United States Patent Application Publication US 2022/0213167 A1 - sequence listing, part 12

SEQ ID NO: 240305 - protein, 17 aa, Homo sapiens
  CDR3 for alpha chain variable domain of TCR clone 120153 (TRAV4, TRAJ18)
CLVGERSVGSTLGRLYF

SEQ ID NO: 240306 - protein, 17 aa, Homo sapiens
  CDR3 for beta chain variable domain of TCR clone 120153 (TRBV11-2, TRBJ2-3)
CQQLRGASRGAPNTQYF

SEQ ID NO: 240307 - protein, 12 aa, Homo sapiens
  CDR3 for alpha chain variable domain of TCR clone 120154 (TRAV3, TRAJ20)
CAVGDPDYKLSF

SEQ ID NO: 240308 - protein, 13 aa, Homo sapiens
  CDR3 for beta chain variable domain of TCR clone 120154 (TRBV9, TRBJ2-1)
CASSVGQGGEQFF

SEQ ID NO: 240309 - protein, 13 aa, Homo sapiens
  CDR3 for alpha chain variable domain of TCR clone 120155 (TRAV27, TRAJ6)
CAGGTRGSYIPTF

SEQ ID NO: 240310 - protein, 14 aa, Homo sapiens
  CDR3 for beta chain variable domain of TCR clone 120155 (TRBV25-1, TRBJ2-7)
CASSEYGRGYEQYF

SEQ ID NO: 240311 - protein, 14 aa, Homo sapiens
  CDR3 for alpha chain variable domain of TCR clone 120156 (TRAV1-2, TRAJ8)
CAVREDIGFQKLVF

SEQ ID NO: 240312 - protein, 16 aa, Homo sapiens
  CDR3 for beta chain variable domain of TCR clone 120156 (TRBV24-1, TRBJ2-3)
CATSDPGTGATDTQYF

SEQ ID NO: 240313 - protein, 14 aa, Homo sapiens
  CDR3 for alpha chain variable domain of TCR clone 120157 (TRAV17, TRAJ16)
CATADFSDGQKLLF

SEQ ID NO: 240314 - protein, 14 aa, Homo sapiens
  CDR3 for beta chain variable domain of TCR clone 120157 (TRBV12-5, TRBJ2-5)
CASGSRTHQETQYF

SEQ ID NO: 240315 - protein, 17 aa, Homo sapiens
  CDR3 for alpha chain variable domain of TCR clone 120158 (TRAV26-1, TRAJ53)
CIVRVDNSGGSNYKLTF

SEQ ID NO: 240316 - protein, 15 aa, Homo sapiens
  CDR3 for beta chain variable domain of TCR clone 120158 (TRBV20-1, TRBJ1-2)
CSARDPLRQGYGYTF

SEQ ID NO: 240317 - protein, 10 aa, Homo sapiens
  CDR3 for alpha chain variable domain of TCR clone 120159 (TRAV2, TRAJ34)
CAVVNDKLIF

SEQ ID NO: 240318 - protein, 13 aa, Homo sapiens
  CDR3 for beta chain variable domain of TCR clone 120159 (TRBV27, TRBJ2-7)
CASSLTTGYEQYF

SEQ ID NO: 240319 - protein, 11 aa, Homo sapiens
  CDR3 for alpha chain variable domain of TCR clone 120160 (TRAV1-2, TRAJ40)
CAVPGTYKHIF

SEQ ID NO: 240320 - protein, 16 aa, Homo sapiens
  CDR3 for beta chain variable domain of TCR clone 120160 (TRBV29-1, TRBJ2-7)
CSVEVVGTSGSYEQYF

SEQ ID NO: 240321 - protein, 14 aa, Homo sapiens
  CDR3 for alpha chain variable domain of TCR clone 120161 (TRAV3, TRAJ21)
CALGRGSTNFTLDL

SEQ ID NO: 240322 - protein, 14 aa, Homo sapiens
  CDR3 for beta chain variable domain of TCR clone 120161 (TRBV7-9, TRBJ2-4)
CASSLAMGGNIHYF

SEQ ID NO: 240323 - protein, 15 aa, Homo sapiens
  CDR3 for alpha chain variable domain of TCR clone 120162 (TRAV34, TRAJ38)
CGADFTPGNNRKLIG

SEQ ID NO: 240324 - protein, 16 aa, Homo sapiens
  CDR3 for beta chain variable domain of TCR clone 120162 (TRBV12-5, TRBJ2-5)
CASGPRTNGNQETQYF

SEQ ID NO: 240325 - protein, 14 aa, Homo sapiens
  CDR3 for alpha chain variable domain of TCR clone 120163 (TRAV23/DV6, TRAJ28)
CAARSGAGSYQLTF

SEQ ID NO: 240326 - protein, 18 aa, Homo sapiens
  CDR3 for beta chain variable domain of TCR clone 120163 (TRBV7-9, TRBJ2-7)
CASSLTTSGSRTWYEQYF

SEQ ID NO: 240327 - protein, 13 aa, Homo sapiens
  CDR3 for alpha chain variable domain of TCR clone 120164 (TRAV3, TRAJ16)
CAVRDRNGQKLLF

SEQ ID NO: 240328 - protein, 15 aa, Homo sapiens
  CDR3 for beta chain variable domain of TCR clone 120164 (TRBV5-1, TRBJ2-1)
CASSPPRAAYNEQFF

SEQ ID NO: 240329 - protein, 13 aa, Homo sapiens
  CDR3 for alpha chain variable domain of TCR clone 120165 (TRAV12-2, TRAJ52)
CAAHGTSYGKLTF

SEQ ID NO: 240330 - protein, 17 aa, Homo sapiens
  CDR3 for beta chain variable domain of TCR clone 120165 (TRBV11-2, TRBJ2-1)
CASSLYPPGVEYNEQFF

SEQ ID NO: 240331 - protein, 13 aa, Homo sapiens
  CDR3 for alpha chain variable domain of TCR clone 120166 (TRAV8-3, TRAJ6)
CAVGSGGSYIPTF

SEQ ID NO: 240332 - protein, 13 aa, Homo sapiens
  CDR3 for beta chain variable domain of TCR clone 120166 (TRBV14, TRBJ2-1)
CASSREGGTEQFF

SEQ ID NO: 240333 - protein, 15 aa, Homo sapiens
  CDR3 for alpha chain variable domain of TCR clone 120167 (TRAV8-3, TRAJ45)
CASSYSGGGADGLTF

SEQ ID NO: 240334 - protein, 16 aa, Homo sapiens
  CDR3 for beta chain variable domain of TCR clone 120167 (TRBV7-9, TRBJ2-1)
CASSSPQGTTRNEQFF

SEQ ID NO: 240335 - protein, 13 aa, Homo sapiens
  CDR3 for alpha chain variable domain of TCR clone 120168 (TRAV27, TRAJ49)
CAPRPYTGNQFYF

SEQ ID NO: 240336 - protein, 20 aa, Homo sapiens
  CDR3 for beta chain variable domain of TCR clone 120168 (TRBV19, TRBJ2-1)
CASSISRTVTSTRLNNEQFF

SEQ ID NO: 240337 - protein, 12 aa, Homo sapiens
  CDR3 for alpha chain variable domain of TCR clone 120169 (TRAV29/DV5, TRAJ34)
CAASGNTDKLIF

SEQ ID NO: 240338 - protein, 16 aa, Homo sapiens
  CDR3 for beta chain variable domain of TCR clone 120169 (TRBV12-4, TRBJ1-5)
CASRQPVEGSNRPQHF

SEQ ID NO: 240339 - protein, 11 aa, Homo sapiens
  CDR3 for alpha chain variable domain of TCR clone 120170 (TRAV1-1, TRAJ23)
CAVRQGGKLIF

SEQ ID NO: 240340 - protein, 20 aa, Homo sapiens
  CDR3 for beta chain variable domain of TCR clone 120170 (TRBV7-8, TRBJ2-2)
CASSHLFPGPIIHITGELFF

SEQ ID NO: 240341 - protein, 10 aa, Homo sapiens
  CDR3 for alpha chain variable domain of TCR clone 120171 (TRAV26-1, TRAJ22)
CIAGSRQLTF

SEQ ID NO: 240342 - protein, 17 aa, Homo sapiens
  CDR3 for beta chain variable domain of TCR clone 120171 (TRBV28, TRBJ2-5)
CASSRQGGLAGAETQYF

SEQ ID NO: 240343 - protein, 12 aa, Homo sapiens
  CDR3 for alpha chain variable domain of TCR clone 120172 (TRAV12-3, TRAJ17)
CAMTLTGDKLTL

SEQ ID NO: 240344 - protein, 15 aa, Homo sapiens
  CDR3 for beta chain variable domain of TCR clone 120172 (TRBV20-1, TRBJ2-7)
CSARDRVSGMDEQYF

SEQ ID NO: 240345 - protein, 17 aa, Homo sapiens
  CDR3 for alpha chain variable domain of TCR clone 120173 (TRAV3, TRAJ30)
CAVRDGPRAGGSYIPTF

SEQ ID NO: 240346 - protein, 11 aa, Homo sapiens
  CDR3 for beta chain variable domain of TCR clone 120173 (TRBV4-1, TRBJ2-2)
CASEHTGELFF

SEQ ID NO: 240347 - protein, 15 aa, Homo sapiens
  CDR3 for alpha chain variable domain of TCR clone 120174 (TRAV26-1, TRAJ56)
CIVRVDNGANSKLTL

SEQ ID NO: 240348 - protein, 15 aa, Homo sapiens
  CDR3 for beta chain variable domain of TCR clone 120174 (TRBV20-1, TRBJ2-7)
CSARDPTEVGHEQYF

SEQ ID NO: 240349 - protein, 15 aa, Homo sapiens
  CDR3 for alpha chain variable domain of TCR clone 120175 (TRAV8-2, TRAJ10)
CVVSHSTGGGNKLTF

SEQ ID NO: 240350 - protein, 17 aa, Homo sapiens
  CDR3 for beta chain variable domain of TCR clone 120175 (TRBV11-2, TRBJ2-1)
CASSLYPPGVEYNEQFF

SEQ ID NO: 240351 - protein, 16 aa, Homo sapiens
  CDR3 for alpha chain variable domain of TCR clone 120176 (TRAV12-3, TRAJ53)
CAMSPGSGGSNYKLTF

SEQ ID NO: 240352 - protein, 16 aa, Homo sapiens
  CDR3 for beta chain variable domain of TCR clone 120176 (TRBV4-2, TRBJ1-1)
CASSQAGFGINTEAFF

SEQ ID NO: 240353 - protein, 16 aa, Homo sapiens
  CDR3 for alpha chain variable domain of TCR clone 120177 (TRAV17, TRAJ28)
CATASVSWAGSYQLTF

SEQ ID NO: 240354 - protein, 14 aa, Homo sapiens
  CDR3 for beta chain variable domain of TCR clone 120177 (TRBV19, TRBJ2-1)
CASEVTGARNEQFF

SEQ ID NO: 240355 - protein, 18 aa, Homo sapiens
  CDR3 for alpha chain variable domain of TCR clone 120178 (TRAV21, TRAJ52)
CAVRPSPAGGTSYGKLTF

SEQ ID NO: 240356 - protein, 16 aa, Homo sapiens
  CDR3 for beta chain variable domain of TCR clone 120178 (TRBV7-6, TRBJ2-1)
CASSLNEGPSYNEQFF

SEQ ID NO: 240357 - protein, 12 aa, Homo sapiens
  CDR3 for alpha chain variable domain of TCR clone 120179 (TRAV16, TRAJ49)
CALNEGGNQFYF

SEQ ID NO: 240358 - protein, 14 aa, Homo sapiens
  CDR3 for beta chain variable domain of TCR clone 120179 (TRBV7-9, TRBJ2-1)
CASRPTGLRNEQFV

SEQ ID NO: 240359 - protein, 14 aa, Homo sapiens
  CDR3 for alpha chain variable domain of TCR clone 120180 (TRAV1-2, TRAJ16)
CAVNRFSDGQKLLF

SEQ ID NO: 240360 - protein, 15 aa, Homo sapiens
  CDR3 for beta chain variable domain of TCR clone 120180 (TRBV4-2, TRBJ1-1)
CASSQEDLPRTEAFF

SEQ ID NO: 240361 - protein, 12 aa, Homo sapiens
  CDR3 for alpha chain variable domain of TCR clone 120181 (TRAV20, TRAJ39)
CAVGNAGNMLTF

SEQ ID NO: 240362 - protein, 17 aa, Homo sapiens
  CDR3 for beta chain variable domain of TCR clone 120181 (TRBV4-1, TRBJ2-3)
RASSQGYVSGGTDTQYF

SEQ ID NO: 240363 - protein, 14 aa, Homo sapiens
  CDR3 for alpha chain variable domain of TCR clone 120182 (TRAV21, TRAJ35)
CAVMPIVFGNVLHC

SEQ ID NO: 240364 - protein, 12 aa, Homo sapiens
  CDR3 for beta chain variable domain of TCR clone 120182 (TRBV7-9, TRBJ2-7)
RASSIKREEQYF

SEQ ID NO: 240365 - protein, 11 aa, Homo sapiens
  CDR3 for alpha chain variable domain of TCR clone 120183 (TRAV17, TRAJ31)
CATSNHARLMF

SEQ ID NO: 240366 - protein, 16 aa, Homo sapiens
  CDR3 for beta chain variable domain of TCR clone 120183 (TRBV7-8, TRBJ2-4)
CASSAERTLAKNIQYF

SEQ ID NO: 240367 - protein, 18 aa, Homo sapiens
  CDR3 for alpha chain variable domain of TCR clone 120184 (TRAV9-2, TRAJ52)
CALSRPNAGGTSYGKLTF

SEQ ID NO: 240368 - protein, 13 aa, Homo sapiens
  CDR3 for beta chain variable domain of TCR clone 120184 (TRBV7-9, TRBJ1-2)
CASSLKQNYGYTF

SEQ ID NO: 240369 - protein, 17 aa, Homo sapiens
  CDR3 for alpha chain variable domain of TCR clone 120185 (TRAV4, TRAJ18)
CLVGERAVGSTLGRLYF

SEQ ID NO: 240370 - protein, 14 aa, Homo sapiens
  CDR3 for beta chain variable domain of TCR clone 120185 (TRBV6-5, TRBJ1-2)
CASSYDGTGGGYTF

SEQ ID NO: 240371 - protein, 13 aa, Homo sapiens
  CDR3 for alpha chain variable domain of TCR clone 120186 (TRAV20, TRAJ37)
CAGCSSNTGKLIF

SEQ ID NO: 240372 - protein, 20 aa, Homo sapiens
  CDR3 for beta chain variable domain of TCR clone 120186 (TRBV7-8, TRBJ2-2)
CASSHLFPGPTIHITGELFF

SEQ ID NO: 240373 - protein, 16 aa, Homo sapiens
  CDR3 for alpha chain variable domain of TCR clone 120187 (TRAV4, TRAJ22)
CLVGDLYSGSARQLTF

SEQ ID NO: 240374 - protein, 15 aa, Homo sapiens
  CDR3 for beta chain variable domain of TCR clone 120187 (TRBV7-9, TRBJ1-6)
CASSSPGRGNSPLHF

SEQ ID NO: 240375 - protein, 10 aa, Homo sapiens
  CDR3 for alpha chain variable domain of TCR clone 120188 (TRAV26-1, TRAJ40)
CIAGTYKYIF

SEQ ID NO: 240376 - protein, 15 aa, Homo sapiens
  CDR3 for beta chain variable domain of TCR clone 120188 (TRBV7-9, TRBJ1-1)
CASSLLEQGGTEAFF

SEQ ID NO: 240377 - protein, 11 aa, Homo sapiens
  CDR3 for alpha chain variable domain of TCR clone 120189 (TRAV14/DV4, TRAJ3)
RLGSSASKIIF

SEQ ID NO: 240378 - protein, 12 aa, Homo sapiens
  CDR3 for beta chain variable domain of TCR clone 120189 (TRBV7-2, TRBJ1-2)
CASRDSIYGYTF

SEQ ID NO: 240379 - protein, 14 aa, Homo sapiens
  CDR3 for alpha chain variable domain of TCR clone 120190 (TRAV23/DV6, TRAJ22)
CAASVSGSARQLTF

SEQ ID NO: 240380 - protein, 15 aa, Homo sapiens
  CDR3 for beta chain variable domain of TCR clone 120190 (TRBV12-4, TRBJ2-5)
CASSPPTGLQETQYF

SEQ ID NO: 240381 - protein, 12 aa, Homo sapiens
  CDR3 for alpha chain variable domain of TCR clone 120191 (TRAV1-1, TRAJ9)
CAVDTGGFKPIF

SEQ ID NO: 240382 - protein, 14 aa, Homo sapiens
  CDR3 for beta chain variable domain of TCR clone 120191 (TRBV7-8, TRBJ2-5)
CASSATGGQETQYF

SEQ ID NO: 240383 - protein, 15 aa, Homo sapiens
  CDR3 for alpha chain variable domain of TCR clone 120192 (TRAV26-1, TRAJ23)
CIVRVAGYQGGKLIF

SEQ ID NO: 240384 - protein, 18 aa, Homo sapiens
  CDR3 for beta chain variable domain of TCR clone 120192 (TRBV28, TRBJ2-1)
CASSSTSGRVNSYNEQFF

SEQ ID NO: 240385 - protein, 18 aa, Homo sapiens
  CDR3 for alpha chain variable domain of TCR clone 120193 (TRAV26-1, TRAJ22)
CIVRVALISSGSARQLTF

SEQ ID NO: 240386 - protein, 15 aa, Homo sapiens
  CDR3 for beta chain variable domain of TCR clone 120193 (TRBV6-1, TRBJ1-5)
CATSDIDSKDQPQHF

SEQ ID NO: 240387 - protein, 15 aa, Homo sapiens
  CDR3 for alpha chain variable domain of TCR clone 120194 (TRAV29/DV5, TRAJ12)
CAAAPRMDSSYKLIF

SEQ ID NO: 240388 - protein, 15 aa, Homo sapiens
  CDR3 for beta chain variable domain of TCR clone 120194 (TRBV5-1, TRBJ2-1)
CASKGLAGVYNEQFF

SEQ ID NO: 240389 - protein, 14 aa, Homo sapiens
  CDR3 for alpha chain variable domain of TCR clone 120195 (TRAV1-1, TRAJ27)
SASYFLGGNTPLVF

SEQ ID NO: 240390 - protein, 12 aa, Homo sapiens
  CDR3 for beta chain variable domain of TCR clone 120195 (TRBV28, TRBJ2-1)
CASSVQINEQFF

SEQ ID NO: 240391 - protein, 16 aa, Homo sapiens
  CDR3 for alpha chain variable domain of TCR clone 120196 (TRAV23/DV6, TRAJ9)
CAASIGGNTGGFKTIF

SEQ ID NO: 240392 - protein, 13 aa, Homo sapiens
  CDR3 for beta chain variable domain of TCR clone 120196 (TRBV7-2, TRBJ2-2)
CASSLAVTGELFF

SEQ ID NO: 240393 - protein, 16 aa, Homo sapiens
  CDR3 for alpha chain variable domain of TCR clone 120197 (TRAV30, TRAJ24)
CGTGIVDADSWRKFQF

SEQ ID NO: 240394 - protein, 14 aa, Homo sapiens
  CDR3 for beta chain variable domain of TCR clone 120197 (TRBV12-5, TRBJ2-5)
CASGSRTHQETQYF

SEQ ID NO: 240395 - protein, 14 aa, Homo sapiens
  CDR3 for alpha chain variable domain of TCR clone 120198 (TRAV12-2, TRAJ17)
CAVNIKAAGNKLTF

SEQ ID NO: 240396 - protein, 16 aa, Homo sapiens
  CDR3 for beta chain variable domain of TCR clone 120198 (TRBV20-1, TRBJ2-6)
CSASSQGYYGANVLTF

SEQ ID NO: 240397 - protein, 12 aa, Homo sapiens
  CDR3 for alpha chain variable domain of TCR clone 120199 (TRAV23/DV6, TRAJ30)
CAANKGDDKIIF

SEQ ID NO: 240398 - protein, 15 aa, Homo sapiens
  CDR3 for beta chain variable domain of TCR clone 120199 (TRBV12-4, TRBJ2-1)
CASRPTRTGYNEQFF

SEQ ID NO: 240399 - protein, 18 aa, Homo sapiens
  CDR3 for alpha chain variable domain of TCR clone 120200 (TRAV21, TRAJ52)
CAVRPSPAGGTSYGKLTF

SEQ ID NO: 240400 - protein, 13 aa, Homo sapiens
  CDR3 for beta chain variable domain of TCR clone 120200 (TRBV7-3, TRBJ1-1)
CASSQDGGAEAFF

SEQ ID NO: 240401 - protein, 13 aa, Homo sapiens
  CDR3 for alpha chain variable domain of TCR clone 120201 (TRAV3, TRAJ27)
CAVRPLGAGKSTF

SEQ ID NO: 240402 - protein, 12 aa, Homo sapiens
  CDR3 for beta chain variable domain of TCR clone 120201 (TRBV6-1, TRBJ2-7)
CASSDYSYEQYL

SEQ ID NO: 240403 - protein, 16 aa, Homo sapiens
  CDR3 for alpha chain variable domain of TCR clone 120202 (TRAV30, TRAJ24)
CGTEIVDADSWGKCQF

SEQ ID NO: 240404 - protein, 14 aa, Homo sapiens
  CDR3 for beta chain variable domain of TCR clone 120202 (TRBV7-2, TRBJ2-7)
CASSPKTSFYEQYF

SEQ ID NO: 240405 - protein, 14 aa, Homo sapiens
  CDR3 for alpha chain variable domain of TCR clone 120203 (TRAV13-1, TRAJ53)
CACAGGGSNYKLTF

SEQ ID NO: 240406 - protein, 14 aa, Homo sapiens
  CDR3 for beta chain variable domain of TCR clone 120203 (TRBV7-2, TRBJ2-1)
CASSLGVGYNEQFF

SEQ ID NO: 240407 - protein, 19 aa, Homo sapiens
  CDR3 for alpha chain variable domain of TCR clone 120204 (TRAV13-1, TRAJ52)
CAASPYQNAGGTSYGKLTF

SEQ ID NO: 240408 - protein, 14 aa, Homo sapiens
  CDR3 for beta chain variable domain of TCR clone 120204 (TRBV7-3, TRBJ1-1)
CASSLKGGNTEAFF

SEQ ID NO: 240409 - protein, 13 aa, Homo sapiens
  CDR3 for alpha chain variable domain of TCR clone 120205 (TRAV3, TRAJ27)
CAVRPLGAGKSTF

SEQ ID NO: 240410 - protein, 14 aa, Homo sapiens
  CDR3 for beta chain variable domain of TCR clone 120205 (TRBV7-6, TRBJ2-3)
RASSLGTVTDTQYF

SEQ ID NO: 240411 - protein, 13 aa, Homo sapiens
  CDR3 for alpha chain variable domain of TCR clone 120206 (TRAV2, TRAJ21)
CAVEDLNFNKFYF

SEQ ID NO: 240412 - protein, 15 aa, Homo sapiens
  CDR3 for beta chain variable domain of TCR clone 120206 (TRBV28, TRBJ2-5)
CASSPGQGSIETQCF

SEQ ID NO: 240413 - protein, 15 aa, Homo sapiens
  CDR3 for alpha chain variable domain of TCR clone 120207 (TRAV3, TRAJ6)
CAVRDSRRKLHTYIW

SEQ ID NO: 240414 - protein, 15 aa, Homo sapiens
  CDR3 for beta chain variable domain of TCR clone 120207 (TRBV18, TRBJ2-7)
CASSPLQGRTYEQYF

SEQ ID NO: 240415 - protein, 15 aa, Homo sapiens
  CDR3 for alpha chain variable domain of TCR clone 120208 (TRAV8-6, TRAJ20)
CAVTRPGSNDYKLSF

SEQ ID NO: 240416 - protein, 18 aa, Homo sapiens
  CDR3 for beta chain variable domain of TCR clone 120208 (TRBV7-3, TRBJ2-3)
CASSSTGTYPGSTDTQYF

SEQ ID NO: 240417 - protein, 14 aa, Homo sapiens
  CDR3 for alpha chain variable domain of TCR clone 120209 (TRAV2, TRAJ23)
CAVMEDNQGGKLIF

SEQ ID NO: 240418 - protein, 16 aa, Homo sapiens
  CDR3 for beta chain variable domain of TCR clone 120209 (TRBV7-2, TRBJ2-5)
CASSSKWLSGQETQYF

SEQ ID NO: 240419 - protein, 13 aa, Homo sapiens
  CDR3 for alpha chain variable domain of TCR clone 120210 (TRAV36/DV7, TRAJ54)
CAVLIQGAQKLVF

SEQ ID NO: 240420 - protein, 13 aa, Homo sapiens
  CDR3 for beta chain variable domain of TCR clone 120210 (TRBV29-1, TRBJ2-4)
RSVGEGTKNIQYF

SEQ ID NO: 240421 - protein, 12 aa, Homo sapiens
  CDR3 for alpha chain variable domain of TCR clone 120211 (TRAV16, TRAJ56)
RAPTGANSKLTF

SEQ ID NO: 240422 - protein, 13 aa, Homo sapiens
  CDR3 for beta chain variable domain of TCR clone 120211 (TRBV20-1, TRBJ2-5)
CSARGDYQETQYF

SEQ ID NO: 240423 - protein, 13 aa, Homo sapiens
  CDR3 for alpha chain variable domain of TCR clone 120212 (TRAV12-2, TRAJ34)
CALSKGDTDKLIF

SEQ ID NO: 240424 - protein, 13 aa, Homo sapiens
  CDR3 for beta chain variable domain of TCR clone 120212 (TRBV20-1, TRBJ2-1)
CSASGAPGDEQFF

SEQ ID NO: 240425 - protein, 16 aa, Homo sapiens
  CDR3 for alpha chain variable domain of TCR clone 120213 (TRAV30, TRAJ24)
CGTEIVDADSWGKFQF

SEQ ID NO: 240426 - protein, 13 aa, Homo sapiens
  CDR3 for beta chain variable domain of TCR clone 120213 (TRBV7-2, TRBJ2-5)
CQQLVRGGETQYF

SEQ ID NO: 240427 - protein, 13 aa, Homo sapiens
  CDR3 for alpha chain variable domain of TCR clone 120214 (TRAV17, TRAJ5)
CAPMDTGRRALPF

SEQ ID NO: 240428 - protein, 15 aa, Homo sapiens
  CDR3 for beta chain variable domain of TCR clone 120214 (TRBV6-6, TRBJ2-5)
CASSPGGGLEETQYF

SEQ ID NO: 240429 - protein, 11 aa, Homo sapiens
  CDR3 for alpha chain variable domain of TCR clone 120215 (TRAV17, TRAJ49)
CATDAGNQFYF

SEQ ID NO: 240430 - protein, 16 aa, Homo sapiens
  CDR3 for beta chain variable domain of TCR clone 120215 (TRBV7-2, TRBJ1-2)
CASSPTPGTSLGGYTF

SEQ ID NO: 240431 - protein, 13 aa, Homo sapiens
  CDR3 for alpha chain variable domain of TCR clone 120216 (TRAV3, TRAJ15)
CAVRDQAGTALIF

SEQ ID NO: 240432 - protein, 15 aa, Homo sapiens
  CDR3 for beta chain variable domain of TCR clone 120216 (TRBV7-2, TRBJ2-1)
CASSSGLAGGNEQFF

SEQ ID NO: 240433 - protein, 16 aa, Homo sapiens
  CDR3 for alpha chain variable domain of TCR clone 120217 (TRAV23/DV6, TRAJ9)
CAASIGGNTGGFKTIF

SEQ ID NO: 240434 - protein, 17 aa, Homo sapiens
  CDR3 for beta chain variable domain of TCR clone 120217 (TRBV7-8, TRBJ2-6)
CASSAGTGGAGANVLTF

SEQ ID NO: 240435 - protein, 14 aa, Homo sapiens
  CDR3 for alpha chain variable domain of TCR clone 120218 (TRAV1-2, TRAJ33)
CAVRAPDSNYQLIW

SEQ ID NO: 240436 - protein, 13 aa, Homo sapiens
  CDR3 for beta chain variable domain of TCR clone 120218 (TRBV20-1, TRBJ1-1)
CSARGGGNTEAFF

SEQ ID NO: 240437 - protein, 19 aa, Homo sapiens
  CDR3 for alpha chain variable domain of TCR clone 120219 (TRAV1-2, TRAJ26)
CLLPLCCERPDNYGQNFVF

SEQ ID NO: 240438 - protein, 13 aa, Homo sapiens
  CDR3 for beta chain variable domain of TCR clone 120219 (TRBV19, TRBJ1-2)
CASSQGHVYGYTF

SEQ ID NO: 240439 - protein, 13 aa, Homo sapiens
  CDR3 for alpha chain variable domain of TCR clone 120220 (TRAV8-3, TRAJ6)
CAARRGGSYITTF

SEQ ID NO: 240440 - protein, 15 aa, Homo sapiens
  CDR3 for beta chain variable domain of TCR clone 120220 (TRBV4-1, TRBJ2-3)
CASSNLAGGRDTQYF

SEQ ID NO: 240441 - protein, 10 aa, Homo sapiens
  CDR3 for alpha chain variable domain of TCR clone 120221 (TRAV1-2, TRAJ23)
CAGQGGKLIF

SEQ ID NO: 240442 - protein, 18 aa, Homo sapiens
  CDR3 for beta chain variable domain of TCR clone 120221 (TRBV11-2, TRBJ1-1)
CASSLRQGGNTRNLSLDK

SEQ ID NO: 240443 - protein, 11 aa, Homo sapiens
  CDR3 for alpha chain variable domain of TCR clone 120222 (TRAV23/DV6, TRAJ58)
CAARLLRGETS

SEQ ID NO: 240444 - protein, 15 aa, Homo sapiens
  CDR3 for beta chain variable domain of TCR clone 120222 (TRBV7-9, TRBJ1-5)
CASSQGHQPNQPQHF

SEQ ID NO: 240445 - protein, 15 aa, Homo sapiens
  CDR3 for alpha chain variable domain of TCR clone 120223 (TRAV8-3, TRAJ41)
CAVGSHSNSGYALNF

SEQ ID NO: 240446 - protein, 17 aa, Homo sapiens
  CDR3 for beta chain variable domain of TCR clone 120223 (TRBV25-1, TRBJ2-1)
CASSAYGQGRGVYEQFF

SEQ ID NO: 240447 - protein, 13 aa, Homo sapiens
  CDR3 for alpha chain variable domain of TCR clone 120224 (TRAV16, TRAJ15)
CALSGPAGTALIF

SEQ ID NO: 240448 - protein, 14 aa, Homo sapiens
  CDR3 for beta chain variable domain of TCR clone 120224 (TRBV19, TRBJ1-1)
CASRRGQGNTEAFF

SEQ ID NO: 240449 - protein, 15 aa, Homo sapiens
  CDR3 for alpha chain variable domain of TCR clone 120225 (TRAV3, TRAJ22)
CAVRDRGGSTRQLTF

SEQ ID NO: 240450 - protein, 16 aa, Homo sapiens
  CDR3 for beta chain variable domain of TCR clone 120225 (TRBV5-4, TRBJ2-3)
CASQQPGAGGADTQYF

SEQ ID NO: 240451 - protein, 16 aa, Homo sapiens
  CDR3 for alpha chain variable domain of TCR clone 120226 (TRAV23/DV6, TRAJ9)
CAASIGGNTGGFNTIF

SEQ ID NO: 240452 - protein, 15 aa, Homo sapiens
  CDR3 for beta chain variable domain of TCR clone 120226 (TRBV6-3, TRBJ2-7)
CASSSPGTVLYEQYF

SEQ ID NO: 240453 - protein, 15 aa, Homo sapiens
  CDR3 for alpha chain variable domain of TCR clone 120227 (TRAV2, TRAJ44)
CAVEAYTGTASKLTF

SEQ ID NO: 240454 - protein, 14 aa, Homo sapiens
  CDR3 for beta chain variable domain of TCR clone 120227 (TRBV11-2, TRBJ2-1)
CASSPGIRDNEQFF

SEQ ID NO: 240455 - protein, 12 aa, Homo sapiens
  CDR3 for alpha chain variable domain of TCR clone 120228 (TRAV12-1, TRAJ40)
CVVYSGTYKYIF

SEQ ID NO: 240456 - protein, 17 aa, Homo sapiens
  CDR3 for beta chain variable domain of TCR clone 120228 (TRBV7-6, TRBJ2-5)
CASSSPQAGDPSETQYF

SEQ ID NO: 240457 - protein, 14 aa, Homo sapiens
  CDR3 for alpha chain variable domain of TCR clone 120229 (TRAV9-2, TRAJ39)
CALYIYNAGNMPTF

SEQ ID NO: 240458 - protein, 15 aa, Homo sapiens
  CDR3 for beta chain variable domain of TCR clone 120229 (TRBV6-1, TRBJ2-6)
CASSSRPSGANVLTF

SEQ ID NO: 240459 - protein, 14 aa, Homo sapiens
  CDR3 for alpha chain variable domain of TCR clone 120230 (TRAV8-4, TRAJ48)
CAVSETFGNEKLTF

SEQ ID NO: 240460 - protein, 14 aa, Homo sapiens
  CDR3 for beta chain variable domain of TCR clone 120230 (TRBV13, TRBJ2-7)
CARSLKGASYEQYF

SEQ ID NO: 240461 - protein, 16 aa, Homo sapiens
  CDR3 for alpha chain variable domain of TCR clone 120231 (TRAV12-3, TRAJ20)
CAMDKLSFGAGTTVTV

SEQ ID NO: 240462 - protein, 14 aa, Homo sapiens
  CDR3 for beta chain variable domain of TCR clone 120231 (TRBV19, TRBJ2-1)
CATSRGDTYNEQFF

SEQ ID NO: 240463 - protein, 15 aa, Homo sapiens
  CDR3 for alpha chain variable domain of TCR clone 120232 (TRAV13-1, TRAJ43)
CAATTELGGNNDMRF

SEQ ID NO: 240464 - protein, 15 aa, Homo sapiens
  CDR3 for beta chain variable domain of TCR clone 120232 (TRBV10-2, TRBJ2-6)
CASSEQGTGANVLTF

SEQ ID NO: 240465 - protein, 15 aa, Homo sapiens
  CDR3 for alpha chain variable domain of TCR clone 120233 (TRAV38-1, TRAJ37)
CAIIHGSGNTGKLIF

SEQ ID NO: 240466 - protein, 12 aa, Homo sapiens
  CDR3 for beta chain variable domain of TCR clone 120233 (TRBV7-9, TRBJ2-7)
CASSFGSYEQYF

SEQ ID NO: 240467 - protein, 11 aa, Homo sapiens
  CDR3 for alpha chain variable domain of TCR clone 120234 (TRAV21, TRAJ34)
CAVTNTDKLIF

SEQ ID NO: 240468 - protein, 14 aa, Homo sapiens
  CDR3 for beta chain variable domain of TCR clone 120234 (TRBV2, TRBJ2-7)
CASSLTSGGYEQYF

SEQ ID NO: 240469 - protein, 15 aa, Homo sapiens
  CDR3 for alpha chain variable domain of TCR clone 120235 (TRAV8-3, TRAJ27)
CAVGPSKTNAGKSTF

SEQ ID NO: 240470 - protein, 14 aa, Homo sapiens
  CDR3 for beta chain variable domain of TCR clone 120235 (TRBV11-2, TRBJ2-3)
CASSRLARTDAQYF

SEQ ID NO: 240471 - protein, 13 aa, Homo sapiens
  CDR3 for alpha chain variable domain of TCR clone 120236 (TRAV2, TRAJ40)
CAVVTSGTYKYIF

SEQ ID NO: 240472 - protein, 14 aa, Homo sapiens
  CDR3 for beta chain variable domain of TCR clone 120236 (TRBV7-9, TRBJ2-2)
CASSLGHRTGELFF

SEQ ID NO: 240473 - protein, 12 aa, Homo sapiens
  CDR3 for alpha chain variable domain of TCR clone 120237 (TRAV22, TRAJ29)
CAPPPGNTPLVF

SEQ ID NO: 240474 - protein, 14 aa, Homo sapiens
  CDR3 for beta chain variable domain of TCR clone 120237 (TRBV11-2, TRBJ2-7)
CASSLGAGAYEQYF

SEQ ID NO: 240475 - protein, 15 aa, Homo sapiens
  CDR3 for alpha chain variable domain of TCR clone 120238 (TRAV23/DV6, TRAJ18)
CAARYRGSTLRRLYF

SEQ ID NO: 240476 - protein, 13 aa, Homo sapiens
  CDR3 for beta chain variable domain of TCR clone 120238 (TRBV7-2, TRBJ2-7)
CASSSPSGSEQYF

SEQ ID NO: 240477 - protein, 12 aa, Homo sapiens
  CDR3 for alpha chain variable domain of TCR clone 120239 (TRAV12-2, TRAJ16)
CAVAPDGQKLLF

SEQ ID NO: 240478 - protein, 14 aa, Homo sapiens
  CDR3 for beta chain variable domain of TCR clone 120239 (TRBV12-5, TRBJ2-5)
CASGSRTHQETQYF

SEQ ID NO: 240479 - protein, 11 aa, Homo sapiens
  CDR3 for alpha chain variable domain of TCR clone 120240 (TRAV13-2, TRAJ20)
CADSNDYKLSF

SEQ ID NO: 240480 - protein, 17 aa, Homo sapiens
  CDR3 for beta chain variable domain of TCR clone 120240 (TRBV7-8, TRBJ2-6)
CASSAGTGGAGANVLTF

SEQ ID NO: 240481 - protein, 14 aa, Homo sapiens
  CDR3 for alpha chain variable domain of TCR clone 120241 (TRAV16, TRAJ4)
CALRFSGGYNKLIF

SEQ ID NO: 240482 - protein, 15 aa, Homo sapiens
  CDR3 for beta chain variable domain of TCR clone 120241 (TRBV7-2, TRBJ2-7)
CASSTRLAGVDEQYF

SEQ ID NO: 240483 - protein, 12 aa, Homo sapiens
  CDR3 for alpha chain variable domain of TCR clone 120242 (TRAV3, TRAJ20)
CAVRDGDYKLSF

SEQ ID NO: 240484 - protein, 15 aa, Homo sapiens
  CDR3 for beta chain variable domain of TCR clone 120242 (TRBV28, TRBJ2-5)
CASSPPWSYQETQYF

SEQ ID NO: 240485 - protein, 17 aa, Homo sapiens
  CDR3 for alpha chain variable domain of TCR clone 120243 (TRAV3, TRAJ6)
CAVRDGPRAGGSYIPTF

SEQ ID NO: 240486 - protein, 15 aa, Homo sapiens
  CDR3 for beta chain variable domain of TCR clone 120243 (TRBV5-8, TRBJ2-2)
CASSVDRGATGELFF

SEQ ID NO: 240487 - protein, 13 aa, Homo sapiens
  CDR3 for alpha chain variable domain of TCR clone 120244 (TRAV8-3, TRAJ48)
CCGCNFGNEKLTF

SEQ ID NO: 240488 - protein, 13 aa, Homo sapiens
  CDR3 for beta chain variable domain of TCR clone 120244 (TRBV7-2, TRBJ2-2)
CASSLAVTGELFF

SEQ ID NO: 240489 - protein, 16 aa, Homo sapiens
  CDR3 for alpha chain variable domain of TCR clone 120245 (TRAV3, TRAJ37)
CAVRGSGSGNTGKLIF

SEQ ID NO: 240490 - protein, 13 aa, Homo sapiens
  CDR3 for beta chain variable domain of TCR clone 120245 (TRBV14, TRBJ2-7)
CASSQDRRGEQYF

SEQ ID NO: 240491 - protein, 16 aa, Homo sapiens
  CDR3 for alpha chain variable domain of TCR clone 120246 (TRAV20, TRAJ6)
CAVQAGGTGGSYIPTF

SEQ ID NO: 240492 - protein, 14 aa, Homo sapiens
  CDR3 for beta chain variable domain of TCR clone 120246 (TRBV7-2, TRBJ1-1)
CASSFLTGTTEAFF

SEQ ID NO: 240493 - protein, 14 aa, Homo sapiens
  CDR3 for alpha chain variable domain of TCR clone 120247 (TRAV8-3, TRAJ9)
CAVVYNTGGFKTIF

SEQ ID NO: 240494 - protein, 14 aa, Homo sapiens
  CDR3 for beta chain variable domain of TCR clone 120247 (TRBV7-3, TRBJ2-2)
CASSLGGYTGELFF

SEQ ID NO: 240495 - protein, 12 aa, Homo sapiens
  CDR3 for alpha chain variable domain of TCR clone 120248 (TRAV12-3, TRAJ20)
CAMVRGDYKLSF

SEQ ID NO: 240496 - protein, 11 aa, Homo sapiens
  CDR3 for beta chain variable domain of TCR clone 120248 (TRBV20-1, TRBJ2-1)
CSLSSGSEQFF

SEQ ID NO: 240497 - protein, 15 aa, Homo sapiens
  CDR3 for alpha chain variable domain of TCR clone 120249 (TRAV17, TRAJ40)
CATVSSTSGTYKYIF

SEQ ID NO: 240498 - protein, 13 aa, Homo sapiens
  CDR3 for beta chain variable domain of TCR clone 120249 (TRBV15, TRBJ1-6)
CATSGGLNSPLHF

SEQ ID NO: 240499 - protein, 14 aa, Homo sapiens
  CDR3 for alpha chain variable domain of TCR clone 120250 (TRAV8-3, TRAJ10)
CAVGNAGGGTKLTF

SEQ ID NO: 240500 - protein, 16 aa, Homo sapiens
  CDR3 for beta chain variable domain of TCR clone 120250 (TRBV11-2, TRBJ1-2)
CASSLDTGGADYGYTF

SEQ ID NO: 240501 - protein, 13 aa, Homo sapiens
  CDR3 for alpha chain variable domain of TCR clone 120251 (TRAV1-2, TRAJ9)
CAALNTGGFKTIF

SEQ ID NO: 240502 - protein, 16 aa, Homo sapiens
  CDR3 for beta chain variable domain of TCR clone 120251 (TRBV6-1, TRBJ2-1)
CASILRQGSSYNEQFF

SEQ ID NO: 240503 - protein, 14 aa, Homo sapiens
  CDR3 for alpha chain variable domain of TCR clone 120252 (TRAV8-3, TRAJ44)
CAVGNTGTASKLTF

SEQ ID NO: 240504 - protein, 15 aa, Homo sapiens
  CDR3 for beta chain variable domain of TCR clone 120252 (TRBV28, TRBJ2-7)
CASSFRGQGRYGQYF

SEQ ID NO: 240505 - protein, 16 aa, Homo sapiens
  CDR3 for alpha chain variable domain of TCR clone 120253 (TRAV17, TRAJ53)
CATDALSGGSNYKLTF

SEQ ID NO: 240506 - protein, 13 aa, Homo sapiens
  CDR3 for beta chain variable domain of TCR clone 120253 (TRBV7-9, TRBJ1-2)
CASSLKQNYGYTF

SEQ ID NO: 240507 - protein, 13 aa, Homo sapiens
  CDR3 for alpha chain variable domain of TCR clone 120254 (TRAV20, TRAJ20)
CAVQAESGYKLSL

SEQ ID NO: 240508 - protein, 13 aa, Homo sapiens
  CDR3 for beta chain variable domain of TCR clone 120254 (TRBV3-1, TRBJ2-3)
CASSQGGGDTQYF

SEQ ID NO: 240509 - protein, 11 aa, Homo sapiens
  CDR3 for alpha chain variable domain of TCR clone 120255 (TRAV3, TRAJ21)
CAVGNFNKFYF

SEQ ID NO: 240510 - protein, 16 aa, Homo sapiens
  CDR3 for beta chain variable domain of TCR clone 120255 (TRBV19, TRBJ2-1)
CAWSKAGPSSYNEQFF

SEQ ID NO: 240511 - protein, 14 aa, Homo sapiens
  CDR3 for alpha chain variable domain of TCR clone 120256 (TRAV12-1, TRAJ30)
CVVNIGGRNGKIIF

SEQ ID NO: 240512 - protein, 14 aa, Homo sapiens
  CDR3 for beta chain variable domain of TCR clone 120256 (TRBV7-6, TRBJ2-3)
CASSLGTVTDTQYF

SEQ ID NO: 240513 - protein, 12 aa, Homo sapiens
  CDR3 for alpha chain variable domain of TCR clone 120257 (TRAV8-3, TRAJ20)
CAVGANDYKLSF

SEQ ID NO: 240514 - protein, 13 aa, Homo sapiens
  CDR3 for beta chain variable domain of TCR clone 120257 (TRBV12-5, TRBJ2-3)
CASGDRQSDTQYF

SEQ ID NO: 240515 - protein, 12 aa, Homo sapiens
  CDR3 for alpha chain variable domain of TCR clone 120258 (TRAV12-1, TRAJ40)
CVAPSGTYKYIF

SEQ ID NO: 240516 - protein, 15 aa, Homo sapiens
  CDR3 for beta chain variable domain of TCR clone 120258 (TRBV12-4, TRBJ2-1)
CASSPLSGRNNEQFF

SEQ ID NO: 240517 - protein, 15 aa, Homo sapiens
  CDR3 for alpha chain variable domain of TCR clone 120259 (TRAV1-2, TRAJ9)
CAVRDDGTGGFKTIF

SEQ ID NO: 240518 - protein, 18 aa, Homo sapiens
  CDR3 for beta chain variable domain of TCR clone 120259 (TRBV11-2, TRBJ2-3)
CASSLGGASRGAPNTQYF

SEQ ID NO: 240519 - protein, 16 aa, Homo sapiens
  CDR3 for alpha chain variable domain of TCR clone 120260 (TRAV8-4, TRAJ5)
CAVSPLTDTGGRALTF

SEQ ID NO: 240520 - protein, 14 aa, Homo sapiens
  CDR3 for beta chain variable domain of TCR clone 120260 (TRBV19, TRBJ1-6)
CASSTDGWNSPLHF

SEQ ID NO: 240521 - protein, 16 aa, Homo sapiens
  CDR3 for alpha chain variable domain of TCR clone 120261 (TRAV3, TRAJ37)
CAVRPHGSGNTGKLIF

SEQ ID NO: 240522 - protein, 14 aa, Homo sapiens
  CDR3 for beta chain variable domain of TCR clone 120261 (TRBV20-1, TRBJ2-7)
CSAWTALSSYEQYF

SEQ ID NO: 240523 - protein, 15 aa, Homo sapiens
  CDR3 for alpha chain variable domain of TCR clone 120262 (TRAV23/DV6, TRAJ26)
CAARTYQADNYGQNF

SEQ ID NO: 240524 - protein, 16 aa, Homo sapiens
  CDR3 for beta chain variable domain of TCR clone 120262 (TRBV6-5, TRBJ2-2)
CASSHVSRAQPGELFF

SEQ ID NO: 240525 - protein, 13 aa, Homo sapiens
  CDR3 for alpha chain variable domain of TCR clone 120263 (TRAV26-2, TRAJ54)
CIPRVGGAQKLVF

SEQ ID NO: 240526 - protein, 16 aa, Homo sapiens
  CDR3 for beta chain variable domain of TCR clone 120263 (TRBV4-1, TRBJ1-1)
CASSSMGERPNTEAFF

SEQ ID NO: 240527 - protein, 16 aa, Homo sapiens
  CDR3 for alpha chain variable domain of TCR clone 120264 (TRAV16, TRAJ4)
CALSRMFSGGYNKLIF

SEQ ID NO: 240528 - protein, 13 aa, Homo sapiens
  CDR3 for beta chain variable domain of TCR clone 120264 (TRBV3-1, TRBJ1-1)
CASSQLQGAEAFF

SEQ ID NO: 240529 - protein, 16 aa, Homo sapiens
  CDR3 for alpha chain variable domain of TCR clone 120265 (TRAV1-2, TRAJ10)
CAVRGVLTGGGNKLTF

SEQ ID NO: 240530 - protein, 15 aa, Homo sapiens
  CDR3 for beta chain variable domain of TCR clone 120265 (TRBV7-9, TRBJ1-4)
CASSATGGNNEKLFF

SEQ ID NO: 240531 - protein, 14 aa, Homo sapiens
  CDR3 for alpha chain variable domain of TCR clone 120266 (TRAV8-2, TRAJ37)
CVVSISGNTGKLFF

SEQ ID NO: 240532 - protein, 11 aa, Homo sapiens
  CDR3 for beta chain variable domain of TCR clone 120266 (TRBV18, TRBJ2-5)
CASSPRETQYF

SEQ ID NO: 240533 - protein, 16 aa, Homo sapiens
  CDR3 for alpha chain variable domain of TCR clone 120267 (TRAV21, TRAJ37)
CAVRTAGSSNTGKLIF

SEQ ID NO: 240534 - protein, 15 aa, Homo sapiens
  CDR3 for beta chain variable domain of TCR clone 120267 (TRBV7-9, TRBJ1-6)
CASSSPGRGNSPLHF

SEQ ID NO: 240535 - protein, 15 aa, Homo sapiens
  CDR3 for alpha chain variable domain of TCR clone 120268 (TRAV12-1, TRAJ44)
CVVFVNTGTASKLTF

SEQ ID NO: 240536 - protein, 11 aa, Homo sapiens
  CDR3 for beta chain variable domain of TCR clone 120268 (TRBV11-2, TRBJ1-1)
CASSINTEAFF

SEQ ID NO: 240537 - protein, 12 aa, Homo sapiens
  CDR3 for alpha chain variable domain of TCR clone 120269 (TRAV12-1, TRAJ40)
CVVYSGTYKYIF

SEQ ID NO: 240538 - protein, 16 aa, Homo sapiens
  CDR3 for beta chain variable domain of TCR clone 120269 (TRBV13, TRBJ2-2)
CASSPRTGEHTGELFF

SEQ ID NO: 240539 - protein, 14 aa, Homo sapiens
  CDR3 for alpha chain variable domain of TCR clone 120270 (TRAV8-4, TRAJ45)
CASGGGGGADGPTF

SEQ ID NO: 240540 - protein, 20 aa, Homo sapiens
  CDR3 for beta chain variable domain of TCR clone 120270 (TRBV4-3, TRBJ2-3)
CASSPRVEMRASGRPDTQYF

SEQ ID NO: 240541 - protein, 10 aa, Homo sapiens
  CDR3 for alpha chain variable domain of TCR clone 120271 (TRAV12-2, TRAJ31)
CAVNNARLMF

SEQ ID NO: 240542 - protein, 15 aa, Homo sapiens
  CDR3 for beta chain variable domain of TCR clone 120271 (TRBV11-1, TRBJ2-2)
CASSLVSGNTGELFF

SEQ ID NO: 240543 - protein, 13 aa, Homo sapiens
  CDR3 for alpha chain variable domain of TCR clone 120272 (TRAV13-1, TRAJ6)
CAASKGGSYIPTF

SEQ ID NO: 240544 - protein, 14 aa, Homo sapiens
  CDR3 for beta chain variable domain of TCR clone 120272 (TRBV7-2, TRBJ2-1)
CASSLGVGYNEQCF

SEQ ID NO: 240545 - protein, 14 aa, Homo sapiens
  CDR3 for alpha chain variable domain of TCR clone 120273 (TRAV1-2, TRAJ8)
CAVREDTGFQKLVC

SEQ ID NO: 240546 - protein, 15 aa, Homo sapiens
  CDR3 for beta chain variable domain of TCR clone 120273 (TRBV28, TRBJ2-6)
CASSLAGSGANVLTF

SEQ ID NO: 240547 - protein, 11 aa, Homo sapiens
  CDR3 for alpha chain variable domain of TCR clone 120274 (TRAV35, TRAJ30)
CAGPGDDKIIF

SEQ ID NO: 240548 - protein, 14 aa, Homo sapiens
  CDR3 for beta chain variable domain of TCR clone 120274 (TRBV7-6, TRBJ1-6)
CASSQAGGGSPLDF

SEQ ID NO: 240549 - protein, 17 aa, Homo sapiens
  CDR3 for alpha chain variable domain of TCR clone 120275 (TRAV3, TRAJ12)
CAARDGGRMDSSYKLIF

SEQ ID NO: 240550 - protein, 14 aa, Homo sapiens
  CDR3 for beta chain variable domain of TCR clone 120275 (TRBV7-9, TRBJ1-2)
CASSRQGANYGYTF

SEQ ID NO: 240551 - protein, 18 aa, Homo sapiens
  CDR3 for alpha chain variable domain of TCR clone 120276 (TRAV21, TRAJ52)
CAVRPSPAGGTSYGKLTF

SEQ ID NO: 240552 - protein, 15 aa, Homo sapiens
  CDR3 for beta chain variable domain of TCR clone 120276 (TRBV6-6, TRBJ2-7)
CASSCSYGGPYEQYF

SEQ ID NO: 240553 - protein, 14 aa, Homo sapiens
  CDR3 for alpha chain variable domain of TCR clone 120277 (TRAV1-1, TRAJ33)
CAVRPEDSNYQLIW

SEQ ID NO: 240554 - protein, 15 aa, Homo sapiens
  CDR3 for beta chain variable domain of TCR clone 120277 (TRBV20-1, TRBJ2-1)
CSARSLGGPGNEQFF

SEQ ID NO: 240555 - protein, 14 aa, Homo sapiens
  CDR3 for alpha chain variable domain of TCR clone 120278 (TRAV36/DV7, TRAJ46)
CAVDFKSSGDKLTF

SEQ ID NO: 240556 - protein, 11 aa, Homo sapiens
  CDR3 for beta chain variable domain of TCR clone 120278 (TRBV11-2, TRBJ2-2)
CASSLPGELFF

SEQ ID NO: 240557 - protein, 11 aa, Homo sapiens
  CDR3 for alpha chain variable domain of TCR clone 120279 (TRAV21, TRAJ41)
CAVRSGYALNF

SEQ ID NO: 240558 - protein, 13 aa, Homo sapiens
  CDR3 for beta chain variable domain of TCR clone 120279 (TRBV7-9, TRBJ1-2)
CASSLKQNYGYSF

SEQ ID NO: 240559 - protein, 16 aa, Homo sapiens
  CDR3 for alpha chain variable domain of TCR clone 120280 (TRAV30, TRAJ26)
CGTESVGDNYGQNFVF

SEQ ID NO: 240560 - protein, 13 aa, Homo sapiens
  CDR3 for beta chain variable domain of TCR clone 120280 (TRBV5-4, TRBJ1-5)
CASSLGGDQPQHF

SEQ ID NO: 240561 - protein, 10 aa, Homo sapiens
  CDR3 for alpha chain variable domain of TCR clone 120281 (TRAV23/DV6, TRAJ57)
CAASSTLSQG

SEQ ID NO: 240562 - protein, 15 aa, Homo sapiens
  CDR3 for beta chain variable domain of TCR clone 120281 (TRBV18, TRBJ2-7)
CASSPSSTGNYEQYF

SEQ ID NO: 240563 - protein, 13 aa, Homo sapiens
  CDR3 for alpha chain variable domain of TCR clone 120282 (TRAV17, TRAJ22)
CAGRRGAARQLTF

SEQ ID NO: 240564 - protein, 14 aa, Homo sapiens
  CDR3 for beta chain variable domain of TCR clone 120282 (TRBV19, TRBJ1-1)
CASSITGWETEAFF

SEQ ID NO: 240565 - protein, 14 aa, Homo sapiens
  CDR3 for alpha chain variable domain of TCR clone 120283 (TRAV12-3, TRAJ9)
CAMSPNTGGFKTIF

SEQ ID NO: 240566 - protein, 12 aa, Homo sapiens
  CDR3 for beta chain variable domain of TCR clone 120283 (TRBV19, TRBJ1-5)
CASSVAQQPQHF

SEQ ID NO: 240567 - protein, 18 aa, Homo sapiens
  CDR3 for alpha chain variable domain of TCR clone 120284 (TRAV26-2, TRAJ45)
CILRLWGYSGGGADGLTF

SEQ ID NO: 240568 - protein, 17 aa, Homo sapiens
  CDR3 for beta chain variable domain of TCR clone 120284 (TRBV28, TRBJ2-3)
CASSPTPAGGRVDTHYF

SEQ ID NO: 240569 - protein, 15 aa, Homo sapiens
  CDR3 for alpha chain variable domain of TCR clone 120285 (TRAV3, TRAJ22)
CAVRDRGGSARQLTF

SEQ ID NO: 240570 - protein, 15 aa, Homo sapiens
  CDR3 for beta chain variable domain of TCR clone 120285 (TRBV6-4, TRBJ2-1)
CASSSGTSGYNEQFF

SEQ ID NO: 240571 - protein, 13 aa, Homo sapiens
  CDR3 for alpha chain variable domain of TCR clone 120286 (TRAV21, TRAJ37)
CAVVAGNTGKLIF

SEQ ID NO: 240572 - protein, 14 aa, Homo sapiens
  CDR3 for beta chain variable domain of TCR clone 120286 (TRBV20-1, TRBJ1-1)
CSAQTRIGGTEAFF

SEQ ID NO: 240573 - protein, 15 aa, Homo sapiens
  CDR3 for alpha chain variable domain of TCR clone 120287 (TRAV12-2, TRAJ43)
CAFDMRFGAGTRLTV

SEQ ID NO: 240574 - protein, 13 aa, Homo sapiens
  CDR3 for beta chain variable domain of TCR clone 120287 (TRBV7-2, TRBJ2-5)
CASSQTSVETQYF

SEQ ID NO: 240575 - protein, 18 aa, Homo sapiens
  CDR3 for alpha chain variable domain of TCR clone 120288 (TRAV21, TRAJ52)
CAVRPSPAGGTSYGKLTF

SEQ ID NO: 240576 - protein, 15 aa, Homo sapiens
  CDR3 for beta chain variable domain of TCR clone 120288 (TRBV20-1, TRBJ1-5)
CSAFKNGQRNQPQHF

SEQ ID NO: 240577 - protein, 17 aa, Homo sapiens
  CDR3 for alpha chain variable domain of TCR clone 120289 (TRAV3, TRAJ6)
CAVRDGPRAGGSYIPTF

SEQ ID NO: 240578 - protein, 14 aa, Homo sapiens
  CDR3 for beta chain variable domain of TCR clone 120289 (TRBV28, TRBJ1-5)
CASSLGVLVKPQHF

SEQ ID NO: 240579 - protein, 13 aa, Homo sapiens
  CDR3 for alpha chain variable domain of TCR clone 120290 (TRAV13-1, TRAJ43)
CAASLSNNNDMRF

SEQ ID NO: 240580 - protein, 14 aa, Homo sapiens
  CDR3 for beta chain variable domain of TCR clone 120290 (TRBV19, TRBJ2-7)
CASTVQGRPYEQYF

SEQ ID NO: 240581 - protein, 15 aa, Homo sapiens
  CDR3 for alpha chain variable domain of TCR clone 120291 (TRAV21, TRAJ53)
CATLNSGGSNYKLTF

SEQ ID NO: 240582 - protein, 14 aa, Homo sapiens
  CDR3 for beta chain variable domain of TCR clone 120291 (TRBV15, TRBJ1-2)
CATSRAAVNYGYTF

SEQ ID NO: 240583 - protein, 15 aa, Homo sapiens
  CDR3 for alpha chain variable domain of TCR clone 120292 (TRAV20, TRAJ50)
CAVRQMKTSYDKVIF

SEQ ID NO: 240584 - protein, 17 aa, Homo sapiens
  CDR3 for beta chain variable domain of TCR clone 120292 (TRBV28, TRBJ2-7)
CASSPIHRASGVYEQYF

SEQ ID NO: 240585 - protein, 14 aa, Homo sapiens
  CDR3 for alpha chain variable domain of TCR clone 120293 (TRAV12-2, TRAJ13)
CAVKKTGGYQKVTF

SEQ ID NO: 240586 - protein, 13 aa, Homo sapiens
  CDR3 for beta chain variable domain of TCR clone 120293 (TRBV10-3, TRBJ2-7)
CAIRAGGPHEQYF

SEQ ID NO: 240587 - protein, 14 aa, Homo sapiens
  CDR3 for alpha chain variable domain of TCR clone 120294 (TRAV13-2, TRAJ17)
CAENSKAAGNKLIF

SEQ ID NO: 240588 - protein, 11 aa, Homo sapiens
  CDR3 for beta chain variable domain of TCR clone 120294 (TRBV6-3, TRBJ2-3)
CATGQADTQYF

SEQ ID NO: 240589 - protein, 12 aa, Homo sapiens
  CDR3 for alpha chain variable domain of TCR clone 120295 (TRAV12-3, TRAJ17)
CAMTLTGNKLTF

SEQ ID NO: 240590 - protein, 13 aa, Homo sapiens
  CDR3 for beta chain variable domain of TCR clone 120295 (TRBV11-2, TRBJ2-5)
CASGHGAKETQYF

SEQ ID NO: 240591 - protein, 13 aa, Homo sapiens
  CDR3 for alpha chain variable domain of TCR clone 120296 (TRAV13-1, TRAJ43)
CAASLSNNNDMRF

SEQ ID NO: 240592 - protein, 15 aa, Homo sapiens
  CDR3 for beta chain variable domain of TCR clone 120296 (TRBV7-2, TRBJ2-1)
CASSSGLAGGNEQFF

SEQ ID NO: 240593 - protein, 14 aa, Homo sapiens
  CDR3 for alpha chain variable domain of TCR clone 120297 (TRAV12-3, TRAJ29)
CAMILLSGNTPLFF

SEQ ID NO: 240594 - protein, 16 aa, Homo sapiens
  CDR3 for beta chain variable domain of TCR clone 120297 (TRBV28, TRBJ2-7)
CASSSGTSGRGYEQYF

SEQ ID NO: 240595 - protein, 16 aa, Homo sapiens
  CDR3 for alpha chain variable domain of TCR clone 120298 (TRAV30, TRAJ24)
CGTEIVDADSWGKFQF

SEQ ID NO: 240596 - protein, 15 aa, Homo sapiens
  CDR3 for beta chain variable domain of TCR clone 120298 (TRBV6-5, TRBJ2-6)
CASSQWEAGANVLTF

SEQ ID NO: 240597 - protein, 10 aa, Homo sapiens
  CDR3 for alpha chain variable domain of TCR clone 120299 (TRAV12-1, TRAJ37)
ARGNTGKLIF

SEQ ID NO: 240598 - protein, 11 aa, Homo sapiens
  CDR3 for beta chain variable domain of TCR clone 120299 (TRBV19, TRBJ1-1)
CASSIGSEAFF

SEQ ID NO: 240599 - protein, 11 aa, Homo sapiens
  CDR3 for alpha chain variable domain of TCR clone 120300 (TRAV3, TRAJ13)
CAVTSYQKVTF

SEQ ID NO: 240600 - protein, 15 aa, Homo sapiens
  CDR3 for beta chain variable domain of TCR clone 120300 (TRBV7-9, TRBJ2-7)
CASSSSGLAAYEQYF

SEQ ID NO: 240601 - protein, 18 aa, Homo sapiens
  CDR3 for alpha chain variable domain of TCR clone 120301 (TRAV3, TRAJ17)
CSVRARRGGRSCRQQANF

SEQ ID NO: 240602 - protein, 14 aa, Homo sapiens
  CDR3 for beta chain variable domain of TCR clone 120301 (TRBV4-1, TRBJ2-2)
CASSQAVNTGELFF

SEQ ID NO: 240603 - protein, 16 aa, Homo sapiens
  CDR3 for alpha chain variable domain of TCR clone 120302 (TRAV30, TRAJ24)
CGTEIVDADSWVKFQF

SEQ ID NO: 240604 - protein, 15 aa, Homo sapiens
  CDR3 for beta chain variable domain of TCR clone 120302 (TRBV7-9, TRBJ1-4)
CASSARTGGNEKLFF

SEQ ID NO: 240605 - protein, 13 aa, Homo sapiens
  CDR3 for alpha chain variable domain of TCR clone 120303 (TRAV13-1, TRAJ21)
CAASIYNFNKFSF

SEQ ID NO: 240606 - protein, 13 aa, Homo sapiens
  CDR3 for beta chain variable domain of TCR clone 120303 (TRBV27, TRBJ1-4)
CASSLMGDEKLFF

SEQ ID NO: 240607 - protein, 13 aa, Homo sapiens
  CDR3 for alpha chain variable domain of TCR clone 120304 (TRAV12-3, TRAJ7)
CAMSASGNNILAF

SEQ ID NO: 240608 - protein, 14 aa, Homo sapiens
  CDR3 for beta chain variable domain of TCR clone 120304 (TRBV13, TRBJ2-5)
CASSLGPRGETQYF

SEQ ID NO: 240609 - protein, 15 aa, Homo sapiens
  CDR3 for alpha chain variable domain of TCR clone 120305 (TRAV26-1, TRAJ22)
CIVRVSFWFCKATDL

SEQ ID NO: 240610 - protein, 13 aa, Homo sapiens
  CDR3 for beta chain variable domain of TCR clone 120305 (TRBV24-1, TRBJ2-3)
CATSTGGTDTQYF

SEQ ID NO: 240611 - protein, 13 aa, Homo sapiens
  CDR3 for alpha chain variable domain of TCR clone 120306 (TRAV12-3, TRAJ54)
CAMFAPGAQKLVF

SEQ ID NO: 240612 - protein, 16 aa, Homo sapiens
  CDR3 for beta chain variable domain of TCR clone 120306 (TRBV7-6, TRBJ2-3)
CASSPRRGGLGDTQYF

SEQ ID NO: 240613 - protein, 10 aa, Homo sapiens
  CDR3 for alpha chain variable domain of TCR clone 120307 (TRAV1-2, TRAJ20)
CALNDYKLSF

SEQ ID NO: 240614 - protein, 16 aa, Homo sapiens
  CDR3 for beta chain variable domain of TCR clone 120307 (TRBV20-1, TRBJ1-1)
CSARAPTQGMNTEAFF

SEQ ID NO: 240615 - protein, 12 aa, Homo sapiens
  CDR3 for alpha chain variable domain of TCR clone 120308 (TRAV12-3, TRAJ20)
CAMVRGDYKLSS

SEQ ID NO: 240616 - protein, 16 aa, Homo sapiens
  CDR3 for beta chain variable domain of TCR clone 120308 (TRBV19, TRBJ2-2)
CASSTARASNTGELFF

SEQ ID NO: 240617 - protein, 13 aa, Homo sapiens
  CDR3 for alpha chain variable domain of TCR clone 120309 (TRAV21, TRAJ45)
CAVMGGGADGLTF

SEQ ID NO: 240618 - protein, 14 aa, Homo sapiens
  CDR3 for beta chain variable domain of TCR clone 120309 (TRBV4-3, TRBJ1-4)
RASSPLQRNEKLFF

SEQ ID NO: 240619 - protein, 13 aa, Homo sapiens
  CDR3 for alpha chain variable domain of TCR clone 120310 (TRAV38-2/DV8, TRAJ34)
CAYRTWNTDKLIF

SEQ ID NO: 240620 - protein, 11 aa, Homo sapiens
  CDR3 for beta chain variable domain of TCR clone 120310 (TRBV12-4, TRBJ2-2)
CASSSAGELFF

SEQ ID NO: 240621 - protein, 15 aa, Homo sapiens
  CDR3 for alpha chain variable domain of TCR clone 120311 (TRAV2, TRAJ15)
CAVEVREQAGTALIF

SEQ ID NO: 240622 - protein, 13 aa, Homo sapiens
  CDR3 for beta chain variable domain of TCR clone 120311 (TRBV10-2, TRBJ2-7)
CASGTSGGYEQYF

SEQ ID NO: 240623 - protein, 13 aa, Homo sapiens
  CDR3 for alpha chain variable domain of TCR clone 120312 (TRAV13-2, TRAJ13)
CAERPGGYQKVTL

SEQ ID NO: 240624 - protein, 15 aa, Homo sapiens
  CDR3 for beta chain variable domain of TCR clone 120312 (TRBV4-1, TRBJ1-4)
CASSDTGGTNEKLFF

SEQ ID NO: 240625 - protein, 14 aa, Homo sapiens
  CDR3 for alpha chain variable domain of TCR clone 120313 (TRAV17, TRAJ6)
CATDERRGSYMPTF

SEQ ID NO: 240626 - protein, 13 aa, Homo sapiens
  CDR3 for beta chain variable domain of TCR clone 120313 (TRBV27, TRBJ2-1)
CASSLGRIWGQFF

SEQ ID NO: 240627 - protein, 16 aa, Homo sapiens
  CDR3 for alpha chain variable domain of TCR clone 120314 (TRAV30, TRAJ24)
CGTEIVDADSWGKFQF

SEQ ID NO: 240628 - protein, 15 aa, Homo sapiens
  CDR3 for beta chain variable domain of TCR clone 120314 (TRBV7-9, IGHJ2)
CASSARTGGNEKLFF

SEQ ID NO: 240629 - protein, 14 aa, Homo sapiens
  CDR3 for alpha chain variable domain of TCR clone 120315 (TRAV12-2, TRAJ17)
CAVLFKAAGNKLTF

SEQ ID NO: 240630 - protein, 14 aa, Homo sapiens
  CDR3 for beta chain variable domain of TCR clone 120315 (TRBV7-8, TRBJ2-3)
CASSLEAGTDTQYF

SEQ ID NO: 240631 - protein, 15 aa, Homo sapiens
  CDR3 for alpha chain variable domain of TCR clone 120316 (TRAV3, TRAJ22)
CAVRDRGCSARQLTF

SEQ ID NO: 240632 - protein, 14 aa, Homo sapiens
  CDR3 for beta chain variable domain of TCR clone 120316 (TRBV19, TRBJ2-1)
CASSRLASINEQFF

SEQ ID NO: 240633 - protein, 12 aa, Homo sapiens
  CDR3 for alpha chain variable domain of TCR clone 120317 (TRAV3, TRAJ20)
CAARDPDYKLSF

SEQ ID NO: 240634 - protein, 14 aa, Homo sapiens
  CDR3 for beta chain variable domain of TCR clone 120317 (TRBV4-2, TRBJ2-1)
CASGLDRAYNEQFF

SEQ ID NO: 240635 - protein, 16 aa, Homo sapiens
  CDR3 for alpha chain variable domain of TCR clone 120318 (TRAV38-2/DV8, TRAJ47)
CAYRSAIMEYGDKLVF

SEQ ID NO: 240636 - protein, 14 aa, Homo sapiens
  CDR3 for beta chain variable domain of TCR clone 120318 (TRBV19, TRBJ2-7)
CASSIFAGTYEQYF

SEQ ID NO: 240637 - protein, 16 aa, Homo sapiens
  CDR3 for alpha chain variable domain of TCR clone 120319 (TRAV12-1, TRAJ13)
CVVNLEVSGGYQKVTF

SEQ ID NO: 240638 - protein, 16 aa, Homo sapiens
  CDR3 for beta chain variable domain of TCR clone 120319 (TRBV24-1, TRBJ2-6)
CATSDRKASGANVLTF

SEQ ID NO: 240639 - protein, 14 aa, Homo sapiens
  CDR3 for alpha chain variable domain of TCR clone 120320 (TRAV3, TRAJ20)
CAVRDSFNDYKLSF

SEQ ID NO: 240640 - protein, 13 aa, Homo sapiens
  CDR3 for beta chain variable domain of TCR clone 120320 (TRBV7-9, TRBJ2-3)
CASSPGSTDTQYF

SEQ ID NO: 240641 - protein, 11 aa, Homo sapiens
  CDR3 for alpha chain variable domain of TCR clone 120321 (TRAV17, TRAJ49)
CATDAGNQFYF

SEQ ID NO: 240642 - protein, 20 aa, Homo sapiens
  CDR3 for beta chain variable domain of TCR clone 120321 (TRBV28, TRBJ2-1)
CARTPIGRSPGLAGGNEQFF

SEQ ID NO: 240643 - protein, 16 aa, Homo sapiens
  CDR3 for alpha chain variable domain of TCR clone 120322 (TRAV8-1, TRAJ42)
CAVTSRYGGSQGNLIF

SEQ ID NO: 240644 - protein, 12 aa, Homo sapiens
  CDR3 for beta chain variable domain of TCR clone 120322 (TRBV6-3, TRBJ2-7)
CASSVGRRGLYF

SEQ ID NO: 240645 - protein, 12 aa, Homo sapiens
  CDR3 for alpha chain variable domain of TCR clone 120323 (TRAV12-3, TRAJ17)
CAMTLTGNKLTF

SEQ ID NO: 240646 - protein, 13 aa, Homo sapiens
  CDR3 for beta chain variable domain of TCR clone 120323 (TRBV20-1, TRBJ1-1)
CSARAGGNTEAFF

SEQ ID NO: 240647 - protein, 12 aa, Homo sapiens
  CDR3 for alpha chain variable domain of TCR clone 120324 (TRAV21, TRAJ33)
CAKMDSNYQLIW

SEQ ID NO: 240648 - protein, 15 aa, Homo sapiens
  CDR3 for beta chain variable domain of TCR clone 120324 (TRBV7-3, TRBJ2-7)
CASSLTGQGKYEQYF

SEQ ID NO: 240649 - protein, 17 aa, Homo sapiens
  CDR3 for alpha chain variable domain of TCR clone 120325 (TRAV3, TRAJ42)
CAVRGRDYGGSQGNPIF

SEQ ID NO: 240650 - protein, 14 aa, Homo sapiens
  CDR3 for beta chain variable domain of TCR clone 120325 (TRBV5-4, TRBJ1-1)
CASSLDSRRDEAFF

SEQ ID NO: 240651 - protein, 14 aa, Homo sapiens
  CDR3 for alpha chain variable domain of TCR clone 120326 (TRAV9-2, TRAJ39)
CALYIYNAGNMPTF

SEQ ID NO: 240652 - protein, 15 aa, Homo sapiens
  CDR3 for beta chain variable domain of TCR clone 120326 (TRBV29-1, TRBJ2-1)
CSAPTGLALYNEQFF

SEQ ID NO: 240653 - protein, 14 aa, Homo sapiens
  CDR3 for alpha chain variable domain of TCR clone 120327 (TRAV12-2, TRAJ17)
CAVLFKAAGNKLTF

SEQ ID NO: 240654 - protein, 13 aa, Homo sapiens
  CDR3 for beta chain variable domain of TCR clone 120327 (TRBV20-1, TRBJ1-3)
CSARVQGRDTIYF

SEQ ID NO: 240655 - protein, 17 aa, Homo sapiens
  CDR3 for alpha chain variable domain of TCR clone 120328 (TRAV4, TRAJ13)
CLVGVQGSSGGYQKVTF

SEQ ID NO: 240656 - protein, 13 aa, Homo sapiens
  CDR3 for beta chain variable domain of TCR clone 120328 (TRBV7-7, TRBJ1-1)
CASSLGANTEAFF

SEQ ID NO: 240657 - protein, 15 aa, Homo sapiens
  CDR3 for alpha chain variable domain of TCR clone 120329 (TRAV21, TRAJ53)
CATLNSGGSNYKLTF

SEQ ID NO: 240658 - protein, 16 aa, Homo sapiens
  CDR3 for beta chain variable domain of TCR clone 120329 (TRBV12-4, TRBJ2-3)
CASSLRLAGTTDTQYF

SEQ ID NO: 240659 - protein, 11 aa, Homo sapiens
  CDR3 for alpha chain variable domain of TCR clone 120330 (TRAV29/DV5, TRAJ49)
CAAVPGNQFYF

SEQ ID NO: 240660 - protein, 20 aa, Homo sapiens
  CDR3 for beta chain variable domain of TCR clone 120330 (TRBV7-8, TRBJ2-2)
CASSHLFPGPTIHITGELFF

SEQ ID NO: 240661 - protein, 16 aa, Homo sapiens
  CDR3 for alpha chain variable domain of TCR clone 120331 (TRAV3, TRAJ37)
CAVRPHCSGNTGKLIF

SEQ ID NO: 240662 - protein, 17 aa, Homo sapiens
  CDR3 for beta chain variable domain of TCR clone 120331 (TRBV5-1, TRBJ2-5)
CASSPVALGQNQETQYF

SEQ ID NO: 240663 - protein, 19 aa, Homo sapiens
  CDR3 for alpha chain variable domain of TCR clone 120332 (TRAV26-1, TRAJ52)
CLVRAHRNAGGTSYGKLTF

SEQ ID NO: 240664 - protein, 15 aa, Homo sapiens
  CDR3 for beta chain variable domain of TCR clone 120332 (TRBV12-4, TRBJ2-5)
CASSPPTGLQETQYF

SEQ ID NO: 240665 - protein, 11 aa, Homo sapiens
  CDR3 for alpha chain variable domain of TCR clone 120333 (TRAV4, TRAJ28)
CLVGDNRAETL

SEQ ID NO: 240666 - protein, 15 aa, Homo sapiens
  CDR3 for beta chain variable domain of TCR clone 120333 (TRBV20-1, TRBJ2-7)
CSARDRVSGMDEQYF

SEQ ID NO: 240667 - protein, 13 aa, Homo sapiens
  CDR3 for alpha chain variable domain of TCR clone 120334 (TRAV36/DV7, TRAJ37)
CAVFSSNTGKLIF

SEQ ID NO: 240668 - protein, 14 aa, Homo sapiens
  CDR3 for beta chain variable domain of TCR clone 120334 (TRBV19, TRBJ2-1)
CASSMGSGRRSSSS

SEQ ID NO: 240669 - protein, 12 aa, Homo sapiens
  CDR3 for alpha chain variable domain of TCR clone 120335 (TRAV8-4, TRAJ22)
CAATGSARQLTF

SEQ ID NO: 240670 - protein, 14 aa, Homo sapiens
  CDR3 for beta chain variable domain of TCR clone 120335 (TRBV7-2, TRBJ2-7)
CASRSQGAAYEQYF

SEQ ID NO: 240671 - protein, 17 aa, Homo sapiens
  CDR3 for alpha chain variable domain of TCR clone 120336 (TRAV3, TRAJ6)
CAVRDGPRAGGSYIPTF

SEQ ID NO: 240672 - protein, 15 aa, Homo sapiens
  CDR3 for beta chain variable domain of TCR clone 120336 (TRBV4-1, TRBJ2-5)
CASSQWDLYQETQYF

SEQ ID NO: 240673 - protein, 16 aa, Homo sapiens
  CDR3 for alpha chain variable domain of TCR clone 120337 (TRAV30, TRAJ24)
CGTEIVDADSWGKFQF

SEQ ID NO: 240674 - protein, 16 aa, Homo sapiens
  CDR3 for beta chain variable domain of TCR clone 120337 (TRBV12-4, TRBJ2-5)
CASSWRPSGDLETQYF

SEQ ID NO: 240675 - protein, 15 aa, Homo sapiens
  CDR3 for alpha chain variable domain of TCR clone 120338 (TRAV12-3, TRAJ11)
CAMSEENSGYSTLTF

SEQ ID NO: 240676 - protein, 13 aa, Homo sapiens
  CDR3 for beta chain variable domain of TCR clone 120338 (TRBV12-4, TRBJ2-1)
CASSFHAGSEQFF

SEQ ID NO: 240677 - protein, 15 aa, Homo sapiens
  CDR3 for alpha chain variable domain of TCR clone 120339 (TRAV17, TRAJ16)
CATALRFSDGQKLIF

SEQ ID NO: 240678 - protein, 15 aa, Homo sapiens
  CDR3 for beta chain variable domain of TCR clone 120339 (TRBV20-1, TRBJ1-1)
CSASRGVTGNTEAFF

SEQ ID NO: 240679 - protein, 13 aa, Homo sapiens
  CDR3 for alpha chain variable domain of TCR clone 120340 (TRAV20, TRAJ49)
CAVQARTGNQFYF

SEQ ID NO: 240680 - protein, 14 aa, Homo sapiens
  CDR3 for beta chain variable domain of TCR clone 120340 (TRBV5-1, TRBJ1-1)
CASSLQGASTEALF

SEQ ID NO: 240681 - protein, 15 aa, Homo sapiens
  CDR3 for alpha chain variable domain of TCR clone 120341 (TRAV2, TRAJ28)
CAVPYSGAGSYQLTF

SEQ ID NO: 240682 - protein, 12 aa, Homo sapiens
  CDR3 for beta chain variable domain of TCR clone 120341 (TRBV28, TRBJ2-3)
CASSLYRDTQYF

SEQ ID NO: 240683 - protein, 11 aa, Homo sapiens
  CDR3 for alpha chain variable domain of TCR clone 120342 (TRAV27, TRAJ47)
SLVEYGNKLVF

SEQ ID NO: 240684 - protein, 18 aa, Homo sapiens
  CDR3 for beta chain variable domain of TCR clone 120342 (TRBV2, TRBJ2-1)
CASRGLAGGPRTYNEQFF

SEQ ID NO: 240685 - protein, 12 aa, Homo sapiens
  CDR3 for alpha chain variable domain of TCR clone 120343 (TRAV21, TRAJ29)
CAVTSGNTPLVF

SEQ ID NO: 240686 - protein, 15 aa, Homo sapiens
  CDR3 for beta chain variable domain of TCR clone 120343 (TRBV10-2, TRBJ2-6)
CASGEQGTGANVLTF

SEQ ID NO: 240687 - protein, 15 aa, Homo sapiens
  CDR3 for alpha chain variable domain of TCR clone 120344 (TRAV1-2, TRAJ16)
CAVRARFSDGQTLLF

SEQ ID NO: 240688 - protein, 19 aa, Homo sapiens
  CDR3 for beta chain variable domain of TCR clone 120344 (TRBV11-3, TRBJ2-3)
CASGFGTSGGPRGGGTQYF

SEQ ID NO: 240689 - protein, 13 aa, Homo sapiens
  CDR3 for alpha chain variable domain of TCR clone 120345 (TRAV13-1, TRAJ53)
CAASKGINYKLTF

SEQ ID NO: 240690 - protein, 13 aa, Homo sapiens
  CDR3 for beta chain variable domain of TCR clone 120345 (TRBV29-1, TRBJ2-5)
CSVTIASEETQYF

SEQ ID NO: 240691 - protein, 14 aa, Homo sapiens
  CDR3 for alpha chain variable domain of TCR clone 120346 (TRAV34, TRAJ44)
CGADGTGTASKLTF

SEQ ID NO: 240692 - protein, 15 aa, Homo sapiens
  CDR3 for beta chain variable domain of TCR clone 120346 (TRBV6-3, TRBJ2-7)
CASSSPGTVFYEQYF

SEQ ID NO: 240693 - protein, 11 aa, Homo sapiens
  CDR3 for alpha chain variable domain of TCR clone 120347 (TRAV3, TRAJ21)
CAVANFNKFYF

SEQ ID NO: 240694 - protein, 16 aa, Homo sapiens
  CDR3 for beta chain variable domain of TCR clone 120347 (TRBV19, TRBJ2-1)
CASSKAGPGSYNEQFF

SEQ ID NO: 240695 - protein, 14 aa, Homo sapiens
  CDR3 for alpha chain variable domain of TCR clone 120348 (TRAV9-2, TRAJ39)
CALYIYNAGNMLTF

SEQ ID NO: 240696 - protein, 15 aa, Homo sapiens
  CDR3 for beta chain variable domain of TCR clone 120348 (TRBV11-2, TRBJ2-1)
CASSSPSTRYNEQFF

SEQ ID NO: 240697 - protein, 13 aa, Homo sapiens
  CDR3 for alpha chain variable domain of TCR clone 120349 (TRAV29/DV5, TRAJ48)
CAASSFGNEKLTF

SEQ ID NO: 240698 - protein, 14 aa, Homo sapiens
  CDR3 for beta chain variable domain of TCR clone 120349 (TRBV3-1, TRBJ2-2)
CASSQDWAQGELFF

SEQ ID NO: 240699 - protein, 15 aa, Homo sapiens
  CDR3 for alpha chain variable domain of TCR clone 120350 (TRAV27, TRAJ38)
CAGGFNAGNNRKLIW

SEQ ID NO: 240700 - protein, 13 aa, Homo sapiens
  CDR3 for beta chain variable domain of TCR clone 120350 (TRBV12-5, TRBJ2-3)
CASQNRGTDTQYF

SEQ ID NO: 240701 - protein, 13 aa, Homo sapiens
  CDR3 for alpha chain variable domain of TCR clone 120351 (TRAV35, TRAJ42)
CAGFPGSQGNLFF

SEQ ID NO: 240702 - protein, 13 aa, Homo sapiens
  CDR3 for beta chain variable domain of TCR clone 120351 (TRBV29-1, TRBJ2-1)
CSVEGGRVNEQFF

SEQ ID NO: 240703 - protein, 14 aa, Homo sapiens
  CDR3 for alpha chain variable domain of TCR clone 120352 (TRAV38-1, TRAJ45)
CSSHSGGGADGLTF

SEQ ID NO: 240704 - protein, 16 aa, Homo sapiens
  CDR3 for beta chain variable domain of TCR clone 120352 (TRBV27, TRBJ2-2)
CASSFRGLVRTGELFF

SEQ ID NO: 240705 - protein, 16 aa, Homo sapiens
  CDR3 for alpha chain variable domain of TCR clone 120353 (TRAV12-3, TRAJ53)
CAMSPGSGGGNYKLTF

SEQ ID NO: 240706 - protein, 17 aa, Homo sapiens
  CDR3 for beta chain variable domain of TCR clone 120353 (TRBV28, TRBJ2-5)
CASSTPEGDALQETQYF

SEQ ID NO: 240707 - protein, 13 aa, Homo sapiens
  CDR3 for alpha chain variable domain of TCR clone 120354 (TRAV3, TRAJ21)
CAVREPDFNKFYF

SEQ ID NO: 240708 - protein, 13 aa, Homo sapiens
  CDR3 for beta chain variable domain of TCR clone 120354 (TRBV7-3, TRBJ2-7)
CASSQAGGYEQYF

SEQ ID NO: 240709 - protein, 16 aa, Homo sapiens
  CDR3 for alpha chain variable domain of TCR clone 120355 (TRAV4, TRAJ22)
CLLGDLYSGSARQLTF

SEQ ID NO: 240710 - protein, 14 aa, Homo sapiens
  CDR3 for beta chain variable domain of TCR clone 120355 (TRBV28, TRBJ2-3)
CASSWRGRADTQYF

SEQ ID NO: 240711 - protein, 13 aa, Homo sapiens
  CDR3 for alpha chain variable domain of TCR clone 120356 (TRAV20, TRAJ37)
CAGCSSNTRKLIF

SEQ ID NO: 240712 - protein, 11 aa, Homo sapiens
  CDR3 for beta chain variable domain of TCR clone 120356 (TRBV12-4, TRBJ2-3)
CASTATDTQYF

SEQ ID NO: 240713 - protein, 15 aa, Homo sapiens
  CDR3 for alpha chain variable domain of TCR clone 120357 (TRAV35, TRAJ40)
CAGQLGTSGTYKYIF

SEQ ID NO: 240714 - protein, 14 aa, Homo sapiens
  CDR3 for beta chain variable domain of TCR clone 120357 (TRBV7-3, TRBJ2-1)
CDSSLAGGTNEQFF

SEQ ID NO: 240715 - protein, 10 aa, Homo sapiens
  CDR3 for alpha chain variable domain of TCR clone 120358 (TRAV38-2/DV8, TRAJ40)
CASGTYKCIF

SEQ ID NO: 240716 - protein, 14 aa, Homo sapiens
  CDR3 for beta chain variable domain of TCR clone 120358 (TRBV7-9, TRBJ2-1)
CASSPRDSLYEQFF

SEQ ID NO: 240717 - protein, 13 aa, Homo sapiens
  CDR3 for alpha chain variable domain of TCR clone 120359 (TRAV16, TRAJ37)
CALGGSNTGKLIF

SEQ ID NO: 240718 - protein, 15 aa, Homo sapiens
  CDR3 for beta chain variable domain of TCR clone 120359 (TRBV20-1, TRBJ2-1)
CSARGRGLSYNEQFF

SEQ ID NO: 240719 - protein, 15 aa, Homo sapiens
  CDR3 for alpha chain variable domain of TCR clone 120360 (TRAV2, TRAJ28)
CAVPYSGAGRYQLTF

SEQ ID NO: 240720 - protein, 17 aa, Homo sapiens
  CDR3 for beta chain variable domain of TCR clone 120360 (TRBV20-1, TRBJ2-4)
CSARDWASGGRENIQYF

SEQ ID NO: 240721 - protein, 16 aa, Homo sapiens
  CDR3 for alpha chain variable domain of TCR clone 120361 (TRAV8-4, TRAJ53)
CAVSTNSGGSNYKLTF

SEQ ID NO: 240722 - protein, 15 aa, Homo sapiens
  CDR3 for beta chain variable domain of TCR clone 120361 (TRBV2, TRBJ2-1)
CASTPTGSSYNEQFF

SEQ ID NO: 240723 - protein, 12 aa, Homo sapiens
  CDR3 for alpha chain variable domain of TCR clone 120362 (TRAV27, TRAJ9)
CAGESGGFKTIF

SEQ ID NO: 240724 - protein, 14 aa, Homo sapiens
  CDR3 for beta chain variable domain of TCR clone 120362 (TRBV6-1, TRBJ2-1)
CASAKDGLYNEQFF

SEQ ID NO: 240725 - protein, 13 aa, Homo sapiens
  CDR3 for alpha chain variable domain of TCR clone 120363 (TRAV13-1, TRAJ39)
CSKYSNAGNMLTF

SEQ ID NO: 240726 - protein, 15 aa, Homo sapiens
  CDR3 for beta chain variable domain of TCR clone 120363 (TRBV28, TRBJ2-1)
CASSIIAGGRSEQFF

SEQ ID NO: 240727 - protein, 12 aa, Homo sapiens
  CDR3 for alpha chain variable domain of TCR clone 120364 (TRAV35, TRAJ54)
CADLQGAQKLVF

SEQ ID NO: 240728 - protein, 13 aa, Homo sapiens
  CDR3 for beta chain variable domain of TCR clone 120364 (TRBV12-5, TRBJ2-3)
CASGDRQSDTQYF

SEQ ID NO: 240729 - protein, 11 aa, Homo sapiens
  CDR3 for alpha chain variable domain of TCR clone 120365 (TRAV17, TRAJ9)
CGFTGGFKTIF

SEQ ID NO: 240730 - protein, 14 aa, Homo sapiens
  CDR3 for beta chain variable domain of TCR clone 120365 (TRBV7-9, TRBJ2-2)
CASSLVQDPGELFF

SEQ ID NO: 240731 - protein, 23 aa, Homo sapiens
  CDR3 for alpha chain variable domain of TCR clone 120366 (TRAV30, TRAJ48)
PAQLLRNLLLWHRDKIGNEKLTF

SEQ ID NO: 240732 - protein, 13 aa, Homo sapiens
  CDR3 for beta chain variable domain of TCR clone 120366 (TRBV11-2, TRBJ2-5)
CASSSTGEETQYF

SEQ ID NO: 240733 - protein, 12 aa, Homo sapiens
  CDR3 for alpha chain variable domain of TCR clone 120367 (TRAV12-3, TRAJ29)
CAAREGNTPLVF

SEQ ID NO: 240734 - protein, 17 aa, Homo sapiens
  CDR3 for beta chain variable domain of TCR clone 120367 (TRBV18, TRBJ2-1)
GASSPLAAGAGDNEQFF

SEQ ID NO: 240735 - protein, 12 aa, Homo sapiens
  CDR3 for alpha chain variable domain of TCR clone 120368 (TRAV12-3, TRAJ17)
CAMTLTGNKLTF

SEQ ID NO: 240736 - protein, 18 aa, Homo sapiens
  CDR3 for beta chain variable domain of TCR clone 120368 (TRBV11-3, TRBJ2-1)
CASSSYHGGRDSYNGQFF

SEQ ID NO: 240737 - protein, 11 aa, Homo sapiens
  CDR3 for alpha chain variable domain of TCR clone 120369 (TRAV27, TRAJ47)
SIVEYGNKLVF

SEQ ID NO: 240738 - protein, 18 aa, Homo sapiens
  CDR3 for beta chain variable domain of TCR clone 120369 (TRBV2, TRBJ2-1)
CAIRGLAGGPRTYNEQFF

SEQ ID NO: 240739 - protein, 13 aa, Homo sapiens
  CDR3 for alpha chain variable domain of TCR clone 120370 (TRAV13-2, TRAJ40)
CAEFTPGTYKYIF

SEQ ID NO: 240740 - protein, 14 aa, Homo sapiens
  CDR3 for beta chain variable domain of TCR clone 120370 (TRBV10-2, TRBJ1-5)
CASSSTGRNQPQHF

SEQ ID NO: 240741 - protein, 14 aa, Homo sapiens
  CDR3 for alpha chain variable domain of TCR clone 120371 (TRAV1-2, TRAJ8)
CAVREDTGFQKLVF

SEQ ID NO: 240742 - protein, 15 aa, Homo sapiens
  CDR3 for beta chain variable domain of TCR clone 120371 (TRBV27, TRBJ2-3)
CATTRTTSATDTQYF

SEQ ID NO: 240743 - protein, 14 aa, Homo sapiens
  CDR3 for alpha chain variable domain of TCR clone 120372 (TRAV1-2, TRAJ16)
CAVNRFSGGQKLLF

SEQ ID NO: 240744 - protein, 13 aa, Homo sapiens
  CDR3 for beta chain variable domain of TCR clone 120372 (TRBV20-1, TRBJ1-1)
CSASLGGGTEAFF

SEQ ID NO: 240745 - protein, 17 aa, Homo sapiens
  CDR3 for alpha chain variable domain of TCR clone 120373 (TRAV4, TRAJ13)
WLVGVQGSSGGYQKVTF

SEQ ID NO: 240746 - protein, 18 aa, Homo sapiens
  CDR3 for beta chain variable domain of TCR clone 120373 (TRBV15, TRBJ2-3)
CATSRDGARSWDTDTQYF

SEQ ID NO: 240747 - protein, 14 aa, Homo sapiens
  CDR3 for alpha chain variable domain of TCR clone 120374 (TRAV1-2, TRAJ16)
CAVNRFSDGQKLLF

SEQ ID NO: 240748 - protein, 13 aa, Homo sapiens
  CDR3 for beta chain variable domain of TCR clone 120374 (TRBV7-2, TRBJ1-1)
CASSLKGAKVAFF

SEQ ID NO: 240749 - protein, 14 aa, Homo sapiens
  CDR3 for alpha chain variable domain of TCR clone 120375 (TRAV1-2, TRAJ16)
CAVNRFSDGEKLLF

SEQ ID NO: 240750 - protein, 14 aa, Homo sapiens
  CDR3 for beta chain variable domain of TCR clone 120375 (TRBV7-3, TRBJ1-1)
CASSLKGGNTEAFF

SEQ ID NO: 240751 - protein, 13 aa, Homo sapiens
  CDR3 for alpha chain variable domain of TCR clone 120376 (TRAV1-1, TRAJ9)
CAAKNTGGFKTIF

SEQ ID NO: 240752 - protein, 14 aa, Homo sapiens
  CDR3 for beta chain variable domain of TCR clone 120376 (TRBV7-2, TRBJ1-1)
CASSFLTGTTEAFF

SEQ ID NO: 240753 - protein, 13 aa, Homo sapiens
  CDR3 for alpha chain variable domain of TCR clone 120377 (TRAV36/DV7, TRAJ7)
CAGTRYGNNRLAF

SEQ ID NO: 240754 - protein, 14 aa, Homo sapiens
  CDR3 for beta chain variable domain of TCR clone 120377 (TRBV19, TRBJ2-1)
CASPTCVLSGEQFF

SEQ ID NO: 240755 - protein, 13 aa, Homo sapiens
  CDR3 for alpha chain variable domain of TCR clone 120378 (TRAV3, TRAJ20)
CAVRDTPRYKLSF

SEQ ID NO: 240756 - protein, 13 aa, Homo sapiens
  CDR3 for beta chain variable domain of TCR clone 120378 (TRBV20-1, TRBJ1-6)
CSAPLGVGSPLHF

SEQ ID NO: 240757 - protein, 14 aa, Homo sapiens
  CDR3 for alpha chain variable domain of TCR clone 120379 (TRAV35, TRAJ13)
CAGRSPGGYQKVTF

SEQ ID NO: 240758 - protein, 14 aa, Homo sapiens
  CDR3 for beta chain variable domain of TCR clone 120379 (TRBV11-3, TRBJ1-6)
CASSFSGGDSPLHF

SEQ ID NO: 240759 - protein, 13 aa, Homo sapiens
  CDR3 for alpha chain variable domain of TCR clone 120380 (TRAV35, TRAJ43)
CAGYPYNNNDVRF

SEQ ID NO: 240760 - protein, 15 aa, Homo sapiens
  CDR3 for beta chain variable domain of TCR clone 120380 (TRBV25-1, TRBJ1-4)
CASSKRIATNEKLFF

SEQ ID NO: 240761 - protein, 14 aa, Homo sapiens
  CDR3 for alpha chain variable domain of TCR clone 120381 (TRAV1-2, TRAJ16)
CAVNRFSDGQKLLF

SEQ ID NO: 240762 - protein, 12 aa, Homo sapiens
  CDR3 for beta chain variable domain of TCR clone 120381 (TRBV27, TRBJ2-5)
CDSSPTGETQYF

SEQ ID NO: 240763 - protein, 19 aa, Homo sapiens
  CDR3 for alpha chain variable domain of TCR clone 120382 (TRAV21, TRAJ20)
SLVTQPPTSVLPNDYKLSF

SEQ ID NO: 240764 - protein, 13 aa, Homo sapiens
  CDR3 for beta chain variable domain of TCR clone 120382 (TRBV2, TRBJ1-4)
CASSERAGEKLFF

SEQ ID NO: 240765 - protein, 14 aa, Homo sapiens
  CDR3 for alpha chain variable domain of TCR clone 120383 (TRAV12-2, TRAJ11)
CAVEGGSGYSTPTF

SEQ ID NO: 240766 - protein, 16 aa, Homo sapiens
  CDR3 for beta chain variable domain of TCR clone 120383 (TRBV6-1, TRBJ1-2)
CASSGAWQGRSHGYTF

SEQ ID NO: 240767 - protein, 16 aa, Homo sapiens
  CDR3 for alpha chain variable domain of TCR clone 120384 (TRAV3, TRAJ3)
CAVRDRAKSSASKIIF

SEQ ID NO: 240768 - protein, 15 aa, Homo sapiens
  CDR3 for beta chain variable domain of TCR clone 120384 (TRBV2, TRBJ2-7)
CASTLLGSGATEQYF

SEQ ID NO: 240769 - protein, 16 aa, Homo sapiens
  CDR3 for alpha chain variable domain of TCR clone 120385 (TRAV30, TRAJ26)
CGTESVGDNYGQNFVF

SEQ ID NO: 240770 - protein, 13 aa, Homo sapiens
  CDR3 for beta chain variable domain of TCR clone 120385 (TRBV19, TRBJ1-2)
CASSISEDYGDTF

SEQ ID NO: 240771 - protein, 14 aa, Homo sapiens
  CDR3 for alpha chain variable domain of TCR clone 120386 (TRAV12-2, TRAJ13)
CAVKKTGGYQKVTF

SEQ ID NO: 240772 - protein, 15 aa, Homo sapiens
  CDR3 for beta chain variable domain of TCR clone 120386 (TRBV18, TRBJ2-5)
CASSPDPGLQETQYF

SEQ ID NO: 240773 - protein, 16 aa, Homo sapiens
  CDR3 for alpha chain variable domain of TCR clone 120387 (TRAV12-1, TRAJ48)
RVVNMVSNFGNEKLTF

SEQ ID NO: 240774 - protein, 18 aa, Homo sapiens
  CDR3 for beta chain variable domain of TCR clone 120387 (TRBV11-2, TRBJ2-6)
CASSLNPFLGTGANVLTF

SEQ ID NO: 240775 - protein, 12 aa, Homo sapiens
  CDR3 for alpha chain variable domain of TCR clone 120388 (TRAV35, TRAJ54)
CADLQGAQKLVF

SEQ ID NO: 240776 - protein, 14 aa, Homo sapiens
  CDR3 for beta chain variable domain of TCR clone 120388 (TRBV7-2, TRBJ2-7)
CASRSQGAAYEQYF

SEQ ID NO: 240777 - protein, 13 aa, Homo sapiens
  CDR3 for alpha chain variable domain of TCR clone 120389 (TRAV2, TRAJ5)
CAVPDTGRRALTF

SEQ ID NO: 240778 - protein, 17 aa, Homo sapiens
  CDR3 for beta chain variable domain of TCR clone 120389 (TRBV11-2, TRBJ2-1)
CASSLYPPGVEYNEQFF

SEQ ID NO: 240779 - protein, 12 aa, Homo sapiens
  CDR3 for alpha chain variable domain of TCR clone 120390 (TRAV3, TRAJ20)
CAVRDHDYKPSF

SEQ ID NO: 240780 - protein, 13 aa, Homo sapiens
  CDR3 for beta chain variable domain of TCR clone 120390 (TRBV9, TRBJ2-7)
CASSVGQGGEQYF

SEQ ID NO: 240781 - protein, 12 aa, Homo sapiens
  CDR3 for alpha chain variable domain of TCR clone 120391 (TRAV13-2, TRAJ8)
CAPWLGFQKLVF

SEQ ID NO: 240782 - protein, 15 aa, Homo sapiens
  CDR3 for beta chain variable domain of TCR clone 120391 (TRBV10-3, TRBJ2-2)
CAISVATSNTGELFF

SEQ ID NO: 240783 - protein, 15 aa, Homo sapiens
  CDR3 for alpha chain variable domain of TCR clone 120392 (TRAV3, TRAJ3)
CAVRDMSSSASKIIF

SEQ ID NO: 240784 - protein, 16 aa, Homo sapiens
  CDR3 for beta chain variable domain of TCR clone 120392 (TRBV7-2, TRBJ2-5)
CASSPFPTGGEETQYF

SEQ ID NO: 240785 - protein, 16 aa, Homo sapiens
  CDR3 for alpha chain variable domain of TCR clone 120393 (TRAV17, TRAJ17)
CATALQEEAAGNKLTF

SEQ ID NO: 240786 - protein, 12 aa, Homo sapiens
  CDR3 for beta chain variable domain of TCR clone 120393 (TRBV4-2, TRBJ2-5)
CASGGAKETQYF

SEQ ID NO: 240787 - protein, 13 aa, Homo sapiens
  CDR3 for alpha chain variable domain of TCR clone 120394 (TRAV21, TRAJ15)
CAVANQAGTALIF

SEQ ID NO: 240788 - protein, 14 aa, Homo sapiens
  CDR3 for beta chain variable domain of TCR clone 120394 (TRBV27, TRBJ2-2)
RASSLGAATGELFF

SEQ ID NO: 240789 - protein, 12 aa, Homo sapiens
  CDR3 for alpha chain variable domain of TCR clone 120395 (TRAV3, TRAJ31)
CAVRDGNARLMF

SEQ ID NO: 240790 - protein, 15 aa, Homo sapiens
  CDR3 for beta chain variable domain of TCR clone 120395 (TRBV11-2, TRBJ2-1)
CASSRNRGLMYEQFF

SEQ ID NO: 240791 - protein, 14 aa, Homo sapiens
  CDR3 for alpha chain variable domain of TCR clone 120396 (TRAV1-1, TRAJ27)
CAVNYNTNAGKSTF

SEQ ID NO: 240792 - protein, 15 aa, Homo sapiens
  CDR3 for beta chain variable domain of TCR clone 120396 (TRBV7-2, TRBJ2-1)
CASSSGLAGGNEQFF

SEQ ID NO: 240793 - protein, 11 aa, Homo sapiens
  CDR3 for alpha chain variable domain of TCR clone 120397 (TRAV17, TRAJ9)
CATTGGFKTIF

SEQ ID NO: 240794 - protein, 16 aa, Homo sapiens
  CDR3 for beta chain variable domain of TCR clone 120397 (TRBV7-9, TRBJ1-2)
CASSLAPLRAAYGYTF

SEQ ID NO: 240795 - protein, 13 aa, Homo sapiens
  CDR3 for alpha chain variable domain of TCR clone 120398 (TRAV2, TRAJ40)
CAVVTSGTYKYIF

SEQ ID NO: 240796 - protein, 16 aa, Homo sapiens
  CDR3 for beta chain variable domain of TCR clone 120398 (TRBV7-3, TRBJ2-1)
CASSLEGYRSYSEQFF

SEQ ID NO: 240797 - protein, 16 aa, Homo sapiens
  CDR3 for alpha chain variable domain of TCR clone 120399 (TRAV16, TRAJ4)
CITVLPFSGGYNKLIF

SEQ ID NO: 240798 - protein, 16 aa, Homo sapiens
  CDR3 for beta chain variable domain of TCR clone 120399 (TRBV19, TRBJ2-7)
CASSMGQGRSSSTSGR

SEQ ID NO: 240799 - protein, 14 aa, Homo sapiens
  CDR3 for alpha chain variable domain of TCR clone 120400 (TRAV17, TRAJ37)
CATDGSSNTGKLIF

SEQ ID NO: 240800 - protein, 15 aa, Homo sapiens
  CDR3 for beta chain variable domain of TCR clone 120400 (TRBV27, TRBJ2-1)
CASSNGGGSSNEQFF

SEQ ID NO: 240801 - protein, 16 aa, Homo sapiens
  CDR3 for alpha chain variable domain of TCR clone 120401 (TRAV3, TRAJ21)
CAVRDIERGNFNKFYF

SEQ ID NO: 240802 - protein, 15 aa, Homo sapiens
  CDR3 for beta chain variable domain of TCR clone 120401 (TRBV6-3, TRBJ2-7)
CASSSPGTVFYEQYF

SEQ ID NO: 240803 - protein, 19 aa, Homo sapiens
  CDR3 for alpha chain variable domain of TCR clone 120402 (TRAV1-2, TRAJ26)
CLLPLCCERPDNCGQNFVF

SEQ ID NO: 240804 - protein, 12 aa, Homo sapiens
  CDR3 for beta chain variable domain of TCR clone 120402 (TRBV7-9, TRBJ2-7)
CATRTDAYEQYF

SEQ ID NO: 240805 - protein, 15 aa, Homo sapiens
  CDR3 for alpha chain variable domain of TCR clone 120403 (TRAV26-1, TRAJ23)
CIVRVEGYQGGKLIF

SEQ ID NO: 240806 - protein, 18 aa, Homo sapiens
  CDR3 for beta chain variable domain of TCR clone 120403 (TRBV28, TRBJ2-1)
CASSSTSGRANSYNEQFF

SEQ ID NO: 240807 - protein, 14 aa, Homo sapiens
  CDR3 for alpha chain variable domain of TCR clone 120404 (TRAV26-1, TRAJ38)
CTADNAGNNRKLIW

SEQ ID NO: 240808 - protein, 13 aa, Homo sapiens
  CDR3 for beta chain variable domain of TCR clone 120404 (TRBV7-9, TRBJ1-2)
CASSLKQNYGYTF

SEQ ID NO: 240809 - protein, 15 aa, Homo sapiens
  CDR3 for alpha chain variable domain of TCR clone 120405 (TRAV8-4, TRAJ8)
CAVSDLNTGFKKLVF

SEQ ID NO: 240810 - protein, 14 aa, Homo sapiens
  CDR3 for beta chain variable domain of TCR clone 120405 (TRBV7-2, TRBJ2-3)
CASSQTGSSYTQYF

SEQ ID NO: 240811 - protein, 13 aa, Homo sapiens
  CDR3 for alpha chain variable domain of TCR clone 120406 (TRAV12-1, TRAJ16)
CVVNGPDGQKLLF

SEQ ID NO: 240812 - protein, 15 aa, Homo sapiens
  CDR3 for beta chain variable domain of TCR clone 120406 (TRBV6-3, TRBJ2-7)
CASSSPGTVFCEQYF

SEQ ID NO: 240813 - protein, 12 aa, Homo sapiens
  CDR3 for alpha chain variable domain of TCR clone 120407 (TRAV26-2, TRAJ21)
CILKGNFNKFYF

SEQ ID NO: 240814 - protein, 14 aa, Homo sapiens
  CDR3 for beta chain variable domain of TCR clone 120407 (TRBV12-4, TRBJ1-1)
CASSLGTGGTDAFF

SEQ ID NO: 240815 - protein, 12 aa, Homo sapiens
  CDR3 for alpha chain variable domain of TCR clone 120408 (TRAV2, TRAJ33)
CAFMDSNYQLIW

SEQ ID NO: 240816 - protein, 14 aa, Homo sapiens
  CDR3 for beta chain variable domain of TCR clone 120408 (TRBV7-2, TRBJ1-6)
CASSLQGANSPLHF

SEQ ID NO: 240817 - protein, 13 aa, Homo sapiens
  CDR3 for alpha chain variable domain of TCR clone 120409 (TRAV12-1, TRAJ6)
CVVFPGGSYIPTF

SEQ ID NO: 240818 - protein, 14 aa, Homo sapiens
  CDR3 for beta chain variable domain of TCR clone 120409 (TRBV20-1, TRBJ1-3)
CSASTTGAGNTIYF

SEQ ID NO: 240819 - protein, 14 aa, Homo sapiens
  CDR3 for alpha chain variable domain of TCR clone 120410 (TRAV26-1, TRAJ38)
CIADNAGNNRKLIW

SEQ ID NO: 240820 - protein, 11 aa, Homo sapiens
  CDR3 for beta chain variable domain of TCR clone 120410 (TRBV23-1, TRBJ2-7)
SSSGTGLEQYF

SEQ ID NO: 240821 - protein, 11 aa, Homo sapiens
  CDR3 for alpha chain variable domain of TCR clone 120411 (TRAV13-1, TRAJ6)
CATLGSYIPTF

SEQ ID NO: 240822 - protein, 13 aa, Homo sapiens
  CDR3 for beta chain variable domain of TCR clone 120411 (TRBV7-3, TRBJ1-2)
CASSLKRGYGYTF

SEQ ID NO: 240823 - protein, 11 aa, Homo sapiens
  CDR3 for alpha chain variable domain of TCR clone 120412 (TRAV2, TRAJ13)
CASGGYQKVTF

SEQ ID NO: 240824 - protein, 17 aa, Homo sapiens
  CDR3 for beta chain variable domain of TCR clone 120412 (TRBV14, TRBJ2-1)
CASSQDRRDSIYNEQFF

SEQ ID NO: 240825 - protein, 13 aa, Homo sapiens
  CDR3 for alpha chain variable domain of TCR clone 120413 (TRAV12-3, TRAJ7)
CAMSVSGNNRLAF

SEQ ID NO: 240826 - protein, 14 aa, Homo sapiens
  CDR3 for beta chain variable domain of TCR clone 120413 (TRBV13, TRBJ2-5)
CASSLGPRGETQYF

SEQ ID NO: 240827 - protein, 13 aa, Homo sapiens
  CDR3 for alpha chain variable domain of TCR clone 120414 (TRAV12-1, TRAJ33)
CGDAPDSNYQLIW

SEQ ID NO: 240828 - protein, 14 aa, Homo sapiens
  CDR3 for beta chain variable domain of TCR clone 120414 (TRBV7-2, TRBJ2-7)
CARRSQGAAYEQYF

SEQ ID NO: 240829 - protein, 13 aa, Homo sapiens
  CDR3 for alpha chain variable domain of TCR clone 120415 (TRAV1-1, TRAJ23)
CAVVANQGGKLIF

SEQ ID NO: 240830 - protein, 13 aa, Homo sapiens
  CDR3 for beta chain variable domain of TCR clone 120415 (TRBV12-4, TRBJ2-5)
CASRLAVQETQYF

SEQ ID NO: 240831 - protein, 19 aa, Homo sapiens
  CDR3 for alpha chain variable domain of TCR clone 120416 (TRAV16, )
CALGGDIQNPDPAVYQLRD

SEQ ID NO: 240832 - protein, 16 aa, Homo sapiens
  CDR3 for beta chain variable domain of TCR clone 120416 (TRBV12-5, TRBJ2-5)
CASGPRTSGNQETQYF

SEQ ID NO: 240833 - protein, 15 aa, Homo sapiens
  CDR3 for alpha chain variable domain of TCR clone 120417 (TRAV2, TRAJ9)
CAVEDRGTGGFKTIF

SEQ ID NO: 240834 - protein, 16 aa, Homo sapiens
  CDR3 for beta chain variable domain of TCR clone 120417 (TRBV7-9, TRBJ2-1)
CASSDVAGGSYNEQFF

SEQ ID NO: 240835 - protein, 15 aa, Homo sapiens
  CDR3 for alpha chain variable domain of TCR clone 120418 (TRAV17, TRAJ57)
CATGPSQGGSEKLVF

SEQ ID NO: 240836 - protein, 16 aa, Homo sapiens
  CDR3 for beta chain variable domain of TCR clone 120418 (TRBV12-4, TRBJ1-5)
RASGRPVGGSNQPQHF

SEQ ID NO: 240837 - protein, 16 aa, Homo sapiens
  CDR3 for alpha chain variable domain of TCR clone 120419 (TRAV30, TRAJ24)
CGTEIVDADSWGKFQF

SEQ ID NO: 240838 - protein, 13 aa, Homo sapiens
  CDR3 for beta chain variable domain of TCR clone 120419 (TRBV12-4, TRBJ2-5)
CASRLAVQETQYF

SEQ ID NO: 240839 - protein, 12 aa, Homo sapiens
  CDR3 for alpha chain variable domain of TCR clone 120420 (TRAV13-1, TRAJ49)
CAASPMGNQFYF

SEQ ID NO: 240840 - protein, 17 aa, Homo sapiens
  CDR3 for beta chain variable domain of TCR clone 120420 (TRBV7-8, TRBJ2-6)
CASSAGTGGAGANVLTF

SEQ ID NO: 240841 - protein, 14 aa, Homo sapiens
  CDR3 for alpha chain variable domain of TCR clone 120421 (TRAV27, TRAJ13)
CRSSNSGGYQKVTF

SEQ ID NO: 240842 - protein, 13 aa, Homo sapiens
  CDR3 for beta chain variable domain of TCR clone 120421 (TRBV7-6, TRBJ2-1)
CPQLGGGADEQFF

SEQ ID NO: 240843 - protein, 12 aa, Homo sapiens
  CDR3 for alpha chain variable domain of TCR clone 120422 (TRAV13-1, TRAJ21)
FAAKEGFNRFYF

SEQ ID NO: 240844 - protein, 15 aa, Homo sapiens
  CDR3 for beta chain variable domain of TCR clone 120422 (TRBV25-1, TRBJ1-4)
CASSPGDSTNEKLFF

SEQ ID NO: 240845 - protein, 16 aa, Homo sapiens
  CDR3 for alpha chain variable domain of TCR clone 120423 (TRAV3, TRAJ10)
CAVRDMRAGGGNRLTF

SEQ ID NO: 240846 - protein, 15 aa, Homo sapiens
  CDR3 for beta chain variable domain of TCR clone 120423 (TRBV20-1, TRBJ2-7)
CSARVPAAYSYEQYF

SEQ ID NO: 240847 - protein, 14 aa, Homo sapiens
  CDR3 for alpha chain variable domain of TCR clone 120424 (TRAV1-2, TRAJ8)
CAVGEDTGFQKLVF

SEQ ID NO: 240848 - protein, 13 aa, Homo sapiens
  CDR3 for beta chain variable domain of TCR clone 120424 (TRBV12-4, TRBJ1-2)
CASSSGLTVISTF

SEQ ID NO: 240849 - protein, 12 aa, Homo sapiens
  CDR3 for alpha chain variable domain of TCR clone 120425 (TRAV1-1, TRAJ39)
CAVPVVGNMLTF

SEQ ID NO: 240850 - protein, 12 aa, Homo sapiens
  CDR3 for beta chain variable domain of TCR clone 120425 (TRBV2, TRBJ1-2)
CASSGQTYGHTF

SEQ ID NO: 240851 - protein, 14 aa, Homo sapiens
  CDR3 for alpha chain variable domain of TCR clone 120426 (TRAV12-2, TRAJ40)
CAVKIPSGTYKYIF

SEQ ID NO: 240852 - protein, 12 aa, Homo sapiens
  CDR3 for beta chain variable domain of TCR clone 120426 (TRBV24-1, TRBJ2-7)
CATSDPGYEQYF

SEQ ID NO: 240853 - protein, 15 aa, Homo sapiens
  CDR3 for alpha chain variable domain of TCR clone 120427 (TRAV12-1, TRAJ44)
CVVFVSTGTASKLTF

SEQ ID NO: 240854 - protein, 17 aa, Homo sapiens
  CDR3 for beta chain variable domain of TCR clone 120427 (TRBV7-8, TRBJ2-6)
CASSAGTGGAGANVLTF

SEQ ID NO: 240855 - protein, 10 aa, Homo sapiens
  CDR3 for alpha chain variable domain of TCR clone 120428 (TRAV26-1, TRAJ22)
CIAGSRQLTF

SEQ ID NO: 240856 - protein, 17 aa, Homo sapiens
  CDR3 for beta chain variable domain of TCR clone 120428 (TRBV5-4, TRBJ1-1)
CASFPTKGRLQNTEAFF

SEQ ID NO: 240857 - protein, 12 aa, Homo sapiens
  CDR3 for alpha chain variable domain of TCR clone 120429 (TRAV9-2, TRAJ36)
CALKKGANNLFF

SEQ ID NO: 240858 - protein, 14 aa, Homo sapiens
  CDR3 for beta chain variable domain of TCR clone 120429 (TRBV12-4, TRBJ2-5)
CASSLPAGVGTQYF

SEQ ID NO: 240859 - protein, 15 aa, Homo sapiens
  CDR3 for alpha chain variable domain of TCR clone 120430 (TRAV25, TRAJ53)
CPTSNSGGSNYKLTF

SEQ ID NO: 240860 - protein, 14 aa, Homo sapiens
  CDR3 for beta chain variable domain of TCR clone 120430 (TRBV11-2, TRBJ2-3)
CASSRLARTDTQYC

SEQ ID NO: 240861 - protein, 18 aa, Homo sapiens
  CDR3 for alpha chain variable domain of TCR clone 120431 (TRAV21, TRAJ52)
CAVRPSPAGGTSYGKLAF

SEQ ID NO: 240862 - protein, 14 aa, Homo sapiens
  CDR3 for beta chain variable domain of TCR clone 120431 (TRBV7-2, TRBJ1-4)
CASSHSKTNEKLFF

SEQ ID NO: 240863 - protein, 14 aa, Homo sapiens
  CDR3 for alpha chain variable domain of TCR clone 120432 (TRAV1-1, TRAJ27)
CAVIYNTNAGKSTF

SEQ ID NO: 240864 - protein, 13 aa, Homo sapiens
  CDR3 for beta chain variable domain of TCR clone 120432 (TRBV11-2, TRBJ2-7)
CASSSYPSYEQYF

SEQ ID NO: 240865 - protein, 17 aa, Homo sapiens
  CDR3 for alpha chain variable domain of TCR clone 120433 (TRAV13-1, TRAJ52)
CAASSGAGGTSYGKLTF

SEQ ID NO: 240866 - protein, 17 aa, Homo sapiens
  CDR3 for beta chain variable domain of TCR clone 120433 (TRBV11-3, TRBJ2-1)
CASSLYPPGVEYNEQFF

SEQ ID NO: 240867 - protein, 14 aa, Homo sapiens
  CDR3 for alpha chain variable domain of TCR clone 120434 (TRAV1-2, TRAJ16)
CAVNRFSDCQKLLF

SEQ ID NO: 240868 - protein, 14 aa, Homo sapiens
  CDR3 for beta chain variable domain of TCR clone 120434 (TRBV12-4, TRBJ1-1)
CASSLGTGGTEAFF

SEQ ID NO: 240869 - protein, 14 aa, Homo sapiens
  CDR3 for alpha chain variable domain of TCR clone 120435 (TRAV1-2, TRAJ16)
CAVNRFSDGQKLLF

SEQ ID NO: 240870 - protein, 12 aa, Homo sapiens
  CDR3 for beta chain variable domain of TCR clone 120435 (TRBV7-6, TRBJ2-7)
CASSVADSEQYF

SEQ ID NO: 240871 - protein, 12 aa, Homo sapiens
  CDR3 for alpha chain variable domain of TCR clone 120436 (TRAV13-1, TRAJ5)
CAAKAGRRALTF

SEQ ID NO: 240872 - protein, 13 aa, Homo sapiens
  CDR3 for beta chain variable domain of TCR clone 120436 (TRBV7-7, TRBJ2-3)
CASSLSRADTQYF

SEQ ID NO: 240873 - protein, 14 aa, Homo sapiens
  CDR3 for alpha chain variable domain of TCR clone 120437 (TRAV12-3, TRAJ54)
CAMRGIQGAQKLVF

SEQ ID NO: 240874 - protein, 13 aa, Homo sapiens
  CDR3 for beta chain variable domain of TCR clone 120437 (TRBV19, TRBJ1-1)
CASSPSDGGEAFF

SEQ ID NO: 240875 - protein, 15 aa, Homo sapiens
  CDR3 for alpha chain variable domain of TCR clone 120438 (TRAV12-1, TRAJ44)
CVVFVNTGTASKLTF

SEQ ID NO: 240876 - protein, 13 aa, Homo sapiens
  CDR3 for beta chain variable domain of TCR clone 120438 (TRBV4-2, TRBJ1-1)
CASSQAGNTEAFF

SEQ ID NO: 240877 - protein, 13 aa, Homo sapiens
  CDR3 for alpha chain variable domain of TCR clone 120439 (TRAV21, TRAJ27)
SAALPGNAGKSTF

SEQ ID NO: 240878 - protein, 14 aa, Homo sapiens
  CDR3 for beta chain variable domain of TCR clone 120439 (TRBV7-6, TRBJ2-3)
CASSLGTVTDTQYF

SEQ ID NO: 240879 - protein, 12 aa, Homo sapiens
  CDR3 for alpha chain variable domain of TCR clone 120440 (TRAV16, TRAJ10)
CSRTGGGNKLTF

SEQ ID NO: 240880 - protein, 12 aa, Homo sapiens
  CDR3 for beta chain variable domain of TCR clone 120440 (TRBV2, TRBJ1-1)
YCRWTVNTKAFF

SEQ ID NO: 240881 - protein, 15 aa, Homo sapiens
  CDR3 for alpha chain variable domain of TCR clone 120441 (TRAV3, TRAJ22)
CAVRDRGGFARQLTF

SEQ ID NO: 240882 - protein, 15 aa, Homo sapiens
  CDR3 for beta chain variable domain of TCR clone 120441 (TRBV27, TRBJ2-1)
CASSNGGGSSNEQFF

SEQ ID NO: 240883 - protein, 15 aa, Homo sapiens
  CDR3 for alpha chain variable domain of TCR clone 120442 (TRAV3, TRAJ22)
CAVRDRGGSARQLTF

SEQ ID NO: 240884 - protein, 12 aa, Homo sapiens
  CDR3 for beta chain variable domain of TCR clone 120442 (TRBV5-4, TRBJ2-7)
CASSLEAYEQYF

SEQ ID NO: 240885 - protein, 14 aa, Homo sapiens
  CDR3 for alpha chain variable domain of TCR clone 120443 (TRAV1-2, TRAJ33)
CAVRAPDSNYQLIW

SEQ ID NO: 240886 - protein, 15 aa, Homo sapiens
  CDR3 for beta chain variable domain of TCR clone 120443 (TRBV10-3, TRBJ2-3)
CAISLTSGGIDTQYF

SEQ ID NO: 240887 - protein, 14 aa, Homo sapiens
  CDR3 for alpha chain variable domain of TCR clone 120444 (TRAV17, TRAJ54)
CAADANQGAQKLVF

SEQ ID NO: 240888 - protein, 12 aa, Homo sapiens
  CDR3 for beta chain variable domain of TCR clone 120444 (TRBV7-9, TRBJ2-7)
CASSIKREEQYF

SEQ ID NO: 240889 - protein, 14 aa, Homo sapiens
  CDR3 for alpha chain variable domain of TCR clone 120445 (TRAV8-3, TRAJ9)
CAVVYNTGAFKTIF

SEQ ID NO: 240890 - protein, 14 aa, Homo sapiens
  CDR3 for beta chain variable domain of TCR clone 120445 (TRBV7-3, TRBJ2-2)
CASSSGGYTGELFF

SEQ ID NO: 240891 - protein, 13 aa, Homo sapiens
  CDR3 for alpha chain variable domain of TCR clone 120446 (TRAV8-3, TRAJ36)
CAVGATGANNLFF

SEQ ID NO: 240892 - protein, 14 aa, Homo sapiens
  CDR3 for beta chain variable domain of TCR clone 120446 (TRBV7-2, TRBJ2-3)
CASSLARGTDTQYF

SEQ ID NO: 240893 - protein, 13 aa, Homo sapiens
  CDR3 for alpha chain variable domain of TCR clone 120447 (TRAV12-2, TRAJ42)
CAVKRGSQGNLIF

SEQ ID NO: 240894 - protein, 14 aa, Homo sapiens
  CDR3 for beta chain variable domain of TCR clone 120447 (TRBV18, TRBJ2-7)
CASSPRGGAYEQYF

SEQ ID NO: 240895 - protein, 13 aa, Homo sapiens
  CDR3 for alpha chain variable domain of TCR clone 120448 (TRAV13-2, TRAJ48)
CAEMDFGNEKLTF

SEQ ID NO: 240896 - protein, 13 aa, Homo sapiens
  CDR3 for beta chain variable domain of TCR clone 120448 (TRBV12-4, TRBJ2-2)
CASSITGSGELFF

SEQ ID NO: 240897 - protein, 15 aa, Homo sapiens
  CDR3 for alpha chain variable domain of TCR clone 120449 (TRAV20, TRAJ50)
CAVRQMKTSYDKVIF

SEQ ID NO: 240898 - protein, 16 aa, Homo sapiens
  CDR3 for beta chain variable domain of TCR clone 120449 (TRBV15, TRBJ1-2)
CATSRGPRTGGDGYTF

SEQ ID NO: 240899 - protein, 13 aa, Homo sapiens
  CDR3 for alpha chain variable domain of TCR clone 120450 (TRAV16, TRAJ54)
CALKVRGAQKLVF

SEQ ID NO: 240900 - protein, 13 aa, Homo sapiens
  CDR3 for beta chain variable domain of TCR clone 120450 (TRBV20-1, TRBJ1-1)
CSAMGGGNTEAFF

SEQ ID NO: 240901 - protein, 14 aa, Homo sapiens
  CDR3 for alpha chain variable domain of TCR clone 120451 (TRAV21, TRAJ52)
CGRAGGTSYGKLTF

SEQ ID NO: 240902 - protein, 14 aa, Homo sapiens
  CDR3 for beta chain variable domain of TCR clone 120451 (TRBV19, TRBJ1-2)
CASSVLGYNYDYTF

SEQ ID NO: 240903 - protein, 15 aa, Homo sapiens
  CDR3 for alpha chain variable domain of TCR clone 120452 (TRAV3, TRAJ5)
CAVRDRKTGRRTLTF

SEQ ID NO: 240904 - protein, 15 aa, Homo sapiens
  CDR3 for beta chain variable domain of TCR clone 120452 (TRBV7-9, TRBJ2-2)
CASGPLDTFPGELFF

SEQ ID NO: 240905 - protein, 18 aa, Homo sapiens
  CDR3 for alpha chain variable domain of TCR clone 120453 (TRAV8-4, TRAJ52)
CAVTRANAGGTSYGKLTF

SEQ ID NO: 240906 - protein, 12 aa, Homo sapiens
  CDR3 for beta chain variable domain of TCR clone 120453 (TRBV29-1, TRBJ2-3)
CSVTGGADTQYF

SEQ ID NO: 240907 - protein, 13 aa, Homo sapiens
  CDR3 for alpha chain variable domain of TCR clone 120454 (TRAV30, TRAJ34)
CGTVGYNTDKLIF

SEQ ID NO: 240908 - protein, 16 aa, Homo sapiens
  CDR3 for beta chain variable domain of TCR clone 120454 (TRBV7-9, TRBJ1-2)
CASSLGFSSGEGGYTF

SEQ ID NO: 240909 - protein, 13 aa, Homo sapiens
  CDR3 for alpha chain variable domain of TCR clone 120455 (TRAV17, TRAJ9)
CAADYTGGFKTIF

SEQ ID NO: 240910 - protein, 16 aa, Homo sapiens
  CDR3 for beta chain variable domain of TCR clone 120455 (TRBV7-7, TRBJ2-1)
CASSLASGTSYNEQFF

SEQ ID NO: 240911 - protein, 12 aa, Homo sapiens
  CDR3 for alpha chain variable domain of TCR clone 120456 (TRAV8-3, TRAJ26)
CAGDNYGQNFFF

SEQ ID NO: 240912 - protein, 15 aa, Homo sapiens
  CDR3 for beta chain variable domain of TCR clone 120456 (TRBV20-1, TRBJ2-3)
CSARRGEAITDTQYF

SEQ ID NO: 240913 - protein, 14 aa, Homo sapiens
  CDR3 for alpha chain variable domain of TCR clone 120457 (TRAV12-1, TRAJ34)
CVVNLDYNTDKLIF

SEQ ID NO: 240914 - protein, 13 aa, Homo sapiens
  CDR3 for beta chain variable domain of TCR clone 120457 (TRBV29-1, TRBJ2-1)
CSVEGGRANEQFF

SEQ ID NO: 240915 - protein, 15 aa, Homo sapiens
  CDR3 for alpha chain variable domain of TCR clone 120458 (TRAV13-1, TRAJ44)
CAASRGGGTASKLTF

SEQ ID NO: 240916 - protein, 16 aa, Homo sapiens
  CDR3 for beta chain variable domain of TCR clone 120458 (TRBV28, TRBJ2-7)
CASSLFFETGGPEQYF

SEQ ID NO: 240917 - protein, 16 aa, Homo sapiens
  CDR3 for alpha chain variable domain of TCR clone 120459 (TRAV8-3, TRAJ8)
CAVPRDGNTGFQKLAF

SEQ ID NO: 240918 - protein, 14 aa, Homo sapiens
  CDR3 for beta chain variable domain of TCR clone 120459 (TRBV28, TRBJ1-1)
CASSESGRGTEAFF

SEQ ID NO: 240919 - protein, 12 aa, Homo sapiens
  CDR3 for alpha chain variable domain of TCR clone 120460 (TRAV16, TRAJ21)
CALLGNFNKFYF

SEQ ID NO: 240920 - protein, 15 aa, Homo sapiens
  CDR3 for beta chain variable domain of TCR clone 120460 (TRBV3-1, TRBJ2-2)
CASSQAVKETGELFF

SEQ ID NO: 240921 - protein, 13 aa, Homo sapiens
  CDR3 for alpha chain variable domain of TCR clone 120461 (TRAV24, TRAJ23)
CASHWNQGGKLIF

SEQ ID NO: 240922 - protein, 16 aa, Homo sapiens
  CDR3 for beta chain variable domain of TCR clone 120461 (TRBV2, TRBJ2-1)
CASSVGGSLSYNEQFF

SEQ ID NO: 240923 - protein, 15 aa, Homo sapiens
  CDR3 for alpha chain variable domain of TCR clone 120462 (TRAV12-3, TRAJ27)
CAMRAYNTNAGKSTF

SEQ ID NO: 240924 - protein, 13 aa, Homo sapiens
  CDR3 for beta chain variable domain of TCR clone 120462 (TRBV11-2, TRBJ2-5)
CATSRGPSETQYF

SEQ ID NO: 240925 - protein, 14 aa, Homo sapiens
  CDR3 for alpha chain variable domain of TCR clone 120463 (TRAV21, TRAJ15)
CAVSLNQAGIALIF

SEQ ID NO: 240926 - protein, 11 aa, Homo sapiens
  CDR3 for beta chain variable domain of TCR clone 120463 (TRBV20-1, TRBJ2-7)
CSARTSYEQYF

SEQ ID NO: 240927 - protein, 14 aa, Homo sapiens
  CDR3 for alpha chain variable domain of TCR clone 120464 (TRAV12-3, TRAJ35)
CAMSLIGFGNVLHC

SEQ ID NO: 240928 - protein, 13 aa, Homo sapiens
  CDR3 for beta chain variable domain of TCR clone 120464 (TRBV20-1, TRBJ2-7)
CSATHTSGYEQYF

SEQ ID NO: 240929 - protein, 12 aa, Homo sapiens
  CDR3 for alpha chain variable domain of TCR clone 120465 (TRAV13-1, TRAJ21)
CAAKEGFNKFYF

SEQ ID NO: 240930 - protein, 14 aa, Homo sapiens
  CDR3 for beta chain variable domain of TCR clone 120465 (TRBV5-4, TRBJ1-1)
CASSLDSRRDEACF

SEQ ID NO: 240931 - protein, 14 aa, Homo sapiens
  CDR3 for alpha chain variable domain of TCR clone 120466 (TRAV27, TRAJ23)
CAGLSYNQGGKLIF

SEQ ID NO: 240932 - protein, 15 aa, Homo sapiens
  CDR3 for beta chain variable domain of TCR clone 120466 (TRBV20-1, TRBJ2-7)
CSARDRVSGMDEQYF

SEQ ID NO: 240933 - protein, 14 aa, Homo sapiens
  CDR3 for alpha chain variable domain of TCR clone 120467 (TRAV14/DV4, TRAJ15)
CAMRRDQAGTALIF

SEQ ID NO: 240934 - protein, 14 aa, Homo sapiens
  CDR3 for beta chain variable domain of TCR clone 120467 (TRBV7-2, TRBJ2-3)
CASSQTGSSYTQYF

SEQ ID NO: 240935 - protein, 15 aa, Homo sapiens
  CDR3 for alpha chain variable domain of TCR clone 120468 (TRAV17, TRAJ37)
FATDGGSSNTGKLIF

SEQ ID NO: 240936 - protein, 15 aa, Homo sapiens
  CDR3 for beta chain variable domain of TCR clone 120468 (TRBV28, TRBJ2-5)
CASSSGRTIQETQYF

SEQ ID NO: 240937 - protein, 18 aa, Homo sapiens
  CDR3 for alpha chain variable domain of TCR clone 120469 (TRAV35, TRAJ28)
CAGHNYPLSGAGSYQLTF

SEQ ID NO: 240938 - protein, 12 aa, Homo sapiens
  CDR3 for beta chain variable domain of TCR clone 120469 (TRBV7-9, TRBJ1-1)
CASSLEGTEAVF

SEQ ID NO: 240939 - protein, 13 aa, Homo sapiens
  CDR3 for alpha chain variable domain of TCR clone 120470 (TRAV8-3, TRAJ48)
CAVVPFGNEKLTF

SEQ ID NO: 240940 - protein, 13 aa, Homo sapiens
  CDR3 for beta chain variable domain of TCR clone 120470 (TRBV7-3, TRBJ1-1)
CASSQDWGAEAFF

SEQ ID NO: 240941 - protein, 15 aa, Homo sapiens
  CDR3 for alpha chain variable domain of TCR clone 120471 (TRAV10, TRAJ39)
CVVSASGNAGNMLTF

SEQ ID NO: 240942 - protein, 14 aa, Homo sapiens
  CDR3 for beta chain variable domain of TCR clone 120471 (TRBV6-6, TRBJ1-5)
CASSYGPANQPQHF

SEQ ID NO: 240943 - protein, 13 aa, Homo sapiens
  CDR3 for alpha chain variable domain of TCR clone 120472 (TRAV13-2, TRAJ13)
CAEGPGGYQKVTF

SEQ ID NO: 240944 - protein, 14 aa, Homo sapiens
  CDR3 for beta chain variable domain of TCR clone 120472 (TRBV23-1, TRBJ2-5)
CASSFLRSQETQYF

SEQ ID NO: 240945 - protein, 15 aa, Homo sapiens
  CDR3 for alpha chain variable domain of TCR clone 120473 (TRAV8-3, TRAJ27)
CAVGPSKTNAVKSTF

SEQ ID NO: 240946 - protein, 12 aa, Homo sapiens
  CDR3 for beta chain variable domain of TCR clone 120473 (TRBV11-2, TRBJ2-2)
CASSLGGGELFF

SEQ ID NO: 240947 - protein, 12 aa, Homo sapiens
  CDR3 for alpha chain variable domain of TCR clone 120474 (TRAV12-3, TRAJ17)
CAMTLTGNKLTF

SEQ ID NO: 240948 - protein, 15 aa, Homo sapiens
  CDR3 for beta chain variable domain of TCR clone 120474 (TRBV20-1, TRBJ2-7)
CSARDRVGGMDEQYF

SEQ ID NO: 240949 - protein, 13 aa, Homo sapiens
  CDR3 for alpha chain variable domain of TCR clone 120475 (TRAV12-1, TRAJ16)
CVVNGPDGQKLLF

SEQ ID NO: 240950 - protein, 16 aa, Homo sapiens
  CDR3 for beta chain variable domain of TCR clone 120475 (TRBV12-4, TRBJ1-5)
CASSRPVGGSNQPQHF

SEQ ID NO: 240951 - protein, 14 aa, Homo sapiens
  CDR3 for alpha chain variable domain of TCR clone 120476 (TRAV1-2, TRAJ6)
CAVSLSGGSYIPTF

SEQ ID NO: 240952 - protein, 15 aa, Homo sapiens
  CDR3 for beta chain variable domain of TCR clone 120476 (TRBV28, TRBJ2-7)
CASSPGGRGFYEQFF

SEQ ID NO: 240953 - protein, 15 aa, Homo sapiens
  CDR3 for alpha chain variable domain of TCR clone 120477 (TRAV23/DV6, TRAJ30)
CAASSQESRDDKIIF

SEQ ID NO: 240954 - protein, 15 aa, Homo sapiens
  CDR3 for beta chain variable domain of TCR clone 120477 (TRBV7-8, TRBJ2-3)
CASSPRTGSTDTQYF

SEQ ID NO: 240955 - protein, 16 aa, Homo sapiens
  CDR3 for alpha chain variable domain of TCR clone 120478 (TRAV1-2, TRAJ10)
CAVRGVLTGGGDKLTF

SEQ ID NO: 240956 - protein, 14 aa, Homo sapiens
  CDR3 for beta chain variable domain of TCR clone 120478 (TRBV25-1, TRBJ1-1)
CASTHLGGNTEAFF

SEQ ID NO: 240957 - protein, 14 aa, Homo sapiens
  CDR3 for alpha chain variable domain of TCR clone 120479 (TRAV17, TRAJ57)
CATDPQGGAEKLVF

SEQ ID NO: 240958 - protein, 13 aa, Homo sapiens
  CDR3 for beta chain variable domain of TCR clone 120479 (TRBV19, TRBJ2-7)
CASSPRQSYEQYF

SEQ ID NO: 240959 - protein, 15 aa, Homo sapiens
  CDR3 for alpha chain variable domain of TCR clone 120480 (TRAV8-3, TRAJ11)
CAVGLLNSGYSTLTF

SEQ ID NO: 240960 - protein, 16 aa, Homo sapiens
  CDR3 for beta chain variable domain of TCR clone 120480 (TRBV7-9, TRBJ1-2)
CASSLGFSAGEDGDTF

SEQ ID NO: 240961 - protein, 12 aa, Homo sapiens
  CDR3 for alpha chain variable domain of TCR clone 120481 (TRAV21, TRAJ37)
CAVRGNTGKLIF

SEQ ID NO: 240962 - protein, 15 aa, Homo sapiens
  CDR3 for beta chain variable domain of TCR clone 120481 (TRBV19, TRBJ2-4)
CASRGPRRGENIQYF

SEQ ID NO: 240963 - protein, 16 aa, Homo sapiens
  CDR3 for alpha chain variable domain of TCR clone 120482 (TRAV30, TRAJ24)
CGTEIVDADSWGKFQF

SEQ ID NO: 240964 - protein, 15 aa, Homo sapiens
  CDR3 for beta chain variable domain of TCR clone 120482 (TRBV7-3, TRBJ2-2)
CASSLEVLPTGELFF

SEQ ID NO: 240965 - protein, 15 aa, Homo sapiens
  CDR3 for alpha chain variable domain of TCR clone 120483 (TRAV21, TRAJ24)
CAARSSTDSWRKLQF

SEQ ID NO: 240966 - protein, 13 aa, Homo sapiens
  CDR3 for beta chain variable domain of TCR clone 120483 (TRBV11-2, TRBJ2-5)
CASSSTGEETQYF

SEQ ID NO: 240967 - protein, 17 aa, Homo sapiens
  CDR3 for alpha chain variable domain of TCR clone 120484 (TRAV26-1, TRAJ37)
CIVRVITGSSNTGKLIF

SEQ ID NO: 240968 - protein, 11 aa, Homo sapiens
  CDR3 for beta chain variable domain of TCR clone 120484 (TRBV29-1, TRBJ2-5)
CSEDRTGTQYF

SEQ ID NO: 240969 - protein, 16 aa, Homo sapiens
  CDR3 for alpha chain variable domain of TCR clone 120485 (TRAV27, TRAJ48)
TAAQPGDTGLYLPLTF

SEQ ID NO: 240970 - protein, 14 aa, Homo sapiens
  CDR3 for beta chain variable domain of TCR clone 120485 (TRBV19, TRBJ2-1)
CASTTFVLSGEQFF

SEQ ID NO: 240971 - protein, 11 aa, Homo sapiens
  CDR3 for alpha chain variable domain of TCR clone 120486 (TRAV8-1, TRAJ15)
CAVGPGTALIF

SEQ ID NO: 240972 - protein, 18 aa, Homo sapiens
  CDR3 for beta chain variable domain of TCR clone 120486 (TRBV18, TRBJ2-3)
CASSYTSGAAGGTVTQYF

SEQ ID NO: 240973 - protein, 12 aa, Homo sapiens
  CDR3 for alpha chain variable domain of TCR clone 120487 (TRAV12-1, TRAJ34)
CVVAGATDRLIF

SEQ ID NO: 240974 - protein, 12 aa, Homo sapiens
  CDR3 for beta chain variable domain of TCR clone 120487 (TRBV7-9, TRBJ1-1)
CASSLVRGEAFF

SEQ ID NO: 240975 - protein, 14 aa, Homo sapiens
  CDR3 for alpha chain variable domain of TCR clone 120488 (TRAV29/DV5, TRAJ32)
CAAAYGGATNKLIF

SEQ ID NO: 240976 - protein, 11 aa, Homo sapiens
  CDR3 for beta chain variable domain of TCR clone 120488 (TRBV11-2, TRBJ2-2)
CASSLPGELVF

SEQ ID NO: 240977 - protein, 16 aa, Homo sapiens
  CDR3 for alpha chain variable domain of TCR clone 120489 (TRAV20, TRAJ10)
CAVLRGLTGGGNKLTF

SEQ ID NO: 240978 - protein, 13 aa, Homo sapiens
  CDR3 for beta chain variable domain of TCR clone 120489 (TRBV20-1, TRBJ2-2)
CSALSGGAGELFF

SEQ ID NO: 240979 - protein, 15 aa, Homo sapiens
  CDR3 for alpha chain variable domain of TCR clone 120490 (TRAV3, TRAJ3)
CCERPRYSRASKIIF

SEQ ID NO: 240980 - protein, 16 aa, Homo sapiens
  CDR3 for beta chain variable domain of TCR clone 120490 (TRBV19, TRBJ1-5)
CASSIDRGGPRQPQHF

SEQ ID NO: 240981 - protein, 20 aa, Homo sapiens
  CDR3 for alpha chain variable domain of TCR clone 120491 (TRAV8-3, TRAJ4)
CAVGARPDFKRSWWLQSADF

SEQ ID NO: 240982 - protein, 13 aa, Homo sapiens
  CDR3 for beta chain variable domain of TCR clone 120491 (TRBV20-1, TRBJ1-2)
CSATGIQGSGYTF

SEQ ID NO: 240983 - protein, 14 aa, Homo sapiens
  CDR3 for alpha chain variable domain of TCR clone 120492 (TRAV27, TRAJ22)
CAGLPSGSARQLTF

SEQ ID NO: 240984 - protein, 19 aa, Homo sapiens
  CDR3 for beta chain variable domain of TCR clone 120492 (TRBV7-2, TRBJ2-5)
CASGTSGGTPPLGSETQYF

SEQ ID NO: 240985 - protein, 12 aa, Homo sapiens
  CDR3 for alpha chain variable domain of TCR clone 120493 (TRAV17, TRAJ4)
CATDGGYNKLIF

SEQ ID NO: 240986 - protein, 14 aa, Homo sapiens
  CDR3 for beta chain variable domain of TCR clone 120493 (TRBV29-1, TRBJ2-2)
SAAQQGSTPGSCFF

SEQ ID NO: 240987 - protein, 15 aa, Homo sapiens
  CDR3 for alpha chain variable domain of TCR clone 120494 (TRAV29/DV5, TRAJ29)
CAASERSSGDTPLVF

SEQ ID NO: 240988 - protein, 17 aa, Homo sapiens
  CDR3 for beta chain variable domain of TCR clone 120494 (TRBV4-1, TRBJ1-4)
CASSQEGPRGVEEKLFF

SEQ ID NO: 240989 - protein, 15 aa, Homo sapiens
  CDR3 for alpha chain variable domain of TCR clone 120495 (TRAV3, TRAJ17)
CAVRDTGAAGNKLTF

SEQ ID NO: 240990 - protein, 14 aa, Homo sapiens
  CDR3 for beta chain variable domain of TCR clone 120495 (TRBV6-3, TRBJ1-1)
CASSNLRPGAEAFF

SEQ ID NO: 240991 - protein, 11 aa, Homo sapiens
  CDR3 for alpha chain variable domain of TCR clone 120496 (TRAV3, TRAJ21)
CAVGNFNRFYF

SEQ ID NO: 240992 - protein, 15 aa, Homo sapiens
  CDR3 for beta chain variable domain of TCR clone 120496 (TRBV7-9, TRBJ1-2)
CASSLDREPNYGYTF

SEQ ID NO: 240993 - protein, 13 aa, Homo sapiens
  CDR3 for alpha chain variable domain of TCR clone 120497 (TRAV13-1, TRAJ43)
CAASKSNNNDMRF

SEQ ID NO: 240994 - protein, 14 aa, Homo sapiens
  CDR3 for beta chain variable domain of TCR clone 120497 (TRBV14, TRBJ2-1)
CASSQVQGRGEQFF

SEQ ID NO: 240995 - protein, 17 aa, Homo sapiens
  CDR3 for alpha chain variable domain of TCR clone 120498 (TRAV3, TRAJ12)
CAVRDGGRMESSYKLIF

SEQ ID NO: 240996 - protein, 13 aa, Homo sapiens
  CDR3 for beta chain variable domain of TCR clone 120498 (TRBV15, TRBJ1-6)
CATSGGLNSPLHF

SEQ ID NO: 240997 - protein, 15 aa, Homo sapiens
  CDR3 for alpha chain variable domain of TCR clone 120499 (TRAV12-1, TRAJ49)
CVVNVLSNTGNQFYF

SEQ ID NO: 240998 - protein, 16 aa, Homo sapiens
  CDR3 for beta chain variable domain of TCR clone 120499 (TRBV20-1, TRBJ1-2)
CSASMGQGVANYGYTF

SEQ ID NO: 240999 - protein, 16 aa, Homo sapiens
  CDR3 for alpha chain variable domain of TCR clone 120500 (TRAV12-1, TRAJ45)
CVVIRYPGGGADGLTF

SEQ ID NO: 241000 - protein, 12 aa, Homo sapiens
  CDR3 for beta chain variable domain of TCR clone 120500 (TRBV6-5, TRBJ2-2)
CASRQITGELFF

SEQ ID NO: 241001 - protein, 13 aa, Homo sapiens
  CDR3 for alpha chain variable domain of TCR clone 120501 (TRAV12-1, TRAJ47)
CVVNMEYGNKLVF

SEQ ID NO: 241002 - protein, 15 aa, Homo sapiens
  CDR3 for beta chain variable domain of TCR clone 120501 (TRBV27, TRBJ2-1)
CASSNGGGSSNEQFF

SEQ ID NO: 241003 - protein, 15 aa, Homo sapiens
  CDR3 for alpha chain variable domain of TCR clone 120502 (TRAV26-1, TRAJ29)
CIVRVEGSGNTPLVF

SEQ ID NO: 241004 - protein, 14 aa, Homo sapiens
  CDR3 for beta chain variable domain of TCR clone 120502 (TRBV12-4, TRBJ1-2)
CASSPPGPGGGYTF

SEQ ID NO: 241005 - protein, 12 aa, Homo sapiens
  CDR3 for alpha chain variable domain of TCR clone 120503 (TRAV12-3, TRAJ17)
CAMTLTGNKLTF

SEQ ID NO: 241006 - protein, 15 aa, Homo sapiens
  CDR3 for beta chain variable domain of TCR clone 120503 (TRBV11-2, TRBJ1-6)
CASTLRGTGNSPLHF

SEQ ID NO: 241007 - protein, 11 aa, Homo sapiens
  CDR3 for alpha chain variable domain of TCR clone 120504 (TRAV21, TRAJ11)
CAVNGYSTLTF

SEQ ID NO: 241008 - protein, 11 aa, Homo sapiens
  CDR3 for beta chain variable domain of TCR clone 120504 (TRBV19, TRBJ1-1)
CASSIGSEAFI

SEQ ID NO: 241009 - protein, 15 aa, Homo sapiens
  CDR3 for alpha chain variable domain of TCR clone 120505 (TRAV23/DV6, TRAJ13)
CAAWPGGGGYQKVTL

SEQ ID NO: 241010 - protein, 14 aa, Homo sapiens
  CDR3 for beta chain variable domain of TCR clone 120505 (TRBV6-1, TRBJ2-1)
CASAGGAIKNEQFF

SEQ ID NO: 241011 - protein, 10 aa, Homo sapiens
  CDR3 for alpha chain variable domain of TCR clone 120506 (TRAV30, TRAJ16)
CGTGGQKLLF

SEQ ID NO: 241012 - protein, 14 aa, Homo sapiens
  CDR3 for beta chain variable domain of TCR clone 120506 (TRBV12-5, TRBJ2-5)
CASGSRTHQETQYF

SEQ ID NO: 241013 - protein, 18 aa, Homo sapiens
  CDR3 for alpha chain variable domain of TCR clone 120507 (TRAV13-1, TRAJ52)
CAASKRSAGGTSYGKLTF

SEQ ID NO: 241014 - protein, 15 aa, Homo sapiens
  CDR3 for beta chain variable domain of TCR clone 120507 (TRBV5-1, TRBJ2-3)
CASSVTSGSTDTQYF

SEQ ID NO: 241015 - protein, 15 aa, Homo sapiens
  CDR3 for alpha chain variable domain of TCR clone 120508 (TRAV14/DV4, TRAJ12)
CAMREERDSSYKLIF

SEQ ID NO: 241016 - protein, 13 aa, Homo sapiens
  CDR3 for beta chain variable domain of TCR clone 120508 (TRBV20-1, TRBJ2-7)
CSARAGSPYEQYF

SEQ ID NO: 241017 - protein, 15 aa, Homo sapiens
  CDR3 for alpha chain variable domain of TCR clone 120509 (TRAV13-2, TRAJ16)
CAENDRFSDGQKLLF

SEQ ID NO: 241018 - protein, 15 aa, Homo sapiens
  CDR3 for beta chain variable domain of TCR clone 120509 (TRBV7-9, TRBJ1-5)
CASSQGHQPNQPQHF

SEQ ID NO: 241019 - protein, 13 aa, Homo sapiens
  CDR3 for alpha chain variable domain of TCR clone 120510 (TRAV20, TRAJ20)
CAVQAGSGYKLSF

SEQ ID NO: 241020 - protein, 17 aa, Homo sapiens
  CDR3 for beta chain variable domain of TCR clone 120510 (TRBV11-2, TRBJ2-1)
CASSLYPPGVEYNEQFF

SEQ ID NO: 241021 - protein, 14 aa, Homo sapiens
  CDR3 for alpha chain variable domain of TCR clone 120511 (TRAV12-3, TRAJ10)
SHLPLTGGGDKLTF

SEQ ID NO: 241022 - protein, 14 aa, Homo sapiens
  CDR3 for beta chain variable domain of TCR clone 120511 (TRBV7-2, TRBJ2-2)
CASSLNSNTGELFF

SEQ ID NO: 241023 - protein, 16 aa, Homo sapiens
  CDR3 for alpha chain variable domain of TCR clone 120512 (TRAV38-2/DV8, TRAJ47)
CAYRSAIMEYGNKLFF

SEQ ID NO: 241024 - protein, 14 aa, Homo sapiens
  CDR3 for beta chain variable domain of TCR clone 120512 (TRBV19, TRBJ2-7)
CASSIFAGTYEQYF

SEQ ID NO: 241025 - protein, 12 aa, Homo sapiens
  CDR3 for alpha chain variable domain of TCR clone 120513 (TRAV2, TRAJ37)
CAVTMNTGKLIF

SEQ ID NO: 241026 - protein, 15 aa, Homo sapiens
  CDR3 for beta chain variable domain of TCR clone 120513 (TRBV5-1, TRBJ2-5)
CDSSFGGPPQETQYF

SEQ ID NO: 241027 - protein, 14 aa, Homo sapiens
  CDR3 for alpha chain variable domain of TCR clone 120514 (TRAV26-1, TRAJ38)
CIADNAGNNRKLIW

SEQ ID NO: 241028 - protein, 15 aa, Homo sapiens
  CDR3 for beta chain variable domain of TCR clone 120514 (TRBV7-3, TRBJ2-2)
CASSETGQGTGELFF

SEQ ID NO: 241029 - protein, 20 aa, Homo sapiens
  CDR3 for alpha chain variable domain of TCR clone 120515 (TRAV21, TRAJ4)
AASQPGDSATLAGGYNKLIF

SEQ ID NO: 241030 - protein, 19 aa, Homo sapiens
  CDR3 for beta chain variable domain of TCR clone 120515 (TRBV18, TRBJ1-3)
CASSPLSRTGMSSGNNIYF

SEQ ID NO: 241031 - protein, 15 aa, Homo sapiens
  CDR3 for alpha chain variable domain of TCR clone 120516 (TRAV3, TRAJ3)
CAVRDGHSSASKIIF

SEQ ID NO: 241032 - protein, 17 aa, Homo sapiens
  CDR3 for beta chain variable domain of TCR clone 120516 (TRBV25-1, TRBJ2-7)
CASSDARVVFSSYEQYV

SEQ ID NO: 241033 - protein, 14 aa, Homo sapiens
  CDR3 for alpha chain variable domain of TCR clone 120517 (TRAV29/DV5, TRAJ20)
CAATIRSNDYKLSF

SEQ ID NO: 241034 - protein, 14 aa, Homo sapiens
  CDR3 for beta chain variable domain of TCR clone 120517 (TRBV9, TRBJ2-7)
CASSVGVGSYEQYF

SEQ ID NO: 241035 - protein, 16 aa, Homo sapiens
  CDR3 for alpha chain variable domain of TCR clone 120518 (TRAV30, TRAJ24)
CGTEIVDADSWGKFQF

SEQ ID NO: 241036 - protein, 15 aa, Homo sapiens
  CDR3 for beta chain variable domain of TCR clone 120518 (TRBV7-9, TRBJ1-4)
CTSSARTGGNEKLFF

SEQ ID NO: 241037 - protein, 13 aa, Homo sapiens
  CDR3 for alpha chain variable domain of TCR clone 120519 (TRAV12-1, TRAJ6)
CVVYPGGSYIPPF

SEQ ID NO: 241038 - protein, 13 aa, Homo sapiens
  CDR3 for beta chain variable domain of TCR clone 120519 (TRBV20-1, TRBJ1-3)
CSAGAYSGNTIYF

SEQ ID NO: 241039 - protein, 15 aa, Homo sapiens
  CDR3 for alpha chain variable domain of TCR clone 120520 (TRAV21, TRAJ24)
CAARSSTDSWGKLQF

SEQ ID NO: 241040 - protein, 16 aa, Homo sapiens
  CDR3 for beta chain variable domain of TCR clone 120520 (TRBV7-3, TRBJ2-1)
CASSLEGYRSYNEQFF

SEQ ID NO: 241041 - protein, 18 aa, Homo sapiens
  CDR3 for alpha chain variable domain of TCR clone 120521 (TRAV26-2, TRAJ54)
CILRDVEVGIQGAQKMVF

SEQ ID NO: 241042 - protein, 16 aa, Homo sapiens
  CDR3 for beta chain variable domain of TCR clone 120521 (TRBV6-1, TRBJ2-5)
CASSETLDRGAETQYF

SEQ ID NO: 241043 - protein, 16 aa, Homo sapiens
  CDR3 for alpha chain variable domain of TCR clone 120522 (TRAV3, TRAJ37)
CAVRGKGSGNTGKLIF

SEQ ID NO: 241044 - protein, 14 aa, Homo sapiens
  CDR3 for beta chain variable domain of TCR clone 120522 (TRBV11-2, TRBJ1-2)
CASSLYRGNYGYTF

SEQ ID NO: 241045 - protein, 11 aa, Homo sapiens
  CDR3 for alpha chain variable domain of TCR clone 120523 (TRAV2, TRAJ33)
CAVDSNYQLIL

SEQ ID NO: 241046 - protein, 14 aa, Homo sapiens
  CDR3 for beta chain variable domain of TCR clone 120523 (TRBV11-2, TRBJ2-3)
CASSRLARTDTQYF

SEQ ID NO: 241047 - protein, 15 aa, Homo sapiens
  CDR3 for alpha chain variable domain of TCR clone 120524 (TRAV21, TRAJ40)
CAVRPQTSGTYKYNF

SEQ ID NO: 241048 - protein, 13 aa, Homo sapiens
  CDR3 for beta chain variable domain of TCR clone 120524 (TRBV7-2, TRBJ2-2)
CASSSVRAGELFF

SEQ ID NO: 241049 - protein, 13 aa, Homo sapiens
  CDR3 for alpha chain variable domain of TCR clone 120525 (TRAV12-2, TRAJ50)
CAVIVTSYDKVIF

SEQ ID NO: 241050 - protein, 14 aa, Homo sapiens
  CDR3 for beta chain variable domain of TCR clone 120525 (TRBV7-6, TRBJ2-3)
CASSLGTVTDTQYF

SEQ ID NO: 241051 - protein, 15 aa, Homo sapiens
  CDR3 for alpha chain variable domain of TCR clone 120526 (TRAV3, TRAJ3)
CAVRDRRRSASKIIF

SEQ ID NO: 241052 - protein, 13 aa, Homo sapiens
  CDR3 for beta chain variable domain of TCR clone 120526 (TRBV9, TRBJ2-5)
CASSPAGLGTQYF

SEQ ID NO: 241053 - protein, 15 aa, Homo sapiens
  CDR3 for alpha chain variable domain of TCR clone 120527 (TRAV13-1, TRAJ42)
CAASIAGGRQGNLIF

SEQ ID NO: 241054 - protein, 15 aa, Homo sapiens
  CDR3 for beta chain variable domain of TCR clone 120527 (TRBV19, TRBJ2-1)
CASSIVRGEGREQFF

SEQ ID NO: 241055 - protein, 14 aa, Homo sapiens
  CDR3 for alpha chain variable domain of TCR clone 120528 (TRAV12-2, TRAJ13)
CAVKKPGGYQKVTL

SEQ ID NO: 241056 - protein, 15 aa, Homo sapiens
  CDR3 for beta chain variable domain of TCR clone 120528 (TRBV27, TRBJ2-1)
CASSNGGGSSNEQFF

SEQ ID NO: 241057 - protein, 15 aa, Homo sapiens
  CDR3 for alpha chain variable domain of TCR clone 120529 (TRAV2, TRAJ15)
CAVEDREQAGTALIC

SEQ ID NO: 241058 - protein, 13 aa, Homo sapiens
  CDR3 for beta chain variable domain of TCR clone 120529 (TRBV10-2, TRBJ2-7)
CASGTSGGYEQYF

SEQ ID NO: 241059 - protein, 16 aa, Homo sapiens
  CDR3 for alpha chain variable domain of TCR clone 120530 (TRAV16, TRAJ52)
FALSAAGGTSYGKLTF

SEQ ID NO: 241060 - protein, 13 aa, Homo sapiens
  CDR3 for beta chain variable domain of TCR clone 120530 (TRBV3-1, TRBJ1-5)
CASSQFGDQPQHF

SEQ ID NO: 241061 - protein, 11 aa, Homo sapiens
  CDR3 for alpha chain variable domain of TCR clone 120531 (TRAV1-1, TRAJ23)
CAVRQGGRLIF

SEQ ID NO: 241062 - protein, 20 aa, Homo sapiens
  CDR3 for beta chain variable domain of TCR clone 120531 (TRBV7-8, TRBJ2-2)
CASSHLFPGPAIHITGELFF

SEQ ID NO: 241063 - protein, 14 aa, Homo sapiens
  CDR3 for alpha chain variable domain of TCR clone 120532 (TRAV8-3, TRAJ30)
CAVGDMNRDDKIIF

SEQ ID NO: 241064 - protein, 17 aa, Homo sapiens
  CDR3 for beta chain variable domain of TCR clone 120532 (TRBV19, TRBJ2-2)
CANSRNPGGFGTGELFF

SEQ ID NO: 241065 - protein, 15 aa, Homo sapiens
  CDR3 for alpha chain variable domain of TCR clone 120533 (TRAV8-3, TRAJ40)
CAAPSLGSGTYKYIF

SEQ ID NO: 241066 - protein, 16 aa, Homo sapiens
  CDR3 for beta chain variable domain of TCR clone 120533 (TRBV7-3, TRBJ2-3)
CASSFSGYRPEDTQYF

SEQ ID NO: 241067 - protein, 16 aa, Homo sapiens
  CDR3 for alpha chain variable domain of TCR clone 120534 (TRAV3, TRAJ10)
CALRDMRAGGGNKLTF

SEQ ID NO: 241068 - protein, 14 aa, Homo sapiens
  CDR3 for beta chain variable domain of TCR clone 120534 (TRBV25-1, TRBJ1-1)
CASTHLGGNTEAFF

SEQ ID NO: 241069 - protein, 12 aa, Homo sapiens
  CDR3 for alpha chain variable domain of TCR clone 120535 (TRAV21, TRAJ11)
CAATSGYSTLTF

SEQ ID NO: 241070 - protein, 14 aa, Homo sapiens
  CDR3 for beta chain variable domain of TCR clone 120535 (TRBV20-1, TRBJ2-7)
CSAPDLAGVGEQYF

SEQ ID NO: 241071 - protein, 15 aa, Homo sapiens
  CDR3 for alpha chain variable domain of TCR clone 120536 (TRAV8-3, TRAJ37)
CAVGARASNTGKLIF

SEQ ID NO: 241072 - protein, 15 aa, Homo sapiens
  CDR3 for beta chain variable domain of TCR clone 120536 (TRBV5-4, TRBJ2-3)
CASSWAGRVTDTQYF

SEQ ID NO: 241073 - protein, 23 aa, Homo sapiens
  CDR3 for alpha chain variable domain of TCR clone 120537 (TRAV12-2, TRAJ36)
SLLIRDSQPSDSATLERANNLFF

SEQ ID NO: 241074 - protein, 16 aa, Homo sapiens
  CDR3 for beta chain variable domain of TCR clone 120537 (TRBV7-6, TRBJ2-1)
CASSLNEGPSYNEQFF

SEQ ID NO: 241075 - protein, 15 aa, Homo sapiens
  CDR3 for alpha chain variable domain of TCR clone 120538 (TRAV8-2, TRAJ40)
CVVLGTTSGTCKYIF

SEQ ID NO: 241076 - protein, 16 aa, Homo sapiens
  CDR3 for beta chain variable domain of TCR clone 120538 (TRBV7-3, TRBJ2-1)
CASSLEGYRSYNEQFF

SEQ ID NO: 241077 - protein, 15 aa, Homo sapiens
  CDR3 for alpha chain variable domain of TCR clone 120539 (TRAV4, TRAJ12)
CLVGDLMDSSYKLIF

SEQ ID NO: 241078 - protein, 13 aa, Homo sapiens
  CDR3 for beta chain variable domain of TCR clone 120539 (TRBV20-1, TRBJ2-5)
CSARGDYQETQYF

SEQ ID NO: 241079 - protein, 15 aa, Homo sapiens
  CDR3 for alpha chain variable domain of TCR clone 120540 (TRAV1-2, TRAJ30)
CAVRPHGNRDDKIIC

SEQ ID NO: 241080 - protein, 13 aa, Homo sapiens
  CDR3 for beta chain variable domain of TCR clone 120540 (TRBV4-1, TRBJ2-7)
CASSQGQAYEQYF

SEQ ID NO: 241081 - protein, 15 aa, Homo sapiens
  CDR3 for alpha chain variable domain of TCR clone 120541 (TRAV17, TRAJ57)
CATGPSQGGSEKLVF

SEQ ID NO: 241082 - protein, 16 aa, Homo sapiens
  CDR3 for beta chain variable domain of TCR clone 120541 (TRBV12-4, TRBJ1-5)
CASSRPVGGSNQLQHF

SEQ ID NO: 241083 - protein, 14 aa, Homo sapiens
  CDR3 for alpha chain variable domain of TCR clone 120542 (TRAV17, TRAJ57)
CATDPQGGSEKLVF

SEQ ID NO: 241084 - protein, 14 aa, Homo sapiens
  CDR3 for beta chain variable domain of TCR clone 120542 (TRBV25-1, TRBJ1-1)
CASTHLGGNTEAFS

SEQ ID NO: 241085 - protein, 12 aa, Homo sapiens
  CDR3 for alpha chain variable domain of TCR clone 120543 (TRAV9-2, TRAJ20)
CALSEGDYKLSF

SEQ ID NO: 241086 - protein, 13 aa, Homo sapiens
  CDR3 for beta chain variable domain of TCR clone 120543 (TRBV11-2, TRBJ1-6)
CASSLAGTSPLHF

SEQ ID NO: 241087 - protein, 13 aa, Homo sapiens
  CDR3 for alpha chain variable domain of TCR clone 120544 (TRAV8-3, TRAJ4)
WVFYSGGYNKLIF

SEQ ID NO: 241088 - protein, 13 aa, Homo sapiens
  CDR3 for beta chain variable domain of TCR clone 120544 (TRBV7-9, TRBJ2-3)
CQQLEDGTDTQYF

SEQ ID NO: 241089 - protein, 13 aa, Homo sapiens
  CDR3 for alpha chain variable domain of TCR clone 120545 (TRAV12-3, TRAJ43)
CAMIGPNNNDMRF

SEQ ID NO: 241090 - protein, 12 aa, Homo sapiens
  CDR3 for beta chain variable domain of TCR clone 120545 (TRBV11-2, TRBJ2-5)
CASSLGQETQYF

SEQ ID NO: 241091 - protein, 13 aa, Homo sapiens
  CDR3 for alpha chain variable domain of TCR clone 120546 (TRAV25, TRAJ30)
CAGRVDRDDKIIF

SEQ ID NO: 241092 - protein, 17 aa, Homo sapiens
  CDR3 for beta chain variable domain of TCR clone 120546 (TRBV7-9, TRBJ2-6)
CASSFGAGYSGANVRTF

SEQ ID NO: 241093 - protein, 13 aa, Homo sapiens
  CDR3 for alpha chain variable domain of TCR clone 120547 (TRAV12-1, TRAJ33)
CGDAPDSNYQLIW

SEQ ID NO: 241094 - protein, 15 aa, Homo sapiens
  CDR3 for beta chain variable domain of TCR clone 120547 (TRBV27, TRBJ2-1)
CASSNGGGYSNEQFF

SEQ ID NO: 241095 - protein, 12 aa, Homo sapiens
  CDR3 for alpha chain variable domain of TCR clone 120548 (TRAV12-3, TRAJ20)
CAMVRGDYKLSF

SEQ ID NO: 241096 - protein, 12 aa, Homo sapiens
  CDR3 for beta chain variable domain of TCR clone 120548 (TRBV6-1, TRBJ2-7)
CASSDYSYEQYF

SEQ ID NO: 241097 - protein, 13 aa, Homo sapiens
  CDR3 for alpha chain variable domain of TCR clone 120549 (TRAV35, TRAJ48)
CSGHEFGNEKLTF

SEQ ID NO: 241098 - protein, 14 aa, Homo sapiens
  CDR3 for beta chain variable domain of TCR clone 120549 (TRBV19, TRBJ2-1)
CASPTFVLSGEQFF

SEQ ID NO: 241099 - protein, 16 aa, Homo sapiens
  CDR3 for alpha chain variable domain of TCR clone 120550 (TRAV17, TRAJ28)
CATASVSGAGSYQLTF

SEQ ID NO: 241100 - protein, 16 aa, Homo sapiens
  CDR3 for beta chain variable domain of TCR clone 120550 (TRBV2, TRBJ2-5)
CASSETQGVGEETQYF

SEQ ID NO: 241101 - protein, 17 aa, Homo sapiens
  CDR3 for alpha chain variable domain of TCR clone 120551 (TRAV8-4, TRAJ6)
CAVRDGPRAGGSYIPTF

SEQ ID NO: 241102 - protein, 14 aa, Homo sapiens
  CDR3 for beta chain variable domain of TCR clone 120551 (TRBV7-2, TRBJ2-7)
CASSPKTSFYEQYF

SEQ ID NO: 241103 - protein, 13 aa, Homo sapiens
  CDR3 for alpha chain variable domain of TCR clone 120552 (TRAV1-1, TRAJ9)
CAAKNTGGFKTIF

SEQ ID NO: 241104 - protein, 13 aa, Homo sapiens
  CDR3 for beta chain variable domain of TCR clone 120552 (TRBV12-4, TRBJ1-2)
CASSLRQGKGYTF

SEQ ID NO: 241105 - protein, 14 aa, Homo sapiens
  CDR3 for alpha chain variable domain of TCR clone 120553 (TRAV8-1, TRAJ47)
CAVNAVGYGNKLVF

SEQ ID NO: 241106 - protein, 13 aa, Homo sapiens
  CDR3 for beta chain variable domain of TCR clone 120553 (TRBV7-3, TRBJ1-1)
CASSQDWGAEAFF

SEQ ID NO: 241107 - protein, 14 aa, Homo sapiens
  CDR3 for alpha chain variable domain of TCR clone 120554 (TRAV17, TRAJ32)
CATDPGGATNKLIF

SEQ ID NO: 241108 - protein, 14 aa, Homo sapiens
  CDR3 for beta chain variable domain of TCR clone 120554 (TRBV19, TRBJ1-5)
CASRAPDSFLSQHF

SEQ ID NO: 241109 - protein, 12 aa, Homo sapiens
  CDR3 for alpha chain variable domain of TCR clone 120555 (TRAV3, TRAJ26)
CAVRDYGQNFVF

SEQ ID NO: 241110 - protein, 16 aa, Homo sapiens
  CDR3 for beta chain variable domain of TCR clone 120555 (TRBV11-2, TRBJ1-2)
CASSPSGREANYGCTF

SEQ ID NO: 241111 - protein, 13 aa, Homo sapiens
  CDR3 for alpha chain variable domain of TCR clone 120556 (TRAV8-6, TRAJ49)
CAVITNTGNQFYF

SEQ ID NO: 241112 - protein, 16 aa, Homo sapiens
  CDR3 for beta chain variable domain of TCR clone 120556 (TRBV28, TRBJ2-1)
CASSLVLMREYNEQFF

SEQ ID NO: 241113 - protein, 14 aa, Homo sapiens
  CDR3 for alpha chain variable domain of TCR clone 120557 (TRAV16, TRAJ31)
CALSGRNKNARLMF

SEQ ID NO: 241114 - protein, 12 aa, Homo sapiens
  CDR3 for beta chain variable domain of TCR clone 120557 (TRBV11-2, TRBJ1-2)
CASSREGDGYTF

SEQ ID NO: 241115 - protein, 17 aa, Homo sapiens
  CDR3 for alpha chain variable domain of TCR clone 120558 (TRAV3, TRAJ12)
CAVRDGGRMDSSYKLIF

SEQ ID NO: 241116 - protein, 15 aa, Homo sapiens
  CDR3 for beta chain variable domain of TCR clone 120558 (TRBV20-1, TRBJ2-5)
CSAGGTGGLQETQYF

SEQ ID NO: 241117 - protein, 21 aa, Homo sapiens
  CDR3 for alpha chain variable domain of TCR clone 120559 (TRAV6, TRAJ36)
CARQTTSSLGLERDPPLFPIS

SEQ ID NO: 241118 - protein, 14 aa, Homo sapiens
  CDR3 for beta chain variable domain of TCR clone 120559 (TRBV10-2, TRBJ1-5)
CASSSTGRNQPQHF

SEQ ID NO: 241119 - protein, 14 aa, Homo sapiens
  CDR3 for alpha chain variable domain of TCR clone 120560 (TRAV3, TRAJ40)
CAVRDRRGTYKYIF

SEQ ID NO: 241120 - protein, 22 aa, Homo sapiens
  CDR3 for beta chain variable domain of TCR clone 120560 (TRBV6-1, TRBJ1-3)
CASVQGGGWKHHIFWRGKLAHC

SEQ ID NO: 241121 - protein, 15 aa, Homo sapiens
  CDR3 for alpha chain variable domain of TCR clone 120561 (TRAV3, TRAJ5)
CAVRDLDTGRRALTF

SEQ ID NO: 241122 - protein, 15 aa, Homo sapiens
  CDR3 for beta chain variable domain of TCR clone 120561 (TRBV4-1, TRBJ1-2)
CASSQGQGAAYGYTF

SEQ ID NO: 241123 - protein, 14 aa, Homo sapiens
  CDR3 for alpha chain variable domain of TCR clone 120562 (TRAV26-1, TRAJ38)
CIADNAGNNRKLIW

SEQ ID NO: 241124 - protein, 13 aa, Homo sapiens
  CDR3 for beta chain variable domain of TCR clone 120562 (TRBV20-1, TRBJ1-1)
CSARGGGNTEAVF

SEQ ID NO: 241125 - protein, 13 aa, Homo sapiens
  CDR3 for alpha chain variable domain of TCR clone 120563 (TRAV5, TRAJ30)
CAGIANRDDEIIF

SEQ ID NO: 241126 - protein, 14 aa, Homo sapiens
  CDR3 for beta chain variable domain of TCR clone 120563 (TRBV4-1, TRBJ2-2)
CASSQAVNTGELFF

SEQ ID NO: 241127 - protein, 13 aa, Homo sapiens
  CDR3 for alpha chain variable domain of TCR clone 120564 (TRAV27, TRAJ6)
YAGGTRGSYIPTS

SEQ ID NO: 241128 - protein, 14 aa, Homo sapiens
  CDR3 for beta chain variable domain of TCR clone 120564 (TRBV6-3, TRBJ1-1)
CASSYQRRDTEAFF

SEQ ID NO: 241129 - protein, 13 aa, Homo sapiens
  CDR3 for alpha chain variable domain of TCR clone 120565 (TRAV3, TRAJ20)
CDVRPLNDYKLSF

SEQ ID NO: 241130 - protein, 12 aa, Homo sapiens
  CDR3 for beta chain variable domain of TCR clone 120565 (TRBV6-1, TRBJ2-1)
CATYGLNNEQFF

SEQ ID NO: 241131 - protein, 13 aa, Homo sapiens
  CDR3 for alpha chain variable domain of TCR clone 120566 (TRAV36/DV7, TRAJ49)
CAGDSNTGNQFYF

SEQ ID NO: 241132 - protein, 12 aa, Homo sapiens
  CDR3 for beta chain variable domain of TCR clone 120566 (TRBV11-2, TRBJ2-2)
CASGLGGGELFF

SEQ ID NO: 241133 - protein, 14 aa, Homo sapiens
  CDR3 for alpha chain variable domain of TCR clone 120567 (TRAV38-2/DV8, TRAJ23)
CAYRSQNQGGNLIF

SEQ ID NO: 241134 - protein, 13 aa, Homo sapiens
  CDR3 for beta chain variable domain of TCR clone 120567 (TRBV24-1, TRBJ2-1)
CATSAGPYNEQFF

SEQ ID NO: 241135 - protein, 12 aa, Homo sapiens
  CDR3 for alpha chain variable domain of TCR clone 120568 (TRAV12-2, TRAJ10)
WGVTGGGNKPTF

SEQ ID NO: 241136 - protein, 14 aa, Homo sapiens
  CDR3 for beta chain variable domain of TCR clone 120568 (TRBV20-1, TRBJ2-1)
CSAQIGGSANEQFF

SEQ ID NO: 241137 - protein, 13 aa, Homo sapiens
  CDR3 for alpha chain variable domain of TCR clone 120569 (TRAV12-3, TRAJ7)
CAMTPYGNNRLAF

SEQ ID NO: 241138 - protein, 17 aa, Homo sapiens
  CDR3 for beta chain variable domain of TCR clone 120569 (TRBV13, TRBJ2-3)
CASSLSRVAGGRNTQYF

SEQ ID NO: 241139 - protein, 16 aa, Homo sapiens
  CDR3 for alpha chain variable domain of TCR clone 120570 (TRAV30, TRAJ24)
CGTEIVDSDSWGKFQF

SEQ ID NO: 241140 - protein, 13 aa, Homo sapiens
  CDR3 for beta chain variable domain of TCR clone 120570 (TRBV20-1, TRBJ1-1)
CSAPPGGHTEAFF

SEQ ID NO: 241141 - protein, 10 aa, Homo sapiens
  CDR3 for alpha chain variable domain of TCR clone 120571 (TRAV12-1, TRAJ37)
ARGNTGKLTF

SEQ ID NO: 241142 - protein, 15 aa, Homo sapiens
  CDR3 for beta chain variable domain of TCR clone 120571 (TRBV7-2, TRBJ2-3)
CASSLEQGGTDTQYF

SEQ ID NO: 241143 - protein, 12 aa, Homo sapiens
  CDR3 for alpha chain variable domain of TCR clone 120572 (TRAV16, TRAJ10)
CSRTGGGNKLTF

SEQ ID NO: 241144 - protein, 15 aa, Homo sapiens
  CDR3 for beta chain variable domain of TCR clone 120572 (TRBV6-3, TRBJ2-7)
CASSSPWTVFYEQYF

SEQ ID NO: 241145 - protein, 16 aa, Homo sapiens
  CDR3 for alpha chain variable domain of TCR clone 120573 (TRAV13-1, TRAJ48)
CAASIFGNFGNEKFTF

SEQ ID NO: 241146 - protein, 16 aa, Homo sapiens
  CDR3 for beta chain variable domain of TCR clone 120573 (TRBV18, TRBJ1-5)
CASSPYRVEGNQPQHF

SEQ ID NO: 241147 - protein, 12 aa, Homo sapiens
  CDR3 for alpha chain variable domain of TCR clone 120574 (TRAV22, TRAJ22)
CAPGGSARQLTF

SEQ ID NO: 241148 - protein, 13 aa, Homo sapiens
  CDR3 for beta chain variable domain of TCR clone 120574 (TRBV15, TRBJ1-6)
CATSGGVNSPLHF

SEQ ID NO: 241149 - protein, 13 aa, Homo sapiens
  CDR3 for alpha chain variable domain of TCR clone 120575 (TRAV3, TRAJ21)
CAVREPHFNKFYF

SEQ ID NO: 241150 - protein, 18 aa, Homo sapiens
  CDR3 for beta chain variable domain of TCR clone 120575 (TRBV11-2, TRBJ2-3)
CASSLGGASRGAPNTQYF

SEQ ID NO: 241151 - protein, 13 aa, Homo sapiens
  CDR3 for alpha chain variable domain of TCR clone 120576 (TRAV17, TRAJ26)
CATVDNYGQNFVF

SEQ ID NO: 241152 - protein, 16 aa, Homo sapiens
  CDR3 for beta chain variable domain of TCR clone 120576 (TRBV2, TRBJ2-1)
CASSVGESLSYNEQFF

SEQ ID NO: 241153 - protein, 14 aa, Homo sapiens
  CDR3 for alpha chain variable domain of TCR clone 120577 (TRAV38-1, TRAJ40)
CALRPTSGTYKYIF

SEQ ID NO: 241154 - protein, 15 aa, Homo sapiens
  CDR3 for beta chain variable domain of TCR clone 120577 (TRBV4-3, TRBJ2-7)
CASSQGGRGIYEQYF

SEQ ID NO: 241155 - protein, 16 aa, Homo sapiens
  CDR3 for alpha chain variable domain of TCR clone 120578 (TRAV12-3, TRAJ53)
CAMSPGRGGSNYKLTL

SEQ ID NO: 241156 - protein, 11 aa, Homo sapiens
  CDR3 for beta chain variable domain of TCR clone 120578 (TRBV29-1, TRBJ2-5)
CSEDRTGTQYF

SEQ ID NO: 241157 - protein, 14 aa, Homo sapiens
  CDR3 for alpha chain variable domain of TCR clone 120579 (TRAV13-1, TRAJ44)
CAAKATGTASKLTF

SEQ ID NO: 241158 - protein, 15 aa, Homo sapiens
  CDR3 for beta chain variable domain of TCR clone 120579 (TRBV7-2, TRBJ2-7)
CASSFTGQGAQEQYF

SEQ ID NO: 241159 - protein, 17 aa, Homo sapiens
  CDR3 for alpha chain variable domain of TCR clone 120580 (TRAV3, TRAJ6)
CAVRDGPRAGGSYIPTF

SEQ ID NO: 241160 - protein, 14 aa, Homo sapiens
  CDR3 for beta chain variable domain of TCR clone 120580 (TRBV7-3, TRBJ2-2)
CASSSGGYTGELFF

SEQ ID NO: 241161 - protein, 16 aa, Homo sapiens
  CDR3 for alpha chain variable domain of TCR clone 120581 (TRAV12-2, TRAJ32)
CAVNLGQGGATNKLIF

SEQ ID NO: 241162 - protein, 15 aa, Homo sapiens
  CDR3 for beta chain variable domain of TCR clone 120581 (TRBV20-1, TRBJ2-7)
CSARGPLAGGREQHF

SEQ ID NO: 241163 - protein, 13 aa, Homo sapiens
  CDR3 for alpha chain variable domain of TCR clone 120582 (TRAV12-1, TRAJ16)
CVVNGPDGQKLLF

SEQ ID NO: 241164 - protein, 13 aa, Homo sapiens
  CDR3 for beta chain variable domain of TCR clone 120582 (TRBV2, TRBJ1-1)
CARNPTGGFRAFF

SEQ ID NO: 241165 - protein, 13 aa, Homo sapiens
  CDR3 for alpha chain variable domain of TCR clone 120583 (TRAV30, TRAJ24)
CGTVTDSWGKLQF

SEQ ID NO: 241166 - protein, 18 aa, Homo sapiens
  CDR3 for beta chain variable domain of TCR clone 120583 (TRBV4-1, TRBJ1-5)
CASSQDPRGQGLNQPQHF

SEQ ID NO: 241167 - protein, 15 aa, Homo sapiens
  CDR3 for alpha chain variable domain of TCR clone 120584 (TRAV8-3, TRAJ45)
CASSYSGGGADGITF

SEQ ID NO: 241168 - protein, 13 aa, Homo sapiens
  CDR3 for beta chain variable domain of TCR clone 120584 (TRBV7-9, TRBJ2-7)
CASSFAGAYEQYF

SEQ ID NO: 241169 - protein, 14 aa, Homo sapiens
  CDR3 for alpha chain variable domain of TCR clone 120585 (TRAV3, TRAJ21)
CAVRDTYNFNKFYF

SEQ ID NO: 241170 - protein, 14 aa, Homo sapiens
  CDR3 for beta chain variable domain of TCR clone 120585 (TRBV27, TRBJ2-3)
CASRDSPITDTQYF

SEQ ID NO: 241171 - protein, 15 aa, Homo sapiens
  CDR3 for alpha chain variable domain of TCR clone 120586 (TRAV17, TRAJ37)
CATDHGSSNTGELIF

SEQ ID NO: 241172 - protein, 14 aa, Homo sapiens
  CDR3 for beta chain variable domain of TCR clone 120586 (TRBV7-2, TRBJ2-3)
CASSRTSGADTQYF

SEQ ID NO: 241173 - protein, 17 aa, Homo sapiens
  CDR3 for alpha chain variable domain of TCR clone 120587 (TRAV3, TRAJ42)
CAVRDRDYGGSQGNLIF

SEQ ID NO: 241174 - protein, 13 aa, Homo sapiens
  CDR3 for beta chain variable domain of TCR clone 120587 (TRBV3-1, TRBJ1-1)
CASSPGVITEAFF

SEQ ID NO: 241175 - protein, 14 aa, Homo sapiens
  CDR3 for alpha chain variable domain of TCR clone 120588 (TRAV17, TRAJ32)
CATDPGSATNKLIF

SEQ ID NO: 241176 - protein, 14 aa, Homo sapiens
  CDR3 for beta chain variable domain of TCR clone 120588 (TRBV2, TRBJ1-5)
CASSENRGGQPQHF

SEQ ID NO: 241177 - protein, 14 aa, Homo sapiens
  CDR3 for alpha chain variable domain of TCR clone 120589 (TRAV20, TRAJ56)
CAVQFGGANSKLTF

SEQ ID NO: 241178 - protein, 11 aa, Homo sapiens
  CDR3 for beta chain variable domain of TCR clone 120589 (TRBV29-1, TRBJ2-5)
CSEDRTGTQYF

SEQ ID NO: 241179 - protein, 14 aa, Homo sapiens
  CDR3 for alpha chain variable domain of TCR clone 120590 (TRAV12-2, TRAJ5)
CDVNRSTGRRALTF

SEQ ID NO: 241180 - protein, 12 aa, Homo sapiens
  CDR3 for beta chain variable domain of TCR clone 120590 (TRBV19, TRBJ1-5)
CASSIAQQPQHF

SEQ ID NO: 241181 - protein, 13 aa, Homo sapiens
  CDR3 for alpha chain variable domain of TCR clone 120591 (TRAV17, TRAJ9)
CATAITGGFKTIF

SEQ ID NO: 241182 - protein, 16 aa, Homo sapiens
  CDR3 for beta chain variable domain of TCR clone 120591 (TRBV15, TRBJ2-1)
GATSRNLAGGYNEQFF

SEQ ID NO: 241183 - protein, 12 aa, Homo sapiens
  CDR3 for alpha chain variable domain of TCR clone 120592 (TRAV13-1, TRAJ53)
CAAGGSNYKLKF

SEQ ID NO: 241184 - protein, 15 aa, Homo sapiens
  CDR3 for beta chain variable domain of TCR clone 120592 (TRBV7-2, TRBJ2-1)
CASSSGLAGGNEQFF

SEQ ID NO: 241185 - protein, 12 aa, Homo sapiens
  CDR3 for alpha chain variable domain of TCR clone 120593 (TRAV8-4, TRAJ43)
CAVSVNNNDMSF

SEQ ID NO: 241186 - protein, 14 aa, Homo sapiens
  CDR3 for beta chain variable domain of TCR clone 120593 (TRBV11-2, TRBJ1-2)
CASSLGTANYGYTF

SEQ ID NO: 241187 - protein, 14 aa, Homo sapiens
  CDR3 for alpha chain variable domain of TCR clone 120594 (TRAV26-2, TRAJ32)
CIVTRSGATNKLIF

SEQ ID NO: 241188 - protein, 12 aa, Homo sapiens
  CDR3 for beta chain variable domain of TCR clone 120594 (TRBV2, TRBJ2-1)
CAYGPPGNEQFF

SEQ ID NO: 241189 - protein, 13 aa, Homo sapiens
  CDR3 for alpha chain variable domain of TCR clone 120595 (TRAV2, TRAJ12)
CAVGADSSYKLIF

SEQ ID NO: 241190 - protein, 17 aa, Homo sapiens
  CDR3 for beta chain variable domain of TCR clone 120595 (TRBV20-1, TRBJ2-2)
CSASGSGQGGLTGELFF

SEQ ID NO: 241191 - protein, 10 aa, Homo sapiens
  CDR3 for alpha chain variable domain of TCR clone 120596 (TRAV26-1, TRAJ22)
CIVSLNFFWF

SEQ ID NO: 241192 - protein, 15 aa, Homo sapiens
  CDR3 for beta chain variable domain of TCR clone 120596 (TRBV4-2, TRBJ1-2)
CASRQRTGGRDGYTF

SEQ ID NO: 241193 - protein, 12 aa, Homo sapiens
  CDR3 for alpha chain variable domain of TCR clone 120597 (TRAV4, TRAJ6)
CLAPGGSYIPTS

SEQ ID NO: 241194 - protein, 14 aa, Homo sapiens
  CDR3 for beta chain variable domain of TCR clone 120597 (TRBV19, TRBJ1-5)
CASSVGQGIQPQHF

SEQ ID NO: 241195 - protein, 14 aa, Homo sapiens
  CDR3 for alpha chain variable domain of TCR clone 120598 (TRAV8-1, TRAJ47)
CAVNAVGYGKKLVF

SEQ ID NO: 241196 - protein, 15 aa, Homo sapiens
  CDR3 for beta chain variable domain of TCR clone 120598 (TRBV3-1, TRBJ2-2)
CASSTTTGPTGELFF

SEQ ID NO: 241197 - protein, 11 aa, Homo sapiens
  CDR3 for alpha chain variable domain of TCR clone 120599 (TRAV13-1, TRAJ6)
CATLGSYKPTF

SEQ ID NO: 241198 - protein, 12 aa, Homo sapiens
  CDR3 for beta chain variable domain of TCR clone 120599 (TRBV11-2, TRBJ2-1)
CASSPGNNEQFF

SEQ ID NO: 241199 - protein, 13 aa, Homo sapiens
  CDR3 for alpha chain variable domain of TCR clone 120600 (TRAV35, TRAJ36)
CAGPRIGANNLFF

SEQ ID NO: 241200 - protein, 15 aa, Homo sapiens
  CDR3 for beta chain variable domain of TCR clone 120600 (TRBV28, TRBJ2-5)
CASSPPWSYQDTQYF

SEQ ID NO: 241201 - protein, 15 aa, Homo sapiens
  CDR3 for alpha chain variable domain of TCR clone 120601 (TRAV21, TRAJ24)
CAARSSTDSWGKLQF

SEQ ID NO: 241202 - protein, 11 aa, Homo sapiens
  CDR3 for beta chain variable domain of TCR clone 120601 (TRBV19, TRBJ2-5)
CASSIKETQYF

SEQ ID NO: 241203 - protein, 18 aa, Homo sapiens
  CDR3 for alpha chain variable domain of TCR clone 120602 (TRAV17, TRAJ45)
CATSLDLYSRGGADGLTF

SEQ ID NO: 241204 - protein, 15 aa, Homo sapiens
  CDR3 for beta chain variable domain of TCR clone 120602 (TRBV11-2, TRBJ2-1)
CASSKNRGLIYEQFF

SEQ ID NO: 241205 - protein, 13 aa, Homo sapiens
  CDR3 for alpha chain variable domain of TCR clone 120603 (TRAV1-2, TRAJ9)
CAALNTGGFKTTF

SEQ ID NO: 241206 - protein, 15 aa, Homo sapiens
  CDR3 for beta chain variable domain of TCR clone 120603 (TRBV11-2, TRBJ1-6)
CASTLRETGNSPLHF

SEQ ID NO: 241207 - protein, 13 aa, Homo sapiens
  CDR3 for alpha chain variable domain of TCR clone 120604 (TRAV8-3, TRAJ5)
CAVGPRGRRALTF

SEQ ID NO: 241208 - protein, 16 aa, Homo sapiens
  CDR3 for beta chain variable domain of TCR clone 120604 (TRBV11-3, TRBJ2-3)
CASSTGGLLGTDTQYF

SEQ ID NO: 241209 - protein, 12 aa, Homo sapiens
  CDR3 for alpha chain variable domain of TCR clone 120605 (TRAV2, TRAJ31)
RAVEDNKARLMF

SEQ ID NO: 241210 - protein, 16 aa, Homo sapiens
  CDR3 for beta chain variable domain of TCR clone 120605 (TRBV10-3, TRBJ2-1)
CAISGVGDGGGGEQFF

SEQ ID NO: 241211 - protein, 14 aa, Homo sapiens
  CDR3 for alpha chain variable domain of TCR clone 120606 (TRAV35, TRAJ22)
CAGLRPGSARQLTF

SEQ ID NO: 241212 - protein, 15 aa, Homo sapiens
  CDR3 for beta chain variable domain of TCR clone 120606 (TRBV28, TRBJ2-5)
CASSPPWSYQETQYF

SEQ ID NO: 241213 - protein, 19 aa, Homo sapiens
  CDR3 for alpha chain variable domain of TCR clone 120607 (TRAV30, TRAJ52)
CGTEANTNAGGTSYGKLTF

SEQ ID NO: 241214 - protein, 13 aa, Homo sapiens
  CDR3 for beta chain variable domain of TCR clone 120607 (TRBV24-1, TRBJ2-2)
CATSDWSTGELFF

SEQ ID NO: 241215 - protein, 13 aa, Homo sapiens
  CDR3 for alpha chain variable domain of TCR clone 120608 (TRAV36/DV7, TRAJ34)
CAVGEVNTDKLIF

SEQ ID NO: 241216 - protein, 15 aa, Homo sapiens
  CDR3 for beta chain variable domain of TCR clone 120608 (TRBV7-2, TRBJ2-1)
CASTHGTGIYNEQFF

SEQ ID NO: 241217 - protein, 14 aa, Homo sapiens
  CDR3 for alpha chain variable domain of TCR clone 120609 (TRAV12-3, TRAJ5)
CALSTYTGRRALTF

SEQ ID NO: 241218 - protein, 13 aa, Homo sapiens
  CDR3 for beta chain variable domain of TCR clone 120609 (TRBV28, TRBJ2-3)
CASSTGGGDTQYF

SEQ ID NO: 241219 - protein, 18 aa, Homo sapiens
  CDR3 for alpha chain variable domain of TCR clone 120610 (TRAV9-2, TRAJ10)
CALSDGALASGGGKKLTF

SEQ ID NO: 241220 - protein, 16 aa, Homo sapiens
  CDR3 for beta chain variable domain of TCR clone 120610 (TRBV28, TRBJ2-7)
CASSSSGTSGSYEQYF

SEQ ID NO: 241221 - protein, 13 aa, Homo sapiens
  CDR3 for alpha chain variable domain of TCR clone 120611 (TRAV27, TRAJ29)
CAGAHSGNTPLVF

SEQ ID NO: 241222 - protein, 19 aa, Homo sapiens
  CDR3 for beta chain variable domain of TCR clone 120611 (TRBV7-9, TRBJ2-1)
CASSHDRGALLRSYNEQFF

SEQ ID NO: 241223 - protein, 13 aa, Homo sapiens
  CDR3 for alpha chain variable domain of TCR clone 120612 (TRAV3, TRAJ20)
CSVRSLNDYKLSF

SEQ ID NO: 241224 - protein, 13 aa, Homo sapiens
  CDR3 for beta chain variable domain of TCR clone 120612 (TRBV7-3, TRBJ1-1)
CASSQDWGAEAFF

SEQ ID NO: 241225 - protein, 17 aa, Homo sapiens
  CDR3 for alpha chain variable domain of TCR clone 120613 (TRAV12-2, TRAJ48)
CASNEKLTFGTGTRLTI

SEQ ID NO: 241226 - protein, 14 aa, Homo sapiens
  CDR3 for beta chain variable domain of TCR clone 120613 (TRBV5-1, TRBJ2-5)
CASSLAGKQETQYC

SEQ ID NO: 241227 - protein, 10 aa, Homo sapiens
  CDR3 for alpha chain variable domain of TCR clone 120614 (TRAV12-1, TRAJ37)
ARGNTGKLIF

SEQ ID NO: 241228 - protein, 15 aa, Homo sapiens
  CDR3 for beta chain variable domain of TCR clone 120614 (TRBV7-2, TRBJ2-3)
CASSLEQGGTDTHYF

SEQ ID NO: 241229 - protein, 12 aa, Homo sapiens
  CDR3 for alpha chain variable domain of TCR clone 120615 (TRAV13-2, TRAJ23)
CAERHRGGKIIF

SEQ ID NO: 241230 - protein, 12 aa, Homo sapiens
  CDR3 for beta chain variable domain of TCR clone 120615 (TRBV11-2, TRBJ2-2)
CASSLGGGELFF

SEQ ID NO: 241231 - protein, 16 aa, Homo sapiens
  CDR3 for alpha chain variable domain of TCR clone 120616 (TRAV13-1, TRAJ48)
CAASIFGNFGNEKLTF

SEQ ID NO: 241232 - protein, 14 aa, Homo sapiens
  CDR3 for beta chain variable domain of TCR clone 120616 (TRBV24-1, TRBJ1-1)
CATSIPRGDTEDFF

SEQ ID NO: 241233 - protein, 18 aa, Homo sapiens
  CDR3 for alpha chain variable domain of TCR clone 120617 (TRAV26-2, TRAJ45)
CILRVDKYSGGGADGLTF

SEQ ID NO: 241234 - protein, 14 aa, Homo sapiens
  CDR3 for beta chain variable domain of TCR clone 120617 (TRBV11-2, TRBJ2-7)
CASSSTGEGYEQYF

SEQ ID NO: 241235 - protein, 15 aa, Homo sapiens
  CDR3 for alpha chain variable domain of TCR clone 120618 (TRAV8-3, TRAJ45)
CASSYSGGGAEDSPL

SEQ ID NO: 241236 - protein, 13 aa, Homo sapiens
  CDR3 for beta chain variable domain of TCR clone 120618 (TRBV10-3, TRBJ2-7)
CASKLAVNYEQYF

SEQ ID NO: 241237 - protein, 12 aa, Homo sapiens
  CDR3 for alpha chain variable domain of TCR clone 120619 (TRAV41, TRAJ58)
CAVETSGSRLTF

SEQ ID NO: 241238 - protein, 16 aa, Homo sapiens
  CDR3 for beta chain variable domain of TCR clone 120619 (TRBV24-1, TRBJ2-3)
CATSDPGTGATDTQYF

SEQ ID NO: 241239 - protein, 15 aa, Homo sapiens
  CDR3 for alpha chain variable domain of TCR clone 120620 (TRAV8-3, TRAJ20)
CAVEAKGSNDYKLSF

SEQ ID NO: 241240 - protein, 15 aa, Homo sapiens
  CDR3 for beta chain variable domain of TCR clone 120620 (TRBV5-1, TRBJ2-2)
CASSSQGGNTGELFF

SEQ ID NO: 241241 - protein, 13 aa, Homo sapiens
  CDR3 for alpha chain variable domain of TCR clone 120621 (TRAV13-2, TRAJ13)
CAERTGGYQKVTF

SEQ ID NO: 241242 - protein, 15 aa, Homo sapiens
  CDR3 for beta chain variable domain of TCR clone 120621 (TRBV11-3, TRBJ2-7)
CASSPGPASSYEQYF

SEQ ID NO: 241243 - protein, 13 aa, Homo sapiens
  CDR3 for alpha chain variable domain of TCR clone 120622 (TRAV27, TRAJ49)
FAPRPYTGNQFYF

SEQ ID NO: 241244 - protein, 18 aa, Homo sapiens
  CDR3 for beta chain variable domain of TCR clone 120622 (TRBV7-3, TRBJ2-5)
CASSLGGAAQGRWETQYF

SEQ ID NO: 241245 - protein, 14 aa, Homo sapiens
  CDR3 for alpha chain variable domain of TCR clone 120623 (TRAV12-2, TRAJ48)
CAVNAFFGNEKLTF

SEQ ID NO: 241246 - protein, 13 aa, Homo sapiens
  CDR3 for beta chain variable domain of TCR clone 120623 (TRBV28, TRBJ2-7)
RAGAQQGLDEQYF

SEQ ID NO: 241247 - protein, 15 aa, Homo sapiens
  CDR3 for alpha chain variable domain of TCR clone 120624 (TRAV13-1, TRAJ52)
SYYNAGGTSYGKLTF

SEQ ID NO: 241248 - protein, 15 aa, Homo sapiens
  CDR3 for beta chain variable domain of TCR clone 120624 (TRBV11-3, TRBJ2-3)
CASLKDGREGDTQYF

SEQ ID NO: 241249 - protein, 18 aa, Homo sapiens
  CDR3 for alpha chain variable domain of TCR clone 120625 (TRAV12-3, TRAJ52)
CAMSVGGAGGTSYGKLTF

SEQ ID NO: 241250 - protein, 13 aa, Homo sapiens
  CDR3 for beta chain variable domain of TCR clone 120625 (TRBV2, TRBJ2-5)
CASSALRGETQYF

SEQ ID NO: 241251 - protein, 14 aa, Homo sapiens
  CDR3 for alpha chain variable domain of TCR clone 120626 (TRAV20, TRAJ42)
CAVQAGGSPGNIIF

SEQ ID NO: 241252 - protein, 14 aa, Homo sapiens
  CDR3 for beta chain variable domain of TCR clone 120626 (TRBV28, TRBJ1-2)
CASRIQGANYGYTF

SEQ ID NO: 241253 - protein, 11 aa, Homo sapiens
  CDR3 for alpha chain variable domain of TCR clone 120627 (TRAV12-2, TRAJ43)
CAAYNNNDMRF

SEQ ID NO: 241254 - protein, 15 aa, Homo sapiens
  CDR3 for beta chain variable domain of TCR clone 120627 (TRBV27, TRBJ2-5)
CASSLYPRGGETQYF

SEQ ID NO: 241255 - protein, 13 aa, Homo sapiens
  CDR3 for alpha chain variable domain of TCR clone 120628 (TRAV8-2, TRAJ43)
WVVSDQGDNDMRF

SEQ ID NO: 241256 - protein, 12 aa, Homo sapiens
  CDR3 for beta chain variable domain of TCR clone 120628 (TRBV7-9, TRBJ2-7)
CASRTGFDEQYF

SEQ ID NO: 241257 - protein, 13 aa, Homo sapiens
  CDR3 for alpha chain variable domain of TCR clone 120629 (TRAV12-3, TRAJ31)
CAMSANNNARLMF

SEQ ID NO: 241258 - protein, 16 aa, Homo sapiens
  CDR3 for beta chain variable domain of TCR clone 120629 (TRBV7-9, TRBJ1-2)
CASSLGFSPGEDGYTF

SEQ ID NO: 241259 - protein, 14 aa, Homo sapiens
  CDR3 for alpha chain variable domain of TCR clone 120630 (TRAV35, TRAJ22)
CAGLRPDSARQLTF

SEQ ID NO: 241260 - protein, 15 aa, Homo sapiens
  CDR3 for beta chain variable domain of TCR clone 120630 (TRBV12-4, TRBJ2-5)
CASSPPTGLQETQYF

SEQ ID NO: 241261 - protein, 13 aa, Homo sapiens
  CDR3 for alpha chain variable domain of TCR clone 120631 (TRAV4, TRAJ34)
CPVGDYNTDKLIF

SEQ ID NO: 241262 - protein, 23 aa, Homo sapiens
  CDR3 for beta chain variable domain of TCR clone 120631 (TRBV4-2, TRBJ2-3)
CASSQDPPRASSISGGRGDTQYF

SEQ ID NO: 241263 - protein, 13 aa, Homo sapiens
  CDR3 for alpha chain variable domain of TCR clone 120632 (TRAV3, TRAJ27)
CAVRPLGAGKSTF

SEQ ID NO: 241264 - protein, 15 aa, Homo sapiens
  CDR3 for beta chain variable domain of TCR clone 120632 (TRBV9, TRBJ2-1)
CASSLAGSSYNEQFF

SEQ ID NO: 241265 - protein, 12 aa, Homo sapiens
  CDR3 for alpha chain variable domain of TCR clone 120633 (TRAV27, TRAJ13)
YAGAGGYQKVTF

SEQ ID NO: 241266 - protein, 15 aa, Homo sapiens
  CDR3 for beta chain variable domain of TCR clone 120633 (TRBV20-1, TRBJ2-6)
CSARDRGPGANVLTF

SEQ ID NO: 241267 - protein, 13 aa, Homo sapiens
  CDR3 for alpha chain variable domain of TCR clone 120634 (TRAV26-2, TRAJ43)
CILRAVNNNDMRF

SEQ ID NO: 241268 - protein, 14 aa, Homo sapiens
  CDR3 for beta chain variable domain of TCR clone 120634 (TRBV7-3, TRBJ1-1)
CASSLKGGNTEAFF

SEQ ID NO: 241269 - protein, 14 aa, Homo sapiens
  CDR3 for alpha chain variable domain of TCR clone 120635 (TRAV35, TRAJ33)
CWPRGRDSNYQLIW

SEQ ID NO: 241270 - protein, 15 aa, Homo sapiens
  CDR3 for beta chain variable domain of TCR clone 120635 (TRBV6-3, TRBJ2-7)
CASSSPGTVFYEQYF

SEQ ID NO: 241271 - protein, 13 aa, Homo sapiens
  CDR3 for alpha chain variable domain of TCR clone 120636 (TRAV26-1, TRAJ48)
CIVRVVGDEKLTF

SEQ ID NO: 241272 - protein, 19 aa, Homo sapiens
  CDR3 for beta chain variable domain of TCR clone 120636 (TRBV11-3, TRBJ2-2)
CAISTRPGAKTTNTGELFF

SEQ ID NO: 241273 - protein, 14 aa, Homo sapiens
  CDR3 for alpha chain variable domain of TCR clone 120637 (TRAV17, TRAJ57)
CATDPQGGSEKLVL

SEQ ID NO: 241274 - protein, 15 aa, Homo sapiens
  CDR3 for beta chain variable domain of TCR clone 120637 (TRBV6-3, TRBJ2-7)
CASSSPGTVFYEQYF

SEQ ID NO: 241275 - protein, 14 aa, Homo sapiens
  CDR3 for alpha chain variable domain of TCR clone 120638 (TRAV8-4, TRAJ37)
CAVSGSSNTGKLIF

SEQ ID NO: 241276 - protein, 14 aa, Homo sapiens
  CDR3 for beta chain variable domain of TCR clone 120638 (TRBV19, TRBJ2-7)
CASSMGQGAIEQYF

SEQ ID NO: 241277 - protein, 11 aa, Homo sapiens
  CDR3 for alpha chain variable domain of TCR clone 120639 (TRAV25, TRAJ5)
CRGGGRRALTF

SEQ ID NO: 241278 - protein, 15 aa, Homo sapiens
  CDR3 for beta chain variable domain of TCR clone 120639 (TRBV20-1, TRBJ2-7)
CSVRDRVSGMDEQYF

SEQ ID NO: 241279 - protein, 16 aa, Homo sapiens
  CDR3 for alpha chain variable domain of TCR clone 120640 (TRAV8-6, TRAJ37)
CALSGLGSSNTGKLIF

SEQ ID NO: 241280 - protein, 15 aa, Homo sapiens
  CDR3 for beta chain variable domain of TCR clone 120640 (TRBV20-1, TRBJ1-5)
CSARSGPSMNQPQHF

SEQ ID NO: 241281 - protein, 11 aa, Homo sapiens
  CDR3 for alpha chain variable domain of TCR clone 120641 (TRAV16, TRAJ26)
CALTRWSEFCL

SEQ ID NO: 241282 - protein, 13 aa, Homo sapiens
  CDR3 for beta chain variable domain of TCR clone 120641 (TRBV7-9, TRBJ1-1)
CASSLASNTEAFF

SEQ ID NO: 241283 - protein, 16 aa, Homo sapiens
  CDR3 for alpha chain variable domain of TCR clone 120642 (TRAV17, TRAJ22)
CATDAISSGSARQLTL

SEQ ID NO: 241284 - protein, 15 aa, Homo sapiens
  CDR3 for beta chain variable domain of TCR clone 120642 (TRBV5-1, TRBJ2-1)
CASSPPRAPYNEQSF

SEQ ID NO: 241285 - protein, 14 aa, Homo sapiens
  CDR3 for alpha chain variable domain of TCR clone 120643 (TRAV1-2, TRAJ8)
CAVREDTGFQKLVF

SEQ ID NO: 241286 - protein, 15 aa, Homo sapiens
  CDR3 for beta chain variable domain of TCR clone 120643 (TRBV2, TRBJ2-7)
SASSEGLARSYEQYF

SEQ ID NO: 241287 - protein, 14 aa, Homo sapiens
  CDR3 for alpha chain variable domain of TCR clone 120644 (TRAV20, TRAJ42)
CAVQAGGSQGNLIF

SEQ ID NO: 241288 - protein, 14 aa, Homo sapiens
  CDR3 for beta chain variable domain of TCR clone 120644 (TRBV28, TRBJ1-2)
CASRMQGANYGYTF

SEQ ID NO: 241289 - protein, 13 aa, Homo sapiens
  CDR3 for alpha chain variable domain of TCR clone 120645 (TRAV12-1, TRAJ21)
CVVTLYNFNKFYF

SEQ ID NO: 241290 - protein, 20 aa, Homo sapiens
  CDR3 for beta chain variable domain of TCR clone 120645 (TRBV7-8, TRBJ2-1)
CASSFAHRLAGVRSYNEQFF

SEQ ID NO: 241291 - protein, 16 aa, Homo sapiens
  CDR3 for alpha chain variable domain of TCR clone 120646 (TRAV3, TRAJ5)
CAVRNIMDTGRRALTF

SEQ ID NO: 241292 - protein, 16 aa, Homo sapiens
  CDR3 for beta chain variable domain of TCR clone 120646 (TRBV4-2, TRBJ2-7)
CASSQEGLANSYEQYF

SEQ ID NO: 241293 - protein, 14 aa, Homo sapiens
  CDR3 for alpha chain variable domain of TCR clone 120647 (TRAV3, TRAJ17)
CAVRDAAAGNKPTF

SEQ ID NO: 241294 - protein, 15 aa, Homo sapiens
  CDR3 for beta chain variable domain of TCR clone 120647 (TRBV3-1, TRBJ2-7)
CASSQVRQGAYEQYF

SEQ ID NO: 241295 - protein, 15 aa, Homo sapiens
  CDR3 for alpha chain variable domain of TCR clone 120648 (TRAV38-1, TRAJ37)
CAFIFGSGNTGKLIF

SEQ ID NO: 241296 - protein, 16 aa, Homo sapiens
  CDR3 for beta chain variable domain of TCR clone 120648 (TRBV15, TRBJ1-2)
CATSRGPRTGGGGYTF

SEQ ID NO: 241297 - protein, 16 aa, Homo sapiens
  CDR3 for alpha chain variable domain of TCR clone 120649 (TRAV12-2, TRAJ10)
CAVNRVLTGGGNKLTF

SEQ ID NO: 241298 - protein, 14 aa, Homo sapiens
  CDR3 for beta chain variable domain of TCR clone 120649 (TRBV25-1, TRBJ1-1)
CASTHLGGNTEAFF

SEQ ID NO: 241299 - protein, 15 aa, Homo sapiens
  CDR3 for alpha chain variable domain of TCR clone 120650 (TRAV29/DV5, TRAJ29)
CAASERSSGNTPLVF

SEQ ID NO: 241300 - protein, 17 aa, Homo sapiens
  CDR3 for beta chain variable domain of TCR clone 120650 (TRBV7-8, TRBJ2-6)
CASSAGTGGAGANVLTF

SEQ ID NO: 241301 - protein, 13 aa, Homo sapiens
  CDR3 for alpha chain variable domain of TCR clone 120651 (TRAV8-3, TRAJ36)
CAVGATGANNLFF

SEQ ID NO: 241302 - protein, 16 aa, Homo sapiens
  CDR3 for beta chain variable domain of TCR clone 120651 (TRBV7-2, TRBJ1-2)
CASSSNQDRRGHGYTF

SEQ ID NO: 241303 - protein, 13 aa, Homo sapiens
  CDR3 for alpha chain variable domain of TCR clone 120652 (TRAV23/DV6, TRAJ21)
CAASIGNFNKFYF

SEQ ID NO: 241304 - protein, 14 aa, Homo sapiens
  CDR3 for beta chain variable domain of TCR clone 120652 (TRBV7-9, TRBJ2-5)
CASSLVGGEETQYF

SEQ ID NO: 241305 - protein, 13 aa, Homo sapiens
  CDR3 for alpha chain variable domain of TCR clone 120653 (TRAV13-1, TRAJ6)
WARGSGGSYIPTF

SEQ ID NO: 241306 - protein, 15 aa, Homo sapiens
  CDR3 for beta chain variable domain of TCR clone 120653 (TRBV2, TRBJ2-1)
CASSELAGSYNEQFF

SEQ ID NO: 241307 - protein, 15 aa, Homo sapiens
  CDR3 for alpha chain variable domain of TCR clone 120654 (TRAV10, TRAJ20)
CVVSAEVSNDYKLSF

SEQ ID NO: 241308 - protein, 12 aa, Homo sapiens
  CDR3 for beta chain variable domain of TCR clone 120654 (TRBV24-1, TRBJ1-1)
CATLYPDTEAFF

SEQ ID NO: 241309 - protein, 14 aa, Homo sapiens
  CDR3 for alpha chain variable domain of TCR clone 120655 (TRAV8-2, TRAJ4)
CVVSPSGGYNKLIF

SEQ ID NO: 241310 - protein, 14 aa, Homo sapiens
  CDR3 for beta chain variable domain of TCR clone 120655 (TRBV13, TRBJ2-5)
CASSLGPRGETQYF

SEQ ID NO: 241311 - protein, 12 aa, Homo sapiens
  CDR3 for alpha chain variable domain of TCR clone 120656 (TRAV8-3, TRAJ26)
CAGDNYGQNFVF

SEQ ID NO: 241312 - protein, 15 aa, Homo sapiens
  CDR3 for beta chain variable domain of TCR clone 120656 (TRBV28, TRBJ2-5)
CASSSGRTIQETQYF

SEQ ID NO: 241313 - protein, 12 aa, Homo sapiens
  CDR3 for alpha chain variable domain of TCR clone 120657 (TRAV13-1, TRAJ21)
CAALFNFNKFYF

SEQ ID NO: 241314 - protein, 14 aa, Homo sapiens
  CDR3 for beta chain variable domain of TCR clone 120657 (TRBV4-1, TRBJ2-7)
RASRLTSGSYEQYF

SEQ ID NO: 241315 - protein, 15 aa, Homo sapiens
  CDR3 for alpha chain variable domain of TCR clone 120658 (TRAV17, TRAJ4)
CTTGTWSGGYNKLIF

SEQ ID NO: 241316 - protein, 14 aa, Homo sapiens
  CDR3 for beta chain variable domain of TCR clone 120658 (TRBV7-2, TRBJ2-7)
CASRSQGAAYEQYF

SEQ ID NO: 241317 - protein, 13 aa, Homo sapiens
  CDR3 for alpha chain variable domain of TCR clone 120659 (TRAV2, TRAJ40)
CAVITSGTYKYIF

SEQ ID NO: 241318 - protein, 14 aa, Homo sapiens
  CDR3 for beta chain variable domain of TCR clone 120659 (TRBV7-2, TRBJ1-1)
CASSFLTGTTEAFF

SEQ ID NO: 241319 - protein, 14 aa, Homo sapiens
  CDR3 for alpha chain variable domain of TCR clone 120660 (TRAV12-2, TRAJ40)
CAVKIPSGTYKYIF

SEQ ID NO: 241320 - protein, 12 aa, Homo sapiens
  CDR3 for beta chain variable domain of TCR clone 120660 (TRBV19, TRBJ1-4)
CASKDWPGGLFF

SEQ ID NO: 241321 - protein, 13 aa, Homo sapiens
  CDR3 for alpha chain variable domain of TCR clone 120661 (TRAV12-2, TRAJ42)
CAVKRGSQGNLIF

SEQ ID NO: 241322 - protein, 15 aa, Homo sapiens
  CDR3 for beta chain variable domain of TCR clone 120661 (TRBV10-3, TRBJ2-7)
CAISAQAGGPYEQYF

SEQ ID NO: 241323 - protein, 15 aa, Homo sapiens
  CDR3 for alpha chain variable domain of TCR clone 120662 (TRAV8-3, TRAJ6)
YAVGPLGGGSYIPTF

SEQ ID NO: 241324 - protein, 14 aa, Homo sapiens
  CDR3 for beta chain variable domain of TCR clone 120662 (TRBV19, TRBJ2-2)
CASSTGQGAGELFF

SEQ ID NO: 241325 - protein, 16 aa, Homo sapiens
  CDR3 for alpha chain variable domain of TCR clone 120663 (TRAV30, TRAJ24)
CGTEIVDADSWVKFQF

SEQ ID NO: 241326 - protein, 13 aa, Homo sapiens
  CDR3 for beta chain variable domain of TCR clone 120663 (TRBV18, TRBJ1-2)
CASSASATEGYTF

SEQ ID NO: 241327 - protein, 12 aa, Homo sapiens
  CDR3 for alpha chain variable domain of TCR clone 120664 (TRAV12-3, TRAJ29)
CAAREGNTPLVF

SEQ ID NO: 241328 - protein, 17 aa, Homo sapiens
  CDR3 for beta chain variable domain of TCR clone 120664 (TRBV18, TRBJ2-1)
CASSPFAAGAGDNEQFF

SEQ ID NO: 241329 - protein, 15 aa, Homo sapiens
  CDR3 for alpha chain variable domain of TCR clone 120665 (TRAV3, TRAJ4)
CAVRDGTGGYNKLIV

SEQ ID NO: 241330 - protein, 15 aa, Homo sapiens
  CDR3 for beta chain variable domain of TCR clone 120665 (TRBV27, TRBJ2-7)
CASSPDQGRLYEQYF

SEQ ID NO: 241331 - protein, 13 aa, Homo sapiens
  CDR3 for alpha chain variable domain of TCR clone 120666 (TRAV3, TRAJ27)
CAVRPLGAGKSTF

SEQ ID NO: 241332 - protein, 13 aa, Homo sapiens
  CDR3 for beta chain variable domain of TCR clone 120666 (TRBV7-9, TRBJ2-3)
CASSPGSTDTLYF

SEQ ID NO: 241333 - protein, 13 aa, Homo sapiens
  CDR3 for alpha chain variable domain of TCR clone 120667 (TRAV21, TRAJ26)
CAVLDNYGQNFFF

SEQ ID NO: 241334 - protein, 16 aa, Homo sapiens
  CDR3 for beta chain variable domain of TCR clone 120667 (TRBV29-1, TRBJ2-2)
CSVETRASGNTGELFF

SEQ ID NO: 241335 - protein, 13 aa, Homo sapiens
  CDR3 for alpha chain variable domain of TCR clone 120668 (TRAV13-1, TRAJ21)
CAASIYKFNKFYF

SEQ ID NO: 241336 - protein, 15 aa, Homo sapiens
  CDR3 for beta chain variable domain of TCR clone 120668 (TRBV7-8, TRBJ1-5)
CASSLAGQPNQPQHF

SEQ ID NO: 241337 - protein, 11 aa, Homo sapiens
  CDR3 for alpha chain variable domain of TCR clone 120669 (TRAV35, TRAJ34)
CWARNTDKLIF

SEQ ID NO: 241338 - protein, 16 aa, Homo sapiens
  CDR3 for beta chain variable domain of TCR clone 120669 (TRBV27, TRBJ2-5)
CASSYGPGGQKETQYF

SEQ ID NO: 241339 - protein, 10 aa, Homo sapiens
  CDR3 for alpha chain variable domain of TCR clone 120670 (TRAV16, TRAJ22)
SAMYLRQLTF

SEQ ID NO: 241340 - protein, 14 aa, Homo sapiens
  CDR3 for beta chain variable domain of TCR clone 120670 (TRBV19, TRBJ2-7)
CASSMGQGAIEQYF

SEQ ID NO: 241341 - protein, 13 aa, Homo sapiens
  CDR3 for alpha chain variable domain of TCR clone 120671 (TRAV30, TRAJ24)
CGTVTDSWGKLQF

SEQ ID NO: 241342 - protein, 14 aa, Homo sapiens
  CDR3 for beta chain variable domain of TCR clone 120671 (TRBV6-3, TRBJ2-2)
CASTDTPDTGELFF

SEQ ID NO: 241343 - protein, 12 aa, Homo sapiens
  CDR3 for alpha chain variable domain of TCR clone 120672 (TRAV1-1, TRAJ39)
CAVPVVGNMLTF

SEQ ID NO: 241344 - protein, 13 aa, Homo sapiens
  CDR3 for beta chain variable domain of TCR clone 120672 (TRBV7-6, TRBJ1-2)
CASSLVADYGYTF

SEQ ID NO: 241345 - protein, 11 aa, Homo sapiens
  CDR3 for alpha chain variable domain of TCR clone 120673 (TRAV13-1, TRAJ6)
CANLGSYIPTF

SEQ ID NO: 241346 - protein, 13 aa, Homo sapiens
  CDR3 for beta chain variable domain of TCR clone 120673 (TRBV6-6, TRBJ2-1)
CASSLHQGDEQFF

SEQ ID NO: 241347 - protein, 18 aa, Homo sapiens
  CDR3 for alpha chain variable domain of TCR clone 120674 (TRAV26-1, TRAJ52)
CIVRVEGAGGTSYGKLTF

SEQ ID NO: 241348 - protein, 13 aa, Homo sapiens
  CDR3 for beta chain variable domain of TCR clone 120674 (TRBV7-3, TRBJ1-2)
CASSLKRGYGYTS

SEQ ID NO: 241349 - protein, 14 aa, Homo sapiens
  CDR3 for alpha chain variable domain of TCR clone 120675 (TRAV12-2, TRAJ13)
CAVKKTGGYQKVTF

SEQ ID NO: 241350 - protein, 16 aa, Homo sapiens
  CDR3 for beta chain variable domain of TCR clone 120675 (TRBV7-8, TRBJ2-6)
CASRVGDSSGANVLTF

SEQ ID NO: 241351 - protein, 18 aa, Homo sapiens
  CDR3 for alpha chain variable domain of TCR clone 120676 (TRAV13-1, TRAJ52)
CAAKNPNAGGTSYGKLTF

SEQ ID NO: 241352 - protein, 15 aa, Homo sapiens
  CDR3 for beta chain variable domain of TCR clone 120676 (TRBV11-2, TRBJ2-1)
CASSKNRGLIYEQFF

SEQ ID NO: 241353 - protein, 14 aa, Homo sapiens
  CDR3 for alpha chain variable domain of TCR clone 120677 (TRAV12-3, TRAJ10)
SHLPLTGGGNKLTF

SEQ ID NO: 241354 - protein, 15 aa, Homo sapiens
  CDR3 for beta chain variable domain of TCR clone 120677 (TRBV7-3, TRBJ2-2)
CASSGTGQGTGELFF

SEQ ID NO: 241355 - protein, 17 aa, Homo sapiens
  CDR3 for alpha chain variable domain of TCR clone 120678 (TRAV17, TRAJ28)
CATDPRRGGAGRYQPTF

SEQ ID NO: 241356 - protein, 16 aa, Homo sapiens
  CDR3 for beta chain variable domain of TCR clone 120678 (TRBV25-1, TRBJ1-1)
CASSGDRDRGRIEAFF

SEQ ID NO: 241357 - protein, 18 aa, Homo sapiens
  CDR3 for alpha chain variable domain of TCR clone 120679 (TRAV21, TRAJ52)
CAVRPSPAGGTSYGKLTF

SEQ ID NO: 241358 - protein, 14 aa, Homo sapiens
  CDR3 for beta chain variable domain of TCR clone 120679 (TRBV2, TRBJ2-7)
CASNRDRGPYEQYF

SEQ ID NO: 241359 - protein, 12 aa, Homo sapiens
  CDR3 for alpha chain variable domain of TCR clone 120680 (TRAV35, TRAJ12)
CAGMDSSYKLIF

SEQ ID NO: 241360 - protein, 14 aa, Homo sapiens
  CDR3 for beta chain variable domain of TCR clone 120680 (TRBV28, TRBJ2-5)
CASSLDRGTETQYF

SEQ ID NO: 241361 - protein, 11 aa, Homo sapiens
  CDR3 for alpha chain variable domain of TCR clone 120681 (TRAV13-1, TRAJ20)
CSPHGLCKLSF

SEQ ID NO: 241362 - protein, 14 aa, Homo sapiens
  CDR3 for beta chain variable domain of TCR clone 120681 (TRBV28, TRBJ2-5)
CASTGAGGVETQYF

SEQ ID NO: 241363 - protein, 12 aa, Homo sapiens
  CDR3 for alpha chain variable domain of TCR clone 120682 (TRAV3, TRAJ20)
CAVRDGDYKLSF

SEQ ID NO: 241364 - protein, 15 aa, Homo sapiens
  CDR3 for beta chain variable domain of TCR clone 120682 (TRBV7-3, TRBJ2-2)
CASSETGQGTGELFF

SEQ ID NO: 241365 - protein, 14 aa, Homo sapiens
  CDR3 for alpha chain variable domain of TCR clone 120683 (TRAV12-2, TRAJ13)
CAVKKTGGYQKVTF

SEQ ID NO: 241366 - protein, 17 aa, Homo sapiens
  CDR3 for beta chain variable domain of TCR clone 120683 (TRBV7-2, TRBJ2-7)
CASSLGTGTSGRYEQYF

SEQ ID NO: 241367 - protein, 16 aa, Homo sapiens
  CDR3 for alpha chain variable domain of TCR clone 120684 (TRAV35, TRAJ54)
SDVGIYPLQGAQKLVF

SEQ ID NO: 241368 - protein, 14 aa, Homo sapiens
  CDR3 for beta chain variable domain of TCR clone 120684 (TRBV25-1, TRBJ1-1)
CASTHLGGNTEAFF

SEQ ID NO: 241369 - protein, 12 aa, Homo sapiens
  CDR3 for alpha chain variable domain of TCR clone 120685 (TRAV13-1, TRAJ15)
CAASQAGTALIF

SEQ ID NO: 241370 - protein, 18 aa, Homo sapiens
  CDR3 for beta chain variable domain of TCR clone 120685 (TRBV7-9, TRBJ2-3)
CASSLPLNGQISTDTQYF

SEQ ID NO: 241371 - protein, 12 aa, Homo sapiens
  CDR3 for alpha chain variable domain of TCR clone 120686 (TRAV2, TRAJ40)
CWVTSGTYKYIF

SEQ ID NO: 241372 - protein, 14 aa, Homo sapiens
  CDR3 for beta chain variable domain of TCR clone 120686 (TRBV19, TRBJ2-1)
CASPTFVLSGEQFF

SEQ ID NO: 241373 - protein, 13 aa, Homo sapiens
  CDR3 for alpha chain variable domain of TCR clone 120687 (TRAV27, TRAJ49)
CAPRPYTRNQFYF

SEQ ID NO: 241374 - protein, 16 aa, Homo sapiens
  CDR3 for beta chain variable domain of TCR clone 120687 (TRBV4-1, TRBJ1-2)
CASSQDAGQVLYGYTF

SEQ ID NO: 241375 - protein, 16 aa, Homo sapiens
  CDR3 for alpha chain variable domain of TCR clone 120688 (TRAV1-1, TRAJ28)
CAVRDDSGAGSYQLTF

SEQ ID NO: 241376 - protein, 14 aa, Homo sapiens
  CDR3 for beta chain variable domain of TCR clone 120688 (TRBV7-8, TRBJ2-5)
CASSATGGQETQYF

SEQ ID NO: 241377 - protein, 16 aa, Homo sapiens
  CDR3 for alpha chain variable domain of TCR clone 120689 (TRAV14/DV4, TRAJ20)
CAMREGRSRDDYKLSF

SEQ ID NO: 241378 - protein, 15 aa, Homo sapiens
  CDR3 for beta chain variable domain of TCR clone 120689 (TRBV18, TRBJ2-1)
CASSPPSASYNEQFF

SEQ ID NO: 241379 - protein, 23 aa, Homo sapiens
  CDR3 for alpha chain variable domain of TCR clone 120690 (TRAV26-1, TRAJ38)
CIADNAGNNHIQNPDPAVYPLRD

SEQ ID NO: 241380 - protein, 13 aa, Homo sapiens
  CDR3 for beta chain variable domain of TCR clone 120690 (TRBV10-3, TRBJ2-7)
CASKLAVNYEQYF

SEQ ID NO: 241381 - protein, 12 aa, Homo sapiens
  CDR3 for alpha chain variable domain of TCR clone 120691 (TRAV12-1, TRAJ40)
CVVYSGTYKYIF

SEQ ID NO: 241382 - protein, 16 aa, Homo sapiens
  CDR3 for beta chain variable domain of TCR clone 120691 (TRBV6-1, TRBJ2-5)
CASSETLDRGAETQYF

SEQ ID NO: 241383 - protein, 14 aa, Homo sapiens
  CDR3 for alpha chain variable domain of TCR clone 120692 (TRAV26-1, TRAJ15)
CIEAGNQAGTALIF

SEQ ID NO: 241384 - protein, 15 aa, Homo sapiens
  CDR3 for beta chain variable domain of TCR clone 120692 (TRBV20-1, TRBJ2-7)
CSARDRVPGMDEQYF

SEQ ID NO: 241385 - protein, 14 aa, Homo sapiens
  CDR3 for alpha chain variable domain of TCR clone 120693 (TRAV8-3, TRAJ4)
CAVGAAGGYNKLIF

SEQ ID NO: 241386 - protein, 14 aa, Homo sapiens
  CDR3 for beta chain variable domain of TCR clone 120693 (TRBV4-2, TRBJ2-1)
CASGLDRAYNEQFF

SEQ ID NO: 241387 - protein, 13 aa, Homo sapiens
  CDR3 for alpha chain variable domain of TCR clone 120694 (TRAV27, TRAJ41)
CRSNSNSGYALNF

SEQ ID NO: 241388 - protein, 16 aa, Homo sapiens
  CDR3 for beta chain variable domain of TCR clone 120694 (TRBV5-1, TRBJ2-3)
CASSLGLAVYTDTQYF

SEQ ID NO: 241389 - protein, 11 aa, Homo sapiens
  CDR3 for alpha chain variable domain of TCR clone 120695 (TRAV3, TRAJ21)
RAVGNFNKFYF

SEQ ID NO: 241390 - protein, 16 aa, Homo sapiens
  CDR3 for beta chain variable domain of TCR clone 120695 (TRBV19, TRBJ2-1)
CASSKAGPSSYNEQLF

SEQ ID NO: 241391 - protein, 20 aa, Homo sapiens
  CDR3 for alpha chain variable domain of TCR clone 120696 (TRAV26-1, TRAJ42)
CCVLLHRQTYYGGSQGNTIF

SEQ ID NO: 241392 - protein, 16 aa, Homo sapiens
  CDR3 for beta chain variable domain of TCR clone 120696 (TRBV7-3, TRBJ2-2)
CASSLKRGTLSGELFF

SEQ ID NO: 241393 - protein, 17 aa, Homo sapiens
  CDR3 for alpha chain variable domain of TCR clone 120697 (TRAV3, TRAJ42)
CAVRDRDYGGSQVNLIF

SEQ ID NO: 241394 - protein, 14 aa, Homo sapiens
  CDR3 for beta chain variable domain of TCR clone 120697 (TRBV19, TRBJ2-2)
CTSSGQGIAGELFF

SEQ ID NO: 241395 - protein, 14 aa, Homo sapiens
  CDR3 for alpha chain variable domain of TCR clone 120698 (TRAV12-2, TRAJ33)
CAVKRARSNYQLIW

SEQ ID NO: 241396 - protein, 14 aa, Homo sapiens
  CDR3 for beta chain variable domain of TCR clone 120698 (TRBV13, TRBJ2-7)
CASSVKGASYEQYF

SEQ ID NO: 241397 - protein, 13 aa, Homo sapiens
  CDR3 for alpha chain variable domain of TCR clone 120699 (TRAV2, TRAJ40)
CAVVTLGTYKYIF

SEQ ID NO: 241398 - protein, 16 aa, Homo sapiens
  CDR3 for beta chain variable domain of TCR clone 120699 (TRBV19, TRBJ2-2)
CASRSPGTGATGELFF

SEQ ID NO: 241399 - protein, 14 aa, Homo sapiens
  CDR3 for alpha chain variable domain of TCR clone 120700 (TRAV1-2, TRAJ16)
CAVNRFSDGQKLLF

SEQ ID NO: 241400 - protein, 16 aa, Homo sapiens
  CDR3 for beta chain variable domain of TCR clone 120700 (TRBV5-1, TRBJ2-5)
CASSLGRTSGQETQYF

SEQ ID NO: 241401 - protein, 15 aa, Homo sapiens
  CDR3 for alpha chain variable domain of TCR clone 120701 (TRAV30, TRAJ32)
CGTEILGGATNKLIF

SEQ ID NO: 241402 - protein, 13 aa, Homo sapiens
  CDR3 for beta chain variable domain of TCR clone 120701 (TRBV20-1, TRBJ1-1)
CSASLGLGTEAFF

SEQ ID NO: 241403 - protein, 14 aa, Homo sapiens
  CDR3 for alpha chain variable domain of TCR clone 120702 (TRAV30, TRAJ33)
CGTERRFSNYQLIW

SEQ ID NO: 241404 - protein, 16 aa, Homo sapiens
  CDR3 for beta chain variable domain of TCR clone 120702 (TRBV7-3, TRBJ2-2)
CASSLKRGTLSGELFF

SEQ ID NO: 241405 - protein, 12 aa, Homo sapiens
  CDR3 for alpha chain variable domain of TCR clone 120703 (TRAV21, TRAJ39)
CAADNAGNMLTF

SEQ ID NO: 241406 - protein, 18 aa, Homo sapiens
  CDR3 for beta chain variable domain of TCR clone 120703 (TRBV18, TRBJ1-3)
CASSPRGGAGPSGNTIYF

SEQ ID NO: 241407 - protein, 10 aa, Homo sapiens
  CDR3 for alpha chain variable domain of TCR clone 120704 (TRAV30, TRAJ48)
CGIGNEKLAF

SEQ ID NO: 241408 - protein, 16 aa, Homo sapiens
  CDR3 for beta chain variable domain of TCR clone 120704 (TRBV27, TRBJ2-1)
SMNVEPGTSGDNEQFF

SEQ ID NO: 241409 - protein, 13 aa, Homo sapiens
  CDR3 for alpha chain variable domain of TCR clone 120705 (TRAV12-3, TRAJ47)
CAMKKEYGKKLVF

SEQ ID NO: 241410 - protein, 17 aa, Homo sapiens
  CDR3 for beta chain variable domain of TCR clone 120705 (TRBV11-2, TRBJ2-1)
CASSLYPPGVEYNEQFF

SEQ ID NO: 241411 - protein, 14 aa, Homo sapiens
  CDR3 for alpha chain variable domain of TCR clone 120706 (TRAV12-2, TRAJ17)
CAVLFKAAGNTLTF

SEQ ID NO: 241412 - protein, 13 aa, Homo sapiens
  CDR3 for beta chain variable domain of TCR clone 120706 (TRBV19, TRBJ1-2)
CASSQGQVYGYTF

SEQ ID NO: 241413 - protein, 16 aa, Homo sapiens
  CDR3 for alpha chain variable domain of TCR clone 120707 (TRAV8-3, TRAJ44)
CAVGASNTGTASKLPF

SEQ ID NO: 241414 - protein, 15 aa, Homo sapiens
  CDR3 for beta chain variable domain of TCR clone 120707 (TRBV27, TRBJ1-5)
CASTFNRGSNQPQHF

SEQ ID NO: 241415 - protein, 12 aa, Homo sapiens
  CDR3 for alpha chain variable domain of TCR clone 120708 (TRAV12-3, TRAJ17)
CAMTLTGNKLTF

SEQ ID NO: 241416 - protein, 15 aa, Homo sapiens
  CDR3 for beta chain variable domain of TCR clone 120708 (TRBV6-3, TRBJ2-1)
CASSCASDSYNEQFF

SEQ ID NO: 241417 - protein, 16 aa, Homo sapiens
  CDR3 for alpha chain variable domain of TCR clone 120709 (TRAV12-1, TRAJ12)
CVVNTLLMDSSYKLIF

SEQ ID NO: 241418 - protein, 17 aa, Homo sapiens
  CDR3 for beta chain variable domain of TCR clone 120709 (TRBV13, TRBJ2-3)
CASSLSRVAGGRNTQYF

SEQ ID NO: 241419 - protein, 19 aa, Homo sapiens
  CDR3 for alpha chain variable domain of TCR clone 120710 (TRAV1-2, TRAJ26)
CLLPLCCEGPDNYGQNFVF

SEQ ID NO: 241420 - protein, 17 aa, Homo sapiens
  CDR3 for beta chain variable domain of TCR clone 120710 (TRBV28, TRBJ2-5)
CASSRQGGLSGAETQYF

SEQ ID NO: 241421 - protein, 13 aa, Homo sapiens
  CDR3 for alpha chain variable domain of TCR clone 120711 (TRAV13-1, TRAJ39)
CSKYSNAGNMLTF

SEQ ID NO: 241422 - protein, 16 aa, Homo sapiens
  CDR3 for beta chain variable domain of TCR clone 120711 (TRBV20-1, TRBJ1-4)
CSALGQGLLTNEKLFF

SEQ ID NO: 241423 - protein, 15 aa, Homo sapiens
  CDR3 for alpha chain variable domain of TCR clone 120712 (TRAV25, TRAJ52)
CAGTSGGTSYVKLTF

SEQ ID NO: 241424 - protein, 16 aa, Homo sapiens
  CDR3 for beta chain variable domain of TCR clone 120712 (TRBV15, TRBJ1-2)
CATSRGPRTGGGGYTF

SEQ ID NO: 241425 - protein, 14 aa, Homo sapiens
  CDR3 for alpha chain variable domain of TCR clone 120713 (TRAV1-2, TRAJ16)
CAVNRFSDGQKLLI

SEQ ID NO: 241426 - protein, 15 aa, Homo sapiens
  CDR3 for beta chain variable domain of TCR clone 120713 (TRBV9, TRBJ1-6)
CASSVAGTGDSPLHF

SEQ ID NO: 241427 - protein, 14 aa, Homo sapiens
  CDR3 for alpha chain variable domain of TCR clone 120714 (TRAV12-3, TRAJ47)
CAMSVREYGNKLVL

SEQ ID NO: 241428 - protein, 15 aa, Homo sapiens
  CDR3 for beta chain variable domain of TCR clone 120714 (TRBV20-1, TRBJ2-2)
CSARDTRLNTGELFF

SEQ ID NO: 241429 - protein, 15 aa, Homo sapiens
  CDR3 for alpha chain variable domain of TCR clone 120715 (TRAV21, TRAJ24)
CAARSSTDSWGKLQF

SEQ ID NO: 241430 - protein, 14 aa, Homo sapiens
  CDR3 for beta chain variable domain of TCR clone 120715 (TRBV11-3, TRBJ1-6)
CASSFSGGDSPLHF

SEQ ID NO: 241431 - protein, 14 aa, Homo sapiens
  CDR3 for alpha chain variable domain of TCR clone 120716 (TRAV20, TRAJ10)
CAVRVEGGGNKLTF

SEQ ID NO: 241432 - protein, 18 aa, Homo sapiens
  CDR3 for beta chain variable domain of TCR clone 120716 (TRBV24-1, TRBJ2-1)
CATSDLMCLGRGVHEQFF

SEQ ID NO: 241433 - protein, 12 aa, Homo sapiens
  CDR3 for alpha chain variable domain of TCR clone 120717 (TRAV12-3, TRAJ17)
CAMTLTDNKLTL

SEQ ID NO: 241434 - protein, 15 aa, Homo sapiens
  CDR3 for beta chain variable domain of TCR clone 120717 (TRBV20-1, TRBJ2-7)
CSARDRVSGMDEQYF

SEQ ID NO: 241435 - protein, 14 aa, Homo sapiens
  CDR3 for alpha chain variable domain of TCR clone 120718 (TRAV26-1, TRAJ48)
CIVRVGFGNEKLTF

SEQ ID NO: 241436 - protein, 13 aa, Homo sapiens
  CDR3 for beta chain variable domain of TCR clone 120718 (TRBV11-3, TRBJ2-3)
CASSQDTKDTQYF

SEQ ID NO: 241437 - protein, 12 aa, Homo sapiens
  CDR3 for alpha chain variable domain of TCR clone 120719 (TRAV8-4, TRAJ37)
CAVRSNKGKLIF

SEQ ID NO: 241438 - protein, 16 aa, Homo sapiens
  CDR3 for beta chain variable domain of TCR clone 120719 (TRBV7-2, TRBJ2-3)
CASSLVGDASTDTQYF

SEQ ID NO: 241439 - protein, 12 aa, Homo sapiens
  CDR3 for alpha chain variable domain of TCR clone 120720 (TRAV12-1, TRAJ31)
CVVNRNNARLMF

SEQ ID NO: 241440 - protein, 16 aa, Homo sapiens
  CDR3 for beta chain variable domain of TCR clone 120720 (TRBV28, TRBJ2-1)
CASSSSYSGSLNEQFF

SEQ ID NO: 241441 - protein, 14 aa, Homo sapiens
  CDR3 for alpha chain variable domain of TCR clone 120721 (TRAV16, TRAJ3)
CALSQYSSASKIIF

SEQ ID NO: 241442 - protein, 14 aa, Homo sapiens
  CDR3 for beta chain variable domain of TCR clone 120721 (TRBV6-3, TRBJ2-1)
CASLHSAYYDEQFF

SEQ ID NO: 241443 - protein, 12 aa, Homo sapiens
  CDR3 for alpha chain variable domain of TCR clone 120722 (TRAV12-3, TRAJ17)
CAMTLTGNKLTF

SEQ ID NO: 241444 - protein, 15 aa, Homo sapiens
  CDR3 for beta chain variable domain of TCR clone 120722 (TRBV20-1, TRBJ2-7)
CSARDRVSGMGERYF

SEQ ID NO: 241445 - protein, 15 aa, Homo sapiens
  CDR3 for alpha chain variable domain of TCR clone 120723 (TRAV36/DV7, TRAJ54)
CAVEKPVQGDQKLVF

SEQ ID NO: 241446 - protein, 14 aa, Homo sapiens
  CDR3 for beta chain variable domain of TCR clone 120723 (TRBV4-3, TRBJ2-2)
CASSQGHVTGELFF

SEQ ID NO: 241447 - protein, 13 aa, Homo sapiens
  CDR3 for alpha chain variable domain of TCR clone 120724 (TRAV26-1, TRAJ29)
CIVRRSGNTPLVF

SEQ ID NO: 241448 - protein, 19 aa, Homo sapiens
  CDR3 for beta chain variable domain of TCR clone 120724 (TRBV7-9, TRBJ2-1)
CASSHNRGALLRSYNEQFF

SEQ ID NO: 241449 - protein, 12 aa, Homo sapiens
  CDR3 for alpha chain variable domain of TCR clone 120725 (TRAV3, TRAJ31)
CAVRDGNARLMF

SEQ ID NO: 241450 - protein, 18 aa, Homo sapiens
  CDR3 for beta chain variable domain of TCR clone 120725 (TRBV7-2, TRBJ2-3)
CASSLKREGIGITDTQYF

SEQ ID NO: 241451 - protein, 12 aa, Homo sapiens
  CDR3 for alpha chain variable domain of TCR clone 120726 (TRAV20, TRAJ33)
CAVRGTNYQLIW

SEQ ID NO: 241452 - protein, 13 aa, Homo sapiens
  CDR3 for beta chain variable domain of TCR clone 120726 (TRBV4-3, TRBJ1-1)
CASSPTGNTEAFF

SEQ ID NO: 241453 - protein, 18 aa, Homo sapiens
  CDR3 for alpha chain variable domain of TCR clone 120727 (TRAV21, TRAJ52)
CAVRPSPAGGTSYGKLTF

SEQ ID NO: 241454 - protein, 14 aa, Homo sapiens
  CDR3 for beta chain variable domain of TCR clone 120727 (TRBV4-1, TRBJ2-2)
CASSQAVNTGDLFF

SEQ ID NO: 241455 - protein, 15 aa, Homo sapiens
  CDR3 for alpha chain variable domain of TCR clone 120728 (TRAV8-3, TRAJ27)
CAVGPSKTNAGKSTF

SEQ ID NO: 241456 - protein, 15 aa, Homo sapiens
  CDR3 for beta chain variable domain of TCR clone 120728 (TRBV27, TRBJ2-3)
CASSLGLAATDTQYF

SEQ ID NO: 241457 - protein, 11 aa, Homo sapiens
  CDR3 for alpha chain variable domain of TCR clone 120729 (TRAV17, TRAJ9)
CATTGGFKTIF

SEQ ID NO: 241458 - protein, 14 aa, Homo sapiens
  CDR3 for beta chain variable domain of TCR clone 120729 (TRBV7-9, TRBJ2-2)
CASSGLADTGALFF

SEQ ID NO: 241459 - protein, 15 aa, Homo sapiens
  CDR3 for alpha chain variable domain of TCR clone 120730 (TRAV21, TRAJ45)
CAVSYSGGGAGGLTF

SEQ ID NO: 241460 - protein, 13 aa, Homo sapiens
  CDR3 for beta chain variable domain of TCR clone 120730 (TRBV20-1, TRBJ2-5)
CSAATELQETQYF

SEQ ID NO: 241461 - protein, 15 aa, Homo sapiens
  CDR3 for alpha chain variable domain of TCR clone 120731 (TRAV26-1, TRAJ48)
CIVRVGAFGNEKLTF

SEQ ID NO: 241462 - protein, 16 aa, Homo sapiens
  CDR3 for beta chain variable domain of TCR clone 120731 (TRBV4-1, TRBJ2-3)
CASSQRAGGLTDTQYF

SEQ ID NO: 241463 - protein, 15 aa, Homo sapiens
  CDR3 for alpha chain variable domain of TCR clone 120732 (TRAV2, TRAJ9)
CAVEDRGTGGFKTIF

SEQ ID NO: 241464 - protein, 14 aa, Homo sapiens
  CDR3 for beta chain variable domain of TCR clone 120732 (TRBV20-1, TRBJ2-5)
CSALVPGYQETQYF

SEQ ID NO: 241465 - protein, 14 aa, Homo sapiens
  CDR3 for alpha chain variable domain of TCR clone 120733 (TRAV23/DV6, TRAJ37)
CAASTSSNTGKLIF

SEQ ID NO: 241466 - protein, 14 aa, Homo sapiens
  CDR3 for beta chain variable domain of TCR clone 120733 (TRBV6-1, TRBJ1-3)
CASVQGGGGNTIYF

SEQ ID NO: 241467 - protein, 16 aa, Homo sapiens
  CDR3 for alpha chain variable domain of TCR clone 120734 (TRAV3, TRAJ21)
CDVRDIERGNFNKFYF

SEQ ID NO: 241468 - protein, 13 aa, Homo sapiens
  CDR3 for beta chain variable domain of TCR clone 120734 (TRBV4-2, TRBJ1-1)
CASSQAGNTEAFF

SEQ ID NO: 241469 - protein, 13 aa, Homo sapiens
  CDR3 for alpha chain variable domain of TCR clone 120735 (TRAV5, TRAJ30)
CAEIANRDDKIIF

SEQ ID NO: 241470 - protein, 14 aa, Homo sapiens
  CDR3 for beta chain variable domain of TCR clone 120735 (TRBV4-1, TRBJ1-1)
CASSHGQGRTEAFF

SEQ ID NO: 241471 - protein, 16 aa, Homo sapiens
  CDR3 for alpha chain variable domain of TCR clone 120736 (TRAV23/DV6, TRAJ9)
CAASIGGNTGGFKTIF

SEQ ID NO: 241472 - protein, 16 aa, Homo sapiens
  CDR3 for beta chain variable domain of TCR clone 120736 (TRBV7-9, TRBJ2-1)
CASSDVAGGSYNEQFF

SEQ ID NO: 241473 - protein, 16 aa, Homo sapiens
  CDR3 for alpha chain variable domain of TCR clone 120737 (TRAV17, TRAJ52)
CATGIIGGTSYGKMTF

SEQ ID NO: 241474 - protein, 12 aa, Homo sapiens
  CDR3 for beta chain variable domain of TCR clone 120737 (TRBV7-3, TRBJ2-1)
CASSFINNEQFF

SEQ ID NO: 241475 - protein, 14 aa, Homo sapiens
  CDR3 for alpha chain variable domain of TCR clone 120738 (TRAV12-1, TRAJ12)
CVVTRMDSSYKLIF

SEQ ID NO: 241476 - protein, 14 aa, Homo sapiens
  CDR3 for beta chain variable domain of TCR clone 120738 (TRBV4-1, TRBJ2-7)
CASSTVAGGDEQYF

SEQ ID NO: 241477 - protein, 14 aa, Homo sapiens
  CDR3 for alpha chain variable domain of TCR clone 120739 (TRAV12-3, TRAJ9)
CAMSPHTGGSKTIF

SEQ ID NO: 241478 - protein, 12 aa, Homo sapiens
  CDR3 for beta chain variable domain of TCR clone 120739 (TRBV11-2, TRBJ2-2)
CASSLGGGELFF

SEQ ID NO: 241479 - protein, 15 aa, Homo sapiens
  CDR3 for alpha chain variable domain of TCR clone 120740 (TRAV8-3, TRAJ35)
CAVGATIGFGTVLHC

SEQ ID NO: 241480 - protein, 11 aa, Homo sapiens
  CDR3 for beta chain variable domain of TCR clone 120740 (TRBV24-1, TRBJ2-5)
CATSIGETQYF

SEQ ID NO: 241481 - protein, 16 aa, Homo sapiens
  CDR3 for alpha chain variable domain of TCR clone 120741 (TRAV8-3, TRAJ13)
CAVGAYPAGGYQKVTF

SEQ ID NO: 241482 - protein, 15 aa, Homo sapiens
  CDR3 for beta chain variable domain of TCR clone 120741 (TRBV19, TRBJ1-5)
CASSIVWADNQPQHF

SEQ ID NO: 241483 - protein, 15 aa, Homo sapiens
  CDR3 for alpha chain variable domain of TCR clone 120742 (TRAV3, TRAJ27)
CAVRGFTPMQANKPL

SEQ ID NO: 241484 - protein, 12 aa, Homo sapiens
  CDR3 for beta chain variable domain of TCR clone 120742 (TRBV11-2, TRBJ2-2)
CASSLGGGELFF

SEQ ID NO: 241485 - protein, 14 aa, Homo sapiens
  CDR3 for alpha chain variable domain of TCR clone 120743 (TRAV12-2, TRAJ13)
CAVKKTGCYQKVTF

SEQ ID NO: 241486 - protein, 13 aa, Homo sapiens
  CDR3 for beta chain variable domain of TCR clone 120743 (TRBV10-3, TRBJ2-7)
CASKLAVNYEQYF

SEQ ID NO: 241487 - protein, 11 aa, Homo sapiens
  CDR3 for alpha chain variable domain of TCR clone 120744 (TRAV3, TRAJ21)
CAVGNFNKFYF

SEQ ID NO: 241488 - protein, 17 aa, Homo sapiens
  CDR3 for beta chain variable domain of TCR clone 120744 (TRBV24-1, TRBJ2-1)
CATSDVSASGTYNEQFF

SEQ ID NO: 241489 - protein, 12 aa, Homo sapiens
  CDR3 for alpha chain variable domain of TCR clone 120745 (TRAV21, TRAJ58)
CAAETSGSRLTF

SEQ ID NO: 241490 - protein, 15 aa, Homo sapiens
  CDR3 for beta chain variable domain of TCR clone 120745 (TRBV20-1, TRBJ2-7)
CSARDPVKGEVEQYF

SEQ ID NO: 241491 - protein, 11 aa, Homo sapiens
  CDR3 for alpha chain variable domain of TCR clone 120746 (TRAV12-1, TRAJ15)
CVVNAVTALIF

SEQ ID NO: 241492 - protein, 16 aa, Homo sapiens
  CDR3 for beta chain variable domain of TCR clone 120746 (TRBV28, TRBJ2-1)
CASSSRVRDSYNEQFF

SEQ ID NO: 241493 - protein, 13 aa, Homo sapiens
  CDR3 for alpha chain variable domain of TCR clone 120747 (TRAV1-1, TRAJ33)
CAVRRDSNYQLIW

SEQ ID NO: 241494 - protein, 16 aa, Homo sapiens
  CDR3 for beta chain variable domain of TCR clone 120747 (TRBV6-1, TRBJ2-2)
CDSSAFRGGDTGELFF

SEQ ID NO: 241495 - protein, 12 aa, Homo sapiens
  CDR3 for alpha chain variable domain of TCR clone 120748 (TRAV12-3, TRAJ17)
CAMTLTGNKLTF

SEQ ID NO: 241496 - protein, 17 aa, Homo sapiens
  CDR3 for beta chain variable domain of TCR clone 120748 (TRBV11-2, TRBJ2-1)
CASSLSPPGVEYNEQFF

SEQ ID NO: 241497 - protein, 15 aa, Homo sapiens
  CDR3 for alpha chain variable domain of TCR clone 120749 (TRAV17, TRAJ16)
CATALRFSDGQKLLF

SEQ ID NO: 241498 - protein, 16 aa, Homo sapiens
  CDR3 for beta chain variable domain of TCR clone 120749 (TRBV5-1, TRBJ1-1)
CASSSGGNSLNTEAFF

SEQ ID NO: 241499 - protein, 11 aa, Homo sapiens
  CDR3 for alpha chain variable domain of TCR clone 120750 (TRAV8-6, TRAJ4)
CAVSEKMVLEQ

SEQ ID NO: 241500 - protein, 14 aa, Homo sapiens
  CDR3 for beta chain variable domain of TCR clone 120750 (TRBV20-1, TRBJ1-1)
CSAQTRIGGTEAFF

SEQ ID NO: 241501 - protein, 14 aa, Homo sapiens
  CDR3 for alpha chain variable domain of TCR clone 120751 (TRAV17, TRAJ6)
CATNPAGGSYIPPF

SEQ ID NO: 241502 - protein, 15 aa, Homo sapiens
  CDR3 for beta chain variable domain of TCR clone 120751 (TRBV2, TRBJ2-5)
CASSGTVAAGETQYF

SEQ ID NO: 241503 - protein, 16 aa, Homo sapiens
  CDR3 for alpha chain variable domain of TCR clone 120752 (TRAV12-2, TRAJ45)
CAVKRNPGRGADGLTF

SEQ ID NO: 241504 - protein, 12 aa, Homo sapiens
  CDR3 for beta chain variable domain of TCR clone 120752 (TRBV6-1, TRBJ2-5)
CASSEGRETQYF

SEQ ID NO: 241505 - protein, 16 aa, Homo sapiens
  CDR3 for alpha chain variable domain of TCR clone 120753 (TRAV21, TRAJ52)
CAVTNAGGTSYGKLTF

SEQ ID NO: 241506 - protein, 16 aa, Homo sapiens
  CDR3 for beta chain variable domain of TCR clone 120753 (TRBV19, TRBJ2-1)
CASSIWGQGARNEQFF

SEQ ID NO: 241507 - protein, 11 aa, Homo sapiens
  CDR3 for alpha chain variable domain of TCR clone 120754 (TRAV12-2, TRAJ31)
CAVTRWARLIF

SEQ ID NO: 241508 - protein, 14 aa, Homo sapiens
  CDR3 for beta chain variable domain of TCR clone 120754 (TRBV19, TRBJ2-1)
CASPTFVLSGEQFF

SEQ ID NO: 241509 - protein, 14 aa, Homo sapiens
  CDR3 for alpha chain variable domain of TCR clone 120755 (TRAV13-1, TRAJ44)
CAAKATGTASNLTF

SEQ ID NO: 241510 - protein, 16 aa, Homo sapiens
  CDR3 for beta chain variable domain of TCR clone 120755 (TRBV15, TRBJ1-2)
CATSRGPRTGGGGYTF

SEQ ID NO: 241511 - protein, 12 aa, Homo sapiens
  CDR3 for alpha chain variable domain of TCR clone 120756 (TRAV20, TRAJ39)
CAVGNAGNMLTF

SEQ ID NO: 241512 - protein, 13 aa, Homo sapiens
  CDR3 for beta chain variable domain of TCR clone 120756 (TRBV4-2, TRBJ2-1)
CASSPGGYNEQFF

SEQ ID NO: 241513 - protein, 12 aa, Homo sapiens
  CDR3 for alpha chain variable domain of TCR clone 120757 (TRAV2, TRAJ33)
CAVEDSDYQLIW

SEQ ID NO: 241514 - protein, 14 aa, Homo sapiens
  CDR3 for beta chain variable domain of TCR clone 120757 (TRBV19, TRBJ1-4)
CASSINRGGEKLFF

SEQ ID NO: 241515 - protein, 14 aa, Homo sapiens
  CDR3 for alpha chain variable domain of TCR clone 120758 (TRAV8-2, TRAJ4)
CVVSPSGGYNKLIF

SEQ ID NO: 241516 - protein, 15 aa, Homo sapiens
  CDR3 for beta chain variable domain of TCR clone 120758 (TRBV4-1, TRBJ1-4)
CDSSDTGGTNEKLFF

SEQ ID NO: 241517 - protein, 16 aa, Homo sapiens
  CDR3 for alpha chain variable domain of TCR clone 120759 (TRAV3, TRAJ23)
CAVKIVIYNQGGKLIF

SEQ ID NO: 241518 - protein, 13 aa, Homo sapiens
  CDR3 for beta chain variable domain of TCR clone 120759 (TRBV10-3, TRBJ2-7)
CASKLAVNYEQYF

SEQ ID NO: 241519 - protein, 17 aa, Homo sapiens
  CDR3 for alpha chain variable domain of TCR clone 120760 (TRAV26-1, TRAJ53)
CIVRVDDSGGSNYKLTF

SEQ ID NO: 241520 - protein, 15 aa, Homo sapiens
  CDR3 for beta chain variable domain of TCR clone 120760 (TRBV28, TRBJ2-1)
CASSGLAEVDNEQFF

SEQ ID NO: 241521 - protein, 14 aa, Homo sapiens
  CDR3 for alpha chain variable domain of TCR clone 120761 (TRAV2, TRAJ37)
RAVDFTSNTGKLIF

SEQ ID NO: 241522 - protein, 15 aa, Homo sapiens
  CDR3 for beta chain variable domain of TCR clone 120761 (TRBV20-1, TRBJ1-1)
CSASRGVTGNTEAFV

SEQ ID NO: 241523 - protein, 10 aa, Homo sapiens
  CDR3 for alpha chain variable domain of TCR clone 120762 (TRAV1-2, TRAJ23)
CAGQGGKLIF

SEQ ID NO: 241524 - protein, 16 aa, Homo sapiens
  CDR3 for beta chain variable domain of TCR clone 120762 (TRBV11-2, TRBJ1-1)
CASSLRQGWEHSKAFF

SEQ ID NO: 241525 - protein, 13 aa, Homo sapiens
  CDR3 for alpha chain variable domain of TCR clone 120763 (TRAV20, TRAJ37)
CAGCSSNTGKLIF

SEQ ID NO: 241526 - protein, 12 aa, Homo sapiens
  CDR3 for beta chain variable domain of TCR clone 120763 (TRBV5-1, TRBJ2-7)
CASSLDSYEQYF

SEQ ID NO: 241527 - protein, 20 aa, Homo sapiens
  CDR3 for alpha chain variable domain of TCR clone 120764 (TRAV4, TRAJ29)
CCVLLPRGCVPFSGNTPLAF

SEQ ID NO: 241528 - protein, 17 aa, Homo sapiens
  CDR3 for beta chain variable domain of TCR clone 120764 (TRBV25-1, TRBJ2-7)
CASSDARVVFSSYEQYF

SEQ ID NO: 241529 - protein, 14 aa, Homo sapiens
  CDR3 for alpha chain variable domain of TCR clone 120765 (TRAV26-1, TRAJ48)
CIVRVGFGNEKLTF

SEQ ID NO: 241530 - protein, 17 aa, Homo sapiens
  CDR3 for beta chain variable domain of TCR clone 120765 (TRBV7-3, TRBJ2-2)
CASSLSGTSGGTGELFF

SEQ ID NO: 241531 - protein, 12 aa, Homo sapiens
  CDR3 for alpha chain variable domain of TCR clone 120766 (TRAV21, TRAJ6)
CAVKGGSDIPTF

SEQ ID NO: 241532 - protein, 13 aa, Homo sapiens
  CDR3 for beta chain variable domain of TCR clone 120766 (TRBV11-2, TRBJ1-1)
CASSFTENTEAFF

SEQ ID NO: 241533 - protein, 12 aa, Homo sapiens
  CDR3 for alpha chain variable domain of TCR clone 120767 (TRAV8-3, TRAJ20)
CAVDFNDYKLSF

SEQ ID NO: 241534 - protein, 13 aa, Homo sapiens
  CDR3 for beta chain variable domain of TCR clone 120767 (TRBV5-7, TRBJ2-3)
GASSLGRTDTQYF

SEQ ID NO: 241535 - protein, 14 aa, Homo sapiens
  CDR3 for alpha chain variable domain of TCR clone 120768 (TRAV12-1, TRAJ30)
CVVNIGGRDDKIIF

SEQ ID NO: 241536 - protein, 16 aa, Homo sapiens
  CDR3 for beta chain variable domain of TCR clone 120768 (TRBV19, TRBJ2-1)
CASSSKGTRSYNEQFF

SEQ ID NO: 241537 - protein, 17 aa, Homo sapiens
  CDR3 for alpha chain variable domain of TCR clone 120769 (TRAV2, TRAJ22)
ILQVREADAAEQRQMTF

SEQ ID NO: 241538 - protein, 16 aa, Homo sapiens
  CDR3 for beta chain variable domain of TCR clone 120769 (TRBV2, TRBJ2-5)
CASSETQGVGEETQYF

SEQ ID NO: 241539 - protein, 11 aa, Homo sapiens
  CDR3 for alpha chain variable domain of TCR clone 120770 (TRAV16, TRAJ49)
CSLNAGNQFYF

SEQ ID NO: 241540 - protein, 12 aa, Homo sapiens
  CDR3 for beta chain variable domain of TCR clone 120770 (TRBV7-9, TRBJ1-4)
CASSTDREKLFF

SEQ ID NO: 241541 - protein, 14 aa, Homo sapiens
  CDR3 for alpha chain variable domain of TCR clone 120771 (TRAV2, TRAJ29)
CAGPFQYGNTPLVF

SEQ ID NO: 241542 - protein, 19 aa, Homo sapiens
  CDR3 for beta chain variable domain of TCR clone 120771 (TRBV7-2, TRBJ2-5)
CASSLKSRPRDPVLRARHA

SEQ ID NO: 241543 - protein, 18 aa, Homo sapiens
  CDR3 for alpha chain variable domain of TCR clone 120772 (TRAV12-3, TRAJ52)
CAMSRTNAGGTSYGKLTF

SEQ ID NO: 241544 - protein, 15 aa, Homo sapiens
  CDR3 for beta chain variable domain of TCR clone 120772 (TRBV7-9, TRBJ2-2)
CASGPLDTFPGELFF

SEQ ID NO: 241545 - protein, 12 aa, Homo sapiens
  CDR3 for alpha chain variable domain of TCR clone 120773 (TRAV12-3, TRAJ21)
CAMFNNFNKFYC

SEQ ID NO: 241546 - protein, 16 aa, Homo sapiens
  CDR3 for beta chain variable domain of TCR clone 120773 (TRBV7-9, TRBJ1-2)
CASSLAPLRAAYGYTF

SEQ ID NO: 241547 - protein, 14 aa, Homo sapiens
  CDR3 for alpha chain variable domain of TCR clone 120774 (TRAV12-3, TRAJ10)
SHLPLTGGGNKLTF

SEQ ID NO: 241548 - protein, 13 aa, Homo sapiens
  CDR3 for beta chain variable domain of TCR clone 120774 (TRBV7-2, TRBJ1-1)
CASNLKGAKVAFF

SEQ ID NO: 241549 - protein, 14 aa, Homo sapiens
  CDR3 for alpha chain variable domain of TCR clone 120775 (TRAV26-2, TRAJ23)
CSRTLYNQGGRLIF

SEQ ID NO: 241550 - protein, 15 aa, Homo sapiens
  CDR3 for beta chain variable domain of TCR clone 120775 (TRBV20-1, TRBJ2-7)
CSARDRVSGMDEQYF

SEQ ID NO: 241551 - protein, 13 aa, Homo sapiens
  CDR3 for alpha chain variable domain of TCR clone 120776 (TRAV8-3, TRAJ54)
CAVSIQGAQKLVF

SEQ ID NO: 241552 - protein, 11 aa, Homo sapiens
  CDR3 for beta chain variable domain of TCR clone 120776 (TRBV29-1, TRBJ2-5)
CSEDRTGTQYF

SEQ ID NO: 241553 - protein, 12 aa, Homo sapiens
  CDR3 for alpha chain variable domain of TCR clone 120777 (TRAV13-1, TRAJ20)
CAARMGDYKLSF

SEQ ID NO: 241554 - protein, 14 aa, Homo sapiens
  CDR3 for beta chain variable domain of TCR clone 120777 (TRBV20-1, TRBJ2-5)
CSASDSGSGETQYF

SEQ ID NO: 241555 - protein, 15 aa, Homo sapiens
  CDR3 for alpha chain variable domain of TCR clone 120778 (TRAV3, TRAJ13)
CAVRVYSGGYQKVTF

SEQ ID NO: 241556 - protein, 13 aa, Homo sapiens
  CDR3 for beta chain variable domain of TCR clone 120778 (TRBV4-2, TRBJ1-1)
CASSQAGNTEAFF

SEQ ID NO: 241557 - protein, 14 aa, Homo sapiens
  CDR3 for alpha chain variable domain of TCR clone 120779 (TRAV17, TRAJ12)
CAILPMDSSYKLIF

SEQ ID NO: 241558 - protein, 16 aa, Homo sapiens
  CDR3 for beta chain variable domain of TCR clone 120779 (TRBV3-1, TRBJ2-5)
CASSPGQFNGFGTQYF

SEQ ID NO: 241559 - protein, 13 aa, Homo sapiens
  CDR3 for alpha chain variable domain of TCR clone 120780 (TRAV12-3, TRAJ54)
CAMFAQGAQKLVF

SEQ ID NO: 241560 - protein, 16 aa, Homo sapiens
  CDR3 for beta chain variable domain of TCR clone 120780 (TRBV7-6, TRBJ2-3)
WASSPRRGGLGDTQYF

SEQ ID NO: 241561 - protein, 11 aa, Homo sapiens
  CDR3 for alpha chain variable domain of TCR clone 120781 (TRAV21, TRAJ49)
CAVITGNQFYF

SEQ ID NO: 241562 - protein, 14 aa, Homo sapiens
  CDR3 for beta chain variable domain of TCR clone 120781 (TRBV5-4, TRBJ2-2)
CASRLDGGTGELFF

SEQ ID NO: 241563 - protein, 12 aa, Homo sapiens
  CDR3 for alpha chain variable domain of TCR clone 120782 (TRAV12-3, TRAJ17)
CAMTLTGNKLTF

SEQ ID NO: 241564 - protein, 15 aa, Homo sapiens
  CDR3 for beta chain variable domain of TCR clone 120782 (TRBV6-4, TRBJ2-7)
FASSDQVPPNYEQYF

SEQ ID NO: 241565 - protein, 15 aa, Homo sapiens
  CDR3 for alpha chain variable domain of TCR clone 120783 (TRAV13-2, TRAJ5)
CAENPHWTGRRALAF

SEQ ID NO: 241566 - protein, 16 aa, Homo sapiens
  CDR3 for beta chain variable domain of TCR clone 120783 (TRBV7-9, TRBJ1-3)
CASSQTSGLRMGTIYF

SEQ ID NO: 241567 - protein, 12 aa, Homo sapiens
  CDR3 for alpha chain variable domain of TCR clone 120784 (TRAV36/DV7, TRAJ40)
CAVGTGTYKYIF

SEQ ID NO: 241568 - protein, 15 aa, Homo sapiens
  CDR3 for beta chain variable domain of TCR clone 120784 (TRBV9, TRBJ1-6)
CASSVAGTGDSPLHF

SEQ ID NO: 241569 - protein, 13 aa, Homo sapiens
  CDR3 for alpha chain variable domain of TCR clone 120785 (TRAV9-2, TRAJ49)
CALIQIGGNQFYF

SEQ ID NO: 241570 - protein, 15 aa, Homo sapiens
  CDR3 for beta chain variable domain of TCR clone 120785 (TRBV20-1, TRBJ2-1)
CSASSAGSSYNEQFF

SEQ ID NO: 241571 - protein, 14 aa, Homo sapiens
  CDR3 for alpha chain variable domain of TCR clone 120786 (TRAV12-3, TRAJ10)
SHLPLTGGGNELTF

SEQ ID NO: 241572 - protein, 14 aa, Homo sapiens
  CDR3 for beta chain variable domain of TCR clone 120786 (TRBV5-1, TRBJ2-3)
CASSLERDLGPQYF

SEQ ID NO: 241573 - protein, 13 aa, Homo sapiens
  CDR3 for alpha chain variable domain of TCR clone 120787 (TRAV13-1, TRAJ20)
FAARVSNDYKLSF

SEQ ID NO: 241574 - protein, 12 aa, Homo sapiens
  CDR3 for beta chain variable domain of TCR clone 120787 (TRBV20-1, TRBJ2-1)
CSARLGTDEQFF

SEQ ID NO: 241575 - protein, 13 aa, Homo sapiens
  CDR3 for alpha chain variable domain of TCR clone 120788 (TRAV13-1, TRAJ39)
CAASIWAGDMLTF

SEQ ID NO: 241576 - protein, 15 aa, Homo sapiens
  CDR3 for beta chain variable domain of TCR clone 120788 (TRBV7-9, TRBJ1-1)
CASSLLGQGGTEAFF

SEQ ID NO: 241577 - protein, 14 aa, Homo sapiens
  CDR3 for alpha chain variable domain of TCR clone 120789 (TRAV1-2, TRAJ16)
CAVNRFSDGQKLLF

SEQ ID NO: 241578 - protein, 13 aa, Homo sapiens
  CDR3 for beta chain variable domain of TCR clone 120789 (TRBV7-6, TRBJ1-2)
CASSLVADYSYTF

SEQ ID NO: 241579 - protein, 14 aa, Homo sapiens
  CDR3 for alpha chain variable domain of TCR clone 120790 (TRAV12-3, TRAJ58)
CAMSTETSGSRLTF

SEQ ID NO: 241580 - protein, 13 aa, Homo sapiens
  CDR3 for beta chain variable domain of TCR clone 120790 (TRBV27, TRBJ2-3)
CASSWGRTDAQYF

SEQ ID NO: 241581 - protein, 11 aa, Homo sapiens
  CDR3 for alpha chain variable domain of TCR clone 120791 (TRAV6, TRAJ29)
CAPPGKHTSCL

SEQ ID NO: 241582 - protein, 17 aa, Homo sapiens
  CDR3 for beta chain variable domain of TCR clone 120791 (TRBV7-3, TRBJ2-3)
CASSPRGQGYGTDTQYF

SEQ ID NO: 241583 - protein, 14 aa, Homo sapiens
  CDR3 for alpha chain variable domain of TCR clone 120792 (TRAV12-3, TRAJ10)
SHLPLTGGGNKLTF

SEQ ID NO: 241584 - protein, 15 aa, Homo sapiens
  CDR3 for beta chain variable domain of TCR clone 120792 (TRBV28, TRBJ2-5)
CASSPGQGSIETQYF

SEQ ID NO: 241585 - protein, 14 aa, Homo sapiens
  CDR3 for alpha chain variable domain of TCR clone 120793 (TRAV12-2, TRAJ40)
CAVKIPSGTYKYIF

SEQ ID NO: 241586 - protein, 16 aa, Homo sapiens
  CDR3 for beta chain variable domain of TCR clone 120793 (TRBV19, TRBJ1-1)
CASRFGGPVTGTEAFF

SEQ ID NO: 241587 - protein, 15 aa, Homo sapiens
  CDR3 for alpha chain variable domain of TCR clone 120794 (TRAV8-3, TRAJ45)
CASSYSGGGADGLTF

SEQ ID NO: 241588 - protein, 16 aa, Homo sapiens
  CDR3 for beta chain variable domain of TCR clone 120794 (TRBV11-2, TRBJ1-2)
CASSLDTGGADYGYTF

SEQ ID NO: 241589 - protein, 16 aa, Homo sapiens
  CDR3 for alpha chain variable domain of TCR clone 120795 (TRAV20, TRAJ22)
CAVQASSSGSARQLTF

SEQ ID NO: 241590 - protein, 13 aa, Homo sapiens
  CDR3 for beta chain variable domain of TCR clone 120795 (TRBV7-2, TRBJ2-5)
CASSQTGVETQYF

SEQ ID NO: 241591 - protein, 15 aa, Homo sapiens
  CDR3 for alpha chain variable domain of TCR clone 120796 (TRAV16, TRAJ10)
CALRELTGGGNKLTF

SEQ ID NO: 241592 - protein, 14 aa, Homo sapiens
  CDR3 for beta chain variable domain of TCR clone 120796 (TRBV5-5, TRBJ2-7)
CASSLGQGTYVQYF

SEQ ID NO: 241593 - protein, 14 aa, Homo sapiens
  CDR3 for alpha chain variable domain of TCR clone 120797 (TRAV17, TRAJ45)
CATDARGGADGLTF

SEQ ID NO: 241594 - protein, 11 aa, Homo sapiens
  CDR3 for beta chain variable domain of TCR clone 120797 (TRBV28, TRBJ2-5)
CATGNQGTQYF

SEQ ID NO: 241595 - protein, 19 aa, Homo sapiens
  CDR3 for alpha chain variable domain of TCR clone 120798 (TRAV2, TRAJ20)
ILQVREADAAVYRDCKLSF

SEQ ID NO: 241596 - protein, 16 aa, Homo sapiens
  CDR3 for beta chain variable domain of TCR clone 120798 (TRBV19, TRBJ2-1)
CASSKAGLSSYNEQFF

SEQ ID NO: 241597 - protein, 14 aa, Homo sapiens
  CDR3 for alpha chain variable domain of TCR clone 120799 (TRAV8-4, TRAJ8)
CAVSLNTGFQKLVF

SEQ ID NO: 241598 - protein, 13 aa, Homo sapiens
  CDR3 for beta chain variable domain of TCR clone 120799 (TRBV7-9, TRBJ2-3)
CASSPWSTDTQYF

SEQ ID NO: 241599 - protein, 13 aa, Homo sapiens
  CDR3 for alpha chain variable domain of TCR clone 120800 (TRAV12-3, TRAJ9)
CAMRNTGGFKTIF

SEQ ID NO: 241600 - protein, 14 aa, Homo sapiens
  CDR3 for beta chain variable domain of TCR clone 120800 (TRBV11-2, TRBJ2-7)
CASSSTGGGYEQYF

SEQ ID NO: 241601 - protein, 17 aa, Homo sapiens
  CDR3 for alpha chain variable domain of TCR clone 120801 (TRAV3, TRAJ6)
CAVIDGPRAGGSYIPTF

SEQ ID NO: 241602 - protein, 16 aa, Homo sapiens
  CDR3 for beta chain variable domain of TCR clone 120801 (TRBV7-8, TRBJ2-3)
CASSTEGQRETDTQYF

SEQ ID NO: 241603 - protein, 13 aa, Homo sapiens
  CDR3 for alpha chain variable domain of TCR clone 120802 (TRAV36/DV7, TRAJ54)
CAVDIQGAQKLVF

SEQ ID NO: 241604 - protein, 14 aa, Homo sapiens
  CDR3 for beta chain variable domain of TCR clone 120802 (TRBV19, TRBJ2-7)
CASNFRGTFTGMYF

SEQ ID NO: 241605 - protein, 17 aa, Homo sapiens
  CDR3 for alpha chain variable domain of TCR clone 120803 (TRAV26-2, TRAJ42)
CILRDVGYGGSQGNLIF

SEQ ID NO: 241606 - protein, 15 aa, Homo sapiens
  CDR3 for beta chain variable domain of TCR clone 120803 (TRBV7-3, TRBJ2-2)
CASSETGQGTGELFF

SEQ ID NO: 241607 - protein, 13 aa, Homo sapiens
  CDR3 for alpha chain variable domain of TCR clone 120804 (TRAV2, TRAJ40)
CAVVTSGTYKYIF

SEQ ID NO: 241608 - protein, 15 aa, Homo sapiens
  CDR3 for beta chain variable domain of TCR clone 120804 (TRBV5-1, TRBJ2-2)
CASSSQGGNTGELFF

SEQ ID NO: 241609 - protein, 14 aa, Homo sapiens
  CDR3 for alpha chain variable domain of TCR clone 120805 (TRAV35, TRAJ50)
CAGHRKASYDKVIF

SEQ ID NO: 241610 - protein, 13 aa, Homo sapiens
  CDR3 for beta chain variable domain of TCR clone 120805 (TRBV7-7, TRBJ2-3)
CASSLSRADTQYF

SEQ ID NO: 241611 - protein, 14 aa, Homo sapiens
  CDR3 for alpha chain variable domain of TCR clone 120806 (TRAV20, TRAJ10)
CAVRVEGGGNKLNF

SEQ ID NO: 241612 - protein, 18 aa, Homo sapiens
  CDR3 for beta chain variable domain of TCR clone 120806 (TRBV24-1, TRBJ2-1)
CATSDLMFLGRGVHEQFF

SEQ ID NO: 241613 - protein, 14 aa, Homo sapiens
  CDR3 for alpha chain variable domain of TCR clone 120807 (TRAV1-2, TRAJ8)
CAVREDTGFQKLVF

SEQ ID NO: 241614 - protein, 15 aa, Homo sapiens
  CDR3 for beta chain variable domain of TCR clone 120807 (TRBV28, TRBJ2-6)
CASSWAGSGANVLTF

SEQ ID NO: 241615 - protein, 15 aa, Homo sapiens
  CDR3 for alpha chain variable domain of TCR clone 120808 (TRAV26-2, TRAJ6)
CILGADSGGSYIPTF

SEQ ID NO: 241616 - protein, 14 aa, Homo sapiens
  CDR3 for beta chain variable domain of TCR clone 120808 (TRBV19, TRBJ2-1)
CASPTFVLSGEQFF

SEQ ID NO: 241617 - protein, 14 aa, Homo sapiens
  CDR3 for alpha chain variable domain of TCR clone 120809 (TRAV2, TRAJ6)
CAVSSSGGSYIPTF

SEQ ID NO: 241618 - protein, 16 aa, Homo sapiens
  CDR3 for beta chain variable domain of TCR clone 120809 (TRBV20-1, TRBJ2-3)
CSAVRDRGPIADTQYF

SEQ ID NO: 241619 - protein, 13 aa, Homo sapiens
  CDR3 for alpha chain variable domain of TCR clone 120810 (TRAV12-2, TRAJ37)
CAGGSGNTGKLIF

SEQ ID NO: 241620 - protein, 14 aa, Homo sapiens
  CDR3 for beta chain variable domain of TCR clone 120810 (TRBV6-1, TRBJ2-6)
CASQQGSGANVLTF

SEQ ID NO: 241621 - protein, 14 aa, Homo sapiens
  CDR3 for alpha chain variable domain of TCR clone 120811 (TRAV12-3, TRAJ13)
CAMKNSGGYQKVTF

SEQ ID NO: 241622 - protein, 14 aa, Homo sapiens
  CDR3 for beta chain variable domain of TCR clone 120811 (TRBV7-2, TRBJ2-7)
CASSPKTSFYEQYF

SEQ ID NO: 241623 - protein, 14 aa, Homo sapiens
  CDR3 for alpha chain variable domain of TCR clone 120812 (TRAV12-3, TRAJ10)
SHLPLTGGGNKLTF

SEQ ID NO: 241624 - protein, 13 aa, Homo sapiens
  CDR3 for beta chain variable domain of TCR clone 120812 (TRBV19, TRBJ2-1)
CASSMYRVNEQFF

SEQ ID NO: 241625 - protein, 14 aa, Homo sapiens
  CDR3 for alpha chain variable domain of TCR clone 120813 (TRAV23/DV6, TRAJ27)
CAASRDTNAGKSNF

SEQ ID NO: 241626 - protein, 13 aa, Homo sapiens
  CDR3 for beta chain variable domain of TCR clone 120813 (TRBV20-1, TRBJ1-5)
CSASGRGNQPQHF

SEQ ID NO: 241627 - protein, 13 aa, Homo sapiens
  CDR3 for alpha chain variable domain of TCR clone 120814 (TRAV12-1, TRAJ3)
CVVNPRGASKIIF

SEQ ID NO: 241628 - protein, 13 aa, Homo sapiens
  CDR3 for beta chain variable domain of TCR clone 120814 (TRBV28, TRBJ1-5)
CASSDRGNQAQHF

SEQ ID NO: 241629 - protein, 17 aa, Homo sapiens
  CDR3 for alpha chain variable domain of TCR clone 120815 (TRAV3, TRAJ6)
CAVRDGPRAGGSYIPTF

SEQ ID NO: 241630 - protein, 20 aa, Homo sapiens
  CDR3 for beta chain variable domain of TCR clone 120815 (TRBV28, TRBJ2-1)
CASTPIGRSLGLAGGNEQFF

SEQ ID NO: 241631 - protein, 16 aa, Homo sapiens
  CDR3 for alpha chain variable domain of TCR clone 120816 (TRAV1-2, TRAJ10)
CAVRGVLTGGGNKLTF

SEQ ID NO: 241632 - protein, 16 aa, Homo sapiens
  CDR3 for beta chain variable domain of TCR clone 120816 (TRBV12-5, TRBJ2-5)
CASGTRTSGNQETQYF

SEQ ID NO: 241633 - protein, 11 aa, Homo sapiens
  CDR3 for alpha chain variable domain of TCR clone 120817 (TRAV27, TRAJ43)
CAGANNNDMRF

SEQ ID NO: 241634 - protein, 14 aa, Homo sapiens
  CDR3 for beta chain variable domain of TCR clone 120817 (TRBV27, TRBJ2-3)
CASSWAGTTDTQYF

SEQ ID NO: 241635 - protein, 18 aa, Homo sapiens
  CDR3 for alpha chain variable domain of TCR clone 120818 (TRAV1-2, TRAJ18)
CAVRDMGDRGSTLGRRYV

SEQ ID NO: 241636 - protein, 16 aa, Homo sapiens
  CDR3 for beta chain variable domain of TCR clone 120818 (TRBV29-1, TRBJ1-2)
CSVEANRDIANYGYTF

SEQ ID NO: 241637 - protein, 15 aa, Homo sapiens
  CDR3 for alpha chain variable domain of TCR clone 120819 (TRAV27, TRAJ45)
CAPVDSGGGADGLTF

SEQ ID NO: 241638 - protein, 13 aa, Homo sapiens
  CDR3 for beta chain variable domain of TCR clone 120819 (TRBV7-9, TRBJ1-2)
CASSLKQNYGYTF

SEQ ID NO: 241639 - protein, 15 aa, Homo sapiens
  CDR3 for alpha chain variable domain of TCR clone 120820 (TRAV26-1, TRAJ29)
CIVRVEGSGNTPLVF

SEQ ID NO: 241640 - protein, 14 aa, Homo sapiens
  CDR3 for beta chain variable domain of TCR clone 120820 (TRBV7-2, TRBJ2-5)
CASSPRGSSETQYF

SEQ ID NO: 241641 - protein, 14 aa, Homo sapiens
  CDR3 for alpha chain variable domain of TCR clone 120821 (TRAV1-2, TRAJ8)
CAVRGDTGFQKLVF

SEQ ID NO: 241642 - protein, 17 aa, Homo sapiens
  CDR3 for beta chain variable domain of TCR clone 120821 (TRBV9, TRBJ2-2)
CASSVGGQGTDTGELFF

SEQ ID NO: 241643 - protein, 12 aa, Homo sapiens
  CDR3 for alpha chain variable domain of TCR clone 120822 (TRAV27, TRAJ9)
CAGESGGFKTIF

SEQ ID NO: 241644 - protein, 16 aa, Homo sapiens
  CDR3 for beta chain variable domain of TCR clone 120822 (TRBV27, TRBJ2-2)
CASSSSGVSNTGELFF

SEQ ID NO: 241645 - protein, 13 aa, Homo sapiens
  CDR3 for alpha chain variable domain of TCR clone 120823 (TRAV17, TRAJ5)
CAPMDTGRRALTF

SEQ ID NO: 241646 - protein, 13 aa, Homo sapiens
  CDR3 for beta chain variable domain of TCR clone 120823 (TRBV19, TRBJ1-2)
CASSVPGQDGYTF

SEQ ID NO: 241647 - protein, 17 aa, Homo sapiens
  CDR3 for alpha chain variable domain of TCR clone 120824 (TRAV2, TRAJ22)
TLQVREADAAEQRQLTF

SEQ ID NO: 241648 - protein, 12 aa, Homo sapiens
  CDR3 for beta chain variable domain of TCR clone 120824 (TRBV11-2, TRBJ2-1)
CASSPGNNEQFF

SEQ ID NO: 241649 - protein, 13 aa, Homo sapiens
  CDR3 for alpha chain variable domain of TCR clone 120825 (TRAV34, TRAJ33)
CGADMNSNYQLIW

SEQ ID NO: 241650 - protein, 16 aa, Homo sapiens
  CDR3 for beta chain variable domain of TCR clone 120825 (TRBV20-1, TRBJ2-1)
CSASRAGGPGYNEQFF

SEQ ID NO: 241651 - protein, 13 aa, Homo sapiens
  CDR3 for alpha chain variable domain of TCR clone 120826 (TRAV29/DV5, TRAJ31)
CAASRNNNARLMF

SEQ ID NO: 241652 - protein, 14 aa, Homo sapiens
  CDR3 for beta chain variable domain of TCR clone 120826 (TRBV5-7, TRBJ1-2)
CASSLVRGDYGYTF

SEQ ID NO: 241653 - protein, 13 aa, Homo sapiens
  CDR3 for alpha chain variable domain of TCR clone 120827 (TRAV12-3, TRAJ29)
CAMTLSGNTPLVF

SEQ ID NO: 241654 - protein, 15 aa, Homo sapiens
  CDR3 for beta chain variable domain of TCR clone 120827 (TRBV5-1, TRBJ2-6)
CASSLDPAGANVLTF

SEQ ID NO: 241655 - protein, 15 aa, Homo sapiens
  CDR3 for alpha chain variable domain of TCR clone 120828 (TRAV21, TRAJ32)
CAVNSYGGATNKLIF

SEQ ID NO: 241656 - protein, 18 aa, Homo sapiens
  CDR3 for beta chain variable domain of TCR clone 120828 (TRBV7-9, TRBJ2-1)
CASSTGLAEGSSYNEKFF

SEQ ID NO: 241657 - protein, 11 aa, Homo sapiens
  CDR3 for alpha chain variable domain of TCR clone 120829 (TRAV21, TRAJ34)
CAHYNTDKLIF

SEQ ID NO: 241658 - protein, 13 aa, Homo sapiens
  CDR3 for beta chain variable domain of TCR clone 120829 (TRBV4-1, TRBJ2-2)
CASSQENTGELFF

SEQ ID NO: 241659 - protein, 15 aa, Homo sapiens
  CDR3 for alpha chain variable domain of TCR clone 120830 (TRAV3, TRAJ5)
CAVRDLDTGRRALTF

SEQ ID NO: 241660 - protein, 13 aa, Homo sapiens
  CDR3 for beta chain variable domain of TCR clone 120830 (TRBV12-4, TRBJ2-7)
CASSPTEPYEQCF

SEQ ID NO: 241661 - protein, 11 aa, Homo sapiens
  CDR3 for alpha chain variable domain of TCR clone 120831 (TRAV1-1, TRAJ23)
CAVRQGGKLIF

SEQ ID NO: 241662 - protein, 18 aa, Homo sapiens
  CDR3 for beta chain variable domain of TCR clone 120831 (TRBV12-4, TRBJ2-2)
CASSLVAGTRGRTGELFF

SEQ ID NO: 241663 - protein, 12 aa, Homo sapiens
  CDR3 for alpha chain variable domain of TCR clone 120832 (TRAV27, TRAJ9)
CAGESGGFKTIF

SEQ ID NO: 241664 - protein, 18 aa, Homo sapiens
  CDR3 for beta chain variable domain of TCR clone 120832 (TRBV10-2, TRBJ2-2)
CISAPAVHRRADAGELFF

SEQ ID NO: 241665 - protein, 13 aa, Homo sapiens
  CDR3 for alpha chain variable domain of TCR clone 120833 (TRAV20, TRAJ20)
CAVRDFNDYKLSF

SEQ ID NO: 241666 - protein, 13 aa, Homo sapiens
  CDR3 for beta chain variable domain of TCR clone 120833 (TRBV7-3, TRBJ1-1)
CASSQDWGAEAFF

SEQ ID NO: 241667 - protein, 13 aa, Homo sapiens
  CDR3 for alpha chain variable domain of TCR clone 120834 (TRAV8-3, TRAJ21)
CAVGAYNFNKFYF

SEQ ID NO: 241668 - protein, 16 aa, Homo sapiens
  CDR3 for beta chain variable domain of TCR clone 120834 (TRBV7-2, TRBJ1-4)
CASSPVGRFDREKLFF

SEQ ID NO: 241669 - protein, 13 aa, Homo sapiens
  CDR3 for alpha chain variable domain of TCR clone 120835 (TRAV13-2, TRAJ53)
CAENMGSNYKLTF

SEQ ID NO: 241670 - protein, 15 aa, Homo sapiens
  CDR3 for beta chain variable domain of TCR clone 120835 (TRBV7-9, TRBJ1-6)
CASSSPGRGNSPLHF

SEQ ID NO: 241671 - protein, 14 aa, Homo sapiens
  CDR3 for alpha chain variable domain of TCR clone 120836 (TRAV2, TRAJ9)
CAVEDRSGGFKTIV

SEQ ID NO: 241672 - protein, 12 aa, Homo sapiens
  CDR3 for beta chain variable domain of TCR clone 120836 (TRBV11-2, TRBJ2-1)
CASSPGNNEQFF

SEQ ID NO: 241673 - protein, 15 aa, Homo sapiens
  CDR3 for alpha chain variable domain of TCR clone 120837 (TRAV38-1, TRAJ37)
CAFIFGSGNTGKLIF

SEQ ID NO: 241674 - protein, 16 aa, Homo sapiens
  CDR3 for beta chain variable domain of TCR clone 120837 (TRBV29-1, TRBJ2-7)
CSVEVVGTSGSYEQYF

SEQ ID NO: 241675 - protein, 12 aa, Homo sapiens
  CDR3 for alpha chain variable domain of TCR clone 120838 (TRAV13-1, TRAJ21)
CAAKEGFNKFYF

SEQ ID NO: 241676 - protein, 13 aa, Homo sapiens
  CDR3 for beta chain variable domain of TCR clone 120838 (TRBV10-3, TRBJ1-2)
CAISERDSYGYTF

SEQ ID NO: 241677 - protein, 15 aa, Homo sapiens
  CDR3 for alpha chain variable domain of TCR clone 120839 (TRAV8-3, TRAJ45)
CASSYSGGGADGLTF

SEQ ID NO: 241678 - protein, 12 aa, Homo sapiens
  CDR3 for beta chain variable domain of TCR clone 120839 (TRBV12-4, TRBJ2-7)
FASSLGGYEQYF

SEQ ID NO: 241679 - protein, 16 aa, Homo sapiens
  CDR3 for alpha chain variable domain of TCR clone 120840 (TRAV12-1, TRAJ45)
CVVIRYSGGGADGLTF

SEQ ID NO: 241680 - protein, 12 aa, Homo sapiens
  CDR3 for beta chain variable domain of TCR clone 120840 (TRBV6-5, TRBJ2-2)
CASRQINGELFF

SEQ ID NO: 241681 - protein, 14 aa, Homo sapiens
  CDR3 for alpha chain variable domain of TCR clone 120841 (TRAV13-1, TRAJ10)
CAAKEPGGGNKLAF

SEQ ID NO: 241682 - protein, 14 aa, Homo sapiens
  CDR3 for beta chain variable domain of TCR clone 120841 (TRBV6-6, TRBJ2-7)
CASSDSGAGYEQYF

SEQ ID NO: 241683 - protein, 12 aa, Homo sapiens
  CDR3 for alpha chain variable domain of TCR clone 120842 (TRAV25, TRAJ11)
CAGASGYSTLTF

SEQ ID NO: 241684 - protein, 14 aa, Homo sapiens
  CDR3 for beta chain variable domain of TCR clone 120842 (TRBV5-8, TRBJ2-3)
CASSLGQGTDRQYF

SEQ ID NO: 241685 - protein, 15 aa, Homo sapiens
  CDR3 for alpha chain variable domain of TCR clone 120843 (TRAV3, TRAJ22)
CAVRDRGGSARQLTV

SEQ ID NO: 241686 - protein, 13 aa, Homo sapiens
  CDR3 for beta chain variable domain of TCR clone 120843 (TRBV2, TRBJ1-5)
CATAGPGNQPQHF

SEQ ID NO: 241687 - protein, 14 aa, Homo sapiens
  CDR3 for alpha chain variable domain of TCR clone 120844 (TRAV13-1, TRAJ3)
CASEGYSSASKIIF

SEQ ID NO: 241688 - protein, 12 aa, Homo sapiens
  CDR3 for beta chain variable domain of TCR clone 120844 (TRBV7-9, TRBJ2-7)
CASSFGSYEQYF

SEQ ID NO: 241689 - protein, 16 aa, Homo sapiens
  CDR3 for alpha chain variable domain of TCR clone 120845 (TRAV23/DV6, TRAJ9)
CAASIGGNTGGFKTIF

SEQ ID NO: 241690 - protein, 14 aa, Homo sapiens
  CDR3 for beta chain variable domain of TCR clone 120845 (TRBV9, TRBJ2-7)
CASCVGVGSYEQYF

SEQ ID NO: 241691 - protein, 12 aa, Homo sapiens
  CDR3 for alpha chain variable domain of TCR clone 120846 (TRAV25, TRAJ38)
CAVTGNNRKLIW

SEQ ID NO: 241692 - protein, 14 aa, Homo sapiens
  CDR3 for beta chain variable domain of TCR clone 120846 (TRBV19, TRBJ1-5)
CASSKMTGPQPQHF

SEQ ID NO: 241693 - protein, 14 aa, Homo sapiens
  CDR3 for alpha chain variable domain of TCR clone 120847 (TRAV2, TRAJ37)
CAVDFTSNTGKLIF

SEQ ID NO: 241694 - protein, 12 aa, Homo sapiens
  CDR3 for beta chain variable domain of TCR clone 120847 (TRBV11-2, TRBJ2-5)
CASSLGQETQYF

SEQ ID NO: 241695 - protein, 14 aa, Homo sapiens
  CDR3 for alpha chain variable domain of TCR clone 120848 (TRAV13-1, TRAJ35)
CAASKGGFGNVLHC

SEQ ID NO: 241696 - protein, 18 aa, Homo sapiens
  CDR3 for beta chain variable domain of TCR clone 120848 (TRBV18, TRBJ1-3)
CASPPRGGAGPSGNTIYF

SEQ ID NO: 241697 - protein, 15 aa, Homo sapiens
  CDR3 for alpha chain variable domain of TCR clone 120849 (TRAV3, TRAJ4)
CAQNMSSGGYNKLIF

SEQ ID NO: 241698 - protein, 16 aa, Homo sapiens
  CDR3 for beta chain variable domain of TCR clone 120849 (TRBV3-1, TRBJ1-6)
CASSQEFQGSYSPLHF

SEQ ID NO: 241699 - protein, 13 aa, Homo sapiens
  CDR3 for alpha chain variable domain of TCR clone 120850 (TRAV17, TRAJ9)
CATDYTGGFKTIF

SEQ ID NO: 241700 - protein, 16 aa, Homo sapiens
  CDR3 for beta chain variable domain of TCR clone 120850 (TRBV7-7, TRBJ2-1)
CASSLASGTSYNEQYF

SEQ ID NO: 241701 - protein, 14 aa, Homo sapiens
  CDR3 for alpha chain variable domain of TCR clone 120851 (TRAV27, TRAJ42)
CAGGDGGSQGNLIF

SEQ ID NO: 241702 - protein, 12 aa, Homo sapiens
  CDR3 for beta chain variable domain of TCR clone 120851 (TRBV11-2, TRBJ2-2)
CASSLGGGELFF

SEQ ID NO: 241703 - protein, 16 aa, Homo sapiens
  CDR3 for alpha chain variable domain of TCR clone 120852 (TRAV1-2, TRAJ10)
CAVRGVLTGGGNELTF

SEQ ID NO: 241704 - protein, 15 aa, Homo sapiens
  CDR3 for beta chain variable domain of TCR clone 120852 (TRBV11-2, TRBJ2-1)
CASSLGTSGLNEQFF

SEQ ID NO: 241705 - protein, 17 aa, Homo sapiens
  CDR3 for alpha chain variable domain of TCR clone 120853 (TRAV26-1, TRAJ58)
CIVRVGAEETSGSRVTF

SEQ ID NO: 241706 - protein, 13 aa, Homo sapiens
  CDR3 for beta chain variable domain of TCR clone 120853 (TRBV12-5, TRBJ1-2)
CASGVRTGNGYTF

SEQ ID NO: 241707 - protein, 17 aa, Homo sapiens
  CDR3 for alpha chain variable domain of TCR clone 120854 (TRAV3, TRAJ6)
CAVRDGPRAGGSYIHTF

SEQ ID NO: 241708 - protein, 13 aa, Homo sapiens
  CDR3 for beta chain variable domain of TCR clone 120854 (TRBV20-1, TRBJ1-1)
CSARGGGNTEAFF

SEQ ID NO: 241709 - protein, 16 aa, Homo sapiens
  CDR3 for alpha chain variable domain of TCR clone 120855 (TRAV26-2, TRAJ45)
CTTASPIGGGADGLTF

SEQ ID NO: 241710 - protein, 20 aa, Homo sapiens
  CDR3 for beta chain variable domain of TCR clone 120855 (TRBV28, TRBJ2-1)
CASTPIGQSPGLAGGNEQFF

SEQ ID NO: 241711 - protein, 18 aa, Homo sapiens
  CDR3 for alpha chain variable domain of TCR clone 120856 (TRAV29/DV5, TRAJ52)
SAAGFRGAGGTSYGKLTF

SEQ ID NO: 241712 - protein, 16 aa, Homo sapiens
  CDR3 for beta chain variable domain of TCR clone 120856 (TRBV7-3, TRBJ2-2)
CASSLKRGTLSGELFF

SEQ ID NO: 241713 - protein, 18 aa, Homo sapiens
  CDR3 for alpha chain variable domain of TCR clone 120857 (TRAV21, TRAJ52)
CAVRPSPAGGTSYGKLTF

SEQ ID NO: 241714 - protein, 16 aa, Homo sapiens
  CDR3 for beta chain variable domain of TCR clone 120857 (TRBV7-2, TRBJ2-5)
CASSSKWLSGQETQYF

SEQ ID NO: 241715 - protein, 15 aa, Homo sapiens
  CDR3 for alpha chain variable domain of TCR clone 120858 (TRAV12-3, TRAJ27)
CAMRAYNTDAGKSTF

SEQ ID NO: 241716 - protein, 13 aa, Homo sapiens
  CDR3 for beta chain variable domain of TCR clone 120858 (TRBV11-2, TRBJ2-5)
CASGRGPSETQYF

SEQ ID NO: 241717 - protein, 16 aa, Homo sapiens
  CDR3 for alpha chain variable domain of TCR clone 120859 (TRAV3, TRAJ10)
CAVRDRRAGGGNKLTF

SEQ ID NO: 241718 - protein, 13 aa, Homo sapiens
  CDR3 for beta chain variable domain of TCR clone 120859 (TRBV20-1, TRBJ2-7)
CSARWGYNYEQYF

SEQ ID NO: 241719 - protein, 11 aa, Homo sapiens
  CDR3 for alpha chain variable domain of TCR clone 120860 (TRAV2, TRAJ33)
CAVDSNYQLIW

SEQ ID NO: 241720 - protein, 14 aa, Homo sapiens
  CDR3 for beta chain variable domain of TCR clone 120860 (TRBV11-2, TRBJ2-3)
CASSRLARTDKQYF

SEQ ID NO: 241721 - protein, 12 aa, Homo sapiens
  CDR3 for alpha chain variable domain of TCR clone 120861 (TRAV1-1, TRAJ8)
CAGGTGFQKLVF

SEQ ID NO: 241722 - protein, 15 aa, Homo sapiens
  CDR3 for beta chain variable domain of TCR clone 120861 (TRBV20-1, TRBJ2-1)
CSARSPGGPGNEQFF

SEQ ID NO: 241723 - protein, 12 aa, Homo sapiens
  CDR3 for alpha chain variable domain of TCR clone 120862 (TRAV12-3, TRAJ17)
CAMTLTGNKLTF

SEQ ID NO: 241724 - protein, 13 aa, Homo sapiens
  CDR3 for beta chain variable domain of TCR clone 120862 (TRBV27, TRBJ2-3)
CASSWGRTDTQYF

SEQ ID NO: 241725 - protein, 14 aa, Homo sapiens
  CDR3 for alpha chain variable domain of TCR clone 120863 (TRAV12-3, TRAJ10)
SHLPLTGRGNKLTF

SEQ ID NO: 241726 - protein, 12 aa, Homo sapiens
  CDR3 for beta chain variable domain of TCR clone 120863 (TRBV7-3, TRBJ2-5)
CASSSPGGTQYF

SEQ ID NO: 241727 - protein, 15 aa, Homo sapiens
  CDR3 for alpha chain variable domain of TCR clone 120864 (TRAV17, TRAJ57)
CATGPSQGGSEKLVF

SEQ ID NO: 241728 - protein, 12 aa, Homo sapiens
  CDR3 for beta chain variable domain of TCR clone 120864 (TRBV6-1, TRBJ1-1)
CASNSPTAEAFF

SEQ ID NO: 241729 - protein, 13 aa, Homo sapiens
  CDR3 for alpha chain variable domain of TCR clone 120865 (TRAV27, TRAJ45)
CRSSGGVADGLTF

SEQ ID NO: 241730 - protein, 17 aa, Homo sapiens
  CDR3 for beta chain variable domain of TCR clone 120865 (TRBV11-2, TRBJ2-1)
CASSLYPPGVEYNERFF

SEQ ID NO: 241731 - protein, 17 aa, Homo sapiens
  CDR3 for alpha chain variable domain of TCR clone 120866 (TRAV3, TRAJ6)
CAVRDGPRAGGSYIPTF

SEQ ID NO: 241732 - protein, 15 aa, Homo sapiens
  CDR3 for beta chain variable domain of TCR clone 120866 (TRBV11-2, TRBJ2-1)
CASSKNRGLIYEQFF

SEQ ID NO: 241733 - protein, 12 aa, Homo sapiens
  CDR3 for alpha chain variable domain of TCR clone 120867 (TRAV12-3, TRAJ40)
CAVSSGTYKYIF

SEQ ID NO: 241734 - protein, 15 aa, Homo sapiens
  CDR3 for beta chain variable domain of TCR clone 120867 (TRBV7-9, TRBJ2-7)
CASSPSGGLTYEQYF

SEQ ID NO: 241735 - protein, 17 aa, Homo sapiens
  CDR3 for alpha chain variable domain of TCR clone 120868 (TRAV4, TRAJ13)
CLVGVQGSSGVYQKVTF

SEQ ID NO: 241736 - protein, 18 aa, Homo sapiens
  CDR3 for beta chain variable domain of TCR clone 120868 (TRBV15, TRBJ2-3)
CATSRDGARSWDTDTQYF

SEQ ID NO: 241737 - protein, 15 aa, Homo sapiens
  CDR3 for alpha chain variable domain of TCR clone 120869 (TRAV12-1, TRAJ44)
CVVDTPQGTASKLTF

SEQ ID NO: 241738 - protein, 13 aa, Homo sapiens
  CDR3 for beta chain variable domain of TCR clone 120869 (TRBV27, TRBJ2-1)
CDSSSGSYNEQFF

SEQ ID NO: 241739 - protein, 14 aa, Homo sapiens
  CDR3 for alpha chain variable domain of TCR clone 120870 (TRAV8-4, TRAJ13)
CAVTLSGGYQKVTF

SEQ ID NO: 241740 - protein, 14 aa, Homo sapiens
  CDR3 for beta chain variable domain of TCR clone 120870 (TRBV7-2, TRBJ1-2)
CASSQTGSTYAYTF

SEQ ID NO: 241741 - protein, 16 aa, Homo sapiens
  CDR3 for alpha chain variable domain of TCR clone 120871 (TRAV3, TRAJ37)
CAVRPHGSGKTGKLIF

SEQ ID NO: 241742 - protein, 16 aa, Homo sapiens
  CDR3 for beta chain variable domain of TCR clone 120871 (TRBV9, TRBJ1-2)
CASSVEEKVSPYGYTF

SEQ ID NO: 241743 - protein, 16 aa, Homo sapiens
  CDR3 for alpha chain variable domain of TCR clone 120872 (TRAV30, TRAJ24)
CGTEIVDADSWGKCQF

SEQ ID NO: 241744 - protein, 14 aa, Homo sapiens
  CDR3 for beta chain variable domain of TCR clone 120872 (TRBV20-1, TRBJ1-1)
CSAQTRIGGTEAFF

SEQ ID NO: 241745 - protein, 13 aa, Homo sapiens
  CDR3 for alpha chain variable domain of TCR clone 120873 (TRAV27, TRAJ29)
CAGAHSGNTPLVF

SEQ ID NO: 241746 - protein, 12 aa, Homo sapiens
  CDR3 for beta chain variable domain of TCR clone 120873 (TRBV24-1, TRBJ1-4)
CATSDPNEKLFF

SEQ ID NO: 241747 - protein, 12 aa, Homo sapiens
  CDR3 for alpha chain variable domain of TCR clone 120874 (TRAV21, TRAJ33)
CPKMDSNYQLIW

SEQ ID NO: 241748 - protein, 14 aa, Homo sapiens
  CDR3 for beta chain variable domain of TCR clone 120874 (TRBV2, TRBJ2-7)
CASSLTSGGYEQYF

SEQ ID NO: 241749 - protein, 13 aa, Homo sapiens
  CDR3 for alpha chain variable domain of TCR clone 120875 (TRAV27, TRAJ54)
CAGAGQGAQKLVF

SEQ ID NO: 241750 - protein, 15 aa, Homo sapiens
  CDR3 for beta chain variable domain of TCR clone 120875 (TRBV18, TRBJ2-6)
CASAPSYAGANVLTF

SEQ ID NO: 241751 - protein, 11 aa, Homo sapiens
  CDR3 for alpha chain variable domain of TCR clone 120876 (TRAV21, TRAJ11)
CAVNGYSTLTF

SEQ ID NO: 241752 - protein, 11 aa, Homo sapiens
  CDR3 for beta chain variable domain of TCR clone 120876 (TRBV19, TRBJ1-1)
CASSIGSAAFF

SEQ ID NO: 241753 - protein, 15 aa, Homo sapiens
  CDR3 for alpha chain variable domain of TCR clone 120877 (TRAV13-1, TRAJ52)
SYYNAGGTSYGRLTF

SEQ ID NO: 241754 - protein, 11 aa, Homo sapiens
  CDR3 for beta chain variable domain of TCR clone 120877 (TRBV12-4, TRBJ2-2)
CASSSAGELFF

SEQ ID NO: 241755 - protein, 15 aa, Homo sapiens
  CDR3 for alpha chain variable domain of TCR clone 120878 (TRAV20, TRAJ53)
CAVQERGGSNYKLTF

SEQ ID NO: 241756 - protein, 14 aa, Homo sapiens
  CDR3 for beta chain variable domain of TCR clone 120878 (TRBV20-1, TRBJ2-1)
CSAQIGGSANEQFF

SEQ ID NO: 241757 - protein, 15 aa, Homo sapiens
  CDR3 for alpha chain variable domain of TCR clone 120879 (TRAV9-2, TRAJ49)
CALSPPDHTGSQFYF

SEQ ID NO: 241758 - protein, 15 aa, Homo sapiens
  CDR3 for beta chain variable domain of TCR clone 120879 (TRBV19, TRBJ1-2)
CASSVGQVLNYGYTF

SEQ ID NO: 241759 - protein, 15 aa, Homo sapiens
  CDR3 for alpha chain variable domain of TCR clone 120880 (TRAV21, TRAJ24)
CAARSSTDSWGKLQF

SEQ ID NO: 241760 - protein, 13 aa, Homo sapiens
  CDR3 for beta chain variable domain of TCR clone 120880 (TRBV11-2, TRBJ2-5)
CASSWTGEETQYF

SEQ ID NO: 241761 - protein, 17 aa, Homo sapiens
  CDR3 for alpha chain variable domain of TCR clone 120881 (TRAV38-1, TRAJ56)
CAFMRILDTGANSKLTF

SEQ ID NO: 241762 - protein, 15 aa, Homo sapiens
  CDR3 for beta chain variable domain of TCR clone 120881 (TRBV6-3, TRBJ2-7)
CASSSPGTVFYEQYF

SEQ ID NO: 241763 - protein, 13 aa, Homo sapiens
  CDR3 for alpha chain variable domain of TCR clone 120882 (TRAV26-1, TRAJ30)
CIVRVESNDEIIF

SEQ ID NO: 241764 - protein, 17 aa, Homo sapiens
  CDR3 for beta chain variable domain of TCR clone 120882 (TRBV13, TRBJ2-3)
CASSLSRVAGGRNTQYF

SEQ ID NO: 241765 - protein, 15 aa, Homo sapiens
  CDR3 for alpha chain variable domain of TCR clone 120883 (TRAV3, TRAJ22)
CAVRDRGGSARQLTF

SEQ ID NO: 241766 - protein, 13 aa, Homo sapiens
  CDR3 for beta chain variable domain of TCR clone 120883 (TRBV2, TRBJ1-5)
CATAGPGNQTQHF

SEQ ID NO: 241767 - protein, 12 aa, Homo sapiens
  CDR3 for alpha chain variable domain of TCR clone 120884 (TRAV13-1, TRAJ21)
CAAKEGFNKFYF

SEQ ID NO: 241768 - protein, 14 aa, Homo sapiens
  CDR3 for beta chain variable domain of TCR clone 120884 (TRBV5-1, TRBJ2-7)
CASSRGESLYEQYL

SEQ ID NO: 241769 - protein, 13 aa, Homo sapiens
  CDR3 for alpha chain variable domain of TCR clone 120885 (TRAV27, TRAJ57)
CRSAQGGSEKLVF

SEQ ID NO: 241770 - protein, 11 aa, Homo sapiens
  CDR3 for beta chain variable domain of TCR clone 120885 (TRBV11-2, TRBJ1-1)
CASSINTEAFF

SEQ ID NO: 241771 - protein, 18 aa, Homo sapiens
  CDR3 for alpha chain variable domain of TCR clone 120886 (TRAV12-2, )
CAVEDIQNPDPAVYQLRD

SEQ ID NO: 241772 - protein, 16 aa, Homo sapiens
  CDR3 for beta chain variable domain of TCR clone 120886 (TRBV6-1, TRBJ1-2)
CASSGARQGRSHGYTF

SEQ ID NO: 241773 - protein, 14 aa, Homo sapiens
  CDR3 for alpha chain variable domain of TCR clone 120887 (TRAV1-2, TRAJ16)
CAVNRFSDGQKLLF

SEQ ID NO: 241774 - protein, 14 aa, Homo sapiens
  CDR3 for beta chain variable domain of TCR clone 120887 (TRBV7-3, TRBJ2-1)
CASSLAGGTNEQFC

SEQ ID NO: 241775 - protein, 13 aa, Homo sapiens
  CDR3 for alpha chain variable domain of TCR clone 120888 (TRAV12-2, TRAJ39)
CAVNNNAGNMLTF

SEQ ID NO: 241776 - protein, 16 aa, Homo sapiens
  CDR3 for beta chain variable domain of TCR clone 120888 (TRBV20-1, TRBJ1-2)
CSASMGQGVANYGYTF

SEQ ID NO: 241777 - protein, 15 aa, Homo sapiens
  CDR3 for alpha chain variable domain of TCR clone 120889 (TRAV17, TRAJ57)
CATGPSQGGSEKLVF

SEQ ID NO: 241778 - protein, 13 aa, Homo sapiens
  CDR3 for beta chain variable domain of TCR clone 120889 (TRBV6-5, TRBJ2-5)
CASSPQGGEIQYF

SEQ ID NO: 241779 - protein, 12 aa, Homo sapiens
  CDR3 for alpha chain variable domain of TCR clone 120890 (TRAV1-2, TRAJ29)
CAVPSGNTPLVF

SEQ ID NO: 241780 - protein, 12 aa, Homo sapiens
  CDR3 for beta chain variable domain of TCR clone 120890 (TRBV12-4, TRBJ2-7)
CPSSLGGYEQYF

SEQ ID NO: 241781 - protein, 12 aa, Homo sapiens
  CDR3 for alpha chain variable domain of TCR clone 120891 (TRAV29/DV5, TRAJ49)
CAALNTGNQFYF

SEQ ID NO: 241782 - protein, 14 aa, Homo sapiens
  CDR3 for beta chain variable domain of TCR clone 120891 (TRBV9, TRBJ2-4)
FASSPSGTSGFQYF

SEQ ID NO: 241783 - protein, 13 aa, Homo sapiens
  CDR3 for alpha chain variable domain of TCR clone 120892 (TRAV8-3, TRAJ48)
CAVVPFGNEKLTF

SEQ ID NO: 241784 - protein, 15 aa, Homo sapiens
  CDR3 for beta chain variable domain of TCR clone 120892 (TRBV11-2, TRBJ2-1)
CASSAPATRYNEQFF

SEQ ID NO: 241785 - protein, 16 aa, Homo sapiens
  CDR3 for alpha chain variable domain of TCR clone 120893 (TRAV30, TRAJ24)
CGTEIVDADSWGKFQV

SEQ ID NO: 241786 - protein, 14 aa, Homo sapiens
  CDR3 for beta chain variable domain of TCR clone 120893 (TRBV12-5, TRBJ2-5)
CASGSRTQQETQYF

SEQ ID NO: 241787 - protein, 13 aa, Homo sapiens
  CDR3 for alpha chain variable domain of TCR clone 120894 (TRAV38-2/DV8, TRAJ29)
CAYRTPGNTPLVF

SEQ ID NO: 241788 - protein, 15 aa, Homo sapiens
  CDR3 for beta chain variable domain of TCR clone 120894 (TRBV6-4, TRBJ2-4)
CASPGTELAKNMQYF

SEQ ID NO: 241789 - protein, 11 aa, Homo sapiens
  CDR3 for alpha chain variable domain of TCR clone 120895 (TRAV26-1, TRAJ37)
CIVRVGRKLIF

SEQ ID NO: 241790 - protein, 12 aa, Homo sapiens
  CDR3 for beta chain variable domain of TCR clone 120895 (TRBV11-2, TRBJ2-2)
CASSLPTGELFF

SEQ ID NO: 241791 - protein, 13 aa, Homo sapiens
  CDR3 for alpha chain variable domain of TCR clone 120896 (TRAV12-3, TRAJ33)
CAMSVNSNYQFIW

SEQ ID NO: 241792 - protein, 13 aa, Homo sapiens
  CDR3 for beta chain variable domain of TCR clone 120896 (TRBV7-2, TRBJ2-2)
CASSLAVTGELFF

SEQ ID NO: 241793 - protein, 15 aa, Homo sapiens
  CDR3 for alpha chain variable domain of TCR clone 120897 (TRAV25, TRAJ52)
CAGTSGSTGYGKLTF

SEQ ID NO: 241794 - protein, 16 aa, Homo sapiens
  CDR3 for beta chain variable domain of TCR clone 120897 (TRBV15, TRBJ1-2)
CATSRGPRTGGGGYTF

SEQ ID NO: 241795 - protein, 13 aa, Homo sapiens
  CDR3 for alpha chain variable domain of TCR clone 120898 (TRAV13-1, TRAJ21)
CAASIYNFNKFYF

SEQ ID NO: 241796 - protein, 13 aa, Homo sapiens
  CDR3 for beta chain variable domain of TCR clone 120898 (TRBV4-1, TRBJ1-1)
CASSRKMNTEAFF

SEQ ID NO: 241797 - protein, 11 aa, Homo sapiens
  CDR3 for alpha chain variable domain of TCR clone 120899 (TRAV1-1, TRAJ23)
CAVRQGGKLIF

SEQ ID NO: 241798 - protein, 15 aa, Homo sapiens
  CDR3 for beta chain variable domain of TCR clone 120899 (TRBV12-4, TRBJ2-2)
CASSFKSANTGELFF

SEQ ID NO: 241799 - protein, 15 aa, Homo sapiens
  CDR3 for alpha chain variable domain of TCR clone 120900 (TRAV17, TRAJ16)
CATALRFSDGQKLLF

SEQ ID NO: 241800 - protein, 15 aa, Homo sapiens
  CDR3 for beta chain variable domain of TCR clone 120900 (TRBV20-1, TRBJ1-1)
CSASRGVTGNTEAFC

SEQ ID NO: 241801 - protein, 14 aa, Homo sapiens
  CDR3 for alpha chain variable domain of TCR clone 120901 (TRAV25, TRAJ6)
CAGRESGGSYIPTF

SEQ ID NO: 241802 - protein, 15 aa, Homo sapiens
  CDR3 for beta chain variable domain of TCR clone 120901 (TRBV11-1, TRBJ2-7)
CASSLNYGASYEQYF

SEQ ID NO: 241803 - protein, 14 aa, Homo sapiens
  CDR3 for alpha chain variable domain of TCR clone 120902 (TRAV10, TRAJ32)
CGEPRGGATNKLIF

SEQ ID NO: 241804 - protein, 14 aa, Homo sapiens
  CDR3 for beta chain variable domain of TCR clone 120902 (TRBV5-4, TRBJ2-2)
CASRLDGGTGELFC

SEQ ID NO: 241805 - protein, 15 aa, Homo sapiens
  CDR3 for alpha chain variable domain of TCR clone 120903 (TRAV26-1, TRAJ38)
CIASSNAGNNRKLIW

SEQ ID NO: 241806 - protein, 12 aa, Homo sapiens
  CDR3 for beta chain variable domain of TCR clone 120903 (TRBV5-8, TRBJ1-2)
CASSFGVYGDTF

SEQ ID NO: 241807 - protein, 13 aa, Homo sapiens
  CDR3 for alpha chain variable domain of TCR clone 120904 (TRAV20, TRAJ21)
CAVEGYNFNKFYF

SEQ ID NO: 241808 - protein, 14 aa, Homo sapiens
  CDR3 for beta chain variable domain of TCR clone 120904 (TRBV3-1, TRBJ2-5)
CASSQGPDQEAQYF

SEQ ID NO: 241809 - protein, 15 aa, Homo sapiens
  CDR3 for alpha chain variable domain of TCR clone 120905 (TRAV29/DV5, TRAJ42)
CAAKTDGGSQGNLIF

SEQ ID NO: 241810 - protein, 14 aa, Homo sapiens
  CDR3 for beta chain variable domain of TCR clone 120905 (TRBV11-2, TRBJ2-3)
CASSRLARTDTQYF

SEQ ID NO: 241811 - protein, 15 aa, Homo sapiens
  CDR3 for alpha chain variable domain of TCR clone 120906 (TRAV27, TRAJ38)
CAARRNAGNNRTLIW

SEQ ID NO: 241812 - protein, 13 aa, Homo sapiens
  CDR3 for beta chain variable domain of TCR clone 120906 (TRBV12-5, TRBJ2-3)
CASGDRQSDTQYF

SEQ ID NO: 241813 - protein, 17 aa, Homo sapiens
  CDR3 for alpha chain variable domain of TCR clone 120907 (TRAV3, TRAJ6)
CAVRDGPRAGGSYIPTF

SEQ ID NO: 241814 - protein, 14 aa, Homo sapiens
  CDR3 for beta chain variable domain of TCR clone 120907 (TRBV5-7, TRBJ1-5)
CASSRTGGGQPQHF

SEQ ID NO: 241815 - protein, 14 aa, Homo sapiens
  CDR3 for alpha chain variable domain of TCR clone 120908 (TRAV26-1, TRAJ38)
CIADKAGNNRKLIW

SEQ ID NO: 241816 - protein, 15 aa, Homo sapiens
  CDR3 for beta chain variable domain of TCR clone 120908 (TRBV27, TRBJ2-1)
CASSNGGGSSNEQFF

SEQ ID NO: 241817 - protein, 11 aa, Homo sapiens
  CDR3 for alpha chain variable domain of TCR clone 120909 (TRAV3, TRAJ21)
CAVGNFNKFYF

SEQ ID NO: 241818 - protein, 15 aa, Homo sapiens
  CDR3 for beta chain variable domain of TCR clone 120909 (TRBV5-1, TRBJ2-1)
CASSWVANSYNEQFF

SEQ ID NO: 241819 - protein, 15 aa, Homo sapiens
  CDR3 for alpha chain variable domain of TCR clone 120910 (TRAV20, TRAJ58)
CAVQDLETSGSRLTF

SEQ ID NO: 241820 - protein, 12 aa, Homo sapiens
  CDR3 for beta chain variable domain of TCR clone 120910 (TRBV28, TRBJ2-3)
CASSLYRDTQYF

SEQ ID NO: 241821 - protein, 13 aa, Homo sapiens
  CDR3 for alpha chain variable domain of TCR clone 120911 (TRAV8-6, TRAJ21)
CAVSPSSLNKFYF

SEQ ID NO: 241822 - protein, 13 aa, Homo sapiens
  CDR3 for beta chain variable domain of TCR clone 120911 (TRBV19, TRBJ1-2)
CASSQGQVYGYTF

SEQ ID NO: 241823 - protein, 12 aa, Homo sapiens
  CDR3 for alpha chain variable domain of TCR clone 120912 (TRAV12-3, TRAJ20)
CAMVRGGYKLSF

SEQ ID NO: 241824 - protein, 14 aa, Homo sapiens
  CDR3 for beta chain variable domain of TCR clone 120912 (TRBV5-5, TRBJ1-5)
CASSGQGVDQPQHF

SEQ ID NO: 241825 - protein, 13 aa, Homo sapiens
  CDR3 for alpha chain variable domain of TCR clone 120913 (TRAV13-1, TRAJ49)
CAAMLYTGNQFYF

SEQ ID NO: 241826 - protein, 14 aa, Homo sapiens
  CDR3 for beta chain variable domain of TCR clone 120913 (TRBV7-6, TRBJ2-3)
CASSLGTVTDTQYF

SEQ ID NO: 241827 - protein, 14 aa, Homo sapiens
  CDR3 for alpha chain variable domain of TCR clone 120914 (TRAV12-2, TRAJ17)
CAVLFKAAGNKLTF

SEQ ID NO: 241828 - protein, 16 aa, Homo sapiens
  CDR3 for beta chain variable domain of TCR clone 120914 (TRBV11-2, TRBJ1-2)
CASSPSGREANYGYTF

SEQ ID NO: 241829 - protein, 14 aa, Homo sapiens
  CDR3 for alpha chain variable domain of TCR clone 120915 (TRAV16, TRAJ26)
CALSSANYGQNFVF

SEQ ID NO: 241830 - protein, 16 aa, Homo sapiens
  CDR3 for beta chain variable domain of TCR clone 120915 (TRBV20-1, TRBJ1-4)
CSAPGQGLLTNEKLFS

SEQ ID NO: 241831 - protein, 13 aa, Homo sapiens
  CDR3 for alpha chain variable domain of TCR clone 120916 (TRAV21, TRAJ15)
CAVANQAGTALIF

SEQ ID NO: 241832 - protein, 12 aa, Homo sapiens
  CDR3 for beta chain variable domain of TCR clone 120916 (TRBV7-9, TRBJ2-7)
CASSIKREEQYF

SEQ ID NO: 241833 - protein, 16 aa, Homo sapiens
  CDR3 for alpha chain variable domain of TCR clone 120917 (TRAV8-3, TRAJ28)
CAVPPQRGAGSYQLTF

SEQ ID NO: 241834 - protein, 12 aa, Homo sapiens
  CDR3 for beta chain variable domain of TCR clone 120917 (TRBV7-8, TRBJ2-7)
CASSLGDREQYF

SEQ ID NO: 241835 - protein, 12 aa, Homo sapiens
  CDR3 for alpha chain variable domain of TCR clone 120918 (TRAV12-3, TRAJ17)
CAMTLTGNKLTF

SEQ ID NO: 241836 - protein, 11 aa, Homo sapiens
  CDR3 for beta chain variable domain of TCR clone 120918 (TRBV5-6, TRBJ2-5)
CASSLERTQYF

SEQ ID NO: 241837 - protein, 11 aa, Homo sapiens
  CDR3 for alpha chain variable domain of TCR clone 120919 (TRAV12-3, TRAJ49)
CAASTGNQFYF

SEQ ID NO: 241838 - protein, 12 aa, Homo sapiens
  CDR3 for beta chain variable domain of TCR clone 120919 (TRBV6-3, TRBJ2-7)
CASSEPGFEQYF

SEQ ID NO: 241839 - protein, 16 aa, Homo sapiens
  CDR3 for alpha chain variable domain of TCR clone 120920 (TRAV8-6, TRAJ4)
CAVSPTFSGGYDKLIF

SEQ ID NO: 241840 - protein, 14 aa, Homo sapiens
  CDR3 for beta chain variable domain of TCR clone 120920 (TRBV29-1, TRBJ2-2)
CSVVTSGAPGELFF

SEQ ID NO: 241841 - protein, 12 aa, Homo sapiens
  CDR3 for alpha chain variable domain of TCR clone 120921 (TRAV12-1, TRAJ23)
CVVNIPGGKLIF

SEQ ID NO: 241842 - protein, 15 aa, Homo sapiens
  CDR3 for beta chain variable domain of TCR clone 120921 (TRBV7-2, TRBJ2-7)
CASSLVSSCSYEQYF

SEQ ID NO: 241843 - protein, 17 aa, Homo sapiens
  CDR3 for alpha chain variable domain of TCR clone 120922 (TRAV3, TRAJ6)
CAVRDGPRAGGSYIPTF

SEQ ID NO: 241844 - protein, 17 aa, Homo sapiens
  CDR3 for beta chain variable domain of TCR clone 120922 (TRBV7-2, TRBJ2-1)
CASSLYPPGVEYNEQFF

SEQ ID NO: 241845 - protein, 11 aa, Homo sapiens
  CDR3 for alpha chain variable domain of TCR clone 120923 (TRAV12-1, TRAJ21)
CVVNNFNKFYF

SEQ ID NO: 241846 - protein, 15 aa, Homo sapiens
  CDR3 for beta chain variable domain of TCR clone 120923 (TRBV27, TRBJ2-1)
CASSNGGGSSNEQFF

SEQ ID NO: 241847 - protein, 14 aa, Homo sapiens
  CDR3 for alpha chain variable domain of TCR clone 120924 (TRAV2, TRAJ22)
CAVGRGGSARQLTF

SEQ ID NO: 241848 - protein, 12 aa, Homo sapiens
  CDR3 for beta chain variable domain of TCR clone 120924 (TRBV19, TRBJ2-1)
CARSMQDTEQFF

SEQ ID NO: 241849 - protein, 14 aa, Homo sapiens
  CDR3 for alpha chain variable domain of TCR clone 120925 (TRAV13-1, TRAJ44)
CAARATGTASKLTF

SEQ ID NO: 241850 - protein, 12 aa, Homo sapiens
  CDR3 for beta chain variable domain of TCR clone 120925 (TRBV7-8, TRBJ2-7)
CASSLGDREQYF

SEQ ID NO: 241851 - protein, 14 aa, Homo sapiens
  CDR3 for alpha chain variable domain of TCR clone 120926 (TRAV35, TRAJ24)
CAGPRRDSWGKLQF

SEQ ID NO: 241852 - protein, 12 aa, Homo sapiens
  CDR3 for beta chain variable domain of TCR clone 120926 (TRBV12-4, TRBJ2-3)
CASSLGKDTQYF

SEQ ID NO: 241853 - protein, 13 aa, Homo sapiens
  CDR3 for alpha chain variable domain of TCR clone 120927 (TRAV13-1, TRAJ43)
CAASKNNNNDMRF

SEQ ID NO: 241854 - protein, 14 aa, Homo sapiens
  CDR3 for beta chain variable domain of TCR clone 120927 (TRBV19, TRBJ2-2)
CASSTLHRSGELFF

SEQ ID NO: 241855 - protein, 12 aa, Homo sapiens
  CDR3 for alpha chain variable domain of TCR clone 120928 (TRAV13-2, TRAJ39)
CAENNAGNMLTF

SEQ ID NO: 241856 - protein, 14 aa, Homo sapiens
  CDR3 for beta chain variable domain of TCR clone 120928 (TRBV2, TRBJ1-5)
CASLGSRDNQPQHF

SEQ ID NO: 241857 - protein, 14 aa, Homo sapiens
  CDR3 for alpha chain variable domain of TCR clone 120929 (TRAV13-1, TRAJ40)
CAASMTSGTYKYIF

SEQ ID NO: 241858 - protein, 14 aa, Homo sapiens
  CDR3 for beta chain variable domain of TCR clone 120929 (TRBV7-3, TRBJ1-1)
CASSLKGGNTEAFF

SEQ ID NO: 241859 - protein, 12 aa, Homo sapiens
  CDR3 for alpha chain variable domain of TCR clone 120930 (TRAV10, TRAJ6)
CVVSEGSYIPTF

SEQ ID NO: 241860 - protein, 15 aa, Homo sapiens
  CDR3 for beta chain variable domain of TCR clone 120930 (TRBV19, TRBJ1-2)
CASSVGQVLNYGYTF

SEQ ID NO: 241861 - protein, 17 aa, Homo sapiens
  CDR3 for alpha chain variable domain of TCR clone 120931 (TRAV13-1, TRAJ31)
CAPRDRLMFGDGTQLVV

SEQ ID NO: 241862 - protein, 12 aa, Homo sapiens
  CDR3 for beta chain variable domain of TCR clone 120931 (TRBV7-9, TRBJ2-7)
CASSLECYEQYF

SEQ ID NO: 241863 - protein, 11 aa, Homo sapiens
  CDR3 for alpha chain variable domain of TCR clone 120932 (TRAV1-1, TRAJ23)
CAVRQGGKLIF

SEQ ID NO: 241864 - protein, 15 aa, Homo sapiens
  CDR3 for beta chain variable domain of TCR clone 120932 (TRBV19, TRBJ1-1)
CASTSGQIQNTEAFF

SEQ ID NO: 241865 - protein, 16 aa, Homo sapiens
  CDR3 for alpha chain variable domain of TCR clone 120933 (TRAV3, TRAJ37)
CAVRGKGSGNTGKLIF

SEQ ID NO: 241866 - protein, 13 aa, Homo sapiens
  CDR3 for beta chain variable domain of TCR clone 120933 (TRBV14, TRBJ2-7)
CASGQDRRYEQYF

SEQ ID NO: 241867 - protein, 16 aa, Homo sapiens
  CDR3 for alpha chain variable domain of TCR clone 120934 (TRAV1-2, TRAJ10)
CAVRGLLTGGGNKLTF

SEQ ID NO: 241868 - protein, 15 aa, Homo sapiens
  CDR3 for beta chain variable domain of TCR clone 120934 (TRBV7-9, TRBJ1-6)
CASSSPGRGNSPLHF

SEQ ID NO: 241869 - protein, 16 aa, Homo sapiens
  CDR3 for alpha chain variable domain of TCR clone 120935 (TRAV21, TRAJ37)
CAVRTAGSSNTGKLIF

SEQ ID NO: 241870 - protein, 16 aa, Homo sapiens
  CDR3 for beta chain variable domain of TCR clone 120935 (TRBV7-2, TRBJ2-5)
CASSSKWWSGQETQYF

SEQ ID NO: 241871 - protein, 15 aa, Homo sapiens
  CDR3 for alpha chain variable domain of TCR clone 120936 (TRAV13-1, TRAJ36)
CAASIRQTGANNLFF

SEQ ID NO: 241872 - protein, 22 aa, Homo sapiens
  CDR3 for beta chain variable domain of TCR clone 120936 (TRBV6-1, TRBJ1-3)
CASVQGGGWKHHIFWRGKLAHC

SEQ ID NO: 241873 - protein, 13 aa, Homo sapiens
  CDR3 for alpha chain variable domain of TCR clone 120937 (TRAV27, TRAJ45)
CGSSGGGADGLTF

SEQ ID NO: 241874 - protein, 14 aa, Homo sapiens
  CDR3 for beta chain variable domain of TCR clone 120937 (TRBV7-2, TRBJ2-7)
CASSPKTSFYEQYF

SEQ ID NO: 241875 - protein, 16 aa, Homo sapiens
  CDR3 for alpha chain variable domain of TCR clone 120938 (TRAV3, TRAJ6)
CAVRDGQGRRKLHTYI

SEQ ID NO: 241876 - protein, 13 aa, Homo sapiens
  CDR3 for beta chain variable domain of TCR clone 120938 (TRBV4-1, TRBJ2-2)
CASSQENTGELFF

SEQ ID NO: 241877 - protein, 15 aa, Homo sapiens
  CDR3 for alpha chain variable domain of TCR clone 120939 (TRAV12-3, TRAJ6)
CAMSATTGGSYIPTF

SEQ ID NO: 241878 - protein, 12 aa, Homo sapiens
  CDR3 for beta chain variable domain of TCR clone 120939 (TRBV29-1, TRBJ2-3)
CSVTGGADTQYF

SEQ ID NO: 241879 - protein, 14 aa, Homo sapiens
  CDR3 for alpha chain variable domain of TCR clone 120940 (TRAV8-3, TRAJ9)
CAVVYNTGGFKTIF

SEQ ID NO: 241880 - protein, 14 aa, Homo sapiens
  CDR3 for beta chain variable domain of TCR clone 120940 (TRBV7-3, TRBJ2-2)
CASSSGGYTVELFF

SEQ ID NO: 241881 - protein, 14 aa, Homo sapiens
  CDR3 for alpha chain variable domain of TCR clone 120941 (TRAV1-2, TRAJ8)
CAVREDTGFQKLVF

SEQ ID NO: 241882 - protein, 15 aa, Homo sapiens
  CDR3 for beta chain variable domain of TCR clone 120941 (TRBV28, TRBJ2-4)
CAAGSGTRLMGIQYF

SEQ ID NO: 241883 - protein, 14 aa, Homo sapiens
  CDR3 for alpha chain variable domain of TCR clone 120942 (TRAV12-2, TRAJ5)
CAVHRSTGRRALTF

SEQ ID NO: 241884 - protein, 12 aa, Homo sapiens
  CDR3 for beta chain variable domain of TCR clone 120942 (TRBV19, TRBJ1-5)
CASSIAQQPQHF

SEQ ID NO: 241885 - protein, 10 aa, Homo sapiens
  CDR3 for alpha chain variable domain of TCR clone 120943 (TRAV30, TRAJ48)
CGIGNEKLTF

SEQ ID NO: 241886 - protein, 14 aa, Homo sapiens
  CDR3 for beta chain variable domain of TCR clone 120943 (TRBV7-6, TRBJ2-3)
CASSVAGGTDTQFF

SEQ ID NO: 241887 - protein, 13 aa, Homo sapiens
  CDR3 for alpha chain variable domain of TCR clone 120944 (TRAV2, TRAJ15)
CAVASQAGTALIF

SEQ ID NO: 241888 - protein, 14 aa, Homo sapiens
  CDR3 for beta chain variable domain of TCR clone 120944 (TRBV7-8, TRBJ1-2)
CASSPDSLSYGYTF

SEQ ID NO: 241889 - protein, 15 aa, Homo sapiens
  CDR3 for alpha chain variable domain of TCR clone 120945 (TRAV26-1, TRAJ22)
CIVRVSFWFCKATDL

SEQ ID NO: 241890 - protein, 14 aa, Homo sapiens
  CDR3 for beta chain variable domain of TCR clone 120945 (TRBV25-1, TRBJ1-1)
CASTHLGGNTEAFF

SEQ ID NO: 241891 - protein, 15 aa, Homo sapiens
  CDR3 for alpha chain variable domain of TCR clone 120946 (TRAV1-2, TRAJ30)
CAVRPHGNRDDKIIF

SEQ ID NO: 241892 - protein, 13 aa, Homo sapiens
  CDR3 for beta chain variable domain of TCR clone 120946 (TRBV4-1, TRBJ2-7)
CSSSQGQAYEQYF

SEQ ID NO: 241893 - protein, 14 aa, Homo sapiens
  CDR3 for alpha chain variable domain of TCR clone 120947 (TRAV1-2, TRAJ16)
CAVNRFSVGQKLLF

SEQ ID NO: 241894 - protein, 13 aa, Homo sapiens
  CDR3 for beta chain variable domain of TCR clone 120947 (TRBV19, TRBJ1-2)
CASSVPGQDGYTF

SEQ ID NO: 241895 - protein, 15 aa, Homo sapiens
  CDR3 for alpha chain variable domain of TCR clone 120948 (TRAV12-3, TRAJ6)
CAMSATSGGSYIPTF

SEQ ID NO: 241896 - protein, 11 aa, Homo sapiens
  CDR3 for beta chain variable domain of TCR clone 120948 (TRBV20-1, TRBJ1-5)
CSAQGDHPQHF

SEQ ID NO: 241897 - protein, 13 aa, Homo sapiens
  CDR3 for alpha chain variable domain of TCR clone 120949 (TRAV14/DV4, TRAJ4)
CAMKAGGYNKLIF

SEQ ID NO: 241898 - protein, 18 aa, Homo sapiens
  CDR3 for beta chain variable domain of TCR clone 120949 (TRBV11-2, TRBJ2-3)
CASSLGGASRGAPNTQYF

SEQ ID NO: 241899 - protein, 16 aa, Homo sapiens
  CDR3 for alpha chain variable domain of TCR clone 120950 (TRAV17, TRAJ28)
CATASVSGAGSYQLTF

SEQ ID NO: 241900 - protein, 11 aa, Homo sapiens
  CDR3 for beta chain variable domain of TCR clone 120950 (TRBV7-9, TRBJ2-5)
CASSLGGTQYF

SEQ ID NO: 241901 - protein, 17 aa, Homo sapiens
  CDR3 for alpha chain variable domain of TCR clone 120951 (TRAV13-1, TRAJ52)
CAAGRNAGGTSDGKLTF

SEQ ID NO: 241902 - protein, 15 aa, Homo sapiens
  CDR3 for beta chain variable domain of TCR clone 120951 (TRBV6-3, TRBJ2-7)
CASSSPGTVFYEQYF

SEQ ID NO: 241903 - protein, 17 aa, Homo sapiens
  CDR3 for alpha chain variable domain of TCR clone 120952 (TRAV3, TRAJ6)
CAVRDGPRAGGSYIPTF

SEQ ID NO: 241904 - protein, 18 aa, Homo sapiens
  CDR3 for beta chain variable domain of TCR clone 120952 (TRBV18, TRBJ2-3)
CASSYTSGAAGGTDTQYF

SEQ ID NO: 241905 - protein, 13 aa, Homo sapiens
  CDR3 for alpha chain variable domain of TCR clone 120953 (TRAV2, TRAJ24)
TTVPLVRWGKLQF

SEQ ID NO: 241906 - protein, 14 aa, Homo sapiens
  CDR3 for beta chain variable domain of TCR clone 120953 (TRBV12-5, TRBJ2-5)
CASGSRTHQETQYF

SEQ ID NO: 241907 - protein, 15 aa, Homo sapiens
  CDR3 for alpha chain variable domain of TCR clone 120954 (TRAV4, TRAJ39)
CLVGPNNNAGNMLTF

SEQ ID NO: 241908 - protein, 15 aa, Homo sapiens
  CDR3 for beta chain variable domain of TCR clone 120954 (TRBV5-1, TRBJ2-1)
FASSPPRAPYNEQFF

SEQ ID NO: 241909 - protein, 12 aa, Homo sapiens
  CDR3 for alpha chain variable domain of TCR clone 120955 (TRAV12-1, TRAJ40)
CVVYSGTYKYIF

SEQ ID NO: 241910 - protein, 15 aa, Homo sapiens
  CDR3 for beta chain variable domain of TCR clone 120955 (TRBV11-3, TRBJ2-3)
CASLKDGREGDTQYF

SEQ ID NO: 241911 - protein, 13 aa, Homo sapiens
  CDR3 for alpha chain variable domain of TCR clone 120956 (TRAV13-2, TRAJ48)
CAEMDFGNEKLTF

SEQ ID NO: 241912 - protein, 13 aa, Homo sapiens
  CDR3 for beta chain variable domain of TCR clone 120956 (TRBV4-1, TRBJ2-1)
CASSQEVQYEQFF

SEQ ID NO: 241913 - protein, 16 aa, Homo sapiens
  CDR3 for alpha chain variable domain of TCR clone 120957 (TRAV23/DV6, TRAJ9)
CAASIGGNTGGFKTIF

SEQ ID NO: 241914 - protein, 14 aa, Homo sapiens
  CDR3 for beta chain variable domain of TCR clone 120957 (TRBV19, TRBJ2-7)
CASSMGQGAIEQYF

SEQ ID NO: 241915 - protein, 17 aa, Homo sapiens
  CDR3 for alpha chain variable domain of TCR clone 120958 (TRAV14/DV4, TRAJ4)
CAMREASGRGGYNKLIF

SEQ ID NO: 241916 - protein, 14 aa, Homo sapiens
  CDR3 for beta chain variable domain of TCR clone 120958 (TRBV19, TRBJ2-7)
CASSMGQGAIEQYV

SEQ ID NO: 241917 - protein, 13 aa, Homo sapiens
  CDR3 for alpha chain variable domain of TCR clone 120959 (TRAV21, TRAJ37)
CAVSSGNTGKLIF

SEQ ID NO: 241918 - protein, 17 aa, Homo sapiens
  CDR3 for beta chain variable domain of TCR clone 120959 (TRBV5-1, TRBJ2-5)
CASSLIGLAANQETQYF

SEQ ID NO: 241919 - protein, 12 aa, Homo sapiens
  CDR3 for alpha chain variable domain of TCR clone 120960 (TRAV12-3, TRAJ20)
CAMVRGDYNLSF

SEQ ID NO: 241920 - protein, 14 aa, Homo sapiens
  CDR3 for beta chain variable domain of TCR clone 120960 (TRBV20-1, TRBJ2-7)
CSAISREASYEQYF

SEQ ID NO: 241921 - protein, 10 aa, Homo sapiens
  CDR3 for alpha chain variable domain of TCR clone 120961 (TRAV12-3, TRAJ18)
CAMSAEAQPW

SEQ ID NO: 241922 - protein, 13 aa, Homo sapiens
  CDR3 for beta chain variable domain of TCR clone 120961 (TRBV19, TRBJ1-2)
CASSVPGQDGYTF

SEQ ID NO: 241923 - protein, 12 aa, Homo sapiens
  CDR3 for alpha chain variable domain of TCR clone 120962 (TRAV12-3, TRAJ20)
CAMVRGDYKLSF

SEQ ID NO: 241924 - protein, 16 aa, Homo sapiens
  CDR3 for beta chain variable domain of TCR clone 120962 (TRBV5-1, TRBJ2-3)
CASSLGLAVCTDTQYF

SEQ ID NO: 241925 - protein, 13 aa, Homo sapiens
  CDR3 for alpha chain variable domain of TCR clone 120963 (TRAV9-2, TRAJ53)
CALSGGSNYKLTF

SEQ ID NO: 241926 - protein, 15 aa, Homo sapiens
  CDR3 for beta chain variable domain of TCR clone 120963 (TRBV20-1, TRBJ1-6)
CSARAASSYNSPLHF

SEQ ID NO: 241927 - protein, 14 aa, Homo sapiens
  CDR3 for alpha chain variable domain of TCR clone 120964 (TRAV12-2, TRAJ40)
CAMKIPSGTYKYIF

SEQ ID NO: 241928 - protein, 15 aa, Homo sapiens
  CDR3 for beta chain variable domain of TCR clone 120964 (TRBV20-1, TRBJ1-4)
CSARREWGVNEKLFF

SEQ ID NO: 241929 - protein, 11 aa, Homo sapiens
  CDR3 for alpha chain variable domain of TCR clone 120965 (TRAV26-1, TRAJ37)
CIVRVGRKLIF

SEQ ID NO: 241930 - protein, 14 aa, Homo sapiens
  CDR3 for beta chain variable domain of TCR clone 120965 (TRBV7-2, TRBJ2-7)
CASRSQGAAYEQYF

SEQ ID NO: 241931 - protein, 15 aa, Homo sapiens
  CDR3 for alpha chain variable domain of TCR clone 120966 (TRAV25, TRAJ10)
CAGPLLTGGGNQLTF

SEQ ID NO: 241932 - protein, 15 aa, Homo sapiens
  CDR3 for beta chain variable domain of TCR clone 120966 (TRBV12-5, TRBJ2-2)
CASGRLGGNTGELFF

SEQ ID NO: 241933 - protein, 13 aa, Homo sapiens
  CDR3 for alpha chain variable domain of TCR clone 120967 (TRAV35, TRAJ36)
CAGPRRGANNLFF

SEQ ID NO: 241934 - protein, 15 aa, Homo sapiens
  CDR3 for beta chain variable domain of TCR clone 120967 (TRBV28, TRBJ2-5)
CASSPPWSYQETQYF

SEQ ID NO: 241935 - protein, 15 aa, Homo sapiens
  CDR3 for alpha chain variable domain of TCR clone 120968 (TRAV8-2, TRAJ15)
CVVTMGNQAGTALIF

SEQ ID NO: 241936 - protein, 15 aa, Homo sapiens
  CDR3 for beta chain variable domain of TCR clone 120968 (TRBV7-2, TRBJ1-2)
CASSPRAGWNYGYTF

SEQ ID NO: 241937 - protein, 14 aa, Homo sapiens
  CDR3 for alpha chain variable domain of TCR clone 120969 (TRAV13-1, TRAJ44)
CAEKATGTASKLTF

SEQ ID NO: 241938 - protein, 14 aa, Homo sapiens
  CDR3 for beta chain variable domain of TCR clone 120969 (TRBV19, TRBJ2-2)
CASSTLHRSGELFF

SEQ ID NO: 241939 - protein, 18 aa, Homo sapiens
  CDR3 for alpha chain variable domain of TCR clone 120970 (TRAV21, TRAJ52)
CAVRPSPAGGTSYGKLTF

SEQ ID NO: 241940 - protein, 13 aa, Homo sapiens
  CDR3 for beta chain variable domain of TCR clone 120970 (TRBV12-4, TRBJ1-5)
CASSPDRAQPQHF

SEQ ID NO: 241941 - protein, 14 aa, Homo sapiens
  CDR3 for alpha chain variable domain of TCR clone 120971 (TRAV2, TRAJ37)
CAVDFTSNTGKLIF

SEQ ID NO: 241942 - protein, 15 aa, Homo sapiens
  CDR3 for beta chain variable domain of TCR clone 120971 (TRBV5-1, TRBJ2-1)
CASSPPRAPYNEQFF

SEQ ID NO: 241943 - protein, 16 aa, Homo sapiens
  CDR3 for alpha chain variable domain of TCR clone 120972 (TRAV3, TRAJ37)
CAVRPHGSGNTGKLIF

SEQ ID NO: 241944 - protein, 13 aa, Homo sapiens
  CDR3 for beta chain variable domain of TCR clone 120972 (TRBV20-1, TRBJ2-2)
CSASAAGTGELFF

SEQ ID NO: 241945 - protein, 12 aa, Homo sapiens
  CDR3 for alpha chain variable domain of TCR clone 120973 (TRAV13-1, TRAJ15)
CAASQAGTALIL

SEQ ID NO: 241946 - protein, 13 aa, Homo sapiens
  CDR3 for beta chain variable domain of TCR clone 120973 (TRBV10-3, TRBJ1-2)
CAISERDSYGYTF

SEQ ID NO: 241947 - protein, 13 aa, Homo sapiens
  CDR3 for alpha chain variable domain of TCR clone 120974 (TRAV13-1, TRAJ12)
CAASPDSSYKLIF

SEQ ID NO: 241948 - protein, 13 aa, Homo sapiens
  CDR3 for beta chain variable domain of TCR clone 120974 (TRBV10-3, TRBJ2-7)
CASKLAVNYEQYF

SEQ ID NO: 241949 - protein, 10 aa, Homo sapiens
  CDR3 for alpha chain variable domain of TCR clone 120975 (TRAV26-1, TRAJ22)
RSGSARQLTF

SEQ ID NO: 241950 - protein, 14 aa, Homo sapiens
  CDR3 for beta chain variable domain of TCR clone 120975 (TRBV18, TRBJ2-7)
CASSPRGGACEQYF

SEQ ID NO: 241951 - protein, 13 aa, Homo sapiens
  CDR3 for alpha chain variable domain of TCR clone 120976 (TRAV12-2, TRAJ24)
CAASTDSWGKLQF

SEQ ID NO: 241952 - protein, 15 aa, Homo sapiens
  CDR3 for beta chain variable domain of TCR clone 120976 (TRBV7-2, TRBJ2-2)
CASSPTGANTGELFF

SEQ ID NO: 241953 - protein, 23 aa, Homo sapiens
  CDR3 for alpha chain variable domain of TCR clone 120977 (TRAV26-1, TRAJ38)
CIADNAGNNHIQNPDPAVYQLRD

SEQ ID NO: 241954 - protein, 17 aa, Homo sapiens
  CDR3 for beta chain variable domain of TCR clone 120977 (TRBV11-2, TRBJ2-6)
YASSQRDIFSGANVLTF

SEQ ID NO: 241955 - protein, 16 aa, Homo sapiens
  CDR3 for alpha chain variable domain of TCR clone 120978 (TRAV8-3, TRAJ10)
CAVGPILTGGGNKLTF

SEQ ID NO: 241956 - protein, 15 aa, Homo sapiens
  CDR3 for beta chain variable domain of TCR clone 120978 (TRBV11-2, TRBJ1-6)
CASTLRETGNSPLHF

SEQ ID NO: 241957 - protein, 14 aa, Homo sapiens
  CDR3 for alpha chain variable domain of TCR clone 120979 (TRAV35, TRAJ13)
CACSPSGGYQKVTF

SEQ ID NO: 241958 - protein, 13 aa, Homo sapiens
  CDR3 for beta chain variable domain of TCR clone 120979 (TRBV29-1, TRBJ1-1)
CSVGDSRNTEAFF

SEQ ID NO: 241959 - protein, 14 aa, Homo sapiens
  CDR3 for alpha chain variable domain of TCR clone 120980 (TRAV35, TRAJ10)
CAGILTGGGNKLTF

SEQ ID NO: 241960 - protein, 16 aa, Homo sapiens
  CDR3 for beta chain variable domain of TCR clone 120980 (TRBV27, TRBJ2-2)
CASSFRGLVRTGELFF

SEQ ID NO: 241961 - protein, 15 aa, Homo sapiens
  CDR3 for alpha chain variable domain of TCR clone 120981 (TRAV4, TRAJ39)
CLVGPNNNSGNMLTF

SEQ ID NO: 241962 - protein, 16 aa, Homo sapiens
  CDR3 for beta chain variable domain of TCR clone 120981 (TRBV13, TRBJ2-2)
CASSPRTGEHTGELFF

SEQ ID NO: 241963 - protein, 12 aa, Homo sapiens
  CDR3 for alpha chain variable domain of TCR clone 120982 (TRAV3, TRAJ43)
CAVRDPNNDMRF

SEQ ID NO: 241964 - protein, 22 aa, Homo sapiens
  CDR3 for beta chain variable domain of TCR clone 120982 (TRBV29-1, TRBJ2-5)
TVSNMSPEDSSIYLCSAGTQYF

SEQ ID NO: 241965 - protein, 12 aa, Homo sapiens
  CDR3 for alpha chain variable domain of TCR clone 120983 (TRAV12-3, TRAJ40)
CAMSSGTYKYIF

SEQ ID NO: 241966 - protein, 13 aa, Homo sapiens
  CDR3 for beta chain variable domain of TCR clone 120983 (TRBV4-2, TRBJ1-1)
CASSQAGNTEAFF

SEQ ID NO: 241967 - protein, 15 aa, Homo sapiens
  CDR3 for alpha chain variable domain of TCR clone 120984 (TRAV17, TRAJ57)
CATGPSQGGSEKLVV

SEQ ID NO: 241968 - protein, 18 aa, Homo sapiens
  CDR3 for beta chain variable domain of TCR clone 120984 (TRBV7-9, TRBJ2-7)
CASSLTTSGSRTWYEQYF

SEQ ID NO: 241969 - protein, 12 aa, Homo sapiens
  CDR3 for alpha chain variable domain of TCR clone 120985 (TRAV12-1, TRAJ40)
CVVPSGTYKYIF

SEQ ID NO: 241970 - protein, 16 aa, Homo sapiens
  CDR3 for beta chain variable domain of TCR clone 120985 (TRBV12-4, TRBJ1-5)
CASSRPVGGSNQPQHF

SEQ ID NO: 241971 - protein, 11 aa, Homo sapiens
  CDR3 for alpha chain variable domain of TCR clone 120986 (TRAV26-2, TRAJ8)
CILTGFQKLVF

SEQ ID NO: 241972 - protein, 17 aa, Homo sapiens
  CDR3 for beta chain variable domain of TCR clone 120986 (TRBV12-4, TRBJ1-1)
CASSLSGFRTMNTEAFF

SEQ ID NO: 241973 - protein, 15 aa, Homo sapiens
  CDR3 for alpha chain variable domain of TCR clone 120987 (TRAV17, TRAJ4)
CATGTWSGGYNKLIF

SEQ ID NO: 241974 - protein, 15 aa, Homo sapiens
  CDR3 for beta chain variable domain of TCR clone 120987 (TRBV20-1, TRBJ2-7)
CSARDRVSGIDEQYF

SEQ ID NO: 241975 - protein, 13 aa, Homo sapiens
  CDR3 for alpha chain variable domain of TCR clone 120988 (TRAV21, TRAJ27)
CAARPGNAGKSTF

SEQ ID NO: 241976 - protein, 14 aa, Homo sapiens
  CDR3 for beta chain variable domain of TCR clone 120988 (TRBV11-2, TRBJ2-7)
CASSLGAGAYEQCF

SEQ ID NO: 241977 - protein, 15 aa, Homo sapiens
  CDR3 for alpha chain variable domain of TCR clone 120989 (TRAV21, TRAJ40)
CAVRPQTSGTYKYIF

SEQ ID NO: 241978 - protein, 13 aa, Homo sapiens
  CDR3 for beta chain variable domain of TCR clone 120989 (TRBV7-3, TRBJ1-1)
CASSQDWGAEAFF

SEQ ID NO: 241979 - protein, 16 aa, Homo sapiens
  CDR3 for alpha chain variable domain of TCR clone 120990 (TRAV8-6, TRAJ37)
CAVSGLGSSNTGKLIF

SEQ ID NO: 241980 - protein, 15 aa, Homo sapiens
  CDR3 for beta chain variable domain of TCR clone 120990 (TRBV20-1, TRBJ1-5)
CSARSGPSTNQPQHF

SEQ ID NO: 241981 - protein, 19 aa, Homo sapiens
  CDR3 for alpha chain variable domain of TCR clone 120991 (TRAV16, )
CALSGDIQNPDPAVYQLRD

SEQ ID NO: 241982 - protein, 11 aa, Homo sapiens
  CDR3 for beta chain variable domain of TCR clone 120991 (TRBV11-2, TRBJ2-2)
CASSLPGELFF

SEQ ID NO: 241983 - protein, 14 aa, Homo sapiens
  CDR3 for alpha chain variable domain of TCR clone 120992 (TRAV1-2, TRAJ16)
CAVNRFSDGQKLLF

SEQ ID NO: 241984 - protein, 14 aa, Homo sapiens
  CDR3 for beta chain variable domain of TCR clone 120992 (TRBV29-1, TRBJ2-2)
CSVLAETNTGELFF

SEQ ID NO: 241985 - protein, 17 aa, Homo sapiens
  CDR3 for alpha chain variable domain of TCR clone 120993 (TRAV12-1, TRAJ36)
CVVIKRSNWGKQPLLWD

SEQ ID NO: 241986 - protein, 17 aa, Homo sapiens
  CDR3 for beta chain variable domain of TCR clone 120993 (TRBV7-3, TRBJ2-3)
CASSLMKRMRGADTQYF

SEQ ID NO: 241987 - protein, 14 aa, Homo sapiens
  CDR3 for alpha chain variable domain of TCR clone 120994 (TRAV1-2, TRAJ8)
CAVREDTGFQKLVL

SEQ ID NO: 241988 - protein, 15 aa, Homo sapiens
  CDR3 for beta chain variable domain of TCR clone 120994 (TRBV7-3, TRBJ2-2)
CASSETGQGTGELFF

SEQ ID NO: 241989 - protein, 15 aa, Homo sapiens
  CDR3 for alpha chain variable domain of TCR clone 120995 (TRAV38-2/DV8, TRAJ48)
CAYRSGGFGNEKLTF

SEQ ID NO: 241990 - protein, 16 aa, Homo sapiens
  CDR3 for beta chain variable domain of TCR clone 120995 (TRBV28, TRBJ2-7)
CASSPWVATGDPSQYF

SEQ ID NO: 241991 - protein, 14 aa, Homo sapiens
  CDR3 for alpha chain variable domain of TCR clone 120996 (TRAV26-1, TRAJ38)
CIVRPLNAGNNHIQ

SEQ ID NO: 241992 - protein, 13 aa, Homo sapiens
  CDR3 for beta chain variable domain of TCR clone 120996 (TRBV18, TRBJ1-1)
CASSPNGDTEAFF

SEQ ID NO: 241993 - protein, 12 aa, Homo sapiens
  CDR3 for alpha chain variable domain of TCR clone 120997 (TRAV20, TRAJ39)
CAVGNAGNMLTF

SEQ ID NO: 241994 - protein, 15 aa, Homo sapiens
  CDR3 for beta chain variable domain of TCR clone 120997 (TRBV7-8, TRBJ2-3)
CASSLMSGNTDTQYF

SEQ ID NO: 241995 - protein, 21 aa, Homo sapiens
  CDR3 for alpha chain variable domain of TCR clone 120998 (TRAV1-1, TRAJ6)
CLLLLRCERLERTGGSYIPTF

SEQ ID NO: 241996 - protein, 13 aa, Homo sapiens
  CDR3 for beta chain variable domain of TCR clone 120998 (TRBV7-2, TRBJ2-2)
CASSLAVTGELFF

SEQ ID NO: 241997 - protein, 11 aa, Homo sapiens
  CDR3 for alpha chain variable domain of TCR clone 120999 (TRAV12-3, TRAJ43)
CAMSVSNDMRF

SEQ ID NO: 241998 - protein, 14 aa, Homo sapiens
  CDR3 for beta chain variable domain of TCR clone 120999 (TRBV19, TRBJ2-1)
CASSMGSGATEQFF

SEQ ID NO: 241999 - protein, 18 aa, Homo sapiens
  CDR3 for alpha chain variable domain of TCR clone 121000 (TRAV21, TRAJ52)
CAVRPSPAGGTSYGKLTF

SEQ ID NO: 242000 - protein, 15 aa, Homo sapiens
  CDR3 for beta chain variable domain of TCR clone 121000 (TRBV20-1, TRBJ2-7)
CSAESGTSGAYEQYF

SEQ ID NO: 242001 - protein, 11 aa, Homo sapiens
  CDR3 for alpha chain variable domain of TCR clone 121001 (TRAV14/DV4, TRAJ29)
CAMRGNTPLVF

SEQ ID NO: 242002 - protein, 15 aa, Homo sapiens
  CDR3 for beta chain variable domain of TCR clone 121001 (TRBV29-1, TRBJ2-7)
CSVEFFDRGSYEQYF

SEQ ID NO: 242003 - protein, 11 aa, Homo sapiens
  CDR3 for alpha chain variable domain of TCR clone 121002 (TRAV21, TRAJ31)
CAVRNNARLMF

SEQ ID NO: 242004 - protein, 16 aa, Homo sapiens
  CDR3 for beta chain variable domain of TCR clone 121002 (TRBV9, TRBJ2-1)
CASSVGGGGNYNEQFF

SEQ ID NO: 242005 - protein, 21 aa, Homo sapiens
  CDR3 for alpha chain variable domain of TCR clone 121003 (TRAV6, TRAJ36)
CARQTTSSLGLERDSPLFPIS

SEQ ID NO: 242006 - protein, 14 aa, Homo sapiens
  CDR3 for beta chain variable domain of TCR clone 121003 (TRBV7-6, TRBJ2-3)
CASSLGTVTDTQYF

SEQ ID NO: 242007 - protein, 14 aa, Homo sapiens
  CDR3 for alpha chain variable domain of TCR clone 121004 (TRAV9-2, TRAJ39)
CALYIYNAGNMLTF

SEQ ID NO: 242008 - protein, 16 aa, Homo sapiens
  CDR3 for beta chain variable domain of TCR clone 121004 (TRBV28, TRBJ2-2)
CASSLEGGSNTGELFF

SEQ ID NO: 242009 - protein, 19 aa, Homo sapiens
  CDR3 for alpha chain variable domain of TCR clone 121005 (TRAV38-1, TRAJ53)
CAFMKHGLESGGINYKLTF

SEQ ID NO: 242010 - protein, 13 aa, Homo sapiens
  CDR3 for beta chain variable domain of TCR clone 121005 (TRBV19, TRBJ2-7)
CASSPRQSYEQYF

SEQ ID NO: 242011 - protein, 14 aa, Homo sapiens
  CDR3 for alpha chain variable domain of TCR clone 121006 (TRAV21, TRAJ47)
CAVEKLEYGNKLVF

SEQ ID NO: 242012 - protein, 15 aa, Homo sapiens
  CDR3 for beta chain variable domain of TCR clone 121006 (TRBV20-1, TRBJ2-7)
CSARDRVSGMDEQYF

SEQ ID NO: 242013 - protein, 11 aa, Homo sapiens
  CDR3 for alpha chain variable domain of TCR clone 121007 (TRAV2, TRAJ13)
CASGGYQKVTF

SEQ ID NO: 242014 - protein, 16 aa, Homo sapiens
  CDR3 for beta chain variable domain of TCR clone 121007 (TRBV6-6, TRBJ1-5)
CASSYSTLVGNQPQHF

SEQ ID NO: 242015 - protein, 13 aa, Homo sapiens
  CDR3 for alpha chain variable domain of TCR clone 121008 (TRAV13-1, TRAJ37)
CAAVSGNTCKLIF

SEQ ID NO: 242016 - protein, 17 aa, Homo sapiens
  CDR3 for beta chain variable domain of TCR clone 121008 (TRBV10-2, TRBJ1-6)
CASSENRGSSYNSPLHF

SEQ ID NO: 242017 - protein, 13 aa, Homo sapiens
  CDR3 for alpha chain variable domain of TCR clone 121009 (TRAV20, TRAJ40)
FAVPFSGTYKYIF

SEQ ID NO: 242018 - protein, 13 aa, Homo sapiens
  CDR3 for beta chain variable domain of TCR clone 121009 (TRBV15, TRBJ2-5)
CATSQIGEETQYF

SEQ ID NO: 242019 - protein, 16 aa, Homo sapiens
  CDR3 for alpha chain variable domain of TCR clone 121010 (TRAV3, TRAJ37)
CAVRGKGSGNTGKLIF

SEQ ID NO: 242020 - protein, 15 aa, Homo sapiens
  CDR3 for beta chain variable domain of TCR clone 121010 (TRBV7-2, TRBJ2-3)
CASSLEQGGTDTQYF

SEQ ID NO: 242021 - protein, 12 aa, Homo sapiens
  CDR3 for alpha chain variable domain of TCR clone 121011 (TRAV12-2, TRAJ10)
WGVTGGGNKLTF

SEQ ID NO: 242022 - protein, 16 aa, Homo sapiens
  CDR3 for beta chain variable domain of TCR clone 121011 (TRBV7-3, TRBJ2-2)
CASSLKRGTLSGELFF

SEQ ID NO: 242023 - protein, 16 aa, Homo sapiens
  CDR3 for alpha chain variable domain of TCR clone 121012 (TRAV16, TRAJ4)
CALSRMFSGGYNKLIF

SEQ ID NO: 242024 - protein, 15 aa, Homo sapiens
  CDR3 for beta chain variable domain of TCR clone 121012 (TRBV5-7, TRBJ2-3)
CASSPGLATTDTQYF

SEQ ID NO: 242025 - protein, 13 aa, Homo sapiens
  CDR3 for alpha chain variable domain of TCR clone 121013 (TRAV35, TRAJ44)
CAGLSGTASKLTF

SEQ ID NO: 242026 - protein, 14 aa, Homo sapiens
  CDR3 for beta chain variable domain of TCR clone 121013 (TRBV5-5, TRBJ1-5)
CASSGQGVDQPQHF

SEQ ID NO: 242027 - protein, 17 aa, Homo sapiens
  CDR3 for alpha chain variable domain of TCR clone 121014 (TRAV3, TRAJ42)
CAVRDRDYGGSQGNLIF

SEQ ID NO: 242028 - protein, 15 aa, Homo sapiens
  CDR3 for beta chain variable domain of TCR clone 121014 (TRBV5-1, TRBJ2-3)
CASSVTSGSTDTQYF

SEQ ID NO: 242029 - protein, 12 aa, Homo sapiens
  CDR3 for alpha chain variable domain of TCR clone 121015 (TRAV25, TRAJ38)
CAGTGNNRKRIW

SEQ ID NO: 242030 - protein, 14 aa, Homo sapiens
  CDR3 for beta chain variable domain of TCR clone 121015 (TRBV19, TRBJ1-5)
CASSKMTGPQPQHF

SEQ ID NO: 242031 - protein, 13 aa, Homo sapiens
  CDR3 for alpha chain variable domain of TCR clone 121016 (TRAV12-2, TRAJ42)
CAVKRGSQGNLIF

SEQ ID NO: 242032 - protein, 14 aa, Homo sapiens
  CDR3 for beta chain variable domain of TCR clone 121016 (TRBV11-2, TRBJ1-5)
CASSLDRGRQPQHF

SEQ ID NO: 242033 - protein, 15 aa, Homo sapiens
  CDR3 for alpha chain variable domain of TCR clone 121017 (TRAV3, TRAJ13)
CAVRVYSGGYQTVTF

SEQ ID NO: 242034 - protein, 15 aa, Homo sapiens
  CDR3 for beta chain variable domain of TCR clone 121017 (TRBV5-7, TRBJ1-2)
CASSLGVAANYGYTF

SEQ ID NO: 242035 - protein, 14 aa, Homo sapiens
  CDR3 for alpha chain variable domain of TCR clone 121018 (TRAV1-2, TRAJ16)
CAVNRFSDGQKLLF

SEQ ID NO: 242036 - protein, 16 aa, Homo sapiens
  CDR3 for beta chain variable domain of TCR clone 121018 (TRBV12-4, TRBJ1-5)
CASSRPVGGSNQPQHC

SEQ ID NO: 242037 - protein, 13 aa, Homo sapiens
  CDR3 for alpha chain variable domain of TCR clone 121019 (TRAV13-1, TRAJ16)
CAAFESDGQKLLF

SEQ ID NO: 242038 - protein, 13 aa, Homo sapiens
  CDR3 for beta chain variable domain of TCR clone 121019 (TRBV12-4, TRBJ1-2)
CASTMTSNYGYTF

SEQ ID NO: 242039 - protein, 16 aa, Homo sapiens
  CDR3 for alpha chain variable domain of TCR clone 121020 (TRAV30, TRAJ44)
CGTEDKRTGTASKLTF

SEQ ID NO: 242040 - protein, 16 aa, Homo sapiens
  CDR3 for beta chain variable domain of TCR clone 121020 (TRBV10-2, TRBJ2-7)
CASSESPGSSGFEQYL

SEQ ID NO: 242041 - protein, 12 aa, Homo sapiens
  CDR3 for alpha chain variable domain of TCR clone 121021 (TRAV13-1, TRAJ21)
CAAKEGFNKFYF

SEQ ID NO: 242042 - protein, 14 aa, Homo sapiens
  CDR3 for beta chain variable domain of TCR clone 121021 (TRBV18, TRBJ2-7)
CASSPRGGDYEQYF

SEQ ID NO: 242043 - protein, 14 aa, Homo sapiens
  CDR3 for alpha chain variable domain of TCR clone 121022 (TRAV8-2, TRAJ37)
CVVSISGNTGKLIF

SEQ ID NO: 242044 - protein, 13 aa, Homo sapiens
  CDR3 for beta chain variable domain of TCR clone 121022 (TRBV29-1, TRBJ1-1)
CGVGDSRNTEAFF

SEQ ID NO: 242045 - protein, 13 aa, Homo sapiens
  CDR3 for alpha chain variable domain of TCR clone 121023 (TRAV8-3, TRAJ48)
CAVVPLGNEKLTF

SEQ ID NO: 242046 - protein, 12 aa, Homo sapiens
  CDR3 for beta chain variable domain of TCR clone 121023 (TRBV11-2, TRBJ2-2)
CASSLGGGELFF

SEQ ID NO: 242047 - protein, 15 aa, Homo sapiens
  CDR3 for alpha chain variable domain of TCR clone 121024 (TRAV3, TRAJ3)
CAVRDGHSSASKIIF

SEQ ID NO: 242048 - protein, 16 aa, Homo sapiens
  CDR3 for beta chain variable domain of TCR clone 121024 (TRBV28, TRBJ1-4)
CASSFGHSMKNCFLAV

SEQ ID NO: 242049 - protein, 16 aa, Homo sapiens
  CDR3 for alpha chain variable domain of TCR clone 121025 (TRAV13-1, TRAJ37)
CAASSLGSSNTGKPIF

SEQ ID NO: 242050 - protein, 12 aa, Homo sapiens
  CDR3 for beta chain variable domain of TCR clone 121025 (TRBV6-1, TRBJ2-5)
CASSEGRETQYF

SEQ ID NO: 242051 - protein, 13 aa, Homo sapiens
  CDR3 for alpha chain variable domain of TCR clone 121026 (TRAV12-3, TRAJ13)
CAMGTGGYQKVTF

SEQ ID NO: 242052 - protein, 18 aa, Homo sapiens
  CDR3 for beta chain variable domain of TCR clone 121026 (TRBV11-2, TRBJ2-3)
CASSLGGASRGAPNTQYF

SEQ ID NO: 242053 - protein, 18 aa, Homo sapiens
  CDR3 for alpha chain variable domain of TCR clone 121027 (TRAV26-1, TRAJ23)
CIVRVGLEVWNQGGKLIF

SEQ ID NO: 242054 - protein, 21 aa, Homo sapiens
  CDR3 for beta chain variable domain of TCR clone 121027 (TRBV12-4, TRBJ2-5)
CASSFFVRGAPRDPVLRARHA

SEQ ID NO: 242055 - protein, 13 aa, Homo sapiens
  CDR3 for alpha chain variable domain of TCR clone 121028 (TRAV13-1, TRAJ43)
CAASKNNNNDMRF

SEQ ID NO: 242056 - protein, 13 aa, Homo sapiens
  CDR3 for beta chain variable domain of TCR clone 121028 (TRBV4-2, TRBJ1-1)
CASSQAGNTEDFF

SEQ ID NO: 242057 - protein, 13 aa, Homo sapiens
  CDR3 for alpha chain variable domain of TCR clone 121029 (TRAV23/DV6, TRAJ22)
GAPYSGSARQLTF

SEQ ID NO: 242058 - protein, 15 aa, Homo sapiens
  CDR3 for beta chain variable domain of TCR clone 121029 (TRBV11-2, TRBJ1-6)
CASSLDPWAVSPLHF

SEQ ID NO: 242059 - protein, 14 aa, Homo sapiens
  CDR3 for alpha chain variable domain of TCR clone 121030 (TRAV38-1, TRAJ40)
CALRPTSGTYKYIF

SEQ ID NO: 242060 - protein, 12 aa, Homo sapiens
  CDR3 for beta chain variable domain of TCR clone 121030 (TRBV7-2, TRBJ2-5)
CQQLGQLKTQYF

SEQ ID NO: 242061 - protein, 18 aa, Homo sapiens
  CDR3 for alpha chain variable domain of TCR clone 121031 (TRAV21, TRAJ52)
CAVRPSPAGGTSYGKLTF

SEQ ID NO: 242062 - protein, 14 aa, Homo sapiens
  CDR3 for beta chain variable domain of TCR clone 121031 (TRBV7-9, TRBJ2-1)
CASSDNSGYNEQFF

SEQ ID NO: 242063 - protein, 12 aa, Homo sapiens
  CDR3 for alpha chain variable domain of TCR clone 121032 (TRAV2, TRAJ9)
CAVGAGGFKTIF

SEQ ID NO: 242064 - protein, 16 aa, Homo sapiens
  CDR3 for beta chain variable domain of TCR clone 121032 (TRBV13, TRBJ2-2)
CASSPTTGEHTGELFF

SEQ ID NO: 242065 - protein, 23 aa, Homo sapiens
  CDR3 for alpha chain variable domain of TCR clone 121033 (TRAV12-2, TRAJ36)
SLLIRDSQPGDSATLERANNLFF

SEQ ID NO: 242066 - protein, 17 aa, Homo sapiens
  CDR3 for beta chain variable domain of TCR clone 121033 (TRBV3-1, TRBJ2-3)
CASSQLLDRGHTDTQYF

SEQ ID NO: 242067 - protein, 16 aa, Homo sapiens
  CDR3 for alpha chain variable domain of TCR clone 121034 (TRAV3, TRAJ37)
CAVRPHGSGNTGKLIF

SEQ ID NO: 242068 - protein, 13 aa, Homo sapiens
  CDR3 for beta chain variable domain of TCR clone 121034 (TRBV2, TRBJ1-5)
CASGTGGYKPQHF

SEQ ID NO: 242069 - protein, 16 aa, Homo sapiens
  CDR3 for alpha chain variable domain of TCR clone 121035 (TRAV30, TRAJ24)
CGTEIVDADSWGKFQF

SEQ ID NO: 242070 - protein, 13 aa, Homo sapiens
  CDR3 for beta chain variable domain of TCR clone 121035 (TRBV4-1, TRBJ2-1)
CASSQAGGDEQFF

SEQ ID NO: 242071 - protein, 14 aa, Homo sapiens
  CDR3 for alpha chain variable domain of TCR clone 121036 (TRAV12-2, TRAJ33)
CAVKRARSNYQLIW

SEQ ID NO: 242072 - protein, 15 aa, Homo sapiens
  CDR3 for beta chain variable domain of TCR clone 121036 (TRBV19, TRBJ2-1)
CASSSPGVPLDEQFF

SEQ ID NO: 242073 - protein, 16 aa, Homo sapiens
  CDR3 for alpha chain variable domain of TCR clone 121037 (TRAV17, TRAJ35)
CATAEGGIGFGNVLHC

SEQ ID NO: 242074 - protein, 16 aa, Homo sapiens
  CDR3 for beta chain variable domain of TCR clone 121037 (TRBV29-1, TRBJ2-6)
CSVEDITYSGANVLTF

SEQ ID NO: 242075 - protein, 12 aa, Homo sapiens
  CDR3 for alpha chain variable domain of TCR clone 121038 (TRAV21, TRAJ56)
CAVGVNRSKLTF

SEQ ID NO: 242076 - protein, 15 aa, Homo sapiens
  CDR3 for beta chain variable domain of TCR clone 121038 (TRBV19, TRBJ1-1)
CASSKTGSTNTEAFF

SEQ ID NO: 242077 - protein, 14 aa, Homo sapiens
  CDR3 for alpha chain variable domain of TCR clone 121039 (TRAV1-1, TRAJ27)
CAVIYNTNAGKSTF

SEQ ID NO: 242078 - protein, 13 aa, Homo sapiens
  CDR3 for beta chain variable domain of TCR clone 121039 (TRBV7-9, TRBJ1-2)
CARSLKQNYGYTF

SEQ ID NO: 242079 - protein, 12 aa, Homo sapiens
  CDR3 for alpha chain variable domain of TCR clone 121040 (TRAV12-1, TRAJ40)
CVVYSGTYKYIF

SEQ ID NO: 242080 - protein, 14 aa, Homo sapiens
  CDR3 for beta chain variable domain of TCR clone 121040 (TRBV7-3, TRBJ1-1)
CASSLGTGYTEAFF

SEQ ID NO: 242081 - protein, 14 aa, Homo sapiens
  CDR3 for alpha chain variable domain of TCR clone 121041 (TRAV12-2, TRAJ13)
CAVKNTGGYQKVTF

SEQ ID NO: 242082 - protein, 17 aa, Homo sapiens
  CDR3 for beta chain variable domain of TCR clone 121041 (TRBV13, TRBJ2-3)
CASSLSRVAGGRNTQYF

SEQ ID NO: 242083 - protein, 16 aa, Homo sapiens
  CDR3 for alpha chain variable domain of TCR clone 121042 (TRAV3, TRAJ37)
CAVRGKGSGNTGKRIF

SEQ ID NO: 242084 - protein, 13 aa, Homo sapiens
  CDR3 for beta chain variable domain of TCR clone 121042 (TRBV14, TRBJ2-7)
CASSQDRRYEQYF

SEQ ID NO: 242085 - protein, 13 aa, Homo sapiens
  CDR3 for alpha chain variable domain of TCR clone 121043 (TRAV23/DV6, TRAJ6)
CAAKTGGSYIPTF

SEQ ID NO: 242086 - protein, 15 aa, Homo sapiens
  CDR3 for beta chain variable domain of TCR clone 121043 (TRBV5-1, TRBJ1-2)
CASSSYGEFDYGYSF

SEQ ID NO: 242087 - protein, 12 aa, Homo sapiens
  CDR3 for alpha chain variable domain of TCR clone 121044 (TRAV1-1, TRAJ30)
CAVRGRDDKIIF

SEQ ID NO: 242088 - protein, 13 aa, Homo sapiens
  CDR3 for beta chain variable domain of TCR clone 121044 (TRBV7-9, TRBJ1-2)
CASSLKQNYGYTF

SEQ ID NO: 242089 - protein, 14 aa, Homo sapiens
  CDR3 for alpha chain variable domain of TCR clone 121045 (TRAV12-3, TRAJ10)
SHLPLTGGGNKLTF

SEQ ID NO: 242090 - protein, 14 aa, Homo sapiens
  CDR3 for beta chain variable domain of TCR clone 121045 (TRBV6-1, TRBJ1-3)
CASVQWGGGNTIYF

SEQ ID NO: 242091 - protein, 12 aa, Homo sapiens
  CDR3 for alpha chain variable domain of TCR clone 121046 (TRAV20, TRAJ45)
CAVRGGADGLTF

SEQ ID NO: 242092 - protein, 13 aa, Homo sapiens
  CDR3 for beta chain variable domain of TCR clone 121046 (TRBV7-9, TRBJ1-2)
CASSLKQNYGYTF

SEQ ID NO: 242093 - protein, 13 aa, Homo sapiens
  CDR3 for alpha chain variable domain of TCR clone 121047 (TRAV3, TRAJ21)
CAVREPDFNKFYF

SEQ ID NO: 242094 - protein, 15 aa, Homo sapiens
  CDR3 for beta chain variable domain of TCR clone 121047 (TRBV18, TRBJ1-1)
CASSDRGTGDTEAFF

SEQ ID NO: 242095 - protein, 13 aa, Homo sapiens
  CDR3 for alpha chain variable domain of TCR clone 121048 (TRAV2, TRAJ40)
CAVVTSGTYKYIF

SEQ ID NO: 242096 - protein, 12 aa, Homo sapiens
  CDR3 for beta chain variable domain of TCR clone 121048 (TRBV11-3, TRBJ2-1)
CASSPGNNEQFF

SEQ ID NO: 242097 - protein, 15 aa, Homo sapiens
  CDR3 for alpha chain variable domain of TCR clone 121049 (TRAV21, TRAJ53)
CATLNSGGSNYKLTF

SEQ ID NO: 242098 - protein, 15 aa, Homo sapiens
  CDR3 for beta chain variable domain of TCR clone 121049 (TRBV7-2, TRBJ2-1)
CASSAGLAGGNEQFF

SEQ ID NO: 242099 - protein, 10 aa, Homo sapiens
  CDR3 for alpha chain variable domain of TCR clone 121050 (TRAV8-4, TRAJ43)
WAVSADDMRF

SEQ ID NO: 242100 - protein, 16 aa, Homo sapiens
  CDR3 for beta chain variable domain of TCR clone 121050 (TRBV12-5, TRBJ2-5)
CASGPRTSGNQETQYF

SEQ ID NO: 242101 - protein, 19 aa, Homo sapiens
  CDR3 for alpha chain variable domain of TCR clone 121051 (TRAV3, TRAJ6)
CAVRDRNPSRSGGSYIPTF

SEQ ID NO: 242102 - protein, 12 aa, Homo sapiens
  CDR3 for beta chain variable domain of TCR clone 121051 (TRBV12-4, TRBJ2-7)
CASSLGGYEQYF

SEQ ID NO: 242103 - protein, 14 aa, Homo sapiens
  CDR3 for alpha chain variable domain of TCR clone 121052 (TRAV13-2, TRAJ6)
CAENRPGGSYIPTF

SEQ ID NO: 242104 - protein, 16 aa, Homo sapiens
  CDR3 for beta chain variable domain of TCR clone 121052 (TRBV5-1, TRBJ2-5)
CASSLRRTSGQETQYF

SEQ ID NO: 242105 - protein, 14 aa, Homo sapiens
  CDR3 for alpha chain variable domain of TCR clone 121053 (TRAV1-2, TRAJ16)
CAVNRFSDGQKLLF

SEQ ID NO: 242106 - protein, 15 aa, Homo sapiens
  CDR3 for beta chain variable domain of TCR clone 121053 (TRBV7-9, TRBJ2-7)
CASSLDLQGPYEQYF

SEQ ID NO: 242107 - protein, 12 aa, Homo sapiens
  CDR3 for alpha chain variable domain of TCR clone 121054 (TRAV16, TRAJ10)
CSRAGGGNKLTF

SEQ ID NO: 242108 - protein, 14 aa, Homo sapiens
  CDR3 for beta chain variable domain of TCR clone 121054 (TRBV7-2, TRBJ2-7)
CASRSQGAAYEQYF

SEQ ID NO: 242109 - protein, 11 aa, Homo sapiens
  CDR3 for alpha chain variable domain of TCR clone 121055 (TRAV20, TRAJ23)
CACNQGGNLIF

SEQ ID NO: 242110 - protein, 16 aa, Homo sapiens
  CDR3 for beta chain variable domain of TCR clone 121055 (TRBV7-8, TRBJ2-5)
CASSFGGQPAQETQYF

SEQ ID NO: 242111 - protein, 13 aa, Homo sapiens
  CDR3 for alpha chain variable domain of TCR clone 121056 (TRAV8-3, TRAJ28)
CAVGAVGSYQLTF

SEQ ID NO: 242112 - protein, 17 aa, Homo sapiens
  CDR3 for beta chain variable domain of TCR clone 121056 (TRBV7-6, TRBJ2-5)
CASSLGGLAGGLKTQYF

SEQ ID NO: 242113 - protein, 17 aa, Homo sapiens
  CDR3 for alpha chain variable domain of TCR clone 121057 (TRAV26-1, TRAJ28)
CIVRVPDSGAGSYQLTF

SEQ ID NO: 242114 - protein, 17 aa, Homo sapiens
  CDR3 for beta chain variable domain of TCR clone 121057 (TRBV28, TRBJ2-7)
CASSTLPAGGKSYEQYF

SEQ ID NO: 242115 - protein, 13 aa, Homo sapiens
  CDR3 for alpha chain variable domain of TCR clone 121058 (TRAV12-1, TRAJ6)
CVVFPGGSYIPTF

SEQ ID NO: 242116 - protein, 14 aa, Homo sapiens
  CDR3 for beta chain variable domain of TCR clone 121058 (TRBV20-1, TRBJ1-3)
CSASPTGAGNTIYC

SEQ ID NO: 242117 - protein, 13 aa, Homo sapiens
  CDR3 for alpha chain variable domain of TCR clone 121059 (TRAV2, TRAJ40)
CAVVTSGTYKYIF

SEQ ID NO: 242118 - protein, 15 aa, Homo sapiens
  CDR3 for beta chain variable domain of TCR clone 121059 (TRBV6-3, TRBJ2-7)
CARSSPGTVFYEQYF

SEQ ID NO: 242119 - protein, 14 aa, Homo sapiens
  CDR3 for alpha chain variable domain of TCR clone 121060 (TRAV8-1, TRAJ5)
CAVRTDTGRRALTF

SEQ ID NO: 242120 - protein, 15 aa, Homo sapiens
  CDR3 for beta chain variable domain of TCR clone 121060 (TRBV4-1, TRBJ2-3)
CASSQDRLPPDTQYF

SEQ ID NO: 242121 - protein, 13 aa, Homo sapiens
  CDR3 for alpha chain variable domain of TCR clone 121061 (TRAV3, TRAJ15)
CAVRDQAGTALIF

SEQ ID NO: 242122 - protein, 15 aa, Homo sapiens
  CDR3 for beta chain variable domain of TCR clone 121061 (TRBV11-1, TRBJ2-7)
CASSLNYGGSYEQYF

SEQ ID NO: 242123 - protein, 13 aa, Homo sapiens
  CDR3 for alpha chain variable domain of TCR clone 121062 (TRAV26-2, TRAJ43)
CILRAVNNNDMRF

SEQ ID NO: 242124 - protein, 15 aa, Homo sapiens
  CDR3 for beta chain variable domain of TCR clone 121062 (TRBV7-2, TRBJ2-1)
CASTHGTGIYNEQCF

SEQ ID NO: 242125 - protein, 15 aa, Homo sapiens
  CDR3 for alpha chain variable domain of TCR clone 121063 (TRAV3, TRAJ22)
CAVRDRGGSARQLTF

SEQ ID NO: 242126 - protein, 16 aa, Homo sapiens
  CDR3 for beta chain variable domain of TCR clone 121063 (TRBV4-2, TRBJ2-4)
CASSQELRRAKNIQYF

SEQ ID NO: 242127 - protein, 16 aa, Homo sapiens
  CDR3 for alpha chain variable domain of TCR clone 121064 (TRAV27, TRAJ34)
CAGGGLGDYKTDKLIF

SEQ ID NO: 242128 - protein, 15 aa, Homo sapiens
  CDR3 for beta chain variable domain of TCR clone 121064 (TRBV9, TRBJ1-4)
CASSVGGSTNEKLFF

SEQ ID NO: 242129 - protein, 10 aa, Homo sapiens
  CDR3 for alpha chain variable domain of TCR clone 121065 (TRAV23/DV6, TRAJ57)
CAASSTLSTG

SEQ ID NO: 242130 - protein, 14 aa, Homo sapiens
  CDR3 for beta chain variable domain of TCR clone 121065 (TRBV25-1, TRBJ1-1)
CASTHLGGNTEAFF

SEQ ID NO: 242131 - protein, 14 aa, Homo sapiens
  CDR3 for alpha chain variable domain of TCR clone 121066 (TRAV1-2, TRAJ12)
CAVSGTDSSYKLIF

SEQ ID NO: 242132 - protein, 14 aa, Homo sapiens
  CDR3 for beta chain variable domain of TCR clone 121066 (TRBV19, TRBJ2-1)
CASPTFVLSGEQFF

SEQ ID NO: 242133 - protein, 13 aa, Homo sapiens
  CDR3 for alpha chain variable domain of TCR clone 121067 (TRAV8-3, TRAJ48)
CAVVPFGIEKLTF

SEQ ID NO: 242134 - protein, 15 aa, Homo sapiens
  CDR3 for beta chain variable domain of TCR clone 121067 (TRBV11-2, TRBJ2-1)
CASSSPSTRYNEQFF

SEQ ID NO: 242135 - protein, 14 aa, Homo sapiens
  CDR3 for alpha chain variable domain of TCR clone 121068 (TRAV1-2, TRAJ8)
CAVREDTGFQKLVF

SEQ ID NO: 242136 - protein, 16 aa, Homo sapiens
  CDR3 for beta chain variable domain of TCR clone 121068 (TRBV28, TRBJ1-4)
CASSPPHRGRSEKLFF

SEQ ID NO: 242137 - protein, 18 aa, Homo sapiens
  CDR3 for alpha chain variable domain of TCR clone 121069 (TRAV26-1, TRAJ23)
CIVRVGLEVWNQGGKLIF

SEQ ID NO: 242138 - protein, 13 aa, Homo sapiens
  CDR3 for beta chain variable domain of TCR clone 121069 (TRBV9, TRBJ2-1)
CASSVGQGGEQFF

SEQ ID NO: 242139 - protein, 11 aa, Homo sapiens
  CDR3 for alpha chain variable domain of TCR clone 121070 (TRAV2, TRAJ21)
CAVFNFNKFYF

SEQ ID NO: 242140 - protein, 16 aa, Homo sapiens
  CDR3 for beta chain variable domain of TCR clone 121070 (TRBV19, TRBJ2-1)
CASSKAGPSSYNEQFF

SEQ ID NO: 242141 - protein, 16 aa, Homo sapiens
  CDR3 for alpha chain variable domain of TCR clone 121071 (TRAV16, TRAJ42)
CARQMNYGGSQGNLIF

SEQ ID NO: 242142 - protein, 13 aa, Homo sapiens
  CDR3 for beta chain variable domain of TCR clone 121071 (TRBV20-1, TRBJ2-7)
CSASPPSSYEQYF

SEQ ID NO: 242143 - protein, 16 aa, Homo sapiens
  CDR3 for alpha chain variable domain of TCR clone 121072 (TRAV12-1, TRAJ22)
CVVNTISSGSARQLTF

SEQ ID NO: 242144 - protein, 13 aa, Homo sapiens
  CDR3 for beta chain variable domain of TCR clone 121072 (TRBV19, TRBJ2-1)
CARNGGVFSEQFF

SEQ ID NO: 242145 - protein, 13 aa, Homo sapiens
  CDR3 for alpha chain variable domain of TCR clone 121073 (TRAV19, TRAJ57)
CALLQGGSEKLVF

SEQ ID NO: 242146 - protein, 14 aa, Homo sapiens
  CDR3 for beta chain variable domain of TCR clone 121073 (TRBV7-8, TRBJ2-7)
CASSPRDRVYEQYF

SEQ ID NO: 242147 - protein, 14 aa, Homo sapiens
  CDR3 for alpha chain variable domain of TCR clone 121074 (TRAV25, TRAJ22)
CAVRSSGSARQLTF

SEQ ID NO: 242148 - protein, 16 aa, Homo sapiens
  CDR3 for beta chain variable domain of TCR clone 121074 (TRBV4-2, TRBJ1-1)
CASSPPPGRAAPEAFF

SEQ ID NO: 242149 - protein, 14 aa, Homo sapiens
  CDR3 for alpha chain variable domain of TCR clone 121075 (TRAV12-2, TRAJ13)
CAVKKTGGYQKVTF

SEQ ID NO: 242150 - protein, 18 aa, Homo sapiens
  CDR3 for beta chain variable domain of TCR clone 121075 (TRBV5-1, TRBJ2-7)
CASSSTGGASGYSYEQYF

SEQ ID NO: 242151 - protein, 19 aa, Homo sapiens
  CDR3 for alpha chain variable domain of TCR clone 121076 (TRAV2, TRAJ20)
ILQVREADAAVYRDCKLSF

SEQ ID NO: 242152 - protein, 13 aa, Homo sapiens
  CDR3 for beta chain variable domain of TCR clone 121076 (TRBV4-1, TRBJ2-3)
CASSQPPTDTQYF

SEQ ID NO: 242153 - protein, 11 aa, Homo sapiens
  CDR3 for alpha chain variable domain of TCR clone 121077 (TRAV17, TRAJ36)
CAPTGASNLFF

SEQ ID NO: 242154 - protein, 13 aa, Homo sapiens
  CDR3 for beta chain variable domain of TCR clone 121077 (TRBV12-4, TRBJ2-7)
CASSPTETYEQYF

SEQ ID NO: 242155 - protein, 13 aa, Homo sapiens
  CDR3 for alpha chain variable domain of TCR clone 121078 (TRAV13-1, TRAJ21)
CAASIYNFNKFYF

SEQ ID NO: 242156 - protein, 14 aa, Homo sapiens
  CDR3 for beta chain variable domain of TCR clone 121078 (TRBV11-3, TRBJ2-1)
CASSATTSGSIQFF

SEQ ID NO: 242157 - protein, 13 aa, Homo sapiens
  CDR3 for alpha chain variable domain of TCR clone 121079 (TRAV36/DV7, TRAJ37)
CAVFSSNTGKLIF

SEQ ID NO: 242158 - protein, 14 aa, Homo sapiens
  CDR3 for beta chain variable domain of TCR clone 121079 (TRBV25-1, TRBJ1-1)
CASTHLGGNTEAFF

SEQ ID NO: 242159 - protein, 14 aa, Homo sapiens
  CDR3 for alpha chain variable domain of TCR clone 121080 (TRAV26-1, TRAJ34)
CIVRVAYNTDKPIF

SEQ ID NO: 242160 - protein, 15 aa, Homo sapiens
  CDR3 for beta chain variable domain of TCR clone 121080 (TRBV20-1, TRBJ2-7)
CSARVPAAYFYEQYL

SEQ ID NO: 242161 - protein, 16 aa, Homo sapiens
  CDR3 for alpha chain variable domain of TCR clone 121081 (TRAV30, TRAJ24)
CGTEIVYADIWGKFQF

SEQ ID NO: 242162 - protein, 14 aa, Homo sapiens
  CDR3 for beta chain variable domain of TCR clone 121081 (TRBV12-5, TRBJ2-5)
CASGSRTHQETQYF

SEQ ID NO: 242163 - protein, 15 aa, Homo sapiens
  CDR3 for alpha chain variable domain of TCR clone 121082 (TRAV12-3, TRAJ27)
CAMRAYNTNAGKSTF

SEQ ID NO: 242164 - protein, 14 aa, Homo sapiens
  CDR3 for beta chain variable domain of TCR clone 121082 (TRBV6-1, TRBJ2-6)
CASQQGAGANVLTF

SEQ ID NO: 242165 - protein, 12 aa, Homo sapiens
  CDR3 for alpha chain variable domain of TCR clone 121083 (TRAV29/DV5, TRAJ49)
FAATDTGNQFYF

SEQ ID NO: 242166 - protein, 19 aa, Homo sapiens
  CDR3 for beta chain variable domain of TCR clone 121083 (TRBV25-1, TRBJ2-2)
CAILVYRVDRGRKTGELFF

SEQ ID NO: 242167 - protein, 13 aa, Homo sapiens
  CDR3 for alpha chain variable domain of TCR clone 121084 (TRAV17, TRAJ22)
CAHHSGSASQLTF

SEQ ID NO: 242168 - protein, 16 aa, Homo sapiens
  CDR3 for beta chain variable domain of TCR clone 121084 (TRBV4-1, TRBJ1-2)
CASSQDAGQVLYGYTF

SEQ ID NO: 242169 - protein, 11 aa, Homo sapiens
  CDR3 for alpha chain variable domain of TCR clone 121085 (TRAV3, TRAJ17)
PRGDAGNKLTF

SEQ ID NO: 242170 - protein, 16 aa, Homo sapiens
  CDR3 for beta chain variable domain of TCR clone 121085 (TRBV7-6, TRBJ2-1)
CASSAPGPSSYNEQFF

SEQ ID NO: 242171 - protein, 16 aa, Homo sapiens
  CDR3 for alpha chain variable domain of TCR clone 121086 (TRAV8-6, TRAJ4)
CAVTKVLSGGYNKLIF

SEQ ID NO: 242172 - protein, 17 aa, Homo sapiens
  CDR3 for beta chain variable domain of TCR clone 121086 (TRBV20-1, TRBJ2-1)
CSASSSGLAGSYNEQFF

SEQ ID NO: 242173 - protein, 13 aa, Homo sapiens
  CDR3 for alpha chain variable domain of TCR clone 121087 (TRAV9-2, TRAJ49)
CALKTNTGNQFYF

SEQ ID NO: 242174 - protein, 14 aa, Homo sapiens
  CDR3 for beta chain variable domain of TCR clone 121087 (TRBV12-4, TRBJ1-1)
CASRQTGLNTEAFF

SEQ ID NO: 242175 - protein, 14 aa, Homo sapiens
  CDR3 for alpha chain variable domain of TCR clone 121088 (TRAV8-2, TRAJ4)
WVVSPSGGYNKLIF

SEQ ID NO: 242176 - protein, 15 aa, Homo sapiens
  CDR3 for beta chain variable domain of TCR clone 121088 (TRBV2, TRBJ2-1)
CASSELAGSYNEQFF

SEQ ID NO: 242177 - protein, 13 aa, Homo sapiens
  CDR3 for alpha chain variable domain of TCR clone 121089 (TRAV27, TRAJ8)
CAGGPTGFQQLVF

SEQ ID NO: 242178 - protein, 15 aa, Homo sapiens
  CDR3 for beta chain variable domain of TCR clone 121089 (TRBV6-1, TRBJ2-7)
CASSESMGDFYEQYF

SEQ ID NO: 242179 - protein, 18 aa, Homo sapiens
  CDR3 for alpha chain variable domain of TCR clone 121090 (TRAV13-1, TRAJ52)
CAASKRSAGGSSYGKLTF

SEQ ID NO: 242180 - protein, 13 aa, Homo sapiens
  CDR3 for beta chain variable domain of TCR clone 121090 (TRBV12-4, TRBJ1-2)
CASSLRQGKGYTF

SEQ ID NO: 242181 - protein, 14 aa, Homo sapiens
  CDR3 for alpha chain variable domain of TCR clone 121091 (TRAV1-2, TRAJ16)
CAVRGFSDGQKLLF

SEQ ID NO: 242182 - protein, 16 aa, Homo sapiens
  CDR3 for beta chain variable domain of TCR clone 121091 (TRBV20-1, TRBJ2-1)
CSARDHRAGGRGEQFF

SEQ ID NO: 242183 - protein, 12 aa, Homo sapiens
  CDR3 for alpha chain variable domain of TCR clone 121092 (TRAV29/DV5, TRAJ49)
CAATDTGNPFYF

SEQ ID NO: 242184 - protein, 19 aa, Homo sapiens
  CDR3 for beta chain variable domain of TCR clone 121092 (TRBV25-1, TRBJ2-2)
CAILVYRVDRGRKTGELFF

SEQ ID NO: 242185 - protein, 11 aa, Homo sapiens
  CDR3 for alpha chain variable domain of TCR clone 121093 (TRAV3, TRAJ21)
CAVGNFNKFYF

SEQ ID NO: 242186 - protein, 17 aa, Homo sapiens
  CDR3 for beta chain variable domain of TCR clone 121093 (TRBV24-1, TRBJ2-4)
CATSDAEARGVRNIQYF

SEQ ID NO: 242187 - protein, 14 aa, Homo sapiens
  CDR3 for alpha chain variable domain of TCR clone 121094 (TRAV35, TRAJ13)
CAGSPSGGYQNVTF

SEQ ID NO: 242188 - protein, 17 aa, Homo sapiens
  CDR3 for beta chain variable domain of TCR clone 121094 (TRBV7-6, TRBJ2-5)
CASSPGLADPWGETQYF

SEQ ID NO: 242189 - protein, 13 aa, Homo sapiens
  CDR3 for alpha chain variable domain of TCR clone 121095 (TRAV27, TRAJ40)
CAGPPSGTYKYIF

SEQ ID NO: 242190 - protein, 13 aa, Homo sapiens
  CDR3 for beta chain variable domain of TCR clone 121095 (TRBV7-7, TRBJ1-1)
CASSLGANTEAFF

SEQ ID NO: 242191 - protein, 23 aa, Homo sapiens
  CDR3 for alpha chain variable domain of TCR clone 121096 (TRAV26-1, TRAJ38)
CIADNAGNNHIQNLDPAVYQLRD

SEQ ID NO: 242192 - protein, 12 aa, Homo sapiens
  CDR3 for beta chain variable domain of TCR clone 121096 (TRBV11-2, TRBJ2-2)
CASSLGGGELFF

SEQ ID NO: 242193 - protein, 20 aa, Homo sapiens
  CDR3 for alpha chain variable domain of TCR clone 121097 (TRAV12-1, TRAJ42)
SSVIQPPTSVKGGSQGNLIF

SEQ ID NO: 242194 - protein, 15 aa, Homo sapiens
  CDR3 for beta chain variable domain of TCR clone 121097 (TRBV3-1, TRBJ2-5)
CASSRNAGGQETQYF

SEQ ID NO: 242195 - protein, 14 aa, Homo sapiens
  CDR3 for alpha chain variable domain of TCR clone 121098 (TRAV12-3, TRAJ10)
SHLPLTGGGNKLTF

SEQ ID NO: 242196 - protein, 20 aa, Homo sapiens
  CDR3 for beta chain variable domain of TCR clone 121098 (TRBV7-8, TRBJ2-2)
CASSHLFPWPTIHITGELFF

SEQ ID NO: 242197 - protein, 11 aa, Homo sapiens
  CDR3 for alpha chain variable domain of TCR clone 121099 (TRAV3, TRAJ21)
CAVGNFNKFYF

SEQ ID NO: 242198 - protein, 12 aa, Homo sapiens
  CDR3 for beta chain variable domain of TCR clone 121099 (TRBV7-6, TRBJ2-3)
CASSTGTDTQYF

SEQ ID NO: 242199 - protein, 12 aa, Homo sapiens
  CDR3 for alpha chain variable domain of TCR clone 121100 (TRAV12-3, TRAJ17)
CAMTLTGNKLTF

SEQ ID NO: 242200 - protein, 12 aa, Homo sapiens
  CDR3 for beta chain variable domain of TCR clone 121100 (TRBV2, TRBJ2-7)
CASSDPDYEQYF

SEQ ID NO: 242201 - protein, 12 aa, Homo sapiens
  CDR3 for alpha chain variable domain of TCR clone 121101 (TRAV26-1, TRAJ13)
CIVSRGYQKVTF

SEQ ID NO: 242202 - protein, 15 aa, Homo sapiens
  CDR3 for beta chain variable domain of TCR clone 121101 (TRBV11-3, TRBJ2-7)
CASSPGPASSYEQYF

SEQ ID NO: 242203 - protein, 23 aa, Homo sapiens
  CDR3 for alpha chain variable domain of TCR clone 121102 (TRAV2, TRAJ32)
GAGGRCRCLLLWGGGGATNKLIF

SEQ ID NO: 242204 - protein, 13 aa, Homo sapiens
  CDR3 for beta chain variable domain of TCR clone 121102 (TRBV20-1, TRBJ1-1)
CSARGGGNTEAFF

SEQ ID NO: 242205 - protein, 13 aa, Homo sapiens
  CDR3 for alpha chain variable domain of TCR clone 121103 (TRAV27, TRAJ45)
CRGGGGGADGLTF

SEQ ID NO: 242206 - protein, 13 aa, Homo sapiens
  CDR3 for beta chain variable domain of TCR clone 121103 (TRBV20-1, TRBJ1-1)
CSAPEGGNNEAFF

SEQ ID NO: 242207 - protein, 14 aa, Homo sapiens
  CDR3 for alpha chain variable domain of TCR clone 121104 (TRAV27, TRAJ40)
CAGSLLRGTYKYIF

SEQ ID NO: 242208 - protein, 11 aa, Homo sapiens
  CDR3 for beta chain variable domain of TCR clone 121104 (TRBV19, TRBJ2-2)
CASRYSGELFF

SEQ ID NO: 242209 - protein, 10 aa, Homo sapiens
  CDR3 for alpha chain variable domain of TCR clone 121105 (TRAV1-2, TRAJ20)
CACNDYKLSF

SEQ ID NO: 242210 - protein, 16 aa, Homo sapiens
  CDR3 for beta chain variable domain of TCR clone 121105 (TRBV20-1, TRBJ2-1)
CSAGDLKQGMNNEQFF

SEQ ID NO: 242211 - protein, 16 aa, Homo sapiens
  CDR3 for alpha chain variable domain of TCR clone 121106 (TRAV14/DV4, TRAJ54)
CAMREGRIQGAQKLVF

SEQ ID NO: 242212 - protein, 14 aa, Homo sapiens
  CDR3 for beta chain variable domain of TCR clone 121106 (TRBV4-1, TRBJ1-5)
CASSQGPTNQPQHF

SEQ ID NO: 242213 - protein, 12 aa, Homo sapiens
  CDR3 for alpha chain variable domain of TCR clone 121107 (TRAV13-1, TRAJ17)
CAARTAGTKLTF

SEQ ID NO: 242214 - protein, 15 aa, Homo sapiens
  CDR3 for beta chain variable domain of TCR clone 121107 (TRBV7-6, TRBJ1-1)
CASSPQGGANTEAFF

SEQ ID NO: 242215 - protein, 14 aa, Homo sapiens
  CDR3 for alpha chain variable domain of TCR clone 121108 (TRAV2, TRAJ37)
CAVDFTSNTGKLIF

SEQ ID NO: 242216 - protein, 14 aa, Homo sapiens
  CDR3 for beta chain variable domain of TCR clone 121108 (TRBV5-4, TRBJ1-1)
CASSLDSRRDEAFF

SEQ ID NO: 242217 - protein, 14 aa, Homo sapiens
  CDR3 for alpha chain variable domain of TCR clone 121109 (TRAV13-1, TRAJ44)
CAAKATGTASKITF

SEQ ID NO: 242218 - protein, 15 aa, Homo sapiens
  CDR3 for beta chain variable domain of TCR clone 121109 (TRBV4-3, TRBJ1-1)
CASSQELGRGTEAFF

SEQ ID NO: 242219 - protein, 15 aa, Homo sapiens
  CDR3 for alpha chain variable domain of TCR clone 121110 (TRAV23/DV6, TRAJ30)
CAASSQESRDDKIIF

SEQ ID NO: 242220 - protein, 17 aa, Homo sapiens
  CDR3 for beta chain variable domain of TCR clone 121110 (TRBV4-3, TRBJ2-1)
CASSHFSSGRASGEQFF

SEQ ID NO: 242221 - protein, 16 aa, Homo sapiens
  CDR3 for alpha chain variable domain of TCR clone 121111 (TRAV16, TRAJ4)
CALSRMFSGGYNKLIF

SEQ ID NO: 242222 - protein, 15 aa, Homo sapiens
  CDR3 for beta chain variable domain of TCR clone 121111 (TRBV2, TRBJ2-1)
CASSELAGSYNEQFF

SEQ ID NO: 242223 - protein, 17 aa, Homo sapiens
  CDR3 for alpha chain variable domain of TCR clone 121112 (TRAV23/DV6, )
CAADIQNPDPAVYQLRD

SEQ ID NO: 242224 - protein, 13 aa, Homo sapiens
  CDR3 for beta chain variable domain of TCR clone 121112 (TRBV20-1, TRBJ1-1)
CSARVGGNTEAFF

SEQ ID NO: 242225 - protein, 16 aa, Homo sapiens
  CDR3 for alpha chain variable domain of TCR clone 121113 (TRAV14/DV4, TRAJ15)
CAMREGPAPAGTALIF

SEQ ID NO: 242226 - protein, 12 aa, Homo sapiens
  CDR3 for beta chain variable domain of TCR clone 121113 (TRBV28, TRBJ2-6)
CAIQAGANVLTF

SEQ ID NO: 242227 - protein, 11 aa, Homo sapiens
  CDR3 for alpha chain variable domain of TCR clone 121114 (TRAV4, TRAJ31)
CLVGDNARLMF

SEQ ID NO: 242228 - protein, 16 aa, Homo sapiens
  CDR3 for beta chain variable domain of TCR clone 121114 (TRBV7-2, TRBJ2-5)
CASSSKWLSCQETQYF

SEQ ID NO: 242229 - protein, 18 aa, Homo sapiens
  CDR3 for alpha chain variable domain of TCR clone 121115 (TRAV21, TRAJ52)
CAVRPSPAGGTSSGKMTF

SEQ ID NO: 242230 - protein, 17 aa, Homo sapiens
  CDR3 for beta chain variable domain of TCR clone 121115 (TRBV13, TRBJ2-3)
CASSLSRVAGGRNTQYF

SEQ ID NO: 242231 - protein, 16 aa, Homo sapiens
  CDR3 for alpha chain variable domain of TCR clone 121116 (TRAV20, TRAJ48)
CAVPVGSNFGNEKLTF

SEQ ID NO: 242232 - protein, 15 aa, Homo sapiens
  CDR3 for beta chain variable domain of TCR clone 121116 (TRBV6-3, TRBJ2-7)
CASSSPGTVFYEQYF

SEQ ID NO: 242233 - protein, 11 aa, Homo sapiens
  CDR3 for alpha chain variable domain of TCR clone 121117 (TRAV21, TRAJ34)
CAVTNTDKLIF

SEQ ID NO: 242234 - protein, 17 aa, Homo sapiens
  CDR3 for beta chain variable domain of TCR clone 121117 (TRBV24-1, TRBJ2-1)
CATSDVSTSGTYNEQFF

SEQ ID NO: 242235 - protein, 14 aa, Homo sapiens
  CDR3 for alpha chain variable domain of TCR clone 121118 (TRAV23/DV6, TRAJ27)
CAASRDTNAGKSTF

SEQ ID NO: 242236 - protein, 15 aa, Homo sapiens
  CDR3 for beta chain variable domain of TCR clone 121118 (TRBV7-3, TRBJ2-1)
CASSLAGAGADEQFF

SEQ ID NO: 242237 - protein, 14 aa, Homo sapiens
  CDR3 for alpha chain variable domain of TCR clone 121119 (TRAV17, TRAJ54)
RATDANQGAQKLVF

SEQ ID NO: 242238 - protein, 15 aa, Homo sapiens
  CDR3 for beta chain variable domain of TCR clone 121119 (TRBV28, TRBJ2-1)
CASSIIAGGRSEQFF

SEQ ID NO: 242239 - protein, 13 aa, Homo sapiens
  CDR3 for alpha chain variable domain of TCR clone 121120 (TRAV3, TRAJ34)
CAVRDYNTDKLIF

SEQ ID NO: 242240 - protein, 14 aa, Homo sapiens
  CDR3 for beta chain variable domain of TCR clone 121120 (TRBV6-1, TRBJ1-3)
CASVQGGGGNTIYF

SEQ ID NO: 242241 - protein, 14 aa, Homo sapiens
  CDR3 for alpha chain variable domain of TCR clone 121121 (TRAV8-3, TRAJ4)
CAVGASGGYNKLIL

SEQ ID NO: 242242 - protein, 17 aa, Homo sapiens
  CDR3 for beta chain variable domain of TCR clone 121121 (TRBV11-2, TRBJ2-1)
CASSLYPPGVEYNEQFF

SEQ ID NO: 242243 - protein, 15 aa, Homo sapiens
  CDR3 for alpha chain variable domain of TCR clone 121122 (TRAV26-1, TRAJ13)
CIVRASRGGYQKVTF

SEQ ID NO: 242244 - protein, 14 aa, Homo sapiens
  CDR3 for beta chain variable domain of TCR clone 121122 (TRBV20-1, TRBJ2-3)
CSARGGTSTDTQYF

SEQ ID NO: 242245 - protein, 14 aa, Homo sapiens
  CDR3 for alpha chain variable domain of TCR clone 121123 (TRAV34, TRAJ44)
CGADGTGTASKLTF

SEQ ID NO: 242246 - protein, 15 aa, Homo sapiens
  CDR3 for beta chain variable domain of TCR clone 121123 (TRBV5-1, TRBJ2-1)
CASSPPRAPYNEQFL

SEQ ID NO: 242247 - protein, 14 aa, Homo sapiens
  CDR3 for alpha chain variable domain of TCR clone 121124 (TRAV1-2, TRAJ16)
CAVNRFSDGQKLLF

SEQ ID NO: 242248 - protein, 11 aa, Homo sapiens
  CDR3 for beta chain variable domain of TCR clone 121124 (TRBV29-1, TRBJ2-5)
CSEYRTGTQYF

SEQ ID NO: 242249 - protein, 15 aa, Homo sapiens
  CDR3 for alpha chain variable domain of TCR clone 121125 (TRAV13-1, TRAJ57)
QVPPLSQGGSEKLVF

SEQ ID NO: 242250 - protein, 15 aa, Homo sapiens
  CDR3 for beta chain variable domain of TCR clone 121125 (TRBV10-3, TRBJ2-1)
CAIRNGTSGHNEQFF

SEQ ID NO: 242251 - protein, 13 aa, Homo sapiens
  CDR3 for alpha chain variable domain of TCR clone 121126 (TRAV25, TRAJ10)
CAGRTGGGNKLTF

SEQ ID NO: 242252 - protein, 15 aa, Homo sapiens
  CDR3 for beta chain variable domain of TCR clone 121126 (TRBV19, TRBJ2-1)
CASSSQGVPLDEQFF

SEQ ID NO: 242253 - protein, 14 aa, Homo sapiens
  CDR3 for alpha chain variable domain of TCR clone 121127 (TRAV12-2, TRAJ17)
CAVLFKAAGNKLTF

SEQ ID NO: 242254 - protein, 16 aa, Homo sapiens
  CDR3 for beta chain variable domain of TCR clone 121127 (TRBV11-2, TRBJ2-1)
CQQLIPPGVEYNEQFF

SEQ ID NO: 242255 - protein, 11 aa, Homo sapiens
  CDR3 for alpha chain variable domain of TCR clone 121128 (TRAV12-3, TRAJ43)
CAMSVFNDMRF

SEQ ID NO: 242256 - protein, 20 aa, Homo sapiens
  CDR3 for beta chain variable domain of TCR clone 121128 (TRBV28, TRBJ2-1)
CASTPIGRSPGLAGGNEQFF

SEQ ID NO: 242257 - protein, 15 aa, Homo sapiens
  CDR3 for alpha chain variable domain of TCR clone 121129 (TRAV2, TRAJ39)
CAVEDRRNAGNMPTF

SEQ ID NO: 242258 - protein, 16 aa, Homo sapiens
  CDR3 for beta chain variable domain of TCR clone 121129 (TRBV7-8, TRBJ2-7)
RASSLASGTSVYEQYF

SEQ ID NO: 242259 - protein, 13 aa, Homo sapiens
  CDR3 for alpha chain variable domain of TCR clone 121130 (TRAV8-3, TRAJ20)
CAVGRPNDYKLSL

SEQ ID NO: 242260 - protein, 14 aa, Homo sapiens
  CDR3 for beta chain variable domain of TCR clone 121130 (TRBV12-5, TRBJ2-5)
CASGSRTHQETQYF

SEQ ID NO: 242261 - protein, 19 aa, Homo sapiens
  CDR3 for alpha chain variable domain of TCR clone 121131 (TRAV26-1, TRAJ52)
CIVRAHRNAGGTSYGKLTF

SEQ ID NO: 242262 - protein, 15 aa, Homo sapiens
  CDR3 for beta chain variable domain of TCR clone 121131 (TRBV12-4, TRBJ2-5)
CASSLPTGLQETQYF

SEQ ID NO: 242263 - protein, 16 aa, Homo sapiens
  CDR3 for alpha chain variable domain of TCR clone 121132 (TRAV3, TRAJ37)
CAVRGKGSGNTGKLIF

SEQ ID NO: 242264 - protein, 15 aa, Homo sapiens
  CDR3 for beta chain variable domain of TCR clone 121132 (TRBV5-1, TRBJ2-3)
CASSVTSGSTDTQYF

SEQ ID NO: 242265 - protein, 14 aa, Homo sapiens
  CDR3 for alpha chain variable domain of TCR clone 121133 (TRAV8-4, TRAJ17)
CAVSDQAAGNKLTF

SEQ ID NO: 242266 - protein, 15 aa, Homo sapiens
  CDR3 for beta chain variable domain of TCR clone 121133 (TRBV7-2, TRBJ1-2)
CASSLAPDRGLGYTV

SEQ ID NO: 242267 - protein, 15 aa, Homo sapiens
  CDR3 for alpha chain variable domain of TCR clone 121134 (TRAV3, TRAJ22)
CAVRDRGGSARQLTL

SEQ ID NO: 242268 - protein, 13 aa, Homo sapiens
  CDR3 for beta chain variable domain of TCR clone 121134 (TRBV2, TRBJ1-5)
CATAGPGNQPQHF

SEQ ID NO: 242269 - protein, 17 aa, Homo sapiens
  CDR3 for alpha chain variable domain of TCR clone 121135 (TRAV4, TRAJ42)
CLVGVLNYGGSQGNLII

SEQ ID NO: 242270 - protein, 12 aa, Homo sapiens
  CDR3 for beta chain variable domain of TCR clone 121135 (TRBV20-1, TRBJ2-1)
CSAQYTYNEQFF

SEQ ID NO: 242271 - protein, 14 aa, Homo sapiens
  CDR3 for alpha chain variable domain of TCR clone 121136 (TRAV8-2, )
CVVNIQNPDPAVYQ

SEQ ID NO: 242272 - protein, 14 aa, Homo sapiens
  CDR3 for beta chain variable domain of TCR clone 121136 (TRBV7-9, TRBJ2-5)
CASSLVGGEETQYF

SEQ ID NO: 242273 - protein, 14 aa, Homo sapiens
  CDR3 for alpha chain variable domain of TCR clone 121137 (TRAV13-1, TRAJ39)
CAASKNNAGNMLTF

SEQ ID NO: 242274 - protein, 11 aa, Homo sapiens
  CDR3 for beta chain variable domain of TCR clone 121137 (TRBV12-4, TRBJ2-3)
CASTATDTQYF

SEQ ID NO: 242275 - protein, 13 aa, Homo sapiens
  CDR3 for alpha chain variable domain of TCR clone 121138 (TRAV26-2, TRAJ43)
CILRAVNNNDMRF

SEQ ID NO: 242276 - protein, 14 aa, Homo sapiens
  CDR3 for beta chain variable domain of TCR clone 121138 (TRBV11-2, TRBJ2-5)
CASSRTGGIETQYF

SEQ ID NO: 242277 - protein, 14 aa, Homo sapiens
  CDR3 for alpha chain variable domain of TCR clone 121139 (TRAV12-1, TRAJ6)
CVVARIRRKLHTYI

SEQ ID NO: 242278 - protein, 10 aa, Homo sapiens
  CDR3 for beta chain variable domain of TCR clone 121139 (TRBV7-3, TRBJ2-1)
KASEYNERFF

SEQ ID NO: 242279 - protein, 13 aa, Homo sapiens
  CDR3 for alpha chain variable domain of TCR clone 121140 (TRAV38-2/DV8, TRAJ34)
CAYRTWNTDKLIF

SEQ ID NO: 242280 - protein, 18 aa, Homo sapiens
  CDR3 for beta chain variable domain of TCR clone 121140 (TRBV6-6, TRBJ1-3)
CASSYSKWDSISGNAIYF

SEQ ID NO: 242281 - protein, 16 aa, Homo sapiens
  CDR3 for alpha chain variable domain of TCR clone 121141 (TRAV16, TRAJ21)
CACGRATTSTNFTLDL

SEQ ID NO: 242282 - protein, 15 aa, Homo sapiens
  CDR3 for beta chain variable domain of TCR clone 121141 (TRBV19, TRBJ2-1)
CASSIQATSYNEQFF

SEQ ID NO: 242283 - protein, 13 aa, Homo sapiens
  CDR3 for alpha chain variable domain of TCR clone 121142 (TRAV1-2, TRAJ11)
CAVRDSGYSTLTF

SEQ ID NO: 242284 - protein, 14 aa, Homo sapiens
  CDR3 for beta chain variable domain of TCR clone 121142 (TRBV5-1, TRBJ2-7)
CASSRGESLYEQYF

SEQ ID NO: 242285 - protein, 13 aa, Homo sapiens
  CDR3 for alpha chain variable domain of TCR clone 121143 (TRAV12-1, TRAJ31)
CVVNFPHNARLMF

SEQ ID NO: 242286 - protein, 11 aa, Homo sapiens
  CDR3 for beta chain variable domain of TCR clone 121143 (TRBV7-2, TRBJ2-5)
CASSFGETQYF

SEQ ID NO: 242287 - protein, 13 aa, Homo sapiens
  CDR3 for alpha chain variable domain of TCR clone 121144 (TRAV2, TRAJ40)
CAVVTSGTYKYTF

SEQ ID NO: 242288 - protein, 14 aa, Homo sapiens
  CDR3 for beta chain variable domain of TCR clone 121144 (TRBV19, TRBJ2-1)
CASPTFVLSGEHFF

SEQ ID NO: 242289 - protein, 14 aa, Homo sapiens
  CDR3 for alpha chain variable domain of TCR clone 121145 (TRAV38-1, TRAJ54)
SAFMSPSGAQKLVF

SEQ ID NO: 242290 - protein, 16 aa, Homo sapiens
  CDR3 for beta chain variable domain of TCR clone 121145 (TRBV28, TRBJ2-1)
CASSLGGSGSYNEQFF

SEQ ID NO: 242291 - protein, 16 aa, Homo sapiens
  CDR3 for alpha chain variable domain of TCR clone 121146 (TRAV17, TRAJ22)
CATGPMSSGSARQLTF

SEQ ID NO: 242292 - protein, 13 aa, Homo sapiens
  CDR3 for beta chain variable domain of TCR clone 121146 (TRBV11-2, TRBJ2-1)
CASSLGLAGGRFF

SEQ ID NO: 242293 - protein, 17 aa, Homo sapiens
  CDR3 for alpha chain variable domain of TCR clone 121147 (TRAV23/DV6, TRAJ57)
CAASSTLSQGGSEKLVF

SEQ ID NO: 242294 - protein, 14 aa, Homo sapiens
  CDR3 for beta chain variable domain of TCR clone 121147 (TRBV25-1, TRBJ1-1)
CASTHLGRNTEAFF

SEQ ID NO: 242295 - protein, 12 aa, Homo sapiens
  CDR3 for alpha chain variable domain of TCR clone 121148 (TRAV4, TRAJ6)
CLAPGGSYIPTF

SEQ ID NO: 242296 - protein, 13 aa, Homo sapiens
  CDR3 for beta chain variable domain of TCR clone 121148 (TRBV29-1, TRBJ2-2)
CSTTGVNTGELFF

SEQ ID NO: 242297 - protein, 17 aa, Homo sapiens
  CDR3 for alpha chain variable domain of TCR clone 121149 (TRAV3, TRAJ6)
CAVRDGPRAGGSYIPTF

SEQ ID NO: 242298 - protein, 15 aa, Homo sapiens
  CDR3 for beta chain variable domain of TCR clone 121149 (TRBV7-2, TRBJ2-1)
CASRKTGSSYNEQFF

SEQ ID NO: 242299 - protein, 13 aa, Homo sapiens
  CDR3 for alpha chain variable domain of TCR clone 121150 (TRAV12-3, TRAJ13)
CALGTGGYQKVTF

SEQ ID NO: 242300 - protein, 14 aa, Homo sapiens
  CDR3 for beta chain variable domain of TCR clone 121150 (TRBV7-2, TRBJ2-5)
CASSTGGELKTQYF

SEQ ID NO: 242301 - protein, 17 aa, Homo sapiens
  CDR3 for alpha chain variable domain of TCR clone 121151 (TRAV13-2, TRAJ42)
CAEKGKNYGGSQGNLIS

SEQ ID NO: 242302 - protein, 16 aa, Homo sapiens
  CDR3 for beta chain variable domain of TCR clone 121151 (TRBV7-9, TRBJ2-1)
CASSLGTGWDYNEQFF

SEQ ID NO: 242303 - protein, 15 aa, Homo sapiens
  CDR3 for alpha chain variable domain of TCR clone 121152 (TRAV26-1, TRAJ44)
CIVRANTGTASKLTF

SEQ ID NO: 242304 - protein, 14 aa, Homo sapiens
  CDR3 for beta chain variable domain of TCR clone 121152 (TRBV7-2, TRBJ2-7)
CASSPKTSFYEQYF

SEQ ID NO: 242305 - protein, 14 aa, Homo sapiens
  CDR3 for alpha chain variable domain of TCR clone 121153 (TRAV2, TRAJ9)
CAVEDRRGGFKTIF

SEQ ID NO: 242306 - protein, 13 aa, Homo sapiens
  CDR3 for beta chain variable domain of TCR clone 121153 (TRBV12-4, TRBJ1-2)
CASTMTSNYGYTF

SEQ ID NO: 242307 - protein, 17 aa, Homo sapiens
  CDR3 for alpha chain variable domain of TCR clone 121154 (TRAV3, TRAJ6)
CAVRDGPRAGGSYIPTF

SEQ ID NO: 242308 - protein, 14 aa, Homo sapiens
  CDR3 for beta chain variable domain of TCR clone 121154 (TRBV2, TRBJ2-7)
CASNRDRGPYEQYF

SEQ ID NO: 242309 - protein, 17 aa, Homo sapiens
  CDR3 for alpha chain variable domain of TCR clone 121155 (TRAV12-2, TRAJ52)
CAVNPYAGGTSYGKLTF

SEQ ID NO: 242310 - protein, 12 aa, Homo sapiens
  CDR3 for beta chain variable domain of TCR clone 121155 (TRBV29-1, TRBJ2-3)
CSVTGGADTQYF

SEQ ID NO: 242311 - protein, 16 aa, Homo sapiens
  CDR3 for alpha chain variable domain of TCR clone 121156 (TRAV38-2/DV8, TRAJ33)
CAYRTGLFDSNYQLIR

SEQ ID NO: 242312 - protein, 13 aa, Homo sapiens
  CDR3 for beta chain variable domain of TCR clone 121156 (TRBV27, TRBJ1-4)
CASSLMGDEKLFF

SEQ ID NO: 242313 - protein, 17 aa, Homo sapiens
  CDR3 for alpha chain variable domain of TCR clone 121157 (TRAV3, TRAJ28)
CAVREAYSGAGSYQLTF

SEQ ID NO: 242314 - protein, 17 aa, Homo sapiens
  CDR3 for beta chain variable domain of TCR clone 121157 (TRBV20-1, TRBJ2-1)
CSASSSGLAGSYNEQLF

SEQ ID NO: 242315 - protein, 14 aa, Homo sapiens
  CDR3 for alpha chain variable domain of TCR clone 121158 (TRAV12-3, TRAJ13)
CAMRNSGGYQKVTF

SEQ ID NO: 242316 - protein, 14 aa, Homo sapiens
  CDR3 for beta chain variable domain of TCR clone 121158 (TRBV4-1, TRBJ1-6)
CASSPGGDSSPLHF

SEQ ID NO: 242317 - protein, 14 aa, Homo sapiens
  CDR3 for alpha chain variable domain of TCR clone 121159 (TRAV13-1, TRAJ29)
CAASSNSGNTPLVF

SEQ ID NO: 242318 - protein, 13 aa, Homo sapiens
  CDR3 for beta chain variable domain of TCR clone 121159 (TRBV19, TRBJ1-2)
CASSVPGQDGYTF

SEQ ID NO: 242319 - protein, 13 aa, Homo sapiens
  CDR3 for alpha chain variable domain of TCR clone 121160 (TRAV20, TRAJ20)
CAVQAGSGYKLSF

SEQ ID NO: 242320 - protein, 16 aa, Homo sapiens
  CDR3 for beta chain variable domain of TCR clone 121160 (TRBV20-1, TRBJ1-4)
CSAPGQGLLTNEKLFF

SEQ ID NO: 242321 - protein, 14 aa, Homo sapiens
  CDR3 for alpha chain variable domain of TCR clone 121161 (TRAV38-1, TRAJ40)
CALRPTSGTYKYIF

SEQ ID NO: 242322 - protein, 16 aa, Homo sapiens
  CDR3 for beta chain variable domain of TCR clone 121161 (TRBV29-1, TRBJ2-7)
CSVEDAEDGTAYEQYF

SEQ ID NO: 242323 - protein, 15 aa, Homo sapiens
  CDR3 for alpha chain variable domain of TCR clone 121162 (TRAV36/DV7, TRAJ53)
WEGENSGGSNYKLTF

SEQ ID NO: 242324 - protein, 13 aa, Homo sapiens
  CDR3 for beta chain variable domain of TCR clone 121162 (TRBV7-9, TRBJ1-2)
CASSLKQNYGYTF

SEQ ID NO: 242325 - protein, 12 aa, Homo sapiens
  CDR3 for alpha chain variable domain of TCR clone 121163 (TRAV12-3, TRAJ3)
CAIDSSASKIIF

SEQ ID NO: 242326 - protein, 15 aa, Homo sapiens
  CDR3 for beta chain variable domain of TCR clone 121163 (TRBV3-1, TRBJ2-1)
CASSQVAGGPSEQFF

SEQ ID NO: 242327 - protein, 12 aa, Homo sapiens
  CDR3 for alpha chain variable domain of TCR clone 121164 (TRAV13-2, TRAJ8)
CAPWLGFQKLVF

SEQ ID NO: 242328 - protein, 15 aa, Homo sapiens
  CDR3 for beta chain variable domain of TCR clone 121164 (TRBV7-2, TRBJ2-1)
CASSSGLAGGNKQFF

SEQ ID NO: 242329 - protein, 14 aa, Homo sapiens
  CDR3 for alpha chain variable domain of TCR clone 121165 (TRAV12-2, TRAJ13)
CAVKKTGGCQKVTF

SEQ ID NO: 242330 - protein, 12 aa, Homo sapiens
  CDR3 for beta chain variable domain of TCR clone 121165 (TRBV11-2, TRBJ2-2)
CASSLGGGELFF

SEQ ID NO: 242331 - protein, 15 aa, Homo sapiens
  CDR3 for alpha chain variable domain of TCR clone 121166 (TRAV38-1, TRAJ37)
CAFIHGSGNTGKLIC

SEQ ID NO: 242332 - protein, 12 aa, Homo sapiens
  CDR3 for beta chain variable domain of TCR clone 121166 (TRBV7-9, TRBJ2-7)
CASSFGSYEQYF

SEQ ID NO: 242333 - protein, 17 aa, Homo sapiens
  CDR3 for alpha chain variable domain of TCR clone 121167 (TRAV3, TRAJ6)
CAVRDGPRAGGSYILTF

SEQ ID NO: 242334 - protein, 20 aa, Homo sapiens
  CDR3 for beta chain variable domain of TCR clone 121167 (TRBV28, TRBJ2-1)
CASAPIGRSPGLAGGNEQFF

SEQ ID NO: 242335 - protein, 18 aa, Homo sapiens
  CDR3 for alpha chain variable domain of TCR clone 121168 (TRAV8-4, TRAJ52)
CAVASFNAGGTSYGKLTF

SEQ ID NO: 242336 - protein, 13 aa, Homo sapiens
  CDR3 for beta chain variable domain of TCR clone 121168 (TRBV7-3, TRBJ1-1)
CASSQDWGAEAFF

SEQ ID NO: 242337 - protein, 14 aa, Homo sapiens
  CDR3 for alpha chain variable domain of TCR clone 121169 (TRAV12-3, TRAJ10)
SHLPLTGGGNKLTF

SEQ ID NO: 242338 - protein, 16 aa, Homo sapiens
  CDR3 for beta chain variable domain of TCR clone 121169 (TRBV4-3, TRBJ2-1)
CTSSPALDRGVNEQFF

SEQ ID NO: 242339 - protein, 14 aa, Homo sapiens
  CDR3 for alpha chain variable domain of TCR clone 121170 (TRAV16, TRAJ33)
CALSAIDSNYQLIW

SEQ ID NO: 242340 - protein, 16 aa, Homo sapiens
  CDR3 for beta chain variable domain of TCR clone 121170 (TRBV12-4, TRBJ2-3)
CASSFPSNTNTDTQCF

SEQ ID NO: 242341 - protein, 12 aa, Homo sapiens
  CDR3 for alpha chain variable domain of TCR clone 121171 (TRAV2, TRAJ40)
CCGTSGTYKYIF

SEQ ID NO: 242342 - protein, 15 aa, Homo sapiens
  CDR3 for beta chain variable domain of TCR clone 121171 (TRBV11-3, TRBJ2-3)
CASLKDGREGDTQYF

SEQ ID NO: 242343 - protein, 11 aa, Homo sapiens
  CDR3 for alpha chain variable domain of TCR clone 121172 (TRAV2, TRAJ23)
CAVETRGKLIF

SEQ ID NO: 242344 - protein, 15 aa, Homo sapiens
  CDR3 for beta chain variable domain of TCR clone 121172 (TRBV6-3, TRBJ2-7)
CASSSPGTVFYEQYF

SEQ ID NO: 242345 - protein, 15 aa, Homo sapiens
  CDR3 for alpha chain variable domain of TCR clone 121173 (TRAV3, TRAJ4)
CAVRDGTGGYNKLIF

SEQ ID NO: 242346 - protein, 16 aa, Homo sapiens
  CDR3 for beta chain variable domain of TCR clone 121173 (TRBV27, TRBJ2-2)
CASSSSGLSNTGELFF

SEQ ID NO: 242347 - protein, 12 aa, Homo sapiens
  CDR3 for alpha chain variable domain of TCR clone 121174 (TRAV13-2, TRAJ8)
CSPWLGFQKLVF

SEQ ID NO: 242348 - protein, 15 aa, Homo sapiens
  CDR3 for beta chain variable domain of TCR clone 121174 (TRBV12-4, TRBJ2-5)
CASSLSGAFQETQYF

SEQ ID NO: 242349 - protein, 13 aa, Homo sapiens
  CDR3 for alpha chain variable domain of TCR clone 121175 (TRAV27, TRAJ41)
CAVEGNSGYALNF

SEQ ID NO: 242350 - protein, 14 aa, Homo sapiens
  CDR3 for beta chain variable domain of TCR clone 121175 (TRBV7-2, TRBJ1-1)
CASSFLTGTTEAFF

SEQ ID NO: 242351 - protein, 14 aa, Homo sapiens
  CDR3 for alpha chain variable domain of TCR clone 121176 (TRAV35, TRAJ22)
CAGLRPGSARQLTF

SEQ ID NO: 242352 - protein, 14 aa, Homo sapiens
  CDR3 for beta chain variable domain of TCR clone 121176 (TRBV4-1, TRBJ2-7)
CASSPVAGRDEQYF

SEQ ID NO: 242353 - protein, 14 aa, Homo sapiens
  CDR3 for alpha chain variable domain of TCR clone 121177 (TRAV12-3, TRAJ20)
CAMSARRGDYKVSF

SEQ ID NO: 242354 - protein, 14 aa, Homo sapiens
  CDR3 for beta chain variable domain of TCR clone 121177 (TRBV7-3, TRBJ2-3)
CASSPSARTDTQYF

SEQ ID NO: 242355 - protein, 15 aa, Homo sapiens
  CDR3 for alpha chain variable domain of TCR clone 121178 (TRAV12-1, TRAJ44)
CVVFVNTGTASKLTF

SEQ ID NO: 242356 - protein, 17 aa, Homo sapiens
  CDR3 for beta chain variable domain of TCR clone 121178 (TRBV28, TRBJ2-3)
CASSPTPAGGRVDTQYF

SEQ ID NO: 242357 - protein, 16 aa, Homo sapiens
  CDR3 for alpha chain variable domain of TCR clone 121179 (TRAV4, TRAJ22)
CLVGDLYSGSARQLTF

SEQ ID NO: 242358 - protein, 13 aa, Homo sapiens
  CDR3 for beta chain variable domain of TCR clone 121179 (TRBV7-9, TRBJ2-7)
CASSFAGAYEQYF

SEQ ID NO: 242359 - protein, 11 aa, Homo sapiens
  CDR3 for alpha chain variable domain of TCR clone 121180 (TRAV3, TRAJ21)
CAVGNFNKFYF

SEQ ID NO: 242360 - protein, 13 aa, Homo sapiens
  CDR3 for beta chain variable domain of TCR clone 121180 (TRBV12-4, TRBJ2-5)
CASRLAVQETQYF

SEQ ID NO: 242361 - protein, 17 aa, Homo sapiens
  CDR3 for alpha chain variable domain of TCR clone 121181 (TRAV3, TRAJ38)
CAVRDCLNAGNNRKLIC

SEQ ID NO: 242362 - protein, 15 aa, Homo sapiens
  CDR3 for beta chain variable domain of TCR clone 121181 (TRBV27, TRBJ2-1)
CASSNGGGSSNEQFF

SEQ ID NO: 242363 - protein, 17 aa, Homo sapiens
  CDR3 for alpha chain variable domain of TCR clone 121182 (TRAV3, TRAJ38)
CAVRDCLNAGNNRNLIW

SEQ ID NO: 242364 - protein, 14 aa, Homo sapiens
  CDR3 for beta chain variable domain of TCR clone 121182 (TRBV5-5, TRBJ1-5)
CASSGQGVDQPQHF

SEQ ID NO: 242365 - protein, 21 aa, Homo sapiens
  CDR3 for alpha chain variable domain of TCR clone 121183 (TRAV1-1, TRAJ6)
CAVRREEATYLHLEEEQALLF

SEQ ID NO: 242366 - protein, 15 aa, Homo sapiens
  CDR3 for beta chain variable domain of TCR clone 121183 (TRBV6-6, TRBJ2-1)
CATRQGVSSYNEQFF

SEQ ID NO: 242367 - protein, 16 aa, Homo sapiens
  CDR3 for alpha chain variable domain of TCR clone 121184 (TRAV3, TRAJ37)
CAVRGKGSGNTGKLIF

SEQ ID NO: 242368 - protein, 15 aa, Homo sapiens
  CDR3 for beta chain variable domain of TCR clone 121184 (TRBV28, TRBJ2-7)
CASSPGGRGFYEQYF

SEQ ID NO: 242369 - protein, 14 aa, Homo sapiens
  CDR3 for alpha chain variable domain of TCR clone 121185 (TRAV13-1, TRAJ40)
CAASMTSGTYKYIF

SEQ ID NO: 242370 - protein, 15 aa, Homo sapiens
  CDR3 for beta chain variable domain of TCR clone 121185 (TRBV7-3, TRBJ2-1)
CASSPTGGGVVEQFF

SEQ ID NO: 242371 - protein, 14 aa, Homo sapiens
  CDR3 for alpha chain variable domain of TCR clone 121186 (TRAV12-2, TRAJ13)
CAVKKTGGYQKVNF

SEQ ID NO: 242372 - protein, 15 aa, Homo sapiens
  CDR3 for beta chain variable domain of TCR clone 121186 (TRBV19, TRBJ1-1)
CASTSGQIQNTEAFF

SEQ ID NO: 242373 - protein, 12 aa, Homo sapiens
  CDR3 for alpha chain variable domain of TCR clone 121187 (TRAV13-1, TRAJ48)
CAADFGNEKLTF

SEQ ID NO: 242374 - protein, 12 aa, Homo sapiens
  CDR3 for beta chain variable domain of TCR clone 121187 (TRBV7-8, TRBJ2-7)
CASSLGDREQYF

SEQ ID NO: 242375 - protein, 14 aa, Homo sapiens
  CDR3 for alpha chain variable domain of TCR clone 121188 (TRAV26-1, TRAJ45)
CIEVTGGGADGLTF

SEQ ID NO: 242376 - protein, 14 aa, Homo sapiens
  CDR3 for beta chain variable domain of TCR clone 121188 (TRBV7-9, TRBJ2-2)
CASSLVQDTGELFF

SEQ ID NO: 242377 - protein, 14 aa, Homo sapiens
  CDR3 for alpha chain variable domain of TCR clone 121189 (TRAV2, TRAJ9)
CAVEDRSGGFKTIF

SEQ ID NO: 242378 - protein, 15 aa, Homo sapiens
  CDR3 for beta chain variable domain of TCR clone 121189 (TRBV5-7, TRBJ1-5)
CASSYGKLWDQTQHF

SEQ ID NO: 242379 - protein, 15 aa, Homo sapiens
  CDR3 for alpha chain variable domain of TCR clone 121190 (TRAV17, TRAJ57)
CATGPSPGGSEKLVF

SEQ ID NO: 242380 - protein, 14 aa, Homo sapiens
  CDR3 for beta chain variable domain of TCR clone 121190 (TRBV11-2, TRBJ1-2)
CASSLYRGNYGYTF

SEQ ID NO: 242381 - protein, 14 aa, Homo sapiens
  CDR3 for alpha chain variable domain of TCR clone 121191 (TRAV12-2, TRAJ10)
CAVTPTGGGNKLTF

SEQ ID NO: 242382 - protein, 12 aa, Homo sapiens
  CDR3 for beta chain variable domain of TCR clone 121191 (TRBV5-1, TRBJ1-2)
CASSQDTYGYTF

SEQ ID NO: 242383 - protein, 13 aa, Homo sapiens
  CDR3 for alpha chain variable domain of TCR clone 121192 (TRAV23/DV6, TRAJ30)
CAASNSGDDKIIF

SEQ ID NO: 242384 - protein, 14 aa, Homo sapiens
  CDR3 for beta chain variable domain of TCR clone 121192 (TRBV15, TRBJ2-5)
CATSIGGLGETQYF

SEQ ID NO: 242385 - protein, 16 aa, Homo sapiens
  CDR3 for alpha chain variable domain of TCR clone 121193 (TRAV21, TRAJ37)
CAVRTAGSSNTGKLIF

SEQ ID NO: 242386 - protein, 13 aa, Homo sapiens
  CDR3 for beta chain variable domain of TCR clone 121193 (TRBV7-9, TRBJ2-5)
CASLTSGRETQYF

SEQ ID NO: 242387 - protein, 15 aa, Homo sapiens
  CDR3 for alpha chain variable domain of TCR clone 121194 (TRAV27, TRAJ38)
CAARRNAGNNRKLIW

SEQ ID NO: 242388 - protein, 14 aa, Homo sapiens
  CDR3 for beta chain variable domain of TCR clone 121194 (TRBV6-1, TRBJ1-3)
CASVQGGGGSTIYF

SEQ ID NO: 242389 - protein, 14 aa, Homo sapiens
  CDR3 for alpha chain variable domain of TCR clone 121195 (TRAV2, TRAJ39)
CAVEGDNAGNMLTF

SEQ ID NO: 242390 - protein, 14 aa, Homo sapiens
  CDR3 for beta chain variable domain of TCR clone 121195 (TRBV28, TRBJ2-7)
CASGLRARGNEQYF

SEQ ID NO: 242391 - protein, 14 aa, Homo sapiens
  CDR3 for alpha chain variable domain of TCR clone 121196 (TRAV12-2, TRAJ13)
CAVKKTGGYQKVTF

SEQ ID NO: 242392 - protein, 13 aa, Homo sapiens
  CDR3 for beta chain variable domain of TCR clone 121196 (TRBV10-3, TRBJ2-7)
CASKLAVNYEKYF

SEQ ID NO: 242393 - protein, 12 aa, Homo sapiens
  CDR3 for alpha chain variable domain of TCR clone 121197 (TRAV12-3, TRAJ17)
CAMTLTGNKLTF

SEQ ID NO: 242394 - protein, 13 aa, Homo sapiens
  CDR3 for beta chain variable domain of TCR clone 121197 (TRBV10-2, TRBJ2-3)
CASSESGDHTQYF

SEQ ID NO: 242395 - protein, 17 aa, Homo sapiens
  CDR3 for alpha chain variable domain of TCR clone 121198 (TRAV17, TRAJ20)
CATRYKLSFGAGTTVTV

SEQ ID NO: 242396 - protein, 13 aa, Homo sapiens
  CDR3 for beta chain variable domain of TCR clone 121198 (TRBV12-4, TRBJ1-2)
CASSLRQGKGYTF

SEQ ID NO: 242397 - protein, 13 aa, Homo sapiens
  CDR3 for alpha chain variable domain of TCR clone 121199 (TRAV12-3, TRAJ40)
CAISDSGTYKYIF

SEQ ID NO: 242398 - protein, 14 aa, Homo sapiens
  CDR3 for beta chain variable domain of TCR clone 121199 (TRBV7-2, TRBJ1-5)
CASSTQGAGQPQHF

SEQ ID NO: 242399 - protein, 15 aa, Homo sapiens
  CDR3 for alpha chain variable domain of TCR clone 121200 (TRAV25, TRAJ53)
CRTSNSGGSNYKLTF

SEQ ID NO: 242400 - protein, 14 aa, Homo sapiens
  CDR3 for beta chain variable domain of TCR clone 121200 (TRBV11-2, TRBJ2-3)
CASSRLARTDTQYF

SEQ ID NO: 242401 - protein, 15 aa, Homo sapiens
  CDR3 for alpha chain variable domain of TCR clone 121201 (TRAV4, TRAJ8)
CLVGEQHTGFQKLVF

SEQ ID NO: 242402 - protein, 15 aa, Homo sapiens
  CDR3 for beta chain variable domain of TCR clone 121201 (TRBV7-9, TRBJ2-5)
CASSNRDYLQDTQYF

SEQ ID NO: 242403 - protein, 13 aa, Homo sapiens
  CDR3 for alpha chain variable domain of TCR clone 121202 (TRAV20, TRAJ21)
CAVEGYNFNKFYF

SEQ ID NO: 242404 - protein, 13 aa, Homo sapiens
  CDR3 for beta chain variable domain of TCR clone 121202 (TRBV28, TRBJ2-5)
CASSFAGGETQYF

SEQ ID NO: 242405 - protein, 14 aa, Homo sapiens
  CDR3 for alpha chain variable domain of TCR clone 121203 (TRAV3, TRAJ21)
CAVRDAYNFNKFYF

SEQ ID NO: 242406 - protein, 17 aa, Homo sapiens
  CDR3 for beta chain variable domain of TCR clone 121203 (TRBV20-1, TRBJ1-6)
CSARGGYTFSYNSPLLF

SEQ ID NO: 242407 - protein, 20 aa, Homo sapiens
  CDR3 for alpha chain variable domain of TCR clone 121204 (TRAV1-2, TRAJ8)
CAVRGHRLSETCIWNWHPTS

SEQ ID NO: 242408 - protein, 15 aa, Homo sapiens
  CDR3 for beta chain variable domain of TCR clone 121204 (TRBV6-3, TRBJ2-7)
CASSSPGTVFYEQYF

SEQ ID NO: 242409 - protein, 14 aa, Homo sapiens
  CDR3 for alpha chain variable domain of TCR clone 121205 (TRAV23/DV6, TRAJ39)
CAASIGNAGNMLTL

SEQ ID NO: 242410 - protein, 12 aa, Homo sapiens
  CDR3 for beta chain variable domain of TCR clone 121205 (TRBV20-1, TRBJ2-5)
CSVGTGSETQYF

SEQ ID NO: 242411 - protein, 12 aa, Homo sapiens
  CDR3 for alpha chain variable domain of TCR clone 121206 (TRAV2, TRAJ9)
CAVGAGGFKTIF

SEQ ID NO: 242412 - protein, 12 aa, Homo sapiens
  CDR3 for beta chain variable domain of TCR clone 121206 (TRBV7-9, TRBJ1-1)
CASSLVRGEAFF

SEQ ID NO: 242413 - protein, 13 aa, Homo sapiens
  CDR3 for alpha chain variable domain of TCR clone 121207 (TRAV3, TRAJ20)
CCEAFCNDYKLIF

SEQ ID NO: 242414 - protein, 15 aa, Homo sapiens
  CDR3 for beta chain variable domain of TCR clone 121207 (TRBV19, TRBJ2-6)
CASVRRDSGANVLTF

SEQ ID NO: 242415 - protein, 14 aa, Homo sapiens
  CDR3 for alpha chain variable domain of TCR clone 121208 (TRAV2, TRAJ12)
CAVDAMGSSYKLIF

SEQ ID NO: 242416 - protein, 13 aa, Homo sapiens
  CDR3 for beta chain variable domain of TCR clone 121208 (TRBV19, TRBJ2-1)
CASKVGASGEQFF

SEQ ID NO: 242417 - protein, 17 aa, Homo sapiens
  CDR3 for alpha chain variable domain of TCR clone 121209 (TRAV26-1, TRAJ53)
CIVRVDDSGGSNYKLTF

SEQ ID NO: 242418 - protein, 13 aa, Homo sapiens
  CDR3 for beta chain variable domain of TCR clone 121209 (TRBV4-2, TRBJ1-1)
CASSQAGNTEAFF

SEQ ID NO: 242419 - protein, 18 aa, Homo sapiens
  CDR3 for alpha chain variable domain of TCR clone 121210 (TRAV12-3, TRAJ52)
CAMSVGGAGGTSFGKLTF

SEQ ID NO: 242420 - protein, 15 aa, Homo sapiens
  CDR3 for beta chain variable domain of TCR clone 121210 (TRBV27, TRBJ1-6)
CASSFDRGLGSPLHF

SEQ ID NO: 242421 - protein, 16 aa, Homo sapiens
  CDR3 for alpha chain variable domain of TCR clone 121211 (TRAV30, TRAJ24)
CGTAIVDADSWGKFQF

SEQ ID NO: 242422 - protein, 13 aa, Homo sapiens
  CDR3 for beta chain variable domain of TCR clone 121211 (TRBV7-2, TRBJ1-4)
CASSLAGLEKLFF

SEQ ID NO: 242423 - protein, 11 aa, Homo sapiens
  CDR3 for alpha chain variable domain of TCR clone 121212 (TRAV12-3, TRAJ43)
CAMSVSNDMRF

SEQ ID NO: 242424 - protein, 13 aa, Homo sapiens
  CDR3 for beta chain variable domain of TCR clone 121212 (TRBV20-1, TRBJ1-1)
CSAPFGGGTEAFF

SEQ ID NO: 242425 - protein, 14 aa, Homo sapiens
  CDR3 for alpha chain variable domain of TCR clone 121213 (TRAV1-2, TRAJ16)
CAVNRFSDGQKLLF

SEQ ID NO: 242426 - protein, 15 aa, Homo sapiens
  CDR3 for beta chain variable domain of TCR clone 121213 (TRBV7-2, TRBJ2-2)
CASSTGTGYTGELFF

SEQ ID NO: 242427 - protein, 16 aa, Homo sapiens
  CDR3 for alpha chain variable domain of TCR clone 121214 (TRAV21, TRAJ17)
CALRPGEEAAGNKLTF

SEQ ID NO: 242428 - protein, 16 aa, Homo sapiens
  CDR3 for beta chain variable domain of TCR clone 121214 (TRBV2, TRBJ2-7)
CASSEPWTGPSYEQYF

SEQ ID NO: 242429 - protein, 14 aa, Homo sapiens
  CDR3 for alpha chain variable domain of TCR clone 121215 (TRAV13-1, TRAJ35)
CAASKGGFGNVLHC

SEQ ID NO: 242430 - protein, 13 aa, Homo sapiens
  CDR3 for beta chain variable domain of TCR clone 121215 (TRBV12-4, TRBJ2-2)
CASSITGSGELFF

SEQ ID NO: 242431 - protein, 15 aa, Homo sapiens
  CDR3 for alpha chain variable domain of TCR clone 121216 (TRAV2, TRAJ11)
CAVGGRNSGYSTLTF

SEQ ID NO: 242432 - protein, 18 aa, Homo sapiens
  CDR3 for beta chain variable domain of TCR clone 121216 (TRBV7-9, TRBJ2-7)
CASSLTTSGSRTWYEQYF

SEQ ID NO: 242433 - protein, 13 aa, Homo sapiens
  CDR3 for alpha chain variable domain of TCR clone 121217 (TRAV13-1, TRAJ39)
FAASIWAGDMLTF

SEQ ID NO: 242434 - protein, 15 aa, Homo sapiens
  CDR3 for beta chain variable domain of TCR clone 121217 (TRBV7-9, TRBJ1-1)
CASSLLEQGGTEAFF

SEQ ID NO: 242435 - protein, 12 aa, Homo sapiens
  CDR3 for alpha chain variable domain of TCR clone 121218 (TRAV12-3, TRAJ17)
RAMTLTGNKLTF

SEQ ID NO: 242436 - protein, 17 aa, Homo sapiens
  CDR3 for beta chain variable domain of TCR clone 121218 (TRBV7-3, TRBJ2-3)
CASSLMKRMRGADTQYF

SEQ ID NO: 242437 - protein, 11 aa, Homo sapiens
  CDR3 for alpha chain variable domain of TCR clone 121219 (TRAV12-3, TRAJ41)
CAMDAREALNF

SEQ ID NO: 242438 - protein, 16 aa, Homo sapiens
  CDR3 for beta chain variable domain of TCR clone 121219 (TRBV7-8, TRBJ2-3)
CASSTEGQRETDTQYF

SEQ ID NO: 242439 - protein, 15 aa, Homo sapiens
  CDR3 for alpha chain variable domain of TCR clone 121220 (TRAV25, TRAJ52)
CAGTSGGTSYGKLTF

SEQ ID NO: 242440 - protein, 17 aa, Homo sapiens
  CDR3 for beta chain variable domain of TCR clone 121220 (TRBV7-9, TRBJ2-1)
CASSLVASYPSYNEQFF

SEQ ID NO: 242441 - protein, 13 aa, Homo sapiens
  CDR3 for alpha chain variable domain of TCR clone 121221 (TRAV35, TRAJ21)
CAGQLSNFNKFYF

SEQ ID NO: 242442 - protein, 11 aa, Homo sapiens
  CDR3 for beta chain variable domain of TCR clone 121221 (TRBV7-6, TRBJ2-5)
CASISQETQYF

SEQ ID NO: 242443 - protein, 18 aa, Homo sapiens
  CDR3 for alpha chain variable domain of TCR clone 121222 (TRAV21, TRAJ52)
CAVRPSPAGGTSYGKLTF

SEQ ID NO: 242444 - protein, 14 aa, Homo sapiens
  CDR3 for beta chain variable domain of TCR clone 121222 (TRBV19, TRBJ1-2)
CTSSLQGQAYGYTF

SEQ ID NO: 242445 - protein, 14 aa, Homo sapiens
  CDR3 for alpha chain variable domain of TCR clone 121223 (TRAV29/DV5, TRAJ36)
CAARRKTGANNLFF

SEQ ID NO: 242446 - protein, 16 aa, Homo sapiens
  CDR3 for beta chain variable domain of TCR clone 121223 (TRBV4-1, TRBJ2-3)
CASSQRAGGLTDTQYF

SEQ ID NO: 242447 - protein, 11 aa, Homo sapiens
  CDR3 for alpha chain variable domain of TCR clone 121224 (TRAV12-3, TRAJ27)
CAMANAGKSTF

SEQ ID NO: 242448 - protein, 12 aa, Homo sapiens
  CDR3 for beta chain variable domain of TCR clone 121224 (TRBV7-2, TRBJ2-5)
CASSQYQETQYF

SEQ ID NO: 242449 - protein, 14 aa, Homo sapiens
  CDR3 for alpha chain variable domain of TCR clone 121225 (TRAV8-3, TRAJ4)
CAVGAAGGYNKLIF

SEQ ID NO: 242450 - protein, 14 aa, Homo sapiens
  CDR3 for beta chain variable domain of TCR clone 121225 (TRBV9, TRBJ2-7)
CASSVGVGSYEQYF

SEQ ID NO: 242451 - protein, 13 aa, Homo sapiens
  CDR3 for alpha chain variable domain of TCR clone 121226 (TRAV12-2, TRAJ42)
CAVKRGSQGNLIF

SEQ ID NO: 242452 - protein, 14 aa, Homo sapiens
  CDR3 for beta chain variable domain of TCR clone 121226 (TRBV6-1, TRBJ1-3)
CASVQGGGGNTIYF

SEQ ID NO: 242453 - protein, 12 aa, Homo sapiens
  CDR3 for alpha chain variable domain of TCR clone 121227 (TRAV12-3, TRAJ17)
CAMTLTGNKLTS

SEQ ID NO: 242454 - protein, 17 aa, Homo sapiens
  CDR3 for beta chain variable domain of TCR clone 121227 (TRBV7-3, TRBJ2-3)
CASSLMKRMRGADTQYF

SEQ ID NO: 242455 - protein, 17 aa, Homo sapiens
  CDR3 for alpha chain variable domain of TCR clone 121228 (TRAV3, TRAJ42)
CAVRDRDYGGSQGNLIV

SEQ ID NO: 242456 - protein, 15 aa, Homo sapiens
  CDR3 for beta chain variable domain of TCR clone 121228 (TRBV2, TRBJ2-7)
CASSEGLARSYEQYF

SEQ ID NO: 242457 - protein, 12 aa, Homo sapiens
  CDR3 for alpha chain variable domain of TCR clone 121229 (TRAV1-2, TRAJ33)
CAALDSNYQLIW

SEQ ID NO: 242458 - protein, 16 aa, Homo sapiens
  CDR3 for beta chain variable domain of TCR clone 121229 (TRBV6-4, TRBJ1-2)
CASSEAVGDPNYGYAF

SEQ ID NO: 242459 - protein, 14 aa, Homo sapiens
  CDR3 for alpha chain variable domain of TCR clone 121230 (TRAV12-3, TRAJ10)
SHLPLTGGGNKLTF

SEQ ID NO: 242460 - protein, 14 aa, Homo sapiens
  CDR3 for beta chain variable domain of TCR clone 121230 (TRBV13, TRBJ2-5)
CASSLGPRGETQYF

SEQ ID NO: 242461 - protein, 14 aa, Homo sapiens
  CDR3 for alpha chain variable domain of TCR clone 121231 (TRAV12-3, TRAJ29)
CAMILLSGNTPLVF

SEQ ID NO: 242462 - protein, 16 aa, Homo sapiens
  CDR3 for beta chain variable domain of TCR clone 121231 (TRBV28, TRBJ2-7)
CACSSGTSGRGYEQYF

SEQ ID NO: 242463 - protein, 14 aa, Homo sapiens
  CDR3 for alpha chain variable domain of TCR clone 121232 (TRAV17, TRAJ31)
CATVLRNNNARLMF

SEQ ID NO: 242464 - protein, 14 aa, Homo sapiens
  CDR3 for beta chain variable domain of TCR clone 121232 (TRBV12-4, TRBJ2-5)
CASSLWQKQESQYF

SEQ ID NO: 242465 - protein, 11 aa, Homo sapiens
  CDR3 for alpha chain variable domain of TCR clone 121233 (TRAV2, TRAJ13)
CASGGYQKVTF

SEQ ID NO: 242466 - protein, 13 aa, Homo sapiens
  CDR3 for beta chain variable domain of TCR clone 121233 (TRBV13, TRBJ2-1)
CASILGGRGEQFF

SEQ ID NO: 242467 - protein, 16 aa, Homo sapiens
  CDR3 for alpha chain variable domain of TCR clone 121234 (TRAV8-3, TRAJ42)
CAVGEGNGGSQGNRIF

SEQ ID NO: 242468 - protein, 14 aa, Homo sapiens
  CDR3 for beta chain variable domain of TCR clone 121234 (TRBV7-2, TRBJ2-1)
CASSRGGARNEQFF

SEQ ID NO: 242469 - protein, 15 aa, Homo sapiens
  CDR3 for alpha chain variable domain of TCR clone 121235 (TRAV17, TRAJ6)
CATDLPSGGSYIPTF

SEQ ID NO: 242470 - protein, 16 aa, Homo sapiens
  CDR3 for beta chain variable domain of TCR clone 121235 (TRBV4-1, TRBJ2-7)
CASSQDPTGYSYEQFF

SEQ ID NO: 242471 - protein, 13 aa, Homo sapiens
  CDR3 for alpha chain variable domain of TCR clone 121236 (TRAV21, TRAJ20)
CAASRLGDYKLSF

SEQ ID NO: 242472 - protein, 13 aa, Homo sapiens
  CDR3 for beta chain variable domain of TCR clone 121236 (TRBV7-3, TRBJ1-1)
CASSPAGGLEAFF

SEQ ID NO: 242473 - protein, 13 aa, Homo sapiens
  CDR3 for alpha chain variable domain of TCR clone 121237 (TRAV12-2, TRAJ39)
CAVNNNAGNMLNF

SEQ ID NO: 242474 - protein, 13 aa, Homo sapiens
  CDR3 for beta chain variable domain of TCR clone 121237 (TRBV2, TRBJ1-5)
CATAGPGNQPQHF

SEQ ID NO: 242475 - protein, 13 aa, Homo sapiens
  CDR3 for alpha chain variable domain of TCR clone 121238 (TRAV12-1, TRAJ21)
CVVTLYNFNKFYF

SEQ ID NO: 242476 - protein, 15 aa, Homo sapiens
  CDR3 for beta chain variable domain of TCR clone 121238 (TRBV11-2, TRBJ2-2)
CASSSDRVNAGELFF

SEQ ID NO: 242477 - protein, 12 aa, Homo sapiens
  CDR3 for alpha chain variable domain of TCR clone 121239 (TRAV4, TRAJ6)
CLAPGGSYIPTF

SEQ ID NO: 242478 - protein, 15 aa, Homo sapiens
  CDR3 for beta chain variable domain of TCR clone 121239 (TRBV7-9, TRBJ1-5)
CASSQGHQPNQPQHF

SEQ ID NO: 242479 - protein, 17 aa, Homo sapiens
  CDR3 for alpha chain variable domain of TCR clone 121240 (TRAV3, TRAJ6)
CAVRDGPRAGGSYIPTF

SEQ ID NO: 242480 - protein, 20 aa, Homo sapiens
  CDR3 for beta chain variable domain of TCR clone 121240 (TRBV28, TRBJ2-1)
CASTPIGRSPGLAGGNEEFF

SEQ ID NO: 242481 - protein, 16 aa, Homo sapiens
  CDR3 for alpha chain variable domain of TCR clone 121241 (TRAV30, TRAJ24)
CGTEIVDADSWGKFQF

SEQ ID NO: 242482 - protein, 13 aa, Homo sapiens
  CDR3 for beta chain variable domain of TCR clone 121241 (TRBV14, TRBJ2-1)
CASSQDRRNEQFF

SEQ ID NO: 242483 - protein, 12 aa, Homo sapiens
  CDR3 for alpha chain variable domain of TCR clone 121242 (TRAV12-2, TRAJ3)
CAVWSSASKIIF

SEQ ID NO: 242484 - protein, 14 aa, Homo sapiens
  CDR3 for beta chain variable domain of TCR clone 121242 (TRBV19, TRBJ2-2)
CASSMVGLSGELFF

SEQ ID NO: 242485 - protein, 12 aa, Homo sapiens
  CDR3 for alpha chain variable domain of TCR clone 121243 (TRAV27, TRAJ35)
CAGADLGNVLHC

SEQ ID NO: 242486 - protein, 13 aa, Homo sapiens
  CDR3 for beta chain variable domain of TCR clone 121243 (TRBV7-3, TRBJ1-1)
CASSQDWGAEAFF

SEQ ID NO: 242487 - protein, 12 aa, Homo sapiens
  CDR3 for alpha chain variable domain of TCR clone 121244 (TRAV12-3, TRAJ17)
CAMTLTGNKLTF

SEQ ID NO: 242488 - protein, 19 aa, Homo sapiens
  CDR3 for beta chain variable domain of TCR clone 121244 (TRBV14, TRBJ2-1)
CASSQDQLWEAPEYNEQFF

SEQ ID NO: 242489 - protein, 12 aa, Homo sapiens
  CDR3 for alpha chain variable domain of TCR clone 121245 (TRAV12-1, TRAJ20)
CVVNPDDYKLSF

SEQ ID NO: 242490 - protein, 16 aa, Homo sapiens
  CDR3 for beta chain variable domain of TCR clone 121245 (TRBV13, TRBJ2-2)
CASSPRTGEHTGELFF

SEQ ID NO: 242491 - protein, 10 aa, Homo sapiens
  CDR3 for alpha chain variable domain of TCR clone 121246 (TRAV12-1, TRAJ33)
CVASNYQLIW

SEQ ID NO: 242492 - protein, 15 aa, Homo sapiens
  CDR3 for beta chain variable domain of TCR clone 121246 (TRBV5-4, TRBJ1-4)
CASSLGDGENEKLFF

SEQ ID NO: 242493 - protein, 11 aa, Homo sapiens
  CDR3 for alpha chain variable domain of TCR clone 121247 (TRAV23/DV6, TRAJ48)
CAPRWVEKLTF

SEQ ID NO: 242494 - protein, 14 aa, Homo sapiens
  CDR3 for beta chain variable domain of TCR clone 121247 (TRBV29-1, TRBJ1-3)
CSVADRVVGNTIYF

SEQ ID NO: 242495 - protein, 14 aa, Homo sapiens
  CDR3 for alpha chain variable domain of TCR clone 121248 (TRAV12-3, TRAJ10)
SHLPLTGGGNKLTF

SEQ ID NO: 242496 - protein, 16 aa, Homo sapiens
  CDR3 for beta chain variable domain of TCR clone 121248 (TRBV19, TRBJ2-7)
CASSPAGSGSLNEQYF

SEQ ID NO: 242497 - protein, 14 aa, Homo sapiens
  CDR3 for alpha chain variable domain of TCR clone 121249 (TRAV38-1, TRAJ40)
CAFRPTSGTYKYIF

SEQ ID NO: 242498 - protein, 14 aa, Homo sapiens
  CDR3 for beta chain variable domain of TCR clone 121249 (TRBV25-1, TRBJ1-1)
CASTHLGGNTEAFF

SEQ ID NO: 242499 - protein, 14 aa, Homo sapiens
  CDR3 for alpha chain variable domain of TCR clone 121250 (TRAV8-3, TRAJ4)
CAVGAAGGYNKLIF

SEQ ID NO: 242500 - protein, 15 aa, Homo sapiens
  CDR3 for beta chain variable domain of TCR clone 121250 (TRBV6-5, TRBJ2-1)
CASSSDAGAGNEQFF

SEQ ID NO: 242501 - protein, 16 aa, Homo sapiens
  CDR3 for alpha chain variable domain of TCR clone 121251 (TRAV25, TRAJ53)
TAVGTGSGGSNYKLTF

SEQ ID NO: 242502 - protein, 16 aa, Homo sapiens
  CDR3 for beta chain variable domain of TCR clone 121251 (TRBV4-2, TRBJ2-3)
CASSLSSGGHTDTQYF

SEQ ID NO: 242503 - protein, 11 aa, Homo sapiens
  CDR3 for alpha chain variable domain of TCR clone 121252 (TRAV12-3, TRAJ27)
CAMANAGKSTF

SEQ ID NO: 242504 - protein, 15 aa, Homo sapiens
  CDR3 for beta chain variable domain of TCR clone 121252 (TRBV4-1, TRBJ2-7)
CASSQNTGRLYEQYF

SEQ ID NO: 242505 - protein, 14 aa, Homo sapiens
  CDR3 for alpha chain variable domain of TCR clone 121253 (TRAV12-1, TRAJ17)
CVVNPKAAGNKLTF

SEQ ID NO: 242506 - protein, 15 aa, Homo sapiens
  CDR3 for beta chain variable domain of TCR clone 121253 (TRBV14, TRBJ2-5)
CASSRQGGVQETQYF

SEQ ID NO: 242507 - protein, 12 aa, Homo sapiens
  CDR3 for alpha chain variable domain of TCR clone 121254 (TRAV8-3, TRAJ26)
CAGDNYDQNFVF

SEQ ID NO: 242508 - protein, 15 aa, Homo sapiens
  CDR3 for beta chain variable domain of TCR clone 121254 (TRBV9, TRBJ2-1)
CASSLAGSSYNEQFF

SEQ ID NO: 242509 - protein, 15 aa, Homo sapiens
  CDR3 for alpha chain variable domain of TCR clone 121255 (TRAV13-1, TRAJ44)
CAASRNTGTASKLTF

SEQ ID NO: 242510 - protein, 15 aa, Homo sapiens
  CDR3 for beta chain variable domain of TCR clone 121255 (TRBV7-9, TRBJ2-5)
CASSRRTGGGETQYF

SEQ ID NO: 242511 - protein, 13 aa, Homo sapiens
  CDR3 for alpha chain variable domain of TCR clone 121256 (TRAV17, TRAJ5)
CALRGTGRRALTF

SEQ ID NO: 242512 - protein, 15 aa, Homo sapiens
  CDR3 for beta chain variable domain of TCR clone 121256 (TRBV20-1, TRBJ2-7)
CSARDRVSGMDEQYF

SEQ ID NO: 242513 - protein, 13 aa, Homo sapiens
  CDR3 for alpha chain variable domain of TCR clone 121257 (TRAV13-1, TRAJ10)
CAALEGGGNKLTF

SEQ ID NO: 242514 - protein, 11 aa, Homo sapiens
  CDR3 for beta chain variable domain of TCR clone 121257 (TRBV20-1, TRBJ2-7)
CSARLSYEQYF

SEQ ID NO: 242515 - protein, 16 aa, Homo sapiens
  CDR3 for alpha chain variable domain of TCR clone 121258 (TRAV26-1, TRAJ37)
CIVRGDGSGNTGKLIF

SEQ ID NO: 242516 - protein, 14 aa, Homo sapiens
  CDR3 for beta chain variable domain of TCR clone 121258 (TRBV7-2, TRBJ2-7)
CASSLYPGRYEQYF

SEQ ID NO: 242517 - protein, 12 aa, Homo sapiens
  CDR3 for alpha chain variable domain of TCR clone 121259 (TRAV12-2, TRAJ10)
WGVPGGGNKLTF

SEQ ID NO: 242518 - protein, 14 aa, Homo sapiens
  CDR3 for beta chain variable domain of TCR clone 121259 (TRBV27, TRBJ2-7)
CASATGTERREQYF

SEQ ID NO: 242519 - protein, 15 aa, Homo sapiens
  CDR3 for alpha chain variable domain of TCR clone 121260 (TRAV21, TRAJ53)
CATLNSGGSNYKMTF

SEQ ID NO: 242520 - protein, 14 aa, Homo sapiens
  CDR3 for beta chain variable domain of TCR clone 121260 (TRBV15, TRBJ1-2)
CATSRASVNYGYTF

SEQ ID NO: 242521 - protein, 11 aa, Homo sapiens
  CDR3 for alpha chain variable domain of TCR clone 121261 (TRAV13-1, TRAJ39)
CASHAGNMLTF

SEQ ID NO: 242522 - protein, 12 aa, Homo sapiens
  CDR3 for beta chain variable domain of TCR clone 121261 (TRBV11-2, TRBJ2-2)
CASSLPTGELFF

SEQ ID NO: 242523 - protein, 14 aa, Homo sapiens
  CDR3 for alpha chain variable domain of TCR clone 121262 (TRAV23/DV6, TRAJ22)
CAASVSGSAKQLTF

SEQ ID NO: 242524 - protein, 13 aa, Homo sapiens
  CDR3 for beta chain variable domain of TCR clone 121262 (TRBV11-2, TRBJ2-5)
CASSRGPSETQYF

SEQ ID NO: 242525 - protein, 13 aa, Homo sapiens
  CDR3 for alpha chain variable domain of TCR clone 121263 (TRAV16, TRAJ31)
CALSAHNNARLMF

SEQ ID NO: 242526 - protein, 16 aa, Homo sapiens
  CDR3 for beta chain variable domain of TCR clone 121263 (TRBV20-1, TRBJ1-4)
CSAPGQGLLTNEKLFF

SEQ ID NO: 242527 - protein, 15 aa, Homo sapiens
  CDR3 for alpha chain variable domain of TCR clone 121264 (TRAV12-1, TRAJ41)
CVVNGASNSGDALNF

SEQ ID NO: 242528 - protein, 15 aa, Homo sapiens
  CDR3 for beta chain variable domain of TCR clone 121264 (TRBV7-2, TRBJ1-5)
CASSSTGVDNQPQHF

SEQ ID NO: 242529 - protein, 16 aa, Homo sapiens
  CDR3 for alpha chain variable domain of TCR clone 121265 (TRAV12-2, TRAJ18)
CAVTTDRGSTLGRLSF

SEQ ID NO: 242530 - protein, 14 aa, Homo sapiens
  CDR3 for beta chain variable domain of TCR clone 121265 (TRBV4-2, TRBJ1-5)
CASSQDSINQPQHF

SEQ ID NO: 242531 - protein, 13 aa, Homo sapiens
  CDR3 for alpha chain variable domain of TCR clone 121266 (TRAV29/DV5, TRAJ31)
CAASRNNNARLMF

SEQ ID NO: 242532 - protein, 13 aa, Homo sapiens
  CDR3 for beta chain variable domain of TCR clone 121266 (TRBV7-2, TRBJ2-1)
CASSLGVYNEQFF

SEQ ID NO: 242533 - protein, 14 aa, Homo sapiens
  CDR3 for alpha chain variable domain of TCR clone 121267 (TRAV12-3, TRAJ10)
SHLPLTGGGNKLTF

SEQ ID NO: 242534 - protein, 12 aa, Homo sapiens
  CDR3 for beta chain variable domain of TCR clone 121267 (TRBV6-5, TRBJ2-1)
CASRTETAEQFF

SEQ ID NO: 242535 - protein, 13 aa, Homo sapiens
  CDR3 for alpha chain variable domain of TCR clone 121268 (TRAV30, TRAJ24)
CGTVTDSWGKLQF

SEQ ID NO: 242536 - protein, 15 aa, Homo sapiens
  CDR3 for beta chain variable domain of TCR clone 121268 (TRBV25-1, TRBJ1-4)
CASSPGDSTNEQLFF

SEQ ID NO: 242537 - protein, 15 aa, Homo sapiens
  CDR3 for alpha chain variable domain of TCR clone 121269 (TRAV16, TRAJ16)
CALQGGGSDGQKLLF

SEQ ID NO: 242538 - protein, 15 aa, Homo sapiens
  CDR3 for beta chain variable domain of TCR clone 121269 (TRBV20-1, TRBJ2-7)
CSVRDRVSGMDEQYF

SEQ ID NO: 242539 - protein, 17 aa, Homo sapiens
  CDR3 for alpha chain variable domain of TCR clone 121270 (TRAV26-1, TRAJ53)
CIVRVDDRGGSNYKLTF

SEQ ID NO: 242540 - protein, 19 aa, Homo sapiens
  CDR3 for beta chain variable domain of TCR clone 121270 (TRBV25-1, TRBJ2-2)
CAILVYRVDRGRKTGELFF

SEQ ID NO: 242541 - protein, 16 aa, Homo sapiens
  CDR3 for alpha chain variable domain of TCR clone 121271 (TRAV30, TRAJ24)
CGTEIVDAASWGKFQF

SEQ ID NO: 242542 - protein, 13 aa, Homo sapiens
  CDR3 for beta chain variable domain of TCR clone 121271 (TRBV10-3, TRBJ1-2)
CAISERDSYGYTF

SEQ ID NO: 242543 - protein, 13 aa, Homo sapiens
  CDR3 for alpha chain variable domain of TCR clone 121272 (TRAV20, TRAJ28)
CAVQEAGSYQLTF

SEQ ID NO: 242544 - protein, 15 aa, Homo sapiens
  CDR3 for beta chain variable domain of TCR clone 121272 (TRBV9, TRBJ1-4)
CASSVGGSTNEKLFF

SEQ ID NO: 242545 - protein, 14 aa, Homo sapiens
  CDR3 for alpha chain variable domain of TCR clone 121273 (TRAV8-3, TRAJ4)
CAVGASGGYNKLIF

SEQ ID NO: 242546 - protein, 17 aa, Homo sapiens
  CDR3 for beta chain variable domain of TCR clone 121273 (TRBV11-2, TRBJ2-1)
CASSLCPPGVEYNEQFF

SEQ ID NO: 242547 - protein, 13 aa, Homo sapiens
  CDR3 for alpha chain variable domain of TCR clone 121274 (TRAV36/DV7, TRAJ54)
CAVDIQGAQKLVF

SEQ ID NO: 242548 - protein, 15 aa, Homo sapiens
  CDR3 for beta chain variable domain of TCR clone 121274 (TRBV4-1, TRBJ1-4)
CASSDTGGTNEKLFF

SEQ ID NO: 242549 - protein, 14 aa, Homo sapiens
  CDR3 for alpha chain variable domain of TCR clone 121275 (TRAV8-4, TRAJ4)
CAVSPLGGYNKLIF

SEQ ID NO: 242550 - protein, 12 aa, Homo sapiens
  CDR3 for beta chain variable domain of TCR clone 121275 (TRBV11-2, TRBJ2-2)
CASSLGGGELFF

SEQ ID NO: 242551 - protein, 13 aa, Homo sapiens
  CDR3 for alpha chain variable domain of TCR clone 121276 (TRAV26-1, TRAJ34)
CIVRPWITGKLIF

SEQ ID NO: 242552 - protein, 14 aa, Homo sapiens
  CDR3 for beta chain variable domain of TCR clone 121276 (TRBV7-2, TRBJ2-7)
CASRSQGAAYEQYF

SEQ ID NO: 242553 - protein, 13 aa, Homo sapiens
  CDR3 for alpha chain variable domain of TCR clone 121277 (TRAV8-6, TRAJ21)
GAVSPSSLNKFYF

SEQ ID NO: 242554 - protein, 14 aa, Homo sapiens
  CDR3 for beta chain variable domain of TCR clone 121277 (TRBV7-9, TRBJ2-5)
CASSLDTAQETQYF

SEQ ID NO: 242555 - protein, 12 aa, Homo sapiens
  CDR3 for alpha chain variable domain of TCR clone 121278 (TRAV4, TRAJ26)
CLVGDYGQNFVF

SEQ ID NO: 242556 - protein, 17 aa, Homo sapiens
  CDR3 for beta chain variable domain of TCR clone 121278 (TRBV13, TRBJ2-3)
CASSLSRVAGGRNTQYF

SEQ ID NO: 242557 - protein, 14 aa, Homo sapiens
  CDR3 for alpha chain variable domain of TCR clone 121279 (TRAV1-2, TRAJ16)
CAVNRFSDGQKLLF

SEQ ID NO: 242558 - protein, 15 aa, Homo sapiens
  CDR3 for beta chain variable domain of TCR clone 121279 (TRBV5-7, TRBJ2-7)
CASSLPGQVFYEQYF

SEQ ID NO: 242559 - protein, 15 aa, Homo sapiens
  CDR3 for alpha chain variable domain of TCR clone 121280 (TRAV1-2, TRAJ18)
CAWEGRGSTLGRLYF

SEQ ID NO: 242560 - protein, 14 aa, Homo sapiens
  CDR3 for beta chain variable domain of TCR clone 121280 (TRBV4-3, TRBJ2-7)
CASSQDVAGEEQYF

SEQ ID NO: 242561 - protein, 12 aa, Homo sapiens
  CDR3 for alpha chain variable domain of TCR clone 121281 (TRAV13-1, TRAJ49)
FAASPMGNQFYF

SEQ ID NO: 242562 - protein, 13 aa, Homo sapiens
  CDR3 for beta chain variable domain of TCR clone 121281 (TRBV20-1, TRBJ2-2)
CSASAAGTGELFF

SEQ ID NO: 242563 - protein, 10 aa, Homo sapiens
  CDR3 for alpha chain variable domain of TCR clone 121282 (TRAV1-2, TRAJ31)
CAFFDARLMF

SEQ ID NO: 242564 - protein, 17 aa, Homo sapiens
  CDR3 for beta chain variable domain of TCR clone 121282 (TRBV15, TRBJ1-2)
CATSGREIDVVNYGYTS

SEQ ID NO: 242565 - protein, 14 aa, Homo sapiens
  CDR3 for alpha chain variable domain of TCR clone 121283 (TRAV9-2, TRAJ24)
CALNPRGSWGKLQS

SEQ ID NO: 242566 - protein, 15 aa, Homo sapiens
  CDR3 for beta chain variable domain of TCR clone 121283 (TRBV7-2, TRBJ2-3)
CASSSTGLETDTQYF

SEQ ID NO: 242567 - protein, 18 aa, Homo sapiens
  CDR3 for alpha chain variable domain of TCR clone 121284 (TRAV35, TRAJ28)
CAGHNYPLSRAGSYQLTF

SEQ ID NO: 242568 - protein, 12 aa, Homo sapiens
  CDR3 for beta chain variable domain of TCR clone 121284 (TRBV7-9, TRBJ1-1)
CASSLEGTEAFF

SEQ ID NO: 242569 - protein, 12 aa, Homo sapiens
  CDR3 for alpha chain variable domain of TCR clone 121285 (TRAV12-3, TRAJ17)
CAMTLTGNKLTF

SEQ ID NO: 242570 - protein, 15 aa, Homo sapiens
  CDR3 for beta chain variable domain of TCR clone 121285 (TRBV11-1, TRBJ2-7)
CASSLNYGASYEQYF

SEQ ID NO: 242571 - protein, 16 aa, Homo sapiens
  CDR3 for alpha chain variable domain of TCR clone 121286 (TRAV26-1, TRAJ38)
CIVRASGAGNNRKLIW

SEQ ID NO: 242572 - protein, 13 aa, Homo sapiens
  CDR3 for beta chain variable domain of TCR clone 121286 (TRBV14, TRBJ1-2)
CASSQDRRRGYTF

SEQ ID NO: 242573 - protein, 12 aa, Homo sapiens
  CDR3 for alpha chain variable domain of TCR clone 121287 (TRAV4, TRAJ34)
CLVGEGTDKLIF

SEQ ID NO: 242574 - protein, 13 aa, Homo sapiens
  CDR3 for beta chain variable domain of TCR clone 121287 (TRBV2, TRBJ2-7)
CATSMGLVYGQYF

SEQ ID NO: 242575 - protein, 16 aa, Homo sapiens
  CDR3 for alpha chain variable domain of TCR clone 121288 (TRAV14/DV4, TRAJ53)
CAMREGGGGSNYKLTF

SEQ ID NO: 242576 - protein, 19 aa, Homo sapiens
  CDR3 for beta chain variable domain of TCR clone 121288 (TRBV28, TRBJ2-4)
CASGFQPGGPAHSKNIQYF

SEQ ID NO: 242577 - protein, 13 aa, Homo sapiens
  CDR3 for alpha chain variable domain of TCR clone 121289 (TRAV36/DV7, TRAJ37)
CAVFSSNTGKLIF

SEQ ID NO: 242578 - protein, 15 aa, Homo sapiens
  CDR3 for beta chain variable domain of TCR clone 121289 (TRBV25-1, TRBJ1-4)
CASSKRIATNEKLFF

SEQ ID NO: 242579 - protein, 14 aa, Homo sapiens
  CDR3 for alpha chain variable domain of TCR clone 121290 (TRAV13-2, TRAJ11)
CAETGNSGYSTLTF

SEQ ID NO: 242580 - protein, 14 aa, Homo sapiens
  CDR3 for beta chain variable domain of TCR clone 121290 (TRBV7-2, TRBJ2-7)
CASSPKTSFYEQYF

SEQ ID NO: 242581 - protein, 14 aa, Homo sapiens
  CDR3 for alpha chain variable domain of TCR clone 121291 (TRAV17, TRAJ40)
CATALTSGTYKYIF

SEQ ID NO: 242582 - protein, 13 aa, Homo sapiens
  CDR3 for beta chain variable domain of TCR clone 121291 (TRBV7-3, TRBJ2-7)
CASSKRRGGEQYF

SEQ ID NO: 242583 - protein, 16 aa, Homo sapiens
  CDR3 for alpha chain variable domain of TCR clone 121292 (TRAV3, TRAJ37)
CAVRVRGSGTTGKLIF

SEQ ID NO: 242584 - protein, 11 aa, Homo sapiens
  CDR3 for beta chain variable domain of TCR clone 121292 (TRBV11-2, TRBJ2-2)
CASSLPGELFF

SEQ ID NO: 242585 - protein, 15 aa, Homo sapiens
  CDR3 for alpha chain variable domain of TCR clone 121293 (TRAV27, TRAJ38)
CAGRLDAGNNRKLIW

SEQ ID NO: 242586 - protein, 13 aa, Homo sapiens
  CDR3 for beta chain variable domain of TCR clone 121293 (TRBV20-1, TRBJ2-1)
TSGALPPGNEQFF

SEQ ID NO: 242587 - protein, 16 aa, Homo sapiens
  CDR3 for alpha chain variable domain of TCR clone 121294 (TRAV14/DV4, TRAJ48)
CAMREGGNFGNEKLTF

SEQ ID NO: 242588 - protein, 13 aa, Homo sapiens
  CDR3 for beta chain variable domain of TCR clone 121294 (TRBV19, TRBJ2-7)
CASRKAGGSEQYF

SEQ ID NO: 242589 - protein, 14 aa, Homo sapiens
  CDR3 for alpha chain variable domain of TCR clone 121295 (TRAV16, TRAJ17)
CAPRIKAAGNKLTF

SEQ ID NO: 242590 - protein, 16 aa, Homo sapiens
  CDR3 for beta chain variable domain of TCR clone 121295 (TRBV11-2, TRBJ2-7)
CASSTVTAPKTYEQYF

SEQ ID NO: 242591 - protein, 14 aa, Homo sapiens
  CDR3 for alpha chain variable domain of TCR clone 121296 (TRAV21, TRAJ45)
CAVSSGGGADGLTL

SEQ ID NO: 242592 - protein, 15 aa, Homo sapiens
  CDR3 for beta chain variable domain of TCR clone 121296 (TRBV6-1, TRBJ2-4)
CASSEAVWTINIQYF

SEQ ID NO: 242593 - protein, 12 aa, Homo sapiens
  CDR3 for alpha chain variable domain of TCR clone 121297 (TRAV17, TRAJ28)
WDSGAGGYQLTF

SEQ ID NO: 242594 - protein, 13 aa, Homo sapiens
  CDR3 for beta chain variable domain of TCR clone 121297 (TRBV11-3, TRBJ1-1)
CASSRQPNTEAFF

SEQ ID NO: 242595 - protein, 12 aa, Homo sapiens
  CDR3 for alpha chain variable domain of TCR clone 121298 (TRAV12-1, TRAJ34)
CGDRHNTDKLIF

SEQ ID NO: 242596 - protein, 11 aa, Homo sapiens
  CDR3 for beta chain variable domain of TCR clone 121298 (TRBV27, TRBJ2-3)
CASSLGDTQYF

SEQ ID NO: 242597 - protein, 15 aa, Homo sapiens
  CDR3 for alpha chain variable domain of TCR clone 121299 (TRAV17, TRAJ56)
CATEPFTVANSKLTF

SEQ ID NO: 242598 - protein, 14 aa, Homo sapiens
  CDR3 for beta chain variable domain of TCR clone 121299 (TRBV19, TRBJ2-1)
CASPTFVLSGEQFF

SEQ ID NO: 242599 - protein, 13 aa, Homo sapiens
  CDR3 for alpha chain variable domain of TCR clone 121300 (TRAV27, TRAJ45)
CRSSGGGADGLTF

SEQ ID NO: 242600 - protein, 13 aa, Homo sapiens
  CDR3 for beta chain variable domain of TCR clone 121300 (TRBV7-6, TRBJ2-3)
CASSLRSDNTQYF

SEQ ID NO: 242601 - protein, 15 aa, Homo sapiens
  CDR3 for alpha chain variable domain of TCR clone 121301 (TRAV21, TRAJ40)
CAVRPQNSGTYKYIF

SEQ ID NO: 242602 - protein, 13 aa, Homo sapiens
  CDR3 for beta chain variable domain of TCR clone 121301 (TRBV7-2, TRBJ2-2)
CASSSVRAGELFF

SEQ ID NO: 242603 - protein, 14 aa, Homo sapiens
  CDR3 for alpha chain variable domain of TCR clone 121302 (TRAV12-2, TRAJ24)
CAVTPADSWGKLQF

SEQ ID NO: 242604 - protein, 12 aa, Homo sapiens
  CDR3 for beta chain variable domain of TCR clone 121302 (TRBV3-1, TRBJ2-1)
CANSQGSSGQFF

SEQ ID NO: 242605 - protein, 14 aa, Homo sapiens
  CDR3 for alpha chain variable domain of TCR clone 121303 (TRAV8-4, TRAJ48)
CAVSETFGNEKLTF

SEQ ID NO: 242606 - protein, 14 aa, Homo sapiens
  CDR3 for beta chain variable domain of TCR clone 121303 (TRBV13, TRBJ2-7)
CASRLKGASYEQYF

SEQ ID NO: 242607 - protein, 15 aa, Homo sapiens
  CDR3 for alpha chain variable domain of TCR clone 121304 (TRAV12-1, TRAJ44)
CVVDTPQGTASKLTF

SEQ ID NO: 242608 - protein, 13 aa, Homo sapiens
  CDR3 for beta chain variable domain of TCR clone 121304 (TRBV27, TRBJ2-1)
CASSSGCYNEQFF

SEQ ID NO: 242609 - protein, 17 aa, Homo sapiens
  CDR3 for alpha chain variable domain of TCR clone 121305 (TRAV13-1, TRAJ53)
CAASWKSSGGSNYKLTF

SEQ ID NO: 242610 - protein, 19 aa, Homo sapiens
  CDR3 for beta chain variable domain of TCR clone 121305 (TRBV7-9, TRBJ2-1)
CASSHTRGALLRSYNEQFF

SEQ ID NO: 242611 - protein, 14 aa, Homo sapiens
  CDR3 for alpha chain variable domain of TCR clone 121306 (TRAV17, TRAJ16)
CATADFADGQKLLF

SEQ ID NO: 242612 - protein, 15 aa, Homo sapiens
  CDR3 for beta chain variable domain of TCR clone 121306 (TRBV18, TRBJ2-1)
CASSPPSASYNEQFF

SEQ ID NO: 242613 - protein, 16 aa, Homo sapiens
  CDR3 for alpha chain variable domain of TCR clone 121307 (TRAV30, TRAJ24)
CGTEIVDADSWGKFQL

SEQ ID NO: 242614 - protein, 15 aa, Homo sapiens
  CDR3 for beta chain variable domain of TCR clone 121307 (TRBV27, TRBJ2-1)
CASSNGGGSSNEQFF

SEQ ID NO: 242615 - protein, 14 aa, Homo sapiens
  CDR3 for alpha chain variable domain of TCR clone 121308 (TRAV2, TRAJ37)
CAVDFTSNTGKLIF

SEQ ID NO: 242616 - protein, 15 aa, Homo sapiens
  CDR3 for beta chain variable domain of TCR clone 121308 (TRBV15, TRBJ1-4)
CATSRDMGSYEKLFF

SEQ ID NO: 242617 - protein, 14 aa, Homo sapiens
  CDR3 for alpha chain variable domain of TCR clone 121309 (TRAV12-2, TRAJ15)
CAPHTGQAGTALIF

SEQ ID NO: 242618 - protein, 13 aa, Homo sapiens
  CDR3 for beta chain variable domain of TCR clone 121309 (TRBV7-9, TRBJ1-2)
CASSLKQNYGYTF

SEQ ID NO: 242619 - protein, 16 aa, Homo sapiens
  CDR3 for alpha chain variable domain of TCR clone 121310 (TRAV20, TRAJ26)
CAVQHRRDNYGQNFVF

SEQ ID NO: 242620 - protein, 13 aa, Homo sapiens
  CDR3 for beta chain variable domain of TCR clone 121310 (TRBV7-2, TRBJ2-2)
CASSLAVTGELFF

SEQ ID NO: 242621 - protein, 14 aa, Homo sapiens
  CDR3 for alpha chain variable domain of TCR clone 121311 (TRAV12-3, TRAJ10)
SHLPLTGGGNKLTF

SEQ ID NO: 242622 - protein, 13 aa, Homo sapiens
  CDR3 for beta chain variable domain of TCR clone 121311 (TRBV2, TRBJ1-5)
CATAGPGNQPQHF

SEQ ID NO: 242623 - protein, 15 aa, Homo sapiens
  CDR3 for alpha chain variable domain of TCR clone 121312 (TRAV8-6, TRAJ10)
CAVSDQAGGGNKLTF

SEQ ID NO: 242624 - protein, 15 aa, Homo sapiens
  CDR3 for beta chain variable domain of TCR clone 121312 (TRBV3-1, TRBJ2-5)
CASSANLGCPETQYF

SEQ ID NO: 242625 - protein, 15 aa, Homo sapiens
  CDR3 for alpha chain variable domain of TCR clone 121313 (TRAV17, TRAJ16)
CATALRFSDGQKLLF

SEQ ID NO: 242626 - protein, 17 aa, Homo sapiens
  CDR3 for beta chain variable domain of TCR clone 121313 (TRBV11-2, TRBJ2-1)
CASSLYPPGVEYNEQFF

SEQ ID NO: 242627 - protein, 15 aa, Homo sapiens
  CDR3 for alpha chain variable domain of TCR clone 121314 (TRAV26-2, TRAJ28)
CILVESGAGSYQLTF

SEQ ID NO: 242628 - protein, 16 aa, Homo sapiens
  CDR3 for beta chain variable domain of TCR clone 121314 (TRBV4-2, TRBJ1-2)
CASSQEIGGASYDYTF

SEQ ID NO: 242629 - protein, 16 aa, Homo sapiens
  CDR3 for alpha chain variable domain of TCR clone 121315 (TRAV16, TRAJ4)
CALGRMFSGGYNKLIF

SEQ ID NO: 242630 - protein, 16 aa, Homo sapiens
  CDR3 for beta chain variable domain of TCR clone 121315 (TRBV12-4, TRBJ1-5)
CASSRPVGGSNQPQHF

SEQ ID NO: 242631 - protein, 16 aa, Homo sapiens
  CDR3 for alpha chain variable domain of TCR clone 121316 (TRAV16, TRAJ4)
CALSRMFSGGYNKLIF

SEQ ID NO: 242632 - protein, 14 aa, Homo sapiens
  CDR3 for beta chain variable domain of TCR clone 121316 (TRBV4-1, TRBJ2-2)
CASSRAVNTGELFF

SEQ ID NO: 242633 - protein, 16 aa, Homo sapiens
  CDR3 for alpha chain variable domain of TCR clone 121317 (TRAV13-2, TRAJ23)
CAETRRFYNQGGKLIF

SEQ ID NO: 242634 - protein, 14 aa, Homo sapiens
  CDR3 for beta chain variable domain of TCR clone 121317 (TRBV25-1, TRBJ1-1)
CASTHLGGNTEAFF

SEQ ID NO: 242635 - protein, 12 aa, Homo sapiens
  CDR3 for alpha chain variable domain of TCR clone 121318 (TRAV26-1, TRAJ35)
CIGLSFGNVLHC

SEQ ID NO: 242636 - protein, 13 aa, Homo sapiens
  CDR3 for beta chain variable domain of TCR clone 121318 (TRBV7-9, TRBJ1-2)
CASSLKQNYGYTF

SEQ ID NO: 242637 - protein, 18 aa, Homo sapiens
  CDR3 for alpha chain variable domain of TCR clone 121319 (TRAV12-3, TRAJ52)
CAMSVGGAGGTSYGKLTF

SEQ ID NO: 242638 - protein, 19 aa, Homo sapiens
  CDR3 for beta chain variable domain of TCR clone 121319 (TRBV19, TRBJ2-5)
CASSIGQVTDFFLGETQYF

SEQ ID NO: 242639 - protein, 15 aa, Homo sapiens
  CDR3 for alpha chain variable domain of TCR clone 121320 (TRAV12-2, TRAJ43)
CAFDMRFGAGTRLTV

SEQ ID NO: 242640 - protein, 18 aa, Homo sapiens
  CDR3 for beta chain variable domain of TCR clone 121320 (TRBV20-1, TRBJ2-3)
CSASGLAGGPGTTVTQYF

SEQ ID NO: 242641 - protein, 15 aa, Homo sapiens
  CDR3 for alpha chain variable domain of TCR clone 121321 (TRAV2, TRAJ15)
CAAGGPNQAGTALIF

SEQ ID NO: 242642 - protein, 13 aa, Homo sapiens
  CDR3 for beta chain variable domain of TCR clone 121321 (TRBV2, TRBJ1-5)
CATAGPGNQPQHL

SEQ ID NO: 242643 - protein, 18 aa, Homo sapiens
  CDR3 for alpha chain variable domain of TCR clone 121322 (TRAV26-1, TRAJ22)
CIVRVSLWFCKATDLLIW

SEQ ID NO: 242644 - protein, 12 aa, Homo sapiens
  CDR3 for beta chain variable domain of TCR clone 121322 (TRBV11-2, TRBJ2-2)
CASSLGGGELFF

SEQ ID NO: 242645 - protein, 14 aa, Homo sapiens
  CDR3 for alpha chain variable domain of TCR clone 121323 (TRAV26-1, TRAJ49)
CIVRLTNTGNQVYF

SEQ ID NO: 242646 - protein, 13 aa, Homo sapiens
  CDR3 for beta chain variable domain of TCR clone 121323 (TRBV4-1, TRBJ2-7)
CASSQGQAYEQYF

SEQ ID NO: 242647 - protein, 14 aa, Homo sapiens
  CDR3 for alpha chain variable domain of TCR clone 121324 (TRAV20, TRAJ40)
CAVQAVPGTYKYIF

SEQ ID NO: 242648 - protein, 14 aa, Homo sapiens
  CDR3 for beta chain variable domain of TCR clone 121324 (TRBV7-2, TRBJ2-2)
CASSLEANTGELFF

SEQ ID NO: 242649 - protein, 14 aa, Homo sapiens
  CDR3 for alpha chain variable domain of TCR clone 121325 (TRAV17, TRAJ57)
CATDPQGGSEKLVF

SEQ ID NO: 242650 - protein, 13 aa, Homo sapiens
  CDR3 for beta chain variable domain of TCR clone 121325 (TRBV3-1, TRBJ2-2)
CASLARGSGELFF

SEQ ID NO: 242651 - protein, 17 aa, Homo sapiens
  CDR3 for alpha chain variable domain of TCR clone 121326 (TRAV23/DV6, TRAJ57)
CAASPTLSQGGSEKLVF

SEQ ID NO: 242652 - protein, 14 aa, Homo sapiens
  CDR3 for beta chain variable domain of TCR clone 121326 (TRBV19, TRBJ2-1)
CASSKDRGQDEQFF

SEQ ID NO: 242653 - protein, 15 aa, Homo sapiens
  CDR3 for alpha chain variable domain of TCR clone 121327 (TRAV21, TRAJ24)
CAARSSTDSWGKLQF

SEQ ID NO: 242654 - protein, 15 aa, Homo sapiens
  CDR3 for beta chain variable domain of TCR clone 121327 (TRBV4-1, TRBJ2-5)
CASSQWDLYQETQYF

SEQ ID NO: 242655 - protein, 14 aa, Homo sapiens
  CDR3 for alpha chain variable domain of TCR clone 121328 (TRAV38-1, TRAJ26)
CAFMPDNYGQNFVF

SEQ ID NO: 242656 - protein, 16 aa, Homo sapiens
  CDR3 for beta chain variable domain of TCR clone 121328 (TRBV12-5, TRBJ2-5)
CASGPRTSGNQETQYF

SEQ ID NO: 242657 - protein, 13 aa, Homo sapiens
  CDR3 for alpha chain variable domain of TCR clone 121329 (TRAV20, TRAJ34)
CAVSSYNNDKLIF

SEQ ID NO: 242658 - protein, 13 aa, Homo sapiens
  CDR3 for beta chain variable domain of TCR clone 121329 (TRBV7-9, TRBJ1-2)
CASSLKQNYGYTF

SEQ ID NO: 242659 - protein, 10 aa, Homo sapiens
  CDR3 for alpha chain variable domain of TCR clone 121330 (TRAV4, TRAJ33)
TLDSNYQLIW

SEQ ID NO: 242660 - protein, 10 aa, Homo sapiens
  CDR3 for beta chain variable domain of TCR clone 121330 (TRBV28, TRBJ1-2)
CASSSDRAVF

SEQ ID NO: 242661 - protein, 12 aa, Homo sapiens
  CDR3 for alpha chain variable domain of TCR clone 121331 (TRAV12-3, TRAJ5)
CAMDTGRRALTF

SEQ ID NO: 242662 - protein, 20 aa, Homo sapiens
  CDR3 for beta chain variable domain of TCR clone 121331 (TRBV7-8, TRBJ2-2)
CASSHLFPGPTIHITGELFF

SEQ ID NO: 242663 - protein, 16 aa, Homo sapiens
  CDR3 for alpha chain variable domain of TCR clone 121332 (TRAV12-1, TRAJ12)
CVVNTLLMDSSYKLIF

SEQ ID NO: 242664 - protein, 14 aa, Homo sapiens
  CDR3 for beta chain variable domain of TCR clone 121332 (TRBV7-2, TRBJ2-7)
CASRSQGAAYEQYF

SEQ ID NO: 242665 - protein, 15 aa, Homo sapiens
  CDR3 for alpha chain variable domain of TCR clone 121333 (TRAV20, TRAJ42)
CAVQATRGSQGNLIF

SEQ ID NO: 242666 - protein, 11 aa, Homo sapiens
  CDR3 for beta chain variable domain of TCR clone 121333 (TRBV12-4, TRBJ2-1)
CASSKFNGQFF

SEQ ID NO: 242667 - protein, 14 aa, Homo sapiens
  CDR3 for alpha chain variable domain of TCR clone 121334 (TRAV26-1, TRAJ48)
CIVRVGLGNEKLTF

SEQ ID NO: 242668 - protein, 13 aa, Homo sapiens
  CDR3 for beta chain variable domain of TCR clone 121334 (TRBV11-3, TRBJ2-3)
CASSHDTKDTQYF

SEQ ID NO: 242669 - protein, 15 aa, Homo sapiens
  CDR3 for alpha chain variable domain of TCR clone 121335 (TRAV3, TRAJ5)
CAVRDRKTGRRALTF

SEQ ID NO: 242670 - protein, 15 aa, Homo sapiens
  CDR3 for beta chain variable domain of TCR clone 121335 (TRBV7-8, TRBJ2-1)
CATSLADSLYNEQFF

SEQ ID NO: 242671 - protein, 15 aa, Homo sapiens
  CDR3 for alpha chain variable domain of TCR clone 121336 (TRAV27, TRAJ38)
CAARRNAGNNRKLIW

SEQ ID NO: 242672 - protein, 15 aa, Homo sapiens
  CDR3 for beta chain variable domain of TCR clone 121336 (TRBV7-9, TRBJ2-7)
CASSLALAEAYEQYF

SEQ ID NO: 242673 - protein, 13 aa, Homo sapiens
  CDR3 for alpha chain variable domain of TCR clone 121337 (TRAV8-3, TRAJ28)
CAVGAVGSYQLTF

SEQ ID NO: 242674 - protein, 13 aa, Homo sapiens
  CDR3 for beta chain variable domain of TCR clone 121337 (TRBV7-3, TRBJ2-5)
CASSFRGSQTQYF

SEQ ID NO: 242675 - protein, 13 aa, Homo sapiens
  CDR3 for alpha chain variable domain of TCR clone 121338 (TRAV12-2, TRAJ30)
CAVNLNRDDKIIF

SEQ ID NO: 242676 - protein, 11 aa, Homo sapiens
  CDR3 for beta chain variable domain of TCR clone 121338 (TRBV19, TRBJ2-7)
CASGNSYEQYF

SEQ ID NO: 242677 - protein, 13 aa, Homo sapiens
  CDR3 for alpha chain variable domain of TCR clone 121339 (TRAV8-3, TRAJ36)
CAVGATVANNLFF

SEQ ID NO: 242678 - protein, 13 aa, Homo sapiens
  CDR3 for beta chain variable domain of TCR clone 121339 (TRBV12-4, TRBJ1-2)
CASSLRQGKGYTF

SEQ ID NO: 242679 - protein, 16 aa, Homo sapiens
  CDR3 for alpha chain variable domain of TCR clone 121340 (TRAV16, TRAJ52)
CALSAAGGTSYGKLTF

SEQ ID NO: 242680 - protein, 12 aa, Homo sapiens
  CDR3 for beta chain variable domain of TCR clone 121340 (TRBV11-3, TRBJ2-2)
CASSLPTGELFF

SEQ ID NO: 242681 - protein, 12 aa, Homo sapiens
  CDR3 for alpha chain variable domain of TCR clone 121341 (TRAV12-1, TRAJ40)
CVVYSGTYKYIF

SEQ ID NO: 242682 - protein, 15 aa, Homo sapiens
  CDR3 for beta chain variable domain of TCR clone 121341 (TRBV5-1, TRBJ2-7)
CASSLNGGPAREQYF

SEQ ID NO: 242683 - protein, 13 aa, Homo sapiens
  CDR3 for alpha chain variable domain of TCR clone 121342 (TRAV36/DV7, TRAJ37)
CAVFSSNIGKLIF

SEQ ID NO: 242684 - protein, 16 aa, Homo sapiens
  CDR3 for beta chain variable domain of TCR clone 121342 (TRBV3-1, TRBJ2-5)
CASSPGQFNGFGTQYF

SEQ ID NO: 242685 - protein, 14 aa, Homo sapiens
  CDR3 for alpha chain variable domain of TCR clone 121343 (TRAV1-2, TRAJ16)
CAVNRFSDGQKLIF

SEQ ID NO: 242686 - protein, 11 aa, Homo sapiens
  CDR3 for beta chain variable domain of TCR clone 121343 (TRBV29-1, TRBJ2-5)
CSEDRTGTQYF

SEQ ID NO: 242687 - protein, 11 aa, Homo sapiens
  CDR3 for alpha chain variable domain of TCR clone 121344 (TRAV23/DV6, TRAJ49)
CAVAPLTSSIL

SEQ ID NO: 242688 - protein, 13 aa, Homo sapiens
  CDR3 for beta chain variable domain of TCR clone 121344 (TRBV6-1, TRBJ1-1)
CASSRQGNTEAFF

SEQ ID NO: 242689 - protein, 17 aa, Homo sapiens
  CDR3 for alpha chain variable domain of TCR clone 121345 (TRAV3, TRAJ6)
CAVSRRTDTGGSYIPTF

SEQ ID NO: 242690 - protein, 15 aa, Homo sapiens
  CDR3 for beta chain variable domain of TCR clone 121345 (TRBV9, TRBJ1-6)
CASSVAGTGDSPLHF

SEQ ID NO: 242691 - protein, 14 aa, Homo sapiens
  CDR3 for alpha chain variable domain of TCR clone 121346 (TRAV21, TRAJ21)
CAVKGFGNLNKFYF

SEQ ID NO: 242692 - protein, 13 aa, Homo sapiens
  CDR3 for beta chain variable domain of TCR clone 121346 (TRBV18, TRBJ1-1)
CASSPETKPEAFF

SEQ ID NO: 242693 - protein, 14 aa, Homo sapiens
  CDR3 for alpha chain variable domain of TCR clone 121347 (TRAV12-3, TRAJ10)
SHLPLTGGGNKLTF

SEQ ID NO: 242694 - protein, 14 aa, Homo sapiens
  CDR3 for beta chain variable domain of TCR clone 121347 (TRBV15, TRBJ2-3)
CATRSGTSTDTQYF

SEQ ID NO: 242695 - protein, 11 aa, Homo sapiens
  CDR3 for alpha chain variable domain of TCR clone 121348 (TRAV21, TRAJ33)
CAVLSNYQLIW

SEQ ID NO: 242696 - protein, 15 aa, Homo sapiens
  CDR3 for beta chain variable domain of TCR clone 121348 (TRBV11-3, TRBJ2-7)
CASSLMVGGSYEQYF

SEQ ID NO: 242697 - protein, 15 aa, Homo sapiens
  CDR3 for alpha chain variable domain of TCR clone 121349 (TRAV26-1, TRAJ38)
CIVRAEGGNNRKLIW

SEQ ID NO: 242698 - protein, 14 aa, Homo sapiens
  CDR3 for beta chain variable domain of TCR clone 121349 (TRBV7-6, TRBJ2-5)
CASSSPSGSENQYF

SEQ ID NO: 242699 - protein, 14 aa, Homo sapiens
  CDR3 for alpha chain variable domain of TCR clone 121350 (TRAV17, TRAJ57)
CATDPQGGSEKLGF

SEQ ID NO: 242700 - protein, 18 aa, Homo sapiens
  CDR3 for beta chain variable domain of TCR clone 121350 (TRBV20-1, TRBJ2-3)
CSASGLAGGPGTTDTQYF

SEQ ID NO: 242701 - protein, 14 aa, Homo sapiens
  CDR3 for alpha chain variable domain of TCR clone 121351 (TRAV13-1, TRAJ9)
CAASALTGGFKTLF

SEQ ID NO: 242702 - protein, 13 aa, Homo sapiens
  CDR3 for beta chain variable domain of TCR clone 121351 (TRBV20-1, TRBJ1-1)
CSAGTVGNTEAFF

SEQ ID NO: 242703 - protein, 12 aa, Homo sapiens
  CDR3 for alpha chain variable domain of TCR clone 121352 (TRAV12-1, TRAJ40)
CVVYSGTYKYIF

SEQ ID NO: 242704 - protein, 17 aa, Homo sapiens
  CDR3 for beta chain variable domain of TCR clone 121352 (TRBV11-3, TRBJ1-5)
CASSTLTGLRGNQPQHF

SEQ ID NO: 242705 - protein, 13 aa, Homo sapiens
  CDR3 for alpha chain variable domain of TCR clone 121353 (TRAV27, TRAJ49)
CAPRPYTGNQFYF

SEQ ID NO: 242706 - protein, 14 aa, Homo sapiens
  CDR3 for beta chain variable domain of TCR clone 121353 (TRBV4-2, TRBJ2-1)
CASGLDRAYNEQFF

SEQ ID NO: 242707 - protein, 15 aa, Homo sapiens
  CDR3 for alpha chain variable domain of TCR clone 121354 (TRAV26-1, TRAJ29)
CIVRVEGSGNTPLVF

SEQ ID NO: 242708 - protein, 18 aa, Homo sapiens
  CDR3 for beta chain variable domain of TCR clone 121354 (TRBV18, TRBJ2-5)
CASSPGVSRDPVLRARHA

SEQ ID NO: 242709 - protein, 12 aa, Homo sapiens
  CDR3 for alpha chain variable domain of TCR clone 121355 (TRAV27, TRAJ9)
CAGESGGFKTIF

SEQ ID NO: 242710 - protein, 11 aa, Homo sapiens
  CDR3 for beta chain variable domain of TCR clone 121355 (TRBV10-2, TRBJ2-2)
CASSASTSRCW

SEQ ID NO: 242711 - protein, 16 aa, Homo sapiens
  CDR3 for alpha chain variable domain of TCR clone 121356 (TRAV12-3, TRAJ53)
CAMSPGSGCSNYKLTF

SEQ ID NO: 242712 - protein, 11 aa, Homo sapiens
  CDR3 for beta chain variable domain of TCR clone 121356 (TRBV29-1, TRBJ2-5)
CSEDRTVTQYF

SEQ ID NO: 242713 - protein, 12 aa, Homo sapiens
  CDR3 for alpha chain variable domain of TCR clone 121357 (TRAV25, TRAJ20)
CAGSSNDYKLSF

SEQ ID NO: 242714 - protein, 14 aa, Homo sapiens
  CDR3 for beta chain variable domain of TCR clone 121357 (TRBV4-3, TRBJ1-4)
CASSPLQRNEKLFF

SEQ ID NO: 242715 - protein, 15 aa, Homo sapiens
  CDR3 for alpha chain variable domain of TCR clone 121358 (TRAV27, TRAJ38)
CAARRNAGNNRTLIW

SEQ ID NO: 242716 - protein, 11 aa, Homo sapiens
  CDR3 for beta chain variable domain of TCR clone 121358 (TRBV12-4, TRBJ2-2)
CASSSAGELFF

SEQ ID NO: 242717 - protein, 12 aa, Homo sapiens
  CDR3 for alpha chain variable domain of TCR clone 121359 (TRAV3, TRAJ27)
CAVRDGAGKSTF

SEQ ID NO: 242718 - protein, 15 aa, Homo sapiens
  CDR3 for beta chain variable domain of TCR clone 121359 (TRBV28, TRBJ2-5)
CASSPPWSYQETQYF

SEQ ID NO: 242719 - protein, 15 aa, Homo sapiens
  CDR3 for alpha chain variable domain of TCR clone 121360 (TRAV26-2, TRAJ57)
CILRDIRGGSEKLVL

SEQ ID NO: 242720 - protein, 15 aa, Homo sapiens
  CDR3 for beta chain variable domain of TCR clone 121360 (TRBV2, TRBJ2-1)
CASDIGLAGEGEQFF

SEQ ID NO: 242721 - protein, 15 aa, Homo sapiens
  CDR3 for alpha chain variable domain of TCR clone 121361 (TRAV21, TRAJ24)
CAARSSTDSWGKLQF

SEQ ID NO: 242722 - protein, 14 aa, Homo sapiens
  CDR3 for beta chain variable domain of TCR clone 121361 (TRBV20-1, TRBJ2-7)
CSAKRGRSSYEQYF

SEQ ID NO: 242723 - protein, 13 aa, Homo sapiens
  CDR3 for alpha chain variable domain of TCR clone 121362 (TRAV20, TRAJ37)
CAACSSNTGKLIF

SEQ ID NO: 242724 - protein, 11 aa, Homo sapiens
  CDR3 for beta chain variable domain of TCR clone 121362 (TRBV12-4, TRBJ2-3)
CASTATDTQYF

SEQ ID NO: 242725 - protein, 12 aa, Homo sapiens
  CDR3 for alpha chain variable domain of TCR clone 121363 (TRAV13-1, TRAJ20)
CAASRGDYKLSF

SEQ ID NO: 242726 - protein, 15 aa, Homo sapiens
  CDR3 for beta chain variable domain of TCR clone 121363 (TRBV20-1, TRBJ2-7)
CSARDRVSGMDEQYF

SEQ ID NO: 242727 - protein, 13 aa, Homo sapiens
  CDR3 for alpha chain variable domain of TCR clone 121364 (TRAV13-1, TRAJ12)
CAASPDSSYRLIF

SEQ ID NO: 242728 - protein, 16 aa, Homo sapiens
  CDR3 for beta chain variable domain of TCR clone 121364 (TRBV15, TRBJ2-1)
CATSRERLAGAYEQFF

SEQ ID NO: 242729 - protein, 18 aa, Homo sapiens
  CDR3 for alpha chain variable domain of TCR clone 121365 (TRAV21, TRAJ52)
CAVRPSPAGGTSYGKLTF

SEQ ID NO: 242730 - protein, 15 aa, Homo sapiens
  CDR3 for beta chain variable domain of TCR clone 121365 (TRBV5-1, TRBJ2-5)
CASSFKGGDQETQYF

SEQ ID NO: 242731 - protein, 15 aa, Homo sapiens
  CDR3 for alpha chain variable domain of TCR clone 121366 (TRAV8-4, TRAJ36)
CAVRKSWTGANNIFF

SEQ ID NO: 242732 - protein, 17 aa, Homo sapiens
  CDR3 for beta chain variable domain of TCR clone 121366 (TRBV3-1, TRBJ2-2)
CASSQDSQGPNTGELFF

SEQ ID NO: 242733 - protein, 14 aa, Homo sapiens
  CDR3 for alpha chain variable domain of TCR clone 121367 (TRAV17, TRAJ16)
CATADFSDGQKLLF

SEQ ID NO: 242734 - protein, 12 aa, Homo sapiens
  CDR3 for beta chain variable domain of TCR clone 121367 (TRBV24-1, TRBJ1-1)
CATLYPDTEAFV

SEQ ID NO: 242735 - protein, 20 aa, Homo sapiens
  CDR3 for alpha chain variable domain of TCR clone 121368 (TRAV1-2, TRAJ10)
CLLPLRCEGVLTGGGNKLTF

SEQ ID NO: 242736 - protein, 12 aa, Homo sapiens
  CDR3 for beta chain variable domain of TCR clone 121368 (TRBV7-8, TRBJ2-7)
CASSLGDREQYF

SEQ ID NO: 242737 - protein, 12 aa, Homo sapiens
  CDR3 for alpha chain variable domain of TCR clone 121369 (TRAV12-3, TRAJ17)
CAMTLTGNKLPF

SEQ ID NO: 242738 - protein, 14 aa, Homo sapiens
  CDR3 for beta chain variable domain of TCR clone 121369 (TRBV18, TRBJ2-7)
CASSPRGGAYEQYF

SEQ ID NO: 242739 - protein, 16 aa, Homo sapiens
  CDR3 for alpha chain variable domain of TCR clone 121370 (TRAV13-1, TRAJ45)
CAARGSRKGGADGLTF

SEQ ID NO: 242740 - protein, 14 aa, Homo sapiens
  CDR3 for beta chain variable domain of TCR clone 121370 (TRBV7-2, TRBJ2-7)
CASSPKTSFYEQYF

SEQ ID NO: 242741 - protein, 15 aa, Homo sapiens
  CDR3 for alpha chain variable domain of TCR clone 121371 (TRAV26-1, TRAJ29)
CIVRVEGSGNTPLVF

SEQ ID NO: 242742 - protein, 14 aa, Homo sapiens
  CDR3 for beta chain variable domain of TCR clone 121371 (TRBV18, TRBJ2-7)
CASSPGVSQETQYF

SEQ ID NO: 242743 - protein, 15 aa, Homo sapiens
  CDR3 for alpha chain variable domain of TCR clone 121372 (TRAV26-1, TRAJ29)
CIVRVEGSGNTPLVF

SEQ ID NO: 242744 - protein, 14 aa, Homo sapiens
  CDR3 for beta chain variable domain of TCR clone 121372 (TRBV18, TRBJ2-1)
CASSPGVSQETQYF

SEQ ID NO: 242745 - protein, 11 aa, Homo sapiens
  CDR3 for alpha chain variable domain of TCR clone 121373 (TRAV12-3, TRAJ27)
CAMANAGKSTF

SEQ ID NO: 242746 - protein, 14 aa, Homo sapiens
  CDR3 for beta chain variable domain of TCR clone 121373 (TRBV4-1, TRBJ2-2)
CAGSQAVNTGELFF

SEQ ID NO: 242747 - protein, 13 aa, Homo sapiens
  CDR3 for alpha chain variable domain of TCR clone 121374 (TRAV8-4, TRAJ30)
CAVSVNRDDKIIF

SEQ ID NO: 242748 - protein, 12 aa, Homo sapiens
  CDR3 for beta chain variable domain of TCR clone 121374 (TRBV11-2, TRBJ2-2)
CASSLGGGELFF

SEQ ID NO: 242749 - protein, 13 aa, Homo sapiens
  CDR3 for alpha chain variable domain of TCR clone 121375 (TRAV16, TRAJ9)
CALSTTGGFKTIF

SEQ ID NO: 242750 - protein, 14 aa, Homo sapiens
  CDR3 for beta chain variable domain of TCR clone 121375 (TRBV5-1, TRBJ2-1)
CASSLEGPVYEQFF

SEQ ID NO: 242751 - protein, 14 aa, Homo sapiens
  CDR3 for alpha chain variable domain of TCR clone 121376 (TRAV35, TRAJ22)
CAGLRPCSARQLTF

SEQ ID NO: 242752 - protein, 14 aa, Homo sapiens
  CDR3 for beta chain variable domain of TCR clone 121376 (TRBV4-1, TRBJ2-7)
CASSPVAGGDEQYF

SEQ ID NO: 242753 - protein, 14 aa, Homo sapiens
  CDR3 for alpha chain variable domain of TCR clone 121377 (TRAV1-1, TRAJ28)
CAAPSGAGSYQLTF

SEQ ID NO: 242754 - protein, 17 aa, Homo sapiens
  CDR3 for beta chain variable domain of TCR clone 121377 (TRBV7-7, TRBJ1-1)
CASIGDRPNLGVTEAFF

SEQ ID NO: 242755 - protein, 11 aa, Homo sapiens
  CDR3 for alpha chain variable domain of TCR clone 121378 (TRAV2, TRAJ13)
CASGGYQKVTF

SEQ ID NO: 242756 - protein, 16 aa, Homo sapiens
  CDR3 for beta chain variable domain of TCR clone 121378 (TRBV6-1, TRBJ2-5)
FASSETLDRGAETQYF

SEQ ID NO: 242757 - protein, 13 aa, Homo sapiens
  CDR3 for alpha chain variable domain of TCR clone 121379 (TRAV13-1, TRAJ21)
CAASIYNFNKFYF

SEQ ID NO: 242758 - protein, 13 aa, Homo sapiens
  CDR3 for beta chain variable domain of TCR clone 121379 (TRBV2, TRBJ1-1)
CASNLLRNTEAFF

SEQ ID NO: 242759 - protein, 14 aa, Homo sapiens
  CDR3 for alpha chain variable domain of TCR clone 121380 (TRAV23/DV6, TRAJ4)
CAANLSGGYNKLIF

SEQ ID NO: 242760 - protein, 14 aa, Homo sapiens
  CDR3 for beta chain variable domain of TCR clone 121380 (TRBV19, TRBJ2-5)
CASSMTGQQETQYF

SEQ ID NO: 242761 - protein, 17 aa, Homo sapiens
  CDR3 for alpha chain variable domain of TCR clone 121381 (TRAV3, TRAJ12)
CAVRDGGRMDSSYKLIF

SEQ ID NO: 242762 - protein, 14 aa, Homo sapiens
  CDR3 for beta chain variable domain of TCR clone 121381 (TRBV5-7, TRBJ1-1)
CASSLAGDWTEAFF

SEQ ID NO: 242763 - protein, 14 aa, Homo sapiens
  CDR3 for alpha chain variable domain of TCR clone 121382 (TRAV26-1, TRAJ48)
CIVRVGFGNEKLTF

SEQ ID NO: 242764 - protein, 13 aa, Homo sapiens
  CDR3 for beta chain variable domain of TCR clone 121382 (TRBV7-9, TRBJ1-2)
CASSLKQNYGYTF

SEQ ID NO: 242765 - protein, 11 aa, Homo sapiens
  CDR3 for alpha chain variable domain of TCR clone 121383 (TRAV12-3, TRAJ49)
GAANTGNQFYF

SEQ ID NO: 242766 - protein, 12 aa, Homo sapiens
  CDR3 for beta chain variable domain of TCR clone 121383 (TRBV6-3, TRBJ2-7)
CASSEPGFEQYF

SEQ ID NO: 242767 - protein, 14 aa, Homo sapiens
  CDR3 for alpha chain variable domain of TCR clone 121384 (TRAV2, TRAJ37)
CAVDFTSNTGKLIF

SEQ ID NO: 242768 - protein, 13 aa, Homo sapiens
  CDR3 for beta chain variable domain of TCR clone 121384 (TRBV11-2, TRBJ1-1)
CASSLGRNTEAFF

SEQ ID NO: 242769 - protein, 14 aa, Homo sapiens
  CDR3 for alpha chain variable domain of TCR clone 121385 (TRAV8-4, TRAJ13)
CAVTLSGGYQKVTF

SEQ ID NO: 242770 - protein, 12 aa, Homo sapiens
  CDR3 for beta chain variable domain of TCR clone 121385 (TRBV9, TRBJ2-1)
CASSVGGTDIFF

SEQ ID NO: 242771 - protein, 14 aa, Homo sapiens
  CDR3 for alpha chain variable domain of TCR clone 121386 (TRAV35, TRAJ50)
CAGHRKTSYDKVIF

SEQ ID NO: 242772 - protein, 12 aa, Homo sapiens
  CDR3 for beta chain variable domain of TCR clone 121386 (TRBV2, TRBJ2-1)
CAYGPPGNEQFF

SEQ ID NO: 242773 - protein, 18 aa, Homo sapiens
  CDR3 for alpha chain variable domain of TCR clone 121387 (TRAV12-2, )
CAVEDIQNPDPAVYQLRD

SEQ ID NO: 242774 - protein, 18 aa, Homo sapiens
  CDR3 for beta chain variable domain of TCR clone 121387 (TRBV11-2, TRBJ2-3)
CASSLGGASRGATNTQYF

SEQ ID NO: 242775 - protein, 12 aa, Homo sapiens
  CDR3 for alpha chain variable domain of TCR clone 121388 (TRAV3, TRAJ20)
CAVRDGDYKLSF

SEQ ID NO: 242776 - protein, 16 aa, Homo sapiens
  CDR3 for beta chain variable domain of TCR clone 121388 (TRBV13, TRBJ2-2)
CASSPRTGEHTGELFF

SEQ ID NO: 242777 - protein, 15 aa, Homo sapiens
  CDR3 for alpha chain variable domain of TCR clone 121389 (TRAV12-3, TRAJ22)
CAMRTISGSARQLTF

SEQ ID NO: 242778 - protein, 15 aa, Homo sapiens
  CDR3 for beta chain variable domain of TCR clone 121389 (TRBV7-2, TRBJ2-5)
CASSFLRGGEETQYF

SEQ ID NO: 242779 - protein, 10 aa, Homo sapiens
  CDR3 for alpha chain variable domain of TCR clone 121390 (TRAV1-2, TRAJ20)
CACNDYKLSF

SEQ ID NO: 242780 - protein, 16 aa, Homo sapiens
  CDR3 for beta chain variable domain of TCR clone 121390 (TRBV20-1, TRBJ2-1)
CSAKDLKQGMNNEQFF

SEQ ID NO: 242781 - protein, 12 aa, Homo sapiens
  CDR3 for alpha chain variable domain of TCR clone 121391 (TRAV12-1, TRAJ40)
CVVYSGTYKYIF

SEQ ID NO: 242782 - protein, 14 aa, Homo sapiens
  CDR3 for beta chain variable domain of TCR clone 121391 (TRBV7-9, TRBJ2-1)
CASSPRDSLYEQFF

SEQ ID NO: 242783 - protein, 14 aa, Homo sapiens
  CDR3 for alpha chain variable domain of TCR clone 121392 (TRAV23/DV6, TRAJ24)
CASSLSDSWGKLQF

SEQ ID NO: 242784 - protein, 16 aa, Homo sapiens
  CDR3 for beta chain variable domain of TCR clone 121392 (TRBV7-9, TRBJ2-6)
CASSLKGPLRANVLTF

SEQ ID NO: 242785 - protein, 17 aa, Homo sapiens
  CDR3 for alpha chain variable domain of TCR clone 121393 (TRAV3, TRAJ42)
CAVRDRDYGGSKGNLIF

SEQ ID NO: 242786 - protein, 15 aa, Homo sapiens
  CDR3 for beta chain variable domain of TCR clone 121393 (TRBV27, TRBJ1-6)
CASSFDRGLGSPLHF

SEQ ID NO: 242787 - protein, 12 aa, Homo sapiens
  CDR3 for alpha chain variable domain of TCR clone 121394 (TRAV3, TRAJ20)
CAVRDPDYKLSF

SEQ ID NO: 242788 - protein, 14 aa, Homo sapiens
  CDR3 for beta chain variable domain of TCR clone 121394 (TRBV4-2, TRBJ2-1)
CASGLDRAYDEQFF

SEQ ID NO: 242789 - protein, 13 aa, Homo sapiens
  CDR3 for alpha chain variable domain of TCR clone 121395 (TRAV20, TRAJ37)
CAGCPSNTGKLIF

SEQ ID NO: 242790 - protein, 21 aa, Homo sapiens
  CDR3 for beta chain variable domain of TCR clone 121395 (TRBV4-2, TRBJ2-3)
PCSQKTRPCISVPAAPDTQYF

SEQ ID NO: 242791 - protein, 14 aa, Homo sapiens
  CDR3 for alpha chain variable domain of TCR clone 121396 (TRAV1-2, TRAJ16)
CAVNRFSDGQKLLF

SEQ ID NO: 242792 - protein, 12 aa, Homo sapiens
  CDR3 for beta chain variable domain of TCR clone 121396 (TRBV5-1, TRBJ2-3)
CASSLAADTQYF

SEQ ID NO: 242793 - protein, 13 aa, Homo sapiens
  CDR3 for alpha chain variable domain of TCR clone 121397 (TRAV1-2, TRAJ9)
CAALNTGGFKTIF

SEQ ID NO: 242794 - protein, 13 aa, Homo sapiens
  CDR3 for beta chain variable domain of TCR clone 121397 (TRBV15, TRBJ1-6)
CATSWGLNSPLHF

SEQ ID NO: 242795 - protein, 14 aa, Homo sapiens
  CDR3 for alpha chain variable domain of TCR clone 121398 (TRAV8-2, TRAJ37)
CVVSTSGNTGKLIF

SEQ ID NO: 242796 - protein, 17 aa, Homo sapiens
  CDR3 for beta chain variable domain of TCR clone 121398 (TRBV7-9, TRBJ2-3)
CASSPTVAGDLTGTQYF

SEQ ID NO: 242797 - protein, 14 aa, Homo sapiens
  CDR3 for alpha chain variable domain of TCR clone 121399 (TRAV8-3, TRAJ9)
CAVVYNTGGFKTIF

SEQ ID NO: 242798 - protein, 16 aa, Homo sapiens
  CDR3 for beta chain variable domain of TCR clone 121399 (TRBV19, TRBJ2-1)
CASSKAGPSSYNEQFF

SEQ ID NO: 242799 - protein, 14 aa, Homo sapiens
  CDR3 for alpha chain variable domain of TCR clone 121400 (TRAV9-2, TRAJ39)
CALYIYNAGNMLTF

SEQ ID NO: 242800 - protein, 13 aa, Homo sapiens
  CDR3 for beta chain variable domain of TCR clone 121400 (TRBV12-4, TRBJ1-2)
CASSSGPNYGYTF

SEQ ID NO: 242801 - protein, 14 aa, Homo sapiens
  CDR3 for alpha chain variable domain of TCR clone 121401 (TRAV30, TRAJ33)
CGTVAPRSSYQLIW

SEQ ID NO: 242802 - protein, 16 aa, Homo sapiens
  CDR3 for beta chain variable domain of TCR clone 121401 (TRBV3-1, TRBJ2-5)
CASSPGQFNGFGTQYF

SEQ ID NO: 242803 - protein, 13 aa, Homo sapiens
  CDR3 for alpha chain variable domain of TCR clone 121402 (TRAV27, TRAJ57)
CRSAQGGSEKLVF

SEQ ID NO: 242804 - protein, 11 aa, Homo sapiens
  CDR3 for beta chain variable domain of TCR clone 121402 (TRBV11-2, TRBJ1-1)
CASSRNTEAFF

SEQ ID NO: 242805 - protein, 15 aa, Homo sapiens
  CDR3 for alpha chain variable domain of TCR clone 121403 (TRAV13-1, TRAJ17)
CAASIERAAGNKLTL

SEQ ID NO: 242806 - protein, 12 aa, Homo sapiens
  CDR3 for beta chain variable domain of TCR clone 121403 (TRBV5-7, TRBJ1-1)
CASSLGRGKAFF

SEQ ID NO: 242807 - protein, 14 aa, Homo sapiens
  CDR3 for alpha chain variable domain of TCR clone 121404 (TRAV8-3, TRAJ36)
CAVGPVTGANNLFF

SEQ ID NO: 242808 - protein, 15 aa, Homo sapiens
  CDR3 for beta chain variable domain of TCR clone 121404 (TRBV4-1, TRBJ2-1)
CASSQDPGNYNEQFF

SEQ ID NO: 242809 - protein, 12 aa, Homo sapiens
  CDR3 for alpha chain variable domain of TCR clone 121405 (TRAV12-3, TRAJ17)
CAMTLTGNKLTF

SEQ ID NO: 242810 - protein, 12 aa, Homo sapiens
  CDR3 for beta chain variable domain of TCR clone 121405 (TRBV12-4, TRBJ1-2)
CASRLQGSGYTF

SEQ ID NO: 242811 - protein, 15 aa, Homo sapiens
  CDR3 for alpha chain variable domain of TCR clone 121406 (TRAV8-4, TRAJ3)
CAVTGENLVQQCFQD

SEQ ID NO: 242812 - protein, 17 aa, Homo sapiens
  CDR3 for beta chain variable domain of TCR clone 121406 (TRBV28, TRBJ2-5)
CASSRQGGLAGAETQYF

SEQ ID NO: 242813 - protein, 16 aa, Homo sapiens
  CDR3 for alpha chain variable domain of TCR clone 121407 (TRAV3, TRAJ6)
CAVRRTPSGGSYIPTF

SEQ ID NO: 242814 - protein, 14 aa, Homo sapiens
  CDR3 for beta chain variable domain of TCR clone 121407 (TRBV3-1, TRBJ1-5)
CANSTGDSNQPQHF

SEQ ID NO: 242815 - protein, 20 aa, Homo sapiens
  CDR3 for alpha chain variable domain of TCR clone 121408 (TRAV4, TRAJ22)
CCVLLPRGDLYSGSARQLTF

SEQ ID NO: 242816 - protein, 14 aa, Homo sapiens
  CDR3 for beta chain variable domain of TCR clone 121408 (TRBV28, TRBJ2-3)
CASSWRGRADTQYF

SEQ ID NO: 242817 - protein, 14 aa, Homo sapiens
  CDR3 for alpha chain variable domain of TCR clone 121409 (TRAV17, TRAJ6)
CATDASGGSYIPTF

SEQ ID NO: 242818 - protein, 19 aa, Homo sapiens
  CDR3 for beta chain variable domain of TCR clone 121409 (TRBV4-3, TRBJ2-7)
CASSQEFIGWQVTPYEQYF

SEQ ID NO: 242819 - protein, 15 aa, Homo sapiens
  CDR3 for alpha chain variable domain of TCR clone 121410 (TRAV12-3, TRAJ6)
CAMSATTGGSYIPTF

SEQ ID NO: 242820 - protein, 16 aa, Homo sapiens
  CDR3 for beta chain variable domain of TCR clone 121410 (TRBV20-1, TRBJ1-2)
WSASMGQGVANYGYTF

SEQ ID NO: 242821 - protein, 16 aa, Homo sapiens
  CDR3 for alpha chain variable domain of TCR clone 121411 (TRAV1-2, TRAJ10)
CAVRGVLTGGGNKLTF

SEQ ID NO: 242822 - protein, 16 aa, Homo sapiens
  CDR3 for beta chain variable domain of TCR clone 121411 (TRBV6-4, TRBJ1-2)
CASSEAVGDPNYGYTF

SEQ ID NO: 242823 - protein, 14 aa, Homo sapiens
  CDR3 for alpha chain variable domain of TCR clone 121412 (TRAV12-2, TRAJ17)
CAVNIKAAGNKLTF

SEQ ID NO: 242824 - protein, 16 aa, Homo sapiens
  CDR3 for beta chain variable domain of TCR clone 121412 (TRBV20-1, TRBJ2-6)
CSASSQRYDGANVLTF

SEQ ID NO: 242825 - protein, 16 aa, Homo sapiens
  CDR3 for alpha chain variable domain of TCR clone 121413 (TRAV3, TRAJ37)
CAVRGKGSGSTGKLIF

SEQ ID NO: 242826 - protein, 15 aa, Homo sapiens
  CDR3 for beta chain variable domain of TCR clone 121413 (TRBV7-3, TRBJ2-2)
CASSETGQGTGELFF

SEQ ID NO: 242827 - protein, 14 aa, Homo sapiens
  CDR3 for alpha chain variable domain of TCR clone 121414 (TRAV17, TRAJ57)
CATDPQGGSEKLVF

SEQ ID NO: 242828 - protein, 16 aa, Homo sapiens
  CDR3 for beta chain variable domain of TCR clone 121414 (TRBV27, TRBJ2-2)
CASSVRGLVRTGELFF

SEQ ID NO: 242829 - protein, 14 aa, Homo sapiens
  CDR3 for alpha chain variable domain of TCR clone 121415 (TRAV12-2, TRAJ13)
CAVKKTGGYQKVTF

SEQ ID NO: 242830 - protein, 13 aa, Homo sapiens
  CDR3 for beta chain variable domain of TCR clone 121415 (TRBV20-1, TRBJ2-5)
CSAREAFQETQYF

SEQ ID NO: 242831 - protein, 17 aa, Homo sapiens
  CDR3 for alpha chain variable domain of TCR clone 121416 (TRAV12-2, TRAJ6)
CAPQGPPRAGGSNIPTF

SEQ ID NO: 242832 - protein, 16 aa, Homo sapiens
  CDR3 for beta chain variable domain of TCR clone 121416 (TRBV19, TRBJ2-2)
CASSTARASNTGELFF

SEQ ID NO: 242833 - protein, 13 aa, Homo sapiens
  CDR3 for alpha chain variable domain of TCR clone 121417 (TRAV20, TRAJ9)
CAVPDAGGFKTIF

SEQ ID NO: 242834 - protein, 15 aa, Homo sapiens
  CDR3 for beta chain variable domain of TCR clone 121417 (TRBV27, TRBJ2-7)
CASSKAGRGGYEQYF

SEQ ID NO: 242835 - protein, 12 aa, Homo sapiens
  CDR3 for alpha chain variable domain of TCR clone 121418 (TRAV12-2, TRAJ31)
CAVNTPDARLMF

SEQ ID NO: 242836 - protein, 17 aa, Homo sapiens
  CDR3 for beta chain variable domain of TCR clone 121418 (TRBV20-1, TRBJ1-6)
CSARGGYTFSYNSPLHC

SEQ ID NO: 242837 - protein, 17 aa, Homo sapiens
  CDR3 for alpha chain variable domain of TCR clone 121419 (TRAV3, TRAJ6)
CAVSDGPRAGGSYIPTF

SEQ ID NO: 242838 - protein, 15 aa, Homo sapiens
  CDR3 for beta chain variable domain of TCR clone 121419 (TRBV20-1, TRBJ1-1)
CSASWDRFLNTEAFF

SEQ ID NO: 242839 - protein, 16 aa, Homo sapiens
  CDR3 for alpha chain variable domain of TCR clone 121420 (TRAV26-1, TRAJ37)
CIVRGDGSGNTGKLIF

SEQ ID NO: 242840 - protein, 13 aa, Homo sapiens
  CDR3 for beta chain variable domain of TCR clone 121420 (TRBV11-2, TRBJ2-5)
CASSSTGEETQYF

SEQ ID NO: 242841 - protein, 16 aa, Homo sapiens
  CDR3 for alpha chain variable domain of TCR clone 121421 (TRAV3, TRAJ10)
CAVRDMRAGGGNKPTF

SEQ ID NO: 242842 - protein, 15 aa, Homo sapiens
  CDR3 for beta chain variable domain of TCR clone 121421 (TRBV20-1, TRBJ2-1)
CSAEGGLLAGDEQFF

SEQ ID NO: 242843 - protein, 14 aa, Homo sapiens
  CDR3 for alpha chain variable domain of TCR clone 121422 (TRAV1-2, TRAJ8)
CAVREDTGFQKLVF

SEQ ID NO: 242844 - protein, 15 aa, Homo sapiens
  CDR3 for beta chain variable domain of TCR clone 121422 (TRBV7-2, TRBJ2-3)
CASSLRGGSTDTQYF

SEQ ID NO: 242845 - protein, 13 aa, Homo sapiens
  CDR3 for alpha chain variable domain of TCR clone 121423 (TRAV12-3, TRAJ35)
CAMAIGFGNVLHC

SEQ ID NO: 242846 - protein, 15 aa, Homo sapiens
  CDR3 for beta chain variable domain of TCR clone 121423 (TRBV20-1, TRBJ2-1)
CSTRGSGTYCNEQFF

SEQ ID NO: 242847 - protein, 16 aa, Homo sapiens
  CDR3 for alpha chain variable domain of TCR clone 121424 (TRAV3, TRAJ3)
CAVRDRAKSSSSKIIF

SEQ ID NO: 242848 - protein, 16 aa, Homo sapiens
  CDR3 for beta chain variable domain of TCR clone 121424 (TRBV20-1, TRBJ2-4)
CSATSLAELAKNIQYF

SEQ ID NO: 242849 - protein, 16 aa, Homo sapiens
  CDR3 for alpha chain variable domain of TCR clone 121425 (TRAV1-2, TRAJ10)
CAVRGVLTGGGNKLTF

SEQ ID NO: 242850 - protein, 17 aa, Homo sapiens
  CDR3 for beta chain variable domain of TCR clone 121425 (TRBV4-2, TRBJ1-1)
CASTQFGGGSGNTEAFF

SEQ ID NO: 242851 - protein, 13 aa, Homo sapiens
  CDR3 for alpha chain variable domain of TCR clone 121426 (TRAV30, TRAJ24)
CGTVTDSWGKLQF

SEQ ID NO: 242852 - protein, 16 aa, Homo sapiens
  CDR3 for beta chain variable domain of TCR clone 121426 (TRBV7-3, TRBJ2-2)
CASSLKRGTLPGELFF

SEQ ID NO: 242853 - protein, 13 aa, Homo sapiens
  CDR3 for alpha chain variable domain of TCR clone 121427 (TRAV8-3, TRAJ44)
CAVVPGTASKLTC

SEQ ID NO: 242854 - protein, 14 aa, Homo sapiens
  CDR3 for beta chain variable domain of TCR clone 121427 (TRBV11-2, TRBJ2-3)
CASSRLARTDTQYF

SEQ ID NO: 242855 - protein, 16 aa, Homo sapiens
  CDR3 for alpha chain variable domain of TCR clone 121428 (TRAV26-1, TRAJ45)
CIVEKYSGGGADGLTF

SEQ ID NO: 242856 - protein, 13 aa, Homo sapiens
  CDR3 for beta chain variable domain of TCR clone 121428 (TRBV20-1, TRBJ1-1)
CSARGGGNTEAFF

SEQ ID NO: 242857 - protein, 13 aa, Homo sapiens
  CDR3 for alpha chain variable domain of TCR clone 121429 (TRAV1-1, TRAJ9)
CAAKNTGGFKTIV

SEQ ID NO: 242858 - protein, 14 aa, Homo sapiens
  CDR3 for beta chain variable domain of TCR clone 121429 (TRBV20-1, TRBJ2-1)
CSAQIGGSANEQFF

SEQ ID NO: 242859 - protein, 13 aa, Homo sapiens
  CDR3 for alpha chain variable domain of TCR clone 121430 (TRAV13-1, TRAJ21)
CAASKGNFNKFYF

SEQ ID NO: 242860 - protein, 16 aa, Homo sapiens
  CDR3 for beta chain variable domain of TCR clone 121430 (TRBV5-4, TRBJ2-3)
CASSWGTIGGTDTQYF

SEQ ID NO: 242861 - protein, 15 aa, Homo sapiens
  CDR3 for alpha chain variable domain of TCR clone 121431 (TRAV12-2, TRAJ43)
CAVDMRFGAGTRLTV

SEQ ID NO: 242862 - protein, 18 aa, Homo sapiens
  CDR3 for beta chain variable domain of TCR clone 121431 (TRBV20-1, TRBJ2-3)
CSASGLAGGPGTTDTQYF

SEQ ID NO: 242863 - protein, 14 aa, Homo sapiens
  CDR3 for alpha chain variable domain of TCR clone 121432 (TRAV8-4, TRAJ17)
YAVSDQAAGNKLTF

SEQ ID NO: 242864 - protein, 15 aa, Homo sapiens
  CDR3 for beta chain variable domain of TCR clone 121432 (TRBV7-2, TRBJ1-2)
CASSLAPDRGLGYTF

SEQ ID NO: 242865 - protein, 17 aa, Homo sapiens
  CDR3 for alpha chain variable domain of TCR clone 121433 (TRAV13-1, TRAJ52)
CAASSGAGGTSYGKLTF

SEQ ID NO: 242866 - protein, 15 aa, Homo sapiens
  CDR3 for beta chain variable domain of TCR clone 121433 (TRBV2, TRBJ2-1)
CASSELAGSFNEQFF

SEQ ID NO: 242867 - protein, 18 aa, Homo sapiens
  CDR3 for alpha chain variable domain of TCR clone 121434 (TRAV13-1, TRAJ52)
CAAKNPNAGGTSYGKLTF

SEQ ID NO: 242868 - protein, 16 aa, Homo sapiens
  CDR3 for beta chain variable domain of TCR clone 121434 (TRBV5-4, TRBJ2-3)
CASQQPGAGGADTQYF

SEQ ID NO: 242869 - protein, 16 aa, Homo sapiens
  CDR3 for alpha chain variable domain of TCR clone 121435 (TRAV25, TRAJ24)
CAQRRGTTDSWGKLQF

SEQ ID NO: 242870 - protein, 14 aa, Homo sapiens
  CDR3 for beta chain variable domain of TCR clone 121435 (TRBV19, TRBJ2-1)
CASPTFVLSGEQFF

SEQ ID NO: 242871 - protein, 14 aa, Homo sapiens
  CDR3 for alpha chain variable domain of TCR clone 121436 (TRAV12-2, TRAJ13)
CAVKKTGGYQKVTF

SEQ ID NO: 242872 - protein, 12 aa, Homo sapiens
  CDR3 for beta chain variable domain of TCR clone 121436 (TRBV12-4, TRBJ1-2)
CASRFIWLHLRF

SEQ ID NO: 242873 - protein, 11 aa, Homo sapiens
  CDR3 for alpha chain variable domain of TCR clone 121437 (TRAV3, TRAJ21)
CAVGNFNKFYF

SEQ ID NO: 242874 - protein, 13 aa, Homo sapiens
  CDR3 for beta chain variable domain of TCR clone 121437 (TRBV2, TRBJ1-1)
CASSVSGYTEAFF

SEQ ID NO: 242875 - protein, 13 aa, Homo sapiens
  CDR3 for alpha chain variable domain of TCR clone 121438 (TRAV8-3, TRAJ36)
CAVGATGANNLFF

SEQ ID NO: 242876 - protein, 13 aa, Homo sapiens
  CDR3 for beta chain variable domain of TCR clone 121438 (TRBV12-4, TRBJ1-2)
CASSLRQGEGYTF

SEQ ID NO: 242877 - protein, 13 aa, Homo sapiens
  CDR3 for alpha chain variable domain of TCR clone 121439 (TRAV9-2, TRAJ53)
CALSGGSNYKLTF

SEQ ID NO: 242878 - protein, 17 aa, Homo sapiens
  CDR3 for beta chain variable domain of TCR clone 121439 (TRBV11-2, TRBJ2-1)
CASRLYPPGVEYNEQFF

SEQ ID NO: 242879 - protein, 12 aa, Homo sapiens
  CDR3 for alpha chain variable domain of TCR clone 121440 (TRAV12-1, TRAJ34)
CVVAGATDKLIF

SEQ ID NO: 242880 - protein, 13 aa, Homo sapiens
  CDR3 for beta chain variable domain of TCR clone 121440 (TRBV7-3, TRBJ1-1)
CASSQDWGAEAFF

SEQ ID NO: 242881 - protein, 16 aa, Homo sapiens
  CDR3 for alpha chain variable domain of TCR clone 121441 (TRAV23/DV6, TRAJ9)
CAASIGGNTGGFKTIF

SEQ ID NO: 242882 - protein, 16 aa, Homo sapiens
  CDR3 for beta chain variable domain of TCR clone 121441 (TRBV7-2, TRBJ2-3)
CASSLVALYSTDTQYF

SEQ ID NO: 242883 - protein, 11 aa, Homo sapiens
  CDR3 for alpha chain variable domain of TCR clone 121442 (TRAV21, TRAJ34)
CAVTNTDKLIF

SEQ ID NO: 242884 - protein, 16 aa, Homo sapiens
  CDR3 for beta chain variable domain of TCR clone 121442 (TRBV18, TRBJ1-1)
CASPPGVGGRGGEAFF

SEQ ID NO: 242885 - protein, 15 aa, Homo sapiens
  CDR3 for alpha chain variable domain of TCR clone 121443 (TRAV26-2, TRAJ28)
CILVESGAVSYQLTF

SEQ ID NO: 242886 - protein, 11 aa, Homo sapiens
  CDR3 for beta chain variable domain of TCR clone 121443 (TRBV25-1, TRBJ2-7)
CASSTSYEQYF

SEQ ID NO: 242887 - protein, 15 aa, Homo sapiens
  CDR3 for alpha chain variable domain of TCR clone 121444 (TRAV12-2, TRAJ50)
CAVNGLETSYDKVIF

SEQ ID NO: 242888 - protein, 16 aa, Homo sapiens
  CDR3 for beta chain variable domain of TCR clone 121444 (TRBV19, TRBJ2-1)
CASSKAGPSSYNEQFL

SEQ ID NO: 242889 - protein, 17 aa, Homo sapiens
  CDR3 for alpha chain variable domain of TCR clone 121445 (TRAV13-1, TRAJ52)
CAASSGAGGTSYGKLTF

SEQ ID NO: 242890 - protein, 15 aa, Homo sapiens
  CDR3 for beta chain variable domain of TCR clone 121445 (TRBV20-1, TRBJ2-7)
CSAESGTSGAYEQYF

SEQ ID NO: 242891 - protein, 14 aa, Homo sapiens
  CDR3 for alpha chain variable domain of TCR clone 121446 (TRAV8-6, TRAJ23)
CAVTVPGQGGKLIF

SEQ ID NO: 242892 - protein, 12 aa, Homo sapiens
  CDR3 for beta chain variable domain of TCR clone 121446 (TRBV27, TRBJ2-2)
CASKLFTGELFF

SEQ ID NO: 242893 - protein, 13 aa, Homo sapiens
  CDR3 for alpha chain variable domain of TCR clone 121447 (TRAV23/DV6, TRAJ58)
CAARLIRGSRLTF

SEQ ID NO: 242894 - protein, 13 aa, Homo sapiens
  CDR3 for beta chain variable domain of TCR clone 121447 (TRBV2, TRBJ1-6)
YADSGSYNSPLHF

SEQ ID NO: 242895 - protein, 13 aa, Homo sapiens
  CDR3 for alpha chain variable domain of TCR clone 121448 (TRAV13-2, TRAJ48)
CAEMDFGNEKLTF

SEQ ID NO: 242896 - protein, 13 aa, Homo sapiens
  CDR3 for beta chain variable domain of TCR clone 121448 (TRBV7-9, TRBJ1-2)
CASSLKQKYGYTF

SEQ ID NO: 242897 - protein, 15 aa, Homo sapiens
  CDR3 for alpha chain variable domain of TCR clone 121449 (TRAV12-3, TRAJ49)
CAMAVTPNTGNQFYF

SEQ ID NO: 242898 - protein, 15 aa, Homo sapiens
  CDR3 for beta chain variable domain of TCR clone 121449 (TRBV2, TRBJ2-1)
CASSEEREGDNEQFF

SEQ ID NO: 242899 - protein, 16 aa, Homo sapiens
  CDR3 for alpha chain variable domain of TCR clone 121450 (TRAV21, TRAJ52)
CAVTNAGGTSYGKLTF

SEQ ID NO: 242900 - protein, 17 aa, Homo sapiens
  CDR3 for beta chain variable domain of TCR clone 121450 (TRBV28, TRBJ2-5)
CASSRQGGLAGAETQYL

SEQ ID NO: 242901 - protein, 12 aa, Homo sapiens
  CDR3 for alpha chain variable domain of TCR clone 121451 (TRAV2, TRAJ34)
CAVERNTDKLIF

SEQ ID NO: 242902 - protein, 13 aa, Homo sapiens
  CDR3 for beta chain variable domain of TCR clone 121451 (TRBV7-6, TRBJ1-2)
CASSLVADYGYTF

SEQ ID NO: 242903 - protein, 15 aa, Homo sapiens
  CDR3 for alpha chain variable domain of TCR clone 121452 (TRAV23/DV6, TRAJ44)
CAASGGTGTASKLTF

SEQ ID NO: 242904 - protein, 16 aa, Homo sapiens
  CDR3 for beta chain variable domain of TCR clone 121452 (TRBV28, TRBJ2-1)
CASSLERGSSYNEQFF

SEQ ID NO: 242905 - protein, 11 aa, Homo sapiens
  CDR3 for alpha chain variable domain of TCR clone 121453 (TRAV12-2, TRAJ49)
CAVHTGNQVYF

SEQ ID NO: 242906 - protein, 15 aa, Homo sapiens
  CDR3 for beta chain variable domain of TCR clone 121453 (TRBV27, TRBJ2-1)
CASSNGGGSSNEQFF

SEQ ID NO: 242907 - protein, 13 aa, Homo sapiens
  CDR3 for alpha chain variable domain of TCR clone 121454 (TRAV17, TRAJ9)
CATAITGGFKTNF

SEQ ID NO: 242908 - protein, 16 aa, Homo sapiens
  CDR3 for beta chain variable domain of TCR clone 121454 (TRBV15, TRBJ2-1)
CATSRNLAGGYNEQFF

SEQ ID NO: 242909 - protein, 14 aa, Homo sapiens
  CDR3 for alpha chain variable domain of TCR clone 121455 (TRAV20, TRAJ36)
CAVQARTGANNLFF

SEQ ID NO: 242910 - protein, 17 aa, Homo sapiens
  CDR3 for beta chain variable domain of TCR clone 121455 (TRBV4-1, TRBJ1-3)
CASSPQRGIRFGNTIYF

SEQ ID NO: 242911 - protein, 13 aa, Homo sapiens
  CDR3 for alpha chain variable domain of TCR clone 121456 (TRAV21, TRAJ20)
CAVGLRVDYKLSF

SEQ ID NO: 242912 - protein, 12 aa, Homo sapiens
  CDR3 for beta chain variable domain of TCR clone 121456 (TRBV27, TRBJ2-5)
RASSPTGETQYF

SEQ ID NO: 242913 - protein, 17 aa, Homo sapiens
  CDR3 for alpha chain variable domain of TCR clone 121457 (TRAV3, TRAJ42)
CAVRDRDYGGSQGNLIF

SEQ ID NO: 242914 - protein, 14 aa, Homo sapiens
  CDR3 for beta chain variable domain of TCR clone 121457 (TRBV7-2, TRBJ1-2)
CASSQTGSTYGYTF

SEQ ID NO: 242915 - protein, 14 aa, Homo sapiens
  CDR3 for alpha chain variable domain of TCR clone 121458 (TRAV20, TRAJ56)
CAVQFGGANSKLTF

SEQ ID NO: 242916 - protein, 16 aa, Homo sapiens
  CDR3 for beta chain variable domain of TCR clone 121458 (TRBV20-1, TRBJ2-7)
CSANEAGAPTSSTSGR

SEQ ID NO: 242917 - protein, 14 aa, Homo sapiens
  CDR3 for alpha chain variable domain of TCR clone 121459 (TRAV27, TRAJ12)
CSGARMDSSYKLIF

SEQ ID NO: 242918 - protein, 18 aa, Homo sapiens
  CDR3 for beta chain variable domain of TCR clone 121459 (TRBV10-3, TRBJ2-7)
CAISESGRPSGGRVEQYF

SEQ ID NO: 242919 - protein, 22 aa, Homo sapiens
  CDR3 for alpha chain variable domain of TCR clone 121460 (TRAV40, )
CLLGDGIPDIQNPDPTVYQLRD

SEQ ID NO: 242920 - protein, 16 aa, Homo sapiens
  CDR3 for beta chain variable domain of TCR clone 121460 (TRBV20-1, TRBJ1-5)
CSAELPGQQTNQPQHF

SEQ ID NO: 242921 - protein, 15 aa, Homo sapiens
  CDR3 for alpha chain variable domain of TCR clone 121461 (TRAV12-3, TRAJ6)
CAMSATTGGSYIPTF

SEQ ID NO: 242922 - protein, 18 aa, Homo sapiens
  CDR3 for beta chain variable domain of TCR clone 121461 (TRBV12-4, TRBJ2-2)
CASSLVAGTRGRTGELFF

SEQ ID NO: 242923 - protein, 14 aa, Homo sapiens
  CDR3 for alpha chain variable domain of TCR clone 121462 (TRAV12-2, TRAJ3)
CAVSLYSSASTIIF

SEQ ID NO: 242924 - protein, 14 aa, Homo sapiens
  CDR3 for beta chain variable domain of TCR clone 121462 (TRBV27, TRBJ2-1)
CAGSIAETYNEQFF

SEQ ID NO: 242925 - protein, 14 aa, Homo sapiens
  CDR3 for alpha chain variable domain of TCR clone 121463 (TRAV9-2, TRAJ39)
CALYIYNAGNMLTF

SEQ ID NO: 242926 - protein, 12 aa, Homo sapiens
  CDR3 for beta chain variable domain of TCR clone 121463 (TRBV24-1, TRBJ1-4)
CATSDPNEKLFF

SEQ ID NO: 242927 - protein, 16 aa, Homo sapiens
  CDR3 for alpha chain variable domain of TCR clone 121464 (TRAV23/DV6, TRAJ9)
CAASIGGNTGGFKTIL

SEQ ID NO: 242928 - protein, 18 aa, Homo sapiens
  CDR3 for beta chain variable domain of TCR clone 121464 (TRBV7-9, TRBJ2-7)
CASSLTTSGSRTWYEQYF

SEQ ID NO: 242929 - protein, 11 aa, Homo sapiens
  CDR3 for alpha chain variable domain of TCR clone 121465 (TRAV12-1, TRAJ34)
CVVNKGRELIF

SEQ ID NO: 242930 - protein, 14 aa, Homo sapiens
  CDR3 for beta chain variable domain of TCR clone 121465 (TRBV6-1, TRBJ1-3)
CASVQGGGGNTIYF

SEQ ID NO: 242931 - protein, 14 aa, Homo sapiens
  CDR3 for alpha chain variable domain of TCR clone 121466 (TRAV26-1, TRAJ34)
CIVRVAYNTDKLIF

SEQ ID NO: 242932 - protein, 15 aa, Homo sapiens
  CDR3 for beta chain variable domain of TCR clone 121466 (TRBV12-4, TRBJ2-1)
CASSLLATGNNEQFF

SEQ ID NO: 242933 - protein, 13 aa, Homo sapiens
  CDR3 for alpha chain variable domain of TCR clone 121467 (TRAV23/DV6, TRAJ58)
CAATGTSGSRLTF

SEQ ID NO: 242934 - protein, 13 aa, Homo sapiens
  CDR3 for beta chain variable domain of TCR clone 121467 (TRBV7-7, TRBJ2-3)
CASSLSRADTQYF

SEQ ID NO: 242935 - protein, 12 aa, Homo sapiens
  CDR3 for alpha chain variable domain of TCR clone 121468 (TRAV13-1, TRAJ53)
AASGGSKYKLTF

SEQ ID NO: 242936 - protein, 15 aa, Homo sapiens
  CDR3 for beta chain variable domain of TCR clone 121468 (TRBV5-1, TRBJ2-1)
CASSPPRAPYNEQFF

SEQ ID NO: 242937 - protein, 17 aa, Homo sapiens
  CDR3 for alpha chain variable domain of TCR clone 121469 (TRAV27, TRAJ26)
CAGAGAPLDNYGQNFVF

SEQ ID NO: 242938 - protein, 15 aa, Homo sapiens
  CDR3 for beta chain variable domain of TCR clone 121469 (TRBV11-2, TRBJ2-5)
CASSPRSGGLETQYF

SEQ ID NO: 242939 - protein, 11 aa, Homo sapiens
  CDR3 for alpha chain variable domain of TCR clone 121470 (TRAV3, TRAJ21)
CAVGNFNKFYF

SEQ ID NO: 242940 - protein, 17 aa, Homo sapiens
  CDR3 for beta chain variable domain of TCR clone 121470 (TRBV24-1, TRBJ2-1)
CAASDVSTSGTYNEQFF

SEQ ID NO: 242941 - protein, 13 aa, Homo sapiens
  CDR3 for alpha chain variable domain of TCR clone 121471 (TRAV27, TRAJ40)
CAGPPSGTYKYIF

SEQ ID NO: 242942 - protein, 14 aa, Homo sapiens
  CDR3 for beta chain variable domain of TCR clone 121471 (TRBV7-3, TRBJ2-2)
CASSSGGYTGELFF

SEQ ID NO: 242943 - protein, 12 aa, Homo sapiens
  CDR3 for alpha chain variable domain of TCR clone 121472 (TRAV12-1, TRAJ40)
CVFYSGTYKFIF

SEQ ID NO: 242944 - protein, 18 aa, Homo sapiens
  CDR3 for beta chain variable domain of TCR clone 121472 (TRBV12-4, TRBJ2-2)
CASSLVAGTRGRTGELFF

SEQ ID NO: 242945 - protein, 10 aa, Homo sapiens
  CDR3 for alpha chain variable domain of TCR clone 121473 (TRAV26-1, TRAJ22)
CIVSLNFFWF

SEQ ID NO: 242946 - protein, 13 aa, Homo sapiens
  CDR3 for beta chain variable domain of TCR clone 121473 (TRBV7-9, TRBJ1-2)
CASSLKQNYGYTF

SEQ ID NO: 242947 - protein, 12 aa, Homo sapiens
  CDR3 for alpha chain variable domain of TCR clone 121474 (TRAV8-3, TRAJ20)
CAVDFNDYKLSF

SEQ ID NO: 242948 - protein, 17 aa, Homo sapiens
  CDR3 for beta chain variable domain of TCR clone 121474 (TRBV4-1, TRBJ2-3)
CASSQDPAGGPLDTQYF

SEQ ID NO: 242949 - protein, 17 aa, Homo sapiens
  CDR3 for alpha chain variable domain of TCR clone 121475 (TRAV2, TRAJ36)
CAVEDRGNWGKQPLLWD

SEQ ID NO: 242950 - protein, 14 aa, Homo sapiens
  CDR3 for beta chain variable domain of TCR clone 121475 (TRBV7-9, TRBJ2-5)
CASSLDAAQETQYF

SEQ ID NO: 242951 - protein, 13 aa, Homo sapiens
  CDR3 for alpha chain variable domain of TCR clone 121476 (TRAV1-2, TRAJ9)
CAALNTGGFKTIF

SEQ ID NO: 242952 - protein, 15 aa, Homo sapiens
  CDR3 for beta chain variable domain of TCR clone 121476 (TRBV28, TRBJ2-1)
CASSPPGLADHEQFF

SEQ ID NO: 242953 - protein, 14 aa, Homo sapiens
  CDR3 for alpha chain variable domain of TCR clone 121477 (TRAV12-1, TRAJ26)
CVVKGSNYGQSFVF

SEQ ID NO: 242954 - protein, 15 aa, Homo sapiens
  CDR3 for beta chain variable domain of TCR clone 121477 (TRBV10-2, TRBJ2-6)
CASSEQGTGANVLTF

SEQ ID NO: 242955 - protein, 15 aa, Homo sapiens
  CDR3 for alpha chain variable domain of TCR clone 121478 (TRAV16, TRAJ16)
CALQGGGSDGQKLLF

SEQ ID NO: 242956 - protein, 15 aa, Homo sapiens
  CDR3 for beta chain variable domain of TCR clone 121478 (TRBV20-1, TRBJ2-7)
CNARDRVSGMDEQYF

SEQ ID NO: 242957 - protein, 13 aa, Homo sapiens
  CDR3 for alpha chain variable domain of TCR clone 121479 (TRAV3, TRAJ20)
CAVRDTPRYKLSF

SEQ ID NO: 242958 - protein, 13 aa, Homo sapiens
  CDR3 for beta chain variable domain of TCR clone 121479 (TRBV10-3, TRBJ2-7)
CASKLAVNYEQYF

SEQ ID NO: 242959 - protein, 16 aa, Homo sapiens
  CDR3 for alpha chain variable domain of TCR clone 121480 (TRAV16, TRAJ52)
CALSAAGGTSYGKLTF

SEQ ID NO: 242960 - protein, 17 aa, Homo sapiens
  CDR3 for beta chain variable domain of TCR clone 121480 (TRBV7-8, TRBJ2-6)
CASSAGTGGAGANVLTF

SEQ ID NO: 242961 - protein, 15 aa, Homo sapiens
  CDR3 for alpha chain variable domain of TCR clone 121481 (TRAV13-1, TRAJ16)
CAARYQMARSCSLQG

SEQ ID NO: 242962 - protein, 13 aa, Homo sapiens
  CDR3 for beta chain variable domain of TCR clone 121481 (TRBV4-1, TRBJ2-1)
CTSSQAGGDEQFF

SEQ ID NO: 242963 - protein, 16 aa, Homo sapiens
  CDR3 for alpha chain variable domain of TCR clone 121482 (TRAV27, TRAJ52)
CAGAPAGGASYGKLTF

SEQ ID NO: 242964 - protein, 12 aa, Homo sapiens
  CDR3 for beta chain variable domain of TCR clone 121482 (TRBV27, TRBJ2-1)
CASRGFYNEQFF

SEQ ID NO: 242965 - protein, 13 aa, Homo sapiens
  CDR3 for alpha chain variable domain of TCR clone 121483 (TRAV16, TRAJ7)
CAPLLGGNNRLAF

SEQ ID NO: 242966 - protein, 15 aa, Homo sapiens
  CDR3 for beta chain variable domain of TCR clone 121483 (TRBV12-4, TRBJ2-5)
CASSPPTGLQETQYF

SEQ ID NO: 242967 - protein, 13 aa, Homo sapiens
  CDR3 for alpha chain variable domain of TCR clone 121484 (TRAV13-1, TRAJ9)
CAARGTGGFKTIF

SEQ ID NO: 242968 - protein, 14 aa, Homo sapiens
  CDR3 for beta chain variable domain of TCR clone 121484 (TRBV15, TRBJ2-3)
CATRSGTSTDTQYF

SEQ ID NO: 242969 - protein, 14 aa, Homo sapiens
  CDR3 for alpha chain variable domain of TCR clone 121485 (TRAV4, TRAJ32)
CLVNYGGATNKLIF

SEQ ID NO: 242970 - protein, 14 aa, Homo sapiens
  CDR3 for beta chain variable domain of TCR clone 121485 (TRBV12-5, TRBJ2-5)
CASGSRTHQETQYF

SEQ ID NO: 242971 - protein, 16 aa, Homo sapiens
  CDR3 for alpha chain variable domain of TCR clone 121486 (TRAV4, TRAJ9)
CLVGDPNRAGGFKTIF

SEQ ID NO: 242972 - protein, 16 aa, Homo sapiens
  CDR3 for beta chain variable domain of TCR clone 121486 (TRBV28, TRBJ1-4)
CASSPPYRGRSEKLFF

SEQ ID NO: 242973 - protein, 15 aa, Homo sapiens
  CDR3 for alpha chain variable domain of TCR clone 121487 (TRAV13-1, TRAJ11)
CAASNRNSGYSTLTF

SEQ ID NO: 242974 - protein, 11 aa, Homo sapiens
  CDR3 for beta chain variable domain of TCR clone 121487 (TRBV20-1, TRBJ2-7)
CSARLSYEQFF

SEQ ID NO: 242975 - protein, 15 aa, Homo sapiens
  CDR3 for alpha chain variable domain of TCR clone 121488 (TRAV4, TRAJ39)
CLVGPNNNAGNMLTF

SEQ ID NO: 242976 - protein, 14 aa, Homo sapiens
  CDR3 for beta chain variable domain of TCR clone 121488 (TRBV5-7, TRBJ2-7)
CASSFKGATGEQYF

SEQ ID NO: 242977 - protein, 12 aa, Homo sapiens
  CDR3 for alpha chain variable domain of TCR clone 121489 (TRAV12-3, TRAJ5)
CAMDTGRRALTF

SEQ ID NO: 242978 - protein, 14 aa, Homo sapiens
  CDR3 for beta chain variable domain of TCR clone 121489 (TRBV25-1, TRBJ1-1)
CASTHLGGNTEAFF

SEQ ID NO: 242979 - protein, 11 aa, Homo sapiens
  CDR3 for alpha chain variable domain of TCR clone 121490 (TRAV21, TRAJ20)
CAVRDDYKLRF

SEQ ID NO: 242980 - protein, 14 aa, Homo sapiens
  CDR3 for beta chain variable domain of TCR clone 121490 (TRBV7-2, TRBJ2-7)
CASSPKTSFYEQYF

SEQ ID NO: 242981 - protein, 12 aa, Homo sapiens
  CDR3 for alpha chain variable domain of TCR clone 121491 (TRAV29/DV5, TRAJ15)
CASNQAGNALIF

SEQ ID NO: 242982 - protein, 15 aa, Homo sapiens
  CDR3 for beta chain variable domain of TCR clone 121491 (TRBV11-2, TRBJ2-2)
CASSSDRVNAGELFF

SEQ ID NO: 242983 - protein, 12 aa, Homo sapiens
  CDR3 for alpha chain variable domain of TCR clone 121492 (TRAV8-1, TRAJ31)
CAVINNNARLMF

SEQ ID NO: 242984 - protein, 16 aa, Homo sapiens
  CDR3 for beta chain variable domain of TCR clone 121492 (TRBV24-1, TRBJ2-3)
CATSDPGTGATDTQYF

SEQ ID NO: 242985 - protein, 14 aa, Homo sapiens
  CDR3 for alpha chain variable domain of TCR clone 121493 (TRAV17, TRAJ35)
CATDRPGFGNVLHC

SEQ ID NO: 242986 - protein, 12 aa, Homo sapiens
  CDR3 for beta chain variable domain of TCR clone 121493 (TRBV7-8, TRBJ2-7)
CASSLGDREQYF

SEQ ID NO: 242987 - protein, 16 aa, Homo sapiens
  CDR3 for alpha chain variable domain of TCR clone 121494 (TRAV1-2, TRAJ10)
CAVRGVLTGGRNKLTF

SEQ ID NO: 242988 - protein, 16 aa, Homo sapiens
  CDR3 for beta chain variable domain of TCR clone 121494 (TRBV12-5, TRBJ2-5)
CASGPRTSGNQETQYF

SEQ ID NO: 242989 - protein, 13 aa, Homo sapiens
  CDR3 for alpha chain variable domain of TCR clone 121495 (TRAV1-2, TRAJ20)
CAVPRSNDYKLSS

SEQ ID NO: 242990 - protein, 14 aa, Homo sapiens
  CDR3 for beta chain variable domain of TCR clone 121495 (TRBV20-1, TRBJ2-7)
CSARYGTTYYEQYF

SEQ ID NO: 242991 - protein, 15 aa, Homo sapiens
  CDR3 for alpha chain variable domain of TCR clone 121496 (TRAV3, TRAJ32)
CAVSSYGGATNKLIF

SEQ ID NO: 242992 - protein, 16 aa, Homo sapiens
  CDR3 for beta chain variable domain of TCR clone 121496 (TRBV7-9, TRBJ1-2)
CASSLGFSSGEDGYTF

SEQ ID NO: 242993 - protein, 13 aa, Homo sapiens
  CDR3 for alpha chain variable domain of TCR clone 121497 (TRAV16, TRAJ5)
CALTNTGRRALTF

SEQ ID NO: 242994 - protein, 15 aa, Homo sapiens
  CDR3 for beta chain variable domain of TCR clone 121497 (TRBV11-2, TRBJ2-4)
CASSSPGTGINIQYF

SEQ ID NO: 242995 - protein, 12 aa, Homo sapiens
  CDR3 for alpha chain variable domain of TCR clone 121498 (TRAV12-3, TRAJ20)
CAMVRGDYKLSF

SEQ ID NO: 242996 - protein, 16 aa, Homo sapiens
  CDR3 for beta chain variable domain of TCR clone 121498 (TRBV13, TRBJ2-2)
CASSPRTGEHTGELFF

SEQ ID NO: 242997 - protein, 11 aa, Homo sapiens
  CDR3 for alpha chain variable domain of TCR clone 121499 (TRAV12-2, TRAJ31)
CAILNNARLMF

SEQ ID NO: 242998 - protein, 13 aa, Homo sapiens
  CDR3 for beta chain variable domain of TCR clone 121499 (TRBV20-1, TRBJ1-1)
CGARLGQGTEAFF

SEQ ID NO: 242999 - protein, 12 aa, Homo sapiens
  CDR3 for alpha chain variable domain of TCR clone 121500 (TRAV13-1, TRAJ11)
CAGPSGYSTLTF

SEQ ID NO: 243000 - protein, 13 aa, Homo sapiens
  CDR3 for beta chain variable domain of TCR clone 121500 (TRBV12-4, TRBJ2-1)
CASSLSSSNEQFF

SEQ ID NO: 243001 - protein, 11 aa, Homo sapiens
  CDR3 for alpha chain variable domain of TCR clone 121501 (TRAV2, TRAJ13)
CASGGYQKVTF

SEQ ID NO: 243002 - protein, 15 aa, Homo sapiens
  CDR3 for beta chain variable domain of TCR clone 121501 (TRBV6-1, TRBJ2-3)
CASSERWDSTDTQYF

SEQ ID NO: 243003 - protein, 14 aa, Homo sapiens
  CDR3 for alpha chain variable domain of TCR clone 121502 (TRAV1-2, TRAJ8)
CAVREDTGFQKLVF

SEQ ID NO: 243004 - protein, 16 aa, Homo sapiens
  CDR3 for beta chain variable domain of TCR clone 121502 (TRBV28, TRBJ2-7)
CASSLFFETGGPEQYF

SEQ ID NO: 243005 - protein, 11 aa, Homo sapiens
  CDR3 for alpha chain variable domain of TCR clone 121503 (TRAV2, TRAJ13)
CASGGYQKVTF

SEQ ID NO: 243006 - protein, 13 aa, Homo sapiens
  CDR3 for beta chain variable domain of TCR clone 121503 (TRBV4-3, TRBJ2-3)
CASSQGYTDTQYF

SEQ ID NO: 243007 - protein, 12 aa, Homo sapiens
  CDR3 for alpha chain variable domain of TCR clone 121504 (TRAV21, TRAJ3)
CCFYSSASKIIF

SEQ ID NO: 243008 - protein, 16 aa, Homo sapiens
  CDR3 for beta chain variable domain of TCR clone 121504 (TRBV19, TRBJ2-1)
CASSKAGPSSYDEQFF

SEQ ID NO: 243009 - protein, 14 aa, Homo sapiens
  CDR3 for alpha chain variable domain of TCR clone 121505 (TRAV4, TRAJ17)
CLVGPQAAGNKLTF

SEQ ID NO: 243010 - protein, 18 aa, Homo sapiens
  CDR3 for beta chain variable domain of TCR clone 121505 (TRBV11-2, TRBJ2-3)
CASSLGGASRGAPNTQYF

SEQ ID NO: 243011 - protein, 16 aa, Homo sapiens
  CDR3 for alpha chain variable domain of TCR clone 121506 (TRAV8-3, TRAJ8)
CAVPRDGNTGFQKLVF

SEQ ID NO: 243012 - protein, 15 aa, Homo sapiens
  CDR3 for beta chain variable domain of TCR clone 121506 (TRBV6-1, TRBJ2-6)
CASSPRPSGANVLTF

SEQ ID NO: 243013 - protein, 12 aa, Homo sapiens
  CDR3 for alpha chain variable domain of TCR clone 121507 (TRAV12-3, TRAJ17)
CAMTLTGNKLTF

SEQ ID NO: 243014 - protein, 16 aa, Homo sapiens
  CDR3 for beta chain variable domain of TCR clone 121507 (TRBV19, TRBJ2-1)
CASSSKGTRSYNEQFF

SEQ ID NO: 243015 - protein, 14 aa, Homo sapiens
  CDR3 for alpha chain variable domain of TCR clone 121508 (TRAV16, TRAJ54)
CALSGVQVAQKLVF

SEQ ID NO: 243016 - protein, 15 aa, Homo sapiens
  CDR3 for beta chain variable domain of TCR clone 121508 (TRBV18, TRBJ2-2)
CASSTSGLHTGELFF

SEQ ID NO: 243017 - protein, 13 aa, Homo sapiens
  CDR3 for alpha chain variable domain of TCR clone 121509 (TRAV27, TRAJ54)
CAEAGQGAQKLVF

SEQ ID NO: 243018 - protein, 15 aa, Homo sapiens
  CDR3 for beta chain variable domain of TCR clone 121509 (TRBV18, TRBJ2-6)
CASSPSYAGANVLTF

SEQ ID NO: 243019 - protein, 14 aa, Homo sapiens
  CDR3 for alpha chain variable domain of TCR clone 121510 (TRAV35, TRAJ33)
CAGTSQDSNYQLIW

SEQ ID NO: 243020 - protein, 15 aa, Homo sapiens
  CDR3 for beta chain variable domain of TCR clone 121510 (TRBV20-1, TRBJ2-7)
CSAESGTSGAYEQYF

SEQ ID NO: 243021 - protein, 13 aa, Homo sapiens
  CDR3 for alpha chain variable domain of TCR clone 121511 (TRAV13-2, TRAJ48)
CAEMDFGNEKLTF

SEQ ID NO: 243022 - protein, 12 aa, Homo sapiens
  CDR3 for beta chain variable domain of TCR clone 121511 (TRBV11-2, TRBJ2-1)
CASSPGNNEQFF

SEQ ID NO: 243023 - protein, 13 aa, Homo sapiens
  CDR3 for alpha chain variable domain of TCR clone 121512 (TRAV2, TRAJ5)
CAVPDTGRRALTF

SEQ ID NO: 243024 - protein, 15 aa, Homo sapiens
  CDR3 for beta chain variable domain of TCR clone 121512 (TRBV4-1, TRBJ1-4)
CASSDTGGTNEKLFF

SEQ ID NO: 243025 - protein, 12 aa, Homo sapiens
  CDR3 for alpha chain variable domain of TCR clone 121513 (TRAV13-2, TRAJ8)
CAPWLGFQKLVF

SEQ ID NO: 243026 - protein, 12 aa, Homo sapiens
  CDR3 for beta chain variable domain of TCR clone 121513 (TRBV6-3, TRBJ2-7)
CASSEPGFEQYF

SEQ ID NO: 243027 - protein, 16 aa, Homo sapiens
  CDR3 for alpha chain variable domain of TCR clone 121514 (TRAV21, TRAJ41)
CAVREFRVCTQLRLRH

SEQ ID NO: 243028 - protein, 15 aa, Homo sapiens
  CDR3 for beta chain variable domain of TCR clone 121514 (TRBV18, TRBJ1-5)
CASSPQARSNQPQHF

SEQ ID NO: 243029 - protein, 16 aa, Homo sapiens
  CDR3 for alpha chain variable domain of TCR clone 121515 (TRAV8-3, TRAJ8)
CAVPRDGNTGFQKLVF

SEQ ID NO: 243030 - protein, 12 aa, Homo sapiens
  CDR3 for beta chain variable domain of TCR clone 121515 (TRBV11-3, TRBJ1-1)
CASSLRDSEAFF

SEQ ID NO: 243031 - protein, 12 aa, Homo sapiens
  CDR3 for alpha chain variable domain of TCR clone 121516 (TRAV12-3, TRAJ3)
CAIDSSASKIIF

SEQ ID NO: 243032 - protein, 12 aa, Homo sapiens
  CDR3 for beta chain variable domain of TCR clone 121516 (TRBV7-9, TRBJ1-1)
CASSLEGTEAFF

SEQ ID NO: 243033 - protein, 17 aa, Homo sapiens
  CDR3 for alpha chain variable domain of TCR clone 121517 (TRAV8-6, TRAJ58)
CAVSSWVGETSGSRLTF

SEQ ID NO: 243034 - protein, 14 aa, Homo sapiens
  CDR3 for beta chain variable domain of TCR clone 121517 (TRBV4-2, TRBJ2-1)
CASDLDRAYNEQFF

SEQ ID NO: 243035 - protein, 16 aa, Homo sapiens
  CDR3 for alpha chain variable domain of TCR clone 121518 (TRAV8-3, TRAJ10)
CAVGPILTGGGNKLTF

SEQ ID NO: 243036 - protein, 18 aa, Homo sapiens
  CDR3 for beta chain variable domain of TCR clone 121518 (TRBV3-1, TRBJ2-7)
CASSRISAGGRSSYEQYF

SEQ ID NO: 243037 - protein, 13 aa, Homo sapiens
  CDR3 for alpha chain variable domain of TCR clone 121519 (TRAV3, TRAJ43)
CAVKARNNNDMRF

SEQ ID NO: 243038 - protein, 16 aa, Homo sapiens
  CDR3 for beta chain variable domain of TCR clone 121519 (TRBV7-9, TRBJ2-3)
CASSFSVAGGIDTQYF

SEQ ID NO: 243039 - protein, 11 aa, Homo sapiens
  CDR3 for alpha chain variable domain of TCR clone 121520 (TRAV2, TRAJ13)
CASGGYQKVTF

SEQ ID NO: 243040 - protein, 16 aa, Homo sapiens
  CDR3 for beta chain variable domain of TCR clone 121520 (TRBV19, TRBJ2-1)
CASSMGGGSAYNEQFF

SEQ ID NO: 243041 - protein, 12 aa, Homo sapiens
  CDR3 for alpha chain variable domain of TCR clone 121521 (TRAV26-2, TRAJ47)
CILVEYGNKLVF

SEQ ID NO: 243042 - protein, 13 aa, Homo sapiens
  CDR3 for beta chain variable domain of TCR clone 121521 (TRBV7-9, TRBJ1-2)
CASSLKQNYGYTF

SEQ ID NO: 243043 - protein, 14 aa, Homo sapiens
  CDR3 for alpha chain variable domain of TCR clone 121522 (TRAV12-2, TRAJ17)
CAALFTAAGNKLTF

SEQ ID NO: 243044 - protein, 16 aa, Homo sapiens
  CDR3 for beta chain variable domain of TCR clone 121522 (TRBV20-1, TRBJ2-2)
CSASASGIPGAGELFF

SEQ ID NO: 243045 - protein, 15 aa, Homo sapiens
  CDR3 for alpha chain variable domain of TCR clone 121523 (TRAV3, TRAJ22)
CAVRDRGGSARQLTF

SEQ ID NO: 243046 - protein, 12 aa, Homo sapiens
  CDR3 for beta chain variable domain of TCR clone 121523 (TRBV12-4, TRBJ1-2)
CASSFIWLHLRF

SEQ ID NO: 243047 - protein, 15 aa, Homo sapiens
  CDR3 for alpha chain variable domain of TCR clone 121524 (TRAV21, TRAJ45)
CAVSYSGGGADVLTF

SEQ ID NO: 243048 - protein, 13 aa, Homo sapiens
  CDR3 for beta chain variable domain of TCR clone 121524 (TRBV20-1, TRBJ2-5)
CSAATELQETQYF

SEQ ID NO: 243049 - protein, 14 aa, Homo sapiens
  CDR3 for alpha chain variable domain of TCR clone 121525 (TRAV1-1, TRAJ35)
CAVRSIGFGNVLHC

SEQ ID NO: 243050 - protein, 11 aa, Homo sapiens
  CDR3 for beta chain variable domain of TCR clone 121525 (TRBV7-8, TRBJ2-7)
CASSLSLEQYF

SEQ ID NO: 243051 - protein, 19 aa, Homo sapiens
  CDR3 for alpha chain variable domain of TCR clone 121526 (TRAV3, TRAJ6)
CAVRDRNPSRSGGSYIPTF

SEQ ID NO: 243052 - protein, 15 aa, Homo sapiens
  CDR3 for beta chain variable domain of TCR clone 121526 (TRBV18, TRBJ2-7)
CASSPTFMDSYEQYL

SEQ ID NO: 243053 - protein, 15 aa, Homo sapiens
  CDR3 for alpha chain variable domain of TCR clone 121527 (TRAV21, TRAJ37)
CAVRPTLSNTGKLIF

SEQ ID NO: 243054 - protein, 16 aa, Homo sapiens
  CDR3 for beta chain variable domain of TCR clone 121527 (TRBV24-1, TRBJ2-3)
CATSDRRQDRTDTQYF

SEQ ID NO: 243055 - protein, 14 aa, Homo sapiens
  CDR3 for alpha chain variable domain of TCR clone 121528 (TRAV12-2, TRAJ13)
CAVKKTGGYQKVTF

SEQ ID NO: 243056 - protein, 13 aa, Homo sapiens
  CDR3 for beta chain variable domain of TCR clone 121528 (TRBV12-4, TRBJ1-2)
CASSFIWLHLRFV

SEQ ID NO: 243057 - protein, 11 aa, Homo sapiens
  CDR3 for alpha chain variable domain of TCR clone 121529 (TRAV1-2, TRAJ20)
CAVANDYKLCF

SEQ ID NO: 243058 - protein, 18 aa, Homo sapiens
  CDR3 for beta chain variable domain of TCR clone 121529 (TRBV20-1, TRBJ2-6)
CSAETTPTHGSGANVLTF

SEQ ID NO: 243059 - protein, 13 aa, Homo sapiens
  CDR3 for alpha chain variable domain of TCR clone 121530 (TRAV17, TRAJ26)
CAPVDNYGQNFVF

SEQ ID NO: 243060 - protein, 16 aa, Homo sapiens
  CDR3 for beta chain variable domain of TCR clone 121530 (TRBV2, TRBJ2-1)
CASSVGGSLSYNEQFF

SEQ ID NO: 243061 - protein, 16 aa, Homo sapiens
  CDR3 for alpha chain variable domain of TCR clone 121531 (TRAV14/DV4, TRAJ54)
CAMREGRIQGAQKLVF

SEQ ID NO: 243062 - protein, 15 aa, Homo sapiens
  CDR3 for beta chain variable domain of TCR clone 121531 (TRBV6-3, TRBJ2-7)
CASSSPGTVFYEQYF

SEQ ID NO: 243063 - protein, 14 aa, Homo sapiens
  CDR3 for alpha chain variable domain of TCR clone 121532 (TRAV8-6, TRAJ5)
CAVSGKAGRRALTF

SEQ ID NO: 243064 - protein, 17 aa, Homo sapiens
  CDR3 for beta chain variable domain of TCR clone 121532 (TRBV4-3, TRBJ2-3)
CASSQDPLAGAVDTQYF

SEQ ID NO: 243065 - protein, 11 aa, Homo sapiens
  CDR3 for alpha chain variable domain of TCR clone 121533 (TRAV2, TRAJ33)
CAVDSNYQLIW

SEQ ID NO: 243066 - protein, 13 aa, Homo sapiens
  CDR3 for beta chain variable domain of TCR clone 121533 (TRBV7-2, TRBJ2-4)
CASSREHANMQYF

SEQ ID NO: 243067 - protein, 15 aa, Homo sapiens
  CDR3 for alpha chain variable domain of TCR clone 121534 (TRAV19, TRAJ23)
CALSEVGNQGGKLIF

SEQ ID NO: 243068 - protein, 14 aa, Homo sapiens
  CDR3 for beta chain variable domain of TCR clone 121534 (TRBV5-1, TRBJ2-7)
CASSRGESLYEQYF

SEQ ID NO: 243069 - protein, 13 aa, Homo sapiens
  CDR3 for alpha chain variable domain of TCR clone 121535 (TRAV26-2, TRAJ43)
CILRAVNNNDMRF

SEQ ID NO: 243070 - protein, 12 aa, Homo sapiens
  CDR3 for beta chain variable domain of TCR clone 121535 (TRBV11-2, TRBJ2-2)
CASSLGGGELFF

SEQ ID NO: 243071 - protein, 13 aa, Homo sapiens
  CDR3 for alpha chain variable domain of TCR clone 121536 (TRAV8-3, TRAJ37)
CAVPSSNTGTLIF

SEQ ID NO: 243072 - protein, 12 aa, Homo sapiens
  CDR3 for beta chain variable domain of TCR clone 121536 (TRBV11-2, TRBJ2-1)
CASSPGNNEQFF

SEQ ID NO: 243073 - protein, 10 aa, Homo sapiens
  CDR3 for alpha chain variable domain of TCR clone 121537 (TRAV38-2/DV8, TRAJ40)
CASGTYTYIF

SEQ ID NO: 243074 - protein, 14 aa, Homo sapiens
  CDR3 for beta chain variable domain of TCR clone 121537 (TRBV7-9, TRBJ2-1)
CASSPRDSLYEQFF

SEQ ID NO: 243075 - protein, 15 aa, Homo sapiens
  CDR3 for alpha chain variable domain of TCR clone 121538 (TRAV38-1, TRAJ37)
CAFIHDSGNTGKLIF

SEQ ID NO: 243076 - protein, 12 aa, Homo sapiens
  CDR3 for beta chain variable domain of TCR clone 121538 (TRBV7-9, TRBJ2-7)
CASSFGSYEQYF

SEQ ID NO: 243077 - protein, 13 aa, Homo sapiens
  CDR3 for alpha chain variable domain of TCR clone 121539 (TRAV17, TRAJ9)
CATDYTGGFKTIF

SEQ ID NO: 243078 - protein, 12 aa, Homo sapiens
  CDR3 for beta chain variable domain of TCR clone 121539 (TRBV19, TRBJ2-7)
VAAGTTYYEQYF

SEQ ID NO: 243079 - protein, 14 aa, Homo sapiens
  CDR3 for alpha chain variable domain of TCR clone 121540 (TRAV12-1, TRAJ39)
CVVNFNNAGNMLTF

SEQ ID NO: 243080 - protein, 15 aa, Homo sapiens
  CDR3 for beta chain variable domain of TCR clone 121540 (TRBV6-3, TRBJ2-7)
CASSSPGTVFYEQYF

SEQ ID NO: 243081 - protein, 14 aa, Homo sapiens
  CDR3 for alpha chain variable domain of TCR clone 121541 (TRAV13-1, TRAJ44)
CAAKATGTASKLTF

SEQ ID NO: 243082 - protein, 14 aa, Homo sapiens
  CDR3 for beta chain variable domain of TCR clone 121541 (TRBV2, TRBJ2-7)
CASSSRVGSYEQYF

SEQ ID NO: 243083 - protein, 12 aa, Homo sapiens
  CDR3 for alpha chain variable domain of TCR clone 121542 (TRAV8-3, TRAJ41)
CAVARSGYALNF

SEQ ID NO: 243084 - protein, 17 aa, Homo sapiens
  CDR3 for beta chain variable domain of TCR clone 121542 (TRBV7-3, TRBJ2-2)
CASSLSGTSGGTGELFF

SEQ ID NO: 243085 - protein, 14 aa, Homo sapiens
  CDR3 for alpha chain variable domain of TCR clone 121543 (TRAV1-2, TRAJ16)
CAVNRFSDGQKLLF

SEQ ID NO: 243086 - protein, 18 aa, Homo sapiens
  CDR3 for beta chain variable domain of TCR clone 121543 (TRBV24-1, TRBJ2-2)
CATSDSGQGTANTGELFF

SEQ ID NO: 243087 - protein, 16 aa, Homo sapiens
  CDR3 for alpha chain variable domain of TCR clone 121544 (TRAV1-2, TRAJ10)
CAVTGVLTGGGNKLTF

SEQ ID NO: 243088 - protein, 12 aa, Homo sapiens
  CDR3 for beta chain variable domain of TCR clone 121544 (TRBV7-8, TRBJ2-7)
CASSLGDREQYF

SEQ ID NO: 243089 - protein, 13 aa, Homo sapiens
  CDR3 for alpha chain variable domain of TCR clone 121545 (TRAV2, TRAJ40)
CAVVPSGTYKYIF

SEQ ID NO: 243090 - protein, 14 aa, Homo sapiens
  CDR3 for beta chain variable domain of TCR clone 121545 (TRBV19, TRBJ2-1)
CASPTFVLGGEQFF

SEQ ID NO: 243091 - protein, 14 aa, Homo sapiens
  CDR3 for alpha chain variable domain of TCR clone 121546 (TRAV1-2, TRAJ16)
CAVNRFSDGQKLLF

SEQ ID NO: 243092 - protein, 13 aa, Homo sapiens
  CDR3 for beta chain variable domain of TCR clone 121546 (TRBV5-7, TRBJ2-5)
CASSLRLQETQYF

SEQ ID NO: 243093 - protein, 14 aa, Homo sapiens
  CDR3 for alpha chain variable domain of TCR clone 121547 (TRAV1-2, TRAJ16)
CAVKEGSDGQKLLF

SEQ ID NO: 243094 - protein, 12 aa, Homo sapiens
  CDR3 for beta chain variable domain of TCR clone 121547 (TRBV20-1, TRBJ1-1)
QCSTWGGTEAFF

SEQ ID NO: 243095 - protein, 14 aa, Homo sapiens
  CDR3 for alpha chain variable domain of TCR clone 121548 (TRAV23/DV6, TRAJ22)
CAAFSSGSARHLTF

SEQ ID NO: 243096 - protein, 14 aa, Homo sapiens
  CDR3 for beta chain variable domain of TCR clone 121548 (TRBV19, TRBJ2-5)
CASSPPGVRETQYF

SEQ ID NO: 243097 - protein, 15 aa, Homo sapiens
  CDR3 for alpha chain variable domain of TCR clone 121549 (TRAV23/DV6, TRAJ18)
CAARYSGSTLGRLYF

SEQ ID NO: 243098 - protein, 13 aa, Homo sapiens
  CDR3 for beta chain variable domain of TCR clone 121549 (TRBV7-2, TRBJ2-7)
CASSSPSGSEQYF

SEQ ID NO: 243099 - protein, 10 aa, Homo sapiens
  CDR3 for alpha chain variable domain of TCR clone 121550 (TRAV3, TRAJ30)
CAVREIEIIF

SEQ ID NO: 243100 - protein, 14 aa, Homo sapiens
  CDR3 for beta chain variable domain of TCR clone 121550 (TRBV7-3, TRBJ1-5)
RASSFSGCNQPQHF

SEQ ID NO: 243101 - protein, 11 aa, Homo sapiens
  CDR3 for alpha chain variable domain of TCR clone 121551 (TRAV3, TRAJ32)
CAVREGMMVVL

SEQ ID NO: 243102 - protein, 13 aa, Homo sapiens
  CDR3 for beta chain variable domain of TCR clone 121551 (TRBV2, TRBJ1-1)
CASSEGGNTEAFF

SEQ ID NO: 243103 - protein, 15 aa, Homo sapiens
  CDR3 for alpha chain variable domain of TCR clone 121552 (TRAV2, TRAJ32)
CCLLEDGGATNKLIF

SEQ ID NO: 243104 - protein, 15 aa, Homo sapiens
  CDR3 for beta chain variable domain of TCR clone 121552 (TRBV7-3, TRBJ2-1)
CASSQRGGALIEQFF

SEQ ID NO: 243105 - protein, 15 aa, Homo sapiens
  CDR3 for alpha chain variable domain of TCR clone 121553 (TRAV26-1, TRAJ38)
CIIRAEGGNNRKLIW

SEQ ID NO: 243106 - protein, 14 aa, Homo sapiens
  CDR3 for beta chain variable domain of TCR clone 121553 (TRBV7-6, TRBJ2-5)
CASSSPSGSETQYF

SEQ ID NO: 243107 - protein, 16 aa, Homo sapiens
  CDR3 for alpha chain variable domain of TCR clone 121554 (TRAV8-3, TRAJ44)
CAVGASNTGTASRLTF

SEQ ID NO: 243108 - protein, 15 aa, Homo sapiens
  CDR3 for beta chain variable domain of TCR clone 121554 (TRBV27, TRBJ1-5)
CASTFNRWSNQPQHF

SEQ ID NO: 243109 - protein, 16 aa, Homo sapiens
  CDR3 for alpha chain variable domain of TCR clone 121555 (TRAV30, TRAJ24)
CGTEIVDADSWGKFQF

SEQ ID NO: 243110 - protein, 14 aa, Homo sapiens
  CDR3 for beta chain variable domain of TCR clone 121555 (TRBV20-1, TRBJ1-1)
CSAHTRIGGTEAFF

SEQ ID NO: 243111 - protein, 14 aa, Homo sapiens
  CDR3 for alpha chain variable domain of TCR clone 121556 (TRAV35, TRAJ13)
CAGSPSGGSQKVTF

SEQ ID NO: 243112 - protein, 13 aa, Homo sapiens
  CDR3 for beta chain variable domain of TCR clone 121556 (TRBV29-1, TRBJ1-1)
CSVGDSRNTEAFF

SEQ ID NO: 243113 - protein, 15 aa, Homo sapiens
  CDR3 for alpha chain variable domain of TCR clone 121557 (TRAV8-4, TRAJ3)
CAVTGDNLVQQCFQD

SEQ ID NO: 243114 - protein, 16 aa, Homo sapiens
  CDR3 for beta chain variable domain of TCR clone 121557 (TRBV4-2, TRBJ1-1)
CASSQAGFGMNTEAFF

SEQ ID NO: 243115 - protein, 13 aa, Homo sapiens
  CDR3 for alpha chain variable domain of TCR clone 121558 (TRAV23/DV6, TRAJ45)
CAASRGGADGLTF

SEQ ID NO: 243116 - protein, 14 aa, Homo sapiens
  CDR3 for beta chain variable domain of TCR clone 121558 (TRBV7-2, TRBJ2-3)
CASSLARGTDTQYF

SEQ ID NO: 243117 - protein, 14 aa, Homo sapiens
  CDR3 for alpha chain variable domain of TCR clone 121559 (TRAV17, TRAJ16)
CATSDFSDGQKLLF

SEQ ID NO: 243118 - protein, 12 aa, Homo sapiens
  CDR3 for beta chain variable domain of TCR clone 121559 (TRBV24-1, TRBJ1-1)
CATLYPDTEAFF

SEQ ID NO: 243119 - protein, 12 aa, Homo sapiens
  CDR3 for alpha chain variable domain of TCR clone 121560 (TRAV13-1, TRAJ9)
CASHTGGFKTIF

SEQ ID NO: 243120 - protein, 13 aa, Homo sapiens
  CDR3 for beta chain variable domain of TCR clone 121560 (TRBV12-4, TRBJ1-2)
CACSSGSKDGYTF

SEQ ID NO: 243121 - protein, 13 aa, Homo sapiens
  CDR3 for alpha chain variable domain of TCR clone 121561 (TRAV8-4, TRAJ10)
CAAFTGGGNKLTF

SEQ ID NO: 243122 - protein, 13 aa, Homo sapiens
  CDR3 for beta chain variable domain of TCR clone 121561 (TRBV7-3, TRBJ1-1)
CASSLTQGTEAFF

SEQ ID NO: 243123 - protein, 16 aa, Homo sapiens
  CDR3 for alpha chain variable domain of TCR clone 121562 (TRAV13-1, TRAJ18)
CAASRMRGSTRGRLYF

SEQ ID NO: 243124 - protein, 16 aa, Homo sapiens
  CDR3 for beta chain variable domain of TCR clone 121562 (TRBV27, TRBJ1-1)
CASSSRGRTGYTEAFF

SEQ ID NO: 243125 - protein, 15 aa, Homo sapiens
  CDR3 for alpha chain variable domain of TCR clone 121563 (TRAV26-1, TRAJ44)
CIVRANTGTASKLTF

SEQ ID NO: 243126 - protein, 15 aa, Homo sapiens
  CDR3 for beta chain variable domain of TCR clone 121563 (TRBV10-3, TRBJ2-3)
CAISLTSGGTDTQYF

SEQ ID NO: 243127 - protein, 14 aa, Homo sapiens
  CDR3 for alpha chain variable domain of TCR clone 121564 (TRAV17, TRAJ54)
CATDANQGAQKLVF

SEQ ID NO: 243128 - protein, 12 aa, Homo sapiens
  CDR3 for beta chain variable domain of TCR clone 121564 (TRBV6-3, TRBJ2-1)
CASSGSYNEQSF

SEQ ID NO: 243129 - protein, 15 aa, Homo sapiens
  CDR3 for alpha chain variable domain of TCR clone 121565 (TRAV29/DV5, TRAJ24)
CAASGATDSWGKFQV

SEQ ID NO: 243130 - protein, 14 aa, Homo sapiens
  CDR3 for beta chain variable domain of TCR clone 121565 (TRBV12-5, TRBJ2-5)
CASGSRTHQETQYF

SEQ ID NO: 243131 - protein, 14 aa, Homo sapiens
  CDR3 for alpha chain variable domain of TCR clone 121566 (TRAV38-1, TRAJ29)
CAFITPSGNTPLVF

SEQ ID NO: 243132 - protein, 16 aa, Homo sapiens
  CDR3 for beta chain variable domain of TCR clone 121566 (TRBV12-5, TRBJ2-5)
CASGPRTSGNQETQYF

SEQ ID NO: 243133 - protein, 13 aa, Homo sapiens
  CDR3 for alpha chain variable domain of TCR clone 121567 (TRAV12-2, TRAJ42)
CAVKRGSQGNLIF

SEQ ID NO: 243134 - protein, 12 aa, Homo sapiens
  CDR3 for beta chain variable domain of TCR clone 121567 (TRBV12-5, TRBJ2-5)
CASGQGVETQYF

SEQ ID NO: 243135 - protein, 14 aa, Homo sapiens
  CDR3 for alpha chain variable domain of TCR clone 121568 (TRAV29/DV5, TRAJ36)
CAARRKTGANNLFF

SEQ ID NO: 243136 - protein, 12 aa, Homo sapiens
  CDR3 for beta chain variable domain of TCR clone 121568 (TRBV11-2, TRBJ2-4)
CASSSASGSEYF

SEQ ID NO: 243137 - protein, 15 aa, Homo sapiens
  CDR3 for alpha chain variable domain of TCR clone 121569 (TRAV3, TRAJ22)
CAVRDRGGSARQLTF

SEQ ID NO: 243138 - protein, 13 aa, Homo sapiens
  CDR3 for beta chain variable domain of TCR clone 121569 (TRBV11-2, TRBJ2-5)
CASSSTGEETQYF

SEQ ID NO: 243139 - protein, 15 aa, Homo sapiens
  CDR3 for alpha chain variable domain of TCR clone 121570 (TRAV3, TRAJ9)
CAVRARNTGGFKTIF

SEQ ID NO: 243140 - protein, 17 aa, Homo sapiens
  CDR3 for beta chain variable domain of TCR clone 121570 (TRBV7-8, TRBJ2-6)
CASSAGTGGAGANVLTF

SEQ ID NO: 243141 - protein, 18 aa, Homo sapiens
  CDR3 for alpha chain variable domain of TCR clone 121571 (TRAV21, TRAJ52)
CAVRPSPAGGTSSGKLTF

SEQ ID NO: 243142 - protein, 15 aa, Homo sapiens
  CDR3 for beta chain variable domain of TCR clone 121571 (TRBV6-6, TRBJ2-7)
CASSCSYGGSYEQYF

SEQ ID NO: 243143 - protein, 13 aa, Homo sapiens
  CDR3 for alpha chain variable domain of TCR clone 121572 (TRAV12-3, TRAJ47)
CAMKKEYGNKLVF

SEQ ID NO: 243144 - protein, 12 aa, Homo sapiens
  CDR3 for beta chain variable domain of TCR clone 121572 (TRBV11-2, TRBJ2-2)
CASSLGGGELFF

SEQ ID NO: 243145 - protein, 17 aa, Homo sapiens
  CDR3 for alpha chain variable domain of TCR clone 121573 (TRAV16, TRAJ58)
CITVLSNGETSGSRLTF

SEQ ID NO: 243146 - protein, 17 aa, Homo sapiens
  CDR3 for beta chain variable domain of TCR clone 121573 (TRBV18, TRBJ2-1)
CASSKGLSGEADNEQFF

SEQ ID NO: 243147 - protein, 13 aa, Homo sapiens
  CDR3 for alpha chain variable domain of TCR clone 121574 (TRAV21, TRAJ27)
CAARPGNAGKSTF

SEQ ID NO: 243148 - protein, 22 aa, Homo sapiens
  CDR3 for beta chain variable domain of TCR clone 121574 (TRBV11-2, TRBJ1-4)
CASSLDITRRGIPRKDNEKLFF

SEQ ID NO: 243149 - protein, 13 aa, Homo sapiens
  CDR3 for alpha chain variable domain of TCR clone 121575 (TRAV36/DV7, TRAJ7)
CAVERYGNNRLAF

SEQ ID NO: 243150 - protein, 17 aa, Homo sapiens
  CDR3 for beta chain variable domain of TCR clone 121575 (TRBV13, TRBJ2-3)
CASSSLGTSGLTDTQYF

SEQ ID NO: 243151 - protein, 11 aa, Homo sapiens
  CDR3 for alpha chain variable domain of TCR clone 121576 (TRAV2, TRAJ13)
CASGGYQKVTF

SEQ ID NO: 243152 - protein, 13 aa, Homo sapiens
  CDR3 for beta chain variable domain of TCR clone 121576 (TRBV7-9, TRBJ1-2)
CASSLKQSYGYTF

SEQ ID NO: 243153 - protein, 15 aa, Homo sapiens
  CDR3 for alpha chain variable domain of TCR clone 121577 (TRAV12-2, TRAJ53)
CAVNGGGGSNYKLTF

SEQ ID NO: 243154 - protein, 13 aa, Homo sapiens
  CDR3 for beta chain variable domain of TCR clone 121577 (TRBV7-2, TRBJ1-2)
CASSLDGIYGYTF

SEQ ID NO: 243155 - protein, 13 aa, Homo sapiens
  CDR3 for alpha chain variable domain of TCR clone 121578 (TRAV12-3, TRAJ13)
FAMSSGGYQKVTF

SEQ ID NO: 243156 - protein, 13 aa, Homo sapiens
  CDR3 for beta chain variable domain of TCR clone 121578 (TRBV20-1, TRBJ1-1)
CSAPPGGHTEAFF

SEQ ID NO: 243157 - protein, 13 aa, Homo sapiens
  CDR3 for alpha chain variable domain of TCR clone 121579 (TRAV12-2, TRAJ50)
CAVIVTSYDKVIS

SEQ ID NO: 243158 - protein, 12 aa, Homo sapiens
  CDR3 for beta chain variable domain of TCR clone 121579 (TRBV20-1, TRBJ1-2)
CSAPGFNYGYTF

SEQ ID NO: 243159 - protein, 12 aa, Homo sapiens
  CDR3 for alpha chain variable domain of TCR clone 121580 (TRAV17, TRAJ31)
CATEQGNARLMF

SEQ ID NO: 243160 - protein, 12 aa, Homo sapiens
  CDR3 for beta chain variable domain of TCR clone 121580 (TRBV27, TRBJ2-7)
CASSGGFYEQYF

SEQ ID NO: 243161 - protein, 17 aa, Homo sapiens
  CDR3 for alpha chain variable domain of TCR clone 121581 (TRAV8-3, TRAJ34)
CAIPGRLIFGTGTRLQV

SEQ ID NO: 243162 - protein, 15 aa, Homo sapiens
  CDR3 for beta chain variable domain of TCR clone 121581 (TRBV5-7, TRBJ2-1)
CASSRRLAGDNEQFF

SEQ ID NO: 243163 - protein, 15 aa, Homo sapiens
  CDR3 for alpha chain variable domain of TCR clone 121582 (TRAV23/DV6, TRAJ10)
CAARGFTGGGNKLTF

SEQ ID NO: 243164 - protein, 17 aa, Homo sapiens
  CDR3 for beta chain variable domain of TCR clone 121582 (TRBV13, TRBJ2-3)
CASSLSRVAGGRNTQYF

SEQ ID NO: 243165 - protein, 14 aa, Homo sapiens
  CDR3 for alpha chain variable domain of TCR clone 121583 (TRAV41, TRAJ57)
CAVLLQGGSEKLVF

SEQ ID NO: 243166 - protein, 12 aa, Homo sapiens
  CDR3 for beta chain variable domain of TCR clone 121583 (TRBV10-3, TRBJ1-1)
CATMDRHPEAFF

SEQ ID NO: 243167 - protein, 13 aa, Homo sapiens
  CDR3 for alpha chain variable domain of TCR clone 121584 (TRAV27, TRAJ45)
CRSSGGGADGLTF

SEQ ID NO: 243168 - protein, 15 aa, Homo sapiens
  CDR3 for beta chain variable domain of TCR clone 121584 (TRBV9, TRBJ2-2)
CASSDVAGASGELFF

SEQ ID NO: 243169 - protein, 14 aa, Homo sapiens
  CDR3 for alpha chain variable domain of TCR clone 121585 (TRAV12-2, TRAJ44)
CAVNKAGTASKLTF

SEQ ID NO: 243170 - protein, 12 aa, Homo sapiens
  CDR3 for beta chain variable domain of TCR clone 121585 (TRBV19, TRBJ1-4)
CASKDWPRELFF

SEQ ID NO: 243171 - protein, 13 aa, Homo sapiens
  CDR3 for alpha chain variable domain of TCR clone 121586 (TRAV27, TRAJ49)
CAPRPYTGNQFYF

SEQ ID NO: 243172 - protein, 16 aa, Homo sapiens
  CDR3 for beta chain variable domain of TCR clone 121586 (TRBV4-1, TRBJ1-2)
CASSQAAGQVLYGYTF

SEQ ID NO: 243173 - protein, 15 aa, Homo sapiens
  CDR3 for alpha chain variable domain of TCR clone 121587 (TRAV8-4, TRAJ37)
CAVSRGSGNTGKLIF

SEQ ID NO: 243174 - protein, 16 aa, Homo sapiens
  CDR3 for beta chain variable domain of TCR clone 121587 (TRBV7-3, TRBJ2-3)
CASSLSGHRPEDTQYF

SEQ ID NO: 243175 - protein, 13 aa, Homo sapiens
  CDR3 for alpha chain variable domain of TCR clone 121588 (TRAV23/DV6, TRAJ58)
CAASEIGGSRLTF

SEQ ID NO: 243176 - protein, 14 aa, Homo sapiens
  CDR3 for beta chain variable domain of TCR clone 121588 (TRBV7-2, TRBJ1-1)
CASSFLTGTTEAFF

SEQ ID NO: 243177 - protein, 13 aa, Homo sapiens
  CDR3 for alpha chain variable domain of TCR clone 121589 (TRAV13-2, TRAJ53)
CAENMGSNYKLTF

SEQ ID NO: 243178 - protein, 16 aa, Homo sapiens
  CDR3 for beta chain variable domain of TCR clone 121589 (TRBV19, TRBJ2-2)
CASRSPGTGATGELFF

SEQ ID NO: 243179 - protein, 18 aa, Homo sapiens
  CDR3 for alpha chain variable domain of TCR clone 121590 (TRAV40, TRAJ42)
SSGSRLLNYGGSQGNIIF

SEQ ID NO: 243180 - protein, 13 aa, Homo sapiens
  CDR3 for beta chain variable domain of TCR clone 121590 (TRBV4-1, TRBJ2-2)
CASSQENTGELFF

SEQ ID NO: 243181 - protein, 22 aa, Homo sapiens
  CDR3 for alpha chain variable domain of TCR clone 121591 (TRAV4, )
CLVGPHNYDIQNPDPAVYQLRE

SEQ ID NO: 243182 - protein, 17 aa, Homo sapiens
  CDR3 for beta chain variable domain of TCR clone 121591 (TRBV24-1, TRBJ2-1)
CATSDVSTSGTYNEQFF

SEQ ID NO: 243183 - protein, 11 aa, Homo sapiens
  CDR3 for alpha chain variable domain of TCR clone 121592 (TRAV3, TRAJ21)
CAAGNFNKFYF

SEQ ID NO: 243184 - protein, 20 aa, Homo sapiens
  CDR3 for beta chain variable domain of TCR clone 121592 (TRBV7-8, TRBJ2-1)
CASSLAHRLAGVRSYNEQFF

SEQ ID NO: 243185 - protein, 14 aa, Homo sapiens
  CDR3 for alpha chain variable domain of TCR clone 121593 (TRAV2, TRAJ9)
CAVEDRSGGLRTIF

SEQ ID NO: 243186 - protein, 17 aa, Homo sapiens
  CDR3 for beta chain variable domain of TCR clone 121593 (TRBV4-1, TRBJ2-7)
CASSRDPLGVRGGEQYF

SEQ ID NO: 243187 - protein, 11 aa, Homo sapiens
  CDR3 for alpha chain variable domain of TCR clone 121594 (TRAV17, TRAJ9)
CATTGGFKTIF

SEQ ID NO: 243188 - protein, 16 aa, Homo sapiens
  CDR3 for beta chain variable domain of TCR clone 121594 (TRBV7-9, TRBJ1-2)
CASSLGFSSGEDGYTF

SEQ ID NO: 243189 - protein, 11 aa, Homo sapiens
  CDR3 for alpha chain variable domain of TCR clone 121595 (TRAV17, TRAJ9)
CATTGGFKTIF

SEQ ID NO: 243190 - protein, 14 aa, Homo sapiens
  CDR3 for beta chain variable domain of TCR clone 121595 (TRBV7-9, TRBJ2-2)
CASSGLADTGEPFF

SEQ ID NO: 243191 - protein, 11 aa, Homo sapiens
  CDR3 for alpha chain variable domain of TCR clone 121596 (TRAV12-3, TRAJ49)
CAANTGNQLYF

SEQ ID NO: 243192 - protein, 12 aa, Homo sapiens
  CDR3 for beta chain variable domain of TCR clone 121596 (TRBV6-3, TRBJ2-7)
CASSEPGFEQYF

SEQ ID NO: 243193 - protein, 15 aa, Homo sapiens
  CDR3 for alpha chain variable domain of TCR clone 121597 (TRAV8-3, TRAJ40)
CAVGPYTSGTYKYIF

SEQ ID NO: 243194 - protein, 18 aa, Homo sapiens
  CDR3 for beta chain variable domain of TCR clone 121597 (TRBV7-2, TRBJ2-7)
CASSLGPGVDRASSTSGR

SEQ ID NO: 243195 - protein, 15 aa, Homo sapiens
  CDR3 for alpha chain variable domain of TCR clone 121598 (TRAV12-1, TRAJ4)
CVVNPFSGGYNKLIF

SEQ ID NO: 243196 - protein, 16 aa, Homo sapiens
  CDR3 for beta chain variable domain of TCR clone 121598 (TRBV5-1, TRBJ1-1)
CASSKTGTEVGTEALF

SEQ ID NO: 243197 - protein, 14 aa, Homo sapiens
  CDR3 for alpha chain variable domain of TCR clone 121599 (TRAV3, TRAJ17)
CAVRDAAAGNKLTF

SEQ ID NO: 243198 - protein, 13 aa, Homo sapiens
  CDR3 for beta chain variable domain of TCR clone 121599 (TRBV2, TRBJ1-1)
CAGSVSGYTEAFF

SEQ ID NO: 243199 - protein, 12 aa, Homo sapiens
  CDR3 for alpha chain variable domain of TCR clone 121600 (TRAV17, TRAJ12)
CATLRSSYKLIF

SEQ ID NO: 243200 - protein, 14 aa, Homo sapiens
  CDR3 for beta chain variable domain of TCR clone 121600 (TRBV19, TRBJ2-1)
CARGARSFRWEQFF

SEQ ID NO: 243201 - protein, 15 aa, Homo sapiens
  CDR3 for alpha chain variable domain of TCR clone 121601 (TRAV8-3, TRAJ45)
CASSYSGGGADGHTF

SEQ ID NO: 243202 - protein, 17 aa, Homo sapiens
  CDR3 for beta chain variable domain of TCR clone 121601 (TRBV7-8, TRBJ1-2)
CASSLRPLQGHLYGYTF

SEQ ID NO: 243203 - protein, 13 aa, Homo sapiens
  CDR3 for alpha chain variable domain of TCR clone 121602 (TRAV13-1, TRAJ10)
CAAAEGGGNKLTF

SEQ ID NO: 243204 - protein, 15 aa, Homo sapiens
  CDR3 for beta chain variable domain of TCR clone 121602 (TRBV7-8, TRBJ2-2)
CASSLDQGCTGELFF

SEQ ID NO: 243205 - protein, 13 aa, Homo sapiens
  CDR3 for alpha chain variable domain of TCR clone 121603 (TRAV16, TRAJ15)
CSKWPQAGTALIF

SEQ ID NO: 243206 - protein, 12 aa, Homo sapiens
  CDR3 for beta chain variable domain of TCR clone 121603 (TRBV18, TRBJ2-5)
CASSPSKETQYF

SEQ ID NO: 243207 - protein, 14 aa, Homo sapiens
  CDR3 for alpha chain variable domain of TCR clone 121604 (TRAV38-2/DV8, TRAJ30)
CAYMDGLGGDKNIF

SEQ ID NO: 243208 - protein, 15 aa, Homo sapiens
  CDR3 for beta chain variable domain of TCR clone 121604 (TRBV7-9, TRBJ2-2)
CASRPADRDTGELFF

SEQ ID NO: 243209 - protein, 14 aa, Homo sapiens
  CDR3 for alpha chain variable domain of TCR clone 121605 (TRAV8-4, TRAJ8)
CTVSVGTGFQKLVF

SEQ ID NO: 243210 - protein, 15 aa, Homo sapiens
  CDR3 for beta chain variable domain of TCR clone 121605 (TRBV2, TRBJ2-3)
CASSGEGTGTDTQYF

SEQ ID NO: 243211 - protein, 15 aa, Homo sapiens
  CDR3 for alpha chain variable domain of TCR clone 121606 (TRAV8-3, TRAJ40)
CAAPSLGSGTCRYIF

SEQ ID NO: 243212 - protein, 12 aa, Homo sapiens
  CDR3 for beta chain variable domain of TCR clone 121606 (TRBV11-2, TRBJ2-2)
CASSLGGGELFF

SEQ ID NO: 243213 - protein, 15 aa, Homo sapiens
  CDR3 for alpha chain variable domain of TCR clone 121607 (TRAV13-1, TRAJ10)
CAAEVVTGGGNKLTF

SEQ ID NO: 243214 - protein, 13 aa, Homo sapiens
  CDR3 for beta chain variable domain of TCR clone 121607 (TRBV28, TRBJ2-5)
CAGVSRGEETRYF

SEQ ID NO: 243215 - protein, 14 aa, Homo sapiens
  CDR3 for alpha chain variable domain of TCR clone 121608 (TRAV13-1, TRAJ12)
CAARRGDSSYKLIF

SEQ ID NO: 243216 - protein, 14 aa, Homo sapiens
  CDR3 for beta chain variable domain of TCR clone 121608 (TRBV7-2, TRBJ2-7)
CASRSQGAAYEQYF

SEQ ID NO: 243217 - protein, 11 aa, Homo sapiens
  CDR3 for alpha chain variable domain of TCR clone 121609 (TRAV13-2, TRAJ20)
CADSNDYKLSF

SEQ ID NO: 243218 - protein, 15 aa, Homo sapiens
  CDR3 for beta chain variable domain of TCR clone 121609 (TRBV4-1, TRBJ1-4)
CASSDTGGTNKKLFF

SEQ ID NO: 243219 - protein, 11 aa, Homo sapiens
  CDR3 for alpha chain variable domain of TCR clone 121610 (TRAV2, TRAJ33)
CAVESNYQLIW

SEQ ID NO: 243220 - protein, 14 aa, Homo sapiens
  CDR3 for beta chain variable domain of TCR clone 121610 (TRBV12-5, TRBJ2-7)
CASGQTGNSYEQYF

SEQ ID NO: 243221 - protein, 13 aa, Homo sapiens
  CDR3 for alpha chain variable domain of TCR clone 121611 (TRAV8-6, TRAJ49)
CAVITNTGNQFYF

SEQ ID NO: 243222 - protein, 17 aa, Homo sapiens
  CDR3 for beta chain variable domain of TCR clone 121611 (TRBV6-1, TRBJ1-2)
CASSGTHSQRGNYGYTF

SEQ ID NO: 243223 - protein, 12 aa, Homo sapiens
  CDR3 for alpha chain variable domain of TCR clone 121612 (TRAV1-1, TRAJ8)
CAGGTGFLKLVF

SEQ ID NO: 243224 - protein, 15 aa, Homo sapiens
  CDR3 for beta chain variable domain of TCR clone 121612 (TRBV7-9, TRBJ1-4)
CASSRTGGFNEKLFF

SEQ ID NO: 243225 - protein, 14 aa, Homo sapiens
  CDR3 for alpha chain variable domain of TCR clone 121613 (TRAV1-2, TRAJ8)
CAVREDTGFQKLVF

SEQ ID NO: 243226 - protein, 16 aa, Homo sapiens
  CDR3 for beta chain variable domain of TCR clone 121613 (TRBV4-3, TRBJ2-2)
CASSHLQGSGTGELFF

SEQ ID NO: 243227 - protein, 16 aa, Homo sapiens
  CDR3 for alpha chain variable domain of TCR clone 121614 (TRAV8-4, TRAJ27)
CAVKEGGFTNAGKSTF

SEQ ID NO: 243228 - protein, 12 aa, Homo sapiens
  CDR3 for beta chain variable domain of TCR clone 121614 (TRBV11-2, TRBJ2-2)
CASSLGGGELFF

SEQ ID NO: 243229 - protein, 14 aa, Homo sapiens
  CDR3 for alpha chain variable domain of TCR clone 121615 (TRAV26-1, TRAJ34)
CIVRVAYNTDKLIF

SEQ ID NO: 243230 - protein, 14 aa, Homo sapiens
  CDR3 for beta chain variable domain of TCR clone 121615 (TRBV27, TRBJ2-1)
CASSATGGYNEQFF

SEQ ID NO: 243231 - protein, 14 aa, Homo sapiens
  CDR3 for alpha chain variable domain of TCR clone 121616 (TRAV14/DV4, TRAJ50)
CAMREFPTDDKVIF

SEQ ID NO: 243232 - protein, 15 aa, Homo sapiens
  CDR3 for beta chain variable domain of TCR clone 121616 (TRBV5-7, TRBJ1-5)
CAGSYGKLWDQPQHF

SEQ ID NO: 243233 - protein, 18 aa, Homo sapiens
  CDR3 for alpha chain variable domain of TCR clone 121617 (TRAV12-3, TRAJ52)
CAMSRTNAGGTSYGKLTF

SEQ ID NO: 243234 - protein, 15 aa, Homo sapiens
  CDR3 for beta chain variable domain of TCR clone 121617 (TRBV7-9, TRBJ1-1)
CASSLLEQGGTEAFF

SEQ ID NO: 243235 - protein, 14 aa, Homo sapiens
  CDR3 for alpha chain variable domain of TCR clone 121618 (TRAV12-1, TRAJ9)
CAVTGYTGGFKTIF

SEQ ID NO: 243236 - protein, 13 aa, Homo sapiens
  CDR3 for beta chain variable domain of TCR clone 121618 (TRBV20-1, TRBJ1-1)
CSARAGGNTEAFF

SEQ ID NO: 243237 - protein, 14 aa, Homo sapiens
  CDR3 for alpha chain variable domain of TCR clone 121619 (TRAV17, TRAJ57)
CATDPQGGAEKLVF

SEQ ID NO: 243238 - protein, 15 aa, Homo sapiens
  CDR3 for beta chain variable domain of TCR clone 121619 (TRBV5-1, TRBJ2-7)
CASSLDLTSSYEQYF

SEQ ID NO: 243239 - protein, 12 aa, Homo sapiens
  CDR3 for alpha chain variable domain of TCR clone 121620 (TRAV3, TRAJ43)
CAVRDPNNDMRF

SEQ ID NO: 243240 - protein, 17 aa, Homo sapiens
  CDR3 for beta chain variable domain of TCR clone 121620 (TRBV7-8, TRBJ2-6)
CASSAGTGGGGANVLTF

SEQ ID NO: 243241 - protein, 12 aa, Homo sapiens
  CDR3 for alpha chain variable domain of TCR clone 121621 (TRAV3, TRAJ20)
CAVRDGDYKLSF

SEQ ID NO: 243242 - protein, 14 aa, Homo sapiens
  CDR3 for beta chain variable domain of TCR clone 121621 (TRBV20-1, TRBJ1-1)
CSAQTRIGGTEAFF

SEQ ID NO: 243243 - protein, 15 aa, Homo sapiens
  CDR3 for alpha chain variable domain of TCR clone 121622 (TRAV3, TRAJ5)
CAVRDLDTGRRALTF

SEQ ID NO: 243244 - protein, 16 aa, Homo sapiens
  CDR3 for beta chain variable domain of TCR clone 121622 (TRBV7-9, TRBJ1-2)
CASSLGFSSGEDGYTF

SEQ ID NO: 243245 - protein, 13 aa, Homo sapiens
  CDR3 for alpha chain variable domain of TCR clone 121623 (TRAV12-2, TRAJ42)
CAVKRGSQGTLIF

SEQ ID NO: 243246 - protein, 16 aa, Homo sapiens
  CDR3 for beta chain variable domain of TCR clone 121623 (TRBV9, TRBJ2-2)
CASSAMGKGNTGELFF

SEQ ID NO: 243247 - protein, 16 aa, Homo sapiens
  CDR3 for alpha chain variable domain of TCR clone 121624 (TRAV12-3, TRAJ18)
CAMRGSRGSTLGRRYF

SEQ ID NO: 243248 - protein, 19 aa, Homo sapiens
  CDR3 for beta chain variable domain of TCR clone 121624 (TRBV6-3, TRBJ2-7)
CASSYRTGLAGGVSGEQYF

SEQ ID NO: 243249 - protein, 11 aa, Homo sapiens
  CDR3 for alpha chain variable domain of TCR clone 121625 (TRAV1-1, TRAJ23)
CAVRQGGKLIF

SEQ ID NO: 243250 - protein, 13 aa, Homo sapiens
  CDR3 for beta chain variable domain of TCR clone 121625 (TRBV7-8, TRBJ2-7)
CASSLTGGREQYF

SEQ ID NO: 243251 - protein, 14 aa, Homo sapiens
  CDR3 for alpha chain variable domain of TCR clone 121626 (TRAV8-3, TRAJ4)
CAVGAAGGYNKLIF

SEQ ID NO: 243252 - protein, 14 aa, Homo sapiens
  CDR3 for beta chain variable domain of TCR clone 121626 (TRBV27, TRBJ1-1)
CASSPQGKRAEAFF

SEQ ID NO: 243253 - protein, 15 aa, Homo sapiens
  CDR3 for alpha chain variable domain of TCR clone 121627 (TRAV16, TRAJ4)
CSKSYVFCGYNKLIF

SEQ ID NO: 243254 - protein, 16 aa, Homo sapiens
  CDR3 for beta chain variable domain of TCR clone 121627 (TRBV24-1, TRBJ2-3)
CATSDPGTGATDTQYF

SEQ ID NO: 243255 - protein, 14 aa, Homo sapiens
  CDR3 for alpha chain variable domain of TCR clone 121628 (TRAV2, TRAJ37)
CAVEDQGNTGKLIF

SEQ ID NO: 243256 - protein, 14 aa, Homo sapiens
  CDR3 for beta chain variable domain of TCR clone 121628 (TRBV18, TRBJ2-1)
CASSTQGRFNEQFF

SEQ ID NO: 243257 - protein, 16 aa, Homo sapiens
  CDR3 for alpha chain variable domain of TCR clone 121629 (TRAV3, TRAJ18)
CAVRDGRGSTLGRLYF

SEQ ID NO: 243258 - protein, 15 aa, Homo sapiens
  CDR3 for beta chain variable domain of TCR clone 121629 (TRBV7-9, TRBJ1-6)
CASSSPGRGNSSLHF

SEQ ID NO: 243259 - protein, 19 aa, Homo sapiens
  CDR3 for alpha chain variable domain of TCR clone 121630 (TRAV1-1, TRAJ30)
CAGSEMTRSSLEKGHDFIF

SEQ ID NO: 243260 - protein, 14 aa, Homo sapiens
  CDR3 for beta chain variable domain of TCR clone 121630 (TRBV19, TRBJ2-1)
CASPTFVLSGEQFF

SEQ ID NO: 243261 - protein, 11 aa, Homo sapiens
  CDR3 for alpha chain variable domain of TCR clone 121631 (TRAV3, TRAJ21)
CAVGNFNKFYF

SEQ ID NO: 243262 - protein, 11 aa, Homo sapiens
  CDR3 for beta chain variable domain of TCR clone 121631 (TRBV19, TRBJ1-1)
CASSIGSEAFL

SEQ ID NO: 243263 - protein, 14 aa, Homo sapiens
  CDR3 for alpha chain variable domain of TCR clone 121632 (TRAV13-1, TRAJ35)
CAASKGGFGNVLHC

SEQ ID NO: 243264 - protein, 16 aa, Homo sapiens
  CDR3 for beta chain variable domain of TCR clone 121632 (TRBV7-3, TRBJ2-1)
CASRSPAGGKYNEQFF

SEQ ID NO: 243265 - protein, 13 aa, Homo sapiens
  CDR3 for alpha chain variable domain of TCR clone 121633 (TRAV12-1, TRAJ26)
CVVRRNYGQNFVF

SEQ ID NO: 243266 - protein, 13 aa, Homo sapiens
  CDR3 for beta chain variable domain of TCR clone 121633 (TRBV4-2, TRBJ2-1)
CQRPDRAYNEQFF

SEQ ID NO: 243267 - protein, 10 aa, Homo sapiens
  CDR3 for alpha chain variable domain of TCR clone 121634 (TRAV1-2, TRAJ34)
CAVNTDKLIF

SEQ ID NO: 243268 - protein, 15 aa, Homo sapiens
  CDR3 for beta chain variable domain of TCR clone 121634 (TRBV19, TRBJ1-2)
CASSVGQVLNYGYTF

SEQ ID NO: 243269 - protein, 18 aa, Homo sapiens
  CDR3 for alpha chain variable domain of TCR clone 121635 (TRAV13-1, TRAJ52)
CAANNPNAGGTSYGKLTF

SEQ ID NO: 243270 - protein, 18 aa, Homo sapiens
  CDR3 for beta chain variable domain of TCR clone 121635 (TRBV4-1, TRBJ1-4)
CASSPRTGGAWTNEKLFF

SEQ ID NO: 243271 - protein, 12 aa, Homo sapiens
  CDR3 for alpha chain variable domain of TCR clone 121636 (TRAV3, TRAJ43)
CAVRDPNNDMRF

SEQ ID NO: 243272 - protein, 13 aa, Homo sapiens
  CDR3 for beta chain variable domain of TCR clone 121636 (TRBV7-9, TRBJ2-3)
CASSPGSTDTQYF

SEQ ID NO: 243273 - protein, 13 aa, Homo sapiens
  CDR3 for alpha chain variable domain of TCR clone 121637 (TRAV12-3, TRAJ7)
CALTPYGNNRLAF

SEQ ID NO: 243274 - protein, 16 aa, Homo sapiens
  CDR3 for beta chain variable domain of TCR clone 121637 (TRBV20-1, TRBJ1-4)
CSARPYGGELNEKLFF

SEQ ID NO: 243275 - protein, 14 aa, Homo sapiens
  CDR3 for alpha chain variable domain of TCR clone 121638 (TRAV12-1, TRAJ17)
CVVNYKAAGNKLNF

SEQ ID NO: 243276 - protein, 13 aa, Homo sapiens
  CDR3 for beta chain variable domain of TCR clone 121638 (TRBV20-1, TRBJ1-1)
CSARGGGNTEAFF

SEQ ID NO: 243277 - protein, 12 aa, Homo sapiens
  CDR3 for alpha chain variable domain of TCR clone 121639 (TRAV25, TRAJ11)
CAGASGSSTLTF

SEQ ID NO: 243278 - protein, 14 aa, Homo sapiens
  CDR3 for beta chain variable domain of TCR clone 121639 (TRBV5-8, TRBJ2-3)
CASSLGQGTDTQYF

SEQ ID NO: 243279 - protein, 11 aa, Homo sapiens
  CDR3 for alpha chain variable domain of TCR clone 121640 (TRAV2, TRAJ33)
CAVESNYQLIW

SEQ ID NO: 243280 - protein, 13 aa, Homo sapiens
  CDR3 for beta chain variable domain of TCR clone 121640 (TRBV4-1, TRBJ2-1)
CASSQAGGDEQFF

SEQ ID NO: 243281 - protein, 23 aa, Homo sapiens
  CDR3 for alpha chain variable domain of TCR clone 121641 (TRAV8-3, )
CAVVTTRIPDIQNPDPAVYQLRD

SEQ ID NO: 243282 - protein, 14 aa, Homo sapiens
  CDR3 for beta chain variable domain of TCR clone 121641 (TRBV11-2, TRBJ2-7)
CASSPSTASYEQYF

SEQ ID NO: 243283 - protein, 16 aa, Homo sapiens
  CDR3 for alpha chain variable domain of TCR clone 121642 (TRAV29/DV5, TRAJ52)
CAASGRRGTSYGKLTF

SEQ ID NO: 243284 - protein, 19 aa, Homo sapiens
  CDR3 for beta chain variable domain of TCR clone 121642 (TRBV7-2, TRBJ2-3)
CASSFLSRNWGGGTDTQYF

SEQ ID NO: 243285 - protein, 16 aa, Homo sapiens
  CDR3 for alpha chain variable domain of TCR clone 121643 (TRAV13-1, TRAJ37)
CAASSLGSSHTGKLIF

SEQ ID NO: 243286 - protein, 12 aa, Homo sapiens
  CDR3 for beta chain variable domain of TCR clone 121643 (TRBV6-1, TRBJ2-5)
CASSEGRETQYF

SEQ ID NO: 243287 - protein, 18 aa, Homo sapiens
  CDR3 for alpha chain variable domain of TCR clone 121644 (TRAV21, TRAJ52)
CAVRPSPAGGTSYGKLTL

SEQ ID NO: 243288 - protein, 15 aa, Homo sapiens
  CDR3 for beta chain variable domain of TCR clone 121644 (TRBV20-1, TRBJ2-7)
CSARDRVSGMDEQYF

SEQ ID NO: 243289 - protein, 17 aa, Homo sapiens
  CDR3 for alpha chain variable domain of TCR clone 121645 (TRAV3, TRAJ6)
CAVRDGPRARGSYIPTF

SEQ ID NO: 243290 - protein, 13 aa, Homo sapiens
  CDR3 for beta chain variable domain of TCR clone 121645 (TRBV4-2, TRBJ1-1)
CASSQAGNTEAFF

SEQ ID NO: 243291 - protein, 18 aa, Homo sapiens
  CDR3 for alpha chain variable domain of TCR clone 121646 (TRAV13-1, TRAJ52)
CAASKRSAGGTSYGKLTF

SEQ ID NO: 243292 - protein, 14 aa, Homo sapiens
  CDR3 for beta chain variable domain of TCR clone 121646 (TRBV7-9, TRBJ2-5)
CASSLVGGEETQYF

SEQ ID NO: 243293 - protein, 12 aa, Homo sapiens
  CDR3 for alpha chain variable domain of TCR clone 121647 (TRAV17, TRAJ39)
CATGAASNMLTF

SEQ ID NO: 243294 - protein, 14 aa, Homo sapiens
  CDR3 for beta chain variable domain of TCR clone 121647 (TRBV7-9, TRBJ1-2)
CASSRQGANYGYTF

SEQ ID NO: 243295 - protein, 14 aa, Homo sapiens
  CDR3 for alpha chain variable domain of TCR clone 121648 (TRAV13-1, TRAJ44)
CAAKATGTASKLTF

SEQ ID NO: 243296 - protein, 13 aa, Homo sapiens
  CDR3 for beta chain variable domain of TCR clone 121648 (TRBV27, TRBJ2-1)
CASSSGSYNEQFF

SEQ ID NO: 243297 - protein, 15 aa, Homo sapiens
  CDR3 for alpha chain variable domain of TCR clone 121649 (TRAV17, TRAJ28)
CATFDSGAGSYQLTF

SEQ ID NO: 243298 - protein, 13 aa, Homo sapiens
  CDR3 for beta chain variable domain of TCR clone 121649 (TRBV5-4, TRBJ2-5)
CASSRQEGETQYF

SEQ ID NO: 243299 - protein, 13 aa, Homo sapiens
  CDR3 for alpha chain variable domain of TCR clone 121650 (TRAV3, TRAJ43)
CAVKARNNNDMRF

SEQ ID NO: 243300 - protein, 16 aa, Homo sapiens
  CDR3 for beta chain variable domain of TCR clone 121650 (TRBV7-9, TRBJ2-3)
CASSFSVAGGTETQYF

SEQ ID NO: 243301 - protein, 14 aa, Homo sapiens
  CDR3 for alpha chain variable domain of TCR clone 121651 (TRAV8-6, TRAJ13)
CAVFSSGGYQQVTF

SEQ ID NO: 243302 - protein, 14 aa, Homo sapiens
  CDR3 for beta chain variable domain of TCR clone 121651 (TRBV7-2, TRBJ1-5)
CASSLTGNNQPQHF

SEQ ID NO: 243303 - protein, 13 aa, Homo sapiens
  CDR3 for alpha chain variable domain of TCR clone 121652 (TRAV9-2, TRAJ12)
CARGEDSSYKLIF

SEQ ID NO: 243304 - protein, 13 aa, Homo sapiens
  CDR3 for beta chain variable domain of TCR clone 121652 (TRBV3-1, TRBJ1-5)
CAIIRRDGQPQHF

SEQ ID NO: 243305 - protein, 18 aa, Homo sapiens
  CDR3 for alpha chain variable domain of TCR clone 121653 (TRAV26-2, TRAJ45)
CILRVDKYSGGGADGLTF

SEQ ID NO: 243306 - protein, 11 aa, Homo sapiens
  CDR3 for beta chain variable domain of TCR clone 121653 (TRBV29-1, TRBJ2-5)
CREDRTGTQYF

SEQ ID NO: 243307 - protein, 14 aa, Homo sapiens
  CDR3 for alpha chain variable domain of TCR clone 121654 (TRAV34, TRAJ44)
CGADGTGTASKLTF

SEQ ID NO: 243308 - protein, 16 aa, Homo sapiens
  CDR3 for beta chain variable domain of TCR clone 121654 (TRBV5-1, TRBJ2-3)
CASSLGLAVYTDTQYF

SEQ ID NO: 243309 - protein, 14 aa, Homo sapiens
  CDR3 for alpha chain variable domain of TCR clone 121655 (TRAV2, TRAJ37)
CAVDFTSNTGKLIF

SEQ ID NO: 243310 - protein, 16 aa, Homo sapiens
  CDR3 for beta chain variable domain of TCR clone 121655 (TRBV27, TRBJ2-7)
CASSSERRDSAYEQCF

SEQ ID NO: 243311 - protein, 14 aa, Homo sapiens
  CDR3 for alpha chain variable domain of TCR clone 121656 (TRAV29/DV5, TRAJ32)
CAASQGGATNKLIF

SEQ ID NO: 243312 - protein, 15 aa, Homo sapiens
  CDR3 for beta chain variable domain of TCR clone 121656 (TRBV27, TRBJ2-1)
CASSNGGGSSNEQFF

SEQ ID NO: 243313 - protein, 14 aa, Homo sapiens
  CDR3 for alpha chain variable domain of TCR clone 121657 (TRAV38-1, TRAJ45)
CASYSGGGADGLTF

SEQ ID NO: 243314 - protein, 20 aa, Homo sapiens
  CDR3 for beta chain variable domain of TCR clone 121657 (TRBV28, TRBJ2-1)
CASTPIGRSPGLAGGNEQFF

SEQ ID NO: 243315 - protein, 13 aa, Homo sapiens
  CDR3 for alpha chain variable domain of TCR clone 121658 (TRAV8-6, TRAJ50)
CAVIKTSYDKGIF

SEQ ID NO: 243316 - protein, 13 aa, Homo sapiens
  CDR3 for beta chain variable domain of TCR clone 121658 (TRBV4-2, TRBJ1-1)
CASSQAGNTEAFF

SEQ ID NO: 243317 - protein, 14 aa, Homo sapiens
  CDR3 for alpha chain variable domain of TCR clone 121659 (TRAV12-2, TRAJ24)
CAVTPADSWGKLQF

SEQ ID NO: 243318 - protein, 15 aa, Homo sapiens
  CDR3 for beta chain variable domain of TCR clone 121659 (TRBV27, TRBJ2-1)
CASSNGGGSSNEQLF

SEQ ID NO: 243319 - protein, 13 aa, Homo sapiens
  CDR3 for alpha chain variable domain of TCR clone 121660 (TRAV17, TRAJ26)
CATVDNYGQNFVF

SEQ ID NO: 243320 - protein, 13 aa, Homo sapiens
  CDR3 for beta chain variable domain of TCR clone 121660 (TRBV14, TRBJ1-1)
CASSQEAGTEAFF

SEQ ID NO: 243321 - protein, 16 aa, Homo sapiens
  CDR3 for alpha chain variable domain of TCR clone 121661 (TRAV26-1, TRAJ36)
CIVRVPDQTGANNLFF

SEQ ID NO: 243322 - protein, 17 aa, Homo sapiens
  CDR3 for beta chain variable domain of TCR clone 121661 (TRBV6-1, TRBJ1-1)
CASSGVGNYKGISGFDK

SEQ ID NO: 243323 - protein, 14 aa, Homo sapiens
  CDR3 for alpha chain variable domain of TCR clone 121662 (TRAV14/DV4, TRAJ49)
CAFNRYLTGNQFYF

SEQ ID NO: 243324 - protein, 14 aa, Homo sapiens
  CDR3 for beta chain variable domain of TCR clone 121662 (TRBV5-1, TRBJ2-5)
CASSLWQIQETQYF

SEQ ID NO: 243325 - protein, 13 aa, Homo sapiens
  CDR3 for alpha chain variable domain of TCR clone 121663 (TRAV17, TRAJ9)
CATASTGGFKTIF

SEQ ID NO: 243326 - protein, 17 aa, Homo sapiens
  CDR3 for beta chain variable domain of TCR clone 121663 (TRBV4-2, TRBJ1-1)
CASTQFGGGSGNTEAFS

SEQ ID NO: 243327 - protein, 14 aa, Homo sapiens
  CDR3 for alpha chain variable domain of TCR clone 121664 (TRAV17, TRAJ34)
CATDRLEGTDKLIF

SEQ ID NO: 243328 - protein, 13 aa, Homo sapiens
  CDR3 for beta chain variable domain of TCR clone 121664 (TRBV11-2, TRBJ2-7)
CASSGTRPYEQYF

SEQ ID NO: 243329 - protein, 11 aa, Homo sapiens
  CDR3 for alpha chain variable domain of TCR clone 121665 (TRAV1-2, TRAJ31)
CAVNNNARLMF

SEQ ID NO: 243330 - protein, 14 aa, Homo sapiens
  CDR3 for beta chain variable domain of TCR clone 121665 (TRBV28, TRBJ2-3)
CASSWRGRADTQYF

SEQ ID NO: 243331 - protein, 15 aa, Homo sapiens
  CDR3 for alpha chain variable domain of TCR clone 121666 (TRAV12-3, TRAJ47)
CAMSALVEYGNKLVF

SEQ ID NO: 243332 - protein, 14 aa, Homo sapiens
  CDR3 for beta chain variable domain of TCR clone 121666 (TRBV4-1, TRBJ2-2)
CASSQAVNTGELFF

SEQ ID NO: 243333 - protein, 12 aa, Homo sapiens
  CDR3 for alpha chain variable domain of TCR clone 121667 (TRAV3, TRAJ20)
CCEKSYDYKLSF

SEQ ID NO: 243334 - protein, 13 aa, Homo sapiens
  CDR3 for beta chain variable domain of TCR clone 121667 (TRBV6-1, TRBJ2-1)
CAGMDPTNNEQFF

SEQ ID NO: 243335 - protein, 15 aa, Homo sapiens
  CDR3 for alpha chain variable domain of TCR clone 121668 (TRAV4, TRAJ39)
CLVGPNNNAGNMLTF

SEQ ID NO: 243336 - protein, 13 aa, Homo sapiens
  CDR3 for beta chain variable domain of TCR clone 121668 (TRBV11-2, TRBJ2-5)
CASSPTGEETQYF

SEQ ID NO: 243337 - protein, 11 aa, Homo sapiens
  CDR3 for alpha chain variable domain of TCR clone 121669 (TRAV12-1, TRAJ8)
CVVTGFQKLVF

SEQ ID NO: 243338 - protein, 15 aa, Homo sapiens
  CDR3 for beta chain variable domain of TCR clone 121669 (TRBV7-2, TRBJ2-3)
CASSLEQGGTDTQYF

SEQ ID NO: 243339 - protein, 14 aa, Homo sapiens
  CDR3 for alpha chain variable domain of TCR clone 121670 (TRAV12-2, TRAJ40)
CAVKIPSGTYKYIF

SEQ ID NO: 243340 - protein, 12 aa, Homo sapiens
  CDR3 for beta chain variable domain of TCR clone 121670 (TRBV2, TRBJ2-7)
CASSRVGYEQYF

SEQ ID NO: 243341 - protein, 13 aa, Homo sapiens
  CDR3 for alpha chain variable domain of TCR clone 121671 (TRAV21, TRAJ57)
CAVTQGGSEKLVF

SEQ ID NO: 243342 - protein, 13 aa, Homo sapiens
  CDR3 for beta chain variable domain of TCR clone 121671 (TRBV19, TRBJ2-1)
CATSRGVYNEQFF

SEQ ID NO: 243343 - protein, 13 aa, Homo sapiens
  CDR3 for alpha chain variable domain of TCR clone 121672 (TRAV13-1, TRAJ4)
CAASIGGYNKLVF

SEQ ID NO: 243344 - protein, 16 aa, Homo sapiens
  CDR3 for beta chain variable domain of TCR clone 121672 (TRBV20-1, TRBJ2-1)
CSAPGLAGSYSDEQFF

SEQ ID NO: 243345 - protein, 12 aa, Homo sapiens
  CDR3 for alpha chain variable domain of TCR clone 121673 (TRAV13-1, TRAJ27)
CAAHTNAGKSTF

SEQ ID NO: 243346 - protein, 14 aa, Homo sapiens
  CDR3 for beta chain variable domain of TCR clone 121673 (TRBV19, TRBJ2-2)
CASSGQGIAGEMFF

SEQ ID NO: 243347 - protein, 12 aa, Homo sapiens
  CDR3 for alpha chain variable domain of TCR clone 121674 (TRAV16, TRAJ10)
CSRTGGGNKLTV

SEQ ID NO: 243348 - protein, 15 aa, Homo sapiens
  CDR3 for beta chain variable domain of TCR clone 121674 (TRBV6-3, TRBJ2-7)
CASSSPGTVFYEQYF

SEQ ID NO: 243349 - protein, 12 aa, Homo sapiens
  CDR3 for alpha chain variable domain of TCR clone 121675 (TRAV21, TRAJ23)
CAVMLQGGKLIF

SEQ ID NO: 243350 - protein, 16 aa, Homo sapiens
  CDR3 for beta chain variable domain of TCR clone 121675 (TRBV6-1, TRBJ2-5)
CASSETLDRGAETQYF

SEQ ID NO: 243351 - protein, 15 aa, Homo sapiens
  CDR3 for alpha chain variable domain of TCR clone 121676 (TRAV26-1, TRAJ48)
CIVRVGDFGNEKLTF

SEQ ID NO: 243352 - protein, 16 aa, Homo sapiens
  CDR3 for beta chain variable domain of TCR clone 121676 (TRBV4-1, TRBJ2-3)
CASGQRAGGLTDTQYF

SEQ ID NO: 243353 - protein, 12 aa, Homo sapiens
  CDR3 for alpha chain variable domain of TCR clone 121677 (TRAV21, TRAJ37)
CAVRGNTGKPIF

SEQ ID NO: 243354 - protein, 15 aa, Homo sapiens
  CDR3 for beta chain variable domain of TCR clone 121677 (TRBV28, TRBJ1-3)
CASSMGWASGNTIYF

SEQ ID NO: 243355 - protein, 13 aa, Homo sapiens
  CDR3 for alpha chain variable domain of TCR clone 121678 (TRAV21, TRAJ15)
CAVRNQAGTALIF

SEQ ID NO: 243356 - protein, 16 aa, Homo sapiens
  CDR3 for beta chain variable domain of TCR clone 121678 (TRBV20-1, TRBJ2-5)
CSPGGTRGGYMETQYF

SEQ ID NO: 243357 - protein, 13 aa, Homo sapiens
  CDR3 for alpha chain variable domain of TCR clone 121679 (TRAV1-2, TRAJ8)
CAVPGPGFQKLVF

SEQ ID NO: 243358 - protein, 13 aa, Homo sapiens
  CDR3 for beta chain variable domain of TCR clone 121679 (TRBV4-2, TRBJ1-1)
CASSQAGNTEAFF

SEQ ID NO: 243359 - protein, 14 aa, Homo sapiens
  CDR3 for alpha chain variable domain of TCR clone 121680 (TRAV20, TRAJ10)
CAVRVEGGGNKLTF

SEQ ID NO: 243360 - protein, 18 aa, Homo sapiens
  CDR3 for beta chain variable domain of TCR clone 121680 (TRBV24-1, TRBJ2-1)
CATSDLMFLGRAVHEQFF

SEQ ID NO: 243361 - protein, 14 aa, Homo sapiens
  CDR3 for alpha chain variable domain of TCR clone 121681 (TRAV8-3, TRAJ3)
CAVVPRSSASKIIF

SEQ ID NO: 243362 - protein, 15 aa, Homo sapiens
  CDR3 for beta chain variable domain of TCR clone 121681 (TRBV20-1, TRBJ2-7)
CSARDRVSGMDEQYF

SEQ ID NO: 243363 - protein, 13 aa, Homo sapiens
  CDR3 for alpha chain variable domain of TCR clone 121682 (TRAV17, TRAJ5)
CGPMDTGRRALTF

SEQ ID NO: 243364 - protein, 14 aa, Homo sapiens
  CDR3 for beta chain variable domain of TCR clone 121682 (TRBV19, TRBJ2-1)
CASPTFVLSGEQFF

SEQ ID NO: 243365 - protein, 11 aa, Homo sapiens
  CDR3 for alpha chain variable domain of TCR clone 121683 (TRAV25, TRAJ21)
CAVGNFNKFYF

SEQ ID NO: 243366 - protein, 16 aa, Homo sapiens
  CDR3 for beta chain variable domain of TCR clone 121683 (TRBV19, TRBJ2-1)
CASSKAGPSSYNEQFF

SEQ ID NO: 243367 - protein, 14 aa, Homo sapiens
  CDR3 for alpha chain variable domain of TCR clone 121684 (TRAV35, TRAJ13)
CAGSPSGGYQKVTF

SEQ ID NO: 243368 - protein, 17 aa, Homo sapiens
  CDR3 for beta chain variable domain of TCR clone 121684 (TRBV7-6, TRBJ2-5)
CASSPGLADPWGETQDF

SEQ ID NO: 243369 - protein, 16 aa, Homo sapiens
  CDR3 for alpha chain variable domain of TCR clone 121685 (TRAV30, TRAJ24)
CGTEIVDADSWGKFQF

SEQ ID NO: 243370 - protein, 16 aa, Homo sapiens
  CDR3 for beta chain variable domain of TCR clone 121685 (TRBV2, TRBJ1-1)
CASSPPNRGMNTEAFF

SEQ ID NO: 243371 - protein, 15 aa, Homo sapiens
  CDR3 for alpha chain variable domain of TCR clone 121686 (TRAV26-1, TRAJ44)
CIVRIGTGTASKLTF

SEQ ID NO: 243372 - protein, 15 aa, Homo sapiens
  CDR3 for beta chain variable domain of TCR clone 121686 (TRBV9, TRBJ1-6)
CASSVAGTGDSPLHF

SEQ ID NO: 243373 - protein, 15 aa, Homo sapiens
  CDR3 for alpha chain variable domain of TCR clone 121687 (TRAV12-1, TRAJ40)
CVVNRDTSGTYKYIF

SEQ ID NO: 243374 - protein, 14 aa, Homo sapiens
  CDR3 for beta chain variable domain of TCR clone 121687 (TRBV19, TRBJ2-1)
CASPTFVLSGEQFF

SEQ ID NO: 243375 - protein, 15 aa, Homo sapiens
  CDR3 for alpha chain variable domain of TCR clone 121688 (TRAV21, TRAJ43)
CAVRPSKAVFDDMRF

SEQ ID NO: 243376 - protein, 17 aa, Homo sapiens
  CDR3 for beta chain variable domain of TCR clone 121688 (TRBV25-1, TRBJ2-7)
CASSDARVVFSSYEQYF

SEQ ID NO: 243377 - protein, 12 aa, Homo sapiens
  CDR3 for alpha chain variable domain of TCR clone 121689 (TRAV2, TRAJ9)
CAVGAGGFKTIF

SEQ ID NO: 243378 - protein, 14 aa, Homo sapiens
  CDR3 for beta chain variable domain of TCR clone 121689 (TRBV7-3, TRBJ2-1)
CASSLAGGTNEQFF

SEQ ID NO: 243379 - protein, 18 aa, Homo sapiens
  CDR3 for alpha chain variable domain of TCR clone 121690 (TRAV21, TRAJ52)
CAVRPSPAGGTSYGKLTF

SEQ ID NO: 243380 - protein, 14 aa, Homo sapiens
  CDR3 for beta chain variable domain of TCR clone 121690 (TRBV23-1, TRBJ2-5)
CASSFLRSQETQYF

SEQ ID NO: 243381 - protein, 16 aa, Homo sapiens
  CDR3 for alpha chain variable domain of TCR clone 121691 (TRAV23/DV6, TRAJ9)
CAASIGGNTGGFKTIF

SEQ ID NO: 243382 - protein, 14 aa, Homo sapiens
  CDR3 for beta chain variable domain of TCR clone 121691 (TRBV9, TRBJ2-7)
CASSLGVGSYEQYF

SEQ ID NO: 243383 - protein, 10 aa, Homo sapiens
  CDR3 for alpha chain variable domain of TCR clone 121692 (TRAV5, TRAJ34)
CAEDTDKLIF

SEQ ID NO: 243384 - protein, 16 aa, Homo sapiens
  CDR3 for beta chain variable domain of TCR clone 121692 (TRBV12-5, TRBJ2-5)
CASGPRTSGNQETQYF

SEQ ID NO: 243385 - protein, 14 aa, Homo sapiens
  CDR3 for alpha chain variable domain of TCR clone 121693 (TRAV29/DV5, TRAJ34)
CAASASRETDKLIF

SEQ ID NO: 243386 - protein, 15 aa, Homo sapiens
  CDR3 for beta chain variable domain of TCR clone 121693 (TRBV7-8, TRBJ2-7)
CASSLEGAGSYEQYF

SEQ ID NO: 243387 - protein, 14 aa, Homo sapiens
  CDR3 for alpha chain variable domain of TCR clone 121694 (TRAV21, TRAJ28)
CAVGSGAGSYQLTF

SEQ ID NO: 243388 - protein, 14 aa, Homo sapiens
  CDR3 for beta chain variable domain of TCR clone 121694 (TRBV18, TRBJ1-4)
CASSPGPNGETLFF

SEQ ID NO: 243389 - protein, 15 aa, Homo sapiens
  CDR3 for alpha chain variable domain of TCR clone 121695 (TRAV12-2, TRAJ43)
CAFDMRFGAGTRLTG

SEQ ID NO: 243390 - protein, 15 aa, Homo sapiens
  CDR3 for beta chain variable domain of TCR clone 121695 (TRBV5-1, TRBJ2-3)
CASSVTSGSTDTQYF

SEQ ID NO: 243391 - protein, 14 aa, Homo sapiens
  CDR3 for alpha chain variable domain of TCR clone 121696 (TRAV13-1, TRAJ35)
CAASTGGFGNVLHC

SEQ ID NO: 243392 - protein, 16 aa, Homo sapiens
  CDR3 for beta chain variable domain of TCR clone 121696 (TRBV2, TRBJ1-4)
CASNLLQGATNEKLFF

SEQ ID NO: 243393 - protein, 14 aa, Homo sapiens
  CDR3 for alpha chain variable domain of TCR clone 121697 (TRAV12-3, TRAJ33)
CAMSVPGSNYQLIW

SEQ ID NO: 243394 - protein, 12 aa, Homo sapiens
  CDR3 for beta chain variable domain of TCR clone 121697 (TRBV7-8, TRBJ2-7)
CASSLGDREQYL

SEQ ID NO: 243395 - protein, 14 aa, Homo sapiens
  CDR3 for alpha chain variable domain of TCR clone 121698 (TRAV12-1, TRAJ17)
CVVNYKAAGNKLTF

SEQ ID NO: 243396 - protein, 14 aa, Homo sapiens
  CDR3 for beta chain variable domain of TCR clone 121698 (TRBV7-3, TRBJ1-1)
CASSLKGGNTEAFF

SEQ ID NO: 243397 - protein, 13 aa, Homo sapiens
  CDR3 for alpha chain variable domain of TCR clone 121699 (TRAV2, TRAJ15)
CAVASQAGTALIF

SEQ ID NO: 243398 - protein, 13 aa, Homo sapiens
  CDR3 for beta chain variable domain of TCR clone 121699 (TRBV4-2, TRBJ1-1)
CASSQAGNTEALF

SEQ ID NO: 243399 - protein, 15 aa, Homo sapiens
  CDR3 for alpha chain variable domain of TCR clone 121700 (TRAV8-4, TRAJ15)
CAVSDPVQAGTALIF

SEQ ID NO: 243400 - protein, 18 aa, Homo sapiens
  CDR3 for beta chain variable domain of TCR clone 121700 (TRBV12-4, TRBJ2-2)
CASSLVAGTRGRTGELFF

SEQ ID NO: 243401 - protein, 14 aa, Homo sapiens
  CDR3 for alpha chain variable domain of TCR clone 121701 (TRAV26-1, TRAJ38)
CIIVGAGNNRKLIW

SEQ ID NO: 243402 - protein, 12 aa, Homo sapiens
  CDR3 for beta chain variable domain of TCR clone 121701 (TRBV5-1, TRBJ2-5)
CASSWDQETQYF

SEQ ID NO: 243403 - protein, 15 aa, Homo sapiens
  CDR3 for alpha chain variable domain of TCR clone 121702 (TRAV23/DV6, TRAJ13)
CAAWPGGGGYQKVTF

SEQ ID NO: 243404 - protein, 15 aa, Homo sapiens
  CDR3 for beta chain variable domain of TCR clone 121702 (TRBV20-1, TRBJ1-1)
CSASRGVTGNAEAFF

SEQ ID NO: 243405 - protein, 14 aa, Homo sapiens
  CDR3 for alpha chain variable domain of TCR clone 121703 (TRAV3, TRAJ6)
CAVRDPWGSYIPTF

SEQ ID NO: 243406 - protein, 13 aa, Homo sapiens
  CDR3 for beta chain variable domain of TCR clone 121703 (TRBV7-3, TRBJ1-1)
CASSQDWGAEAFF

SEQ ID NO: 243407 - protein, 12 aa, Homo sapiens
  CDR3 for alpha chain variable domain of TCR clone 121704 (TRAV21, TRAJ58)
CAAETSGSRLTF

SEQ ID NO: 243408 - protein, 15 aa, Homo sapiens
  CDR3 for beta chain variable domain of TCR clone 121704 (TRBV20-1, TRBJ2-7)
CSARDPVKGGGEQYF

SEQ ID NO: 243409 - protein, 12 aa, Homo sapiens
  CDR3 for alpha chain variable domain of TCR clone 121705 (TRAV3, TRAJ43)
CAVRDPNNDMRF

SEQ ID NO: 243410 - protein, 16 aa, Homo sapiens
  CDR3 for beta chain variable domain of TCR clone 121705 (TRBV4-1, TRBJ2-7)
CASSQEWTSGPLEQYF

SEQ ID NO: 243411 - protein, 13 aa, Homo sapiens
  CDR3 for alpha chain variable domain of TCR clone 121706 (TRAV27, TRAJ45)
CRSSGGGSDGLTF

SEQ ID NO: 243412 - protein, 11 aa, Homo sapiens
  CDR3 for beta chain variable domain of TCR clone 121706 (TRBV19, TRBJ1-1)
CASSIGSEAFF

SEQ ID NO: 243413 - protein, 13 aa, Homo sapiens
  CDR3 for alpha chain variable domain of TCR clone 121707 (TRAV12-1, TRAJ6)
CVVFPGGSYIPTF

SEQ ID NO: 243414 - protein, 16 aa, Homo sapiens
  CDR3 for beta chain variable domain of TCR clone 121707 (TRBV20-1, TRBJ1-3)
CSASPTGAGNTIYLER

SEQ ID NO: 243415 - protein, 15 aa, Homo sapiens
  CDR3 for alpha chain variable domain of TCR clone 121708 (TRAV17, TRAJ57)
CATGPSQGGSEKLVF

SEQ ID NO: 243416 - protein, 13 aa, Homo sapiens
  CDR3 for beta chain variable domain of TCR clone 121708 (TRBV4-2, TRBJ1-1)
CASSQAGNTEAFF

SEQ ID NO: 243417 - protein, 15 aa, Homo sapiens
  CDR3 for alpha chain variable domain of TCR clone 121709 (TRAV2, TRAJ3)
CAVPPGYSSASKIIF

SEQ ID NO: 243418 - protein, 13 aa, Homo sapiens
  CDR3 for beta chain variable domain of TCR clone 121709 (TRBV7-9, TRBJ1-2)
CASSLKQNYGYTF

SEQ ID NO: 243419 - protein, 14 aa, Homo sapiens
  CDR3 for alpha chain variable domain of TCR clone 121710 (TRAV6, TRAJ6)
CALPASGGSYIPTF

SEQ ID NO: 243420 - protein, 15 aa, Homo sapiens
  CDR3 for beta chain variable domain of TCR clone 121710 (TRBV27, TRBJ1-6)
CASSFDRGLGSPLHF

SEQ ID NO: 243421 - protein, 15 aa, Homo sapiens
  CDR3 for alpha chain variable domain of TCR clone 121711 (TRAV29/DV5, TRAJ44)
CAASAGTGTASKLTF

SEQ ID NO: 243422 - protein, 15 aa, Homo sapiens
  CDR3 for beta chain variable domain of TCR clone 121711 (TRBV7-9, TRBJ1-6)
CASSSPGRGNSPLHF

SEQ ID NO: 243423 - protein, 13 aa, Homo sapiens
  CDR3 for alpha chain variable domain of TCR clone 121712 (TRAV17, TRAJ5)
CAPMDTGRRALTF

SEQ ID NO: 243424 - protein, 16 aa, Homo sapiens
  CDR3 for beta chain variable domain of TCR clone 121712 (TRBV27, TRBJ2-7)
CASSSERRDSAYEQYF

SEQ ID NO: 243425 - protein, 14 aa, Homo sapiens
  CDR3 for alpha chain variable domain of TCR clone 121713 (TRAV20, TRAJ4)
CAVRLGGGYNKLIF

SEQ ID NO: 243426 - protein, 21 aa, Homo sapiens
  CDR3 for beta chain variable domain of TCR clone 121713 (TRBV15, TRBJ2-1)
AWGTQPCTCVPPSEVDTARFF

SEQ ID NO: 243427 - protein, 11 aa, Homo sapiens
  CDR3 for alpha chain variable domain of TCR clone 121714 (TRAV12-3, TRAJ27)
CAMANAGKSTF

SEQ ID NO: 243428 - protein, 14 aa, Homo sapiens
  CDR3 for beta chain variable domain of TCR clone 121714 (TRBV12-5, TRBJ2-5)
CASGSRTHQETQYF

SEQ ID NO: 243429 - protein, 14 aa, Homo sapiens
  CDR3 for alpha chain variable domain of TCR clone 121715 (TRAV2, TRAJ16)
CAVERGSDGRKLLF

SEQ ID NO: 243430 - protein, 12 aa, Homo sapiens
  CDR3 for beta chain variable domain of TCR clone 121715 (TRBV6-5, TRBJ2-7)
CASYIYGYEQYF

SEQ ID NO: 243431 - protein, 11 aa, Homo sapiens
  CDR3 for alpha chain variable domain of TCR clone 121716 (TRAV21, TRAJ34)
CAHYNTDKLIF

SEQ ID NO: 243432 - protein, 13 aa, Homo sapiens
  CDR3 for beta chain variable domain of TCR clone 121716 (TRBV7-6, TRBJ1-2)
CASSLMADYGYTF

SEQ ID NO: 243433 - protein, 17 aa, Homo sapiens
  CDR3 for alpha chain variable domain of TCR clone 121717 (TRAV26-2, TRAJ28)
FILRPLLIVAGSYQLTF

SEQ ID NO: 243434 - protein, 16 aa, Homo sapiens
  CDR3 for beta chain variable domain of TCR clone 121717 (TRBV6-4, TRBJ1-4)
CASSETGQDPNEKLFF

SEQ ID NO: 243435 - protein, 12 aa, Homo sapiens
  CDR3 for alpha chain variable domain of TCR clone 121718 (TRAV27, TRAJ21)
CAGVRQLQQTLL

SEQ ID NO: 243436 - protein, 14 aa, Homo sapiens
  CDR3 for beta chain variable domain of TCR clone 121718 (TRBV7-9, TRBJ1-4)
CASSLEGQSEKLFF

SEQ ID NO: 243437 - protein, 14 aa, Homo sapiens
  CDR3 for alpha chain variable domain of TCR clone 121719 (TRAV1-2, TRAJ8)
CAVREDTGFQKLVF

SEQ ID NO: 243438 - protein, 14 aa, Homo sapiens
  CDR3 for beta chain variable domain of TCR clone 121719 (TRBV7-8, TRBJ2-7)
CASSPRDRVYEQYF

SEQ ID NO: 243439 - protein, 15 aa, Homo sapiens
  CDR3 for alpha chain variable domain of TCR clone 121720 (TRAV29/DV5, TRAJ29)
CAASERSSGNAPLVF

SEQ ID NO: 243440 - protein, 17 aa, Homo sapiens
  CDR3 for beta chain variable domain of TCR clone 121720 (TRBV4-1, TRBJ1-4)
CASSQEGPRGVEEKLFF

SEQ ID NO: 243441 - protein, 13 aa, Homo sapiens
  CDR3 for alpha chain variable domain of TCR clone 121721 (TRAV8-3, TRAJ28)
CAVGAVGSYQLTF

SEQ ID NO: 243442 - protein, 15 aa, Homo sapiens
  CDR3 for beta chain variable domain of TCR clone 121721 (TRBV18, TRBJ2-3)
CASSPLAGETDTQYF

SEQ ID NO: 243443 - protein, 13 aa, Homo sapiens
  CDR3 for alpha chain variable domain of TCR clone 121722 (TRAV13-1, TRAJ39)
CAASIVMQATCPP

SEQ ID NO: 243444 - protein, 16 aa, Homo sapiens
  CDR3 for beta chain variable domain of TCR clone 121722 (TRBV7-2, TRBJ2-3)
CASSLVALYSTDTQYF

SEQ ID NO: 243445 - protein, 16 aa, Homo sapiens
  CDR3 for alpha chain variable domain of TCR clone 121723 (TRAV30, TRAJ24)
CGTEIVDDDSWGKFQF

SEQ ID NO: 243446 - protein, 16 aa, Homo sapiens
  CDR3 for beta chain variable domain of TCR clone 121723 (TRBV2, TRBJ1-3)
CASSGGAGRSGNTIYF

SEQ ID NO: 243447 - protein, 13 aa, Homo sapiens
  CDR3 for alpha chain variable domain of TCR clone 121724 (TRAV29/DV5, TRAJ49)
CAASTNTGNKFYF

SEQ ID NO: 243448 - protein, 13 aa, Homo sapiens
  CDR3 for beta chain variable domain of TCR clone 121724 (TRBV7-2, TRBJ1-4)
CASSLAGLEKLFF

SEQ ID NO: 243449 - protein, 15 aa, Homo sapiens
  CDR3 for alpha chain variable domain of TCR clone 121725 (TRAV21, TRAJ24)
CAARPSTDSWGKLQF

SEQ ID NO: 243450 - protein, 13 aa, Homo sapiens
  CDR3 for beta chain variable domain of TCR clone 121725 (TRBV20-1, TRBJ2-7)
CSATHTSGYEQYF

SEQ ID NO: 243451 - protein, 12 aa, Homo sapiens
  CDR3 for alpha chain variable domain of TCR clone 121726 (TRAV12-3, TRAJ17)
CAITLTGNKLTF

SEQ ID NO: 243452 - protein, 15 aa, Homo sapiens
  CDR3 for beta chain variable domain of TCR clone 121726 (TRBV20-1, TRBJ2-7)
CGARDRVSGMDEQYF

SEQ ID NO: 243453 - protein, 12 aa, Homo sapiens
  CDR3 for alpha chain variable domain of TCR clone 121727 (TRAV1-1, TRAJ8)
CAGGTGFQKLVF

SEQ ID NO: 243454 - protein, 16 aa, Homo sapiens
  CDR3 for beta chain variable domain of TCR clone 121727 (TRBV3-1, TRBJ2-5)
CASSPGQFNGFGTQYF

SEQ ID NO: 243455 - protein, 19 aa, Homo sapiens
  CDR3 for alpha chain variable domain of TCR clone 121728 (TRAV2, TRAJ20)
ILQVREADAAVYRDCKLSF

SEQ ID NO: 243456 - protein, 12 aa, Homo sapiens
  CDR3 for beta chain variable domain of TCR clone 121728 (TRBV10-3, TRBJ1-1)
CATMDRPPEAFF

SEQ ID NO: 243457 - protein, 14 aa, Homo sapiens
  CDR3 for alpha chain variable domain of TCR clone 121729 (TRAV29/DV5, TRAJ44)
CAAFLIGTASKLTF

SEQ ID NO: 243458 - protein, 15 aa, Homo sapiens
  CDR3 for beta chain variable domain of TCR clone 121729 (TRBV7-3, TRBJ2-2)
CASSETGQGTGELFF

SEQ ID NO: 243459 - protein, 15 aa, Homo sapiens
  CDR3 for alpha chain variable domain of TCR clone 121730 (TRAV23/DV6, TRAJ13)
CAAWPGGGGSQKVTF

SEQ ID NO: 243460 - protein, 14 aa, Homo sapiens
  CDR3 for beta chain variable domain of TCR clone 121730 (TRBV6-1, TRBJ2-1)
CASAGGAIKNEQFF

SEQ ID NO: 243461 - protein, 10 aa, Homo sapiens
  CDR3 for alpha chain variable domain of TCR clone 121731 (TRAV1-2, TRAJ20)
CAVTDYKLSF

SEQ ID NO: 243462 - protein, 13 aa, Homo sapiens
  CDR3 for beta chain variable domain of TCR clone 121731 (TRBV7-3, TRBJ1-1)
CASSQDWGAEAFF

SEQ ID NO: 243463 - protein, 13 aa, Homo sapiens
  CDR3 for alpha chain variable domain of TCR clone 121732 (TRAV12-1, TRAJ40)
CVVPASGTYKYIF

SEQ ID NO: 243464 - protein, 14 aa, Homo sapiens
  CDR3 for beta chain variable domain of TCR clone 121732 (TRBV6-1, TRBJ1-3)
CASVQGGGGNTIYF

SEQ ID NO: 243465 - protein, 15 aa, Homo sapiens
  CDR3 for alpha chain variable domain of TCR clone 121733 (TRAV26-2, TRAJ28)
CILVESGAGSYQLTF

SEQ ID NO: 243466 - protein, 13 aa, Homo sapiens
  CDR3 for beta chain variable domain of TCR clone 121733 (TRBV7-9, TRBJ1-2)
CASSLKQNYGYTL

SEQ ID NO: 243467 - protein, 13 aa, Homo sapiens
  CDR3 for alpha chain variable domain of TCR clone 121734 (TRAV2, TRAJ29)
CAAQNSGNTPLVF

SEQ ID NO: 243468 - protein, 13 aa, Homo sapiens
  CDR3 for beta chain variable domain of TCR clone 121734 (TRBV7-9, TRBJ1-2)
CASSLKQNYGYTF

SEQ ID NO: 243469 - protein, 12 aa, Homo sapiens
  CDR3 for alpha chain variable domain of TCR clone 121735 (TRAV12-3, TRAJ20)
WAMVRGDYKLSF

SEQ ID NO: 243470 - protein, 12 aa, Homo sapiens
  CDR3 for beta chain variable domain of TCR clone 121735 (TRBV6-1, TRBJ2-7)
CASSDYSYEQYF

SEQ ID NO: 243471 - protein, 13 aa, Homo sapiens
  CDR3 for alpha chain variable domain of TCR clone 121736 (TRAV12-3, TRAJ13)
CAMGTGGYQKVTF

SEQ ID NO: 243472 - protein, 14 aa, Homo sapiens
  CDR3 for beta chain variable domain of TCR clone 121736 (TRBV6-1, TRBJ1-3)
CASVQGGGGNTIYF

SEQ ID NO: 243473 - protein, 14 aa, Homo sapiens
  CDR3 for alpha chain variable domain of TCR clone 121737 (TRAV17, TRAJ34)
CATVPTYNTDKLIF

SEQ ID NO: 243474 - protein, 17 aa, Homo sapiens
  CDR3 for beta chain variable domain of TCR clone 121737 (TRBV4-3, TRBJ1-2)
CASSSRLQAGGSVGYTF

SEQ ID NO: 243475 - protein, 13 aa, Homo sapiens
  CDR3 for alpha chain variable domain of TCR clone 121738 (TRAV12-3, TRAJ31)
CAMSANNNARLMF

SEQ ID NO: 243476 - protein, 16 aa, Homo sapiens
  CDR3 for beta chain variable domain of TCR clone 121738 (TRBV7-9, TRBJ1-2)
CASSLGFFSGEDGYTF

SEQ ID NO: 243477 - protein, 13 aa, Homo sapiens
  CDR3 for alpha chain variable domain of TCR clone 121739 (TRAV13-1, TRAJ21)
CAASIYNFNKFYF

SEQ ID NO: 243478 - protein, 13 aa, Homo sapiens
  CDR3 for beta chain variable domain of TCR clone 121739 (TRBV27, TRBJ1-4)
CSSSLMGDEKLFF

SEQ ID NO: 243479 - protein, 16 aa, Homo sapiens
  CDR3 for alpha chain variable domain of TCR clone 121740 (TRAV3, TRAJ21)
CAVRDIERGNFNKFYF

SEQ ID NO: 243480 - protein, 11 aa, Homo sapiens
  CDR3 for beta chain variable domain of TCR clone 121740 (TRBV11-2, TRBJ2-2)
CASSLPGELFF

SEQ ID NO: 243481 - protein, 20 aa, Homo sapiens
  CDR3 for alpha chain variable domain of TCR clone 121741 (TRAV12-2, TRAJ52)
SPVIQPPARAGGTSYGKLTF

SEQ ID NO: 243482 - protein, 16 aa, Homo sapiens
  CDR3 for beta chain variable domain of TCR clone 121741 (TRBV15, TRBJ1-2)
RATSRGPRTGGGGYTF

SEQ ID NO: 243483 - protein, 15 aa, Homo sapiens
  CDR3 for alpha chain variable domain of TCR clone 121742 (TRAV26-1, TRAJ29)
CIVRVEGSGNTPLVF

SEQ ID NO: 243484 - protein, 16 aa, Homo sapiens
  CDR3 for beta chain variable domain of TCR clone 121742 (TRBV7-9, TRBJ2-3)
CASSPWREVGTDTQYF

SEQ ID NO: 243485 - protein, 13 aa, Homo sapiens
  CDR3 for alpha chain variable domain of TCR clone 121743 (TRAV13-1, TRAJ43)
CAASLSNNNDMRF

SEQ ID NO: 243486 - protein, 11 aa, Homo sapiens
  CDR3 for beta chain variable domain of TCR clone 121743 (TRBV5-1, TRBJ2-5)
CWGAGEKTQYF

SEQ ID NO: 243487 - protein, 19 aa, Homo sapiens
  CDR3 for alpha chain variable domain of TCR clone 121744 (TRAV2, TRAJ20)
ILQVREADAAVYRDCKLSF

SEQ ID NO: 243488 - protein, 15 aa, Homo sapiens
  CDR3 for beta chain variable domain of TCR clone 121744 (TRBV7-2, TRBJ2-1)
CASSLASGRVNEQFF

SEQ ID NO: 243489 - protein, 14 aa, Homo sapiens
  CDR3 for alpha chain variable domain of TCR clone 121745 (TRAV8-4, TRAJ48)
CAVSETFGNEKLTF

SEQ ID NO: 243490 - protein, 13 aa, Homo sapiens
  CDR3 for beta chain variable domain of TCR clone 121745 (TRBV20-1, TRBJ1-1)
CSARVGGNTEAFF

SEQ ID NO: 243491 - protein, 16 aa, Homo sapiens
  CDR3 for alpha chain variable domain of TCR clone 121746 (TRAV12-3, TRAJ53)
CAMSAGSGGSNYKLTL

SEQ ID NO: 243492 - protein, 13 aa, Homo sapiens
  CDR3 for beta chain variable domain of TCR clone 121746 (TRBV29-1, TRBJ2-3)
CSVGPRGTDTQYF

SEQ ID NO: 243493 - protein, 13 aa, Homo sapiens
  CDR3 for alpha chain variable domain of TCR clone 121747 (TRAV12-1, TRAJ34)
CVVTGYNTDKLIF

SEQ ID NO: 243494 - protein, 15 aa, Homo sapiens
  CDR3 for beta chain variable domain of TCR clone 121747 (TRBV28, TRBJ2-7)
CASKGGGYTSSTSGR

SEQ ID NO: 243495 - protein, 12 aa, Homo sapiens
  CDR3 for alpha chain variable domain of TCR clone 121748 (TRAV2, TRAJ31)
CAVEDNNTRLMF

SEQ ID NO: 243496 - protein, 16 aa, Homo sapiens
  CDR3 for beta chain variable domain of TCR clone 121748 (TRBV10-3, TRBJ2-1)
CAISGVGDGGGGEQFF

SEQ ID NO: 243497 - protein, 13 aa, Homo sapiens
  CDR3 for alpha chain variable domain of TCR clone 121749 (TRAV20, TRAJ37)
CAGCSSNTGKLIF

SEQ ID NO: 243498 - protein, 17 aa, Homo sapiens
  CDR3 for beta chain variable domain of TCR clone 121749 (TRBV19, TRBJ2-7)
CASSISFYDSYPYEQYF

SEQ ID NO: 243499 - protein, 14 aa, Homo sapiens
  CDR3 for alpha chain variable domain of TCR clone 121750 (TRAV2, TRAJ37)
CAVDFTSNTGKLIF

SEQ ID NO: 243500 - protein, 17 aa, Homo sapiens
  CDR3 for beta chain variable domain of TCR clone 121750 (TRBV19, TRBJ2-7)
CASSISFYDSYPYEPYF

SEQ ID NO: 243501 - protein, 13 aa, Homo sapiens
  CDR3 for alpha chain variable domain of TCR clone 121751 (TRAV21, TRAJ27)
CAARPGNAGKSTF

SEQ ID NO: 243502 - protein, 13 aa, Homo sapiens
  CDR3 for beta chain variable domain of TCR clone 121751 (TRBV7-6, TRBJ2-1)
CQQLWGGADEQFF

SEQ ID NO: 243503 - protein, 11 aa, Homo sapiens
  CDR3 for alpha chain variable domain of TCR clone 121752 (TRAV17, TRAJ9)
CATTGGFKTIF

SEQ ID NO: 243504 - protein, 14 aa, Homo sapiens
  CDR3 for beta chain variable domain of TCR clone 121752 (TRBV7-9, TRBJ2-2)
CASSGLEDTGELFF

SEQ ID NO: 243505 - protein, 14 aa, Homo sapiens
  CDR3 for alpha chain variable domain of TCR clone 121753 (TRAV21, TRAJ35)
CAVMPIGFGNVLHC

SEQ ID NO: 243506 - protein, 15 aa, Homo sapiens
  CDR3 for beta chain variable domain of TCR clone 121753 (TRBV7-3, TRBJ2-2)
CASSETGQGTGELFF

SEQ ID NO: 243507 - protein, 17 aa, Homo sapiens
  CDR3 for alpha chain variable domain of TCR clone 121754 (TRAV38-2/DV8, TRAJ23)
CALSRKLIFGQGTELSV

SEQ ID NO: 243508 - protein, 16 aa, Homo sapiens
  CDR3 for beta chain variable domain of TCR clone 121754 (TRBV11-2, TRBJ1-1)
CASSLRQGGEHSKAFF

SEQ ID NO: 243509 - protein, 13 aa, Homo sapiens
  CDR3 for alpha chain variable domain of TCR clone 121755 (TRAV8-6, TRAJ49)
CAVITNTGNQFYF

SEQ ID NO: 243510 - protein, 14 aa, Homo sapiens
  CDR3 for beta chain variable domain of TCR clone 121755 (TRBV18, TRBJ2-7)
CASSPRGGAYEQYF

SEQ ID NO: 243511 - protein, 16 aa, Homo sapiens
  CDR3 for alpha chain variable domain of TCR clone 121756 (TRAV3, TRAJ5)
CAVRNLMDTGRRALTF

SEQ ID NO: 243512 - protein, 16 aa, Homo sapiens
  CDR3 for beta chain variable domain of TCR clone 121756 (TRBV4-2, TRBJ2-7)
CASSQEGLANSYAQYF

SEQ ID NO: 243513 - protein, 11 aa, Homo sapiens
  CDR3 for alpha chain variable domain of TCR clone 121757 (TRAV35, TRAJ30)
CAPGGDDKIIF

SEQ ID NO: 243514 - protein, 14 aa, Homo sapiens
  CDR3 for beta chain variable domain of TCR clone 121757 (TRBV7-6, TRBJ2-1)
CASSLGGGADEQLF

SEQ ID NO: 243515 - protein, 15 aa, Homo sapiens
  CDR3 for alpha chain variable domain of TCR clone 121758 (TRAV12-2, TRAJ57)
CAVSRGQGGSEKRVF

SEQ ID NO: 243516 - protein, 15 aa, Homo sapiens
  CDR3 for beta chain variable domain of TCR clone 121758 (TRBV5-1, TRBJ2-1)
CASSPPRAPYNEQFF

SEQ ID NO: 243517 - protein, 12 aa, Homo sapiens
  CDR3 for alpha chain variable domain of TCR clone 121759 (TRAV12-3, TRAJ43)
CAISSNNNDMRF

SEQ ID NO: 243518 - protein, 15 aa, Homo sapiens
  CDR3 for beta chain variable domain of TCR clone 121759 (TRBV3-1, TRBJ2-7)
CASSQEWTGSYEQYF

SEQ ID NO: 243519 - protein, 14 aa, Homo sapiens
  CDR3 for alpha chain variable domain of TCR clone 121760 (TRAV21, TRAJ28)
CAVGSGAGSYQLTF

SEQ ID NO: 243520 - protein, 14 aa, Homo sapiens
  CDR3 for beta chain variable domain of TCR clone 121760 (TRBV18, TRBJ1-4)
CASSPGPNGEKLLF

SEQ ID NO: 243521 - protein, 16 aa, Homo sapiens
  CDR3 for alpha chain variable domain of TCR clone 121761 (TRAV26-1, TRAJ36)
CIVRVSYQTGANNLFF

SEQ ID NO: 243522 - protein, 13 aa, Homo sapiens
  CDR3 for beta chain variable domain of TCR clone 121761 (TRBV5-5, TRBJ1-5)
CARSLGIGGDQHF

SEQ ID NO: 243523 - protein, 15 aa, Homo sapiens
  CDR3 for alpha chain variable domain of TCR clone 121762 (TRAV27, TRAJ38)
CAGRFHAGNNRKLIW

SEQ ID NO: 243524 - protein, 13 aa, Homo sapiens
  CDR3 for beta chain variable domain of TCR clone 121762 (TRBV12-5, TRBJ2-3)
CASQNRGTDTQYF

SEQ ID NO: 243525 - protein, 13 aa, Homo sapiens
  CDR3 for alpha chain variable domain of TCR clone 121763 (TRAV2, TRAJ40)
CAVVTSGTYKYIF

SEQ ID NO: 243526 - protein, 15 aa, Homo sapiens
  CDR3 for beta chain variable domain of TCR clone 121763 (TRBV7-2, TRBJ2-3)
CASSLNLRDTDTQYF

SEQ ID NO: 243527 - protein, 13 aa, Homo sapiens
  CDR3 for alpha chain variable domain of TCR clone 121764 (TRAV13-1, TRAJ49)
CAAMLYTGNQFYF

SEQ ID NO: 243528 - protein, 15 aa, Homo sapiens
  CDR3 for beta chain variable domain of TCR clone 121764 (TRBV12-4, TRBJ1-5)
CASTRGSGFGQTQHF

SEQ ID NO: 243529 - protein, 13 aa, Homo sapiens
  CDR3 for alpha chain variable domain of TCR clone 121765 (TRAV27, TRAJ8)
CAGGPTGFQKLVF

SEQ ID NO: 243530 - protein, 16 aa, Homo sapiens
  CDR3 for beta chain variable domain of TCR clone 121765 (TRBV7-9, TRBJ2-1)
RASSDVAGGSYNEQFF

SEQ ID NO: 243531 - protein, 11 aa, Homo sapiens
  CDR3 for alpha chain variable domain of TCR clone 121766 (TRAV1-1, TRAJ23)
CAVRQGGKLIF

SEQ ID NO: 243532 - protein, 19 aa, Homo sapiens
  CDR3 for beta chain variable domain of TCR clone 121766 (TRBV2, TRBJ2-7)
CASSDDETSGRANDYEQYF

SEQ ID NO: 243533 - protein, 12 aa, Homo sapiens
  CDR3 for alpha chain variable domain of TCR clone 121767 (TRAV12-3, TRAJ54)
CGADRGAQKLEF

SEQ ID NO: 243534 - protein, 15 aa, Homo sapiens
  CDR3 for beta chain variable domain of TCR clone 121767 (TRBV27, TRBJ2-1)
CASSLAGGPFNEQFF

SEQ ID NO: 243535 - protein, 12 aa, Homo sapiens
  CDR3 for alpha chain variable domain of TCR clone 121768 (TRAV17, TRAJ20)
CATLANDYKPSF

SEQ ID NO: 243536 - protein, 14 aa, Homo sapiens
  CDR3 for beta chain variable domain of TCR clone 121768 (TRBV10-3, TRBJ1-2)
CAISEDTPYYGYTF

SEQ ID NO: 243537 - protein, 12 aa, Homo sapiens
  CDR3 for alpha chain variable domain of TCR clone 121769 (TRAV2, TRAJ31)
CAVEDNNARLMF

SEQ ID NO: 243538 - protein, 16 aa, Homo sapiens
  CDR3 for beta chain variable domain of TCR clone 121769 (TRBV18, TRBJ2-7)
CASSPLQSGTHYEQYF

SEQ ID NO: 243539 - protein, 14 aa, Homo sapiens
  CDR3 for alpha chain variable domain of TCR clone 121770 (TRAV9-2, TRAJ39)
CALYIYNAGNMLTF

SEQ ID NO: 243540 - protein, 16 aa, Homo sapiens
  CDR3 for beta chain variable domain of TCR clone 121770 (TRBV7-8, TRBJ2-1)
CASSLVGGGPYNEQFF

SEQ ID NO: 243541 - protein, 17 aa, Homo sapiens
  CDR3 for alpha chain variable domain of TCR clone 121771 (TRAV26-1, TRAJ22)
CIVRVPSHSGSARQLTF

SEQ ID NO: 243542 - protein, 16 aa, Homo sapiens
  CDR3 for beta chain variable domain of TCR clone 121771 (TRBV28, TRBJ2-1)
CASRRSGRVVGNEQSF

SEQ ID NO: 243543 - protein, 15 aa, Homo sapiens
  CDR3 for alpha chain variable domain of TCR clone 121772 (TRAV8-3, TRAJ41)
CAVGSNSNSGYALNF

SEQ ID NO: 243544 - protein, 17 aa, Homo sapiens
  CDR3 for beta chain variable domain of TCR clone 121772 (TRBV25-1, TRBJ2-1)
CTSSAYGQGRGVYEQFF

SEQ ID NO: 243545 - protein, 10 aa, Homo sapiens
  CDR3 for alpha chain variable domain of TCR clone 121773 (TRAV12-2, TRAJ48)
CAVTSEKLTF

SEQ ID NO: 243546 - protein, 15 aa, Homo sapiens
  CDR3 for beta chain variable domain of TCR clone 121773 (TRBV5-8, TRBJ1-1)
CASSFSGTSLKGAFF

SEQ ID NO: 243547 - protein, 14 aa, Homo sapiens
  CDR3 for alpha chain variable domain of TCR clone 121774 (TRAV17, TRAJ36)
CATVSLTGANNLFF

SEQ ID NO: 243548 - protein, 13 aa, Homo sapiens
  CDR3 for beta chain variable domain of TCR clone 121774 (TRBV4-1, TRBJ1-1)
CASSQLGTGEAFF

SEQ ID NO: 243549 - protein, 17 aa, Homo sapiens
  CDR3 for alpha chain variable domain of TCR clone 121775 (TRAV3, TRAJ6)
CAVRDGPRAGGSYIPTF

SEQ ID NO: 243550 - protein, 13 aa, Homo sapiens
  CDR3 for beta chain variable domain of TCR clone 121775 (TRBV7-9, TRBJ1-2)
CASSPSNFWGYTF

SEQ ID NO: 243551 - protein, 18 aa, Homo sapiens
  CDR3 for alpha chain variable domain of TCR clone 121776 (TRAV29/DV5, TRAJ52)
CAAGFRGAGGTSYGKLTL

SEQ ID NO: 243552 - protein, 14 aa, Homo sapiens
  CDR3 for beta chain variable domain of TCR clone 121776 (TRBV20-1, TRBJ2-7)
CSAKRGRSSYEQYF

SEQ ID NO: 243553 - protein, 14 aa, Homo sapiens
  CDR3 for alpha chain variable domain of TCR clone 121777 (TRAV8-4, TRAJ16)
SAVSPVGRWPEAAL

SEQ ID NO: 243554 - protein, 15 aa, Homo sapiens
  CDR3 for beta chain variable domain of TCR clone 121777 (TRBV11-3, TRBJ2-7)
CASSPGPASSYEQYF

SEQ ID NO: 243555 - protein, 12 aa, Homo sapiens
  CDR3 for alpha chain variable domain of TCR clone 121778 (TRAV25, TRAJ16)
CAGNRDGQKLLF

SEQ ID NO: 243556 - protein, 15 aa, Homo sapiens
  CDR3 for beta chain variable domain of TCR clone 121778 (TRBV11-3, TRBJ2-3)
CASLKDGREGDTQYF

SEQ ID NO: 243557 - protein, 12 aa, Homo sapiens
  CDR3 for alpha chain variable domain of TCR clone 121779 (TRAV3, TRAJ20)
CAVRDPDYKLSF

SEQ ID NO: 243558 - protein, 14 aa, Homo sapiens
  CDR3 for beta chain variable domain of TCR clone 121779 (TRBV7-2, TRBJ1-2)
CASSQTGSTYGYTF

SEQ ID NO: 243559 - protein, 16 aa, Homo sapiens
  CDR3 for alpha chain variable domain of TCR clone 121780 (TRAV3, TRAJ37)
CAVRGKGSGNTGKLIF

SEQ ID NO: 243560 - protein, 13 aa, Homo sapiens
  CDR3 for beta chain variable domain of TCR clone 121780 (TRBV7-2, TRBJ2-2)
CASSSVRDGELFF

SEQ ID NO: 243561 - protein, 16 aa, Homo sapiens
  CDR3 for alpha chain variable domain of TCR clone 121781 (TRAV4, TRAJ22)
CLVGDLYSGSARQLPF

SEQ ID NO: 243562 - protein, 16 aa, Homo sapiens
  CDR3 for beta chain variable domain of TCR clone 121781 (TRBV7-9, TRBJ2-3)
CASSPWREVGTDTQYF

SEQ ID NO: 243563 - protein, 10 aa, Homo sapiens
  CDR3 for alpha chain variable domain of TCR clone 121782 (TRAV1-2, TRAJ23)
SAGQGGKLIF

SEQ ID NO: 243564 - protein, 13 aa, Homo sapiens
  CDR3 for beta chain variable domain of TCR clone 121782 (TRBV7-7, TRBJ2-3)
CASSLSRADTQYF

SEQ ID NO: 243565 - protein, 15 aa, Homo sapiens
  CDR3 for alpha chain variable domain of TCR clone 121783 (TRAV27, TRAJ53)
CRAINIGGSNYKLTF

SEQ ID NO: 243566 - protein, 14 aa, Homo sapiens
  CDR3 for beta chain variable domain of TCR clone 121783 (TRBV7-3, TRBJ2-1)
CASSLAGGTNEQFF

SEQ ID NO: 243567 - protein, 14 aa, Homo sapiens
  CDR3 for alpha chain variable domain of TCR clone 121784 (TRAV17, TRAJ57)
CATDPQGGSDKLVF

SEQ ID NO: 243568 - protein, 16 aa, Homo sapiens
  CDR3 for beta chain variable domain of TCR clone 121784 (TRBV20-1, TRBJ1-4)
CSAPGQGLLTNEKLFF

SEQ ID NO: 243569 - protein, 15 aa, Homo sapiens
  CDR3 for alpha chain variable domain of TCR clone 121785 (TRAV17, TRAJ23)
CATDAEDNQGGKLIF

SEQ ID NO: 243570 - protein, 12 aa, Homo sapiens
  CDR3 for beta chain variable domain of TCR clone 121785 (TRBV2, TRBJ2-1)
CAKREGDNEQFF

SEQ ID NO: 243571 - protein, 15 aa, Homo sapiens
  CDR3 for alpha chain variable domain of TCR clone 121786 (TRAV27, TRAJ38)
CAARRNGGNNRKLIW

SEQ ID NO: 243572 - protein, 13 aa, Homo sapiens
  CDR3 for beta chain variable domain of TCR clone 121786 (TRBV12-5, TRBJ2-3)
CASGDRQSDTQYF

SEQ ID NO: 243573 - protein, 14 aa, Homo sapiens
  CDR3 for alpha chain variable domain of TCR clone 121787 (TRAV17, TRAJ12)
CATDEKDSSFKLIF

SEQ ID NO: 243574 - protein, 16 aa, Homo sapiens
  CDR3 for beta chain variable domain of TCR clone 121787 (TRBV11-2, TRBJ2-1)
CASSPRLAGVYNEQFF

SEQ ID NO: 243575 - protein, 12 aa, Homo sapiens
  CDR3 for alpha chain variable domain of TCR clone 121788 (TRAV12-3, TRAJ17)
CAMTLTGNKLTF

SEQ ID NO: 243576 - protein, 15 aa, Homo sapiens
  CDR3 for beta chain variable domain of TCR clone 121788 (TRBV19, TRBJ2-1)
CASSILGEGRNEQFI

SEQ ID NO: 243577 - protein, 13 aa, Homo sapiens
  CDR3 for alpha chain variable domain of TCR clone 121789 (TRAV17, TRAJ22)
CAHHSGSSRQLTF

SEQ ID NO: 243578 - protein, 16 aa, Homo sapiens
  CDR3 for beta chain variable domain of TCR clone 121789 (TRBV4-1, TRBJ1-2)
CASSQDAGQVLYGYTF

SEQ ID NO: 243579 - protein, 15 aa, Homo sapiens
  CDR3 for alpha chain variable domain of TCR clone 121790 (TRAV4, TRAJ3)
CLVGDSDSSASKIIF

SEQ ID NO: 243580 - protein, 17 aa, Homo sapiens
  CDR3 for beta chain variable domain of TCR clone 121790 (TRBV11-2, TRBJ2-1)
CASSLYPPGVEYNEQFF

SEQ ID NO: 243581 - protein, 13 aa, Homo sapiens
  CDR3 for alpha chain variable domain of TCR clone 121791 (TRAV12-2, TRAJ42)
CAVKRGSQGNLIF

SEQ ID NO: 243582 - protein, 14 aa, Homo sapiens
  CDR3 for beta chain variable domain of TCR clone 121791 (TRBV25-1, TRBJ1-6)
CASILSADISPLHF

SEQ ID NO: 243583 - protein, 13 aa, Homo sapiens
  CDR3 for alpha chain variable domain of TCR clone 121792 (TRAV27, TRAJ45)
CRSSGGGADGLTF

SEQ ID NO: 243584 - protein, 17 aa, Homo sapiens
  CDR3 for beta chain variable domain of TCR clone 121792 (TRBV11-2, TRBJ2-1)
CATSLYPPGVEYNEQFF

SEQ ID NO: 243585 - protein, 13 aa, Homo sapiens
  CDR3 for alpha chain variable domain of TCR clone 121793 (TRAV5, TRAJ30)
CAEIANRDDKIIF

SEQ ID NO: 243586 - protein, 14 aa, Homo sapiens
  CDR3 for beta chain variable domain of TCR clone 121793 (TRBV4-1, TRBJ2-2)
CASSQAVNTGELLF

SEQ ID NO: 243587 - protein, 14 aa, Homo sapiens
  CDR3 for alpha chain variable domain of TCR clone 121794 (TRAV8-3, TRAJ35)
CAAVPQGFGNVLHC

SEQ ID NO: 243588 - protein, 15 aa, Homo sapiens
  CDR3 for beta chain variable domain of TCR clone 121794 (TRBV6-1, TRBJ2-2)
CASSAGQGYTGELFF

SEQ ID NO: 243589 - protein, 16 aa, Homo sapiens
  CDR3 for alpha chain variable domain of TCR clone 121795 (TRAV20, TRAJ52)
CAVLPDGGTSYGKMTF

SEQ ID NO: 243590 - protein, 12 aa, Homo sapiens
  CDR3 for beta chain variable domain of TCR clone 121795 (TRBV19, TRBJ2-1)
CASSQISNEQFF

SEQ ID NO: 243591 - protein, 15 aa, Homo sapiens
  CDR3 for alpha chain variable domain of TCR clone 121796 (TRAV12-2, TRAJ53)
CAVNGGGGSNYKLTF

SEQ ID NO: 243592 - protein, 18 aa, Homo sapiens
  CDR3 for beta chain variable domain of TCR clone 121796 (TRBV27, TRBJ2-7)
CASSSSISLLGTSYEQYF

SEQ ID NO: 243593 - protein, 14 aa, Homo sapiens
  CDR3 for alpha chain variable domain of TCR clone 121797 (TRAV21, TRAJ37)
CAVKGSSNTGKLIF

SEQ ID NO: 243594 - protein, 14 aa, Homo sapiens
  CDR3 for beta chain variable domain of TCR clone 121797 (TRBV7-2, TRBJ2-1)
CACSRGGARNEQFF

SEQ ID NO: 243595 - protein, 12 aa, Homo sapiens
  CDR3 for alpha chain variable domain of TCR clone 121798 (TRAV8-6, TRAJ27)
CAVSEEEGKSTF

SEQ ID NO: 243596 - protein, 14 aa, Homo sapiens
  CDR3 for beta chain variable domain of TCR clone 121798 (TRBV7-7, TRBJ2-2)
CATRQDSDTGELFF

SEQ ID NO: 243597 - protein, 15 aa, Homo sapiens
  CDR3 for alpha chain variable domain of TCR clone 121799 (TRAV21, TRAJ53)
CAVRQSGGSNYKLTF

SEQ ID NO: 243598 - protein, 15 aa, Homo sapiens
  CDR3 for beta chain variable domain of TCR clone 121799 (TRBV6-3, TRBJ2-7)
CASSSPGTVFYEQYF

SEQ ID NO: 243599 - protein, 13 aa, Homo sapiens
  CDR3 for alpha chain variable domain of TCR clone 121800 (TRAV2, TRAJ11)
CAVAPSGYSTLTF

SEQ ID NO: 243600 - protein, 14 aa, Homo sapiens
  CDR3 for beta chain variable domain of TCR clone 121800 (TRBV7-2, TRBJ1-1)
CASSFLTGTTEAFF

SEQ ID NO: 243601 - protein, 11 aa, Homo sapiens
  CDR3 for alpha chain variable domain of TCR clone 121801 (TRAV23/DV6, TRAJ48)
CAPRLGEKLTF

SEQ ID NO: 243602 - protein, 13 aa, Homo sapiens
  CDR3 for beta chain variable domain of TCR clone 121801 (TRBV12-4, TRBJ2-5)
CASSPGTEETQYF

SEQ ID NO: 243603 - protein, 15 aa, Homo sapiens
  CDR3 for alpha chain variable domain of TCR clone 121802 (TRAV29/DV5, TRAJ47)
CAARPTMEYGNKPVF

SEQ ID NO: 243604 - protein, 13 aa, Homo sapiens
  CDR3 for beta chain variable domain of TCR clone 121802 (TRBV20-1, TRBJ1-1)
CSARAGGNTEAFF

SEQ ID NO: 243605 - protein, 19 aa, Homo sapiens
  CDR3 for alpha chain variable domain of TCR clone 121803 (TRAV26-1, TRAJ52)
CIVRANRNAGGTSYGKLTF

SEQ ID NO: 243606 - protein, 15 aa, Homo sapiens
  CDR3 for beta chain variable domain of TCR clone 121803 (TRBV29-1, TRBJ2-1)
CSGRDRKSSYNEQFF

SEQ ID NO: 243607 - protein, 13 aa, Homo sapiens
  CDR3 for alpha chain variable domain of TCR clone 121804 (TRAV13-1, TRAJ43)
CSASKNNNNDMRF

SEQ ID NO: 243608 - protein, 14 aa, Homo sapiens
  CDR3 for beta chain variable domain of TCR clone 121804 (TRBV14, TRBJ2-1)
CASSQVQGRGEQFF

SEQ ID NO: 243609 - protein, 20 aa, Homo sapiens
  CDR3 for alpha chain variable domain of TCR clone 121805 (TRAV12-3, TRAJ41)
SLFIRDSQPSDSATPEALNF

SEQ ID NO: 243610 - protein, 14 aa, Homo sapiens
  CDR3 for beta chain variable domain of TCR clone 121805 (TRBV12-4, TRBJ1-1)
CASSLGTGGTEAFF

SEQ ID NO: 243611 - protein, 15 aa, Homo sapiens
  CDR3 for alpha chain variable domain of TCR clone 121806 (TRAV8-3, TRAJ32)
CAVGPYGGATNKLIS

SEQ ID NO: 243612 - protein, 14 aa, Homo sapiens
  CDR3 for beta chain variable domain of TCR clone 121806 (TRBV29-1, TRBJ2-2)
CSVLAETNTGELFF

SEQ ID NO: 243613 - protein, 13 aa, Homo sapiens
  CDR3 for alpha chain variable domain of TCR clone 121807 (TRAV8-6, TRAJ16)
CAASSPDGQKLLF

SEQ ID NO: 243614 - protein, 16 aa, Homo sapiens
  CDR3 for beta chain variable domain of TCR clone 121807 (TRBV5-7, TRBJ2-3)
CASSSLGGAITDTQYF

SEQ ID NO: 243615 - protein, 10 aa, Homo sapiens
  CDR3 for alpha chain variable domain of TCR clone 121808 (TRAV21, TRAJ31)
CAVDNARLMF

SEQ ID NO: 243616 - protein, 14 aa, Homo sapiens
  CDR3 for beta chain variable domain of TCR clone 121808 (TRBV7-7, TRBJ2-2)
CATRQDSDTGELFF

SEQ ID NO: 243617 - protein, 14 aa, Homo sapiens
  CDR3 for alpha chain variable domain of TCR clone 121809 (TRAV1-2, TRAJ16)
CAVNRFSDGQKLLF

SEQ ID NO: 243618 - protein, 16 aa, Homo sapiens
  CDR3 for beta chain variable domain of TCR clone 121809 (TRBV7-3, TRBJ2-2)
RASSLKRGTLSGELFF

SEQ ID NO: 243619 - protein, 15 aa, Homo sapiens
  CDR3 for alpha chain variable domain of TCR clone 121810 (TRAV8-4, TRAJ8)
CAVSDLNTGFQKLIF

SEQ ID NO: 243620 - protein, 14 aa, Homo sapiens
  CDR3 for beta chain variable domain of TCR clone 121810 (TRBV7-2, TRBJ2-3)
CASSQTGSSYTQYF

SEQ ID NO: 243621 - protein, 13 aa, Homo sapiens
  CDR3 for alpha chain variable domain of TCR clone 121811 (TRAV12-3, TRAJ7)
CAMTPYGNNRLAF

SEQ ID NO: 243622 - protein, 16 aa, Homo sapiens
  CDR3 for beta chain variable domain of TCR clone 121811 (TRBV7-7, TRBJ2-1)
CASSLASGTSYNEQFF

SEQ ID NO: 243623 - protein, 14 aa, Homo sapiens
  CDR3 for alpha chain variable domain of TCR clone 121812 (TRAV1-2, TRAJ8)
CAVREDTGFQKLVF

SEQ ID NO: 243624 - protein, 12 aa, Homo sapiens
  CDR3 for beta chain variable domain of TCR clone 121812 (TRBV13, TRBJ2-1)
CASSLGAQEQFF

SEQ ID NO: 243625 - protein, 12 aa, Homo sapiens
  CDR3 for alpha chain variable domain of TCR clone 121813 (TRAV3, TRAJ26)
CAVRDYGQNFVF

SEQ ID NO: 243626 - protein, 16 aa, Homo sapiens
  CDR3 for beta chain variable domain of TCR clone 121813 (TRBV11-2, TRBJ1-2)
SASSPSGREANYGYAF

SEQ ID NO: 243627 - protein, 15 aa, Homo sapiens
  CDR3 for alpha chain variable domain of TCR clone 121814 (TRAV2, TRAJ9)
CAVEDRGTGGFKTIF

SEQ ID NO: 243628 - protein, 12 aa, Homo sapiens
  CDR3 for beta chain variable domain of TCR clone 121814 (TRBV11-2, TRBJ2-2)
CASSLPTGELFF

SEQ ID NO: 243629 - protein, 15 aa, Homo sapiens
  CDR3 for alpha chain variable domain of TCR clone 121815 (TRAV29/DV5, TRAJ57)
CAASLLRGGSEKLVF

SEQ ID NO: 243630 - protein, 14 aa, Homo sapiens
  CDR3 for beta chain variable domain of TCR clone 121815 (TRBV12-4, TRBJ1-1)
CASSLGTGGTEAFF

SEQ ID NO: 243631 - protein, 15 aa, Homo sapiens
  CDR3 for alpha chain variable domain of TCR clone 121816 (TRAV12-2, TRAJ53)
CAVNGGGGSNYKLTF

SEQ ID NO: 243632 - protein, 14 aa, Homo sapiens
  CDR3 for beta chain variable domain of TCR clone 121816 (TRBV6-1, TRBJ1-3)
CASVQGGDGNTIYF

SEQ ID NO: 243633 - protein, 13 aa, Homo sapiens
  CDR3 for alpha chain variable domain of TCR clone 121817 (TRAV13-2, TRAJ48)
CAEMDFGNEKLTF

SEQ ID NO: 243634 - protein, 14 aa, Homo sapiens
  CDR3 for beta chain variable domain of TCR clone 121817 (TRBV5-4, TRBJ1-1)
CASSLDSRRDEAFF

SEQ ID NO: 243635 - protein, 10 aa, Homo sapiens
  CDR3 for alpha chain variable domain of TCR clone 121818 (TRAV23/DV6, TRAJ43)
CAAAVAALEQ

SEQ ID NO: 243636 - protein, 13 aa, Homo sapiens
  CDR3 for beta chain variable domain of TCR clone 121818 (TRBV12-4, TRBJ1-2)
CASSLRQGKGYTV

SEQ ID NO: 243637 - protein, 11 aa, Homo sapiens
  CDR3 for alpha chain variable domain of TCR clone 121819 (TRAV8-3, TRAJ49)
CAVNTGNQFYF

SEQ ID NO: 243638 - protein, 15 aa, Homo sapiens
  CDR3 for beta chain variable domain of TCR clone 121819 (TRBV20-1, TRBJ2-7)
CSARDRVSGMDEQYF

SEQ ID NO: 243639 - protein, 11 aa, Homo sapiens
  CDR3 for alpha chain variable domain of TCR clone 121820 (TRAV17, TRAJ9)
CGFTGGLKTIF

SEQ ID NO: 243640 - protein, 12 aa, Homo sapiens
  CDR3 for beta chain variable domain of TCR clone 121820 (TRBV29-1, TRBJ2-3)
CSVTGGADTQYF

SEQ ID NO: 243641 - protein, 12 aa, Homo sapiens
  CDR3 for alpha chain variable domain of TCR clone 121821 (TRAV25, TRAJ11)
CAGASGYSTLTF

SEQ ID NO: 243642 - protein, 18 aa, Homo sapiens
  CDR3 for beta chain variable domain of TCR clone 121821 (TRBV11-2, TRBJ2-3)
CASSLGGASRGAPNTQYF

SEQ ID NO: 243643 - protein, 14 aa, Homo sapiens
  CDR3 for alpha chain variable domain of TCR clone 121822 (TRAV1-2, TRAJ16)
CAVDRFSDGQKLLF

SEQ ID NO: 243644 - protein, 16 aa, Homo sapiens
  CDR3 for beta chain variable domain of TCR clone 121822 (TRBV11-2, TRBJ1-2)
CASSLDTGGADYGYTF

SEQ ID NO: 243645 - protein, 18 aa, Homo sapiens
  CDR3 for alpha chain variable domain of TCR clone 121823 (TRAV17, TRAJ45)
CATSLDLYSGGVADGLTF

SEQ ID NO: 243646 - protein, 15 aa, Homo sapiens
  CDR3 for beta chain variable domain of TCR clone 121823 (TRBV11-2, TRBJ2-1)
CASSKNRGLIYEQFF

SEQ ID NO: 243647 - protein, 14 aa, Homo sapiens
  CDR3 for alpha chain variable domain of TCR clone 121824 (TRAV12-2, TRAJ44)
CAVNKAGTASKLTF

SEQ ID NO: 243648 - protein, 15 aa, Homo sapiens
  CDR3 for beta chain variable domain of TCR clone 121824 (TRBV27, TRBJ2-1)
CASSNGGGSSNEQFF

SEQ ID NO: 243649 - protein, 12 aa, Homo sapiens
  CDR3 for alpha chain variable domain of TCR clone 121825 (TRAV27, TRAJ35)
CAGADFGNVLHC

SEQ ID NO: 243650 - protein, 17 aa, Homo sapiens
  CDR3 for beta chain variable domain of TCR clone 121825 (TRBV5-1, TRBJ2-2)
CASSPRTGGMNTGELFF

SEQ ID NO: 243651 - protein, 16 aa, Homo sapiens
  CDR3 for alpha chain variable domain of TCR clone 121826 (TRAV3, TRAJ28)
CAVLPRSGAGSYQLTF

SEQ ID NO: 243652 - protein, 15 aa, Homo sapiens
  CDR3 for beta chain variable domain of TCR clone 121826 (TRBV7-9, TRBJ2-7)
CASSSSGLAVYEQYF

SEQ ID NO: 243653 - protein, 16 aa, Homo sapiens
  CDR3 for alpha chain variable domain of TCR clone 121827 (TRAV3, TRAJ5)
CAVRNLMDTGRRALTF

SEQ ID NO: 243654 - protein, 11 aa, Homo sapiens
  CDR3 for beta chain variable domain of TCR clone 121827 (TRBV12-4, TRBJ2-3)
CASTATDTQYF

SEQ ID NO: 243655 - protein, 12 aa, Homo sapiens
  CDR3 for alpha chain variable domain of TCR clone 121828 (TRAV26-1, TRAJ13)
CIVSRGYQKVTF

SEQ ID NO: 243656 - protein, 14 aa, Homo sapiens
  CDR3 for beta chain variable domain of TCR clone 121828 (TRBV19, TRBJ2-1)
CASPTFVLSGEQFF

SEQ ID NO: 243657 - protein, 15 aa, Homo sapiens
  CDR3 for alpha chain variable domain of TCR clone 121829 (TRAV8-3, TRAJ45)
CASSYSGGGADGLTF

SEQ ID NO: 243658 - protein, 13 aa, Homo sapiens
  CDR3 for beta chain variable domain of TCR clone 121829 (TRBV11-2, TRBJ2-5)
CASSFSSQETQYF

SEQ ID NO: 243659 - protein, 13 aa, Homo sapiens
  CDR3 for alpha chain variable domain of TCR clone 121830 (TRAV13-1, TRAJ39)
CAASIWAGNMLTF

SEQ ID NO: 243660 - protein, 14 aa, Homo sapiens
  CDR3 for beta chain variable domain of TCR clone 121830 (TRBV12-5, TRBJ2-5)
CASGSRTHQETQYF

SEQ ID NO: 243661 - protein, 13 aa, Homo sapiens
  CDR3 for alpha chain variable domain of TCR clone 121831 (TRAV16, TRAJ31)
CALSAHNNARLML

SEQ ID NO: 243662 - protein, 17 aa, Homo sapiens
  CDR3 for beta chain variable domain of TCR clone 121831 (TRBV12-4, TRBJ2-1)
CASSPGLAGGRINEQFF

SEQ ID NO: 243663 - protein, 15 aa, Homo sapiens
  CDR3 for alpha chain variable domain of TCR clone 121832 (TRAV3, TRAJ47)
CVVRDIGEYGNKLVF

SEQ ID NO: 243664 - protein, 14 aa, Homo sapiens
  CDR3 for beta chain variable domain of TCR clone 121832 (TRBV13, TRBJ2-5)
CASSLERVGETQYF

SEQ ID NO: 243665 - protein, 14 aa, Homo sapiens
  CDR3 for alpha chain variable domain of TCR clone 121833 (TRAV35, TRAJ50)
CAGHRKTSYDKVIF

SEQ ID NO: 243666 - protein, 12 aa, Homo sapiens
  CDR3 for beta chain variable domain of TCR clone 121833 (TRBV12-4, TRBJ2-7)
CASSLGGYEQYF

SEQ ID NO: 243667 - protein, 13 aa, Homo sapiens
  CDR3 for alpha chain variable domain of TCR clone 121834 (TRAV26-2, TRAJ43)
CILRAVNNNDMRF

SEQ ID NO: 243668 - protein, 14 aa, Homo sapiens
  CDR3 for beta chain variable domain of TCR clone 121834 (TRBV7-6, TRBJ2-3)
CASSLGTVTDTQYF

SEQ ID NO: 243669 - protein, 16 aa, Homo sapiens
  CDR3 for alpha chain variable domain of TCR clone 121835 (TRAV30, TRAJ24)
CGTEIVDAVSWGKFQF

SEQ ID NO: 243670 - protein, 14 aa, Homo sapiens
  CDR3 for beta chain variable domain of TCR clone 121835 (TRBV7-9, TRBJ2-4)
CASSLAMGGNIQYF

SEQ ID NO: 243671 - protein, 11 aa, Homo sapiens
  CDR3 for alpha chain variable domain of TCR clone 121836 (TRAV21, TRAJ26)
CCVNYGQNFVF

SEQ ID NO: 243672 - protein, 16 aa, Homo sapiens
  CDR3 for beta chain variable domain of TCR clone 121836 (TRBV19, TRBJ2-2)
CASRSPGTGATGELFF

SEQ ID NO: 243673 - protein, 15 aa, Homo sapiens
  CDR3 for alpha chain variable domain of TCR clone 121837 (TRAV8-2, TRAJ16)
CVVSDGFSDGQKLLF

SEQ ID NO: 243674 - protein, 13 aa, Homo sapiens
  CDR3 for beta chain variable domain of TCR clone 121837 (TRBV10-3, TRBJ2-7)
CASKLAVNYEQYF

SEQ ID NO: 243675 - protein, 14 aa, Homo sapiens
  CDR3 for alpha chain variable domain of TCR clone 121838 (TRAV26-2, TRAJ32)
CCVGYGGATNKLIF

SEQ ID NO: 243676 - protein, 14 aa, Homo sapiens
  CDR3 for beta chain variable domain of TCR clone 121838 (TRBV4-2, TRBJ2-1)
CASGLDRAYNEQFL

SEQ ID NO: 243677 - protein, 12 aa, Homo sapiens
  CDR3 for alpha chain variable domain of TCR clone 121839 (TRAV8-3, TRAJ26)
CAGDNCGQNFVF

SEQ ID NO: 243678 - protein, 15 aa, Homo sapiens
  CDR3 for beta chain variable domain of TCR clone 121839 (TRBV9, TRBJ2-1)
CASSLAGSSYNEQFF

SEQ ID NO: 243679 - protein, 12 aa, Homo sapiens
  CDR3 for alpha chain variable domain of TCR clone 121840 (TRAV13-2, TRAJ23)
CAERHRGGKLIF

SEQ ID NO: 243680 - protein, 13 aa, Homo sapiens
  CDR3 for beta chain variable domain of TCR clone 121840 (TRBV12-5, TRBJ2-1)
CASGLGRGNEQFF

SEQ ID NO: 243681 - protein, 14 aa, Homo sapiens
  CDR3 for alpha chain variable domain of TCR clone 121841 (TRAV21, TRAJ35)
CAVTPIGFGNVLHC

SEQ ID NO: 243682 - protein, 12 aa, Homo sapiens
  CDR3 for beta chain variable domain of TCR clone 121841 (TRBV7-9, TRBJ2-7)
CASSIKREEQYF

SEQ ID NO: 243683 - protein, 16 aa, Homo sapiens
  CDR3 for alpha chain variable domain of TCR clone 121842 (TRAV1-2, TRAJ10)
CAVRDQGGGGGNKLTF

SEQ ID NO: 243684 - protein, 13 aa, Homo sapiens
  CDR3 for beta chain variable domain of TCR clone 121842 (TRBV29-1, TRBJ1-1)
CSVGDSRNTEAFL

SEQ ID NO: 243685 - protein, 10 aa, Homo sapiens
  CDR3 for alpha chain variable domain of TCR clone 121843 (TRAV27, TRAJ37)
CAGGVGKLIF

SEQ ID NO: 243686 - protein, 15 aa, Homo sapiens
  CDR3 for beta chain variable domain of TCR clone 121843 (TRBV5-1, TRBJ2-5)
CASSFKGGDQETQYF

SEQ ID NO: 243687 - protein, 13 aa, Homo sapiens
  CDR3 for alpha chain variable domain of TCR clone 121844 (TRAV13-2, TRAJ13)
CAERPGGYQKVTF

SEQ ID NO: 243688 - protein, 16 aa, Homo sapiens
  CDR3 for beta chain variable domain of TCR clone 121844 (TRBV18, TRBJ2-5)
CASSPPSSGGAETQYF

SEQ ID NO: 243689 - protein, 15 aa, Homo sapiens
  CDR3 for alpha chain variable domain of TCR clone 121845 (TRAV12-1, TRAJ44)
CVVEEYTGTASKLTF

SEQ ID NO: 243690 - protein, 14 aa, Homo sapiens
  CDR3 for beta chain variable domain of TCR clone 121845 (TRBV5-1, TRBJ1-2)
CASSLEPVNYGYTF

SEQ ID NO: 243691 - protein, 14 aa, Homo sapiens
  CDR3 for alpha chain variable domain of TCR clone 121846 (TRAV12-2, TRAJ17)
CAVLFKAAGNKLTF

SEQ ID NO: 243692 - protein, 14 aa, Homo sapiens
  CDR3 for beta chain variable domain of TCR clone 121846 (TRBV7-8, TRBJ2-1)
CASSATGGQETQYF

SEQ ID NO: 243693 - protein, 13 aa, Homo sapiens
  CDR3 for alpha chain variable domain of TCR clone 121847 (TRAV12-3, TRAJ35)
CAVAIGFGNVLHC

SEQ ID NO: 243694 - protein, 15 aa, Homo sapiens
  CDR3 for beta chain variable domain of TCR clone 121847 (TRBV20-1, TRBJ2-1)
CSARGSGTYYNEQFF

SEQ ID NO: 243695 - protein, 17 aa, Homo sapiens
  CDR3 for alpha chain variable domain of TCR clone 121848 (TRAV13-1, TRAJ52)
CAASSGAGGTSYGKLTF

SEQ ID NO: 243696 - protein, 15 aa, Homo sapiens
  CDR3 for beta chain variable domain of TCR clone 121848 (TRBV18, TRBJ2-5)
CASSPVVQTAETQYF

SEQ ID NO: 243697 - protein, 15 aa, Homo sapiens
  CDR3 for alpha chain variable domain of TCR clone 121849 (TRAV17, TRAJ57)
CATGPSQGGSEKLVL

SEQ ID NO: 243698 - protein, 14 aa, Homo sapiens
  CDR3 for beta chain variable domain of TCR clone 121849 (TRBV12-5, TRBJ2-5)
CASGSRTHQETQYF

SEQ ID NO: 243699 - protein, 13 aa, Homo sapiens
  CDR3 for alpha chain variable domain of TCR clone 121850 (TRAV12-2, TRAJ20)
CAVYPSIDYKLSF

SEQ ID NO: 243700 - protein, 15 aa, Homo sapiens
  CDR3 for beta chain variable domain of TCR clone 121850 (TRBV27, TRBJ2-5)
CASSLYPRGGETQYF

SEQ ID NO: 243701 - protein, 11 aa, Homo sapiens
  CDR3 for alpha chain variable domain of TCR clone 121851 (TRAV23/DV6, TRAJ58)
CAARLLRGETS

SEQ ID NO: 243702 - protein, 17 aa, Homo sapiens
  CDR3 for beta chain variable domain of TCR clone 121851 (TRBV7-3, TRBJ2-3)
CASSLMKRMRGADTQYF

SEQ ID NO: 243703 - protein, 14 aa, Homo sapiens
  CDR3 for alpha chain variable domain of TCR clone 121852 (TRAV9-2, TRAJ39)
CALYIYNAGNMPTF

SEQ ID NO: 243704 - protein, 17 aa, Homo sapiens
  CDR3 for beta chain variable domain of TCR clone 121852 (TRBV20-1, TRBJ2-2)
CSASGSGQGGLTGELFF

SEQ ID NO: 243705 - protein, 18 aa, Homo sapiens
  CDR3 for alpha chain variable domain of TCR clone 121853 (TRAV26-1, TRAJ23)
CIVRVGLEVWNQGGKLIF

SEQ ID NO: 243706 - protein, 16 aa, Homo sapiens
  CDR3 for beta chain variable domain of TCR clone 121853 (TRBV12-4, TRBJ2-5)
CTSSFFVRGRQETQYF

SEQ ID NO: 243707 - protein, 14 aa, Homo sapiens
  CDR3 for alpha chain variable domain of TCR clone 121854 (TRAV29/DV5, TRAJ32)
CAAAYGGATNKLIF

SEQ ID NO: 243708 - protein, 11 aa, Homo sapiens
  CDR3 for beta chain variable domain of TCR clone 121854 (TRBV11-2, TRBJ2-2)
RASSLPGELFF

SEQ ID NO: 243709 - protein, 16 aa, Homo sapiens
  CDR3 for alpha chain variable domain of TCR clone 121855 (TRAV8-3, TRAJ13)
CAVGAYPSWGYQKVTF

SEQ ID NO: 243710 - protein, 15 aa, Homo sapiens
  CDR3 for beta chain variable domain of TCR clone 121855 (TRBV19, TRBJ1-5)
CASSIVWADNQPQHF

SEQ ID NO: 243711 - protein, 14 aa, Homo sapiens
  CDR3 for alpha chain variable domain of TCR clone 121856 (TRAV12-2, TRAJ40)
CAVKIPSGTYKYIF

SEQ ID NO: 243712 - protein, 14 aa, Homo sapiens
  CDR3 for beta chain variable domain of TCR clone 121856 (TRBV20-1, TRBJ1-1)
CSAQTRIGGTEAFI

SEQ ID NO: 243713 - protein, 17 aa, Homo sapiens
  CDR3 for alpha chain variable domain of TCR clone 121857 (TRAV13-1, TRAJ52)
CAASSGAGGTSYGKLTF

SEQ ID NO: 243714 - protein, 15 aa, Homo sapiens
  CDR3 for beta chain variable domain of TCR clone 121857 (TRBV2, TRBJ2-1)
CASSVLAGSYNEQFF

SEQ ID NO: 243715 - protein, 14 aa, Homo sapiens
  CDR3 for alpha chain variable domain of TCR clone 121858 (TRAV26-1, TRAJ34)
CIVRVAYNNDKLIF

SEQ ID NO: 243716 - protein, 14 aa, Homo sapiens
  CDR3 for beta chain variable domain of TCR clone 121858 (TRBV20-1, TRBJ2-7)
CSAWTALSSYEQYF

SEQ ID NO: 243717 - protein, 12 aa, Homo sapiens
  CDR3 for alpha chain variable domain of TCR clone 121859 (TRAV12-3, TRAJ17)
CALTLTGNKLTF

SEQ ID NO: 243718 - protein, 15 aa, Homo sapiens
  CDR3 for beta chain variable domain of TCR clone 121859 (TRBV20-1, TRBJ2-7)
CSARDRVSGMDERYF

SEQ ID NO: 243719 - protein, 13 aa, Homo sapiens
  CDR3 for alpha chain variable domain of TCR clone 121860 (TRAV21, TRAJ37)
CAVSSGNTGKLIF

SEQ ID NO: 243720 - protein, 16 aa, Homo sapiens
  CDR3 for beta chain variable domain of TCR clone 121860 (TRBV20-1, TRBJ1-4)
CSAPGQGLLTNEKLFF

SEQ ID NO: 243721 - protein, 13 aa, Homo sapiens
  CDR3 for alpha chain variable domain of TCR clone 121861 (TRAV12-3, TRAJ54)
CALVPQGAQKLVF

SEQ ID NO: 243722 - protein, 15 aa, Homo sapiens
  CDR3 for beta chain variable domain of TCR clone 121861 (TRBV4-1, TRBJ2-2)
CASSQDSRGTRELFF

SEQ ID NO: 243723 - protein, 15 aa, Homo sapiens
  CDR3 for alpha chain variable domain of TCR clone 121862 (TRAV25, TRAJ52)
CGGRPGGTSYGKLTF

SEQ ID NO: 243724 - protein, 17 aa, Homo sapiens
  CDR3 for beta chain variable domain of TCR clone 121862 (TRBV7-8, TRBJ2-6)
CASSAGTGGAGANVLTF

SEQ ID NO: 243725 - protein, 14 aa, Homo sapiens
  CDR3 for alpha chain variable domain of TCR clone 121863 (TRAV16, TRAJ42)
CALLAGGSQGNLIF

SEQ ID NO: 243726 - protein, 17 aa, Homo sapiens
  CDR3 for beta chain variable domain of TCR clone 121863 (TRBV7-8, TRBJ2-6)
CASSAGTGGAGANVLTF

SEQ ID NO: 243727 - protein, 14 aa, Homo sapiens
  CDR3 for alpha chain variable domain of TCR clone 121864 (TRAV2, TRAJ37)
CAVDFTSNTGKLIF

SEQ ID NO: 243728 - protein, 18 aa, Homo sapiens
  CDR3 for beta chain variable domain of TCR clone 121864 (TRBV7-9, TRBJ2-7)
CASSLTTSGSRTWYEQYF

SEQ ID NO: 243729 - protein, 13 aa, Homo sapiens
  CDR3 for alpha chain variable domain of TCR clone 121865 (TRAV26-1, TRAJ36)
CIVVGTGANNLFF

SEQ ID NO: 243730 - protein, 13 aa, Homo sapiens
  CDR3 for beta chain variable domain of TCR clone 121865 (TRBV6-5, TRBJ2-6)
CASSTSGPLRLDV

SEQ ID NO: 243731 - protein, 19 aa, Homo sapiens
  CDR3 for alpha chain variable domain of TCR clone 121866 (TRAV2, TRAJ20)
ILQVREADAAVYRDCKLSF

SEQ ID NO: 243732 - protein, 14 aa, Homo sapiens
  CDR3 for beta chain variable domain of TCR clone 121866 (TRBV12-4, TRBJ1-1)
CASSLGTGGTEAFF

SEQ ID NO: 243733 - protein, 20 aa, Homo sapiens
  CDR3 for alpha chain variable domain of TCR clone 121867 (TRAV26-1, TRAJ47)
CCVLLHRQSSFMEYGNKLVF

SEQ ID NO: 243734 - protein, 14 aa, Homo sapiens
  CDR3 for beta chain variable domain of TCR clone 121867 (TRBV7-2, TRBJ1-2)
CASSRGGTNCGYTF

SEQ ID NO: 243735 - protein, 11 aa, Homo sapiens
  CDR3 for alpha chain variable domain of TCR clone 121868 (TRAV3, TRAJ21)
CAVGNFNKFYL

SEQ ID NO: 243736 - protein, 16 aa, Homo sapiens
  CDR3 for beta chain variable domain of TCR clone 121868 (TRBV19, TRBJ2-1)
CASSKAGPSSYNEQFF

SEQ ID NO: 243737 - protein, 13 aa, Homo sapiens
  CDR3 for alpha chain variable domain of TCR clone 121869 (TRAV2, TRAJ24)
CAVTPDSWGKLQF

SEQ ID NO: 243738 - protein, 14 aa, Homo sapiens
  CDR3 for beta chain variable domain of TCR clone 121869 (TRBV13, TRBJ2-5)
CASSLGRGQETQYF

SEQ ID NO: 243739 - protein, 17 aa, Homo sapiens
  CDR3 for alpha chain variable domain of TCR clone 121870 (TRAV13-1, TRAJ52)
CAASSGAGGTSYGKLTF

SEQ ID NO: 243740 - protein, 13 aa, Homo sapiens
  CDR3 for beta chain variable domain of TCR clone 121870 (TRBV4-2, TRBJ1-1)
CASSQAGDTEAFF

SEQ ID NO: 243741 - protein, 16 aa, Homo sapiens
  CDR3 for alpha chain variable domain of TCR clone 121871 (TRAV16, TRAJ4)
CSLSRMFSGGYNKLIF

SEQ ID NO: 243742 - protein, 12 aa, Homo sapiens
  CDR3 for beta chain variable domain of TCR clone 121871 (TRBV29-1, TRBJ2-3)
CSVTGGADTQYF

SEQ ID NO: 243743 - protein, 16 aa, Homo sapiens
  CDR3 for alpha chain variable domain of TCR clone 121872 (TRAV4, TRAJ22)
CLVGDLYSGSARQLTF

SEQ ID NO: 243744 - protein, 16 aa, Homo sapiens
  CDR3 for beta chain variable domain of TCR clone 121872 (TRBV7-9, TRBJ2-1)
CACSDVAGGSYNEQFF

SEQ ID NO: 243745 - protein, 15 aa, Homo sapiens
  CDR3 for alpha chain variable domain of TCR clone 121873 (TRAV26-1, TRAJ24)
CIVREDTDSWGKLQF

SEQ ID NO: 243746 - protein, 14 aa, Homo sapiens
  CDR3 for beta chain variable domain of TCR clone 121873 (TRBV7-2, TRBJ2-7)
CASSLYPGRYEQYF

SEQ ID NO: 243747 - protein, 12 aa, Homo sapiens
  CDR3 for alpha chain variable domain of TCR clone 121874 (TRAV5, TRAJ27)
CAEITNAGKSTF

SEQ ID NO: 243748 - protein, 15 aa, Homo sapiens
  CDR3 for beta chain variable domain of TCR clone 121874 (TRBV11-2, TRBJ1-2)
CASSLEGVQGNGYTF

SEQ ID NO: 243749 - protein, 11 aa, Homo sapiens
  CDR3 for alpha chain variable domain of TCR clone 121875 (TRAV21, TRAJ34)
CAHYNTDKLIF

SEQ ID NO: 243750 - protein, 13 aa, Homo sapiens
  CDR3 for beta chain variable domain of TCR clone 121875 (TRBV7-6, TRBJ1-2)
CASSLVADYGYNF

SEQ ID NO: 243751 - protein, 11 aa, Homo sapiens
  CDR3 for alpha chain variable domain of TCR clone 121876 (TRAV2, TRAJ13)
CASGGYQKVTF

SEQ ID NO: 243752 - protein, 14 aa, Homo sapiens
  CDR3 for beta chain variable domain of TCR clone 121876 (TRBV19, TRBJ2-2)
CASSTLHRSGELFF

SEQ ID NO: 243753 - protein, 14 aa, Homo sapiens
  CDR3 for alpha chain variable domain of TCR clone 121877 (TRAV1-2, TRAJ8)
CAVREDTGFQKLVF

SEQ ID NO: 243754 - protein, 17 aa, Homo sapiens
  CDR3 for beta chain variable domain of TCR clone 121877 (TRBV19, TRBJ1-1)
CASSIAGRGLMNTEAFF

SEQ ID NO: 243755 - protein, 13 aa, Homo sapiens
  CDR3 for alpha chain variable domain of TCR clone 121878 (TRAV21, TRAJ57)
CAVTQGRSEKLVF

SEQ ID NO: 243756 - protein, 17 aa, Homo sapiens
  CDR3 for beta chain variable domain of TCR clone 121878 (TRBV13, TRBJ2-3)
CASSLSRVAGGRNTQYF

SEQ ID NO: 243757 - protein, 13 aa, Homo sapiens
  CDR3 for alpha chain variable domain of TCR clone 121879 (TRAV5, TRAJ30)
CAEIANRDDKIIL

SEQ ID NO: 243758 - protein, 14 aa, Homo sapiens
  CDR3 for beta chain variable domain of TCR clone 121879 (TRBV4-1, TRBJ2-2)
CASSQAVNTGELFF

SEQ ID NO: 243759 - protein, 15 aa, Homo sapiens
  CDR3 for alpha chain variable domain of TCR clone 121880 (TRAV3, TRAJ9)
CAVRARNTGGFNTIF

SEQ ID NO: 243760 - protein, 12 aa, Homo sapiens
  CDR3 for beta chain variable domain of TCR clone 121880 (TRBV11-2, TRBJ2-7)
CASSLPTYEQYF

SEQ ID NO: 243761 - protein, 14 aa, Homo sapiens
  CDR3 for alpha chain variable domain of TCR clone 121881 (TRAV1-2, TRAJ27)
CAVRSGTNAGKSTL

SEQ ID NO: 243762 - protein, 15 aa, Homo sapiens
  CDR3 for beta chain variable domain of TCR clone 121881 (TRBV18, TRBJ2-7)
CASSPLQGRTYEQYF

SEQ ID NO: 243763 - protein, 12 aa, Homo sapiens
  CDR3 for alpha chain variable domain of TCR clone 121882 (TRAV21, TRAJ33)
CAKMDSNYQLIW

SEQ ID NO: 243764 - protein, 15 aa, Homo sapiens
  CDR3 for beta chain variable domain of TCR clone 121882 (TRBV10-3, TRBJ2-5)
CAISEFGRGQETQYF

SEQ ID NO: 243765 - protein, 14 aa, Homo sapiens
  CDR3 for alpha chain variable domain of TCR clone 121883 (TRAV12-2, TRAJ11)
CAVEGGSGYSTLTF

SEQ ID NO: 243766 - protein, 20 aa, Homo sapiens
  CDR3 for beta chain variable domain of TCR clone 121883 (TRBV7-8, TRBJ2-2)
CASSHLFPGPTIHITGELFF

SEQ ID NO: 243767 - protein, 13 aa, Homo sapiens
  CDR3 for alpha chain variable domain of TCR clone 121884 (TRAV8-6, TRAJ49)
CAVITNTGNQFYF

SEQ ID NO: 243768 - protein, 13 aa, Homo sapiens
  CDR3 for beta chain variable domain of TCR clone 121884 (TRBV19, TRBJ1-2)
CASSVPGQDGYTF

SEQ ID NO: 243769 - protein, 14 aa, Homo sapiens
  CDR3 for alpha chain variable domain of TCR clone 121885 (TRAV1-2, TRAJ8)
CAVREDTGFRKLVF

SEQ ID NO: 243770 - protein, 15 aa, Homo sapiens
  CDR3 for beta chain variable domain of TCR clone 121885 (TRBV12-4, TRBJ2-5)
CASSPPTGLQETQYF

SEQ ID NO: 243771 - protein, 14 aa, Homo sapiens
  CDR3 for alpha chain variable domain of TCR clone 121886 (TRAV16, TRAJ42)
CALLAGGSQGNLIF

SEQ ID NO: 243772 - protein, 13 aa, Homo sapiens
  CDR3 for beta chain variable domain of TCR clone 121886 (TRBV7-9, TRBJ2-3)
CASSPGSTDTQYF

SEQ ID NO: 243773 - protein, 13 aa, Homo sapiens
  CDR3 for alpha chain variable domain of TCR clone 121887 (TRAV13-2, TRAJ53)
CAENMGSNYKLTF

SEQ ID NO: 243774 - protein, 13 aa, Homo sapiens
  CDR3 for beta chain variable domain of TCR clone 121887 (TRBV10-3, TRBJ2-7)
CASKLAVNYEQYF

SEQ ID NO: 243775 - protein, 14 aa, Homo sapiens
  CDR3 for alpha chain variable domain of TCR clone 121888 (TRAV1-2, TRAJ6)
CAVSLSGGSYIPIF

SEQ ID NO: 243776 - protein, 15 aa, Homo sapiens
  CDR3 for beta chain variable domain of TCR clone 121888 (TRBV28, TRBJ2-7)
CASSPGGRGFYEQYF

SEQ ID NO: 243777 - protein, 15 aa, Homo sapiens
  CDR3 for alpha chain variable domain of TCR clone 121889 (TRAV4, TRAJ8)
CLVGEQHTVFQKLVF

SEQ ID NO: 243778 - protein, 15 aa, Homo sapiens
  CDR3 for beta chain variable domain of TCR clone 121889 (TRBV7-9, TRBJ2-5)
CASSNRDYLQETQYF

SEQ ID NO: 243779 - protein, 23 aa, Homo sapiens
  CDR3 for alpha chain variable domain of TCR clone 121890 (TRAV26-1, TRAJ38)
CIADNAGNNHIQNPDPAVYQLRD

SEQ ID NO: 243780 - protein, 16 aa, Homo sapiens
  CDR3 for beta chain variable domain of TCR clone 121890 (TRBV11-2, TRBJ2-7)
CASSPTTGGVSYEQYF

SEQ ID NO: 243781 - protein, 18 aa, Homo sapiens
  CDR3 for alpha chain variable domain of TCR clone 121891 (TRAV21, TRAJ52)
CAVRPSPAGGTSYGKLTF

SEQ ID NO: 243782 - protein, 15 aa, Homo sapiens
  CDR3 for beta chain variable domain of TCR clone 121891 (TRBV7-2, TRBJ1-2)
CASSPRAGWNYGYTF

SEQ ID NO: 243783 - protein, 13 aa, Homo sapiens
  CDR3 for alpha chain variable domain of TCR clone 121892 (TRAV12-1, TRAJ33)
CGDAPDSNYQLIW

SEQ ID NO: 243784 - protein, 15 aa, Homo sapiens
  CDR3 for beta chain variable domain of TCR clone 121892 (TRBV11-1, TRBJ2-1)
CASSNGGGSSNEQFF

SEQ ID NO: 243785 - protein, 15 aa, Homo sapiens
  CDR3 for alpha chain variable domain of TCR clone 121893 (TRAV35, TRAJ40)
CAGQLGTSGTYKYIF

SEQ ID NO: 243786 - protein, 14 aa, Homo sapiens
  CDR3 for beta chain variable domain of TCR clone 121893 (TRBV7-3, TRBJ2-1)
CASSLAGGTNERFF

SEQ ID NO: 243787 - protein, 13 aa, Homo sapiens
  CDR3 for alpha chain variable domain of TCR clone 121894 (TRAV20, TRAJ40)
CAVPFSGTYKYIF

SEQ ID NO: 243788 - protein, 15 aa, Homo sapiens
  CDR3 for beta chain variable domain of TCR clone 121894 (TRBV7-3, TRBJ2-1)
CASSPTGGGEVEQFF

SEQ ID NO: 243789 - protein, 13 aa, Homo sapiens
  CDR3 for alpha chain variable domain of TCR clone 121895 (TRAV23/DV6, TRAJ33)
CAASADSNYQLIW

SEQ ID NO: 243790 - protein, 13 aa, Homo sapiens
  CDR3 for beta chain variable domain of TCR clone 121895 (TRBV12-5, TRBJ2-3)
CASQNRGTDTQYF

SEQ ID NO: 243791 - protein, 17 aa, Homo sapiens
  CDR3 for alpha chain variable domain of TCR clone 121896 (TRAV3, TRAJ42)
CAVRDRDYGGSQGNLIF

SEQ ID NO: 243792 - protein, 13 aa, Homo sapiens
  CDR3 for beta chain variable domain of TCR clone 121896 (TRBV12-4, TRBJ2-5)
CASRLAVQETQYF

SEQ ID NO: 243793 - protein, 18 aa, Homo sapiens
  CDR3 for alpha chain variable domain of TCR clone 121897 (TRAV26-2, TRAJ45)
CILRLWGYSGGGADGLNF

SEQ ID NO: 243794 - protein, 17 aa, Homo sapiens
  CDR3 for beta chain variable domain of TCR clone 121897 (TRBV28, TRBJ2-3)
CASSPTPAGGRVDTQYF

SEQ ID NO: 243795 - protein, 17 aa, Homo sapiens
  CDR3 for alpha chain variable domain of TCR clone 121898 (TRAV3, TRAJ6)
CAVRDGPRAGGSYRPTF

SEQ ID NO: 243796 - protein, 16 aa, Homo sapiens
  CDR3 for beta chain variable domain of TCR clone 121898 (TRBV5-1, TRBJ2-2)
CASSFPAGANTGELFF

SEQ ID NO: 243797 - protein, 14 aa, Homo sapiens
  CDR3 for alpha chain variable domain of TCR clone 121899 (TRAV13-1, TRAJ44)
CAAKATGTASKLTF

SEQ ID NO: 243798 - protein, 11 aa, Homo sapiens
  CDR3 for beta chain variable domain of TCR clone 121899 (TRBV11-2, TRBJ2-2)
CASSLPGELFF

SEQ ID NO: 243799 - protein, 13 aa, Homo sapiens
  CDR3 for alpha chain variable domain of TCR clone 121900 (TRAV27, TRAJ11)
CAGGGSGYSTFTF

SEQ ID NO: 243800 - protein, 15 aa, Homo sapiens
  CDR3 for beta chain variable domain of TCR clone 121900 (TRBV5-1, TRBJ1-1)
CASSLGQGRFAEAFF

SEQ ID NO: 243801 - protein, 15 aa, Homo sapiens
  CDR3 for alpha chain variable domain of TCR clone 121901 (TRAV21, TRAJ10)
CAVRGLTGGGNKLTF

SEQ ID NO: 243802 - protein, 14 aa, Homo sapiens
  CDR3 for beta chain variable domain of TCR clone 121901 (TRBV19, TRBJ2-2)
CASSTLHRSGELFF

SEQ ID NO: 243803 - protein, 15 aa, Homo sapiens
  CDR3 for alpha chain variable domain of TCR clone 121902 (TRAV17, TRAJ35)
CATAFVIGFGNVLHC

SEQ ID NO: 243804 - protein, 15 aa, Homo sapiens
  CDR3 for beta chain variable domain of TCR clone 121902 (TRBV7-9, TRBJ2-7)
CASSVALAEAYEQYF

SEQ ID NO: 243805 - protein, 12 aa, Homo sapiens
  CDR3 for alpha chain variable domain of TCR clone 121903 (TRAV8-3, TRAJ41)
CAVALSGYALHF

SEQ ID NO: 243806 - protein, 16 aa, Homo sapiens
  CDR3 for beta chain variable domain of TCR clone 121903 (TRBV27, TRBJ2-7)
CASSSERRDSAYEQYF

SEQ ID NO: 243807 - protein, 14 aa, Homo sapiens
  CDR3 for alpha chain variable domain of TCR clone 121904 (TRAV1-2, TRAJ8)
CAVREDTGFQKLVF

SEQ ID NO: 243808 - protein, 13 aa, Homo sapiens
  CDR3 for beta chain variable domain of TCR clone 121904 (TRBV12-4, TRBJ1-5)
CASSPDRAQTQHF

SEQ ID NO: 243809 - protein, 17 aa, Homo sapiens
  CDR3 for alpha chain variable domain of TCR clone 121905 (TRAV26-1, TRAJ53)
CIVRVDDRGGSNYKLKF

SEQ ID NO: 243810 - protein, 15 aa, Homo sapiens
  CDR3 for beta chain variable domain of TCR clone 121905 (TRBV20-1, TRBJ2-7)
CSARVPAAYFYEQYF

SEQ ID NO: 243811 - protein, 14 aa, Homo sapiens
  CDR3 for alpha chain variable domain of TCR clone 121906 (TRAV4, TRAJ17)
CPVGDMAAGNKLTF

SEQ ID NO: 243812 - protein, 13 aa, Homo sapiens
  CDR3 for beta chain variable domain of TCR clone 121906 (TRBV18, TRBJ2-7)
CASQSGGGYEQYF

SEQ ID NO: 243813 - protein, 14 aa, Homo sapiens
  CDR3 for alpha chain variable domain of TCR clone 121907 (TRAV21, TRAJ4)
CAAPGGGGYNKLIF

SEQ ID NO: 243814 - protein, 13 aa, Homo sapiens
  CDR3 for beta chain variable domain of TCR clone 121907 (TRBV7-3, TRBJ2-1)
CASSPGSYNEQFF

SEQ ID NO: 243815 - protein, 12 aa, Homo sapiens
  CDR3 for alpha chain variable domain of TCR clone 121908 (TRAV12-1, TRAJ40)
CVVYSGTYKYNF

SEQ ID NO: 243816 - protein, 15 aa, Homo sapiens
  CDR3 for beta chain variable domain of TCR clone 121908 (TRBV7-9, TRBJ1-6)
CASSSPGRGNSPLHF

SEQ ID NO: 243817 - protein, 17 aa, Homo sapiens
  CDR3 for alpha chain variable domain of TCR clone 121909 (TRAV1-2, TRAJ8)
CAVRDHDENTGFQKLVF

SEQ ID NO: 243818 - protein, 16 aa, Homo sapiens
  CDR3 for beta chain variable domain of TCR clone 121909 (TRBV7-9, TRBJ2-2)
CASSGFGGANTGELFF

SEQ ID NO: 243819 - protein, 15 aa, Homo sapiens
  CDR3 for alpha chain variable domain of TCR clone 121910 (TRAV2, TRAJ41)
CAVGLGSNSGYALNF

SEQ ID NO: 243820 - protein, 13 aa, Homo sapiens
  CDR3 for beta chain variable domain of TCR clone 121910 (TRBV4-2, TRBJ1-1)
CASSQAGNTEAFF

SEQ ID NO: 243821 - protein, 13 aa, Homo sapiens
  CDR3 for alpha chain variable domain of TCR clone 121911 (TRAV12-1, TRAJ34)
RVVTGYNTDKLIF

SEQ ID NO: 243822 - protein, 13 aa, Homo sapiens
  CDR3 for beta chain variable domain of TCR clone 121911 (TRBV28, TRBJ2-7)
CASKAGGVYEQYF

SEQ ID NO: 243823 - protein, 18 aa, Homo sapiens
  CDR3 for alpha chain variable domain of TCR clone 121912 (TRAV26-1, TRAJ5)
CIVRVVPPRDTGRRALTF

SEQ ID NO: 243824 - protein, 15 aa, Homo sapiens
  CDR3 for beta chain variable domain of TCR clone 121912 (TRBV7-9, TRBJ2-7)
CASSLPMGQAKEQYF

SEQ ID NO: 243825 - protein, 13 aa, Homo sapiens
  CDR3 for alpha chain variable domain of TCR clone 121913 (TRAV17, TRAJ40)
CATRSPGTYKYIF

SEQ ID NO: 243826 - protein, 12 aa, Homo sapiens
  CDR3 for beta chain variable domain of TCR clone 121913 (TRBV11-2, TRBJ2-2)
CASSLGGGELFF

SEQ ID NO: 243827 - protein, 14 aa, Homo sapiens
  CDR3 for alpha chain variable domain of TCR clone 121914 (TRAV26-1, TRAJ49)
CIVRPRNTGNQFYF

SEQ ID NO: 243828 - protein, 13 aa, Homo sapiens
  CDR3 for beta chain variable domain of TCR clone 121914 (TRBV12-4, TRBJ2-4)
CASSNLRGNMQYF

SEQ ID NO: 243829 - protein, 15 aa, Homo sapiens
  CDR3 for alpha chain variable domain of TCR clone 121915 (TRAV3, TRAJ30)
CAVRDEYGRDDKIIF

SEQ ID NO: 243830 - protein, 16 aa, Homo sapiens
  CDR3 for beta chain variable domain of TCR clone 121915 (TRBV5-1, TRBJ2-5)
GASSLANHRGRETQYF

SEQ ID NO: 243831 - protein, 14 aa, Homo sapiens
  CDR3 for alpha chain variable domain of TCR clone 121916 (TRAV26-1, TRAJ21)
CIVRVVYNFNKFYL

SEQ ID NO: 243832 - protein, 11 aa, Homo sapiens
  CDR3 for beta chain variable domain of TCR clone 121916 (TRBV5-6, TRBJ2-5)
CASSLERTQYF

SEQ ID NO: 243833 - protein, 15 aa, Homo sapiens
  CDR3 for alpha chain variable domain of TCR clone 121917 (TRAV16, TRAJ12)
CSKWPLRDSSYKLIF

SEQ ID NO: 243834 - protein, 17 aa, Homo sapiens
  CDR3 for beta chain variable domain of TCR clone 121917 (TRBV13, TRBJ2-3)
CASSLSRVAGGRNTQYF

SEQ ID NO: 243835 - protein, 16 aa, Homo sapiens
  CDR3 for alpha chain variable domain of TCR clone 121918 (TRAV26-1, TRAJ23)
CIVRVHPYNQGGKLIF

SEQ ID NO: 243836 - protein, 15 aa, Homo sapiens
  CDR3 for beta chain variable domain of TCR clone 121918 (TRBV5-7, TRBJ2-7)
CASNPYFEGSYEQYF

SEQ ID NO: 243837 - protein, 11 aa, Homo sapiens
  CDR3 for alpha chain variable domain of TCR clone 121919 (TRAV1-2, TRAJ20)
CAVANDYKLSF

SEQ ID NO: 243838 - protein, 15 aa, Homo sapiens
  CDR3 for beta chain variable domain of TCR clone 121919 (TRBV2, TRBJ2-1)
FASSELAGSYNEQFF

SEQ ID NO: 243839 - protein, 14 aa, Homo sapiens
  CDR3 for alpha chain variable domain of TCR clone 121920 (TRAV8-3, TRAJ39)
CAVGANNAGNMLTF

SEQ ID NO: 243840 - protein, 16 aa, Homo sapiens
  CDR3 for beta chain variable domain of TCR clone 121920 (TRBV5-1, TRBJ2-7)
CASRPSFSNNPYEQYF

SEQ ID NO: 243841 - protein, 13 aa, Homo sapiens
  CDR3 for alpha chain variable domain of TCR clone 121921 (TRAV2, TRAJ21)
CAVEDLNFNKFYF

SEQ ID NO: 243842 - protein, 14 aa, Homo sapiens
  CDR3 for beta chain variable domain of TCR clone 121921 (TRBV6-1, TRBJ1-3)
CASVQGGGGNTIYF

SEQ ID NO: 243843 - protein, 16 aa, Homo sapiens
  CDR3 for alpha chain variable domain of TCR clone 121922 (TRAV1-1, TRAJ29)
CAVRSTRNSGNTPLVS

SEQ ID NO: 243844 - protein, 16 aa, Homo sapiens
  CDR3 for beta chain variable domain of TCR clone 121922 (TRBV27, TRBJ1-1)
CASSSRGRTGYTEAFF

SEQ ID NO: 243845 - protein, 13 aa, Homo sapiens
  CDR3 for alpha chain variable domain of TCR clone 121923 (TRAV4, TRAJ22)
CLGGSGSASQLTF

SEQ ID NO: 243846 - protein, 15 aa, Homo sapiens
  CDR3 for beta chain variable domain of TCR clone 121923 (TRBV7-9, TRBJ1-6)
CASSSPGRGNSPLHF

SEQ ID NO: 243847 - protein, 11 aa, Homo sapiens
  CDR3 for alpha chain variable domain of TCR clone 121924 (TRAV1-2, TRAJ20)
CAVSNDYKLSF

SEQ ID NO: 243848 - protein, 18 aa, Homo sapiens
  CDR3 for beta chain variable domain of TCR clone 121924 (TRBV27, TRBJ2-7)
CASSSSISLLGTSYEQYF

SEQ ID NO: 243849 - protein, 15 aa, Homo sapiens
  CDR3 for alpha chain variable domain of TCR clone 121925 (TRAV17, TRAJ13)
CATVPNSGGYQKVTF

SEQ ID NO: 243850 - protein, 17 aa, Homo sapiens
  CDR3 for beta chain variable domain of TCR clone 121925 (TRBV5-5, TRBJ1-2)
CASSLGSLDGQSEGYTF

SEQ ID NO: 243851 - protein, 12 aa, Homo sapiens
  CDR3 for alpha chain variable domain of TCR clone 121926 (TRAV3, TRAJ43)
CAVRDPNNDMRF

SEQ ID NO: 243852 - protein, 15 aa, Homo sapiens
  CDR3 for beta chain variable domain of TCR clone 121926 (TRBV6-5, TRBJ2-1)
CASSYDAGAGNEQFL

SEQ ID NO: 243853 - protein, 13 aa, Homo sapiens
  CDR3 for alpha chain variable domain of TCR clone 121927 (TRAV12-1, TRAJ34)
CVVTGYNTDKLIF

SEQ ID NO: 243854 - protein, 17 aa, Homo sapiens
  CDR3 for beta chain variable domain of TCR clone 121927 (TRBV11-2, TRBJ2-1)
CASSLYPPGVEYNEQFF

SEQ ID NO: 243855 - protein, 14 aa, Homo sapiens
  CDR3 for alpha chain variable domain of TCR clone 121928 (TRAV12-1, TRAJ36)
CVVNYWGKQPLLWD

SEQ ID NO: 243856 - protein, 14 aa, Homo sapiens
  CDR3 for beta chain variable domain of TCR clone 121928 (TRBV7-3, TRBJ1-1)
CASSLKGGNTEAFF

SEQ ID NO: 243857 - protein, 16 aa, Homo sapiens
  CDR3 for alpha chain variable domain of TCR clone 121929 (TRAV8-4, TRAJ9)
CSVTFNTGGFKDYLWS

SEQ ID NO: 243858 - protein, 15 aa, Homo sapiens
  CDR3 for beta chain variable domain of TCR clone 121929 (TRBV7-9, TRBJ2-2)
CASSPETGAGGELFF

SEQ ID NO: 243859 - protein, 13 aa, Homo sapiens
  CDR3 for alpha chain variable domain of TCR clone 121930 (TRAV17, TRAJ5)
CAPMDTGRRALTS

SEQ ID NO: 243860 - protein, 14 aa, Homo sapiens
  CDR3 for beta chain variable domain of TCR clone 121930 (TRBV29-1, TRBJ2-7)
CSVDQRQASYEQYF

SEQ ID NO: 243861 - protein, 14 aa, Homo sapiens
  CDR3 for alpha chain variable domain of TCR clone 121931 (TRAV2, TRAJ9)
CAVEDRSGGFKTIL

SEQ ID NO: 243862 - protein, 16 aa, Homo sapiens
  CDR3 for beta chain variable domain of TCR clone 121931 (TRBV7-3, TRBJ2-1)
CASSLEGYRSYNEQFF

SEQ ID NO: 243863 - protein, 13 aa, Homo sapiens
  CDR3 for alpha chain variable domain of TCR clone 121932 (TRAV13-2, TRAJ48)
CAEMDFGNEKLTF

SEQ ID NO: 243864 - protein, 16 aa, Homo sapiens
  CDR3 for beta chain variable domain of TCR clone 121932 (TRBV27, TRBJ2-2)
CASSCRGLVRTGELFF

SEQ ID NO: 243865 - protein, 12 aa, Homo sapiens
  CDR3 for alpha chain variable domain of TCR clone 121933 (TRAV17, TRAJ30)
CVPERRDDKIIF

SEQ ID NO: 243866 - protein, 14 aa, Homo sapiens
  CDR3 for beta chain variable domain of TCR clone 121933 (TRBV7-7, TRBJ2-2)
CASSRDRSTEELFF

SEQ ID NO: 243867 - protein, 12 aa, Homo sapiens
  CDR3 for alpha chain variable domain of TCR clone 121934 (TRAV13-1, TRAJ15)
CAASQAGTALIF

SEQ ID NO: 243868 - protein, 14 aa, Homo sapiens
  CDR3 for beta chain variable domain of TCR clone 121934 (TRBV19, TRBJ2-1)
CASPPFVLSGEQFF

SEQ ID NO: 243869 - protein, 14 aa, Homo sapiens
  CDR3 for alpha chain variable domain of TCR clone 121935 (TRAV8-1, TRAJ5)
CAVRTDAGRRALTF

SEQ ID NO: 243870 - protein, 14 aa, Homo sapiens
  CDR3 for beta chain variable domain of TCR clone 121935 (TRBV7-8, TRBJ2-3)
CASSFLDGQDTQYF

SEQ ID NO: 243871 - protein, 12 aa, Homo sapiens
  CDR3 for alpha chain variable domain of TCR clone 121936 (TRAV30, TRAJ39)
CGRGNAGNMLTF

SEQ ID NO: 243872 - protein, 14 aa, Homo sapiens
  CDR3 for beta chain variable domain of TCR clone 121936 (TRBV7-2, TRBJ2-7)
CASRSQGAAYEQYF

SEQ ID NO: 243873 - protein, 14 aa, Homo sapiens
  CDR3 for alpha chain variable domain of TCR clone 121937 (TRAV12-1, TRAJ26)
CVVKGSNYGQNFVF

SEQ ID NO: 243874 - protein, 14 aa, Homo sapiens
  CDR3 for beta chain variable domain of TCR clone 121937 (TRBV7-2, TRBJ2-7)
CASSPKASFYEQYF

SEQ ID NO: 243875 - protein, 14 aa, Homo sapiens
  CDR3 for alpha chain variable domain of TCR clone 121938 (TRAV21, TRAJ37)
CAVKGSSNTGKLIF

SEQ ID NO: 243876 - protein, 14 aa, Homo sapiens
  CDR3 for beta chain variable domain of TCR clone 121938 (TRBV7-2, TRBJ2-1)
CASSRGGARDEQFF

SEQ ID NO: 243877 - protein, 13 aa, Homo sapiens
  CDR3 for alpha chain variable domain of TCR clone 121939 (TRAV36/DV7, TRAJ53)
CALSGGSNYKLTF

SEQ ID NO: 243878 - protein, 13 aa, Homo sapiens
  CDR3 for beta chain variable domain of TCR clone 121939 (TRBV28, TRBJ2-4)
CASSQSSKSIQYF

SEQ ID NO: 243879 - protein, 14 aa, Homo sapiens
  CDR3 for alpha chain variable domain of TCR clone 121940 (TRAV12-2, TRAJ15)
CAPHTGQAGTALIF

SEQ ID NO: 243880 - protein, 17 aa, Homo sapiens
  CDR3 for beta chain variable domain of TCR clone 121940 (TRBV13, TRBJ2-3)
CASSLSRVAGGRNTQYF

SEQ ID NO: 243881 - protein, 16 aa, Homo sapiens
  CDR3 for alpha chain variable domain of TCR clone 121941 (TRAV1-2, TRAJ10)
CAMRGVLTGGGNKLTF

SEQ ID NO: 243882 - protein, 20 aa, Homo sapiens
  CDR3 for beta chain variable domain of TCR clone 121941 (TRBV7-8, TRBJ2-2)
CASSHLFPGPTIHITGELFF

SEQ ID NO: 243883 - protein, 15 aa, Homo sapiens
  CDR3 for alpha chain variable domain of TCR clone 121942 (TRAV17, TRAJ48)
CATDETNFGNEKLTF

SEQ ID NO: 243884 - protein, 14 aa, Homo sapiens
  CDR3 for beta chain variable domain of TCR clone 121942 (TRBV7-2, TRBJ2-7)
CASSPKTSFYEQYF

SEQ ID NO: 243885 - protein, 14 aa, Homo sapiens
  CDR3 for alpha chain variable domain of TCR clone 121943 (TRAV23/DV6, TRAJ58)
CAGMRETSGSRVTF

SEQ ID NO: 243886 - protein, 13 aa, Homo sapiens
  CDR3 for beta chain variable domain of TCR clone 121943 (TRBV28, TRBJ2-7)
CASRSSGVYEQYF

SEQ ID NO: 243887 - protein, 11 aa, Homo sapiens
  CDR3 for alpha chain variable domain of TCR clone 121944 (TRAV13-1, TRAJ20)
CAASNDYKLSF

SEQ ID NO: 243888 - protein, 15 aa, Homo sapiens
  CDR3 for beta chain variable domain of TCR clone 121944 (TRBV6-3, TRBJ2-7)
CASSSPGTVFYERYF

SEQ ID NO: 243889 - protein, 13 aa, Homo sapiens
  CDR3 for alpha chain variable domain of TCR clone 121945 (TRAV13-1, TRAJ5)
CAASDTGRRALTF

SEQ ID NO: 243890 - protein, 12 aa, Homo sapiens
  CDR3 for beta chain variable domain of TCR clone 121945 (TRBV28, TRBJ2-3)
CASSLYRDTQDF

SEQ ID NO: 243891 - protein, 13 aa, Homo sapiens
  CDR3 for alpha chain variable domain of TCR clone 121946 (TRAV36/DV7, TRAJ53)
CALSGGSNYKLTF

SEQ ID NO: 243892 - protein, 12 aa, Homo sapiens
  CDR3 for beta chain variable domain of TCR clone 121946 (TRBV29-1, TRBJ2-3)
CSVTGGADTQYF

SEQ ID NO: 243893 - protein, 15 aa, Homo sapiens
  CDR3 for alpha chain variable domain of TCR clone 121947 (TRAV26-2, TRAJ57)
CILRDIRGGSEQLVF

SEQ ID NO: 243894 - protein, 15 aa, Homo sapiens
  CDR3 for beta chain variable domain of TCR clone 121947 (TRBV2, TRBJ2-1)
CASDIGLAGEGEQFF

SEQ ID NO: 243895 - protein, 14 aa, Homo sapiens
  CDR3 for alpha chain variable domain of TCR clone 121948 (TRAV17, TRAJ23)
CATALGGQGGKLIF

SEQ ID NO: 243896 - protein, 14 aa, Homo sapiens
  CDR3 for beta chain variable domain of TCR clone 121948 (TRBV4-1, TRBJ2-2)
CASSQAVNTGELFF

SEQ ID NO: 243897 - protein, 10 aa, Homo sapiens
  CDR3 for alpha chain variable domain of TCR clone 121949 (TRAV36/DV7, TRAJ48)
CAVGNEKLTF

SEQ ID NO: 243898 - protein, 15 aa, Homo sapiens
  CDR3 for beta chain variable domain of TCR clone 121949 (TRBV28, TRBJ1-3)
CASSMGWASGNTIYF

SEQ ID NO: 243899 - protein, 17 aa, Homo sapiens
  CDR3 for alpha chain variable domain of TCR clone 121950 (TRAV8-6, TRAJ58)
CAVSSWVGETSGSRLTF

SEQ ID NO: 243900 - protein, 15 aa, Homo sapiens
  CDR3 for beta chain variable domain of TCR clone 121950 (TRBV7-9, TRBJ1-6)
CASSSPGRGNSPLHF

SEQ ID NO: 243901 - protein, 12 aa, Homo sapiens
  CDR3 for alpha chain variable domain of TCR clone 121951 (TRAV17, TRAJ54)
CAILQGAQKLVF

SEQ ID NO: 243902 - protein, 16 aa, Homo sapiens
  CDR3 for beta chain variable domain of TCR clone 121951 (TRBV12-5, TRBJ2-5)
CASGPRTSGNQETQYF

SEQ ID NO: 243903 - protein, 18 aa, Homo sapiens
  CDR3 for alpha chain variable domain of TCR clone 121952 (TRAV29/DV5, TRAJ52)
CAAGFRGAGGTSYGKLTF

SEQ ID NO: 243904 - protein, 16 aa, Homo sapiens
  CDR3 for beta chain variable domain of TCR clone 121952 (TRBV7-3, TRBJ2-2)
CASSLERGTLSGELFF

SEQ ID NO: 243905 - protein, 13 aa, Homo sapiens
  CDR3 for alpha chain variable domain of TCR clone 121953 (TRAV27, TRAJ17)
CAGDATAGNKLTF

SEQ ID NO: 243906 - protein, 15 aa, Homo sapiens
  CDR3 for beta chain variable domain of TCR clone 121953 (TRBV5-1, TRBJ2-3)
CASRNQAGSTDTQYF

SEQ ID NO: 243907 - protein, 14 aa, Homo sapiens
  CDR3 for alpha chain variable domain of TCR clone 121954 (TRAV12-3, TRAJ29)
CAMSPYSGNTHLVF

SEQ ID NO: 243908 - protein, 15 aa, Homo sapiens
  CDR3 for beta chain variable domain of TCR clone 121954 (TRBV27, TRBJ2-1)
CASSNGGGSSNEQFF

SEQ ID NO: 243909 - protein, 17 aa, Homo sapiens
  CDR3 for alpha chain variable domain of TCR clone 121955 (TRAV3, TRAJ42)
CAVRDRDYGGSQGNLIF

SEQ ID NO: 243910 - protein, 18 aa, Homo sapiens
  CDR3 for beta chain variable domain of TCR clone 121955 (TRBV4-1, TRBJ1-4)
CASSPRTGGAWTNEKLFF

SEQ ID NO: 243911 - protein, 15 aa, Homo sapiens
  CDR3 for alpha chain variable domain of TCR clone 121956 (TRAV17, TRAJ22)
CATVAPSGSARQLTF

SEQ ID NO: 243912 - protein, 16 aa, Homo sapiens
  CDR3 for beta chain variable domain of TCR clone 121956 (TRBV10-3, TRBJ2-7)
CAISADFADRPYKQYF

SEQ ID NO: 243913 - protein, 14 aa, Homo sapiens
  CDR3 for alpha chain variable domain of TCR clone 121957 (TRAV12-2, TRAJ3)
CAVSLYSRASKIIF

SEQ ID NO: 243914 - protein, 14 aa, Homo sapiens
  CDR3 for beta chain variable domain of TCR clone 121957 (TRBV27, TRBJ2-1)
CAGSIAETYNEQFF

SEQ ID NO: 243915 - protein, 12 aa, Homo sapiens
  CDR3 for alpha chain variable domain of TCR clone 121958 (TRAV21, TRAJ33)
CAKVDSNYQLIW

SEQ ID NO: 243916 - protein, 14 aa, Homo sapiens
  CDR3 for beta chain variable domain of TCR clone 121958 (TRBV2, TRBJ2-7)
CASSLTAGGYEQYF

SEQ ID NO: 243917 - protein, 13 aa, Homo sapiens
  CDR3 for alpha chain variable domain of TCR clone 121959 (TRAV16, TRAJ34)
CALTGYNTAKLIF

SEQ ID NO: 243918 - protein, 13 aa, Homo sapiens
  CDR3 for beta chain variable domain of TCR clone 121959 (TRBV6-1, TRBJ2-1)
CASREDGGHEQFF

SEQ ID NO: 243919 - protein, 11 aa, Homo sapiens
  CDR3 for alpha chain variable domain of TCR clone 121960 (TRAV2, TRAJ33)
CAVESNYQLIW

SEQ ID NO: 243920 - protein, 16 aa, Homo sapiens
  CDR3 for beta chain variable domain of TCR clone 121960 (TRBV12-4, TRBJ2-5)
CASSWRPSGDLETQYF

SEQ ID NO: 243921 - protein, 13 aa, Homo sapiens
  CDR3 for alpha chain variable domain of TCR clone 121961 (TRAV2, TRAJ40)
CAVVTSGTYKYIF

SEQ ID NO: 243922 - protein, 13 aa, Homo sapiens
  CDR3 for beta chain variable domain of TCR clone 121961 (TRBV7-9, TRBJ2-5)
CASLPSGRDTQYF

SEQ ID NO: 243923 - protein, 12 aa, Homo sapiens
  CDR3 for alpha chain variable domain of TCR clone 121962 (TRAV2, TRAJ26)
CAGSPGRLWSEF

SEQ ID NO: 243924 - protein, 16 aa, Homo sapiens
  CDR3 for beta chain variable domain of TCR clone 121962 (TRBV13, TRBJ2-2)
CASSPRTGEHTGELLF

SEQ ID NO: 243925 - protein, 13 aa, Homo sapiens
  CDR3 for alpha chain variable domain of TCR clone 121963 (TRAV12-3, TRAJ56)
CALATGANSKLTF

SEQ ID NO: 243926 - protein, 16 aa, Homo sapiens
  CDR3 for beta chain variable domain of TCR clone 121963 (TRBV18, TRBJ1-2)
CASSPPERVTIYGYTF

SEQ ID NO: 243927 - protein, 18 aa, Homo sapiens
  CDR3 for alpha chain variable domain of TCR clone 121964 (TRAV21, TRAJ52)
CAVRPSPAGGTSYGKLTF

SEQ ID NO: 243928 - protein, 12 aa, Homo sapiens
  CDR3 for beta chain variable domain of TCR clone 121964 (TRBV2, TRBJ2-1)
CAYGPPGNEQFF

SEQ ID NO: 243929 - protein, 12 aa, Homo sapiens
  CDR3 for alpha chain variable domain of TCR clone 121965 (TRAV29/DV5, TRAJ49)
CAATDTGNQFYF

SEQ ID NO: 243930 - protein, 16 aa, Homo sapiens
  CDR3 for beta chain variable domain of TCR clone 121965 (TRBV11-2, TRBJ1-2)
CASSLDTGGADYGYTF

SEQ ID NO: 243931 - protein, 15 aa, Homo sapiens
  CDR3 for alpha chain variable domain of TCR clone 121966 (TRAV17, TRAJ57)
CATGPSQGGSEKLVF

SEQ ID NO: 243932 - protein, 16 aa, Homo sapiens
  CDR3 for beta chain variable domain of TCR clone 121966 (TRBV12-4, TRBJ1-5)
CGSSRPVGGSNQPQHF

SEQ ID NO: 243933 - protein, 12 aa, Homo sapiens
  CDR3 for alpha chain variable domain of TCR clone 121967 (TRAV35, TRAJ49)
CAGGTPVTSSIL

SEQ ID NO: 243934 - protein, 16 aa, Homo sapiens
  CDR3 for beta chain variable domain of TCR clone 121967 (TRBV5-1, TRBJ2-2)
CASSLWDTTNAGELFF

SEQ ID NO: 243935 - protein, 13 aa, Homo sapiens
  CDR3 for alpha chain variable domain of TCR clone 121968 (TRAV38-2/DV8, TRAJ34)
CAYRTWNTDKLIF

SEQ ID NO: 243936 - protein, 17 aa, Homo sapiens
  CDR3 for beta chain variable domain of TCR clone 121968 (TRBV11-2, TRBJ2-1)
CASSLYPPGVEYNEQFF

SEQ ID NO: 243937 - protein, 16 aa, Homo sapiens
  CDR3 for alpha chain variable domain of TCR clone 121969 (TRAV1-2, TRAJ10)
CAVRGGLTGGGNKLTF

SEQ ID NO: 243938 - protein, 16 aa, Homo sapiens
  CDR3 for beta chain variable domain of TCR clone 121969 (TRBV9, TRBJ2-1)
CASSVGGGGNYNEQFF

SEQ ID NO: 243939 - protein, 13 aa, Homo sapiens
  CDR3 for alpha chain variable domain of TCR clone 121970 (TRAV12-1, TRAJ16)
CVMNGPDGQKLLF

SEQ ID NO: 243940 - protein, 13 aa, Homo sapiens
  CDR3 for beta chain variable domain of TCR clone 121970 (TRBV2, TRBJ1-1)
CARNPTGGFHAFF

SEQ ID NO: 243941 - protein, 13 aa, Homo sapiens
  CDR3 for alpha chain variable domain of TCR clone 121971 (TRAV12-2, TRAJ37)
CAGGSGNTGKLIF

SEQ ID NO: 243942 - protein, 14 aa, Homo sapiens
  CDR3 for beta chain variable domain of TCR clone 121971 (TRBV12-5, TRBJ2-5)
CASGSRTHQETQYF

SEQ ID NO: 243943 - protein, 14 aa, Homo sapiens
  CDR3 for alpha chain variable domain of TCR clone 121972 (TRAV12-3, TRAJ10)
SHLPLTGGGNKLTF

SEQ ID NO: 243944 - protein, 16 aa, Homo sapiens
  CDR3 for beta chain variable domain of TCR clone 121972 (TRBV29-1, TRBJ2-2)
CSVEKTSEGNTGELFF

SEQ ID NO: 243945 - protein, 12 aa, Homo sapiens
  CDR3 for alpha chain variable domain of TCR clone 121973 (TRAV2, TRAJ9)
CAVGAGGFKTIF

SEQ ID NO: 243946 - protein, 12 aa, Homo sapiens
  CDR3 for beta chain variable domain of TCR clone 121973 (TRBV7-8, TRBJ2-7)
CASSLGDREQYF

SEQ ID NO: 243947 - protein, 14 aa, Homo sapiens
  CDR3 for alpha chain variable domain of TCR clone 121974 (TRAV19, TRAJ5)
CALKKDTGRRALTF

SEQ ID NO: 243948 - protein, 15 aa, Homo sapiens
  CDR3 for beta chain variable domain of TCR clone 121974 (TRBV2, TRBJ2-5)
CASSEAGTLQETQYF

SEQ ID NO: 243949 - protein, 14 aa, Homo sapiens
  CDR3 for alpha chain variable domain of TCR clone 121975 (TRAV26-1, TRAJ38)
CIADNAGNNSKLIW

SEQ ID NO: 243950 - protein, 17 aa, Homo sapiens
  CDR3 for beta chain variable domain of TCR clone 121975 (TRBV7-9, TRBJ2-3)
CASSPTVAGDLTDTQYF

SEQ ID NO: 243951 - protein, 15 aa, Homo sapiens
  CDR3 for alpha chain variable domain of TCR clone 121976 (TRAV26-1, TRAJ29)
CIVRVEGSGNTPLVF

SEQ ID NO: 243952 - protein, 15 aa, Homo sapiens
  CDR3 for beta chain variable domain of TCR clone 121976 (TRBV7-9, TRBJ1-5)
CASSQGHQPNQQQHF

SEQ ID NO: 243953 - protein, 11 aa, Homo sapiens
  CDR3 for alpha chain variable domain of TCR clone 121977 (TRAV1-1, TRAJ23)
CAVRQGGKLIF

SEQ ID NO: 243954 - protein, 16 aa, Homo sapiens
  CDR3 for beta chain variable domain of TCR clone 121977 (TRBV7-2, TRBJ1-4)
CASSPVGRFDREKLFF

SEQ ID NO: 243955 - protein, 14 aa, Homo sapiens
  CDR3 for alpha chain variable domain of TCR clone 121978 (TRAV3, TRAJ22)
CAVRDYGSARQLTF

SEQ ID NO: 243956 - protein, 13 aa, Homo sapiens
  CDR3 for beta chain variable domain of TCR clone 121978 (TRBV11-2, TRBJ2-5)
CASGHGAKETKYF

SEQ ID NO: 243957 - protein, 15 aa, Homo sapiens
  CDR3 for alpha chain variable domain of TCR clone 121979 (TRAV8-3, TRAJ28)
CAVACSGAGSYQLTF

SEQ ID NO: 243958 - protein, 12 aa, Homo sapiens
  CDR3 for beta chain variable domain of TCR clone 121979 (TRBV5-1, TRBJ2-1)
CASIGGYNEQFF

SEQ ID NO: 243959 - protein, 14 aa, Homo sapiens
  CDR3 for alpha chain variable domain of TCR clone 121980 (TRAV8-6, TRAJ9)
CAVSSYTGGFKTIL

SEQ ID NO: 243960 - protein, 15 aa, Homo sapiens
  CDR3 for beta chain variable domain of TCR clone 121980 (TRBV2, TRBJ1-2)
CASSESRTVNYGYTF

SEQ ID NO: 243961 - protein, 17 aa, Homo sapiens
  CDR3 for alpha chain variable domain of TCR clone 121981 (TRAV3, TRAJ6)
CAVRDGPRAGGSYIPTF

SEQ ID NO: 243962 - protein, 15 aa, Homo sapiens
  CDR3 for beta chain variable domain of TCR clone 121981 (TRBV12-4, TRBJ2-7)
CASSLGSGGPYEQYF

SEQ ID NO: 243963 - protein, 12 aa, Homo sapiens
  CDR3 for alpha chain variable domain of TCR clone 121982 (TRAV22, TRAJ43)
CAVELNNNDMRF

SEQ ID NO: 243964 - protein, 14 aa, Homo sapiens
  CDR3 for beta chain variable domain of TCR clone 121982 (TRBV25-1, TRBJ1-1)
CASTHLGGNTEAFF

SEQ ID NO: 243965 - protein, 10 aa, Homo sapiens
  CDR3 for alpha chain variable domain of TCR clone 121983 (TRAV4, TRAJ20)
KGSNDYKLSF

SEQ ID NO: 243966 - protein, 17 aa, Homo sapiens
  CDR3 for beta chain variable domain of TCR clone 121983 (TRBV11-2, TRBJ2-1)
CASSLYPPGVEYNEQFF

SEQ ID NO: 243967 - protein, 13 aa, Homo sapiens
  CDR3 for alpha chain variable domain of TCR clone 121984 (TRAV12-1, TRAJ33)
CGDTPDSNYQLIW

SEQ ID NO: 243968 - protein, 15 aa, Homo sapiens
  CDR3 for beta chain variable domain of TCR clone 121984 (TRBV27, TRBJ2-1)
CASSNGGGSSNEQFF

SEQ ID NO: 243969 - protein, 11 aa, Homo sapiens
  CDR3 for alpha chain variable domain of TCR clone 121985 (TRAV12-2, TRAJ49)
CAVTGGNQFYF

SEQ ID NO: 243970 - protein, 14 aa, Homo sapiens
  CDR3 for beta chain variable domain of TCR clone 121985 (TRBV7-2, TRBJ2-5)
CASSLFGREETQYF

SEQ ID NO: 243971 - protein, 12 aa, Homo sapiens
  CDR3 for alpha chain variable domain of TCR clone 121986 (TRAV12-3, TRAJ17)
CAMTLTGNKLTF

SEQ ID NO: 243972 - protein, 20 aa, Homo sapiens
  CDR3 for beta chain variable domain of TCR clone 121986 (TRBV7-8, TRBJ2-2)
RASSHLFPGPTIHITGELFF

SEQ ID NO: 243973 - protein, 13 aa, Homo sapiens
  CDR3 for alpha chain variable domain of TCR clone 121987 (TRAV2, TRAJ15)
CAVASQAGTALIF

SEQ ID NO: 243974 - protein, 13 aa, Homo sapiens
  CDR3 for beta chain variable domain of TCR clone 121987 (TRBV12-4, TRBJ2-5)
CASSLGGSRTQYF

SEQ ID NO: 243975 - protein, 14 aa, Homo sapiens
  CDR3 for alpha chain variable domain of TCR clone 121988 (TRAV21, TRAJ35)
CAVMPIGFGNVLHC

SEQ ID NO: 243976 - protein, 20 aa, Homo sapiens
  CDR3 for beta chain variable domain of TCR clone 121988 (TRBV7-8, TRBJ2-2)
CASSHLFPGPTIHITGELFF

SEQ ID NO: 243977 - protein, 14 aa, Homo sapiens
  CDR3 for alpha chain variable domain of TCR clone 121989 (TRAV29/DV5, TRAJ48)
CAAMALFGNEKLTF

SEQ ID NO: 243978 - protein, 15 aa, Homo sapiens
  CDR3 for beta chain variable domain of TCR clone 121989 (TRBV7-2, TRBJ2-1)
CASAHGTGIYNEQFF

SEQ ID NO: 243979 - protein, 13 aa, Homo sapiens
  CDR3 for alpha chain variable domain of TCR clone 121990 (TRAV20, TRAJ9)
CAVPDTGGFTTIF

SEQ ID NO: 243980 - protein, 15 aa, Homo sapiens
  CDR3 for beta chain variable domain of TCR clone 121990 (TRBV27, TRBJ2-7)
CASSKAGRGGYEQYF

SEQ ID NO: 243981 - protein, 11 aa, Homo sapiens
  CDR3 for alpha chain variable domain of TCR clone 121991 (TRAV2, TRAJ13)
CASGGYQKVTF

SEQ ID NO: 243982 - protein, 13 aa, Homo sapiens
  CDR3 for beta chain variable domain of TCR clone 121991 (TRBV12-4, TRBJ2-5)
CASRLAVQETQYF

SEQ ID NO: 243983 - protein, 13 aa, Homo sapiens
  CDR3 for alpha chain variable domain of TCR clone 121992 (TRAV3, TRAJ27)
CAVRPLGAGKSTF

SEQ ID NO: 243984 - protein, 14 aa, Homo sapiens
  CDR3 for beta chain variable domain of TCR clone 121992 (TRBV5-5, TRBJ1-5)
CASSGQGVDQPQHF

SEQ ID NO: 243985 - protein, 14 aa, Homo sapiens
  CDR3 for alpha chain variable domain of TCR clone 121993 (TRAV17, TRAJ31)
CATVLRNNNARLMF

SEQ ID NO: 243986 - protein, 14 aa, Homo sapiens
  CDR3 for beta chain variable domain of TCR clone 121993 (TRBV7-2, TRBJ2-7)
CASRSQGAAYEQYF

SEQ ID NO: 243987 - protein, 11 aa, Homo sapiens
  CDR3 for alpha chain variable domain of TCR clone 121994 (TRAV12-2, TRAJ31)
CAILNNARLMF

SEQ ID NO: 243988 - protein, 16 aa, Homo sapiens
  CDR3 for beta chain variable domain of TCR clone 121994 (TRBV20-1, TRBJ1-4)
CSAPGQGLLTNEKLFF

SEQ ID NO: 243989 - protein, 14 aa, Homo sapiens
  CDR3 for alpha chain variable domain of TCR clone 121995 (TRAV12-1, TRAJ43)
CVVNGRSNNNDMRF

SEQ ID NO: 243990 - protein, 14 aa, Homo sapiens
  CDR3 for beta chain variable domain of TCR clone 121995 (TRBV19, TRBJ1-6)
CASSSGTGYSPLHF

SEQ ID NO: 243991 - protein, 17 aa, Homo sapiens
  CDR3 for alpha chain variable domain of TCR clone 121996 (TRAV13-1, TRAJ52)
CAAGRNAGGTSYGKLTF

SEQ ID NO: 243992 - protein, 13 aa, Homo sapiens
  CDR3 for beta chain variable domain of TCR clone 121996 (TRBV12-4, TRBJ1-5)
CASSPDRAQPQHF

SEQ ID NO: 243993 - protein, 12 aa, Homo sapiens
  CDR3 for alpha chain variable domain of TCR clone 121997 (TRAV3, TRAJ20)
CAVRDGDYKLSF

SEQ ID NO: 243994 - protein, 18 aa, Homo sapiens
  CDR3 for beta chain variable domain of TCR clone 121997 (TRBV11-2, TRBJ2-6)
CASSLNPFLGTGANVLTF

SEQ ID NO: 243995 - protein, 14 aa, Homo sapiens
  CDR3 for alpha chain variable domain of TCR clone 121998 (TRAV35, TRAJ22)
CAGLRPGSARQLTF

SEQ ID NO: 243996 - protein, 14 aa, Homo sapiens
  CDR3 for beta chain variable domain of TCR clone 121998 (TRBV7-2, TRBJ2-7)
CASRSQGAAYEQYF

SEQ ID NO: 243997 - protein, 12 aa, Homo sapiens
  CDR3 for alpha chain variable domain of TCR clone 121999 (TRAV3, TRAJ43)
CAVRDPNNDMRF

SEQ ID NO: 243998 - protein, 15 aa, Homo sapiens
  CDR3 for beta chain variable domain of TCR clone 121999 (TRBV27, TRBJ1-5)
CASSLGTRFDQPQHF

SEQ ID NO: 243999 - protein, 14 aa, Homo sapiens
  CDR3 for alpha chain variable domain of TCR clone 122000 (TRAV38-1, TRAJ40)
CALRPTSGTYKYIF

SEQ ID NO: 244000 - protein, 14 aa, Homo sapiens
  CDR3 for beta chain variable domain of TCR clone 122000 (TRBV7-9, TRBJ2-7)
CASSLSQGSYEQYF

SEQ ID NO: 244001 - protein, 15 aa, Homo sapiens
  CDR3 for alpha chain variable domain of TCR clone 122001 (TRAV13-1, TRAJ17)
CAASIERAAGNKLTF

SEQ ID NO: 244002 - protein, 15 aa, Homo sapiens
  CDR3 for beta chain variable domain of TCR clone 122001 (TRBV7-8, TRBJ2-1)
CASSLADSLYNEQFF

SEQ ID NO: 244003 - protein, 14 aa, Homo sapiens
  CDR3 for alpha chain variable domain of TCR clone 122002 (TRAV17, TRAJ39)
CASDPVRAGNMLTF

SEQ ID NO: 244004 - protein, 15 aa, Homo sapiens
  CDR3 for beta chain variable domain of TCR clone 122002 (TRBV13, TRBJ1-5)
CASSFGQGGVQPQHF

SEQ ID NO: 244005 - protein, 20 aa, Homo sapiens
  CDR3 for alpha chain variable domain of TCR clone 122003 (TRAV14/DV4, TRAJ22)
CAMREVPFSISSGSARQLTF

SEQ ID NO: 244006 - protein, 13 aa, Homo sapiens
  CDR3 for beta chain variable domain of TCR clone 122003 (TRBV4-2, TRBJ2-3)
CASSQDWQHTQYF

SEQ ID NO: 244007 - protein, 12 aa, Homo sapiens
  CDR3 for alpha chain variable domain of TCR clone 122004 (TRAV12-2, TRAJ9)
CAVNTGGFKTIF

SEQ ID NO: 244008 - protein, 13 aa, Homo sapiens
  CDR3 for beta chain variable domain of TCR clone 122004 (TRBV24-1, TRBJ2-2)
CATSDWSTGELFF

SEQ ID NO: 244009 - protein, 16 aa, Homo sapiens
  CDR3 for alpha chain variable domain of TCR clone 122005 (TRAV26-1, TRAJ52)
CIVSNAGGTSYGKLTL

SEQ ID NO: 244010 - protein, 16 aa, Homo sapiens
  CDR3 for beta chain variable domain of TCR clone 122005 (TRBV5-1, TRBJ2-1)
CASSLEGRGLYNEQFF

SEQ ID NO: 244011 - protein, 12 aa, Homo sapiens
  CDR3 for alpha chain variable domain of TCR clone 122006 (TRAV35, TRAJ31)
CSAASNNARLMF

SEQ ID NO: 244012 - protein, 14 aa, Homo sapiens
  CDR3 for beta chain variable domain of TCR clone 122006 (TRBV2, TRBJ2-2)
CASSLFGGNGELFF

SEQ ID NO: 244013 - protein, 15 aa, Homo sapiens
  CDR3 for alpha chain variable domain of TCR clone 122007 (TRAV8-3, TRAJ45)
CASSYSGGGADGLTF

SEQ ID NO: 244014 - protein, 13 aa, Homo sapiens
  CDR3 for beta chain variable domain of TCR clone 122007 (TRBV19, TRBJ1-2)
CASSVPGQDGYAF

SEQ ID NO: 244015 - protein, 13 aa, Homo sapiens
  CDR3 for alpha chain variable domain of TCR clone 122008 (TRAV24, TRAJ42)
CAFSTGSQGNLIF

SEQ ID NO: 244016 - protein, 15 aa, Homo sapiens
  CDR3 for beta chain variable domain of TCR clone 122008 (TRBV2, TRBJ2-1)
CASSELAGSYNEQFF

SEQ ID NO: 244017 - protein, 17 aa, Homo sapiens
  CDR3 for alpha chain variable domain of TCR clone 122009 (TRAV8-4, TRAJ18)
CAVSSLRRGSTLGRLYF

SEQ ID NO: 244018 - protein, 13 aa, Homo sapiens
  CDR3 for beta chain variable domain of TCR clone 122009 (TRBV7-3, TRBJ1-1)
CASSQDWGAEAFF

SEQ ID NO: 244019 - protein, 19 aa, Homo sapiens
  CDR3 for alpha chain variable domain of TCR clone 122010 (TRAV1-2, TRAJ26)
CLLPLCCERPDNYGQNFVF

SEQ ID NO: 244020 - protein, 16 aa, Homo sapiens
  CDR3 for beta chain variable domain of TCR clone 122010 (TRBV4-1, TRBJ2-3)
CASSQSTSGAEDTQYF

SEQ ID NO: 244021 - protein, 16 aa, Homo sapiens
  CDR3 for alpha chain variable domain of TCR clone 122011 (TRAV3, TRAJ10)
CAVRDMRAGGGNKLTF

SEQ ID NO: 244022 - protein, 19 aa, Homo sapiens
  CDR3 for beta chain variable domain of TCR clone 122011 (TRBV6-3, TRBJ1-2)
CDSSYSKGRTGPPNYGYTF

SEQ ID NO: 244023 - protein, 11 aa, Homo sapiens
  CDR3 for alpha chain variable domain of TCR clone 122012 (TRAV27, TRAJ45)
CAGAQEEVLTD

SEQ ID NO: 244024 - protein, 17 aa, Homo sapiens
  CDR3 for beta chain variable domain of TCR clone 122012 (TRBV11-2, TRBJ2-1)
CASSLYPPGVEYNGQFF

SEQ ID NO: 244025 - protein, 16 aa, Homo sapiens
  CDR3 for alpha chain variable domain of TCR clone 122013 (TRAV8-4, TRAJ32)
CAVSEDYGGATNKLIF

SEQ ID NO: 244026 - protein, 16 aa, Homo sapiens
  CDR3 for beta chain variable domain of TCR clone 122013 (TRBV4-1, TRBJ1-4)
CASSQDLRRGGEKLFF

SEQ ID NO: 244027 - protein, 14 aa, Homo sapiens
  CDR3 for alpha chain variable domain of TCR clone 122014 (TRAV12-1, TRAJ13)
CVVIDYGGYQKVTF

SEQ ID NO: 244028 - protein, 12 aa, Homo sapiens
  CDR3 for beta chain variable domain of TCR clone 122014 (TRBV29-1, TRBJ2-3)
CSVTGGADTQYF

SEQ ID NO: 244029 - protein, 14 aa, Homo sapiens
  CDR3 for alpha chain variable domain of TCR clone 122015 (TRAV17, TRAJ57)
CATDPQGGSEKLGF

SEQ ID NO: 244030 - protein, 13 aa, Homo sapiens
  CDR3 for beta chain variable domain of TCR clone 122015 (TRBV19, TRBJ2-7)
CASSPRQSYEQYF

SEQ ID NO: 244031 - protein, 15 aa, Homo sapiens
  CDR3 for alpha chain variable domain of TCR clone 122016 (TRAV3, TRAJ3)
CAVRDRDSSASKIIF

SEQ ID NO: 244032 - protein, 18 aa, Homo sapiens
  CDR3 for beta chain variable domain of TCR clone 122016 (TRBV25-1, TRBJ1-2)
CASSRLQNGQGLIFGYTF

SEQ ID NO: 244033 - protein, 15 aa, Homo sapiens
  CDR3 for alpha chain variable domain of TCR clone 122017 (TRAV2, TRAJ22)
CAVPSRGGSARQLTF

SEQ ID NO: 244034 - protein, 19 aa, Homo sapiens
  CDR3 for beta chain variable domain of TCR clone 122017 (TRBV25-1, TRBJ2-2)
CAILVYRVDRGRKTGELFF

SEQ ID NO: 244035 - protein, 14 aa, Homo sapiens
  CDR3 for alpha chain variable domain of TCR clone 122018 (TRAV12-3, TRAJ10)
SHLPLTGGGNKLTF

SEQ ID NO: 244036 - protein, 16 aa, Homo sapiens
  CDR3 for beta chain variable domain of TCR clone 122018 (TRBV7-6, TRBJ2-3)
CASSPLAGGSTDTQYF

SEQ ID NO: 244037 - protein, 12 aa, Homo sapiens
  CDR3 for alpha chain variable domain of TCR clone 122019 (TRAV23/DV6, TRAJ17)
CARGSCRQQANF

SEQ ID NO: 244038 - protein, 14 aa, Homo sapiens
  CDR3 for beta chain variable domain of TCR clone 122019 (TRBV7-2, TRBJ1-2)
CASSQTGSTYGCTF

SEQ ID NO: 244039 - protein, 11 aa, Homo sapiens
  CDR3 for alpha chain variable domain of TCR clone 122020 (TRAV16, TRAJ33)
CALHSNYPLIW

SEQ ID NO: 244040 - protein, 15 aa, Homo sapiens
  CDR3 for beta chain variable domain of TCR clone 122020 (TRBV20-1, TRBJ2-7)
CSARDRVSGMDEQYF

SEQ ID NO: 244041 - protein, 12 aa, Homo sapiens
  CDR3 for alpha chain variable domain of TCR clone 122021 (TRAV8-3, TRAJ26)
CAGDNYGQNFVF

SEQ ID NO: 244042 - protein, 16 aa, Homo sapiens
  CDR3 for beta chain variable domain of TCR clone 122021 (TRBV27, TRBJ2-1)
CASRPPHYVGLDEQFF

SEQ ID NO: 244043 - protein, 13 aa, Homo sapiens
  CDR3 for alpha chain variable domain of TCR clone 122022 (TRAV21, TRAJ27)
CAALNTNAGKSTF

SEQ ID NO: 244044 - protein, 19 aa, Homo sapiens
  CDR3 for beta chain variable domain of TCR clone 122022 (TRBV19, TRBJ2-5)
CASSIGQVTDFFLGETQYF

SEQ ID NO: 244045 - protein, 14 aa, Homo sapiens
  CDR3 for alpha chain variable domain of TCR clone 122023 (TRAV2, TRAJ9)
CAVEDRSGGFKTIF

SEQ ID NO: 244046 - protein, 13 aa, Homo sapiens
  CDR3 for beta chain variable domain of TCR clone 122023 (TRBV3-1, TRBJ1-1)
CARSPGVITEAFF

SEQ ID NO: 244047 - protein, 11 aa, Homo sapiens
  CDR3 for alpha chain variable domain of TCR clone 122024 (TRAV2, TRAJ13)
CASGGYQKVTF

SEQ ID NO: 244048 - protein, 16 aa, Homo sapiens
  CDR3 for beta chain variable domain of TCR clone 122024 (TRBV19, TRBJ2-1)
CASSMVGGSSYNEQFF

SEQ ID NO: 244049 - protein, 11 aa, Homo sapiens
  CDR3 for alpha chain variable domain of TCR clone 122025 (TRAV2, TRAJ33)
CAVDSNYQLIG

SEQ ID NO: 244050 - protein, 14 aa, Homo sapiens
  CDR3 for beta chain variable domain of TCR clone 122025 (TRBV11-2, TRBJ2-3)
CASSRLARTDTQYF

SEQ ID NO: 244051 - protein, 17 aa, Homo sapiens
  CDR3 for alpha chain variable domain of TCR clone 122026 (TRAV12-1, TRAJ13)
CVVNKRGEFWGLPESYL

SEQ ID NO: 244052 - protein, 17 aa, Homo sapiens
  CDR3 for beta chain variable domain of TCR clone 122026 (TRBV28, TRBJ2-5)
CASSTPGGDALQETQYF

SEQ ID NO: 244053 - protein, 13 aa, Homo sapiens
  CDR3 for alpha chain variable domain of TCR clone 122027 (TRAV1-2, TRAJ17)
CAVGKAAGNKLTF

SEQ ID NO: 244054 - protein, 15 aa, Homo sapiens
  CDR3 for beta chain variable domain of TCR clone 122027 (TRBV12-4, TRBJ2-5)
CASSPPTGLQETQYF

SEQ ID NO: 244055 - protein, 16 aa, Homo sapiens
  CDR3 for alpha chain variable domain of TCR clone 122028 (TRAV30, TRAJ24)
CGTEIVDADSWGKFQV

SEQ ID NO: 244056 - protein, 13 aa, Homo sapiens
  CDR3 for beta chain variable domain of TCR clone 122028 (TRBV11-2, TRBJ2-5)
CASSSTGEETQYF

SEQ ID NO: 244057 - protein, 11 aa, Homo sapiens
  CDR3 for alpha chain variable domain of TCR clone 122029 (TRAV2, TRAJ13)
CDSGGYQKVTF

SEQ ID NO: 244058 - protein, 11 aa, Homo sapiens
  CDR3 for beta chain variable domain of TCR clone 122029 (TRBV5-6, TRBJ2-5)
CASSLERTQYF

SEQ ID NO: 244059 - protein, 20 aa, Homo sapiens
  CDR3 for alpha chain variable domain of TCR clone 122030 (TRAV21, TRAJ22)
SLVTQPPTLKSSGSARQLTF

SEQ ID NO: 244060 - protein, 15 aa, Homo sapiens
  CDR3 for beta chain variable domain of TCR clone 122030 (TRBV20-1, TRBJ2-7)
CSARDRVSGMDEQYF

SEQ ID NO: 244061 - protein, 16 aa, Homo sapiens
  CDR3 for alpha chain variable domain of TCR clone 122031 (TRAV12-2, TRAJ43)
CAGDDMRFGAGTRLTV

SEQ ID NO: 244062 - protein, 14 aa, Homo sapiens
  CDR3 for beta chain variable domain of TCR clone 122031 (TRBV25-1, TRBJ1-1)
CASTHLGGNTEAFF

SEQ ID NO: 244063 - protein, 13 aa, Homo sapiens
  CDR3 for alpha chain variable domain of TCR clone 122032 (TRAV25, TRAJ30)
CAGRVDRDDKIIF

SEQ ID NO: 244064 - protein, 17 aa, Homo sapiens
  CDR3 for beta chain variable domain of TCR clone 122032 (TRBV7-9, TRBJ2-6)
CASSFGAGYSWANVLTF

SEQ ID NO: 244065 - protein, 13 aa, Homo sapiens
  CDR3 for alpha chain variable domain of TCR clone 122033 (TRAV16, TRAJ29)
CALSRRGNTPLVF

SEQ ID NO: 244066 - protein, 11 aa, Homo sapiens
  CDR3 for beta chain variable domain of TCR clone 122033 (TRBV7-9, TRBJ2-3)
CASSGPDTQYF

SEQ ID NO: 244067 - protein, 14 aa, Homo sapiens
  CDR3 for alpha chain variable domain of TCR clone 122034 (TRAV17, TRAJ32)
CATDPGGATNKLIF

SEQ ID NO: 244068 - protein, 14 aa, Homo sapiens
  CDR3 for beta chain variable domain of TCR clone 122034 (TRBV12-5, TRBJ2-5)
CASGSRTHQETQYF

SEQ ID NO: 244069 - protein, 13 aa, Homo sapiens
  CDR3 for alpha chain variable domain of TCR clone 122035 (TRAV21, TRAJ15)
CAVANKAGTALIF

SEQ ID NO: 244070 - protein, 14 aa, Homo sapiens
  CDR3 for beta chain variable domain of TCR clone 122035 (TRBV27, TRBJ2-2)
CASSLGAATGELFF

SEQ ID NO: 244071 - protein, 11 aa, Homo sapiens
  CDR3 for alpha chain variable domain of TCR clone 122036 (TRAV13-1, TRAJ43)
CAAHNNNDMRF

SEQ ID NO: 244072 - protein, 15 aa, Homo sapiens
  CDR3 for beta chain variable domain of TCR clone 122036 (TRBV6-1, TRBJ2-2)
CVSSRLRGDTGELFF

SEQ ID NO: 244073 - protein, 11 aa, Homo sapiens
  CDR3 for alpha chain variable domain of TCR clone 122037 (TRAV1-2, TRAJ31)
CAVNNNPRLMF

SEQ ID NO: 244074 - protein, 15 aa, Homo sapiens
  CDR3 for beta chain variable domain of TCR clone 122037 (TRBV28, TRBJ2-1)
CASSIIAGGRSEQFF

SEQ ID NO: 244075 - protein, 10 aa, Homo sapiens
  CDR3 for alpha chain variable domain of TCR clone 122038 (TRAV8-4, TRAJ43)
CAVSADDLRF

SEQ ID NO: 244076 - protein, 13 aa, Homo sapiens
  CDR3 for beta chain variable domain of TCR clone 122038 (TRBV12-4, TRBJ2-5)
CASSPGTEETQYF

SEQ ID NO: 244077 - protein, 23 aa, Homo sapiens
  CDR3 for alpha chain variable domain of TCR clone 122039 (TRAV26-1, TRAJ38)
CIADNAGNNHIQNPEPAVYQLRD

SEQ ID NO: 244078 - protein, 12 aa, Homo sapiens
  CDR3 for beta chain variable domain of TCR clone 122039 (TRBV11-2, TRBJ2-2)
CASSLGGGELFF

SEQ ID NO: 244079 - protein, 12 aa, Homo sapiens
  CDR3 for alpha chain variable domain of TCR clone 122040 (TRAV26-1, TRAJ13)
CIVSRGYQKVTF

SEQ ID NO: 244080 - protein, 13 aa, Homo sapiens
  CDR3 for beta chain variable domain of TCR clone 122040 (TRBV19, TRBJ1-2)
CASSVPGQDGYTF

SEQ ID NO: 244081 - protein, 13 aa, Homo sapiens
  CDR3 for alpha chain variable domain of TCR clone 122041 (TRAV1-2, TRAJ9)
CAALNTGGFKTIF

SEQ ID NO: 244082 - protein, 13 aa, Homo sapiens
  CDR3 for beta chain variable domain of TCR clone 122041 (TRBV12-4, TRBJ1-2)
CASSLRQGKGYTF

SEQ ID NO: 244083 - protein, 16 aa, Homo sapiens
  CDR3 for alpha chain variable domain of TCR clone 122042 (TRAV12-2, TRAJ6)
CAAPLAGSGGSYIPTF

SEQ ID NO: 244084 - protein, 13 aa, Homo sapiens
  CDR3 for beta chain variable domain of TCR clone 122042 (TRBV20-1, TRBJ1-1)
CSARGGGNTEAFF

SEQ ID NO: 244085 - protein, 14 aa, Homo sapiens
  CDR3 for alpha chain variable domain of TCR clone 122043 (TRAV3, TRAJ16)
CCERLKSDGQTLLF

SEQ ID NO: 244086 - protein, 15 aa, Homo sapiens
  CDR3 for beta chain variable domain of TCR clone 122043 (TRBV28, TRBJ2-7)
CASSPGGRGFYEQYF

SEQ ID NO: 244087 - protein, 16 aa, Homo sapiens
  CDR3 for alpha chain variable domain of TCR clone 122044 (TRAV17, TRAJ9)
CATGEWGGTGGFKTIF

SEQ ID NO: 244088 - protein, 12 aa, Homo sapiens
  CDR3 for beta chain variable domain of TCR clone 122044 (TRBV11-2, TRBJ2-1)
CASSPGNNEQFL

SEQ ID NO: 244089 - protein, 15 aa, Homo sapiens
  CDR3 for alpha chain variable domain of TCR clone 122045 (TRAV26-2, TRAJ21)
FILSNTTSTNFTLDL

SEQ ID NO: 244090 - protein, 16 aa, Homo sapiens
  CDR3 for beta chain variable domain of TCR clone 122045 (TRBV4-2, TRBJ2-6)
CASSQARSSGANVLTF

SEQ ID NO: 244091 - protein, 14 aa, Homo sapiens
  CDR3 for alpha chain variable domain of TCR clone 122046 (TRAV2, TRAJ9)
CAVEDRSGGFKTIF

SEQ ID NO: 244092 - protein, 18 aa, Homo sapiens
  CDR3 for beta chain variable domain of TCR clone 122046 (TRBV25-1, TRBJ2-2)
CHPSYRVDRGRKTGELFF

SEQ ID NO: 244093 - protein, 14 aa, Homo sapiens
  CDR3 for alpha chain variable domain of TCR clone 122047 (TRAV12-1, TRAJ17)
CVVNPKAAGNKLTF

SEQ ID NO: 244094 - protein, 20 aa, Homo sapiens
  CDR3 for beta chain variable domain of TCR clone 122047 (TRBV7-8, TRBJ2-2)
CASSHLFPGPTIHITGELFF

SEQ ID NO: 244095 - protein, 13 aa, Homo sapiens
  CDR3 for alpha chain variable domain of TCR clone 122048 (TRAV17, TRAJ54)
CATSWGGAQKLVF

SEQ ID NO: 244096 - protein, 15 aa, Homo sapiens
  CDR3 for beta chain variable domain of TCR clone 122048 (TRBV4-3, TRBJ2-3)
CASSPSLRSTDTQYF

SEQ ID NO: 244097 - protein, 14 aa, Homo sapiens
  CDR3 for alpha chain variable domain of TCR clone 122049 (TRAV13-1, TRAJ10)
CAALFTGGGNRLTF

SEQ ID NO: 244098 - protein, 15 aa, Homo sapiens
  CDR3 for beta chain variable domain of TCR clone 122049 (TRBV10-3, TRBJ2-2)
CAISEGDRAAGELFF

SEQ ID NO: 244099 - protein, 11 aa, Homo sapiens
  CDR3 for alpha chain variable domain of TCR clone 122050 (TRAV20, TRAJ23)
CACNQGGELIF

SEQ ID NO: 244100 - protein, 16 aa, Homo sapiens
  CDR3 for beta chain variable domain of TCR clone 122050 (TRBV7-8, TRBJ2-5)
CASSFGGQPAQETQYF

SEQ ID NO: 244101 - protein, 16 aa, Homo sapiens
  CDR3 for alpha chain variable domain of TCR clone 122051 (TRAV26-1, TRAJ23)
CIVRPHGNNQGGKLIF

SEQ ID NO: 244102 - protein, 14 aa, Homo sapiens
  CDR3 for beta chain variable domain of TCR clone 122051 (TRBV25-1, TRBJ1-1)
CASTHLGGNTEAFF

SEQ ID NO: 244103 - protein, 11 aa, Homo sapiens
  CDR3 for alpha chain variable domain of TCR clone 122052 (TRAV12-2, TRAJ33)
CAVTSNYQLIW

SEQ ID NO: 244104 - protein, 14 aa, Homo sapiens
  CDR3 for beta chain variable domain of TCR clone 122052 (TRBV12-4, TRBJ2-2)
CASNQGANTGELFS

SEQ ID NO: 244105 - protein, 12 aa, Homo sapiens
  CDR3 for alpha chain variable domain of TCR clone 122053 (TRAV13-1, TRAJ15)
CAANQAGTALIF

SEQ ID NO: 244106 - protein, 14 aa, Homo sapiens
  CDR3 for beta chain variable domain of TCR clone 122053 (TRBV7-2, TRBJ2-5)
CASSPLGQSETQCF

SEQ ID NO: 244107 - protein, 14 aa, Homo sapiens
  CDR3 for alpha chain variable domain of TCR clone 122054 (TRAV1-2, TRAJ16)
SAVNRFSDGQKLLF

SEQ ID NO: 244108 - protein, 15 aa, Homo sapiens
  CDR3 for beta chain variable domain of TCR clone 122054 (TRBV7-9, TRBJ1-6)
CASSSPGRGNSPLHF

SEQ ID NO: 244109 - protein, 14 aa, Homo sapiens
  CDR3 for alpha chain variable domain of TCR clone 122055 (TRAV12-3, TRAJ42)
CAMNYGGSQGNLIF

SEQ ID NO: 244110 - protein, 15 aa, Homo sapiens
  CDR3 for beta chain variable domain of TCR clone 122055 (TRBV7-9, TRBJ1-5)
CASSQGHQPNQPQHF

SEQ ID NO: 244111 - protein, 13 aa, Homo sapiens
  CDR3 for alpha chain variable domain of TCR clone 122056 (TRAV13-1, TRAJ5)
CAASDTGRRALTF

SEQ ID NO: 244112 - protein, 12 aa, Homo sapiens
  CDR3 for beta chain variable domain of TCR clone 122056 (TRBV28, TRBJ2-3)
CASSLYRDKQYF

SEQ ID NO: 244113 - protein, 11 aa, Homo sapiens
  CDR3 for alpha chain variable domain of TCR clone 122057 (TRAV2, TRAJ33)
CAVDRNYQLIW

SEQ ID NO: 244114 - protein, 12 aa, Homo sapiens
  CDR3 for beta chain variable domain of TCR clone 122057 (TRBV11-2, TRBJ2-2)
CASSLGGGELFF

SEQ ID NO: 244115 - protein, 11 aa, Homo sapiens
  CDR3 for alpha chain variable domain of TCR clone 122058 (TRAV12-2, TRAJ49)
CALQGGNQFYF

SEQ ID NO: 244116 - protein, 13 aa, Homo sapiens
  CDR3 for beta chain variable domain of TCR clone 122058 (TRBV4-1, TRBJ1-1)
CASSQLGTGEDFF

SEQ ID NO: 244117 - protein, 16 aa, Homo sapiens
  CDR3 for alpha chain variable domain of TCR clone 122059 (TRAV17, TRAJ52)
CATDPMGGTSYGKLAF

SEQ ID NO: 244118 - protein, 16 aa, Homo sapiens
  CDR3 for beta chain variable domain of TCR clone 122059 (TRBV6-6, TRBJ2-3)
CASSYLKATSTDTQYF

SEQ ID NO: 244119 - protein, 13 aa, Homo sapiens
  CDR3 for alpha chain variable domain of TCR clone 122060 (TRAV20, TRAJ48)
CAVHLFGNEKLTF

SEQ ID NO: 244120 - protein, 15 aa, Homo sapiens
  CDR3 for beta chain variable domain of TCR clone 122060 (TRBV6-5, TRBJ2-6)
CASSLWEAGANVLTF

SEQ ID NO: 244121 - protein, 16 aa, Homo sapiens
  CDR3 for alpha chain variable domain of TCR clone 122061 (TRAV38-1, TRAJ37)
CAFMKYGGGNTGKLIF

SEQ ID NO: 244122 - protein, 11 aa, Homo sapiens
  CDR3 for beta chain variable domain of TCR clone 122061 (TRBV11-2, TRBJ2-2)
CASSLPGELFF

SEQ ID NO: 244123 - protein, 13 aa, Homo sapiens
  CDR3 for alpha chain variable domain of TCR clone 122062 (TRAV21, TRAJ27)
CAALNTNAGKSTF

SEQ ID NO: 244124 - protein, 13 aa, Homo sapiens
  CDR3 for beta chain variable domain of TCR clone 122062 (TRBV19, TRBJ1-2)
CASSVPGQDGYTF

SEQ ID NO: 244125 - protein, 17 aa, Homo sapiens
  CDR3 for alpha chain variable domain of TCR clone 122063 (TRAV21, TRAJ52)
CAVGVNAGGTSYGKLTF

SEQ ID NO: 244126 - protein, 13 aa, Homo sapiens
  CDR3 for beta chain variable domain of TCR clone 122063 (TRBV5-1, TRBJ1-2)
CASSFQGNYGYSF

SEQ ID NO: 244127 - protein, 13 aa, Homo sapiens
  CDR3 for alpha chain variable domain of TCR clone 122064 (TRAV16, TRAJ26)
CALLDNYGQNFVF

SEQ ID NO: 244128 - protein, 14 aa, Homo sapiens
  CDR3 for beta chain variable domain of TCR clone 122064 (TRBV7-2, TRBJ1-5)
CASSTQGAGQPQHF

SEQ ID NO: 244129 - protein, 14 aa, Homo sapiens
  CDR3 for alpha chain variable domain of TCR clone 122065 (TRAV3, TRAJ20)
CAVPPAPNDYNLSF

SEQ ID NO: 244130 - protein, 13 aa, Homo sapiens
  CDR3 for beta chain variable domain of TCR clone 122065 (TRBV15, TRBJ1-2)
CATSRVDARSPVF

SEQ ID NO: 244131 - protein, 11 aa, Homo sapiens
  CDR3 for alpha chain variable domain of TCR clone 122066 (TRAV3, TRAJ17)
TRGAAGNKLTF

SEQ ID NO: 244132 - protein, 16 aa, Homo sapiens
  CDR3 for beta chain variable domain of TCR clone 122066 (TRBV7-6, TRBJ2-1)
CASSAPGPSSYNEQFF

SEQ ID NO: 244133 - protein, 12 aa, Homo sapiens
  CDR3 for alpha chain variable domain of TCR clone 122067 (TRAV12-3, TRAJ17)
CAMTLTGNKLTF

SEQ ID NO: 244134 - protein, 15 aa, Homo sapiens
  CDR3 for beta chain variable domain of TCR clone 122067 (TRBV20-1, TRBJ2-7)
CSARDRVSGMDEQVF

SEQ ID NO: 244135 - protein, 15 aa, Homo sapiens
  CDR3 for alpha chain variable domain of TCR clone 122068 (TRAV8-3, TRAJ40)
CAAPSLASGTYKYIF

SEQ ID NO: 244136 - protein, 16 aa, Homo sapiens
  CDR3 for beta chain variable domain of TCR clone 122068 (TRBV7-3, TRBJ2-3)
CASSLSGYRPEDTQYF

SEQ ID NO: 244137 - protein, 18 aa, Homo sapiens
  CDR3 for alpha chain variable domain of TCR clone 122069 (TRAV8-3, TRAJ4)
RVRDPTSNDPGGYNKLIF

SEQ ID NO: 244138 - protein, 13 aa, Homo sapiens
  CDR3 for beta chain variable domain of TCR clone 122069 (TRBV20-1, TRBJ1-2)
CSATGIQGSGYTF

SEQ ID NO: 244139 - protein, 13 aa, Homo sapiens
  CDR3 for alpha chain variable domain of TCR clone 122070 (TRAV12-3, TRAJ7)
CAMTPYGNNRIAF

SEQ ID NO: 244140 - protein, 16 aa, Homo sapiens
  CDR3 for beta chain variable domain of TCR clone 122070 (TRBV20-1, TRBJ1-4)
CSARPYGGELNEKLFF

SEQ ID NO: 244141 - protein, 13 aa, Homo sapiens
  CDR3 for alpha chain variable domain of TCR clone 122071 (TRAV12-3, TRAJ7)
CAMTPYGNNRLAF

SEQ ID NO: 244142 - protein, 18 aa, Homo sapiens
  CDR3 for beta chain variable domain of TCR clone 122071 (TRBV20-1, TRBJ1-4)
CSARPYGGNLMKNCFLAV

SEQ ID NO: 244143 - protein, 14 aa, Homo sapiens
  CDR3 for alpha chain variable domain of TCR clone 122072 (TRAV8-4, TRAJ8)
CAVSLNTGFQKLVF

SEQ ID NO: 244144 - protein, 13 aa, Homo sapiens
  CDR3 for beta chain variable domain of TCR clone 122072 (TRBV7-9, TRBJ2-3)
CARSPGSTDTQYF

SEQ ID NO: 244145 - protein, 17 aa, Homo sapiens
  CDR3 for alpha chain variable domain of TCR clone 122073 (TRAV13-1, TRAJ52)
CAAGRNAGGTSYGQLTF

SEQ ID NO: 244146 - protein, 13 aa, Homo sapiens
  CDR3 for beta chain variable domain of TCR clone 122073 (TRBV7-2, TRBJ1-1)
CASNLKGAKVAFF

SEQ ID NO: 244147 - protein, 19 aa, Homo sapiens
  CDR3 for alpha chain variable domain of TCR clone 122074 (TRAV17, TRAJ17)
CATDGRPGVIKAAGNKLTF

SEQ ID NO: 244148 - protein, 16 aa, Homo sapiens
  CDR3 for beta chain variable domain of TCR clone 122074 (TRBV11-2, TRBJ2-7)
CASSTVTAPKTYEQYF

SEQ ID NO: 244149 - protein, 12 aa, Homo sapiens
  CDR3 for alpha chain variable domain of TCR clone 122075 (TRAV12-3, TRAJ17)
CAMTLTGNKLTF

SEQ ID NO: 244150 - protein, 14 aa, Homo sapiens
  CDR3 for beta chain variable domain of TCR clone 122075 (TRBV20-1, TRBJ1-5)
CSARDDRGNQPQHF

SEQ ID NO: 244151 - protein, 11 aa, Homo sapiens
  CDR3 for alpha chain variable domain of TCR clone 122076 (TRAV3, TRAJ21)
CAVGNFNKFYF

SEQ ID NO: 244152 - protein, 13 aa, Homo sapiens
  CDR3 for beta chain variable domain of TCR clone 122076 (TRBV7-9, TRBJ1-2)
CASSLKRNYGYTF

SEQ ID NO: 244153 - protein, 16 aa, Homo sapiens
  CDR3 for alpha chain variable domain of TCR clone 122077 (TRAV30, TRAJ24)
CVTEIVDADSWGKFQF

SEQ ID NO: 244154 - protein, 12 aa, Homo sapiens
  CDR3 for beta chain variable domain of TCR clone 122077 (TRBV7-8, TRBJ2-7)
CASSLGDREQYF

SEQ ID NO: 244155 - protein, 14 aa, Homo sapiens
  CDR3 for alpha chain variable domain of TCR clone 122078 (TRAV14/DV4, TRAJ15)
CAMSRDQAGTALIF

SEQ ID NO: 244156 - protein, 16 aa, Homo sapiens
  CDR3 for beta chain variable domain of TCR clone 122078 (TRBV15, TRBJ2-3)
CATSRDLGIVTDTQYF

SEQ ID NO: 244157 - protein, 15 aa, Homo sapiens
  CDR3 for alpha chain variable domain of TCR clone 122079 (TRAV12-3, TRAJ11)
CAMSEENSGYCTLTF

SEQ ID NO: 244158 - protein, 16 aa, Homo sapiens
  CDR3 for beta chain variable domain of TCR clone 122079 (TRBV5-1, TRBJ2-7)
CASSLEGLAGLYEQYF

SEQ ID NO: 244159 - protein, 16 aa, Homo sapiens
  CDR3 for alpha chain variable domain of TCR clone 122080 (TRAV14/DV4, TRAJ53)
CAMREGGGGSNYKPTF

SEQ ID NO: 244160 - protein, 14 aa, Homo sapiens
  CDR3 for beta chain variable domain of TCR clone 122080 (TRBV20-1, TRBJ2-7)
CSAKTGTGGYEQYF

SEQ ID NO: 244161 - protein, 15 aa, Homo sapiens
  CDR3 for alpha chain variable domain of TCR clone 122081 (TRAV3, TRAJ22)
CAVRDRGGSARQLTF

SEQ ID NO: 244162 - protein, 16 aa, Homo sapiens
  CDR3 for beta chain variable domain of TCR clone 122081 (TRBV19, TRBJ1-6)
CASSVAPVAGNSPLHF

SEQ ID NO: 244163 - protein, 13 aa, Homo sapiens
  CDR3 for alpha chain variable domain of TCR clone 122082 (TRAV17, TRAJ9)
CATDYTGGFKTIF

SEQ ID NO: 244164 - protein, 16 aa, Homo sapiens
  CDR3 for beta chain variable domain of TCR clone 122082 (TRBV28, TRBJ2-2)
CASSLEGGSNTGELFF

SEQ ID NO: 244165 - protein, 14 aa, Homo sapiens
  CDR3 for alpha chain variable domain of TCR clone 122083 (TRAV13-1, TRAJ35)
CAASKGGFGNVLHF

SEQ ID NO: 244166 - protein, 13 aa, Homo sapiens
  CDR3 for beta chain variable domain of TCR clone 122083 (TRBV7-3, TRBJ1-1)
CASSQDWGAEALF

SEQ ID NO: 244167 - protein, 16 aa, Homo sapiens
  CDR3 for alpha chain variable domain of TCR clone 122084 (TRAV17, TRAJ36)
CATVSLNWGKQPLLWD

SEQ ID NO: 244168 - protein, 13 aa, Homo sapiens
  CDR3 for beta chain variable domain of TCR clone 122084 (TRBV4-1, TRBJ1-1)
CASSKLGTGEAFF

SEQ ID NO: 244169 - protein, 16 aa, Homo sapiens
  CDR3 for alpha chain variable domain of TCR clone 122085 (TRAV3, TRAJ10)
CAVRDMRAGGGNKLTF

SEQ ID NO: 244170 - protein, 14 aa, Homo sapiens
  CDR3 for beta chain variable domain of TCR clone 122085 (TRBV13, TRBJ2-5)
CASSLERVGETQYF

SEQ ID NO: 244171 - protein, 12 aa, Homo sapiens
  CDR3 for alpha chain variable domain of TCR clone 122086 (TRAV1-1, TRAJ43)
CAPRVSSNDMRF

SEQ ID NO: 244172 - protein, 15 aa, Homo sapiens
  CDR3 for beta chain variable domain of TCR clone 122086 (TRBV5-1, TRBJ2-7)
CASSLGDCTTYEQYF

SEQ ID NO: 244173 - protein, 16 aa, Homo sapiens
  CDR3 for alpha chain variable domain of TCR clone 122087 (TRAV3, TRAJ37)
CAVRGKGSGNTGKLIF

SEQ ID NO: 244174 - protein, 13 aa, Homo sapiens
  CDR3 for beta chain variable domain of TCR clone 122087 (TRBV14, TRBJ2-7)
CASSQERRYEQYF

SEQ ID NO: 244175 - protein, 13 aa, Homo sapiens
  CDR3 for alpha chain variable domain of TCR clone 122088 (TRAV1-1, TRAJ9)
CAAKNTGGFKTIF

SEQ ID NO: 244176 - protein, 14 aa, Homo sapiens
  CDR3 for beta chain variable domain of TCR clone 122088 (TRBV20-1, TRBJ2-1)
CSAQIGGSAKEQFF

SEQ ID NO: 244177 - protein, 16 aa, Homo sapiens
  CDR3 for alpha chain variable domain of TCR clone 122089 (TRAV27, TRAJ13)
CAGAKSDAGGYQKVTF

SEQ ID NO: 244178 - protein, 15 aa, Homo sapiens
  CDR3 for beta chain variable domain of TCR clone 122089 (TRBV29-1, TRBJ2-1)
CSVGRHALFYNEQFF

SEQ ID NO: 244179 - protein, 12 aa, Homo sapiens
  CDR3 for alpha chain variable domain of TCR clone 122090 (TRAV21, TRAJ11)
CAATSGYSTLTF

SEQ ID NO: 244180 - protein, 14 aa, Homo sapiens
  CDR3 for beta chain variable domain of TCR clone 122090 (TRBV20-1, TRBJ2-7)
CSAPELAGVGEQYS

SEQ ID NO: 244181 - protein, 16 aa, Homo sapiens
  CDR3 for alpha chain variable domain of TCR clone 122091 (TRAV12-2, TRAJ18)
CAVTTDRCSTLGRLYF

SEQ ID NO: 244182 - protein, 13 aa, Homo sapiens
  CDR3 for beta chain variable domain of TCR clone 122091 (TRBV19, TRBJ2-3)
CATWDKITDTQYF

SEQ ID NO: 244183 - protein, 14 aa, Homo sapiens
  CDR3 for alpha chain variable domain of TCR clone 122092 (TRAV12-2, TRAJ13)
CAVKKTGGYQKVTF

SEQ ID NO: 244184 - protein, 17 aa, Homo sapiens
  CDR3 for beta chain variable domain of TCR clone 122092 (TRBV15, TRBJ2-4)
CATSRDNPQTGLDMQYF

SEQ ID NO: 244185 - protein, 12 aa, Homo sapiens
  CDR3 for alpha chain variable domain of TCR clone 122093 (TRAV3, TRAJ43)
CAVRDSNNDMRF

SEQ ID NO: 244186 - protein, 15 aa, Homo sapiens
  CDR3 for beta chain variable domain of TCR clone 122093 (TRBV27, TRBJ1-5)
CASSLGTGFDQPQHF

SEQ ID NO: 244187 - protein, 13 aa, Homo sapiens
  CDR3 for alpha chain variable domain of TCR clone 122094 (TRAV3, TRAJ41)
CAVSSNSGYALNF

SEQ ID NO: 244188 - protein, 13 aa, Homo sapiens
  CDR3 for beta chain variable domain of TCR clone 122094 (TRBV7-2, TRBJ2-7)
CASSSPSGSEQYF

SEQ ID NO: 244189 - protein, 17 aa, Homo sapiens
  CDR3 for alpha chain variable domain of TCR clone 122095 (TRAV13-1, TRAJ31)
CAPRDRLMFGDGTQLVV

SEQ ID NO: 244190 - protein, 12 aa, Homo sapiens
  CDR3 for beta chain variable domain of TCR clone 122095 (TRBV7-9, TRBJ2-7)
CASSLDGYEQYF

SEQ ID NO: 244191 - protein, 11 aa, Homo sapiens
  CDR3 for alpha chain variable domain of TCR clone 122096 (TRAV21, TRAJ34)
CAVTNTDKLIF

SEQ ID NO: 244192 - protein, 16 aa, Homo sapiens
  CDR3 for beta chain variable domain of TCR clone 122096 (TRBV18, TRBJ1-1)
CASSPGVGGRGGVAFF

SEQ ID NO: 244193 - protein, 12 aa, Homo sapiens
  CDR3 for alpha chain variable domain of TCR clone 122097 (TRAV29/DV5, TRAJ15)
CASNQAGTALIF

SEQ ID NO: 244194 - protein, 15 aa, Homo sapiens
  CDR3 for beta chain variable domain of TCR clone 122097 (TRBV11-2, TRBJ2-2)
CASSSDRVNAGEMFF

SEQ ID NO: 244195 - protein, 16 aa, Homo sapiens
  CDR3 for alpha chain variable domain of TCR clone 122098 (TRAV3, TRAJ37)
CAVRGKGSGNTGKLIF

SEQ ID NO: 244196 - protein, 12 aa, Homo sapiens
  CDR3 for beta chain variable domain of TCR clone 122098 (TRBV14, TRBJ2-7)
CASSLYKDEQYF

SEQ ID NO: 244197 - protein, 15 aa, Homo sapiens
  CDR3 for alpha chain variable domain of TCR clone 122099 (TRAV3, TRAJ22)
CAVRDRGGSARQLTF

SEQ ID NO: 244198 - protein, 14 aa, Homo sapiens
  CDR3 for beta chain variable domain of TCR clone 122099 (TRBV19, TRBJ2-2)
CASSIAGAFGELFF

SEQ ID NO: 244199 - protein, 16 aa, Homo sapiens
  CDR3 for alpha chain variable domain of TCR clone 122100 (TRAV23/DV6, TRAJ9)
CAASIGGKTGGFKTIF

SEQ ID NO: 244200 - protein, 12 aa, Homo sapiens
  CDR3 for beta chain variable domain of TCR clone 122100 (TRBV6-3, TRBJ2-7)
CASSEPGFEQYF

SEQ ID NO: 244201 - protein, 18 aa, Homo sapiens
  CDR3 for alpha chain variable domain of TCR clone 122101 (TRAV21, TRAJ52)
CAVRPSPTGGTSYGKLTF

SEQ ID NO: 244202 - protein, 14 aa, Homo sapiens
  CDR3 for beta chain variable domain of TCR clone 122101 (TRBV4-1, TRBJ2-2)
CASSQAVNTGELFF

SEQ ID NO: 244203 - protein, 12 aa, Homo sapiens
  CDR3 for alpha chain variable domain of TCR clone 122102 (TRAV14/DV4, TRAJ9)
CAMNPGGFKTIF

SEQ ID NO: 244204 - protein, 16 aa, Homo sapiens
  CDR3 for beta chain variable domain of TCR clone 122102 (TRBV28, TRBJ2-5)
CASSVSPAGGWETQYF

SEQ ID NO: 244205 - protein, 12 aa, Homo sapiens
  CDR3 for alpha chain variable domain of TCR clone 122103 (TRAV30, TRAJ20)
CGTESNDYKISF

SEQ ID NO: 244206 - protein, 15 aa, Homo sapiens
  CDR3 for beta chain variable domain of TCR clone 122103 (TRBV20-1, TRBJ2-7)
CSARDRVSGMDEQYF

SEQ ID NO: 244207 - protein, 14 aa, Homo sapiens
  CDR3 for alpha chain variable domain of TCR clone 122104 (TRAV12-2, TRAJ13)
CAVKKTGGYQKVTF

SEQ ID NO: 244208 - protein, 14 aa, Homo sapiens
  CDR3 for beta chain variable domain of TCR clone 122104 (TRBV6-1, TRBJ1-3)
GASVQGGGGNTIYF

SEQ ID NO: 244209 - protein, 12 aa, Homo sapiens
  CDR3 for alpha chain variable domain of TCR clone 122105 (TRAV13-1, TRAJ21)
CAAKEGFNKFYF

SEQ ID NO: 244210 - protein, 14 aa, Homo sapiens
  CDR3 for beta chain variable domain of TCR clone 122105 (TRBV10-3, TRBJ1-2)
CAISAGGRVDGYTF

SEQ ID NO: 244211 - protein, 17 aa, Homo sapiens
  CDR3 for alpha chain variable domain of TCR clone 122106 (TRAV2, TRAJ22)
ILQVREEDATEQRQLTF

SEQ ID NO: 244212 - protein, 16 aa, Homo sapiens
  CDR3 for beta chain variable domain of TCR clone 122106 (TRBV2, TRBJ2-5)
CASSETQGVGEETQYF

SEQ ID NO: 244213 - protein, 13 aa, Homo sapiens
  CDR3 for alpha chain variable domain of TCR clone 122107 (TRAV17, TRAJ54)
CATVIQGAQKLGF

SEQ ID NO: 244214 - protein, 15 aa, Homo sapiens
  CDR3 for beta chain variable domain of TCR clone 122107 (TRBV13, TRBJ2-1)
CASSLLSGLNNEQFF

SEQ ID NO: 244215 - protein, 13 aa, Homo sapiens
  CDR3 for alpha chain variable domain of TCR clone 122108 (TRAV13-1, TRAJ21)
CAASIYNFNKFYF

SEQ ID NO: 244216 - protein, 18 aa, Homo sapiens
  CDR3 for beta chain variable domain of TCR clone 122108 (TRBV11-2, TRBJ2-3)
CASSLGGASRGAPNTQYF

SEQ ID NO: 244217 - protein, 12 aa, Homo sapiens
  CDR3 for alpha chain variable domain of TCR clone 122109 (TRAV12-3, TRAJ17)
CAMTLTGNKLTF

SEQ ID NO: 244218 - protein, 15 aa, Homo sapiens
  CDR3 for beta chain variable domain of TCR clone 122109 (TRBV19, TRBJ2-7)
CASRPTPGLSIEQYF

SEQ ID NO: 244219 - protein, 15 aa, Homo sapiens
  CDR3 for alpha chain variable domain of TCR clone 122110 (TRAV8-3, TRAJ32)
CAVGPYGGATNKLIF

SEQ ID NO: 244220 - protein, 14 aa, Homo sapiens
  CDR3 for beta chain variable domain of TCR clone 122110 (TRBV29-1, TRBJ2-2)
CSVLAEANTGELFF

SEQ ID NO: 244221 - protein, 14 aa, Homo sapiens
  CDR3 for alpha chain variable domain of TCR clone 122111 (TRAV26-1, TRAJ38)
CIADNAGNNRELIW

SEQ ID NO: 244222 - protein, 13 aa, Homo sapiens
  CDR3 for beta chain variable domain of TCR clone 122111 (TRBV7-9, TRBJ1-2)
CASSLKQNYGYTF

SEQ ID NO: 244223 - protein, 15 aa, Homo sapiens
  CDR3 for alpha chain variable domain of TCR clone 122112 (TRAV13-1, TRAJ52)
CAATSPRTSYGKLTF

SEQ ID NO: 244224 - protein, 15 aa, Homo sapiens
  CDR3 for beta chain variable domain of TCR clone 122112 (TRBV10-2, TRBJ2-6)
CASSEQGTGANVLTF

SEQ ID NO: 244225 - protein, 16 aa, Homo sapiens
  CDR3 for alpha chain variable domain of TCR clone 122113 (TRAV20, TRAJ52)
CAVLPDGGTRYGKLTF

SEQ ID NO: 244226 - protein, 12 aa, Homo sapiens
  CDR3 for beta chain variable domain of TCR clone 122113 (TRBV19, TRBJ2-1)
CASSQISNEQFF

SEQ ID NO: 244227 - protein, 14 aa, Homo sapiens
  CDR3 for alpha chain variable domain of TCR clone 122114 (TRAV21, TRAJ32)
CAVRNGGATNKLIF

SEQ ID NO: 244228 - protein, 15 aa, Homo sapiens
  CDR3 for beta chain variable domain of TCR clone 122114 (TRBV29-1, TRBJ2-1)
CSVSRTSGRYNEQFF

SEQ ID NO: 244229 - protein, 13 aa, Homo sapiens
  CDR3 for alpha chain variable domain of TCR clone 122115 (TRAV12-2, TRAJ20)
CAVNRFDDYKLSF

SEQ ID NO: 244230 - protein, 15 aa, Homo sapiens
  CDR3 for beta chain variable domain of TCR clone 122115 (TRBV7-9, TRBJ1-6)
CASSSPGRGNSPLHF

SEQ ID NO: 244231 - protein, 14 aa, Homo sapiens
  CDR3 for alpha chain variable domain of TCR clone 122116 (TRAV8-4, TRAJ54)
CAVSEVLGAQKRVF

SEQ ID NO: 244232 - protein, 13 aa, Homo sapiens
  CDR3 for beta chain variable domain of TCR clone 122116 (TRBV27, TRBJ2-7)
CASSFVSSYEQYF

SEQ ID NO: 244233 - protein, 16 aa, Homo sapiens
  CDR3 for alpha chain variable domain of TCR clone 122117 (TRAV38-1, TRAJ40)
CALRPTSGTYKYILEQ

SEQ ID NO: 244234 - protein, 14 aa, Homo sapiens
  CDR3 for beta chain variable domain of TCR clone 122117 (TRBV25-1, TRBJ1-1)
CASTHLGGNTEAFF

SEQ ID NO: 244235 - protein, 10 aa, Homo sapiens
  CDR3 for alpha chain variable domain of TCR clone 122118 (TRAV12-1, TRAJ43)
CVVHDNDMRF

SEQ ID NO: 244236 - protein, 13 aa, Homo sapiens
  CDR3 for beta chain variable domain of TCR clone 122118 (TRBV12-4, TRBJ1-2)
CASSSGLTVISTS

SEQ ID NO: 244237 - protein, 16 aa, Homo sapiens
  CDR3 for alpha chain variable domain of TCR clone 122119 (TRAV30, TRAJ24)
CGTEIVDADSWGKFQF

SEQ ID NO: 244238 - protein, 13 aa, Homo sapiens
  CDR3 for beta chain variable domain of TCR clone 122119 (TRBV18, TRBJ1-2)
CASSASATEGYTF

SEQ ID NO: 244239 - protein, 13 aa, Homo sapiens
  CDR3 for alpha chain variable domain of TCR clone 122120 (TRAV12-2, TRAJ15)
CAVFNQAGTALIF

SEQ ID NO: 244240 - protein, 15 aa, Homo sapiens
  CDR3 for beta chain variable domain of TCR clone 122120 (TRBV7-8, TRBJ1-5)
CASSRGGGAGEPQHF

SEQ ID NO: 244241 - protein, 15 aa, Homo sapiens
  CDR3 for alpha chain variable domain of TCR clone 122121 (TRAV25, TRAJ52)
CAGTSGGTSYGKLTF

SEQ ID NO: 244242 - protein, 16 aa, Homo sapiens
  CDR3 for beta chain variable domain of TCR clone 122121 (TRBV15, TRBJ1-2)
CATSRGPRIGGGGYTF

SEQ ID NO: 244243 - protein, 11 aa, Homo sapiens
  CDR3 for alpha chain variable domain of TCR clone 122122 (TRAV21, TRAJ31)
CAVRNNARLMF

SEQ ID NO: 244244 - protein, 14 aa, Homo sapiens
  CDR3 for beta chain variable domain of TCR clone 122122 (TRBV7-2, TRBJ2-7)
CASRSQGAAYEQYF

SEQ ID NO: 244245 - protein, 13 aa, Homo sapiens
  CDR3 for alpha chain variable domain of TCR clone 122123 (TRAV13-2, TRAJ13)
CAERPGGYKKVTF

SEQ ID NO: 244246 - protein, 19 aa, Homo sapiens
  CDR3 for beta chain variable domain of TCR clone 122123 (TRBV4-1, TRBJ2-1)
CASSQGPLPGLGSRNEQFF

SEQ ID NO: 244247 - protein, 14 aa, Homo sapiens
  CDR3 for alpha chain variable domain of TCR clone 122124 (TRAV26-1, TRAJ45)
CIEVTGGGADGLTF

SEQ ID NO: 244248 - protein, 13 aa, Homo sapiens
  CDR3 for beta chain variable domain of TCR clone 122124 (TRBV11-2, TRBJ2-5)
CASSRGPSETQYF

SEQ ID NO: 244249 - protein, 14 aa, Homo sapiens
  CDR3 for alpha chain variable domain of TCR clone 122125 (TRAV1-2, TRAJ16)
CAVNRFSDGQKLLF

SEQ ID NO: 244250 - protein, 13 aa, Homo sapiens
  CDR3 for beta chain variable domain of TCR clone 122125 (TRBV14, TRBJ2-7)
CASSQDRRCEQYF

SEQ ID NO: 244251 - protein, 13 aa, Homo sapiens
  CDR3 for alpha chain variable domain of TCR clone 122126 (TRAV2, TRAJ15)
CAVASQAGTALVF

SEQ ID NO: 244252 - protein, 15 aa, Homo sapiens
  CDR3 for beta chain variable domain of TCR clone 122126 (TRBV7-3, TRBJ2-2)
CASSETGQGTGELFF

SEQ ID NO: 244253 - protein, 18 aa, Homo sapiens
  CDR3 for alpha chain variable domain of TCR clone 122127 (TRAV29/DV5, TRAJ52)
CAAGFRGAGGTSYGKLAF

SEQ ID NO: 244254 - protein, 13 aa, Homo sapiens
  CDR3 for beta chain variable domain of TCR clone 122127 (TRBV7-2, TRBJ2-4)
CASSREHANIQYF

SEQ ID NO: 244255 - protein, 14 aa, Homo sapiens
  CDR3 for alpha chain variable domain of TCR clone 122128 (TRAV16, TRAJ3)
CALSQYSSASKIIF

SEQ ID NO: 244256 - protein, 14 aa, Homo sapiens
  CDR3 for beta chain variable domain of TCR clone 122128 (TRBV12-4, TRBJ1-1)
CASSLGTGGTEAFF

SEQ ID NO: 244257 - protein, 16 aa, Homo sapiens
  CDR3 for alpha chain variable domain of TCR clone 122129 (TRAV30, TRAJ24)
CGTEIVDADSWGKFQF

SEQ ID NO: 244258 - protein, 14 aa, Homo sapiens
  CDR3 for beta chain variable domain of TCR clone 122129 (TRBV20-1, TRBJ2-7)
CSAKRGRSSYEQYF

SEQ ID NO: 244259 - protein, 13 aa, Homo sapiens
  CDR3 for alpha chain variable domain of TCR clone 122130 (TRAV20, TRAJ40)
CAVPFPGTYKCIF

SEQ ID NO: 244260 - protein, 13 aa, Homo sapiens
  CDR3 for beta chain variable domain of TCR clone 122130 (TRBV15, TRBJ2-5)
CATSQIGEETQYF

SEQ ID NO: 244261 - protein, 14 aa, Homo sapiens
  CDR3 for alpha chain variable domain of TCR clone 122131 (TRAV8-2, TRAJ37)
CVVSISGNTGKLIF

SEQ ID NO: 244262 - protein, 12 aa, Homo sapiens
  CDR3 for beta chain variable domain of TCR clone 122131 (TRBV28, TRBJ2-3)
CASSLYRDTQYF

SEQ ID NO: 244263 - protein, 13 aa, Homo sapiens
  CDR3 for alpha chain variable domain of TCR clone 122132 (TRAV1-2, TRAJ9)
CAALNTGGFKTIF

SEQ ID NO: 244264 - protein, 12 aa, Homo sapiens
  CDR3 for beta chain variable domain of TCR clone 122132 (TRBV28, TRBJ2-1)
CASSVQINEQFF

SEQ ID NO: 244265 - protein, 17 aa, Homo sapiens
  CDR3 for alpha chain variable domain of TCR clone 122133 (TRAV3, TRAJ6)
CAVRDGPRAGGSYIPTF

SEQ ID NO: 244266 - protein, 18 aa, Homo sapiens
  CDR3 for beta chain variable domain of TCR clone 122133 (TRBV7-9, TRBJ2-7)
CASSPTTSGSRTWYEQYF

SEQ ID NO: 244267 - protein, 14 aa, Homo sapiens
  CDR3 for alpha chain variable domain of TCR clone 122134 (TRAV12-2, TRAJ24)
CAVTPADSWGKLQF

SEQ ID NO: 244268 - protein, 14 aa, Homo sapiens
  CDR3 for beta chain variable domain of TCR clone 122134 (TRBV19, TRBJ2-7)
CASNFRDTFTGMYF

SEQ ID NO: 244269 - protein, 12 aa, Homo sapiens
  CDR3 for alpha chain variable domain of TCR clone 122135 (TRAV27, TRAJ9)
CAGESGGFKTIF

SEQ ID NO: 244270 - protein, 16 aa, Homo sapiens
  CDR3 for beta chain variable domain of TCR clone 122135 (TRBV6-1, TRBJ2-5)
CASSETLDRGAETQYF

SEQ ID NO: 244271 - protein, 14 aa, Homo sapiens
  CDR3 for alpha chain variable domain of TCR clone 122136 (TRAV13-1, TRAJ44)
CAAKATGTASKLTF

SEQ ID NO: 244272 - protein, 17 aa, Homo sapiens
  CDR3 for beta chain variable domain of TCR clone 122136 (TRBV7-3, TRBJ2-3)
CASSLMKRMRVADTQYF

SEQ ID NO: 244273 - protein, 20 aa, Homo sapiens
  CDR3 for alpha chain variable domain of TCR clone 122137 (TRAV12-1, TRAJ42)
SSVIQPPTSVKGGSQGNLIF

SEQ ID NO: 244274 - protein, 18 aa, Homo sapiens
  CDR3 for beta chain variable domain of TCR clone 122137 (TRBV11-2, TRBJ2-3)
CASILGGASRGAPNTQYF

SEQ ID NO: 244275 - protein, 15 aa, Homo sapiens
  CDR3 for alpha chain variable domain of TCR clone 122138 (TRAV26-1, TRAJ17)
CIVSSFKAAGNKLTF

SEQ ID NO: 244276 - protein, 11 aa, Homo sapiens
  CDR3 for beta chain variable domain of TCR clone 122138 (TRBV5-6, TRBJ2-5)
CASSLERTQYF

SEQ ID NO: 244277 - protein, 13 aa, Homo sapiens
  CDR3 for alpha chain variable domain of TCR clone 122139 (TRAV21, TRAJ57)
CAVIDGGSEKLVF

SEQ ID NO: 244278 - protein, 15 aa, Homo sapiens
  CDR3 for beta chain variable domain of TCR clone 122139 (TRBV10-3, TRBJ2-5)
CAISEFGRGQETQYF

SEQ ID NO: 244279 - protein, 12 aa, Homo sapiens
  CDR3 for alpha chain variable domain of TCR clone 122140 (TRAV12-1, TRAJ31)
CVSWNNNARLMY

SEQ ID NO: 244280 - protein, 15 aa, Homo sapiens
  CDR3 for beta chain variable domain of TCR clone 122140 (TRBV7-2, TRBJ1-5)
CASSLDRGQDQPQHF

SEQ ID NO: 244281 - protein, 11 aa, Homo sapiens
  CDR3 for alpha chain variable domain of TCR clone 122141 (TRAV16, TRAJ49)
CALRSGNQFYF

SEQ ID NO: 244282 - protein, 16 aa, Homo sapiens
  CDR3 for beta chain variable domain of TCR clone 122141 (TRBV20-1, TRBJ1-5)
CSARDVGGGWVQPQHF

SEQ ID NO: 244283 - protein, 15 aa, Homo sapiens
  CDR3 for alpha chain variable domain of TCR clone 122142 (TRAV2, TRAJ11)
CAVGGRNSGYSTLTF

SEQ ID NO: 244284 - protein, 14 aa, Homo sapiens
  CDR3 for beta chain variable domain of TCR clone 122142 (TRBV4-1, TRBJ2-2)
CAGSQAVNTGELFF

SEQ ID NO: 244285 - protein, 13 aa, Homo sapiens
  CDR3 for alpha chain variable domain of TCR clone 122143 (TRAV3, TRAJ21)
CAVREPDFNKFYF

SEQ ID NO: 244286 - protein, 13 aa, Homo sapiens
  CDR3 for beta chain variable domain of TCR clone 122143 (TRBV9, TRBJ2-1)
SASSPSGGNEQFF

SEQ ID NO: 244287 - protein, 15 aa, Homo sapiens
  CDR3 for alpha chain variable domain of TCR clone 122144 (TRAV34, TRAJ36)
CGAPSRLGGANNLFF

SEQ ID NO: 244288 - protein, 16 aa, Homo sapiens
  CDR3 for beta chain variable domain of TCR clone 122144 (TRBV4-3, TRBJ2-1)
CASSYRRLGSWDQQFF

SEQ ID NO: 244289 - protein, 15 aa, Homo sapiens
  CDR3 for alpha chain variable domain of TCR clone 122145 (TRAV3, TRAJ5)
CDVRDLDTGRRALTF

SEQ ID NO: 244290 - protein, 15 aa, Homo sapiens
  CDR3 for beta chain variable domain of TCR clone 122145 (TRBV6-3, TRBJ2-2)
CASSFLATLTGELFF

SEQ ID NO: 244291 - protein, 12 aa, Homo sapiens
  CDR3 for alpha chain variable domain of TCR clone 122146 (TRAV3, TRAJ20)
CAVRDGDYKLSF

SEQ ID NO: 244292 - protein, 12 aa, Homo sapiens
  CDR3 for beta chain variable domain of TCR clone 122146 (TRBV11-2, TRBJ2-2)
CASSLPTGELFF

SEQ ID NO: 244293 - protein, 12 aa, Homo sapiens
  CDR3 for alpha chain variable domain of TCR clone 122147 (TRAV21, TRAJ42)
CAVGGSQGNLIF

SEQ ID NO: 244294 - protein, 14 aa, Homo sapiens
  CDR3 for beta chain variable domain of TCR clone 122147 (TRBV12-4, TRBJ1-1)
CASSLGKGGTEAFF

SEQ ID NO: 244295 - protein, 12 aa, Homo sapiens
  CDR3 for alpha chain variable domain of TCR clone 122148 (TRAV2, TRAJ5)
CALDTGSRALTF

SEQ ID NO: 244296 - protein, 15 aa, Homo sapiens
  CDR3 for beta chain variable domain of TCR clone 122148 (TRBV10-3, TRBJ2-1)
CAISDVQDRAYEQFF

SEQ ID NO: 244297 - protein, 14 aa, Homo sapiens
  CDR3 for alpha chain variable domain of TCR clone 122149 (TRAV8-3, TRAJ15)
CAVGRHQAGTALIF

SEQ ID NO: 244298 - protein, 16 aa, Homo sapiens
  CDR3 for beta chain variable domain of TCR clone 122149 (TRBV19, TRBJ2-1)
CASSKAGPSSYNEQFF

SEQ ID NO: 244299 - protein, 15 aa, Homo sapiens
  CDR3 for alpha chain variable domain of TCR clone 122150 (TRAV17, TRAJ4)
CATGTWSGGYIKLIF

SEQ ID NO: 244300 - protein, 13 aa, Homo sapiens
  CDR3 for beta chain variable domain of TCR clone 122150 (TRBV6-6, TRBJ2-7)
CASSPKHLAEQYF

SEQ ID NO: 244301 - protein, 13 aa, Homo sapiens
  CDR3 for alpha chain variable domain of TCR clone 122151 (TRAV8-4, TRAJ30)
CAVSVNRDDKIIF

SEQ ID NO: 244302 - protein, 15 aa, Homo sapiens
  CDR3 for beta chain variable domain of TCR clone 122151 (TRBV6-3, TRBJ2-7)
CASSSPGTVFYEQYF

SEQ ID NO: 244303 - protein, 15 aa, Homo sapiens
  CDR3 for alpha chain variable domain of TCR clone 122152 (TRAV3, TRAJ17)
CAVRDTGAAGNKRTF

SEQ ID NO: 244304 - protein, 14 aa, Homo sapiens
  CDR3 for beta chain variable domain of TCR clone 122152 (TRBV6-3, TRBJ1-1)
CASSNLPPGAEAFF

SEQ ID NO: 244305 - protein, 14 aa, Homo sapiens
  CDR3 for alpha chain variable domain of TCR clone 122153 (TRAV23/DV6, TRAJ9)
CAASKDTGGLKTIF

SEQ ID NO: 244306 - protein, 12 aa, Homo sapiens
  CDR3 for beta chain variable domain of TCR clone 122153 (TRBV20-1, TRBJ2-1)
CSASGGANEQFF

SEQ ID NO: 244307 - protein, 13 aa, Homo sapiens
  CDR3 for alpha chain variable domain of TCR clone 122154 (TRAV17, TRAJ9)
CATDYTGGFKTIF

SEQ ID NO: 244308 - protein, 13 aa, Homo sapiens
  CDR3 for beta chain variable domain of TCR clone 122154 (TRBV12-5, TRBJ2-3)
CASGDRQSDTQYF

SEQ ID NO: 244309 - protein, 14 aa, Homo sapiens
  CDR3 for alpha chain variable domain of TCR clone 122155 (TRAV1-2, TRAJ16)
FAVNRFSDGQKLLF

SEQ ID NO: 244310 - protein, 13 aa, Homo sapiens
  CDR3 for beta chain variable domain of TCR clone 122155 (TRBV7-9, TRBJ1-2)
CASSLKQNYGYTF

SEQ ID NO: 244311 - protein, 13 aa, Homo sapiens
  CDR3 for alpha chain variable domain of TCR clone 122156 (TRAV17, TRAJ9)
CATDYTGGFKTIF

SEQ ID NO: 244312 - protein, 16 aa, Homo sapiens
  CDR3 for beta chain variable domain of TCR clone 122156 (TRBV29-1, TRBJ1-2)
CSVEANRDIANYGYTF

SEQ ID NO: 244313 - protein, 15 aa, Homo sapiens
  CDR3 for alpha chain variable domain of TCR clone 122157 (TRAV23/DV6, TRAJ37)
CAAGEGSSNTGKLIF

SEQ ID NO: 244314 - protein, 15 aa, Homo sapiens
  CDR3 for beta chain variable domain of TCR clone 122157 (TRBV7-3, TRBJ2-1)
CASSLAGAGADEQFF

SEQ ID NO: 244315 - protein, 13 aa, Homo sapiens
  CDR3 for alpha chain variable domain of TCR clone 122158 (TRAV21, TRAJ20)
CAVGLRIDYKLSF

SEQ ID NO: 244316 - protein, 13 aa, Homo sapiens
  CDR3 for beta chain variable domain of TCR clone 122158 (TRBV29-1, TRBJ2-1)
CSVEGGRVNEQFF

SEQ ID NO: 244317 - protein, 15 aa, Homo sapiens
  CDR3 for alpha chain variable domain of TCR clone 122159 (TRAV17, TRAJ57)
CATGPSQGGSEKLVF

SEQ ID NO: 244318 - protein, 13 aa, Homo sapiens
  CDR3 for beta chain variable domain of TCR clone 122159 (TRBV20-1, TRBJ1-1)
CSARGGGNTEAFF

SEQ ID NO: 244319 - protein, 14 aa, Homo sapiens
  CDR3 for alpha chain variable domain of TCR clone 122160 (TRAV12-2, TRAJ41)
CAVNRANSGYALNF

SEQ ID NO: 244320 - protein, 13 aa, Homo sapiens
  CDR3 for beta chain variable domain of TCR clone 122160 (TRBV7-9, TRBJ1-1)
CASSLSGETEAFF

SEQ ID NO: 244321 - protein, 16 aa, Homo sapiens
  CDR3 for alpha chain variable domain of TCR clone 122161 (TRAV3, TRAJ4)
CAVRPSPSGGYNKLMF

SEQ ID NO: 244322 - protein, 12 aa, Homo sapiens
  CDR3 for beta chain variable domain of TCR clone 122161 (TRBV7-9, TRBJ2-7)
CASSQGVYEQYF

SEQ ID NO: 244323 - protein, 16 aa, Homo sapiens
  CDR3 for alpha chain variable domain of TCR clone 122162 (TRAV17, TRAJ22)
CATGPISSGSARQLTL

SEQ ID NO: 244324 - protein, 13 aa, Homo sapiens
  CDR3 for beta chain variable domain of TCR clone 122162 (TRBV11-2, TRBJ2-1)
CASSLGLAGGRFF

SEQ ID NO: 244325 - protein, 15 aa, Homo sapiens
  CDR3 for alpha chain variable domain of TCR clone 122163 (TRAV8-3, TRAJ45)
CAVEGSEGGADGLTF

SEQ ID NO: 244326 - protein, 16 aa, Homo sapiens
  CDR3 for beta chain variable domain of TCR clone 122163 (TRBV6-5, TRBJ2-6)
CASSYPLSSGANVLTF

SEQ ID NO: 244327 - protein, 23 aa, Homo sapiens
  CDR3 for alpha chain variable domain of TCR clone 122164 (TRAV26-1, TRAJ38)
CIADNAGNNHIQNPDPAVYQLRD

SEQ ID NO: 244328 - protein, 15 aa, Homo sapiens
  CDR3 for beta chain variable domain of TCR clone 122164 (TRBV11-2, TRBJ2-1)
CASSLTSGGYNEQFF

SEQ ID NO: 244329 - protein, 15 aa, Homo sapiens
  CDR3 for alpha chain variable domain of TCR clone 122165 (TRAV2, TRAJ28)
CAVPYSGAGSYQLTF

SEQ ID NO: 244330 - protein, 12 aa, Homo sapiens
  CDR3 for beta chain variable domain of TCR clone 122165 (TRBV11-2, TRBJ2-2)
CASSLGGGELFF

SEQ ID NO: 244331 - protein, 14 aa, Homo sapiens
  CDR3 for alpha chain variable domain of TCR clone 122166 (TRAV1-2, TRAJ8)
CAVREDTGFQKLVF

SEQ ID NO: 244332 - protein, 14 aa, Homo sapiens
  CDR3 for beta chain variable domain of TCR clone 122166 (TRBV7-8, TRBJ2-3)
CASSSRDSTDTQYF

SEQ ID NO: 244333 - protein, 13 aa, Homo sapiens
  CDR3 for alpha chain variable domain of TCR clone 122167 (TRAV2, TRAJ29)
CVAQNSGNTPLVF

SEQ ID NO: 244334 - protein, 14 aa, Homo sapiens
  CDR3 for beta chain variable domain of TCR clone 122167 (TRBV7-9, TRBJ2-4)
CASSLAMGGNIQYF

SEQ ID NO: 244335 - protein, 17 aa, Homo sapiens
  CDR3 for alpha chain variable domain of TCR clone 122168 (TRAV17, TRAJ28)
CATDPRRGWAGSYQLTF

SEQ ID NO: 244336 - protein, 16 aa, Homo sapiens
  CDR3 for beta chain variable domain of TCR clone 122168 (TRBV25-1, TRBJ1-1)
CASSGDRDRGRIEAFF

SEQ ID NO: 244337 - protein, 16 aa, Homo sapiens
  CDR3 for alpha chain variable domain of TCR clone 122169 (TRAV20, TRAJ22)
CAVQASSSGSARQLTF

SEQ ID NO: 244338 - protein, 15 aa, Homo sapiens
  CDR3 for beta chain variable domain of TCR clone 122169 (TRBV6-5, TRBJ2-1)
CASSYDAGAGNEQFF

SEQ ID NO: 244339 - protein, 11 aa, Homo sapiens
  CDR3 for alpha chain variable domain of TCR clone 122170 (TRAV2, TRAJ33)
CAVESNYQLIW

SEQ ID NO: 244340 - protein, 20 aa, Homo sapiens
  CDR3 for beta chain variable domain of TCR clone 122170 (TRBV7-8, TRBJ2-1)
CASSLAHRLAGVRSYNEQFF

SEQ ID NO: 244341 - protein, 15 aa, Homo sapiens
  CDR3 for alpha chain variable domain of TCR clone 122171 (TRAV9-2, TRAJ57)
CALFSGQGGSEKLVF

SEQ ID NO: 244342 - protein, 14 aa, Homo sapiens
  CDR3 for beta chain variable domain of TCR clone 122171 (TRBV25-1, TRBJ1-1)
CASTHLGGNTEAFF

SEQ ID NO: 244343 - protein, 16 aa, Homo sapiens
  CDR3 for alpha chain variable domain of TCR clone 122172 (TRAV14/DV4, TRAJ53)
CAMREGGGGSNYKLTF

SEQ ID NO: 244344 - protein, 15 aa, Homo sapiens
  CDR3 for beta chain variable domain of TCR clone 122172 (TRBV9, TRBJ1-6)
CASSVAGTGDSPLHF

SEQ ID NO: 244345 - protein, 14 aa, Homo sapiens
  CDR3 for alpha chain variable domain of TCR clone 122173 (TRAV13-1, TRAJ17)
CAASRGAAGNKLTF

SEQ ID NO: 244346 - protein, 17 aa, Homo sapiens
  CDR3 for beta chain variable domain of TCR clone 122173 (TRBV11-2, TRBJ2-1)
CASSLYPPGVEYNEQFF

SEQ ID NO: 244347 - protein, 14 aa, Homo sapiens
  CDR3 for alpha chain variable domain of TCR clone 122174 (TRAV9-2, TRAJ39)
CALYIYNAGNMLTF

SEQ ID NO: 244348 - protein, 15 aa, Homo sapiens
  CDR3 for beta chain variable domain of TCR clone 122174 (TRBV12-4, TRBJ2-5)
CASTLNSGRGETQYF

SEQ ID NO: 244349 - protein, 13 aa, Homo sapiens
  CDR3 for alpha chain variable domain of TCR clone 122175 (TRAV12-3, TRAJ7)
CAMTPYGNNRLAF

SEQ ID NO: 244350 - protein, 13 aa, Homo sapiens
  CDR3 for beta chain variable domain of TCR clone 122175 (TRBV12-4, TRBJ2-2)
CASSITGSGELFF

SEQ ID NO: 244351 - protein, 17 aa, Homo sapiens
  CDR3 for alpha chain variable domain of TCR clone 122176 (TRAV3, TRAJ42)
CAVRDRDSGGSQGNLIF

SEQ ID NO: 244352 - protein, 15 aa, Homo sapiens
  CDR3 for beta chain variable domain of TCR clone 122176 (TRBV6-6, TRBJ2-7)
CASSYSYGGSYEQYF

SEQ ID NO: 244353 - protein, 14 aa, Homo sapiens
  CDR3 for alpha chain variable domain of TCR clone 122177 (TRAV26-1, TRAJ38)
CIADNAGNNRKLIW

SEQ ID NO: 244354 - protein, 17 aa, Homo sapiens
  CDR3 for beta chain variable domain of TCR clone 122177 (TRBV15, TRBJ1-1)
CATSSVGGADGDTEAFF

SEQ ID NO: 244355 - protein, 12 aa, Homo sapiens
  CDR3 for alpha chain variable domain of TCR clone 122178 (TRAV12-2, TRAJ4)
GWPEGGYNKLIF

SEQ ID NO: 244356 - protein, 12 aa, Homo sapiens
  CDR3 for beta chain variable domain of TCR clone 122178 (TRBV7-8, TRBJ2-7)
CASSLGDREQYF

SEQ ID NO: 244357 - protein, 13 aa, Homo sapiens
  CDR3 for alpha chain variable domain of TCR clone 122179 (TRAV21, TRAJ20)
CAVGLRVDYKLSF

SEQ ID NO: 244358 - protein, 14 aa, Homo sapiens
  CDR3 for beta chain variable domain of TCR clone 122179 (TRBV19, TRBJ2-1)
CASPTLVLSGEQFF

SEQ ID NO: 244359 - protein, 12 aa, Homo sapiens
  CDR3 for alpha chain variable domain of TCR clone 122180 (TRAV12-2, TRAJ7)
CAVVRGNNRLAF

SEQ ID NO: 244360 - protein, 12 aa, Homo sapiens
  CDR3 for beta chain variable domain of TCR clone 122180 (TRBV7-8, TRBJ2-7)
CASSLGDREQYF

SEQ ID NO: 244361 - protein, 13 aa, Homo sapiens
  CDR3 for alpha chain variable domain of TCR clone 122181 (TRAV12-2, TRAJ9)
CAVLETGGFKTIF

SEQ ID NO: 244362 - protein, 17 aa, Homo sapiens
  CDR3 for beta chain variable domain of TCR clone 122181 (TRBV6-3, TRBJ2-7)
CTSVPAAGQGLIYEQYF

SEQ ID NO: 244363 - protein, 14 aa, Homo sapiens
  CDR3 for alpha chain variable domain of TCR clone 122182 (TRAV1-2, TRAJ8)
CAVREDTGFQKLVV

SEQ ID NO: 244364 - protein, 13 aa, Homo sapiens
  CDR3 for beta chain variable domain of TCR clone 122182 (TRBV29-1, TRBJ1-1)
CSVGDSRNTEAFF

SEQ ID NO: 244365 - protein, 12 aa, Homo sapiens
  CDR3 for alpha chain variable domain of TCR clone 122183 (TRAV10, TRAJ6)
CVVSEGSYIPTF

SEQ ID NO: 244366 - protein, 15 aa, Homo sapiens
  CDR3 for beta chain variable domain of TCR clone 122183 (TRBV4-3, TRBJ2-7)
CASSQGGRGIYEQYF

SEQ ID NO: 244367 - protein, 14 aa, Homo sapiens
  CDR3 for alpha chain variable domain of TCR clone 122184 (TRAV3, TRAJ21)
CAVRDAYNFNKFYY

SEQ ID NO: 244368 - protein, 17 aa, Homo sapiens
  CDR3 for beta chain variable domain of TCR clone 122184 (TRBV20-1, TRBJ1-6)
CSARGGYTFSYNSPLHF

SEQ ID NO: 244369 - protein, 14 aa, Homo sapiens
  CDR3 for alpha chain variable domain of TCR clone 122185 (TRAV26-1, TRAJ26)
CIVRATFLGQNFVF

SEQ ID NO: 244370 - protein, 16 aa, Homo sapiens
  CDR3 for beta chain variable domain of TCR clone 122185 (TRBV12-4, TRBJ2-7)
CASGSTGTGPSYEQYF

SEQ ID NO: 244371 - protein, 13 aa, Homo sapiens
  CDR3 for alpha chain variable domain of TCR clone 122186 (TRAV21, TRAJ20)
CAVGLRVDYKLSF

SEQ ID NO: 244372 - protein, 16 aa, Homo sapiens
  CDR3 for beta chain variable domain of TCR clone 122186 (TRBV12-4, TRBJ2-5)
CASSWRPSGDLETQYF

SEQ ID NO: 244373 - protein, 12 aa, Homo sapiens
  CDR3 for alpha chain variable domain of TCR clone 122187 (TRAV13-2, TRAJ8)
CAPWLGFQKLVF

SEQ ID NO: 244374 - protein, 11 aa, Homo sapiens
  CDR3 for beta chain variable domain of TCR clone 122187 (TRBV19, TRBJ2-5)
CASSIKETQYF

SEQ ID NO: 244375 - protein, 14 aa, Homo sapiens
  CDR3 for alpha chain variable domain of TCR clone 122188 (TRAV12-1, TRAJ17)
CVLNYKAAGNKLTF

SEQ ID NO: 244376 - protein, 14 aa, Homo sapiens
  CDR3 for beta chain variable domain of TCR clone 122188 (TRBV7-8, TRBJ2-3)
CASSLEAGTDTQYF

SEQ ID NO: 244377 - protein, 16 aa, Homo sapiens
  CDR3 for alpha chain variable domain of TCR clone 122189 (TRAV12-1, TRAJ12)
CVVNTLLMDCSYKLIF

SEQ ID NO: 244378 - protein, 13 aa, Homo sapiens
  CDR3 for beta chain variable domain of TCR clone 122189 (TRBV11-2, TRBJ2-1)
CASSSEAYNEQFF

SEQ ID NO: 244379 - protein, 16 aa, Homo sapiens
  CDR3 for alpha chain variable domain of TCR clone 122190 (TRAV13-1, TRAJ13)
CTAFFLGVTRKLPLEL

SEQ ID NO: 244380 - protein, 15 aa, Homo sapiens
  CDR3 for beta chain variable domain of TCR clone 122190 (TRBV6-5, TRBJ2-1)
CASSYDAGAGNEQFF

SEQ ID NO: 244381 - protein, 12 aa, Homo sapiens
  CDR3 for alpha chain variable domain of TCR clone 122191 (TRAV8-3, TRAJ20)
CAVGANDYKLSF

SEQ ID NO: 244382 - protein, 14 aa, Homo sapiens
  CDR3 for beta chain variable domain of TCR clone 122191 (TRBV2, TRBJ2-7)
CASSLTSGGYEQYF

SEQ ID NO: 244383 - protein, 17 aa, Homo sapiens
  CDR3 for alpha chain variable domain of TCR clone 122192 (TRAV8-6, TRAJ58)
CAVSSWVGETSGSRLTF

SEQ ID NO: 244384 - protein, 15 aa, Homo sapiens
  CDR3 for beta chain variable domain of TCR clone 122192 (TRBV7-6, TRBJ1-2)
CASSSGGRGGYGYTF

SEQ ID NO: 244385 - protein, 12 aa, Homo sapiens
  CDR3 for alpha chain variable domain of TCR clone 122193 (TRAV1-1, TRAJ8)
CAGATGFQKLVF

SEQ ID NO: 244386 - protein, 15 aa, Homo sapiens
  CDR3 for beta chain variable domain of TCR clone 122193 (TRBV7-9, TRBJ1-4)
CASSRTGGFNEKLFF

SEQ ID NO: 244387 - protein, 11 aa, Homo sapiens
  CDR3 for alpha chain variable domain of TCR clone 122194 (TRAV17, TRAJ36)
CAPTVANNLFF

SEQ ID NO: 244388 - protein, 12 aa, Homo sapiens
  CDR3 for beta chain variable domain of TCR clone 122194 (TRBV29-1, TRBJ2-3)
CSVTGGADTQYF

SEQ ID NO: 244389 - protein, 12 aa, Homo sapiens
  CDR3 for alpha chain variable domain of TCR clone 122195 (TRAV12-2, TRAJ21)
CAVRYNFNKFYF

SEQ ID NO: 244390 - protein, 14 aa, Homo sapiens
  CDR3 for beta chain variable domain of TCR clone 122195 (TRBV28, TRBJ2-1)
CASGYYTAYNEQFS

SEQ ID NO: 244391 - protein, 14 aa, Homo sapiens
  CDR3 for alpha chain variable domain of TCR clone 122196 (TRAV12-3, TRAJ9)
CAMSPNTGGAKTIF

SEQ ID NO: 244392 - protein, 12 aa, Homo sapiens
  CDR3 for beta chain variable domain of TCR clone 122196 (TRBV11-2, TRBJ2-2)
CASSLGGGELFF

SEQ ID NO: 244393 - protein, 12 aa, Homo sapiens
  CDR3 for alpha chain variable domain of TCR clone 122197 (TRAV1-1, TRAJ39)
CAVPVVGNMLTF

SEQ ID NO: 244394 - protein, 12 aa, Homo sapiens
  CDR3 for beta chain variable domain of TCR clone 122197 (TRBV5-1, TRBJ2-3)
CASSLAADTQYF

SEQ ID NO: 244395 - protein, 15 aa, Homo sapiens
  CDR3 for alpha chain variable domain of TCR clone 122198 (TRAV3, TRAJ22)
CAVRDRGGSARQLTL

SEQ ID NO: 244396 - protein, 15 aa, Homo sapiens
  CDR3 for beta chain variable domain of TCR clone 122198 (TRBV20-1, TRBJ1-1)
CSASRGVTGNTEAFF

SEQ ID NO: 244397 - protein, 11 aa, Homo sapiens
  CDR3 for alpha chain variable domain of TCR clone 122199 (TRAV3, TRAJ17)
PRGAAGNKLTF

SEQ ID NO: 244398 - protein, 16 aa, Homo sapiens
  CDR3 for beta chain variable domain of TCR clone 122199 (TRBV7-6, TRBJ2-1)
CASSAPGPSAYNEQFF

SEQ ID NO: 244399 - protein, 14 aa, Homo sapiens
  CDR3 for alpha chain variable domain of TCR clone 122200 (TRAV35, TRAJ39)
CAGQLGNAGNMLTF

SEQ ID NO: 244400 - protein, 12 aa, Homo sapiens
  CDR3 for beta chain variable domain of TCR clone 122200 (TRBV11-2, TRBJ2-2)
CASSLGGGELFF

SEQ ID NO: 244401 - protein, 11 aa, Homo sapiens
  CDR3 for alpha chain variable domain of TCR clone 122201 (TRAV23/DV6, TRAJ58)
CAARLLRGETS

SEQ ID NO: 244402 - protein, 15 aa, Homo sapiens
  CDR3 for beta chain variable domain of TCR clone 122201 (TRBV5-1, TRBJ2-1)
CASSPPRAPYNEQFF

SEQ ID NO: 244403 - protein, 13 aa, Homo sapiens
  CDR3 for alpha chain variable domain of TCR clone 122202 (TRAV17, TRAJ54)
CAAGIQGAQKLGF

SEQ ID NO: 244404 - protein, 14 aa, Homo sapiens
  CDR3 for beta chain variable domain of TCR clone 122202 (TRBV11-2, TRBJ1-2)
CASSLGTANYGYTF

SEQ ID NO: 244405 - protein, 14 aa, Homo sapiens
  CDR3 for alpha chain variable domain of TCR clone 122203 (TRAV12-3, TRAJ57)
CAMSAWGGSGKLVF

SEQ ID NO: 244406 - protein, 16 aa, Homo sapiens
  CDR3 for beta chain variable domain of TCR clone 122203 (TRBV7-3, TRBJ2-2)
CASSLKRGTLSGELFF

SEQ ID NO: 244407 - protein, 14 aa, Homo sapiens
  CDR3 for alpha chain variable domain of TCR clone 122204 (TRAV23/DV6, TRAJ24)
CAASLSDSWGKLQF

SEQ ID NO: 244408 - protein, 16 aa, Homo sapiens
  CDR3 for beta chain variable domain of TCR clone 122204 (TRBV7-9, TRBJ2-6)
CASSLKGPRRANVLTF

SEQ ID NO: 244409 - protein, 14 aa, Homo sapiens
  CDR3 for alpha chain variable domain of TCR clone 122205 (TRAV1-1, TRAJ28)
CAAPSGAGSYQLTF

SEQ ID NO: 244410 - protein, 15 aa, Homo sapiens
  CDR3 for beta chain variable domain of TCR clone 122205 (TRBV7-3, TRBJ2-2)
CASKANGANTGELFF

SEQ ID NO: 244411 - protein, 16 aa, Homo sapiens
  CDR3 for alpha chain variable domain of TCR clone 122206 (TRAV20, TRAJ22)
CAVQVSSSGSARQLTF

SEQ ID NO: 244412 - protein, 13 aa, Homo sapiens
  CDR3 for beta chain variable domain of TCR clone 122206 (TRBV7-2, TRBJ2-5)
CASSQTSVETQYF

SEQ ID NO: 244413 - protein, 15 aa, Homo sapiens
  CDR3 for alpha chain variable domain of TCR clone 122207 (TRAV8-1, TRAJ6)
CAVNTPPGGSYIPTY

SEQ ID NO: 244414 - protein, 14 aa, Homo sapiens
  CDR3 for beta chain variable domain of TCR clone 122207 (TRBV12-4, TRBJ2-1)
CASSLGQGASEQFF

SEQ ID NO: 244415 - protein, 12 aa, Homo sapiens
  CDR3 for alpha chain variable domain of TCR clone 122208 (TRAV8-6, TRAJ43)
CAVSHNNNNMRF

SEQ ID NO: 244416 - protein, 14 aa, Homo sapiens
  CDR3 for beta chain variable domain of TCR clone 122208 (TRBV10-3, TRBJ1-1)
CAISDGSGVTEAFF

SEQ ID NO: 244417 - protein, 10 aa, Homo sapiens
  CDR3 for alpha chain variable domain of TCR clone 122209 (TRAV1-2, TRAJ20)
CALNDYKLSF

SEQ ID NO: 244418 - protein, 20 aa, Homo sapiens
  CDR3 for beta chain variable domain of TCR clone 122209 (TRBV7-8, TRBJ2-2)
CASSHLFPGPTIHITGELFF

SEQ ID NO: 244419 - protein, 13 aa, Homo sapiens
  CDR3 for alpha chain variable domain of TCR clone 122210 (TRAV17, TRAJ9)
CATDYTGGFKTIF

SEQ ID NO: 244420 - protein, 14 aa, Homo sapiens
  CDR3 for beta chain variable domain of TCR clone 122210 (TRBV19, TRBJ2-5)
CASSMTGQQETQFF

SEQ ID NO: 244421 - protein, 13 aa, Homo sapiens
  CDR3 for alpha chain variable domain of TCR clone 122211 (TRAV1-2, TRAJ9)
CAALNTGGFKTIF

SEQ ID NO: 244422 - protein, 13 aa, Homo sapiens
  CDR3 for beta chain variable domain of TCR clone 122211 (TRBV19, TRBJ1-2)
CASTVPGQDGYTF

SEQ ID NO: 244423 - protein, 12 aa, Homo sapiens
  CDR3 for alpha chain variable domain of TCR clone 122212 (TRAV27, TRAJ35)
CAGADFGNVLHC

SEQ ID NO: 244424 - protein, 17 aa, Homo sapiens
  CDR3 for beta chain variable domain of TCR clone 122212 (TRBV20-1, TRBJ2-2)
CSASGSGQGGLTGELFF

SEQ ID NO: 244425 - protein, 20 aa, Homo sapiens
  CDR3 for alpha chain variable domain of TCR clone 122213 (TRAV25, TRAJ21)
TATQTTDVGTYPLSFNNFYF

SEQ ID NO: 244426 - protein, 14 aa, Homo sapiens
  CDR3 for beta chain variable domain of TCR clone 122213 (TRBV6-1, TRBJ2-1)
CASAKDGFYNEQFF

SEQ ID NO: 244427 - protein, 15 aa, Homo sapiens
  CDR3 for alpha chain variable domain of TCR clone 122214 (TRAV1-2, TRAJ15)
CAVDVMGSAGTALIL

SEQ ID NO: 244428 - protein, 13 aa, Homo sapiens
  CDR3 for beta chain variable domain of TCR clone 122214 (TRBV20-1, TRBJ1-1)
CSAFDRENTEAFF

SEQ ID NO: 244429 - protein, 14 aa, Homo sapiens
  CDR3 for alpha chain variable domain of TCR clone 122215 (TRAV38-1, TRAJ40)
CALRPTSGTYKYIF

SEQ ID NO: 244430 - protein, 15 aa, Homo sapiens
  CDR3 for beta chain variable domain of TCR clone 122215 (TRBV18, TRBJ2-1)
CASSPPSASYNEQFF

SEQ ID NO: 244431 - protein, 15 aa, Homo sapiens
  CDR3 for alpha chain variable domain of TCR clone 122216 (TRAV27, TRAJ50)
CAGVGRGTSYDKVIF

SEQ ID NO: 244432 - protein, 14 aa, Homo sapiens
  CDR3 for beta chain variable domain of TCR clone 122216 (TRBV7-2, TRBJ1-1)
CASSFYDVNTEAFF

SEQ ID NO: 244433 - protein, 10 aa, Homo sapiens
  CDR3 for alpha chain variable domain of TCR clone 122217 (TRAV21, TRAJ31)
CAVDNARFMF

SEQ ID NO: 244434 - protein, 13 aa, Homo sapiens
  CDR3 for beta chain variable domain of TCR clone 122217 (TRBV4-1, TRBJ1-1)
CASSRKMNTEAFF

SEQ ID NO: 244435 - protein, 14 aa, Homo sapiens
  CDR3 for alpha chain variable domain of TCR clone 122218 (TRAV8-3, TRAJ30)
CAVGDMNRDDKIIF

SEQ ID NO: 244436 - protein, 17 aa, Homo sapiens
  CDR3 for beta chain variable domain of TCR clone 122218 (TRBV19, TRBJ2-2)
CASIRNPGGFGTGELFF

SEQ ID NO: 244437 - protein, 15 aa, Homo sapiens
  CDR3 for alpha chain variable domain of TCR clone 122219 (TRAV27, TRAJ38)
CAARRNAGNNRKLIW

SEQ ID NO: 244438 - protein, 12 aa, Homo sapiens
  CDR3 for beta chain variable domain of TCR clone 122219 (TRBV11-3, TRBJ1-1)
CASSHRQGEAFF

SEQ ID NO: 244439 - protein, 15 aa, Homo sapiens
  CDR3 for alpha chain variable domain of TCR clone 122220 (TRAV35, TRAJ23)
CAGPLGNNQGGKLIF

SEQ ID NO: 244440 - protein, 16 aa, Homo sapiens
  CDR3 for beta chain variable domain of TCR clone 122220 (TRBV7-9, TRBJ1-1)
CASTPLQSYTEAFLDK

SEQ ID NO: 244441 - protein, 16 aa, Homo sapiens
  CDR3 for alpha chain variable domain of TCR clone 122221 (TRAV3, TRAJ10)
CAVRDMRAGGGNKLTF

SEQ ID NO: 244442 - protein, 11 aa, Homo sapiens
  CDR3 for beta chain variable domain of TCR clone 122221 (TRBV28, TRBJ2-7)
CASGPLPEQYF

SEQ ID NO: 244443 - protein, 13 aa, Homo sapiens
  CDR3 for alpha chain variable domain of TCR clone 122222 (TRAV3, TRAJ20)
CAVRDTPRYKLSF

SEQ ID NO: 244444 - protein, 15 aa, Homo sapiens
  CDR3 for beta chain variable domain of TCR clone 122222 (TRBV6-3, TRBJ2-7)
CASSSPGTVFYEQYF

SEQ ID NO: 244445 - protein, 13 aa, Homo sapiens
  CDR3 for alpha chain variable domain of TCR clone 122223 (TRAV2, TRAJ11)
CAVEEVGYSTLTF

SEQ ID NO: 244446 - protein, 17 aa, Homo sapiens
  CDR3 for beta chain variable domain of TCR clone 122223 (TRBV7-2, TRBJ2-1)
CASSRGTSGAVGWEQFF

SEQ ID NO: 244447 - protein, 15 aa, Homo sapiens
  CDR3 for alpha chain variable domain of TCR clone 122224 (TRAV12-2, TRAJ20)
CAVKGGFGAGTTVTV

SEQ ID NO: 244448 - protein, 14 aa, Homo sapiens
  CDR3 for beta chain variable domain of TCR clone 122224 (TRBV11-2, TRBJ2-5)
CASRPLAGRETQYF

SEQ ID NO: 244449 - protein, 12 aa, Homo sapiens
  CDR3 for alpha chain variable domain of TCR clone 122225 (TRAV3, TRAJ43)
CAVRDPNNDMRF

SEQ ID NO: 244450 - protein, 19 aa, Homo sapiens
  CDR3 for beta chain variable domain of TCR clone 122225 (TRBV19, TRBJ2-2)
CASTRPGLAGGRVTGELFF

SEQ ID NO: 244451 - protein, 17 aa, Homo sapiens
  CDR3 for alpha chain variable domain of TCR clone 122226 (TRAV13-1, TRAJ52)
CAASSGAGGTSYGKLTF

SEQ ID NO: 244452 - protein, 14 aa, Homo sapiens
  CDR3 for beta chain variable domain of TCR clone 122226 (TRBV19, TRBJ2-1)
CASPTFVLSGEQFF

SEQ ID NO: 244453 - protein, 13 aa, Homo sapiens
  CDR3 for alpha chain variable domain of TCR clone 122227 (TRAV3, TRAJ21)
CSVREPDFNKFYF

SEQ ID NO: 244454 - protein, 15 aa, Homo sapiens
  CDR3 for beta chain variable domain of TCR clone 122227 (TRBV2, TRBJ2-1)
CASSELAGGYNEQFF

SEQ ID NO: 244455 - protein, 11 aa, Homo sapiens
  CDR3 for alpha chain variable domain of TCR clone 122228 (TRAV1-2, TRAJ40)
CAVPGTYKYIF

SEQ ID NO: 244456 - protein, 16 aa, Homo sapiens
  CDR3 for beta chain variable domain of TCR clone 122228 (TRBV29-1, TRBJ2-7)
CSVEVEGTSGSYEQYF

SEQ ID NO: 244457 - protein, 15 aa, Homo sapiens
  CDR3 for alpha chain variable domain of TCR clone 122229 (TRAV13-1, TRAJ32)
CAASIYGVATNKLIF

SEQ ID NO: 244458 - protein, 14 aa, Homo sapiens
  CDR3 for beta chain variable domain of TCR clone 122229 (TRBV7-9, TRBJ2-1)
CASSLASGSNEQFF

SEQ ID NO: 244459 - protein, 14 aa, Homo sapiens
  CDR3 for alpha chain variable domain of TCR clone 122230 (TRAV13-1, TRAJ44)
CAAKATGTASKLTF

SEQ ID NO: 244460 - protein, 14 aa, Homo sapiens
  CDR3 for beta chain variable domain of TCR clone 122230 (TRBV19, TRBJ2-2)
CASSTLHRSGELCF

SEQ ID NO: 244461 - protein, 14 aa, Homo sapiens
  CDR3 for alpha chain variable domain of TCR clone 122231 (TRAV2, TRAJ42)
CDVVGGGSQGNLIF

SEQ ID NO: 244462 - protein, 15 aa, Homo sapiens
  CDR3 for beta chain variable domain of TCR clone 122231 (TRBV11-3, TRBJ2-3)
CASSFRAAFPDTQYF

SEQ ID NO: 244463 - protein, 14 aa, Homo sapiens
  CDR3 for alpha chain variable domain of TCR clone 122232 (TRAV17, TRAJ16)
CATADFSEGQKLLF

SEQ ID NO: 244464 - protein, 12 aa, Homo sapiens
  CDR3 for beta chain variable domain of TCR clone 122232 (TRBV24-1, TRBJ1-1)
CATLYPDTEAFF

SEQ ID NO: 244465 - protein, 18 aa, Homo sapiens
  CDR3 for alpha chain variable domain of TCR clone 122233 (TRAV8-3, TRAJ4)
WVRDPTSNDPGCYNKLIF

SEQ ID NO: 244466 - protein, 13 aa, Homo sapiens
  CDR3 for beta chain variable domain of TCR clone 122233 (TRBV20-1, TRBJ1-2)
CSATGIQGSGYTF

SEQ ID NO: 244467 - protein, 16 aa, Homo sapiens
  CDR3 for alpha chain variable domain of TCR clone 122234 (TRAV12-3, TRAJ53)
CAMSPGSGGSNYKPTF

SEQ ID NO: 244468 - protein, 16 aa, Homo sapiens
  CDR3 for beta chain variable domain of TCR clone 122234 (TRBV4-2, TRBJ1-1)
CASSQAGFGMNTEAFF

SEQ ID NO: 244469 - protein, 11 aa, Homo sapiens
  CDR3 for alpha chain variable domain of TCR clone 122235 (TRAV12-3, TRAJ49)
CAANTGNQFYF

SEQ ID NO: 244470 - protein, 12 aa, Homo sapiens
  CDR3 for beta chain variable domain of TCR clone 122235 (TRBV6-3, TRBJ2-7)
RASSEPGFEQYF

SEQ ID NO: 244471 - protein, 15 aa, Homo sapiens
  CDR3 for alpha chain variable domain of TCR clone 122236 (TRAV26-1, TRAJ29)
CIVRVEGSGNTPLVF

SEQ ID NO: 244472 - protein, 13 aa, Homo sapiens
  CDR3 for beta chain variable domain of TCR clone 122236 (TRBV7-9, TRBJ1-1)
CASSQDWGAEAFF

SEQ ID NO: 244473 - protein, 16 aa, Homo sapiens
  CDR3 for alpha chain variable domain of TCR clone 122237 (TRAV30, TRAJ24)
CGTEIVDADSWGKFQF

SEQ ID NO: 244474 - protein, 14 aa, Homo sapiens
  CDR3 for beta chain variable domain of TCR clone 122237 (TRBV7-2, TRBJ2-5)
CASSSLAGSETQYF

SEQ ID NO: 244475 - protein, 16 aa, Homo sapiens
  CDR3 for alpha chain variable domain of TCR clone 122238 (TRAV23/DV6, TRAJ52)
CAARPSGGTSYGKLTF

SEQ ID NO: 244476 - protein, 13 aa, Homo sapiens
  CDR3 for beta chain variable domain of TCR clone 122238 (TRBV7-9, TRBJ1-1)
CASSLSGETEAFL

SEQ ID NO: 244477 - protein, 14 aa, Homo sapiens
  CDR3 for alpha chain variable domain of TCR clone 122239 (TRAV1-2, TRAJ16)
CAVNRFSDGQKLLF

SEQ ID NO: 244478 - protein, 18 aa, Homo sapiens
  CDR3 for beta chain variable domain of TCR clone 122239 (TRBV7-7, TRBJ2-1)
CASSLALTSGRSYNEQFF

SEQ ID NO: 244479 - protein, 14 aa, Homo sapiens
  CDR3 for alpha chain variable domain of TCR clone 122240 (TRAV29/DV5, TRAJ32)
CAAAYGVATNKLIF

SEQ ID NO: 244480 - protein, 15 aa, Homo sapiens
  CDR3 for beta chain variable domain of TCR clone 122240 (TRBV27, TRBJ2-7)
CASSTAGTGSYEQYF

SEQ ID NO: 244481 - protein, 12 aa, Homo sapiens
  CDR3 for alpha chain variable domain of TCR clone 122241 (TRAV2, TRAJ34)
CAVEDNTDKLIF

SEQ ID NO: 244482 - protein, 13 aa, Homo sapiens
  CDR3 for beta chain variable domain of TCR clone 122241 (TRBV19, TRBJ2-7)
CASRKAGGSEQYF

SEQ ID NO: 244483 - protein, 13 aa, Homo sapiens
  CDR3 for alpha chain variable domain of TCR clone 122242 (TRAV35, TRAJ21)
CAVQLSNFNKFYF

SEQ ID NO: 244484 - protein, 11 aa, Homo sapiens
  CDR3 for beta chain variable domain of TCR clone 122242 (TRBV7-6, TRBJ2-5)
CASSSQETQYF

SEQ ID NO: 244485 - protein, 10 aa, Homo sapiens
  CDR3 for alpha chain variable domain of TCR clone 122243 (TRAV23/DV6, TRAJ57)
CAASPTLSQG

SEQ ID NO: 244486 - protein, 14 aa, Homo sapiens
  CDR3 for beta chain variable domain of TCR clone 122243 (TRBV25-1, TRBJ1-1)
CASTHLGGNTKAFF

SEQ ID NO: 244487 - protein, 11 aa, Homo sapiens
  CDR3 for alpha chain variable domain of TCR clone 122244 (TRAV16, TRAJ31)
CALFNNARLMF

SEQ ID NO: 244488 - protein, 15 aa, Homo sapiens
  CDR3 for beta chain variable domain of TCR clone 122244 (TRBV7-3, TRBJ2-1)
CASSPTGGGEVEQFF

SEQ ID NO: 244489 - protein, 15 aa, Homo sapiens
  CDR3 for alpha chain variable domain of TCR clone 122245 (TRAV12-3, TRAJ6)
CAMSATTGGSYIPTF

SEQ ID NO: 244490 - protein, 15 aa, Homo sapiens
  CDR3 for beta chain variable domain of TCR clone 122245 (TRBV11-2, TRBJ2-1)
CASSLTSGGYNEQFF

SEQ ID NO: 244491 - protein, 14 aa, Homo sapiens
  CDR3 for alpha chain variable domain of TCR clone 122246 (TRAV17, TRAJ57)
CATDPQGGSEKLVF

SEQ ID NO: 244492 - protein, 13 aa, Homo sapiens
  CDR3 for beta chain variable domain of TCR clone 122246 (TRBV19, TRBJ1-5)
CASSIGGNQPQHF

SEQ ID NO: 244493 - protein, 15 aa, Homo sapiens
  CDR3 for alpha chain variable domain of TCR clone 122247 (TRAV12-1, TRAJ44)
CVADLPTGTASKLTF

SEQ ID NO: 244494 - protein, 15 aa, Homo sapiens
  CDR3 for beta chain variable domain of TCR clone 122247 (TRBV7-8, TRBJ1-5)
CASSLERRGLEPQHF

SEQ ID NO: 244495 - protein, 14 aa, Homo sapiens
  CDR3 for alpha chain variable domain of TCR clone 122248 (TRAV4, TRAJ17)
CLVGDMAAGNKLTC

SEQ ID NO: 244496 - protein, 13 aa, Homo sapiens
  CDR3 for beta chain variable domain of TCR clone 122248 (TRBV18, TRBJ2-7)
CASQSGGGYEQYF

SEQ ID NO: 244497 - protein, 14 aa, Homo sapiens
  CDR3 for alpha chain variable domain of TCR clone 122249 (TRAV1-2, TRAJ16)
CAVNRFSDGQKLFF

SEQ ID NO: 244498 - protein, 14 aa, Homo sapiens
  CDR3 for beta chain variable domain of TCR clone 122249 (TRBV6-5, TRBJ2-1)
CASRPQGRGNEQFF

SEQ ID NO: 244499 - protein, 11 aa, Homo sapiens
  CDR3 for alpha chain variable domain of TCR clone 122250 (TRAV12-3, TRAJ27)
CAMANAGKSTF

SEQ ID NO: 244500 - protein, 16 aa, Homo sapiens
  CDR3 for beta chain variable domain of TCR clone 122250 (TRBV5-1, TRBJ2-1)
CASSLTLAGGRNEQFF

SEQ ID NO: 244501 - protein, 13 aa, Homo sapiens
  CDR3 for alpha chain variable domain of TCR clone 122251 (TRAV27, TRAJ45)
CRSSGGGADGLTF

SEQ ID NO: 244502 - protein, 14 aa, Homo sapiens
  CDR3 for beta chain variable domain of TCR clone 122251 (TRBV2, TRBJ2-7)
CASSLTSGGYEQYF

SEQ ID NO: 244503 - protein, 18 aa, Homo sapiens
  CDR3 for alpha chain variable domain of TCR clone 122252 (TRAV21, TRAJ52)
CAVRPSSAGGTSYGKLTF

SEQ ID NO: 244504 - protein, 17 aa, Homo sapiens
  CDR3 for beta chain variable domain of TCR clone 122252 (TRBV25-1, TRBJ2-1)
CASSAYGQGRGVYEQFF

SEQ ID NO: 244505 - protein, 14 aa, Homo sapiens
  CDR3 for alpha chain variable domain of TCR clone 122253 (TRAV8-3, TRAJ39)
CAVGANNAGNMLTF

SEQ ID NO: 244506 - protein, 13 aa, Homo sapiens
  CDR3 for beta chain variable domain of TCR clone 122253 (TRBV7-3, TRBJ1-1)
CASSQDWGAEAFF

SEQ ID NO: 244507 - protein, 15 aa, Homo sapiens
  CDR3 for alpha chain variable domain of TCR clone 122254 (TRAV8-3, TRAJ45)
CASSYSGGGADGLTF

SEQ ID NO: 244508 - protein, 15 aa, Homo sapiens
  CDR3 for beta chain variable domain of TCR clone 122254 (TRBV27, TRBJ1-4)
CASSPRHATNEKLFL

SEQ ID NO: 244509 - protein, 15 aa, Homo sapiens
  CDR3 for alpha chain variable domain of TCR clone 122255 (TRAV26-1, TRAJ29)
CIVRVEGSGNTPLVF

SEQ ID NO: 244510 - protein, 14 aa, Homo sapiens
  CDR3 for beta chain variable domain of TCR clone 122255 (TRBV18, TRBJ2-5)
CACSPGVSQETQYF

SEQ ID NO: 244511 - protein, 10 aa, Homo sapiens
  CDR3 for alpha chain variable domain of TCR clone 122256 (TRAV1-2, TRAJ34)
CAVNTDKLIF

SEQ ID NO: 244512 - protein, 15 aa, Homo sapiens
  CDR3 for beta chain variable domain of TCR clone 122256 (TRBV27, TRBJ2-5)
CASSLYPRGGETQYF

SEQ ID NO: 244513 - protein, 12 aa, Homo sapiens
  CDR3 for alpha chain variable domain of TCR clone 122257 (TRAV8-6, TRAJ4)
CAVSDHPNKLIF

SEQ ID NO: 244514 - protein, 14 aa, Homo sapiens
  CDR3 for beta chain variable domain of TCR clone 122257 (TRBV6-5, TRBJ1-1)
CASSYGQGDTEAFF

SEQ ID NO: 244515 - protein, 14 aa, Homo sapiens
  CDR3 for alpha chain variable domain of TCR clone 122258 (TRAV8-6, TRAJ12)
CAVKAADSSYKLIF

SEQ ID NO: 244516 - protein, 14 aa, Homo sapiens
  CDR3 for beta chain variable domain of TCR clone 122258 (TRBV12-4, TRBJ1-1)
CASSLRSSGTEAFF

SEQ ID NO: 244517 - protein, 14 aa, Homo sapiens
  CDR3 for alpha chain variable domain of TCR clone 122259 (TRAV12-1, TRAJ12)
CVVNGRDSSYKLIF

SEQ ID NO: 244518 - protein, 13 aa, Homo sapiens
  CDR3 for beta chain variable domain of TCR clone 122259 (TRBV28, TRBJ2-2)
CASIRESTGELLF

SEQ ID NO: 244519 - protein, 21 aa, Homo sapiens
  CDR3 for alpha chain variable domain of TCR clone 122260 (TRAV29/DV5, TRAJ52)
CSVLLCSKREAGGTSYGKLTF

SEQ ID NO: 244520 - protein, 13 aa, Homo sapiens
  CDR3 for beta chain variable domain of TCR clone 122260 (TRBV27, TRBJ1-4)
CASSLMGDEKLLF

SEQ ID NO: 244521 - protein, 14 aa, Homo sapiens
  CDR3 for alpha chain variable domain of TCR clone 122261 (TRAV8-4, TRAJ13)
CAVTLSGGYQKVTF

SEQ ID NO: 244522 - protein, 16 aa, Homo sapiens
  CDR3 for beta chain variable domain of TCR clone 122261 (TRBV12-5, TRBJ2-5)
CASGPRTSGNQETQYF

SEQ ID NO: 244523 - protein, 13 aa, Homo sapiens
  CDR3 for alpha chain variable domain of TCR clone 122262 (TRAV20, TRAJ40)
CAVPFSGTYKYIF

SEQ ID NO: 244524 - protein, 12 aa, Homo sapiens
  CDR3 for beta chain variable domain of TCR clone 122262 (TRBV15, TRBJ2-5)
CHQPNWGRDQYF

SEQ ID NO: 244525 - protein, 16 aa, Homo sapiens
  CDR3 for alpha chain variable domain of TCR clone 122263 (TRAV1-2, TRAJ10)
CAVRGVLTGGGNKLTF

SEQ ID NO: 244526 - protein, 16 aa, Homo sapiens
  CDR3 for beta chain variable domain of TCR clone 122263 (TRBV10-3, TRBJ2-1)
CAIRGGGRGDYNEQFF

SEQ ID NO: 244527 - protein, 13 aa, Homo sapiens
  CDR3 for alpha chain variable domain of TCR clone 122264 (TRAV8-6, TRAJ43)
CAVPGSRNNDMRF

SEQ ID NO: 244528 - protein, 16 aa, Homo sapiens
  CDR3 for beta chain variable domain of TCR clone 122264 (TRBV11-2, TRBJ1-2)
CASSLDTGGADYGYTF

SEQ ID NO: 244529 - protein, 17 aa, Homo sapiens
  CDR3 for alpha chain variable domain of TCR clone 122265 (TRAV2, TRAJ22)
ILQVREADAAEQRQLTF

SEQ ID NO: 244530 - protein, 14 aa, Homo sapiens
  CDR3 for beta chain variable domain of TCR clone 122265 (TRBV7-8, TRBJ2-3)
CASSLEAGTDTQYF

SEQ ID NO: 244531 - protein, 18 aa, Homo sapiens
  CDR3 for alpha chain variable domain of TCR clone 122266 (TRAV21, TRAJ52)
CAVRPSPSGGTSYGKLTF

SEQ ID NO: 244532 - protein, 14 aa, Homo sapiens
  CDR3 for beta chain variable domain of TCR clone 122266 (TRBV7-2, TRBJ2-1)
CASSLEGGYNEQFF

SEQ ID NO: 244533 - protein, 22 aa, Homo sapiens
  CDR3 for alpha chain variable domain of TCR clone 122267 (TRAV36/DV7, TRAJ50)
CAVEPENLLRQGDIWARDKLIS

SEQ ID NO: 244534 - protein, 13 aa, Homo sapiens
  CDR3 for beta chain variable domain of TCR clone 122267 (TRBV7-2, TRBJ2-7)
CASSSPSGSEQYF

SEQ ID NO: 244535 - protein, 13 aa, Homo sapiens
  CDR3 for alpha chain variable domain of TCR clone 122268 (TRAV13-1, TRAJ6)
CAASKGGSYIPTF

SEQ ID NO: 244536 - protein, 13 aa, Homo sapiens
  CDR3 for beta chain variable domain of TCR clone 122268 (TRBV7-9, TRBJ2-5)
CASLPSGRENQYF

SEQ ID NO: 244537 - protein, 14 aa, Homo sapiens
  CDR3 for alpha chain variable domain of TCR clone 122269 (TRAV17, TRAJ32)
RATDPGGATNKLIF

SEQ ID NO: 244538 - protein, 14 aa, Homo sapiens
  CDR3 for beta chain variable domain of TCR clone 122269 (TRBV2, TRBJ1-5)
CASSENRGGQPQHF

SEQ ID NO: 244539 - protein, 14 aa, Homo sapiens
  CDR3 for alpha chain variable domain of TCR clone 122270 (TRAV12-1, TRAJ23)
CVVIVYNQGGKLIF

SEQ ID NO: 244540 - protein, 15 aa, Homo sapiens
  CDR3 for beta chain variable domain of TCR clone 122270 (TRBV20-1, TRBJ1-5)
CSATPPGQGPQPQHF

SEQ ID NO: 244541 - protein, 13 aa, Homo sapiens
  CDR3 for alpha chain variable domain of TCR clone 122271 (TRAV12-1, TRAJ53)
CVVNAESNYKLTF

SEQ ID NO: 244542 - protein, 15 aa, Homo sapiens
  CDR3 for beta chain variable domain of TCR clone 122271 (TRBV11-3, TRBJ2-3)
CASLKDGREGDTQYF

SEQ ID NO: 244543 - protein, 13 aa, Homo sapiens
  CDR3 for alpha chain variable domain of TCR clone 122272 (TRAV12-3, TRAJ13)
CAMTSGSYQKVTF

SEQ ID NO: 244544 - protein, 13 aa, Homo sapiens
  CDR3 for beta chain variable domain of TCR clone 122272 (TRBV20-1, TRBJ2-2)
CSALSGGAGELFF

SEQ ID NO: 244545 - protein, 13 aa, Homo sapiens
  CDR3 for alpha chain variable domain of TCR clone 122273 (TRAV13-1, TRAJ37)
CAAVSGNTGKLIF

SEQ ID NO: 244546 - protein, 17 aa, Homo sapiens
  CDR3 for beta chain variable domain of TCR clone 122273 (TRBV28, TRBJ2-7)
CASSPLHRASEVYEQYF

SEQ ID NO: 244547 - protein, 14 aa, Homo sapiens
  CDR3 for alpha chain variable domain of TCR clone 122274 (TRAV35, TRAJ22)
CAGLRPGSARQLTF

SEQ ID NO: 244548 - protein, 15 aa, Homo sapiens
  CDR3 for beta chain variable domain of TCR clone 122274 (TRBV12-4, TRBJ2-5)
CASSPPTVLQETQYF

SEQ ID NO: 244549 - protein, 13 aa, Homo sapiens
  CDR3 for alpha chain variable domain of TCR clone 122275 (TRAV12-2, TRAJ10)
CAVPTGGGNKLTF

SEQ ID NO: 244550 - protein, 14 aa, Homo sapiens
  CDR3 for beta chain variable domain of TCR clone 122275 (TRBV7-2, TRBJ2-7)
CASSPKTSFYEQYF

SEQ ID NO: 244551 - protein, 14 aa, Homo sapiens
  CDR3 for alpha chain variable domain of TCR clone 122276 (TRAV12-1, TRAJ17)
CVVNPKAAGNKLTF

SEQ ID NO: 244552 - protein, 16 aa, Homo sapiens
  CDR3 for beta chain variable domain of TCR clone 122276 (TRBV20-1, TRBJ2-1)
CSAGASGYSSYNEQFF

SEQ ID NO: 244553 - protein, 10 aa, Homo sapiens
  CDR3 for alpha chain variable domain of TCR clone 122277 (TRAV30, TRAJ48)
CGIGNEKLTF

SEQ ID NO: 244554 - protein, 14 aa, Homo sapiens
  CDR3 for beta chain variable domain of TCR clone 122277 (TRBV7-6, TRBJ2-3)
CASSVAGGTDTQYS

SEQ ID NO: 244555 - protein, 17 aa, Homo sapiens
  CDR3 for alpha chain variable domain of TCR clone 122278 (TRAV3, TRAJ42)
CAVRDRDYGGSQGNLIF

SEQ ID NO: 244556 - protein, 15 aa, Homo sapiens
  CDR3 for beta chain variable domain of TCR clone 122278 (TRBV6-6, TRBJ2-7)
CASSYSYGGSYEQYC

SEQ ID NO: 244557 - protein, 16 aa, Homo sapiens
  CDR3 for alpha chain variable domain of TCR clone 122279 (TRAV26-1, TRAJ22)
CIVSLNFFWLCKATDL

SEQ ID NO: 244558 - protein, 15 aa, Homo sapiens
  CDR3 for beta chain variable domain of TCR clone 122279 (TRBV4-2, TRBJ1-2)
CASSQRTGGRDGYTF

SEQ ID NO: 244559 - protein, 13 aa, Homo sapiens
  CDR3 for alpha chain variable domain of TCR clone 122280 (TRAV13-1, TRAJ5)
CAAEHTGRRALTF

SEQ ID NO: 244560 - protein, 14 aa, Homo sapiens
  CDR3 for beta chain variable domain of TCR clone 122280 (TRBV7-6, TRBJ2-3)
CASSLGTVTDTQYF

SEQ ID NO: 244561 - protein, 12 aa, Homo sapiens
  CDR3 for alpha chain variable domain of TCR clone 122281 (TRAV12-3, TRAJ17)
CAMTLTGNKLTF

SEQ ID NO: 244562 - protein, 14 aa, Homo sapiens
  CDR3 for beta chain variable domain of TCR clone 122281 (TRBV20-1, TRBJ2-1)
RSAQIGGSANEQFF

SEQ ID NO: 244563 - protein, 17 aa, Homo sapiens
  CDR3 for alpha chain variable domain of TCR clone 122282 (TRAV26-2, TRAJ42)
CILRDVGYGGSQGNLIF

SEQ ID NO: 244564 - protein, 16 aa, Homo sapiens
  CDR3 for beta chain variable domain of TCR clone 122282 (TRBV6-5, TRBJ2-1)
CASSETLAGQYNEQFF

SEQ ID NO: 244565 - protein, 14 aa, Homo sapiens
  CDR3 for alpha chain variable domain of TCR clone 122283 (TRAV16, TRAJ15)
CSLSFNQAGTALIF

SEQ ID NO: 244566 - protein, 16 aa, Homo sapiens
  CDR3 for beta chain variable domain of TCR clone 122283 (TRBV9, TRBJ2-7)
CASSAGPDRSPYEQYF

SEQ ID NO: 244567 - protein, 13 aa, Homo sapiens
  CDR3 for alpha chain variable domain of TCR clone 122284 (TRAV27, TRAJ42)
CAGAQGSQGNLIF

SEQ ID NO: 244568 - protein, 15 aa, Homo sapiens
  CDR3 for beta chain variable domain of TCR clone 122284 (TRBV10-3, TRBJ2-2)
CAIRTDREDTGELFF

SEQ ID NO: 244569 - protein, 17 aa, Homo sapiens
  CDR3 for alpha chain variable domain of TCR clone 122285 (TRAV38-2/DV8, TRAJ28)
CAFLTLYSVAGSYQLTF

SEQ ID NO: 244570 - protein, 14 aa, Homo sapiens
  CDR3 for beta chain variable domain of TCR clone 122285 (TRBV7-2, TRBJ2-5)
CASSLSGGGETQYF

SEQ ID NO: 244571 - protein, 14 aa, Homo sapiens
  CDR3 for alpha chain variable domain of TCR clone 122286 (TRAV21, TRAJ35)
CAVMPIGFGNGLHC

SEQ ID NO: 244572 - protein, 12 aa, Homo sapiens
  CDR3 for beta chain variable domain of TCR clone 122286 (TRBV7-9, TRBJ2-7)
CASSIKREEQYF

SEQ ID NO: 244573 - protein, 11 aa, Homo sapiens
  CDR3 for alpha chain variable domain of TCR clone 122287 (TRAV1-2, TRAJ31)
CAVNNNARLMF

SEQ ID NO: 244574 - protein, 15 aa, Homo sapiens
  CDR3 for beta chain variable domain of TCR clone 122287 (TRBV28, TRBJ2-1)
CASSIIAGRRSEQFF

SEQ ID NO: 244575 - protein, 18 aa, Homo sapiens
  CDR3 for alpha chain variable domain of TCR clone 122288 (TRAV13-1, TRAJ52)
CAAKNPNAGGTSYGKLTF

SEQ ID NO: 244576 - protein, 15 aa, Homo sapiens
  CDR3 for beta chain variable domain of TCR clone 122288 (TRBV6-1, TRBJ2-3)
CASSERGGITDTHYF

SEQ ID NO: 244577 - protein, 14 aa, Homo sapiens
  CDR3 for alpha chain variable domain of TCR clone 122289 (TRAV12-2, TRAJ13)
CAVKKTGGYKKVTF

SEQ ID NO: 244578 - protein, 13 aa, Homo sapiens
  CDR3 for beta chain variable domain of TCR clone 122289 (TRBV20-1, TRBJ2-3)
CSARLAGTDTQYF

SEQ ID NO: 244579 - protein, 14 aa, Homo sapiens
  CDR3 for alpha chain variable domain of TCR clone 122290 (TRAV3, TRAJ6)
CAVRDWGGSYIPTF

SEQ ID NO: 244580 - protein, 17 aa, Homo sapiens
  CDR3 for beta chain variable domain of TCR clone 122290 (TRBV6-5, TRBJ2-1)
CASRLSGRFESYNEQSF

SEQ ID NO: 244581 - protein, 12 aa, Homo sapiens
  CDR3 for alpha chain variable domain of TCR clone 122291 (TRAV13-2, TRAJ13)
CRDGGGYQKVTF

SEQ ID NO: 244582 - protein, 15 aa, Homo sapiens
  CDR3 for beta chain variable domain of TCR clone 122291 (TRBV20-1, TRBJ1-5)
CSARVGRVVSQPQHF

SEQ ID NO: 244583 - protein, 18 aa, Homo sapiens
  CDR3 for alpha chain variable domain of TCR clone 122292 (TRAV29/DV5, TRAJ52)
CAAGFRGAGGTSYGKLTF

SEQ ID NO: 244584 - protein, 13 aa, Homo sapiens
  CDR3 for beta chain variable domain of TCR clone 122292 (TRBV7-2, TRBJ2-4)
CASSREHANIQYF

SEQ ID NO: 244585 - protein, 14 aa, Homo sapiens
  CDR3 for alpha chain variable domain of TCR clone 122293 (TRAV12-1, TRAJ12)
CEVTRMDSSYKLIF

SEQ ID NO: 244586 - protein, 13 aa, Homo sapiens
  CDR3 for beta chain variable domain of TCR clone 122293 (TRBV20-1, TRBJ1-1)
CSARGGGNTEAFF

SEQ ID NO: 244587 - protein, 12 aa, Homo sapiens
  CDR3 for alpha chain variable domain of TCR clone 122294 (TRAV2, TRAJ34)
CAVARNTDKLIF

SEQ ID NO: 244588 - protein, 14 aa, Homo sapiens
  CDR3 for beta chain variable domain of TCR clone 122294 (TRBV7-9, TRBJ2-1)
CASSDNSGYNEQFF

SEQ ID NO: 244589 - protein, 15 aa, Homo sapiens
  CDR3 for alpha chain variable domain of TCR clone 122295 (TRAV2, TRAJ9)
CAVEDRGTGGFKAIF

SEQ ID NO: 244590 - protein, 14 aa, Homo sapiens
  CDR3 for beta chain variable domain of TCR clone 122295 (TRBV4-1, TRBJ2-2)
CASSQAVNTGELFF

SEQ ID NO: 244591 - protein, 12 aa, Homo sapiens
  CDR3 for alpha chain variable domain of TCR clone 122296 (TRAV13-1, TRAJ15)
CAASQAGTALIF

SEQ ID NO: 244592 - protein, 14 aa, Homo sapiens
  CDR3 for beta chain variable domain of TCR clone 122296 (TRBV19, TRBJ2-5)
CASSSSGIQETQYF

SEQ ID NO: 244593 - protein, 12 aa, Homo sapiens
  CDR3 for alpha chain variable domain of TCR clone 122297 (TRAV8-6, TRAJ47)
CAVSEDGNKLVF

SEQ ID NO: 244594 - protein, 14 aa, Homo sapiens
  CDR3 for beta chain variable domain of TCR clone 122297 (TRBV18, TRBJ2-5)
CASSPGVSQETQYF

SEQ ID NO: 244595 - protein, 14 aa, Homo sapiens
  CDR3 for alpha chain variable domain of TCR clone 122298 (TRAV6, TRAJ6)
CALPTSGGSYIPTF

SEQ ID NO: 244596 - protein, 17 aa, Homo sapiens
  CDR3 for beta chain variable domain of TCR clone 122298 (TRBV5-1, TRBJ2-5)
CASSAVALGQNQETQYF

SEQ ID NO: 244597 - protein, 15 aa, Homo sapiens
  CDR3 for alpha chain variable domain of TCR clone 122299 (TRAV17, TRAJ22)
CATVAPSGSARQLTF

SEQ ID NO: 244598 - protein, 13 aa, Homo sapiens
  CDR3 for beta chain variable domain of TCR clone 122299 (TRBV7-3, TRBJ1-1)
CASSQDWGAEAFF

SEQ ID NO: 244599 - protein, 16 aa, Homo sapiens
  CDR3 for alpha chain variable domain of TCR clone 122300 (TRAV14/DV4, TRAJ53)
CAMREGGGGSNYKLTF

SEQ ID NO: 244600 - protein, 16 aa, Homo sapiens
  CDR3 for beta chain variable domain of TCR clone 122300 (TRBV4-2, TRBJ1-1)
CASSQAGFGMNTEAFF

SEQ ID NO: 244601 - protein, 14 aa, Homo sapiens
  CDR3 for alpha chain variable domain of TCR clone 122301 (TRAV12-2, TRAJ53)
CRERGGGSNYKLTF

SEQ ID NO: 244602 - protein, 15 aa, Homo sapiens
  CDR3 for beta chain variable domain of TCR clone 122301 (TRBV11-2, TRBJ2-4)
CASSRPGTGINIQYF

SEQ ID NO: 244603 - protein, 18 aa, Homo sapiens
  CDR3 for alpha chain variable domain of TCR clone 122302 (TRAV3, TRAJ42)
CAVRDEGTGGGSQGNLIF

SEQ ID NO: 244604 - protein, 17 aa, Homo sapiens
  CDR3 for beta chain variable domain of TCR clone 122302 (TRBV5-4, TRBJ2-1)
CASSSAGGRGPYNEQFF

SEQ ID NO: 244605 - protein, 12 aa, Homo sapiens
  CDR3 for alpha chain variable domain of TCR clone 122303 (TRAV12-3, TRAJ3)
CAIDSSASKIIF

SEQ ID NO: 244606 - protein, 17 aa, Homo sapiens
  CDR3 for beta chain variable domain of TCR clone 122303 (TRBV7-9, TRBJ2-3)
CASSLEEAGAHPDTQYF

SEQ ID NO: 244607 - protein, 13 aa, Homo sapiens
  CDR3 for alpha chain variable domain of TCR clone 122304 (TRAV13-1, TRAJ39)
CSKYSNAGNRLTF

SEQ ID NO: 244608 - protein, 16 aa, Homo sapiens
  CDR3 for beta chain variable domain of TCR clone 122304 (TRBV20-1, TRBJ1-4)
CSAPGQGLLTNEKLFF

SEQ ID NO: 244609 - protein, 12 aa, Homo sapiens
  CDR3 for alpha chain variable domain of TCR clone 122305 (TRAV12-3, TRAJ43)
CAVSSNNNDMRF

SEQ ID NO: 244610 - protein, 15 aa, Homo sapiens
  CDR3 for beta chain variable domain of TCR clone 122305 (TRBV27, TRBJ1-4)
CASSPRHATNEKLFF

SEQ ID NO: 244611 - protein, 13 aa, Homo sapiens
  CDR3 for alpha chain variable domain of TCR clone 122306 (TRAV21, TRAJ3)
CCEPYSSASKIIF

SEQ ID NO: 244612 - protein, 15 aa, Homo sapiens
  CDR3 for beta chain variable domain of TCR clone 122306 (TRBV7-3, TRBJ2-1)
CASSPTGGGEGEQFF

SEQ ID NO: 244613 - protein, 13 aa, Homo sapiens
  CDR3 for alpha chain variable domain of TCR clone 122307 (TRAV12-3, TRAJ13)
CAMSSGGYQKVTF

SEQ ID NO: 244614 - protein, 12 aa, Homo sapiens
  CDR3 for beta chain variable domain of TCR clone 122307 (TRBV19, TRBJ1-4)
CASKDWPGGLFF

SEQ ID NO: 244615 - protein, 14 aa, Homo sapiens
  CDR3 for alpha chain variable domain of TCR clone 122308 (TRAV12-2, TRAJ44)
CAVNPAVTASKLTF

SEQ ID NO: 244616 - protein, 13 aa, Homo sapiens
  CDR3 for beta chain variable domain of TCR clone 122308 (TRBV20-1, TRBJ1-6)
CSAPLGVGSPLHF

SEQ ID NO: 244617 - protein, 13 aa, Homo sapiens
  CDR3 for alpha chain variable domain of TCR clone 122309 (TRAV12-1, TRAJ13)
CVVALLGYQKVTF

SEQ ID NO: 244618 - protein, 13 aa, Homo sapiens
  CDR3 for beta chain variable domain of TCR clone 122309 (TRBV20-1, TRBJ2-5)
FSAILTGQETQYF

SEQ ID NO: 244619 - protein, 20 aa, Homo sapiens
  CDR3 for alpha chain variable domain of TCR clone 122310 (TRAV25, TRAJ21)
TATQTTDVGTYPLSFNKFYF

SEQ ID NO: 244620 - protein, 14 aa, Homo sapiens
  CDR3 for beta chain variable domain of TCR clone 122310 (TRBV6-1, TRBJ2-1)
CASAKDGFYNEQLF

SEQ ID NO: 244621 - protein, 11 aa, Homo sapiens
  CDR3 for alpha chain variable domain of TCR clone 122311 (TRAV12-3, TRAJ27)
CAMANAGKSTF

SEQ ID NO: 244622 - protein, 12 aa, Homo sapiens
  CDR3 for beta chain variable domain of TCR clone 122311 (TRBV12-5, TRBJ2-5)
CASGQGVETQYF

SEQ ID NO: 244623 - protein, 11 aa, Homo sapiens
  CDR3 for alpha chain variable domain of TCR clone 122312 (TRAV12-3, TRAJ41)
CAMNAREALNF

SEQ ID NO: 244624 - protein, 16 aa, Homo sapiens
  CDR3 for beta chain variable domain of TCR clone 122312 (TRBV7-8, TRBJ2-3)
CASRTEGQRETDTQYF

SEQ ID NO: 244625 - protein, 11 aa, Homo sapiens
  CDR3 for alpha chain variable domain of TCR clone 122313 (TRAV12-2, TRAJ31)
CSILNNARLMF

SEQ ID NO: 244626 - protein, 16 aa, Homo sapiens
  CDR3 for beta chain variable domain of TCR clone 122313 (TRBV13, TRBJ2-2)
CASSPRTGEHTGELFF

SEQ ID NO: 244627 - protein, 18 aa, Homo sapiens
  CDR3 for alpha chain variable domain of TCR clone 122314 (TRAV1-1, TRAJ13)
CLLLLRSAPGGGYQKVTF

SEQ ID NO: 244628 - protein, 13 aa, Homo sapiens
  CDR3 for beta chain variable domain of TCR clone 122314 (TRBV7-9, TRBJ2-3)
CASSPGSTDTQYF

SEQ ID NO: 244629 - protein, 12 aa, Homo sapiens
  CDR3 for alpha chain variable domain of TCR clone 122315 (TRAV12-3, TRAJ17)
CAMTLTGNKLTF

SEQ ID NO: 244630 - protein, 15 aa, Homo sapiens
  CDR3 for beta chain variable domain of TCR clone 122315 (TRBV12-4, TRBJ1-2)
CASSPITGGGYGYTF

SEQ ID NO: 244631 - protein, 16 aa, Homo sapiens
  CDR3 for alpha chain variable domain of TCR clone 122316 (TRAV3, TRAJ10)
CAVRDMRAGEGNKLTF

SEQ ID NO: 244632 - protein, 11 aa, Homo sapiens
  CDR3 for beta chain variable domain of TCR clone 122316 (TRBV29-1, TRBJ2-5)
CSEDRTGTQYF

SEQ ID NO: 244633 - protein, 12 aa, Homo sapiens
  CDR3 for alpha chain variable domain of TCR clone 122317 (TRAV29/DV5, TRAJ41)
CAAISSGYALNF

SEQ ID NO: 244634 - protein, 17 aa, Homo sapiens
  CDR3 for beta chain variable domain of TCR clone 122317 (TRBV18, TRBJ2-1)
CVSSKGLSGGADNEQFF

SEQ ID NO: 244635 - protein, 17 aa, Homo sapiens
  CDR3 for alpha chain variable domain of TCR clone 122318 (TRAV3, TRAJ42)
CAVRDRDYGGSQGNLIF

SEQ ID NO: 244636 - protein, 14 aa, Homo sapiens
  CDR3 for beta chain variable domain of TCR clone 122318 (TRBV19, TRBJ2-1)
CASSRLASINEQFF

SEQ ID NO: 244637 - protein, 14 aa, Homo sapiens
  CDR3 for alpha chain variable domain of TCR clone 122319 (TRAV2, TRAJ9)
CAVEDRRGGFKTIF

SEQ ID NO: 244638 - protein, 14 aa, Homo sapiens
  CDR3 for beta chain variable domain of TCR clone 122319 (TRBV7-3, TRBJ2-1)
CASSLAGGTNEQFF

SEQ ID NO: 244639 - protein, 12 aa, Homo sapiens
  CDR3 for alpha chain variable domain of TCR clone 122320 (TRAV1-2, TRAJ33)
CAALDSNYQLIW

SEQ ID NO: 244640 - protein, 14 aa, Homo sapiens
  CDR3 for beta chain variable domain of TCR clone 122320 (TRBV28, TRBJ2-5)
CASSLYRGTETQYF

SEQ ID NO: 244641 - protein, 12 aa, Homo sapiens
  CDR3 for alpha chain variable domain of TCR clone 122321 (TRAV2, TRAJ9)
CAVGAGGFKTIF

SEQ ID NO: 244642 - protein, 13 aa, Homo sapiens
  CDR3 for beta chain variable domain of TCR clone 122321 (TRBV7-2, TRBJ2-2)
CASSLAVTGELFF

SEQ ID NO: 244643 - protein, 12 aa, Homo sapiens
  CDR3 for alpha chain variable domain of TCR clone 122322 (TRAV12-3, TRAJ20)
CAMVRGDYKLSS

SEQ ID NO: 244644 - protein, 14 aa, Homo sapiens
  CDR3 for beta chain variable domain of TCR clone 122322 (TRBV7-8, TRBJ2-3)
CASSLEAGTDTQYF

SEQ ID NO: 244645 - protein, 12 aa, Homo sapiens
  CDR3 for alpha chain variable domain of TCR clone 122323 (TRAV8-3, TRAJ27)
CAVGVEAGKSTF

SEQ ID NO: 244646 - protein, 14 aa, Homo sapiens
  CDR3 for beta chain variable domain of TCR clone 122323 (TRBV2, TRBJ2-1)
CASRLIVGHDEQFF

SEQ ID NO: 244647 - protein, 12 aa, Homo sapiens
  CDR3 for alpha chain variable domain of TCR clone 122324 (TRAV30, TRAJ39)
CGRGNAGNMLTF

SEQ ID NO: 244648 - protein, 15 aa, Homo sapiens
  CDR3 for beta chain variable domain of TCR clone 122324 (TRBV5-1, TRBJ1-1)
CASSCTGRGNTEAFF

SEQ ID NO: 244649 - protein, 14 aa, Homo sapiens
  CDR3 for alpha chain variable domain of TCR clone 122325 (TRAV25, TRAJ27)
CAGPGNTTAGKSTF

SEQ ID NO: 244650 - protein, 16 aa, Homo sapiens
  CDR3 for beta chain variable domain of TCR clone 122325 (TRBV4-1, TRBJ2-6)
CASSQDGGPGANVLTF

SEQ ID NO: 244651 - protein, 13 aa, Homo sapiens
  CDR3 for alpha chain variable domain of TCR clone 122326 (TRAV3, TRAJ21)
CAVREPDFNKFYF

SEQ ID NO: 244652 - protein, 15 aa, Homo sapiens
  CDR3 for beta chain variable domain of TCR clone 122326 (TRBV4-1, TRBJ2-7)
CASSQQGQGFDEQYF

SEQ ID NO: 244653 - protein, 14 aa, Homo sapiens
  CDR3 for alpha chain variable domain of TCR clone 122327 (TRAV38-1, TRAJ45)
CASHSGGGADGLTF

SEQ ID NO: 244654 - protein, 15 aa, Homo sapiens
  CDR3 for beta chain variable domain of TCR clone 122327 (TRBV4-1, TRBJ2-5)
CASSQWDLYQETQYF

SEQ ID NO: 244655 - protein, 14 aa, Homo sapiens
  CDR3 for alpha chain variable domain of TCR clone 122328 (TRAV12-2, TRAJ40)
CAVKIPSGTYKYIF

SEQ ID NO: 244656 - protein, 16 aa, Homo sapiens
  CDR3 for beta chain variable domain of TCR clone 122328 (TRBV29-1, TRBJ2-7)
CSVEVVGTSGSYEQYF

SEQ ID NO: 244657 - protein, 14 aa, Homo sapiens
  CDR3 for alpha chain variable domain of TCR clone 122329 (TRAV38-1, TRAJ40)
CALRPTSGTYKYIF

SEQ ID NO: 244658 - protein, 13 aa, Homo sapiens
  CDR3 for beta chain variable domain of TCR clone 122329 (TRBV7-9, TRBJ1-4)
CASSLPGIEKLFF

SEQ ID NO: 244659 - protein, 12 aa, Homo sapiens
  CDR3 for alpha chain variable domain of TCR clone 122330 (TRAV12-2, TRAJ20)
CAVNRNDYKLSF

SEQ ID NO: 244660 - protein, 17 aa, Homo sapiens
  CDR3 for beta chain variable domain of TCR clone 122330 (TRBV7-3, TRBJ2-3)
CASSLMKRMRGADTQYF

SEQ ID NO: 244661 - protein, 16 aa, Homo sapiens
  CDR3 for alpha chain variable domain of TCR clone 122331 (TRAV35, TRAJ28)
CAGQKYSGAGSYQLTF

SEQ ID NO: 244662 - protein, 16 aa, Homo sapiens
  CDR3 for beta chain variable domain of TCR clone 122331 (TRBV7-3, TRBJ2-2)
CASSLKRGTLSGELVF

SEQ ID NO: 244663 - protein, 16 aa, Homo sapiens
  CDR3 for alpha chain variable domain of TCR clone 122332 (TRAV30, TRAJ24)
CGTEIVDADSWGKFQF

SEQ ID NO: 244664 - protein, 13 aa, Homo sapiens
  CDR3 for beta chain variable domain of TCR clone 122332 (TRBV7-9, TRBJ1-2)
CASSPSNFWGYTF

SEQ ID NO: 244665 - protein, 11 aa, Homo sapiens
  CDR3 for alpha chain variable domain of TCR clone 122333 (TRAV12-1, TRAJ30)
CVVNGQDKSIF

SEQ ID NO: 244666 - protein, 16 aa, Homo sapiens
  CDR3 for beta chain variable domain of TCR clone 122333 (TRBV24-1, TRBJ2-3)
CATSDAISGITDTQYF

SEQ ID NO: 244667 - protein, 15 aa, Homo sapiens
  CDR3 for alpha chain variable domain of TCR clone 122334 (TRAV21, TRAJ24)
CAARSSTDSWGKLQF

SEQ ID NO: 244668 - protein, 13 aa, Homo sapiens
  CDR3 for beta chain variable domain of TCR clone 122334 (TRBV11-3, TRBJ2-5)
CAGSSTGEETQYF

SEQ ID NO: 244669 - protein, 12 aa, Homo sapiens
  CDR3 for alpha chain variable domain of TCR clone 122335 (TRAV8-3, TRAJ40)
CAVNSGTYKYIF

SEQ ID NO: 244670 - protein, 14 aa, Homo sapiens
  CDR3 for beta chain variable domain of TCR clone 122335 (TRBV12-4, TRBJ2-3)
CASSGQGSTDTQYF

SEQ ID NO: 244671 - protein, 23 aa, Homo sapiens
  CDR3 for alpha chain variable domain of TCR clone 122336 (TRAV26-1, TRAJ38)
CIADNAGNNHIQNPDPAVYQLRD

SEQ ID NO: 244672 - protein, 13 aa, Homo sapiens
  CDR3 for beta chain variable domain of TCR clone 122336 (TRBV4-3, TRBJ2-3)
CASSQGYTDTQYF

SEQ ID NO: 244673 - protein, 10 aa, Homo sapiens
  CDR3 for alpha chain variable domain of TCR clone 122337 (TRAV26-1, TRAJ40)
CIAGTYKYIF

SEQ ID NO: 244674 - protein, 15 aa, Homo sapiens
  CDR3 for beta chain variable domain of TCR clone 122337 (TRBV19, TRBJ2-1)
CASSSTGVPLDEQFF

SEQ ID NO: 244675 - protein, 14 aa, Homo sapiens
  CDR3 for alpha chain variable domain of TCR clone 122338 (TRAV38-1, TRAJ29)
CAFITPSGNTPLVF

SEQ ID NO: 244676 - protein, 14 aa, Homo sapiens
  CDR3 for beta chain variable domain of TCR clone 122338 (TRBV18, TRBJ2-7)
CASSPRGGAYEQFF

SEQ ID NO: 244677 - protein, 13 aa, Homo sapiens
  CDR3 for alpha chain variable domain of TCR clone 122339 (TRAV3, TRAJ21)
CAVREPDFNKFYF

SEQ ID NO: 244678 - protein, 12 aa, Homo sapiens
  CDR3 for beta chain variable domain of TCR clone 122339 (TRBV28, TRBJ2-6)
CAIQAGANVLSF

SEQ ID NO: 244679 - protein, 16 aa, Homo sapiens
  CDR3 for alpha chain variable domain of TCR clone 122340 (TRAV35, TRAJ37)
CWAFLCGSSNTGKLIF

SEQ ID NO: 244680 - protein, 13 aa, Homo sapiens
  CDR3 for beta chain variable domain of TCR clone 122340 (TRBV2, TRBJ1-2)
CASSVRGNYGYTF

SEQ ID NO: 244681 - protein, 11 aa, Homo sapiens
  CDR3 for alpha chain variable domain of TCR clone 122341 (TRAV1-1, TRAJ5)
CAVRVRRALTF

SEQ ID NO: 244682 - protein, 14 aa, Homo sapiens
  CDR3 for beta chain variable domain of TCR clone 122341 (TRBV25-1, TRBJ1-1)
CASTHLGGNTEAFF

SEQ ID NO: 244683 - protein, 13 aa, Homo sapiens
  CDR3 for alpha chain variable domain of TCR clone 122342 (TRAV2, TRAJ13)
CAVGSGGYQKVTF

SEQ ID NO: 244684 - protein, 15 aa, Homo sapiens
  CDR3 for beta chain variable domain of TCR clone 122342 (TRBV7-2, TRBJ2-1)
CASSSGLAGGNEQFF

SEQ ID NO: 244685 - protein, 15 aa, Homo sapiens
  CDR3 for alpha chain variable domain of TCR clone 122343 (TRAV3, TRAJ5)
CAVRDRKTGRRALTF

SEQ ID NO: 244686 - protein, 17 aa, Homo sapiens
  CDR3 for beta chain variable domain of TCR clone 122343 (TRBV7-3, TRBJ2-3)
CASSLMKRMRGADTQYF

SEQ ID NO: 244687 - protein, 14 aa, Homo sapiens
  CDR3 for alpha chain variable domain of TCR clone 122344 (TRAV26-2, TRAJ32)
CILFRGGATNKLIF

SEQ ID NO: 244688 - protein, 16 aa, Homo sapiens
  CDR3 for beta chain variable domain of TCR clone 122344 (TRBV12-5, TRBJ2-5)
CASGPRTSGNQETQYF

SEQ ID NO: 244689 - protein, 12 aa, Homo sapiens
  CDR3 for alpha chain variable domain of TCR clone 122345 (TRAV13-1, TRAJ49)
CAAPNTGNQFYF

SEQ ID NO: 244690 - protein, 17 aa, Homo sapiens
  CDR3 for beta chain variable domain of TCR clone 122345 (TRBV25-1, TRBJ2-7)
CASSDARVVFSSYEHYF

SEQ ID NO: 244691 - protein, 14 aa, Homo sapiens
  CDR3 for alpha chain variable domain of TCR clone 122346 (TRAV8-3, TRAJ44)
CAVGNTGTASKLTF

SEQ ID NO: 244692 - protein, 15 aa, Homo sapiens
  CDR3 for beta chain variable domain of TCR clone 122346 (TRBV28, TRBJ2-7)
CASSSREQGRYEQYF

SEQ ID NO: 244693 - protein, 12 aa, Homo sapiens
  CDR3 for alpha chain variable domain of TCR clone 122347 (TRAV12-2, TRAJ8)
CAVNTGFQKLVF

SEQ ID NO: 244694 - protein, 12 aa, Homo sapiens
  CDR3 for beta chain variable domain of TCR clone 122347 (TRBV5-1, TRBJ2-7)
CASSLDSYEQYF

SEQ ID NO: 244695 - protein, 11 aa, Homo sapiens
  CDR3 for alpha chain variable domain of TCR clone 122348 (TRAV12-3, TRAJ43)
CAMSVSNDMRF

SEQ ID NO: 244696 - protein, 12 aa, Homo sapiens
  CDR3 for beta chain variable domain of TCR clone 122348 (TRBV20-1, TRBJ1-1)
QCSTWGVTEAFF

SEQ ID NO: 244697 - protein, 15 aa, Homo sapiens
  CDR3 for alpha chain variable domain of TCR clone 122349 (TRAV26-1, TRAJ44)
CIVRIGTGTASKLTF

SEQ ID NO: 244698 - protein, 13 aa, Homo sapiens
  CDR3 for beta chain variable domain of TCR clone 122349 (TRBV19, TRBJ1-1)
CASSIGPQAEAFF

SEQ ID NO: 244699 - protein, 15 aa, Homo sapiens
  CDR3 for alpha chain variable domain of TCR clone 122350 (TRAV13-2, TRAJ40)
CAENRSRQGTYKYIF

SEQ ID NO: 244700 - protein, 15 aa, Homo sapiens
  CDR3 for beta chain variable domain of TCR clone 122350 (TRBV10-2, TRBJ2-6)
CASSEQGTGANVLTF

SEQ ID NO: 244701 - protein, 11 aa, Homo sapiens
  CDR3 for alpha chain variable domain of TCR clone 122351 (TRAV21, TRAJ9)
CAVPGGFKTIF

SEQ ID NO: 244702 - protein, 12 aa, Homo sapiens
  CDR3 for beta chain variable domain of TCR clone 122351 (TRBV7-9, TRBJ2-5)
CATSGAQETQYF

SEQ ID NO: 244703 - protein, 16 aa, Homo sapiens
  CDR3 for alpha chain variable domain of TCR clone 122352 (TRAV30, TRAJ24)
CGTEIVDADSWGKFQF

SEQ ID NO: 244704 - protein, 16 aa, Homo sapiens
  CDR3 for beta chain variable domain of TCR clone 122352 (TRBV15, TRBJ2-5)
CATSRYLEAAQETQYF

SEQ ID NO: 244705 - protein, 13 aa, Homo sapiens
  CDR3 for alpha chain variable domain of TCR clone 122353 (TRAV2, TRAJ40)
CAVVTSGTYKYIF

SEQ ID NO: 244706 - protein, 15 aa, Homo sapiens
  CDR3 for beta chain variable domain of TCR clone 122353 (TRBV7-2, TRBJ2-1)
CASSSDSLNYNEQFF

SEQ ID NO: 244707 - protein, 12 aa, Homo sapiens
  CDR3 for alpha chain variable domain of TCR clone 122354 (TRAV8-3, TRAJ40)
CAVTSGTYKYIF

SEQ ID NO: 244708 - protein, 14 aa, Homo sapiens
  CDR3 for beta chain variable domain of TCR clone 122354 (TRBV12-4, TRBJ2-3)
CASSGHGSTDTQYF

SEQ ID NO: 244709 - protein, 14 aa, Homo sapiens
  CDR3 for alpha chain variable domain of TCR clone 122355 (TRAV12-2, TRAJ17)
CAVLFKAAGNKLTF

SEQ ID NO: 244710 - protein, 14 aa, Homo sapiens
  CDR3 for beta chain variable domain of TCR clone 122355 (TRBV12-5, TRBJ2-5)
CASGSWTHQETQYF

SEQ ID NO: 244711 - protein, 11 aa, Homo sapiens
  CDR3 for alpha chain variable domain of TCR clone 122356 (TRAV1-2, TRAJ31)
CAVKNNARLMF

SEQ ID NO: 244712 - protein, 15 aa, Homo sapiens
  CDR3 for beta chain variable domain of TCR clone 122356 (TRBV5-1, TRBJ2-1)
CASSPPRAPYNEQFF

SEQ ID NO: 244713 - protein, 15 aa, Homo sapiens
  CDR3 for alpha chain variable domain of TCR clone 122357 (TRAV26-1, TRAJ40)
CIVRAVPSGTYKYIF

SEQ ID NO: 244714 - protein, 14 aa, Homo sapiens
  CDR3 for beta chain variable domain of TCR clone 122357 (TRBV19, TRBJ2-1)
CASTDPGLANEQFF

SEQ ID NO: 244715 - protein, 12 aa, Homo sapiens
  CDR3 for alpha chain variable domain of TCR clone 122358 (TRAV1-1, TRAJ39)
CAVSVVGNMLTF

SEQ ID NO: 244716 - protein, 15 aa, Homo sapiens
  CDR3 for beta chain variable domain of TCR clone 122358 (TRBV19, TRBJ1-6)
CASSTQGAVGSPLHF

SEQ ID NO: 244717 - protein, 12 aa, Homo sapiens
  CDR3 for alpha chain variable domain of TCR clone 122359 (TRAV3, TRAJ20)
CAVRDPDYKLSF

SEQ ID NO: 244718 - protein, 13 aa, Homo sapiens
  CDR3 for beta chain variable domain of TCR clone 122359 (TRBV9, TRBJ2-1)
CASSVGQGGEQFC

SEQ ID NO: 244719 - protein, 18 aa, Homo sapiens
  CDR3 for alpha chain variable domain of TCR clone 122360 (TRAV21, TRAJ52)
CAVRPSPAGGTSYGKLTF

SEQ ID NO: 244720 - protein, 14 aa, Homo sapiens
  CDR3 for beta chain variable domain of TCR clone 122360 (TRBV19, TRBJ2-7)
CASSIFAGTYEQYF

SEQ ID NO: 244721 - protein, 14 aa, Homo sapiens
  CDR3 for alpha chain variable domain of TCR clone 122361 (TRAV14/DV4, TRAJ15)
CAMRRDQAGTALIF

SEQ ID NO: 244722 - protein, 16 aa, Homo sapiens
  CDR3 for beta chain variable domain of TCR clone 122361 (TRBV15, TRBJ2-3)
CATSRDLGIATDTQYF

SEQ ID NO: 244723 - protein, 15 aa, Homo sapiens
  CDR3 for alpha chain variable domain of TCR clone 122362 (TRAV3, TRAJ4)
CAVRDGTGGHNKLIF

SEQ ID NO: 244724 - protein, 13 aa, Homo sapiens
  CDR3 for beta chain variable domain of TCR clone 122362 (TRBV12-5, TRBJ1-2)
CASGVRTGNGYTF

SEQ ID NO: 244725 - protein, 11 aa, Homo sapiens
  CDR3 for alpha chain variable domain of TCR clone 122363 (TRAV12-1, TRAJ43)
CVEYDNNDMRF

SEQ ID NO: 244726 - protein, 16 aa, Homo sapiens
  CDR3 for beta chain variable domain of TCR clone 122363 (TRBV19, TRBJ2-2)
CASSFPGQGLAGELFF

SEQ ID NO: 244727 - protein, 14 aa, Homo sapiens
  CDR3 for alpha chain variable domain of TCR clone 122364 (TRAV12-2, TRAJ45)
CAVYSGGGADGLTF

SEQ ID NO: 244728 - protein, 13 aa, Homo sapiens
  CDR3 for beta chain variable domain of TCR clone 122364 (TRBV7-7, TRBJ2-3)
CASSLSRADTRYF

SEQ ID NO: 244729 - protein, 13 aa, Homo sapiens
  CDR3 for alpha chain variable domain of TCR clone 122365 (TRAV12-1, TRAJ31)
CVVNDNNNARLMF

SEQ ID NO: 244730 - protein, 16 aa, Homo sapiens
  CDR3 for beta chain variable domain of TCR clone 122365 (TRBV7-3, TRBJ2-2)
CASSLKRGTLSGELFF

SEQ ID NO: 244731 - protein, 16 aa, Homo sapiens
  CDR3 for alpha chain variable domain of TCR clone 122366 (TRAV12-3, TRAJ45)
CAMGWGSGGGADGLTF

SEQ ID NO: 244732 - protein, 16 aa, Homo sapiens
  CDR3 for beta chain variable domain of TCR clone 122366 (TRBV2, TRBJ2-1)
CASSVGGSLSYNEQFF

SEQ ID NO: 244733 - protein, 14 aa, Homo sapiens
  CDR3 for alpha chain variable domain of TCR clone 122367 (TRAV26-1, TRAJ38)
CIADNAGNNRKLIW

SEQ ID NO: 244734 - protein, 15 aa, Homo sapiens
  CDR3 for beta chain variable domain of TCR clone 122367 (TRBV7-3, TRBJ2-1)
CASILDGNSYNEQFF

SEQ ID NO: 244735 - protein, 11 aa, Homo sapiens
  CDR3 for alpha chain variable domain of TCR clone 122368 (TRAV3, TRAJ21)
CAVGNFNKFYF

SEQ ID NO: 244736 - protein, 16 aa, Homo sapiens
  CDR3 for beta chain variable domain of TCR clone 122368 (TRBV2, TRBJ2-6)
CASSETGGSGANVLTF

SEQ ID NO: 244737 - protein, 13 aa, Homo sapiens
  CDR3 for alpha chain variable domain of TCR clone 122369 (TRAV2, TRAJ40)
CAVVTSGTYKYIF

SEQ ID NO: 244738 - protein, 14 aa, Homo sapiens
  CDR3 for beta chain variable domain of TCR clone 122369 (TRBV4-2, TRBJ2-1)
CASGLDRAYNEQFL

SEQ ID NO: 244739 - protein, 20 aa, Homo sapiens
  CDR3 for alpha chain variable domain of TCR clone 122370 (TRAV26-1, TRAJ42)
CCVLLHRQTYYGGSQGNLIF

SEQ ID NO: 244740 - protein, 16 aa, Homo sapiens
  CDR3 for beta chain variable domain of TCR clone 122370 (TRBV7-3, TRBJ2-2)
CAGSLKRGTLSGELFF

SEQ ID NO: 244741 - protein, 15 aa, Homo sapiens
  CDR3 for alpha chain variable domain of TCR clone 122371 (TRAV13-1, TRAJ11)
CAASNWNSGYSTLTF

SEQ ID NO: 244742 - protein, 11 aa, Homo sapiens
  CDR3 for beta chain variable domain of TCR clone 122371 (TRBV20-1, TRBJ2-7)
CSARLSYEQYF

SEQ ID NO: 244743 - protein, 15 aa, Homo sapiens
  CDR3 for alpha chain variable domain of TCR clone 122372 (TRAV21, TRAJ53)
CATLNSGGSNYKLTF

SEQ ID NO: 244744 - protein, 16 aa, Homo sapiens
  CDR3 for beta chain variable domain of TCR clone 122372 (TRBV7-2, TRBJ2-5)
CASSPFPTGGEETQYF

SEQ ID NO: 244745 - protein, 13 aa, Homo sapiens
  CDR3 for alpha chain variable domain of TCR clone 122373 (TRAV8-3, TRAJ36)
CAVGVTGANNLFF

SEQ ID NO: 244746 - protein, 17 aa, Homo sapiens
  CDR3 for beta chain variable domain of TCR clone 122373 (TRBV4-2, TRBJ1-1)
CASTQFGGGSGNTEAFF

SEQ ID NO: 244747 - protein, 14 aa, Homo sapiens
  CDR3 for alpha chain variable domain of TCR clone 122374 (TRAV1-1, TRAJ28)
CAAPSGAGSYQLTF

SEQ ID NO: 244748 - protein, 15 aa, Homo sapiens
  CDR3 for beta chain variable domain of TCR clone 122374 (TRBV12-4, TRBJ1-6)
CASSLGGQGTSPLHF

SEQ ID NO: 244749 - protein, 13 aa, Homo sapiens
  CDR3 for alpha chain variable domain of TCR clone 122375 (TRAV17, TRAJ26)
CATVDNYGQNFVF

SEQ ID NO: 244750 - protein, 14 aa, Homo sapiens
  CDR3 for beta chain variable domain of TCR clone 122375 (TRBV7-6, TRBJ2-3)
CASSLGTVTDTQYF

SEQ ID NO: 244751 - protein, 14 aa, Homo sapiens
  CDR3 for alpha chain variable domain of TCR clone 122376 (TRAV1-2, TRAJ16)
CAVNRFSDGQKLLF

SEQ ID NO: 244752 - protein, 19 aa, Homo sapiens
  CDR3 for beta chain variable domain of TCR clone 122376 (TRBV7-2, TRBJ2-3)
CASSFLPRNWGGGTDTQYF

SEQ ID NO: 244753 - protein, 12 aa, Homo sapiens
  CDR3 for alpha chain variable domain of TCR clone 122377 (TRAV16, TRAJ10)
CSRTGGGNKLTF

SEQ ID NO: 244754 - protein, 15 aa, Homo sapiens
  CDR3 for beta chain variable domain of TCR clone 122377 (TRBV7-2, TRBJ2-7)
CASSTPGLTRGEQYF

SEQ ID NO: 244755 - protein, 12 aa, Homo sapiens
  CDR3 for alpha chain variable domain of TCR clone 122378 (TRAV21, TRAJ13)
PGPSGGYQKVTF

SEQ ID NO: 244756 - protein, 15 aa, Homo sapiens
  CDR3 for beta chain variable domain of TCR clone 122378 (TRBV7-9, TRBJ1-6)
CASSSSGRGNSPLHF

SEQ ID NO: 244757 - protein, 17 aa, Homo sapiens
  CDR3 for alpha chain variable domain of TCR clone 122379 (TRAV26-1, TRAJ58)
CIVRVGAEETSGSRLTC

SEQ ID NO: 244758 - protein, 18 aa, Homo sapiens
  CDR3 for beta chain variable domain of TCR clone 122379 (TRBV7-9, TRBJ2-7)
CASSLTTSGSRTWYEQYF

SEQ ID NO: 244759 - protein, 19 aa, Homo sapiens
  CDR3 for alpha chain variable domain of TCR clone 122380 (TRAV26-1, TRAJ52)
CIVRAHRNAGGTSYGKLTF

SEQ ID NO: 244760 - protein, 17 aa, Homo sapiens
  CDR3 for beta chain variable domain of TCR clone 122380 (TRBV12-4, TRBJ1-1)
CASSLSGFRTMNTEAFF

SEQ ID NO: 244761 - protein, 16 aa, Homo sapiens
  CDR3 for alpha chain variable domain of TCR clone 122381 (TRAV20, TRAJ53)
CAVRRGSGGSHYKLTF

SEQ ID NO: 244762 - protein, 12 aa, Homo sapiens
  CDR3 for beta chain variable domain of TCR clone 122381 (TRBV29-1, TRBJ2-3)
CSVVLGADTQYF

SEQ ID NO: 244763 - protein, 12 aa, Homo sapiens
  CDR3 for alpha chain variable domain of TCR clone 122382 (TRAV2, TRAJ31)
CAVEDNNARIMF

SEQ ID NO: 244764 - protein, 16 aa, Homo sapiens
  CDR3 for beta chain variable domain of TCR clone 122382 (TRBV10-3, TRBJ2-1)
CAISGVGDGGGGEQFF

SEQ ID NO: 244765 - protein, 12 aa, Homo sapiens
  CDR3 for alpha chain variable domain of TCR clone 122383 (TRAV2, TRAJ37)
CAVTMNTGKLIF

SEQ ID NO: 244766 - protein, 17 aa, Homo sapiens
  CDR3 for beta chain variable domain of TCR clone 122383 (TRBV13, TRBJ2-3)
CASSLSRVAGGRNTQYF

SEQ ID NO: 244767 - protein, 17 aa, Homo sapiens
  CDR3 for alpha chain variable domain of TCR clone 122384 (TRAV4, TRAJ13)
CLVGVQGSSGGYQKVTL

SEQ ID NO: 244768 - protein, 16 aa, Homo sapiens
  CDR3 for beta chain variable domain of TCR clone 122384 (TRBV28, TRBJ2-7)
CASSLFFETGGPEQYF

SEQ ID NO: 244769 - protein, 14 aa, Homo sapiens
  CDR3 for alpha chain variable domain of TCR clone 122385 (TRAV16, TRAJ48)
CALTPGFGNEKLTF

SEQ ID NO: 244770 - protein, 14 aa, Homo sapiens
  CDR3 for beta chain variable domain of TCR clone 122385 (TRBV5-1, TRBJ2-3)
CASSRGQGGGTQYF

SEQ ID NO: 244771 - protein, 11 aa, Homo sapiens
  CDR3 for alpha chain variable domain of TCR clone 122386 (TRAV1-1, TRAJ23)
CAVRQGGKLIF

SEQ ID NO: 244772 - protein, 20 aa, Homo sapiens
  CDR3 for beta chain variable domain of TCR clone 122386 (TRBV7-8, TRBJ2-2)
CASSHIFPGPTIHITGELFF

SEQ ID NO: 244773 - protein, 15 aa, Homo sapiens
  CDR3 for alpha chain variable domain of TCR clone 122387 (TRAV2, TRAJ13)
CAVEPEFWGLPESYL

SEQ ID NO: 244774 - protein, 14 aa, Homo sapiens
  CDR3 for beta chain variable domain of TCR clone 122387 (TRBV28, TRBJ1-5)
CASSGQTLYQPQHF

SEQ ID NO: 244775 - protein, 15 aa, Homo sapiens
  CDR3 for alpha chain variable domain of TCR clone 122388 (TRAV26-2, TRAJ13)
CILRDLSGGYQKVTF

SEQ ID NO: 244776 - protein, 17 aa, Homo sapiens
  CDR3 for beta chain variable domain of TCR clone 122388 (TRBV13, TRBJ2-3)
CASSLSRVAGGRNTQYF

SEQ ID NO: 244777 - protein, 16 aa, Homo sapiens
  CDR3 for alpha chain variable domain of TCR clone 122389 (TRAV30, TRAJ24)
CGTEIVDADSWGKFQF

SEQ ID NO: 244778 - protein, 14 aa, Homo sapiens
  CDR3 for beta chain variable domain of TCR clone 122389 (TRBV20-1, TRBJ1-1)
CSAQTRIGGTGAFF

SEQ ID NO: 244779 - protein, 16 aa, Homo sapiens
  CDR3 for alpha chain variable domain of TCR clone 122390 (TRAV12-2, TRAJ6)
CAAPLAGSGGSYIPTF

SEQ ID NO: 244780 - protein, 13 aa, Homo sapiens
  CDR3 for beta chain variable domain of TCR clone 122390 (TRBV6-9, TRBJ2-5)
CASRGDGRRTQYF

SEQ ID NO: 244781 - protein, 13 aa, Homo sapiens
  CDR3 for alpha chain variable domain of TCR clone 122391 (TRAV17, TRAJ9)
CATDGTGGFKTIF

SEQ ID NO: 244782 - protein, 12 aa, Homo sapiens
  CDR3 for beta chain variable domain of TCR clone 122391 (TRBV7-8, TRBJ2-7)
CASSLGDREQYF

SEQ ID NO: 244783 - protein, 13 aa, Homo sapiens
  CDR3 for alpha chain variable domain of TCR clone 122392 (TRAV12-3, TRAJ33)
CAMSVNSNYQLIW

SEQ ID NO: 244784 - protein, 17 aa, Homo sapiens
  CDR3 for beta chain variable domain of TCR clone 122392 (TRBV7-8, TRBJ2-6)
CASSAGTGGAGANVLTF

SEQ ID NO: 244785 - protein, 13 aa, Homo sapiens
  CDR3 for alpha chain variable domain of TCR clone 122393 (TRAV36/DV7, TRAJ53)
CALSGGSSYKLTF

SEQ ID NO: 244786 - protein, 13 aa, Homo sapiens
  CDR3 for beta chain variable domain of TCR clone 122393 (TRBV28, TRBJ2-4)
CASSQSSKNIQYF

SEQ ID NO: 244787 - protein, 14 aa, Homo sapiens
  CDR3 for alpha chain variable domain of TCR clone 122394 (TRAV1-2, TRAJ16)
CAVIRFSDGQKLLF

SEQ ID NO: 244788 - protein, 14 aa, Homo sapiens
  CDR3 for beta chain variable domain of TCR clone 122394 (TRBV7-9, TRBJ2-3)
CASSLEDGTDTQYF

SEQ ID NO: 244789 - protein, 15 aa, Homo sapiens
  CDR3 for alpha chain variable domain of TCR clone 122395 (TRAV38-2/DV8, TRAJ43)
CAYRSWGAMPNDMRF

SEQ ID NO: 244790 - protein, 12 aa, Homo sapiens
  CDR3 for beta chain variable domain of TCR clone 122395 (TRBV28, TRBJ1-1)
CAGNSGDTEAFF

SEQ ID NO: 244791 - protein, 16 aa, Homo sapiens
  CDR3 for alpha chain variable domain of TCR clone 122396 (TRAV14/DV4, TRAJ53)
CAMREGGGGSNYKLTF

SEQ ID NO: 244792 - protein, 13 aa, Homo sapiens
  CDR3 for beta chain variable domain of TCR clone 122396 (TRBV12-4, TRBJ1-2)
CASSLRQGKGYTF

SEQ ID NO: 244793 - protein, 22 aa, Homo sapiens
  CDR3 for alpha chain variable domain of TCR clone 122397 (TRAV8-6, TRAJ38)
CAVSSNAGNNHIQNPDPAVYQL

SEQ ID NO: 244794 - protein, 14 aa, Homo sapiens
  CDR3 for beta chain variable domain of TCR clone 122397 (TRBV7-9, TRBJ2-1)
CASSPRDSLYEQFF

SEQ ID NO: 244795 - protein, 16 aa, Homo sapiens
  CDR3 for alpha chain variable domain of TCR clone 122398 (TRAV12-2, TRAJ32)
CAVNLGQGGATNKLIF

SEQ ID NO: 244796 - protein, 15 aa, Homo sapiens
  CDR3 for beta chain variable domain of TCR clone 122398 (TRBV20-1, TRBJ2-7)
CSARRPLAGGREQYF

SEQ ID NO: 244797 - protein, 11 aa, Homo sapiens
  CDR3 for alpha chain variable domain of TCR clone 122399 (TRAV1-2, TRAJ40)
CAVPGTYKYIF

SEQ ID NO: 244798 - protein, 16 aa, Homo sapiens
  CDR3 for beta chain variable domain of TCR clone 122399 (TRBV7-3, TRBJ2-2)
CVSSLKRGTLSGELFF

SEQ ID NO: 244799 - protein, 13 aa, Homo sapiens
  CDR3 for alpha chain variable domain of TCR clone 122400 (TRAV8-3, TRAJ36)
CAVGATGANNLFF

SEQ ID NO: 244800 - protein, 15 aa, Homo sapiens
  CDR3 for beta chain variable domain of TCR clone 122400 (TRBV7-2, TRBJ1-2)
CASIPRAGWNYGYTF

SEQ ID NO: 244801 - protein, 13 aa, Homo sapiens
  CDR3 for alpha chain variable domain of TCR clone 122401 (TRAV12-3, TRAJ40)
CAMSDSGTYKYIF

SEQ ID NO: 244802 - protein, 15 aa, Homo sapiens
  CDR3 for beta chain variable domain of TCR clone 122401 (TRBV11-3, TRBJ2-3)
CASLKDGREGDTQYF

SEQ ID NO: 244803 - protein, 13 aa, Homo sapiens
  CDR3 for alpha chain variable domain of TCR clone 122402 (TRAV2, TRAJ40)
CAVVTSGTYKYIF

SEQ ID NO: 244804 - protein, 12 aa, Homo sapiens
  CDR3 for beta chain variable domain of TCR clone 122402 (TRBV11-3, TRBJ2-2)
CASSLPTGELFF

SEQ ID NO: 244805 - protein, 11 aa, Homo sapiens
  CDR3 for alpha chain variable domain of TCR clone 122403 (TRAV21, TRAJ34)
CAVTNTDKLIF

SEQ ID NO: 244806 - protein, 16 aa, Homo sapiens
  CDR3 for beta chain variable domain of TCR clone 122403 (TRBV27, TRBJ2-2)
CASSFRGLVRTGELFF

SEQ ID NO: 244807 - protein, 13 aa, Homo sapiens
  CDR3 for alpha chain variable domain of TCR clone 122404 (TRAV8-3, TRAJ28)
CAVGAVGSYQLTF

SEQ ID NO: 244808 - protein, 15 aa, Homo sapiens
  CDR3 for beta chain variable domain of TCR clone 122404 (TRBV7-9, TRBJ1-5)
CASSQGHQPNQPPHF

SEQ ID NO: 244809 - protein, 15 aa, Homo sapiens
  CDR3 for alpha chain variable domain of TCR clone 122405 (TRAV25, TRAJ53)
CPTSNIGGSNYKLTF

SEQ ID NO: 244810 - protein, 14 aa, Homo sapiens
  CDR3 for beta chain variable domain of TCR clone 122405 (TRBV11-2, TRBJ2-3)
CASSRLARTDTQYF

SEQ ID NO: 244811 - protein, 12 aa, Homo sapiens
  CDR3 for alpha chain variable domain of TCR clone 122406 (TRAV21, TRAJ13)
PGPSGVYQKVTF

SEQ ID NO: 244812 - protein, 15 aa, Homo sapiens
  CDR3 for beta chain variable domain of TCR clone 122406 (TRBV7-9, TRBJ1-6)
CASSSPGRGNSPLHF

SEQ ID NO: 244813 - protein, 14 aa, Homo sapiens
  CDR3 for alpha chain variable domain of TCR clone 122407 (TRAV3, TRAJ9)
CAVRLNTGGFKTIF

SEQ ID NO: 244814 - protein, 17 aa, Homo sapiens
  CDR3 for beta chain variable domain of TCR clone 122407 (TRBV7-8, TRBJ2-6)
CASSAGTGGAGANVLTF

SEQ ID NO: 244815 - protein, 16 aa, Homo sapiens
  CDR3 for alpha chain variable domain of TCR clone 122408 (TRAV21, TRAJ37)
CAVRTAGSSNTGKLIV

SEQ ID NO: 244816 - protein, 13 aa, Homo sapiens
  CDR3 for beta chain variable domain of TCR clone 122408 (TRBV7-9, TRBJ2-5)
CASLPSGRETQYF

SEQ ID NO: 244817 - protein, 12 aa, Homo sapiens
  CDR3 for alpha chain variable domain of TCR clone 122409 (TRAV2, TRAJ5)
CALDTGRRALTF

SEQ ID NO: 244818 - protein, 15 aa, Homo sapiens
  CDR3 for beta chain variable domain of TCR clone 122409 (TRBV10-3, TRBJ2-1)
CSISDVQDRAYEQFF

SEQ ID NO: 244819 - protein, 15 aa, Homo sapiens
  CDR3 for alpha chain variable domain of TCR clone 122410 (TRAV8-3, TRAJ27)
CAVGPSNTNAGKSTF

SEQ ID NO: 244820 - protein, 14 aa, Homo sapiens
  CDR3 for beta chain variable domain of TCR clone 122410 (TRBV11-2, TRBJ2-3)
CASSRLARTDTQYF

SEQ ID NO: 244821 - protein, 14 aa, Homo sapiens
  CDR3 for alpha chain variable domain of TCR clone 122411 (TRAV20, TRAJ22)
CAVALGGSARQLTF

SEQ ID NO: 244822 - protein, 15 aa, Homo sapiens
  CDR3 for beta chain variable domain of TCR clone 122411 (TRBV7-2, TRBJ1-1)
CASSFAGDRDTEASF

SEQ ID NO: 244823 - protein, 15 aa, Homo sapiens
  CDR3 for alpha chain variable domain of TCR clone 122412 (TRAV13-1, TRAJ42)
CAASIAGGSQGNLIF

SEQ ID NO: 244824 - protein, 15 aa, Homo sapiens
  CDR3 for beta chain variable domain of TCR clone 122412 (TRBV19, TRBJ1-5)
CASSDSGPRNQPQHF

SEQ ID NO: 244825 - protein, 13 aa, Homo sapiens
  CDR3 for alpha chain variable domain of TCR clone 122413 (TRAV12-2, TRAJ20)
CAVYPSNDYKLSF

SEQ ID NO: 244826 - protein, 16 aa, Homo sapiens
  CDR3 for beta chain variable domain of TCR clone 122413 (TRBV13, TRBJ2-2)
CASSPRTGEHTGELFF

SEQ ID NO: 244827 - protein, 13 aa, Homo sapiens
  CDR3 for alpha chain variable domain of TCR clone 122414 (TRAV16, TRAJ34)
CITVLSHTDKLIF

SEQ ID NO: 244828 - protein, 14 aa, Homo sapiens
  CDR3 for beta chain variable domain of TCR clone 122414 (TRBV11-2, TRBJ2-7)
CASSLGAGAYEQYF

SEQ ID NO: 244829 - protein, 14 aa, Homo sapiens
  CDR3 for alpha chain variable domain of TCR clone 122415 (TRAV8-1, TRAJ13)
CAVKRSGGYQKVTF

SEQ ID NO: 244830 - protein, 15 aa, Homo sapiens
  CDR3 for beta chain variable domain of TCR clone 122415 (TRBV20-1, TRBJ2-7)
CSARGPLAGGREQYF

SEQ ID NO: 244831 - protein, 12 aa, Homo sapiens
  CDR3 for alpha chain variable domain of TCR clone 122416 (TRAV3, TRAJ31)
CAVRDGNARLMF

SEQ ID NO: 244832 - protein, 14 aa, Homo sapiens
  CDR3 for beta chain variable domain of TCR clone 122416 (TRBV7-7, TRBJ2-2)
CATRQDSDTGELFF

SEQ ID NO: 244833 - protein, 14 aa, Homo sapiens
  CDR3 for alpha chain variable domain of TCR clone 122417 (TRAV26-1, TRAJ21)
CIVRVVYNFNKFYF

SEQ ID NO: 244834 - protein, 11 aa, Homo sapiens
  CDR3 for beta chain variable domain of TCR clone 122417 (TRBV5-6, TRBJ2-5)
CASSLERTQYF

SEQ ID NO: 244835 - protein, 15 aa, Homo sapiens
  CDR3 for alpha chain variable domain of TCR clone 122418 (TRAV8-3, TRAJ40)
CAAPSLGSGTYKYIF

SEQ ID NO: 244836 - protein, 16 aa, Homo sapiens
  CDR3 for beta chain variable domain of TCR clone 122418 (TRBV7-3, TRBJ2-3)
CASSLSGYRPEGTQYF

SEQ ID NO: 244837 - protein, 16 aa, Homo sapiens
  CDR3 for alpha chain variable domain of TCR clone 122419 (TRAV13-1, TRAJ22)
CAAKGGRSGSARKLTF

SEQ ID NO: 244838 - protein, 15 aa, Homo sapiens
  CDR3 for beta chain variable domain of TCR clone 122419 (TRBV9, TRBJ1-6)
CASSVAGTGDSPLHF

SEQ ID NO: 244839 - protein, 15 aa, Homo sapiens
  CDR3 for alpha chain variable domain of TCR clone 122420 (TRAV16, TRAJ39)
CALSPSNNAGNMLTF

SEQ ID NO: 244840 - protein, 14 aa, Homo sapiens
  CDR3 for beta chain variable domain of TCR clone 122420 (TRBV7-7, TRBJ2-7)
CASSPGGLTYEQYF

SEQ ID NO: 244841 - protein, 14 aa, Homo sapiens
  CDR3 for alpha chain variable domain of TCR clone 122421 (TRAV2, TRAJ9)
CAVEDRSGGFKTIF

SEQ ID NO: 244842 - protein, 11 aa, Homo sapiens
  CDR3 for beta chain variable domain of TCR clone 122421 (TRBV7-9, TRBJ2-5)
GASSLGETQYF

SEQ ID NO: 244843 - protein, 14 aa, Homo sapiens
  CDR3 for alpha chain variable domain of TCR clone 122422 (TRAV21, TRAJ37)
CAVKGSSSTGKLIF

SEQ ID NO: 244844 - protein, 14 aa, Homo sapiens
  CDR3 for beta chain variable domain of TCR clone 122422 (TRBV7-2, TRBJ2-1)
CASSRGGARNEQFF

SEQ ID NO: 244845 - protein, 16 aa, Homo sapiens
  CDR3 for alpha chain variable domain of TCR clone 122423 (TRAV39, TRAJ17)
CAVDIQRSTAGNKLTF

SEQ ID NO: 244846 - protein, 18 aa, Homo sapiens
  CDR3 for beta chain variable domain of TCR clone 122423 (TRBV18, TRBJ1-3)
CASSPRGGAGPSGNTIYF

SEQ ID NO: 244847 - protein, 14 aa, Homo sapiens
  CDR3 for alpha chain variable domain of TCR clone 122424 (TRAV12-3, TRAJ10)
SHLPLKGGGNKLTF

SEQ ID NO: 244848 - protein, 14 aa, Homo sapiens
  CDR3 for beta chain variable domain of TCR clone 122424 (TRBV6-1, TRBJ1-3)
CASVQGGGGNTIYF

SEQ ID NO: 244849 - protein, 14 aa, Homo sapiens
  CDR3 for alpha chain variable domain of TCR clone 122425 (TRAV1-2, TRAJ16)
CAVNRFSDGQQLLF

SEQ ID NO: 244850 - protein, 12 aa, Homo sapiens
  CDR3 for beta chain variable domain of TCR clone 122425 (TRBV11-2, TRBJ2-2)
CASSLGGGELFF

SEQ ID NO: 244851 - protein, 15 aa, Homo sapiens
  CDR3 for alpha chain variable domain of TCR clone 122426 (TRAV13-2, TRAJ16)
CAERGVFSDGQKLLF

SEQ ID NO: 244852 - protein, 15 aa, Homo sapiens
  CDR3 for beta chain variable domain of TCR clone 122426 (TRBV20-1, TRBJ2-7)
CSARDRVSGMDEQYF

SEQ ID NO: 244853 - protein, 15 aa, Homo sapiens
  CDR3 for alpha chain variable domain of TCR clone 122427 (TRAV12-2, TRAJ56)
CAVNPFTGANSKLTF

SEQ ID NO: 244854 - protein, 13 aa, Homo sapiens
  CDR3 for beta chain variable domain of TCR clone 122427 (TRBV20-1, TRBJ1-2)
CSARDWVYGGYTF

SEQ ID NO: 244855 - protein, 14 aa, Homo sapiens
  CDR3 for alpha chain variable domain of TCR clone 122428 (TRAV12-1, TRAJ17)
CVVNYKAAGNKLTF

SEQ ID NO: 244856 - protein, 15 aa, Homo sapiens
  CDR3 for beta chain variable domain of TCR clone 122428 (TRBV11-3, TRBJ2-7)
CASSPGPASSYEQYF

SEQ ID NO: 244857 - protein, 14 aa, Homo sapiens
  CDR3 for alpha chain variable domain of TCR clone 122429 (TRAV23/DV6, TRAJ9)
CAASIGGKYWRLQN

SEQ ID NO: 244858 - protein, 13 aa, Homo sapiens
  CDR3 for beta chain variable domain of TCR clone 122429 (TRBV7-9, TRBJ1-2)
CASSLKQSYGYTF

SEQ ID NO: 244859 - protein, 19 aa, Homo sapiens
  CDR3 for alpha chain variable domain of TCR clone 122430 (TRAV26-1, TRAJ38)
CIADNAGNNHIQNPDPAVY

SEQ ID NO: 244860 - protein, 13 aa, Homo sapiens
  CDR3 for beta chain variable domain of TCR clone 122430 (TRBV20-1, TRBJ1-1)
CSARGGGDTEAFF

SEQ ID NO: 244861 - protein, 15 aa, Homo sapiens
  CDR3 for alpha chain variable domain of TCR clone 122431 (TRAV4, TRAJ42)
CLVGGYVGSQGNLIF

SEQ ID NO: 244862 - protein, 16 aa, Homo sapiens
  CDR3 for beta chain variable domain of TCR clone 122431 (TRBV27, TRBJ1-1)
CASSTRTGGVGTEAFF

SEQ ID NO: 244863 - protein, 14 aa, Homo sapiens
  CDR3 for alpha chain variable domain of TCR clone 122432 (TRAV16, TRAJ29)
CALTRHSGNTPLVF

SEQ ID NO: 244864 - protein, 12 aa, Homo sapiens
  CDR3 for beta chain variable domain of TCR clone 122432 (TRBV2, TRBJ2-1)
CAKREGYNEQFF

SEQ ID NO: 244865 - protein, 11 aa, Homo sapiens
  CDR3 for alpha chain variable domain of TCR clone 122433 (TRAV1-2, TRAJ20)
CAVSNDYKLSF

SEQ ID NO: 244866 - protein, 16 aa, Homo sapiens
  CDR3 for beta chain variable domain of TCR clone 122433 (TRBV29-1, TRBJ2-6)
CSVEDITYYGANVLTF

SEQ ID NO: 244867 - protein, 12 aa, Homo sapiens
  CDR3 for alpha chain variable domain of TCR clone 122434 (TRAV8-4, TRAJ43)
CAVSVNNNDMRF

SEQ ID NO: 244868 - protein, 13 aa, Homo sapiens
  CDR3 for beta chain variable domain of TCR clone 122434 (TRBV7-9, TRBJ1-2)
CASSLKQNYGYTS

SEQ ID NO: 244869 - protein, 11 aa, Homo sapiens
  CDR3 for alpha chain variable domain of TCR clone 122435 (TRAV27, TRAJ47)
CRSNQGNKLVF

SEQ ID NO: 244870 - protein, 16 aa, Homo sapiens
  CDR3 for beta chain variable domain of TCR clone 122435 (TRBV7-9, TRBJ2-1)
CANSDVAGGSYNEQFF

SEQ ID NO: 244871 - protein, 11 aa, Homo sapiens
  CDR3 for alpha chain variable domain of TCR clone 122436 (TRAV13-1, TRAJ39)
CASHAGNMLTF

SEQ ID NO: 244872 - protein, 14 aa, Homo sapiens
  CDR3 for beta chain variable domain of TCR clone 122436 (TRBV11-2, TRBJ1-5)
CASRLDRGRQPQHF

SEQ ID NO: 244873 - protein, 13 aa, Homo sapiens
  CDR3 for alpha chain variable domain of TCR clone 122437 (TRAV13-2, TRAJ13)
CAERPGGYQKVTF

SEQ ID NO: 244874 - protein, 15 aa, Homo sapiens
  CDR3 for beta chain variable domain of TCR clone 122437 (TRBV11-3, TRBJ2-7)
CASSPGPASSYEQYC

SEQ ID NO: 244875 - protein, 13 aa, Homo sapiens
  CDR3 for alpha chain variable domain of TCR clone 122438 (TRAV2, TRAJ15)
CAVASQAGTALIF

SEQ ID NO: 244876 - protein, 15 aa, Homo sapiens
  CDR3 for beta chain variable domain of TCR clone 122438 (TRBV5-1, TRBJ2-7)
CASSLNGGPAREQYF

SEQ ID NO: 244877 - protein, 13 aa, Homo sapiens
  CDR3 for alpha chain variable domain of TCR clone 122439 (TRAV21, TRAJ57)
CAVTQGGSEKLVF

SEQ ID NO: 244878 - protein, 13 aa, Homo sapiens
  CDR3 for beta chain variable domain of TCR clone 122439 (TRBV27, TRBJ1-1)
CASSLSIGAEAFF

SEQ ID NO: 244879 - protein, 23 aa, Homo sapiens
  CDR3 for alpha chain variable domain of TCR clone 122440 (TRAV30, TRAJ29)
PAQLLRNLLLWHGAFSGNTPLVF

SEQ ID NO: 244880 - protein, 15 aa, Homo sapiens
  CDR3 for beta chain variable domain of TCR clone 122440 (TRBV5-1, TRBJ2-2)
CASSLFGQNTGELFF

SEQ ID NO: 244881 - protein, 18 aa, Homo sapiens
  CDR3 for alpha chain variable domain of TCR clone 122441 (TRAV21, TRAJ52)
CAVRPSPAGGTSYGKLTF

SEQ ID NO: 244882 - protein, 15 aa, Homo sapiens
  CDR3 for beta chain variable domain of TCR clone 122441 (TRBV28, TRBJ2-1)
CASSGLAEVDNEQFF

SEQ ID NO: 244883 - protein, 10 aa, Homo sapiens
  CDR3 for alpha chain variable domain of TCR clone 122442 (TRAV2, TRAJ40)
CAVVTRNLQI

SEQ ID NO: 244884 - protein, 14 aa, Homo sapiens
  CDR3 for beta chain variable domain of TCR clone 122442 (TRBV19, TRBJ2-1)
CASPTFVLSGEQFF

SEQ ID NO: 244885 - protein, 15 aa, Homo sapiens
  CDR3 for alpha chain variable domain of TCR clone 122443 (TRAV4, TRAJ39)
CLVGPNNNAGNMLTF

SEQ ID NO: 244886 - protein, 14 aa, Homo sapiens
  CDR3 for beta chain variable domain of TCR clone 122443 (TRBV19, TRBJ2-7)
CASNFRDTFTGLYF

SEQ ID NO: 244887 - protein, 15 aa, Homo sapiens
  CDR3 for alpha chain variable domain of TCR clone 122444 (TRAV13-2, TRAJ29)
GDSAARDGGNTPLVF

SEQ ID NO: 244888 - protein, 17 aa, Homo sapiens
  CDR3 for beta chain variable domain of TCR clone 122444 (TRBV20-1, TRBJ2-2)
CSASGSGQGGLTGELFF

SEQ ID NO: 244889 - protein, 16 aa, Homo sapiens
  CDR3 for alpha chain variable domain of TCR clone 122445 (TRAV14/DV4, TRAJ53)
CAMREGGGGSNYKLTF

SEQ ID NO: 244890 - protein, 12 aa, Homo sapiens
  CDR3 for beta chain variable domain of TCR clone 122445 (TRBV12-4, TRBJ2-7)
CASSLGGYEQYF

SEQ ID NO: 244891 - protein, 11 aa, Homo sapiens
  CDR3 for alpha chain variable domain of TCR clone 122446 (TRAV27, TRAJ40)
SLTPGTYKYIF

SEQ ID NO: 244892 - protein, 12 aa, Homo sapiens
  CDR3 for beta chain variable domain of TCR clone 122446 (TRBV18, TRBJ2-3)
CQLNQNTDTQYF

SEQ ID NO: 244893 - protein, 14 aa, Homo sapiens
  CDR3 for alpha chain variable domain of TCR clone 122447 (TRAV1-2, TRAJ16)
CAVNRFSDCQKLLF

SEQ ID NO: 244894 - protein, 13 aa, Homo sapiens
  CDR3 for beta chain variable domain of TCR clone 122447 (TRBV20-1, TRBJ1-1)
CSARLGQGTEAFF

SEQ ID NO: 244895 - protein, 12 aa, Homo sapiens
  CDR3 for alpha chain variable domain of TCR clone 122448 (TRAV34, TRAJ49)
CGALLTGNQFYF

SEQ ID NO: 244896 - protein, 15 aa, Homo sapiens
  CDR3 for beta chain variable domain of TCR clone 122448 (TRBV11-3, TRBJ2-3)
CASLKDGREGDTQYF

SEQ ID NO: 244897 - protein, 14 aa, Homo sapiens
  CDR3 for alpha chain variable domain of TCR clone 122449 (TRAV38-1, TRAJ28)
CAFTSGAGRYQLTF

SEQ ID NO: 244898 - protein, 18 aa, Homo sapiens
  CDR3 for beta chain variable domain of TCR clone 122449 (TRBV7-9, TRBJ1-1)
CASSKPWDTMGMNTEAFF

SEQ ID NO: 244899 - protein, 14 aa, Homo sapiens
  CDR3 for alpha chain variable domain of TCR clone 122450 (TRAV8-1, TRAJ49)
CASSIANTGNQFYF

SEQ ID NO: 244900 - protein, 13 aa, Homo sapiens
  CDR3 for beta chain variable domain of TCR clone 122450 (TRBV7-3, TRBJ1-1)
CASSQDWGAEAFF

SEQ ID NO: 244901 - protein, 16 aa, Homo sapiens
  CDR3 for alpha chain variable domain of TCR clone 122451 (TRAV8-3, TRAJ22)
CAVDLLGPGSARQLNF

SEQ ID NO: 244902 - protein, 14 aa, Homo sapiens
  CDR3 for beta chain variable domain of TCR clone 122451 (TRBV11-2, TRBJ2-7)
CASSLELEGYEQYF

SEQ ID NO: 244903 - protein, 13 aa, Homo sapiens
  CDR3 for alpha chain variable domain of TCR clone 122452 (TRAV29/DV5, TRAJ31)
CAASRNNNARLMF

SEQ ID NO: 244904 - protein, 14 aa, Homo sapiens
  CDR3 for beta chain variable domain of TCR clone 122452 (TRBV7-9, TRBJ2-2)
CASNLVQDTGELFF

SEQ ID NO: 244905 - protein, 14 aa, Homo sapiens
  CDR3 for alpha chain variable domain of TCR clone 122453 (TRAV4, TRAJ17)
CLVGDMAAGNKLTF

SEQ ID NO: 244906 - protein, 14 aa, Homo sapiens
  CDR3 for beta chain variable domain of TCR clone 122453 (TRBV7-6, TRBJ2-3)
CASSLGTVKDTQYF

SEQ ID NO: 244907 - protein, 10 aa, Homo sapiens
  CDR3 for alpha chain variable domain of TCR clone 122454 (TRAV12-3, TRAJ49)
CAMNDDQFYF

SEQ ID NO: 244908 - protein, 13 aa, Homo sapiens
  CDR3 for beta chain variable domain of TCR clone 122454 (TRBV12-4, TRBJ1-1)
WASSPGTGFEAFF

SEQ ID NO: 244909 - protein, 15 aa, Homo sapiens
  CDR3 for alpha chain variable domain of TCR clone 122455 (TRAV2, TRAJ28)
CAVPYSGAGSYQLTF

SEQ ID NO: 244910 - protein, 17 aa, Homo sapiens
  CDR3 for beta chain variable domain of TCR clone 122455 (TRBV20-1, TRBJ2-4)
CSARDWARGGRENIQYF

SEQ ID NO: 244911 - protein, 14 aa, Homo sapiens
  CDR3 for alpha chain variable domain of TCR clone 122456 (TRAV25, TRAJ34)
CAGSTRRVSDKLIF

SEQ ID NO: 244912 - protein, 16 aa, Homo sapiens
  CDR3 for beta chain variable domain of TCR clone 122456 (TRBV7-3, TRBJ2-2)
CASSLKRGTLSGELFF

SEQ ID NO: 244913 - protein, 14 aa, Homo sapiens
  CDR3 for alpha chain variable domain of TCR clone 122457 (TRAV12-2, TRAJ13)
CAVKKTGGYQKVTF

SEQ ID NO: 244914 - protein, 19 aa, Homo sapiens
  CDR3 for beta chain variable domain of TCR clone 122457 (TRBV27, TRBJ2-1)
CASSNGEGPPMSSSSGQGH

SEQ ID NO: 244915 - protein, 13 aa, Homo sapiens
  CDR3 for alpha chain variable domain of TCR clone 122458 (TRAV21, TRAJ37)
CAVSSGNTGKLIF

SEQ ID NO: 244916 - protein, 13 aa, Homo sapiens
  CDR3 for beta chain variable domain of TCR clone 122458 (TRBV2, TRBJ1-4)
CASSERAGEKLFF

SEQ ID NO: 244917 - protein, 11 aa, Homo sapiens
  CDR3 for alpha chain variable domain of TCR clone 122459 (TRAV21, TRAJ31)
CAVRNNARLMF

SEQ ID NO: 244918 - protein, 15 aa, Homo sapiens
  CDR3 for beta chain variable domain of TCR clone 122459 (TRBV5-1, TRBJ2-7)
CASSLGDFTTYEQYF

SEQ ID NO: 244919 - protein, 15 aa, Homo sapiens
  CDR3 for alpha chain variable domain of TCR clone 122460 (TRAV3, TRAJ3)
CAVRDRRSSASKIIF

SEQ ID NO: 244920 - protein, 14 aa, Homo sapiens
  CDR3 for beta chain variable domain of TCR clone 122460 (TRBV19, TRBJ2-1)
CASPTFVLSGEQFF

SEQ ID NO: 244921 - protein, 17 aa, Homo sapiens
  CDR3 for alpha chain variable domain of TCR clone 122461 (TRAV4, TRAJ13)
CLVGVQGSSGGYQKVTF

SEQ ID NO: 244922 - protein, 18 aa, Homo sapiens
  CDR3 for beta chain variable domain of TCR clone 122461 (TRBV15, TRBJ2-3)
CATSRDGARIWDTDTQYF

SEQ ID NO: 244923 - protein, 16 aa, Homo sapiens
  CDR3 for alpha chain variable domain of TCR clone 122462 (TRAV12-2, TRAJ32)
CAVNLGQVGATNKLIF

SEQ ID NO: 244924 - protein, 15 aa, Homo sapiens
  CDR3 for beta chain variable domain of TCR clone 122462 (TRBV20-1, TRBJ2-7)
CSARGPLAGGREQYF

SEQ ID NO: 244925 - protein, 14 aa, Homo sapiens
  CDR3 for alpha chain variable domain of TCR clone 122463 (TRAV16, TRAJ3)
CALSQYSSASKIIF

SEQ ID NO: 244926 - protein, 16 aa, Homo sapiens
  CDR3 for beta chain variable domain of TCR clone 122463 (TRBV20-1, TRBJ1-4)
CSAPGQGLLTNEKLFF

SEQ ID NO: 244927 - protein, 11 aa, Homo sapiens
  CDR3 for alpha chain variable domain of TCR clone 122464 (TRAV13-1, TRAJ52)
PGGTSYGKLTF

SEQ ID NO: 244928 - protein, 16 aa, Homo sapiens
  CDR3 for beta chain variable domain of TCR clone 122464 (TRBV28, TRBJ2-7)
CVSSPWVATGDLSQYF

SEQ ID NO: 244929 - protein, 14 aa, Homo sapiens
  CDR3 for alpha chain variable domain of TCR clone 122465 (TRAV12-1, TRAJ27)
CGEHIRTNAGKSTF

SEQ ID NO: 244930 - protein, 16 aa, Homo sapiens
  CDR3 for beta chain variable domain of TCR clone 122465 (TRBV15, TRBJ1-4)
CATSRDSPPGREKLFF

SEQ ID NO: 244931 - protein, 13 aa, Homo sapiens
  CDR3 for alpha chain variable domain of TCR clone 122466 (TRAV26-2, TRAJ54)
CIPRVGGAQELVF

SEQ ID NO: 244932 - protein, 16 aa, Homo sapiens
  CDR3 for beta chain variable domain of TCR clone 122466 (TRBV4-1, TRBJ1-1)
CASSSMSERPNTEAFF

SEQ ID NO: 244933 - protein, 16 aa, Homo sapiens
  CDR3 for alpha chain variable domain of TCR clone 122467 (TRAV30, TRAJ24)
CGTEIVAADSWGKFQF

SEQ ID NO: 244934 - protein, 16 aa, Homo sapiens
  CDR3 for beta chain variable domain of TCR clone 122467 (TRBV12-5, TRBJ2-5)
CASGPRTSGNQETQYF

SEQ ID NO: 244935 - protein, 18 aa, Homo sapiens
  CDR3 for alpha chain variable domain of TCR clone 122468 (TRAV8-4, TRAJ52)
CAVTRANAGGTSYVKLTF

SEQ ID NO: 244936 - protein, 12 aa, Homo sapiens
  CDR3 for beta chain variable domain of TCR clone 122468 (TRBV11-2, TRBJ2-2)
CASSLPTGELFF

SEQ ID NO: 244937 - protein, 12 aa, Homo sapiens
  CDR3 for alpha chain variable domain of TCR clone 122469 (TRAV21, TRAJ42)
CDVGGSQGNLIF

SEQ ID NO: 244938 - protein, 14 aa, Homo sapiens
  CDR3 for beta chain variable domain of TCR clone 122469 (TRBV12-4, TRBJ1-1)
CASSLGTGGTEAFF

SEQ ID NO: 244939 - protein, 13 aa, Homo sapiens
  CDR3 for alpha chain variable domain of TCR clone 122470 (TRAV8-2, TRAJ29)
CALPGAGNTPLVF

SEQ ID NO: 244940 - protein, 15 aa, Homo sapiens
  CDR3 for beta chain variable domain of TCR clone 122470 (TRBV7-2, TRBJ2-7)
CASSLVSSGSYEQYF

SEQ ID NO: 244941 - protein, 15 aa, Homo sapiens
  CDR3 for alpha chain variable domain of TCR clone 122471 (TRAV36/DV7, TRAJ53)
WEGENSGGSNYKLTF

SEQ ID NO: 244942 - protein, 15 aa, Homo sapiens
  CDR3 for beta chain variable domain of TCR clone 122471 (TRBV6-1, TRBJ2-5)
CASSEGWGIQETQYL

SEQ ID NO: 244943 - protein, 13 aa, Homo sapiens
  CDR3 for alpha chain variable domain of TCR clone 122472 (TRAV13-2, TRAJ53)
CAENMGSNYKLTF

SEQ ID NO: 244944 - protein, 13 aa, Homo sapiens
  CDR3 for beta chain variable domain of TCR clone 122472 (TRBV4-1, TRBJ2-2)
CASSQKNTGELFF

SEQ ID NO: 244945 - protein, 16 aa, Homo sapiens
  CDR3 for alpha chain variable domain of TCR clone 122473 (TRAV3, TRAJ28)
CAVLPRSGAGRYQLTF

SEQ ID NO: 244946 - protein, 18 aa, Homo sapiens
  CDR3 for beta chain variable domain of TCR clone 122473 (TRBV23-1, TRBJ2-7)
CASSQYRRTDSTSSTSGR

SEQ ID NO: 244947 - protein, 14 aa, Homo sapiens
  CDR3 for alpha chain variable domain of TCR clone 122474 (TRAV1-2, TRAJ8)
CAVREDTGFHKLVF

SEQ ID NO: 244948 - protein, 16 aa, Homo sapiens
  CDR3 for beta chain variable domain of TCR clone 122474 (TRBV28, TRBJ1-4)
CASSPPYRGRSEKLFF

SEQ ID NO: 244949 - protein, 14 aa, Homo sapiens
  CDR3 for alpha chain variable domain of TCR clone 122475 (TRAV8-2, TRAJ11)
CVVSEKSGYSSLTF

SEQ ID NO: 244950 - protein, 16 aa, Homo sapiens
  CDR3 for beta chain variable domain of TCR clone 122475 (TRBV28, TRBJ2-1)
CASSSPEYPRDNEQFF

SEQ ID NO: 244951 - protein, 11 aa, Homo sapiens
  CDR3 for alpha chain variable domain of TCR clone 122476 (TRAV8-2, TRAJ26)
CVVTLLLGSEF

SEQ ID NO: 244952 - protein, 15 aa, Homo sapiens
  CDR3 for beta chain variable domain of TCR clone 122476 (TRBV11-2, TRBJ2-2)
CASSSDRVNAGEMFF

SEQ ID NO: 244953 - protein, 12 aa, Homo sapiens
  CDR3 for alpha chain variable domain of TCR clone 122477 (TRAV26-1, TRAJ48)
CIAGFGNEKLTF

SEQ ID NO: 244954 - protein, 17 aa, Homo sapiens
  CDR3 for beta chain variable domain of TCR clone 122477 (TRBV7-6, TRBJ2-1)
CASSFGLAGGTYNEQFF

SEQ ID NO: 244955 - protein, 16 aa, Homo sapiens
  CDR3 for alpha chain variable domain of TCR clone 122478 (TRAV13-1, TRAJ48)
CSKYLESNFGNEKLTF

SEQ ID NO: 244956 - protein, 17 aa, Homo sapiens
  CDR3 for beta chain variable domain of TCR clone 122478 (TRBV28, TRBJ2-1)
CASSSARQALTYNEQFF

SEQ ID NO: 244957 - protein, 12 aa, Homo sapiens
  CDR3 for alpha chain variable domain of TCR clone 122479 (TRAV21, TRAJ39)
CAADNAGNMLTF

SEQ ID NO: 244958 - protein, 17 aa, Homo sapiens
  CDR3 for beta chain variable domain of TCR clone 122479 (TRBV3-1, TRBJ2-2)
CASSQFRDKVDTGELFF

SEQ ID NO: 244959 - protein, 15 aa, Homo sapiens
  CDR3 for alpha chain variable domain of TCR clone 122480 (TRAV8-3, TRAJ41)
CAVGPNSNSGYALNF

SEQ ID NO: 244960 - protein, 17 aa, Homo sapiens
  CDR3 for beta chain variable domain of TCR clone 122480 (TRBV25-1, TRBJ2-1)
CASSAYGQGRGVYEQFF

SEQ ID NO: 244961 - protein, 14 aa, Homo sapiens
  CDR3 for alpha chain variable domain of TCR clone 122481 (TRAV26-1, TRAJ34)
CIVRAAYNTDKLIF

SEQ ID NO: 244962 - protein, 15 aa, Homo sapiens
  CDR3 for beta chain variable domain of TCR clone 122481 (TRBV7-9, TRBJ1-4)
CAGSRTGGFNEKLFF

SEQ ID NO: 244963 - protein, 17 aa, Homo sapiens
  CDR3 for alpha chain variable domain of TCR clone 122482 (TRAV26-2, TRAJ42)
CILRDVGYGGSQGNLIF

SEQ ID NO: 244964 - protein, 13 aa, Homo sapiens
  CDR3 for beta chain variable domain of TCR clone 122482 (TRBV11-2, TRBJ2-5)
CASGHGAKETQYF

SEQ ID NO: 244965 - protein, 12 aa, Homo sapiens
  CDR3 for alpha chain variable domain of TCR clone 122483 (TRAV16, TRAJ22)
CALEVSARQLTF

SEQ ID NO: 244966 - protein, 14 aa, Homo sapiens
  CDR3 for beta chain variable domain of TCR clone 122483 (TRBV11-2, TRBJ2-3)
CASSSIARTDTQYF

SEQ ID NO: 244967 - protein, 13 aa, Homo sapiens
  CDR3 for alpha chain variable domain of TCR clone 122484 (TRAV8-3, TRAJ43)
CAVGTDNNNDIRF

SEQ ID NO: 244968 - protein, 12 aa, Homo sapiens
  CDR3 for beta chain variable domain of TCR clone 122484 (TRBV7-2, TRBJ1-6)
CASSLSSSPLHF

SEQ ID NO: 244969 - protein, 13 aa, Homo sapiens
  CDR3 for alpha chain variable domain of TCR clone 122485 (TRAV27, TRAJ45)
CRSSGGGADGLTF

SEQ ID NO: 244970 - protein, 15 aa, Homo sapiens
  CDR3 for beta chain variable domain of TCR clone 122485 (TRBV5-1, TRBJ2-3)
CASSSTSGSTDTQYF

SEQ ID NO: 244971 - protein, 16 aa, Homo sapiens
  CDR3 for alpha chain variable domain of TCR clone 122486 (TRAV3, TRAJ13)
CAVRDPNSGGYQKVTF

SEQ ID NO: 244972 - protein, 13 aa, Homo sapiens
  CDR3 for beta chain variable domain of TCR clone 122486 (TRBV7-9, TRBJ2-7)
CASSLQGSYEQYF

SEQ ID NO: 244973 - protein, 14 aa, Homo sapiens
  CDR3 for alpha chain variable domain of TCR clone 122487 (TRAV12-2, TRAJ13)
CAVKKTGGYQKVTF

SEQ ID NO: 244974 - protein, 17 aa, Homo sapiens
  CDR3 for beta chain variable domain of TCR clone 122487 (TRBV7-6, TRBJ2-7)
CASSAIKTSGGRYEQYF

SEQ ID NO: 244975 - protein, 16 aa, Homo sapiens
  CDR3 for alpha chain variable domain of TCR clone 122488 (TRAV12-2, TRAJ18)
CAVTTDRGSTLGRLYF

SEQ ID NO: 244976 - protein, 13 aa, Homo sapiens
  CDR3 for beta chain variable domain of TCR clone 122488 (TRBV19, TRBJ2-3)
CATRDKITDTQYF

SEQ ID NO: 244977 - protein, 13 aa, Homo sapiens
  CDR3 for alpha chain variable domain of TCR clone 122489 (TRAV13-1, TRAJ13)
CAASKGGYQKVTF

SEQ ID NO: 244978 - protein, 13 aa, Homo sapiens
  CDR3 for beta chain variable domain of TCR clone 122489 (TRBV28, TRBJ2-7)
CASKAGGVYEQYF

SEQ ID NO: 244979 - protein, 16 aa, Homo sapiens
  CDR3 for alpha chain variable domain of TCR clone 122490 (TRAV26-2, TRAJ57)
CILRDVGSGGSEKPVF

SEQ ID NO: 244980 - protein, 13 aa, Homo sapiens
  CDR3 for beta chain variable domain of TCR clone 122490 (TRBV18, TRBJ2-3)
CASSPGVTDTQYF

SEQ ID NO: 244981 - protein, 12 aa, Homo sapiens
  CDR3 for alpha chain variable domain of TCR clone 122491 (TRAV12-2, TRAJ42)
CAVGGSQGNLIF

SEQ ID NO: 244982 - protein, 14 aa, Homo sapiens
  CDR3 for beta chain variable domain of TCR clone 122491 (TRBV19, TRBJ2-7)
CASSIFAGTYEQYF

SEQ ID NO: 244983 - protein, 14 aa, Homo sapiens
  CDR3 for alpha chain variable domain of TCR clone 122492 (TRAV1-2, TRAJ16)
CAVNRFSDGQKLLF

SEQ ID NO: 244984 - protein, 14 aa, Homo sapiens
  CDR3 for beta chain variable domain of TCR clone 122492 (TRBV13, TRBJ2-5)
CASSLGRRQETQYF

SEQ ID NO: 244985 - protein, 13 aa, Homo sapiens
  CDR3 for alpha chain variable domain of TCR clone 122493 (TRAV21, TRAJ32)
CAVSGGATNKLIF

SEQ ID NO: 244986 - protein, 11 aa, Homo sapiens
  CDR3 for beta chain variable domain of TCR clone 122493 (TRBV11-2, TRBJ2-2)
CASSLPGELFF

SEQ ID NO: 244987 - protein, 16 aa, Homo sapiens
  CDR3 for alpha chain variable domain of TCR clone 122494 (TRAV8-3, TRAJ13)
CAVGAYPSAGYQKVTF

SEQ ID NO: 244988 - protein, 15 aa, Homo sapiens
  CDR3 for beta chain variable domain of TCR clone 122494 (TRBV19, TRBJ1-5)
CASSIVWADNQPQHF

SEQ ID NO: 244989 - protein, 12 aa, Homo sapiens
  CDR3 for alpha chain variable domain of TCR clone 122495 (TRAV3, TRAJ26)
CAVRDYGQNFVF

SEQ ID NO: 244990 - protein, 15 aa, Homo sapiens
  CDR3 for beta chain variable domain of TCR clone 122495 (TRBV7-3, TRBJ2-1)
CASSLGQGPFGEQFF

SEQ ID NO: 244991 - protein, 16 aa, Homo sapiens
  CDR3 for alpha chain variable domain of TCR clone 122496 (TRAV12-2, TRAJ40)
CAVIRGGTSGTYKYIF

SEQ ID NO: 244992 - protein, 14 aa, Homo sapiens
  CDR3 for beta chain variable domain of TCR clone 122496 (TRBV20-1, TRBJ2-5)
RSARDGRAGETQYF

SEQ ID NO: 244993 - protein, 16 aa, Homo sapiens
  CDR3 for alpha chain variable domain of TCR clone 122497 (TRAV21, TRAJ37)
CAVRTAGSSNTGKLIF

SEQ ID NO: 244994 - protein, 14 aa, Homo sapiens
  CDR3 for beta chain variable domain of TCR clone 122497 (TRBV19, TRBJ2-1)
CARGARSFQWEQFF

SEQ ID NO: 244995 - protein, 17 aa, Homo sapiens
  CDR3 for alpha chain variable domain of TCR clone 122498 (TRAV3, TRAJ6)
CAVRDGPRAGGSYIPTF

SEQ ID NO: 244996 - protein, 16 aa, Homo sapiens
  CDR3 for beta chain variable domain of TCR clone 122498 (TRBV7-9, TRBJ1-2)
CASSPGGGAINYGYTF

SEQ ID NO: 244997 - protein, 18 aa, Homo sapiens
  CDR3 for alpha chain variable domain of TCR clone 122499 (TRAV12-1, TRAJ52)
CVVKLITAGGTSYGKLTF

SEQ ID NO: 244998 - protein, 16 aa, Homo sapiens
  CDR3 for beta chain variable domain of TCR clone 122499 (TRBV7-6, TRBJ2-7)
CASSGGTGALSYEQYF

SEQ ID NO: 244999 - protein, 13 aa, Homo sapiens
  CDR3 for alpha chain variable domain of TCR clone 122500 (TRAV8-3, TRAJ48)
CAVVTFGNEKLTF

SEQ ID NO: 245000 - protein, 15 aa, Homo sapiens
  CDR3 for beta chain variable domain of TCR clone 122500 (TRBV11-2, TRBJ2-1)
CASSSPSTRYNEQFF

SEQ ID NO: 245001 - protein, 13 aa, Homo sapiens
  CDR3 for alpha chain variable domain of TCR clone 122501 (TRAV8-3, TRAJ28)
CAVGAVGSYQLTF

SEQ ID NO: 245002 - protein, 14 aa, Homo sapiens
  CDR3 for beta chain variable domain of TCR clone 122501 (TRBV7-2, TRBJ2-7)
CASRSQGAAYEQYY

SEQ ID NO: 245003 - protein, 11 aa, Homo sapiens
  CDR3 for alpha chain variable domain of TCR clone 122502 (TRAV12-1, TRAJ30)
CVVNGQDKIIF

SEQ ID NO: 245004 - protein, 14 aa, Homo sapiens
  CDR3 for beta chain variable domain of TCR clone 122502 (TRBV4-2, TRBJ2-1)
CASGLDRAYNEQFF

SEQ ID NO: 245005 - protein, 13 aa, Homo sapiens
  CDR3 for alpha chain variable domain of TCR clone 122503 (TRAV21, TRAJ44)
CAAHTGTASKLTF

SEQ ID NO: 245006 - protein, 18 aa, Homo sapiens
  CDR3 for beta chain variable domain of TCR clone 122503 (TRBV25-1, TRBJ1-2)
CASSGLQNGQGLIFGYAF

SEQ ID NO: 245007 - protein, 14 aa, Homo sapiens
  CDR3 for alpha chain variable domain of TCR clone 122504 (TRAV17, TRAJ22)
CATSPSGSERQLTF

SEQ ID NO: 245008 - protein, 14 aa, Homo sapiens
  CDR3 for beta chain variable domain of TCR clone 122504 (TRBV4-1, TRBJ2-5)
RQQPWDLYQETQYF

SEQ ID NO: 245009 - protein, 17 aa, Homo sapiens
  CDR3 for alpha chain variable domain of TCR clone 122505 (TRAV4, TRAJ13)
CIVGVQGSSGGYQKVNF

SEQ ID NO: 245010 - protein, 18 aa, Homo sapiens
  CDR3 for beta chain variable domain of TCR clone 122505 (TRBV15, TRBJ2-3)
CATSRDGARSWDTDTQYF

SEQ ID NO: 245011 - protein, 13 aa, Homo sapiens
  CDR3 for alpha chain variable domain of TCR clone 122506 (TRAV1-1, TRAJ23)
CAVVANQVGKLIF

SEQ ID NO: 245012 - protein, 16 aa, Homo sapiens
  CDR3 for beta chain variable domain of TCR clone 122506 (TRBV5-5, TRBJ1-2)
CASSPTWGRGLYGYTF

SEQ ID NO: 245013 - protein, 16 aa, Homo sapiens
  CDR3 for alpha chain variable domain of TCR clone 122507 (TRAV1-2, TRAJ10)
CAVRGVLTGGGNKLTF

SEQ ID NO: 245014 - protein, 11 aa, Homo sapiens
  CDR3 for beta chain variable domain of TCR clone 122507 (TRBV11-2, TRBJ1-1)
CASSINTEAFF

SEQ ID NO: 245015 - protein, 11 aa, Homo sapiens
  CDR3 for alpha chain variable domain of TCR clone 122508 (TRAV1-1, TRAJ20)
CAVFNDYKLSF

SEQ ID NO: 245016 - protein, 16 aa, Homo sapiens
  CDR3 for beta chain variable domain of TCR clone 122508 (TRBV29-1, TRBJ2-2)
CSVEKTSEGDTGELFF

SEQ ID NO: 245017 - protein, 14 aa, Homo sapiens
  CDR3 for alpha chain variable domain of TCR clone 122509 (TRAV17, TRAJ16)
CATADFSVGQKLLF

SEQ ID NO: 245018 - protein, 12 aa, Homo sapiens
  CDR3 for beta chain variable domain of TCR clone 122509 (TRBV24-1, TRBJ1-1)
CATLYPDTEAFF

SEQ ID NO: 245019 - protein, 17 aa, Homo sapiens
  CDR3 for alpha chain variable domain of TCR clone 122510 (TRAV13-1, TRAJ52)
CAAGRNAGGTSYGKLTF

SEQ ID NO: 245020 - protein, 14 aa, Homo sapiens
  CDR3 for beta chain variable domain of TCR clone 122510 (TRBV7-6, TRBJ2-3)
CASSLGTVTDTQYF

SEQ ID NO: 245021 - protein, 14 aa, Homo sapiens
  CDR3 for alpha chain variable domain of TCR clone 122511 (TRAV12-1, TRAJ39)
CVVNFNNAGNMLTF

SEQ ID NO: 245022 - protein, 14 aa, Homo sapiens
  CDR3 for beta chain variable domain of TCR clone 122511 (TRBV4-2, TRBJ2-1)
CASGLDRAYNEQFF

SEQ ID NO: 245023 - protein, 14 aa, Homo sapiens
  CDR3 for alpha chain variable domain of TCR clone 122512 (TRAV38-2/DV8, TRAJ57)
CARNTQGGSEKLVF

SEQ ID NO: 245024 - protein, 13 aa, Homo sapiens
  CDR3 for beta chain variable domain of TCR clone 122512 (TRBV7-8, TRBJ2-7)
CASSLTGGREQYF

SEQ ID NO: 245025 - protein, 12 aa, Homo sapiens
  CDR3 for alpha chain variable domain of TCR clone 122513 (TRAV21, TRAJ33)
CSVQDSDYQLIW

SEQ ID NO: 245026 - protein, 14 aa, Homo sapiens
  CDR3 for beta chain variable domain of TCR clone 122513 (TRBV28, TRBJ2-1)
CASSPGEGGNEQFF

SEQ ID NO: 245027 - protein, 13 aa, Homo sapiens
  CDR3 for alpha chain variable domain of TCR clone 122514 (TRAV21, TRAJ34)
CAVGEGDTDKLIF

SEQ ID NO: 245028 - protein, 17 aa, Homo sapiens
  CDR3 for beta chain variable domain of TCR clone 122514 (TRBV20-1, TRBJ1-5)
CSARDPSAQGFNQPQHF

SEQ ID NO: 245029 - protein, 16 aa, Homo sapiens
  CDR3 for alpha chain variable domain of TCR clone 122515 (TRAV30, TRAJ24)
CGTEIVDADSWGEFQF

SEQ ID NO: 245030 - protein, 19 aa, Homo sapiens
  CDR3 for beta chain variable domain of TCR clone 122515 (TRBV25-1, TRBJ2-2)
CAILVYRVDRGRKTGELFF

SEQ ID NO: 245031 - protein, 12 aa, Homo sapiens
  CDR3 for alpha chain variable domain of TCR clone 122516 (TRAV27, TRAJ36)
ASTPAGANTLFF

SEQ ID NO: 245032 - protein, 13 aa, Homo sapiens
  CDR3 for beta chain variable domain of TCR clone 122516 (TRBV7-9, TRBJ2-3)
CASSPGSTDTQYF

SEQ ID NO: 245033 - protein, 16 aa, Homo sapiens
  CDR3 for alpha chain variable domain of TCR clone 122517 (TRAV2, TRAJ4)
CALEDRFSGGYNKLIF

SEQ ID NO: 245034 - protein, 13 aa, Homo sapiens
  CDR3 for beta chain variable domain of TCR clone 122517 (TRBV7-7, TRBJ2-5)
CASSRSGQETQYF

SEQ ID NO: 245035 - protein, 13 aa, Homo sapiens
  CDR3 for alpha chain variable domain of TCR clone 122518 (TRAV13-1, TRAJ6)
CAASRGGGYIPTF

SEQ ID NO: 245036 - protein, 15 aa, Homo sapiens
  CDR3 for beta chain variable domain of TCR clone 122518 (TRBV25-1, TRBJ2-5)
CASSDTGTHQETQYF

SEQ ID NO: 245037 - protein, 15 aa, Homo sapiens
  CDR3 for alpha chain variable domain of TCR clone 122519 (TRAV3, TRAJ29)
CAVRDINSGNTPLVF

SEQ ID NO: 245038 - protein, 16 aa, Homo sapiens
  CDR3 for beta chain variable domain of TCR clone 122519 (TRBV4-1, TRBJ2-5)
CASSQTFDGDQETQYF

SEQ ID NO: 245039 - protein, 10 aa, Homo sapiens
  CDR3 for alpha chain variable domain of TCR clone 122520 (TRAV23/DV6, TRAJ43)
CAASIPALLL

SEQ ID NO: 245040 - protein, 16 aa, Homo sapiens
  CDR3 for beta chain variable domain of TCR clone 122520 (TRBV7-3, TRBJ2-2)
CASSLKRGTLSGELFF

SEQ ID NO: 245041 - protein, 12 aa, Homo sapiens
  CDR3 for alpha chain variable domain of TCR clone 122521 (TRAV12-3, TRAJ20)
CAMVRGDYKLSF

SEQ ID NO: 245042 - protein, 16 aa, Homo sapiens
  CDR3 for beta chain variable domain of TCR clone 122521 (TRBV24-1, TRBJ2-3)
CATSDPGTGATDTQYF

SEQ ID NO: 245043 - protein, 13 aa, Homo sapiens
  CDR3 for alpha chain variable domain of TCR clone 122522 (TRAV2, TRAJ15)
CAVASQAGTALIF

SEQ ID NO: 245044 - protein, 13 aa, Homo sapiens
  CDR3 for beta chain variable domain of TCR clone 122522 (TRBV24-1, TRBJ2-2)
CATSDWSTGELFF

SEQ ID NO: 245045 - protein, 19 aa, Homo sapiens
  CDR3 for alpha chain variable domain of TCR clone 122523 (TRAV29/DV5, TRAJ49)
CSVLLCSKLTVDTGNQFYL

SEQ ID NO: 245046 - protein, 17 aa, Homo sapiens
  CDR3 for beta chain variable domain of TCR clone 122523 (TRBV13, TRBJ2-3)
CASSLSRVAGGRNTQYF

SEQ ID NO: 245047 - protein, 14 aa, Homo sapiens
  CDR3 for alpha chain variable domain of TCR clone 122524 (TRAV30, TRAJ33)
CGTVAPRSNYQLIW

SEQ ID NO: 245048 - protein, 13 aa, Homo sapiens
  CDR3 for beta chain variable domain of TCR clone 122524 (TRBV27, TRBJ2-7)
CASSFSQGYEQYF

SEQ ID NO: 245049 - protein, 11 aa, Homo sapiens
  CDR3 for alpha chain variable domain of TCR clone 122525 (TRAV35, TRAJ22)
CAGPGVGQLTF

SEQ ID NO: 245050 - protein, 14 aa, Homo sapiens
  CDR3 for beta chain variable domain of TCR clone 122525 (TRBV7-2, TRBJ1-1)
CASSFLTGTTEAFF

SEQ ID NO: 245051 - protein, 14 aa, Homo sapiens
  CDR3 for alpha chain variable domain of TCR clone 122526 (TRAV23/DV6, TRAJ4)
CAANLSGGYNRLIF

SEQ ID NO: 245052 - protein, 17 aa, Homo sapiens
  CDR3 for beta chain variable domain of TCR clone 122526 (TRBV4-1, TRBJ1-3)
CASSPQRGIRFGNTIYF

SEQ ID NO: 245053 - protein, 14 aa, Homo sapiens
  CDR3 for alpha chain variable domain of TCR clone 122527 (TRAV17, TRAJ35)
CATDRPGFGTVLHC

SEQ ID NO: 245054 - protein, 15 aa, Homo sapiens
  CDR3 for beta chain variable domain of TCR clone 122527 (TRBV28, TRBJ2-5)
CASSSGRVIQETQYF

SEQ ID NO: 245055 - protein, 14 aa, Homo sapiens
  CDR3 for alpha chain variable domain of TCR clone 122528 (TRAV12-2, TRAJ44)
CAVNPAGTASKLTF

SEQ ID NO: 245056 - protein, 13 aa, Homo sapiens
  CDR3 for beta chain variable domain of TCR clone 122528 (TRBV19, TRBJ1-2)
CASSVPGQDGYTF

SEQ ID NO: 245057 - protein, 15 aa, Homo sapiens
  CDR3 for alpha chain variable domain of TCR clone 122529 (TRAV25, TRAJ52)
CAGRPGGTSYGKLTF

SEQ ID NO: 245058 - protein, 17 aa, Homo sapiens
  CDR3 for beta chain variable domain of TCR clone 122529 (TRBV7-8, TRBJ2-6)
CATSAGTGGAGANVLTF

SEQ ID NO: 245059 - protein, 11 aa, Homo sapiens
  CDR3 for alpha chain variable domain of TCR clone 122530 (TRAV12-3, TRAJ27)
CAMANAGKSTF

SEQ ID NO: 245060 - protein, 13 aa, Homo sapiens
  CDR3 for beta chain variable domain of TCR clone 122530 (TRBV20-1, TRBJ1-1)
CSARVGGNTEAIF

SEQ ID NO: 245061 - protein, 14 aa, Homo sapiens
  CDR3 for alpha chain variable domain of TCR clone 122531 (TRAV23/DV6, TRAJ6)
CAASRSGGSYIPTF

SEQ ID NO: 245062 - protein, 17 aa, Homo sapiens
  CDR3 for beta chain variable domain of TCR clone 122531 (TRBV20-1, TRBJ2-1)
CSASASGLSGSYNEQFF

SEQ ID NO: 245063 - protein, 14 aa, Homo sapiens
  CDR3 for alpha chain variable domain of TCR clone 122532 (TRAV29/DV5, TRAJ36)
CAARRKTGANNLFF

SEQ ID NO: 245064 - protein, 11 aa, Homo sapiens
  CDR3 for beta chain variable domain of TCR clone 122532 (TRBV12-4, TRBJ2-3)
CASTATDTQYF

SEQ ID NO: 245065 - protein, 13 aa, Homo sapiens
  CDR3 for alpha chain variable domain of TCR clone 122533 (TRAV20, TRAJ31)
CAVQAWNNARLMF

SEQ ID NO: 245066 - protein, 15 aa, Homo sapiens
  CDR3 for beta chain variable domain of TCR clone 122533 (TRBV6-3, TRBJ2-7)
CASSSPGTVFYEQYF

SEQ ID NO: 245067 - protein, 14 aa, Homo sapiens
  CDR3 for alpha chain variable domain of TCR clone 122534 (TRAV12-1, TRAJ10)
CVAILTGGGNKLTF

SEQ ID NO: 245068 - protein, 15 aa, Homo sapiens
  CDR3 for beta chain variable domain of TCR clone 122534 (TRBV20-1, TRBJ2-7)
CSARGFRRQTYEQYF

SEQ ID NO: 245069 - protein, 12 aa, Homo sapiens
  CDR3 for alpha chain variable domain of TCR clone 122535 (TRAV27, TRAJ9)
CAGESGGFKTIF

SEQ ID NO: 245070 - protein, 18 aa, Homo sapiens
  CDR3 for beta chain variable domain of TCR clone 122535 (TRBV10-2, TRBJ2-2)
CISAPAVHRQADAGELFF

SEQ ID NO: 245071 - protein, 14 aa, Homo sapiens
  CDR3 for alpha chain variable domain of TCR clone 122536 (TRAV20, TRAJ56)
CAVQFGGANSKLTL

SEQ ID NO: 245072 - protein, 14 aa, Homo sapiens
  CDR3 for beta chain variable domain of TCR clone 122536 (TRBV7-2, TRBJ1-1)
CASSFLTGTTEAFF

SEQ ID NO: 245073 - protein, 13 aa, Homo sapiens
  CDR3 for alpha chain variable domain of TCR clone 122537 (TRAV2, TRAJ40)
CAVVTSGTYKYIF

SEQ ID NO: 245074 - protein, 14 aa, Homo sapiens
  CDR3 for beta chain variable domain of TCR clone 122537 (TRBV7-2, TRBJ1-3)
CASSLGTAGNTIYF

SEQ ID NO: 245075 - protein, 10 aa, Homo sapiens
  CDR3 for alpha chain variable domain of TCR clone 122538 (TRAV25, TRAJ20)
CVVNDYKLSF

SEQ ID NO: 245076 - protein, 13 aa, Homo sapiens
  CDR3 for beta chain variable domain of TCR clone 122538 (TRBV6-3, TRBJ2-7)
CASSFSGGYEQYF

SEQ ID NO: 245077 - protein, 12 aa, Homo sapiens
  CDR3 for alpha chain variable domain of TCR clone 122539 (TRAV36/DV7, TRAJ54)
CAVVREAQKLVF

SEQ ID NO: 245078 - protein, 14 aa, Homo sapiens
  CDR3 for beta chain variable domain of TCR clone 122539 (TRBV7-3, TRBJ1-1)
CASSLKGGNTEAFF

SEQ ID NO: 245079 - protein, 13 aa, Homo sapiens
  CDR3 for alpha chain variable domain of TCR clone 122540 (TRAV17, TRAJ9)
FATDYTGGFKTIF

SEQ ID NO: 245080 - protein, 16 aa, Homo sapiens
  CDR3 for beta chain variable domain of TCR clone 122540 (TRBV7-7, TRBJ2-1)
CASSLASGTSYNEQFF

SEQ ID NO: 245081 - protein, 14 aa, Homo sapiens
  CDR3 for alpha chain variable domain of TCR clone 122541 (TRAV27, TRAJ15)
CAGFDNQAGTALIF

SEQ ID NO: 245082 - protein, 11 aa, Homo sapiens
  CDR3 for beta chain variable domain of TCR clone 122541 (TRBV29-1, TRBJ1-1)
CSVEVGTQTFF

SEQ ID NO: 245083 - protein, 15 aa, Homo sapiens
  CDR3 for alpha chain variable domain of TCR clone 122542 (TRAV3, TRAJ17)
CAVSSKEAAGNKLTF

SEQ ID NO: 245084 - protein, 12 aa, Homo sapiens
  CDR3 for beta chain variable domain of TCR clone 122542 (TRBV7-9, TRBJ1-6)
CASSLMTSPLHF

SEQ ID NO: 245085 - protein, 15 aa, Homo sapiens
  CDR3 for alpha chain variable domain of TCR clone 122543 (TRAV20, TRAJ4)
CAVQVFSGGYNKLIF

SEQ ID NO: 245086 - protein, 15 aa, Homo sapiens
  CDR3 for beta chain variable domain of TCR clone 122543 (TRBV3-1, TRBJ1-2)
CASSPTRLPEGGYTF

SEQ ID NO: 245087 - protein, 20 aa, Homo sapiens
  CDR3 for alpha chain variable domain of TCR clone 122544 (TRAV21, TRAJ4)
AAPQPGDSATLAGGYNKLIF

SEQ ID NO: 245088 - protein, 19 aa, Homo sapiens
  CDR3 for beta chain variable domain of TCR clone 122544 (TRBV18, TRBJ1-3)
CASSPLSRTGMSSGNTIYF

SEQ ID NO: 245089 - protein, 13 aa, Homo sapiens
  CDR3 for alpha chain variable domain of TCR clone 122545 (TRAV12-3, TRAJ43)
CAMIRPNNNDMRF

SEQ ID NO: 245090 - protein, 12 aa, Homo sapiens
  CDR3 for beta chain variable domain of TCR clone 122545 (TRBV11-2, TRBJ2-2)
CASSLPTGELFF

SEQ ID NO: 245091 - protein, 11 aa, Homo sapiens
  CDR3 for alpha chain variable domain of TCR clone 122546 (TRAV8-4, TRAJ20)
CAVTDVLTTTS

SEQ ID NO: 245092 - protein, 16 aa, Homo sapiens
  CDR3 for beta chain variable domain of TCR clone 122546 (TRBV6-1, TRBJ1-2)
CASSGAWQGRSHGYTF

SEQ ID NO: 245093 - protein, 15 aa, Homo sapiens
  CDR3 for alpha chain variable domain of TCR clone 122547 (TRAV27, TRAJ38)
CAGRFNAGNKRKLIW

SEQ ID NO: 245094 - protein, 13 aa, Homo sapiens
  CDR3 for beta chain variable domain of TCR clone 122547 (TRBV12-5, TRBJ2-3)
CASQNRGTDTQYF

SEQ ID NO: 245095 - protein, 14 aa, Homo sapiens
  CDR3 for alpha chain variable domain of TCR clone 122548 (TRAV12-1, TRAJ24)
CVVRSTDSWGKFQF

SEQ ID NO: 245096 - protein, 13 aa, Homo sapiens
  CDR3 for beta chain variable domain of TCR clone 122548 (TRBV2, TRBJ2-3)
CASILAGGQAQYF

SEQ ID NO: 245097 - protein, 14 aa, Homo sapiens
  CDR3 for alpha chain variable domain of TCR clone 122549 (TRAV4, TRAJ30)
CLVGDMNGDDKIIF

SEQ ID NO: 245098 - protein, 16 aa, Homo sapiens
  CDR3 for beta chain variable domain of TCR clone 122549 (TRBV20-1, TRBJ1-4)
CSAPGQGLLTNEKLFF

SEQ ID NO: 245099 - protein, 13 aa, Homo sapiens
  CDR3 for alpha chain variable domain of TCR clone 122550 (TRAV27, TRAJ41)
CAGEGNSGYALNF

SEQ ID NO: 245100 - protein, 13 aa, Homo sapiens
  CDR3 for beta chain variable domain of TCR clone 122550 (TRBV19, TRBJ2-7)
CASRKAGGSEQYF

SEQ ID NO: 245101 - protein, 15 aa, Homo sapiens
  CDR3 for alpha chain variable domain of TCR clone 122551 (TRAV3, TRAJ22)
CAVRDRGGSARPLTF

SEQ ID NO: 245102 - protein, 14 aa, Homo sapiens
  CDR3 for beta chain variable domain of TCR clone 122551 (TRBV19, TRBJ2-1)
CASSRLASINEQFF

SEQ ID NO: 245103 - protein, 19 aa, Homo sapiens
  CDR3 for alpha chain variable domain of TCR clone 122552 (TRAV3, TRAJ37)
CAVRDIVGGYPSNPGKLIF

SEQ ID NO: 245104 - protein, 15 aa, Homo sapiens
  CDR3 for beta chain variable domain of TCR clone 122552 (TRBV28, TRBJ2-7)
CASSQLGAGGHEQYF

SEQ ID NO: 245105 - protein, 11 aa, Homo sapiens
  CDR3 for alpha chain variable domain of TCR clone 122553 (TRAV1-1, TRAJ23)
FAVRQGGKLIF

SEQ ID NO: 245106 - protein, 20 aa, Homo sapiens
  CDR3 for beta chain variable domain of TCR clone 122553 (TRBV7-8, TRBJ2-2)
CASSHLFPGPTVHITGELFF

SEQ ID NO: 245107 - protein, 14 aa, Homo sapiens
  CDR3 for alpha chain variable domain of TCR clone 122554 (TRAV3, TRAJ20)
CAVPPAPNDSKLSF

SEQ ID NO: 245108 - protein, 13 aa, Homo sapiens
  CDR3 for beta chain variable domain of TCR clone 122554 (TRBV15, TRBJ1-2)
CATSRVDARSPVF

SEQ ID NO: 245109 - protein, 12 aa, Homo sapiens
  CDR3 for alpha chain variable domain of TCR clone 122555 (TRAV2, TRAJ10)
CASTGGGSKLTF

SEQ ID NO: 245110 - protein, 13 aa, Homo sapiens
  CDR3 for beta chain variable domain of TCR clone 122555 (TRBV19, TRBJ1-5)
CASSMRGYQPQHF

SEQ ID NO: 245111 - protein, 15 aa, Homo sapiens
  CDR3 for alpha chain variable domain of TCR clone 122556 (TRAV14/DV4, TRAJ12)
CAMREARDSSYKLIF

SEQ ID NO: 245112 - protein, 16 aa, Homo sapiens
  CDR3 for beta chain variable domain of TCR clone 122556 (TRBV11-2, TRBJ1-2)
CASSLDTGGADYGYTF

SEQ ID NO: 245113 - protein, 12 aa, Homo sapiens
  CDR3 for alpha chain variable domain of TCR clone 122557 (TRAV13-1, TRAJ42)
VNYGGSQGNLIF

SEQ ID NO: 245114 - protein, 15 aa, Homo sapiens
  CDR3 for beta chain variable domain of TCR clone 122557 (TRBV20-1, TRBJ2-1)
CSASSAGSFYNEQFF

SEQ ID NO: 245115 - protein, 11 aa, Homo sapiens
  CDR3 for alpha chain variable domain of TCR clone 122558 (TRAV35, TRAJ34)
CWARNTDKLIF

SEQ ID NO: 245116 - protein, 14 aa, Homo sapiens
  CDR3 for beta chain variable domain of TCR clone 122558 (TRBV5-1, TRBJ2-7)
CASSRGESLYEHYF

SEQ ID NO: 245117 - protein, 14 aa, Homo sapiens
  CDR3 for alpha chain variable domain of TCR clone 122559 (TRAV17, TRAJ34)
CATDSLEGTDKLIF

SEQ ID NO: 245118 - protein, 14 aa, Homo sapiens
  CDR3 for beta chain variable domain of TCR clone 122559 (TRBV7-2, TRBJ2-7)
CASSPKTSFYEQYF

SEQ ID NO: 245119 - protein, 17 aa, Homo sapiens
  CDR3 for alpha chain variable domain of TCR clone 122560 (TRAV27, TRAJ26)
CAGARAPLYNYGQNFVF

SEQ ID NO: 245120 - protein, 15 aa, Homo sapiens
  CDR3 for beta chain variable domain of TCR clone 122560 (TRBV11-2, TRBJ2-5)
CASSPRSGGLETQYF

SEQ ID NO: 245121 - protein, 15 aa, Homo sapiens
  CDR3 for alpha chain variable domain of TCR clone 122561 (TRAV20, TRAJ24)
CAVQAAPDSRGKFQF

SEQ ID NO: 245122 - protein, 14 aa, Homo sapiens
  CDR3 for beta chain variable domain of TCR clone 122561 (TRBV20-1, TRBJ1-1)
CSARDRGQGSEAFF

SEQ ID NO: 245123 - protein, 13 aa, Homo sapiens
  CDR3 for alpha chain variable domain of TCR clone 122562 (TRAV21, TRAJ20)
CAVSRLGDYKPSF

SEQ ID NO: 245124 - protein, 13 aa, Homo sapiens
  CDR3 for beta chain variable domain of TCR clone 122562 (TRBV7-3, TRBJ1-1)
CASSPAGGLEAFF

SEQ ID NO: 245125 - protein, 14 aa, Homo sapiens
  CDR3 for alpha chain variable domain of TCR clone 122563 (TRAV38-1, TRAJ35)
CAFMIESFGNVLHC

SEQ ID NO: 245126 - protein, 20 aa, Homo sapiens
  CDR3 for beta chain variable domain of TCR clone 122563 (TRBV28, TRBJ2-1)
CASTPIGRSPGLAGGNEQFF

SEQ ID NO: 245127 - protein, 14 aa, Homo sapiens
  CDR3 for alpha chain variable domain of TCR clone 122564 (TRAV2, TRAJ12)
CAVDAMDSSYRLFF

SEQ ID NO: 245128 - protein, 13 aa, Homo sapiens
  CDR3 for beta chain variable domain of TCR clone 122564 (TRBV19, TRBJ2-1)
CASKVGAGGEQFF

SEQ ID NO: 245129 - protein, 14 aa, Homo sapiens
  CDR3 for alpha chain variable domain of TCR clone 122565 (TRAV12-2, TRAJ44)
CAVNKAGTASKLTF

SEQ ID NO: 245130 - protein, 15 aa, Homo sapiens
  CDR3 for beta chain variable domain of TCR clone 122565 (TRBV6-3, TRBJ2-7)
CASSSPGTVFYEQYF

SEQ ID NO: 245131 - protein, 13 aa, Homo sapiens
  CDR3 for alpha chain variable domain of TCR clone 122566 (TRAV26-1, TRAJ48)
CIVRVVGDEKLTF

SEQ ID NO: 245132 - protein, 16 aa, Homo sapiens
  CDR3 for beta chain variable domain of TCR clone 122566 (TRBV5-1, TRBJ2-2)
CASSSRTGGRTGELLF

SEQ ID NO: 245133 - protein, 15 aa, Homo sapiens
  CDR3 for alpha chain variable domain of TCR clone 122567 (TRAV21, TRAJ13)
CAVRPTSGGYQEVTF

SEQ ID NO: 245134 - protein, 15 aa, Homo sapiens
  CDR3 for beta chain variable domain of TCR clone 122567 (TRBV28, TRBJ2-7)
CASSPGGRGFYEQYF

SEQ ID NO: 245135 - protein, 12 aa, Homo sapiens
  CDR3 for alpha chain variable domain of TCR clone 122568 (TRAV12-3, TRAJ17)
CAMTLTGNQLTF

SEQ ID NO: 245136 - protein, 13 aa, Homo sapiens
  CDR3 for beta chain variable domain of TCR clone 122568 (TRBV7-3, TRBJ1-1)
CASSQDWGAEAFF

SEQ ID NO: 245137 - protein, 12 aa, Homo sapiens
  CDR3 for alpha chain variable domain of TCR clone 122569 (TRAV13-1, TRAJ27)
CAAHTNAGKSTF

SEQ ID NO: 245138 - protein, 13 aa, Homo sapiens
  CDR3 for beta chain variable domain of TCR clone 122569 (TRBV7-9, TRBJ1-2)
CASSLKQNYGYTF

SEQ ID NO: 245139 - protein, 13 aa, Homo sapiens
  CDR3 for alpha chain variable domain of TCR clone 122570 (TRAV21, TRAJ15)
CTVANQAGTALIF

SEQ ID NO: 245140 - protein, 14 aa, Homo sapiens
  CDR3 for beta chain variable domain of TCR clone 122570 (TRBV27, TRBJ2-2)
CASSLGAATGELFF

SEQ ID NO: 245141 - protein, 15 aa, Homo sapiens
  CDR3 for alpha chain variable domain of TCR clone 122571 (TRAV3, TRAJ20)
CAVRDIKLSDYKLSF

SEQ ID NO: 245142 - protein, 14 aa, Homo sapiens
  CDR3 for beta chain variable domain of TCR clone 122571 (TRBV7-2, TRBJ1-1)
CASSFLTGTTEAFF

SEQ ID NO: 245143 - protein, 11 aa, Homo sapiens
  CDR3 for alpha chain variable domain of TCR clone 122572 (TRAV2, TRAJ33)
CAVESIYQLIW

SEQ ID NO: 245144 - protein, 15 aa, Homo sapiens
  CDR3 for beta chain variable domain of TCR clone 122572 (TRBV19, TRBJ1-1)
CASTSGQIQNTEAFF

SEQ ID NO: 245145 - protein, 12 aa, Homo sapiens
  CDR3 for alpha chain variable domain of TCR clone 122573 (TRAV13-2, TRAJ8)
CAPWLGFQKLVF

SEQ ID NO: 245146 - protein, 15 aa, Homo sapiens
  CDR3 for beta chain variable domain of TCR clone 122573 (TRBV6-3, TRBJ2-7)
CASSSPGTVFYEQYF

SEQ ID NO: 245147 - protein, 12 aa, Homo sapiens
  CDR3 for alpha chain variable domain of TCR clone 122574 (TRAV35, TRAJ39)
LAPNNAGNMLTC

SEQ ID NO: 245148 - protein, 16 aa, Homo sapiens
  CDR3 for beta chain variable domain of TCR clone 122574 (TRBV2, TRBJ2-3)
CASSTSVEGVTDTQYF

SEQ ID NO: 245149 - protein, 14 aa, Homo sapiens
  CDR3 for alpha chain variable domain of TCR clone 122575 (TRAV1-2, TRAJ16)
CAVNRLSDGQKLLF

SEQ ID NO: 245150 - protein, 16 aa, Homo sapiens
  CDR3 for beta chain variable domain of TCR clone 122575 (TRBV20-1, TRBJ1-2)
CSASMGQGVANYGYTF

SEQ ID NO: 245151 - protein, 13 aa, Homo sapiens
  CDR3 for alpha chain variable domain of TCR clone 122576 (TRAV3, TRAJ21)
CAVREPYFNKFYF

SEQ ID NO: 245152 - protein, 14 aa, Homo sapiens
  CDR3 for beta chain variable domain of TCR clone 122576 (TRBV4-1, TRBJ2-2)
CASSQAVNTGELFF

SEQ ID NO: 245153 - protein, 14 aa, Homo sapiens
  CDR3 for alpha chain variable domain of TCR clone 122577 (TRAV17, TRAJ57)
CSTDPQGGSEKLVF

SEQ ID NO: 245154 - protein, 18 aa, Homo sapiens
  CDR3 for beta chain variable domain of TCR clone 122577 (TRBV6-6, TRBJ1-3)
CASSYSKWDSISGNTIYF

SEQ ID NO: 245155 - protein, 17 aa, Homo sapiens
  CDR3 for alpha chain variable domain of TCR clone 122578 (TRAV17, TRAJ7)
CATLGRLAFGKGNQVVV

SEQ ID NO: 245156 - protein, 17 aa, Homo sapiens
  CDR3 for beta chain variable domain of TCR clone 122578 (TRBV11-2, TRBJ2-1)
CASSLYPPGVEYNEQFF

SEQ ID NO: 245157 - protein, 13 aa, Homo sapiens
  CDR3 for alpha chain variable domain of TCR clone 122579 (TRAV17, TRAJ32)
CAPDGGATNKLIF

SEQ ID NO: 245158 - protein, 13 aa, Homo sapiens
  CDR3 for beta chain variable domain of TCR clone 122579 (TRBV7-2, TRBJ2-7)
CASSSPSGSEQYF

SEQ ID NO: 245159 - protein, 13 aa, Homo sapiens
  CDR3 for alpha chain variable domain of TCR clone 122580 (TRAV21, TRAJ20)
CAVGLRVDYKLSF

SEQ ID NO: 245160 - protein, 14 aa, Homo sapiens
  CDR3 for beta chain variable domain of TCR clone 122580 (TRBV5-4, TRBJ1-1)
CASSLDSRRDEAFF

SEQ ID NO: 245161 - protein, 14 aa, Homo sapiens
  CDR3 for alpha chain variable domain of TCR clone 122581 (TRAV35, TRAJ38)
CAGSNAGNNRKLIW

SEQ ID NO: 245162 - protein, 14 aa, Homo sapiens
  CDR3 for beta chain variable domain of TCR clone 122581 (TRBV7-2, TRBJ2-7)
CASSLYPGRYEQYF

SEQ ID NO: 245163 - protein, 14 aa, Homo sapiens
  CDR3 for alpha chain variable domain of TCR clone 122582 (TRAV13-2, TRAJ22)
CADGTLGTARQLTF

SEQ ID NO: 245164 - protein, 16 aa, Homo sapiens
  CDR3 for beta chain variable domain of TCR clone 122582 (TRBV19, TRBJ2-1)
CASSSKGTRSYNEQFF

SEQ ID NO: 245165 - protein, 16 aa, Homo sapiens
  CDR3 for alpha chain variable domain of TCR clone 122583 (TRAV8-2, TRAJ45)
CVVSEGTGGGAAGLTF

SEQ ID NO: 245166 - protein, 15 aa, Homo sapiens
  CDR3 for beta chain variable domain of TCR clone 122583 (TRBV7-9, TRBJ2-5)
CASSLVAGGLETQYF

SEQ ID NO: 245167 - protein, 17 aa, Homo sapiens
  CDR3 for alpha chain variable domain of TCR clone 122584 (TRAV3, TRAJ6)
CVVRDGPRAGGSYIPTF

SEQ ID NO: 245168 - protein, 20 aa, Homo sapiens
  CDR3 for beta chain variable domain of TCR clone 122584 (TRBV28, TRBJ2-1)
CASTPIGRSPGLAGGNEQFF

SEQ ID NO: 245169 - protein, 11 aa, Homo sapiens
  CDR3 for alpha chain variable domain of TCR clone 122585 (TRAV3, TRAJ21)
CAVGNFNKFYF

SEQ ID NO: 245170 - protein, 13 aa, Homo sapiens
  CDR3 for beta chain variable domain of TCR clone 122585 (TRBV11-2, TRBJ2-1)
CASSLGLAGGRFF

SEQ ID NO: 245171 - protein, 14 aa, Homo sapiens
  CDR3 for alpha chain variable domain of TCR clone 122586 (TRAV17, TRAJ34)
CATDSLEGPDKLIF

SEQ ID NO: 245172 - protein, 13 aa, Homo sapiens
  CDR3 for beta chain variable domain of TCR clone 122586 (TRBV11-2, TRBJ2-7)
CASSGTRPYEQYF

SEQ ID NO: 245173 - protein, 17 aa, Homo sapiens
  CDR3 for alpha chain variable domain of TCR clone 122587 (TRAV3, TRAJ12)
CAVRDGGRMDSSYKLIF

SEQ ID NO: 245174 - protein, 13 aa, Homo sapiens
  CDR3 for beta chain variable domain of TCR clone 122587 (TRBV28, TRBJ2-7)
CASSPSGTYEQYF

SEQ ID NO: 245175 - protein, 14 aa, Homo sapiens
  CDR3 for alpha chain variable domain of TCR clone 122588 (TRAV1-2, TRAJ16)
CAVNRFSDGQKLLF

SEQ ID NO: 245176 - protein, 15 aa, Homo sapiens
  CDR3 for beta chain variable domain of TCR clone 122588 (TRBV12-4, TRBJ1-6)
CASSSPGRGNSPLHF

SEQ ID NO: 245177 - protein, 10 aa, Homo sapiens
  CDR3 for alpha chain variable domain of TCR clone 122589 (TRAV30, TRAJ48)
CGIGNEKLTF

SEQ ID NO: 245178 - protein, 16 aa, Homo sapiens
  CDR3 for beta chain variable domain of TCR clone 122589 (TRBV2, TRBJ2-1)
CASSVGGSLSYNEQFF

SEQ ID NO: 245179 - protein, 18 aa, Homo sapiens
  CDR3 for alpha chain variable domain of TCR clone 122590 (TRAV26-1, TRAJ23)
CIVRVGLEVWNQGGKLIF

SEQ ID NO: 245180 - protein, 16 aa, Homo sapiens
  CDR3 for beta chain variable domain of TCR clone 122590 (TRBV12-4, TRBJ2-5)
CASSFFVKGRQETQYF

SEQ ID NO: 245181 - protein, 12 aa, Homo sapiens
  CDR3 for alpha chain variable domain of TCR clone 122591 (TRAV12-1, TRAJ40)
CVVYSGTYKYIF

SEQ ID NO: 245182 - protein, 11 aa, Homo sapiens
  CDR3 for beta chain variable domain of TCR clone 122591 (TRBV19, TRBJ2-5)
CASSIKETQYF

SEQ ID NO: 245183 - protein, 17 aa, Homo sapiens
  CDR3 for alpha chain variable domain of TCR clone 122592 (TRAV3, TRAJ6)
CSVRDGPRAGGSYIPPF

SEQ ID NO: 245184 - protein, 14 aa, Homo sapiens
  CDR3 for beta chain variable domain of TCR clone 122592 (TRBV7-2, TRBJ2-7)
CASSPKTSFYEQYF

SEQ ID NO: 245185 - protein, 14 aa, Homo sapiens
  CDR3 for alpha chain variable domain of TCR clone 122593 (TRAV16, TRAJ44)
CALSTTGTASKLTF

SEQ ID NO: 245186 - protein, 14 aa, Homo sapiens
  CDR3 for beta chain variable domain of TCR clone 122593 (TRBV20-1, TRBJ2-7)
CSAVSREASYEQYF

SEQ ID NO: 245187 - protein, 12 aa, Homo sapiens
  CDR3 for alpha chain variable domain of TCR clone 122594 (TRAV12-2, TRAJ3)
CAVWSSASKIIS

SEQ ID NO: 245188 - protein, 12 aa, Homo sapiens
  CDR3 for beta chain variable domain of TCR clone 122594 (TRBV11-2, TRBJ2-1)
CASSPGNNEQFF

SEQ ID NO: 245189 - protein, 14 aa, Homo sapiens
  CDR3 for alpha chain variable domain of TCR clone 122595 (TRAV9-2, TRAJ39)
CALYIYNAGNMLTF

SEQ ID NO: 245190 - protein, 13 aa, Homo sapiens
  CDR3 for beta chain variable domain of TCR clone 122595 (TRBV7-9, TRBJ1-2)
CASSLNQNYGYTF

SEQ ID NO: 245191 - protein, 11 aa, Homo sapiens
  CDR3 for alpha chain variable domain of TCR clone 122596 (TRAV2, TRAJ13)
CASGGYQKVTF

SEQ ID NO: 245192 - protein, 16 aa, Homo sapiens
  CDR3 for beta chain variable domain of TCR clone 122596 (TRBV6-1, TRBJ2-5)
CASSETQDRGAETQYF

SEQ ID NO: 245193 - protein, 14 aa, Homo sapiens
  CDR3 for alpha chain variable domain of TCR clone 122597 (TRAV26-1, TRAJ38)
CIADNAGNIRKLIW

SEQ ID NO: 245194 - protein, 15 aa, Homo sapiens
  CDR3 for beta chain variable domain of TCR clone 122597 (TRBV27, TRBJ2-7)
CASSTAGTGSYEQYF

SEQ ID NO: 245195 - protein, 14 aa, Homo sapiens
  CDR3 for alpha chain variable domain of TCR clone 122598 (TRAV1-2, TRAJ16)
CAVNRFSDGQKLLF

SEQ ID NO: 245196 - protein, 14 aa, Homo sapiens
  CDR3 for beta chain variable domain of TCR clone 122598 (TRBV11-2, TRBJ2-3)
CASSLGGGANTQYF

SEQ ID NO: 245197 - protein, 14 aa, Homo sapiens
  CDR3 for alpha chain variable domain of TCR clone 122599 (TRAV12-1, TRAJ47)
CVVGRREYGNKLVF

SEQ ID NO: 245198 - protein, 12 aa, Homo sapiens
  CDR3 for beta chain variable domain of TCR clone 122599 (TRBV11-2, TRBJ2-2)
CASSLGGGELFF

SEQ ID NO: 245199 - protein, 13 aa, Homo sapiens
  CDR3 for alpha chain variable domain of TCR clone 122600 (TRAV27, TRAJ49)
CAPRPYTGNQFYF

SEQ ID NO: 245200 - protein, 16 aa, Homo sapiens
  CDR3 for beta chain variable domain of TCR clone 122600 (TRBV4-1, TRBJ1-2)
CASSQDAGQVRYGYTF

SEQ ID NO: 245201 - protein, 15 aa, Homo sapiens
  CDR3 for alpha chain variable domain of TCR clone 122601 (TRAV12-3, TRAJ27)
CAMRAYNTNAGKSSF

SEQ ID NO: 245202 - protein, 13 aa, Homo sapiens
  CDR3 for beta chain variable domain of TCR clone 122601 (TRBV11-2, TRBJ2-5)
CASSRGPSETQYF

SEQ ID NO: 245203 - protein, 14 aa, Homo sapiens
  CDR3 for alpha chain variable domain of TCR clone 122602 (TRAV13-1, TRAJ44)
CAAKATGTASKLTF

SEQ ID NO: 245204 - protein, 13 aa, Homo sapiens
  CDR3 for beta chain variable domain of TCR clone 122602 (TRBV5-5, TRBJ1-2)
CASSLWRGEDYTF

SEQ ID NO: 245205 - protein, 13 aa, Homo sapiens
  CDR3 for alpha chain variable domain of TCR clone 122603 (TRAV16, TRAJ31)
CALSAHNNARLTF

SEQ ID NO: 245206 - protein, 17 aa, Homo sapiens
  CDR3 for beta chain variable domain of TCR clone 122603 (TRBV12-4, TRBJ2-1)
CASSPGLAGGRINEQFF

SEQ ID NO: 245207 - protein, 13 aa, Homo sapiens
  CDR3 for alpha chain variable domain of TCR clone 122604 (TRAV8-3, TRAJ28)
CAVGAVGSYQLTF

SEQ ID NO: 245208 - protein, 17 aa, Homo sapiens
  CDR3 for beta chain variable domain of TCR clone 122604 (TRBV11-2, TRBJ2-1)
CASSLYPPGVEYSEQFF

SEQ ID NO: 245209 - protein, 15 aa, Homo sapiens
  CDR3 for alpha chain variable domain of TCR clone 122605 (TRAV17, TRAJ42)
CATDHYGGSQGNLIF

SEQ ID NO: 245210 - protein, 14 aa, Homo sapiens
  CDR3 for beta chain variable domain of TCR clone 122605 (TRBV7-2, TRBJ2-7)
CASSPKTSFYEQYF

SEQ ID NO: 245211 - protein, 16 aa, Homo sapiens
  CDR3 for alpha chain variable domain of TCR clone 122606 (TRAV23/DV6, TRAJ9)
CAASIGGNTGRFKTIF

SEQ ID NO: 245212 - protein, 14 aa, Homo sapiens
  CDR3 for beta chain variable domain of TCR clone 122606 (TRBV9, TRBJ2-7)
CASSVGVGSYEQYF

SEQ ID NO: 245213 - protein, 16 aa, Homo sapiens
  CDR3 for alpha chain variable domain of TCR clone 122607 (TRAV3, TRAJ10)
FAVRDMRAGGGNKLTF

SEQ ID NO: 245214 - protein, 12 aa, Homo sapiens
  CDR3 for beta chain variable domain of TCR clone 122607 (TRBV20-1, TRBJ2-7)
CSAGLKMGEQYF

SEQ ID NO: 245215 - protein, 14 aa, Homo sapiens
  CDR3 for alpha chain variable domain of TCR clone 122608 (TRAV2, TRAJ37)
TTVPGSSNTGKLIF

SEQ ID NO: 245216 - protein, 14 aa, Homo sapiens
  CDR3 for beta chain variable domain of TCR clone 122608 (TRBV7-8, TRBJ2-7)
CASSLWQSSCEQYF

SEQ ID NO: 245217 - protein, 18 aa, Homo sapiens
  CDR3 for alpha chain variable domain of TCR clone 122609 (TRAV21, TRAJ52)
CAVRPSPAGGTSYGKLTF

SEQ ID NO: 245218 - protein, 14 aa, Homo sapiens
  CDR3 for beta chain variable domain of TCR clone 122609 (TRBV4-1, TRBJ2-2)
CASSQAVNTGELVF

SEQ ID NO: 245219 - protein, 15 aa, Homo sapiens
  CDR3 for alpha chain variable domain of TCR clone 122610 (TRAV21, TRAJ40)
CAVRPQTSGTYKYIF

SEQ ID NO: 245220 - protein, 13 aa, Homo sapiens
  CDR3 for beta chain variable domain of TCR clone 122610 (TRBV7-2, TRBJ2-2)
CASSSVRAGELFC

SEQ ID NO: 245221 - protein, 13 aa, Homo sapiens
  CDR3 for alpha chain variable domain of TCR clone 122611 (TRAV23/DV6, TRAJ24)
CAASEDSWGKLQC

SEQ ID NO: 245222 - protein, 12 aa, Homo sapiens
  CDR3 for beta chain variable domain of TCR clone 122611 (TRBV5-1, TRBJ2-7)
CASSDSTYEQYF

SEQ ID NO: 245223 - protein, 17 aa, Homo sapiens
  CDR3 for alpha chain variable domain of TCR clone 122612 (TRAV3, TRAJ6)
CAVRDGPRAGGSCIPTF

SEQ ID NO: 245224 - protein, 13 aa, Homo sapiens
  CDR3 for beta chain variable domain of TCR clone 122612 (TRBV12-5, TRBJ2-3)
CASGDRQSDTQYF

SEQ ID NO: 245225 - protein, 14 aa, Homo sapiens
  CDR3 for alpha chain variable domain of TCR clone 122613 (TRAV2, TRAJ9)
CAVEDRSGGFKTIF

SEQ ID NO: 245226 - protein, 13 aa, Homo sapiens
  CDR3 for beta chain variable domain of TCR clone 122613 (TRBV7-6, TRBJ2-7)
CASSLDHTHEQYF

SEQ ID NO: 245227 - protein, 14 aa, Homo sapiens
  CDR3 for alpha chain variable domain of TCR clone 122614 (TRAV12-2, TRAJ13)
CAVKKTGGYQKVTF

SEQ ID NO: 245228 - protein, 13 aa, Homo sapiens
  CDR3 for beta chain variable domain of TCR clone 122614 (TRBV13, TRBJ2-2)
CASSGGNTGELFF

SEQ ID NO: 245229 - protein, 13 aa, Homo sapiens
  CDR3 for alpha chain variable domain of TCR clone 122615 (TRAV2, TRAJ40)
CAVVTSGTYKYIF

SEQ ID NO: 245230 - protein, 14 aa, Homo sapiens
  CDR3 for beta chain variable domain of TCR clone 122615 (TRBV11-2, TRBJ1-5)
CASSLDRGRQPQHF

SEQ ID NO: 245231 - protein, 18 aa, Homo sapiens
  CDR3 for alpha chain variable domain of TCR clone 122616 (TRAV26-1, TRAJ52)
CIVRVAGAGGTSYGKLKF

SEQ ID NO: 245232 - protein, 13 aa, Homo sapiens
  CDR3 for beta chain variable domain of TCR clone 122616 (TRBV7-8, TRBJ1-2)
CASSAQSYYGYTF

SEQ ID NO: 245233 - protein, 15 aa, Homo sapiens
  CDR3 for alpha chain variable domain of TCR clone 122617 (TRAV23/DV6, TRAJ30)
CAARSQESRDDKIIF

SEQ ID NO: 245234 - protein, 17 aa, Homo sapiens
  CDR3 for beta chain variable domain of TCR clone 122617 (TRBV4-3, TRBJ2-1)
CASSQFSSGRASGEQFF

SEQ ID NO: 245235 - protein, 19 aa, Homo sapiens
  CDR3 for alpha chain variable domain of TCR clone 122618 (TRAV26-1, TRAJ50)
CCVLLHRQNPKTYYDKVIF

SEQ ID NO: 245236 - protein, 17 aa, Homo sapiens
  CDR3 for beta chain variable domain of TCR clone 122618 (TRBV4-1, TRBJ1-4)
CASSQEGPRGVEEKLFF

SEQ ID NO: 245237 - protein, 13 aa, Homo sapiens
  CDR3 for alpha chain variable domain of TCR clone 122619 (TRAV13-1, TRAJ39)
CSKYSNAGNMLTF

SEQ ID NO: 245238 - protein, 13 aa, Homo sapiens
  CDR3 for beta chain variable domain of TCR clone 122619 (TRBV11-3, TRBJ1-1)
CASSSNRDTEAFF

SEQ ID NO: 245239 - protein, 14 aa, Homo sapiens
  CDR3 for alpha chain variable domain of TCR clone 122620 (TRAV13-1, TRAJ35)
CAASKGGFGNVLHC

SEQ ID NO: 245240 - protein, 13 aa, Homo sapiens
  CDR3 for beta chain variable domain of TCR clone 122620 (TRBV7-3, TRBJ1-1)
CASSQGWGAEAFF

SEQ ID NO: 245241 - protein, 16 aa, Homo sapiens
  CDR3 for alpha chain variable domain of TCR clone 122621 (TRAV30, TRAJ24)
CGTEIVDADSWGHFQF

SEQ ID NO: 245242 - protein, 14 aa, Homo sapiens
  CDR3 for beta chain variable domain of TCR clone 122621 (TRBV12-5, TRBJ2-5)
CASGSRTHQETQYF

SEQ ID NO: 245243 - protein, 15 aa, Homo sapiens
  CDR3 for alpha chain variable domain of TCR clone 122622 (TRAV38-1, TRAJ37)
CAFIFGSGNTGKLIF

SEQ ID NO: 245244 - protein, 12 aa, Homo sapiens
  CDR3 for beta chain variable domain of TCR clone 122622 (TRBV7-9, TRBJ2-7)
CASSLKGYEQYF

SEQ ID NO: 245245 - protein, 13 aa, Homo sapiens
  CDR3 for alpha chain variable domain of TCR clone 122623 (TRAV12-3, TRAJ7)
CAMTPYGTTDSLL

SEQ ID NO: 245246 - protein, 16 aa, Homo sapiens
  CDR3 for beta chain variable domain of TCR clone 122623 (TRBV20-1, TRBJ1-4)
CSARPYGGELNEKLFF

SEQ ID NO: 245247 - protein, 19 aa, Homo sapiens
  CDR3 for alpha chain variable domain of TCR clone 122624 (TRAV25, TRAJ20)
TATQTTDVGILPQDYKLSF

SEQ ID NO: 245248 - protein, 17 aa, Homo sapiens
  CDR3 for beta chain variable domain of TCR clone 122624 (TRBV4-3, TRBJ2-1)
CASSQFSSGRASGEQFF

SEQ ID NO: 245249 - protein, 12 aa, Homo sapiens
  CDR3 for alpha chain variable domain of TCR clone 122625 (TRAV10, TRAJ43)
WVVVRVGNDMRF

SEQ ID NO: 245250 - protein, 15 aa, Homo sapiens
  CDR3 for beta chain variable domain of TCR clone 122625 (TRBV2, TRBJ2-7)
CASSEGLARSYEQYF

SEQ ID NO: 245251 - protein, 18 aa, Homo sapiens
  CDR3 for alpha chain variable domain of TCR clone 122626 (TRAV21, TRAJ52)
CAVRPSPAGGTSYGMLTF

SEQ ID NO: 245252 - protein, 13 aa, Homo sapiens
  CDR3 for beta chain variable domain of TCR clone 122626 (TRBV7-9, TRBJ2-7)
CASSFAGAYEQYF

SEQ ID NO: 245253 - protein, 17 aa, Homo sapiens
  CDR3 for alpha chain variable domain of TCR clone 122627 (TRAV3, TRAJ38)
CAVRDCLNAGNNRKLIG

SEQ ID NO: 245254 - protein, 14 aa, Homo sapiens
  CDR3 for beta chain variable domain of TCR clone 122627 (TRBV5-5, TRBJ1-5)
CASSGQGVDQPQHF

SEQ ID NO: 245255 - protein, 15 aa, Homo sapiens
  CDR3 for alpha chain variable domain of TCR clone 122628 (TRAV21, TRAJ53)
CATLNSGGSNYKLKF

SEQ ID NO: 245256 - protein, 13 aa, Homo sapiens
  CDR3 for beta chain variable domain of TCR clone 122628 (TRBV7-9, TRBJ2-3)
CASSPGSTDTQYF

SEQ ID NO: 245257 - protein, 11 aa, Homo sapiens
  CDR3 for alpha chain variable domain of TCR clone 122629 (TRAV1-2, TRAJ20)
CAVANDYKLSF

SEQ ID NO: 245258 - protein, 16 aa, Homo sapiens
  CDR3 for beta chain variable domain of TCR clone 122629 (TRBV2, TRBJ2-5)
CASSARGLGGRETQYF

SEQ ID NO: 245259 - protein, 13 aa, Homo sapiens
  CDR3 for alpha chain variable domain of TCR clone 122630 (TRAV2, TRAJ15)
CAVASQAGTALIF

SEQ ID NO: 245260 - protein, 15 aa, Homo sapiens
  CDR3 for beta chain variable domain of TCR clone 122630 (TRBV28, TRBJ2-1)
CASSLGTRLYNEQFF

SEQ ID NO: 245261 - protein, 11 aa, Homo sapiens
  CDR3 for alpha chain variable domain of TCR clone 122631 (TRAV13-1, TRAJ8)
CAARGFQKLVF

SEQ ID NO: 245262 - protein, 16 aa, Homo sapiens
  CDR3 for beta chain variable domain of TCR clone 122631 (TRBV19, TRBJ1-5)
CASSTRGTRCNQPQHF

SEQ ID NO: 245263 - protein, 16 aa, Homo sapiens
  CDR3 for alpha chain variable domain of TCR clone 122632 (TRAV16, TRAJ4)
CALSRMFSGGYNKLIF

SEQ ID NO: 245264 - protein, 11 aa, Homo sapiens
  CDR3 for beta chain variable domain of TCR clone 122632 (TRBV7-8, TRBJ2-7)
CASSLSLEQYF

SEQ ID NO: 245265 - protein, 15 aa, Homo sapiens
  CDR3 for alpha chain variable domain of TCR clone 122633 (TRAV23/DV6, TRAJ38)
CAARSNAGNNRKLIG

SEQ ID NO: 245266 - protein, 16 aa, Homo sapiens
  CDR3 for beta chain variable domain of TCR clone 122633 (TRBV10-2, TRBJ1-5)
CASSRDRDYSNQPQHF

SEQ ID NO: 245267 - protein, 14 aa, Homo sapiens
  CDR3 for alpha chain variable domain of TCR clone 122634 (TRAV3, TRAJ37)
CAVKESGNTGKLIF

SEQ ID NO: 245268 - protein, 14 aa, Homo sapiens
  CDR3 for beta chain variable domain of TCR clone 122634 (TRBV15, TRBJ2-4)
CATEGGQGANIQYF

SEQ ID NO: 245269 - protein, 12 aa, Homo sapiens
  CDR3 for alpha chain variable domain of TCR clone 122635 (TRAV13-1, TRAJ21)
CAAKEGFNKFYF

SEQ ID NO: 245270 - protein, 14 aa, Homo sapiens
  CDR3 for beta chain variable domain of TCR clone 122635 (TRBV4-2, TRBJ2-3)
CASSQERGTDTQYF

SEQ ID NO: 245271 - protein, 14 aa, Homo sapiens
  CDR3 for alpha chain variable domain of TCR clone 122636 (TRAV26-1, TRAJ38)
CIADNAGNNRKLIW

SEQ ID NO: 245272 - protein, 16 aa, Homo sapiens
  CDR3 for beta chain variable domain of TCR clone 122636 (TRBV7-9, TRBJ2-3)
CASSPWREVGTDTQYF

SEQ ID NO: 245273 - protein, 10 aa, Homo sapiens
  CDR3 for alpha chain variable domain of TCR clone 122637 (TRAV8-4, TRAJ43)
CAVSADDIRF

SEQ ID NO: 245274 - protein, 11 aa, Homo sapiens
  CDR3 for beta chain variable domain of TCR clone 122637 (TRBV12-4, TRBJ2-3)
CASTATDTQYF

SEQ ID NO: 245275 - protein, 14 aa, Homo sapiens
  CDR3 for alpha chain variable domain of TCR clone 122638 (TRAV12-3, TRAJ10)
SHLPLTGGGNKLTF

SEQ ID NO: 245276 - protein, 17 aa, Homo sapiens
  CDR3 for beta chain variable domain of TCR clone 122638 (TRBV10-3, TRBJ2-4)
CTSVPSVNKGSKNIQYF

SEQ ID NO: 245277 - protein, 13 aa, Homo sapiens
  CDR3 for alpha chain variable domain of TCR clone 122639 (TRAV13-1, TRAJ5)
CAARVTGRRALTF

SEQ ID NO: 245278 - protein, 16 aa, Homo sapiens
  CDR3 for beta chain variable domain of TCR clone 122639 (TRBV7-3, TRBJ2-1)
CASSLEGYRSYNEQFF

SEQ ID NO: 245279 - protein, 13 aa, Homo sapiens
  CDR3 for alpha chain variable domain of TCR clone 122640 (TRAV13-1, TRAJ43)
CAASKNNNNDMRF

SEQ ID NO: 245280 - protein, 15 aa, Homo sapiens
  CDR3 for beta chain variable domain of TCR clone 122640 (TRBV3-1, TRBJ2-7)
CASSQAPSGSYEQYF

SEQ ID NO: 245281 - protein, 14 aa, Homo sapiens
  CDR3 for alpha chain variable domain of TCR clone 122641 (TRAV23/DV6, TRAJ28)
CAARSGAGSYQLTF

SEQ ID NO: 245282 - protein, 17 aa, Homo sapiens
  CDR3 for beta chain variable domain of TCR clone 122641 (TRBV28, TRBJ2-5)
CASSTPEGDALQETQYF

SEQ ID NO: 245283 - protein, 10 aa, Homo sapiens
  CDR3 for alpha chain variable domain of TCR clone 122642 (TRAV9-2, TRAJ22)
CAPPRGQLTF

SEQ ID NO: 245284 - protein, 16 aa, Homo sapiens
  CDR3 for beta chain variable domain of TCR clone 122642 (TRBV7-2, TRBJ2-5)
CASSPFPTGGEETQYF

SEQ ID NO: 245285 - protein, 15 aa, Homo sapiens
  CDR3 for alpha chain variable domain of TCR clone 122643 (TRAV3, TRAJ4)
CAVRDGTGGYNKLIF

SEQ ID NO: 245286 - protein, 14 aa, Homo sapiens
  CDR3 for beta chain variable domain of TCR clone 122643 (TRBV6-1, TRBJ2-1)
CASAKDGFYNEQFF

SEQ ID NO: 245287 - protein, 14 aa, Homo sapiens
  CDR3 for alpha chain variable domain of TCR clone 122644 (TRAV12-3, TRAJ9)
CAMSPNTGGFKTIF

SEQ ID NO: 245288 - protein, 12 aa, Homo sapiens
  CDR3 for beta chain variable domain of TCR clone 122644 (TRBV19, TRBJ1-5)
CASSMAQQPQHF

SEQ ID NO: 245289 - protein, 14 aa, Homo sapiens
  CDR3 for alpha chain variable domain of TCR clone 122645 (TRAV3, TRAJ21)
CAVESQANFNKFYF

SEQ ID NO: 245290 - protein, 12 aa, Homo sapiens
  CDR3 for beta chain variable domain of TCR clone 122645 (TRBV6-3, TRBJ2-7)
CASGLTPYEQYF

SEQ ID NO: 245291 - protein, 12 aa, Homo sapiens
  CDR3 for alpha chain variable domain of TCR clone 122646 (TRAV1-2, TRAJ26)
CAVRYYGQNFVF

SEQ ID NO: 245292 - protein, 14 aa, Homo sapiens
  CDR3 for beta chain variable domain of TCR clone 122646 (TRBV11-1, TRBJ2-7)
CASSFRQGSYERYF

SEQ ID NO: 245293 - protein, 12 aa, Homo sapiens
  CDR3 for alpha chain variable domain of TCR clone 122647 (TRAV13-1, TRAJ6)
CAAMGGSHIPTF

SEQ ID NO: 245294 - protein, 12 aa, Homo sapiens
  CDR3 for beta chain variable domain of TCR clone 122647 (TRBV5-4, TRBJ2-2)
CASIDQGGELFF

SEQ ID NO: 245295 - protein, 15 aa, Homo sapiens
  CDR3 for alpha chain variable domain of TCR clone 122648 (TRAV27, TRAJ38)
CAARRNAGNNRKLSW

SEQ ID NO: 245296 - protein, 17 aa, Homo sapiens
  CDR3 for beta chain variable domain of TCR clone 122648 (TRBV13, TRBJ2-3)
CASSLSRVAGGRNTQYF

SEQ ID NO: 245297 - protein, 13 aa, Homo sapiens
  CDR3 for alpha chain variable domain of TCR clone 122649 (TRAV8-3, TRAJ44)
CAVVPGTASKLTF

SEQ ID NO: 245298 - protein, 16 aa, Homo sapiens
  CDR3 for beta chain variable domain of TCR clone 122649 (TRBV13, TRBJ2-2)
CASSPRTGEHTGELFF

SEQ ID NO: 245299 - protein, 18 aa, Homo sapiens
  CDR3 for alpha chain variable domain of TCR clone 122650 (TRAV21, TRAJ52)
CAVRPSPAGGPSDGKLTF

SEQ ID NO: 245300 - protein, 17 aa, Homo sapiens
  CDR3 for beta chain variable domain of TCR clone 122650 (TRBV13, TRBJ2-3)
CASSLSRVAGGRNTQYF

SEQ ID NO: 245301 - protein, 15 aa, Homo sapiens
  CDR3 for alpha chain variable domain of TCR clone 122651 (TRAV17, TRAJ57)
CATGPPQGGSEKLVF

SEQ ID NO: 245302 - protein, 14 aa, Homo sapiens
  CDR3 for beta chain variable domain of TCR clone 122651 (TRBV11-2, TRBJ1-2)
CASSLYRGNYGYTF

SEQ ID NO: 245303 - protein, 16 aa, Homo sapiens
  CDR3 for alpha chain variable domain of TCR clone 122652 (TRAV30, TRAJ24)
CGTEIVDADSWGKLQI

SEQ ID NO: 245304 - protein, 14 aa, Homo sapiens
  CDR3 for beta chain variable domain of TCR clone 122652 (TRBV12-5, TRBJ2-5)
CASGSRTHQETQYF

SEQ ID NO: 245305 - protein, 14 aa, Homo sapiens
  CDR3 for alpha chain variable domain of TCR clone 122653 (TRAV21, TRAJ52)
CGRAGGTSYGQLTF

SEQ ID NO: 245306 - protein, 14 aa, Homo sapiens
  CDR3 for beta chain variable domain of TCR clone 122653 (TRBV19, TRBJ1-2)
CASSVLGYNYGYTF

SEQ ID NO: 245307 - protein, 14 aa, Homo sapiens
  CDR3 for alpha chain variable domain of TCR clone 122654 (TRAV1-2, TRAJ16)
CAVNRFPDGQKLLF

SEQ ID NO: 245308 - protein, 14 aa, Homo sapiens
  CDR3 for beta chain variable domain of TCR clone 122654 (TRBV5-5, TRBJ1-2)
CASSLDPYNYGYTF

SEQ ID NO: 245309 - protein, 15 aa, Homo sapiens
  CDR3 for alpha chain variable domain of TCR clone 122655 (TRAV2, TRAJ15)
CAVEDREQAGTDLIF

SEQ ID NO: 245310 - protein, 13 aa, Homo sapiens
  CDR3 for beta chain variable domain of TCR clone 122655 (TRBV10-2, TRBJ2-7)
CASGTSGGYEQYF

SEQ ID NO: 245311 - protein, 11 aa, Homo sapiens
  CDR3 for alpha chain variable domain of TCR clone 122656 (TRAV2, TRAJ13)
CASGGYQKITF

SEQ ID NO: 245312 - protein, 13 aa, Homo sapiens
  CDR3 for beta chain variable domain of TCR clone 122656 (TRBV12-4, TRBJ1-2)
CASSLRQGKGYTF

SEQ ID NO: 245313 - protein, 11 aa, Homo sapiens
  CDR3 for alpha chain variable domain of TCR clone 122657 (TRAV12-1, TRAJ34)
CVVNKGRKLIF

SEQ ID NO: 245314 - protein, 12 aa, Homo sapiens
  CDR3 for beta chain variable domain of TCR clone 122657 (TRBV2, TRBJ2-1)
CAYGPPGNEQFF

SEQ ID NO: 245315 - protein, 15 aa, Homo sapiens
  CDR3 for alpha chain variable domain of TCR clone 122658 (TRAV13-1, TRAJ45)
CAASGSGGGAAGLTF

SEQ ID NO: 245316 - protein, 14 aa, Homo sapiens
  CDR3 for beta chain variable domain of TCR clone 122658 (TRBV12-4, TRBJ1-2)
CASSFVGTAYGYTF

SEQ ID NO: 245317 - protein, 13 aa, Homo sapiens
  CDR3 for alpha chain variable domain of TCR clone 122659 (TRAV3, TRAJ8)
CAVRFTGFQKLLF

SEQ ID NO: 245318 - protein, 12 aa, Homo sapiens
  CDR3 for beta chain variable domain of TCR clone 122659 (TRBV2, TRBJ1-2)
CASSGQTYGYTF

SEQ ID NO: 245319 - protein, 12 aa, Homo sapiens
  CDR3 for alpha chain variable domain of TCR clone 122660 (TRAV23/DV6, TRAJ30)
CAASKGDDNIIF

SEQ ID NO: 245320 - protein, 18 aa, Homo sapiens
  CDR3 for beta chain variable domain of TCR clone 122660 (TRBV10-3, TRBJ2-3)
CAISESRVGPMRGDTQYF

SEQ ID NO: 245321 - protein, 14 aa, Homo sapiens
  CDR3 for alpha chain variable domain of TCR clone 122661 (TRAV3, TRAJ9)
CAVRGNTGGFKTIF

SEQ ID NO: 245322 - protein, 14 aa, Homo sapiens
  CDR3 for beta chain variable domain of TCR clone 122661 (TRBV15, TRBJ2-1)
CATSGVEDYDEQFF

SEQ ID NO: 245323 - protein, 15 aa, Homo sapiens
  CDR3 for alpha chain variable domain of TCR clone 122662 (TRAV2, TRAJ22)
CAVPSRGGSARQLTF

SEQ ID NO: 245324 - protein, 14 aa, Homo sapiens
  CDR3 for beta chain variable domain of TCR clone 122662 (TRBV20-1, TRBJ2-1)
CSAQIGGSANEQFF

SEQ ID NO: 245325 - protein, 13 aa, Homo sapiens
  CDR3 for alpha chain variable domain of TCR clone 122663 (TRAV26-2, TRAJ43)
CILRAVNNNDMRF

SEQ ID NO: 245326 - protein, 15 aa, Homo sapiens
  CDR3 for beta chain variable domain of TCR clone 122663 (TRBV7-2, TRBJ2-1)
GASTHGTGIYNEQFF

SEQ ID NO: 245327 - protein, 15 aa, Homo sapiens
  CDR3 for alpha chain variable domain of TCR clone 122664 (TRAV8-3, TRAJ45)
CASSYSGGGADGLTF

SEQ ID NO: 245328 - protein, 18 aa, Homo sapiens
  CDR3 for beta chain variable domain of TCR clone 122664 (TRBV18, TRBJ1-3)
CASSPRGGAGPSGDTIYF

SEQ ID NO: 245329 - protein, 16 aa, Homo sapiens
  CDR3 for alpha chain variable domain of TCR clone 122665 (TRAV12-2, TRAJ10)
CAVNRVLTGGGNKLTF

SEQ ID NO: 245330 - protein, 12 aa, Homo sapiens
  CDR3 for beta chain variable domain of TCR clone 122665 (TRBV28, TRBJ2-7)
CSSSFSSYEQYF

SEQ ID NO: 245331 - protein, 16 aa, Homo sapiens
  CDR3 for alpha chain variable domain of TCR clone 122666 (TRAV3, TRAJ10)
CAVRDMNAGGGNKLTF

SEQ ID NO: 245332 - protein, 13 aa, Homo sapiens
  CDR3 for beta chain variable domain of TCR clone 122666 (TRBV19, TRBJ1-2)
CASSVPGQDGYTF

SEQ ID NO: 245333 - protein, 14 aa, Homo sapiens
  CDR3 for alpha chain variable domain of TCR clone 122667 (TRAV13-1, TRAJ44)
CAAKATGTASKLTL

SEQ ID NO: 245334 - protein, 14 aa, Homo sapiens
  CDR3 for beta chain variable domain of TCR clone 122667 (TRBV7-3, TRBJ1-1)
CASSLKGGNTEAFF

SEQ ID NO: 245335 - protein, 19 aa, Homo sapiens
  CDR3 for alpha chain variable domain of TCR clone 122668 (TRAV8-3, TRAJ8)
LSTSVLWDPLNTGFQKLVF

SEQ ID NO: 245336 - protein, 13 aa, Homo sapiens
  CDR3 for beta chain variable domain of TCR clone 122668 (TRBV10-2, TRBJ2-3)
CASSESGDHTQYF

SEQ ID NO: 245337 - protein, 16 aa, Homo sapiens
  CDR3 for alpha chain variable domain of TCR clone 122669 (TRAV3, TRAJ37)
CAVRGKGSGNTGKRIF

SEQ ID NO: 245338 - protein, 16 aa, Homo sapiens
  CDR3 for beta chain variable domain of TCR clone 122669 (TRBV12-4, TRBJ1-5)
CASSRPVGGSNQPQHF

SEQ ID NO: 245339 - protein, 15 aa, Homo sapiens
  CDR3 for alpha chain variable domain of TCR clone 122670 (TRAV21, TRAJ27)
CAARPGNAGKSALGM

SEQ ID NO: 245340 - protein, 14 aa, Homo sapiens
  CDR3 for beta chain variable domain of TCR clone 122670 (TRBV7-6, TRBJ2-3)
CASSLGTVTDTQYF

SEQ ID NO: 245341 - protein, 14 aa, Homo sapiens
  CDR3 for alpha chain variable domain of TCR clone 122671 (TRAV12-2, TRAJ5)
CAVKGDTGRRALTF

SEQ ID NO: 245342 - protein, 14 aa, Homo sapiens
  CDR3 for beta chain variable domain of TCR clone 122671 (TRBV28, TRBJ2-7)
CASKPGPDLYEQYF

SEQ ID NO: 245343 - protein, 13 aa, Homo sapiens
  CDR3 for alpha chain variable domain of TCR clone 122672 (TRAV12-1, TRAJ22)
CVVPSGSARQLTF

SEQ ID NO: 245344 - protein, 13 aa, Homo sapiens
  CDR3 for beta chain variable domain of TCR clone 122672 (TRBV7-3, TRBJ1-1)
CASSQDWGAEAFF

SEQ ID NO: 245345 - protein, 15 aa, Homo sapiens
  CDR3 for alpha chain variable domain of TCR clone 122673 (TRAV17, TRAJ57)
CATGPSRGGSEKLVF

SEQ ID NO: 245346 - protein, 15 aa, Homo sapiens
  CDR3 for beta chain variable domain of TCR clone 122673 (TRBV6-3, TRBJ2-7)
CASSSPGTVFYEQYF

SEQ ID NO: 245347 - protein, 13 aa, Homo sapiens
  CDR3 for alpha chain variable domain of TCR clone 122674 (TRAV26-2, TRAJ43)
CILRAVNNNDMRF

SEQ ID NO: 245348 - protein, 15 aa, Homo sapiens
  CDR3 for beta chain variable domain of TCR clone 122674 (TRBV7-9, TRBJ1-6)
CASSSPGRGNSPLHF

SEQ ID NO: 245349 - protein, 16 aa, Homo sapiens
  CDR3 for alpha chain variable domain of TCR clone 122675 (TRAV30, TRAJ24)
CGTEIVDAGSWGKFQF

SEQ ID NO: 245350 - protein, 13 aa, Homo sapiens
  CDR3 for beta chain variable domain of TCR clone 122675 (TRBV7-3, TRBJ1-1)
CASSQDWGAEAFF

SEQ ID NO: 245351 - protein, 12 aa, Homo sapiens
  CDR3 for alpha chain variable domain of TCR clone 122676 (TRAV29/DV5, TRAJ49)
CAATDTGNQFYF

SEQ ID NO: 245352 - protein, 15 aa, Homo sapiens
  CDR3 for beta chain variable domain of TCR clone 122676 (TRBV27, TRBJ2-1)
CASSNGGGSSNEQFF

SEQ ID NO: 245353 - protein, 10 aa, Homo sapiens
  CDR3 for alpha chain variable domain of TCR clone 122677 (TRAV12-1, TRAJ20)
CVVNPRRLSF

SEQ ID NO: 245354 - protein, 15 aa, Homo sapiens
  CDR3 for beta chain variable domain of TCR clone 122677 (TRBV5-1, TRBJ2-1)
CASSPPRAPYNEQFF

SEQ ID NO: 245355 - protein, 15 aa, Homo sapiens
  CDR3 for alpha chain variable domain of TCR clone 122678 (TRAV35, TRAJ50)
CAGQLRKTAYDKVIF

SEQ ID NO: 245356 - protein, 12 aa, Homo sapiens
  CDR3 for beta chain variable domain of TCR clone 122678 (TRBV5-1, TRBJ2-5)
CASSLGLETQYF

SEQ ID NO: 245357 - protein, 15 aa, Homo sapiens
  CDR3 for alpha chain variable domain of TCR clone 122679 (TRAV27, TRAJ33)
CAGADIMDSNYQVIW

SEQ ID NO: 245358 - protein, 13 aa, Homo sapiens
  CDR3 for beta chain variable domain of TCR clone 122679 (TRBV28, TRBJ1-2)
CASSLQGRGGYTF

SEQ ID NO: 245359 - protein, 12 aa, Homo sapiens
  CDR3 for alpha chain variable domain of TCR clone 122680 (TRAV3, TRAJ9)
CAVNTGGFKTIF

SEQ ID NO: 245360 - protein, 15 aa, Homo sapiens
  CDR3 for beta chain variable domain of TCR clone 122680 (TRBV7-2, TRBJ2-1)
CASSFQADEYNEQFF

SEQ ID NO: 245361 - protein, 13 aa, Homo sapiens
  CDR3 for alpha chain variable domain of TCR clone 122681 (TRAV3, TRAJ29)
CAVRDIIDTPLVF

SEQ ID NO: 245362 - protein, 20 aa, Homo sapiens
  CDR3 for beta chain variable domain of TCR clone 122681 (TRBV7-8, TRBJ2-2)
CASSHLFPGPTIHITGELFF

SEQ ID NO: 245363 - protein, 15 aa, Homo sapiens
  CDR3 for alpha chain variable domain of TCR clone 122682 (TRAV8-3, TRAJ45)
CASSYSGGGADGLTF

SEQ ID NO: 245364 - protein, 14 aa, Homo sapiens
  CDR3 for beta chain variable domain of TCR clone 122682 (TRBV7-6, TRBJ2-3)
CASSLGTVTDTQYF

SEQ ID NO: 245365 - protein, 12 aa, Homo sapiens
  CDR3 for alpha chain variable domain of TCR clone 122683 (TRAV27, TRAJ13)
CAGAGGYQKVTF

SEQ ID NO: 245366 - protein, 15 aa, Homo sapiens
  CDR3 for beta chain variable domain of TCR clone 122683 (TRBV20-1, TRBJ2-6)
CSARDMGPGANVLTF

SEQ ID NO: 245367 - protein, 15 aa, Homo sapiens
  CDR3 for alpha chain variable domain of TCR clone 122684 (TRAV17, TRAJ13)
CATDAGSGGYQKVTF

SEQ ID NO: 245368 - protein, 13 aa, Homo sapiens
  CDR3 for beta chain variable domain of TCR clone 122684 (TRBV7-3, TRBJ1-1)
CASSQDWGAEAFF

SEQ ID NO: 245369 - protein, 16 aa, Homo sapiens
  CDR3 for alpha chain variable domain of TCR clone 122685 (TRAV17, TRAJ54)
CATDSDIIQGAQKLVF

SEQ ID NO: 245370 - protein, 15 aa, Homo sapiens
  CDR3 for beta chain variable domain of TCR clone 122685 (TRBV11-2, TRBJ2-2)
CASSSDRVNAGELFF

SEQ ID NO: 245371 - protein, 13 aa, Homo sapiens
  CDR3 for alpha chain variable domain of TCR clone 122686 (TRAV23/DV6, TRAJ58)
CAATGTSGSRLTF

SEQ ID NO: 245372 - protein, 16 aa, Homo sapiens
  CDR3 for beta chain variable domain of TCR clone 122686 (TRBV12-5, TRBJ2-5)
CASGPRTSGNQETQYF

SEQ ID NO: 245373 - protein, 13 aa, Homo sapiens
  CDR3 for alpha chain variable domain of TCR clone 122687 (TRAV12-1, TRAJ40)
CVVSSSGTYKYIF

SEQ ID NO: 245374 - protein, 14 aa, Homo sapiens
  CDR3 for beta chain variable domain of TCR clone 122687 (TRBV2, TRBJ1-6)
CASEVSSYNSPLHF

SEQ ID NO: 245375 - protein, 14 aa, Homo sapiens
  CDR3 for alpha chain variable domain of TCR clone 122688 (TRAV9-2, TRAJ36)
RALPWRTGANNLFF

SEQ ID NO: 245376 - protein, 14 aa, Homo sapiens
  CDR3 for beta chain variable domain of TCR clone 122688 (TRBV2, TRBJ1-2)
CASSELQVSYGYTF

SEQ ID NO: 245377 - protein, 12 aa, Homo sapiens
  CDR3 for alpha chain variable domain of TCR clone 122689 (TRAV1-2, TRAJ42)
CVAGGSQGNLIF

SEQ ID NO: 245378 - protein, 13 aa, Homo sapiens
  CDR3 for beta chain variable domain of TCR clone 122689 (TRBV7-6, TRBJ2-3)
CASSLRSDNTQYF

SEQ ID NO: 245379 - protein, 11 aa, Homo sapiens
  CDR3 for alpha chain variable domain of TCR clone 122690 (TRAV2, TRAJ33)
CAVESNYQLIW

SEQ ID NO: 245380 - protein, 15 aa, Homo sapiens
  CDR3 for beta chain variable domain of TCR clone 122690 (TRBV7-6, TRBJ2-7)
CASSGRRDTFGEQYF

SEQ ID NO: 245381 - protein, 13 aa, Homo sapiens
  CDR3 for alpha chain variable domain of TCR clone 122691 (TRAV22, TRAJ26)
CAVGHNYGQNFVF

SEQ ID NO: 245382 - protein, 16 aa, Homo sapiens
  CDR3 for beta chain variable domain of TCR clone 122691 (TRBV7-2, TRBJ2-6)
CASSERRASGANVLTF

SEQ ID NO: 245383 - protein, 11 aa, Homo sapiens
  CDR3 for alpha chain variable domain of TCR clone 122692 (TRAV2, TRAJ21)
CAVFNFNKFYF

SEQ ID NO: 245384 - protein, 15 aa, Homo sapiens
  CDR3 for beta chain variable domain of TCR clone 122692 (TRBV25-1, TRBJ1-4)
CASSPGDSTNEKLFF

SEQ ID NO: 245385 - protein, 16 aa, Homo sapiens
  CDR3 for alpha chain variable domain of TCR clone 122693 (TRAV21, TRAJ37)
CAVRPRGSSNTGKLIF

SEQ ID NO: 245386 - protein, 14 aa, Homo sapiens
  CDR3 for beta chain variable domain of TCR clone 122693 (TRBV4-2, TRBJ2-3)
CASRETRAPGMQYF

SEQ ID NO: 245387 - protein, 13 aa, Homo sapiens
  CDR3 for alpha chain variable domain of TCR clone 122694 (TRAV21, TRAJ20)
CAVGLRVDYKLSF

SEQ ID NO: 245388 - protein, 13 aa, Homo sapiens
  CDR3 for beta chain variable domain of TCR clone 122694 (TRBV6-1, TRBJ1-1)
CASSRKGNTEAFF

SEQ ID NO: 245389 - protein, 16 aa, Homo sapiens
  CDR3 for alpha chain variable domain of TCR clone 122695 (TRAV1-2, TRAJ10)
CAVRDQGGGGGNKLTF

SEQ ID NO: 245390 - protein, 16 aa, Homo sapiens
  CDR3 for beta chain variable domain of TCR clone 122695 (TRBV4-3, TRBJ2-2)
CASSHLQGSGTGELFF

SEQ ID NO: 245391 - protein, 12 aa, Homo sapiens
  CDR3 for alpha chain variable domain of TCR clone 122696 (TRAV12-2, TRAJ20)
CAVNRNDYKLSF

SEQ ID NO: 245392 - protein, 13 aa, Homo sapiens
  CDR3 for beta chain variable domain of TCR clone 122696 (TRBV20-1, TRBJ1-5)
CSARILGNQPQHF

SEQ ID NO: 245393 - protein, 13 aa, Homo sapiens
  CDR3 for alpha chain variable domain of TCR clone 122697 (TRAV13-2, TRAJ48)
CAEMDFGNEKLTF

SEQ ID NO: 245394 - protein, 15 aa, Homo sapiens
  CDR3 for beta chain variable domain of TCR clone 122697 (TRBV7-9, TRBJ2-7)
CASSLALAEAYEQYF

SEQ ID NO: 245395 - protein, 11 aa, Homo sapiens
  CDR3 for alpha chain variable domain of TCR clone 122698 (TRAV2, TRAJ13)
CASGGYQKVTF

SEQ ID NO: 245396 - protein, 13 aa, Homo sapiens
  CDR3 for beta chain variable domain of TCR clone 122698 (TRBV4-1, TRBJ2-7)
CASSQGQAYEQYF

SEQ ID NO: 245397 - protein, 17 aa, Homo sapiens
  CDR3 for alpha chain variable domain of TCR clone 122699 (TRAV8-6, TRAJ58)
CAVSSGVGETSGPRLTF

SEQ ID NO: 245398 - protein, 14 aa, Homo sapiens
  CDR3 for beta chain variable domain of TCR clone 122699 (TRBV4-2, TRBJ2-1)
CASGLDRAYNEQFF

SEQ ID NO: 245399 - protein, 16 aa, Homo sapiens
  CDR3 for alpha chain variable domain of TCR clone 122700 (TRAV12-3, TRAJ53)
CAMSPGSGGSNYKLTF

SEQ ID NO: 245400 - protein, 15 aa, Homo sapiens
  CDR3 for beta chain variable domain of TCR clone 122700 (TRBV11-3, TRBJ2-5)
CASSDTSGGIETQYF

SEQ ID NO: 245401 - protein, 13 aa, Homo sapiens
  CDR3 for alpha chain variable domain of TCR clone 122701 (TRAV12-1, TRAJ38)
CVVPAGNNRKLIW

SEQ ID NO: 245402 - protein, 16 aa, Homo sapiens
  CDR3 for beta chain variable domain of TCR clone 122701 (TRBV19, TRBJ2-2)
CASRSPGTGATGELFF

SEQ ID NO: 245403 - protein, 15 aa, Homo sapiens
  CDR3 for alpha chain variable domain of TCR clone 122702 (TRAV35, TRAJ58)
CAGRRQETSGSRLTF

SEQ ID NO: 245404 - protein, 14 aa, Homo sapiens
  CDR3 for beta chain variable domain of TCR clone 122702 (TRBV28, TRBJ2-3)
CASSWRGRADTQYF

SEQ ID NO: 245405 - protein, 16 aa, Homo sapiens
  CDR3 for alpha chain variable domain of TCR clone 122703 (TRAV30, TRAJ24)
CGTEFVDADSWGKFQF

SEQ ID NO: 245406 - protein, 12 aa, Homo sapiens
  CDR3 for beta chain variable domain of TCR clone 122703 (TRBV11-2, TRBJ2-2)
CASSLGGGELFF

SEQ ID NO: 245407 - protein, 13 aa, Homo sapiens
  CDR3 for alpha chain variable domain of TCR clone 122704 (TRAV21, TRAJ27)
CAALNTNAGKSTF

SEQ ID NO: 245408 - protein, 14 aa, Homo sapiens
  CDR3 for beta chain variable domain of TCR clone 122704 (TRBV27, TRBJ1-1)
CASSLLSCLSEAFF

SEQ ID NO: 245409 - protein, 14 aa, Homo sapiens
  CDR3 for alpha chain variable domain of TCR clone 122705 (TRAV12-2, TRAJ13)
CAVKKTGGYQKVTF

SEQ ID NO: 245410 - protein, 13 aa, Homo sapiens
  CDR3 for beta chain variable domain of TCR clone 122705 (TRBV28, TRBJ2-7)
CASTPGLAGEQYF

SEQ ID NO: 245411 - protein, 19 aa, Homo sapiens
  CDR3 for alpha chain variable domain of TCR clone 122706 (TRAV13-1, TRAJ52)
CAASPYQNAGGTSYGKLTF

SEQ ID NO: 245412 - protein, 15 aa, Homo sapiens
  CDR3 for beta chain variable domain of TCR clone 122706 (TRBV4-1, TRBJ1-4)
CASSDTGGTNEKLFF

SEQ ID NO: 245413 - protein, 15 aa, Homo sapiens
  CDR3 for alpha chain variable domain of TCR clone 122707 (TRAV17, TRAJ35)
CATAFVIGFGNVLHC

SEQ ID NO: 245414 - protein, 15 aa, Homo sapiens
  CDR3 for beta chain variable domain of TCR clone 122707 (TRBV15, TRBJ1-5)
CATSREQGGNQPQHF

SEQ ID NO: 245415 - protein, 15 aa, Homo sapiens
  CDR3 for alpha chain variable domain of TCR clone 122708 (TRAV23/DV6, TRAJ57)
CAASSTLSQCGSEKL

SEQ ID NO: 245416 - protein, 14 aa, Homo sapiens
  CDR3 for beta chain variable domain of TCR clone 122708 (TRBV25-1, TRBJ1-1)
CASTHLGGNTEAFF

SEQ ID NO: 245417 - protein, 13 aa, Homo sapiens
  CDR3 for alpha chain variable domain of TCR clone 122709 (TRAV23/DV6, TRAJ15)
CAALPAGRDCSDL

SEQ ID NO: 245418 - protein, 14 aa, Homo sapiens
  CDR3 for beta chain variable domain of TCR clone 122709 (TRBV7-9, TRBJ1-2)
CASSRQGANYGYTF

SEQ ID NO: 245419 - protein, 12 aa, Homo sapiens
  CDR3 for alpha chain variable domain of TCR clone 122710 (TRAV12-3, TRAJ17)
CAMTLTGNKLNF

SEQ ID NO: 245420 - protein, 15 aa, Homo sapiens
  CDR3 for beta chain variable domain of TCR clone 122710 (TRBV20-1, TRBJ2-7)
CSARDRVPGMDEQYF

SEQ ID NO: 245421 - protein, 17 aa, Homo sapiens
  CDR3 for alpha chain variable domain of TCR clone 122711 (TRAV13-1, TRAJ31)
CAPRDRLMFGDGTQLVV

SEQ ID NO: 245422 - protein, 17 aa, Homo sapiens
  CDR3 for beta chain variable domain of TCR clone 122711 (TRBV20-1, TRBJ2-2)
CSASGSGQGGLTGELFF

SEQ ID NO: 245423 - protein, 12 aa, Homo sapiens
  CDR3 for alpha chain variable domain of TCR clone 122712 (TRAV13-2, TRAJ8)
CAPWLGFQKLVF

SEQ ID NO: 245424 - protein, 13 aa, Homo sapiens
  CDR3 for beta chain variable domain of TCR clone 122712 (TRBV12-4, TRBJ1-2)
CASSLRQGKGYTF

SEQ ID NO: 245425 - protein, 14 aa, Homo sapiens
  CDR3 for alpha chain variable domain of TCR clone 122713 (TRAV13-1, TRAJ44)
CAAKATGTTSKLTF

SEQ ID NO: 245426 - protein, 16 aa, Homo sapiens
  CDR3 for beta chain variable domain of TCR clone 122713 (TRBV7-9, TRBJ2-6)
CASSLKGPLRANVLTF

SEQ ID NO: 245427 - protein, 14 aa, Homo sapiens
  CDR3 for alpha chain variable domain of TCR clone 122714 (TRAV4, TRAJ34)
CLVGVGYNTDKLIF

SEQ ID NO: 245428 - protein, 17 aa, Homo sapiens
  CDR3 for beta chain variable domain of TCR clone 122714 (TRBV12-4, TRBJ1-1)
CASSLWGRGIQNTEAFF

SEQ ID NO: 245429 - protein, 12 aa, Homo sapiens
  CDR3 for alpha chain variable domain of TCR clone 122715 (TRAV21, TRAJ13)
PGPSGGYQKVTF

SEQ ID NO: 245430 - protein, 15 aa, Homo sapiens
  CDR3 for beta chain variable domain of TCR clone 122715 (TRBV7-9, TRBJ1-6)
YASSSPGCGNSPLHF

SEQ ID NO: 245431 - protein, 13 aa, Homo sapiens
  CDR3 for alpha chain variable domain of TCR clone 122716 (TRAV20, TRAJ37)
CAGCSSNTGKLIF

SEQ ID NO: 245432 - protein, 13 aa, Homo sapiens
  CDR3 for beta chain variable domain of TCR clone 122716 (TRBV12-5, TRBJ2-3)
CASGDRQSDTQYF

SEQ ID NO: 245433 - protein, 14 aa, Homo sapiens
  CDR3 for alpha chain variable domain of TCR clone 122717 (TRAV17, TRAJ16)
CATAGFSDGQKLLF

SEQ ID NO: 245434 - protein, 15 aa, Homo sapiens
  CDR3 for beta chain variable domain of TCR clone 122717 (TRBV6-3, TRBJ2-7)
CASSSPGTVFYEQYF

SEQ ID NO: 245435 - protein, 15 aa, Homo sapiens
  CDR3 for alpha chain variable domain of TCR clone 122718 (TRAV17, TRAJ6)
CATDLPSGGSYIPTF

SEQ ID NO: 245436 - protein, 16 aa, Homo sapiens
  CDR3 for beta chain variable domain of TCR clone 122718 (TRBV4-1, TRBJ2-7)
CASSKDPTGYSYEQYF

SEQ ID NO: 245437 - protein, 14 aa, Homo sapiens
  CDR3 for alpha chain variable domain of TCR clone 122719 (TRAV1-2, TRAJ16)
CAVNRLSDGQKLLF

SEQ ID NO: 245438 - protein, 12 aa, Homo sapiens
  CDR3 for beta chain variable domain of TCR clone 122719 (TRBV11-2, TRBJ2-1)
CASSPGNNEQFF

SEQ ID NO: 245439 - protein, 15 aa, Homo sapiens
  CDR3 for alpha chain variable domain of TCR clone 122720 (TRAV4, TRAJ26)
CLVGDMNKYGQNFVF

SEQ ID NO: 245440 - protein, 16 aa, Homo sapiens
  CDR3 for beta chain variable domain of TCR clone 122720 (TRBV28, TRBJ1-4)
CASSSRTGAANEKLFF

SEQ ID NO: 245441 - protein, 17 aa, Homo sapiens
  CDR3 for alpha chain variable domain of TCR clone 122721 (TRAV3, TRAJ6)
CAVRDGPRAGGSYIPTF

SEQ ID NO: 245442 - protein, 16 aa, Homo sapiens
  CDR3 for beta chain variable domain of TCR clone 122721 (TRBV29-1, TRBJ2-7)
CSVEDAEDGTAYEQYF

SEQ ID NO: 245443 - protein, 17 aa, Homo sapiens
  CDR3 for alpha chain variable domain of TCR clone 122722 (TRAV17, TRAJ52)
CATDRNAGGTSYGKLTF

SEQ ID NO: 245444 - protein, 11 aa, Homo sapiens
  CDR3 for beta chain variable domain of TCR clone 122722 (TRBV29-1, TRBJ1-1)
CSVEILTEAFF

SEQ ID NO: 245445 - protein, 14 aa, Homo sapiens
  CDR3 for alpha chain variable domain of TCR clone 122723 (TRAV13-1, TRAJ44)
RAAKAAGTASKLTF

SEQ ID NO: 245446 - protein, 13 aa, Homo sapiens
  CDR3 for beta chain variable domain of TCR clone 122723 (TRBV5-5, TRBJ1-2)
CASSFWRGEDYTF

SEQ ID NO: 245447 - protein, 15 aa, Homo sapiens
  CDR3 for alpha chain variable domain of TCR clone 122724 (TRAV12-1, TRAJ44)
CVADLPTGTASKLTF

SEQ ID NO: 245448 - protein, 13 aa, Homo sapiens
  CDR3 for beta chain variable domain of TCR clone 122724 (TRBV6-5, TRBJ2-5)
CASSPRGGETQYF

SEQ ID NO: 245449 - protein, 14 aa, Homo sapiens
  CDR3 for alpha chain variable domain of TCR clone 122725 (TRAV3, TRAJ21)
CAVRDAYNFNKFYF

SEQ ID NO: 245450 - protein, 15 aa, Homo sapiens
  CDR3 for beta chain variable domain of TCR clone 122725 (TRBV6-5, TRBJ1-5)
CASSYSWDSNQHQHF

SEQ ID NO: 245451 - protein, 11 aa, Homo sapiens
  CDR3 for alpha chain variable domain of TCR clone 122726 (TRAV1-2, TRAJ20)
CAVANDYKLSY

SEQ ID NO: 245452 - protein, 18 aa, Homo sapiens
  CDR3 for beta chain variable domain of TCR clone 122726 (TRBV20-1, TRBJ2-6)
CSAETTPTHGSGANVLTF

SEQ ID NO: 245453 - protein, 12 aa, Homo sapiens
  CDR3 for alpha chain variable domain of TCR clone 122727 (TRAV1-2, TRAJ33)
CAALDSNYQLIW

SEQ ID NO: 245454 - protein, 16 aa, Homo sapiens
  CDR3 for beta chain variable domain of TCR clone 122727 (TRBV6-4, TRBJ1-2)
CASSEAFGDPNYGYTF

SEQ ID NO: 245455 - protein, 12 aa, Homo sapiens
  CDR3 for alpha chain variable domain of TCR clone 122728 (TRAV12-3, TRAJ17)
CAMTLTGNKLTF

SEQ ID NO: 245456 - protein, 14 aa, Homo sapiens
  CDR3 for beta chain variable domain of TCR clone 122728 (TRBV25-1, TRBJ1-1)
CASIHLGGNTEAFF

SEQ ID NO: 245457 - protein, 14 aa, Homo sapiens
  CDR3 for alpha chain variable domain of TCR clone 122729 (TRAV12-2, TRAJ13)
CAVKKTGGYQKVTF

SEQ ID NO: 245458 - protein, 14 aa, Homo sapiens
  CDR3 for beta chain variable domain of TCR clone 122729 (TRBV7-2, TRBJ2-7)
CASSPKTSFYGQYF

SEQ ID NO: 245459 - protein, 22 aa, Homo sapiens
  CDR3 for alpha chain variable domain of TCR clone 122730 (TRAV8-3, TRAJ42)
CAVGPNYGGSKEISSLEKALNS

SEQ ID NO: 245460 - protein, 14 aa, Homo sapiens
  CDR3 for beta chain variable domain of TCR clone 122730 (TRBV19, TRBJ2-1)
CASPTFVLSGEQFF

SEQ ID NO: 245461 - protein, 13 aa, Homo sapiens
  CDR3 for alpha chain variable domain of TCR clone 122731 (TRAV8-1, TRAJ13)
CAVSKGGYQKVTF

SEQ ID NO: 245462 - protein, 18 aa, Homo sapiens
  CDR3 for beta chain variable domain of TCR clone 122731 (TRBV11-2, TRBJ2-7)
CASSCRTVQTGQSYEQYF

SEQ ID NO: 245463 - protein, 15 aa, Homo sapiens
  CDR3 for alpha chain variable domain of TCR clone 122732 (TRAV8-3, TRAJ45)
CASSYSGGGADGLTF

SEQ ID NO: 245464 - protein, 18 aa, Homo sapiens
  CDR3 for beta chain variable domain of TCR clone 122732 (TRBV18, TRBJ1-3)
CASSARGGAGPSGNTIYF

SEQ ID NO: 245465 - protein, 16 aa, Homo sapiens
  CDR3 for alpha chain variable domain of TCR clone 122733 (TRAV17, TRAJ53)
CATDALRGGSNYKLTF

SEQ ID NO: 245466 - protein, 15 aa, Homo sapiens
  CDR3 for beta chain variable domain of TCR clone 122733 (TRBV20-1, TRBJ2-7)
CSARDRVSGMDEQYF

SEQ ID NO: 245467 - protein, 13 aa, Homo sapiens
  CDR3 for alpha chain variable domain of TCR clone 122734 (TRAV26-1, TRAJ34)
CIVRPWITDKLIF

SEQ ID NO: 245468 - protein, 15 aa, Homo sapiens
  CDR3 for beta chain variable domain of TCR clone 122734 (TRBV5-1, TRBJ2-3)
CASRNQAGSTDTQYF

SEQ ID NO: 245469 - protein, 17 aa, Homo sapiens
  CDR3 for alpha chain variable domain of TCR clone 122735 (TRAV38-2/DV8, TRAJ38)
RAYRSARGAGNNRKLIW

SEQ ID NO: 245470 - protein, 13 aa, Homo sapiens
  CDR3 for beta chain variable domain of TCR clone 122735 (TRBV6-5, TRBJ2-1)
CASRGRVGNEQFF

SEQ ID NO: 245471 - protein, 17 aa, Homo sapiens
  CDR3 for alpha chain variable domain of TCR clone 122736 (TRAV16, TRAJ58)
CITVPSNGETSGSRLTF

SEQ ID NO: 245472 - protein, 17 aa, Homo sapiens
  CDR3 for beta chain variable domain of TCR clone 122736 (TRBV18, TRBJ2-1)
CASSKGLSGGADNEQFF

SEQ ID NO: 245473 - protein, 15 aa, Homo sapiens
  CDR3 for alpha chain variable domain of TCR clone 122737 (TRAV8-3, TRAJ45)
CASSYSGGGADGLTF

SEQ ID NO: 245474 - protein, 13 aa, Homo sapiens
  CDR3 for beta chain variable domain of TCR clone 122737 (TRBV7-3, TRBJ2-1)
CASSLDSYNEQFF

SEQ ID NO: 245475 - protein, 17 aa, Homo sapiens
  CDR3 for alpha chain variable domain of TCR clone 122738 (TRAV3, TRAJ6)
CAVRDGPRAGGSYIPTF

SEQ ID NO: 245476 - protein, 14 aa, Homo sapiens
  CDR3 for beta chain variable domain of TCR clone 122738 (TRBV7-2, TRBJ2-1)
CASSPKTSFYEQFF

SEQ ID NO: 245477 - protein, 13 aa, Homo sapiens
  CDR3 for alpha chain variable domain of TCR clone 122739 (TRAV17, TRAJ29)
CATDAFRNHTSCL

SEQ ID NO: 245478 - protein, 13 aa, Homo sapiens
  CDR3 for beta chain variable domain of TCR clone 122739 (TRBV5-7, TRBJ2-6)
CASTSSGANVLTF

SEQ ID NO: 245479 - protein, 14 aa, Homo sapiens
  CDR3 for alpha chain variable domain of TCR clone 122740 (TRAV12-2, TRAJ44)
CAVNPAGTASKLTF

SEQ ID NO: 245480 - protein, 16 aa, Homo sapiens
  CDR3 for beta chain variable domain of TCR clone 122740 (TRBV12-4, TRBJ2-1)
CASSAVGQGNGDEQFF

SEQ ID NO: 245481 - protein, 14 aa, Homo sapiens
  CDR3 for alpha chain variable domain of TCR clone 122741 (TRAV12-2, TRAJ13)
CAVKKTGGYQKVTF

SEQ ID NO: 245482 - protein, 14 aa, Homo sapiens
  CDR3 for beta chain variable domain of TCR clone 122741 (TRBV4-1, TRBJ2-7)
CASIPSREGFEQYF

SEQ ID NO: 245483 - protein, 15 aa, Homo sapiens
  CDR3 for alpha chain variable domain of TCR clone 122742 (TRAV2, TRAJ15)
CAAEDREQAGTALIF

SEQ ID NO: 245484 - protein, 13 aa, Homo sapiens
  CDR3 for beta chain variable domain of TCR clone 122742 (TRBV10-2, TRBJ2-7)
CASGTSGGYEQYF

SEQ ID NO: 245485 - protein, 15 aa, Homo sapiens
  CDR3 for alpha chain variable domain of TCR clone 122743 (TRAV12-3, TRAJ6)
CAMSATTGGSYIPTF

SEQ ID NO: 245486 - protein, 13 aa, Homo sapiens
  CDR3 for beta chain variable domain of TCR clone 122743 (TRBV19, TRBJ2-7)
CASSPRQSYEQYF

SEQ ID NO: 245487 - protein, 11 aa, Homo sapiens
  CDR3 for alpha chain variable domain of TCR clone 122744 (TRAV13-2, TRAJ23)
CADSPRGKLIF

SEQ ID NO: 245488 - protein, 18 aa, Homo sapiens
  CDR3 for beta chain variable domain of TCR clone 122744 (TRBV6-5, TRBJ1-1)
CASSYSAPGGTGGTEAFF

SEQ ID NO: 245489 - protein, 15 aa, Homo sapiens
  CDR3 for alpha chain variable domain of TCR clone 122745 (TRAV2, TRAJ9)
CAVEDRGTGGFKTIF

SEQ ID NO: 245490 - protein, 13 aa, Homo sapiens
  CDR3 for beta chain variable domain of TCR clone 122745 (TRBV2, TRBJ1-1)
CDSRWTVNTEAFF

SEQ ID NO: 245491 - protein, 15 aa, Homo sapiens
  CDR3 for alpha chain variable domain of TCR clone 122746 (TRAV2, TRAJ15)
CAVEDWGQAGTALIF

SEQ ID NO: 245492 - protein, 13 aa, Homo sapiens
  CDR3 for beta chain variable domain of TCR clone 122746 (TRBV10-2, TRBJ2-7)
RASGASGGYEQYF

SEQ ID NO: 245493 - protein, 14 aa, Homo sapiens
  CDR3 for alpha chain variable domain of TCR clone 122747 (TRAV20, TRAJ21)
CAAGGIYNFNNFYF

SEQ ID NO: 245494 - protein, 12 aa, Homo sapiens
  CDR3 for beta chain variable domain of TCR clone 122747 (TRBV12-4, TRBJ2-1)
CASSLVRVEQFF

SEQ ID NO: 245495 - protein, 11 aa, Homo sapiens
  CDR3 for alpha chain variable domain of TCR clone 122748 (TRAV17, TRAJ53)
CATGSNYKLTF

SEQ ID NO: 245496 - protein, 14 aa, Homo sapiens
  CDR3 for beta chain variable domain of TCR clone 122748 (TRBV6-6, TRBJ2-7)
CASSDSGAGYEQYF

SEQ ID NO: 245497 - protein, 17 aa, Homo sapiens
  CDR3 for alpha chain variable domain of TCR clone 122749 (TRAV36/DV7, TRAJ52)
CAVAQRAGGTSYGKLTF

SEQ ID NO: 245498 - protein, 15 aa, Homo sapiens
  CDR3 for beta chain variable domain of TCR clone 122749 (TRBV2, TRBJ2-1)
CASSEEREGDNEQFF

SEQ ID NO: 245499 - protein, 14 aa, Homo sapiens
  CDR3 for alpha chain variable domain of TCR clone 122750 (TRAV12-2, TRAJ13)
FAVKKTGGYQKVTF

SEQ ID NO: 245500 - protein, 11 aa, Homo sapiens
  CDR3 for beta chain variable domain of TCR clone 122750 (TRBV11-2, TRBJ2-2)
CASSLPGELFF

SEQ ID NO: 245501 - protein, 12 aa, Homo sapiens
  CDR3 for alpha chain variable domain of TCR clone 122751 (TRAV12-2, TRAJ10)
WGVTGGGNTLTF

SEQ ID NO: 245502 - protein, 16 aa, Homo sapiens
  CDR3 for beta chain variable domain of TCR clone 122751 (TRBV6-4, TRBJ1-2)
CASSEAVGDPNYGYTF

SEQ ID NO: 245503 - protein, 14 aa, Homo sapiens
  CDR3 for alpha chain variable domain of TCR clone 122752 (TRAV12-2, TRAJ36)
CAANPPTGANNLFF

SEQ ID NO: 245504 - protein, 13 aa, Homo sapiens
  CDR3 for beta chain variable domain of TCR clone 122752 (TRBV20-1, TRBJ1-6)
CSAPTGLGSPLHF

SEQ ID NO: 245505 - protein, 16 aa, Homo sapiens
  CDR3 for alpha chain variable domain of TCR clone 122753 (TRAV30, TRAJ24)
CGTEIVDADSWGKFAF

SEQ ID NO: 245506 - protein, 14 aa, Homo sapiens
  CDR3 for beta chain variable domain of TCR clone 122753 (TRBV12-5, TRBJ2-5)
CASGSRTHQETQYF

SEQ ID NO: 245507 - protein, 14 aa, Homo sapiens
  CDR3 for alpha chain variable domain of TCR clone 122754 (TRAV1-2, TRAJ16)
CAVNRFSDVQKLLF

SEQ ID NO: 245508 - protein, 14 aa, Homo sapiens
  CDR3 for beta chain variable domain of TCR clone 122754 (TRBV7-9, TRBJ2-2)
CASSLGHRTGELFF

SEQ ID NO: 245509 - protein, 15 aa, Homo sapiens
  CDR3 for alpha chain variable domain of TCR clone 122755 (TRAV26-1, TRAJ29)
CIVRVEGSGITPLVF

SEQ ID NO: 245510 - protein, 14 aa, Homo sapiens
  CDR3 for beta chain variable domain of TCR clone 122755 (TRBV18, TRBJ2-5)
CASSPGVSQETQYF

SEQ ID NO: 245511 - protein, 13 aa, Homo sapiens
  CDR3 for alpha chain variable domain of TCR clone 122756 (TRAV17, TRAJ5)
CALRGTGRRALTF

SEQ ID NO: 245512 - protein, 14 aa, Homo sapiens
  CDR3 for beta chain variable domain of TCR clone 122756 (TRBV19, TRBJ2-3)
CASSAPRGTDTQYF

SEQ ID NO: 245513 - protein, 15 aa, Homo sapiens
  CDR3 for alpha chain variable domain of TCR clone 122757 (TRAV3, TRAJ29)
CAVRDLYSGNTPLVF

SEQ ID NO: 245514 - protein, 14 aa, Homo sapiens
  CDR3 for beta chain variable domain of TCR clone 122757 (TRBV7-6, TRBJ2-1)
CASSLGGGADEQFF

SEQ ID NO: 245515 - protein, 10 aa, Homo sapiens
  CDR3 for alpha chain variable domain of TCR clone 122758 (TRAV12-1, TRAJ20)
CVVNPRKLSF

SEQ ID NO: 245516 - protein, 12 aa, Homo sapiens
  CDR3 for beta chain variable domain of TCR clone 122758 (TRBV11-2, TRBJ2-2)
CASSLGGGELFF

SEQ ID NO: 245517 - protein, 14 aa, Homo sapiens
  CDR3 for alpha chain variable domain of TCR clone 122759 (TRAV1-2, TRAJ16)
CAVNRFSDGQKLLF

SEQ ID NO: 245518 - protein, 12 aa, Homo sapiens
  CDR3 for beta chain variable domain of TCR clone 122759 (TRBV20-1, TRBJ2-1)
CSAQYTYNEQFF

SEQ ID NO: 245519 - protein, 16 aa, Homo sapiens
  CDR3 for alpha chain variable domain of TCR clone 122760 (TRAV27, TRAJ48)
TAAQPGDTGLYLPLTF

SEQ ID NO: 245520 - protein, 13 aa, Homo sapiens
  CDR3 for beta chain variable domain of TCR clone 122760 (TRBV7-2, TRBJ2-5)
CASSQTSVETLYF

SEQ ID NO: 245521 - protein, 14 aa, Homo sapiens
  CDR3 for alpha chain variable domain of TCR clone 122761 (TRAV13-1, TRAJ40)
CAASMTSGTYKYIF

SEQ ID NO: 245522 - protein, 15 aa, Homo sapiens
  CDR3 for beta chain variable domain of TCR clone 122761 (TRBV7-3, TRBJ2-1)
CASSPTGGGEIEQFF

SEQ ID NO: 245523 - protein, 16 aa, Homo sapiens
  CDR3 for alpha chain variable domain of TCR clone 122762 (TRAV8-3, TRAJ10)
CAVGPGVTGGGNKLTF

SEQ ID NO: 245524 - protein, 13 aa, Homo sapiens
  CDR3 for beta chain variable domain of TCR clone 122762 (TRBV18, TRBJ1-1)
CASSPAPSGEAFF

SEQ ID NO: 245525 - protein, 14 aa, Homo sapiens
  CDR3 for alpha chain variable domain of TCR clone 122763 (TRAV12-2, TRAJ13)
CAVKKTGGYQKVTF

SEQ ID NO: 245526 - protein, 13 aa, Homo sapiens
  CDR3 for beta chain variable domain of TCR clone 122763 (TRBV19, TRBJ1-5)
CASSMRGYQPQHF

SEQ ID NO: 245527 - protein, 14 aa, Homo sapiens
  CDR3 for alpha chain variable domain of TCR clone 122764 (TRAV29/DV5, TRAJ36)
CAARRKTGANNLFF

SEQ ID NO: 245528 - protein, 14 aa, Homo sapiens
  CDR3 for beta chain variable domain of TCR clone 122764 (TRBV12-5, TRBJ2-5)
CANGSRTHQETQYF

SEQ ID NO: 245529 - protein, 14 aa, Homo sapiens
  CDR3 for alpha chain variable domain of TCR clone 122765 (TRAV13-1, TRAJ35)
CAASKGGFGNVLHC

SEQ ID NO: 245530 - protein, 13 aa, Homo sapiens
  CDR3 for beta chain variable domain of TCR clone 122765 (TRBV24-1, TRBJ2-2)
CATSDWSTGELFF

SEQ ID NO: 245531 - protein, 12 aa, Homo sapiens
  CDR3 for alpha chain variable domain of TCR clone 122766 (TRAV12-1, TRAJ40)
CVFYSGTYKYIF

SEQ ID NO: 245532 - protein, 14 aa, Homo sapiens
  CDR3 for beta chain variable domain of TCR clone 122766 (TRBV12-4, TRBJ1-4)
CASRMTGRSEKLFF

SEQ ID NO: 245533 - protein, 14 aa, Homo sapiens
  CDR3 for alpha chain variable domain of TCR clone 122767 (TRAV1-2, TRAJ8)
CAVREDTGFQKLVF

SEQ ID NO: 245534 - protein, 15 aa, Homo sapiens
  CDR3 for beta chain variable domain of TCR clone 122767 (TRBV20-1, TRBJ2-7)
CSARKGLAESYEQYF

SEQ ID NO: 245535 - protein, 16 aa, Homo sapiens
  CDR3 for alpha chain variable domain of TCR clone 122768 (TRAV3, TRAJ37)
CAVRPHGSGNTGKLIF

SEQ ID NO: 245536 - protein, 15 aa, Homo sapiens
  CDR3 for beta chain variable domain of TCR clone 122768 (TRBV28, TRBJ2-5)
CASSPPWSYQETQYF

SEQ ID NO: 245537 - protein, 14 aa, Homo sapiens
  CDR3 for alpha chain variable domain of TCR clone 122769 (TRAV1-2, TRAJ16)
CAVKEGSDGQKLLF

SEQ ID NO: 245538 - protein, 14 aa, Homo sapiens
  CDR3 for beta chain variable domain of TCR clone 122769 (TRBV20-1, TRBJ1-1)
SAVLHLGGGTEAFF

SEQ ID NO: 245539 - protein, 10 aa, Homo sapiens
  CDR3 for alpha chain variable domain of TCR clone 122770 (TRAV12-1, TRAJ43)
CVVHNNDMRF

SEQ ID NO: 245540 - protein, 13 aa, Homo sapiens
  CDR3 for beta chain variable domain of TCR clone 122770 (TRBV12-4, TRBJ1-2)
CAGSSGLTVISTF

SEQ ID NO: 245541 - protein, 10 aa, Homo sapiens
  CDR3 for alpha chain variable domain of TCR clone 122771 (TRAV16, TRAJ22)
SAMYLRQLTF

SEQ ID NO: 245542 - protein, 14 aa, Homo sapiens
  CDR3 for beta chain variable domain of TCR clone 122771 (TRBV18, TRBJ2-7)
CASSPRGGAYEQYF

SEQ ID NO: 245543 - protein, 11 aa, Homo sapiens
  CDR3 for alpha chain variable domain of TCR clone 122772 (TRAV1-2, TRAJ20)
CAVANDYKLSF

SEQ ID NO: 245544 - protein, 18 aa, Homo sapiens
  CDR3 for beta chain variable domain of TCR clone 122772 (TRBV20-1, TRBJ2-6)
CSAETTPTHCSGANVLTF

SEQ ID NO: 245545 - protein, 14 aa, Homo sapiens
  CDR3 for alpha chain variable domain of TCR clone 122773 (TRAV8-6, TRAJ12)
CAVKAADSSYKLVF

SEQ ID NO: 245546 - protein, 15 aa, Homo sapiens
  CDR3 for beta chain variable domain of TCR clone 122773 (TRBV5-1, TRBJ2-5)
CASSLGLAEQETQYF

SEQ ID NO: 245547 - protein, 15 aa, Homo sapiens
  CDR3 for alpha chain variable domain of TCR clone 122774 (TRAV17, TRAJ35)
CATAFVIGFGNVLHC

SEQ ID NO: 245548 - protein, 15 aa, Homo sapiens
  CDR3 for beta chain variable domain of TCR clone 122774 (TRBV7-9, TRBJ2-7)
CASSLALVEAYEQYF

SEQ ID NO: 245549 - protein, 13 aa, Homo sapiens
  CDR3 for alpha chain variable domain of TCR clone 122775 (TRAV12-1, TRAJ26)
CVVRRNYGHNFVF

SEQ ID NO: 245550 - protein, 14 aa, Homo sapiens
  CDR3 for beta chain variable domain of TCR clone 122775 (TRBV6-3, TRBJ1-1)
CASRYTGESTEAFF

SEQ ID NO: 245551 - protein, 13 aa, Homo sapiens
  CDR3 for alpha chain variable domain of TCR clone 122776 (TRAV3, TRAJ31)
CAVGEGNNARLMF

SEQ ID NO: 245552 - protein, 15 aa, Homo sapiens
  CDR3 for beta chain variable domain of TCR clone 122776 (TRBV6-1, TRBJ1-1)
CASRTPGQLNTEAFF

SEQ ID NO: 245553 - protein, 13 aa, Homo sapiens
  CDR3 for alpha chain variable domain of TCR clone 122777 (TRAV12-1, TRAJ33)
CGDAPDSNYKLIW

SEQ ID NO: 245554 - protein, 12 aa, Homo sapiens
  CDR3 for beta chain variable domain of TCR clone 122777 (TRBV11-2, TRBJ2-2)
CASSLGGGELFF

SEQ ID NO: 245555 - protein, 12 aa, Homo sapiens
  CDR3 for alpha chain variable domain of TCR clone 122778 (TRAV8-3, TRAJ15)
CAVGAPLSALIF

SEQ ID NO: 245556 - protein, 17 aa, Homo sapiens
  CDR3 for beta chain variable domain of TCR clone 122778 (TRBV5-7, TRBJ1-1)
CASSLRFRGLMNTEAFF

SEQ ID NO: 245557 - protein, 10 aa, Homo sapiens
  CDR3 for alpha chain variable domain of TCR clone 122779 (TRAV30, TRAJ32)
CGTEKDKVVL

SEQ ID NO: 245558 - protein, 13 aa, Homo sapiens
  CDR3 for beta chain variable domain of TCR clone 122779 (TRBV10-3, TRBJ2-7)
CASKLAVNYEQYF

SEQ ID NO: 245559 - protein, 14 aa, Homo sapiens
  CDR3 for alpha chain variable domain of TCR clone 122780 (TRAV8-4, TRAJ17)
CAVSDQAAGNKQTF

SEQ ID NO: 245560 - protein, 15 aa, Homo sapiens
  CDR3 for beta chain variable domain of TCR clone 122780 (TRBV7-2, TRBJ1-2)
CASSLAPDRGLGYTF

SEQ ID NO: 245561 - protein, 15 aa, Homo sapiens
  CDR3 for alpha chain variable domain of TCR clone 122781 (TRAV13-1, TRAJ18)
CAASGGGSTLGRLDF

SEQ ID NO: 245562 - protein, 13 aa, Homo sapiens
  CDR3 for beta chain variable domain of TCR clone 122781 (TRBV18, TRBJ2-1)
CASGLASNNEQFF

SEQ ID NO: 245563 - protein, 13 aa, Homo sapiens
  CDR3 for alpha chain variable domain of TCR clone 122782 (TRAV8-6, TRAJ49)
CAVITNTGNQFYF

SEQ ID NO: 245564 - protein, 15 aa, Homo sapiens
  CDR3 for beta chain variable domain of TCR clone 122782 (TRBV5-1, TRBJ1-5)
CASSFWVVSPSILVM

SEQ ID NO: 245565 - protein, 12 aa, Homo sapiens
  CDR3 for alpha chain variable domain of TCR clone 122783 (TRAV12-3, TRAJ17)
CAMTLTDNKLTF

SEQ ID NO: 245566 - protein, 15 aa, Homo sapiens
  CDR3 for beta chain variable domain of TCR clone 122783 (TRBV20-1, TRBJ2-7)
CSARDRVPGMDEQYF

SEQ ID NO: 245567 - protein, 16 aa, Homo sapiens
  CDR3 for alpha chain variable domain of TCR clone 122784 (TRAV14/DV4, TRAJ54)
CAMREGRIQGAQKLVF

SEQ ID NO: 245568 - protein, 14 aa, Homo sapiens
  CDR3 for beta chain variable domain of TCR clone 122784 (TRBV19, TRBJ2-2)
CASSGQGIAGELFF

SEQ ID NO: 245569 - protein, 16 aa, Homo sapiens
  CDR3 for alpha chain variable domain of TCR clone 122785 (TRAV3, TRAJ21)
CAVRDIERGNFNKFYF

SEQ ID NO: 245570 - protein, 14 aa, Homo sapiens
  CDR3 for beta chain variable domain of TCR clone 122785 (TRBV7-8, TRBJ2-3)
CASSLEAGTDTQYF

SEQ ID NO: 245571 - protein, 14 aa, Homo sapiens
  CDR3 for alpha chain variable domain of TCR clone 122786 (TRAV13-1, TRAJ29)
CAASSNSGNTPLVF

SEQ ID NO: 245572 - protein, 15 aa, Homo sapiens
  CDR3 for beta chain variable domain of TCR clone 122786 (TRBV2, TRBJ2-1)
CATQARLVMIGEQFF

SEQ ID NO: 245573 - protein, 15 aa, Homo sapiens
  CDR3 for alpha chain variable domain of TCR clone 122787 (TRAV17, TRAJ10)
CATVLLTGGGNKPTF

SEQ ID NO: 245574 - protein, 16 aa, Homo sapiens
  CDR3 for beta chain variable domain of TCR clone 122787 (TRBV7-9, TRBJ2-3)
CASSPWREVGTDTQYF

SEQ ID NO: 245575 - protein, 14 aa, Homo sapiens
  CDR3 for alpha chain variable domain of TCR clone 122788 (TRAV26-1, TRAJ39)
CIVRGSRAGNMLTF

SEQ ID NO: 245576 - protein, 14 aa, Homo sapiens
  CDR3 for beta chain variable domain of TCR clone 122788 (TRBV10-3, TRBJ2-5)
CATSRDRDRETQYF

SEQ ID NO: 245577 - protein, 14 aa, Homo sapiens
  CDR3 for alpha chain variable domain of TCR clone 122789 (TRAV2, TRAJ9)
CAVEDRSGGFKTIF

SEQ ID NO: 245578 - protein, 17 aa, Homo sapiens
  CDR3 for beta chain variable domain of TCR clone 122789 (TRBV5-1, TRBJ2-2)
CASSRTSGRFSTGELFF

SEQ ID NO: 245579 - protein, 12 aa, Homo sapiens
  CDR3 for alpha chain variable domain of TCR clone 122790 (TRAV35, TRAJ49)
CAGWNTGNQFYF

SEQ ID NO: 245580 - protein, 16 aa, Homo sapiens
  CDR3 for beta chain variable domain of TCR clone 122790 (TRBV5-1, TRBJ2-2)
CASSLWDTTNTEELFF

SEQ ID NO: 245581 - protein, 15 aa, Homo sapiens
  CDR3 for alpha chain variable domain of TCR clone 122791 (TRAV12-3, TRAJ6)
CAMSATTGGSYIPTF

SEQ ID NO: 245582 - protein, 16 aa, Homo sapiens
  CDR3 for beta chain variable domain of TCR clone 122791 (TRBV20-1, TRBJ1-2)
CSASMGEGVANYGYTF

SEQ ID NO: 245583 - protein, 15 aa, Homo sapiens
  CDR3 for alpha chain variable domain of TCR clone 122792 (TRAV3, TRAJ5)
CAVRDIDTGRRAPTF

SEQ ID NO: 245584 - protein, 13 aa, Homo sapiens
  CDR3 for beta chain variable domain of TCR clone 122792 (TRBV12-4, TRBJ2-7)
CASSPTETYEQYF

SEQ ID NO: 245585 - protein, 14 aa, Homo sapiens
  CDR3 for alpha chain variable domain of TCR clone 122793 (TRAV13-1, TRAJ35)
CAASKGGFGNVLHC

SEQ ID NO: 245586 - protein, 15 aa, Homo sapiens
  CDR3 for beta chain variable domain of TCR clone 122793 (TRBV15, TRBJ2-1)
CATSRADRGHNEQFF

SEQ ID NO: 245587 - protein, 15 aa, Homo sapiens
  CDR3 for alpha chain variable domain of TCR clone 122794 (TRAV1-1, TRAJ4)
CAVRAFSGGYNKLIF

SEQ ID NO: 245588 - protein, 14 aa, Homo sapiens
  CDR3 for beta chain variable domain of TCR clone 122794 (TRBV4-1, TRBJ2-2)
CASSQAVNTGELFF

SEQ ID NO: 245589 - protein, 17 aa, Homo sapiens
  CDR3 for alpha chain variable domain of TCR clone 122795 (TRAV4, TRAJ18)
CLVGERSVGSTLGRLYF

SEQ ID NO: 245590 - protein, 16 aa, Homo sapiens
  CDR3 for beta chain variable domain of TCR clone 122795 (TRBV15, TRBJ1-4)
CATSRDSPPGRENLFF

SEQ ID NO: 245591 - protein, 20 aa, Homo sapiens
  CDR3 for alpha chain variable domain of TCR clone 122796 (TRAV21, TRAJ22)
SLVTQLPTLKSSGSARQLTF

SEQ ID NO: 245592 - protein, 16 aa, Homo sapiens
  CDR3 for beta chain variable domain of TCR clone 122796 (TRBV7-3, TRBJ2-2)
CASSLKRGTLSGELFF

SEQ ID NO: 245593 - protein, 14 aa, Homo sapiens
  CDR3 for alpha chain variable domain of TCR clone 122797 (TRAV27, TRAJ17)
CRSTIRAAGNKLTF

SEQ ID NO: 245594 - protein, 14 aa, Homo sapiens
  CDR3 for beta chain variable domain of TCR clone 122797 (TRBV2, TRBJ2-3)
CAVGGTISTDTQYF

SEQ ID NO: 245595 - protein, 11 aa, Homo sapiens
  CDR3 for alpha chain variable domain of TCR clone 122798 (TRAV35, TRAJ30)
CAGPGDDKIIF

SEQ ID NO: 245596 - protein, 12 aa, Homo sapiens
  CDR3 for beta chain variable domain of TCR clone 122798 (TRBV11-2, TRBJ2-2)
CASSLGGGELFF

SEQ ID NO: 245597 - protein, 12 aa, Homo sapiens
  CDR3 for alpha chain variable domain of TCR clone 122799 (TRAV2, TRAJ31)
CAVAEGNARLMF

SEQ ID NO: 245598 - protein, 18 aa, Homo sapiens
  CDR3 for beta chain variable domain of TCR clone 122799 (TRBV7-9, TRBJ2-3)
CASSLDLAGLATPDTQYF

SEQ ID NO: 245599 - protein, 12 aa, Homo sapiens
  CDR3 for alpha chain variable domain of TCR clone 122800 (TRAV26-1, TRAJ36)
CIVETGANNLFF

SEQ ID NO: 245600 - protein, 15 aa, Homo sapiens
  CDR3 for beta chain variable domain of TCR clone 122800 (TRBV20-1, TRBJ2-7)
CSARDRVSGMDEQYF

SEQ ID NO: 245601 - protein, 14 aa, Homo sapiens
  CDR3 for alpha chain variable domain of TCR clone 122801 (TRAV12-2, TRAJ13)
CAVKKTGGYQKVTF

SEQ ID NO: 245602 - protein, 15 aa, Homo sapiens
  CDR3 for beta chain variable domain of TCR clone 122801 (TRBV3-1, TRBJ2-7)
CASSQEWTGSYEQYF

SEQ ID NO: 245603 - protein, 16 aa, Homo sapiens
  CDR3 for alpha chain variable domain of TCR clone 122802 (TRAV23/DV6, TRAJ52)
CAARPSGGTSYGKLTF

SEQ ID NO: 245604 - protein, 15 aa, Homo sapiens
  CDR3 for beta chain variable domain of TCR clone 122802 (TRBV5-1, TRBJ2-3)
CASSVTSGSTDTQYF

SEQ ID NO: 245605 - protein, 13 aa, Homo sapiens
  CDR3 for alpha chain variable domain of TCR clone 122803 (TRAV12-1, TRAJ11)
CVVNRAGYSTLTF

SEQ ID NO: 245606 - protein, 12 aa, Homo sapiens
  CDR3 for beta chain variable domain of TCR clone 122803 (TRBV12-4, TRBJ2-7)
CASSLGGYEQYF

SEQ ID NO: 245607 - protein, 16 aa, Homo sapiens
  CDR3 for alpha chain variable domain of TCR clone 122804 (TRAV16, TRAJ52)
CALSAAGGASYGKLTF

SEQ ID NO: 245608 - protein, 16 aa, Homo sapiens
  CDR3 for beta chain variable domain of TCR clone 122804 (TRBV12-4, TRBJ1-5)
CASSRPVGGSNQPQHF

SEQ ID NO: 245609 - protein, 12 aa, Homo sapiens
  CDR3 for alpha chain variable domain of TCR clone 122805 (TRAV27, TRAJ35)
CAGADFGNVLHS

SEQ ID NO: 245610 - protein, 16 aa, Homo sapiens
  CDR3 for beta chain variable domain of TCR clone 122805 (TRBV6-1, TRBJ2-1)
CASISRQGSSYNEQFF

SEQ ID NO: 245611 - protein, 15 aa, Homo sapiens
  CDR3 for alpha chain variable domain of TCR clone 122806 (TRAV17, TRAJ16)
CATDARISDGQKLLF

SEQ ID NO: 245612 - protein, 15 aa, Homo sapiens
  CDR3 for beta chain variable domain of TCR clone 122806 (TRBV20-1, TRBJ2-7)
CSARDRVSGMDEQYF

SEQ ID NO: 245613 - protein, 14 aa, Homo sapiens
  CDR3 for alpha chain variable domain of TCR clone 122807 (TRAV17, TRAJ57)
CATDPQGGSEKLVF

SEQ ID NO: 245614 - protein, 16 aa, Homo sapiens
  CDR3 for beta chain variable domain of TCR clone 122807 (TRBV20-1, TRBJ1-4)
CSAPGQGILTNEKLFF

SEQ ID NO: 245615 - protein, 15 aa, Homo sapiens
  CDR3 for alpha chain variable domain of TCR clone 122808 (TRAV17, TRAJ57)
CATGPSQGGSEKLVF

SEQ ID NO: 245616 - protein, 15 aa, Homo sapiens
  CDR3 for beta chain variable domain of TCR clone 122808 (TRBV19, TRBJ2-2)
CASSLNRGVTGELFF

SEQ ID NO: 245617 - protein, 14 aa, Homo sapiens
  CDR3 for alpha chain variable domain of TCR clone 122809 (TRAV12-3, TRAJ10)
SHLPLTGGGNKLTF

SEQ ID NO: 245618 - protein, 12 aa, Homo sapiens
  CDR3 for beta chain variable domain of TCR clone 122809 (TRBV11-2, TRBJ2-2)
CASSLGGGELLF

SEQ ID NO: 245619 - protein, 13 aa, Homo sapiens
  CDR3 for alpha chain variable domain of TCR clone 122810 (TRAV23/DV6, TRAJ34)
CAAIENNTDKLIF

SEQ ID NO: 245620 - protein, 15 aa, Homo sapiens
  CDR3 for beta chain variable domain of TCR clone 122810 (TRBV20-1, TRBJ2-7)
CSAESGTSGAYEQYF

SEQ ID NO: 245621 - protein, 10 aa, Homo sapiens
  CDR3 for alpha chain variable domain of TCR clone 122811 (TRAV8-4, TRAJ43)
CAVSADDMRF

SEQ ID NO: 245622 - protein, 15 aa, Homo sapiens
  CDR3 for beta chain variable domain of TCR clone 122811 (TRBV5-1, TRBJ2-3)
CASSVTSGSTDTQYF

SEQ ID NO: 245623 - protein, 13 aa, Homo sapiens
  CDR3 for alpha chain variable domain of TCR clone 122812 (TRAV21, TRAJ57)
CAVTQGGSEKLVF

SEQ ID NO: 245624 - protein, 15 aa, Homo sapiens
  CDR3 for beta chain variable domain of TCR clone 122812 (TRBV5-1, TRBJ1-1)
CASSSTTGTNTEAFC

SEQ ID NO: 245625 - protein, 14 aa, Homo sapiens
  CDR3 for alpha chain variable domain of TCR clone 122813 (TRAV26-1, TRAJ48)
CIVRTNFGNEKLTF

SEQ ID NO: 245626 - protein, 12 aa, Homo sapiens
  CDR3 for beta chain variable domain of TCR clone 122813 (TRBV20-1, TRBJ2-7)
CSASSGANEQCF

SEQ ID NO: 245627 - protein, 14 aa, Homo sapiens
  CDR3 for alpha chain variable domain of TCR clone 122814 (TRAV12-1, TRAJ13)
CVVIDSGGYQKVTF

SEQ ID NO: 245628 - protein, 12 aa, Homo sapiens
  CDR3 for beta chain variable domain of TCR clone 122814 (TRBV29-1, TRBJ2-3)
CSVTGGADKQYF

SEQ ID NO: 245629 - protein, 15 aa, Homo sapiens
  CDR3 for alpha chain variable domain of TCR clone 122815 (TRAV14/DV4, TRAJ12)
CAMREGWDSSYKLIF

SEQ ID NO: 245630 - protein, 16 aa, Homo sapiens
  CDR3 for beta chain variable domain of TCR clone 122815 (TRBV2, TRBJ2-5)
CASSGTQGVGEETQYF

SEQ ID NO: 245631 - protein, 14 aa, Homo sapiens
  CDR3 for alpha chain variable domain of TCR clone 122816 (TRAV21, TRAJ58)
CAVRRGRSGSRLTF

SEQ ID NO: 245632 - protein, 13 aa, Homo sapiens
  CDR3 for beta chain variable domain of TCR clone 122816 (TRBV7-2, TRBJ1-6)
CASSLKVDSPLHF

SEQ ID NO: 245633 - protein, 15 aa, Homo sapiens
  CDR3 for alpha chain variable domain of TCR clone 122817 (TRAV2, TRAJ9)
CAVEDRGTGGFKTIF

SEQ ID NO: 245634 - protein, 16 aa, Homo sapiens
  CDR3 for beta chain variable domain of TCR clone 122817 (TRBV24-1, TRBJ2-3)
CATSDLGTGATDTQYF

SEQ ID NO: 245635 - protein, 12 aa, Homo sapiens
  CDR3 for alpha chain variable domain of TCR clone 122818 (TRAV20, TRAJ13)
CCVKRGYQKVTF

SEQ ID NO: 245636 - protein, 14 aa, Homo sapiens
  CDR3 for beta chain variable domain of TCR clone 122818 (TRBV2, TRBJ2-1)
CASRTGSSYNEQFF

SEQ ID NO: 245637 - protein, 15 aa, Homo sapiens
  CDR3 for alpha chain variable domain of TCR clone 122819 (TRAV8-2, TRAJ24)
CVVSDRTDSWGKLQF

SEQ ID NO: 245638 - protein, 12 aa, Homo sapiens
  CDR3 for beta chain variable domain of TCR clone 122819 (TRBV11-2, TRBJ2-2)
CASSLPTGELFF

SEQ ID NO: 245639 - protein, 10 aa, Homo sapiens
  CDR3 for alpha chain variable domain of TCR clone 122820 (TRAV35, TRAJ43)
LGGRNNDMRF

SEQ ID NO: 245640 - protein, 18 aa, Homo sapiens
  CDR3 for beta chain variable domain of TCR clone 122820 (TRBV11-2, TRBJ2-3)
CASSLGGASRGAPNTQYF

SEQ ID NO: 245641 - protein, 14 aa, Homo sapiens
  CDR3 for alpha chain variable domain of TCR clone 122821 (TRAV1-1, TRAJ27)
CAVIYNTNAGKSTF

SEQ ID NO: 245642 - protein, 11 aa, Homo sapiens
  CDR3 for beta chain variable domain of TCR clone 122821 (TRBV29-1, TRBJ2-5)
CSEDRTGTQYF

SEQ ID NO: 245643 - protein, 13 aa, Homo sapiens
  CDR3 for alpha chain variable domain of TCR clone 122822 (TRAV2, TRAJ40)
CAVVTSGTYKYIF

SEQ ID NO: 245644 - protein, 16 aa, Homo sapiens
  CDR3 for beta chain variable domain of TCR clone 122822 (TRBV19, TRBJ2-2)
CSSRSPGTGATGELFF

SEQ ID NO: 245645 - protein, 13 aa, Homo sapiens
  CDR3 for alpha chain variable domain of TCR clone 122823 (TRAV30, TRAJ24)
CGTVTDSWGKLQF

SEQ ID NO: 245646 - protein, 15 aa, Homo sapiens
  CDR3 for beta chain variable domain of TCR clone 122823 (TRBV25-1, TRBJ1-4)
CASSPGDSTNERLFF

SEQ ID NO: 245647 - protein, 15 aa, Homo sapiens
  CDR3 for alpha chain variable domain of TCR clone 122824 (TRAV2, TRAJ15)
CAVEDRNQAGTALLF

SEQ ID NO: 245648 - protein, 13 aa, Homo sapiens
  CDR3 for beta chain variable domain of TCR clone 122824 (TRBV10-2, TRBJ2-1)
CASGASGDAKQFF

SEQ ID NO: 245649 - protein, 14 aa, Homo sapiens
  CDR3 for alpha chain variable domain of TCR clone 122825 (TRAV13-1, TRAJ44)
CAAKATGTASKLTF

SEQ ID NO: 245650 - protein, 14 aa, Homo sapiens
  CDR3 for beta chain variable domain of TCR clone 122825 (TRBV7-9, TRBJ2-1)
CASSPRDSLYEQFF

SEQ ID NO: 245651 - protein, 14 aa, Homo sapiens
  CDR3 for alpha chain variable domain of TCR clone 122826 (TRAV26-1, TRAJ45)
CIELTGGGADGLTF

SEQ ID NO: 245652 - protein, 12 aa, Homo sapiens
  CDR3 for beta chain variable domain of TCR clone 122826 (TRBV12-4, TRBJ2-7)
CASSLGGYEQYF

SEQ ID NO: 245653 - protein, 13 aa, Homo sapiens
  CDR3 for alpha chain variable domain of TCR clone 122827 (TRAV27, TRAJ6)
CAGGTRGSYIPTF

SEQ ID NO: 245654 - protein, 14 aa, Homo sapiens
  CDR3 for beta chain variable domain of TCR clone 122827 (TRBV11-2, TRBJ2-3)
CASSLGGGANTQYF

SEQ ID NO: 245655 - protein, 11 aa, Homo sapiens
  CDR3 for alpha chain variable domain of TCR clone 122828 (TRAV1-2, TRAJ40)
CAFPGTYKYIF

SEQ ID NO: 245656 - protein, 16 aa, Homo sapiens
  CDR3 for beta chain variable domain of TCR clone 122828 (TRBV7-3, TRBJ2-2)
CASSLKRGTLSGELFF

SEQ ID NO: 245657 - protein, 14 aa, Homo sapiens
  CDR3 for alpha chain variable domain of TCR clone 122829 (TRAV12-1, TRAJ12)
CVVTRIDSSYKLIF

SEQ ID NO: 245658 - protein, 13 aa, Homo sapiens
  CDR3 for beta chain variable domain of TCR clone 122829 (TRBV20-1, TRBJ1-1)
CSARGGGDTEAFF

SEQ ID NO: 245659 - protein, 10 aa, Homo sapiens
  CDR3 for alpha chain variable domain of TCR clone 122830 (TRAV12-3, TRAJ49)
CAVHGNQFYF

SEQ ID NO: 245660 - protein, 12 aa, Homo sapiens
  CDR3 for beta chain variable domain of TCR clone 122830 (TRBV24-1, TRBJ2-7)
CATRDPGYEQYF

SEQ ID NO: 245661 - protein, 11 aa, Homo sapiens
  CDR3 for alpha chain variable domain of TCR clone 122831 (TRAV3, TRAJ49)
CAPITGNQFYF

SEQ ID NO: 245662 - protein, 16 aa, Homo sapiens
  CDR3 for beta chain variable domain of TCR clone 122831 (TRBV5-1, TRBJ2-3)
CASSIFPMSSTDAQYF

SEQ ID NO: 245663 - protein, 15 aa, Homo sapiens
  CDR3 for alpha chain variable domain of TCR clone 122832 (TRAV26-1, TRAJ11)
CIVRASNSGYSTLTF

SEQ ID NO: 245664 - protein, 11 aa, Homo sapiens
  CDR3 for beta chain variable domain of TCR clone 122832 (TRBV11-2, TRBJ2-2)
CASSLPGELFF

SEQ ID NO: 245665 - protein, 15 aa, Homo sapiens
  CDR3 for alpha chain variable domain of TCR clone 122833 (TRAV8-4, TRAJ37)
CAVSRGSGNTGKLIF

SEQ ID NO: 245666 - protein, 15 aa, Homo sapiens
  CDR3 for beta chain variable domain of TCR clone 122833 (TRBV7-2, TRBJ2-1)
CASTHGTGIYNEQFF

SEQ ID NO: 245667 - protein, 16 aa, Homo sapiens
  CDR3 for alpha chain variable domain of TCR clone 122834 (TRAV30, TRAJ24)
CGTEIVDADSWGKFQF

SEQ ID NO: 245668 - protein, 16 aa, Homo sapiens
  CDR3 for beta chain variable domain of TCR clone 122834 (TRBV5-1, TRBJ2-3)
CASSSVGRRSTDTQYF

SEQ ID NO: 245669 - protein, 15 aa, Homo sapiens
  CDR3 for alpha chain variable domain of TCR clone 122835 (TRAV12-3, TRAJ6)
CAMSATTGGSYIPTF

SEQ ID NO: 245670 - protein, 16 aa, Homo sapiens
  CDR3 for beta chain variable domain of TCR clone 122835 (TRBV11-2, TRBJ2-7)
CASSPTTGGVSYEQYF

SEQ ID NO: 245671 - protein, 16 aa, Homo sapiens
  CDR3 for alpha chain variable domain of TCR clone 122836 (TRAV30, TRAJ24)
CGTEIVDADSWGKFQF

SEQ ID NO: 245672 - protein, 15 aa, Homo sapiens
  CDR3 for beta chain variable domain of TCR clone 122836 (TRBV20-1, TRBJ2-7)
CSARDRVSGMGEQYF

SEQ ID NO: 245673 - protein, 12 aa, Homo sapiens
  CDR3 for alpha chain variable domain of TCR clone 122837 (TRAV24, TRAJ5)
CASYTGRRALTF

SEQ ID NO: 245674 - protein, 13 aa, Homo sapiens
  CDR3 for beta chain variable domain of TCR clone 122837 (TRBV27, TRBJ2-7)
CASSFVSSYEQYF

SEQ ID NO: 245675 - protein, 16 aa, Homo sapiens
  CDR3 for alpha chain variable domain of TCR clone 122838 (TRAV14/DV4, TRAJ37)
CAMREYGSGNTGKLIF

SEQ ID NO: 245676 - protein, 15 aa, Homo sapiens
  CDR3 for beta chain variable domain of TCR clone 122838 (TRBV2, TRBJ2-5)
CASSEQGLIGGTQYF

SEQ ID NO: 245677 - protein, 11 aa, Homo sapiens
  CDR3 for alpha chain variable domain of TCR clone 122839 (TRAV4, TRAJ23)
CLVAPGEKLIF

SEQ ID NO: 245678 - protein, 15 aa, Homo sapiens
  CDR3 for beta chain variable domain of TCR clone 122839 (TRBV7-2, TRBJ2-1)
CASSFQADEYNEQFF

SEQ ID NO: 245679 - protein, 16 aa, Homo sapiens
  CDR3 for alpha chain variable domain of TCR clone 122840 (TRAV12-1, TRAJ12)
CVVNTLLMDSSYKLIF

SEQ ID NO: 245680 - protein, 14 aa, Homo sapiens
  CDR3 for beta chain variable domain of TCR clone 122840 (TRBV18, TRBJ2-5)
CASSPGVSQETQYF

SEQ ID NO: 245681 - protein, 12 aa, Homo sapiens
  CDR3 for alpha chain variable domain of TCR clone 122841 (TRAV10, TRAJ43)
CVVVRVGNDMRF

SEQ ID NO: 245682 - protein, 15 aa, Homo sapiens
  CDR3 for beta chain variable domain of TCR clone 122841 (TRBV2, TRBJ2-7)
CASSEGLARSYEQYI

SEQ ID NO: 245683 - protein, 14 aa, Homo sapiens
  CDR3 for alpha chain variable domain of TCR clone 122842 (TRAV38-1, TRAJ43)
CDFMKHNNNNDMRF

SEQ ID NO: 245684 - protein, 17 aa, Homo sapiens
  CDR3 for beta chain variable domain of TCR clone 122842 (TRBV7-7, TRBJ1-4)
CASSLVGQGASNEKLFF

SEQ ID NO: 245685 - protein, 12 aa, Homo sapiens
  CDR3 for alpha chain variable domain of TCR clone 122843 (TRAV21, TRAJ33)
CAKMDSNYQLIW

SEQ ID NO: 245686 - protein, 14 aa, Homo sapiens
  CDR3 for beta chain variable domain of TCR clone 122843 (TRBV7-3, TRBJ2-1)
CASSLTGGANEQFF

SEQ ID NO: 245687 - protein, 14 aa, Homo sapiens
  CDR3 for alpha chain variable domain of TCR clone 122844 (TRAV1-2, TRAJ16)
CAVNRFSDGEKLLF

SEQ ID NO: 245688 - protein, 17 aa, Homo sapiens
  CDR3 for beta chain variable domain of TCR clone 122844 (TRBV20-1, TRBJ2-1)
CSASSSGLAGSYNEQFF

SEQ ID NO: 245689 - protein, 16 aa, Homo sapiens
  CDR3 for alpha chain variable domain of TCR clone 122845 (TRAV26-2, TRAJ57)
FILRDVGSGGSEKLVF

SEQ ID NO: 245690 - protein, 13 aa, Homo sapiens
  CDR3 for beta chain variable domain of TCR clone 122845 (TRBV18, TRBJ2-3)
CASSPGVTDTQYF

SEQ ID NO: 245691 - protein, 14 aa, Homo sapiens
  CDR3 for alpha chain variable domain of TCR clone 122846 (TRAV16, TRAJ44)
CALSTTGTASKLTF

SEQ ID NO: 245692 - protein, 17 aa, Homo sapiens
  CDR3 for beta chain variable domain of TCR clone 122846 (TRBV11-2, TRBJ2-1)
CASSLYPPGVEYNEQFF

SEQ ID NO: 245693 - protein, 18 aa, Homo sapiens
  CDR3 for alpha chain variable domain of TCR clone 122847 (TRAV8-3, TRAJ6)
CAVGAEHQEEATYLHLDE

SEQ ID NO: 245694 - protein, 14 aa, Homo sapiens
  CDR3 for beta chain variable domain of TCR clone 122847 (TRBV6-6, TRBJ2-7)
CASSDSGAGYEQYF

SEQ ID NO: 245695 - protein, 14 aa, Homo sapiens
  CDR3 for alpha chain variable domain of TCR clone 122848 (TRAV1-2, TRAJ8)
CAVRDDTGFQKLVF

SEQ ID NO: 245696 - protein, 15 aa, Homo sapiens
  CDR3 for beta chain variable domain of TCR clone 122848 (TRBV7-9, TRBJ1-1)
CASSHRGTVNTEAFF

SEQ ID NO: 245697 - protein, 13 aa, Homo sapiens
  CDR3 for alpha chain variable domain of TCR clone 122849 (TRAV2, TRAJ29)
CAEQSSGNTPLVF

SEQ ID NO: 245698 - protein, 13 aa, Homo sapiens
  CDR3 for beta chain variable domain of TCR clone 122849 (TRBV28, TRBJ1-2)
CASSPGNRNGYTF

SEQ ID NO: 245699 - protein, 11 aa, Homo sapiens
  CDR3 for alpha chain variable domain of TCR clone 122850 (TRAV2, TRAJ13)
CASVGYQKVTF

SEQ ID NO: 245700 - protein, 17 aa, Homo sapiens
  CDR3 for beta chain variable domain of TCR clone 122850 (TRBV20-1, TRBJ2-1)
CSARDPLAGVWDNEQFF

SEQ ID NO: 245701 - protein, 13 aa, Homo sapiens
  CDR3 for alpha chain variable domain of TCR clone 122851 (TRAV17, TRAJ9)
CATDYTGGFKTIF

SEQ ID NO: 245702 - protein, 14 aa, Homo sapiens
  CDR3 for beta chain variable domain of TCR clone 122851 (TRBV11-1, TRBJ2-7)
CASSLEREWGEQYF

SEQ ID NO: 245703 - protein, 15 aa, Homo sapiens
  CDR3 for alpha chain variable domain of TCR clone 122852 (TRAV3, TRAJ3)
CAVSDRDSNASKIIF

SEQ ID NO: 245704 - protein, 18 aa, Homo sapiens
  CDR3 for beta chain variable domain of TCR clone 122852 (TRBV25-1, TRBJ1-2)
CASSGLQNGQGLIFGYTF

SEQ ID NO: 245705 - protein, 14 aa, Homo sapiens
  CDR3 for alpha chain variable domain of TCR clone 122853 (TRAV16, TRAJ39)
CALSKNNAGNMLTF

SEQ ID NO: 245706 - protein, 14 aa, Homo sapiens
  CDR3 for beta chain variable domain of TCR clone 122853 (TRBV20-1, TRBJ1-1)
CSAQTRIGGTEAFF

SEQ ID NO: 245707 - protein, 12 aa, Homo sapiens
  CDR3 for alpha chain variable domain of TCR clone 122854 (TRAV13-2, TRAJ8)
CAPWLGFQKLVF

SEQ ID NO: 245708 - protein, 15 aa, Homo sapiens
  CDR3 for beta chain variable domain of TCR clone 122854 (TRBV19, TRBJ1-1)
CASDDRDGGHTEAFF

SEQ ID NO: 245709 - protein, 13 aa, Homo sapiens
  CDR3 for alpha chain variable domain of TCR clone 122855 (TRAV26-1, TRAJ33)
CIVRVEGNYQLIW

SEQ ID NO: 245710 - protein, 14 aa, Homo sapiens
  CDR3 for beta chain variable domain of TCR clone 122855 (TRBV7-3, TRBJ2-2)
CASSSGGYTGELFF

SEQ ID NO: 245711 - protein, 15 aa, Homo sapiens
  CDR3 for alpha chain variable domain of TCR clone 122856 (TRAV26-2, TRAJ28)
FILVESGAGSYQLTF

SEQ ID NO: 245712 - protein, 16 aa, Homo sapiens
  CDR3 for beta chain variable domain of TCR clone 122856 (TRBV4-2, TRBJ1-2)
CASSQEIGGASYGYTF

SEQ ID NO: 245713 - protein, 16 aa, Homo sapiens
  CDR3 for alpha chain variable domain of TCR clone 122857 (TRAV12-2, TRAJ32)
CAVNLGQGGDTNKLIF

SEQ ID NO: 245714 - protein, 12 aa, Homo sapiens
  CDR3 for beta chain variable domain of TCR clone 122857 (TRBV29-1, TRBJ2-3)
CSVTGGADTQYF

SEQ ID NO: 245715 - protein, 11 aa, Homo sapiens
  CDR3 for alpha chain variable domain of TCR clone 122858 (TRAV12-1, TRAJ21)
CVVNNFNKFYF

SEQ ID NO: 245716 - protein, 16 aa, Homo sapiens
  CDR3 for beta chain variable domain of TCR clone 122858 (TRBV20-1, TRBJ2-3)
CSAVRDRGPIADTQYF

SEQ ID NO: 245717 - protein, 18 aa, Homo sapiens
  CDR3 for alpha chain variable domain of TCR clone 122859 (TRAV21, TRAJ52)
CAVRPSPAGGTSYGKLTF

SEQ ID NO: 245718 - protein, 13 aa, Homo sapiens
  CDR3 for beta chain variable domain of TCR clone 122859 (TRBV10-3, TRBJ2-7)
CASKRAVNYEQYF

SEQ ID NO: 245719 - protein, 14 aa, Homo sapiens
  CDR3 for alpha chain variable domain of TCR clone 122860 (TRAV1-2, TRAJ16)
CAVNRFSDGQKLLF

SEQ ID NO: 245720 - protein, 13 aa, Homo sapiens
  CDR3 for beta chain variable domain of TCR clone 122860 (TRBV7-9, TRBJ1-2)
CARSLKQNYGYTF

SEQ ID NO: 245721 - protein, 15 aa, Homo sapiens
  CDR3 for alpha chain variable domain of TCR clone 122861 (TRAV21, TRAJ38)
CAVRQDAGNIRKLIW

SEQ ID NO: 245722 - protein, 16 aa, Homo sapiens
  CDR3 for beta chain variable domain of TCR clone 122861 (TRBV4-2, TRBJ1-1)
CASRPLDGGGDTEAFF

SEQ ID NO: 245723 - protein, 13 aa, Homo sapiens
  CDR3 for alpha chain variable domain of TCR clone 122862 (TRAV12-2, TRAJ39)
CAVNNNAGNRLTF

SEQ ID NO: 245724 - protein, 13 aa, Homo sapiens
  CDR3 for beta chain variable domain of TCR clone 122862 (TRBV2, TRBJ1-5)
CATAGPGNQPQHF

SEQ ID NO: 245725 - protein, 19 aa, Homo sapiens
  CDR3 for alpha chain variable domain of TCR clone 122863 (TRAV2, TRAJ20)
ILQVREADAAVYRDCKLSF

SEQ ID NO: 245726 - protein, 18 aa, Homo sapiens
  CDR3 for beta chain variable domain of TCR clone 122863 (TRBV20-1, TRBJ2-3)
CSASGLAGGPGTTDAQYF

SEQ ID NO: 245727 - protein, 17 aa, Homo sapiens
  CDR3 for alpha chain variable domain of TCR clone 122864 (TRAV3, TRAJ6)
CAVRDGPRAGGNYIPTF

SEQ ID NO: 245728 - protein, 14 aa, Homo sapiens
  CDR3 for beta chain variable domain of TCR clone 122864 (TRBV7-2, TRBJ2-7)
CASSPKTSFYEHYF

SEQ ID NO: 245729 - protein, 13 aa, Homo sapiens
  CDR3 for alpha chain variable domain of TCR clone 122865 (TRAV1-2, TRAJ9)
CAALNTGGFKTIF

SEQ ID NO: 245730 - protein, 14 aa, Homo sapiens
  CDR3 for beta chain variable domain of TCR clone 122865 (TRBV13, TRBJ2-3)
CASSAGSPTDTQYF

SEQ ID NO: 245731 - protein, 15 aa, Homo sapiens
  CDR3 for alpha chain variable domain of TCR clone 122866 (TRAV12-2, TRAJ53)
CAVNGGGGSNYKLTF

SEQ ID NO: 245732 - protein, 12 aa, Homo sapiens
  CDR3 for beta chain variable domain of TCR clone 122866 (TRBV12-4, TRBJ1-5)
CASSLGRQPQHF

SEQ ID NO: 245733 - protein, 15 aa, Homo sapiens
  CDR3 for alpha chain variable domain of TCR clone 122867 (TRAV8-4, TRAJ40)
CAVSSSTSGTYKYIF

SEQ ID NO: 245734 - protein, 13 aa, Homo sapiens
  CDR3 for beta chain variable domain of TCR clone 122867 (TRBV2, TRBJ2-1)
CATSRGTDNEQFF

SEQ ID NO: 245735 - protein, 13 aa, Homo sapiens
  CDR3 for alpha chain variable domain of TCR clone 122868 (TRAV36/DV7, TRAJ33)
CAVDMDSNYKLIW

SEQ ID NO: 245736 - protein, 16 aa, Homo sapiens
  CDR3 for beta chain variable domain of TCR clone 122868 (TRBV15, TRBJ2-3)
CATRLSGGRAPDTQYF

SEQ ID NO: 245737 - protein, 14 aa, Homo sapiens
  CDR3 for alpha chain variable domain of TCR clone 122869 (TRAV26-2, TRAJ31)
CILIPGNNNARLMF

SEQ ID NO: 245738 - protein, 14 aa, Homo sapiens
  CDR3 for beta chain variable domain of TCR clone 122869 (TRBV4-2, TRBJ2-1)
CASGLDRAYNEQFF

SEQ ID NO: 245739 - protein, 15 aa, Homo sapiens
  CDR3 for alpha chain variable domain of TCR clone 122870 (TRAV2, TRAJ9)
CAVEDRGTGGLKTIF

SEQ ID NO: 245740 - protein, 13 aa, Homo sapiens
  CDR3 for beta chain variable domain of TCR clone 122870 (TRBV20-1, TRBJ1-1)
CSARGGGNTEAFF

SEQ ID NO: 245741 - protein, 13 aa, Homo sapiens
  CDR3 for alpha chain variable domain of TCR clone 122871 (TRAV25, TRAJ10)
CAGRTGGGNKLTF

SEQ ID NO: 245742 - protein, 16 aa, Homo sapiens
  CDR3 for beta chain variable domain of TCR clone 122871 (TRBV11-3, TRBJ2-5)
CASSSVVAGSTETQYF

SEQ ID NO: 245743 - protein, 14 aa, Homo sapiens
  CDR3 for alpha chain variable domain of TCR clone 122872 (TRAV3, TRAJ9)
CAVRLNTAGFKTIF

SEQ ID NO: 245744 - protein, 15 aa, Homo sapiens
  CDR3 for beta chain variable domain of TCR clone 122872 (TRBV7-2, TRBJ2-1)
CASSLASGRVNEQFF

SEQ ID NO: 245745 - protein, 13 aa, Homo sapiens
  CDR3 for alpha chain variable domain of TCR clone 122873 (TRAV8-3, TRAJ40)
CAVDPSGTYKYIF

SEQ ID NO: 245746 - protein, 14 aa, Homo sapiens
  CDR3 for beta chain variable domain of TCR clone 122873 (TRBV6-1, TRBJ2-1)
CASAKDGFYNEQFF

SEQ ID NO: 245747 - protein, 14 aa, Homo sapiens
  CDR3 for alpha chain variable domain of TCR clone 122874 (TRAV9-2, TRAJ39)
CALYIYNAGNMLTF

SEQ ID NO: 245748 - protein, 16 aa, Homo sapiens
  CDR3 for beta chain variable domain of TCR clone 122874 (TRBV25-1, TRBJ2-7)
CASSELTGGGIYEQYF

SEQ ID NO: 245749 - protein, 13 aa, Homo sapiens
  CDR3 for alpha chain variable domain of TCR clone 122875 (TRAV2, TRAJ15)
CAVASQEGTALIF

SEQ ID NO: 245750 - protein, 16 aa, Homo sapiens
  CDR3 for beta chain variable domain of TCR clone 122875 (TRBV20-1, TRBJ1-4)
CSAPGQGLLTNEKLFF

SEQ ID NO: 245751 - protein, 15 aa, Homo sapiens
  CDR3 for alpha chain variable domain of TCR clone 122876 (TRAV17, TRAJ16)
CATALRFSDGQQLLF

SEQ ID NO: 245752 - protein, 12 aa, Homo sapiens
  CDR3 for beta chain variable domain of TCR clone 122876 (TRBV2, TRBJ2-7)
CASSDPDYEQYF

SEQ ID NO: 245753 - protein, 14 aa, Homo sapiens
  CDR3 for alpha chain variable domain of TCR clone 122877 (TRAV8-4, TRAJ12)
CAVSHGDSSYKLIF

SEQ ID NO: 245754 - protein, 14 aa, Homo sapiens
  CDR3 for beta chain variable domain of TCR clone 122877 (TRBV25-1, TRBJ1-1)
CASTHLGGNTEAFF

SEQ ID NO: 245755 - protein, 23 aa, Homo sapiens
  CDR3 for alpha chain variable domain of TCR clone 122878 (TRAV12-2, TRAJ36)
SLLIRDSQPSDSATLERANNLFF

SEQ ID NO: 245756 - protein, 13 aa, Homo sapiens
  CDR3 for beta chain variable domain of TCR clone 122878 (TRBV19, TRBJ1-2)
CASSQGQVYGYTF

SEQ ID NO: 245757 - protein, 16 aa, Homo sapiens
  CDR3 for alpha chain variable domain of TCR clone 122879 (TRAV3, TRAJ37)
CAVRGKGSGNTGKLIF

SEQ ID NO: 245758 - protein, 13 aa, Homo sapiens
  CDR3 for beta chain variable domain of TCR clone 122879 (TRBV14, TRBJ2-7)
CACSQDRRYEQYF

SEQ ID NO: 245759 - protein, 14 aa, Homo sapiens
  CDR3 for alpha chain variable domain of TCR clone 122880 (TRAV8-1, TRAJ5)
CAVSMDTCRRALTF

SEQ ID NO: 245760 - protein, 15 aa, Homo sapiens
  CDR3 for beta chain variable domain of TCR clone 122880 (TRBV19, TRBJ2-4)
CASRGPRRGENIQYF

SEQ ID NO: 245761 - protein, 13 aa, Homo sapiens
  CDR3 for alpha chain variable domain of TCR clone 122881 (TRAV13-1, TRAJ5)
CAARVTGRRALTF

SEQ ID NO: 245762 - protein, 15 aa, Homo sapiens
  CDR3 for beta chain variable domain of TCR clone 122881 (TRBV7-9, TRBJ2-7)
FASSPGGGLTYEQYF

SEQ ID NO: 245763 - protein, 16 aa, Homo sapiens
  CDR3 for alpha chain variable domain of TCR clone 122882 (TRAV12-2, TRAJ40)
CAVIRGGTSGTYKYIF

SEQ ID NO: 245764 - protein, 11 aa, Homo sapiens
  CDR3 for beta chain variable domain of TCR clone 122882 (TRBV7-9, TRBJ2-3)
CASSPTDTQYF

SEQ ID NO: 245765 - protein, 13 aa, Homo sapiens
  CDR3 for alpha chain variable domain of TCR clone 122883 (TRAV1-1, TRAJ9)
CAATNTGGFKTIF

SEQ ID NO: 245766 - protein, 13 aa, Homo sapiens
  CDR3 for beta chain variable domain of TCR clone 122883 (TRBV7-9, TRBJ1-2)
CASSLKQNYGYTF

SEQ ID NO: 245767 - protein, 15 aa, Homo sapiens
  CDR3 for alpha chain variable domain of TCR clone 122884 (TRAV3, TRAJ22)
CAVRDRGGFARQLTF

SEQ ID NO: 245768 - protein, 14 aa, Homo sapiens
  CDR3 for beta chain variable domain of TCR clone 122884 (TRBV19, TRBJ2-1)
CASSRLASINEQFF

SEQ ID NO: 245769 - protein, 14 aa, Homo sapiens
  CDR3 for alpha chain variable domain of TCR clone 122885 (TRAV13-1, TRAJ28)
CAASPGAGSYQLTF

SEQ ID NO: 245770 - protein, 15 aa, Homo sapiens
  CDR3 for beta chain variable domain of TCR clone 122885 (TRBV7-3, TRBJ2-1)
CASSPTGGGEVEQFF

SEQ ID NO: 245771 - protein, 13 aa, Homo sapiens
  CDR3 for alpha chain variable domain of TCR clone 122886 (TRAV27, TRAJ6)
CAGGTRGSYIPTF

SEQ ID NO: 245772 - protein, 14 aa, Homo sapiens
  CDR3 for beta chain variable domain of TCR clone 122886 (TRBV6-3, TRBJ1-1)
CACSYQRRDTEAFF

SEQ ID NO: 245773 - protein, 11 aa, Homo sapiens
  CDR3 for alpha chain variable domain of TCR clone 122887 (TRAV2, TRAJ33)
CAVESNYQLIW

SEQ ID NO: 245774 - protein, 13 aa, Homo sapiens
  CDR3 for beta chain variable domain of TCR clone 122887 (TRBV20-1, TRBJ1-1)
CSARVGGNTEAFF

SEQ ID NO: 245775 - protein, 12 aa, Homo sapiens
  CDR3 for alpha chain variable domain of TCR clone 122888 (TRAV38-2/DV8, TRAJ48)
CTLLSGNEKLTF

SEQ ID NO: 245776 - protein, 15 aa, Homo sapiens
  CDR3 for beta chain variable domain of TCR clone 122888 (TRBV6-1, TRBJ2-1)
CASSELRGQYNEQFF

SEQ ID NO: 245777 - protein, 15 aa, Homo sapiens
  CDR3 for alpha chain variable domain of TCR clone 122889 (TRAV3, TRAJ22)
CAVRDRGGSARQLTF

SEQ ID NO: 245778 - protein, 16 aa, Homo sapiens
  CDR3 for beta chain variable domain of TCR clone 122889 (TRBV11-2, TRBJ2-1)
CASARGSYSRHNEQFF

SEQ ID NO: 245779 - protein, 15 aa, Homo sapiens
  CDR3 for alpha chain variable domain of TCR clone 122890 (TRAV3, TRAJ32)
CAVSSYGGATNKLIF

SEQ ID NO: 245780 - protein, 16 aa, Homo sapiens
  CDR3 for beta chain variable domain of TCR clone 122890 (TRBV5-1, TRBJ2-5)
CANSLSLAGAQETQYF

SEQ ID NO: 245781 - protein, 16 aa, Homo sapiens
  CDR3 for alpha chain variable domain of TCR clone 122891 (TRAV1-2, TRAJ10)
CAVRGVLTGGGNKLTF

SEQ ID NO: 245782 - protein, 12 aa, Homo sapiens
  CDR3 for beta chain variable domain of TCR clone 122891 (TRBV7-8, TRBJ2-7)
CASSLVDREQYF

SEQ ID NO: 245783 - protein, 13 aa, Homo sapiens
  CDR3 for alpha chain variable domain of TCR clone 122892 (TRAV17, TRAJ9)
CATDYTGGFKTIF

SEQ ID NO: 245784 - protein, 14 aa, Homo sapiens
  CDR3 for beta chain variable domain of TCR clone 122892 (TRBV19, TRBJ2-5)
FASSMTGQQETQYF

SEQ ID NO: 245785 - protein, 12 aa, Homo sapiens
  CDR3 for alpha chain variable domain of TCR clone 122893 (TRAV12-2, TRAJ10)
WGVTGGGNKITF

SEQ ID NO: 245786 - protein, 16 aa, Homo sapiens
  CDR3 for beta chain variable domain of TCR clone 122893 (TRBV24-1, TRBJ2-3)
CATSDRRQDLTDTQYF

SEQ ID NO: 245787 - protein, 15 aa, Homo sapiens
  CDR3 for alpha chain variable domain of TCR clone 122894 (TRAV23/DV6, TRAJ37)
CAAGEGSSNTGKLIF

SEQ ID NO: 245788 - protein, 17 aa, Homo sapiens
  CDR3 for beta chain variable domain of TCR clone 122894 (TRBV20-1, TRBJ2-7)
CSATRAGGVAGVEDQYF

SEQ ID NO: 245789 - protein, 16 aa, Homo sapiens
  CDR3 for alpha chain variable domain of TCR clone 122895 (TRAV13-1, TRAJ48)
CAASIFGNFGNEKLTF

SEQ ID NO: 245790 - protein, 16 aa, Homo sapiens
  CDR3 for beta chain variable domain of TCR clone 122895 (TRBV7-2, TRBJ2-6)
CASSERRASGANVPTF

SEQ ID NO: 245791 - protein, 15 aa, Homo sapiens
  CDR3 for alpha chain variable domain of TCR clone 122896 (TRAV3, TRAJ4)
CAVRDGTGGYNKMIF

SEQ ID NO: 245792 - protein, 12 aa, Homo sapiens
  CDR3 for beta chain variable domain of TCR clone 122896 (TRBV7-9, TRBJ2-7)
CASSLFDYEQYF

SEQ ID NO: 245793 - protein, 16 aa, Homo sapiens
  CDR3 for alpha chain variable domain of TCR clone 122897 (TRAV16, TRAJ52)
CALSAAGGTSYGKLTF

SEQ ID NO: 245794 - protein, 13 aa, Homo sapiens
  CDR3 for beta chain variable domain of TCR clone 122897 (TRBV7-9, TRBJ1-2)
CASSLKQNYGYTF

SEQ ID NO: 245795 - protein, 11 aa, Homo sapiens
  CDR3 for alpha chain variable domain of TCR clone 122898 (TRAV3, TRAJ17)
PRGAAGNKLTF

SEQ ID NO: 245796 - protein, 14 aa, Homo sapiens
  CDR3 for beta chain variable domain of TCR clone 122898 (TRBV7-2, TRBJ2-7)
CASSPKTSFYEQYF

SEQ ID NO: 245797 - protein, 14 aa, Homo sapiens
  CDR3 for alpha chain variable domain of TCR clone 122899 (TRAV12-1, TRAJ12)
CVLTRMDSSYKLIF

SEQ ID NO: 245798 - protein, 13 aa, Homo sapiens
  CDR3 for beta chain variable domain of TCR clone 122899 (TRBV20-1, TRBJ1-1)
CSARGGGNTEAFF

SEQ ID NO: 245799 - protein, 15 aa, Homo sapiens
  CDR3 for alpha chain variable domain of TCR clone 122900 (TRAV35, TRAJ23)
CAGPLGNNQGGKLIF

SEQ ID NO: 245800 - protein, 14 aa, Homo sapiens
  CDR3 for beta chain variable domain of TCR clone 122900 (TRBV7-9, TRBJ1-1)
CASTPLQPYTEAFF

SEQ ID NO: 245801 - protein, 15 aa, Homo sapiens
  CDR3 for alpha chain variable domain of TCR clone 122901 (TRAV20, TRAJ50)
CAVRQMKTSYDKVIF

SEQ ID NO: 245802 - protein, 17 aa, Homo sapiens
  CDR3 for beta chain variable domain of TCR clone 122901 (TRBV28, TRBJ2-7)
RASSPLHRASGVYEQYF

SEQ ID NO: 245803 - protein, 15 aa, Homo sapiens
  CDR3 for alpha chain variable domain of TCR clone 122902 (TRAV8-3, TRAJ27)
CAVGPSETNAGKSTL

SEQ ID NO: 245804 - protein, 15 aa, Homo sapiens
  CDR3 for beta chain variable domain of TCR clone 122902 (TRBV7-9, TRBJ1-6)
CASSSPGRGNSPLHF

SEQ ID NO: 245805 - protein, 15 aa, Homo sapiens
  CDR3 for alpha chain variable domain of TCR clone 122903 (TRAV8-3, TRAJ45)
RASSYSGGGADGLTF

SEQ ID NO: 245806 - protein, 13 aa, Homo sapiens
  CDR3 for beta chain variable domain of TCR clone 122903 (TRBV10-3, TRBJ2-7)
CVSKLAVNYEQYF

SEQ ID NO: 245807 - protein, 15 aa, Homo sapiens
  CDR3 for alpha chain variable domain of TCR clone 122904 (TRAV26-1, TRAJ15)
PHATLRDQAGTALIF

SEQ ID NO: 245808 - protein, 15 aa, Homo sapiens
  CDR3 for beta chain variable domain of TCR clone 122904 (TRBV11-1, TRBJ2-7)
CASSLNYGASYEQYF

SEQ ID NO: 245809 - protein, 12 aa, Homo sapiens
  CDR3 for alpha chain variable domain of TCR clone 122905 (TRAV25, TRAJ11)
CAGASGYSTLTF

SEQ ID NO: 245810 - protein, 14 aa, Homo sapiens
  CDR3 for beta chain variable domain of TCR clone 122905 (TRBV5-8, TRBJ2-3)
CASSLGQGTDTKYF

SEQ ID NO: 245811 - protein, 14 aa, Homo sapiens
  CDR3 for alpha chain variable domain of TCR clone 122906 (TRAV35, TRAJ44)
CAGRPSRTASKLTF

SEQ ID NO: 245812 - protein, 14 aa, Homo sapiens
  CDR3 for beta chain variable domain of TCR clone 122906 (TRBV7-2, TRBJ1-3)
CASSRGGTGNTMYF

SEQ ID NO: 245813 - protein, 12 aa, Homo sapiens
  CDR3 for alpha chain variable domain of TCR clone 122907 (TRAV12-2, TRAJ47)
CAAAEYGNKLVF

SEQ ID NO: 245814 - protein, 14 aa, Homo sapiens
  CDR3 for beta chain variable domain of TCR clone 122907 (TRBV20-1, TRBJ1-1)
CSAMGGTANTEAFF

SEQ ID NO: 245815 - protein, 13 aa, Homo sapiens
  CDR3 for alpha chain variable domain of TCR clone 122908 (TRAV21, TRAJ57)
CAVTQGGSEKLVF

SEQ ID NO: 245816 - protein, 17 aa, Homo sapiens
  CDR3 for beta chain variable domain of TCR clone 122908 (TRBV7-3, TRBJ2-3)
CASSLMKRMRGADTQYF

SEQ ID NO: 245817 - protein, 15 aa, Homo sapiens
  CDR3 for alpha chain variable domain of TCR clone 122909 (TRAV3, TRAJ47)
CAVRDIGEYGNKLVF

SEQ ID NO: 245818 - protein, 19 aa, Homo sapiens
  CDR3 for beta chain variable domain of TCR clone 122909 (TRBV25-1, TRBJ2-2)
CAILVYRVDRGRKTGELFL

SEQ ID NO: 245819 - protein, 14 aa, Homo sapiens
  CDR3 for alpha chain variable domain of TCR clone 122910 (TRAV2, TRAJ37)
CAVDFTDNTGKLIF

SEQ ID NO: 245820 - protein, 15 aa, Homo sapiens
  CDR3 for beta chain variable domain of TCR clone 122910 (TRBV20-1, TRBJ1-1)
CSASRGVTGYTEAFF

SEQ ID NO: 245821 - protein, 14 aa, Homo sapiens
  CDR3 for alpha chain variable domain of TCR clone 122911 (TRAV26-1, TRAJ38)
CIADNAGNNRKLIW

SEQ ID NO: 245822 - protein, 16 aa, Homo sapiens
  CDR3 for beta chain variable domain of TCR clone 122911 (TRBV12-4, TRBJ1-5)
CASSRPVGGSNQPQHF

SEQ ID NO: 245823 - protein, 12 aa, Homo sapiens
  CDR3 for alpha chain variable domain of TCR clone 122912 (TRAV13-1, TRAJ21)
CAAKEGFNKFYF

SEQ ID NO: 245824 - protein, 13 aa, Homo sapiens
  CDR3 for beta chain variable domain of TCR clone 122912 (TRBV19, TRBJ2-2)
CASSIWSTGELFF

SEQ ID NO: 245825 - protein, 13 aa, Homo sapiens
  CDR3 for alpha chain variable domain of TCR clone 122913 (TRAV8-3, TRAJ28)
CAVGAVGSYQRTF

SEQ ID NO: 245826 - protein, 13 aa, Homo sapiens
  CDR3 for beta chain variable domain of TCR clone 122913 (TRBV29-1, TRBJ2-1)
CSVEGGRVNEQFF

SEQ ID NO: 245827 - protein, 11 aa, Homo sapiens
  CDR3 for alpha chain variable domain of TCR clone 122914 (TRAV21, TRAJ34)
CAHYNTDKLIF

SEQ ID NO: 245828 - protein, 13 aa, Homo sapiens
  CDR3 for beta chain variable domain of TCR clone 122914 (TRBV7-6, TRBJ1-2)
CASSLVAYYGYTF

SEQ ID NO: 245829 - protein, 14 aa, Homo sapiens
  CDR3 for alpha chain variable domain of TCR clone 122915 (TRAV12-2, TRAJ24)
CAVTPADSWGKLQF

SEQ ID NO: 245830 - protein, 12 aa, Homo sapiens
  CDR3 for beta chain variable domain of TCR clone 122915 (TRBV3-1, TRBJ2-1)
CASSQGSSRQFF

SEQ ID NO: 245831 - protein, 12 aa, Homo sapiens
  CDR3 for alpha chain variable domain of TCR clone 122916 (TRAV8-3, TRAJ26)
CAGDNYGQNFVF

SEQ ID NO: 245832 - protein, 17 aa, Homo sapiens
  CDR3 for beta chain variable domain of TCR clone 122916 (TRBV2, TRBJ1-6)
CASSLRSGVLMTSPLHF

SEQ ID NO: 245833 - protein, 13 aa, Homo sapiens
  CDR3 for alpha chain variable domain of TCR clone 122917 (TRAV13-1, TRAJ5)
CAARVTGRRALTF

SEQ ID NO: 245834 - protein, 15 aa, Homo sapiens
  CDR3 for beta chain variable domain of TCR clone 122917 (TRBV7-9, TRBJ2-7)
CASSPGCGLTYEQYF

SEQ ID NO: 245835 - protein, 13 aa, Homo sapiens
  CDR3 for alpha chain variable domain of TCR clone 122918 (TRAV12-1, TRAJ13)
CVVNLGGYQKVTF

SEQ ID NO: 245836 - protein, 13 aa, Homo sapiens
  CDR3 for beta chain variable domain of TCR clone 122918 (TRBV7-9, TRBJ1-2)
CASSLKQNYGYTF

SEQ ID NO: 245837 - protein, 15 aa, Homo sapiens
  CDR3 for alpha chain variable domain of TCR clone 122919 (TRAV14/DV4, TRAJ10)
CAMRVLTGGGNKLTF

SEQ ID NO: 245838 - protein, 15 aa, Homo sapiens
  CDR3 for beta chain variable domain of TCR clone 122919 (TRBV3-1, TRBJ2-5)
CASSANLGGPETQYF

SEQ ID NO: 245839 - protein, 17 aa, Homo sapiens
  CDR3 for alpha chain variable domain of TCR clone 122920 (TRAV3, TRAJ6)
CAVRDGPRAGGSYITTF

SEQ ID NO: 245840 - protein, 13 aa, Homo sapiens
  CDR3 for beta chain variable domain of TCR clone 122920 (TRBV27, TRBJ1-1)
CASSLSIGAEAFF

SEQ ID NO: 245841 - protein, 15 aa, Homo sapiens
  CDR3 for alpha chain variable domain of TCR clone 122921 (TRAV26-1, TRAJ39)
CIVRVARNAGNMLTF

SEQ ID NO: 245842 - protein, 14 aa, Homo sapiens
  CDR3 for beta chain variable domain of TCR clone 122921 (TRBV19, TRBJ2-1)
CASPTFVLSGEQFF

SEQ ID NO: 245843 - protein, 12 aa, Homo sapiens
  CDR3 for alpha chain variable domain of TCR clone 122922 (TRAV13-1, TRAJ49)
CAASPMGNQFYF

SEQ ID NO: 245844 - protein, 14 aa, Homo sapiens
  CDR3 for beta chain variable domain of TCR clone 122922 (TRBV25-1, TRBJ1-1)
CASTHLGGNTEAFF

SEQ ID NO: 245845 - protein, 13 aa, Homo sapiens
  CDR3 for alpha chain variable domain of TCR clone 122923 (TRAV20, TRAJ37)
CAGCSSNTGKLIF

SEQ ID NO: 245846 - protein, 21 aa, Homo sapiens
  CDR3 for beta chain variable domain of TCR clone 122923 (TRBV4-2, TRBJ2-3)
PCSQKARPCISVPAAPDTQYF

SEQ ID NO: 245847 - protein, 14 aa, Homo sapiens
  CDR3 for alpha chain variable domain of TCR clone 122924 (TRAV16, TRAJ29)
CALTRNSGNTPLVF

SEQ ID NO: 245848 - protein, 13 aa, Homo sapiens
  CDR3 for beta chain variable domain of TCR clone 122924 (TRBV4-1, TRBJ2-7)
CASSQGQAYEQYF

SEQ ID NO: 245849 - protein, 15 aa, Homo sapiens
  CDR3 for alpha chain variable domain of TCR clone 122925 (TRAV12-1, TRAJ44)
CVTDLPTGTASKLTF

SEQ ID NO: 245850 - protein, 13 aa, Homo sapiens
  CDR3 for beta chain variable domain of TCR clone 122925 (TRBV6-5, TRBJ2-5)
CASSPQGGETQYF

SEQ ID NO: 245851 - protein, 15 aa, Homo sapiens
  CDR3 for alpha chain variable domain of TCR clone 122926 (TRAV12-2, TRAJ50)
CAVNGLETSYDKVIF

SEQ ID NO: 245852 - protein, 11 aa, Homo sapiens
  CDR3 for beta chain variable domain of TCR clone 122926 (TRBV12-4, TRBJ2-3)
CASTATDTQYF

SEQ ID NO: 245853 - protein, 15 aa, Homo sapiens
  CDR3 for alpha chain variable domain of TCR clone 122927 (TRAV21, TRAJ10)
CAVPLLTGGGNKLPF

SEQ ID NO: 245854 - protein, 14 aa, Homo sapiens
  CDR3 for beta chain variable domain of TCR clone 122927 (TRBV12-4, TRBJ1-1)
CASSLGTGGTEAFF

SEQ ID NO: 245855 - protein, 14 aa, Homo sapiens
  CDR3 for alpha chain variable domain of TCR clone 122928 (TRAV1-1, TRAJ34)
CAVSPSYNTDKPIF

SEQ ID NO: 245856 - protein, 15 aa, Homo sapiens
  CDR3 for beta chain variable domain of TCR clone 122928 (TRBV6-3, TRBJ2-7)
CASSSPGTVFYEQYF

SEQ ID NO: 245857 - protein, 15 aa, Homo sapiens
  CDR3 for alpha chain variable domain of TCR clone 122929 (TRAV35, TRAJ20)
CAGQLVVSNDYKLSF

SEQ ID NO: 245858 - protein, 13 aa, Homo sapiens
  CDR3 for beta chain variable domain of TCR clone 122929 (TRBV19, TRBJ2-7)
CASSKTGTHEQYF

SEQ ID NO: 245859 - protein, 14 aa, Homo sapiens
  CDR3 for alpha chain variable domain of TCR clone 122930 (TRAV8-3, TRAJ39)
CAVGAGGAGNMLTF

SEQ ID NO: 245860 - protein, 16 aa, Homo sapiens
  CDR3 for beta chain variable domain of TCR clone 122930 (TRBV7-2, TRBJ1-3)
CASSSGRVLSGNTIYF

SEQ ID NO: 245861 - protein, 12 aa, Homo sapiens
  CDR3 for alpha chain variable domain of TCR clone 122931 (TRAV4, TRAJ26)
CLVGDYGQNFVF

SEQ ID NO: 245862 - protein, 16 aa, Homo sapiens
  CDR3 for beta chain variable domain of TCR clone 122931 (TRBV7-2, TRBJ1-2)
CASSSNQYRRGHGYTF

SEQ ID NO: 245863 - protein, 12 aa, Homo sapiens
  CDR3 for alpha chain variable domain of TCR clone 122932 (TRAV13-2, TRAJ8)
CAPWLGFQKLVF

SEQ ID NO: 245864 - protein, 18 aa, Homo sapiens
  CDR3 for beta chain variable domain of TCR clone 122932 (TRBV11-3, TRBJ2-3)
CASSLGGASRGAPNTQYF

SEQ ID NO: 245865 - protein, 15 aa, Homo sapiens
  CDR3 for alpha chain variable domain of TCR clone 122933 (TRAV17, TRAJ57)
CATGPSQGGSEKLVL

SEQ ID NO: 245866 - protein, 14 aa, Homo sapiens
  CDR3 for beta chain variable domain of TCR clone 122933 (TRBV11-2, TRBJ1-2)
CASSLYRGNYGYTF

SEQ ID NO: 245867 - protein, 14 aa, Homo sapiens
  CDR3 for alpha chain variable domain of TCR clone 122934 (TRAV12-1, TRAJ17)
CVVNYKAAGNKLTF

SEQ ID NO: 245868 - protein, 19 aa, Homo sapiens
  CDR3 for beta chain variable domain of TCR clone 122934 (TRBV12-4, TRBJ2-1)
CASTLAFDPRDKEANEQFF

SEQ ID NO: 245869 - protein, 13 aa, Homo sapiens
  CDR3 for alpha chain variable domain of TCR clone 122935 (TRAV21, TRAJ57)
CAVTQGGSEKLVF

SEQ ID NO: 245870 - protein, 18 aa, Homo sapiens
  CDR3 for beta chain variable domain of TCR clone 122935 (TRBV29-1, TRBJ2-7)
CSVEDAEEVRPTSSTSGR

SEQ ID NO: 245871 - protein, 18 aa, Homo sapiens
  CDR3 for alpha chain variable domain of TCR clone 122936 (TRAV12-3, TRAJ52)
CAMSRTNAGGTSYGKLTF

SEQ ID NO: 245872 - protein, 13 aa, Homo sapiens
  CDR3 for beta chain variable domain of TCR clone 122936 (TRBV6-4, TRBJ1-5)
CASSADLNQPQHF

SEQ ID NO: 245873 - protein, 14 aa, Homo sapiens
  CDR3 for alpha chain variable domain of TCR clone 122937 (TRAV17, TRAJ45)
CATASGGGADGLTF

SEQ ID NO: 245874 - protein, 15 aa, Homo sapiens
  CDR3 for beta chain variable domain of TCR clone 122937 (TRBV11-2, TRBJ2-1)
CASSRNRGLMYEQFV

SEQ ID NO: 245875 - protein, 14 aa, Homo sapiens
  CDR3 for alpha chain variable domain of TCR clone 122938 (TRAV20, TRAJ17)
CAVQARAAGNKLTF

SEQ ID NO: 245876 - protein, 14 aa, Homo sapiens
  CDR3 for beta chain variable domain of TCR clone 122938 (TRBV7-8, TRBJ2-3)
CASSLEAGTDTQYF

SEQ ID NO: 245877 - protein, 15 aa, Homo sapiens
  CDR3 for alpha chain variable domain of TCR clone 122939 (TRAV13-1, TRAJ50)
CAAKGSETSYDKVIF

SEQ ID NO: 245878 - protein, 18 aa, Homo sapiens
  CDR3 for beta chain variable domain of TCR clone 122939 (TRBV10-3, TRBJ2-1)
CTSVPSVGLRGGVDEQFF

SEQ ID NO: 245879 - protein, 18 aa, Homo sapiens
  CDR3 for alpha chain variable domain of TCR clone 122940 (TRAV21, TRAJ52)
CAVRPSPAGGTSYGKLTF

SEQ ID NO: 245880 - protein, 16 aa, Homo sapiens
  CDR3 for beta chain variable domain of TCR clone 122940 (TRBV13, TRBJ2-3)
CQSLSRVAGGRNTQYF

SEQ ID NO: 245881 - protein, 13 aa, Homo sapiens
  CDR3 for alpha chain variable domain of TCR clone 122941 (TRAV22, TRAJ9)
CAVGSTGGFKTIF

SEQ ID NO: 245882 - protein, 15 aa, Homo sapiens
  CDR3 for beta chain variable domain of TCR clone 122941 (TRBV6-3, TRBJ2-7)
CASSSPGTVFYEQYF

SEQ ID NO: 245883 - protein, 13 aa, Homo sapiens
  CDR3 for alpha chain variable domain of TCR clone 122942 (TRAV29/DV5, TRAJ31)
CAASRNNNARLMF

SEQ ID NO: 245884 - protein, 15 aa, Homo sapiens
  CDR3 for beta chain variable domain of TCR clone 122942 (TRBV19, TRBJ1-2)
CASSVGQVLNYGYTF

SEQ ID NO: 245885 - protein, 16 aa, Homo sapiens
  CDR3 for alpha chain variable domain of TCR clone 122943 (TRAV30, TRAJ24)
CGTEIVDADSWGKFQF

SEQ ID NO: 245886 - protein, 14 aa, Homo sapiens
  CDR3 for beta chain variable domain of TCR clone 122943 (TRBV7-6, TRBJ2-7)
CASSFRQGADEQYF

SEQ ID NO: 245887 - protein, 14 aa, Homo sapiens
  CDR3 for alpha chain variable domain of TCR clone 122944 (TRAV21, TRAJ28)
CAVGSGAGSSQLTF

SEQ ID NO: 245888 - protein, 14 aa, Homo sapiens
  CDR3 for beta chain variable domain of TCR clone 122944 (TRBV18, TRBJ1-4)
CASSPGPNGEKLFF

SEQ ID NO: 245889 - protein, 14 aa, Homo sapiens
  CDR3 for alpha chain variable domain of TCR clone 122945 (TRAV1-2, TRAJ8)
CAVREDTGFQKLAF

SEQ ID NO: 245890 - protein, 17 aa, Homo sapiens
  CDR3 for beta chain variable domain of TCR clone 122945 (TRBV11-2, TRBJ2-1)
CASSLYPPGVEYNEQFF

SEQ ID NO: 245891 - protein, 12 aa, Homo sapiens
  CDR3 for alpha chain variable domain of TCR clone 122946 (TRAV12-3, TRAJ17)
CAMTLTGNKPTF

SEQ ID NO: 245892 - protein, 14 aa, Homo sapiens
  CDR3 for beta chain variable domain of TCR clone 122946 (TRBV4-1, TRBJ2-7)
CASSQDREHVEQYF

SEQ ID NO: 245893 - protein, 10 aa, Homo sapiens
  CDR3 for alpha chain variable domain of TCR clone 122947 (TRAV12-2, TRAJ43)
CAGKVLSMRF

SEQ ID NO: 245894 - protein, 14 aa, Homo sapiens
  CDR3 for beta chain variable domain of TCR clone 122947 (TRBV11-2, TRBJ2-7)
CASSLGNSLYEQYF

SEQ ID NO: 245895 - protein, 20 aa, Homo sapiens
  CDR3 for alpha chain variable domain of TCR clone 122948 (TRAV26-1, TRAJ38)
CIADNAGNNHIQNPDPAVNQ

SEQ ID NO: 245896 - protein, 13 aa, Homo sapiens
  CDR3 for beta chain variable domain of TCR clone 122948 (TRBV20-1, TRBJ1-1)
CSARGGGNTEAFF

SEQ ID NO: 245897 - protein, 12 aa, Homo sapiens
  CDR3 for alpha chain variable domain of TCR clone 122949 (TRAV12-3, TRAJ17)
CAMTLTGNRLTF

SEQ ID NO: 245898 - protein, 11 aa, Homo sapiens
  CDR3 for beta chain variable domain of TCR clone 122949 (TRBV12-4, TRBJ2-2)
CASSSAGELFF

SEQ ID NO: 245899 - protein, 16 aa, Homo sapiens
  CDR3 for alpha chain variable domain of TCR clone 122950 (TRAV38-1, TRAJ32)
CAFMKGGGGATNTLIF

SEQ ID NO: 245900 - protein, 13 aa, Homo sapiens
  CDR3 for beta chain variable domain of TCR clone 122950 (TRBV20-1, TRBJ2-5)
CSAREAFQETQYF

SEQ ID NO: 245901 - protein, 13 aa, Homo sapiens
  CDR3 for alpha chain variable domain of TCR clone 122951 (TRAV17, TRAJ9)
CATDYTGGFKTIF

SEQ ID NO: 245902 - protein, 14 aa, Homo sapiens
  CDR3 for beta chain variable domain of TCR clone 122951 (TRBV18, TRBJ2-7)
CASSPRGGAYEQYF

SEQ ID NO: 245903 - protein, 14 aa, Homo sapiens
  CDR3 for alpha chain variable domain of TCR clone 122952 (TRAV16, TRAJ33)
CALSAMDSNYQLIW

SEQ ID NO: 245904 - protein, 14 aa, Homo sapiens
  CDR3 for beta chain variable domain of TCR clone 122952 (TRBV18, TRBJ2-3)
CASSGLADTDTQYF

SEQ ID NO: 245905 - protein, 11 aa, Homo sapiens
  CDR3 for alpha chain variable domain of TCR clone 122953 (TRAV12-3, TRAJ27)
CAMANAGKSTF

SEQ ID NO: 245906 - protein, 13 aa, Homo sapiens
  CDR3 for beta chain variable domain of TCR clone 122953 (TRBV20-1, TRBJ1-1)
CSARVGGNTEGFF

SEQ ID NO: 245907 - protein, 14 aa, Homo sapiens
  CDR3 for alpha chain variable domain of TCR clone 122954 (TRAV26-1, TRAJ38)
CIADNAGNNHIQNP

SEQ ID NO: 245908 - protein, 13 aa, Homo sapiens
  CDR3 for beta chain variable domain of TCR clone 122954 (TRBV10-3, TRBJ2-7)
CASKLAVNYEQYF

SEQ ID NO: 245909 - protein, 14 aa, Homo sapiens
  CDR3 for alpha chain variable domain of TCR clone 122955 (TRAV12-2, TRAJ45)
CAVNIQGKADGLTF

SEQ ID NO: 245910 - protein, 15 aa, Homo sapiens
  CDR3 for beta chain variable domain of TCR clone 122955 (TRBV4-1, TRBJ2-1)
CASSQDAGGLYEQFF

SEQ ID NO: 245911 - protein, 14 aa, Homo sapiens
  CDR3 for alpha chain variable domain of TCR clone 122956 (TRAV12-3, TRAJ10)
SHLPLTGGGNKLTF

SEQ ID NO: 245912 - protein, 15 aa, Homo sapiens
  CDR3 for beta chain variable domain of TCR clone 122956 (TRBV27, TRBJ1-5)
CASSLGTGLDQPQHF

SEQ ID NO: 245913 - protein, 11 aa, Homo sapiens
  CDR3 for alpha chain variable domain of TCR clone 122957 (TRAV1-1, TRAJ23)
SAVRQGGKLIF

SEQ ID NO: 245914 - protein, 20 aa, Homo sapiens
  CDR3 for beta chain variable domain of TCR clone 122957 (TRBV7-8, TRBJ2-2)
CASSHLFPGPTVHITGELFF

SEQ ID NO: 245915 - protein, 14 aa, Homo sapiens
  CDR3 for alpha chain variable domain of TCR clone 122958 (TRAV12-2, TRAJ53)
CAGKGGGSNYKLTF

SEQ ID NO: 245916 - protein, 16 aa, Homo sapiens
  CDR3 for beta chain variable domain of TCR clone 122958 (TRBV20-1, TRBJ1-2)
CSASMGQGVANYGYTF

SEQ ID NO: 245917 - protein, 11 aa, Homo sapiens
  CDR3 for alpha chain variable domain of TCR clone 122959 (TRAV2, TRAJ33)
CAVESNYQLIW

SEQ ID NO: 245918 - protein, 16 aa, Homo sapiens
  CDR3 for beta chain variable domain of TCR clone 122959 (TRBV24-1, TRBJ2-3)
CATSDPGTGATDTQYF

SEQ ID NO: 245919 - protein, 12 aa, Homo sapiens
  CDR3 for alpha chain variable domain of TCR clone 122960 (TRAV12-1, TRAJ40)
CVFYSGTYKYIF

SEQ ID NO: 245920 - protein, 18 aa, Homo sapiens
  CDR3 for beta chain variable domain of TCR clone 122960 (TRBV12-4, TRBJ2-2)
CASSLVAGTRGQTGELFF

SEQ ID NO: 245921 - protein, 13 aa, Homo sapiens
  CDR3 for alpha chain variable domain of TCR clone 122961 (TRAV21, TRAJ20)
CAVGLRVDYKLSF

SEQ ID NO: 245922 - protein, 15 aa, Homo sapiens
  CDR3 for beta chain variable domain of TCR clone 122961 (TRBV29-1, TRBJ2-1)
CSVPTGLALYNEQFF

SEQ ID NO: 245923 - protein, 15 aa, Homo sapiens
  CDR3 for alpha chain variable domain of TCR clone 122962 (TRAV12-3, TRAJ11)
CAMSEENSGYSTLTF

SEQ ID NO: 245924 - protein, 19 aa, Homo sapiens
  CDR3 for beta chain variable domain of TCR clone 122962 (TRBV19, TRBJ2-5)
CASSIGQVTDFFLGETQYF

SEQ ID NO: 245925 - protein, 16 aa, Homo sapiens
  CDR3 for alpha chain variable domain of TCR clone 122963 (TRAV12-2, TRAJ28)
CAVFTDSGAGSYQLTF

SEQ ID NO: 245926 - protein, 14 aa, Homo sapiens
  CDR3 for beta chain variable domain of TCR clone 122963 (TRBV25-1, TRBJ1-1)
CASTHLGGNTEAFF

SEQ ID NO: 245927 - protein, 13 aa, Homo sapiens
  CDR3 for alpha chain variable domain of TCR clone 122964 (TRAV3, TRAJ43)
FAVKARNNNDMRF

SEQ ID NO: 245928 - protein, 16 aa, Homo sapiens
  CDR3 for beta chain variable domain of TCR clone 122964 (TRBV7-9, TRBJ2-3)
CASSFSVAGGTDTQYF

SEQ ID NO: 245929 - protein, 14 aa, Homo sapiens
  CDR3 for alpha chain variable domain of TCR clone 122965 (TRAV1-2, TRAJ16)
CAVNRFSDGQTLLF

SEQ ID NO: 245930 - protein, 15 aa, Homo sapiens
  CDR3 for beta chain variable domain of TCR clone 122965 (TRBV28, TRBJ2-5)
CASSPGQGSIETQYF

SEQ ID NO: 245931 - protein, 14 aa, Homo sapiens
  CDR3 for alpha chain variable domain of TCR clone 122966 (TRAV12-2, TRAJ13)
CAVKRAGGYQKVTF

SEQ ID NO: 245932 - protein, 15 aa, Homo sapiens
  CDR3 for beta chain variable domain of TCR clone 122966 (TRBV27, TRBJ2-1)
CASSNGGGSSNEQFF

SEQ ID NO: 245933 - protein, 16 aa, Homo sapiens
  CDR3 for alpha chain variable domain of TCR clone 122967 (TRAV1-2, TRAJ10)
CAVGGVLTGGGNKLTF

SEQ ID NO: 245934 - protein, 12 aa, Homo sapiens
  CDR3 for beta chain variable domain of TCR clone 122967 (TRBV12-4, TRBJ2-7)
CASSLGGYEQYF

SEQ ID NO: 245935 - protein, 13 aa, Homo sapiens
  CDR3 for alpha chain variable domain of TCR clone 122968 (TRAV27, TRAJ53)
CAGQGGSNYKLAF

SEQ ID NO: 245936 - protein, 13 aa, Homo sapiens
  CDR3 for beta chain variable domain of TCR clone 122968 (TRBV29-1, TRBJ1-1)
CSVESGFGTEAFF

SEQ ID NO: 245937 - protein, 16 aa, Homo sapiens
  CDR3 for alpha chain variable domain of TCR clone 122969 (TRAV14/DV4, TRAJ17)
CAMRPKGKAAGNKLTF

SEQ ID NO: 245938 - protein, 14 aa, Homo sapiens
  CDR3 for beta chain variable domain of TCR clone 122969 (TRBV20-1, TRBJ1-1)
CSAQTRIGGTEAFF

SEQ ID NO: 245939 - protein, 15 aa, Homo sapiens
  CDR3 for alpha chain variable domain of TCR clone 122970 (TRAV12-2, TRAJ43)
CAFDMRIGAGTRLTV

SEQ ID NO: 245940 - protein, 18 aa, Homo sapiens
  CDR3 for beta chain variable domain of TCR clone 122970 (TRBV20-1, TRBJ2-3)
CSASGLAGGPGTTDTQYF

SEQ ID NO: 245941 - protein, 14 aa, Homo sapiens
  CDR3 for alpha chain variable domain of TCR clone 122971 (TRAV13-1, TRAJ35)
CAASKGGFGKLLHC

SEQ ID NO: 245942 - protein, 13 aa, Homo sapiens
  CDR3 for beta chain variable domain of TCR clone 122971 (TRBV7-3, TRBJ1-1)
CASSQDWGAEAFF

SEQ ID NO: 245943 - protein, 12 aa, Homo sapiens
  CDR3 for alpha chain variable domain of TCR clone 122972 (TRAV12-2, TRAJ43)
CAVNVNNNDMRF

SEQ ID NO: 245944 - protein, 14 aa, Homo sapiens
  CDR3 for beta chain variable domain of TCR clone 122972 (TRBV7-3, TRBJ2-1)
CASSLAGGTNEQFF

SEQ ID NO: 245945 - protein, 17 aa, Homo sapiens
  CDR3 for alpha chain variable domain of TCR clone 122973 (TRAV3, TRAJ42)
CAVRGRNYGGSQGNLIF

SEQ ID NO: 245946 - protein, 14 aa, Homo sapiens
  CDR3 for beta chain variable domain of TCR clone 122973 (TRBV5-4, TRBJ1-1)
CASSLDSRRDEAFF

SEQ ID NO: 245947 - protein, 14 aa, Homo sapiens
  CDR3 for alpha chain variable domain of TCR clone 122974 (TRAV12-2, TRAJ13)
CDVKKTGGYQKVTF

SEQ ID NO: 245948 - protein, 18 aa, Homo sapiens
  CDR3 for beta chain variable domain of TCR clone 122974 (TRBV11-2, TRBJ2-3)
CASSLGGASRGAPNTQYF

SEQ ID NO: 245949 - protein, 14 aa, Homo sapiens
  CDR3 for alpha chain variable domain of TCR clone 122975 (TRAV1-1, TRAJ27)
CAVIYNTNAGKSTF

SEQ ID NO: 245950 - protein, 15 aa, Homo sapiens
  CDR3 for beta chain variable domain of TCR clone 122975 (TRBV7-2, TRBJ2-3)
CASLKDGREGDTQYF

SEQ ID NO: 245951 - protein, 14 aa, Homo sapiens
  CDR3 for alpha chain variable domain of TCR clone 122976 (TRAV12-2, TRAJ36)
CAVKISTGANNRFF

SEQ ID NO: 245952 - protein, 14 aa, Homo sapiens
  CDR3 for beta chain variable domain of TCR clone 122976 (TRBV25-1, TRBJ1-2)
CASSDTTGVVGYTF

SEQ ID NO: 245953 - protein, 13 aa, Homo sapiens
  CDR3 for alpha chain variable domain of TCR clone 122977 (TRAV8-4, TRAJ49)
CAVRTLTGNQFYF

SEQ ID NO: 245954 - protein, 16 aa, Homo sapiens
  CDR3 for beta chain variable domain of TCR clone 122977 (TRBV7-2, TRBJ1-3)
CASSRLEASSGNTIYF

SEQ ID NO: 245955 - protein, 13 aa, Homo sapiens
  CDR3 for alpha chain variable domain of TCR clone 122978 (TRAV12-1, TRAJ11)
CVLNRAGYSTLTF

SEQ ID NO: 245956 - protein, 16 aa, Homo sapiens
  CDR3 for beta chain variable domain of TCR clone 122978 (TRBV27, TRBJ2-2)
CASSLRPGGAPGELFF

SEQ ID NO: 245957 - protein, 11 aa, Homo sapiens
  CDR3 for alpha chain variable domain of TCR clone 122979 (TRAV2, TRAJ13)
CAFGGYQKVTF

SEQ ID NO: 245958 - protein, 15 aa, Homo sapiens
  CDR3 for beta chain variable domain of TCR clone 122979 (TRBV7-2, TRBJ2-1)
CASSSGLAGGNEQFF

SEQ ID NO: 245959 - protein, 14 aa, Homo sapiens
  CDR3 for alpha chain variable domain of TCR clone 122980 (TRAV21, TRAJ35)
CAVMPIGFGNVLHC

SEQ ID NO: 245960 - protein, 13 aa, Homo sapiens
  CDR3 for beta chain variable domain of TCR clone 122980 (TRBV10-3, TRBJ1-2)
CAISERDSYGYTF

SEQ ID NO: 245961 - protein, 13 aa, Homo sapiens
  CDR3 for alpha chain variable domain of TCR clone 122981 (TRAV2, TRAJ21)
CAVEDLNFNKFYF

SEQ ID NO: 245962 - protein, 14 aa, Homo sapiens
  CDR3 for beta chain variable domain of TCR clone 122981 (TRBV25-1, TRBJ1-1)
CASTHLGGNTEAFF

SEQ ID NO: 245963 - protein, 13 aa, Homo sapiens
  CDR3 for alpha chain variable domain of TCR clone 122982 (TRAV16, TRAJ22)
SVMLAGSARQLTF

SEQ ID NO: 245964 - protein, 18 aa, Homo sapiens
  CDR3 for beta chain variable domain of TCR clone 122982 (TRBV7-2, TRBJ2-3)
CASSLETSRGRKADTQYF

SEQ ID NO: 245965 - protein, 14 aa, Homo sapiens
  CDR3 for alpha chain variable domain of TCR clone 122983 (TRAV26-1, TRAJ26)
CIARATFLGQNSVF

SEQ ID NO: 245966 - protein, 16 aa, Homo sapiens
  CDR3 for beta chain variable domain of TCR clone 122983 (TRBV12-4, TRBJ2-7)
CASRSTGTGPSYEQYF

SEQ ID NO: 245967 - protein, 16 aa, Homo sapiens
  CDR3 for alpha chain variable domain of TCR clone 122984 (TRAV12-3, TRAJ53)
CAMSPGSGGSNYKLTF

SEQ ID NO: 245968 - protein, 15 aa, Homo sapiens
  CDR3 for beta chain variable domain of TCR clone 122984 (TRBV19, TRBJ1-2)
CASSVGQVLNYGYTF

SEQ ID NO: 245969 - protein, 13 aa, Homo sapiens
  CDR3 for alpha chain variable domain of TCR clone 122985 (TRAV23/DV6, TRAJ15)
CAALPAGRNCSDL

SEQ ID NO: 245970 - protein, 14 aa, Homo sapiens
  CDR3 for beta chain variable domain of TCR clone 122985 (TRBV7-9, TRBJ1-2)
CASNRQGANYGYTF

SEQ ID NO: 245971 - protein, 12 aa, Homo sapiens
  CDR3 for alpha chain variable domain of TCR clone 122986 (TRAV13-2, TRAJ23)
CAERHRGGKLIF

SEQ ID NO: 245972 - protein, 14 aa, Homo sapiens
  CDR3 for beta chain variable domain of TCR clone 122986 (TRBV11-2, TRBJ1-2)
CASSLGTANYGYAF

SEQ ID NO: 245973 - protein, 13 aa, Homo sapiens
  CDR3 for alpha chain variable domain of TCR clone 122987 (TRAV12-3, TRAJ13)
CAMTSGGYQKVTF

SEQ ID NO: 245974 - protein, 13 aa, Homo sapiens
  CDR3 for beta chain variable domain of TCR clone 122987 (TRBV20-1, TRBJ2-2)
RSALSGGAGELFF

SEQ ID NO: 245975 - protein, 15 aa, Homo sapiens
  CDR3 for alpha chain variable domain of TCR clone 122988 (TRAV3, TRAJ3)
CAVRDRDSSASKIIF

SEQ ID NO: 245976 - protein, 18 aa, Homo sapiens
  CDR3 for beta chain variable domain of TCR clone 122988 (TRBV25-1, TRBJ1-2)
CDSSGLQNGQGLIFGYTF

SEQ ID NO: 245977 - protein, 13 aa, Homo sapiens
  CDR3 for alpha chain variable domain of TCR clone 122989 (TRAV27, TRAJ6)
CAGGTRGSYIPTF

SEQ ID NO: 245978 - protein, 11 aa, Homo sapiens
  CDR3 for beta chain variable domain of TCR clone 122989 (TRBV12-4, TRBJ2-3)
CASTATDTQYF

SEQ ID NO: 245979 - protein, 13 aa, Homo sapiens
  CDR3 for alpha chain variable domain of TCR clone 122990 (TRAV27, TRAJ17)
CAGAATGGNKLTF

SEQ ID NO: 245980 - protein, 15 aa, Homo sapiens
  CDR3 for beta chain variable domain of TCR clone 122990 (TRBV5-1, TRBJ2-3)
CASRNQAGSTDTQYF

SEQ ID NO: 245981 - protein, 18 aa, Homo sapiens
  CDR3 for alpha chain variable domain of TCR clone 122991 (TRAV12-3, TRAJ52)
CAMSVGGAGGTSYAKLTF

SEQ ID NO: 245982 - protein, 15 aa, Homo sapiens
  CDR3 for beta chain variable domain of TCR clone 122991 (TRBV27, TRBJ1-6)
CASSFDRGLGSPLHF

SEQ ID NO: 245983 - protein, 13 aa, Homo sapiens
  CDR3 for alpha chain variable domain of TCR clone 122992 (TRAV12-3, TRAJ13)
CAMSSGGYQKVTF

SEQ ID NO: 245984 - protein, 14 aa, Homo sapiens
  CDR3 for beta chain variable domain of TCR clone 122992 (TRBV7-6, TRBJ2-3)
CASSLGTVTDTQYF

SEQ ID NO: 245985 - protein, 16 aa, Homo sapiens
  CDR3 for alpha chain variable domain of TCR clone 122993 (TRAV8-6, TRAJ42)
CAVSEGYGGSQGNLIF

SEQ ID NO: 245986 - protein, 16 aa, Homo sapiens
  CDR3 for beta chain variable domain of TCR clone 122993 (TRBV13, TRBJ2-2)
CASSLRTGEHTGELFF

SEQ ID NO: 245987 - protein, 14 aa, Homo sapiens
  CDR3 for alpha chain variable domain of TCR clone 122994 (TRAV1-2, TRAJ16)
CAVNRFSDGQKLLF

SEQ ID NO: 245988 - protein, 12 aa, Homo sapiens
  CDR3 for beta chain variable domain of TCR clone 122994 (TRBV12-4, TRBJ2-3)
CASSTLPDTQYF

SEQ ID NO: 245989 - protein, 16 aa, Homo sapiens
  CDR3 for alpha chain variable domain of TCR clone 122995 (TRAV3, TRAJ21)
CAVRDIERGNFNKFYF

SEQ ID NO: 245990 - protein, 15 aa, Homo sapiens
  CDR3 for beta chain variable domain of TCR clone 122995 (TRBV3-1, TRBJ2-1)
CASSQVVDDGEEQFF

SEQ ID NO: 245991 - protein, 12 aa, Homo sapiens
  CDR3 for alpha chain variable domain of TCR clone 122996 (TRAV8-3, TRAJ26)
CAGDNYGQNFVF

SEQ ID NO: 245992 - protein, 15 aa, Homo sapiens
  CDR3 for beta chain variable domain of TCR clone 122996 (TRBV20-1, TRBJ2-3)
CSARRGEAIIDTQYF

SEQ ID NO: 245993 - protein, 16 aa, Homo sapiens
  CDR3 for alpha chain variable domain of TCR clone 122997 (TRAV16, TRAJ4)
CALSRMFSGGYNKLIF

SEQ ID NO: 245994 - protein, 13 aa, Homo sapiens
  CDR3 for beta chain variable domain of TCR clone 122997 (TRBV20-1, TRBJ1-1)
CSAPLGGGTEAFF

SEQ ID NO: 245995 - protein, 12 aa, Homo sapiens
  CDR3 for alpha chain variable domain of TCR clone 122998 (TRAV21, TRAJ31)
CSVSPARGRLMF

SEQ ID NO: 245996 - protein, 14 aa, Homo sapiens
  CDR3 for beta chain variable domain of TCR clone 122998 (TRBV28, TRBJ2-7)
CASSLLRISYEQYF

SEQ ID NO: 245997 - protein, 11 aa, Homo sapiens
  CDR3 for alpha chain variable domain of TCR clone 122999 (TRAV35, TRAJ34)
CWARNTEKLIF

SEQ ID NO: 245998 - protein, 14 aa, Homo sapiens
  CDR3 for beta chain variable domain of TCR clone 122999 (TRBV5-1, TRBJ2-7)
CASSRGESLYEQYF

SEQ ID NO: 245999 - protein, 17 aa, Homo sapiens
  CDR3 for alpha chain variable domain of TCR clone 123000 (TRAV13-1, TRAJ52)
CAARLGAGGTSYGKLTF

SEQ ID NO: 246000 - protein, 15 aa, Homo sapiens
  CDR3 for beta chain variable domain of TCR clone 123000 (TRBV2, TRBJ2-1)
CASSELAGSYNEQFF

SEQ ID NO: 246001 - protein, 11 aa, Homo sapiens
  CDR3 for alpha chain variable domain of TCR clone 123001 (TRAV2, TRAJ40)
CAVVTSGTYKI

SEQ ID NO: 246002 - protein, 14 aa, Homo sapiens
  CDR3 for beta chain variable domain of TCR clone 123001 (TRBV19, TRBJ2-1)
CASPTFVLSGEQFF

SEQ ID NO: 246003 - protein, 13 aa, Homo sapiens
  CDR3 for alpha chain variable domain of TCR clone 123002 (TRAV8-3, TRAJ43)
CAVVPYNNNDMRF

SEQ ID NO: 246004 - protein, 15 aa, Homo sapiens
  CDR3 for beta chain variable domain of TCR clone 123002 (TRBV11-3, TRBJ2-3)
CASLKDGREGDTQYF

SEQ ID NO: 246005 - protein, 14 aa, Homo sapiens
  CDR3 for alpha chain variable domain of TCR clone 123003 (TRAV34, TRAJ44)
CGADGTGTASKLTF

SEQ ID NO: 246006 - protein, 18 aa, Homo sapiens
  CDR3 for beta chain variable domain of TCR clone 123003 (TRBV28, TRBJ2-1)
CASSSTSGRANSYNEQFF

SEQ ID NO: 246007 - protein, 14 aa, Homo sapiens
  CDR3 for alpha chain variable domain of TCR clone 123004 (TRAV12-2, TRAJ40)
CAGKIPSGTYKYIF

SEQ ID NO: 246008 - protein, 18 aa, Homo sapiens
  CDR3 for beta chain variable domain of TCR clone 123004 (TRBV20-1, TRBJ2-6)
CSAETTPTHGSGANVLTF

SEQ ID NO: 246009 - protein, 14 aa, Homo sapiens
  CDR3 for alpha chain variable domain of TCR clone 123005 (TRAV13-1, TRAJ26)
CAASRGNYGQNFVF

SEQ ID NO: 246010 - protein, 13 aa, Homo sapiens
  CDR3 for beta chain variable domain of TCR clone 123005 (TRBV4-2, TRBJ1-1)
CASSQAGNTEAFF

SEQ ID NO: 246011 - protein, 14 aa, Homo sapiens
  CDR3 for alpha chain variable domain of TCR clone 123006 (TRAV12-2, TRAJ13)
CAVKKTGGYQKVTF

SEQ ID NO: 246012 - protein, 12 aa, Homo sapiens
  CDR3 for beta chain variable domain of TCR clone 123006 (TRBV5-1, TRBJ2-3)
CASSLAADTQYF

SEQ ID NO: 246013 - protein, 14 aa, Homo sapiens
  CDR3 for alpha chain variable domain of TCR clone 123007 (TRAV17, TRAJ31)
CATVLRNNNDRLMF

SEQ ID NO: 246014 - protein, 14 aa, Homo sapiens
  CDR3 for beta chain variable domain of TCR clone 123007 (TRBV12-4, TRBJ2-5)
CASSLWQKQETQYF

SEQ ID NO: 246015 - protein, 13 aa, Homo sapiens
  CDR3 for alpha chain variable domain of TCR clone 123008 (TRAV8-4, TRAJ48)
CAVSLFGNEKLTF

SEQ ID NO: 246016 - protein, 15 aa, Homo sapiens
  CDR3 for beta chain variable domain of TCR clone 123008 (TRBV20-1, TRBJ2-7)
CIARKGLAESYEQYF

SEQ ID NO: 246017 - protein, 13 aa, Homo sapiens
  CDR3 for alpha chain variable domain of TCR clone 123009 (TRAV12-3, TRAJ40)
CAMSDSGTYKYIF

SEQ ID NO: 246018 - protein, 11 aa, Homo sapiens
  CDR3 for beta chain variable domain of TCR clone 123009 (TRBV11-2, TRBJ2-2)
CASSLPGELFF

SEQ ID NO: 246019 - protein, 12 aa, Homo sapiens
  CDR3 for alpha chain variable domain of TCR clone 123010 (TRAV13-2, TRAJ23)
CAERQRGGKLIF

SEQ ID NO: 246020 - protein, 13 aa, Homo sapiens
  CDR3 for beta chain variable domain of TCR clone 123010 (TRBV7-9, TRBJ2-3)
CASSPGSTDTQYF

SEQ ID NO: 246021 - protein, 14 aa, Homo sapiens
  CDR3 for alpha chain variable domain of TCR clone 123011 (TRAV13-2, TRAJ6)
CAERGSGGSYIPTF

SEQ ID NO: 246022 - protein, 17 aa, Homo sapiens
  CDR3 for beta chain variable domain of TCR clone 123011 (TRBV4-1, TRBJ1-4)
CASSQEGPRGVEEKLFF

SEQ ID NO: 246023 - protein, 11 aa, Homo sapiens
  CDR3 for alpha chain variable domain of TCR clone 123012 (TRAV13-1, TRAJ43)
CAAHNNNDMRF

SEQ ID NO: 246024 - protein, 15 aa, Homo sapiens
  CDR3 for beta chain variable domain of TCR clone 123012 (TRBV19, TRBJ2-4)
CASRGPRRGENIQYF

SEQ ID NO: 246025 - protein, 13 aa, Homo sapiens
  CDR3 for alpha chain variable domain of TCR clone 123013 (TRAV12-1, TRAJ34)
CVVTGYNTDTLIF

SEQ ID NO: 246026 - protein, 13 aa, Homo sapiens
  CDR3 for beta chain variable domain of TCR clone 123013 (TRBV28, TRBJ2-7)
CASKAGGVYEQYF

SEQ ID NO: 246027 - protein, 17 aa, Homo sapiens
  CDR3 for alpha chain variable domain of TCR clone 123014 (TRAV17, TRAJ28)
CATDPRRGGAGSYQLTF

SEQ ID NO: 246028 - protein, 16 aa, Homo sapiens
  CDR3 for beta chain variable domain of TCR clone 123014 (TRBV25-1, TRBJ1-1)
CASSGDRDRGRIDAFF

SEQ ID NO: 246029 - protein, 14 aa, Homo sapiens
  CDR3 for alpha chain variable domain of TCR clone 123015 (TRAV2, TRAJ29)
CAGPFQYGNTPLVS

SEQ ID NO: 246030 - protein, 11 aa, Homo sapiens
  CDR3 for beta chain variable domain of TCR clone 123015 (TRBV29-1, TRBJ2-5)
CSEDRTGTQYF

SEQ ID NO: 246031 - protein, 14 aa, Homo sapiens
  CDR3 for alpha chain variable domain of TCR clone 123016 (TRAV12-1, TRAJ30)
CVSTGTNRDDKIIF

SEQ ID NO: 246032 - protein, 11 aa, Homo sapiens
  CDR3 for beta chain variable domain of TCR clone 123016 (TRBV4-1, TRBJ2-2)
CASEHTGELFF

SEQ ID NO: 246033 - protein, 14 aa, Homo sapiens
  CDR3 for alpha chain variable domain of TCR clone 123017 (TRAV2, TRAJ9)
CAVEDRSGGFKTIF

SEQ ID NO: 246034 - protein, 16 aa, Homo sapiens
  CDR3 for beta chain variable domain of TCR clone 123017 (TRBV7-3, TRBJ2-2)
CASSLKRWTLSGELFF

SEQ ID NO: 246035 - protein, 15 aa, Homo sapiens
  CDR3 for alpha chain variable domain of TCR clone 123018 (TRAV2, TRAJ9)
CAVEDRGTGGFKTIF

SEQ ID NO: 246036 - protein, 16 aa, Homo sapiens
  CDR3 for beta chain variable domain of TCR clone 123018 (TRBV24-1, TRBJ2-3)
CAASDPGAGATDTQYF

SEQ ID NO: 246037 - protein, 12 aa, Homo sapiens
  CDR3 for alpha chain variable domain of TCR clone 123019 (TRAV12-1, TRAJ17)
CAMTLTGNKLTF

SEQ ID NO: 246038 - protein, 13 aa, Homo sapiens
  CDR3 for beta chain variable domain of TCR clone 123019 (TRBV19, TRBJ2-7)
CASRKAGGSEQYF

SEQ ID NO: 246039 - protein, 12 aa, Homo sapiens
  CDR3 for alpha chain variable domain of TCR clone 123020 (TRAV16, TRAJ10)
CSRTGGGNKPTF

SEQ ID NO: 246040 - protein, 16 aa, Homo sapiens
  CDR3 for beta chain variable domain of TCR clone 123020 (TRBV12-5, TRBJ2-5)
CASGPRTSGNQETQYF

SEQ ID NO: 246041 - protein, 14 aa, Homo sapiens
  CDR3 for alpha chain variable domain of TCR clone 123021 (TRAV12-2, TRAJ40)
CAVKIPSGTYKYIF

SEQ ID NO: 246042 - protein, 14 aa, Homo sapiens
  CDR3 for beta chain variable domain of TCR clone 123021 (TRBV20-1, TRBJ1-1)
CSAQTPIGGTEAFF

SEQ ID NO: 246043 - protein, 12 aa, Homo sapiens
  CDR3 for alpha chain variable domain of TCR clone 123022 (TRAV12-3, TRAJ40)
CAMSSGTYKYIF

SEQ ID NO: 246044 - protein, 17 aa, Homo sapiens
  CDR3 for beta chain variable domain of TCR clone 123022 (TRBV7-3, TRBJ2-5)
CASSLGSGRSGSETQYF

SEQ ID NO: 246045 - protein, 12 aa, Homo sapiens
  CDR3 for alpha chain variable domain of TCR clone 123023 (TRAV8-3, TRAJ20)
CAVGANDYKLSF

SEQ ID NO: 246046 - protein, 13 aa, Homo sapiens
  CDR3 for beta chain variable domain of TCR clone 123023 (TRBV19, TRBJ2-1)
CASSIPTYNEQFF

SEQ ID NO: 246047 - protein, 16 aa, Homo sapiens
  CDR3 for alpha chain variable domain of TCR clone 123024 (TRAV16, TRAJ52)
CARSGVGGTSYGKLTF

SEQ ID NO: 246048 - protein, 14 aa, Homo sapiens
  CDR3 for beta chain variable domain of TCR clone 123024 (TRBV19, TRBJ1-2)
CASSLQGQAYGYTF

SEQ ID NO: 246049 - protein, 14 aa, Homo sapiens
  CDR3 for alpha chain variable domain of TCR clone 123025 (TRAV8-4, TRAJ9)
CAVRINTGGFKTIF

SEQ ID NO: 246050 - protein, 19 aa, Homo sapiens
  CDR3 for beta chain variable domain of TCR clone 123025 (TRBV25-1, TRBJ2-2)
CAILVYRVDRGRKTGELFF

SEQ ID NO: 246051 - protein, 15 aa, Homo sapiens
  CDR3 for alpha chain variable domain of TCR clone 123026 (TRAV12-2, TRAJ50)
CAVNGLETSYDKVIF

SEQ ID NO: 246052 - protein, 14 aa, Homo sapiens
  CDR3 for beta chain variable domain of TCR clone 123026 (TRBV25-1, TRBJ1-1)
CASTHLGGNTEAFF

SEQ ID NO: 246053 - protein, 13 aa, Homo sapiens
  CDR3 for alpha chain variable domain of TCR clone 123027 (TRAV3, TRAJ31)
CAVREGNNARLMF

SEQ ID NO: 246054 - protein, 15 aa, Homo sapiens
  CDR3 for beta chain variable domain of TCR clone 123027 (TRBV6-1, TRBJ1-1)
CASRTPGQLNTEDFF

SEQ ID NO: 246055 - protein, 14 aa, Homo sapiens
  CDR3 for alpha chain variable domain of TCR clone 123028 (TRAV26-1, TRAJ40)
CIVRLLSGTHKYIF

SEQ ID NO: 246056 - protein, 13 aa, Homo sapiens
  CDR3 for beta chain variable domain of TCR clone 123028 (TRBV3-1, TRBJ1-1)
YASSQLQGAEAFF

SEQ ID NO: 246057 - protein, 15 aa, Homo sapiens
  CDR3 for alpha chain variable domain of TCR clone 123029 (TRAV17, TRAJ57)
CATGPSQGGSERLVF

SEQ ID NO: 246058 - protein, 16 aa, Homo sapiens
  CDR3 for beta chain variable domain of TCR clone 123029 (TRBV12-4, TRBJ1-5)
CASSRPVGGSNQPQHL

SEQ ID NO: 246059 - protein, 17 aa, Homo sapiens
  CDR3 for alpha chain variable domain of TCR clone 123030 (TRAV3, TRAJ13)
CAVRDMRRTGGYQKVTF

SEQ ID NO: 246060 - protein, 18 aa, Homo sapiens
  CDR3 for beta chain variable domain of TCR clone 123030 (TRBV11-2, TRBJ2-3)
CASSLGGASRGAPNTQYF

SEQ ID NO: 246061 - protein, 12 aa, Homo sapiens
  CDR3 for alpha chain variable domain of TCR clone 123031 (TRAV12-3, TRAJ29)
CAAREGNTPLVF

SEQ ID NO: 246062 - protein, 16 aa, Homo sapiens
  CDR3 for beta chain variable domain of TCR clone 123031 (TRBV12-4, TRBJ1-2)
CASSLGQYRPNYGYTF

SEQ ID NO: 246063 - protein, 12 aa, Homo sapiens
  CDR3 for alpha chain variable domain of TCR clone 123032 (TRAV17, TRAJ20)
CATQANDYKLSF

SEQ ID NO: 246064 - protein, 12 aa, Homo sapiens
  CDR3 for beta chain variable domain of TCR clone 123032 (TRBV6-1, TRBJ1-1)
CASNSPTAEAVF

SEQ ID NO: 246065 - protein, 13 aa, Homo sapiens
  CDR3 for alpha chain variable domain of TCR clone 123033 (TRAV1-1, TRAJ31)
CASYLNNNARLMF

SEQ ID NO: 246066 - protein, 13 aa, Homo sapiens
  CDR3 for beta chain variable domain of TCR clone 123033 (TRBV15, TRBJ1-6)
CATSGCLNSPLHF

SEQ ID NO: 246067 - protein, 15 aa, Homo sapiens
  CDR3 for alpha chain variable domain of TCR clone 123034 (TRAV2, TRAJ18)
CAVEDRGSTLGRLYF

SEQ ID NO: 246068 - protein, 16 aa, Homo sapiens
  CDR3 for beta chain variable domain of TCR clone 123034 (TRBV5-1, TRBJ2-5)
CASSSSGLGGAETQYF

SEQ ID NO: 246069 - protein, 11 aa, Homo sapiens
  CDR3 for alpha chain variable domain of TCR clone 123035 (TRAV21, TRAJ34)
CAVTNTDKLIF

SEQ ID NO: 246070 - protein, 16 aa, Homo sapiens
  CDR3 for beta chain variable domain of TCR clone 123035 (TRBV9, TRBJ2-2)
CASSAMGKGNTGELFF

SEQ ID NO: 246071 - protein, 14 aa, Homo sapiens
  CDR3 for alpha chain variable domain of TCR clone 123036 (TRAV12-2, TRAJ39)
CDVTPNNAGNMLTF

SEQ ID NO: 246072 - protein, 15 aa, Homo sapiens
  CDR3 for beta chain variable domain of TCR clone 123036 (TRBV27, TRBJ2-1)
CASSNGGGSSNEQFF

SEQ ID NO: 246073 - protein, 13 aa, Homo sapiens
  CDR3 for alpha chain variable domain of TCR clone 123037 (TRAV12-3, TRAJ13)
CAMSSGGYQKATF

SEQ ID NO: 246074 - protein, 14 aa, Homo sapiens
  CDR3 for beta chain variable domain of TCR clone 123037 (TRBV2, TRBJ2-1)
CASRTGSSYNEQFF

SEQ ID NO: 246075 - protein, 17 aa, Homo sapiens
  CDR3 for alpha chain variable domain of TCR clone 123038 (TRAV38-1, TRAJ28)
CAFMKPTSGAGSYQLTF

SEQ ID NO: 246076 - protein, 17 aa, Homo sapiens
  CDR3 for beta chain variable domain of TCR clone 123038 (TRBV20-1, TRBJ2-2)
CSASGSGQGGLTGELFF

SEQ ID NO: 246077 - protein, 13 aa, Homo sapiens
  CDR3 for alpha chain variable domain of TCR clone 123039 (TRAV17, TRAJ5)
CALRGTGRRALTF

SEQ ID NO: 246078 - protein, 15 aa, Homo sapiens
  CDR3 for beta chain variable domain of TCR clone 123039 (TRBV7-9, TRBJ1-4)
CASSARTGGNEKLFF

SEQ ID NO: 246079 - protein, 11 aa, Homo sapiens
  CDR3 for alpha chain variable domain of TCR clone 123040 (TRAV12-2, TRAJ49)
CAPQGGNQFYF

SEQ ID NO: 246080 - protein, 13 aa, Homo sapiens
  CDR3 for beta chain variable domain of TCR clone 123040 (TRBV4-1, TRBJ1-1)
CASSQLGTGEAFF

SEQ ID NO: 246081 - protein, 14 aa, Homo sapiens
  CDR3 for alpha chain variable domain of TCR clone 123041 (TRAV17, TRAJ32)
CATDPGGATNKLIF

SEQ ID NO: 246082 - protein, 14 aa, Homo sapiens
  CDR3 for beta chain variable domain of TCR clone 123041 (TRBV2, TRBJ1-5)
CASSENKGGQPQHF

SEQ ID NO: 246083 - protein, 14 aa, Homo sapiens
  CDR3 for alpha chain variable domain of TCR clone 123042 (TRAV26-1, TRAJ48)
CIVRVGFGNEKLTF

SEQ ID NO: 246084 - protein, 16 aa, Homo sapiens
  CDR3 for beta chain variable domain of TCR clone 123042 (TRBV19, TRBJ2-1)
CASSKAGPSSYNEQFF

SEQ ID NO: 246085 - protein, 14 aa, Homo sapiens
  CDR3 for alpha chain variable domain of TCR clone 123043 (TRAV17, TRAJ33)
CATDARRSNYQLIW

SEQ ID NO: 246086 - protein, 12 aa, Homo sapiens
  CDR3 for beta chain variable domain of TCR clone 123043 (TRBV7-8, TRBJ2-7)
CASSLGDREQYF

SEQ ID NO: 246087 - protein, 14 aa, Homo sapiens
  CDR3 for alpha chain variable domain of TCR clone 123044 (TRAV2, TRAJ9)
CAVEDRSGGFKTIF

SEQ ID NO: 246088 - protein, 14 aa, Homo sapiens
  CDR3 for beta chain variable domain of TCR clone 123044 (TRBV7-2, TRBJ1-2)
CASSQTGSTYGYTF

SEQ ID NO: 246089 - protein, 15 aa, Homo sapiens
  CDR3 for alpha chain variable domain of TCR clone 123045 (TRAV20, TRAJ53)
CAVQASGGSNYKLTF

SEQ ID NO: 246090 - protein, 12 aa, Homo sapiens
  CDR3 for beta chain variable domain of TCR clone 123045 (TRBV7-6, TRBJ2-5)
CASSLSQETQYL

SEQ ID NO: 246091 - protein, 13 aa, Homo sapiens
  CDR3 for alpha chain variable domain of TCR clone 123046 (TRAV12-2, TRAJ20)
CAVYPSNDYKLSF

SEQ ID NO: 246092 - protein, 13 aa, Homo sapiens
  CDR3 for beta chain variable domain of TCR clone 123046 (TRBV5-5, TRBJ1-2)
CASSFWRGEDYTF

SEQ ID NO: 246093 - protein, 13 aa, Homo sapiens
  CDR3 for alpha chain variable domain of TCR clone 123047 (TRAV8-6, TRAJ8)
CAVSNTGFQKLVF

SEQ ID NO: 246094 - protein, 15 aa, Homo sapiens
  CDR3 for beta chain variable domain of TCR clone 123047 (TRBV28, TRBJ2-5)
CASSSGRTIQETQFF

SEQ ID NO: 246095 - protein, 12 aa, Homo sapiens
  CDR3 for alpha chain variable domain of TCR clone 123048 (TRAV13-2, TRAJ42)
CAEGGSQRNLIF

SEQ ID NO: 246096 - protein, 16 aa, Homo sapiens
  CDR3 for beta chain variable domain of TCR clone 123048 (TRBV5-7, TRBJ2-3)
CASSPWTSGGTDTQYF

SEQ ID NO: 246097 - protein, 14 aa, Homo sapiens
  CDR3 for alpha chain variable domain of TCR clone 123049 (TRAV35, TRAJ24)
CAGPRRDSWGKLQF

SEQ ID NO: 246098 - protein, 19 aa, Homo sapiens
  CDR3 for beta chain variable domain of TCR clone 123049 (TRBV19, TRBJ2-2)
CASTRPGLAGGRVTGELFF

SEQ ID NO: 246099 - protein, 11 aa, Homo sapiens
  CDR3 for alpha chain variable domain of TCR clone 123050 (TRAV17, TRAJ45)
CATGGADGLTF

SEQ ID NO: 246100 - protein, 16 aa, Homo sapiens
  CDR3 for beta chain variable domain of TCR clone 123050 (TRBV5-1, TRBJ1-1)
CASSFGGPAMNTEAFF

SEQ ID NO: 246101 - protein, 18 aa, Homo sapiens
  CDR3 for alpha chain variable domain of TCR clone 123051 (TRAV26-2, TRAJ45)
CILRVDKYSGGGADGLTF

SEQ ID NO: 246102 - protein, 18 aa, Homo sapiens
  CDR3 for beta chain variable domain of TCR clone 123051 (TRBV11-2, TRBJ2-3)
CASSLGGASRGAPNTQYF

SEQ ID NO: 246103 - protein, 14 aa, Homo sapiens
  CDR3 for alpha chain variable domain of TCR clone 123052 (TRAV12-3, TRAJ10)
SHLPLTGGGNKLTF

SEQ ID NO: 246104 - protein, 12 aa, Homo sapiens
  CDR3 for beta chain variable domain of TCR clone 123052 (TRBV2, TRBJ2-7)
CASTYRTDEQYF

SEQ ID NO: 246105 - protein, 15 aa, Homo sapiens
  CDR3 for alpha chain variable domain of TCR clone 123053 (TRAV3, TRAJ5)
CAVRNLDTGRRALTF

SEQ ID NO: 246106 - protein, 13 aa, Homo sapiens
  CDR3 for beta chain variable domain of TCR clone 123053 (TRBV12-4, TRBJ2-7)
CASSPTETYEQYF

SEQ ID NO: 246107 - protein, 17 aa, Homo sapiens
  CDR3 for alpha chain variable domain of TCR clone 123054 (TRAV3, TRAJ6)
CAVRDGPRAGGSYIPAF

SEQ ID NO: 246108 - protein, 20 aa, Homo sapiens
  CDR3 for beta chain variable domain of TCR clone 123054 (TRBV28, TRBJ2-1)
CASTPIGRSPGLAGGNEQFF

SEQ ID NO: 246109 - protein, 13 aa, Homo sapiens
  CDR3 for alpha chain variable domain of TCR clone 123055 (TRAV21, TRAJ20)
CAVVLRVDYKLSF

SEQ ID NO: 246110 - protein, 11 aa, Homo sapiens
  CDR3 for beta chain variable domain of TCR clone 123055 (TRBV29-1, TRBJ2-5)
CSEDRTGTQYF

SEQ ID NO: 246111 - protein, 13 aa, Homo sapiens
  CDR3 for alpha chain variable domain of TCR clone 123056 (TRAV8-3, TRAJ44)
CAVVPGTASKLTF

SEQ ID NO: 246112 - protein, 13 aa, Homo sapiens
  CDR3 for beta chain variable domain of TCR clone 123056 (TRBV11-3, TRBJ1-1)
CATEEGLNTEAFF

SEQ ID NO: 246113 - protein, 15 aa, Homo sapiens
  CDR3 for alpha chain variable domain of TCR clone 123057 (TRAV26-1, TRAJ22)
CIARVSFWFCKATDL

SEQ ID NO: 246114 - protein, 14 aa, Homo sapiens
  CDR3 for beta chain variable domain of TCR clone 123057 (TRBV4-1, TRBJ2-2)
CASSQAVNTGELFF

SEQ ID NO: 246115 - protein, 14 aa, Homo sapiens
  CDR3 for alpha chain variable domain of TCR clone 123058 (TRAV13-1, TRAJ3)
CAASKSSSASKIIF

SEQ ID NO: 246116 - protein, 16 aa, Homo sapiens
  CDR3 for beta chain variable domain of TCR clone 123058 (TRBV15, TRBJ2-3)
CATSRDLGIVTDTQYF

SEQ ID NO: 246117 - protein, 13 aa, Homo sapiens
  CDR3 for alpha chain variable domain of TCR clone 123059 (TRAV23/DV6, TRAJ22)
CAPYSGSARQLTF

SEQ ID NO: 246118 - protein, 14 aa, Homo sapiens
  CDR3 for beta chain variable domain of TCR clone 123059 (TRBV5-7, TRBJ1-2)
CASSLVGGDYGYTF

SEQ ID NO: 246119 - protein, 15 aa, Homo sapiens
  CDR3 for alpha chain variable domain of TCR clone 123060 (TRAV23/DV6, TRAJ30)
CAASSQESRNDKIIF

SEQ ID NO: 246120 - protein, 17 aa, Homo sapiens
  CDR3 for beta chain variable domain of TCR clone 123060 (TRBV4-3, TRBJ2-1)
CASSQFSSGRASGEQFF

SEQ ID NO: 246121 - protein, 15 aa, Homo sapiens
  CDR3 for alpha chain variable domain of TCR clone 123061 (TRAV25, TRAJ53)
CAATGGGGSNYKLTF

SEQ ID NO: 246122 - protein, 11 aa, Homo sapiens
  CDR3 for beta chain variable domain of TCR clone 123061 (TRBV11-3, TRBJ2-2)
CASSSGGKLFF

SEQ ID NO: 246123 - protein, 16 aa, Homo sapiens
  CDR3 for alpha chain variable domain of TCR clone 123062 (TRAV13-1, TRAJ45)
CAARGSRKGGADGLTF

SEQ ID NO: 246124 - protein, 16 aa, Homo sapiens
  CDR3 for beta chain variable domain of TCR clone 123062 (TRBV7-3, TRBJ2-2)
CASSLKRGTLSGELFF

SEQ ID NO: 246125 - protein, 16 aa, Homo sapiens
  CDR3 for alpha chain variable domain of TCR clone 123063 (TRAV12-3, TRAJ53)
CAMSPGSGGSNYKLTF

SEQ ID NO: 246126 - protein, 16 aa, Homo sapiens
  CDR3 for beta chain variable domain of TCR clone 123063 (TRBV19, TRBJ2-1)
CASSMGGGSSYNEQFF

SEQ ID NO: 246127 - protein, 12 aa, Homo sapiens
  CDR3 for alpha chain variable domain of TCR clone 123064 (TRAV16, TRAJ10)
CSRTGGGNKLTF

SEQ ID NO: 246128 - protein, 16 aa, Homo sapiens
  CDR3 for beta chain variable domain of TCR clone 123064 (TRBV7-9, TRBJ1-2)
CASSLGFSSGEDGYTF

SEQ ID NO: 246129 - protein, 15 aa, Homo sapiens
  CDR3 for alpha chain variable domain of TCR clone 123065 (TRAV26-1, TRAJ37)
CIVENGSGNTGKLIF

SEQ ID NO: 246130 - protein, 18 aa, Homo sapiens
  CDR3 for beta chain variable domain of TCR clone 123065 (TRBV11-2, TRBJ2-3)
CASSLGGASRGAPNTQYF

SEQ ID NO: 246131 - protein, 11 aa, Homo sapiens
  CDR3 for alpha chain variable domain of TCR clone 123066 (TRAV1-2, TRAJ20)
CAVSNDYKLSF

SEQ ID NO: 246132 - protein, 14 aa, Homo sapiens
  CDR3 for beta chain variable domain of TCR clone 123066 (TRBV25-1, TRBJ1-1)
CASTHLGGNTEAFF

SEQ ID NO: 246133 - protein, 14 aa, Homo sapiens
  CDR3 for alpha chain variable domain of TCR clone 123067 (TRAV8-3, TRAJ10)
CAVGNAGGGNKRTF

SEQ ID NO: 246134 - protein, 16 aa, Homo sapiens
  CDR3 for beta chain variable domain of TCR clone 123067 (TRBV11-2, TRBJ1-2)
CASSLDTGGADYGYTF

SEQ ID NO: 246135 - protein, 14 aa, Homo sapiens
  CDR3 for alpha chain variable domain of TCR clone 123068 (TRAV21, TRAJ35)
CAVMPIGLGNVLHC

SEQ ID NO: 246136 - protein, 12 aa, Homo sapiens
  CDR3 for beta chain variable domain of TCR clone 123068 (TRBV7-9, TRBJ2-7)
CASSIKREEQYF

SEQ ID NO: 246137 - protein, 14 aa, Homo sapiens
  CDR3 for alpha chain variable domain of TCR clone 123069 (TRAV12-3, TRAJ10)
SHLPLTGGGNKLTF

SEQ ID NO: 246138 - protein, 17 aa, Homo sapiens
  CDR3 for beta chain variable domain of TCR clone 123069 (TRBV4-1, TRBJ2-3)
CASSQGYVSGGTDTQYF

SEQ ID NO: 246139 - protein, 13 aa, Homo sapiens
  CDR3 for alpha chain variable domain of TCR clone 123070 (TRAV3, TRAJ41)
CAGSSNSGYALNF

SEQ ID NO: 246140 - protein, 14 aa, Homo sapiens
  CDR3 for beta chain variable domain of TCR clone 123070 (TRBV7-2, TRBJ2-7)
CASSPKTSFYEQYF

SEQ ID NO: 246141 - protein, 14 aa, Homo sapiens
  CDR3 for alpha chain variable domain of TCR clone 123071 (TRAV35, TRAJ13)
CAGSPSGGYQKVTF

SEQ ID NO: 246142 - protein, 19 aa, Homo sapiens
  CDR3 for beta chain variable domain of TCR clone 123071 (TRBV28, TRBJ2-7)
CASSYSGTSRLGWVYEQYF

SEQ ID NO: 246143 - protein, 14 aa, Homo sapiens
  CDR3 for alpha chain variable domain of TCR clone 123072 (TRAV12-3, TRAJ57)
CAMSAWGGSEKLVF

SEQ ID NO: 246144 - protein, 18 aa, Homo sapiens
  CDR3 for beta chain variable domain of TCR clone 123072 (TRBV10-3, TRBJ2-3)
CAISESRVGPMRGDTQYF

SEQ ID NO: 246145 - protein, 12 aa, Homo sapiens
  CDR3 for alpha chain variable domain of TCR clone 123073 (TRAV13-2, TRAJ16)
GGGPLGGQKLLF

SEQ ID NO: 246146 - protein, 15 aa, Homo sapiens
  CDR3 for beta chain variable domain of TCR clone 123073 (TRBV5-4, TRBJ2-1)
CASSSGLAELNEQFF

SEQ ID NO: 246147 - protein, 12 aa, Homo sapiens
  CDR3 for alpha chain variable domain of TCR clone 123074 (TRAV13-1, TRAJ21)
CAAKEGFNKFYF

SEQ ID NO: 246148 - protein, 14 aa, Homo sapiens
  CDR3 for beta chain variable domain of TCR clone 123074 (TRBV7-2, TRBJ1-1)
CASSFLTGTTEAFF

SEQ ID NO: 246149 - protein, 15 aa, Homo sapiens
  CDR3 for alpha chain variable domain of TCR clone 123075 (TRAV21, TRAJ53)
CATLNSGGSNYKLTF

SEQ ID NO: 246150 - protein, 13 aa, Homo sapiens
  CDR3 for beta chain variable domain of TCR clone 123075 (TRBV6-1, TRBJ1-1)
CASSRQGNTEAFF

SEQ ID NO: 246151 - protein, 14 aa, Homo sapiens
  CDR3 for alpha chain variable domain of TCR clone 123076 (TRAV36/DV7, TRAJ58)
CAVEAGTSGSRLTF

SEQ ID NO: 246152 - protein, 18 aa, Homo sapiens
  CDR3 for beta chain variable domain of TCR clone 123076 (TRBV11-2, TRBJ2-3)
CASSLGGASRGAPNTQYF

SEQ ID NO: 246153 - protein, 15 aa, Homo sapiens
  CDR3 for alpha chain variable domain of TCR clone 123077 (TRAV3, TRAJ5)
CAVRDLYTGRRALTF

SEQ ID NO: 246154 - protein, 16 aa, Homo sapiens
  CDR3 for beta chain variable domain of TCR clone 123077 (TRBV20-1, TRBJ1-4)
CSAPGQGLLTNEKPFF

SEQ ID NO: 246155 - protein, 13 aa, Homo sapiens
  CDR3 for alpha chain variable domain of TCR clone 123078 (TRAV12-3, TRAJ6)
CANPSGGSYIPTF

SEQ ID NO: 246156 - protein, 14 aa, Homo sapiens
  CDR3 for beta chain variable domain of TCR clone 123078 (TRBV19, TRBJ1-1)
CASGRDRDATEAFF

SEQ ID NO: 246157 - protein, 13 aa, Homo sapiens
  CDR3 for alpha chain variable domain of TCR clone 123079 (TRAV16, TRAJ28)
CALTGAGSYQLTF

SEQ ID NO: 246158 - protein, 17 aa, Homo sapiens
  CDR3 for beta chain variable domain of TCR clone 123079 (TRBV7-3, TRBJ2-3)
CASSLMKRMRGADTQYF

SEQ ID NO: 246159 - protein, 18 aa, Homo sapiens
  CDR3 for alpha chain variable domain of TCR clone 123080 (TRAV12-3, TRAJ52)
CAMSVGGAGGTSYGKLTF

SEQ ID NO: 246160 - protein, 15 aa, Homo sapiens
  CDR3 for beta chain variable domain of TCR clone 123080 (TRBV7-6, TRBJ2-5)
CASSKPTGPQETQYF

SEQ ID NO: 246161 - protein, 14 aa, Homo sapiens
  CDR3 for alpha chain variable domain of TCR clone 123081 (TRAV1-2, TRAJ16)
CAVNRFSDGQKLLF

SEQ ID NO: 246162 - protein, 15 aa, Homo sapiens
  CDR3 for beta chain variable domain of TCR clone 123081 (TRBV6-3, TRBJ2-7)
CAGSSPGTVFYEQYF

SEQ ID NO: 246163 - protein, 13 aa, Homo sapiens
  CDR3 for alpha chain variable domain of TCR clone 123082 (TRAV21, TRAJ15)
CAVCNQAGTALIF

SEQ ID NO: 246164 - protein, 16 aa, Homo sapiens
  CDR3 for beta chain variable domain of TCR clone 123082 (TRBV12-4, TRBJ1-5)
CASSRPVGGSNQTQHF

SEQ ID NO: 246165 - protein, 12 aa, Homo sapiens
  CDR3 for alpha chain variable domain of TCR clone 123083 (TRAV8-3, TRAJ27)
CAVGAEAGKSTF

SEQ ID NO: 246166 - protein, 14 aa, Homo sapiens
  CDR3 for beta chain variable domain of TCR clone 123083 (TRBV2, TRBJ2-1)
CASRLIAGHDEQFF

SEQ ID NO: 246167 - protein, 15 aa, Homo sapiens
  CDR3 for alpha chain variable domain of TCR clone 123084 (TRAV34, TRAJ38)
CGADFTPGNNRKLIW

SEQ ID NO: 246168 - protein, 14 aa, Homo sapiens
  CDR3 for beta chain variable domain of TCR clone 123084 (TRBV19, TRBJ2-3)
CASSIRQGADTQYF

SEQ ID NO: 246169 - protein, 17 aa, Homo sapiens
  CDR3 for alpha chain variable domain of TCR clone 123085 (TRAV3, TRAJ12)
CAVRDVGRMDSSYKLIF

SEQ ID NO: 246170 - protein, 13 aa, Homo sapiens
  CDR3 for beta chain variable domain of TCR clone 123085 (TRBV20-1, TRBJ1-1)
CSAPLGGGTEAFF

SEQ ID NO: 246171 - protein, 17 aa, Homo sapiens
  CDR3 for alpha chain variable domain of TCR clone 123086 (TRAV3, TRAJ12)
CAVRDGGRMDSSYKLIF

SEQ ID NO: 246172 - protein, 13 aa, Homo sapiens
  CDR3 for beta chain variable domain of TCR clone 123086 (TRBV19, TRBJ1-5)
CASSEGSNQPQHF

SEQ ID NO: 246173 - protein, 16 aa, Homo sapiens
  CDR3 for alpha chain variable domain of TCR clone 123087 (TRAV3, TRAJ10)
CAVRDMRAGVGNKLTF

SEQ ID NO: 246174 - protein, 19 aa, Homo sapiens
  CDR3 for beta chain variable domain of TCR clone 123087 (TRBV6-3, TRBJ1-2)
CASSYSKGRTGPPNYGYTF

SEQ ID NO: 246175 - protein, 13 aa, Homo sapiens
  CDR3 for alpha chain variable domain of TCR clone 123088 (TRAV12-2, TRAJ39)
CAVNNNAGNMLTF

SEQ ID NO: 246176 - protein, 14 aa, Homo sapiens
  CDR3 for beta chain variable domain of TCR clone 123088 (TRBV7-3, TRBJ2-1)
CASSPGGGGNEQFF

SEQ ID NO: 246177 - protein, 13 aa, Homo sapiens
  CDR3 for alpha chain variable domain of TCR clone 123089 (TRAV8-3, TRAJ36)
CAVGATGANNLFF

SEQ ID NO: 246178 - protein, 12 aa, Homo sapiens
  CDR3 for beta chain variable domain of TCR clone 123089 (TRBV7-8, TRBJ2-7)
CASSLGDREQYF

SEQ ID NO: 246179 - protein, 14 aa, Homo sapiens
  CDR3 for alpha chain variable domain of TCR clone 123090 (TRAV26-1, TRAJ26)
CIGRATFLGQNFVF

SEQ ID NO: 246180 - protein, 16 aa, Homo sapiens
  CDR3 for beta chain variable domain of TCR clone 123090 (TRBV12-4, TRBJ2-7)
CASRSTGTGPSYEQYF

SEQ ID NO: 246181 - protein, 12 aa, Homo sapiens
  CDR3 for alpha chain variable domain of TCR clone 123091 (TRAV35, TRAJ49)
CAGWNTGNQFYF

SEQ ID NO: 246182 - protein, 16 aa, Homo sapiens
  CDR3 for beta chain variable domain of TCR clone 123091 (TRBV5-1, TRBJ2-2)
CASSLWDTMNTGELFF

SEQ ID NO: 246183 - protein, 13 aa, Homo sapiens
  CDR3 for alpha chain variable domain of TCR clone 123092 (TRAV13-1, TRAJ40)
CAASTSGTYKYIF

SEQ ID NO: 246184 - protein, 12 aa, Homo sapiens
  CDR3 for beta chain variable domain of TCR clone 123092 (TRBV11-2, TRBJ2-5)
CASSLVGETQYF

SEQ ID NO: 246185 - protein, 18 aa, Homo sapiens
  CDR3 for alpha chain variable domain of TCR clone 123093 (TRAV3, TRAJ17)
CAVSARRGGRSCRQQANF

SEQ ID NO: 246186 - protein, 14 aa, Homo sapiens
  CDR3 for beta chain variable domain of TCR clone 123093 (TRBV4-1, TRBJ2-2)
CASSQAVNTGELFF

SEQ ID NO: 246187 - protein, 13 aa, Homo sapiens
  CDR3 for alpha chain variable domain of TCR clone 123094 (TRAV21, TRAJ27)
CAALNTNAGKSTF

SEQ ID NO: 246188 - protein, 14 aa, Homo sapiens
  CDR3 for beta chain variable domain of TCR clone 123094 (TRBV6-1, TRBJ1-3)
CASVQGGGGNTIYF

SEQ ID NO: 246189 - protein, 14 aa, Homo sapiens
  CDR3 for alpha chain variable domain of TCR clone 123095 (TRAV13-1, TRAJ35)
CAASKGGFGNVLNC

SEQ ID NO: 246190 - protein, 14 aa, Homo sapiens
  CDR3 for beta chain variable domain of TCR clone 123095 (TRBV19, TRBJ2-1)
CASPTFVLSGEQFF

SEQ ID NO: 246191 - protein, 16 aa, Homo sapiens
  CDR3 for alpha chain variable domain of TCR clone 123096 (TRAV4, TRAJ22)
CLVGDLYSGSARHLTF

SEQ ID NO: 246192 - protein, 14 aa, Homo sapiens
  CDR3 for beta chain variable domain of TCR clone 123096 (TRBV28, TRBJ2-3)
CASSWRGRADTQYF

SEQ ID NO: 246193 - protein, 18 aa, Homo sapiens
  CDR3 for alpha chain variable domain of TCR clone 123097 (TRAV12-3, TRAJ52)
CAMSVGGAGGTSYGKLTF

SEQ ID NO: 246194 - protein, 15 aa, Homo sapiens
  CDR3 for beta chain variable domain of TCR clone 123097 (TRBV27, TRBJ1-6)
CASSFDRGLGSPLHY

SEQ ID NO: 246195 - protein, 15 aa, Homo sapiens
  CDR3 for alpha chain variable domain of TCR clone 123098 (TRAV1-1, TRAJ4)
CAVRAFSGGYNKLIF

SEQ ID NO: 246196 - protein, 14 aa, Homo sapiens
  CDR3 for beta chain variable domain of TCR clone 123098 (TRBV25-1, TRBJ1-1)
CASTHLGGNTEAFF

SEQ ID NO: 246197 - protein, 14 aa, Homo sapiens
  CDR3 for alpha chain variable domain of TCR clone 123099 (TRAV17, TRAJ57)
CATDPQGGSEKLFF

SEQ ID NO: 246198 - protein, 16 aa, Homo sapiens
  CDR3 for beta chain variable domain of TCR clone 123099 (TRBV20-1, TRBJ1-4)
CSAPGQGLLTNEKLFF

SEQ ID NO: 246199 - protein, 14 aa, Homo sapiens
  CDR3 for alpha chain variable domain of TCR clone 123100 (TRAV13-1, TRAJ29)
CAARAGSGNTPLVF

SEQ ID NO: 246200 - protein, 14 aa, Homo sapiens
  CDR3 for beta chain variable domain of TCR clone 123100 (TRBV18, TRBJ1-1)
CASSQGQGNTEAFF

SEQ ID NO: 246201 - protein, 15 aa, Homo sapiens
  CDR3 for alpha chain variable domain of TCR clone 123101 (TRAV3, TRAJ17)
CAVRDTGAAGNKLTF

SEQ ID NO: 246202 - protein, 14 aa, Homo sapiens
  CDR3 for beta chain variable domain of TCR clone 123101 (TRBV6-3, TRBJ1-1)
CASSNILPGAEAFF

SEQ ID NO: 246203 - protein, 13 aa, Homo sapiens
  CDR3 for alpha chain variable domain of TCR clone 123102 (TRAV13-1, TRAJ5)
CAASDTGRRALTF

SEQ ID NO: 246204 - protein, 12 aa, Homo sapiens
  CDR3 for beta chain variable domain of TCR clone 123102 (TRBV11-2, TRBJ2-1)
CASSPGNNEQFF

SEQ ID NO: 246205 - protein, 15 aa, Homo sapiens
  CDR3 for alpha chain variable domain of TCR clone 123103 (TRAV21, TRAJ53)
CATLNSGGSNYKLTF

SEQ ID NO: 246206 - protein, 15 aa, Homo sapiens
  CDR3 for beta chain variable domain of TCR clone 123103 (TRBV11-3, TRBJ1-1)
CASSLGGPGDTEAFF

SEQ ID NO: 246207 - protein, 11 aa, Homo sapiens
  CDR3 for alpha chain variable domain of TCR clone 123104 (TRAV13-1, TRAJ30)
CAASRDDKIIF

SEQ ID NO: 246208 - protein, 15 aa, Homo sapiens
  CDR3 for beta chain variable domain of TCR clone 123104 (TRBV18, TRBJ1-1)
CASSPSGWVNTEAFF

SEQ ID NO: 246209 - protein, 14 aa, Homo sapiens
  CDR3 for alpha chain variable domain of TCR clone 123105 (TRAV38-1, TRAJ40)
CALRPTSGTYKYIF

SEQ ID NO: 246210 - protein, 12 aa, Homo sapiens
  CDR3 for beta chain variable domain of TCR clone 123105 (TRBV14, TRBJ2-7)
CASSSLKGEQYF

SEQ ID NO: 246211 - protein, 13 aa, Homo sapiens
  CDR3 for alpha chain variable domain of TCR clone 123106 (TRAV8-6, TRAJ21)
CAVSPSFLNKFYF

SEQ ID NO: 246212 - protein, 14 aa, Homo sapiens
  CDR3 for beta chain variable domain of TCR clone 123106 (TRBV7-9, TRBJ2-5)
CASSLDTAQETQYF

SEQ ID NO: 246213 - protein, 13 aa, Homo sapiens
  CDR3 for alpha chain variable domain of TCR clone 123107 (TRAV3, TRAJ36)
CAVRDTGANNLFF

SEQ ID NO: 246214 - protein, 15 aa, Homo sapiens
  CDR3 for beta chain variable domain of TCR clone 123107 (TRBV24-1, TRBJ2-1)
CATRGSGGFYNEQFF

SEQ ID NO: 246215 - protein, 12 aa, Homo sapiens
  CDR3 for alpha chain variable domain of TCR clone 123108 (TRAV23/DV6, TRAJ57)
CAASSTLSQGVS

SEQ ID NO: 246216 - protein, 14 aa, Homo sapiens
  CDR3 for beta chain variable domain of TCR clone 123108 (TRBV25-1, TRBJ1-1)
CASTHLGGNTEAFF

SEQ ID NO: 246217 - protein, 11 aa, Homo sapiens
  CDR3 for alpha chain variable domain of TCR clone 123109 (TRAV29/DV5, TRAJ49)
CAAVPGNQFSF

SEQ ID NO: 246218 - protein, 17 aa, Homo sapiens
  CDR3 for beta chain variable domain of TCR clone 123109 (TRBV4-2, TRBJ1-1)
CASTQFGGGSGNTEAFF

SEQ ID NO: 246219 - protein, 14 aa, Homo sapiens
  CDR3 for alpha chain variable domain of TCR clone 123110 (TRAV12-1, TRAJ17)
CVVNYKAAGNKLTF

SEQ ID NO: 246220 - protein, 13 aa, Homo sapiens
  CDR3 for beta chain variable domain of TCR clone 123110 (TRBV5-4, TRBJ2-5)
CASSPVSQETQYF

SEQ ID NO: 246221 - protein, 15 aa, Homo sapiens
  CDR3 for alpha chain variable domain of TCR clone 123111 (TRAV8-3, TRAJ45)
CASSYSGGGADGLTF

SEQ ID NO: 246222 - protein, 13 aa, Homo sapiens
  CDR3 for beta chain variable domain of TCR clone 123111 (TRBV10-3, TRBJ2-7)
CASKLAVSYEQYV

SEQ ID NO: 246223 - protein, 12 aa, Homo sapiens
  CDR3 for alpha chain variable domain of TCR clone 123112 (TRAV2, TRAJ9)
CAVGAGGFKTIF

SEQ ID NO: 246224 - protein, 14 aa, Homo sapiens
  CDR3 for beta chain variable domain of TCR clone 123112 (TRBV5-1, TRBJ2-3)
CASSRGQGGGTQYF

SEQ ID NO: 246225 - protein, 12 aa, Homo sapiens
  CDR3 for alpha chain variable domain of TCR clone 123113 (TRAV16, TRAJ13)
CITLRGYQKVTF

SEQ ID NO: 246226 - protein, 14 aa, Homo sapiens
  CDR3 for beta chain variable domain of TCR clone 123113 (TRBV19, TRBJ2-1)
CASPTFVLSGEQFF

SEQ ID NO: 246227 - protein, 16 aa, Homo sapiens
  CDR3 for alpha chain variable domain of TCR clone 123114 (TRAV30, TRAJ24)
CGTEIVDADSWGKFQF

SEQ ID NO: 246228 - protein, 15 aa, Homo sapiens
  CDR3 for beta chain variable domain of TCR clone 123114 (TRBV7-2, TRBJ2-7)
CASSTPGLTRGEQYF

SEQ ID NO: 246229 - protein, 14 aa, Homo sapiens
  CDR3 for alpha chain variable domain of TCR clone 123115 (TRAV1-2, TRAJ16)
CAVNRFSDGQKLLF

SEQ ID NO: 246230 - protein, 14 aa, Homo sapiens
  CDR3 for beta chain variable domain of TCR clone 123115 (TRBV4-1, TRBJ2-2)
CASSQEVNTGELFF

SEQ ID NO: 246231 - protein, 14 aa, Homo sapiens
  CDR3 for alpha chain variable domain of TCR clone 123116 (TRAV12-3, TRAJ20)
CAMSARRGDCKLSF

SEQ ID NO: 246232 - protein, 14 aa, Homo sapiens
  CDR3 for beta chain variable domain of TCR clone 123116 (TRBV7-3, TRBJ2-3)
CASSPSARTDTQYF

SEQ ID NO: 246233 - protein, 13 aa, Homo sapiens
  CDR3 for alpha chain variable domain of TCR clone 123117 (TRAV3, TRAJ21)
CAVREPDFNKFYF

SEQ ID NO: 246234 - protein, 13 aa, Homo sapiens
  CDR3 for beta chain variable domain of TCR clone 123117 (TRBV10-3, TRBJ1-2)
CAISERDSYGYTF

SEQ ID NO: 246235 - protein, 13 aa, Homo sapiens
  CDR3 for alpha chain variable domain of TCR clone 123118 (TRAV12-3, TRAJ7)
CAMTPYGNNRLAF

SEQ ID NO: 246236 - protein, 13 aa, Homo sapiens
  CDR3 for beta chain variable domain of TCR clone 123118 (TRBV2, TRBJ2-7)
CASSVGGSGEQYF

SEQ ID NO: 246237 - protein, 14 aa, Homo sapiens
  CDR3 for alpha chain variable domain of TCR clone 123119 (TRAV8-6, TRAJ54)
CAVSDFQGAQKLVF

SEQ ID NO: 246238 - protein, 13 aa, Homo sapiens
  CDR3 for beta chain variable domain of TCR clone 123119 (TRBV3-1, TRBJ1-1)
CASSPGVITEAFF

SEQ ID NO: 246239 - protein, 14 aa, Homo sapiens
  CDR3 for alpha chain variable domain of TCR clone 123120 (TRAV20, TRAJ29)
CAVQAWVGNTPLVF

SEQ ID NO: 246240 - protein, 13 aa, Homo sapiens
  CDR3 for beta chain variable domain of TCR clone 123120 (TRBV4-1, TRBJ1-1)
CASSRKMNTEAFF

SEQ ID NO: 246241 - protein, 16 aa, Homo sapiens
  CDR3 for alpha chain variable domain of TCR clone 123121 (TRAV12-3, TRAJ53)
CAMSPGSGGSNYKLTF

SEQ ID NO: 246242 - protein, 11 aa, Homo sapiens
  CDR3 for beta chain variable domain of TCR clone 123121 (TRBV7-8, TRBJ2-7)
CASSLSLEQYF

SEQ ID NO: 246243 - protein, 12 aa, Homo sapiens
  CDR3 for alpha chain variable domain of TCR clone 123122 (TRAV2, TRAJ10)
CASTGGGNKITF

SEQ ID NO: 246244 - protein, 14 aa, Homo sapiens
  CDR3 for beta chain variable domain of TCR clone 123122 (TRBV7-2, TRBJ2-2)
CASRGQGAAGELFF

SEQ ID NO: 246245 - protein, 14 aa, Homo sapiens
  CDR3 for alpha chain variable domain of TCR clone 123123 (TRAV12-1, TRAJ23)
CVVIVYNQGGKLIF

SEQ ID NO: 246246 - protein, 15 aa, Homo sapiens
  CDR3 for beta chain variable domain of TCR clone 123123 (TRBV20-1, TRBJ1-5)
CSAKPPGQGPQPQLF

SEQ ID NO: 246247 - protein, 16 aa, Homo sapiens
  CDR3 for alpha chain variable domain of TCR clone 123124 (TRAV8-1, TRAJ42)
CAVTSRDGGSQGNLIF

SEQ ID NO: 246248 - protein, 12 aa, Homo sapiens
  CDR3 for beta chain variable domain of TCR clone 123124 (TRBV6-3, TRBJ2-7)
CASSLGRRGLYF

SEQ ID NO: 246249 - protein, 13 aa, Homo sapiens
  CDR3 for alpha chain variable domain of TCR clone 123125 (TRAV41, TRAJ48)
SVPVNFGNEKLTF

SEQ ID NO: 246250 - protein, 15 aa, Homo sapiens
  CDR3 for beta chain variable domain of TCR clone 123125 (TRBV27, TRBJ2-5)
CASSPQREGQREQYF

SEQ ID NO: 246251 - protein, 14 aa, Homo sapiens
  CDR3 for alpha chain variable domain of TCR clone 123126 (TRAV4, TRAJ9)
CLVGSGTGGFTTIF

SEQ ID NO: 246252 - protein, 15 aa, Homo sapiens
  CDR3 for beta chain variable domain of TCR clone 123126 (TRBV7-2, TRBJ2-1)
CASSLASGRVNEQFF

SEQ ID NO: 246253 - protein, 13 aa, Homo sapiens
  CDR3 for alpha chain variable domain of TCR clone 123127 (TRAV13-1, TRAJ6)
CAASKGGSYIPTF

SEQ ID NO: 246254 - protein, 14 aa, Homo sapiens
  CDR3 for beta chain variable domain of TCR clone 123127 (TRBV7-2, TRBJ2-1)
CASSLGVGYNDQFF

SEQ ID NO: 246255 - protein, 14 aa, Homo sapiens
  CDR3 for alpha chain variable domain of TCR clone 123128 (TRAV23/DV6, TRAJ22)
CAASVPGSARQLTF

SEQ ID NO: 246256 - protein, 13 aa, Homo sapiens
  CDR3 for beta chain variable domain of TCR clone 123128 (TRBV11-2, TRBJ2-5)
CASSRGPSETQYF

SEQ ID NO: 246257 - protein, 14 aa, Homo sapiens
  CDR3 for alpha chain variable domain of TCR clone 123129 (TRAV8-3, TRAJ15)
CAVGRHQSGTALIF

SEQ ID NO: 246258 - protein, 13 aa, Homo sapiens
  CDR3 for beta chain variable domain of TCR clone 123129 (TRBV9, TRBJ2-7)
CASSASDSYEQYF

SEQ ID NO: 246259 - protein, 13 aa, Homo sapiens
  CDR3 for alpha chain variable domain of TCR clone 123130 (TRAV36/DV7, TRAJ56)
CAGTTGANSKLTF

SEQ ID NO: 246260 - protein, 14 aa, Homo sapiens
  CDR3 for beta chain variable domain of TCR clone 123130 (TRBV6-3, TRBJ1-1)
CASSNLLPGAEAFF

SEQ ID NO: 246261 - protein, 16 aa, Homo sapiens
  CDR3 for alpha chain variable domain of TCR clone 123131 (TRAV4, TRAJ42)
CLVGDHYGGSQGNLIF

SEQ ID NO: 246262 - protein, 14 aa, Homo sapiens
  CDR3 for beta chain variable domain of TCR clone 123131 (TRBV7-6, TRBJ2-3)
CASSLGTVTDTQYF

SEQ ID NO: 246263 - protein, 14 aa, Homo sapiens
  CDR3 for alpha chain variable domain of TCR clone 123132 (TRAV9-2, TRAJ39)
CALYIYNAGNMLTF

SEQ ID NO: 246264 - protein, 12 aa, Homo sapiens
  CDR3 for beta chain variable domain of TCR clone 123132 (TRBV24-1, TRBJ1-1)
CATSDSDRGAFF

SEQ ID NO: 246265 - protein, 14 aa, Homo sapiens
  CDR3 for alpha chain variable domain of TCR clone 123133 (TRAV1-2, TRAJ16)
CAVNRVSDGQKLLF

SEQ ID NO: 246266 - protein, 17 aa, Homo sapiens
  CDR3 for beta chain variable domain of TCR clone 123133 (TRBV13, TRBJ2-3)
CASSLSRVAGGRNTQYF

SEQ ID NO: 246267 - protein, 16 aa, Homo sapiens
  CDR3 for alpha chain variable domain of TCR clone 123134 (TRAV14/DV4, TRAJ53)
CAMREGGGGSNYKLTF

SEQ ID NO: 246268 - protein, 15 aa, Homo sapiens
  CDR3 for beta chain variable domain of TCR clone 123134 (TRBV7-3, TRBJ2-2)
CASGETGQGTGELFF

SEQ ID NO: 246269 - protein, 18 aa, Homo sapiens
  CDR3 for alpha chain variable domain of TCR clone 123135 (TRAV26-1, TRAJ56)
CIVRVASRVTGANSKLPF

SEQ ID NO: 246270 - protein, 15 aa, Homo sapiens
  CDR3 for beta chain variable domain of TCR clone 123135 (TRBV7-9, TRBJ2-5)
CASSDTGRGRETQYF

SEQ ID NO: 246271 - protein, 12 aa, Homo sapiens
  CDR3 for alpha chain variable domain of TCR clone 123136 (TRAV17, TRAJ20)
CATDGDDYKLSF

SEQ ID NO: 246272 - protein, 18 aa, Homo sapiens
  CDR3 for beta chain variable domain of TCR clone 123136 (TRBV6-5, TRBJ2-5)
CASSYSQAGGSCQETQYF

SEQ ID NO: 246273 - protein, 14 aa, Homo sapiens
  CDR3 for alpha chain variable domain of TCR clone 123137 (TRAV12-2, TRAJ17)
CAVLFKAVGNKLTF

SEQ ID NO: 246274 - protein, 14 aa, Homo sapiens
  CDR3 for beta chain variable domain of TCR clone 123137 (TRBV7-8, TRBJ2-5)
CASSATGGQETQYF

SEQ ID NO: 246275 - protein, 16 aa, Homo sapiens
  CDR3 for alpha chain variable domain of TCR clone 123138 (TRAV38-1, TRAJ56)
CAFMKRQTGANSKLTF

SEQ ID NO: 246276 - protein, 14 aa, Homo sapiens
  CDR3 for beta chain variable domain of TCR clone 123138 (TRBV5-5, TRBJ2-7)
CASSLGQGTYEQYF

SEQ ID NO: 246277 - protein, 14 aa, Homo sapiens
  CDR3 for alpha chain variable domain of TCR clone 123139 (TRAV8-3, TRAJ23)
CAVIIYNQGGKLIF

SEQ ID NO: 246278 - protein, 15 aa, Homo sapiens
  CDR3 for beta chain variable domain of TCR clone 123139 (TRBV18, TRBJ2-1)
CASSPPSASYNEQFL

SEQ ID NO: 246279 - protein, 14 aa, Homo sapiens
  CDR3 for alpha chain variable domain of TCR clone 123140 (TRAV21, TRAJ28)
CAVGSGAGSYQLTL

SEQ ID NO: 246280 - protein, 14 aa, Homo sapiens
  CDR3 for beta chain variable domain of TCR clone 123140 (TRBV18, TRBJ1-4)
CASSPGPNGEKLFF

SEQ ID NO: 246281 - protein, 12 aa, Homo sapiens
  CDR3 for alpha chain variable domain of TCR clone 123141 (TRAV12-3, TRAJ17)
CAMTLTGNKLTF

SEQ ID NO: 246282 - protein, 15 aa, Homo sapiens
  CDR3 for beta chain variable domain of TCR clone 123141 (TRBV20-1, TRBJ2-7)
CSAIDRVAGMDEQYF

SEQ ID NO: 246283 - protein, 15 aa, Homo sapiens
  CDR3 for alpha chain variable domain of TCR clone 123142 (TRAV8-6, TRAJ6)
CAVRDASGGSYIPTF

SEQ ID NO: 246284 - protein, 16 aa, Homo sapiens
  CDR3 for beta chain variable domain of TCR clone 123142 (TRBV7-3, TRBJ2-2)
CASSLKRGTLSGELFF

SEQ ID NO: 246285 - protein, 13 aa, Homo sapiens
  CDR3 for alpha chain variable domain of TCR clone 123143 (TRAV21, TRAJ57)
CAVTQGGSEKLVF

SEQ ID NO: 246286 - protein, 13 aa, Homo sapiens
  CDR3 for beta chain variable domain of TCR clone 123143 (TRBV6-4, TRBJ1-5)
CASSADLNQPQHF

SEQ ID NO: 246287 - protein, 18 aa, Homo sapiens
  CDR3 for alpha chain variable domain of TCR clone 123144 (TRAV12-3, TRAJ52)
CAMSRTNAGGTSYGKLTF

SEQ ID NO: 246288 - protein, 17 aa, Homo sapiens
  CDR3 for beta chain variable domain of TCR clone 123144 (TRBV7-3, TRBJ2-3)
CASSLMKRMRGADTQYF

SEQ ID NO: 246289 - protein, 14 aa, Homo sapiens
  CDR3 for alpha chain variable domain of TCR clone 123145 (TRAV1-2, TRAJ29)
FAVRELTSATPLVF

SEQ ID NO: 246290 - protein, 14 aa, Homo sapiens
  CDR3 for beta chain variable domain of TCR clone 123145 (TRBV3-1, TRBJ2-5)
CASSQGPDQETQYF

SEQ ID NO: 246291 - protein, 17 aa, Homo sapiens
  CDR3 for alpha chain variable domain of TCR clone 123146 (TRAV3, TRAJ6)
CAVRDGPRAEGSYIPTF

SEQ ID NO: 246292 - protein, 16 aa, Homo sapiens
  CDR3 for beta chain variable domain of TCR clone 123146 (TRBV4-1, TRBJ2-7)
CASSLTAGQATYEQYF

SEQ ID NO: 246293 - protein, 12 aa, Homo sapiens
  CDR3 for alpha chain variable domain of TCR clone 123147 (TRAV1-1, TRAJ8)
CAGGTGFQKLVF

SEQ ID NO: 246294 - protein, 13 aa, Homo sapiens
  CDR3 for beta chain variable domain of TCR clone 123147 (TRBV4-2, TRBJ1-1)
CASSQAGNTEAFF

SEQ ID NO: 246295 - protein, 16 aa, Homo sapiens
  CDR3 for alpha chain variable domain of TCR clone 123148 (TRAV12-2, TRAJ10)
CAVDRVLTGGGNKLTF

SEQ ID NO: 246296 - protein, 14 aa, Homo sapiens
  CDR3 for beta chain variable domain of TCR clone 123148 (TRBV7-9, TRBJ2-1)
CASSPRDSLYEQFF

SEQ ID NO: 246297 - protein, 13 aa, Homo sapiens
  CDR3 for alpha chain variable domain of TCR clone 123149 (TRAV3, TRAJ20)
CAVRDTARYKLSF

SEQ ID NO: 246298 - protein, 14 aa, Homo sapiens
  CDR3 for beta chain variable domain of TCR clone 123149 (TRBV11-1, TRBJ2-7)
CASTFAVPSYEQYF

SEQ ID NO: 246299 - protein, 11 aa, Homo sapiens
  CDR3 for alpha chain variable domain of TCR clone 123150 (TRAV23/DV6, TRAJ49)
CAVAPVTSSTL

SEQ ID NO: 246300 - protein, 13 aa, Homo sapiens
  CDR3 for beta chain variable domain of TCR clone 123150 (TRBV6-1, TRBJ1-1)
CASSRQGNTEAFF

SEQ ID NO: 246301 - protein, 13 aa, Homo sapiens
  CDR3 for alpha chain variable domain of TCR clone 123151 (TRAV2, TRAJ23)
CAVMGNQGGKLIF

SEQ ID NO: 246302 - protein, 13 aa, Homo sapiens
  CDR3 for beta chain variable domain of TCR clone 123151 (TRBV20-1, TRBJ2-2)
CSASAAGTGELFF

SEQ ID NO: 246303 - protein, 11 aa, Homo sapiens
  CDR3 for alpha chain variable domain of TCR clone 123152 (TRAV20, TRAJ27)
CAVTNAGKSTF

SEQ ID NO: 246304 - protein, 15 aa, Homo sapiens
  CDR3 for beta chain variable domain of TCR clone 123152 (TRBV18, TRBJ2-1)
CASSPPSASYNEQFF

SEQ ID NO: 246305 - protein, 12 aa, Homo sapiens
  CDR3 for alpha chain variable domain of TCR clone 123153 (TRAV1-1, TRAJ8)
CAGGTGFQKLVF

SEQ ID NO: 246306 - protein, 15 aa, Homo sapiens
  CDR3 for beta chain variable domain of TCR clone 123153 (TRBV7-9, TRBJ1-4)
CASSRTRGFNEKLFF

SEQ ID NO: 246307 - protein, 13 aa, Homo sapiens
  CDR3 for alpha chain variable domain of TCR clone 123154 (TRAV27, TRAJ45)
CRSSGGGADGLTF

SEQ ID NO: 246308 - protein, 16 aa, Homo sapiens
  CDR3 for beta chain variable domain of TCR clone 123154 (TRBV7-2, TRBJ1-4)
CASSLAPGRRDEKLFF

SEQ ID NO: 246309 - protein, 15 aa, Homo sapiens
  CDR3 for alpha chain variable domain of TCR clone 123155 (TRAV17, TRAJ28)
CATVDSGARSYQLTF

SEQ ID NO: 246310 - protein, 13 aa, Homo sapiens
  CDR3 for beta chain variable domain of TCR clone 123155 (TRBV5-4, TRBJ2-5)
CASSRQEGETQYF

SEQ ID NO: 246311 - protein, 17 aa, Homo sapiens
  CDR3 for alpha chain variable domain of TCR clone 123156 (TRAV36/DV7, TRAJ52)
CAVAQRAGGTSYGKLTF

SEQ ID NO: 246312 - protein, 17 aa, Homo sapiens
  CDR3 for beta chain variable domain of TCR clone 123156 (TRBV11-2, TRBJ2-1)
CASSLYPPGVEYNEQFF

SEQ ID NO: 246313 - protein, 12 aa, Homo sapiens
  CDR3 for alpha chain variable domain of TCR clone 123157 (TRAV17, TRAJ57)
CATDGGSEKLDF

SEQ ID NO: 246314 - protein, 13 aa, Homo sapiens
  CDR3 for beta chain variable domain of TCR clone 123157 (TRBV7-9, TRBJ2-7)
CASSFAGAYEQYF

SEQ ID NO: 246315 - protein, 14 aa, Homo sapiens
  CDR3 for alpha chain variable domain of TCR clone 123158 (TRAV29/DV5, TRAJ32)
CAAAYGGATNKLIF

SEQ ID NO: 246316 - protein, 11 aa, Homo sapiens
  CDR3 for beta chain variable domain of TCR clone 123158 (TRBV19, TRBJ2-5)
CASSIKETQYF

SEQ ID NO: 246317 - protein, 15 aa, Homo sapiens
  CDR3 for alpha chain variable domain of TCR clone 123159 (TRAV23/DV6, TRAJ44)
CAAMKPTGTASNLTF

SEQ ID NO: 246318 - protein, 16 aa, Homo sapiens
  CDR3 for beta chain variable domain of TCR clone 123159 (TRBV28, TRBJ2-5)
CATSGWPSRLKETQYF

SEQ ID NO: 246319 - protein, 17 aa, Homo sapiens
  CDR3 for alpha chain variable domain of TCR clone 123160 (TRAV13-1, TRAJ32)
CAASNGWWCYKQAHLWN

SEQ ID NO: 246320 - protein, 15 aa, Homo sapiens
  CDR3 for beta chain variable domain of TCR clone 123160 (TRBV20-1, TRBJ2-7)
CSARDRVSGMDEQYF

SEQ ID NO: 246321 - protein, 12 aa, Homo sapiens
  CDR3 for alpha chain variable domain of TCR clone 123161 (TRAV8-6, TRAJ36)
CAVSDWLGQTTS

SEQ ID NO: 246322 - protein, 15 aa, Homo sapiens
  CDR3 for beta chain variable domain of TCR clone 123161 (TRBV7-9, TRBJ2-7)
CISVSEAPPMNEQYF

SEQ ID NO: 246323 - protein, 12 aa, Homo sapiens
  CDR3 for alpha chain variable domain of TCR clone 123162 (TRAV13-1, TRAJ27)
CAAHTNAGKSTF

SEQ ID NO: 246324 - protein, 14 aa, Homo sapiens
  CDR3 for beta chain variable domain of TCR clone 123162 (TRBV12-5, TRBJ2-5)
CVSGSRTHQETQYF

SEQ ID NO: 246325 - protein, 13 aa, Homo sapiens
  CDR3 for alpha chain variable domain of TCR clone 123163 (TRAV13-1, TRAJ6)
CAASKGGSYIPTF

SEQ ID NO: 246326 - protein, 14 aa, Homo sapiens
  CDR3 for beta chain variable domain of TCR clone 123163 (TRBV7-2, TRBJ2-1)
CASSLGVGYNEQFL

SEQ ID NO: 246327 - protein, 12 aa, Homo sapiens
  CDR3 for alpha chain variable domain of TCR clone 123164 (TRAV13-1, TRAJ21)
CAAKEGFNKFYF

SEQ ID NO: 246328 - protein, 14 aa, Homo sapiens
  CDR3 for beta chain variable domain of TCR clone 123164 (TRBV20-1, TRBJ2-1)
CSAQIGGSANEQFF

SEQ ID NO: 246329 - protein, 13 aa, Homo sapiens
  CDR3 for alpha chain variable domain of TCR clone 123165 (TRAV13-2, TRAJ48)
CAEMDFGNEKLTF

SEQ ID NO: 246330 - protein, 17 aa, Homo sapiens
  CDR3 for beta chain variable domain of TCR clone 123165 (TRBV7-9, TRBJ1-6)
CASSSPGRGNSPSTLGT

SEQ ID NO: 246331 - protein, 16 aa, Homo sapiens
  CDR3 for alpha chain variable domain of TCR clone 123166 (TRAV22, TRAJ45)
CAVERGKGGGADGLTF

SEQ ID NO: 246332 - protein, 12 aa, Homo sapiens
  CDR3 for beta chain variable domain of TCR clone 123166 (TRBV14, TRBJ2-4)
CASSNLKSIQYF

SEQ ID NO: 246333 - protein, 14 aa, Homo sapiens
  CDR3 for alpha chain variable domain of TCR clone 123167 (TRAV38-1, TRAJ27)
CAFIHNTNAGKSTF

SEQ ID NO: 246334 - protein, 15 aa, Homo sapiens
  CDR3 for beta chain variable domain of TCR clone 123167 (TRBV7-3, TRBJ2-1)
CASSPTGGGEVEQFF

SEQ ID NO: 246335 - protein, 17 aa, Homo sapiens
  CDR3 for alpha chain variable domain of TCR clone 123168 (TRAV17, TRAJ24)
CATLTTDSWGEIPVWSR

SEQ ID NO: 246336 - protein, 16 aa, Homo sapiens
  CDR3 for beta chain variable domain of TCR clone 123168 (TRBV4-2, TRBJ2-7)
CASSQDGGSLRGEQYF

SEQ ID NO: 246337 - protein, 14 aa, Homo sapiens
  CDR3 for alpha chain variable domain of TCR clone 123169 (TRAV12-2, TRAJ5)
CAVNTSTGRRALTF

SEQ ID NO: 246338 - protein, 12 aa, Homo sapiens
  CDR3 for beta chain variable domain of TCR clone 123169 (TRBV19, TRBJ1-5)
CASSIAQQPQHF

SEQ ID NO: 246339 - protein, 11 aa, Homo sapiens
  CDR3 for alpha chain variable domain of TCR clone 123170 (TRAV1-1, TRAJ16)
CAAGDGRKLLF

SEQ ID NO: 246340 - protein, 15 aa, Homo sapiens
  CDR3 for beta chain variable domain of TCR clone 123170 (TRBV28, TRBJ1-2)
CASIPQGSDDYGYTF

SEQ ID NO: 246341 - protein, 17 aa, Homo sapiens
  CDR3 for alpha chain variable domain of TCR clone 123171 (TRAV23/DV6, TRAJ57)
CAASSTLSQGGSEKLVF

SEQ ID NO: 246342 - protein, 17 aa, Homo sapiens
  CDR3 for beta chain variable domain of TCR clone 123171 (TRBV10-3, TRBJ2-6)
CAISESTAPSGTNVLTF

SEQ ID NO: 246343 - protein, 13 aa, Homo sapiens
  CDR3 for alpha chain variable domain of TCR clone 123172 (TRAV21, TRAJ57)
CAVIEGGAEKLVF

SEQ ID NO: 246344 - protein, 15 aa, Homo sapiens
  CDR3 for beta chain variable domain of TCR clone 123172 (TRBV10-3, TRBJ2-5)
CAISEFGRGQETQYF

SEQ ID NO: 246345 - protein, 11 aa, Homo sapiens
  CDR3 for alpha chain variable domain of TCR clone 123173 (TRAV2, TRAJ40)
CAVEGTYKYIF

SEQ ID NO: 246346 - protein, 14 aa, Homo sapiens
  CDR3 for beta chain variable domain of TCR clone 123173 (TRBV18, TRBJ2-5)
CASSPGVSQETQYF

SEQ ID NO: 246347 - protein, 17 aa, Homo sapiens
  CDR3 for alpha chain variable domain of TCR clone 123174 (TRAV3, TRAJ6)
CAVRDVPRAGGSYIPTV

SEQ ID NO: 246348 - protein, 14 aa, Homo sapiens
  CDR3 for beta chain variable domain of TCR clone 123174 (TRBV7-2, TRBJ2-7)
CASSPKTSFYEQYF

SEQ ID NO: 246349 - protein, 12 aa, Homo sapiens
  CDR3 for alpha chain variable domain of TCR clone 123175 (TRAV1-1, TRAJ8)
CAGGTGFQKLVF

SEQ ID NO: 246350 - protein, 19 aa, Homo sapiens
  CDR3 for beta chain variable domain of TCR clone 123175 (TRBV25-1, TRBJ2-2)
CAILVYRVDRGRKTGELFF

SEQ ID NO: 246351 - protein, 13 aa, Homo sapiens
  CDR3 for alpha chain variable domain of TCR clone 123176 (TRAV2, TRAJ15)
CAVASQAGTALIF

SEQ ID NO: 246352 - protein, 16 aa, Homo sapiens
  CDR3 for beta chain variable domain of TCR clone 123176 (TRBV5-1, TRBJ1-1)
CASNSGGNSLNTEAFF

SEQ ID NO: 246353 - protein, 16 aa, Homo sapiens
  CDR3 for alpha chain variable domain of TCR clone 123177 (TRAV3, TRAJ10)
CAVRDMRAGGGNKLPF

SEQ ID NO: 246354 - protein, 15 aa, Homo sapiens
  CDR3 for beta chain variable domain of TCR clone 123177 (TRBV9, TRBJ1-6)
CASSVAGTGDSPLHF

SEQ ID NO: 246355 - protein, 14 aa, Homo sapiens
  CDR3 for alpha chain variable domain of TCR clone 123178 (TRAV20, TRAJ22)
CAVQVSGSARQLTF

SEQ ID NO: 246356 - protein, 14 aa, Homo sapiens
  CDR3 for beta chain variable domain of TCR clone 123178 (TRBV20-1, TRBJ1-1)
CSAQTRIGGTEAFF

SEQ ID NO: 246357 - protein, 15 aa, Homo sapiens
  CDR3 for alpha chain variable domain of TCR clone 123179 (TRAV12-2, TRAJ53)
CAVNGGGGSNYKLTV

SEQ ID NO: 246358 - protein, 12 aa, Homo sapiens
  CDR3 for beta chain variable domain of TCR clone 123179 (TRBV7-6, TRBJ2-5)
CASSLSQETQYF

SEQ ID NO: 246359 - protein, 14 aa, Homo sapiens
  CDR3 for alpha chain variable domain of TCR clone 123180 (TRAV26-1, TRAJ22)
CIVRVYGSARQLTF

SEQ ID NO: 246360 - protein, 17 aa, Homo sapiens
  CDR3 for beta chain variable domain of TCR clone 123180 (TRBV7-3, TRBJ2-3)
CASSPGGLAGFVDTQYF

SEQ ID NO: 246361 - protein, 13 aa, Homo sapiens
  CDR3 for alpha chain variable domain of TCR clone 123181 (TRAV4, TRAJ31)
CLVGDSNNARLMF

SEQ ID NO: 246362 - protein, 15 aa, Homo sapiens
  CDR3 for beta chain variable domain of TCR clone 123181 (TRBV10-2, TRBJ2-6)
CASSEQGTGANVLTF

SEQ ID NO: 246363 - protein, 12 aa, Homo sapiens
  CDR3 for alpha chain variable domain of TCR clone 123182 (TRAV12-3, TRAJ42)
CAPGGSQGKLIF

SEQ ID NO: 246364 - protein, 13 aa, Homo sapiens
  CDR3 for beta chain variable domain of TCR clone 123182 (TRBV5-7, TRBJ2-6)
CASTSSGANVLTF

SEQ ID NO: 246365 - protein, 14 aa, Homo sapiens
  CDR3 for alpha chain variable domain of TCR clone 123183 (TRAV13-1, TRAJ39)
CAAPPNNAGKMLTF

SEQ ID NO: 246366 - protein, 14 aa, Homo sapiens
  CDR3 for beta chain variable domain of TCR clone 123183 (TRBV12-4, TRBJ1-1)
CASNSGDLNTEAFF

SEQ ID NO: 246367 - protein, 12 aa, Homo sapiens
  CDR3 for alpha chain variable domain of TCR clone 123184 (TRAV13-2, TRAJ8)
CAPWLGFQKLVF

SEQ ID NO: 246368 - protein, 13 aa, Homo sapiens
  CDR3 for beta chain variable domain of TCR clone 123184 (TRBV4-2, TRBJ1-1)
CASSQAGNTEAFF

SEQ ID NO: 246369 - protein, 12 aa, Homo sapiens
  CDR3 for alpha chain variable domain of TCR clone 123185 (TRAV20, TRAJ39)
CAVGNAGNMLTF

SEQ ID NO: 246370 - protein, 20 aa, Homo sapiens
  CDR3 for beta chain variable domain of TCR clone 123185 (TRBV7-8, TRBJ2-2)
CASSHLFPGPTIHITGELFF

SEQ ID NO: 246371 - protein, 14 aa, Homo sapiens
  CDR3 for alpha chain variable domain of TCR clone 123186 (TRAV30, TRAJ50)
CGTALKTSYDKVIF

SEQ ID NO: 246372 - protein, 17 aa, Homo sapiens
  CDR3 for beta chain variable domain of TCR clone 123186 (TRBV13, TRBJ2-3)
CASSLSRVAGGRNTQYF

SEQ ID NO: 246373 - protein, 13 aa, Homo sapiens
  CDR3 for alpha chain variable domain of TCR clone 123187 (TRAV13-1, TRAJ53)
CAASKGSNYKLTF

SEQ ID NO: 246374 - protein, 14 aa, Homo sapiens
  CDR3 for beta chain variable domain of TCR clone 123187 (TRBV25-1, TRBJ1-1)
CASTHLGGNTEAFF

SEQ ID NO: 246375 - protein, 14 aa, Homo sapiens
  CDR3 for alpha chain variable domain of TCR clone 123188 (TRAV35, TRAJ13)
CAGSPPGGYQKVTF

SEQ ID NO: 246376 - protein, 13 aa, Homo sapiens
  CDR3 for beta chain variable domain of TCR clone 123188 (TRBV29-1, TRBJ1-1)
CSVGDSWNTEAFF

SEQ ID NO: 246377 - protein, 16 aa, Homo sapiens
  CDR3 for alpha chain variable domain of TCR clone 123189 (TRAV8-2, TRAJ48)
CVVSDVSNFGNEKLTF

SEQ ID NO: 246378 - protein, 15 aa, Homo sapiens
  CDR3 for beta chain variable domain of TCR clone 123189 (TRBV20-1, TRBJ2-7)
CSARDRVSGMDEQYF

SEQ ID NO: 246379 - protein, 13 aa, Homo sapiens
  CDR3 for alpha chain variable domain of TCR clone 123190 (TRAV2, TRAJ16)
CAVARSDGQKLLF

SEQ ID NO: 246380 - protein, 15 aa, Homo sapiens
  CDR3 for beta chain variable domain of TCR clone 123190 (TRBV20-1, TRBJ2-5)
CSAIKGQGSQETQYF

SEQ ID NO: 246381 - protein, 17 aa, Homo sapiens
  CDR3 for alpha chain variable domain of TCR clone 123191 (TRAV16, TRAJ48)
CALRRDISNFGNEKLTF

SEQ ID NO: 246382 - protein, 13 aa, Homo sapiens
  CDR3 for beta chain variable domain of TCR clone 123191 (TRBV29-1, TRBJ1-1)
CSVGDSRNTEAFF

SEQ ID NO: 246383 - protein, 14 aa, Homo sapiens
  CDR3 for alpha chain variable domain of TCR clone 123192 (TRAV26-1, TRAJ39)
CIVRSSRAGNMLTF

SEQ ID NO: 246384 - protein, 15 aa, Homo sapiens
  CDR3 for beta chain variable domain of TCR clone 123192 (TRBV7-9, TRBJ1-5)
CASSQGHQPNQPQHF

SEQ ID NO: 246385 - protein, 13 aa, Homo sapiens
  CDR3 for alpha chain variable domain of TCR clone 123193 (TRAV12-1, TRAJ26)
SATYLYYGQNFVF

SEQ ID NO: 246386 - protein, 15 aa, Homo sapiens
  CDR3 for beta chain variable domain of TCR clone 123193 (TRBV20-1, TRBJ2-7)
CSARDRVSGMDEQYF

SEQ ID NO: 246387 - protein, 14 aa, Homo sapiens
  CDR3 for alpha chain variable domain of TCR clone 123194 (TRAV20, TRAJ20)
CAVRRRYNDYKLSF

SEQ ID NO: 246388 - protein, 13 aa, Homo sapiens
  CDR3 for beta chain variable domain of TCR clone 123194 (TRBV19, TRBJ2-5)
CASSETAPETQYF

SEQ ID NO: 246389 - protein, 13 aa, Homo sapiens
  CDR3 for alpha chain variable domain of TCR clone 123195 (TRAV21, TRAJ45)
CAAPGGGADGLTF

SEQ ID NO: 246390 - protein, 15 aa, Homo sapiens
  CDR3 for beta chain variable domain of TCR clone 123195 (TRBV28, TRBJ2-7)
CASSPGGRGFYEQYF

SEQ ID NO: 246391 - protein, 12 aa, Homo sapiens
  CDR3 for alpha chain variable domain of TCR clone 123196 (TRAV21, TRAJ33)
CAKMDSNYQLIW

SEQ ID NO: 246392 - protein, 15 aa, Homo sapiens
  CDR3 for beta chain variable domain of TCR clone 123196 (TRBV5-1, TRBJ2-3)
CASSVTSGSTDTQYF

SEQ ID NO: 246393 - protein, 13 aa, Homo sapiens
  CDR3 for alpha chain variable domain of TCR clone 123197 (TRAV1-2, TRAJ12)
CAVSVDSSYKLIF

SEQ ID NO: 246394 - protein, 14 aa, Homo sapiens
  CDR3 for beta chain variable domain of TCR clone 123197 (TRBV19, TRBJ2-1)
CASSSGRDYNEQFF

SEQ ID NO: 246395 - protein, 11 aa, Homo sapiens
  CDR3 for alpha chain variable domain of TCR clone 123198 (TRAV12-1, TRAJ27)
CVVNNAGKSTF

SEQ ID NO: 246396 - protein, 14 aa, Homo sapiens
  CDR3 for beta chain variable domain of TCR clone 123198 (TRBV28, TRBJ2-1)
CASSLNGRNNEQFF

SEQ ID NO: 246397 - protein, 10 aa, Homo sapiens
  CDR3 for alpha chain variable domain of TCR clone 123199 (TRAV23/DV6, TRAJ57)
CAASSTLSQG

SEQ ID NO: 246398 - protein, 15 aa, Homo sapiens
  CDR3 for beta chain variable domain of TCR clone 123199 (TRBV29-1, TRBJ1-4)
CSVVGIGDINEKLFF

SEQ ID NO: 246399 - protein, 13 aa, Homo sapiens
  CDR3 for alpha chain variable domain of TCR clone 123200 (TRAV12-1, TRAJ26)
CVVRRNYGQNFVF

SEQ ID NO: 246400 - protein, 20 aa, Homo sapiens
  CDR3 for beta chain variable domain of TCR clone 123200 (TRBV28, TRBJ2-1)
CASTPIGRSPGLAGGNEQFF

SEQ ID NO: 246401 - protein, 13 aa, Homo sapiens
  CDR3 for alpha chain variable domain of TCR clone 123201 (TRAV27, TRAJ6)
CAVASGGSYIPTF

SEQ ID NO: 246402 - protein, 14 aa, Homo sapiens
  CDR3 for beta chain variable domain of TCR clone 123201 (TRBV18, TRBJ2-5)
CASSPGVSQETQYF

SEQ ID NO: 246403 - protein, 15 aa, Homo sapiens
  CDR3 for alpha chain variable domain of TCR clone 123202 (TRAV21, TRAJ52)
CAVRGGGTSYGKLTF

SEQ ID NO: 246404 - protein, 15 aa, Homo sapiens
  CDR3 for beta chain variable domain of TCR clone 123202 (TRBV28, TRBJ2-1)
CASSIIAGGRSEQFF

SEQ ID NO: 246405 - protein, 14 aa, Homo sapiens
  CDR3 for alpha chain variable domain of TCR clone 123203 (TRAV1-2, TRAJ8)
CAVREDTGFQKLVF

SEQ ID NO: 246406 - protein, 13 aa, Homo sapiens
  CDR3 for beta chain variable domain of TCR clone 123203 (TRBV27, TRBJ2-7)
CASSLRHRYEQYF

SEQ ID NO: 246407 - protein, 13 aa, Homo sapiens
  CDR3 for alpha chain variable domain of TCR clone 123204 (TRAV27, TRAJ3)
ASLRGSSASKIIF

SEQ ID NO: 246408 - protein, 17 aa, Homo sapiens
  CDR3 for beta chain variable domain of TCR clone 123204 (TRBV11-2, TRBJ2-1)
CASSLYPPGVEYNEQFF

SEQ ID NO: 246409 - protein, 14 aa, Homo sapiens
  CDR3 for alpha chain variable domain of TCR clone 123205 (TRAV23/DV6, TRAJ28)
CAASSGAGSYQLTF

SEQ ID NO: 246410 - protein, 12 aa, Homo sapiens
  CDR3 for beta chain variable domain of TCR clone 123205 (TRBV12-5, TRBJ2-5)
CASGQGVETQYF

SEQ ID NO: 246411 - protein, 18 aa, Homo sapiens
  CDR3 for alpha chain variable domain of TCR clone 123206 (TRAV26-2, TRAJ54)
CILRDVEVGIQGAQKLAF

SEQ ID NO: 246412 - protein, 17 aa, Homo sapiens
  CDR3 for beta chain variable domain of TCR clone 123206 (TRBV20-1, TRBJ1-5)
CSASLSPGQGGNQPQHF

SEQ ID NO: 246413 - protein, 18 aa, Homo sapiens
  CDR3 for alpha chain variable domain of TCR clone 123207 (TRAV13-1, TRAJ52)
CAASKRSAGGTSYGKLTS

SEQ ID NO: 246414 - protein, 13 aa, Homo sapiens
  CDR3 for beta chain variable domain of TCR clone 123207 (TRBV12-4, TRBJ1-2)
CAGSLRQGKGYTF

SEQ ID NO: 246415 - protein, 14 aa, Homo sapiens
  CDR3 for alpha chain variable domain of TCR clone 123208 (TRAV12-2, TRAJ12)
CAVINRASSYKLIF

SEQ ID NO: 246416 - protein, 15 aa, Homo sapiens
  CDR3 for beta chain variable domain of TCR clone 123208 (TRBV28, TRBJ2-1)
CASSLDTSSYNEQFF

SEQ ID NO: 246417 - protein, 16 aa, Homo sapiens
  CDR3 for alpha chain variable domain of TCR clone 123209 (TRAV38-2/DV8, TRAJ45)
CAYRGNSGGGADGLTL

SEQ ID NO: 246418 - protein, 17 aa, Homo sapiens
  CDR3 for beta chain variable domain of TCR clone 123209 (TRBV11-3, TRBJ2-5)
CASSLPGVRGGKETQYF

SEQ ID NO: 246419 - protein, 13 aa, Homo sapiens
  CDR3 for alpha chain variable domain of TCR clone 123210 (TRAV16, TRAJ48)
CSPLNFGNETLTF

SEQ ID NO: 246420 - protein, 11 aa, Homo sapiens
  CDR3 for beta chain variable domain of TCR clone 123210 (TRBV7-9, TRBJ2-3)
CASSPTDTQYF

SEQ ID NO: 246421 - protein, 14 aa, Homo sapiens
  CDR3 for alpha chain variable domain of TCR clone 123211 (TRAV1-2, TRAJ27)
CAPAEYTNAGKSTF

SEQ ID NO: 246422 - protein, 18 aa, Homo sapiens
  CDR3 for beta chain variable domain of TCR clone 123211 (TRBV28, TRBJ1-2)
CAIRQQQGKRGSNYGYTF

SEQ ID NO: 246423 - protein, 14 aa, Homo sapiens
  CDR3 for alpha chain variable domain of TCR clone 123212 (TRAV17, TRAJ34)
CATDSLEGTDKLIF

SEQ ID NO: 246424 - protein, 13 aa, Homo sapiens
  CDR3 for beta chain variable domain of TCR clone 123212 (TRBV4-2, TRBJ2-3)
CASSLTSTDTQYF

SEQ ID NO: 246425 - protein, 14 aa, Homo sapiens
  CDR3 for alpha chain variable domain of TCR clone 123213 (TRAV1-2, TRAJ16)
CAVNRFSDGQKLLL

SEQ ID NO: 246426 - protein, 16 aa, Homo sapiens
  CDR3 for beta chain variable domain of TCR clone 123213 (TRBV7-2, TRBJ2-7)
CASSLDLSGGAYEQYF

SEQ ID NO: 246427 - protein, 14 aa, Homo sapiens
  CDR3 for alpha chain variable domain of TCR clone 123214 (TRAV14/DV4, TRAJ41)
CARGGPDSGYALNF

SEQ ID NO: 246428 - protein, 15 aa, Homo sapiens
  CDR3 for beta chain variable domain of TCR clone 123214 (TRBV19, TRBJ2-1)
CASIIQATSYNEQFF

SEQ ID NO: 246429 - protein, 14 aa, Homo sapiens
  CDR3 for alpha chain variable domain of TCR clone 123215 (TRAV8-4, TRAJ13)
CAVTLSGGYQKVTF

SEQ ID NO: 246430 - protein, 13 aa, Homo sapiens
  CDR3 for beta chain variable domain of TCR clone 123215 (TRBV7-2, TRBJ1-2)
CQQPDGVTYGYTF

SEQ ID NO: 246431 - protein, 15 aa, Homo sapiens
  CDR3 for alpha chain variable domain of TCR clone 123216 (TRAV27, TRAJ38)
CAARRNAGNNRKLIW

SEQ ID NO: 246432 - protein, 17 aa, Homo sapiens
  CDR3 for beta chain variable domain of TCR clone 123216 (TRBV28, TRBJ2-5)
CASSTPEGDALQETQYF

SEQ ID NO: 246433 - protein, 15 aa, Homo sapiens
  CDR3 for alpha chain variable domain of TCR clone 123217 (TRAV13-1, TRAJ32)
CAASNGWWCYKQAHL

SEQ ID NO: 246434 - protein, 15 aa, Homo sapiens
  CDR3 for beta chain variable domain of TCR clone 123217 (TRBV20-1, TRBJ1-2)
CSAIRTGAFNYGDTF

SEQ ID NO: 246435 - protein, 14 aa, Homo sapiens
  CDR3 for alpha chain variable domain of TCR clone 123218 (TRAV35, TRAJ22)
CAGLRPGSARQLTS

SEQ ID NO: 246436 - protein, 13 aa, Homo sapiens
  CDR3 for beta chain variable domain of TCR clone 123218 (TRBV20-1, TRBJ1-1)
CSARGGGNTEAFF

SEQ ID NO: 246437 - protein, 11 aa, Homo sapiens
  CDR3 for alpha chain variable domain of TCR clone 123219 (TRAV21, TRAJ34)
CAVTKTDKLIF

SEQ ID NO: 246438 - protein, 16 aa, Homo sapiens
  CDR3 for beta chain variable domain of TCR clone 123219 (TRBV18, TRBJ1-1)
CASSPGVGGRGGEAFF

SEQ ID NO: 246439 - protein, 14 aa, Homo sapiens
  CDR3 for alpha chain variable domain of TCR clone 123220 (TRAV26-2, TRAJ32)
CCVGYGGATNKLIF

SEQ ID NO: 246440 - protein, 14 aa, Homo sapiens
  CDR3 for beta chain variable domain of TCR clone 123220 (TRBV4-2, TRBJ2-1)
CASGMDRAYNEQFF

SEQ ID NO: 246441 - protein, 13 aa, Homo sapiens
  CDR3 for alpha chain variable domain of TCR clone 123221 (TRAV9-2, TRAJ53)
CALSGGSNYKLTF

SEQ ID NO: 246442 - protein, 16 aa, Homo sapiens
  CDR3 for beta chain variable domain of TCR clone 123221 (TRBV7-3, TRBJ2-2)
CASSLKRGTLSGELFF

SEQ ID NO: 246443 - protein, 14 aa, Homo sapiens
  CDR3 for alpha chain variable domain of TCR clone 123222 (TRAV38-1, TRAJ40)
CALRPTSGTYKYIF

SEQ ID NO: 246444 - protein, 12 aa, Homo sapiens
  CDR3 for beta chain variable domain of TCR clone 123222 (TRBV7-8, TRBJ2-7)
CASSLGDREQYF

SEQ ID NO: 246445 - protein, 13 aa, Homo sapiens
  CDR3 for alpha chain variable domain of TCR clone 123223 (TRAV2, TRAJ40)
CAVVTSGTYKYIF

SEQ ID NO: 246446 - protein, 16 aa, Homo sapiens
  CDR3 for beta chain variable domain of TCR clone 123223 (TRBV25-1, TRBJ1-1)
CASSGDRDRGRIEAFF

SEQ ID NO: 246447 - protein, 14 aa, Homo sapiens
  CDR3 for alpha chain variable domain of TCR clone 123224 (TRAV2, TRAJ39)
CAVEGGNAGNMLTF

SEQ ID NO: 246448 - protein, 14 aa, Homo sapiens
  CDR3 for beta chain variable domain of TCR clone 123224 (TRBV28, TRBJ2-7)
CASSLRARGNEQYF

SEQ ID NO: 246449 - protein, 15 aa, Homo sapiens
  CDR3 for alpha chain variable domain of TCR clone 123225 (TRAV17, TRAJ57)
CATGPSQGGSEKLVF

SEQ ID NO: 246450 - protein, 14 aa, Homo sapiens
  CDR3 for beta chain variable domain of TCR clone 123225 (TRBV3-1, TRBJ2-5)
CASSQGPDQETQYF

SEQ ID NO: 246451 - protein, 11 aa, Homo sapiens
  CDR3 for alpha chain variable domain of TCR clone 123226 (TRAV12-1, TRAJ31)
CVGRVQCQTHV

SEQ ID NO: 246452 - protein, 15 aa, Homo sapiens
  CDR3 for beta chain variable domain of TCR clone 123226 (TRBV7-9, TRBJ1-5)
CASSQGHQPNQPQHF

SEQ ID NO: 246453 - protein, 15 aa, Homo sapiens
  CDR3 for alpha chain variable domain of TCR clone 123227 (TRAV27, TRAJ53)
CAGVVGVGSNYKLTF

SEQ ID NO: 246454 - protein, 14 aa, Homo sapiens
  CDR3 for beta chain variable domain of TCR clone 123227 (TRBV13, TRBJ2-3)
CASSRPSSTDTQYF

SEQ ID NO: 246455 - protein, 11 aa, Homo sapiens
  CDR3 for alpha chain variable domain of TCR clone 123228 (TRAV2, TRAJ13)
CASGGYQKVTF

SEQ ID NO: 246456 - protein, 14 aa, Homo sapiens
  CDR3 for beta chain variable domain of TCR clone 123228 (TRBV5-1, TRBJ1-5)
CASSLESGSRPQHF

SEQ ID NO: 246457 - protein, 12 aa, Homo sapiens
  CDR3 for alpha chain variable domain of TCR clone 123229 (TRAV29/DV5, TRAJ15)
CASNQSGTALIF

SEQ ID NO: 246458 - protein, 15 aa, Homo sapiens
  CDR3 for beta chain variable domain of TCR clone 123229 (TRBV11-2, TRBJ2-2)
CASSSDRVNAGELFF

SEQ ID NO: 246459 - protein, 10 aa, Homo sapiens
  CDR3 for alpha chain variable domain of TCR clone 123230 (TRAV12-3, TRAJ18)
CAMSAEAQPW

SEQ ID NO: 246460 - protein, 14 aa, Homo sapiens
  CDR3 for beta chain variable domain of TCR clone 123230 (TRBV7-3, TRBJ1-1)
CASSLKGGNTEAFF

SEQ ID NO: 246461 - protein, 14 aa, Homo sapiens
  CDR3 for alpha chain variable domain of TCR clone 123231 (TRAV12-3, TRAJ22)
CAMSLFGSARQLTF

SEQ ID NO: 246462 - protein, 15 aa, Homo sapiens
  CDR3 for beta chain variable domain of TCR clone 123231 (TRBV20-1, TRBJ2-7)
CSARDRVSGMDEQYF

SEQ ID NO: 246463 - protein, 14 aa, Homo sapiens
  CDR3 for alpha chain variable domain of TCR clone 123232 (TRAV13-1, TRAJ35)
CAASKGGFGNVLHC

SEQ ID NO: 246464 - protein, 12 aa, Homo sapiens
  CDR3 for beta chain variable domain of TCR clone 123232 (TRBV7-3, TRBJ2-1)
CASSFINNEQFF

SEQ ID NO: 246465 - protein, 12 aa, Homo sapiens
  CDR3 for alpha chain variable domain of TCR clone 123233 (TRAV3, TRAJ7)
CADLLWEQQTRF

SEQ ID NO: 246466 - protein, 13 aa, Homo sapiens
  CDR3 for beta chain variable domain of TCR clone 123233 (TRBV7-3, TRBJ2-5)
CASSFRGGENQYF

SEQ ID NO: 246467 - protein, 13 aa, Homo sapiens
  CDR3 for alpha chain variable domain of TCR clone 123234 (TRAV12-3, TRAJ47)
CAMKKEYGNKLVF

SEQ ID NO: 246468 - protein, 17 aa, Homo sapiens
  CDR3 for beta chain variable domain of TCR clone 123234 (TRBV24-1, TRBJ2-4)
CATSDAEARGVRNIQYF

SEQ ID NO: 246469 - protein, 14 aa, Homo sapiens
  CDR3 for alpha chain variable domain of TCR clone 123235 (TRAV13-1, TRAJ3)
CAASKSSSASKIIF

SEQ ID NO: 246470 - protein, 15 aa, Homo sapiens
  CDR3 for beta chain variable domain of TCR clone 123235 (TRBV7-2, TRBJ2-1)
CASSSGLAGGNEQFF

SEQ ID NO: 246471 - protein, 16 aa, Homo sapiens
  CDR3 for alpha chain variable domain of TCR clone 123236 (TRAV3, TRAJ10)
CAVRDMRAGGGNELTF

SEQ ID NO: 246472 - protein, 15 aa, Homo sapiens
  CDR3 for beta chain variable domain of TCR clone 123236 (TRBV11-2, TRBJ1-6)
CASTGFGTAVSPLHF

SEQ ID NO: 246473 - protein, 14 aa, Homo sapiens
  CDR3 for alpha chain variable domain of TCR clone 123237 (TRAV12-2, TRAJ32)
CAHPESGDTNKLIF

SEQ ID NO: 246474 - protein, 14 aa, Homo sapiens
  CDR3 for beta chain variable domain of TCR clone 123237 (TRBV4-2, TRBJ2-3)
CASRETRAPGMQYF

SEQ ID NO: 246475 - protein, 14 aa, Homo sapiens
  CDR3 for alpha chain variable domain of TCR clone 123238 (TRAV8-2, TRAJ11)
CVVSEKSGYSTLTF

SEQ ID NO: 246476 - protein, 13 aa, Homo sapiens
  CDR3 for beta chain variable domain of TCR clone 123238 (TRBV13, TRBJ2-7)
CASSLERGWKKYF

SEQ ID NO: 246477 - protein, 17 aa, Homo sapiens
  CDR3 for alpha chain variable domain of TCR clone 123239 (TRAV13-1, TRAJ52)
CAASSGAGGTSYGKLTF

SEQ ID NO: 246478 - protein, 17 aa, Homo sapiens
  CDR3 for beta chain variable domain of TCR clone 123239 (TRBV11-2, TRBJ2-1)
CASSLYPPGVECNEQFF

SEQ ID NO: 246479 - protein, 14 aa, Homo sapiens
  CDR3 for alpha chain variable domain of TCR clone 123240 (TRAV35, TRAJ22)
CAGLRPGSARQLTF

SEQ ID NO: 246480 - protein, 15 aa, Homo sapiens
  CDR3 for beta chain variable domain of TCR clone 123240 (TRBV12-4, TRBJ2-5)
CASSPPTGLLETQYF

SEQ ID NO: 246481 - protein, 20 aa, Homo sapiens
  CDR3 for alpha chain variable domain of TCR clone 123241 (TRAV12-1, TRAJ42)
SSVIQPPTSVKGGSQGNLIF

SEQ ID NO: 246482 - protein, 16 aa, Homo sapiens
  CDR3 for beta chain variable domain of TCR clone 123241 (TRBV19, TRBJ2-2)
CASRSPGTGATGELFF

SEQ ID NO: 246483 - protein, 18 aa, Homo sapiens
  CDR3 for alpha chain variable domain of TCR clone 123242 (TRAV21, TRAJ52)
CAVRPSPAGGTSYGKLTF

SEQ ID NO: 246484 - protein, 13 aa, Homo sapiens
  CDR3 for beta chain variable domain of TCR clone 123242 (TRBV19, TRBJ1-5)
CASSIGGEQPQHF

SEQ ID NO: 246485 - protein, 13 aa, Homo sapiens
  CDR3 for alpha chain variable domain of TCR clone 123243 (TRAV21, TRAJ27)
CAALNTNAGKSTF

SEQ ID NO: 246486 - protein, 15 aa, Homo sapiens
  CDR3 for beta chain variable domain of TCR clone 123243 (TRBV7-2, TRBJ2-1)
CASSSRTSREDEQFF

SEQ ID NO: 246487 - protein, 13 aa, Homo sapiens
  CDR3 for alpha chain variable domain of TCR clone 123244 (TRAV17, TRAJ26)
CATVDNYGQNFVF

SEQ ID NO: 246488 - protein, 13 aa, Homo sapiens
  CDR3 for beta chain variable domain of TCR clone 123244 (TRBV7-2, TRBJ2-7)
CASSSPSGSEQYF

SEQ ID NO: 246489 - protein, 14 aa, Homo sapiens
  CDR3 for alpha chain variable domain of TCR clone 123245 (TRAV1-2, TRAJ16)
CAVNRFSDGQKLLF

SEQ ID NO: 246490 - protein, 11 aa, Homo sapiens
  CDR3 for beta chain variable domain of TCR clone 123245 (TRBV25-1, TRBJ1-1)
CASRVFTEAFF

SEQ ID NO: 246491 - protein, 14 aa, Homo sapiens
  CDR3 for alpha chain variable domain of TCR clone 123246 (TRAV8-4, TRAJ22)
CAVSPGGSARQLTF

SEQ ID NO: 246492 - protein, 15 aa, Homo sapiens
  CDR3 for beta chain variable domain of TCR clone 123246 (TRBV7-3, TRBJ2-1)
CASSPTGGGEVEQFF

SEQ ID NO: 246493 - protein, 20 aa, Homo sapiens
  CDR3 for alpha chain variable domain of TCR clone 123247 (TRAV12-1, TRAJ42)
SSVIQPPTSVKGGSQGNLIF

SEQ ID NO: 246494 - protein, 14 aa, Homo sapiens
  CDR3 for beta chain variable domain of TCR clone 123247 (TRBV7-6, TRBJ2-3)
CASSLGTVTDTQYF

SEQ ID NO: 246495 - protein, 14 aa, Homo sapiens
  CDR3 for alpha chain variable domain of TCR clone 123248 (TRAV1-2, TRAJ8)
CAVREDTGFQKLVF

SEQ ID NO: 246496 - protein, 11 aa, Homo sapiens
  CDR3 for beta chain variable domain of TCR clone 123248 (TRBV7-2, TRBJ2-7)
CASSLGWEQYF

SEQ ID NO: 246497 - protein, 16 aa, Homo sapiens
  CDR3 for alpha chain variable domain of TCR clone 123249 (TRAV3, TRAJ37)
CAGRGKGSGNTGKLIF

SEQ ID NO: 246498 - protein, 12 aa, Homo sapiens
  CDR3 for beta chain variable domain of TCR clone 123249 (TRBV11-2, TRBJ2-2)
CASSLGGGELFF

SEQ ID NO: 246499 - protein, 11 aa, Homo sapiens
  CDR3 for alpha chain variable domain of TCR clone 123250 (TRAV21, TRAJ39)
LLVNAGSMLTF

SEQ ID NO: 246500 - protein, 12 aa, Homo sapiens
  CDR3 for beta chain variable domain of TCR clone 123250 (TRBV3-1, TRBJ2-1)
CASSQGSSGQFF

SEQ ID NO: 246501 - protein, 14 aa, Homo sapiens
  CDR3 for alpha chain variable domain of TCR clone 123251 (TRAV1-2, TRAJ16)
CAVNRFSDGQKLLF

SEQ ID NO: 246502 - protein, 12 aa, Homo sapiens
  CDR3 for beta chain variable domain of TCR clone 123251 (TRBV28, TRBJ1-2)
CASSRPNYGYTF

SEQ ID NO: 246503 - protein, 11 aa, Homo sapiens
  CDR3 for alpha chain variable domain of TCR clone 123252 (TRAV26-1, TRAJ27)
CIDPMQANQPL

SEQ ID NO: 246504 - protein, 18 aa, Homo sapiens
  CDR3 for beta chain variable domain of TCR clone 123252 (TRBV7-9, TRBJ2-6)
CASSFPGAGISGANVLTF

SEQ ID NO: 246505 - protein, 13 aa, Homo sapiens
  CDR3 for alpha chain variable domain of TCR clone 123253 (TRAV3, TRAJ41)
CAVSSNSGYALNF

SEQ ID NO: 246506 - protein, 14 aa, Homo sapiens
  CDR3 for beta chain variable domain of TCR clone 123253 (TRBV7-2, TRBJ2-7)
CASRSQGAAYEQYF

SEQ ID NO: 246507 - protein, 14 aa, Homo sapiens
  CDR3 for alpha chain variable domain of TCR clone 123254 (TRAV12-3, TRAJ10)
SHLPLTGGGNKLTF

SEQ ID NO: 246508 - protein, 14 aa, Homo sapiens
  CDR3 for beta chain variable domain of TCR clone 123254 (TRBV7-6, TRBJ2-5)
CASSLDGQGRTQYF

SEQ ID NO: 246509 - protein, 14 aa, Homo sapiens
  CDR3 for alpha chain variable domain of TCR clone 123255 (TRAV12-1, TRAJ34)
CVVNLDYNTDKLIF

SEQ ID NO: 246510 - protein, 17 aa, Homo sapiens
  CDR3 for beta chain variable domain of TCR clone 123255 (TRBV20-1, TRBJ2-7)
GSAAGTSGGGSSYEQYF

SEQ ID NO: 246511 - protein, 11 aa, Homo sapiens
  CDR3 for alpha chain variable domain of TCR clone 123256 (TRAV2, TRAJ33)
CAVDSNYQLIW

SEQ ID NO: 246512 - protein, 15 aa, Homo sapiens
  CDR3 for beta chain variable domain of TCR clone 123256 (TRBV19, TRBJ1-2)
CASSGGQVLNYGYTF

SEQ ID NO: 246513 - protein, 12 aa, Homo sapiens
  CDR3 for alpha chain variable domain of TCR clone 123257 (TRAV8-3, TRAJ20)
CAVGANDYKLSF

SEQ ID NO: 246514 - protein, 15 aa, Homo sapiens
  CDR3 for beta chain variable domain of TCR clone 123257 (TRBV19, TRBJ2-2)
CQPSPGTGATGELFF

SEQ ID NO: 246515 - protein, 11 aa, Homo sapiens
  CDR3 for alpha chain variable domain of TCR clone 123258 (TRAV12-1, TRAJ21)
CVVYNFNKFYF

SEQ ID NO: 246516 - protein, 14 aa, Homo sapiens
  CDR3 for beta chain variable domain of TCR clone 123258 (TRBV19, TRBJ2-7)
CASSMGLGAIEQYF

SEQ ID NO: 246517 - protein, 15 aa, Homo sapiens
  CDR3 for alpha chain variable domain of TCR clone 123259 (TRAV12-3, TRAJ52)
CNGGAGGTSYGKLTF

SEQ ID NO: 246518 - protein, 13 aa, Homo sapiens
  CDR3 for beta chain variable domain of TCR clone 123259 (TRBV20-1, TRBJ2-5)
CSARWDYQETQYF

SEQ ID NO: 246519 - protein, 15 aa, Homo sapiens
  CDR3 for alpha chain variable domain of TCR clone 123260 (TRAV4, TRAJ39)
CLVGPNNNEGNMLTF

SEQ ID NO: 246520 - protein, 13 aa, Homo sapiens
  CDR3 for beta chain variable domain of TCR clone 123260 (TRBV11-2, TRBJ2-5)
CASSSTGEETQYF

SEQ ID NO: 246521 - protein, 14 aa, Homo sapiens
  CDR3 for alpha chain variable domain of TCR clone 123261 (TRAV8-3, TRAJ23)
CAVIIYNQGGKLIF

SEQ ID NO: 246522 - protein, 14 aa, Homo sapiens
  CDR3 for beta chain variable domain of TCR clone 123261 (TRBV25-1, TRBJ1-1)
CASTHLGGNTEAFF

SEQ ID NO: 246523 - protein, 18 aa, Homo sapiens
  CDR3 for alpha chain variable domain of TCR clone 123262 (TRAV21, TRAJ52)
CAVRPSPAGGTSYGKLTF

SEQ ID NO: 246524 - protein, 15 aa, Homo sapiens
  CDR3 for beta chain variable domain of TCR clone 123262 (TRBV7-9, TRBJ2-7)
CASSSSGLAVYEQYV

SEQ ID NO: 246525 - protein, 12 aa, Homo sapiens
  CDR3 for alpha chain variable domain of TCR clone 123263 (TRAV17, TRAJ57)
CATDGGSEKLVF

SEQ ID NO: 246526 - protein, 13 aa, Homo sapiens
  CDR3 for beta chain variable domain of TCR clone 123263 (TRBV7-9, TRBJ2-7)
FASSFAGAYEQYF

SEQ ID NO: 246527 - protein, 18 aa, Homo sapiens
  CDR3 for alpha chain variable domain of TCR clone 123264 (TRAV13-1, TRAJ52)
CAAKNPNAGGTSYGKLTF

SEQ ID NO: 246528 - protein, 18 aa, Homo sapiens
  CDR3 for beta chain variable domain of TCR clone 123264 (TRBV12-4, TRBJ2-4)
CASSRAGAVDVAKNIQYF

SEQ ID NO: 246529 - protein, 15 aa, Homo sapiens
  CDR3 for alpha chain variable domain of TCR clone 123265 (TRAV21, TRAJ40)
CAVRPQTAGTYKYIF

SEQ ID NO: 246530 - protein, 13 aa, Homo sapiens
  CDR3 for beta chain variable domain of TCR clone 123265 (TRBV7-2, TRBJ2-2)
CASSSVRAGELFF

SEQ ID NO: 246531 - protein, 15 aa, Homo sapiens
  CDR3 for alpha chain variable domain of TCR clone 123266 (TRAV17, TRAJ22)
CATVAPSDSARQLTF

SEQ ID NO: 246532 - protein, 16 aa, Homo sapiens
  CDR3 for beta chain variable domain of TCR clone 123266 (TRBV10-3, TRBJ2-7)
CAISADFADRPYEQYF

SEQ ID NO: 246533 - protein, 11 aa, Homo sapiens
  CDR3 for alpha chain variable domain of TCR clone 123267 (TRAV1-2, TRAJ34)
CAGYNTDKLIF

SEQ ID NO: 246534 - protein, 16 aa, Homo sapiens
  CDR3 for beta chain variable domain of TCR clone 123267 (TRBV10-3, TRBJ2-1)
CAISGVGDGGGGEQSF

SEQ ID NO: 246535 - protein, 16 aa, Homo sapiens
  CDR3 for alpha chain variable domain of TCR clone 123268 (TRAV30, TRAJ24)
CGTEIVDADSWGKFQF

SEQ ID NO: 246536 - protein, 14 aa, Homo sapiens
  CDR3 for beta chain variable domain of TCR clone 123268 (TRBV7-9, TRBJ2-2)
CASSGLADTGELFF

SEQ ID NO: 246537 - protein, 16 aa, Homo sapiens
  CDR3 for alpha chain variable domain of TCR clone 123269 (TRAV12-1, TRAJ12)
CVVNTLLIDSSYKLIF

SEQ ID NO: 246538 - protein, 13 aa, Homo sapiens
  CDR3 for beta chain variable domain of TCR clone 123269 (TRBV11-2, TRBJ2-1)
CASSSEAYNEQFF

SEQ ID NO: 246539 - protein, 13 aa, Homo sapiens
  CDR3 for alpha chain variable domain of TCR clone 123270 (TRAV13-1, TRAJ12)
CAASPDSSYKLIF

SEQ ID NO: 246540 - protein, 16 aa, Homo sapiens
  CDR3 for beta chain variable domain of TCR clone 123270 (TRBV15, TRBJ2-1)
CATSRERLAEAYEQFF

SEQ ID NO: 246541 - protein, 12 aa, Homo sapiens
  CDR3 for alpha chain variable domain of TCR clone 123271 (TRAV29/DV5, TRAJ49)
CAATDTGNQSYF

SEQ ID NO: 246542 - protein, 15 aa, Homo sapiens
  CDR3 for beta chain variable domain of TCR clone 123271 (TRBV19, TRBJ2-2)
CASRQTGADTGELFF

SEQ ID NO: 246543 - protein, 14 aa, Homo sapiens
  CDR3 for alpha chain variable domain of TCR clone 123272 (TRAV1-2, TRAJ8)
CAVREDTGFQKLVF

SEQ ID NO: 246544 - protein, 12 aa, Homo sapiens
  CDR3 for beta chain variable domain of TCR clone 123272 (TRBV11-2, TRBJ2-3)
GASRGAPNTQYF

SEQ ID NO: 246545 - protein, 17 aa, Homo sapiens
  CDR3 for alpha chain variable domain of TCR clone 123273 (TRAV8-6, TRAJ58)
CAVSSWLGETSGSRLTF

SEQ ID NO: 246546 - protein, 15 aa, Homo sapiens
  CDR3 for beta chain variable domain of TCR clone 123273 (TRBV6-5, TRBJ2-1)
CASSYDAGAGNEQFF

SEQ ID NO: 246547 - protein, 14 aa, Homo sapiens
  CDR3 for alpha chain variable domain of TCR clone 123274 (TRAV12-2, TRAJ13)
CAVKKTGGYQKVTF

SEQ ID NO: 246548 - protein, 18 aa, Homo sapiens
  CDR3 for beta chain variable domain of TCR clone 123274 (TRBV7-6, TRBJ2-1)
CASSPRTSGMSSYNEQFF

SEQ ID NO: 246549 - protein, 15 aa, Homo sapiens
  CDR3 for alpha chain variable domain of TCR clone 123275 (TRAV3, TRAJ17)
CAVSPKEAAGNKLTS

SEQ ID NO: 246550 - protein, 12 aa, Homo sapiens
  CDR3 for beta chain variable domain of TCR clone 123275 (TRBV7-9, TRBJ1-6)
CASSLMTSPLHF

SEQ ID NO: 246551 - protein, 15 aa, Homo sapiens
  CDR3 for alpha chain variable domain of TCR clone 123276 (TRAV3, TRAJ20)
CAVRDIKLSDYKLSF

SEQ ID NO: 246552 - protein, 15 aa, Homo sapiens
  CDR3 for beta chain variable domain of TCR clone 123276 (TRBV7-9, TRBJ1-6)
CASSSPGRRNSPLHF

SEQ ID NO: 246553 - protein, 11 aa, Homo sapiens
  CDR3 for alpha chain variable domain of TCR clone 123277 (TRAV39, TRAJ49)
CAVDISTQFYF

SEQ ID NO: 246554 - protein, 15 aa, Homo sapiens
  CDR3 for beta chain variable domain of TCR clone 123277 (TRBV9, TRBJ1-6)
CASSVAGTGDSPLHF

SEQ ID NO: 246555 - protein, 16 aa, Homo sapiens
  CDR3 for alpha chain variable domain of TCR clone 123278 (TRAV3, TRAJ37)
CAVRPHGSGNTGKLIF

SEQ ID NO: 246556 - protein, 16 aa, Homo sapiens
  CDR3 for beta chain variable domain of TCR clone 123278 (TRBV9, TRBJ1-2)
CASSVEEKFSPYGYTF

SEQ ID NO: 246557 - protein, 15 aa, Homo sapiens
  CDR3 for alpha chain variable domain of TCR clone 123279 (TRAV35, TRAJ50)
CAGQLRKTSYDKVIF

SEQ ID NO: 246558 - protein, 12 aa, Homo sapiens
  CDR3 for beta chain variable domain of TCR clone 123279 (TRBV5-1, TRBJ2-5)
CASSLALETQYF

SEQ ID NO: 246559 - protein, 13 aa, Homo sapiens
  CDR3 for alpha chain variable domain of TCR clone 123280 (TRAV2, TRAJ40)
CAVVTSGTHKYIF

SEQ ID NO: 246560 - protein, 14 aa, Homo sapiens
  CDR3 for beta chain variable domain of TCR clone 123280 (TRBV19, TRBJ2-1)
CASPTVVLSGEQFF

SEQ ID NO: 246561 - protein, 12 aa, Homo sapiens
  CDR3 for alpha chain variable domain of TCR clone 123281 (TRAV4, TRAJ9)
CLVPTGGFKTIF

SEQ ID NO: 246562 - protein, 13 aa, Homo sapiens
  CDR3 for beta chain variable domain of TCR clone 123281 (TRBV7-9, TRBJ1-2)
CASSLKQNYGYTF

SEQ ID NO: 246563 - protein, 14 aa, Homo sapiens
  CDR3 for alpha chain variable domain of TCR clone 123282 (TRAV12-2, TRAJ40)
CAVKIPSGTYRYIF

SEQ ID NO: 246564 - protein, 14 aa, Homo sapiens
  CDR3 for beta chain variable domain of TCR clone 123282 (TRBV7-2, TRBJ2-7)
CASSLYPGRYEQYF

SEQ ID NO: 246565 - protein, 12 aa, Homo sapiens
  CDR3 for alpha chain variable domain of TCR clone 123283 (TRAV12-3, TRAJ5)
CAMDTGRRALTF

SEQ ID NO: 246566 - protein, 13 aa, Homo sapiens
  CDR3 for beta chain variable domain of TCR clone 123283 (TRBV7-3, TRBJ1-1)
CASSQDWGAEAFF

SEQ ID NO: 246567 - protein, 15 aa, Homo sapiens
  CDR3 for alpha chain variable domain of TCR clone 123284 (TRAV3, TRAJ20)
CAVRDIKLSVYKLSF

SEQ ID NO: 246568 - protein, 15 aa, Homo sapiens
  CDR3 for beta chain variable domain of TCR clone 123284 (TRBV7-9, TRBJ1-6)
CASSSPGRGNSPLHF

SEQ ID NO: 246569 - protein, 10 aa, Homo sapiens
  CDR3 for alpha chain variable domain of TCR clone 123285 (TRAV12-1, TRAJ20)
CAIYFQRLQA

SEQ ID NO: 246570 - protein, 15 aa, Homo sapiens
  CDR3 for beta chain variable domain of TCR clone 123285 (TRBV10-2, TRBJ2-6)
CASSEQGTGANVLTF

SEQ ID NO: 246571 - protein, 12 aa, Homo sapiens
  CDR3 for alpha chain variable domain of TCR clone 123286 (TRAV16, TRAJ56)
CAPTGANSKLTF

SEQ ID NO: 246572 - protein, 15 aa, Homo sapiens
  CDR3 for beta chain variable domain of TCR clone 123286 (TRBV27, TRBJ2-1)
CASSNGGGSSNEQFF

SEQ ID NO: 246573 - protein, 15 aa, Homo sapiens
  CDR3 for alpha chain variable domain of TCR clone 123287 (TRAV8-3, TRAJ45)
CALSYSGGGADGLPF

SEQ ID NO: 246574 - protein, 13 aa, Homo sapiens
  CDR3 for beta chain variable domain of TCR clone 123287 (TRBV10-3, TRBJ2-7)
CASKLAVNYEQYF

SEQ ID NO: 246575 - protein, 13 aa, Homo sapiens
  CDR3 for alpha chain variable domain of TCR clone 123288 (TRAV21, TRAJ27)
CAALNTNAGKSTF

SEQ ID NO: 246576 - protein, 13 aa, Homo sapiens
  CDR3 for beta chain variable domain of TCR clone 123288 (TRBV11-2, TRBJ2-5)
CASSSTGEETQYF

SEQ ID NO: 246577 - protein, 13 aa, Homo sapiens
  CDR3 for alpha chain variable domain of TCR clone 123289 (TRAV8-6, TRAJ9)
CAVWDTGGFKTTF

SEQ ID NO: 246578 - protein, 14 aa, Homo sapiens
  CDR3 for beta chain variable domain of TCR clone 123289 (TRBV2, TRBJ2-1)
CASSEALIYNEQFF

SEQ ID NO: 246579 - protein, 17 aa, Homo sapiens
  CDR3 for alpha chain variable domain of TCR clone 123290 (TRAV3, TRAJ42)
CAVRDRDYGGSQGNLIF

SEQ ID NO: 246580 - protein, 12 aa, Homo sapiens
  CDR3 for beta chain variable domain of TCR clone 123290 (TRBV7-9, TRBJ2-7)
CASSIKREEQYF

SEQ ID NO: 246581 - protein, 12 aa, Homo sapiens
  CDR3 for alpha chain variable domain of TCR clone 123291 (TRAV12-1, TRAJ40)
FVFYSGTYKYIF

SEQ ID NO: 246582 - protein, 18 aa, Homo sapiens
  CDR3 for beta chain variable domain of TCR clone 123291 (TRBV12-4, TRBJ2-2)
CASSLVAGTRGRTGELFF

SEQ ID NO: 246583 - protein, 11 aa, Homo sapiens
  CDR3 for alpha chain variable domain of TCR clone 123292 (TRAV21, TRAJ48)
CAVDGNEKLTF

SEQ ID NO: 246584 - protein, 16 aa, Homo sapiens
  CDR3 for beta chain variable domain of TCR clone 123292 (TRBV19, TRBJ2-1)
CASSSKGTRSYKEQFF

SEQ ID NO: 246585 - protein, 12 aa, Homo sapiens
  CDR3 for alpha chain variable domain of TCR clone 123293 (TRAV12-3, TRAJ17)
CAMTLTGNKLTF

SEQ ID NO: 246586 - protein, 19 aa, Homo sapiens
  CDR3 for beta chain variable domain of TCR clone 123293 (TRBV19, TRBJ2-2)
CASTRPGLAGGRVTGELFF

SEQ ID NO: 246587 - protein, 16 aa, Homo sapiens
  CDR3 for alpha chain variable domain of TCR clone 123294 (TRAV3, TRAJ10)
CAVRDMRAGGGNKLTV

SEQ ID NO: 246588 - protein, 19 aa, Homo sapiens
  CDR3 for beta chain variable domain of TCR clone 123294 (TRBV6-3, TRBJ1-2)
CASSYSKGRTGPPNYGYTF

SEQ ID NO: 246589 - protein, 14 aa, Homo sapiens
  CDR3 for alpha chain variable domain of TCR clone 123295 (TRAV35, TRAJ41)
CAGQASVRRNALSF

SEQ ID NO: 246590 - protein, 14 aa, Homo sapiens
  CDR3 for beta chain variable domain of TCR clone 123295 (TRBV20-1, TRBJ1-2)
CSASEQGAVYGYTF

SEQ ID NO: 246591 - protein, 12 aa, Homo sapiens
  CDR3 for alpha chain variable domain of TCR clone 123296 (TRAV12-3, TRAJ5)
CAMDTGRRALTF

SEQ ID NO: 246592 - protein, 14 aa, Homo sapiens
  CDR3 for beta chain variable domain of TCR clone 123296 (TRBV4-1, TRBJ2-2)
CASSQAVNTGELFF

SEQ ID NO: 246593 - protein, 17 aa, Homo sapiens
  CDR3 for alpha chain variable domain of TCR clone 123297 (TRAV26-1, TRAJ47)
CIVPSLLYMEYGNKLDF

SEQ ID NO: 246594 - protein, 14 aa, Homo sapiens
  CDR3 for beta chain variable domain of TCR clone 123297 (TRBV7-3, TRBJ1-5)
RASSFSGCNQPQHF

SEQ ID NO: 246595 - protein, 13 aa, Homo sapiens
  CDR3 for alpha chain variable domain of TCR clone 123298 (TRAV8-3, TRAJ36)
CAVGATGANNLFF

SEQ ID NO: 246596 - protein, 14 aa, Homo sapiens
  CDR3 for beta chain variable domain of TCR clone 123298 (TRBV13, TRBJ2-7)
CASSLKGASYEQYF

SEQ ID NO: 246597 - protein, 14 aa, Homo sapiens
  CDR3 for alpha chain variable domain of TCR clone 123299 (TRAV8-3, TRAJ39)
CAVGATNAGNMLTF

SEQ ID NO: 246598 - protein, 12 aa, Homo sapiens
  CDR3 for beta chain variable domain of TCR clone 123299 (TRBV11-3, TRBJ1-1)
CASSHRQGEAFF

SEQ ID NO: 246599 - protein, 16 aa, Homo sapiens
  CDR3 for alpha chain variable domain of TCR clone 123300 (TRAV30, TRAJ26)
CGTESVGDNYGQNFVF

SEQ ID NO: 246600 - protein, 13 aa, Homo sapiens
  CDR3 for beta chain variable domain of TCR clone 123300 (TRBV19, TRBJ2-1)
CASSTGGSNEQFF

SEQ ID NO: 246601 - protein, 14 aa, Homo sapiens
  CDR3 for alpha chain variable domain of TCR clone 123301 (TRAV8-3, TRAJ12)
CAVGARDSSYKLIF

SEQ ID NO: 246602 - protein, 16 aa, Homo sapiens
  CDR3 for beta chain variable domain of TCR clone 123301 (TRBV11-2, TRBJ2-7)
CASSPLAGGPRYEQYF

SEQ ID NO: 246603 - protein, 13 aa, Homo sapiens
  CDR3 for alpha chain variable domain of TCR clone 123302 (TRAV3, TRAJ20)
CAVRPLNDYKLSF

SEQ ID NO: 246604 - protein, 12 aa, Homo sapiens
  CDR3 for beta chain variable domain of TCR clone 123302 (TRBV6-1, TRBJ2-1)
RATYGLNNEQFF

SEQ ID NO: 246605 - protein, 12 aa, Homo sapiens
  CDR3 for alpha chain variable domain of TCR clone 123303 (TRAV21, TRAJ33)
CAKMDSNYQLIW

SEQ ID NO: 246606 - protein, 15 aa, Homo sapiens
  CDR3 for beta chain variable domain of TCR clone 123303 (TRBV15, TRBJ1-5)
CATSREQGGNQPQHF

SEQ ID NO: 246607 - protein, 15 aa, Homo sapiens
  CDR3 for alpha chain variable domain of TCR clone 123304 (TRAV17, TRAJ16)
CATALRFSDGQKLLF

SEQ ID NO: 246608 - protein, 15 aa, Homo sapiens
  CDR3 for beta chain variable domain of TCR clone 123304 (TRBV20-1, TRBJ1-1)
CSASRGVTGNTEDFF

SEQ ID NO: 246609 - protein, 15 aa, Homo sapiens
  CDR3 for alpha chain variable domain of TCR clone 123305 (TRAV38-1, TRAJ37)
CAFIFGSGNTGKLIS

SEQ ID NO: 246610 - protein, 12 aa, Homo sapiens
  CDR3 for beta chain variable domain of TCR clone 123305 (TRBV7-9, TRBJ2-7)
CASSLEGYEQYF

SEQ ID NO: 246611 - protein, 15 aa, Homo sapiens
  CDR3 for alpha chain variable domain of TCR clone 123306 (TRAV27, TRAJ33)
CAGADIMDSNYKLIW

SEQ ID NO: 246612 - protein, 13 aa, Homo sapiens
  CDR3 for beta chain variable domain of TCR clone 123306 (TRBV28, TRBJ1-2)
CASSLQGRGGYTF

SEQ ID NO: 246613 - protein, 11 aa, Homo sapiens
  CDR3 for alpha chain variable domain of TCR clone 123307 (TRAV23/DV6, TRAJ17)
HGGAAGNKLTF

SEQ ID NO: 246614 - protein, 14 aa, Homo sapiens
  CDR3 for beta chain variable domain of TCR clone 123307 (TRBV7-2, TRBJ1-2)
CASSQTGSTYGYTF

SEQ ID NO: 246615 - protein, 13 aa, Homo sapiens
  CDR3 for alpha chain variable domain of TCR clone 123308 (TRAV1-1, TRAJ31)
CASYLNNNARLML

SEQ ID NO: 246616 - protein, 14 aa, Homo sapiens
  CDR3 for beta chain variable domain of TCR clone 123308 (TRBV4-1, TRBJ2-5)
CASSRSGSGETQYF

SEQ ID NO: 246617 - protein, 11 aa, Homo sapiens
  CDR3 for alpha chain variable domain of TCR clone 123309 (TRAV26-1, TRAJ37)
CIVRVGRTLIF

SEQ ID NO: 246618 - protein, 13 aa, Homo sapiens
  CDR3 for beta chain variable domain of TCR clone 123309 (TRBV14, TRBJ1-2)
CASSEDRRYGYTF

SEQ ID NO: 246619 - protein, 14 aa, Homo sapiens
  CDR3 for alpha chain variable domain of TCR clone 123310 (TRAV1-2, TRAJ8)
CAVREDTGFQKLVF

SEQ ID NO: 246620 - protein, 14 aa, Homo sapiens
  CDR3 for beta chain variable domain of TCR clone 123310 (TRBV19, TRBJ2-1)
CASPTFVLRGEQFF

SEQ ID NO: 246621 - protein, 13 aa, Homo sapiens
  CDR3 for alpha chain variable domain of TCR clone 123311 (TRAV16, TRAJ22)
SAMLAGSARQLTF

SEQ ID NO: 246622 - protein, 18 aa, Homo sapiens
  CDR3 for beta chain variable domain of TCR clone 123311 (TRBV7-2, TRBJ2-3)
CAISLETSRGRKADTQYF

SEQ ID NO: 246623 - protein, 14 aa, Homo sapiens
  CDR3 for alpha chain variable domain of TCR clone 123312 (TRAV1-2, TRAJ16)
CAVNRFSDGQKLLF

SEQ ID NO: 246624 - protein, 14 aa, Homo sapiens
  CDR3 for beta chain variable domain of TCR clone 123312 (TRBV29-1, TRBJ2-5)
CSVETSGSGETQYF

SEQ ID NO: 246625 - protein, 13 aa, Homo sapiens
  CDR3 for alpha chain variable domain of TCR clone 123313 (TRAV3, TRAJ33)
CAVRGRSNYQLIW

SEQ ID NO: 246626 - protein, 16 aa, Homo sapiens
  CDR3 for beta chain variable domain of TCR clone 123313 (TRBV4-2, TRBJ2-7)
CASSQDRGTSSYEQYF

SEQ ID NO: 246627 - protein, 17 aa, Homo sapiens
  CDR3 for alpha chain variable domain of TCR clone 123314 (TRAV26-2, TRAJ28)
CILRPLLIVAGSYQLTF

SEQ ID NO: 246628 - protein, 16 aa, Homo sapiens
  CDR3 for beta chain variable domain of TCR clone 123314 (TRBV12-5, TRBJ2-5)
CASGPRTSGNQETQYF

SEQ ID NO: 246629 - protein, 15 aa, Homo sapiens
  CDR3 for alpha chain variable domain of TCR clone 123315 (TRAV27, TRAJ38)
CAGRFNAGNNRKLIW

SEQ ID NO: 246630 - protein, 14 aa, Homo sapiens
  CDR3 for beta chain variable domain of TCR clone 123315 (TRBV7-6, TRBJ2-3)
CASSLGTVTDTQYF

SEQ ID NO: 246631 - protein, 14 aa, Homo sapiens
  CDR3 for alpha chain variable domain of TCR clone 123316 (TRAV12-2, TRAJ6)
CVPLRPGGSYIPTF

SEQ ID NO: 246632 - protein, 20 aa, Homo sapiens
  CDR3 for beta chain variable domain of TCR clone 123316 (TRBV19, TRBJ2-1)
CASSISRTVTSTRLNNEQFF

SEQ ID NO: 246633 - protein, 13 aa, Homo sapiens
  CDR3 for alpha chain variable domain of TCR clone 123317 (TRAV12-1, TRAJ6)
CVVFPGGGYIPTF

SEQ ID NO: 246634 - protein, 14 aa, Homo sapiens
  CDR3 for beta chain variable domain of TCR clone 123317 (TRBV20-1, TRBJ1-3)
CSASPTGAGNTIYF

SEQ ID NO: 246635 - protein, 15 aa, Homo sapiens
  CDR3 for alpha chain variable domain of TCR clone 123318 (TRAV12-3, TRAJ22)
CAMRTISGSARQLTF

SEQ ID NO: 246636 - protein, 16 aa, Homo sapiens
  CDR3 for beta chain variable domain of TCR clone 123318 (TRBV20-1, TRBJ2-2)
CSASRPGTGNTGELFF

SEQ ID NO: 246637 - protein, 15 aa, Homo sapiens
  CDR3 for alpha chain variable domain of TCR clone 123319 (TRAV27, TRAJ38)
CAARRNAGNNRKLIW

SEQ ID NO: 246638 - protein, 13 aa, Homo sapiens
  CDR3 for beta chain variable domain of TCR clone 123319 (TRBV10-3, TRBJ1-2)
CAISERDSYGYTF

SEQ ID NO: 246639 - protein, 13 aa, Homo sapiens
  CDR3 for alpha chain variable domain of TCR clone 123320 (TRAV3, TRAJ21)
CAVREPDFNKFYF

SEQ ID NO: 246640 - protein, 12 aa, Homo sapiens
  CDR3 for beta chain variable domain of TCR clone 123320 (TRBV5-1, TRBJ2-7)
CASSFRGYEQYF

SEQ ID NO: 246641 - protein, 13 aa, Homo sapiens
  CDR3 for alpha chain variable domain of TCR clone 123321 (TRAV12-1, TRAJ43)
CVVSHHNNTDMRF

SEQ ID NO: 246642 - protein, 14 aa, Homo sapiens
  CDR3 for beta chain variable domain of TCR clone 123321 (TRBV5-5, TRBJ2-2)
CASSLLGDTGELFF

SEQ ID NO: 246643 - protein, 14 aa, Homo sapiens
  CDR3 for alpha chain variable domain of TCR clone 123322 (TRAV2, TRAJ41)
CAVGTSNSGDALNF

SEQ ID NO: 246644 - protein, 13 aa, Homo sapiens
  CDR3 for beta chain variable domain of TCR clone 123322 (TRBV4-1, TRBJ2-1)
CASSQEVQYEQFF

SEQ ID NO: 246645 - protein, 15 aa, Homo sapiens
  CDR3 for alpha chain variable domain of TCR clone 123323 (TRAV21, TRAJ38)
CAVRQDAGNNRKLIW

SEQ ID NO: 246646 - protein, 14 aa, Homo sapiens
  CDR3 for beta chain variable domain of TCR clone 123323 (TRBV12-4, TRBJ1-1)
CASSPIRRTGEAFF

SEQ ID NO: 246647 - protein, 10 aa, Homo sapiens
  CDR3 for alpha chain variable domain of TCR clone 123324 (TRAV12-2, TRAJ48)
CAVTSEKLTF

SEQ ID NO: 246648 - protein, 17 aa, Homo sapiens
  CDR3 for beta chain variable domain of TCR clone 123324 (TRBV11-1, TRBJ2-7)
CASSLAGSFGLDYEQYF

SEQ ID NO: 246649 - protein, 12 aa, Homo sapiens
  CDR3 for alpha chain variable domain of TCR clone 123325 (TRAV21, TRAJ31)
CVLAGNNARLMF

SEQ ID NO: 246650 - protein, 16 aa, Homo sapiens
  CDR3 for beta chain variable domain of TCR clone 123325 (TRBV27, TRBJ2-5)
CASSFVPGGTKETQYF

SEQ ID NO: 246651 - protein, 14 aa, Homo sapiens
  CDR3 for alpha chain variable domain of TCR clone 123326 (TRAV12-2, TRAJ40)
CAVKIPSGTYKYIF

SEQ ID NO: 246652 - protein, 13 aa, Homo sapiens
  CDR3 for beta chain variable domain of TCR clone 123326 (TRBV7-9, TRBJ2-1)
CASSAGLYNEQFF

SEQ ID NO: 246653 - protein, 13 aa, Homo sapiens
  CDR3 for alpha chain variable domain of TCR clone 123327 (TRAV12-3, TRAJ33)
CAMSVNSNYQLIW

SEQ ID NO: 246654 - protein, 14 aa, Homo sapiens
  CDR3 for beta chain variable domain of TCR clone 123327 (TRBV7-9, TRBJ2-2)
CASSGLADTGELFF

SEQ ID NO: 246655 - protein, 13 aa, Homo sapiens
  CDR3 for alpha chain variable domain of TCR clone 123328 (TRAV12-2, TRAJ20)
CAVYPYNDYKLSF

SEQ ID NO: 246656 - protein, 15 aa, Homo sapiens
  CDR3 for beta chain variable domain of TCR clone 123328 (TRBV27, TRBJ2-5)
CASSLYPRGGETQYF

SEQ ID NO: 246657 - protein, 14 aa, Homo sapiens
  CDR3 for alpha chain variable domain of TCR clone 123329 (TRAV1-2, TRAJ8)
CAVREDTGFQKLVF

SEQ ID NO: 246658 - protein, 16 aa, Homo sapiens
  CDR3 for beta chain variable domain of TCR clone 123329 (TRBV5-1, TRBJ2-7)
CASSWGTGGRAWEQYF

SEQ ID NO: 246659 - protein, 12 aa, Homo sapiens
  CDR3 for alpha chain variable domain of TCR clone 123330 (TRAV12-2, TRAJ47)
CAVAEYGNKLVF

SEQ ID NO: 246660 - protein, 14 aa, Homo sapiens
  CDR3 for beta chain variable domain of TCR clone 123330 (TRBV20-1, TRBJ1-1)
CSAMGGTADTEAFF

SEQ ID NO: 246661 - protein, 13 aa, Homo sapiens
  CDR3 for alpha chain variable domain of TCR clone 123331 (TRAV12-1, TRAJ49)
CVVNTNTGNQFYF

SEQ ID NO: 246662 - protein, 14 aa, Homo sapiens
  CDR3 for beta chain variable domain of TCR clone 123331 (TRBV18, TRBJ1-2)
CASSPPGQAYGYTF

SEQ ID NO: 246663 - protein, 14 aa, Homo sapiens
  CDR3 for alpha chain variable domain of TCR clone 123332 (TRAV4, TRAJ10)
CLVGDTGGGNKLIF

SEQ ID NO: 246664 - protein, 13 aa, Homo sapiens
  CDR3 for beta chain variable domain of TCR clone 123332 (TRBV10-2, TRBJ2-5)
CVSSVGPQETQYF

SEQ ID NO: 246665 - protein, 14 aa, Homo sapiens
  CDR3 for alpha chain variable domain of TCR clone 123333 (TRAV12-3, TRAJ10)
SHLPLTGGGNKLTF

SEQ ID NO: 246666 - protein, 15 aa, Homo sapiens
  CDR3 for beta chain variable domain of TCR clone 123333 (TRBV20-1, TRBJ2-7)
CSARDRVSGMDEQFF

SEQ ID NO: 246667 - protein, 13 aa, Homo sapiens
  CDR3 for alpha chain variable domain of TCR clone 123334 (TRAV29/DV5, TRAJ48)
CAASSFGNEKLTF

SEQ ID NO: 246668 - protein, 11 aa, Homo sapiens
  CDR3 for beta chain variable domain of TCR clone 123334 (TRBV12-4, TRBJ2-3)
CASTATDTQYF

SEQ ID NO: 246669 - protein, 13 aa, Homo sapiens
  CDR3 for alpha chain variable domain of TCR clone 123335 (TRAV13-2, TRAJ40)
CAEFTSGTYKYIF

SEQ ID NO: 246670 - protein, 14 aa, Homo sapiens
  CDR3 for beta chain variable domain of TCR clone 123335 (TRBV7-2, TRBJ1-2)
CASSQTGSTYGYTF

SEQ ID NO: 246671 - protein, 15 aa, Homo sapiens
  CDR3 for alpha chain variable domain of TCR clone 123336 (TRAV8-3, TRAJ7)
CAVGSISYGNNRLAF

SEQ ID NO: 246672 - protein, 15 aa, Homo sapiens
  CDR3 for beta chain variable domain of TCR clone 123336 (TRBV4-2, TRBJ1-1)
CASSQEDLPRTEAVF

SEQ ID NO: 246673 - protein, 13 aa, Homo sapiens
  CDR3 for alpha chain variable domain of TCR clone 123337 (TRAV12-1, TRAJ9)
CVVLNTGGFKTIF

SEQ ID NO: 246674 - protein, 16 aa, Homo sapiens
  CDR3 for beta chain variable domain of TCR clone 123337 (TRBV12-5, TRBJ2-5)
CASGPRTSGNQETQYF

SEQ ID NO: 246675 - protein, 15 aa, Homo sapiens
  CDR3 for alpha chain variable domain of TCR clone 123338 (TRAV4, TRAJ39)
CLVGPNNNAGNMLTF

SEQ ID NO: 246676 - protein, 13 aa, Homo sapiens
  CDR3 for beta chain variable domain of TCR clone 123338 (TRBV11-2, TRBJ2-5)
CASSSTGDETQYF

SEQ ID NO: 246677 - protein, 13 aa, Homo sapiens
  CDR3 for alpha chain variable domain of TCR clone 123339 (TRAV27, TRAJ29)
CAGAHSGNTPLVF

SEQ ID NO: 246678 - protein, 14 aa, Homo sapiens
  CDR3 for beta chain variable domain of TCR clone 123339 (TRBV7-9, TRBJ2-7)
CAGSIGQGAGEQYF

SEQ ID NO: 246679 - protein, 14 aa, Homo sapiens
  CDR3 for alpha chain variable domain of TCR clone 123340 (TRAV30, TRAJ33)
CGTVAPRSNYQLIW

SEQ ID NO: 246680 - protein, 18 aa, Homo sapiens
  CDR3 for beta chain variable domain of TCR clone 123340 (TRBV11-2, TRBJ2-3)
WASSLGGASRGAPNTQYF

SEQ ID NO: 246681 - protein, 11 aa, Homo sapiens
  CDR3 for alpha chain variable domain of TCR clone 123341 (TRAV21, TRAJ34)
CAVTNTDKLIF

SEQ ID NO: 246682 - protein, 16 aa, Homo sapiens
  CDR3 for beta chain variable domain of TCR clone 123341 (TRBV13, TRBJ2-2)
CASSPRTGEHTGELFF

SEQ ID NO: 246683 - protein, 16 aa, Homo sapiens
  CDR3 for alpha chain variable domain of TCR clone 123342 (TRAV3, TRAJ10)
CAVRDMNAGGGNKLNF

SEQ ID NO: 246684 - protein, 16 aa, Homo sapiens
  CDR3 for beta chain variable domain of TCR clone 123342 (TRBV6-3, TRBJ1-2)
CASSYSRRASNYGYTF

SEQ ID NO: 246685 - protein, 12 aa, Homo sapiens
  CDR3 for alpha chain variable domain of TCR clone 123343 (TRAV2, TRAJ36)
CAKLTGANNLFF

SEQ ID NO: 246686 - protein, 18 aa, Homo sapiens
  CDR3 for beta chain variable domain of TCR clone 123343 (TRBV19, TRBJ1-1)
CASSIDGGDYTGNTEAFF

SEQ ID NO: 246687 - protein, 18 aa, Homo sapiens
  CDR3 for alpha chain variable domain of TCR clone 123344 (TRAV35, TRAJ52)
CAGLLRYPGGTSYGKLTF

SEQ ID NO: 246688 - protein, 13 aa, Homo sapiens
  CDR3 for beta chain variable domain of TCR clone 123344 (TRBV12-4, TRBJ1-2)
CASSLRQGKGYTF

SEQ ID NO: 246689 - protein, 14 aa, Homo sapiens
  CDR3 for alpha chain variable domain of TCR clone 123345 (TRAV27, TRAJ22)
CAGVSVLGKRQLTF

SEQ ID NO: 246690 - protein, 13 aa, Homo sapiens
  CDR3 for beta chain variable domain of TCR clone 123345 (TRBV7-3, TRBJ1-1)
CASSQDWGAEAFF

SEQ ID NO: 246691 - protein, 14 aa, Homo sapiens
  CDR3 for alpha chain variable domain of TCR clone 123346 (TRAV26-1, TRAJ38)
CIADNAGNNRKLIW

SEQ ID NO: 246692 - protein, 14 aa, Homo sapiens
  CDR3 for beta chain variable domain of TCR clone 123346 (TRBV11-2, TRBJ1-5)
CASSSRTGNQPQHF

SEQ ID NO: 246693 - protein, 11 aa, Homo sapiens
  CDR3 for alpha chain variable domain of TCR clone 123347 (TRAV13-1, TRAJ39)
CASHAGNMLTF

SEQ ID NO: 246694 - protein, 14 aa, Homo sapiens
  CDR3 for beta chain variable domain of TCR clone 123347 (TRBV11-2, TRBJ1-5)
CASSLGRGRQPQHF

SEQ ID NO: 246695 - protein, 15 aa, Homo sapiens
  CDR3 for alpha chain variable domain of TCR clone 123348 (TRAV16, TRAJ16)
CALQGGGSDGQKLLF

SEQ ID NO: 246696 - protein, 15 aa, Homo sapiens
  CDR3 for beta chain variable domain of TCR clone 123348 (TRBV6-3, TRBJ2-7)
CASSSPGTVFYEQYF

SEQ ID NO: 246697 - protein, 11 aa, Homo sapiens
  CDR3 for alpha chain variable domain of TCR clone 123349 (TRAV13-1, TRAJ6)
CATLGSYIPTF

SEQ ID NO: 246698 - protein, 13 aa, Homo sapiens
  CDR3 for beta chain variable domain of TCR clone 123349 (TRBV20-1, TRBJ2-7)
CSATHTSGYEQYF

SEQ ID NO: 246699 - protein, 16 aa, Homo sapiens
  CDR3 for alpha chain variable domain of TCR clone 123350 (TRAV21, TRAJ45)
CAVSWGSGGGAAGLTF

SEQ ID NO: 246700 - protein, 14 aa, Homo sapiens
  CDR3 for beta chain variable domain of TCR clone 123350 (TRBV4-2, TRBJ1-2)
CASSPGGSNYGYTF

SEQ ID NO: 246701 - protein, 11 aa, Homo sapiens
  CDR3 for alpha chain variable domain of TCR clone 123351 (TRAV12-2, TRAJ29)
CAVTLRSPLVF

SEQ ID NO: 246702 - protein, 16 aa, Homo sapiens
  CDR3 for beta chain variable domain of TCR clone 123351 (TRBV19, TRBJ1-5)
CASRIDRGGPRQPQHF

SEQ ID NO: 246703 - protein, 13 aa, Homo sapiens
  CDR3 for alpha chain variable domain of TCR clone 123352 (TRAV12-3, TRAJ16)
CAVQLSDGQKLLF

SEQ ID NO: 246704 - protein, 11 aa, Homo sapiens
  CDR3 for beta chain variable domain of TCR clone 123352 (TRBV29-1, TRBJ2-5)
CSEDRTGTQYF

SEQ ID NO: 246705 - protein, 15 aa, Homo sapiens
  CDR3 for alpha chain variable domain of TCR clone 123353 (TRAV8-3, TRAJ40)
CAAPSLGSGTYRYIF

SEQ ID NO: 246706 - protein, 16 aa, Homo sapiens
  CDR3 for beta chain variable domain of TCR clone 123353 (TRBV7-3, TRBJ2-3)
GASSLSGYRPEDTQYF

SEQ ID NO: 246707 - protein, 16 aa, Homo sapiens
  CDR3 for alpha chain variable domain of TCR clone 123354 (TRAV26-2, TRAJ45)
CTTASPIGGVADGLTF

SEQ ID NO: 246708 - protein, 20 aa, Homo sapiens
  CDR3 for beta chain variable domain of TCR clone 123354 (TRBV28, TRBJ2-1)
CASTPIGRSPGLAGGNEQFF

SEQ ID NO: 246709 - protein, 12 aa, Homo sapiens
  CDR3 for alpha chain variable domain of TCR clone 123355 (TRAV4, TRAJ9)
CLVPTGGFKTIF

SEQ ID NO: 246710 - protein, 13 aa, Homo sapiens
  CDR3 for beta chain variable domain of TCR clone 123355 (TRBV11-2, TRBJ2-1)
CASSLGLAGGRFF

SEQ ID NO: 246711 - protein, 14 aa, Homo sapiens
  CDR3 for alpha chain variable domain of TCR clone 123356 (TRAV12-3, TRAJ10)
SHLPLTGGGNKLTF

SEQ ID NO: 246712 - protein, 14 aa, Homo sapiens
  CDR3 for beta chain variable domain of TCR clone 123356 (TRBV7-2, TRBJ2-2)
CASSLNSNTGELLF

SEQ ID NO: 246713 - protein, 14 aa, Homo sapiens
  CDR3 for alpha chain variable domain of TCR clone 123357 (TRAV38-1, TRAJ45)
CAYYSGGGADGLTF

SEQ ID NO: 246714 - protein, 20 aa, Homo sapiens
  CDR3 for beta chain variable domain of TCR clone 123357 (TRBV28, TRBJ2-1)
CASTPIGRSPELAGGNEQFF

SEQ ID NO: 246715 - protein, 21 aa, Homo sapiens
  CDR3 for alpha chain variable domain of TCR clone 123358 (TRAV1-1, TRAJ6)
CLLLLRCERLERTGGSYIPTF

SEQ ID NO: 246716 - protein, 13 aa, Homo sapiens
  CDR3 for beta chain variable domain of TCR clone 123358 (TRBV10-2, TRBJ2-7)
CASRASGGYEQYF

SEQ ID NO: 246717 - protein, 14 aa, Homo sapiens
  CDR3 for alpha chain variable domain of TCR clone 123359 (TRAV29/DV5, TRAJ20)
CAATIRSNDSKLSF

SEQ ID NO: 246718 - protein, 15 aa, Homo sapiens
  CDR3 for beta chain variable domain of TCR clone 123359 (TRBV20-1, TRBJ2-1)
CSASSAGSSYNEQFF

SEQ ID NO: 246719 - protein, 18 aa, Homo sapiens
  CDR3 for alpha chain variable domain of TCR clone 123360 (TRAV13-1, TRAJ52)
CAASKRSAGGTSYGKLTF

SEQ ID NO: 246720 - protein, 20 aa, Homo sapiens
  CDR3 for beta chain variable domain of TCR clone 123360 (TRBV28, TRBJ2-1)
CASTPIGRSPGLAGGNEQFF

SEQ ID NO: 246721 - protein, 16 aa, Homo sapiens
  CDR3 for alpha chain variable domain of TCR clone 123361 (TRAV17, TRAJ28)
CASYAYSGAGSYQLTF

SEQ ID NO: 246722 - protein, 15 aa, Homo sapiens
  CDR3 for beta chain variable domain of TCR clone 123361 (TRBV4-3, TRBJ2-1)
CASSPSGGLYNEQFF

SEQ ID NO: 246723 - protein, 14 aa, Homo sapiens
  CDR3 for alpha chain variable domain of TCR clone 123362 (TRAV13-1, TRAJ44)
CAAKATGTASKLTF

SEQ ID NO: 246724 - protein, 17 aa, Homo sapiens
  CDR3 for beta chain variable domain of TCR clone 123362 (TRBV7-3, TRBJ2-3)
CASSLMKRMRGAETQYF

SEQ ID NO: 246725 - protein, 18 aa, Homo sapiens
  CDR3 for alpha chain variable domain of TCR clone 123363 (TRAV21, TRAJ52)
CAVRPSPAGGTSYGKLTF

SEQ ID NO: 246726 - protein, 13 aa, Homo sapiens
  CDR3 for beta chain variable domain of TCR clone 123363 (TRBV19, TRBJ1-2)
CASSVPGQDGYTS

SEQ ID NO: 246727 - protein, 23 aa, Homo sapiens
  CDR3 for alpha chain variable domain of TCR clone 123364 (TRAV1-1, TRAJ29)
LLQELQMKDSASYFLGGNTPLAF

SEQ ID NO: 246728 - protein, 13 aa, Homo sapiens
  CDR3 for beta chain variable domain of TCR clone 123364 (TRBV25-1, TRBJ2-7)
CASSEDGDYEQYF

SEQ ID NO: 246729 - protein, 15 aa, Homo sapiens
  CDR3 for alpha chain variable domain of TCR clone 123365 (TRAV12-1, TRAJ44)
CVADLPTGTASKLTF

SEQ ID NO: 246730 - protein, 15 aa, Homo sapiens
  CDR3 for beta chain variable domain of TCR clone 123365 (TRBV10-3, TRBJ2-3)
CAISLTSGGTDTQYF

SEQ ID NO: 246731 - protein, 12 aa, Homo sapiens
  CDR3 for alpha chain variable domain of TCR clone 123366 (TRAV1-1, TRAJ30)
CAVRGRDDKSIF

SEQ ID NO: 246732 - protein, 13 aa, Homo sapiens
  CDR3 for beta chain variable domain of TCR clone 123366 (TRBV11-3, TRBJ2-7)
CASSLDKLYEQYF

SEQ ID NO: 246733 - protein, 16 aa, Homo sapiens
  CDR3 for alpha chain variable domain of TCR clone 123367 (TRAV1-1, TRAJ28)
CAVRDDSGAGSYQPTF

SEQ ID NO: 246734 - protein, 12 aa, Homo sapiens
  CDR3 for beta chain variable domain of TCR clone 123367 (TRBV11-2, TRBJ2-5)
CASSLDTQTQYF

SEQ ID NO: 246735 - protein, 13 aa, Homo sapiens
  CDR3 for alpha chain variable domain of TCR clone 123368 (TRAV8-3, TRAJ44)
CAVVPGTASKLTF

SEQ ID NO: 246736 - protein, 11 aa, Homo sapiens
  CDR3 for beta chain variable domain of TCR clone 123368 (TRBV11-2, TRBJ1-1)
CASSINTEAFF

SEQ ID NO: 246737 - protein, 18 aa, Homo sapiens
  CDR3 for alpha chain variable domain of TCR clone 123369 (TRAV26-2, TRAJ45)
CILRVDKYSGGGADGLTF

SEQ ID NO: 246738 - protein, 16 aa, Homo sapiens
  CDR3 for beta chain variable domain of TCR clone 123369 (TRBV2, TRBJ1-4)
CASNLLQGATNEKLLF

SEQ ID NO: 246739 - protein, 14 aa, Homo sapiens
  CDR3 for alpha chain variable domain of TCR clone 123370 (TRAV12-2, TRAJ40)
CAVKIPSGTYKYIF

SEQ ID NO: 246740 - protein, 15 aa, Homo sapiens
  CDR3 for beta chain variable domain of TCR clone 123370 (TRBV7-2, TRBJ1-2)
CASSPRAGWNYGYTF

SEQ ID NO: 246741 - protein, 12 aa, Homo sapiens
  CDR3 for alpha chain variable domain of TCR clone 123371 (TRAV13-1, TRAJ21)
CAAFFNFTKFYF

SEQ ID NO: 246742 - protein, 14 aa, Homo sapiens
  CDR3 for beta chain variable domain of TCR clone 123371 (TRBV4-1, TRBJ2-7)
CASRLTSGSYEQYF

SEQ ID NO: 246743 - protein, 15 aa, Homo sapiens
  CDR3 for alpha chain variable domain of TCR clone 123372 (TRAV14/DV4, TRAJ33)
CAMREGRDSNYQLLW

SEQ ID NO: 246744 - protein, 16 aa, Homo sapiens
  CDR3 for beta chain variable domain of TCR clone 123372 (TRBV12-5, TRBJ2-5)
CASGPRTSGNQETQYF

SEQ ID NO: 246745 - protein, 14 aa, Homo sapiens
  CDR3 for alpha chain variable domain of TCR clone 123373 (TRAV12-2, TRAJ24)
CAVTPADSWGKLQF

SEQ ID NO: 246746 - protein, 14 aa, Homo sapiens
  CDR3 for beta chain variable domain of TCR clone 123373 (TRBV7-2, TRBJ1-1)
CASSFLTGTTEAFF

SEQ ID NO: 246747 - protein, 17 aa, Homo sapiens
  CDR3 for alpha chain variable domain of TCR clone 123374 (TRAV26-1, TRAJ10)
CIVSFRGLTGGGNKLTF

SEQ ID NO: 246748 - protein, 11 aa, Homo sapiens
  CDR3 for beta chain variable domain of TCR clone 123374 (TRBV29-1, TRBJ2-5)
CSEDRTGTQYF

SEQ ID NO: 246749 - protein, 14 aa, Homo sapiens
  CDR3 for alpha chain variable domain of TCR clone 123375 (TRAV21, TRAJ35)
CAVMPIGFGNGLHF

SEQ ID NO: 246750 - protein, 12 aa, Homo sapiens
  CDR3 for beta chain variable domain of TCR clone 123375 (TRBV7-9, TRBJ2-7)
CASSIKREEQYF

SEQ ID NO: 246751 - protein, 18 aa, Homo sapiens
  CDR3 for alpha chain variable domain of TCR clone 123376 (TRAV26-2, TRAJ45)
CILRVDKYSGGGADGLTL

SEQ ID NO: 246752 - protein, 12 aa, Homo sapiens
  CDR3 for beta chain variable domain of TCR clone 123376 (TRBV29-1, TRBJ2-3)
CSVTGGADTQYF

SEQ ID NO: 246753 - protein, 15 aa, Homo sapiens
  CDR3 for alpha chain variable domain of TCR clone 123377 (TRAV13-1, TRAJ6)
CAAIHPSGGSYIPTF

SEQ ID NO: 246754 - protein, 14 aa, Homo sapiens
  CDR3 for beta chain variable domain of TCR clone 123377 (TRBV7-9, TRBJ2-2)
CASGLAINAGELFF

SEQ ID NO: 246755 - protein, 12 aa, Homo sapiens
  CDR3 for alpha chain variable domain of TCR clone 123378 (TRAV12-3, TRAJ17)
CAMTLTGNKLTF

SEQ ID NO: 246756 - protein, 16 aa, Homo sapiens
  CDR3 for beta chain variable domain of TCR clone 123378 (TRBV9, TRBJ1-2)
CASSVEEKVSPYGYTF

SEQ ID NO: 246757 - protein, 15 aa, Homo sapiens
  CDR3 for alpha chain variable domain of TCR clone 123379 (TRAV13-2, TRAJ58)
CVTAQKETSGFRLTF

SEQ ID NO: 246758 - protein, 14 aa, Homo sapiens
  CDR3 for beta chain variable domain of TCR clone 123379 (TRBV7-2, TRBJ2-3)
CASRRGLAADTQYF

SEQ ID NO: 246759 - protein, 10 aa, Homo sapiens
  CDR3 for alpha chain variable domain of TCR clone 123380 (TRAV17, TRAJ52)
SATSYGKLTF

SEQ ID NO: 246760 - protein, 13 aa, Homo sapiens
  CDR3 for beta chain variable domain of TCR clone 123380 (TRBV29-1, TRBJ2-5)
CSVGGTSAETQFF

SEQ ID NO: 246761 - protein, 11 aa, Homo sapiens
  CDR3 for alpha chain variable domain of TCR clone 123381 (TRAV12-2, TRAJ31)
CAILNNAILMF

SEQ ID NO: 246762 - protein, 13 aa, Homo sapiens
  CDR3 for beta chain variable domain of TCR clone 123381 (TRBV20-1, TRBJ1-1)
CSARLGQGTEAFF

SEQ ID NO: 246763 - protein, 15 aa, Homo sapiens
  CDR3 for alpha chain variable domain of TCR clone 123382 (TRAV26-1, TRAJ39)
CIVRDGSNAGNMLTF

SEQ ID NO: 246764 - protein, 16 aa, Homo sapiens
  CDR3 for beta chain variable domain of TCR clone 123382 (TRBV7-2, TRBJ1-3)
CASSGLEASSGNTIYF

SEQ ID NO: 246765 - protein, 20 aa, Homo sapiens
  CDR3 for alpha chain variable domain of TCR clone 123383 (TRAV26-1, TRAJ42)
CCVLLHRQTYYGGSQGNLIF

SEQ ID NO: 246766 - protein, 16 aa, Homo sapiens
  CDR3 for beta chain variable domain of TCR clone 123383 (TRBV4-1, TRBJ1-1)
CASSSMSEWPNTEAFF

SEQ ID NO: 246767 - protein, 14 aa, Homo sapiens
  CDR3 for alpha chain variable domain of TCR clone 123384 (TRAV12-2, TRAJ11)
CAVEGGSGYSTLTF

SEQ ID NO: 246768 - protein, 15 aa, Homo sapiens
  CDR3 for beta chain variable domain of TCR clone 123384 (TRBV7-2, TRBJ2-2)
CASSLTGSFTGELFF

SEQ ID NO: 246769 - protein, 15 aa, Homo sapiens
  CDR3 for alpha chain variable domain of TCR clone 123385 (TRAV17, TRAJ57)
CATGPSQGGSEKLVF

SEQ ID NO: 246770 - protein, 14 aa, Homo sapiens
  CDR3 for beta chain variable domain of TCR clone 123385 (TRBV12-5, TRBJ2-5)
CASGSRIHQETQYF

SEQ ID NO: 246771 - protein, 13 aa, Homo sapiens
  CDR3 for alpha chain variable domain of TCR clone 123386 (TRAV8-4, TRAJ48)
CAVSLFGNEKLTL

SEQ ID NO: 246772 - protein, 15 aa, Homo sapiens
  CDR3 for beta chain variable domain of TCR clone 123386 (TRBV20-1, TRBJ2-7)
CSARKGLAESYEQYF

SEQ ID NO: 246773 - protein, 12 aa, Homo sapiens
  CDR3 for alpha chain variable domain of TCR clone 123387 (TRAV3, TRAJ20)
CAVRDPDYKLSF

SEQ ID NO: 246774 - protein, 14 aa, Homo sapiens
  CDR3 for beta chain variable domain of TCR clone 123387 (TRBV18, TRBJ2-5)
CASSPGVSQETQYF

SEQ ID NO: 246775 - protein, 13 aa, Homo sapiens
  CDR3 for alpha chain variable domain of TCR clone 123388 (TRAV26-1, TRAJ34)
CIVRPWITDKLIF

SEQ ID NO: 246776 - protein, 16 aa, Homo sapiens
  CDR3 for beta chain variable domain of TCR clone 123388 (TRBV7-3, TRBJ2-2)
CASSLKRGTLSGELFF

SEQ ID NO: 246777 - protein, 13 aa, Homo sapiens
  CDR3 for alpha chain variable domain of TCR clone 123389 (TRAV3, TRAJ41)
CAVSSNSGYALNF

SEQ ID NO: 246778 - protein, 14 aa, Homo sapiens
  CDR3 for beta chain variable domain of TCR clone 123389 (TRBV7-6, TRBJ2-3)
CASSLGTVTDTQYF

SEQ ID NO: 246779 - protein, 10 aa, Homo sapiens
  CDR3 for alpha chain variable domain of TCR clone 123390 (TRAV12-2, TRAJ20)
CAVYLYKLSF

SEQ ID NO: 246780 - protein, 18 aa, Homo sapiens
  CDR3 for beta chain variable domain of TCR clone 123390 (TRBV11-2, TRBJ2-3)
CASSLGGASRGAPNTQYF

SEQ ID NO: 246781 - protein, 11 aa, Homo sapiens
  CDR3 for alpha chain variable domain of TCR clone 123391 (TRAV3, TRAJ21)
CAVGNFNKFYF

SEQ ID NO: 246782 - protein, 15 aa, Homo sapiens
  CDR3 for beta chain variable domain of TCR clone 123391 (TRBV7-3, TRBJ2-7)
CASSPPVALNHEQYF

SEQ ID NO: 246783 - protein, 14 aa, Homo sapiens
  CDR3 for alpha chain variable domain of TCR clone 123392 (TRAV26-1, TRAJ34)
CTVRVAYNTDKLIF

SEQ ID NO: 246784 - protein, 19 aa, Homo sapiens
  CDR3 for beta chain variable domain of TCR clone 123392 (TRBV25-1, TRBJ2-2)
CAILVYRVDRGRKTGELFF

SEQ ID NO: 246785 - protein, 13 aa, Homo sapiens
  CDR3 for alpha chain variable domain of TCR clone 123393 (TRAV8-3, TRAJ44)
CAVVPGTASRLTF

SEQ ID NO: 246786 - protein, 14 aa, Homo sapiens
  CDR3 for beta chain variable domain of TCR clone 123393 (TRBV11-2, TRBJ2-3)
CASRRLARTDTQYF

SEQ ID NO: 246787 - protein, 13 aa, Homo sapiens
  CDR3 for alpha chain variable domain of TCR clone 123394 (TRAV16, TRAJ26)
CITVLCLGQNFVF

SEQ ID NO: 246788 - protein, 12 aa, Homo sapiens
  CDR3 for beta chain variable domain of TCR clone 123394 (TRBV11-2, TRBJ2-1)
CASSPGNDEQFF

SEQ ID NO: 246789 - protein, 14 aa, Homo sapiens
  CDR3 for alpha chain variable domain of TCR clone 123395 (TRAV12-3, TRAJ58)
CEMSTETSGSRLTF

SEQ ID NO: 246790 - protein, 12 aa, Homo sapiens
  CDR3 for beta chain variable domain of TCR clone 123395 (TRBV7-8, TRBJ2-7)
CASSLGDREQYF

SEQ ID NO: 246791 - protein, 16 aa, Homo sapiens
  CDR3 for alpha chain variable domain of TCR clone 123396 (TRAV20, TRAJ28)
CAVRDPSGAGSYQLTF

SEQ ID NO: 246792 - protein, 15 aa, Homo sapiens
  CDR3 for beta chain variable domain of TCR clone 123396 (TRBV27, TRBJ2-1)
CASSNGGGSSNEQFF

SEQ ID NO: 246793 - protein, 11 aa, Homo sapiens
  CDR3 for alpha chain variable domain of TCR clone 123397 (TRAV13-1, TRAJ30)
CAASRDDNIIF

SEQ ID NO: 246794 - protein, 15 aa, Homo sapiens
  CDR3 for beta chain variable domain of TCR clone 123397 (TRBV18, TRBJ1-1)
CASSPSSWVNTEAFF

SEQ ID NO: 246795 - protein, 15 aa, Homo sapiens
  CDR3 for alpha chain variable domain of TCR clone 123398 (TRAV12-2, TRAJ43)
CAFDMRFGAGTRLTV

SEQ ID NO: 246796 - protein, 16 aa, Homo sapiens
  CDR3 for beta chain variable domain of TCR clone 123398 (TRBV19, TRBJ2-1)
CASSKAGPSSYNEQFF

SEQ ID NO: 246797 - protein, 15 aa, Homo sapiens
  CDR3 for alpha chain variable domain of TCR clone 123399 (TRAV13-1, TRAJ17)
CAASIERAAGNKLTF

SEQ ID NO: 246798 - protein, 18 aa, Homo sapiens
  CDR3 for beta chain variable domain of TCR clone 123399 (TRBV12-4, TRBJ2-2)
CASSLVAGTRGRTGELFF

SEQ ID NO: 246799 - protein, 14 aa, Homo sapiens
  CDR3 for alpha chain variable domain of TCR clone 123400 (TRAV1-2, TRAJ16)
CAVNRSSDGQKLLF

SEQ ID NO: 246800 - protein, 12 aa, Homo sapiens
  CDR3 for beta chain variable domain of TCR clone 123400 (TRBV28, TRBJ2-6)
CAIQAGANVLTF

SEQ ID NO: 246801 - protein, 13 aa, Homo sapiens
  CDR3 for alpha chain variable domain of TCR clone 123401 (TRAV12-1, TRAJ26)
CVVRRNYGQNFVF

SEQ ID NO: 246802 - protein, 14 aa, Homo sapiens
  CDR3 for beta chain variable domain of TCR clone 123401 (TRBV28, TRBJ2-5)
CASSLRGLEETQYF

SEQ ID NO: 246803 - protein, 12 aa, Homo sapiens
  CDR3 for alpha chain variable domain of TCR clone 123402 (TRAV23/DV6, TRAJ17)
CARGSCRQQANF

SEQ ID NO: 246804 - protein, 15 aa, Homo sapiens
  CDR3 for beta chain variable domain of TCR clone 123402 (TRBV20-1, TRBJ2-5)
CSASPLAGGQETQYF

SEQ ID NO: 246805 - protein, 19 aa, Homo sapiens
  CDR3 for alpha chain variable domain of TCR clone 123403 (TRAV3, TRAJ6)
CAVRDRNPSRSGGSYIPTV

SEQ ID NO: 246806 - protein, 15 aa, Homo sapiens
  CDR3 for beta chain variable domain of TCR clone 123403 (TRBV18, TRBJ2-7)
CASSPTFMDSYEQYF

SEQ ID NO: 246807 - protein, 17 aa, Homo sapiens
  CDR3 for alpha chain variable domain of TCR clone 123404 (TRAV8-6, TRAJ22)
CAVSLYPSSGSARQLTF

SEQ ID NO: 246808 - protein, 17 aa, Homo sapiens
  CDR3 for beta chain variable domain of TCR clone 123404 (TRBV11-3, TRBJ2-5)
CASSLPGVRGGKETQYF

SEQ ID NO: 246809 - protein, 13 aa, Homo sapiens
  CDR3 for alpha chain variable domain of TCR clone 123405 (TRAV3, TRAJ33)
CAVRDRSNYQLIW

SEQ ID NO: 246810 - protein, 14 aa, Homo sapiens
  CDR3 for beta chain variable domain of TCR clone 123405 (TRBV7-2, TRBJ2-3)
CASSQTGSSYTQYF

SEQ ID NO: 246811 - protein, 20 aa, Homo sapiens
  CDR3 for alpha chain variable domain of TCR clone 123406 (TRAV26-1, TRAJ30)
CIVRVEMTRSSLEKGHDFIF

SEQ ID NO: 246812 - protein, 13 aa, Homo sapiens
  CDR3 for beta chain variable domain of TCR clone 123406 (TRBV4-2, TRBJ1-1)
CASSQAGNTEAFF

SEQ ID NO: 246813 - protein, 14 aa, Homo sapiens
  CDR3 for alpha chain variable domain of TCR clone 123407 (TRAV12-3, TRAJ9)
CAMSVETGGFKTIF

SEQ ID NO: 246814 - protein, 13 aa, Homo sapiens
  CDR3 for beta chain variable domain of TCR clone 123407 (TRBV4-1, TRBJ2-1)
CASSQAGGDEQFF

SEQ ID NO: 246815 - protein, 14 aa, Homo sapiens
  CDR3 for alpha chain variable domain of TCR clone 123408 (TRAV12-3, TRAJ42)
CAMNYGGSEGNLIF

SEQ ID NO: 246816 - protein, 15 aa, Homo sapiens
  CDR3 for beta chain variable domain of TCR clone 123408 (TRBV5-7, TRBJ1-5)
CASSYGKLWDQPQHF

SEQ ID NO: 246817 - protein, 13 aa, Homo sapiens
  CDR3 for alpha chain variable domain of TCR clone 123409 (TRAV12-3, TRAJ54)
CALVPQGAQKLLF

SEQ ID NO: 246818 - protein, 15 aa, Homo sapiens
  CDR3 for beta chain variable domain of TCR clone 123409 (TRBV4-1, TRBJ2-2)
CASSQDSRGTGELFF

SEQ ID NO: 246819 - protein, 10 aa, Homo sapiens
  CDR3 for alpha chain variable domain of TCR clone 123410 (TRAV30, TRAJ48)
CGIGNEKLTF

SEQ ID NO: 246820 - protein, 15 aa, Homo sapiens
  CDR3 for beta chain variable domain of TCR clone 123410 (TRBV28, TRBJ2-5)
CASSPPWSYQETQCF

SEQ ID NO: 246821 - protein, 13 aa, Homo sapiens
  CDR3 for alpha chain variable domain of TCR clone 123411 (TRAV12-3, TRAJ54)
CEMFAQGAQKLVF

SEQ ID NO: 246822 - protein, 16 aa, Homo sapiens
  CDR3 for beta chain variable domain of TCR clone 123411 (TRBV7-6, TRBJ2-3)
CASSPRRGGLGDTQYF

SEQ ID NO: 246823 - protein, 17 aa, Homo sapiens
  CDR3 for alpha chain variable domain of TCR clone 123412 (TRAV3, TRAJ42)
CAVRDRDYGGSQGNLIF

SEQ ID NO: 246824 - protein, 12 aa, Homo sapiens
  CDR3 for beta chain variable domain of TCR clone 123412 (TRBV12-5, TRBJ2-5)
CASGQGVETQYF

SEQ ID NO: 246825 - protein, 19 aa, Homo sapiens
  CDR3 for alpha chain variable domain of TCR clone 123413 (TRAV3, TRAJ6)
CAVRDRNPSRSGGSYIPTF

SEQ ID NO: 246826 - protein, 15 aa, Homo sapiens
  CDR3 for beta chain variable domain of TCR clone 123413 (TRBV18, TRBJ2-7)
CAISPTFMDSYEQYF

SEQ ID NO: 246827 - protein, 12 aa, Homo sapiens
  CDR3 for alpha chain variable domain of TCR clone 123414 (TRAV16, TRAJ10)
CSRTGGGNKITF

SEQ ID NO: 246828 - protein, 14 aa, Homo sapiens
  CDR3 for beta chain variable domain of TCR clone 123414 (TRBV7-2, TRBJ2-7)
CASRSQGAAYEQYF

SEQ ID NO: 246829 - protein, 15 aa, Homo sapiens
  CDR3 for alpha chain variable domain of TCR clone 123415 (TRAV12-2, TRAJ43)
CAFDMRFGAGTRLTV

SEQ ID NO: 246830 - protein, 12 aa, Homo sapiens
  CDR3 for beta chain variable domain of TCR clone 123415 (TRBV28, TRBJ2-3)
CASSLYRDTQYF

SEQ ID NO: 246831 - protein, 16 aa, Homo sapiens
  CDR3 for alpha chain variable domain of TCR clone 123416 (TRAV30, TRAJ24)
CGTEMVEADSWGKFQF

SEQ ID NO: 246832 - protein, 14 aa, Homo sapiens
  CDR3 for beta chain variable domain of TCR clone 123416 (TRBV12-5, TRBJ2-5)
CASGSRTHQETQYF

SEQ ID NO: 246833 - protein, 14 aa, Homo sapiens
  CDR3 for alpha chain variable domain of TCR clone 123417 (TRAV1-2, TRAJ8)
CAVREDTGFQKLVF

SEQ ID NO: 246834 - protein, 13 aa, Homo sapiens
  CDR3 for beta chain variable domain of TCR clone 123417 (TRBV19, TRBJ1-2)
CAGSVPGQDGYTF

SEQ ID NO: 246835 - protein, 11 aa, Homo sapiens
  CDR3 for alpha chain variable domain of TCR clone 123418 (TRAV17, TRAJ36)
CAPTGANNLFL

SEQ ID NO: 246836 - protein, 13 aa, Homo sapiens
  CDR3 for beta chain variable domain of TCR clone 123418 (TRBV12-4, TRBJ2-7)
CASSPTETYEQYF

SEQ ID NO: 246837 - protein, 15 aa, Homo sapiens
  CDR3 for alpha chain variable domain of TCR clone 123419 (TRAV8-4, TRAJ47)
CAVSYPEEYGNKLVF

SEQ ID NO: 246838 - protein, 15 aa, Homo sapiens
  CDR3 for beta chain variable domain of TCR clone 123419 (TRBV11-2, TRBJ2-1)
CASSLGPDSYNEQFF

SEQ ID NO: 246839 - protein, 17 aa, Homo sapiens
  CDR3 for alpha chain variable domain of TCR clone 123420 (TRAV3, TRAJ6)
CAVRDGPRAGGSYIPTF

SEQ ID NO: 246840 - protein, 18 aa, Homo sapiens
  CDR3 for beta chain variable domain of TCR clone 123420 (TRBV7-9, TRBJ2-7)
CAGSLTTSGSRTWYEQYF

SEQ ID NO: 246841 - protein, 14 aa, Homo sapiens
  CDR3 for alpha chain variable domain of TCR clone 123421 (TRAV17, TRAJ12)
CATDEKDSSYKLIF

SEQ ID NO: 246842 - protein, 14 aa, Homo sapiens
  CDR3 for beta chain variable domain of TCR clone 123421 (TRBV25-1, TRBJ1-1)
CASTHLGGNTEAFF

SEQ ID NO: 246843 - protein, 12 aa, Homo sapiens
  CDR3 for alpha chain variable domain of TCR clone 123422 (TRAV8-3, TRAJ41)
RAVALSGYALNF

SEQ ID NO: 246844 - protein, 16 aa, Homo sapiens
  CDR3 for beta chain variable domain of TCR clone 123422 (TRBV27, TRBJ2-7)
CASSSERRDSAYEQYF

SEQ ID NO: 246845 - protein, 16 aa, Homo sapiens
  CDR3 for alpha chain variable domain of TCR clone 123423 (TRAV3, TRAJ4)
CAVRPSPSGGHNKLIF

SEQ ID NO: 246846 - protein, 12 aa, Homo sapiens
  CDR3 for beta chain variable domain of TCR clone 123423 (TRBV7-9, TRBJ2-7)
CASSQGVYEQYF

SEQ ID NO: 246847 - protein, 15 aa, Homo sapiens
  CDR3 for alpha chain variable domain of TCR clone 123424 (TRAV17, TRAJ22)
CATDLLSGSARQLTF

SEQ ID NO: 246848 - protein, 13 aa, Homo sapiens
  CDR3 for beta chain variable domain of TCR clone 123424 (TRBV7-9, TRBJ1-2)
CASSLKQNYGYTF

SEQ ID NO: 246849 - protein, 15 aa, Homo sapiens
  CDR3 for alpha chain variable domain of TCR clone 123425 (TRAV12-1, TRAJ37)
CVVNIMGGNTGKLIF

SEQ ID NO: 246850 - protein, 14 aa, Homo sapiens
  CDR3 for beta chain variable domain of TCR clone 123425 (TRBV12-4, TRBJ1-1)
CACSLGTGGTEAFF

SEQ ID NO: 246851 - protein, 12 aa, Homo sapiens
  CDR3 for alpha chain variable domain of TCR clone 123426 (TRAV3, TRAJ43)
CAVRDPNNDMRF

SEQ ID NO: 246852 - protein, 13 aa, Homo sapiens
  CDR3 for beta chain variable domain of TCR clone 123426 (TRBV4-2, TRBJ1-1)
CASSQAGNTEAFF

SEQ ID NO: 246853 - protein, 12 aa, Homo sapiens
  CDR3 for alpha chain variable domain of TCR clone 123427 (TRAV9-2, TRAJ48)
CALSDRMGALTF

SEQ ID NO: 246854 - protein, 15 aa, Homo sapiens
  CDR3 for beta chain variable domain of TCR clone 123427 (TRBV5-1, TRBJ1-2)
CASSYPGTGSSGYTF

SEQ ID NO: 246855 - protein, 14 aa, Homo sapiens
  CDR3 for alpha chain variable domain of TCR clone 123428 (TRAV1-1, TRAJ27)
CAVIYNTNAGKSTF

SEQ ID NO: 246856 - protein, 13 aa, Homo sapiens
  CDR3 for beta chain variable domain of TCR clone 123428 (TRBV7-9, TRBJ1-2)
CASSLEQNYGYTF

SEQ ID NO: 246857 - protein, 14 aa, Homo sapiens
  CDR3 for alpha chain variable domain of TCR clone 123429 (TRAV1-2, TRAJ16)
CAVNRFSDGQKLLF

SEQ ID NO: 246858 - protein, 15 aa, Homo sapiens
  CDR3 for beta chain variable domain of TCR clone 123429 (TRBV7-8, TRBJ2-7)
CASSLERAGSYEQYF

SEQ ID NO: 246859 - protein, 14 aa, Homo sapiens
  CDR3 for alpha chain variable domain of TCR clone 123430 (TRAV12-1, TRAJ17)
CVVNYKAAGNKLTF

SEQ ID NO: 246860 - protein, 14 aa, Homo sapiens
  CDR3 for beta chain variable domain of TCR clone 123430 (TRBV6-1, TRBJ1-3)
CASMQGGGGNTIYF

SEQ ID NO: 246861 - protein, 13 aa, Homo sapiens
  CDR3 for alpha chain variable domain of TCR clone 123431 (TRAV17, TRAJ34)
CATDLYNTDKLVF

SEQ ID NO: 246862 - protein, 12 aa, Homo sapiens
  CDR3 for beta chain variable domain of TCR clone 123431 (TRBV11-2, TRBJ2-2)
CASSLGGGELFF

SEQ ID NO: 246863 - protein, 14 aa, Homo sapiens
  CDR3 for alpha chain variable domain of TCR clone 123432 (TRAV13-1, TRAJ44)
CAAKAAGTASKLTF

SEQ ID NO: 246864 - protein, 13 aa, Homo sapiens
  CDR3 for beta chain variable domain of TCR clone 123432 (TRBV5-5, TRBJ1-2)
CASSFWRGEDYAF

SEQ ID NO: 246865 - protein, 11 aa, Homo sapiens
  CDR3 for alpha chain variable domain of TCR clone 123433 (TRAV2, TRAJ33)
CAVESNYQLIW

SEQ ID NO: 246866 - protein, 16 aa, Homo sapiens
  CDR3 for beta chain variable domain of TCR clone 123433 (TRBV7-2, TRBJ2-5)
CASSPFPTGGEETQYF

SEQ ID NO: 246867 - protein, 16 aa, Homo sapiens
  CDR3 for alpha chain variable domain of TCR clone 123434 (TRAV3, TRAJ10)
CAARDMRAGGGNKLTF

SEQ ID NO: 246868 - protein, 16 aa, Homo sapiens
  CDR3 for beta chain variable domain of TCR clone 123434 (TRBV12-5, TRBJ2-5)
CASGPRTSGNQETQYF

SEQ ID NO: 246869 - protein, 13 aa, Homo sapiens
  CDR3 for alpha chain variable domain of TCR clone 123435 (TRAV12-1, TRAJ26)
CVVRRNYGQNFVF

SEQ ID NO: 246870 - protein, 14 aa, Homo sapiens
  CDR3 for beta chain variable domain of TCR clone 123435 (TRBV7-2, TRBJ2-7)
RASSLYPGRYEQYF

SEQ ID NO: 246871 - protein, 13 aa, Homo sapiens
  CDR3 for alpha chain variable domain of TCR clone 123436 (TRAV36/DV7, TRAJ49)
CAGDSNTGNQFYF

SEQ ID NO: 246872 - protein, 15 aa, Homo sapiens
  CDR3 for beta chain variable domain of TCR clone 123436 (TRBV7-2, TRBJ1-5)
CASSLDRGQDQPQHF

SEQ ID NO: 246873 - protein, 13 aa, Homo sapiens
  CDR3 for alpha chain variable domain of TCR clone 123437 (TRAV12-3, TRAJ40)
CAMSDSGTYKYIF

SEQ ID NO: 246874 - protein, 14 aa, Homo sapiens
  CDR3 for beta chain variable domain of TCR clone 123437 (TRBV7-2, TRBJ1-5)
CASSTQGADQPQHF

SEQ ID NO: 246875 - protein, 17 aa, Homo sapiens
  CDR3 for alpha chain variable domain of TCR clone 123438 (TRAV26-1, TRAJ37)
CIVRVITVSSNTGKLIF

SEQ ID NO: 246876 - protein, 14 aa, Homo sapiens
  CDR3 for beta chain variable domain of TCR clone 123438 (TRBV19, TRBJ2-1)
CASPTFVLSGEQFL

SEQ ID NO: 246877 - protein, 15 aa, Homo sapiens
  CDR3 for alpha chain variable domain of TCR clone 123439 (TRAV4, TRAJ8)
CLVGEQHTGFQKLVF

SEQ ID NO: 246878 - protein, 15 aa, Homo sapiens
  CDR3 for beta chain variable domain of TCR clone 123439 (TRBV7-9, TRBJ2-5)
CASSNREYLQETQYF

SEQ ID NO: 246879 - protein, 12 aa, Homo sapiens
  CDR3 for alpha chain variable domain of TCR clone 123440 (TRAV2, TRAJ9)
CAVGAGGFKTIF

SEQ ID NO: 246880 - protein, 18 aa, Homo sapiens
  CDR3 for beta chain variable domain of TCR clone 123440 (TRBV4-1, TRBJ1-5)
CASSQDPRGQGLNQPQHF

SEQ ID NO: 246881 - protein, 16 aa, Homo sapiens
  CDR3 for alpha chain variable domain of TCR clone 123441 (TRAV9-2, TRAJ10)
CALSEGGTGGGNKLTF

SEQ ID NO: 246882 - protein, 14 aa, Homo sapiens
  CDR3 for beta chain variable domain of TCR clone 123441 (TRBV6-1, TRBJ1-3)
CASVQGGGGNTIYF

SEQ ID NO: 246883 - protein, 16 aa, Homo sapiens
  CDR3 for alpha chain variable domain of TCR clone 123442 (TRAV16, TRAJ4)
CALSRMFSGGYNKLIF

SEQ ID NO: 246884 - protein, 15 aa, Homo sapiens
  CDR3 for beta chain variable domain of TCR clone 123442 (TRBV7-6, TRBJ1-5)
CASSQSSGINQPQHF

SEQ ID NO: 246885 - protein, 16 aa, Homo sapiens
  CDR3 for alpha chain variable domain of TCR clone 123443 (TRAV1-2, TRAJ10)
CAVRVVLTGGGNKLTF

SEQ ID NO: 246886 - protein, 12 aa, Homo sapiens
  CDR3 for beta chain variable domain of TCR clone 123443 (TRBV12-4, TRBJ2-7)
CASSLGGYEQYF

SEQ ID NO: 246887 - protein, 14 aa, Homo sapiens
  CDR3 for alpha chain variable domain of TCR clone 123444 (TRAV12-2, TRAJ13)
CAVKKTGGYQKFTF

SEQ ID NO: 246888 - protein, 17 aa, Homo sapiens
  CDR3 for beta chain variable domain of TCR clone 123444 (TRBV13, TRBJ2-3)
CASSLSRVAGGRNTQYF

SEQ ID NO: 246889 - protein, 20 aa, Homo sapiens
  CDR3 for alpha chain variable domain of TCR clone 123445 (TRAV26-1, TRAJ42)
CCVLLHRQTYYGGSEGNLIF

SEQ ID NO: 246890 - protein, 16 aa, Homo sapiens
  CDR3 for beta chain variable domain of TCR clone 123445 (TRBV7-3, TRBJ2-2)
CASSLKRGTLSGELFF

SEQ ID NO: 246891 - protein, 16 aa, Homo sapiens
  CDR3 for alpha chain variable domain of TCR clone 123446 (TRAV12-3, TRAJ53)
CAMSPGSGGSNYKLTF

SEQ ID NO: 246892 - protein, 20 aa, Homo sapiens
  CDR3 for beta chain variable domain of TCR clone 123446 (TRBV7-8, TRBJ2-2)
CASSHLFPGPTIHITGELSF

SEQ ID NO: 246893 - protein, 10 aa, Homo sapiens
  CDR3 for alpha chain variable domain of TCR clone 123447 (TRAV21, TRAJ43)
CAVRIGDMRF

SEQ ID NO: 246894 - protein, 13 aa, Homo sapiens
  CDR3 for beta chain variable domain of TCR clone 123447 (TRBV20-1, TRBJ2-7)
CSAPGLADYEQYS

SEQ ID NO: 246895 - protein, 16 aa, Homo sapiens
  CDR3 for alpha chain variable domain of TCR clone 123448 (TRAV3, TRAJ37)
CAVRGKRSGNTGKLIF

SEQ ID NO: 246896 - protein, 14 aa, Homo sapiens
  CDR3 for beta chain variable domain of TCR clone 123448 (TRBV7-2, TRBJ2-7)
CASSPKTSFYEQYF

SEQ ID NO: 246897 - protein, 11 aa, Homo sapiens
  CDR3 for alpha chain variable domain of TCR clone 123449 (TRAV12-1, TRAJ26)
CVVAYGQNFVF

SEQ ID NO: 246898 - protein, 15 aa, Homo sapiens
  CDR3 for beta chain variable domain of TCR clone 123449 (TRBV7-3, TRBJ2-2)
CASSETGQGTGELFF

SEQ ID NO: 246899 - protein, 15 aa, Homo sapiens
  CDR3 for alpha chain variable domain of TCR clone 123450 (TRAV17, TRAJ57)
CATGPSQGGSEKLVF

SEQ ID NO: 246900 - protein, 16 aa, Homo sapiens
  CDR3 for beta chain variable domain of TCR clone 123450 (TRBV12-4, TRBJ1-5)
CSSSRPVGVSNQPQHF

SEQ ID NO: 246901 - protein, 15 aa, Homo sapiens
  CDR3 for alpha chain variable domain of TCR clone 123451 (TRAV21, TRAJ56)
CAVTKYTGANSELTF

SEQ ID NO: 246902 - protein, 14 aa, Homo sapiens
  CDR3 for beta chain variable domain of TCR clone 123451 (TRBV20-1, TRBJ2-3)
CSARVRGSTDTQYF

SEQ ID NO: 246903 - protein, 16 aa, Homo sapiens
  CDR3 for alpha chain variable domain of TCR clone 123452 (TRAV1-2, TRAJ10)
CAVRGVLTGGGNKLTF

SEQ ID NO: 246904 - protein, 15 aa, Homo sapiens
  CDR3 for beta chain variable domain of TCR clone 123452 (TRBV2, TRBJ2-7)
CASSEGLARSYEQYF

SEQ ID NO: 246905 - protein, 16 aa, Homo sapiens
  CDR3 for alpha chain variable domain of TCR clone 123453 (TRAV3, TRAJ10)
CAVRDMRAGGGNKLTF

SEQ ID NO: 246906 - protein, 17 aa, Homo sapiens
  CDR3 for beta chain variable domain of TCR clone 123453 (TRBV28, TRBJ2-5)
CARSTPEGDALQETQYF

SEQ ID NO: 246907 - protein, 14 aa, Homo sapiens
  CDR3 for alpha chain variable domain of TCR clone 123454 (TRAV1-2, TRAJ16)
CAVNRFSDGQKLLF

SEQ ID NO: 246908 - protein, 15 aa, Homo sapiens
  CDR3 for beta chain variable domain of TCR clone 123454 (TRBV18, TRBJ1-1)
CASSPRQGENTEAFF

SEQ ID NO: 246909 - protein, 16 aa, Homo sapiens
  CDR3 for alpha chain variable domain of TCR clone 123455 (TRAV26-1, TRAJ37)
CIVRGDGSGSTGKLIF

SEQ ID NO: 246910 - protein, 14 aa, Homo sapiens
  CDR3 for beta chain variable domain of TCR clone 123455 (TRBV19, TRBJ2-2)
CASSGQGIAGELFF

SEQ ID NO: 246911 - protein, 13 aa, Homo sapiens
  CDR3 for alpha chain variable domain of TCR clone 123456 (TRAV23/DV6, TRAJ34)
CAAIENNTDKLIF

SEQ ID NO: 246912 - protein, 18 aa, Homo sapiens
  CDR3 for beta chain variable domain of TCR clone 123456 (TRBV20-1, TRBJ2-6)
CSAETTPPHGSGANVLTF

SEQ ID NO: 246913 - protein, 12 aa, Homo sapiens
  CDR3 for alpha chain variable domain of TCR clone 123457 (TRAV12-3, TRAJ5)
CAMDTGRRALTI

SEQ ID NO: 246914 - protein, 13 aa, Homo sapiens
  CDR3 for beta chain variable domain of TCR clone 123457 (TRBV7-7, TRBJ2-2)
CASSLTSAGELFF

SEQ ID NO: 246915 - protein, 13 aa, Homo sapiens
  CDR3 for alpha chain variable domain of TCR clone 123458 (TRAV3, TRAJ4)
CAVRDVGYNKLIF

SEQ ID NO: 246916 - protein, 14 aa, Homo sapiens
  CDR3 for beta chain variable domain of TCR clone 123458 (TRBV12-4, TRBJ1-2)
CASSSSAAGSSYTF

SEQ ID NO: 246917 - protein, 14 aa, Homo sapiens
  CDR3 for alpha chain variable domain of TCR clone 123459 (TRAV1-2, TRAJ16)
CAVNRFSDGQKLLF

SEQ ID NO: 246918 - protein, 16 aa, Homo sapiens
  CDR3 for beta chain variable domain of TCR clone 123459 (TRBV5-1, TRBJ2-5)
CASSLRRTSGQKTQYF

SEQ ID NO: 246919 - protein, 13 aa, Homo sapiens
  CDR3 for alpha chain variable domain of TCR clone 123460 (TRAV23/DV6, TRAJ12)
CAPRVDSSYKLIF

SEQ ID NO: 246920 - protein, 14 aa, Homo sapiens
  CDR3 for beta chain variable domain of TCR clone 123460 (TRBV12-5, TRBJ2-5)
CASGSRTHQETQYF

SEQ ID NO: 246921 - protein, 16 aa, Homo sapiens
  CDR3 for alpha chain variable domain of TCR clone 123461 (TRAV4, TRAJ18)
CCVLLIGGSTLGRLYF

SEQ ID NO: 246922 - protein, 12 aa, Homo sapiens
  CDR3 for beta chain variable domain of TCR clone 123461 (TRBV6-3, TRBJ2-7)
CASSLTPDEQYF

SEQ ID NO: 246923 - protein, 12 aa, Homo sapiens
  CDR3 for alpha chain variable domain of TCR clone 123462 (TRAV21, TRAJ30)
CAVMNRDDKIIF

SEQ ID NO: 246924 - protein, 11 aa, Homo sapiens
  CDR3 for beta chain variable domain of TCR clone 123462 (TRBV12-4, TRBJ2-3)
CASTATDTQYF

SEQ ID NO: 246925 - protein, 14 aa, Homo sapiens
  CDR3 for alpha chain variable domain of TCR clone 123463 (TRAV12-3, TRAJ10)
SHLPLTGGGNKLTF

SEQ ID NO: 246926 - protein, 13 aa, Homo sapiens
  CDR3 for beta chain variable domain of TCR clone 123463 (TRBV2, TRBJ1-1)
CASRWTVNTEAFF

SEQ ID NO: 246927 - protein, 14 aa, Homo sapiens
  CDR3 for alpha chain variable domain of TCR clone 123464 (TRAV29/DV5, TRAJ48)
CAAMALFGNEKLTF

SEQ ID NO: 246928 - protein, 15 aa, Homo sapiens
  CDR3 for beta chain variable domain of TCR clone 123464 (TRBV11-2, TRBJ1-2)
CASSLEGVQRNGYTF

SEQ ID NO: 246929 - protein, 14 aa, Homo sapiens
  CDR3 for alpha chain variable domain of TCR clone 123465 (TRAV21, TRAJ21)
CAVKGFGNFNKFYF

SEQ ID NO: 246930 - protein, 15 aa, Homo sapiens
  CDR3 for beta chain variable domain of TCR clone 123465 (TRBV5-1, TRBJ1-4)
FAPAAWKDGNEKLFF

SEQ ID NO: 246931 - protein, 12 aa, Homo sapiens
  CDR3 for alpha chain variable domain of TCR clone 123466 (TRAV12-3, TRAJ17)
CAMTLTGNKLTF

SEQ ID NO: 246932 - protein, 12 aa, Homo sapiens
  CDR3 for beta chain variable domain of TCR clone 123466 (TRBV5-4, TRBJ2-7)
CASSWAGQGENF

SEQ ID NO: 246933 - protein, 17 aa, Homo sapiens
  CDR3 for alpha chain variable domain of TCR clone 123467 (TRAV4, )
CLVDIQNPDPALYQLRD

SEQ ID NO: 246934 - protein, 13 aa, Homo sapiens
  CDR3 for beta chain variable domain of TCR clone 123467 (TRBV6-1, TRBJ2-1)
CAGMDPTNNEQFF

SEQ ID NO: 246935 - protein, 13 aa, Homo sapiens
  CDR3 for alpha chain variable domain of TCR clone 123468 (TRAV36/DV7, TRAJ38)
CVANAGNNRQLIW

SEQ ID NO: 246936 - protein, 14 aa, Homo sapiens
  CDR3 for beta chain variable domain of TCR clone 123468 (TRBV7-2, TRBJ2-7)
CASSLRWEVNEQYF

SEQ ID NO: 246937 - protein, 17 aa, Homo sapiens
  CDR3 for alpha chain variable domain of TCR clone 123469 (TRAV13-1, TRAJ52)
CAAGRNAGGTSYGKLTF

SEQ ID NO: 246938 - protein, 15 aa, Homo sapiens
  CDR3 for beta chain variable domain of TCR clone 123469 (TRBV3-1, TRBJ2-7)
CASSQVRQGAYEQYF

SEQ ID NO: 246939 - protein, 15 aa, Homo sapiens
  CDR3 for alpha chain variable domain of TCR clone 123470 (TRAV13-1, TRAJ17)
CAASIERAAGNKLTF

SEQ ID NO: 246940 - protein, 14 aa, Homo sapiens
  CDR3 for beta chain variable domain of TCR clone 123470 (TRBV11-2, TRBJ1-5)
CASSLDRGRQPQHF

SEQ ID NO: 246941 - protein, 14 aa, Homo sapiens
  CDR3 for alpha chain variable domain of TCR clone 123471 (TRAV20, TRAJ10)
CAVRVEGGGNKLTF

SEQ ID NO: 246942 - protein, 18 aa, Homo sapiens
  CDR3 for beta chain variable domain of TCR clone 123471 (TRBV24-1, TRBJ2-1)
CAISDLMFLGRGVHEQFF

SEQ ID NO: 246943 - protein, 18 aa, Homo sapiens
  CDR3 for alpha chain variable domain of TCR clone 123472 (TRAV21, TRAJ52)
CAVRPSPAGGTSYGKLTF

SEQ ID NO: 246944 - protein, 17 aa, Homo sapiens
  CDR3 for beta chain variable domain of TCR clone 123472 (TRBV13, TRBJ2-3)
RASSLSRAAGGRNTQYF

SEQ ID NO: 246945 - protein, 15 aa, Homo sapiens
  CDR3 for alpha chain variable domain of TCR clone 123473 (TRAV3, TRAJ4)
CAQNMFSGGYNKLIF

SEQ ID NO: 246946 - protein, 17 aa, Homo sapiens
  CDR3 for beta chain variable domain of TCR clone 123473 (TRBV20-1, TRBJ2-3)
CSAREIMGQSFTDTQYF

SEQ ID NO: 246947 - protein, 15 aa, Homo sapiens
  CDR3 for alpha chain variable domain of TCR clone 123474 (TRAV1-1, TRAJ5)
CAVRHMDTGRRALTF

SEQ ID NO: 246948 - protein, 14 aa, Homo sapiens
  CDR3 for beta chain variable domain of TCR clone 123474 (TRBV7-9, TRBJ2-5)
CASSLDTAQETQYF

SEQ ID NO: 246949 - protein, 14 aa, Homo sapiens
  CDR3 for alpha chain variable domain of TCR clone 123475 (TRAV13-1, TRAJ3)
CAAEGYSSASKIIF

SEQ ID NO: 246950 - protein, 14 aa, Homo sapiens
  CDR3 for beta chain variable domain of TCR clone 123475 (TRBV19, TRBJ2-5)
CAGSSSGIQETQYF

SEQ ID NO: 246951 - protein, 11 aa, Homo sapiens
  CDR3 for alpha chain variable domain of TCR clone 123476 (TRAV21, TRAJ34)
CAHYNTDKLIF

SEQ ID NO: 246952 - protein, 15 aa, Homo sapiens
  CDR3 for beta chain variable domain of TCR clone 123476 (TRBV11-2, TRBJ1-2)
CASSLEGVQRNGYTF

SEQ ID NO: 246953 - protein, 14 aa, Homo sapiens
  CDR3 for alpha chain variable domain of TCR clone 123477 (TRAV23/DV6, TRAJ24)
CAASLSDSWGKLQF

SEQ ID NO: 246954 - protein, 14 aa, Homo sapiens
  CDR3 for beta chain variable domain of TCR clone 123477 (TRBV24-1, TRBJ2-5)
CATSDALKGETQYF

SEQ ID NO: 246955 - protein, 14 aa, Homo sapiens
  CDR3 for alpha chain variable domain of TCR clone 123478 (TRAV3, TRAJ21)
CALGRGSTNFTLDL

SEQ ID NO: 246956 - protein, 14 aa, Homo sapiens
  CDR3 for beta chain variable domain of TCR clone 123478 (TRBV7-9, TRBJ2-4)
CASSLAMGGNTQYF

SEQ ID NO: 246957 - protein, 13 aa, Homo sapiens
  CDR3 for alpha chain variable domain of TCR clone 123479 (TRAV21, TRAJ57)
CAVTQGGSEKLVF

SEQ ID NO: 246958 - protein, 17 aa, Homo sapiens
  CDR3 for beta chain variable domain of TCR clone 123479 (TRBV4-2, TRBJ2-5)
CASSQDAAGGPVETQYF

SEQ ID NO: 246959 - protein, 14 aa, Homo sapiens
  CDR3 for alpha chain variable domain of TCR clone 123480 (TRAV23/DV6, TRAJ45)
CAVYSGGGADGLTF

SEQ ID NO: 246960 - protein, 16 aa, Homo sapiens
  CDR3 for beta chain variable domain of TCR clone 123480 (TRBV13, TRBJ2-5)
CASSRGAGIRQETQYF

SEQ ID NO: 246961 - protein, 14 aa, Homo sapiens
  CDR3 for alpha chain variable domain of TCR clone 123481 (TRAV12-2, TRAJ3)
CAVSLYSSDSKIIF

SEQ ID NO: 246962 - protein, 14 aa, Homo sapiens
  CDR3 for beta chain variable domain of TCR clone 123481 (TRBV27, TRBJ2-1)
CAGSIAETYNEQFF

SEQ ID NO: 246963 - protein, 15 aa, Homo sapiens
  CDR3 for alpha chain variable domain of TCR clone 123482 (TRAV12-3, TRAJ6)
CAMSATTGGSYIPQF

SEQ ID NO: 246964 - protein, 16 aa, Homo sapiens
  CDR3 for beta chain variable domain of TCR clone 123482 (TRBV20-1, TRBJ1-2)
CSASMGQGVANYGYTF

SEQ ID NO: 246965 - protein, 13 aa, Homo sapiens
  CDR3 for alpha chain variable domain of TCR clone 123483 (TRAV21, TRAJ45)
CAVMGGGADGLTF

SEQ ID NO: 246966 - protein, 16 aa, Homo sapiens
  CDR3 for beta chain variable domain of TCR clone 123483 (TRBV5-1, TRBJ2-3)
CASSLGLAVYTDTQYF

SEQ ID NO: 246967 - protein, 12 aa, Homo sapiens
  CDR3 for alpha chain variable domain of TCR clone 123484 (TRAV13-1, TRAJ15)
CAASQAGTAPIF

SEQ ID NO: 246968 - protein, 14 aa, Homo sapiens
  CDR3 for beta chain variable domain of TCR clone 123484 (TRBV19, TRBJ2-1)
CASPTFVLSGEQFF

SEQ ID NO: 246969 - protein, 14 aa, Homo sapiens
  CDR3 for alpha chain variable domain of TCR clone 123485 (TRAV2, TRAJ3)
CAVDRYSSAYKIIF

SEQ ID NO: 246970 - protein, 16 aa, Homo sapiens
  CDR3 for beta chain variable domain of TCR clone 123485 (TRBV20-1, TRBJ1-5)
CSAELPGQQTNQPQHF

SEQ ID NO: 246971 - protein, 16 aa, Homo sapiens
  CDR3 for alpha chain variable domain of TCR clone 123486 (TRAV30, TRAJ24)
CGTEIVDADSWRKFQV

SEQ ID NO: 246972 - protein, 14 aa, Homo sapiens
  CDR3 for beta chain variable domain of TCR clone 123486 (TRBV12-5, TRBJ2-5)
CASGSRTHQETQYF

SEQ ID NO: 246973 - protein, 16 aa, Homo sapiens
  CDR3 for alpha chain variable domain of TCR clone 123487 (TRAV26-1, TRAJ38)
CIVRVSGAGNNRKRIW

SEQ ID NO: 246974 - protein, 13 aa, Homo sapiens
  CDR3 for beta chain variable domain of TCR clone 123487 (TRBV14, TRBJ1-2)
CASSQDRRRGYTF

SEQ ID NO: 246975 - protein, 11 aa, Homo sapiens
  CDR3 for alpha chain variable domain of TCR clone 123488 (TRAV1-2, TRAJ31)
CAVNNNARLMF

SEQ ID NO: 246976 - protein, 17 aa, Homo sapiens
  CDR3 for beta chain variable domain of TCR clone 123488 (TRBV28, TRBJ2-1)
CTSASSIIAGGRSEQFF

SEQ ID NO: 246977 - protein, 16 aa, Homo sapiens
  CDR3 for alpha chain variable domain of TCR clone 123489 (TRAV3, TRAJ32)
CAVRDMGGGATTKLIF

SEQ ID NO: 246978 - protein, 11 aa, Homo sapiens
  CDR3 for beta chain variable domain of TCR clone 123489 (TRBV12-4, TRBJ2-1)
CASSRLNEQFF

SEQ ID NO: 246979 - protein, 14 aa, Homo sapiens
  CDR3 for alpha chain variable domain of TCR clone 123490 (TRAV10, TRAJ32)
CGEPRGGATNKLIF

SEQ ID NO: 246980 - protein, 14 aa, Homo sapiens
  CDR3 for beta chain variable domain of TCR clone 123490 (TRBV5-4, TRBJ2-2)
CASRLDGGTGEPFF

SEQ ID NO: 246981 - protein, 14 aa, Homo sapiens
  CDR3 for alpha chain variable domain of TCR clone 123491 (TRAV35, TRAJ50)
CAGPRKTSYDKVIF

SEQ ID NO: 246982 - protein, 15 aa, Homo sapiens
  CDR3 for beta chain variable domain of TCR clone 123491 (TRBV6-3, TRBJ2-7)
CASSSPGTVFYEQYF

SEQ ID NO: 246983 - protein, 14 aa, Homo sapiens
  CDR3 for alpha chain variable domain of TCR clone 123492 (TRAV2, TRAJ9)
CAVEDRSGGFKTIF

SEQ ID NO: 246984 - protein, 15 aa, Homo sapiens
  CDR3 for beta chain variable domain of TCR clone 123492 (TRBV11-2, TRBJ1-2)
CASSLAFGNNYGYTF

SEQ ID NO: 246985 - protein, 15 aa, Homo sapiens
  CDR3 for alpha chain variable domain of TCR clone 123493 (TRAV17, TRAJ57)
CATGPSQGGSKKLVF

SEQ ID NO: 246986 - protein, 14 aa, Homo sapiens
  CDR3 for beta chain variable domain of TCR clone 123493 (TRBV12-5, TRBJ2-5)
CASGSRTHQETQYF

SEQ ID NO: 246987 - protein, 14 aa, Homo sapiens
  CDR3 for alpha chain variable domain of TCR clone 123494 (TRAV21, TRAJ22)
CAVFFSGSARQLTS

SEQ ID NO: 246988 - protein, 14 aa, Homo sapiens
  CDR3 for beta chain variable domain of TCR clone 123494 (TRBV19, TRBJ1-1)
CASSIREMNTEAFF

SEQ ID NO: 246989 - protein, 12 aa, Homo sapiens
  CDR3 for alpha chain variable domain of TCR clone 123495 (TRAV13-2, TRAJ23)
CAERHRGGKLIF

SEQ ID NO: 246990 - protein, 13 aa, Homo sapiens
  CDR3 for beta chain variable domain of TCR clone 123495 (TRBV25-1, TRBJ2-6)
CASRGPGANVLTF

SEQ ID NO: 246991 - protein, 13 aa, Homo sapiens
  CDR3 for alpha chain variable domain of TCR clone 123496 (TRAV1-2, TRAJ9)
CAVLNTGGFKTIF

SEQ ID NO: 246992 - protein, 15 aa, Homo sapiens
  CDR3 for beta chain variable domain of TCR clone 123496 (TRBV10-3, TRBJ2-3)
CAISLTSGGTDTQYF

SEQ ID NO: 246993 - protein, 12 aa, Homo sapiens
  CDR3 for alpha chain variable domain of TCR clone 123497 (TRAV35, TRAJ39)
LAPNNAGHMLTF

SEQ ID NO: 246994 - protein, 16 aa, Homo sapiens
  CDR3 for beta chain variable domain of TCR clone 123497 (TRBV2, TRBJ2-3)
CASSTSVEGVTDTQYF

SEQ ID NO: 246995 - protein, 13 aa, Homo sapiens
  CDR3 for alpha chain variable domain of TCR clone 123498 (TRAV8-2, TRAJ43)
CVVSDQGDKDMRF

SEQ ID NO: 246996 - protein, 12 aa, Homo sapiens
  CDR3 for beta chain variable domain of TCR clone 123498 (TRBV7-9, TRBJ2-7)
CASRTGFDEQYF

SEQ ID NO: 246997 - protein, 14 aa, Homo sapiens
  CDR3 for alpha chain variable domain of TCR clone 123499 (TRAV13-1, TRAJ44)
CAAKATGTASKLTF

SEQ ID NO: 246998 - protein, 15 aa, Homo sapiens
  CDR3 for beta chain variable domain of TCR clone 123499 (TRBV11-2, TRBJ1-2)
CASSLEGVQRNGYTF

SEQ ID NO: 246999 - protein, 12 aa, Homo sapiens
  CDR3 for alpha chain variable domain of TCR clone 123500 (TRAV26-1, TRAJ26)
FIVFIYGQNFVF

SEQ ID NO: 247000 - protein, 13 aa, Homo sapiens
  CDR3 for beta chain variable domain of TCR clone 123500 (TRBV27, TRBJ1-1)
CASSLSIGAEAFF

SEQ ID NO: 247001 - protein, 12 aa, Homo sapiens
  CDR3 for alpha chain variable domain of TCR clone 123501 (TRAV13-1, TRAJ15)
CAASQAGTALIF

SEQ ID NO: 247002 - protein, 14 aa, Homo sapiens
  CDR3 for beta chain variable domain of TCR clone 123501 (TRBV19, TRBJ2-2)
CASSTLHRSGELCF

SEQ ID NO: 247003 - protein, 16 aa, Homo sapiens
  CDR3 for alpha chain variable domain of TCR clone 123502 (TRAV12-1, TRAJ12)
CVVNTLLMDSSYKLIF

SEQ ID NO: 247004 - protein, 12 aa, Homo sapiens
  CDR3 for beta chain variable domain of TCR clone 123502 (TRBV28, TRBJ2-3)
CASSLYRDTQYF

SEQ ID NO: 247005 - protein, 15 aa, Homo sapiens
  CDR3 for alpha chain variable domain of TCR clone 123503 (TRAV3, TRAJ45)
CAVRTLWGGADGLTF

SEQ ID NO: 247006 - protein, 16 aa, Homo sapiens
  CDR3 for beta chain variable domain of TCR clone 123503 (TRBV6-1, TRBJ2-2)
CASSFGQGANTGELFF

SEQ ID NO: 247007 - protein, 15 aa, Homo sapiens
  CDR3 for alpha chain variable domain of TCR clone 123504 (TRAV3, TRAJ27)
CAVRDPLTNAGKSTF

SEQ ID NO: 247008 - protein, 15 aa, Homo sapiens
  CDR3 for beta chain variable domain of TCR clone 123504 (TRBV28, TRBJ2-1)
RASSIIAGGRSEQFF

SEQ ID NO: 247009 - protein, 10 aa, Homo sapiens
  CDR3 for alpha chain variable domain of TCR clone 123505 (TRAV1-2, TRAJ31)
CAFFDARLMF

SEQ ID NO: 247010 - protein, 15 aa, Homo sapiens
  CDR3 for beta chain variable domain of TCR clone 123505 (TRBV4-1, TRBJ1-4)
CASSDTGGANEKLFF

SEQ ID NO: 247011 - protein, 12 aa, Homo sapiens
  CDR3 for alpha chain variable domain of TCR clone 123506 (TRAV12-3, TRAJ17)
CAMTLTGNKLTF

SEQ ID NO: 247012 - protein, 14 aa, Homo sapiens
  CDR3 for beta chain variable domain of TCR clone 123506 (TRBV19, TRBJ2-3)
CASSAPRGTDTQYF

SEQ ID NO: 247013 - protein, 16 aa, Homo sapiens
  CDR3 for alpha chain variable domain of TCR clone 123507 (TRAV17, TRAJ9)
CATGEWGGTGGFKTIF

SEQ ID NO: 247014 - protein, 14 aa, Homo sapiens
  CDR3 for beta chain variable domain of TCR clone 123507 (TRBV11-2, TRBJ2-3)
CASSRLARTDTQYF

SEQ ID NO: 247015 - protein, 14 aa, Homo sapiens
  CDR3 for alpha chain variable domain of TCR clone 123508 (TRAV1-2, TRAJ16)
CAVNRFSDGQKLLF

SEQ ID NO: 247016 - protein, 13 aa, Homo sapiens
  CDR3 for beta chain variable domain of TCR clone 123508 (TRBV7-9, TRBJ1-2)
CASSLKQNYSYTF

SEQ ID NO: 247017 - protein, 14 aa, Homo sapiens
  CDR3 for alpha chain variable domain of TCR clone 123509 (TRAV12-2, TRAJ13)
CAVKKTGGYQKVTL

SEQ ID NO: 247018 - protein, 11 aa, Homo sapiens
  CDR3 for beta chain variable domain of TCR clone 123509 (TRBV29-1, TRBJ2-5)
CSEDRTGTQYF

SEQ ID NO: 247019 - protein, 14 aa, Homo sapiens
  CDR3 for alpha chain variable domain of TCR clone 123510 (TRAV3, TRAJ21)
CAVESQANFNKFYF

SEQ ID NO: 247020 - protein, 12 aa, Homo sapiens
  CDR3 for beta chain variable domain of TCR clone 123510 (TRBV11-2, TRBJ2-2)
CASSLGGGELFF

SEQ ID NO: 247021 - protein, 14 aa, Homo sapiens
  CDR3 for alpha chain variable domain of TCR clone 123511 (TRAV1-2, TRAJ16)
CAVNRFSDGQKLLF

SEQ ID NO: 247022 - protein, 15 aa, Homo sapiens
  CDR3 for beta chain variable domain of TCR clone 123511 (TRBV11-2, TRBJ2-7)
CASSLAGGVATEQYF

SEQ ID NO: 247023 - protein, 16 aa, Homo sapiens
  CDR3 for alpha chain variable domain of TCR clone 123512 (TRAV4, TRAJ18)
CCVLLIGGSTLGRLYF

SEQ ID NO: 247024 - protein, 12 aa, Homo sapiens
  CDR3 for beta chain variable domain of TCR clone 123512 (TRBV6-3, TRBJ2-7)
CASTLTPYEQYF

SEQ ID NO: 247025 - protein, 11 aa, Homo sapiens
  CDR3 for alpha chain variable domain of TCR clone 123513 (TRAV5, TRAJ31)
CAESNNARLMF

SEQ ID NO: 247026 - protein, 13 aa, Homo sapiens
  CDR3 for beta chain variable domain of TCR clone 123513 (TRBV7-7, TRBJ2-5)
CASSRSGQETQYF

SEQ ID NO: 247027 - protein, 14 aa, Homo sapiens
  CDR3 for alpha chain variable domain of TCR clone 123514 (TRAV1-2, TRAJ8)
CAVREDTGFQKLVF

SEQ ID NO: 247028 - protein, 14 aa, Homo sapiens
  CDR3 for beta chain variable domain of TCR clone 123514 (TRBV7-3, TRBJ2-1)
CASSLTGGANEQFF

SEQ ID NO: 247029 - protein, 13 aa, Homo sapiens
  CDR3 for alpha chain variable domain of TCR clone 123515 (TRAV17, TRAJ40)
CAGALGGTYKYIF

SEQ ID NO: 247030 - protein, 16 aa, Homo sapiens
  CDR3 for beta chain variable domain of TCR clone 123515 (TRBV7-2, TRBJ1-4)
CASSLAPGRRDEKLIF

SEQ ID NO: 247031 - protein, 14 aa, Homo sapiens
  CDR3 for alpha chain variable domain of TCR clone 123516 (TRAV1-1, TRAJ27)
CAVIYNTNAGKSTF

SEQ ID NO: 247032 - protein, 14 aa, Homo sapiens
  CDR3 for beta chain variable domain of TCR clone 123516 (TRBV6-5, TRBJ1-2)
CASSYDGTGGGDTF

SEQ ID NO: 247033 - protein, 15 aa, Homo sapiens
  CDR3 for alpha chain variable domain of TCR clone 123517 (TRAV38-2/DV8, TRAJ47)
CAYRSAKGYGNRLVF

SEQ ID NO: 247034 - protein, 15 aa, Homo sapiens
  CDR3 for beta chain variable domain of TCR clone 123517 (TRBV6-6, TRBJ2-7)
CASSYSYGGSYEQYF

SEQ ID NO: 247035 - protein, 12 aa, Homo sapiens
  CDR3 for alpha chain variable domain of TCR clone 123518 (TRAV1-2, TRAJ9)
FAGYTGGFKTIF

SEQ ID NO: 247036 - protein, 15 aa, Homo sapiens
  CDR3 for beta chain variable domain of TCR clone 123518 (TRBV11-2, TRBJ2-1)
CASSPAGQSLNEQFF

SEQ ID NO: 247037 - protein, 14 aa, Homo sapiens
  CDR3 for alpha chain variable domain of TCR clone 123519 (TRAV17, TRAJ45)
CATAPGGGADGLTF

SEQ ID NO: 247038 - protein, 15 aa, Homo sapiens
  CDR3 for beta chain variable domain of TCR clone 123519 (TRBV11-2, TRBJ2-1)
CASSRNRGLMYEQFF

SEQ ID NO: 247039 - protein, 12 aa, Homo sapiens
  CDR3 for alpha chain variable domain of TCR clone 123520 (TRAV3, TRAJ43)
CAVRGPDNDMRF

SEQ ID NO: 247040 - protein, 13 aa, Homo sapiens
  CDR3 for beta chain variable domain of TCR clone 123520 (TRBV12-4, TRBJ2-7)
CASSPTETYEQYF

SEQ ID NO: 247041 - protein, 11 aa, Homo sapiens
  CDR3 for alpha chain variable domain of TCR clone 123521 (TRAV2, TRAJ13)
CASGGYQKVTF

SEQ ID NO: 247042 - protein, 14 aa, Homo sapiens
  CDR3 for beta chain variable domain of TCR clone 123521 (TRBV11-2, TRBJ1-2)
CASSLGTANYGYTF

SEQ ID NO: 247043 - protein, 14 aa, Homo sapiens
  CDR3 for alpha chain variable domain of TCR clone 123522 (TRAV38-1, TRAJ29)
CAFITPSGNTPLVF

SEQ ID NO: 247044 - protein, 15 aa, Homo sapiens
  CDR3 for beta chain variable domain of TCR clone 123522 (TRBV7-9, TRBJ1-6)
CASSSPGRGNSPLHF

SEQ ID NO: 247045 - protein, 18 aa, Homo sapiens
  CDR3 for alpha chain variable domain of TCR clone 123523 (TRAV26-2, TRAJ54)
CILRDVEVGIQRAQKLGF

SEQ ID NO: 247046 - protein, 17 aa, Homo sapiens
  CDR3 for beta chain variable domain of TCR clone 123523 (TRBV20-1, TRBJ1-5)
CSASLSPGQGGNQPQHF

SEQ ID NO: 247047 - protein, 15 aa, Homo sapiens
  CDR3 for alpha chain variable domain of TCR clone 123524 (TRAV2, TRAJ22)
CAVPSRGGSARQLTF

SEQ ID NO: 247048 - protein, 13 aa, Homo sapiens
  CDR3 for beta chain variable domain of TCR clone 123524 (TRBV10-3, TRBJ2-7)
CASKLAVNYEQYF

SEQ ID NO: 247049 - protein, 13 aa, Homo sapiens
  CDR3 for alpha chain variable domain of TCR clone 123525 (TRAV8-3, TRAJ43)
CAVVPYNNNDMLF

SEQ ID NO: 247050 - protein, 17 aa, Homo sapiens
  CDR3 for beta chain variable domain of TCR clone 123525 (TRBV7-7, TRBJ1-1)
CASIGDRPNLGVTEAFF

SEQ ID NO: 247051 - protein, 16 aa, Homo sapiens
  CDR3 for alpha chain variable domain of TCR clone 123526 (TRAV30, TRAJ24)
CGTEIVDADSWGKFQF

SEQ ID NO: 247052 - protein, 12 aa, Homo sapiens
  CDR3 for beta chain variable domain of TCR clone 123526 (TRBV11-3, TRBJ2-1)
CASSPGNNEQFF

SEQ ID NO: 247053 - protein, 14 aa, Homo sapiens
  CDR3 for alpha chain variable domain of TCR clone 123527 (TRAV12-2, TRAJ13)
CAVTKTGGYQKVTF

SEQ ID NO: 247054 - protein, 13 aa, Homo sapiens
  CDR3 for beta chain variable domain of TCR clone 123527 (TRBV20-1, TRBJ1-1)
CSARLGQGTEAFF

SEQ ID NO: 247055 - protein, 14 aa, Homo sapiens
  CDR3 for alpha chain variable domain of TCR clone 123528 (TRAV3, TRAJ21)
CAAESQANFNKFYF

SEQ ID NO: 247056 - protein, 12 aa, Homo sapiens
  CDR3 for beta chain variable domain of TCR clone 123528 (TRBV6-3, TRBJ2-7)
CASSLTPYEQYF

SEQ ID NO: 247057 - protein, 14 aa, Homo sapiens
  CDR3 for alpha chain variable domain of TCR clone 123529 (TRAV26-1, TRAJ49)
CIGRLTNTGNQFYF

SEQ ID NO: 247058 - protein, 13 aa, Homo sapiens
  CDR3 for beta chain variable domain of TCR clone 123529 (TRBV4-1, TRBJ2-7)
CASSQGQAYEQYF

SEQ ID NO: 247059 - protein, 13 aa, Homo sapiens
  CDR3 for alpha chain variable domain of TCR clone 123530 (TRAV17, TRAJ31)
CATDENNNARLMF

SEQ ID NO: 247060 - protein, 14 aa, Homo sapiens
  CDR3 for beta chain variable domain of TCR clone 123530 (TRBV13, TRBJ2-5)
CASSLGPRGETQYF

SEQ ID NO: 247061 - protein, 23 aa, Homo sapiens
  CDR3 for alpha chain variable domain of TCR clone 123531 (TRAV8-4, TRAJ38)
CARLNAGNNHIQNPDPAVYHLRD

SEQ ID NO: 247062 - protein, 14 aa, Homo sapiens
  CDR3 for beta chain variable domain of TCR clone 123531 (TRBV7-8, TRBJ2-3)
CASSLEAGTDTQYF

SEQ ID NO: 247063 - protein, 19 aa, Homo sapiens
  CDR3 for alpha chain variable domain of TCR clone 123532 (TRAV8-3, )
CAVVTTRIPDIQNPDPAVF

SEQ ID NO: 247064 - protein, 14 aa, Homo sapiens
  CDR3 for beta chain variable domain of TCR clone 123532 (TRBV11-2, TRBJ2-7)
CASSPSTTSYEQYF

SEQ ID NO: 247065 - protein, 12 aa, Homo sapiens
  CDR3 for alpha chain variable domain of TCR clone 123533 (TRAV1-2, TRAJ33)
CAALDSNYQLIC

SEQ ID NO: 247066 - protein, 14 aa, Homo sapiens
  CDR3 for beta chain variable domain of TCR clone 123533 (TRBV19, TRBJ2-3)
CASSAPRGTDTQYF

SEQ ID NO: 247067 - protein, 14 aa, Homo sapiens
  CDR3 for alpha chain variable domain of TCR clone 123534 (TRAV16, TRAJ39)
RALSKNNAGNMLTF

SEQ ID NO: 247068 - protein, 19 aa, Homo sapiens
  CDR3 for beta chain variable domain of TCR clone 123534 (TRBV6-6, TRBJ2-1)
AAPSQTSVYFCASSYEQFF

SEQ ID NO: 247069 - protein, 17 aa, Homo sapiens
  CDR3 for alpha chain variable domain of TCR clone 123535 (TRAV8-3, TRAJ50)
CAVGAVDTETSYDKVIF

SEQ ID NO: 247070 - protein, 15 aa, Homo sapiens
  CDR3 for beta chain variable domain of TCR clone 123535 (TRBV6-3, TRBJ2-7)
CASSSPGTVFYEQYF

SEQ ID NO: 247071 - protein, 12 aa, Homo sapiens
  CDR3 for alpha chain variable domain of TCR clone 123536 (TRAV2, TRAJ5)
CALDTGRRALTF

SEQ ID NO: 247072 - protein, 19 aa, Homo sapiens
  CDR3 for beta chain variable domain of TCR clone 123536 (TRBV25-1, TRBJ2-2)
CAILVYRVDRGRKTGELFF

SEQ ID NO: 247073 - protein, 14 aa, Homo sapiens
  CDR3 for alpha chain variable domain of TCR clone 123537 (TRAV12-2, TRAJ11)
CAVTRESGYSTLTF

SEQ ID NO: 247074 - protein, 10 aa, Homo sapiens
  CDR3 for beta chain variable domain of TCR clone 123537 (TRBV20-1, TRBJ2-5)
CSARFETQYF

SEQ ID NO: 247075 - protein, 14 aa, Homo sapiens
  CDR3 for alpha chain variable domain of TCR clone 123538 (TRAV35, TRAJ40)
CAGSSTSGTYEYIF

SEQ ID NO: 247076 - protein, 16 aa, Homo sapiens
  CDR3 for beta chain variable domain of TCR clone 123538 (TRBV20-1, TRBJ1-4)
CSARPYGGELNEKLFF

SEQ ID NO: 247077 - protein, 14 aa, Homo sapiens
  CDR3 for alpha chain variable domain of TCR clone 123539 (TRAV1-2, TRAJ8)
CAVREDTGFQKLVF

SEQ ID NO: 247078 - protein, 16 aa, Homo sapiens
  CDR3 for beta chain variable domain of TCR clone 123539 (TRBV12-5, TRBJ2-5)
CVSGPRTSGNQETQYF

SEQ ID NO: 247079 - protein, 13 aa, Homo sapiens
  CDR3 for alpha chain variable domain of TCR clone 123540 (TRAV38-1, TRAJ42)
CARWGGSQGNLIF

SEQ ID NO: 247080 - protein, 13 aa, Homo sapiens
  CDR3 for beta chain variable domain of TCR clone 123540 (TRBV19, TRBJ2-7)
CASSPRQSYEQYF

SEQ ID NO: 247081 - protein, 13 aa, Homo sapiens
  CDR3 for alpha chain variable domain of TCR clone 123541 (TRAV12-1, TRAJ33)
CGDAPDSNYQLIW

SEQ ID NO: 247082 - protein, 15 aa, Homo sapiens
  CDR3 for beta chain variable domain of TCR clone 123541 (TRBV27, TRBJ2-1)
CASSNGEGPPMSSSS

SEQ ID NO: 247083 - protein, 14 aa, Homo sapiens
  CDR3 for alpha chain variable domain of TCR clone 123542 (TRAV9-2, TRAJ39)
CALYIYNAGNMLTF

SEQ ID NO: 247084 - protein, 15 aa, Homo sapiens
  CDR3 for beta chain variable domain of TCR clone 123542 (TRBV15, TRBJ2-7)
CATSRDRSPRNEQYF

SEQ ID NO: 247085 - protein, 11 aa, Homo sapiens
  CDR3 for alpha chain variable domain of TCR clone 123543 (TRAV35, TRAJ31)
CAESGDARLVF

SEQ ID NO: 247086 - protein, 11 aa, Homo sapiens
  CDR3 for beta chain variable domain of TCR clone 123543 (TRBV24-1, TRBJ2-3)
CATSDLDTQYF

SEQ ID NO: 247087 - protein, 11 aa, Homo sapiens
  CDR3 for alpha chain variable domain of TCR clone 123544 (TRAV12-1, TRAJ8)
CVVTGFQKIVF

SEQ ID NO: 247088 - protein, 14 aa, Homo sapiens
  CDR3 for beta chain variable domain of TCR clone 123544 (TRBV19, TRBJ2-1)
CASGKSTQYNEQFF

SEQ ID NO: 247089 - protein, 11 aa, Homo sapiens
  CDR3 for alpha chain variable domain of TCR clone 123545 (TRAV26-1, TRAJ27)
CIDPNAGKSAF

SEQ ID NO: 247090 - protein, 18 aa, Homo sapiens
  CDR3 for beta chain variable domain of TCR clone 123545 (TRBV7-9, TRBJ2-6)
CASSFPGAGISGANVLTF

SEQ ID NO: 247091 - protein, 12 aa, Homo sapiens
  CDR3 for alpha chain variable domain of TCR clone 123546 (TRAV8-3, TRAJ26)
CAGDNYGQNFVF

SEQ ID NO: 247092 - protein, 17 aa, Homo sapiens
  CDR3 for beta chain variable domain of TCR clone 123546 (TRBV20-1, TRBJ2-1)
CSASSSGLAGSYNEQFF

SEQ ID NO: 247093 - protein, 14 aa, Homo sapiens
  CDR3 for alpha chain variable domain of TCR clone 123547 (TRAV1-1, TRAJ27)
CAVIYNTNAGKSTF

SEQ ID NO: 247094 - protein, 18 aa, Homo sapiens
  CDR3 for beta chain variable domain of TCR clone 123547 (TRBV7-3, TRBJ2-1)
CASSLTLASGGAMVSSSS

SEQ ID NO: 247095 - protein, 15 aa, Homo sapiens
  CDR3 for alpha chain variable domain of TCR clone 123548 (TRAV17, TRAJ23)
CATDAEDNQGGKLIF

SEQ ID NO: 247096 - protein, 15 aa, Homo sapiens
  CDR3 for beta chain variable domain of TCR clone 123548 (TRBV12-4, TRBJ2-5)
CASSPPTGLQETQYF

SEQ ID NO: 247097 - protein, 12 aa, Homo sapiens
  CDR3 for alpha chain variable domain of TCR clone 123549 (TRAV29/DV5, TRAJ34)
CAASGNTDKLIF

SEQ ID NO: 247098 - protein, 16 aa, Homo sapiens
  CDR3 for beta chain variable domain of TCR clone 123549 (TRBV12-4, TRBJ1-5)
CAGRQPVEGSNQPQHF

SEQ ID NO: 247099 - protein, 14 aa, Homo sapiens
  CDR3 for alpha chain variable domain of TCR clone 123550 (TRAV35, TRAJ24)
CAGPRRESWGKLQF

SEQ ID NO: 247100 - protein, 12 aa, Homo sapiens
  CDR3 for beta chain variable domain of TCR clone 123550 (TRBV12-4, TRBJ2-3)
CASSLGQDTQYF

SEQ ID NO: 247101 - protein, 16 aa, Homo sapiens
  CDR3 for alpha chain variable domain of TCR clone 123551 (TRAV3, TRAJ10)
CAVRDMRAGGGNKLTF

SEQ ID NO: 247102 - protein, 17 aa, Homo sapiens
  CDR3 for beta chain variable domain of TCR clone 123551 (TRBV4-2, TRBJ1-1)
CASTQFGGGSGNTEAFF

SEQ ID NO: 247103 - protein, 15 aa, Homo sapiens
  CDR3 for alpha chain variable domain of TCR clone 123552 (TRAV21, TRAJ52)
CAVRGGGTSSGKLTF

SEQ ID NO: 247104 - protein, 15 aa, Homo sapiens
  CDR3 for beta chain variable domain of TCR clone 123552 (TRBV18, TRBJ1-5)
CASSPSDRSNQPQHF

SEQ ID NO: 247105 - protein, 15 aa, Homo sapiens
  CDR3 for alpha chain variable domain of TCR clone 123553 (TRAV3, TRAJ3)
CAVRDMSSSASKIIF

SEQ ID NO: 247106 - protein, 14 aa, Homo sapiens
  CDR3 for beta chain variable domain of TCR clone 123553 (TRBV19, TRBJ2-1)
CASPTFVLSGQQFF

SEQ ID NO: 247107 - protein, 15 aa, Homo sapiens
  CDR3 for alpha chain variable domain of TCR clone 123554 (TRAV4, TRAJ39)
FLVGPNNNAGNMLTF

SEQ ID NO: 247108 - protein, 14 aa, Homo sapiens
  CDR3 for beta chain variable domain of TCR clone 123554 (TRBV19, TRBJ2-1)
CASPTFVLSGEQFF

SEQ ID NO: 247109 - protein, 11 aa, Homo sapiens
  CDR3 for alpha chain variable domain of TCR clone 123555 (TRAV2, TRAJ13)
CASAGYQKVTF

SEQ ID NO: 247110 - protein, 16 aa, Homo sapiens
  CDR3 for beta chain variable domain of TCR clone 123555 (TRBV19, TRBJ2-1)
CASSMGGGSSYNEQFF

SEQ ID NO: 247111 - protein, 14 aa, Homo sapiens
  CDR3 for alpha chain variable domain of TCR clone 123556 (TRAV25, TRAJ22)
CAVRSYGSARQLTF

SEQ ID NO: 247112 - protein, 16 aa, Homo sapiens
  CDR3 for beta chain variable domain of TCR clone 123556 (TRBV4-2, TRBJ1-1)
CASSPSPGRAAPEAFF

SEQ ID NO: 247113 - protein, 15 aa, Homo sapiens
  CDR3 for alpha chain variable domain of TCR clone 123557 (TRAV16, TRAJ48)
CALFISNFGNEKLTF

SEQ ID NO: 247114 - protein, 13 aa, Homo sapiens
  CDR3 for beta chain variable domain of TCR clone 123557 (TRBV10-3, TRBJ2-7)
CASKLAVNYEQYF

SEQ ID NO: 247115 - protein, 15 aa, Homo sapiens
  CDR3 for alpha chain variable domain of TCR clone 123558 (TRAV21, TRAJ32)
CAVNSYGGATNKLIF

SEQ ID NO: 247116 - protein, 12 aa, Homo sapiens
  CDR3 for beta chain variable domain of TCR clone 123558 (TRBV19, TRBJ2-1)
CASSRQGAEQFF

SEQ ID NO: 247117 - protein, 14 aa, Homo sapiens
  CDR3 for alpha chain variable domain of TCR clone 123559 (TRAV12-2, TRAJ9)
FAVNMEGGGFKTIF

SEQ ID NO: 247118 - protein, 14 aa, Homo sapiens
  CDR3 for beta chain variable domain of TCR clone 123559 (TRBV27, TRBJ2-5)
CASSSLKGWETQYF

SEQ ID NO: 247119 - protein, 12 aa, Homo sapiens
  CDR3 for alpha chain variable domain of TCR clone 123560 (TRAV2, TRAJ31)
CAVEDNNARLMF

SEQ ID NO: 247120 - protein, 13 aa, Homo sapiens
  CDR3 for beta chain variable domain of TCR clone 123560 (TRBV6-1, TRBJ1-1)
CASSRQGNTEAFF

SEQ ID NO: 247121 - protein, 14 aa, Homo sapiens
  CDR3 for alpha chain variable domain of TCR clone 123561 (TRAV2, TRAJ22)
CAVGRGGSARQLSF

SEQ ID NO: 247122 - protein, 12 aa, Homo sapiens
  CDR3 for beta chain variable domain of TCR clone 123561 (TRBV19, TRBJ2-1)
CASSMQDTEQFF

SEQ ID NO: 247123 - protein, 15 aa, Homo sapiens
  CDR3 for alpha chain variable domain of TCR clone 123562 (TRAV12-1, TRAJ4)
CVVNGFSVGYNKLIF

SEQ ID NO: 247124 - protein, 18 aa, Homo sapiens
  CDR3 for beta chain variable domain of TCR clone 123562 (TRBV6-5, TRBJ2-1)
CASSYSSRRAGVYNEQFF

SEQ ID NO: 247125 - protein, 14 aa, Homo sapiens
  CDR3 for alpha chain variable domain of TCR clone 123563 (TRAV12-2, TRAJ53)
CAVKGGGSNYKLTF

SEQ ID NO: 247126 - protein, 15 aa, Homo sapiens
  CDR3 for beta chain variable domain of TCR clone 123563 (TRBV11-2, TRBJ2-2)
CASSSDRVNAGELFS

SEQ ID NO: 247127 - protein, 13 aa, Homo sapiens
  CDR3 for alpha chain variable domain of TCR clone 123564 (TRAV21, TRAJ27)
CAALNTKAGKSTF

SEQ ID NO: 247128 - protein, 14 aa, Homo sapiens
  CDR3 for beta chain variable domain of TCR clone 123564 (TRBV27, TRBJ1-1)
CASSLLSGLSEAFF

SEQ ID NO: 247129 - protein, 14 aa, Homo sapiens
  CDR3 for alpha chain variable domain of TCR clone 123565 (TRAV17, TRAJ11)
CATDTGRGYSTLTF

SEQ ID NO: 247130 - protein, 13 aa, Homo sapiens
  CDR3 for beta chain variable domain of TCR clone 123565 (TRBV19, TRBJ2-5)
CASRDSRRDTQYF

SEQ ID NO: 247131 - protein, 16 aa, Homo sapiens
  CDR3 for alpha chain variable domain of TCR clone 123566 (TRAV30, TRAJ24)
CGTEIVDADSWGKFQF

SEQ ID NO: 247132 - protein, 15 aa, Homo sapiens
  CDR3 for beta chain variable domain of TCR clone 123566 (TRBV6-6, TRBJ2-5)
CASSPGGGLEETQYF

SEQ ID NO: 247133 - protein, 13 aa, Homo sapiens
  CDR3 for alpha chain variable domain of TCR clone 123567 (TRAV2, TRAJ29)
CAAQNSGNTPLVF

SEQ ID NO: 247134 - protein, 14 aa, Homo sapiens
  CDR3 for beta chain variable domain of TCR clone 123567 (TRBV25-1, TRBJ1-1)
CASTHLGGNTEAFF

SEQ ID NO: 247135 - protein, 12 aa, Homo sapiens
  CDR3 for alpha chain variable domain of TCR clone 123568 (TRAV29/DV5, TRAJ36)
CAARRKLGQTTS

SEQ ID NO: 247136 - protein, 14 aa, Homo sapiens
  CDR3 for beta chain variable domain of TCR clone 123568 (TRBV12-5, TRBJ2-5)
CASGSRTHQETQYF

SEQ ID NO: 247137 - protein, 13 aa, Homo sapiens
  CDR3 for alpha chain variable domain of TCR clone 123569 (TRAV20, TRAJ31)
CAVQAWNNARLMF

SEQ ID NO: 247138 - protein, 14 aa, Homo sapiens
  CDR3 for beta chain variable domain of TCR clone 123569 (TRBV4-1, TRBJ2-2)
CASSQAVNTGELFF

SEQ ID NO: 247139 - protein, 12 aa, Homo sapiens
  CDR3 for alpha chain variable domain of TCR clone 123570 (TRAV21, TRAJ27)
CAANTNAGKSTF

SEQ ID NO: 247140 - protein, 15 aa, Homo sapiens
  CDR3 for beta chain variable domain of TCR clone 123570 (TRBV29-1, TRBJ1-4)
CSVVGIGDINDKLFF

SEQ ID NO: 247141 - protein, 12 aa, Homo sapiens
  CDR3 for alpha chain variable domain of TCR clone 123571 (TRAV1-2, TRAJ33)
CAALDSNYQLIW

SEQ ID NO: 247142 - protein, 16 aa, Homo sapiens
  CDR3 for beta chain variable domain of TCR clone 123571 (TRBV6-4, TRBJ1-2)
CASSEAVGDPNYCYTF

SEQ ID NO: 247143 - protein, 12 aa, Homo sapiens
  CDR3 for alpha chain variable domain of TCR clone 123572 (TRAV8-3, TRAJ26)
CAGNNYGQNFVF

SEQ ID NO: 247144 - protein, 13 aa, Homo sapiens
  CDR3 for beta chain variable domain of TCR clone 123572 (TRBV7-2, TRBJ2-7)
CASSSPSGSEQYF

SEQ ID NO: 247145 - protein, 11 aa, Homo sapiens
  CDR3 for alpha chain variable domain of TCR clone 123573 (TRAV1-2, TRAJ20)
CAVANDYNLSF

SEQ ID NO: 247146 - protein, 16 aa, Homo sapiens
  CDR3 for beta chain variable domain of TCR clone 123573 (TRBV4-3, TRBJ1-6)
CASSQDPGVYNSPLHF

SEQ ID NO: 247147 - protein, 13 aa, Homo sapiens
  CDR3 for alpha chain variable domain of TCR clone 123574 (TRAV13-1, TRAJ21)
CAASIYNFNKFYF

SEQ ID NO: 247148 - protein, 15 aa, Homo sapiens
  CDR3 for beta chain variable domain of TCR clone 123574 (TRBV7-3, TRBJ2-1)
CASSLAGAGADEQLF

SEQ ID NO: 247149 - protein, 13 aa, Homo sapiens
  CDR3 for alpha chain variable domain of TCR clone 123575 (TRAV20, TRAJ37)
CAGCSSNTGKLIF

SEQ ID NO: 247150 - protein, 13 aa, Homo sapiens
  CDR3 for beta chain variable domain of TCR clone 123575 (TRBV7-2, TRBJ2-7)
CASSSPSGSEQYF

SEQ ID NO: 247151 - protein, 12 aa, Homo sapiens
  CDR3 for alpha chain variable domain of TCR clone 123576 (TRAV4, TRAJ21)
CLVGDNFNKFYF

SEQ ID NO: 247152 - protein, 17 aa, Homo sapiens
  CDR3 for beta chain variable domain of TCR clone 123576 (TRBV3-1, TRBJ2-7)
CASSHDLTGLSSYEQYF

SEQ ID NO: 247153 - protein, 17 aa, Homo sapiens
  CDR3 for alpha chain variable domain of TCR clone 123577 (TRAV26-1, TRAJ58)
CIVRVGAEETSGSRLTF

SEQ ID NO: 247154 - protein, 17 aa, Homo sapiens
  CDR3 for beta chain variable domain of TCR clone 123577 (TRBV7-8, TRBJ2-5)
CASSLAGLAGGQETQYF

SEQ ID NO: 247155 - protein, 13 aa, Homo sapiens
  CDR3 for alpha chain variable domain of TCR clone 123578 (TRAV13-1, TRAJ10)
CAALEGGGNKLTF

SEQ ID NO: 247156 - protein, 12 aa, Homo sapiens
  CDR3 for beta chain variable domain of TCR clone 123578 (TRBV11-2, TRBJ2-2)
CASSLPTGELFF

SEQ ID NO: 247157 - protein, 16 aa, Homo sapiens
  CDR3 for alpha chain variable domain of TCR clone 123579 (TRAV30, TRAJ24)
CGTEIVDADSWGKFQF

SEQ ID NO: 247158 - protein, 15 aa, Homo sapiens
  CDR3 for beta chain variable domain of TCR clone 123579 (TRBV27, TRBJ2-5)
CASSLIPSGGETQYF

SEQ ID NO: 247159 - protein, 13 aa, Homo sapiens
  CDR3 for alpha chain variable domain of TCR clone 123580 (TRAV20, TRAJ37)
CAGCSSNTGKLIF

SEQ ID NO: 247160 - protein, 13 aa, Homo sapiens
  CDR3 for beta chain variable domain of TCR clone 123580 (TRBV4-1, TRBJ2-7)
CASSQGQAYEQYF

SEQ ID NO: 247161 - protein, 23 aa, Homo sapiens
  CDR3 for alpha chain variable domain of TCR clone 123581 (TRAV26-1, )
CIADNGGNNHIQNPDPAVYQLRD

SEQ ID NO: 247162 - protein, 13 aa, Homo sapiens
  CDR3 for beta chain variable domain of TCR clone 123581 (TRBV20-1, TRBJ1-1)
CSARGGGNTEAFF

SEQ ID NO: 247163 - protein, 14 aa, Homo sapiens
  CDR3 for alpha chain variable domain of TCR clone 123582 (TRAV23/DV6, TRAJ11)
CAASLESGSSTLTF

SEQ ID NO: 247164 - protein, 13 aa, Homo sapiens
  CDR3 for beta chain variable domain of TCR clone 123582 (TRBV4-1, TRBJ2-5)
CASSLTRGETQYF

SEQ ID NO: 247165 - protein, 13 aa, Homo sapiens
  CDR3 for alpha chain variable domain of TCR clone 123583 (TRAV2, TRAJ11)
CAVEDSGYSTLTF

SEQ ID NO: 247166 - protein, 14 aa, Homo sapiens
  CDR3 for beta chain variable domain of TCR clone 123583 (TRBV19, TRBJ2-1)
CASPTFVLSGEQFF

SEQ ID NO: 247167 - protein, 13 aa, Homo sapiens
  CDR3 for alpha chain variable domain of TCR clone 123584 (TRAV17, TRAJ5)
CAPMDTGRRALTF

SEQ ID NO: 247168 - protein, 14 aa, Homo sapiens
  CDR3 for beta chain variable domain of TCR clone 123584 (TRBV19, TRBJ2-1)
CASPTFVLSGGQFF

SEQ ID NO: 247169 - protein, 12 aa, Homo sapiens
  CDR3 for alpha chain variable domain of TCR clone 123585 (TRAV2, TRAJ9)
CAVGAGGFKTIF

SEQ ID NO: 247170 - protein, 15 aa, Homo sapiens
  CDR3 for beta chain variable domain of TCR clone 123585 (TRBV11-2, TRBJ1-3)
CASSLDGTVGNTIYF

SEQ ID NO: 247171 - protein, 14 aa, Homo sapiens
  CDR3 for alpha chain variable domain of TCR clone 123586 (TRAV1-1, TRAJ27)
CAVIYNTNAGKSTF

SEQ ID NO: 247172 - protein, 14 aa, Homo sapiens
  CDR3 for beta chain variable domain of TCR clone 123586 (TRBV11-2, TRBJ1-2)
CASSLGTANYGYTF

SEQ ID NO: 247173 - protein, 16 aa, Homo sapiens
  CDR3 for alpha chain variable domain of TCR clone 123587 (TRAV3, TRAJ21)
CAVRDIERGKFNKFYF

SEQ ID NO: 247174 - protein, 14 aa, Homo sapiens
  CDR3 for beta chain variable domain of TCR clone 123587 (TRBV12-4, TRBJ2-5)
CASSLSSGRETQYF

SEQ ID NO: 247175 - protein, 13 aa, Homo sapiens
  CDR3 for alpha chain variable domain of TCR clone 123588 (TRAV12-3, TRAJ7)
CAMSASGNNRLAF

SEQ ID NO: 247176 - protein, 16 aa, Homo sapiens
  CDR3 for beta chain variable domain of TCR clone 123588 (TRBV11-2, TRBJ2-3)
CASSSRTSGGAGTQYF

SEQ ID NO: 247177 - protein, 13 aa, Homo sapiens
  CDR3 for alpha chain variable domain of TCR clone 123589 (TRAV36/DV7, TRAJ49)
CAGDSNTGNQFYF

SEQ ID NO: 247178 - protein, 14 aa, Homo sapiens
  CDR3 for beta chain variable domain of TCR clone 123589 (TRBV4-2, TRBJ1-2)
CASSQTTGNYGYTF

SEQ ID NO: 247179 - protein, 18 aa, Homo sapiens
  CDR3 for alpha chain variable domain of TCR clone 123590 (TRAV26-2, TRAJ45)
CILRVDKYSGGGADGLTF

SEQ ID NO: 247180 - protein, 14 aa, Homo sapiens
  CDR3 for beta chain variable domain of TCR clone 123590 (TRBV7-2, TRBJ2-7)
CASRPQGAAYEQYF

SEQ ID NO: 247181 - protein, 13 aa, Homo sapiens
  CDR3 for alpha chain variable domain of TCR clone 123591 (TRAV27, TRAJ45)
CRSSGGGADGLTF

SEQ ID NO: 247182 - protein, 15 aa, Homo sapiens
  CDR3 for beta chain variable domain of TCR clone 123591 (TRBV3-1, TRBJ2-7)
CASSQVRQGAYEQYF

SEQ ID NO: 247183 - protein, 14 aa, Homo sapiens
  CDR3 for alpha chain variable domain of TCR clone 123592 (TRAV8-4, TRAJ13)
CAVTLSGGYQKVPF

SEQ ID NO: 247184 - protein, 14 aa, Homo sapiens
  CDR3 for beta chain variable domain of TCR clone 123592 (TRBV7-2, TRBJ1-2)
CASSQTGSTYGYTF

SEQ ID NO: 247185 - protein, 14 aa, Homo sapiens
  CDR3 for alpha chain variable domain of TCR clone 123593 (TRAV17, TRAJ22)
CATSPSGSARQLTF

SEQ ID NO: 247186 - protein, 15 aa, Homo sapiens
  CDR3 for beta chain variable domain of TCR clone 123593 (TRBV7-9, TRBJ1-6)
CASSSPGRGNSPLHF

SEQ ID NO: 247187 - protein, 12 aa, Homo sapiens
  CDR3 for alpha chain variable domain of TCR clone 123594 (TRAV12-2, TRAJ20)
CAVRPSDYKLSF

SEQ ID NO: 247188 - protein, 14 aa, Homo sapiens
  CDR3 for beta chain variable domain of TCR clone 123594 (TRBV7-2, TRBJ2-1)
CASSLGVGYNEQFF

SEQ ID NO: 247189 - protein, 12 aa, Homo sapiens
  CDR3 for alpha chain variable domain of TCR clone 123595 (TRAV2, TRAJ9)
CAVGAGGLKTIF

SEQ ID NO: 247190 - protein, 11 aa, Homo sapiens
  CDR3 for beta chain variable domain of TCR clone 123595 (TRBV13, TRBJ2-2)
CASSPRTGEHT

SEQ ID NO: 247191 - protein, 17 aa, Homo sapiens
  CDR3 for alpha chain variable domain of TCR clone 123596 (TRAV2, TRAJ22)
ILQVREADAAEQRQLTF

SEQ ID NO: 247192 - protein, 15 aa, Homo sapiens
  CDR3 for beta chain variable domain of TCR clone 123596 (TRBV19, TRBJ2-7)
CASRPTPGLSIEQYF

SEQ ID NO: 247193 - protein, 11 aa, Homo sapiens
  CDR3 for alpha chain variable domain of TCR clone 123597 (TRAV23/DV6, TRAJ49)
CAVAPVTSSIF

SEQ ID NO: 247194 - protein, 14 aa, Homo sapiens
  CDR3 for beta chain variable domain of TCR clone 123597 (TRBV19, TRBJ2-1)
CASPTFVLSGEQFF

SEQ ID NO: 247195 - protein, 11 aa, Homo sapiens
  CDR3 for alpha chain variable domain of TCR clone 123598 (TRAV13-1, TRAJ8)
FAARGFQKLVF

SEQ ID NO: 247196 - protein, 16 aa, Homo sapiens
  CDR3 for beta chain variable domain of TCR clone 123598 (TRBV19, TRBJ1-5)
CASSTRGTRSNQPQHF

SEQ ID NO: 247197 - protein, 15 aa, Homo sapiens
  CDR3 for alpha chain variable domain of TCR clone 123599 (TRAV12-1, TRAJ9)
CVVSFGDTGGFKTIF

SEQ ID NO: 247198 - protein, 18 aa, Homo sapiens
  CDR3 for beta chain variable domain of TCR clone 123599 (TRBV11-2, TRBJ2-3)
CASSLGGASRGAPNTQYF

SEQ ID NO: 247199 - protein, 18 aa, Homo sapiens
  CDR3 for alpha chain variable domain of TCR clone 123600 (TRAV21, TRAJ52)
CAVRPSPAGGTSYGKLTF

SEQ ID NO: 247200 - protein, 14 aa, Homo sapiens
  CDR3 for beta chain variable domain of TCR clone 123600 (TRBV19, TRBJ1-5)
CASSLGPGGEPQHF

SEQ ID NO: 247201 - protein, 14 aa, Homo sapiens
  CDR3 for alpha chain variable domain of TCR clone 123601 (TRAV12-3, TRAJ10)
SHLPLTGGGNKLTF

SEQ ID NO: 247202 - protein, 20 aa, Homo sapiens
  CDR3 for beta chain variable domain of TCR clone 123601 (TRBV7-8, TRBJ2-2)
CASSHLFPGPTIHIAGELFF

SEQ ID NO: 247203 - protein, 12 aa, Homo sapiens
  CDR3 for alpha chain variable domain of TCR clone 123602 (TRAV27, TRAJ9)
CAGESGGFKTIF

SEQ ID NO: 247204 - protein, 13 aa, Homo sapiens
  CDR3 for beta chain variable domain of TCR clone 123602 (TRBV6-5, TRBJ1-1)
QTSVYFCALRAFF

SEQ ID NO: 247205 - protein, 15 aa, Homo sapiens
  CDR3 for alpha chain variable domain of TCR clone 123603 (TRAV2, TRAJ32)
CAVANYGGGTNKLIF

SEQ ID NO: 247206 - protein, 15 aa, Homo sapiens
  CDR3 for beta chain variable domain of TCR clone 123603 (TRBV7-7, TRBJ2-5)
CASSQLERAEETQYF

SEQ ID NO: 247207 - protein, 14 aa, Homo sapiens
  CDR3 for alpha chain variable domain of TCR clone 123604 (TRAV3, TRAJ9)
CAVRLNTGGFRTIF

SEQ ID NO: 247208 - protein, 16 aa, Homo sapiens
  CDR3 for beta chain variable domain of TCR clone 123604 (TRBV12-5, TRBJ2-5)
CASGPRTSGNQETQYF

SEQ ID NO: 247209 - protein, 14 aa, Homo sapiens
  CDR3 for alpha chain variable domain of TCR clone 123605 (TRAV17, TRAJ32)
CATDPGGATHKLIF

SEQ ID NO: 247210 - protein, 14 aa, Homo sapiens
  CDR3 for beta chain variable domain of TCR clone 123605 (TRBV2, TRBJ1-5)
CASSENRGGQPQHF

SEQ ID NO: 247211 - protein, 13 aa, Homo sapiens
  CDR3 for alpha chain variable domain of TCR clone 123606 (TRAV16, TRAJ28)
CALTGAGSYQLTF

SEQ ID NO: 247212 - protein, 12 aa, Homo sapiens
  CDR3 for beta chain variable domain of TCR clone 123606 (TRBV7-8, TRBJ2-7)
CASSLGDREQYF

SEQ ID NO: 247213 - protein, 12 aa, Homo sapiens
  CDR3 for alpha chain variable domain of TCR clone 123607 (TRAV17, TRAJ12)
CAGGDSSYKLIF

SEQ ID NO: 247214 - protein, 14 aa, Homo sapiens
  CDR3 for beta chain variable domain of TCR clone 123607 (TRBV20-1, TRBJ1-1)
CSAQTRIGGTEAFF

SEQ ID NO: 247215 - protein, 14 aa, Homo sapiens
  CDR3 for alpha chain variable domain of TCR clone 123608 (TRAV2, TRAJ37)
CAVDFTSNTGKLIF

SEQ ID NO: 247216 - protein, 16 aa, Homo sapiens
  CDR3 for beta chain variable domain of TCR clone 123608 (TRBV4-2, TRBJ1-2)
CASSQAGTKANYGYTF

SEQ ID NO: 247217 - protein, 14 aa, Homo sapiens
  CDR3 for alpha chain variable domain of TCR clone 123609 (TRAV12-3, TRAJ13)
CAMKNSGGYQKVTF

SEQ ID NO: 247218 - protein, 13 aa, Homo sapiens
  CDR3 for beta chain variable domain of TCR clone 123609 (TRBV29-1, TRBJ2-5)
CSARDRVEETRYF

SEQ ID NO: 247219 - protein, 17 aa, Homo sapiens
  CDR3 for alpha chain variable domain of TCR clone 123610 (TRAV3, TRAJ6)
CAVRDGPRAGGSYIPTF

SEQ ID NO: 247220 - protein, 14 aa, Homo sapiens
  CDR3 for beta chain variable domain of TCR clone 123610 (TRBV7-2, TRBJ2-7)
CASNPKTSFYDQYF

SEQ ID NO: 247221 - protein, 12 aa, Homo sapiens
  CDR3 for alpha chain variable domain of TCR clone 123611 (TRAV21, TRAJ33)
CAKMDSNYQLIW

SEQ ID NO: 247222 - protein, 14 aa, Homo sapiens
  CDR3 for beta chain variable domain of TCR clone 123611 (TRBV7-2, TRBJ2-7)
CASSGLAGRGEQYF

SEQ ID NO: 247223 - protein, 11 aa, Homo sapiens
  CDR3 for alpha chain variable domain of TCR clone 123612 (TRAV2, TRAJ33)
CAVESNYQLIW

SEQ ID NO: 247224 - protein, 15 aa, Homo sapiens
  CDR3 for beta chain variable domain of TCR clone 123612 (TRBV19, TRBJ2-1)
CASSIVRGEGREQFF

SEQ ID NO: 247225 - protein, 17 aa, Homo sapiens
  CDR3 for alpha chain variable domain of TCR clone 123613 (TRAV4, TRAJ18)
CLVDERSVGSTLGRLYF

SEQ ID NO: 247226 - protein, 16 aa, Homo sapiens
  CDR3 for beta chain variable domain of TCR clone 123613 (TRBV4-2, TRBJ1-1)
CASSPSPGRAAPEAFF

SEQ ID NO: 247227 - protein, 13 aa, Homo sapiens
  CDR3 for alpha chain variable domain of TCR clone 123614 (TRAV17, TRAJ9)
CATAITGGIKTIF

SEQ ID NO: 247228 - protein, 16 aa, Homo sapiens
  CDR3 for beta chain variable domain of TCR clone 123614 (TRBV15, TRBJ2-1)
CATSRNLAGGYNEQFF

SEQ ID NO: 247229 - protein, 14 aa, Homo sapiens
  CDR3 for alpha chain variable domain of TCR clone 123615 (TRAV12-3, TRAJ54)
CAMRGIQGAQKLVF

SEQ ID NO: 247230 - protein, 13 aa, Homo sapiens
  CDR3 for beta chain variable domain of TCR clone 123615 (TRBV19, TRBJ1-1)
CASSPSNGGEAFL

SEQ ID NO: 247231 - protein, 11 aa, Homo sapiens
  CDR3 for alpha chain variable domain of TCR clone 123616 (TRAV17, TRAJ9)
CGCTGGFKTIF

SEQ ID NO: 247232 - protein, 14 aa, Homo sapiens
  CDR3 for beta chain variable domain of TCR clone 123616 (TRBV7-9, TRBJ2-2)
CASSLVQDTGELFF

SEQ ID NO: 247233 - protein, 17 aa, Homo sapiens
  CDR3 for alpha chain variable domain of TCR clone 123617 (TRAV26-1, TRAJ36)
CIVRPPGDQTGANNPFF

SEQ ID NO: 247234 - protein, 16 aa, Homo sapiens
  CDR3 for beta chain variable domain of TCR clone 123617 (TRBV19, TRBJ2-1)
CASSKAGPSSYNEQFF

SEQ ID NO: 247235 - protein, 14 aa, Homo sapiens
  CDR3 for alpha chain variable domain of TCR clone 123618 (TRAV1-2, TRAJ8)
CAVRKDTGFQKLVF

SEQ ID NO: 247236 - protein, 13 aa, Homo sapiens
  CDR3 for beta chain variable domain of TCR clone 123618 (TRBV11-2, TRBJ1-6)
CASSLAGTSPLHF

SEQ ID NO: 247237 - protein, 14 aa, Homo sapiens
  CDR3 for alpha chain variable domain of TCR clone 123619 (TRAV1-1, TRAJ28)
GAAPSGAGSYQLTF

SEQ ID NO: 247238 - protein, 15 aa, Homo sapiens
  CDR3 for beta chain variable domain of TCR clone 123619 (TRBV7-2, TRBJ1-2)
CASSLVSGGDYGYTF

SEQ ID NO: 247239 - protein, 13 aa, Homo sapiens
  CDR3 for alpha chain variable domain of TCR clone 123620 (TRAV25, TRAJ30)
CAGRVDRDDKIIF

SEQ ID NO: 247240 - protein, 15 aa, Homo sapiens
  CDR3 for beta chain variable domain of TCR clone 123620 (TRBV9, TRBJ2-1)
CASSLAGSSYNEQFF

SEQ ID NO: 247241 - protein, 10 aa, Homo sapiens
  CDR3 for alpha chain variable domain of TCR clone 123621 (TRAV12-3, TRAJ49)
CAMNDDQFYF

SEQ ID NO: 247242 - protein, 12 aa, Homo sapiens
  CDR3 for beta chain variable domain of TCR clone 123621 (TRBV12-4, TRBJ1-1)
CSSPGTGFEAFF

SEQ ID NO: 247243 - protein, 13 aa, Homo sapiens
  CDR3 for alpha chain variable domain of TCR clone 123622 (TRAV12-2, TRAJ50)
CAVIVTSYDKVIF

SEQ ID NO: 247244 - protein, 15 aa, Homo sapiens
  CDR3 for beta chain variable domain of TCR clone 123622 (TRBV9, TRBJ1-6)
CASSVAGTGDSPLHF

SEQ ID NO: 247245 - protein, 12 aa, Homo sapiens
  CDR3 for alpha chain variable domain of TCR clone 123623 (TRAV8-4, TRAJ31)
CAVSDSNARLMF

SEQ ID NO: 247246 - protein, 15 aa, Homo sapiens
  CDR3 for beta chain variable domain of TCR clone 123623 (TRBV10-2, TRBJ2-6)
CASSEQGTGANVLTF

SEQ ID NO: 247247 - protein, 11 aa, Homo sapiens
  CDR3 for alpha chain variable domain of TCR clone 123624 (TRAV13-1, TRAJ39)
CASHAGNMLTF

SEQ ID NO: 247248 - protein, 13 aa, Homo sapiens
  CDR3 for beta chain variable domain of TCR clone 123624 (TRBV19, TRBJ2-5)
CASRDSRRETQYF

SEQ ID NO: 247249 - protein, 16 aa, Homo sapiens
  CDR3 for alpha chain variable domain of TCR clone 123625 (TRAV4, TRAJ18)
CCVLLIGGSTLGRLYF

SEQ ID NO: 247250 - protein, 14 aa, Homo sapiens
  CDR3 for beta chain variable domain of TCR clone 123625 (TRBV5-4, TRBJ1-1)
CASSLDSRRDEAFF

SEQ ID NO: 247251 - protein, 14 aa, Homo sapiens
  CDR3 for alpha chain variable domain of TCR clone 123626 (TRAV3, TRAJ8)
CAVSLNTGFQKLVF

SEQ ID NO: 247252 - protein, 15 aa, Homo sapiens
  CDR3 for beta chain variable domain of TCR clone 123626 (TRBV19, TRBJ1-1)
CASTSGQIQNTEAFF

SEQ ID NO: 247253 - protein, 13 aa, Homo sapiens
  CDR3 for alpha chain variable domain of TCR clone 123627 (TRAV8-6, TRAJ8)
CAGSNTGFQKLVF

SEQ ID NO: 247254 - protein, 15 aa, Homo sapiens
  CDR3 for beta chain variable domain of TCR clone 123627 (TRBV28, TRBJ2-5)
CASSSGRTIQETQYF

SEQ ID NO: 247255 - protein, 13 aa, Homo sapiens
  CDR3 for alpha chain variable domain of TCR clone 123628 (TRAV21, TRAJ27)
CAALNTNAGKSTF

SEQ ID NO: 247256 - protein, 12 aa, Homo sapiens
  CDR3 for beta chain variable domain of TCR clone 123628 (TRBV29-1, TRBJ2-3)
CSVTGGADTQYF

SEQ ID NO: 247257 - protein, 11 aa, Homo sapiens
  CDR3 for alpha chain variable domain of TCR clone 123629 (TRAV12-3, TRAJ11)
CAMKGYSTLTF

SEQ ID NO: 247258 - protein, 16 aa, Homo sapiens
  CDR3 for beta chain variable domain of TCR clone 123629 (TRBV7-3, TRBJ2-2)
CASSLKRGTLSGELFF

SEQ ID NO: 247259 - protein, 15 aa, Homo sapiens
  CDR3 for alpha chain variable domain of TCR clone 123630 (TRAV12-3, TRAJ6)
CAMSATSGGSYIPTF

SEQ ID NO: 247260 - protein, 16 aa, Homo sapiens
  CDR3 for beta chain variable domain of TCR clone 123630 (TRBV5-1, TRBJ2-5)
CASSPRLAGGQETQYF

SEQ ID NO: 247261 - protein, 18 aa, Homo sapiens
  CDR3 for alpha chain variable domain of TCR clone 123631 (TRAV21, TRAJ52)
CAVRPSPAGCTSYGKLTF

SEQ ID NO: 247262 - protein, 13 aa, Homo sapiens
  CDR3 for beta chain variable domain of TCR clone 123631 (TRBV29-1, TRBJ2-2)
CSVYREDTGELFF

SEQ ID NO: 247263 - protein, 13 aa, Homo sapiens
  CDR3 for alpha chain variable domain of TCR clone 123632 (TRAV2, TRAJ9)
RAVESTGGFKTIF

SEQ ID NO: 247264 - protein, 15 aa, Homo sapiens
  CDR3 for beta chain variable domain of TCR clone 123632 (TRBV10-3, TRBJ2-1)
CAITFGGGTDNEQFF

SEQ ID NO: 247265 - protein, 11 aa, Homo sapiens
  CDR3 for alpha chain variable domain of TCR clone 123633 (TRAV12-2, TRAJ29)
CAVTLRSPLVF

SEQ ID NO: 247266 - protein, 16 aa, Homo sapiens
  CDR3 for beta chain variable domain of TCR clone 123633 (TRBV12-4, TRBJ2-5)
CASSFFVRGRQETQYF

SEQ ID NO: 247267 - protein, 14 aa, Homo sapiens
  CDR3 for alpha chain variable domain of TCR clone 123634 (TRAV2, TRAJ9)
CAVEDRGGGFKTIF

SEQ ID NO: 247268 - protein, 18 aa, Homo sapiens
  CDR3 for beta chain variable domain of TCR clone 123634 (TRBV20-1, TRBJ2-5)
CSQTGDSGRLGGKETQYF

SEQ ID NO: 247269 - protein, 12 aa, Homo sapiens
  CDR3 for alpha chain variable domain of TCR clone 123635 (TRAV30, TRAJ39)
CGRGNAGNMLTF

SEQ ID NO: 247270 - protein, 16 aa, Homo sapiens
  CDR3 for beta chain variable domain of TCR clone 123635 (TRBV5-7, TRBJ1-4)
CASSPSGGLKTEKLFF

SEQ ID NO: 247271 - protein, 15 aa, Homo sapiens
  CDR3 for alpha chain variable domain of TCR clone 123636 (TRAV12-2, TRAJ53)
CAVNGGGGSNYKLTF

SEQ ID NO: 247272 - protein, 17 aa, Homo sapiens
  CDR3 for beta chain variable domain of TCR clone 123636 (TRBV7-3, TRBJ2-3)
CARSLMKRMRGADTQYF

SEQ ID NO: 247273 - protein, 14 aa, Homo sapiens
  CDR3 for alpha chain variable domain of TCR clone 123637 (TRAV26-1, TRAJ38)
CIVDNAGNNRKLIW

SEQ ID NO: 247274 - protein, 16 aa, Homo sapiens
  CDR3 for beta chain variable domain of TCR clone 123637 (TRBV20-1, TRBJ2-7)
CSASTSGRLSSYEQYF

SEQ ID NO: 247275 - protein, 14 aa, Homo sapiens
  CDR3 for alpha chain variable domain of TCR clone 123638 (TRAV12-3, TRAJ29)
CAMILLSGNAPLVF

SEQ ID NO: 247276 - protein, 16 aa, Homo sapiens
  CDR3 for beta chain variable domain of TCR clone 123638 (TRBV28, TRBJ2-7)
CASSSGTSGRGYEQYF

SEQ ID NO: 247277 - protein, 13 aa, Homo sapiens
  CDR3 for alpha chain variable domain of TCR clone 123639 (TRAV23/DV6, TRAJ27)
CAASKPMQAKQPL

SEQ ID NO: 247278 - protein, 14 aa, Homo sapiens
  CDR3 for beta chain variable domain of TCR clone 123639 (TRBV5-4, TRBJ1-1)
CASSLDSRRDEAFF

SEQ ID NO: 247279 - protein, 17 aa, Homo sapiens
  CDR3 for alpha chain variable domain of TCR clone 123640 (TRAV3, TRAJ6)
CAVRDGPRAGGSYIHTF

SEQ ID NO: 247280 - protein, 13 aa, Homo sapiens
  CDR3 for beta chain variable domain of TCR clone 123640 (TRBV19, TRBJ2-7)
CASSIDRTYEQYF

SEQ ID NO: 247281 - protein, 12 aa, Homo sapiens
  CDR3 for alpha chain variable domain of TCR clone 123641 (TRAV8-3, TRAJ20)
CAVDCNDYKLSF

SEQ ID NO: 247282 - protein, 17 aa, Homo sapiens
  CDR3 for beta chain variable domain of TCR clone 123641 (TRBV7-8, TRBJ2-6)
CASSAGTGGAGANVLTF

SEQ ID NO: 247283 - protein, 15 aa, Homo sapiens
  CDR3 for alpha chain variable domain of TCR clone 123642 (TRAV38-1, TRAJ37)
CAFIFGSGNTGKLIF

SEQ ID NO: 247284 - protein, 17 aa, Homo sapiens
  CDR3 for beta chain variable domain of TCR clone 123642 (TRBV28, TRBJ2-5)
CASSTPEGDALQETQYF

SEQ ID NO: 247285 - protein, 16 aa, Homo sapiens
  CDR3 for alpha chain variable domain of TCR clone 123643 (TRAV20, TRAJ22)
CAVQASSSGSARQLTF

SEQ ID NO: 247286 - protein, 14 aa, Homo sapiens
  CDR3 for beta chain variable domain of TCR clone 123643 (TRBV20-1, TRBJ1-1)
CSAQTRIGGTEAFF

SEQ ID NO: 247287 - protein, 18 aa, Homo sapiens
  CDR3 for alpha chain variable domain of TCR clone 123644 (TRAV13-1, TRAJ52)
CAAKNPNAGGTSYGKLTF

SEQ ID NO: 247288 - protein, 15 aa, Homo sapiens
  CDR3 for beta chain variable domain of TCR clone 123644 (TRBV2, TRBJ1-1)
CASSERSGRNTEAFF

SEQ ID NO: 247289 - protein, 14 aa, Homo sapiens
  CDR3 for alpha chain variable domain of TCR clone 123645 (TRAV12-3, TRAJ57)
CARALEGGSEKLVF

SEQ ID NO: 247290 - protein, 16 aa, Homo sapiens
  CDR3 for beta chain variable domain of TCR clone 123645 (TRBV11-3, TRBJ2-3)
CQQLGTDRGGTDTQYF

SEQ ID NO: 247291 - protein, 16 aa, Homo sapiens
  CDR3 for alpha chain variable domain of TCR clone 123646 (TRAV30, TRAJ24)
CGTEIVDADSWGQFQF

SEQ ID NO: 247292 - protein, 15 aa, Homo sapiens
  CDR3 for beta chain variable domain of TCR clone 123646 (TRBV7-9, TRBJ1-4)
CASSARTGGNEKLFF

SEQ ID NO: 247293 - protein, 15 aa, Homo sapiens
  CDR3 for alpha chain variable domain of TCR clone 123647 (TRAV21, TRAJ24)
CAARSSTESWGKLQF

SEQ ID NO: 247294 - protein, 15 aa, Homo sapiens
  CDR3 for beta chain variable domain of TCR clone 123647 (TRBV19, TRBJ1-1)
CASTSGQIQNTEAFF

SEQ ID NO: 247295 - protein, 14 aa, Homo sapiens
  CDR3 for alpha chain variable domain of TCR clone 123648 (TRAV38-1, TRAJ40)
CALRPTSGTYKYIF

SEQ ID NO: 247296 - protein, 15 aa, Homo sapiens
  CDR3 for beta chain variable domain of TCR clone 123648 (TRBV6-6, TRBJ2-7)
CASSYSYGGSYEQYF

SEQ ID NO: 247297 - protein, 16 aa, Homo sapiens
  CDR3 for alpha chain variable domain of TCR clone 123649 (TRAV26-1, TRAJ53)
CIVRVAMGGSNYKLTF

SEQ ID NO: 247298 - protein, 14 aa, Homo sapiens
  CDR3 for beta chain variable domain of TCR clone 123649 (TRBV5-4, TRBJ1-1)
CASSLDSRRDEAFF

SEQ ID NO: 247299 - protein, 14 aa, Homo sapiens
  CDR3 for alpha chain variable domain of TCR clone 123650 (TRAV1-2, TRAJ8)
CAVREDTGFQKLVF

SEQ ID NO: 247300 - protein, 14 aa, Homo sapiens
  CDR3 for beta chain variable domain of TCR clone 123650 (TRBV11-2, TRBJ2-3)
CDSSRLARTDTQYF

SEQ ID NO: 247301 - protein, 14 aa, Homo sapiens
  CDR3 for alpha chain variable domain of TCR clone 123651 (TRAV13-1, TRAJ13)
CAASRVGGYQKVNF

SEQ ID NO: 247302 - protein, 17 aa, Homo sapiens
  CDR3 for beta chain variable domain of TCR clone 123651 (TRBV15, TRBJ1-5)
CATSRAPPGTRNQPQHF

SEQ ID NO: 247303 - protein, 15 aa, Homo sapiens
  CDR3 for alpha chain variable domain of TCR clone 123652 (TRAV8-3, TRAJ27)
CAVGPSKTNAGKSTF

SEQ ID NO: 247304 - protein, 14 aa, Homo sapiens
  CDR3 for beta chain variable domain of TCR clone 123652 (TRBV12-4, TRBJ1-2)
CASSFVGTAYGYTF

SEQ ID NO: 247305 - protein, 14 aa, Homo sapiens
  CDR3 for alpha chain variable domain of TCR clone 123653 (TRAV12-2, TRAJ11)
CAVEGGSGYSTLTF

SEQ ID NO: 247306 - protein, 17 aa, Homo sapiens
  CDR3 for beta chain variable domain of TCR clone 123653 (TRBV13, TRBJ2-3)
CASSLSRVAGGRNTQYF

SEQ ID NO: 247307 - protein, 13 aa, Homo sapiens
  CDR3 for alpha chain variable domain of TCR clone 123654 (TRAV2, TRAJ24)
TTVPLVSWGKLQF

SEQ ID NO: 247308 - protein, 13 aa, Homo sapiens
  CDR3 for beta chain variable domain of TCR clone 123654 (TRBV7-3, TRBJ1-1)
CASSQDWGAEAFF

SEQ ID NO: 247309 - protein, 16 aa, Homo sapiens
  CDR3 for alpha chain variable domain of TCR clone 123655 (TRAV13-1, TRAJ48)
CAASIFGNFGNETLTF

SEQ ID NO: 247310 - protein, 14 aa, Homo sapiens
  CDR3 for beta chain variable domain of TCR clone 123655 (TRBV7-3, TRBJ1-1)
CASSLKGGNTEAFF

SEQ ID NO: 247311 - protein, 12 aa, Homo sapiens
  CDR3 for alpha chain variable domain of TCR clone 123656 (TRAV3, TRAJ43)
CAVRDPNNDMRF

SEQ ID NO: 247312 - protein, 11 aa, Homo sapiens
  CDR3 for beta chain variable domain of TCR clone 123656 (TRBV20-1, TRBJ2-1)
CSLSSGSEQFF

SEQ ID NO: 247313 - protein, 15 aa, Homo sapiens
  CDR3 for alpha chain variable domain of TCR clone 123657 (TRAV26-1, TRAJ40)
CIVRAVPSGTYTYIF

SEQ ID NO: 247314 - protein, 14 aa, Homo sapiens
  CDR3 for beta chain variable domain of TCR clone 123657 (TRBV19, TRBJ2-1)
CASKDPGLANEQFF

SEQ ID NO: 247315 - protein, 14 aa, Homo sapiens
  CDR3 for alpha chain variable domain of TCR clone 123658 (TRAV2, TRAJ29)
CAVEDRVGNTPLGC

SEQ ID NO: 247316 - protein, 15 aa, Homo sapiens
  CDR3 for beta chain variable domain of TCR clone 123658 (TRBV10-3, TRBJ2-1)
CAISDVQDRAYEQFF

SEQ ID NO: 247317 - protein, 14 aa, Homo sapiens
  CDR3 for alpha chain variable domain of TCR clone 123659 (TRAV1-2, TRAJ15)
CAVRDRQAGTALIF

SEQ ID NO: 247318 - protein, 16 aa, Homo sapiens
  CDR3 for beta chain variable domain of TCR clone 123659 (TRBV19, TRBJ2-1)
CASSKAGPSSYNEQFF

SEQ ID NO: 247319 - protein, 12 aa, Homo sapiens
  CDR3 for alpha chain variable domain of TCR clone 123660 (TRAV13-1, TRAJ49)
CAETNTGNQFYF

SEQ ID NO: 247320 - protein, 17 aa, Homo sapiens
  CDR3 for beta chain variable domain of TCR clone 123660 (TRBV25-1, TRBJ2-7)
CASSDARVVFSSYEQYF

SEQ ID NO: 247321 - protein, 12 aa, Homo sapiens
  CDR3 for alpha chain variable domain of TCR clone 123661 (TRAV13-1, TRAJ21)
CAAKEGFNKFYF

SEQ ID NO: 247322 - protein, 15 aa, Homo sapiens
  CDR3 for beta chain variable domain of TCR clone 123661 (TRBV3-1, TRBJ2-2)
CASSQAVRETGELFF

SEQ ID NO: 247323 - protein, 16 aa, Homo sapiens
  CDR3 for alpha chain variable domain of TCR clone 123662 (TRAV3, TRAJ37)
YAVRGKGSGNTGKLIF

SEQ ID NO: 247324 - protein, 15 aa, Homo sapiens
  CDR3 for beta chain variable domain of TCR clone 123662 (TRBV6-6, TRBJ2-5)
CASSYGKIIQETQYF

SEQ ID NO: 247325 - protein, 13 aa, Homo sapiens
  CDR3 for alpha chain variable domain of TCR clone 123663 (TRAV36/DV7, TRAJ54)
CAVDIQGAQKLVF

SEQ ID NO: 247326 - protein, 14 aa, Homo sapiens
  CDR3 for beta chain variable domain of TCR clone 123663 (TRBV10-1, TRBJ1-5)
CASRARGAIQPQHF

SEQ ID NO: 247327 - protein, 13 aa, Homo sapiens
  CDR3 for alpha chain variable domain of TCR clone 123664 (TRAV17, TRAJ15)
CATANQAGTALIF

SEQ ID NO: 247328 - protein, 15 aa, Homo sapiens
  CDR3 for beta chain variable domain of TCR clone 123664 (TRBV7-8, TRBJ1-2)
CASSLVRDGGLGYTF

SEQ ID NO: 247329 - protein, 21 aa, Homo sapiens
  CDR3 for alpha chain variable domain of TCR clone 123665 (TRAV1-1, TRAJ6)
CLLLLRFERLERTGGSYIPTF

SEQ ID NO: 247330 - protein, 13 aa, Homo sapiens
  CDR3 for beta chain variable domain of TCR clone 123665 (TRBV10-2, TRBJ2-7)
CASGASGGYEQYF

SEQ ID NO: 247331 - protein, 13 aa, Homo sapiens
  CDR3 for alpha chain variable domain of TCR clone 123666 (TRAV3, TRAJ30)
CAVRDRGDDKIIF

SEQ ID NO: 247332 - protein, 17 aa, Homo sapiens
  CDR3 for beta chain variable domain of TCR clone 123666 (TRBV20-1, TRBJ2-1)
CSASWGSSGGPNNEQFF

SEQ ID NO: 247333 - protein, 11 aa, Homo sapiens
  CDR3 for alpha chain variable domain of TCR clone 123667 (TRAV4, TRAJ31)
CLVGLNARLMF

SEQ ID NO: 247334 - protein, 16 aa, Homo sapiens
  CDR3 for beta chain variable domain of TCR clone 123667 (TRBV15, TRBJ2-6)
CATSVNGGFLANVLAF

SEQ ID NO: 247335 - protein, 12 aa, Homo sapiens
  CDR3 for alpha chain variable domain of TCR clone 123668 (TRAV8-3, TRAJ53)
CAVVGSNYKLTF

SEQ ID NO: 247336 - protein, 20 aa, Homo sapiens
  CDR3 for beta chain variable domain of TCR clone 123668 (TRBV28, TRBJ2-1)
CASTPIGRSPGLAGGNEQFF

SEQ ID NO: 247337 - protein, 13 aa, Homo sapiens
  CDR3 for alpha chain variable domain of TCR clone 123669 (TRAV8-3, TRAJ48)
CAVVPFGNEKLTF

SEQ ID NO: 247338 - protein, 17 aa, Homo sapiens
  CDR3 for beta chain variable domain of TCR clone 123669 (TRBV7-8, TRBJ2-6)
CASSAGTGGAGANVLTF

SEQ ID NO: 247339 - protein, 14 aa, Homo sapiens
  CDR3 for alpha chain variable domain of TCR clone 123670 (TRAV13-1, TRAJ52)
CAANGGTSYGKLTF

SEQ ID NO: 247340 - protein, 13 aa, Homo sapiens
  CDR3 for beta chain variable domain of TCR clone 123670 (TRBV24-1, TRBJ2-2)
CATSGWSTGELFF

SEQ ID NO: 247341 - protein, 13 aa, Homo sapiens
  CDR3 for alpha chain variable domain of TCR clone 123671 (TRAV17, TRAJ5)
CALRGTGRRALTF

SEQ ID NO: 247342 - protein, 15 aa, Homo sapiens
  CDR3 for beta chain variable domain of TCR clone 123671 (TRBV20-1, TRBJ1-1)
CSASRGVTGNTEAFF

SEQ ID NO: 247343 - protein, 12 aa, Homo sapiens
  CDR3 for alpha chain variable domain of TCR clone 123672 (TRAV21, TRAJ8)
CAVNTGFQKLVF

SEQ ID NO: 247344 - protein, 15 aa, Homo sapiens
  CDR3 for beta chain variable domain of TCR clone 123672 (TRBV15, TRBJ1-1)
CATSLQGGRNTEAFF

SEQ ID NO: 247345 - protein, 16 aa, Homo sapiens
  CDR3 for alpha chain variable domain of TCR clone 123673 (TRAV30, TRAJ24)
CGTEIVDADSWGTFQF

SEQ ID NO: 247346 - protein, 16 aa, Homo sapiens
  CDR3 for beta chain variable domain of TCR clone 123673 (TRBV2, TRBJ1-3)
CASSGGAGRSGNTIYF

SEQ ID NO: 247347 - protein, 13 aa, Homo sapiens
  CDR3 for alpha chain variable domain of TCR clone 123674 (TRAV12-3, TRAJ13)
CAMGTGCYQKVTF

SEQ ID NO: 247348 - protein, 14 aa, Homo sapiens
  CDR3 for beta chain variable domain of TCR clone 123674 (TRBV7-2, TRBJ2-5)
CASSTGGELKTQYF

SEQ ID NO: 247349 - protein, 18 aa, Homo sapiens
  CDR3 for alpha chain variable domain of TCR clone 123675 (TRAV17, TRAJ45)
CSTSLDLYSGGGADGLTF

SEQ ID NO: 247350 - protein, 13 aa, Homo sapiens
  CDR3 for beta chain variable domain of TCR clone 123675 (TRBV10-3, TRBJ2-7)
CASKLAVNYEQYF

SEQ ID NO: 247351 - protein, 13 aa, Homo sapiens
  CDR3 for alpha chain variable domain of TCR clone 123676 (TRAV13-1, TRAJ5)
CAASDTGRRALTF

SEQ ID NO: 247352 - protein, 12 aa, Homo sapiens
  CDR3 for beta chain variable domain of TCR clone 123676 (TRBV28, TRBJ2-3)
CASSLYGDTQYF

SEQ ID NO: 247353 - protein, 14 aa, Homo sapiens
  CDR3 for alpha chain variable domain of TCR clone 123677 (TRAV2, TRAJ9)
CAVEDRSGGFKTIV

SEQ ID NO: 247354 - protein, 13 aa, Homo sapiens
  CDR3 for beta chain variable domain of TCR clone 123677 (TRBV7-3, TRBJ1-1)
CASSQDWGAEAFF

SEQ ID NO: 247355 - protein, 15 aa, Homo sapiens
  CDR3 for alpha chain variable domain of TCR clone 123678 (TRAV26-1, TRAJ15)
GIVRAANQAGTALIF

SEQ ID NO: 247356 - protein, 15 aa, Homo sapiens
  CDR3 for beta chain variable domain of TCR clone 123678 (TRBV20-1, TRBJ1-1)
CSARSAATSNTEAFF

SEQ ID NO: 247357 - protein, 14 aa, Homo sapiens
  CDR3 for alpha chain variable domain of TCR clone 123679 (TRAV12-2, TRAJ13)
CAVKKTGGYQKVTF

SEQ ID NO: 247358 - protein, 16 aa, Homo sapiens
  CDR3 for beta chain variable domain of TCR clone 123679 (TRBV28, TRBJ2-2)
CASSLEGGPNTGELFF

SEQ ID NO: 247359 - protein, 15 aa, Homo sapiens
  CDR3 for alpha chain variable domain of TCR clone 123680 (TRAV8-3, TRAJ11)
CAVGLLNSGYSTLTF

SEQ ID NO: 247360 - protein, 15 aa, Homo sapiens
  CDR3 for beta chain variable domain of TCR clone 123680 (TRBV9, TRBJ1-6)
CASSVAGTGDSPLHF

SEQ ID NO: 247361 - protein, 13 aa, Homo sapiens
  CDR3 for alpha chain variable domain of TCR clone 123681 (TRAV3, TRAJ43)
CAVKARNNNDMRF

SEQ ID NO: 247362 - protein, 16 aa, Homo sapiens
  CDR3 for beta chain variable domain of TCR clone 123681 (TRBV7-9, TRBJ2-3)
CASSLSVAGGTDTQYF

SEQ ID NO: 247363 - protein, 11 aa, Homo sapiens
  CDR3 for alpha chain variable domain of TCR clone 123682 (TRAV2, TRAJ13)
CASGGYQKVTF

SEQ ID NO: 247364 - protein, 16 aa, Homo sapiens
  CDR3 for beta chain variable domain of TCR clone 123682 (TRBV6-1, TRBJ2-5)
CASSETLDRGAETQYC

SEQ ID NO: 247365 - protein, 14 aa, Homo sapiens
  CDR3 for alpha chain variable domain of TCR clone 123683 (TRAV1-1, TRAJ28)
CAAPSGAGSYHLTF

SEQ ID NO: 247366 - protein, 15 aa, Homo sapiens
  CDR3 for beta chain variable domain of TCR clone 123683 (TRBV7-2, TRBJ1-2)
CASSLVSGGDYGYTF

SEQ ID NO: 247367 - protein, 14 aa, Homo sapiens
  CDR3 for alpha chain variable domain of TCR clone 123684 (TRAV1-2, TRAJ8)
CAVREDTGFQKLVF

SEQ ID NO: 247368 - protein, 16 aa, Homo sapiens
  CDR3 for beta chain variable domain of TCR clone 123684 (TRBV4-2, TRBJ2-5)
CASSQELVGSQETQYF

SEQ ID NO: 247369 - protein, 17 aa, Homo sapiens
  CDR3 for alpha chain variable domain of TCR clone 123685 (TRAV3, TRAJ6)
CAVRDGPRAGGSYIPTF

SEQ ID NO: 247370 - protein, 14 aa, Homo sapiens
  CDR3 for beta chain variable domain of TCR clone 123685 (TRBV7-9, TRBJ1-1)
CASTPLQSYTEAFF

SEQ ID NO: 247371 - protein, 15 aa, Homo sapiens
  CDR3 for alpha chain variable domain of TCR clone 123686 (TRAV35, TRAJ50)
CAGQLRKTSYDNVIF

SEQ ID NO: 247372 - protein, 12 aa, Homo sapiens
  CDR3 for beta chain variable domain of TCR clone 123686 (TRBV5-1, TRBJ2-5)
CASSLGLETQYF

SEQ ID NO: 247373 - protein, 13 aa, Homo sapiens
  CDR3 for alpha chain variable domain of TCR clone 123687 (TRAV12-2, TRAJ38)
CAVNAGNNRKLIW

SEQ ID NO: 247374 - protein, 13 aa, Homo sapiens
  CDR3 for beta chain variable domain of TCR clone 123687 (TRBV15, TRBJ1-6)
CATSGGLNSPLHF

SEQ ID NO: 247375 - protein, 16 aa, Homo sapiens
  CDR3 for alpha chain variable domain of TCR clone 123688 (TRAV12-2, TRAJ30)
CAAPLAGSGGSYIPTF

SEQ ID NO: 247376 - protein, 18 aa, Homo sapiens
  CDR3 for beta chain variable domain of TCR clone 123688 (TRBV10-3, TRBJ2-3)
CAISESRVGPMRGDTQYF

SEQ ID NO: 247377 - protein, 14 aa, Homo sapiens
  CDR3 for alpha chain variable domain of TCR clone 123689 (TRAV12-2, TRAJ13)
CAVKKTGGYQKVTF

SEQ ID NO: 247378 - protein, 14 aa, Homo sapiens
  CDR3 for beta chain variable domain of TCR clone 123689 (TRBV2, TRBJ1-6)
CASEVSSYNSPLHF

SEQ ID NO: 247379 - protein, 14 aa, Homo sapiens
  CDR3 for alpha chain variable domain of TCR clone 123690 (TRAV23/DV6, TRAJ4)
CAANLSGGYNKLIF

SEQ ID NO: 247380 - protein, 11 aa, Homo sapiens
  CDR3 for beta chain variable domain of TCR clone 123690 (TRBV7-9, TRBJ2-3)
CASSPTDTQCF

SEQ ID NO: 247381 - protein, 17 aa, Homo sapiens
  CDR3 for alpha chain variable domain of TCR clone 123691 (TRAV12-2, TRAJ52)
CAVNPYAGGTSYGKLTF

SEQ ID NO: 247382 - protein, 14 aa, Homo sapiens
  CDR3 for beta chain variable domain of TCR clone 123691 (TRBV7-9, TRBJ1-1)
RASSPRTGNTEAFF

SEQ ID NO: 247383 - protein, 13 aa, Homo sapiens
  CDR3 for alpha chain variable domain of TCR clone 123692 (TRAV13-1, TRAJ43)
CAASLSNNNDMRF

SEQ ID NO: 247384 - protein, 17 aa, Homo sapiens
  CDR3 for beta chain variable domain of TCR clone 123692 (TRBV5-1, TRBJ2-5)
CSVSAGCWGAGEKTQYF

SEQ ID NO: 247385 - protein, 13 aa, Homo sapiens
  CDR3 for alpha chain variable domain of TCR clone 123693 (TRAV35, TRAJ32)
CAGVGGATNKLIF

SEQ ID NO: 247386 - protein, 14 aa, Homo sapiens
  CDR3 for beta chain variable domain of TCR clone 123693 (TRBV19, TRBJ2-6)
CASTIGSGANVLTF

SEQ ID NO: 247387 - protein, 15 aa, Homo sapiens
  CDR3 for alpha chain variable domain of TCR clone 123694 (TRAV8-2, TRAJ44)
CVVSPNTGPASKLTF

SEQ ID NO: 247388 - protein, 12 aa, Homo sapiens
  CDR3 for beta chain variable domain of TCR clone 123694 (TRBV11-2, TRBJ2-2)
CAVPRNTGELFF

SEQ ID NO: 247389 - protein, 10 aa, Homo sapiens
  CDR3 for alpha chain variable domain of TCR clone 123695 (TRAV1-2, TRAJ23)
CAGQGGKLIF

SEQ ID NO: 247390 - protein, 18 aa, Homo sapiens
  CDR3 for beta chain variable domain of TCR clone 123695 (TRBV20-1, TRBJ2-3)
CSASGLAGGPGTTDTQYF

SEQ ID NO: 247391 - protein, 16 aa, Homo sapiens
  CDR3 for alpha chain variable domain of TCR clone 123696 (TRAV17, TRAJ53)
CTTDALSGGSNYKLTF

SEQ ID NO: 247392 - protein, 12 aa, Homo sapiens
  CDR3 for beta chain variable domain of TCR clone 123696 (TRBV5-1, TRBJ2-7)
CASSFRGYEQYF

SEQ ID NO: 247393 - protein, 18 aa, Homo sapiens
  CDR3 for alpha chain variable domain of TCR clone 123697 (TRAV21, TRAJ52)
CAVRPSPAGGTSYGKLTF

SEQ ID NO: 247394 - protein, 14 aa, Homo sapiens
  CDR3 for beta chain variable domain of TCR clone 123697 (TRBV19, TRBJ2-7)
CASSMGQGAIEQYF

SEQ ID NO: 247395 - protein, 12 aa, Homo sapiens
  CDR3 for alpha chain variable domain of TCR clone 123698 (TRAV21, TRAJ13)
PGPSGGYQKVTF

SEQ ID NO: 247396 - protein, 16 aa, Homo sapiens
  CDR3 for beta chain variable domain of TCR clone 123698 (TRBV5-1, TRBJ2-2)
CASSLWDTTNTGELFF

SEQ ID NO: 247397 - protein, 16 aa, Homo sapiens
  CDR3 for alpha chain variable domain of TCR clone 123699 (TRAV23/DV6, TRAJ9)
CAASIGGNTGGFKTIF

SEQ ID NO: 247398 - protein, 15 aa, Homo sapiens
  CDR3 for beta chain variable domain of TCR clone 123699 (TRBV6-3, TRBJ2-7)
CASSSPVTVLYEQYF

SEQ ID NO: 247399 - protein, 18 aa, Homo sapiens
  CDR3 for alpha chain variable domain of TCR clone 123700 (TRAV12-3, TRAJ52)
CAMSRTNAGGTSYGKLTF

SEQ ID NO: 247400 - protein, 17 aa, Homo sapiens
  CDR3 for beta chain variable domain of TCR clone 123700 (TRBV7-3, TRBJ2-3)
CGSSLMKRMRGADTQYF

SEQ ID NO: 247401 - protein, 14 aa, Homo sapiens
  CDR3 for alpha chain variable domain of TCR clone 123701 (TRAV26-2, TRAJ38)
CIPYNAGNNRKLIW

SEQ ID NO: 247402 - protein, 14 aa, Homo sapiens
  CDR3 for beta chain variable domain of TCR clone 123701 (TRBV19, TRBJ2-1)
CASPTFVLSGEQFF

SEQ ID NO: 247403 - protein, 14 aa, Homo sapiens
  CDR3 for alpha chain variable domain of TCR clone 123702 (TRAV12-3, TRAJ56)
CVMSVTGANSKLTF

SEQ ID NO: 247404 - protein, 17 aa, Homo sapiens
  CDR3 for beta chain variable domain of TCR clone 123702 (TRBV20-1, TRBJ2-3)
CSASLLGRGGSADTQYF

SEQ ID NO: 247405 - protein, 17 aa, Homo sapiens
  CDR3 for alpha chain variable domain of TCR clone 123703 (TRAV3, TRAJ42)
CAVRDKDYGGSQGNLIF

SEQ ID NO: 247406 - protein, 14 aa, Homo sapiens
  CDR3 for beta chain variable domain of TCR clone 123703 (TRBV19, TRBJ2-5)
CASSMTGQQETQYF

SEQ ID NO: 247407 - protein, 15 aa, Homo sapiens
  CDR3 for alpha chain variable domain of TCR clone 123704 (TRAV12-1, TRAJ44)
CVVDEYTGTASKLTF

SEQ ID NO: 247408 - protein, 14 aa, Homo sapiens
  CDR3 for beta chain variable domain of TCR clone 123704 (TRBV5-1, TRBJ1-2)
CASSLEPVYYGYTF

SEQ ID NO: 247409 - protein, 13 aa, Homo sapiens
  CDR3 for alpha chain variable domain of TCR clone 123705 (TRAV12-1, TRAJ16)
CVVNGPDGQNLLF

SEQ ID NO: 247410 - protein, 13 aa, Homo sapiens
  CDR3 for beta chain variable domain of TCR clone 123705 (TRBV2, TRBJ1-1)
CARNPTGGFHAFF

SEQ ID NO: 247411 - protein, 12 aa, Homo sapiens
  CDR3 for alpha chain variable domain of TCR clone 123706 (TRAV13-1, TRAJ15)
CAASQAGTALIV

SEQ ID NO: 247412 - protein, 14 aa, Homo sapiens
  CDR3 for beta chain variable domain of TCR clone 123706 (TRBV19, TRBJ2-2)
CASSTLHRSGELFF

SEQ ID NO: 247413 - protein, 15 aa, Homo sapiens
  CDR3 for alpha chain variable domain of TCR clone 123707 (TRAV25, TRAJ10)
CAGPLLTGGGNKLTF

SEQ ID NO: 247414 - protein, 15 aa, Homo sapiens
  CDR3 for beta chain variable domain of TCR clone 123707 (TRBV4-1, TRBJ1-4)
CASSDTGGTNEKLFF

SEQ ID NO: 247415 - protein, 14 aa, Homo sapiens
  CDR3 for alpha chain variable domain of TCR clone 123708 (TRAV30, TRAJ33)
CGTERRCSNYQLIW

SEQ ID NO: 247416 - protein, 16 aa, Homo sapiens
  CDR3 for beta chain variable domain of TCR clone 123708 (TRBV7-3, TRBJ2-2)
CASSLKRGTLSGELFF

SEQ ID NO: 247417 - protein, 17 aa, Homo sapiens
  CDR3 for alpha chain variable domain of TCR clone 123709 (TRAV3, TRAJ38)
CAVRDCLNAGNNRKLIW

SEQ ID NO: 247418 - protein, 14 aa, Homo sapiens
  CDR3 for beta chain variable domain of TCR clone 123709 (TRBV7-9, TRBJ2-1)
CASSPRDSLYEQFF

SEQ ID NO: 247419 - protein, 16 aa, Homo sapiens
  CDR3 for alpha chain variable domain of TCR clone 123710 (TRAV21, TRAJ45)
CAVSWGSGGGADGLTF

SEQ ID NO: 247420 - protein, 13 aa, Homo sapiens
  CDR3 for beta chain variable domain of TCR clone 123710 (TRBV7-9, TRBJ1-2)
CASSLKQNYGYTF

SEQ ID NO: 247421 - protein, 14 aa, Homo sapiens
  CDR3 for alpha chain variable domain of TCR clone 123711 (TRAV17, TRAJ6)
CATDASGGSYIPTF

SEQ ID NO: 247422 - protein, 14 aa, Homo sapiens
  CDR3 for beta chain variable domain of TCR clone 123711 (TRBV7-2, TRBJ2-7)
CASRSQGAAYEQYF

SEQ ID NO: 247423 - protein, 14 aa, Homo sapiens
  CDR3 for alpha chain variable domain of TCR clone 123712 (TRAV26-1, TRAJ45)
CIEVTGGGADGLTF

SEQ ID NO: 247424 - protein, 13 aa, Homo sapiens
  CDR3 for beta chain variable domain of TCR clone 123712 (TRBV7-6, TRBJ1-2)
CASSLVADYGYTF

SEQ ID NO: 247425 - protein, 18 aa, Homo sapiens
  CDR3 for alpha chain variable domain of TCR clone 123713 (TRAV13-1, TRAJ52)
CAAKNPNAGGTSYGKLTF

SEQ ID NO: 247426 - protein, 15 aa, Homo sapiens
  CDR3 for beta chain variable domain of TCR clone 123713 (TRBV12-4, TRBJ2-5)
CASSPPTGLQETQYF

SEQ ID NO: 247427 - protein, 10 aa, Homo sapiens
  CDR3 for alpha chain variable domain of TCR clone 123714 (TRAV23/DV6, TRAJ3)
CAATTFALGG

SEQ ID NO: 247428 - protein, 17 aa, Homo sapiens
  CDR3 for beta chain variable domain of TCR clone 123714 (TRBV28, TRBJ2-1)
CASSSARQALTYNEQFF

SEQ ID NO: 247429 - protein, 14 aa, Homo sapiens
  CDR3 for alpha chain variable domain of TCR clone 123715 (TRAV12-1, TRAJ38)
CGELKAGNNRKMIW

SEQ ID NO: 247430 - protein, 17 aa, Homo sapiens
  CDR3 for beta chain variable domain of TCR clone 123715 (TRBV20-1, TRBJ2-1)
CSASSSGLAGSYNEQFF

SEQ ID NO: 247431 - protein, 11 aa, Homo sapiens
  CDR3 for alpha chain variable domain of TCR clone 123716 (TRAV12-1, TRAJ21)
CVVNNFNKFYF

SEQ ID NO: 247432 - protein, 17 aa, Homo sapiens
  CDR3 for beta chain variable domain of TCR clone 123716 (TRBV7-8, TRBJ2-1)
CASSPPTGTLAYNEQFF

SEQ ID NO: 247433 - protein, 17 aa, Homo sapiens
  CDR3 for alpha chain variable domain of TCR clone 123717 (TRAV14/DV4, TRAJ4)
CAMREASGRGGYNKLSF

SEQ ID NO: 247434 - protein, 14 aa, Homo sapiens
  CDR3 for beta chain variable domain of TCR clone 123717 (TRBV19, TRBJ2-7)
CASSMGQGAIEQYF

SEQ ID NO: 247435 - protein, 13 aa, Homo sapiens
  CDR3 for alpha chain variable domain of TCR clone 123718 (TRAV35, TRAJ42)
CAGFPGSQGNLIF

SEQ ID NO: 247436 - protein, 14 aa, Homo sapiens
  CDR3 for beta chain variable domain of TCR clone 123718 (TRBV19, TRBJ2-1)
CASPTCVLSGEQFF

SEQ ID NO: 247437 - protein, 19 aa, Homo sapiens
  CDR3 for alpha chain variable domain of TCR clone 123719 (TRAV1-2, TRAJ26)
CLLPLCCERPDNYGQNFVF

SEQ ID NO: 247438 - protein, 17 aa, Homo sapiens
  CDR3 for beta chain variable domain of TCR clone 123719 (TRBV20-1, TRBJ2-1)
CSASSSGLAGSYNEQFF

SEQ ID NO: 247439 - protein, 15 aa, Homo sapiens
  CDR3 for alpha chain variable domain of TCR clone 123720 (TRAV1-1, TRAJ20)
CAVRDNVANDYKLRF

SEQ ID NO: 247440 - protein, 13 aa, Homo sapiens
  CDR3 for beta chain variable domain of TCR clone 123720 (TRBV4-1, TRBJ2-2)
CASSQENTGELFF

SEQ ID NO: 247441 - protein, 13 aa, Homo sapiens
  CDR3 for alpha chain variable domain of TCR clone 123721 (TRAV13-1, TRAJ21)
CAASIYNFNKFYF

SEQ ID NO: 247442 - protein, 14 aa, Homo sapiens
  CDR3 for beta chain variable domain of TCR clone 123721 (TRBV5-5, TRBJ2-7)
CASSLGQGTYEQYF

SEQ ID NO: 247443 - protein, 15 aa, Homo sapiens
  CDR3 for alpha chain variable domain of TCR clone 123722 (TRAV27, TRAJ38)
CAARRNAGNNRKRTW

SEQ ID NO: 247444 - protein, 13 aa, Homo sapiens
  CDR3 for beta chain variable domain of TCR clone 123722 (TRBV12-5, TRBJ2-3)
CASGDRQSDTQYF

SEQ ID NO: 247445 - protein, 15 aa, Homo sapiens
  CDR3 for alpha chain variable domain of TCR clone 123723 (TRAV12-3, TRAJ6)
CAMSATTGGSYIPTF

SEQ ID NO: 247446 - protein, 15 aa, Homo sapiens
  CDR3 for beta chain variable domain of TCR clone 123723 (TRBV9, TRBJ2-1)
CASSLAGSSYNEQFF

SEQ ID NO: 247447 - protein, 23 aa, Homo sapiens
  CDR3 for alpha chain variable domain of TCR clone 123724 (TRAV30, TRAJ43)
CTLRPPSSVTQEPTSAALSDMRF

SEQ ID NO: 247448 - protein, 15 aa, Homo sapiens
  CDR3 for beta chain variable domain of TCR clone 123724 (TRBV7-2, TRBJ2-3)
CASSSTGLETDTQYF

SEQ ID NO: 247449 - protein, 10 aa, Homo sapiens
  CDR3 for alpha chain variable domain of TCR clone 123725 (TRAV1-2, TRAJ20)
CALNDYKLSF

SEQ ID NO: 247450 - protein, 16 aa, Homo sapiens
  CDR3 for beta chain variable domain of TCR clone 123725 (TRBV20-1, TRBJ1-4)
CSAPGQGLLTNEKLFF

SEQ ID NO: 247451 - protein, 13 aa, Homo sapiens
  CDR3 for alpha chain variable domain of TCR clone 123726 (TRAV9-2, TRAJ33)
CALRMDSNYQLIW

SEQ ID NO: 247452 - protein, 14 aa, Homo sapiens
  CDR3 for beta chain variable domain of TCR clone 123726 (TRBV7-7, TRBJ2-2)
CASSTRASGGELFF

SEQ ID NO: 247453 - protein, 11 aa, Homo sapiens
  CDR3 for alpha chain variable domain of TCR clone 123727 (TRAV12-1, TRAJ34)
CVVNKGRELIF

SEQ ID NO: 247454 - protein, 18 aa, Homo sapiens
  CDR3 for beta chain variable domain of TCR clone 123727 (TRBV7-3, TRBJ2-1)
CASSLTLASGRAMVSSSS

SEQ ID NO: 247455 - protein, 16 aa, Homo sapiens
  CDR3 for alpha chain variable domain of TCR clone 123728 (TRAV3, TRAJ37)
CAVRGKGSGNTGKLIF

SEQ ID NO: 247456 - protein, 15 aa, Homo sapiens
  CDR3 for beta chain variable domain of TCR clone 123728 (TRBV6-6, TRBJ2-5)
CASSYGKIIQGTQYF

SEQ ID NO: 247457 - protein, 18 aa, Homo sapiens
  CDR3 for alpha chain variable domain of TCR clone 123729 (TRAV13-1, TRAJ52)
CAAKNPNAGGTSYGKLTF

SEQ ID NO: 247458 - protein, 15 aa, Homo sapiens
  CDR3 for beta chain variable domain of TCR clone 123729 (TRBV28, TRBJ2-1)
CASSIIAGDRSEQFF

SEQ ID NO: 247459 - protein, 11 aa, Homo sapiens
  CDR3 for alpha chain variable domain of TCR clone 123730 (TRAV3, TRAJ21)
CAVGNFNKFYF

SEQ ID NO: 247460 - protein, 14 aa, Homo sapiens
  CDR3 for beta chain variable domain of TCR clone 123730 (TRBV7-6, TRBJ2-5)
CASSLVGGAETQYF

SEQ ID NO: 247461 - protein, 13 aa, Homo sapiens
  CDR3 for alpha chain variable domain of TCR clone 123731 (TRAV3, TRAJ21)
CAVRAPDFNKFYF

SEQ ID NO: 247462 - protein, 13 aa, Homo sapiens
  CDR3 for beta chain variable domain of TCR clone 123731 (TRBV9, TRBJ2-1)
CASSPSGGNEQFF

SEQ ID NO: 247463 - protein, 14 aa, Homo sapiens
  CDR3 for alpha chain variable domain of TCR clone 123732 (TRAV1-2, TRAJ8)
CAVREDTGFQKLVF

SEQ ID NO: 247464 - protein, 13 aa, Homo sapiens
  CDR3 for beta chain variable domain of TCR clone 123732 (TRBV9, TRBJ2-1)
CASSPSGGNEQFF

SEQ ID NO: 247465 - protein, 14 aa, Homo sapiens
  CDR3 for alpha chain variable domain of TCR clone 123733 (TRAV26-1, TRAJ45)
CIEVTGGGADGLTF

SEQ ID NO: 247466 - protein, 19 aa, Homo sapiens
  CDR3 for beta chain variable domain of TCR clone 123733 (TRBV19, TRBJ2-2)
CASTRPGLAGGRVTGKLFF

SEQ ID NO: 247467 - protein, 16 aa, Homo sapiens
  CDR3 for alpha chain variable domain of TCR clone 123734 (TRAV3, TRAJ10)
CAVRDMRAGGGNKLTF

SEQ ID NO: 247468 - protein, 14 aa, Homo sapiens
  CDR3 for beta chain variable domain of TCR clone 123734 (TRBV7-2, TRBJ1-1)
CARSFLTGTTEAFF

SEQ ID NO: 247469 - protein, 15 aa, Homo sapiens
  CDR3 for alpha chain variable domain of TCR clone 123735 (TRAV17, TRAJ35)
CATAFVIGFGNVLHC

SEQ ID NO: 247470 - protein, 14 aa, Homo sapiens
  CDR3 for beta chain variable domain of TCR clone 123735 (TRBV12-4, TRBJ2-5)
CASSQSGGGETQCF

SEQ ID NO: 247471 - protein, 14 aa, Homo sapiens
  CDR3 for alpha chain variable domain of TCR clone 123736 (TRAV26-1, TRAJ38)
CIADNAGNNRKLIW

SEQ ID NO: 247472 - protein, 13 aa, Homo sapiens
  CDR3 for beta chain variable domain of TCR clone 123736 (TRBV7-9, TRBJ2-7)
CASSFAGAYEQYF

SEQ ID NO: 247473 - protein, 14 aa, Homo sapiens
  CDR3 for alpha chain variable domain of TCR clone 123737 (TRAV12-3, TRAJ58)
CAMSTETSGSRLTF

SEQ ID NO: 247474 - protein, 13 aa, Homo sapiens
  CDR3 for beta chain variable domain of TCR clone 123737 (TRBV27, TRBJ2-3)
CARSWGRTDTQYF

SEQ ID NO: 247475 - protein, 18 aa, Homo sapiens
  CDR3 for alpha chain variable domain of TCR clone 123738 (TRAV26-1, TRAJ57)
CIVRVALRFRGGSEKLVF

SEQ ID NO: 247476 - protein, 15 aa, Homo sapiens
  CDR3 for beta chain variable domain of TCR clone 123738 (TRBV27, TRBJ2-1)
CASSNGGGSSNEQFF

SEQ ID NO: 247477 - protein, 11 aa, Homo sapiens
  CDR3 for alpha chain variable domain of TCR clone 123739 (TRAV26-1, TRAJ37)
CIVRVGRKLIF

SEQ ID NO: 247478 - protein, 17 aa, Homo sapiens
  CDR3 for beta chain variable domain of TCR clone 123739 (TRBV7-8, TRBJ2-6)
CASSAGTGGAGANVLTF

SEQ ID NO: 247479 - protein, 15 aa, Homo sapiens
  CDR3 for alpha chain variable domain of TCR clone 123740 (TRAV26-1, TRAJ29)
CIVRVEGSGNTPLVF

SEQ ID NO: 247480 - protein, 14 aa, Homo sapiens
  CDR3 for beta chain variable domain of TCR clone 123740 (TRBV7-3, TRBJ1-1)
CASSLKGGNTEAFF

SEQ ID NO: 247481 - protein, 13 aa, Homo sapiens
  CDR3 for alpha chain variable domain of TCR clone 123741 (TRAV20, TRAJ49)
CAVHSNTGNQFYF

SEQ ID NO: 247482 - protein, 15 aa, Homo sapiens
  CDR3 for beta chain variable domain of TCR clone 123741 (TRBV12-4, TRBJ2-5)
CASSPPTGLQETQYF

SEQ ID NO: 247483 - protein, 12 aa, Homo sapiens
  CDR3 for alpha chain variable domain of TCR clone 123742 (TRAV12-3, TRAJ17)
CAMTLTGNKLTF

SEQ ID NO: 247484 - protein, 13 aa, Homo sapiens
  CDR3 for beta chain variable domain of TCR clone 123742 (TRBV6-5, TRBJ2-5)
CASSPQGGETQYF

SEQ ID NO: 247485 - protein, 15 aa, Homo sapiens
  CDR3 for alpha chain variable domain of TCR clone 123743 (TRAV12-1, TRAJ9)
CVVSFGDTGGFKTIF

SEQ ID NO: 247486 - protein, 12 aa, Homo sapiens
  CDR3 for beta chain variable domain of TCR clone 123743 (TRBV11-2, TRBJ2-4)
CASSSASGSKYF

SEQ ID NO: 247487 - protein, 16 aa, Homo sapiens
  CDR3 for alpha chain variable domain of TCR clone 123744 (TRAV1-2, TRAJ10)
CAVRGVLTGGGIKLTF

SEQ ID NO: 247488 - protein, 12 aa, Homo sapiens
  CDR3 for beta chain variable domain of TCR clone 123744 (TRBV11-2, TRBJ2-1)
CASSPGNNEQFF

SEQ ID NO: 247489 - protein, 15 aa, Homo sapiens
  CDR3 for alpha chain variable domain of TCR clone 123745 (TRAV3, TRAJ3)
CAVRDGHSSASQIIF

SEQ ID NO: 247490 - protein, 14 aa, Homo sapiens
  CDR3 for beta chain variable domain of TCR clone 123745 (TRBV28, TRBJ1-4)
CASSFGTFDEKLFF

SEQ ID NO: 247491 - protein, 14 aa, Homo sapiens
  CDR3 for alpha chain variable domain of TCR clone 123746 (TRAV9-2, TRAJ39)
CALYIYNAGNMLTF

SEQ ID NO: 247492 - protein, 13 aa, Homo sapiens
  CDR3 for beta chain variable domain of TCR clone 123746 (TRBV7-7, TRBJ2-3)
CASSLSRADTQYF

SEQ ID NO: 247493 - protein, 13 aa, Homo sapiens
  CDR3 for alpha chain variable domain of TCR clone 123747 (TRAV26-1, TRAJ48)
CIVRVVGDEKLNF

SEQ ID NO: 247494 - protein, 16 aa, Homo sapiens
  CDR3 for beta chain variable domain of TCR clone 123747 (TRBV12-5, TRBJ2-5)
CASGPRTSGNQETQYF

SEQ ID NO: 247495 - protein, 11 aa, Homo sapiens
  CDR3 for alpha chain variable domain of TCR clone 123748 (TRAV2, TRAJ33)
CAVESKYQLIW

SEQ ID NO: 247496 - protein, 15 aa, Homo sapiens
  CDR3 for beta chain variable domain of TCR clone 123748 (TRBV19, TRBJ1-1)
CASTSGQIQNTEAFF

SEQ ID NO: 247497 - protein, 15 aa, Homo sapiens
  CDR3 for alpha chain variable domain of TCR clone 123749 (TRAV27, TRAJ38)
CAARRNAGNNRKLIW

SEQ ID NO: 247498 - protein, 13 aa, Homo sapiens
  CDR3 for beta chain variable domain of TCR clone 123749 (TRBV12-5, TRBJ2-3)
CASGDRQSVTQYF

SEQ ID NO: 247499 - protein, 14 aa, Homo sapiens
  CDR3 for alpha chain variable domain of TCR clone 123750 (TRAV9-2, TRAJ38)
CALSNAGNNRKLIW

SEQ ID NO: 247500 - protein, 13 aa, Homo sapiens
  CDR3 for beta chain variable domain of TCR clone 123750 (TRBV7-3, TRBJ1-1)
CASSQDWGAEAFF

SEQ ID NO: 247501 - protein, 13 aa, Homo sapiens
  CDR3 for alpha chain variable domain of TCR clone 123751 (TRAV12-3, TRAJ13)
CAVSSGGYQKVTF

SEQ ID NO: 247502 - protein, 13 aa, Homo sapiens
  CDR3 for beta chain variable domain of TCR clone 123751 (TRBV20-1, TRBJ1-1)
CSAPPGGHTEAFF

SEQ ID NO: 247503 - protein, 12 aa, Homo sapiens
  CDR3 for alpha chain variable domain of TCR clone 123752 (TRAV12-2, TRAJ10)
WGVTRGGNKLTF

SEQ ID NO: 247504 - protein, 13 aa, Homo sapiens
  CDR3 for beta chain variable domain of TCR clone 123752 (TRBV7-3, TRBJ1-1)
CASSQDWGAEAFF

SEQ ID NO: 247505 - protein, 15 aa, Homo sapiens
  CDR3 for alpha chain variable domain of TCR clone 123753 (TRAV12-1, TRAJ44)
CVVFVNTGTASKLTF

SEQ ID NO: 247506 - protein, 15 aa, Homo sapiens
  CDR3 for beta chain variable domain of TCR clone 123753 (TRBV27, TRBJ2-1)
CASSNGGGSSNEQFF

SEQ ID NO: 247507 - protein, 13 aa, Homo sapiens
  CDR3 for alpha chain variable domain of TCR clone 123754 (TRAV8-3, TRAJ43)
CAVVPYNNNDMRF

SEQ ID NO: 247508 - protein, 12 aa, Homo sapiens
  CDR3 for beta chain variable domain of TCR clone 123754 (TRBV14, TRBJ1-1)
CASSQFKGLAFF

SEQ ID NO: 247509 - protein, 17 aa, Homo sapiens
  CDR3 for alpha chain variable domain of TCR clone 123755 (TRAV26-1, TRAJ58)
CIVRVGADETSGSRLTF

SEQ ID NO: 247510 - protein, 18 aa, Homo sapiens
  CDR3 for beta chain variable domain of TCR clone 123755 (TRBV7-9, TRBJ2-7)
CASSLTTSGSRTWYEQYF

SEQ ID NO: 247511 - protein, 14 aa, Homo sapiens
  CDR3 for alpha chain variable domain of TCR clone 123756 (TRAV35, TRAJ22)
CAGLRPGSARQLTF

SEQ ID NO: 247512 - protein, 13 aa, Homo sapiens
  CDR3 for beta chain variable domain of TCR clone 123756 (TRBV19, TRBJ1-1)
CASSITGESEAFF

SEQ ID NO: 247513 - protein, 11 aa, Homo sapiens
  CDR3 for alpha chain variable domain of TCR clone 123757 (TRAV22, TRAJ49)
CSVLTGNQFYF

SEQ ID NO: 247514 - protein, 11 aa, Homo sapiens
  CDR3 for beta chain variable domain of TCR clone 123757 (TRBV5-6, TRBJ2-1)
CASSLGGEQFF

SEQ ID NO: 247515 - protein, 14 aa, Homo sapiens
  CDR3 for alpha chain variable domain of TCR clone 123758 (TRAV8-3, TRAJ4)
CAVGAAGGYNKLIF

SEQ ID NO: 247516 - protein, 13 aa, Homo sapiens
  CDR3 for beta chain variable domain of TCR clone 123758 (TRBV19, TRBJ1-2)
CASSQGQVYGYTF

SEQ ID NO: 247517 - protein, 15 aa, Homo sapiens
  CDR3 for alpha chain variable domain of TCR clone 123759 (TRAV8-6, TRAJ37)
CAVIFSSVNTGKLIF

SEQ ID NO: 247518 - protein, 15 aa, Homo sapiens
  CDR3 for beta chain variable domain of TCR clone 123759 (TRBV25-1, TRBJ2-4)
CASSETESAKNIQYF

SEQ ID NO: 247519 - protein, 16 aa, Homo sapiens
  CDR3 for alpha chain variable domain of TCR clone 123760 (TRAV3, TRAJ18)
CAVRDGRGSTLGRVYF

SEQ ID NO: 247520 - protein, 15 aa, Homo sapiens
  CDR3 for beta chain variable domain of TCR clone 123760 (TRBV7-9, TRBJ1-6)
CASSSPGRGNSPLHF

SEQ ID NO: 247521 - protein, 16 aa, Homo sapiens
  CDR3 for alpha chain variable domain of TCR clone 123761 (TRAV3, TRAJ10)
CAVRDIRAGGGNKLTF

SEQ ID NO: 247522 - protein, 13 aa, Homo sapiens
  CDR3 for beta chain variable domain of TCR clone 123761 (TRBV6-1, TRBJ1-1)
CASSRQGNTEAFF

SEQ ID NO: 247523 - protein, 16 aa, Homo sapiens
  CDR3 for alpha chain variable domain of TCR clone 123762 (TRAV27, TRAJ53)
CAAPEGSVGSNYKLTF

SEQ ID NO: 247524 - protein, 14 aa, Homo sapiens
  CDR3 for beta chain variable domain of TCR clone 123762 (TRBV4-3, TRBJ1-5)
CASSQGGQGWPQHF

SEQ ID NO: 247525 - protein, 16 aa, Homo sapiens
  CDR3 for alpha chain variable domain of TCR clone 123763 (TRAV30, TRAJ24)
CGTEIVDADSWGKFQF

SEQ ID NO: 247526 - protein, 18 aa, Homo sapiens
  CDR3 for beta chain variable domain of TCR clone 123763 (TRBV7-9, TRBJ2-7)
CASSLTTSGSRAWYEQYF

SEQ ID NO: 247527 - protein, 15 aa, Homo sapiens
  CDR3 for alpha chain variable domain of TCR clone 123764 (TRAV13-1, TRAJ44)
CAASRGGGTASKLTF

SEQ ID NO: 247528 - protein, 17 aa, Homo sapiens
  CDR3 for beta chain variable domain of TCR clone 123764 (TRBV11-2, TRBJ2-1)
CASSLYPPGVEYNEQFF

SEQ ID NO: 247529 - protein, 12 aa, Homo sapiens
  CDR3 for alpha chain variable domain of TCR clone 123765 (TRAV21, TRAJ15)
CAVNQAGTALIF

SEQ ID NO: 247530 - protein, 13 aa, Homo sapiens
  CDR3 for beta chain variable domain of TCR clone 123765 (TRBV11-3, TRBJ2-5)
CASSSTGEETQYF

SEQ ID NO: 247531 - protein, 16 aa, Homo sapiens
  CDR3 for alpha chain variable domain of TCR clone 123766 (TRAV30, TRAJ24)
CGTEIVDADSWGKFQF

SEQ ID NO: 247532 - protein, 12 aa, Homo sapiens
  CDR3 for beta chain variable domain of TCR clone 123766 (TRBV5-7, TRBJ1-1)
CASSLGRGKAFF

SEQ ID NO: 247533 - protein, 16 aa, Homo sapiens
  CDR3 for alpha chain variable domain of TCR clone 123767 (TRAV12-3, TRAJ53)
CAMSPGSGGSNYKLKF

SEQ ID NO: 247534 - protein, 20 aa, Homo sapiens
  CDR3 for beta chain variable domain of TCR clone 123767 (TRBV7-8, TRBJ2-2)
CASSHLFPGPTIHITGELFF

SEQ ID NO: 247535 - protein, 14 aa, Homo sapiens
  CDR3 for alpha chain variable domain of TCR clone 123768 (TRAV2, TRAJ9)
CAVEDRSGGFKTIF

SEQ ID NO: 247536 - protein, 15 aa, Homo sapiens
  CDR3 for beta chain variable domain of TCR clone 123768 (TRBV7-9, TRBJ1-2)
CASSLDREPNYGYTF

SEQ ID NO: 247537 - protein, 14 aa, Homo sapiens
  CDR3 for alpha chain variable domain of TCR clone 123769 (TRAV29/DV5, TRAJ20)
CAATIRSNDYTLSF

SEQ ID NO: 247538 - protein, 15 aa, Homo sapiens
  CDR3 for beta chain variable domain of TCR clone 123769 (TRBV20-1, TRBJ2-1)
CSASSAGSSYNEQFF

SEQ ID NO: 247539 - protein, 13 aa, Homo sapiens
  CDR3 for alpha chain variable domain of TCR clone 123770 (TRAV2, TRAJ40)
CAVVTSGTYKYIF

SEQ ID NO: 247540 - protein, 14 aa, Homo sapiens
  CDR3 for beta chain variable domain of TCR clone 123770 (TRBV4-2, TRBJ2-1)
CASGLDRTYNEQFF

SEQ ID NO: 247541 - protein, 13 aa, Homo sapiens
  CDR3 for alpha chain variable domain of TCR clone 123771 (TRAV29/DV5, TRAJ31)
CAASRNNNARLRF

SEQ ID NO: 247542 - protein, 12 aa, Homo sapiens
  CDR3 for beta chain variable domain of TCR clone 123771 (TRBV14, TRBJ2-5)
CASSHLKETQYF

SEQ ID NO: 247543 - protein, 14 aa, Homo sapiens
  CDR3 for alpha chain variable domain of TCR clone 123772 (TRAV12-2, TRAJ13)
CGVKKTGGYQKVTF

SEQ ID NO: 247544 - protein, 15 aa, Homo sapiens
  CDR3 for beta chain variable domain of TCR clone 123772 (TRBV27, TRBJ2-1)
CASSNGGGSSNEQFF

SEQ ID NO: 247545 - protein, 13 aa, Homo sapiens
  CDR3 for alpha chain variable domain of TCR clone 123773 (TRAV27, TRAJ49)
CAPRPYTGNQFYF

SEQ ID NO: 247546 - protein, 15 aa, Homo sapiens
  CDR3 for beta chain variable domain of TCR clone 123773 (TRBV12-4, TRBJ1-2)
CASSLAHRDGQAYTF

SEQ ID NO: 247547 - protein, 14 aa, Homo sapiens
  CDR3 for alpha chain variable domain of TCR clone 123774 (TRAV9-2, TRAJ39)
CALYIYNAGNMLTF

SEQ ID NO: 247548 - protein, 14 aa, Homo sapiens
  CDR3 for beta chain variable domain of TCR clone 123774 (TRBV19, TRBJ2-2)
CASSTLHRSGELFF

SEQ ID NO: 247549 - protein, 11 aa, Homo sapiens
  CDR3 for alpha chain variable domain of TCR clone 123775 (TRAV3, TRAJ21)
CAVGNFNKFYF

SEQ ID NO: 247550 - protein, 15 aa, Homo sapiens
  CDR3 for beta chain variable domain of TCR clone 123775 (TRBV7-2, TRBJ2-3)
CASSLAGAFIDTQYF

SEQ ID NO: 247551 - protein, 10 aa, Homo sapiens
  CDR3 for alpha chain variable domain of TCR clone 123776 (TRAV29/DV5, TRAJ37)
CAALTGKLIF

SEQ ID NO: 247552 - protein, 15 aa, Homo sapiens
  CDR3 for beta chain variable domain of TCR clone 123776 (TRBV5-1, TRBJ2-7)
CASSLDLTSSYEQYF

SEQ ID NO: 247553 - protein, 22 aa, Homo sapiens
  CDR3 for alpha chain variable domain of TCR clone 123777 (TRAV21, TRAJ35)
CAVMPIGFGNVLHCGSGTPVIF

SEQ ID NO: 247554 - protein, 12 aa, Homo sapiens
  CDR3 for beta chain variable domain of TCR clone 123777 (TRBV7-9, TRBJ2-7)
CASSIKREEQYF

SEQ ID NO: 247555 - protein, 14 aa, Homo sapiens
  CDR3 for alpha chain variable domain of TCR clone 123778 (TRAV20, TRAJ56)
CAVQFGGANSKLTF

SEQ ID NO: 247556 - protein, 15 aa, Homo sapiens
  CDR3 for beta chain variable domain of TCR clone 123778 (TRBV9, TRBJ1-6)
CASSVSGTGDSPLHF

SEQ ID NO: 247557 - protein, 10 aa, Homo sapiens
  CDR3 for alpha chain variable domain of TCR clone 123779 (TRAV5, TRAJ34)
CAEDTDNLIF

SEQ ID NO: 247558 - protein, 12 aa, Homo sapiens
  CDR3 for beta chain variable domain of TCR clone 123779 (TRBV11-2, TRBJ2-2)
CASSLGGGELFF

SEQ ID NO: 247559 - protein, 13 aa, Homo sapiens
  CDR3 for alpha chain variable domain of TCR clone 123780 (TRAV21, TRAJ27)
CAARPGNAGKSTF

SEQ ID NO: 247560 - protein, 12 aa, Homo sapiens
  CDR3 for beta chain variable domain of TCR clone 123780 (TRBV14, TRBJ1-1)
CASSQLKGLAFF

SEQ ID NO: 247561 - protein, 15 aa, Homo sapiens
  CDR3 for alpha chain variable domain of TCR clone 123781 (TRAV3, TRAJ42)
CDVRGGTGSQGNLIF

SEQ ID NO: 247562 - protein, 14 aa, Homo sapiens
  CDR3 for beta chain variable domain of TCR clone 123781 (TRBV19, TRBJ1-2)
CASSSLFARDVYTF

SEQ ID NO: 247563 - protein, 13 aa, Homo sapiens
  CDR3 for alpha chain variable domain of TCR clone 123782 (TRAV17, TRAJ9)
CARDYTGGFKTIF

SEQ ID NO: 247564 - protein, 14 aa, Homo sapiens
  CDR3 for beta chain variable domain of TCR clone 123782 (TRBV19, TRBJ2-5)
CASSMTGQQETQYF

SEQ ID NO: 247565 - protein, 11 aa, Homo sapiens
  CDR3 for alpha chain variable domain of TCR clone 123783 (TRAV3, TRAJ21)
CAVGNFNKFYF

SEQ ID NO: 247566 - protein, 15 aa, Homo sapiens
  CDR3 for beta chain variable domain of TCR clone 123783 (TRBV4-1, TRBJ2-3)
CASSRGQGIPDTQYF

SEQ ID NO: 247567 - protein, 14 aa, Homo sapiens
  CDR3 for alpha chain variable domain of TCR clone 123784 (TRAV1-2, TRAJ16)
CAVNRFSDGQKLLF

SEQ ID NO: 247568 - protein, 10 aa, Homo sapiens
  CDR3 for beta chain variable domain of TCR clone 123784 (TRBV9, TRBJ1-6)
CASSVADRGF

SEQ ID NO: 247569 - protein, 16 aa, Homo sapiens
  CDR3 for alpha chain variable domain of TCR clone 123785 (TRAV12-2, TRAJ10)
CAVNRVLTGGGNKLTF

SEQ ID NO: 247570 - protein, 17 aa, Homo sapiens
  CDR3 for beta chain variable domain of TCR clone 123785 (TRBV13, TRBJ2-3)
CASSLSRVAGGRNTQYF

SEQ ID NO: 247571 - protein, 11 aa, Homo sapiens
  CDR3 for alpha chain variable domain of TCR clone 123786 (TRAV16, TRAJ31)
CALFNNARLMF

SEQ ID NO: 247572 - protein, 13 aa, Homo sapiens
  CDR3 for beta chain variable domain of TCR clone 123786 (TRBV20-1, TRBJ2-7)
CSARTGAGYEQYF

SEQ ID NO: 247573 - protein, 14 aa, Homo sapiens
  CDR3 for alpha chain variable domain of TCR clone 123787 (TRAV30, TRAJ26)
CGTEIVSYGQNFVF

SEQ ID NO: 247574 - protein, 15 aa, Homo sapiens
  CDR3 for beta chain variable domain of TCR clone 123787 (TRBV5-1, TRBJ2-1)
CASSPPRAPYNEQFF

SEQ ID NO: 247575 - protein, 17 aa, Homo sapiens
  CDR3 for alpha chain variable domain of TCR clone 123788 (TRAV13-1, TRAJ31)
CAPRDRLMFGDGTQLVV

SEQ ID NO: 247576 - protein, 12 aa, Homo sapiens
  CDR3 for beta chain variable domain of TCR clone 123788 (TRBV7-9, TRBJ2-7)
CATSLEGYEQYF

SEQ ID NO: 247577 - protein, 14 aa, Homo sapiens
  CDR3 for alpha chain variable domain of TCR clone 123789 (TRAV12-1, TRAJ17)
CVVNFKAAGNKLTF

SEQ ID NO: 247578 - protein, 17 aa, Homo sapiens
  CDR3 for beta chain variable domain of TCR clone 123789 (TRBV20-1, TRBJ2-1)
CSASASGLAGPYNEQFF

SEQ ID NO: 247579 - protein, 13 aa, Homo sapiens
  CDR3 for alpha chain variable domain of TCR clone 123790 (TRAV16, TRAJ37)
CALSSSNTGKLIF

SEQ ID NO: 247580 - protein, 12 aa, Homo sapiens
  CDR3 for beta chain variable domain of TCR clone 123790 (TRBV29-1, TRBJ2-3)
CSVTGGADTQYF

SEQ ID NO: 247581 - protein, 13 aa, Homo sapiens
  CDR3 for alpha chain variable domain of TCR clone 123791 (TRAV8-3, TRAJ28)
CAVGAVGSYQLTF

SEQ ID NO: 247582 - protein, 17 aa, Homo sapiens
  CDR3 for beta chain variable domain of TCR clone 123791 (TRBV20-1, TRBJ2-1)
CSARDPLAGVWDNEQFF

SEQ ID NO: 247583 - protein, 15 aa, Homo sapiens
  CDR3 for alpha chain variable domain of TCR clone 123792 (TRAV1-2, TRAJ30)
CAVRPHGNRDDRIIF

SEQ ID NO: 247584 - protein, 13 aa, Homo sapiens
  CDR3 for beta chain variable domain of TCR clone 123792 (TRBV4-1, TRBJ2-7)
CASSQGQAYEQYF

SEQ ID NO: 247585 - protein, 13 aa, Homo sapiens
  CDR3 for alpha chain variable domain of TCR clone 123793 (TRAV12-3, TRAJ21)
CAPGPHNFNKFYF

SEQ ID NO: 247586 - protein, 13 aa, Homo sapiens
  CDR3 for beta chain variable domain of TCR clone 123793 (TRBV7-9, TRBJ1-2)
CASSLKQNYGYTF

SEQ ID NO: 247587 - protein, 15 aa, Homo sapiens
  CDR3 for alpha chain variable domain of TCR clone 123794 (TRAV13-1, TRAJ11)
CAASNRNSGYSTLTF

SEQ ID NO: 247588 - protein, 11 aa, Homo sapiens
  CDR3 for beta chain variable domain of TCR clone 123794 (TRBV20-1, TRBJ2-7)
CSARLSYEQYS

SEQ ID NO: 247589 - protein, 16 aa, Homo sapiens
  CDR3 for alpha chain variable domain of TCR clone 123795 (TRAV16, TRAJ57)
CAPYLITQGGSEKLVF

SEQ ID NO: 247590 - protein, 12 aa, Homo sapiens
  CDR3 for beta chain variable domain of TCR clone 123795 (TRBV7-9, TRBJ2-7)
CASSLEGYEQYF

SEQ ID NO: 247591 - protein, 13 aa, Homo sapiens
  CDR3 for alpha chain variable domain of TCR clone 123796 (TRAV17, TRAJ9)
CATDYTGGFKTIF

SEQ ID NO: 247592 - protein, 16 aa, Homo sapiens
  CDR3 for beta chain variable domain of TCR clone 123796 (TRBV7-7, TRBJ2-1)
CSSSLASGTSYNEQFF

SEQ ID NO: 247593 - protein, 14 aa, Homo sapiens
  CDR3 for alpha chain variable domain of TCR clone 123797 (TRAV8-4, TRAJ5)
CAVSTDTGRRALTF

SEQ ID NO: 247594 - protein, 15 aa, Homo sapiens
  CDR3 for beta chain variable domain of TCR clone 123797 (TRBV28, TRBJ2-3)
CAPTFRDWSTDTQYF

SEQ ID NO: 247595 - protein, 15 aa, Homo sapiens
  CDR3 for alpha chain variable domain of TCR clone 123798 (TRAV8-3, TRAJ11)
CAVGLLNSRYSTLTF

SEQ ID NO: 247596 - protein, 23 aa, Homo sapiens
  CDR3 for beta chain variable domain of TCR clone 123798 (TRBV7-9, TRBJ1-2)
EAQLEKSRLLSDRFSSGEDGYTF

SEQ ID NO: 247597 - protein, 11 aa, Homo sapiens
  CDR3 for alpha chain variable domain of TCR clone 123799 (TRAV12-3, TRAJ43)
CAMSVSNDMRF

SEQ ID NO: 247598 - protein, 14 aa, Homo sapiens
  CDR3 for beta chain variable domain of TCR clone 123799 (TRBV20-1, TRBJ1-1)
CSARDRQVPPGAFF

SEQ ID NO: 247599 - protein, 13 aa, Homo sapiens
  CDR3 for alpha chain variable domain of TCR clone 123800 (TRAV8-4, TRAJ30)
CAVSVNRDDNIIF

SEQ ID NO: 247600 - protein, 13 aa, Homo sapiens
  CDR3 for beta chain variable domain of TCR clone 123800 (TRBV2, TRBJ2-2)
CASRAWRTGELFF

SEQ ID NO: 247601 - protein, 13 aa, Homo sapiens
  CDR3 for alpha chain variable domain of TCR clone 123801 (TRAV21, TRAJ15)
CASPNQAGTALIF

SEQ ID NO: 247602 - protein, 15 aa, Homo sapiens
  CDR3 for beta chain variable domain of TCR clone 123801 (TRBV11-2, TRBJ2-1)
CASSLGPDSYNEQFF

SEQ ID NO: 247603 - protein, 14 aa, Homo sapiens
  CDR3 for alpha chain variable domain of TCR clone 123802 (TRAV1-2, TRAJ8)
CAVREDTGFQKLVF

SEQ ID NO: 247604 - protein, 15 aa, Homo sapiens
  CDR3 for beta chain variable domain of TCR clone 123802 (TRBV12-4, TRBJ2-5)
CASSPPTGLQEAQYF

SEQ ID NO: 247605 - protein, 14 aa, Homo sapiens
  CDR3 for alpha chain variable domain of TCR clone 123803 (TRAV17, TRAJ6)
CATDASGGSYLPTF

SEQ ID NO: 247606 - protein, 19 aa, Homo sapiens
  CDR3 for beta chain variable domain of TCR clone 123803 (TRBV4-3, TRBJ2-7)
CASSQEFIGWQVTPYEQYF

SEQ ID NO: 247607 - protein, 15 aa, Homo sapiens
  CDR3 for alpha chain variable domain of TCR clone 123804 (TRAV3, TRAJ5)
CAVRDRKTGRRALTF

SEQ ID NO: 247608 - protein, 15 aa, Homo sapiens
  CDR3 for beta chain variable domain of TCR clone 123804 (TRBV7-8, TRBJ2-1)
CAISLADSLYNEQFF

SEQ ID NO: 247609 - protein, 11 aa, Homo sapiens
  CDR3 for alpha chain variable domain of TCR clone 123805 (TRAV21, TRAJ34)
CAVTNTDKLIF

SEQ ID NO: 247610 - protein, 16 aa, Homo sapiens
  CDR3 for beta chain variable domain of TCR clone 123805 (TRBV28, TRBJ2-7)
CASSFPDRRLTYEQYF

SEQ ID NO: 247611 - protein, 14 aa, Homo sapiens
  CDR3 for alpha chain variable domain of TCR clone 123806 (TRAV8-4, TRAJ15)
CAVTIREAGTALIF

SEQ ID NO: 247612 - protein, 15 aa, Homo sapiens
  CDR3 for beta chain variable domain of TCR clone 123806 (TRBV10-3, TRBJ2-7)
CAISEKGGTSSTSGR

SEQ ID NO: 247613 - protein, 16 aa, Homo sapiens
  CDR3 for alpha chain variable domain of TCR clone 123807 (TRAV30, TRAJ24)
CGTEIVDADSWGKFQF

SEQ ID NO: 247614 - protein, 16 aa, Homo sapiens
  CDR3 for beta chain variable domain of TCR clone 123807 (TRBV20-1, TRBJ2-7)
CSASTSGRLSSYEQYF

SEQ ID NO: 247615 - protein, 14 aa, Homo sapiens
  CDR3 for alpha chain variable domain of TCR clone 123808 (TRAV16, TRAJ26)
CALSSANYGQDFVF

SEQ ID NO: 247616 - protein, 12 aa, Homo sapiens
  CDR3 for beta chain variable domain of TCR clone 123808 (TRBV6-5, TRBJ2-2)
CASRTGTGELFF

SEQ ID NO: 247617 - protein, 13 aa, Homo sapiens
  CDR3 for alpha chain variable domain of TCR clone 123809 (TRAV12-1, TRAJ21)
CVVTLYNFNKFYF

SEQ ID NO: 247618 - protein, 11 aa, Homo sapiens
  CDR3 for beta chain variable domain of TCR clone 123809 (TRBV29-1, TRBJ2-5)
CSEDRTGTQYF

SEQ ID NO: 247619 - protein, 15 aa, Homo sapiens
  CDR3 for alpha chain variable domain of TCR clone 123810 (TRAV8-3, TRAJ11)
CAVGLLNSGYSTLTF

SEQ ID NO: 247620 - protein, 14 aa, Homo sapiens
  CDR3 for beta chain variable domain of TCR clone 123810 (TRBV20-1, TRBJ2-7)
CSAKRGRSSYEQYF

SEQ ID NO: 247621 - protein, 14 aa, Homo sapiens
  CDR3 for alpha chain variable domain of TCR clone 123811 (TRAV12-2, TRAJ40)
CAVKIPSGTYKYIF

SEQ ID NO: 247622 - protein, 13 aa, Homo sapiens
  CDR3 for beta chain variable domain of TCR clone 123811 (TRBV7-3, TRBJ2-1)
CASSLDSYNEQFF

SEQ ID NO: 247623 - protein, 12 aa, Homo sapiens
  CDR3 for alpha chain variable domain of TCR clone 123812 (TRAV27, TRAJ35)
CAGADFGNVLHC

SEQ ID NO: 247624 - protein, 11 aa, Homo sapiens
  CDR3 for beta chain variable domain of TCR clone 123812 (TRBV29-1, TRBJ2-5)
CSEDRTGTQYF

SEQ ID NO: 247625 - protein, 15 aa, Homo sapiens
  CDR3 for alpha chain variable domain of TCR clone 123813 (TRAV2, TRAJ22)
CAVPPRGGSARQLTF

SEQ ID NO: 247626 - protein, 14 aa, Homo sapiens
  CDR3 for beta chain variable domain of TCR clone 123813 (TRBV7-6, TRBJ2-3)
CASSLGTVTDTQYF

SEQ ID NO: 247627 - protein, 13 aa, Homo sapiens
  CDR3 for alpha chain variable domain of TCR clone 123814 (TRAV29/DV5, TRAJ31)
CAASRNNNARLMF

SEQ ID NO: 247628 - protein, 13 aa, Homo sapiens
  CDR3 for beta chain variable domain of TCR clone 123814 (TRBV14, TRBJ2-7)
ISVPAAYKDEQYF

SEQ ID NO: 247629 - protein, 13 aa, Homo sapiens
  CDR3 for alpha chain variable domain of TCR clone 123815 (TRAV13-1, TRAJ39)
CSKYSNAGNMLTF

SEQ ID NO: 247630 - protein, 11 aa, Homo sapiens
  CDR3 for beta chain variable domain of TCR clone 123815 (TRBV10-2, TRBJ2-2)
CASSASTSRCR

SEQ ID NO: 247631 - protein, 12 aa, Homo sapiens
  CDR3 for alpha chain variable domain of TCR clone 123816 (TRAV3, TRAJ20)
CAVRDPDYKLSF

SEQ ID NO: 247632 - protein, 13 aa, Homo sapiens
  CDR3 for beta chain variable domain of TCR clone 123816 (TRBV7-2, TRBJ2-2)
CASSLAVTGELFF

SEQ ID NO: 247633 - protein, 16 aa, Homo sapiens
  CDR3 for alpha chain variable domain of TCR clone 123817 (TRAV30, TRAJ24)
CGTEIVDADSWGKFQF

SEQ ID NO: 247634 - protein, 13 aa, Homo sapiens
  CDR3 for beta chain variable domain of TCR clone 123817 (TRBV7-3, TRBJ1-1)
CDSSQDWGAEAFF

SEQ ID NO: 247635 - protein, 14 aa, Homo sapiens
  CDR3 for alpha chain variable domain of TCR clone 123818 (TRAV12-1, TRAJ17)
CVVTFKAAGNKLTF

SEQ ID NO: 247636 - protein, 17 aa, Homo sapiens
  CDR3 for beta chain variable domain of TCR clone 123818 (TRBV20-1, TRBJ2-1)
CSASASGLAGSYNEQFF

SEQ ID NO: 247637 - protein, 18 aa, Homo sapiens
  CDR3 for alpha chain variable domain of TCR clone 123819 (TRAV12-2, )
CAVEDIQNPDHAVYQLRD

SEQ ID NO: 247638 - protein, 16 aa, Homo sapiens
  CDR3 for beta chain variable domain of TCR clone 123819 (TRBV6-1, TRBJ1-2)
CASSGAWQGRSHGYTF

SEQ ID NO: 247639 - protein, 15 aa, Homo sapiens
  CDR3 for alpha chain variable domain of TCR clone 123820 (TRAV25, TRAJ52)
CAGRPGGTSYGKLTF

SEQ ID NO: 247640 - protein, 17 aa, Homo sapiens
  CDR3 for beta chain variable domain of TCR clone 123820 (TRBV7-8, TRBJ2-6)
CASSAGTGGAGANVLTY

SEQ ID NO: 247641 - protein, 18 aa, Homo sapiens
  CDR3 for alpha chain variable domain of TCR clone 123821 (TRAV12-3, TRAJ52)
CAMSVGGAGGTSYGKLTF

SEQ ID NO: 247642 - protein, 16 aa, Homo sapiens
  CDR3 for beta chain variable domain of TCR clone 123821 (TRBV4-2, TRBJ2-2)
CASSQDPSGREGELFF

SEQ ID NO: 247643 - protein, 14 aa, Homo sapiens
  CDR3 for alpha chain variable domain of TCR clone 123822 (TRAV12-1, TRAJ37)
CVVTGSSDTGKLIF

SEQ ID NO: 247644 - protein, 20 aa, Homo sapiens
  CDR3 for beta chain variable domain of TCR clone 123822 (TRBV23-1, TRBJ2-5)
CISAPAVPERVLLIQETQYF

SEQ ID NO: 247645 - protein, 12 aa, Homo sapiens
  CDR3 for alpha chain variable domain of TCR clone 123823 (TRAV3, TRAJ20)
CAVRDGDYKLSF

SEQ ID NO: 247646 - protein, 13 aa, Homo sapiens
  CDR3 for beta chain variable domain of TCR clone 123823 (TRBV10-3, TRBJ2-7)
YAISEKGGYEQYF

SEQ ID NO: 247647 - protein, 12 aa, Homo sapiens
  CDR3 for alpha chain variable domain of TCR clone 123824 (TRAV35, TRAJ30)
CAGQLADDKIIF

SEQ ID NO: 247648 - protein, 17 aa, Homo sapiens
  CDR3 for beta chain variable domain of TCR clone 123824 (TRBV4-2, TRBJ2-5)
CASSPGRRRNFQETQYF

SEQ ID NO: 247649 - protein, 13 aa, Homo sapiens
  CDR3 for alpha chain variable domain of TCR clone 123825 (TRAV8-4, TRAJ9)
CAVSDTGGFKTIF

SEQ ID NO: 247650 - protein, 13 aa, Homo sapiens
  CDR3 for beta chain variable domain of TCR clone 123825 (TRBV7-3, TRBJ1-1)
CASSQDWGAEAFF

SEQ ID NO: 247651 - protein, 15 aa, Homo sapiens
  CDR3 for alpha chain variable domain of TCR clone 123826 (TRAV3, TRAJ22)
CAVGDRGGSARQLTF

SEQ ID NO: 247652 - protein, 15 aa, Homo sapiens
  CDR3 for beta chain variable domain of TCR clone 123826 (TRBV10-3, TRBJ2-3)
CAISLTSGGTDTQYF

SEQ ID NO: 247653 - protein, 16 aa, Homo sapiens
  CDR3 for alpha chain variable domain of TCR clone 123827 (TRAV8-3, TRAJ10)
CAVGPILTGGVNKLTF

SEQ ID NO: 247654 - protein, 16 aa, Homo sapiens
  CDR3 for beta chain variable domain of TCR clone 123827 (TRBV7-2, TRBJ2-5)
CASSSKWLSGQETQYF

SEQ ID NO: 247655 - protein, 14 aa, Homo sapiens
  CDR3 for alpha chain variable domain of TCR clone 123828 (TRAV1-2, TRAJ16)
CAVNRFSDSQKLLF

SEQ ID NO: 247656 - protein, 14 aa, Homo sapiens
  CDR3 for beta chain variable domain of TCR clone 123828 (TRBV7-9, TRBJ2-3)
CASSLEDGTDTQYF

SEQ ID NO: 247657 - protein, 14 aa, Homo sapiens
  CDR3 for alpha chain variable domain of TCR clone 123829 (TRAV12-3, TRAJ12)
CAMSEVDSSYKLIF

SEQ ID NO: 247658 - protein, 12 aa, Homo sapiens
  CDR3 for beta chain variable domain of TCR clone 123829 (TRBV18, TRBJ1-4)
CASSPRREKLFF

SEQ ID NO: 247659 - protein, 14 aa, Homo sapiens
  CDR3 for alpha chain variable domain of TCR clone 123830 (TRAV8-3, TRAJ9)
CSVVYNTGGFKTIF

SEQ ID NO: 247660 - protein, 14 aa, Homo sapiens
  CDR3 for beta chain variable domain of TCR clone 123830 (TRBV7-3, TRBJ2-2)
CASSSGGYTGELFF

SEQ ID NO: 247661 - protein, 15 aa, Homo sapiens
  CDR3 for alpha chain variable domain of TCR clone 123831 (TRAV26-1, TRAJ29)
CIVRVEGSGNTPLVF

SEQ ID NO: 247662 - protein, 17 aa, Homo sapiens
  CDR3 for beta chain variable domain of TCR clone 123831 (TRBV10-3, TRBJ2-6)
CAISESTAPSGANVLTF

SEQ ID NO: 247663 - protein, 13 aa, Homo sapiens
  CDR3 for alpha chain variable domain of TCR clone 123832 (TRAV3, TRAJ21)
CAVREPDFNKFYF

SEQ ID NO: 247664 - protein, 16 aa, Homo sapiens
  CDR3 for beta chain variable domain of TCR clone 123832 (TRBV4-1, TRBJ2-3)
CASSQSTSGAEDTQYF

SEQ ID NO: 247665 - protein, 11 aa, Homo sapiens
  CDR3 for alpha chain variable domain of TCR clone 123833 (TRAV23/DV6, TRAJ58)
CSARLLRGETS

SEQ ID NO: 247666 - protein, 14 aa, Homo sapiens
  CDR3 for beta chain variable domain of TCR clone 123833 (TRBV7-3, TRBJ2-1)
CASSLAGGTNEQFF

SEQ ID NO: 247667 - protein, 16 aa, Homo sapiens
  CDR3 for alpha chain variable domain of TCR clone 123834 (TRAV12-2, TRAJ10)
CAVNRVLTGGGNKLTF

SEQ ID NO: 247668 - protein, 12 aa, Homo sapiens
  CDR3 for beta chain variable domain of TCR clone 123834 (TRBV28, TRBJ2-7)
CASSFSGYEQYF

SEQ ID NO: 247669 - protein, 14 aa, Homo sapiens
  CDR3 for alpha chain variable domain of TCR clone 123835 (TRAV8-2, TRAJ6)
CAVISAGGSYIPTF

SEQ ID NO: 247670 - protein, 16 aa, Homo sapiens
  CDR3 for beta chain variable domain of TCR clone 123835 (TRBV7-6, TRBJ2-6)
CASSLPGLSGANVLTF

SEQ ID NO: 247671 - protein, 13 aa, Homo sapiens
  CDR3 for alpha chain variable domain of TCR clone 123836 (TRAV3, TRAJ21)
CAVREPDFTKFYF

SEQ ID NO: 247672 - protein, 13 aa, Homo sapiens
  CDR3 for beta chain variable domain of TCR clone 123836 (TRBV9, TRBJ2-1)
CASSPSGGNEQFF

SEQ ID NO: 247673 - protein, 12 aa, Homo sapiens
  CDR3 for alpha chain variable domain of TCR clone 123837 (TRAV1-2, TRAJ33)
CAALDSNYQLIW

SEQ ID NO: 247674 - protein, 16 aa, Homo sapiens
  CDR3 for beta chain variable domain of TCR clone 123837 (TRBV12-5, TRBJ2-5)
CASGPRTSGNQETQYF

SEQ ID NO: 247675 - protein, 13 aa, Homo sapiens
  CDR3 for alpha chain variable domain of TCR clone 123838 (TRAV2, TRAJ15)
CAVASQAGTALLF

SEQ ID NO: 247676 - protein, 15 aa, Homo sapiens
  CDR3 for beta chain variable domain of TCR clone 123838 (TRBV20-1, TRBJ2-7)
CSARDRVSGMDEQYF

SEQ ID NO: 247677 - protein, 17 aa, Homo sapiens
  CDR3 for alpha chain variable domain of TCR clone 123839 (TRAV26-2, TRAJ42)
CILRDVGYGGSQGNLIL

SEQ ID NO: 247678 - protein, 16 aa, Homo sapiens
  CDR3 for beta chain variable domain of TCR clone 123839 (TRBV6-5, TRBJ2-1)
CASSETLAGHYNEQFF

SEQ ID NO: 247679 - protein, 13 aa, Homo sapiens
  CDR3 for alpha chain variable domain of TCR clone 123840 (TRAV13-2, TRAJ8)
CAFMNTGFQKLVF

SEQ ID NO: 247680 - protein, 13 aa, Homo sapiens
  CDR3 for beta chain variable domain of TCR clone 123840 (TRBV5-5, TRBJ1-2)
CASSFWRGEDYTF

SEQ ID NO: 247681 - protein, 12 aa, Homo sapiens
  CDR3 for alpha chain variable domain of TCR clone 123841 (TRAV12-2, TRAJ30)
CAVRNRDDKIIF

SEQ ID NO: 247682 - protein, 15 aa, Homo sapiens
  CDR3 for beta chain variable domain of TCR clone 123841 (TRBV6-3, TRBJ1-5)
CASRVDRWSNQTQHF

SEQ ID NO: 247683 - protein, 17 aa, Homo sapiens
  CDR3 for alpha chain variable domain of TCR clone 123842 (TRAV1-2, TRAJ8)
CAVRDPDENTGFQKLVF

SEQ ID NO: 247684 - protein, 14 aa, Homo sapiens
  CDR3 for beta chain variable domain of TCR clone 123842 (TRBV7-8, TRBJ1-2)
CASSPDSLSYGYTF

SEQ ID NO: 247685 - protein, 11 aa, Homo sapiens
  CDR3 for alpha chain variable domain of TCR clone 123843 (TRAV12-2, TRAJ29)
CAVTLRSPLVF

SEQ ID NO: 247686 - protein, 14 aa, Homo sapiens
  CDR3 for beta chain variable domain of TCR clone 123843 (TRBV19, TRBJ2-5)
CASSMTGQQETQYF

SEQ ID NO: 247687 - protein, 15 aa, Homo sapiens
  CDR3 for alpha chain variable domain of TCR clone 123844 (TRAV12-2, TRAJ57)
CAVSRGQGGSEKLVF

SEQ ID NO: 247688 - protein, 14 aa, Homo sapiens
  CDR3 for beta chain variable domain of TCR clone 123844 (TRBV20-1, TRBJ2-1)
CSAHPGLPYNEQLF

SEQ ID NO: 247689 - protein, 15 aa, Homo sapiens
  CDR3 for alpha chain variable domain of TCR clone 123845 (TRAV21, TRAJ57)
CAAIITQGGSEKLAF

SEQ ID NO: 247690 - protein, 14 aa, Homo sapiens
  CDR3 for beta chain variable domain of TCR clone 123845 (TRBV5-1, TRBJ2-2)
CASSLIWIPGELFF

SEQ ID NO: 247691 - protein, 15 aa, Homo sapiens
  CDR3 for alpha chain variable domain of TCR clone 123846 (TRAV17, TRAJ57)
CATGPSPGGSEKLVF

SEQ ID NO: 247692 - protein, 15 aa, Homo sapiens
  CDR3 for beta chain variable domain of TCR clone 123846 (TRBV7-9, TRBJ1-6)
CASSSPGRGNSPLHF

SEQ ID NO: 247693 - protein, 18 aa, Homo sapiens
  CDR3 for alpha chain variable domain of TCR clone 123847 (TRAV9-2, TRAJ54)
CQTQRCTSVLTTAQKLVF

SEQ ID NO: 247694 - protein, 16 aa, Homo sapiens
  CDR3 for beta chain variable domain of TCR clone 123847 (TRBV6-1, TRBJ2-1)
CASILRQGSSYNEQFF

SEQ ID NO: 247695 - protein, 18 aa, Homo sapiens
  CDR3 for alpha chain variable domain of TCR clone 123848 (TRAV3, TRAJ17)
CAVRARRGGRSCRQQANF

SEQ ID NO: 247696 - protein, 14 aa, Homo sapiens
  CDR3 for beta chain variable domain of TCR clone 123848 (TRBV23-1, TRBJ2-5)
CASSFLRSQETQYF

SEQ ID NO: 247697 - protein, 14 aa, Homo sapiens
  CDR3 for alpha chain variable domain of TCR clone 123849 (TRAV12-2, TRAJ40)
CAVKIPSGTYKYIF

SEQ ID NO: 247698 - protein, 13 aa, Homo sapiens
  CDR3 for beta chain variable domain of TCR clone 123849 (TRBV27, TRBJ1-4)
CASSLMGDEKLFF

SEQ ID NO: 247699 - protein, 12 aa, Homo sapiens
  CDR3 for alpha chain variable domain of TCR clone 123850 (TRAV27, TRAJ36)
ASTPAGVNNLFF

SEQ ID NO: 247700 - protein, 13 aa, Homo sapiens
  CDR3 for beta chain variable domain of TCR clone 123850 (TRBV7-9, TRBJ2-3)
CASSPGSTDTQYF

SEQ ID NO: 247701 - protein, 14 aa, Homo sapiens
  CDR3 for alpha chain variable domain of TCR clone 123851 (TRAV1-1, TRAJ23)
CAVSIYNQGGKLIF

SEQ ID NO: 247702 - protein, 20 aa, Homo sapiens
  CDR3 for beta chain variable domain of TCR clone 123851 (TRBV6-4, TRBJ2-7)
CASSNSSVSGQVPTSYEQYF

SEQ ID NO: 247703 - protein, 12 aa, Homo sapiens
  CDR3 for alpha chain variable domain of TCR clone 123852 (TRAV12-3, TRAJ13)
CNDLWGYQKVTF

SEQ ID NO: 247704 - protein, 13 aa, Homo sapiens
  CDR3 for beta chain variable domain of TCR clone 123852 (TRBV20-1, TRBJ2-2)
CSALSGGAGELFF

SEQ ID NO: 247705 - protein, 16 aa, Homo sapiens
  CDR3 for alpha chain variable domain of TCR clone 123853 (TRAV3, TRAJ37)
CAVRVRGSDNTGKLIF

SEQ ID NO: 247706 - protein, 11 aa, Homo sapiens
  CDR3 for beta chain variable domain of TCR clone 123853 (TRBV11-2, TRBJ2-2)
CASSLPGELFF

SEQ ID NO: 247707 - protein, 17 aa, Homo sapiens
  CDR3 for alpha chain variable domain of TCR clone 123854 (TRAV3, TRAJ6)
CAVRDGPRAGGSYIPTF

SEQ ID NO: 247708 - protein, 14 aa, Homo sapiens
  CDR3 for beta chain variable domain of TCR clone 123854 (TRBV7-9, TRBJ2-4)
CASSLAMGGNIQYF

SEQ ID NO: 247709 - protein, 12 aa, Homo sapiens
  CDR3 for alpha chain variable domain of TCR clone 123855 (TRAV13-1, TRAJ21)
CAAKEGFNKFYF

SEQ ID NO: 247710 - protein, 14 aa, Homo sapiens
  CDR3 for beta chain variable domain of TCR clone 123855 (TRBV20-1, TRBJ1-1)
CSAQTRIGGTEAFF

SEQ ID NO: 247711 - protein, 13 aa, Homo sapiens
  CDR3 for alpha chain variable domain of TCR clone 123856 (TRAV21, TRAJ27)
CAARPGNAGKSTF

SEQ ID NO: 247712 - protein, 11 aa, Homo sapiens
  CDR3 for beta chain variable domain of TCR clone 123856 (TRBV27, TRBJ2-5)
CATLAGETQYF

SEQ ID NO: 247713 - protein, 15 aa, Homo sapiens
  CDR3 for alpha chain variable domain of TCR clone 123857 (TRAV17, TRAJ23)
CATDAEDNQGGKLIF

SEQ ID NO: 247714 - protein, 14 aa, Homo sapiens
  CDR3 for beta chain variable domain of TCR clone 123857 (TRBV6-1, TRBJ1-3)
CASVQGGGGNTMYF

SEQ ID NO: 247715 - protein, 13 aa, Homo sapiens
  CDR3 for alpha chain variable domain of TCR clone 123858 (TRAV13-2, TRAJ48)
CAEMDFGNEKLTF

SEQ ID NO: 247716 - protein, 13 aa, Homo sapiens
  CDR3 for beta chain variable domain of TCR clone 123858 (TRBV27, TRBJ1-4)
CASSLMGDEKLFF

SEQ ID NO: 247717 - protein, 14 aa, Homo sapiens
  CDR3 for alpha chain variable domain of TCR clone 123859 (TRAV13-1, TRAJ40)
CAASMTSGTYKYIF

SEQ ID NO: 247718 - protein, 13 aa, Homo sapiens
  CDR3 for beta chain variable domain of TCR clone 123859 (TRBV4-1, TRBJ2-5)
CASSPEVQETQYF

SEQ ID NO: 247719 - protein, 13 aa, Homo sapiens
  CDR3 for alpha chain variable domain of TCR clone 123860 (TRAV8-4, TRAJ30)
CAVSVNRDDKIIF

SEQ ID NO: 247720 - protein, 16 aa, Homo sapiens
  CDR3 for beta chain variable domain of TCR clone 123860 (TRBV7-3, TRBJ2-2)
CASSLKRGTLSGELFF

SEQ ID NO: 247721 - protein, 12 aa, Homo sapiens
  CDR3 for alpha chain variable domain of TCR clone 123861 (TRAV12-3, TRAJ17)
CAMTLTGNKLTF

SEQ ID NO: 247722 - protein, 13 aa, Homo sapiens
  CDR3 for beta chain variable domain of TCR clone 123861 (TRBV14, TRBJ2-1)
CASSREGGTEQFF

SEQ ID NO: 247723 - protein, 15 aa, Homo sapiens
  CDR3 for alpha chain variable domain of TCR clone 123862 (TRAV8-3, TRAJ45)
CASSYSGGGADGLTF

SEQ ID NO: 247724 - protein, 13 aa, Homo sapiens
  CDR3 for beta chain variable domain of TCR clone 123862 (TRBV7-3, TRBJ1-2)
CASSLKRGYGYTF

SEQ ID NO: 247725 - protein, 13 aa, Homo sapiens
  CDR3 for alpha chain variable domain of TCR clone 123863 (TRAV2, TRAJ40)
CAVVTSGTYKYIF

SEQ ID NO: 247726 - protein, 16 aa, Homo sapiens
  CDR3 for beta chain variable domain of TCR clone 123863 (TRBV19, TRBJ2-2)
CASSFPGQGLAGELFF

SEQ ID NO: 247727 - protein, 13 aa, Homo sapiens
  CDR3 for alpha chain variable domain of TCR clone 123864 (TRAV12-2, TRAJ39)
CAVNTNAGNMLTF

SEQ ID NO: 247728 - protein, 13 aa, Homo sapiens
  CDR3 for beta chain variable domain of TCR clone 123864 (TRBV2, TRBJ1-5)
CATAGPGNQPQHF

SEQ ID NO: 247729 - protein, 13 aa, Homo sapiens
  CDR3 for alpha chain variable domain of TCR clone 123865 (TRAV1-2, TRAJ9)
CAALNTGGFKTIF

SEQ ID NO: 247730 - protein, 16 aa, Homo sapiens
  CDR3 for beta chain variable domain of TCR clone 123865 (TRBV7-3, TRBJ2-5)
CASIQPGGSVQETQYF

SEQ ID NO: 247731 - protein, 14 aa, Homo sapiens
  CDR3 for alpha chain variable domain of TCR clone 123866 (TRAV17, TRAJ8)
CATQSGTGFQKLVF

SEQ ID NO: 247732 - protein, 14 aa, Homo sapiens
  CDR3 for beta chain variable domain of TCR clone 123866 (TRBV18, TRBJ2-7)
CASSPRGGAYEQYF

SEQ ID NO: 247733 - protein, 13 aa, Homo sapiens
  CDR3 for alpha chain variable domain of TCR clone 123867 (TRAV16, TRAJ31)
CALSAHNNARLMF

SEQ ID NO: 247734 - protein, 17 aa, Homo sapiens
  CDR3 for beta chain variable domain of TCR clone 123867 (TRBV12-4, TRBJ2-1)
CASSPGLAGGRIKEQFF

SEQ ID NO: 247735 - protein, 14 aa, Homo sapiens
  CDR3 for alpha chain variable domain of TCR clone 123868 (TRAV30, TRAJ26)
CGTEIVSYGQNFVF

SEQ ID NO: 247736 - protein, 19 aa, Homo sapiens
  CDR3 for beta chain variable domain of TCR clone 123868 (TRBV19, TRBJ2-5)
CASSIGQVTDFFLGETQYF

SEQ ID NO: 247737 - protein, 15 aa, Homo sapiens
  CDR3 for alpha chain variable domain of TCR clone 123869 (TRAV3, TRAJ3)
CAVSDGHSSASKIIF

SEQ ID NO: 247738 - protein, 17 aa, Homo sapiens
  CDR3 for beta chain variable domain of TCR clone 123869 (TRBV25-1, TRBJ2-7)
CASSDARVVFSSYEQYF

SEQ ID NO: 247739 - protein, 14 aa, Homo sapiens
  CDR3 for alpha chain variable domain of TCR clone 123870 (TRAV12-3, TRAJ42)
CAMNYGGSQGNLIF

SEQ ID NO: 247740 - protein, 15 aa, Homo sapiens
  CDR3 for beta chain variable domain of TCR clone 123870 (TRBV5-7, TRBJ1-5)
CASSYGKLWDQPQQF

SEQ ID NO: 247741 - protein, 14 aa, Homo sapiens
  CDR3 for alpha chain variable domain of TCR clone 123871 (TRAV4, TRAJ23)
CLVGSYNQGGKLIF

SEQ ID NO: 247742 - protein, 14 aa, Homo sapiens
  CDR3 for beta chain variable domain of TCR clone 123871 (TRBV7-2, TRBJ2-7)
CASSPKTSFYEQYF

SEQ ID NO: 247743 - protein, 15 aa, Homo sapiens
  CDR3 for alpha chain variable domain of TCR clone 123872 (TRAV8-2, TRAJ24)
CVVSDRTDSWGKLQL

SEQ ID NO: 247744 - protein, 15 aa, Homo sapiens
  CDR3 for beta chain variable domain of TCR clone 123872 (TRBV29-1, TRBJ2-7)
CSVEFFDRGSYEQYF

SEQ ID NO: 247745 - protein, 16 aa, Homo sapiens
  CDR3 for alpha chain variable domain of TCR clone 123873 (TRAV3, TRAJ10)
CAVRDMRAGGGNKRTF

SEQ ID NO: 247746 - protein, 16 aa, Homo sapiens
  CDR3 for beta chain variable domain of TCR clone 123873 (TRBV20-1, TRBJ1-4)
CSAPGQGLLTNEKLFF

SEQ ID NO: 247747 - protein, 14 aa, Homo sapiens
  CDR3 for alpha chain variable domain of TCR clone 123874 (TRAV13-1, TRAJ13)
CAASRVGGYQQVTF

SEQ ID NO: 247748 - protein, 17 aa, Homo sapiens
  CDR3 for beta chain variable domain of TCR clone 123874 (TRBV15, TRBJ1-5)
CATSRAPPGTRNQPQHF

SEQ ID NO: 247749 - protein, 16 aa, Homo sapiens
  CDR3 for alpha chain variable domain of TCR clone 123875 (TRAV3, TRAJ37)
CAVRPYGSGNTGKLIF

SEQ ID NO: 247750 - protein, 16 aa, Homo sapiens
  CDR3 for beta chain variable domain of TCR clone 123875 (TRBV9, TRBJ1-2)
CASSVEEKVSPYGYTF

SEQ ID NO: 247751 - protein, 16 aa, Homo sapiens
  CDR3 for alpha chain variable domain of TCR clone 123876 (TRAV21, TRAJ33)
CAVSPASMDSNYQLIC

SEQ ID NO: 247752 - protein, 17 aa, Homo sapiens
  CDR3 for beta chain variable domain of TCR clone 123876 (TRBV2, TRBJ1-4)
CASSKRELTQGEEKLFF

SEQ ID NO: 247753 - protein, 15 aa, Homo sapiens
  CDR3 for alpha chain variable domain of TCR clone 123877 (TRAV13-1, TRAJ11)
CAASNRNSGYSTLTF

SEQ ID NO: 247754 - protein, 18 aa, Homo sapiens
  CDR3 for beta chain variable domain of TCR clone 123877 (TRBV6-6, TRBJ1-3)
CASSYSKWDSISGNTIYF

SEQ ID NO: 247755 - protein, 14 aa, Homo sapiens
  CDR3 for alpha chain variable domain of TCR clone 123878 (TRAV12-2, TRAJ17)
CAVLFKAAGNKLTF

SEQ ID NO: 247756 - protein, 14 aa, Homo sapiens
  CDR3 for beta chain variable domain of TCR clone 123878 (TRBV12-5, TRBJ2-5)
CASGSRTYQETQYF

SEQ ID NO: 247757 - protein, 12 aa, Homo sapiens
  CDR3 for alpha chain variable domain of TCR clone 123879 (TRAV2, TRAJ31)
CAVEDNNARLMF

SEQ ID NO: 247758 - protein, 16 aa, Homo sapiens
  CDR3 for beta chain variable domain of TCR clone 123879 (TRBV20-1, TRBJ1-2)
CSASMGQGVANYGYTF

SEQ ID NO: 247759 - protein, 13 aa, Homo sapiens
  CDR3 for alpha chain variable domain of TCR clone 123880 (TRAV35, TRAJ42)
CAGFPGSQGNLIF

SEQ ID NO: 247760 - protein, 13 aa, Homo sapiens
  CDR3 for beta chain variable domain of TCR clone 123880 (TRBV5-1, TRBJ2-1)
CASRPFGYNEQFF

SEQ ID NO: 247761 - protein, 11 aa, Homo sapiens
  CDR3 for alpha chain variable domain of TCR clone 123881 (TRAV8-1, TRAJ8)
CAMTGFQKLVF

SEQ ID NO: 247762 - protein, 13 aa, Homo sapiens
  CDR3 for beta chain variable domain of TCR clone 123881 (TRBV7-8, TRBJ2-7)
CASSFAGLYEQYF

SEQ ID NO: 247763 - protein, 13 aa, Homo sapiens
  CDR3 for alpha chain variable domain of TCR clone 123882 (TRAV21, TRAJ26)
CAVLDNYGQNFVF

SEQ ID NO: 247764 - protein, 13 aa, Homo sapiens
  CDR3 for beta chain variable domain of TCR clone 123882 (TRBV7-9, TRBJ1-2)
CASSLKQNYGYTF

SEQ ID NO: 247765 - protein, 14 aa, Homo sapiens
  CDR3 for alpha chain variable domain of TCR clone 123883 (TRAV8-3, TRAJ4)
CAVGAAGGYNKLIF

SEQ ID NO: 247766 - protein, 14 aa, Homo sapiens
  CDR3 for beta chain variable domain of TCR clone 123883 (TRBV7-7, TRBJ2-7)
CASSLGRGVGEQYF

SEQ ID NO: 247767 - protein, 14 aa, Homo sapiens
  CDR3 for alpha chain variable domain of TCR clone 123884 (TRAV8-4, TRAJ4)
CAVSPSGGYNKLIF

SEQ ID NO: 247768 - protein, 18 aa, Homo sapiens
  CDR3 for beta chain variable domain of TCR clone 123884 (TRBV28, TRBJ2-1)
CASSSTSGRANSYNEQFF

SEQ ID NO: 247769 - protein, 14 aa, Homo sapiens
  CDR3 for alpha chain variable domain of TCR clone 123885 (TRAV8-3, TRAJ4)
CAVGAADGYNKLIF

SEQ ID NO: 247770 - protein, 15 aa, Homo sapiens
  CDR3 for beta chain variable domain of TCR clone 123885 (TRBV6-5, TRBJ2-1)
CASSYDAGAGNEQFF

SEQ ID NO: 247771 - protein, 14 aa, Homo sapiens
  CDR3 for alpha chain variable domain of TCR clone 123886 (TRAV12-2, TRAJ40)
CAVKTPSGTYKCIF

SEQ ID NO: 247772 - protein, 14 aa, Homo sapiens
  CDR3 for beta chain variable domain of TCR clone 123886 (TRBV20-1, TRBJ1-1)
CSAQTRIGGTEAFF

SEQ ID NO: 247773 - protein, 12 aa, Homo sapiens
  CDR3 for alpha chain variable domain of TCR clone 123887 (TRAV12-3, TRAJ42)
CAPGGSQGNLIF

SEQ ID NO: 247774 - protein, 14 aa, Homo sapiens
  CDR3 for beta chain variable domain of TCR clone 123887 (TRBV19, TRBJ2-1)
CASPTFVLSGEQFF

SEQ ID NO: 247775 - protein, 18 aa, Homo sapiens
  CDR3 for alpha chain variable domain of TCR clone 123888 (TRAV9-2, TRAJ52)
CALSRHNAGGTSYGKLTF

SEQ ID NO: 247776 - protein, 15 aa, Homo sapiens
  CDR3 for beta chain variable domain of TCR clone 123888 (TRBV27, TRBJ2-7)
CASSPQREGQREQYF

SEQ ID NO: 247777 - protein, 13 aa, Homo sapiens
  CDR3 for alpha chain variable domain of TCR clone 123889 (TRAV13-2, TRAJ48)
CAEMHFGNEKLTF

SEQ ID NO: 247778 - protein, 15 aa, Homo sapiens
  CDR3 for beta chain variable domain of TCR clone 123889 (TRBV7-9, TRBJ1-6)
CASSSPGRGNSPLHF

SEQ ID NO: 247779 - protein, 16 aa, Homo sapiens
  CDR3 for alpha chain variable domain of TCR clone 123890 (TRAV30, TRAJ24)
CGTEIVDADSWGKFQF

SEQ ID NO: 247780 - protein, 14 aa, Homo sapiens
  CDR3 for beta chain variable domain of TCR clone 123890 (TRBV7-2, TRBJ1-1)
CASSFVTGTTEAFF

SEQ ID NO: 247781 - protein, 15 aa, Homo sapiens
  CDR3 for alpha chain variable domain of TCR clone 123891 (TRAV16, TRAJ17)
CALSQIKAAGNKLTF

SEQ ID NO: 247782 - protein, 12 aa, Homo sapiens
  CDR3 for beta chain variable domain of TCR clone 123891 (TRBV11-2, TRBJ2-2)
CASSLGGGELFF

SEQ ID NO: 247783 - protein, 12 aa, Homo sapiens
  CDR3 for alpha chain variable domain of TCR clone 123892 (TRAV29/DV5, TRAJ49)
CAATDTGNQFYF

SEQ ID NO: 247784 - protein, 15 aa, Homo sapiens
  CDR3 for beta chain variable domain of TCR clone 123892 (TRBV7-3, TRBJ2-2)
CASSETGQGTGELFF

SEQ ID NO: 247785 - protein, 15 aa, Homo sapiens
  CDR3 for alpha chain variable domain of TCR clone 123893 (TRAV26-1, TRAJ29)
CIVRVEGSGNTPLVF

SEQ ID NO: 247786 - protein, 14 aa, Homo sapiens
  CDR3 for beta chain variable domain of TCR clone 123893 (TRBV28, TRBJ2-7)
CASSGLAEPAEQYF

SEQ ID NO: 247787 - protein, 16 aa, Homo sapiens
  CDR3 for alpha chain variable domain of TCR clone 123894 (TRAV3, TRAJ10)
CAVRDMRAGGGNKLTF

SEQ ID NO: 247788 - protein, 17 aa, Homo sapiens
  CDR3 for beta chain variable domain of TCR clone 123894 (TRBV28, TRBJ2-5)
FASSTPEGDALQETQYF

SEQ ID NO: 247789 - protein, 15 aa, Homo sapiens
  CDR3 for alpha chain variable domain of TCR clone 123895 (TRAV8-3, TRAJ45)
RASSYSGGGADGLPF

SEQ ID NO: 247790 - protein, 13 aa, Homo sapiens
  CDR3 for beta chain variable domain of TCR clone 123895 (TRBV10-3, TRBJ2-7)
CASKLAVNYEQYF

SEQ ID NO: 247791 - protein, 15 aa, Homo sapiens
  CDR3 for alpha chain variable domain of TCR clone 123896 (TRAV21, TRAJ53)
CATLNSGGSNYKLTF

SEQ ID NO: 247792 - protein, 16 aa, Homo sapiens
  CDR3 for beta chain variable domain of TCR clone 123896 (TRBV20-1, TRBJ1-2)
CSASMGQGVANYGYAF

SEQ ID NO: 247793 - protein, 11 aa, Homo sapiens
  CDR3 for alpha chain variable domain of TCR clone 123897 (TRAV3, TRAJ21)
CAVGNFNKFYF

SEQ ID NO: 247794 - protein, 15 aa, Homo sapiens
  CDR3 for beta chain variable domain of TCR clone 123897 (TRBV3-1, TRBJ2-7)
CASSQVRQGAYEQYF

SEQ ID NO: 247795 - protein, 13 aa, Homo sapiens
  CDR3 for alpha chain variable domain of TCR clone 123898 (TRAV16, TRAJ31)
CALSAHNNARLMF

SEQ ID NO: 247796 - protein, 17 aa, Homo sapiens
  CDR3 for beta chain variable domain of TCR clone 123898 (TRBV12-4, TRBJ2-1)
CASSPGLAGVRINEQFF

SEQ ID NO: 247797 - protein, 17 aa, Homo sapiens
  CDR3 for alpha chain variable domain of TCR clone 123899 (TRAV4, TRAJ13)
CLVGVQGSSGGYQKVTF

SEQ ID NO: 247798 - protein, 18 aa, Homo sapiens
  CDR3 for beta chain variable domain of TCR clone 123899 (TRBV15, TRBJ2-3)
RATSRDGARSWDTDTQYF

SEQ ID NO: 247799 - protein, 16 aa, Homo sapiens
  CDR3 for alpha chain variable domain of TCR clone 123900 (TRAV22, TRAJ45)
CAVERGKRGGADGLTF

SEQ ID NO: 247800 - protein, 14 aa, Homo sapiens
  CDR3 for beta chain variable domain of TCR clone 123900 (TRBV11-2, TRBJ2-3)
CASSRLARTDTQYF

SEQ ID NO: 247801 - protein, 14 aa, Homo sapiens
  CDR3 for alpha chain variable domain of TCR clone 123901 (TRAV12-2, TRAJ17)
CAVLFKAAGNKLTF

SEQ ID NO: 247802 - protein, 17 aa, Homo sapiens
  CDR3 for beta chain variable domain of TCR clone 123901 (TRBV15, TRBJ1-4)
CATSRYGTGDPNEKLFF

SEQ ID NO: 247803 - protein, 14 aa, Homo sapiens
  CDR3 for alpha chain variable domain of TCR clone 123902 (TRAV12-3, TRAJ10)
SHLPLTGGGNKLTF

SEQ ID NO: 247804 - protein, 18 aa, Homo sapiens
  CDR3 for beta chain variable domain of TCR clone 123902 (TRBV11-2, TRBJ2-7)
CASSWRTVQTGQSYEQYF

SEQ ID NO: 247805 - protein, 17 aa, Homo sapiens
  CDR3 for alpha chain variable domain of TCR clone 123903 (TRAV8-1, TRAJ43)
CAVTNDMRFGAGTRLTV

SEQ ID NO: 247806 - protein, 17 aa, Homo sapiens
  CDR3 for beta chain variable domain of TCR clone 123903 (TRBV5-4, TRBJ2-1)
CASSSAGGRGPYNEQFF

SEQ ID NO: 247807 - protein, 16 aa, Homo sapiens
  CDR3 for alpha chain variable domain of TCR clone 123904 (TRAV3, TRAJ37)
CAVRPHGSGTTGKLIF

SEQ ID NO: 247808 - protein, 14 aa, Homo sapiens
  CDR3 for beta chain variable domain of TCR clone 123904 (TRBV2, TRBJ2-1)
CASSDRAYYNEQFF

SEQ ID NO: 247809 - protein, 18 aa, Homo sapiens
  CDR3 for alpha chain variable domain of TCR clone 123905 (TRAV3, TRAJ4)
CAVRPSPSGGYNKLILEQ

SEQ ID NO: 247810 - protein, 12 aa, Homo sapiens
  CDR3 for beta chain variable domain of TCR clone 123905 (TRBV7-9, TRBJ2-7)
CASSQGVYEQYF

SEQ ID NO: 247811 - protein, 15 aa, Homo sapiens
  CDR3 for alpha chain variable domain of TCR clone 123906 (TRAV26-1, TRAJ23)
CIVRVLNNQGGKLIF

SEQ ID NO: 247812 - protein, 15 aa, Homo sapiens
  CDR3 for beta chain variable domain of TCR clone 123906 (TRBV7-4, TRBJ1-2)
CQQPLTGGLSYGYTF

SEQ ID NO: 247813 - protein, 12 aa, Homo sapiens
  CDR3 for alpha chain variable domain of TCR clone 123907 (TRAV26-1, TRAJ36)
CIVRVRADNLFF

SEQ ID NO: 247814 - protein, 13 aa, Homo sapiens
  CDR3 for beta chain variable domain of TCR clone 123907 (TRBV11-2, TRBJ2-5)
CASSRGPSETQYV

SEQ ID NO: 247815 - protein, 11 aa, Homo sapiens
  CDR3 for alpha chain variable domain of TCR clone 123908 (TRAV3, TRAJ21)
CAVGNFSKFYF

SEQ ID NO: 247816 - protein, 13 aa, Homo sapiens
  CDR3 for beta chain variable domain of TCR clone 123908 (TRBV7-9, TRBJ1-2)
CASSLKQNYGYTF

SEQ ID NO: 247817 - protein, 14 aa, Homo sapiens
  CDR3 for alpha chain variable domain of TCR clone 123909 (TRAV38-1, TRAJ30)
CAFMPMNRDDNIIF

SEQ ID NO: 247818 - protein, 15 aa, Homo sapiens
  CDR3 for beta chain variable domain of TCR clone 123909 (TRBV7-9, TRBJ2-7)
CASSLDLQGPYEQYF

SEQ ID NO: 247819 - protein, 14 aa, Homo sapiens
  CDR3 for alpha chain variable domain of TCR clone 123910 (TRAV8-1, TRAJ24)
CAVNAADSWGKLQF

SEQ ID NO: 247820 - protein, 16 aa, Homo sapiens
  CDR3 for beta chain variable domain of TCR clone 123910 (TRBV20-1, TRBJ1-2)
CSASMGQGVANYGYTF

SEQ ID NO: 247821 - protein, 14 aa, Homo sapiens
  CDR3 for alpha chain variable domain of TCR clone 123911 (TRAV12-2, TRAJ24)
CAVTPADSWGKLQF

SEQ ID NO: 247822 - protein, 15 aa, Homo sapiens
  CDR3 for beta chain variable domain of TCR clone 123911 (TRBV27, TRBJ2-1)
CASSNGGGPPMSSSS

SEQ ID NO: 247823 - protein, 15 aa, Homo sapiens
  CDR3 for alpha chain variable domain of TCR clone 123912 (TRAV26-1, TRAJ23)
CIVRVAGYQGGKLIF

SEQ ID NO: 247824 - protein, 18 aa, Homo sapiens
  CDR3 for beta chain variable domain of TCR clone 123912 (TRBV28, TRBJ2-1)
CASSSASGRANSYNEQFF

SEQ ID NO: 247825 - protein, 12 aa, Homo sapiens
  CDR3 for alpha chain variable domain of TCR clone 123913 (TRAV12-1, TRAJ40)
CVAYSGTYKYIF

SEQ ID NO: 247826 - protein, 15 aa, Homo sapiens
  CDR3 for beta chain variable domain of TCR clone 123913 (TRBV7-9, TRBJ1-6)
CASSSPGRGNSPLHF

SEQ ID NO: 247827 - protein, 11 aa, Homo sapiens
  CDR3 for alpha chain variable domain of TCR clone 123914 (TRAV12-1, TRAJ43)
CVEYDNNDMRF

SEQ ID NO: 247828 - protein, 13 aa, Homo sapiens
  CDR3 for beta chain variable domain of TCR clone 123914 (TRBV12-4, TRBJ1-1)
CASSPGTGFEAFF

SEQ ID NO: 247829 - protein, 17 aa, Homo sapiens
  CDR3 for alpha chain variable domain of TCR clone 123915 (TRAV3, TRAJ6)
CAVRDGPRAGGSYIPTS

SEQ ID NO: 247830 - protein, 16 aa, Homo sapiens
  CDR3 for beta chain variable domain of TCR clone 123915 (TRBV4-1, TRBJ2-7)
CASSLTAGQATYEQYF

SEQ ID NO: 247831 - protein, 16 aa, Homo sapiens
  CDR3 for alpha chain variable domain of TCR clone 123916 (TRAV1-2, TRAJ10)
CAVRGVLTGGGNKLTF

SEQ ID NO: 247832 - protein, 12 aa, Homo sapiens
  CDR3 for beta chain variable domain of TCR clone 123916 (TRBV7-9, TRBJ2-7)
CASSIKREEQYF

SEQ ID NO: 247833 - protein, 13 aa, Homo sapiens
  CDR3 for alpha chain variable domain of TCR clone 123917 (TRAV12-2, TRAJ15)
CAVFNQAGTALIF

SEQ ID NO: 247834 - protein, 10 aa, Homo sapiens
  CDR3 for beta chain variable domain of TCR clone 123917 (TRBV7-8, TRBJ1-5)
CASSRGGALI

SEQ ID NO: 247835 - protein, 12 aa, Homo sapiens
  CDR3 for alpha chain variable domain of TCR clone 123918 (TRAV12-2, TRAJ43)
CAVNVNNNDMRF

SEQ ID NO: 247836 - protein, 19 aa, Homo sapiens
  CDR3 for beta chain variable domain of TCR clone 123918 (TRBV25-1, TRBJ2-2)
CAILVYRVDRGRKTGELFF

SEQ ID NO: 247837 - protein, 15 aa, Homo sapiens
  CDR3 for alpha chain variable domain of TCR clone 123919 (TRAV25, TRAJ52)
CAGTSGGTSYGKLTF

SEQ ID NO: 247838 - protein, 16 aa, Homo sapiens
  CDR3 for beta chain variable domain of TCR clone 123919 (TRBV15, TRBJ1-2)
CATSRGPRTGDGGYTF

SEQ ID NO: 247839 - protein, 15 aa, Homo sapiens
  CDR3 for alpha chain variable domain of TCR clone 123920 (TRAV12-2, TRAJ53)
CAVNGGGGSNYKLTF

SEQ ID NO: 247840 - protein, 14 aa, Homo sapiens
  CDR3 for beta chain variable domain of TCR clone 123920 (TRBV19, TRBJ2-2)
CASSTLHRSGEPFF

SEQ ID NO: 247841 - protein, 13 aa, Homo sapiens
  CDR3 for alpha chain variable domain of TCR clone 123921 (TRAV12-1, TRAJ53)
CVVNAESNYKLTF

SEQ ID NO: 247842 - protein, 14 aa, Homo sapiens
  CDR3 for beta chain variable domain of TCR clone 123921 (TRBV6-1, TRBJ1-3)
CASVQGGGGNTIYF

SEQ ID NO: 247843 - protein, 12 aa, Homo sapiens
  CDR3 for alpha chain variable domain of TCR clone 123922 (TRAV12-3, TRAJ17)
CAMTLTGNKLTF

SEQ ID NO: 247844 - protein, 13 aa, Homo sapiens
  CDR3 for beta chain variable domain of TCR clone 123922 (TRBV7-3, TRBJ2-1)
CASSLDSYNEQFF

SEQ ID NO: 247845 - protein, 14 aa, Homo sapiens
  CDR3 for alpha chain variable domain of TCR clone 123923 (TRAV38-1, TRAJ45)
CASHSGGGDDGLTF

SEQ ID NO: 247846 - protein, 13 aa, Homo sapiens
  CDR3 for beta chain variable domain of TCR clone 123923 (TRBV10-3, TRBJ1-2)
CAISERDSYGYTF

SEQ ID NO: 247847 - protein, 14 aa, Homo sapiens
  CDR3 for alpha chain variable domain of TCR clone 123924 (TRAV26-1, TRAJ26)
CIVRATFLGQNFVF

SEQ ID NO: 247848 - protein, 13 aa, Homo sapiens
  CDR3 for beta chain variable domain of TCR clone 123924 (TRBV19, TRBJ1-2)
CASSVPGQDGYTF

SEQ ID NO: 247849 - protein, 13 aa, Homo sapiens
  CDR3 for alpha chain variable domain of TCR clone 123925 (TRAV8-3, TRAJ47)
CAVSMEYGNKLVF

SEQ ID NO: 247850 - protein, 17 aa, Homo sapiens
  CDR3 for beta chain variable domain of TCR clone 123925 (TRBV20-1, TRBJ2-2)
CSASGSGQGGLTGELFF

SEQ ID NO: 247851 - protein, 16 aa, Homo sapiens
  CDR3 for alpha chain variable domain of TCR clone 123926 (TRAV4, TRAJ22)
CLVSDLYSGSARQLTF

SEQ ID NO: 247852 - protein, 16 aa, Homo sapiens
  CDR3 for beta chain variable domain of TCR clone 123926 (TRBV7-9, TRBJ2-1)
CASSDVAGGSYNEQFF

SEQ ID NO: 247853 - protein, 14 aa, Homo sapiens
  CDR3 for alpha chain variable domain of TCR clone 123927 (TRAV26-1, TRAJ40)
CIIRVARGTYKYIF

SEQ ID NO: 247854 - protein, 14 aa, Homo sapiens
  CDR3 for beta chain variable domain of TCR clone 123927 (TRBV25-1, TRBJ1-1)
CASTHLGGNTEAFF

SEQ ID NO: 247855 - protein, 14 aa, Homo sapiens
  CDR3 for alpha chain variable domain of TCR clone 123928 (TRAV14/DV4, TRAJ49)
CAFNRYLTGNQFYF

SEQ ID NO: 247856 - protein, 16 aa, Homo sapiens
  CDR3 for beta chain variable domain of TCR clone 123928 (TRBV7-3, TRBJ2-2)
CASSLKRGTLSGELFF

SEQ ID NO: 247857 - protein, 14 aa, Homo sapiens
  CDR3 for alpha chain variable domain of TCR clone 123929 (TRAV12-3, TRAJ10)
SHLPLTGGGNKLTF

SEQ ID NO: 247858 - protein, 14 aa, Homo sapiens
  CDR3 for beta chain variable domain of TCR clone 123929 (TRBV6-1, TRBJ1-3)
CASVQGGGVNTIYF

SEQ ID NO: 247859 - protein, 12 aa, Homo sapiens
  CDR3 for alpha chain variable domain of TCR clone 123930 (TRAV12-2, TRAJ21)
CAVNRNFDKFYF

SEQ ID NO: 247860 - protein, 14 aa, Homo sapiens
  CDR3 for beta chain variable domain of TCR clone 123930 (TRBV12-4, TRBJ2-3)
CASSLSGATDTQYF

SEQ ID NO: 247861 - protein, 12 aa, Homo sapiens
  CDR3 for alpha chain variable domain of TCR clone 123931 (TRAV12-2, TRAJ49)
CAVTTPGNQFYF

SEQ ID NO: 247862 - protein, 14 aa, Homo sapiens
  CDR3 for beta chain variable domain of TCR clone 123931 (TRBV12-5, TRBJ2-5)
CASGSRTHQETQYF

SEQ ID NO: 247863 - protein, 15 aa, Homo sapiens
  CDR3 for alpha chain variable domain of TCR clone 123932 (TRAV25, TRAJ53)
CPTSNSGGSNYKLTF

SEQ ID NO: 247864 - protein, 14 aa, Homo sapiens
  CDR3 for beta chain variable domain of TCR clone 123932 (TRBV11-2, TRBJ2-3)
CASSRLARTDTKYF

SEQ ID NO: 247865 - protein, 14 aa, Homo sapiens
  CDR3 for alpha chain variable domain of TCR clone 123933 (TRAV16, TRAJ17)
CALSGRAAGNKLTF

SEQ ID NO: 247866 - protein, 15 aa, Homo sapiens
  CDR3 for beta chain variable domain of TCR clone 123933 (TRBV3-1, TRBJ1-2)
CASSPTRLPEGGYIF

SEQ ID NO: 247867 - protein, 13 aa, Homo sapiens
  CDR3 for alpha chain variable domain of TCR clone 123934 (TRAV1-1, TRAJ9)
CAAKNTGGFKTIF

SEQ ID NO: 247868 - protein, 20 aa, Homo sapiens
  CDR3 for beta chain variable domain of TCR clone 123934 (TRBV28, TRBJ2-1)
CASTPIGRSPGLAGGNEQFF

SEQ ID NO: 247869 - protein, 14 aa, Homo sapiens
  CDR3 for alpha chain variable domain of TCR clone 123935 (TRAV13-1, TRAJ35)
CAASKGGFGHVLHC

SEQ ID NO: 247870 - protein, 13 aa, Homo sapiens
  CDR3 for beta chain variable domain of TCR clone 123935 (TRBV7-3, TRBJ1-1)
CASSQDWGAEAFF

SEQ ID NO: 247871 - protein, 10 aa, Homo sapiens
  CDR3 for alpha chain variable domain of TCR clone 123936 (TRAV12-3, TRAJ18)
CAMSAEAQPW

SEQ ID NO: 247872 - protein, 13 aa, Homo sapiens
  CDR3 for beta chain variable domain of TCR clone 123936 (TRBV15, TRBJ1-6)
CATSGGLDSPLHF

SEQ ID NO: 247873 - protein, 15 aa, Homo sapiens
  CDR3 for alpha chain variable domain of TCR clone 123937 (TRAV1-1, TRAJ24)
CALSGGTDSWGKFHF

SEQ ID NO: 247874 - protein, 16 aa, Homo sapiens
  CDR3 for beta chain variable domain of TCR clone 123937 (TRBV2, TRBJ2-7)
CASSEPWTGPSYEQYF

SEQ ID NO: 247875 - protein, 15 aa, Homo sapiens
  CDR3 for alpha chain variable domain of TCR clone 123938 (TRAV25, TRAJ53)
CAATGGGGSNYKLTF

SEQ ID NO: 247876 - protein, 15 aa, Homo sapiens
  CDR3 for beta chain variable domain of TCR clone 123938 (TRBV6-3, TRBJ2-7)
CASSSPGTVFYEQYF

SEQ ID NO: 247877 - protein, 13 aa, Homo sapiens
  CDR3 for alpha chain variable domain of TCR clone 123939 (TRAV12-1, TRAJ16)
CVVNGPDGPKLLF

SEQ ID NO: 247878 - protein, 13 aa, Homo sapiens
  CDR3 for beta chain variable domain of TCR clone 123939 (TRBV2, TRBJ1-1)
CARNPTGGFHAFF

SEQ ID NO: 247879 - protein, 13 aa, Homo sapiens
  CDR3 for alpha chain variable domain of TCR clone 123940 (TRAV17, TRAJ26)
CATVDNYGQNFVF

SEQ ID NO: 247880 - protein, 13 aa, Homo sapiens
  CDR3 for beta chain variable domain of TCR clone 123940 (TRBV4-2, TRBJ1-1)
CASSQAGNTEAFF

SEQ ID NO: 247881 - protein, 14 aa, Homo sapiens
  CDR3 for alpha chain variable domain of TCR clone 123941 (TRAV1-2, TRAJ16)
CAVNRFSDGKKLLF

SEQ ID NO: 247882 - protein, 14 aa, Homo sapiens
  CDR3 for beta chain variable domain of TCR clone 123941 (TRBV12-5, TRBJ2-5)
CASGSRTHQETQYF

SEQ ID NO: 247883 - protein, 14 aa, Homo sapiens
  CDR3 for alpha chain variable domain of TCR clone 123942 (TRAV1-2, TRAJ16)
CAVNRFSDGQKLLF

SEQ ID NO: 247884 - protein, 12 aa, Homo sapiens
  CDR3 for beta chain variable domain of TCR clone 123942 (TRBV24-1, TRBJ2-7)
CATSDPGYEQYF

SEQ ID NO: 247885 - protein, 12 aa, Homo sapiens
  CDR3 for alpha chain variable domain of TCR clone 123943 (TRAV16, TRAJ10)
CSRTGGGNKLTF

SEQ ID NO: 247886 - protein, 14 aa, Homo sapiens
  CDR3 for beta chain variable domain of TCR clone 123943 (TRBV11-2, TRBJ2-1)
CASTTGQGNNEQFF

SEQ ID NO: 247887 - protein, 15 aa, Homo sapiens
  CDR3 for alpha chain variable domain of TCR clone 123944 (TRAV2, TRAJ15)
RAVEDREQAGTALIF

SEQ ID NO: 247888 - protein, 13 aa, Homo sapiens
  CDR3 for beta chain variable domain of TCR clone 123944 (TRBV10-2, TRBJ2-7)
CASGTSGGYEQYF

SEQ ID NO: 247889 - protein, 18 aa, Homo sapiens
  CDR3 for alpha chain variable domain of TCR clone 123945 (TRAV26-2, TRAJ45)
CILRVDKYSGGGADGPTF

SEQ ID NO: 247890 - protein, 14 aa, Homo sapiens
  CDR3 for beta chain variable domain of TCR clone 123945 (TRBV7-2, TRBJ2-7)
CASRSQGAAYEQYF

SEQ ID NO: 247891 - protein, 13 aa, Homo sapiens
  CDR3 for alpha chain variable domain of TCR clone 123946 (TRAV27, TRAJ40)
CAGENSGTYKYIF

SEQ ID NO: 247892 - protein, 14 aa, Homo sapiens
  CDR3 for beta chain variable domain of TCR clone 123946 (TRBV19, TRBJ2-1)
CASPTFVLSGEQFF

SEQ ID NO: 247893 - protein, 15 aa, Homo sapiens
  CDR3 for alpha chain variable domain of TCR clone 123947 (TRAV17, TRAJ56)
CATEPFTGANSKLTF

SEQ ID NO: 247894 - protein, 15 aa, Homo sapiens
  CDR3 for beta chain variable domain of TCR clone 123947 (TRBV28, TRBJ1-5)
CASSRTGGYVQAQHF

SEQ ID NO: 247895 - protein, 14 aa, Homo sapiens
  CDR3 for alpha chain variable domain of TCR clone 123948 (TRAV12-2, TRAJ17)
CAVLFKAAGNELTF

SEQ ID NO: 247896 - protein, 13 aa, Homo sapiens
  CDR3 for beta chain variable domain of TCR clone 123948 (TRBV19, TRBJ1-2)
CASSQGQVYGYTF

SEQ ID NO: 247897 - protein, 15 aa, Homo sapiens
  CDR3 for alpha chain variable domain of TCR clone 123949 (TRAV2, TRAJ9)
CAVEDRGTGGFKTIF

SEQ ID NO: 247898 - protein, 13 aa, Homo sapiens
  CDR3 for beta chain variable domain of TCR clone 123949 (TRBV7-2, TRBJ1-4)
CASSLAGLEKLFF

SEQ ID NO: 247899 - protein, 16 aa, Homo sapiens
  CDR3 for alpha chain variable domain of TCR clone 123950 (TRAV26-1, TRAJ13)
CIVRVGNSGGYQKVTF

SEQ ID NO: 247900 - protein, 20 aa, Homo sapiens
  CDR3 for beta chain variable domain of TCR clone 123950 (TRBV7-8, TRBJ2-2)
CASSHLFPGPTIHITGELFF

SEQ ID NO: 247901 - protein, 15 aa, Homo sapiens
  CDR3 for alpha chain variable domain of TCR clone 123951 (TRAV35, TRAJ40)
CAGQLGTSGTYKYIF

SEQ ID NO: 247902 - protein, 14 aa, Homo sapiens
  CDR3 for beta chain variable domain of TCR clone 123951 (TRBV7-3, TRBJ2-1)
RASSLAGGTNEQFF

SEQ ID NO: 247903 - protein, 16 aa, Homo sapiens
  CDR3 for alpha chain variable domain of TCR clone 123952 (TRAV2, TRAJ10)
CCGGSTVTGGGNKLTF

SEQ ID NO: 247904 - protein, 16 aa, Homo sapiens
  CDR3 for beta chain variable domain of TCR clone 123952 (TRBV18, TRBJ1-5)
CASSPSTGNSNQHQHF

SEQ ID NO: 247905 - protein, 12 aa, Homo sapiens
  CDR3 for alpha chain variable domain of TCR clone 123953 (TRAV36/DV7, TRAJ54)
CAVVRGGQKLVF

SEQ ID NO: 247906 - protein, 14 aa, Homo sapiens
  CDR3 for beta chain variable domain of TCR clone 123953 (TRBV7-3, TRBJ1-1)
CASSLKGGNTEAFF

SEQ ID NO: 247907 - protein, 13 aa, Homo sapiens
  CDR3 for alpha chain variable domain of TCR clone 123954 (TRAV13-1, TRAJ16)
CAARYQMARSCSF

SEQ ID NO: 247908 - protein, 13 aa, Homo sapiens
  CDR3 for beta chain variable domain of TCR clone 123954 (TRBV4-1, TRBJ2-1)
CASSQAGGDEQFF

SEQ ID NO: 247909 - protein, 16 aa, Homo sapiens
  CDR3 for alpha chain variable domain of TCR clone 123955 (TRAV13-1, TRAJ37)
CAASSLGSSNTCKLIF

SEQ ID NO: 247910 - protein, 12 aa, Homo sapiens
  CDR3 for beta chain variable domain of TCR clone 123955 (TRBV6-1, TRBJ2-5)
CASSEGRETQYF

SEQ ID NO: 247911 - protein, 15 aa, Homo sapiens
  CDR3 for alpha chain variable domain of TCR clone 123956 (TRAV12-2, TRAJ53)
CAVNGGGGSNYKLTF

SEQ ID NO: 247912 - protein, 17 aa, Homo sapiens
  CDR3 for beta chain variable domain of TCR clone 123956 (TRBV7-3, TRBJ2-3)
CASSLMKRRRRADTQYF

SEQ ID NO: 247913 - protein, 15 aa, Homo sapiens
  CDR3 for alpha chain variable domain of TCR clone 123957 (TRAV38-1, TRAJ37)
CAFIHGSGNTGKLIF

SEQ ID NO: 247914 - protein, 11 aa, Homo sapiens
  CDR3 for beta chain variable domain of TCR clone 123957 (TRBV7-9, TRBJ2-7)
CSSFGSYEQYF

SEQ ID NO: 247915 - protein, 15 aa, Homo sapiens
  CDR3 for alpha chain variable domain of TCR clone 123958 (TRAV26-2, TRAJ28)
CILVESGAGSYQPTF

SEQ ID NO: 247916 - protein, 16 aa, Homo sapiens
  CDR3 for beta chain variable domain of TCR clone 123958 (TRBV4-2, TRBJ1-2)
CASSQEIGGASYGYTF

SEQ ID NO: 247917 - protein, 14 aa, Homo sapiens
  CDR3 for alpha chain variable domain of TCR clone 123959 (TRAV1-2, TRAJ16)
CAVNRFSDGQKLLF

SEQ ID NO: 247918 - protein, 15 aa, Homo sapiens
  CDR3 for beta chain variable domain of TCR clone 123959 (TRBV5-1, TRBJ2-7)
CASSLNGGPAREQYF

SEQ ID NO: 247919 - protein, 14 aa, Homo sapiens
  CDR3 for alpha chain variable domain of TCR clone 123960 (TRAV12-1, TRAJ23)
CVVKPGNQGGKLIF

SEQ ID NO: 247920 - protein, 17 aa, Homo sapiens
  CDR3 for beta chain variable domain of TCR clone 123960 (TRBV5-1, TRBJ2-5)
CASSPVALGQNQETQYF

SEQ ID NO: 247921 - protein, 16 aa, Homo sapiens
  CDR3 for alpha chain variable domain of TCR clone 123961 (TRAV26-1, TRAJ53)
CIVSVAMGGSNYKLTF

SEQ ID NO: 247922 - protein, 12 aa, Homo sapiens
  CDR3 for beta chain variable domain of TCR clone 123961 (TRBV7-9, TRBJ1-5)
CASSPQGQPQHF

SEQ ID NO: 247923 - protein, 12 aa, Homo sapiens
  CDR3 for alpha chain variable domain of TCR clone 123962 (TRAV2, TRAJ9)
CAVGAGGFKTIF

SEQ ID NO: 247924 - protein, 15 aa, Homo sapiens
  CDR3 for beta chain variable domain of TCR clone 123962 (TRBV2, TRBJ2-1)
CASSELAGSYNEQFF

SEQ ID NO: 247925 - protein, 13 aa, Homo sapiens
  CDR3 for alpha chain variable domain of TCR clone 123963 (TRAV8-1, TRAJ30)
CAVIMNRDDKIIF

SEQ ID NO: 247926 - protein, 15 aa, Homo sapiens
  CDR3 for beta chain variable domain of TCR clone 123963 (TRBV7-3, TRBJ2-1)
CASSLGQGPFGEQFF

SEQ ID NO: 247927 - protein, 12 aa, Homo sapiens
  CDR3 for alpha chain variable domain of TCR clone 123964 (TRAV12-3, TRAJ17)
CAMALTGKKLTF

SEQ ID NO: 247928 - protein, 15 aa, Homo sapiens
  CDR3 for beta chain variable domain of TCR clone 123964 (TRBV20-1, TRBJ2-7)
CSARDRVSGMDEQYF

SEQ ID NO: 247929 - protein, 14 aa, Homo sapiens
  CDR3 for alpha chain variable domain of TCR clone 123965 (TRAV12-3, TRAJ13)
CAMRNSGGYQKVTF

SEQ ID NO: 247930 - protein, 14 aa, Homo sapiens
  CDR3 for beta chain variable domain of TCR clone 123965 (TRBV4-1, TRBJ1-6)
CASSPGSDSSALHF

SEQ ID NO: 247931 - protein, 14 aa, Homo sapiens
  CDR3 for alpha chain variable domain of TCR clone 123966 (TRAV8-6, TRAJ30)
CAVRPVNRDDKIIF

SEQ ID NO: 247932 - protein, 13 aa, Homo sapiens
  CDR3 for beta chain variable domain of TCR clone 123966 (TRBV19, TRBJ2-2)
CASRTLGTGELFF

SEQ ID NO: 247933 - protein, 15 aa, Homo sapiens
  CDR3 for alpha chain variable domain of TCR clone 123967 (TRAV2, TRAJ9)
CAVEDRGTGGFKTIF

SEQ ID NO: 247934 - protein, 18 aa, Homo sapiens
  CDR3 for beta chain variable domain of TCR clone 123967 (TRBV24-1, TRBJ2-3)
CATSDPGQGRQIRSILAQ

SEQ ID NO: 247935 - protein, 14 aa, Homo sapiens
  CDR3 for alpha chain variable domain of TCR clone 123968 (TRAV35, TRAJ50)
CAGHRKTSYDKVIF

SEQ ID NO: 247936 - protein, 17 aa, Homo sapiens
  CDR3 for beta chain variable domain of TCR clone 123968 (TRBV20-1, TRBJ2-1)
CSASSSGLAGSYNEQFF

SEQ ID NO: 247937 - protein, 14 aa, Homo sapiens
  CDR3 for alpha chain variable domain of TCR clone 123969 (TRAV16, TRAJ16)
CALSVLSDGQKLLF

SEQ ID NO: 247938 - protein, 15 aa, Homo sapiens
  CDR3 for beta chain variable domain of TCR clone 123969 (TRBV6-3, TRBJ2-7)
CASSSPGTVFYEQYF

SEQ ID NO: 247939 - protein, 13 aa, Homo sapiens
  CDR3 for alpha chain variable domain of TCR clone 123970 (TRAV12-3, TRAJ13)
CAMTSGGYQKVTF

SEQ ID NO: 247940 - protein, 13 aa, Homo sapiens
  CDR3 for beta chain variable domain of TCR clone 123970 (TRBV20-1, TRBJ2-2)
CSASAAGTGELFF

SEQ ID NO: 247941 - protein, 16 aa, Homo sapiens
  CDR3 for alpha chain variable domain of TCR clone 123971 (TRAV30, TRAJ24)
CGTEIVDADSWGKFQF

SEQ ID NO: 247942 - protein, 15 aa, Homo sapiens
  CDR3 for beta chain variable domain of TCR clone 123971 (TRBV20-1, TRBJ2-4)
CSARDLTGDPNIQYF

SEQ ID NO: 247943 - protein, 17 aa, Homo sapiens
  CDR3 for alpha chain variable domain of TCR clone 123972 (TRAV13-1, TRAJ31)
CAPRDRLMFGDGTQLVV

SEQ ID NO: 247944 - protein, 17 aa, Homo sapiens
  CDR3 for beta chain variable domain of TCR clone 123972 (TRBV4-1, TRBJ1-4)
CASSQEGPRGVEEKLFF

SEQ ID NO: 247945 - protein, 14 aa, Homo sapiens
  CDR3 for alpha chain variable domain of TCR clone 123973 (TRAV12-3, TRAJ54)
CAMSAQQGAQKLVF

SEQ ID NO: 247946 - protein, 13 aa, Homo sapiens
  CDR3 for beta chain variable domain of TCR clone 123973 (TRBV15, TRBJ1-6)
CATSGGLNSPLHF

SEQ ID NO: 247947 - protein, 23 aa, Homo sapiens
  CDR3 for alpha chain variable domain of TCR clone 123974 (TRAV26-1, TRAJ38)
CIADNAGNNHIQNPYPAVYQLRD

SEQ ID NO: 247948 - protein, 14 aa, Homo sapiens
  CDR3 for beta chain variable domain of TCR clone 123974 (TRBV7-3, TRBJ1-1)
CASSLKGGNTEAFF

SEQ ID NO: 247949 - protein, 14 aa, Homo sapiens
  CDR3 for alpha chain variable domain of TCR clone 123975 (TRAV26-1, TRAJ8)
CIVRVDTGFQKLVF

SEQ ID NO: 247950 - protein, 13 aa, Homo sapiens
  CDR3 for beta chain variable domain of TCR clone 123975 (TRBV7-7, TRBJ2-5)
CASSRSGQETQYF

SEQ ID NO: 247951 - protein, 15 aa, Homo sapiens
  CDR3 for alpha chain variable domain of TCR clone 123976 (TRAV4, TRAJ39)
CLVGPNNNAGNMLTF

SEQ ID NO: 247952 - protein, 16 aa, Homo sapiens
  CDR3 for beta chain variable domain of TCR clone 123976 (TRBV13, TRBJ2-2)
CAGSPRTGEHTGELFF

SEQ ID NO: 247953 - protein, 20 aa, Homo sapiens
  CDR3 for alpha chain variable domain of TCR clone 123977 (TRAV12-2, TRAJ52)
SPVIQPPARAGGTSYGKLTF

SEQ ID NO: 247954 - protein, 16 aa, Homo sapiens
  CDR3 for beta chain variable domain of TCR clone 123977 (TRBV15, TRBJ1-2)
CATSRGPRTGGGGYTL

SEQ ID NO: 247955 - protein, 13 aa, Homo sapiens
  CDR3 for alpha chain variable domain of TCR clone 123978 (TRAV12-2, TRAJ50)
CAVIVTSYDKVIF

SEQ ID NO: 247956 - protein, 12 aa, Homo sapiens
  CDR3 for beta chain variable domain of TCR clone 123978 (TRBV11-2, TRBJ2-2)
CASSLGGGELFF

SEQ ID NO: 247957 - protein, 17 aa, Homo sapiens
  CDR3 for alpha chain variable domain of TCR clone 123979 (TRAV13-2, TRAJ31)
CAENARLMFGDGTQRVV

SEQ ID NO: 247958 - protein, 14 aa, Homo sapiens
  CDR3 for beta chain variable domain of TCR clone 123979 (TRBV7-9, TRBJ2-1)
CASSLGVADNEQFF

SEQ ID NO: 247959 - protein, 12 aa, Homo sapiens
  CDR3 for alpha chain variable domain of TCR clone 123980 (TRAV38-1, TRAJ32)
CAPLGATNKLLF

SEQ ID NO: 247960 - protein, 14 aa, Homo sapiens
  CDR3 for beta chain variable domain of TCR clone 123980 (TRBV29-1, TRBJ2-5)
CSVETSGSGETQYF

SEQ ID NO: 247961 - protein, 16 aa, Homo sapiens
  CDR3 for alpha chain variable domain of TCR clone 123981 (TRAV8-3, TRAJ8)
CAVPRDGNTGFQKIVF

SEQ ID NO: 247962 - protein, 15 aa, Homo sapiens
  CDR3 for beta chain variable domain of TCR clone 123981 (TRBV6-1, TRBJ2-6)
CASSSRPSGANVLTF

SEQ ID NO: 247963 - protein, 12 aa, Homo sapiens
  CDR3 for alpha chain variable domain of TCR clone 123982 (TRAV36/DV7, TRAJ54)
CAVVRGAQKLVF

SEQ ID NO: 247964 - protein, 14 aa, Homo sapiens
  CDR3 for beta chain variable domain of TCR clone 123982 (TRBV7-3, TRBJ1-1)
CASSLKGGNNEAFF

SEQ ID NO: 247965 - protein, 15 aa, Homo sapiens
  CDR3 for alpha chain variable domain of TCR clone 123983 (TRAV3, TRAJ45)
CAVRTPWGGADGLTF

SEQ ID NO: 247966 - protein, 13 aa, Homo sapiens
  CDR3 for beta chain variable domain of TCR clone 123983 (TRBV27, TRBJ2-7)
CASSFVSSYEQYF

SEQ ID NO: 247967 - protein, 13 aa, Homo sapiens
  CDR3 for alpha chain variable domain of TCR clone 123984 (TRAV22, TRAJ29)
CAVGGSGNTPLVF

SEQ ID NO: 247968 - protein, 18 aa, Homo sapiens
  CDR3 for beta chain variable domain of TCR clone 123984 (TRBV10-3, TRBJ2-3)
CATSESRVGPMRGDTQYF

SEQ ID NO: 247969 - protein, 16 aa, Homo sapiens
  CDR3 for alpha chain variable domain of TCR clone 123985 (TRAV16, TRAJ4)
CALSRMFSGGYNKLIV

SEQ ID NO: 247970 - protein, 16 aa, Homo sapiens
  CDR3 for beta chain variable domain of TCR clone 123985 (TRBV24-1, TRBJ2-3)
CATSDPGTGATDTQYF

SEQ ID NO: 247971 - protein, 14 aa, Homo sapiens
  CDR3 for alpha chain variable domain of TCR clone 123986 (TRAV12-2, TRAJ6)
CASKWGGGSYIPTF

SEQ ID NO: 247972 - protein, 13 aa, Homo sapiens
  CDR3 for beta chain variable domain of TCR clone 123986 (TRBV2, TRBJ1-1)
CASSEGGNTEDFF

SEQ ID NO: 247973 - protein, 17 aa, Homo sapiens
  CDR3 for alpha chain variable domain of TCR clone 123987 (TRAV38-1, TRAJ45)
CAFMRSHSGGGADGLTF

SEQ ID NO: 247974 - protein, 12 aa, Homo sapiens
  CDR3 for beta chain variable domain of TCR clone 123987 (TRBV7-9, TRBJ2-7)
CASSIKREEQYF

SEQ ID NO: 247975 - protein, 15 aa, Homo sapiens
  CDR3 for alpha chain variable domain of TCR clone 123988 (TRAV20, TRAJ53)
CAVQASGGSNYKLTF

SEQ ID NO: 247976 - protein, 12 aa, Homo sapiens
  CDR3 for beta chain variable domain of TCR clone 123988 (TRBV7-6, TRBJ2-5)
CASNLSQETQYF

SEQ ID NO: 247977 - protein, 11 aa, Homo sapiens
  CDR3 for alpha chain variable domain of TCR clone 123989 (TRAV3, TRAJ21)
CAVGNFNKFYF

SEQ ID NO: 247978 - protein, 12 aa, Homo sapiens
  CDR3 for beta chain variable domain of TCR clone 123989 (TRBV7-3, TRBJ2-1)
CASSFQSGPQFF

SEQ ID NO: 247979 - protein, 15 aa, Homo sapiens
  CDR3 for alpha chain variable domain of TCR clone 123990 (TRAV12-1, TRAJ42)
CVVTRDGGSQGNLIF

SEQ ID NO: 247980 - protein, 15 aa, Homo sapiens
  CDR3 for beta chain variable domain of TCR clone 123990 (TRBV20-1, TRBJ2-7)
CSARDRVSGMDEQYF

SEQ ID NO: 247981 - protein, 14 aa, Homo sapiens
  CDR3 for alpha chain variable domain of TCR clone 123991 (TRAV12-2, TRAJ13)
CAVKKTGSYQKVTL

SEQ ID NO: 247982 - protein, 15 aa, Homo sapiens
  CDR3 for beta chain variable domain of TCR clone 123991 (TRBV27, TRBJ2-1)
CASSNGGGSSNEQFF

SEQ ID NO: 247983 - protein, 16 aa, Homo sapiens
  CDR3 for alpha chain variable domain of TCR clone 123992 (TRAV12-2, TRAJ18)
CAVTTDRGSTLGRLYF

SEQ ID NO: 247984 - protein, 13 aa, Homo sapiens
  CDR3 for beta chain variable domain of TCR clone 123992 (TRBV19, TRBJ2-3)
CATWDKVTDTQYF

SEQ ID NO: 247985 - protein, 15 aa, Homo sapiens
  CDR3 for alpha chain variable domain of TCR clone 123993 (TRAV8-3, TRAJ15)
CAVGADNQAGTALIF

SEQ ID NO: 247986 - protein, 14 aa, Homo sapiens
  CDR3 for beta chain variable domain of TCR clone 123993 (TRBV20-1, TRBJ2-1)
CSPNDEASYNEQFF

SEQ ID NO: 247987 - protein, 15 aa, Homo sapiens
  CDR3 for alpha chain variable domain of TCR clone 123994 (TRAV17, TRAJ57)
CATGPSQGGSEKLVF

SEQ ID NO: 247988 - protein, 14 aa, Homo sapiens
  CDR3 for beta chain variable domain of TCR clone 123994 (TRBV12-5, TRBJ2-5)
CAGGSRTHQETQYF

SEQ ID NO: 247989 - protein, 13 aa, Homo sapiens
  CDR3 for alpha chain variable domain of TCR clone 123995 (TRAV13-1, TRAJ4)
CAVSIGGYNKLIF

SEQ ID NO: 247990 - protein, 16 aa, Homo sapiens
  CDR3 for beta chain variable domain of TCR clone 123995 (TRBV20-1, TRBJ2-1)
CSAPGLAGSYSDEQFF

SEQ ID NO: 247991 - protein, 18 aa, Homo sapiens
  CDR3 for alpha chain variable domain of TCR clone 123996 (TRAV9-2, TRAJ52)
CALSRHNAGGTSYGKLTF

SEQ ID NO: 247992 - protein, 14 aa, Homo sapiens
  CDR3 for beta chain variable domain of TCR clone 123996 (TRBV11-2, TRBJ1-2)
CASSLGTANYGYTF

SEQ ID NO: 247993 - protein, 14 aa, Homo sapiens
  CDR3 for alpha chain variable domain of TCR clone 123997 (TRAV14/DV4, TRAJ26)
CAMREGTYGQNFVF

SEQ ID NO: 247994 - protein, 16 aa, Homo sapiens
  CDR3 for beta chain variable domain of TCR clone 123997 (TRBV9, TRBJ1-2)
CASSVEEKVSPYGYTV

SEQ ID NO: 247995 - protein, 14 aa, Homo sapiens
  CDR3 for alpha chain variable domain of TCR clone 123998 (TRAV13-2, TRAJ17)
CAENSKAAGNKLTF

SEQ ID NO: 247996 - protein, 16 aa, Homo sapiens
  CDR3 for beta chain variable domain of TCR clone 123998 (TRBV11-2, TRBJ2-7)
CASSPLAGGPRYEQYF

SEQ ID NO: 247997 - protein, 12 aa, Homo sapiens
  CDR3 for alpha chain variable domain of TCR clone 123999 (TRAV38-1, TRAJ47)
CAFETYGNKLVF

SEQ ID NO: 247998 - protein, 15 aa, Homo sapiens
  CDR3 for beta chain variable domain of TCR clone 123999 (TRBV7-9, TRBJ1-6)
CASSSPGRGNSPLHF

SEQ ID NO: 247999 - protein, 13 aa, Homo sapiens
  CDR3 for alpha chain variable domain of TCR clone 124000 (TRAV13-1, TRAJ5)
CAARVTGRRALTF

SEQ ID NO: 248000 - protein, 17 aa, Homo sapiens
  CDR3 for beta chain variable domain of TCR clone 124000 (TRBV11-2, TRBJ2-1)
CASSLYPPGVEYNEQFF

SEQ ID NO: 248001 - protein, 12 aa, Homo sapiens
  CDR3 for alpha chain variable domain of TCR clone 124001 (TRAV13-1, TRAJ21)
CAAKEGFNKFYF

SEQ ID NO: 248002 - protein, 19 aa, Homo sapiens
  CDR3 for beta chain variable domain of TCR clone 124001 (TRBV4-1, TRBJ2-7)
CASSQEGGGITTSIYEQYF

SEQ ID NO: 248003 - protein, 14 aa, Homo sapiens
  CDR3 for alpha chain variable domain of TCR clone 124002 (TRAV17, TRAJ22)
CATSPSGSARQLTF

SEQ ID NO: 248004 - protein, 15 aa, Homo sapiens
  CDR3 for beta chain variable domain of TCR clone 124002 (TRBV4-1, TRBJ2-5)
CASSQWDLYQETQDF

SEQ ID NO: 248005 - protein, 18 aa, Homo sapiens
  CDR3 for alpha chain variable domain of TCR clone 124003 (TRAV12-3, TRAJ52)
CAMSLTNAGGTSYGKLTF

SEQ ID NO: 248006 - protein, 17 aa, Homo sapiens
  CDR3 for beta chain variable domain of TCR clone 124003 (TRBV7-3, TRBJ2-3)
CASSLMKRMRGADTQYF

SEQ ID NO: 248007 - protein, 14 aa, Homo sapiens
  CDR3 for alpha chain variable domain of TCR clone 124004 (TRAV20, TRAJ47)
CAVTSGEYGNELVF

SEQ ID NO: 248008 - protein, 17 aa, Homo sapiens
  CDR3 for beta chain variable domain of TCR clone 124004 (TRBV20-1, TRBJ1-1)
CSARGTGGSYGNTGAFF

SEQ ID NO: 248009 - protein, 16 aa, Homo sapiens
  CDR3 for alpha chain variable domain of TCR clone 124005 (TRAV1-2, TRAJ10)
CAVRGVLTGGGNKLTF

SEQ ID NO: 248010 - protein, 14 aa, Homo sapiens
  CDR3 for beta chain variable domain of TCR clone 124005 (TRBV28, TRBJ2-1)
CASSLNGRNNEQFF

SEQ ID NO: 248011 - protein, 11 aa, Homo sapiens
  CDR3 for alpha chain variable domain of TCR clone 124006 (TRAV2, TRAJ13)
CASGGYQKVTF

SEQ ID NO: 248012 - protein, 14 aa, Homo sapiens
  CDR3 for beta chain variable domain of TCR clone 124006 (TRBV13, TRBJ2-5)
CASSLGRGQETQYF

SEQ ID NO: 248013 - protein, 15 aa, Homo sapiens
  CDR3 for alpha chain variable domain of TCR clone 124007 (TRAV35, TRAJ58)
CAGRRQETSGSRLTF

SEQ ID NO: 248014 - protein, 14 aa, Homo sapiens
  CDR3 for beta chain variable domain of TCR clone 124007 (TRBV7-8, TRBJ2-3)
CASSFKSSTDTQYF

SEQ ID NO: 248015 - protein, 14 aa, Homo sapiens
  CDR3 for alpha chain variable domain of TCR clone 124008 (TRAV23/DV6, TRAJ12)
CAASRMDSSYKLIF

SEQ ID NO: 248016 - protein, 14 aa, Homo sapiens
  CDR3 for beta chain variable domain of TCR clone 124008 (TRBV4-2, TRBJ2-1)
CASGLDRAYNEQFF

SEQ ID NO: 248017 - protein, 14 aa, Homo sapiens
  CDR3 for alpha chain variable domain of TCR clone 124009 (TRAV2, TRAJ9)
CAVEDRSGGFKTIF

SEQ ID NO: 248018 - protein, 14 aa, Homo sapiens
  CDR3 for beta chain variable domain of TCR clone 124009 (TRBV18, TRBJ2-7)
RASSPRGGAYEQYF

SEQ ID NO: 248019 - protein, 14 aa, Homo sapiens
  CDR3 for alpha chain variable domain of TCR clone 124010 (TRAV12-3, TRAJ22)
CAMSLFGSARQLTF

SEQ ID NO: 248020 - protein, 16 aa, Homo sapiens
  CDR3 for beta chain variable domain of TCR clone 124010 (TRBV7-9, TRBJ1-2)
CASSLGFSSGEDGYTF

SEQ ID NO: 248021 - protein, 14 aa, Homo sapiens
  CDR3 for alpha chain variable domain of TCR clone 124011 (TRAV17, TRAJ4)
CATAPLGGYTKLIF

SEQ ID NO: 248022 - protein, 13 aa, Homo sapiens
  CDR3 for beta chain variable domain of TCR clone 124011 (TRBV12-4, TRBJ1-3)
CASSLASGNTIYF

SEQ ID NO: 248023 - protein, 16 aa, Homo sapiens
  CDR3 for alpha chain variable domain of TCR clone 124012 (TRAV12-2, TRAJ40)
CAVIRGGTSGTYKYIF

SEQ ID NO: 248024 - protein, 15 aa, Homo sapiens
  CDR3 for beta chain variable domain of TCR clone 124012 (TRBV15, TRBJ1-4)
CATSRDMGSYEKLFF

SEQ ID NO: 248025 - protein, 13 aa, Homo sapiens
  CDR3 for alpha chain variable domain of TCR clone 124013 (TRAV6, TRAJ20)
CALAVSNDYKLSF

SEQ ID NO: 248026 - protein, 16 aa, Homo sapiens
  CDR3 for beta chain variable domain of TCR clone 124013 (TRBV7-9, TRBJ2-1)
CASSDVAGGCYNEQFF

SEQ ID NO: 248027 - protein, 14 aa, Homo sapiens
  CDR3 for alpha chain variable domain of TCR clone 124014 (TRAV1-2, TRAJ16)
FAVNRFSDGQKLLF

SEQ ID NO: 248028 - protein, 15 aa, Homo sapiens
  CDR3 for beta chain variable domain of TCR clone 124014 (TRBV2, TRBJ2-1)
CASSEEREGDNEQFF

SEQ ID NO: 248029 - protein, 15 aa, Homo sapiens
  CDR3 for alpha chain variable domain of TCR clone 124015 (TRAV8-2, TRAJ15)
CVVTMGNQAGTALIF

SEQ ID NO: 248030 - protein, 14 aa, Homo sapiens
  CDR3 for beta chain variable domain of TCR clone 124015 (TRBV7-3, TRBJ2-1)
CASSLAGGTNEQFF

SEQ ID NO: 248031 - protein, 14 aa, Homo sapiens
  CDR3 for alpha chain variable domain of TCR clone 124016 (TRAV4, TRAJ26)
CLVDPHNYGQNFVF

SEQ ID NO: 248032 - protein, 17 aa, Homo sapiens
  CDR3 for beta chain variable domain of TCR clone 124016 (TRBV24-1, TRBJ2-1)
CATSDVSTSGTHNEQFF

SEQ ID NO: 248033 - protein, 14 aa, Homo sapiens
  CDR3 for alpha chain variable domain of TCR clone 124017 (TRAV16, TRAJ33)
CALSAMVSNYQLIW

SEQ ID NO: 248034 - protein, 12 aa, Homo sapiens
  CDR3 for beta chain variable domain of TCR clone 124017 (TRBV5-1, TRBJ1-2)
CASSQDTYGYTF

SEQ ID NO: 248035 - protein, 15 aa, Homo sapiens
  CDR3 for alpha chain variable domain of TCR clone 124018 (TRAV12-3, TRAJ6)
CAMSATTGGSYIPTF

SEQ ID NO: 248036 - protein, 15 aa, Homo sapiens
  CDR3 for beta chain variable domain of TCR clone 124018 (TRBV5-1, TRBJ2-2)
CASSSQGGNTGELFF

SEQ ID NO: 248037 - protein, 12 aa, Homo sapiens
  CDR3 for alpha chain variable domain of TCR clone 124019 (TRAV9-2, TRAJ26)
CALRGYGQNFVF

SEQ ID NO: 248038 - protein, 13 aa, Homo sapiens
  CDR3 for beta chain variable domain of TCR clone 124019 (TRBV28, TRBJ2-2)
CASIRESTGELFF

SEQ ID NO: 248039 - protein, 16 aa, Homo sapiens
  CDR3 for alpha chain variable domain of TCR clone 124020 (TRAV26-1, TRAJ53)
CIVRVAMGGSNYKLTF

SEQ ID NO: 248040 - protein, 12 aa, Homo sapiens
  CDR3 for beta chain variable domain of TCR clone 124020 (TRBV7-9, TRBJ1-5)
CDSSPQGQPQHF

SEQ ID NO: 248041 - protein, 12 aa, Homo sapiens
  CDR3 for alpha chain variable domain of TCR clone 124021 (TRAV21, TRAJ3)
CCFYSSASKIIF

SEQ ID NO: 248042 - protein, 15 aa, Homo sapiens
  CDR3 for beta chain variable domain of TCR clone 124021 (TRBV20-1, TRBJ2-7)
CSARDRASGMDEQYF

SEQ ID NO: 248043 - protein, 14 aa, Homo sapiens
  CDR3 for alpha chain variable domain of TCR clone 124022 (TRAV12-3, TRAJ33)
CAMSVPGSNYQLIW

SEQ ID NO: 248044 - protein, 14 aa, Homo sapiens
  CDR3 for beta chain variable domain of TCR clone 124022 (TRBV18, TRBJ2-3)
CASPGLADTDTQYF

SEQ ID NO: 248045 - protein, 12 aa, Homo sapiens
  CDR3 for alpha chain variable domain of TCR clone 124023 (TRAV21, TRAJ31)
CVLAGNNARLMF

SEQ ID NO: 248046 - protein, 16 aa, Homo sapiens
  CDR3 for beta chain variable domain of TCR clone 124023 (TRBV27, TRBJ2-5)
CASSFSPGGTKETQYF

SEQ ID NO: 248047 - protein, 14 aa, Homo sapiens
  CDR3 for alpha chain variable domain of TCR clone 124024 (TRAV17, TRAJ16)
CATADFSDGQKLLF

SEQ ID NO: 248048 - protein, 14 aa, Homo sapiens
  CDR3 for beta chain variable domain of TCR clone 124024 (TRBV9, TRBJ2-3)
CASSRQPYTDTQYF

SEQ ID NO: 248049 - protein, 17 aa, Homo sapiens
  CDR3 for alpha chain variable domain of TCR clone 124025 (TRAV13-1, TRAJ52)
CAASSGARGTSYGKLTF

SEQ ID NO: 248050 - protein, 15 aa, Homo sapiens
  CDR3 for beta chain variable domain of TCR clone 124025 (TRBV2, TRBJ2-1)
CASSELAGSYNEQFF

SEQ ID NO: 248051 - protein, 11 aa, Homo sapiens
  CDR3 for alpha chain variable domain of TCR clone 124026 (TRAV2, TRAJ33)
CAVESNYQLIW

SEQ ID NO: 248052 - protein, 12 aa, Homo sapiens
  CDR3 for beta chain variable domain of TCR clone 124026 (TRBV7-9, TRBJ2-7)
CASSLEGYEQYF

SEQ ID NO: 248053 - protein, 15 aa, Homo sapiens
  CDR3 for alpha chain variable domain of TCR clone 124027 (TRAV8-3, TRAJ27)
CAVGPSKTNAGKSTF

SEQ ID NO: 248054 - protein, 15 aa, Homo sapiens
  CDR3 for beta chain variable domain of TCR clone 124027 (TRBV7-2, TRBJ2-1)
CASISGLAGGNEQFF

SEQ ID NO: 248055 - protein, 16 aa, Homo sapiens
  CDR3 for alpha chain variable domain of TCR clone 124028 (TRAV30, TRAJ24)
CGTEIVDSDSWGKFQF

SEQ ID NO: 248056 - protein, 15 aa, Homo sapiens
  CDR3 for beta chain variable domain of TCR clone 124028 (TRBV20-1, TRBJ2-7)
CSARDRVSGMDEQYF

SEQ ID NO: 248057 - protein, 18 aa, Homo sapiens
  CDR3 for alpha chain variable domain of TCR clone 124029 (TRAV12-3, TRAJ52)
CAMSVGGAGGTSYGKLTF

SEQ ID NO: 248058 - protein, 19 aa, Homo sapiens
  CDR3 for beta chain variable domain of TCR clone 124029 (TRBV5-8, TRBJ2-3)
CASSFLGTSGSHRTDTQYF

SEQ ID NO: 248059 - protein, 12 aa, Homo sapiens
  CDR3 for alpha chain variable domain of TCR clone 124030 (TRAV21, TRAJ49)
CAVRNTGNQFYF

SEQ ID NO: 248060 - protein, 12 aa, Homo sapiens
  CDR3 for beta chain variable domain of TCR clone 124030 (TRBV7-9, TRBJ2-7)
CATRTDAYEQYV

SEQ ID NO: 248061 - protein, 16 aa, Homo sapiens
  CDR3 for alpha chain variable domain of TCR clone 124031 (TRAV23/DV6, TRAJ9)
CAASIGGNTGGFKTIF

SEQ ID NO: 248062 - protein, 16 aa, Homo sapiens
  CDR3 for beta chain variable domain of TCR clone 124031 (TRBV7-7, TRBJ2-1)
CASSLASGTSYNEQFF

SEQ ID NO: 248063 - protein, 13 aa, Homo sapiens
  CDR3 for alpha chain variable domain of TCR clone 124032 (TRAV21, TRAJ20)
CAVGLRVDYKLSF

SEQ ID NO: 248064 - protein, 13 aa, Homo sapiens
  CDR3 for beta chain variable domain of TCR clone 124032 (TRBV6-1, TRBJ1-1)
CARSRQGNTEAFF

SEQ ID NO: 248065 - protein, 13 aa, Homo sapiens
  CDR3 for alpha chain variable domain of TCR clone 124033 (TRAV13-2, TRAJ48)
CAEMDFGNEKLTF

SEQ ID NO: 248066 - protein, 16 aa, Homo sapiens
  CDR3 for beta chain variable domain of TCR clone 124033 (TRBV29-1, TRBJ2-7)
CSVEVVGTSGSYEQYF

SEQ ID NO: 248067 - protein, 12 aa, Homo sapiens
  CDR3 for alpha chain variable domain of TCR clone 124034 (TRAV13-1, TRAJ34)
CAASKGTDKLIF

SEQ ID NO: 248068 - protein, 14 aa, Homo sapiens
  CDR3 for beta chain variable domain of TCR clone 124034 (TRBV18, TRBJ1-2)
CASSPDRVVYGYTF

SEQ ID NO: 248069 - protein, 14 aa, Homo sapiens
  CDR3 for alpha chain variable domain of TCR clone 124035 (TRAV12-2, TRAJ40)
CAVKIPSGTHKYIF

SEQ ID NO: 248070 - protein, 15 aa, Homo sapiens
  CDR3 for beta chain variable domain of TCR clone 124035 (TRBV20-1, TRBJ1-4)
CSARREWGVNEKLFF

SEQ ID NO: 248071 - protein, 12 aa, Homo sapiens
  CDR3 for alpha chain variable domain of TCR clone 124036 (TRAV12-3, TRAJ17)
CAMTLTGNKLTF

SEQ ID NO: 248072 - protein, 15 aa, Homo sapiens
  CDR3 for beta chain variable domain of TCR clone 124036 (TRBV20-1, TRBJ2-7)
CSAGDRVAGMDEQYF

SEQ ID NO: 248073 - protein, 18 aa, Homo sapiens
  CDR3 for alpha chain variable domain of TCR clone 124037 (TRAV17, TRAJ45)
CATSLDLYSGGGANGLTF

SEQ ID NO: 248074 - protein, 15 aa, Homo sapiens
  CDR3 for beta chain variable domain of TCR clone 124037 (TRBV7-2, TRBJ2-3)
CASTPTSGETDTQYF

SEQ ID NO: 248075 - protein, 12 aa, Homo sapiens
  CDR3 for alpha chain variable domain of TCR clone 124038 (TRAV13-1, TRAJ27)
CAAHTNAAKSTF

SEQ ID NO: 248076 - protein, 14 aa, Homo sapiens
  CDR3 for beta chain variable domain of TCR clone 124038 (TRBV19, TRBJ2-2)
CASSGQGIAGELFF

SEQ ID NO: 248077 - protein, 16 aa, Homo sapiens
  CDR3 for alpha chain variable domain of TCR clone 124039 (TRAV12-2, TRAJ32)
CAVNFGQGGATNKLIF

SEQ ID NO: 248078 - protein, 15 aa, Homo sapiens
  CDR3 for beta chain variable domain of TCR clone 124039 (TRBV20-1, TRBJ2-7)
CSARGPLAGGREQYF

SEQ ID NO: 248079 - protein, 16 aa, Homo sapiens
  CDR3 for alpha chain variable domain of TCR clone 124040 (TRAV22, TRAJ45)
CAVESGKRGGADGLTF

SEQ ID NO: 248080 - protein, 16 aa, Homo sapiens
  CDR3 for beta chain variable domain of TCR clone 124040 (TRBV5-1, TRBJ2-5)
CASSLRRTSGQETQYF

SEQ ID NO: 248081 - protein, 13 aa, Homo sapiens
  CDR3 for alpha chain variable domain of TCR clone 124041 (TRAV3, TRAJ21)
CAVREPDFNKFYF

SEQ ID NO: 248082 - protein, 15 aa, Homo sapiens
  CDR3 for beta chain variable domain of TCR clone 124041 (TRBV2, TRBJ2-7)
CASSELERGGVEQYF

SEQ ID NO: 248083 - protein, 10 aa, Homo sapiens
  CDR3 for alpha chain variable domain of TCR clone 124042 (TRAV12-2, TRAJ48)
CAVTREKLTF

SEQ ID NO: 248084 - protein, 17 aa, Homo sapiens
  CDR3 for beta chain variable domain of TCR clone 124042 (TRBV11-1, TRBJ2-7)
CASSLTGSFGLDYEQYF

SEQ ID NO: 248085 - protein, 13 aa, Homo sapiens
  CDR3 for alpha chain variable domain of TCR clone 124043 (TRAV27, TRAJ29)
CAGAHSGNTPLAF

SEQ ID NO: 248086 - protein, 15 aa, Homo sapiens
  CDR3 for beta chain variable domain of TCR clone 124043 (TRBV15, TRBJ1-4)
CATSRDMGSYEKLFF

SEQ ID NO: 248087 - protein, 23 aa, Homo sapiens
  CDR3 for alpha chain variable domain of TCR clone 124044 (TRAV26-1, TRAJ38)
CIADNAGNNHIQNPDPAVYQLRD

SEQ ID NO: 248088 - protein, 13 aa, Homo sapiens
  CDR3 for beta chain variable domain of TCR clone 124044 (TRBV20-1, TRBJ1-1)
CSARSGGNTEAFF

SEQ ID NO: 248089 - protein, 18 aa, Homo sapiens
  CDR3 for alpha chain variable domain of TCR clone 124045 (TRAV13-1, TRAJ10)
CAASKGRAVTGGGSKLTF

SEQ ID NO: 248090 - protein, 14 aa, Homo sapiens
  CDR3 for beta chain variable domain of TCR clone 124045 (TRBV18, TRBJ2-7)
CASSPRGGAYEQYF

SEQ ID NO: 248091 - protein, 10 aa, Homo sapiens
  CDR3 for alpha chain variable domain of TCR clone 124046 (TRAV1-2, TRAJ20)
CACNDYKLIF

SEQ ID NO: 248092 - protein, 16 aa, Homo sapiens
  CDR3 for beta chain variable domain of TCR clone 124046 (TRBV20-1, TRBJ2-1)
CSARDLKQGMNNEQFF

SEQ ID NO: 248093 - protein, 17 aa, Homo sapiens
  CDR3 for alpha chain variable domain of TCR clone 124047 (TRAV26-1, TRAJ53)
CIVRVDDSGGSNYKLTF

SEQ ID NO: 248094 - protein, 15 aa, Homo sapiens
  CDR3 for beta chain variable domain of TCR clone 124047 (TRBV20-1, TRBJ2-7)
CGARVPAAYFYEQYF

SEQ ID NO: 248095 - protein, 16 aa, Homo sapiens
  CDR3 for alpha chain variable domain of TCR clone 124048 (TRAV3, TRAJ42)
CAVRDIKGGSQGNLIF

SEQ ID NO: 248096 - protein, 14 aa, Homo sapiens
  CDR3 for beta chain variable domain of TCR clone 124048 (TRBV18, TRBJ1-1)
CASSPPTGRTEAFF

SEQ ID NO: 248097 - protein, 11 aa, Homo sapiens
  CDR3 for alpha chain variable domain of TCR clone 124049 (TRAV13-1, TRAJ24)
CAALNGQLGEI

SEQ ID NO: 248098 - protein, 15 aa, Homo sapiens
  CDR3 for beta chain variable domain of TCR clone 124049 (TRBV11-2, TRBJ2-4)
CASSRPGTGINIQYF

SEQ ID NO: 248099 - protein, 12 aa, Homo sapiens
  CDR3 for alpha chain variable domain of TCR clone 124050 (TRAV8-3, TRAJ20)
CAVGGGDYKLSF

SEQ ID NO: 248100 - protein, 14 aa, Homo sapiens
  CDR3 for beta chain variable domain of TCR clone 124050 (TRBV20-1, TRBJ1-5)
CSARDDRGNQPQHF

SEQ ID NO: 248101 - protein, 12 aa, Homo sapiens
  CDR3 for alpha chain variable domain of TCR clone 124051 (TRAV1-2, TRAJ29)
CAVRNLDTPLVF

SEQ ID NO: 248102 - protein, 18 aa, Homo sapiens
  CDR3 for beta chain variable domain of TCR clone 124051 (TRBV15, TRBJ2-1)
CVPPPGCGGGPTTNEQFF

SEQ ID NO: 248103 - protein, 17 aa, Homo sapiens
  CDR3 for alpha chain variable domain of TCR clone 124052 (TRAV13-1, TRAJ28)
CAASPPYSGAGSYQLTF

SEQ ID NO: 248104 - protein, 16 aa, Homo sapiens
  CDR3 for beta chain variable domain of TCR clone 124052 (TRBV28, TRBJ2-7)
CASSLFFETGGPEQYF

SEQ ID NO: 248105 - protein, 14 aa, Homo sapiens
  CDR3 for alpha chain variable domain of TCR clone 124053 (TRAV9-2, TRAJ39)
CALYIYNAGNMLTF

SEQ ID NO: 248106 - protein, 20 aa, Homo sapiens
  CDR3 for beta chain variable domain of TCR clone 124053 (TRBV5-1, TRBJ2-3)
CASSLWLAGAITTRTDTQYF

SEQ ID NO: 248107 - protein, 13 aa, Homo sapiens
  CDR3 for alpha chain variable domain of TCR clone 124054 (TRAV4, TRAJ28)
CLFIWGLELPTHF

SEQ ID NO: 248108 - protein, 14 aa, Homo sapiens
  CDR3 for beta chain variable domain of TCR clone 124054 (TRBV7-9, TRBJ2-5)
CASSLDTAQETQYF

SEQ ID NO: 248109 - protein, 12 aa, Homo sapiens
  CDR3 for alpha chain variable domain of TCR clone 124055 (TRAV3, TRAJ20)
CAGRDPDYKLSF

SEQ ID NO: 248110 - protein, 14 aa, Homo sapiens
  CDR3 for beta chain variable domain of TCR clone 124055 (TRBV4-2, TRBJ2-1)
CASGLDRAYNEQFF

SEQ ID NO: 248111 - protein, 14 aa, Homo sapiens
  CDR3 for alpha chain variable domain of TCR clone 124056 (TRAV8-4, TRAJ9)
CAVRINTGGFKTIF

SEQ ID NO: 248112 - protein, 14 aa, Homo sapiens
  CDR3 for beta chain variable domain of TCR clone 124056 (TRBV27, TRBJ2-1)
CASSATGGYNEQFF

SEQ ID NO: 248113 - protein, 15 aa, Homo sapiens
  CDR3 for alpha chain variable domain of TCR clone 124057 (TRAV34, TRAJ38)
CGADFTPGNNRKLIW

SEQ ID NO: 248114 - protein, 14 aa, Homo sapiens
  CDR3 for beta chain variable domain of TCR clone 124057 (TRBV5-7, TRBJ1-1)
CASSLAGDWTEAFF

SEQ ID NO: 248115 - protein, 12 aa, Homo sapiens
  CDR3 for alpha chain variable domain of TCR clone 124058 (TRAV12-3, TRAJ20)
CAMVIGDYKLSF

SEQ ID NO: 248116 - protein, 12 aa, Homo sapiens
  CDR3 for beta chain variable domain of TCR clone 124058 (TRBV6-1, TRBJ2-7)
CASSDYSYEQYF

SEQ ID NO: 248117 - protein, 14 aa, Homo sapiens
  CDR3 for alpha chain variable domain of TCR clone 124059 (TRAV1-2, TRAJ8)
CAVREDSGFQKLVF

SEQ ID NO: 248118 - protein, 14 aa, Homo sapiens
  CDR3 for beta chain variable domain of TCR clone 124059 (TRBV29-1, TRBJ2-5)
CSVETSGSGGTQYF

SEQ ID NO: 248119 - protein, 14 aa, Homo sapiens
  CDR3 for alpha chain variable domain of TCR clone 124060 (TRAV27, TRAJ44)
CAASFTATASKLTF

SEQ ID NO: 248120 - protein, 13 aa, Homo sapiens
  CDR3 for beta chain variable domain of TCR clone 124060 (TRBV27, TRBJ2-3)
CATSRGGLYTQYF

SEQ ID NO: 248121 - protein, 14 aa, Homo sapiens
  CDR3 for alpha chain variable domain of TCR clone 124061 (TRAV35, TRAJ41)
CAGKTSNSGYALNF

SEQ ID NO: 248122 - protein, 11 aa, Homo sapiens
  CDR3 for beta chain variable domain of TCR clone 124061 (TRBV5-1, TRBJ2-5)
CASSYQETQYF

SEQ ID NO: 248123 - protein, 22 aa, Homo sapiens
  CDR3 for alpha chain variable domain of TCR clone 124062 (TRAV2, TRAJ38)
CAVEDFPNAGNNHIQNPDPAVY

SEQ ID NO: 248124 - protein, 13 aa, Homo sapiens
  CDR3 for beta chain variable domain of TCR clone 124062 (TRBV12-4, TRBJ2-7)
CASSPTETYEQYF

SEQ ID NO: 248125 - protein, 13 aa, Homo sapiens
  CDR3 for alpha chain variable domain of TCR clone 124063 (TRAV9-2, TRAJ53)
CALSGGSNYKLTF

SEQ ID NO: 248126 - protein, 14 aa, Homo sapiens
  CDR3 for beta chain variable domain of TCR clone 124063 (TRBV7-2, TRBJ1-1)
CASSFLTGTTEAFF

SEQ ID NO: 248127 - protein, 15 aa, Homo sapiens
  CDR3 for alpha chain variable domain of TCR clone 124064 (TRAV26-1, TRAJ44)
CIVRANIGTASKLTF

SEQ ID NO: 248128 - protein, 12 aa, Homo sapiens
  CDR3 for beta chain variable domain of TCR clone 124064 (TRBV2, TRBJ2-1)
GRGLPSYNEQFS

SEQ ID NO: 248129 - protein, 15 aa, Homo sapiens
  CDR3 for alpha chain variable domain of TCR clone 124065 (TRAV1-2, TRAJ39)
CAVEGVDNAGNMLTF

SEQ ID NO: 248130 - protein, 13 aa, Homo sapiens
  CDR3 for beta chain variable domain of TCR clone 124065 (TRBV27, TRBJ1-6)
CASRWTGYSPLLF

SEQ ID NO: 248131 - protein, 11 aa, Homo sapiens
  CDR3 for alpha chain variable domain of TCR clone 124066 (TRAV2, TRAJ13)
CASGGYQKVTF

SEQ ID NO: 248132 - protein, 16 aa, Homo sapiens
  CDR3 for beta chain variable domain of TCR clone 124066 (TRBV6-1, TRBJ2-5)
CASRETLDRGAETQYF

SEQ ID NO: 248133 - protein, 12 aa, Homo sapiens
  CDR3 for alpha chain variable domain of TCR clone 124067 (TRAV12-3, TRAJ17)
CAMTLTGNKLTF

SEQ ID NO: 248134 - protein, 14 aa, Homo sapiens
  CDR3 for beta chain variable domain of TCR clone 124067 (TRBV12-4, TRBJ2-3)
CASSGQGSTDTQYL

SEQ ID NO: 248135 - protein, 15 aa, Homo sapiens
  CDR3 for alpha chain variable domain of TCR clone 124068 (TRAV25, TRAJ53)
CPTSNSGGSNYKLTF

SEQ ID NO: 248136 - protein, 14 aa, Homo sapiens
  CDR3 for beta chain variable domain of TCR clone 124068 (TRBV11-2, TRBJ2-3)
CASSRLASTDTQYF

SEQ ID NO: 248137 - protein, 15 aa, Homo sapiens
  CDR3 for alpha chain variable domain of TCR clone 124069 (TRAV21, TRAJ10)
CAVRGLTGGGNKLTF

SEQ ID NO: 248138 - protein, 14 aa, Homo sapiens
  CDR3 for beta chain variable domain of TCR clone 124069 (TRBV6-6, TRBJ2-7)
CASSDSGAGYEQYF

SEQ ID NO: 248139 - protein, 11 aa, Homo sapiens
  CDR3 for alpha chain variable domain of TCR clone 124070 (TRAV3, TRAJ21)
CAVGNFNKFYF

SEQ ID NO: 248140 - protein, 14 aa, Homo sapiens
  CDR3 for beta chain variable domain of TCR clone 124070 (TRBV5-1, TRBJ2-7)
CASSRGESLYEQYF

SEQ ID NO: 248141 - protein, 17 aa, Homo sapiens
  CDR3 for alpha chain variable domain of TCR clone 124071 (TRAV3, TRAJ6)
CAVRDGPRAGGSYIPPF

SEQ ID NO: 248142 - protein, 15 aa, Homo sapiens
  CDR3 for beta chain variable domain of TCR clone 124071 (TRBV5-8, TRBJ2-2)
CASSLDRGATGELFF

SEQ ID NO: 248143 - protein, 13 aa, Homo sapiens
  CDR3 for alpha chain variable domain of TCR clone 124072 (TRAV2, TRAJ40)
CAVVTSGTYKYVF

SEQ ID NO: 248144 - protein, 14 aa, Homo sapiens
  CDR3 for beta chain variable domain of TCR clone 124072 (TRBV19, TRBJ2-1)
CASPAFVLSGEQFF

SEQ ID NO: 248145 - protein, 13 aa, Homo sapiens
  CDR3 for alpha chain variable domain of TCR clone 124073 (TRAV27, TRAJ54)
CAGAGQGAQKLVF

SEQ ID NO: 248146 - protein, 15 aa, Homo sapiens
  CDR3 for beta chain variable domain of TCR clone 124073 (TRBV18, TRBJ2-6)
CASSPPYAGANVLTF

SEQ ID NO: 248147 - protein, 14 aa, Homo sapiens
  CDR3 for alpha chain variable domain of TCR clone 124074 (TRAV1-2, TRAJ8)
CAVREDTGFEKLVF

SEQ ID NO: 248148 - protein, 11 aa, Homo sapiens
  CDR3 for beta chain variable domain of TCR clone 124074 (TRBV11-3, TRBJ2-7)
CASSRTYEQYF

SEQ ID NO: 248149 - protein, 13 aa, Homo sapiens
  CDR3 for alpha chain variable domain of TCR clone 124075 (TRAV17, TRAJ26)
CATVDNYGQNFVF

SEQ ID NO: 248150 - protein, 15 aa, Homo sapiens
  CDR3 for beta chain variable domain of TCR clone 124075 (TRBV2, TRBJ2-4)
CASSAQGAAKNIQYF

SEQ ID NO: 248151 - protein, 16 aa, Homo sapiens
  CDR3 for alpha chain variable domain of TCR clone 124076 (TRAV3, TRAJ10)
CAVRDMNAGGGNKLTF

SEQ ID NO: 248152 - protein, 19 aa, Homo sapiens
  CDR3 for beta chain variable domain of TCR clone 124076 (TRBV3-1, TRBJ2-5)
CASSQDSPINRGRRETQYF

SEQ ID NO: 248153 - protein, 13 aa, Homo sapiens
  CDR3 for alpha chain variable domain of TCR clone 124077 (TRAV17, TRAJ5)
CALRGTGRRALTF

SEQ ID NO: 248154 - protein, 11 aa, Homo sapiens
  CDR3 for beta chain variable domain of TCR clone 124077 (TRBV5-6, TRBJ2-5)
CASSLERTQYF

SEQ ID NO: 248155 - protein, 12 aa, Homo sapiens
  CDR3 for alpha chain variable domain of TCR clone 124078 (TRAV30, TRAJ43)
CGTEERGNDMRF

SEQ ID NO: 248156 - protein, 13 aa, Homo sapiens
  CDR3 for beta chain variable domain of TCR clone 124078 (TRBV27, TRBJ2-7)
CASSCSQGYEQYF

SEQ ID NO: 248157 - protein, 11 aa, Homo sapiens
  CDR3 for alpha chain variable domain of TCR clone 124079 (TRAV27, TRAJ47)
CAGAYGNKLVF

SEQ ID NO: 248158 - protein, 15 aa, Homo sapiens
  CDR3 for beta chain variable domain of TCR clone 124079 (TRBV9, TRBJ2-7)
CASRPHEQGSYEQYF

SEQ ID NO: 248159 - protein, 13 aa, Homo sapiens
  CDR3 for alpha chain variable domain of TCR clone 124080 (TRAV8-6, TRAJ21)
CAVSPFSLNKFYF

SEQ ID NO: 248160 - protein, 14 aa, Homo sapiens
  CDR3 for beta chain variable domain of TCR clone 124080 (TRBV7-9, TRBJ2-5)
CASSLDTAQETQYF

SEQ ID NO: 248161 - protein, 14 aa, Homo sapiens
  CDR3 for alpha chain variable domain of TCR clone 124081 (TRAV2, TRAJ9)
CAVEDRSGGFKTIF

SEQ ID NO: 248162 - protein, 15 aa, Homo sapiens
  CDR3 for beta chain variable domain of TCR clone 124081 (TRBV19, TRBJ2-1)
CASSNRDRGPNEQFF

SEQ ID NO: 248163 - protein, 12 aa, Homo sapiens
  CDR3 for alpha chain variable domain of TCR clone 124082 (TRAV3, TRAJ20)
CAVRDPDYKLSF

SEQ ID NO: 248164 - protein, 17 aa, Homo sapiens
  CDR3 for beta chain variable domain of TCR clone 124082 (TRBV20-1, TRBJ2-1)
CSASSSGLAGSYNEQFF

SEQ ID NO: 248165 - protein, 14 aa, Homo sapiens
  CDR3 for alpha chain variable domain of TCR clone 124083 (TRAV8-3, TRAJ31)
CAVGRGLNNARLVF

SEQ ID NO: 248166 - protein, 15 aa, Homo sapiens
  CDR3 for beta chain variable domain of TCR clone 124083 (TRBV7-2, TRBJ2-2)
CASSLAGGLTGELFF

SEQ ID NO: 248167 - protein, 16 aa, Homo sapiens
  CDR3 for alpha chain variable domain of TCR clone 124084 (TRAV12-3, TRAJ53)
CAMSPGSGGSNYKLTF

SEQ ID NO: 248168 - protein, 14 aa, Homo sapiens
  CDR3 for beta chain variable domain of TCR clone 124084 (TRBV4-1, TRBJ2-7)
CASSPVAGGDGQYF

SEQ ID NO: 248169 - protein, 13 aa, Homo sapiens
  CDR3 for alpha chain variable domain of TCR clone 124085 (TRAV27, TRAJ45)
CRSSGGGADGLTF

SEQ ID NO: 248170 - protein, 17 aa, Homo sapiens
  CDR3 for beta chain variable domain of TCR clone 124085 (TRBV11-2, TRBJ2-1)
CASSLYPRGVEYNEQFF

SEQ ID NO: 248171 - protein, 14 aa, Homo sapiens
  CDR3 for alpha chain variable domain of TCR clone 124086 (TRAV12-2, TRAJ15)
CAPHTGQAGTALIF

SEQ ID NO: 248172 - protein, 17 aa, Homo sapiens
  CDR3 for beta chain variable domain of TCR clone 124086 (TRBV4-1, TRBJ1-4)
CASSQEGPRGVEEKLFF

SEQ ID NO: 248173 - protein, 14 aa, Homo sapiens
  CDR3 for alpha chain variable domain of TCR clone 124087 (TRAV13-1, TRAJ23)
CAASRLGRGGKLIF

SEQ ID NO: 248174 - protein, 15 aa, Homo sapiens
  CDR3 for beta chain variable domain of TCR clone 124087 (TRBV7-2, TRBJ2-1)
CAGSLVAGRYNEQFF

SEQ ID NO: 248175 - protein, 14 aa, Homo sapiens
  CDR3 for alpha chain variable domain of TCR clone 124088 (TRAV8-4, TRAJ43)
CAVSDPRNNNYMRF

SEQ ID NO: 248176 - protein, 15 aa, Homo sapiens
  CDR3 for beta chain variable domain of TCR clone 124088 (TRBV4-2, TRBJ1-2)
CASSQRTGGRDGYTF

SEQ ID NO: 248177 - protein, 14 aa, Homo sapiens
  CDR3 for alpha chain variable domain of TCR clone 124089 (TRAV4, TRAJ10)
CLVGDTGGGNKLTF

SEQ ID NO: 248178 - protein, 14 aa, Homo sapiens
  CDR3 for beta chain variable domain of TCR clone 124089 (TRBV7-9, TRBJ2-3)
CASSLEQGTNTQYF

SEQ ID NO: 248179 - protein, 18 aa, Homo sapiens
  CDR3 for alpha chain variable domain of TCR clone 124090 (TRAV21, TRAJ52)
CAVRPSPAGGTSYGNLTF

SEQ ID NO: 248180 - protein, 12 aa, Homo sapiens
  CDR3 for beta chain variable domain of TCR clone 124090 (TRBV11-2, TRBJ2-2)
CASSLGGGELFF

SEQ ID NO: 248181 - protein, 14 aa, Homo sapiens
  CDR3 for alpha chain variable domain of TCR clone 124091 (TRAV13-1, TRAJ44)
CAAKATGTASKLTF

SEQ ID NO: 248182 - protein, 14 aa, Homo sapiens
  CDR3 for beta chain variable domain of TCR clone 124091 (TRBV2, TRBJ2-1)
CASSDRAYYNEQFF

SEQ ID NO: 248183 - protein, 13 aa, Homo sapiens
  CDR3 for alpha chain variable domain of TCR clone 124092 (TRAV22, TRAJ29)
CAVGGSGNTPLVF

SEQ ID NO: 248184 - protein, 17 aa, Homo sapiens
  CDR3 for beta chain variable domain of TCR clone 124092 (TRBV7-3, TRBJ2-3)
CASSLMKRMRGADTQYF

SEQ ID NO: 248185 - protein, 15 aa, Homo sapiens
  CDR3 for alpha chain variable domain of TCR clone 124093 (TRAV1-2, TRAJ35)
CAVRDREGFGNVLHC

SEQ ID NO: 248186 - protein, 14 aa, Homo sapiens
  CDR3 for beta chain variable domain of TCR clone 124093 (TRBV19, TRBJ2-1)
CASPTFVLSGEQFF

SEQ ID NO: 248187 - protein, 12 aa, Homo sapiens
  CDR3 for alpha chain variable domain of TCR clone 124094 (TRAV35, TRAJ49)
CAGWNTGNQFYF

SEQ ID NO: 248188 - protein, 16 aa, Homo sapiens
  CDR3 for beta chain variable domain of TCR clone 124094 (TRBV5-1, TRBJ2-2)
CASSPWDTTNTGELFF

SEQ ID NO: 248189 - protein, 14 aa, Homo sapiens
  CDR3 for alpha chain variable domain of TCR clone 124095 (TRAV12-3, TRAJ9)
CAMSPNTGGFKTIF

SEQ ID NO: 248190 - protein, 12 aa, Homo sapiens
  CDR3 for beta chain variable domain of TCR clone 124095 (TRBV19, TRBJ1-5)
CASSIAQQPQQF

SEQ ID NO: 248191 - protein, 13 aa, Homo sapiens
  CDR3 for alpha chain variable domain of TCR clone 124096 (TRAV20, TRAJ34)
CAVSSYNTDKLIF

SEQ ID NO: 248192 - protein, 15 aa, Homo sapiens
  CDR3 for beta chain variable domain of TCR clone 124096 (TRBV20-1, TRBJ1-2)
CSAAGEWARIYGYTF

SEQ ID NO: 248193 - protein, 11 aa, Homo sapiens
  CDR3 for alpha chain variable domain of TCR clone 124097 (TRAV12-1, TRAJ43)
CVEYDNNDMRF

SEQ ID NO: 248194 - protein, 17 aa, Homo sapiens
  CDR3 for beta chain variable domain of TCR clone 124097 (TRBV20-1, TRBJ2-1)
CSASDPLAGVWDNEQFF

SEQ ID NO: 248195 - protein, 10 aa, Homo sapiens
  CDR3 for alpha chain variable domain of TCR clone 124098 (TRAV30, TRAJ48)
CGIGNEKLTF

SEQ ID NO: 248196 - protein, 16 aa, Homo sapiens
  CDR3 for beta chain variable domain of TCR clone 124098 (TRBV19, TRBJ2-1)
CASSIQAGGSYNEQFF

SEQ ID NO: 248197 - protein, 14 aa, Homo sapiens
  CDR3 for alpha chain variable domain of TCR clone 124099 (TRAV12-2, TRAJ33)
CAVDYPDSNYQLIW

SEQ ID NO: 248198 - protein, 16 aa, Homo sapiens
  CDR3 for beta chain variable domain of TCR clone 124099 (TRBV19, TRBJ2-1)
CASSKAGPSSYNERFF

SEQ ID NO: 248199 - protein, 17 aa, Homo sapiens
  CDR3 for alpha chain variable domain of TCR clone 124100 (TRAV26-1, TRAJ53)
CIVRVDDSGGSNYKLTF

SEQ ID NO: 248200 - protein, 16 aa, Homo sapiens
  CDR3 for beta chain variable domain of TCR clone 124100 (TRBV7-3, TRBJ2-1)
CASSLEGYRSYNEQFF

SEQ ID NO: 248201 - protein, 16 aa, Homo sapiens
  CDR3 for alpha chain variable domain of TCR clone 124101 (TRAV30, TRAJ24)
CGTEIVNADSWGKFQF

SEQ ID NO: 248202 - protein, 15 aa, Homo sapiens
  CDR3 for beta chain variable domain of TCR clone 124101 (TRBV18, TRBJ2-1)
CASLPDRGRDNEQFF

SEQ ID NO: 248203 - protein, 10 aa, Homo sapiens
  CDR3 for alpha chain variable domain of TCR clone 124102 (TRAV12-2, TRAJ22)
CAVNETQLTF

SEQ ID NO: 248204 - protein, 13 aa, Homo sapiens
  CDR3 for beta chain variable domain of TCR clone 124102 (TRBV19, TRBJ1-2)
CASSQGQVYGYTF

SEQ ID NO: 248205 - protein, 17 aa, Homo sapiens
  CDR3 for alpha chain variable domain of TCR clone 124103 (TRAV26-1, TRAJ22)
CIVRVPSHSGSARQLTF

SEQ ID NO: 248206 - protein, 15 aa, Homo sapiens
  CDR3 for beta chain variable domain of TCR clone 124103 (TRBV11-2, TRBJ2-1)
CASSSPSTRYNEQFF

SEQ ID NO: 248207 - protein, 13 aa, Homo sapiens
  CDR3 for alpha chain variable domain of TCR clone 124104 (TRAV36/DV7, TRAJ37)
CAVFSSNTGKLIF

SEQ ID NO: 248208 - protein, 15 aa, Homo sapiens
  CDR3 for beta chain variable domain of TCR clone 124104 (TRBV12-4, TRBJ2-5)
SQQFFVRGRQETQYF

SEQ ID NO: 248209 - protein, 14 aa, Homo sapiens
  CDR3 for alpha chain variable domain of TCR clone 124105 (TRAV13-2, TRAJ10)
CAETFTGGGNKLTF

SEQ ID NO: 248210 - protein, 16 aa, Homo sapiens
  CDR3 for beta chain variable domain of TCR clone 124105 (TRBV18, TRBJ2-7)
CASSPRSQGISYEQYS

SEQ ID NO: 248211 - protein, 15 aa, Homo sapiens
  CDR3 for alpha chain variable domain of TCR clone 124106 (TRAV4, TRAJ48)
CLVGDIDFGNEKLTF

SEQ ID NO: 248212 - protein, 14 aa, Homo sapiens
  CDR3 for beta chain variable domain of TCR clone 124106 (TRBV7-3, TRBJ2-1)
CASSLAGGTNEQFF

SEQ ID NO: 248213 - protein, 15 aa, Homo sapiens
  CDR3 for alpha chain variable domain of TCR clone 124107 (TRAV3, TRAJ3)
CAVRDGHSSASKIIF

SEQ ID NO: 248214 - protein, 13 aa, Homo sapiens
  CDR3 for beta chain variable domain of TCR clone 124107 (TRBV18, TRBJ2-5)
CASSLQGQETQYF

SEQ ID NO: 248215 - protein, 11 aa, Homo sapiens
  CDR3 for alpha chain variable domain of TCR clone 124108 (TRAV21, TRAJ34)
CAHYNTDKLIF

SEQ ID NO: 248216 - protein, 12 aa, Homo sapiens
  CDR3 for beta chain variable domain of TCR clone 124108 (TRBV18, TRBJ2-1)
CASSSDEDEQFF

SEQ ID NO: 248217 - protein, 13 aa, Homo sapiens
  CDR3 for alpha chain variable domain of TCR clone 124109 (TRAV21, TRAJ20)
CAVGVFADYKLSF

SEQ ID NO: 248218 - protein, 12 aa, Homo sapiens
  CDR3 for beta chain variable domain of TCR clone 124109 (TRBV12-4, TRBJ2-7)
CASSLGGYEQYF

SEQ ID NO: 248219 - protein, 15 aa, Homo sapiens
  CDR3 for alpha chain variable domain of TCR clone 124110 (TRAV35, TRAJ50)
CAGQLHKTSYDKVIF

SEQ ID NO: 248220 - protein, 12 aa, Homo sapiens
  CDR3 for beta chain variable domain of TCR clone 124110 (TRBV5-1, TRBJ2-5)
CASSLGLETQYF

SEQ ID NO: 248221 - protein, 12 aa, Homo sapiens
  CDR3 for alpha chain variable domain of TCR clone 124111 (TRAV13-2, TRAJ23)
CAERHRRGKLIF

SEQ ID NO: 248222 - protein, 13 aa, Homo sapiens
  CDR3 for beta chain variable domain of TCR clone 124111 (TRBV7-9, TRBJ1-2)
CASSLKQNYGYTF

SEQ ID NO: 248223 - protein, 15 aa, Homo sapiens
  CDR3 for alpha chain variable domain of TCR clone 124112 (TRAV3, TRAJ5)
CAVRDLYTCRRALTF

SEQ ID NO: 248224 - protein, 16 aa, Homo sapiens
  CDR3 for beta chain variable domain of TCR clone 124112 (TRBV20-1, TRBJ1-4)
CSAPGQGLLTNEKLFF

SEQ ID NO: 248225 - protein, 11 aa, Homo sapiens
  CDR3 for alpha chain variable domain of TCR clone 124113 (TRAV2, TRAJ13)
CASGGYQKVTF

SEQ ID NO: 248226 - protein, 12 aa, Homo sapiens
  CDR3 for beta chain variable domain of TCR clone 124113 (TRBV7-9, TRBJ1-1)
CASSLEGTEAFF

SEQ ID NO: 248227 - protein, 14 aa, Homo sapiens
  CDR3 for alpha chain variable domain of TCR clone 124114 (TRAV29/DV5, TRAJ49)
CAASAQNTGNQFYF

SEQ ID NO: 248228 - protein, 14 aa, Homo sapiens
  CDR3 for beta chain variable domain of TCR clone 124114 (TRBV25-1, TRBJ1-1)
CASTHLGGNTEAFF

SEQ ID NO: 248229 - protein, 15 aa, Homo sapiens
  CDR3 for alpha chain variable domain of TCR clone 124115 (TRAV21, TRAJ24)
CAARSSTDSWGKLEF

SEQ ID NO: 248230 - protein, 13 aa, Homo sapiens
  CDR3 for beta chain variable domain of TCR clone 124115 (TRBV11-2, TRBJ2-5)
CASSSTGEETQYF

SEQ ID NO: 248231 - protein, 14 aa, Homo sapiens
  CDR3 for alpha chain variable domain of TCR clone 124116 (TRAV1-2, TRAJ16)
CAVSRFSDGQKLLF

SEQ ID NO: 248232 - protein, 14 aa, Homo sapiens
  CDR3 for beta chain variable domain of TCR clone 124116 (TRBV15, TRBJ2-3)
CATRSGTSIDTQYF

SEQ ID NO: 248233 - protein, 14 aa, Homo sapiens
  CDR3 for alpha chain variable domain of TCR clone 124117 (TRAV1-2, TRAJ8)
CAVREDTGFQKLGF

SEQ ID NO: 248234 - protein, 14 aa, Homo sapiens
  CDR3 for beta chain variable domain of TCR clone 124117 (TRBV11-3, TRBJ2-3)
CASSRLARTDTQYF

SEQ ID NO: 248235 - protein, 16 aa, Homo sapiens
  CDR3 for alpha chain variable domain of TCR clone 124118 (TRAV26-1, TRAJ53)
CIVRVAMGGSNYKLTF

SEQ ID NO: 248236 - protein, 12 aa, Homo sapiens
  CDR3 for beta chain variable domain of TCR clone 124118 (TRBV7-9, TRBJ1-5)
CASSPQGQPQHV

SEQ ID NO: 248237 - protein, 15 aa, Homo sapiens
  CDR3 for alpha chain variable domain of TCR clone 124119 (TRAV8-3, TRAJ45)
CASSYSGGGADGLTF

SEQ ID NO: 248238 - protein, 14 aa, Homo sapiens
  CDR3 for beta chain variable domain of TCR clone 124119 (TRBV7-6, TRBJ2-1)
CASSLGGGADEQFF

SEQ ID NO: 248239 - protein, 14 aa, Homo sapiens
  CDR3 for alpha chain variable domain of TCR clone 124120 (TRAV9-2, TRAJ39)
CALYIYNAGNMLTF

SEQ ID NO: 248240 - protein, 16 aa, Homo sapiens
  CDR3 for beta chain variable domain of TCR clone 124120 (TRBV7-3, TRBJ2-1)
CASSLEGYRSYNEQFF

SEQ ID NO: 248241 - protein, 16 aa, Homo sapiens
  CDR3 for alpha chain variable domain of TCR clone 124121 (TRAV4, TRAJ22)
CLVGDLYSGSARQLTF

SEQ ID NO: 248242 - protein, 13 aa, Homo sapiens
  CDR3 for beta chain variable domain of TCR clone 124121 (TRBV10-3, TRBJ2-7)
CAISEKGGYEQYF

SEQ ID NO: 248243 - protein, 11 aa, Homo sapiens
  CDR3 for alpha chain variable domain of TCR clone 124122 (TRAV13-1, TRAJ52)
PGGTSYGQLTF

SEQ ID NO: 248244 - protein, 16 aa, Homo sapiens
  CDR3 for beta chain variable domain of TCR clone 124122 (TRBV28, TRBJ2-7)
CASSPWVATGDLSQYF

SEQ ID NO: 248245 - protein, 20 aa, Homo sapiens
  CDR3 for alpha chain variable domain of TCR clone 124123 (TRAV26-1, TRAJ42)
CCVLLHRQTYSGGSQGNLIF

SEQ ID NO: 248246 - protein, 16 aa, Homo sapiens
  CDR3 for beta chain variable domain of TCR clone 124123 (TRBV7-3, TRBJ2-2)
CASSLKRGTLSGELFF

SEQ ID NO: 248247 - protein, 21 aa, Homo sapiens
  CDR3 for alpha chain variable domain of TCR clone 124124 (TRAV12-1, TRAJ32)
SSVIQPPTSMNYGGATNKLIF

SEQ ID NO: 248248 - protein, 15 aa, Homo sapiens
  CDR3 for beta chain variable domain of TCR clone 124124 (TRBV7-9, TRBJ2-2)
CASGPLDTFLGELFF

SEQ ID NO: 248249 - protein, 14 aa, Homo sapiens
  CDR3 for alpha chain variable domain of TCR clone 124125 (TRAV27, TRAJ23)
PHLGAKDQGGKLIF

SEQ ID NO: 248250 - protein, 16 aa, Homo sapiens
  CDR3 for beta chain variable domain of TCR clone 124125 (TRBV15, TRBJ2-3)
CATSRDLGIVTDTQYF

SEQ ID NO: 248251 - protein, 14 aa, Homo sapiens
  CDR3 for alpha chain variable domain of TCR clone 124126 (TRAV12-2, TRAJ11)
CAVNMNSGYSTPTF

SEQ ID NO: 248252 - protein, 13 aa, Homo sapiens
  CDR3 for beta chain variable domain of TCR clone 124126 (TRBV6-1, TRBJ1-2)
CASSDSPSYGYTF

SEQ ID NO: 248253 - protein, 14 aa, Homo sapiens
  CDR3 for alpha chain variable domain of TCR clone 124127 (TRAV27, TRAJ23)
CAGAFDNQGGKLIF

SEQ ID NO: 248254 - protein, 15 aa, Homo sapiens
  CDR3 for beta chain variable domain of TCR clone 124127 (TRBV7-3, TRBJ2-7)
CASSLTGQGKYERYF

SEQ ID NO: 248255 - protein, 13 aa, Homo sapiens
  CDR3 for alpha chain variable domain of TCR clone 124128 (TRAV17, TRAJ5)
CALRGTGRRALTF

SEQ ID NO: 248256 - protein, 15 aa, Homo sapiens
  CDR3 for beta chain variable domain of TCR clone 124128 (TRBV11-2, TRBJ2-2)
CASSSDRVNAGELFF

SEQ ID NO: 248257 - protein, 14 aa, Homo sapiens
  CDR3 for alpha chain variable domain of TCR clone 124129 (TRAV1-2, TRAJ16)
CAVNRFSDGQKLLF

SEQ ID NO: 248258 - protein, 14 aa, Homo sapiens
  CDR3 for beta chain variable domain of TCR clone 124129 (TRBV7-3, TRBJ2-1)
CASSLAGGANEQFF

SEQ ID NO: 248259 - protein, 13 aa, Homo sapiens
  CDR3 for alpha chain variable domain of TCR clone 124130 (TRAV26-1, TRAJ40)
CIVRGTGTYKYIF

SEQ ID NO: 248260 - protein, 14 aa, Homo sapiens
  CDR3 for beta chain variable domain of TCR clone 124130 (TRBV11-2, TRBJ2-3)
CASSLGGGANTQYF

SEQ ID NO: 248261 - protein, 13 aa, Homo sapiens
  CDR3 for alpha chain variable domain of TCR clone 124131 (TRAV17, TRAJ26)
CATVDNYGQNFVF

SEQ ID NO: 248262 - protein, 14 aa, Homo sapiens
  CDR3 for beta chain variable domain of TCR clone 124131 (TRBV7-9, TRBJ2-5)
CASSRWAVSETQYF

SEQ ID NO: 248263 - protein, 13 aa, Homo sapiens
  CDR3 for alpha chain variable domain of TCR clone 124132 (TRAV8-6, TRAJ49)
CAVITNTGNQFYF

SEQ ID NO: 248264 - protein, 13 aa, Homo sapiens
  CDR3 for beta chain variable domain of TCR clone 124132 (TRBV7-2, TRBJ2-2)
CASSLAVTGELFF

SEQ ID NO: 248265 - protein, 14 aa, Homo sapiens
  CDR3 for alpha chain variable domain of TCR clone 124133 (TRAV4, TRAJ6)
CLVGEAGGSYIPAF

SEQ ID NO: 248266 - protein, 13 aa, Homo sapiens
  CDR3 for beta chain variable domain of TCR clone 124133 (TRBV7-3, TRBJ1-1)
CASSQDWGAEAFF

SEQ ID NO: 248267 - protein, 17 aa, Homo sapiens
  CDR3 for alpha chain variable domain of TCR clone 124134 (TRAV17, TRAJ52)
CATERPSGGTSYGKLTF

SEQ ID NO: 248268 - protein, 13 aa, Homo sapiens
  CDR3 for beta chain variable domain of TCR clone 124134 (TRBV11-2, TRBJ2-1)
CASSPDPDNEQFF

SEQ ID NO: 248269 - protein, 18 aa, Homo sapiens
  CDR3 for alpha chain variable domain of TCR clone 124135 (TRAV17, TRAJ45)
CATSLDLYSGGGADVLTF

SEQ ID NO: 248270 - protein, 15 aa, Homo sapiens
  CDR3 for beta chain variable domain of TCR clone 124135 (TRBV11-2, TRBJ2-1)
CASSKNRGLIYEQFF

SEQ ID NO: 248271 - protein, 14 aa, Homo sapiens
  CDR3 for alpha chain variable domain of TCR clone 124136 (TRAV8-1, TRAJ36)
CAVNSPTGANTLFF

SEQ ID NO: 248272 - protein, 15 aa, Homo sapiens
  CDR3 for beta chain variable domain of TCR clone 124136 (TRBV7-2, TRBJ2-3)
CASSLEQGGTDTQYF

SEQ ID NO: 248273 - protein, 13 aa, Homo sapiens
  CDR3 for alpha chain variable domain of TCR clone 124137 (TRAV27, TRAJ45)
CRSSGGGADGLTF

SEQ ID NO: 248274 - protein, 13 aa, Homo sapiens
  CDR3 for beta chain variable domain of TCR clone 124137 (TRBV19, TRBJ1-2)
CASSVPGQDGYTF

SEQ ID NO: 248275 - protein, 14 aa, Homo sapiens
  CDR3 for alpha chain variable domain of TCR clone 124138 (TRAV2, TRAJ37)
CAVEGSSNTGKLIF

SEQ ID NO: 248276 - protein, 16 aa, Homo sapiens
  CDR3 for beta chain variable domain of TCR clone 124138 (TRBV19, TRBJ2-1)
CASSKAGPSSYNEQFF

SEQ ID NO: 248277 - protein, 14 aa, Homo sapiens
  CDR3 for alpha chain variable domain of TCR clone 124139 (TRAV1-2, TRAJ16)
CAVNRFSDGQKLLF

SEQ ID NO: 248278 - protein, 14 aa, Homo sapiens
  CDR3 for beta chain variable domain of TCR clone 124139 (TRBV7-2, TRBJ1-5)
CASSPRGGPQPQHF

SEQ ID NO: 248279 - protein, 16 aa, Homo sapiens
  CDR3 for alpha chain variable domain of TCR clone 124140 (TRAV30, TRAJ24)
CGTEIVGADSWGKFQF

SEQ ID NO: 248280 - protein, 18 aa, Homo sapiens
  CDR3 for beta chain variable domain of TCR clone 124140 (TRBV11-2, TRBJ2-3)
CASSLGGASRGAPNTQYF

SEQ ID NO: 248281 - protein, 14 aa, Homo sapiens
  CDR3 for alpha chain variable domain of TCR clone 124141 (TRAV8-4, TRAJ13)
CAVTLSGGYQKVTF

SEQ ID NO: 248282 - protein, 16 aa, Homo sapiens
  CDR3 for beta chain variable domain of TCR clone 124141 (TRBV5-7, TRBJ1-4)
CASSPSGGLETEKLFF

SEQ ID NO: 248283 - protein, 16 aa, Homo sapiens
  CDR3 for alpha chain variable domain of TCR clone 124142 (TRAV30, TRAJ24)
CGTEVVDADSWGKLQF

SEQ ID NO: 248284 - protein, 14 aa, Homo sapiens
  CDR3 for beta chain variable domain of TCR clone 124142 (TRBV12-5, TRBJ2-5)
CASGSRTHQETQYF

SEQ ID NO: 248285 - protein, 14 aa, Homo sapiens
  CDR3 for alpha chain variable domain of TCR clone 124143 (TRAV1-2, TRAJ8)
CAVREDTGFQKLVF

SEQ ID NO: 248286 - protein, 15 aa, Homo sapiens
  CDR3 for beta chain variable domain of TCR clone 124143 (TRBV6-3, TRBJ2-7)
CASSSPGTVIYEQYF

SEQ ID NO: 248287 - protein, 14 aa, Homo sapiens
  CDR3 for alpha chain variable domain of TCR clone 124144 (TRAV21, TRAJ15)
CAVSLNQAGTALIF

SEQ ID NO: 248288 - protein, 11 aa, Homo sapiens
  CDR3 for beta chain variable domain of TCR clone 124144 (TRBV20-1, TRBJ2-7)
CSASTSYEQYF

SEQ ID NO: 248289 - protein, 12 aa, Homo sapiens
  CDR3 for alpha chain variable domain of TCR clone 124145 (TRAV13-1, TRAJ21)
CAAKEGFNKFYF

SEQ ID NO: 248290 - protein, 14 aa, Homo sapiens
  CDR3 for beta chain variable domain of TCR clone 124145 (TRBV12-4, TRBJ2-1)
CASSLGQGASEQFF

SEQ ID NO: 248291 - protein, 14 aa, Homo sapiens
  CDR3 for alpha chain variable domain of TCR clone 124146 (TRAV34, TRAJ22)
CGADTSGSARQLTF

SEQ ID NO: 248292 - protein, 15 aa, Homo sapiens
  CDR3 for beta chain variable domain of TCR clone 124146 (TRBV2, TRBJ1-3)
CASSISPRSGNTIYF

SEQ ID NO: 248293 - protein, 15 aa, Homo sapiens
  CDR3 for alpha chain variable domain of TCR clone 124147 (TRAV2, TRAJ42)
FGVEGYGGSQGNLIF

SEQ ID NO: 248294 - protein, 14 aa, Homo sapiens
  CDR3 for beta chain variable domain of TCR clone 124147 (TRBV11-3, TRBJ2-7)
CASSPDRNTYEQYF

SEQ ID NO: 248295 - protein, 11 aa, Homo sapiens
  CDR3 for alpha chain variable domain of TCR clone 124148 (TRAV23/DV6, TRAJ43)
CAASWNNDMRF

SEQ ID NO: 248296 - protein, 13 aa, Homo sapiens
  CDR3 for beta chain variable domain of TCR clone 124148 (TRBV4-3, TRBJ2-3)
CASSQGYTDTQYF

SEQ ID NO: 248297 - protein, 14 aa, Homo sapiens
  CDR3 for alpha chain variable domain of TCR clone 124149 (TRAV20, TRAJ29)
CAVQAWVGNTPLVF

SEQ ID NO: 248298 - protein, 16 aa, Homo sapiens
  CDR3 for beta chain variable domain of TCR clone 124149 (TRBV19, TRBJ2-1)
CASSKAGPSSYNEQFF

SEQ ID NO: 248299 - protein, 13 aa, Homo sapiens
  CDR3 for alpha chain variable domain of TCR clone 124150 (TRAV2, TRAJ40)
CAVVTSGTYKYIF

SEQ ID NO: 248300 - protein, 15 aa, Homo sapiens
  CDR3 for beta chain variable domain of TCR clone 124150 (TRBV4-1, TRBJ2-2)
CASSEGQGITGELFF

SEQ ID NO: 248301 - protein, 18 aa, Homo sapiens
  CDR3 for alpha chain variable domain of TCR clone 124151 (TRAV21, TRAJ52)
CAVRPSPAGGTSYGKLTF

SEQ ID NO: 248302 - protein, 16 aa, Homo sapiens
  CDR3 for beta chain variable domain of TCR clone 124151 (TRBV29-1, TRBJ1-2)
CSVEANRDIANYGYTF

SEQ ID NO: 248303 - protein, 15 aa, Homo sapiens
  CDR3 for alpha chain variable domain of TCR clone 124152 (TRAV4, TRAJ26)
CLVGDMSNYGQNFVF

SEQ ID NO: 248304 - protein, 16 aa, Homo sapiens
  CDR3 for beta chain variable domain of TCR clone 124152 (TRBV28, TRBJ1-4)
CASSSRTGAANEKLFF

SEQ ID NO: 248305 - protein, 14 aa, Homo sapiens
  CDR3 for alpha chain variable domain of TCR clone 124153 (TRAV1-2, TRAJ8)
CAVREDTGFQKLVF

SEQ ID NO: 248306 - protein, 13 aa, Homo sapiens
  CDR3 for beta chain variable domain of TCR clone 124153 (TRBV2, TRBJ1-5)
CASSQGGSQPQHF

SEQ ID NO: 248307 - protein, 13 aa, Homo sapiens
  CDR3 for alpha chain variable domain of TCR clone 124154 (TRAV1-2, TRAJ9)
CAALNTGGFKTNF

SEQ ID NO: 248308 - protein, 14 aa, Homo sapiens
  CDR3 for beta chain variable domain of TCR clone 124154 (TRBV13, TRBJ2-3)
CASSSGSPTDTQYF

SEQ ID NO: 248309 - protein, 11 aa, Homo sapiens
  CDR3 for alpha chain variable domain of TCR clone 124155 (TRAV6, TRAJ31)
CALRENARLMF

SEQ ID NO: 248310 - protein, 12 aa, Homo sapiens
  CDR3 for beta chain variable domain of TCR clone 124155 (TRBV11-2, TRBJ2-2)
CASSLGGGELFF

SEQ ID NO: 248311 - protein, 12 aa, Homo sapiens
  CDR3 for alpha chain variable domain of TCR clone 124156 (TRAV1-1, TRAJ39)
CAVPVVGNMLTF

SEQ ID NO: 248312 - protein, 15 aa, Homo sapiens
  CDR3 for beta chain variable domain of TCR clone 124156 (TRBV20-1, TRBJ2-5)
CSAEGTGGLQETQYF

SEQ ID NO: 248313 - protein, 11 aa, Homo sapiens
  CDR3 for alpha chain variable domain of TCR clone 124157 (TRAV1-1, TRAJ23)
CAVRQGGKLIF

SEQ ID NO: 248314 - protein, 20 aa, Homo sapiens
  CDR3 for beta chain variable domain of TCR clone 124157 (TRBV7-8, TRBJ2-2)
CASSHLFPGPTIHITGELYF

SEQ ID NO: 248315 - protein, 14 aa, Homo sapiens
  CDR3 for alpha chain variable domain of TCR clone 124158 (TRAV16, TRAJ39)
CALSKNNAGNMLTF

SEQ ID NO: 248316 - protein, 13 aa, Homo sapiens
  CDR3 for beta chain variable domain of TCR clone 124158 (TRBV7-3, TRBJ1-1)
CASSQDWGAEAFF

SEQ ID NO: 248317 - protein, 14 aa, Homo sapiens
  CDR3 for alpha chain variable domain of TCR clone 124159 (TRAV12-3, TRAJ29)
CAMILLSGNTPLVF

SEQ ID NO: 248318 - protein, 15 aa, Homo sapiens
  CDR3 for beta chain variable domain of TCR clone 124159 (TRBV10-2, TRBJ2-7)
CASWNRGQATYEQYF

SEQ ID NO: 248319 - protein, 16 aa, Homo sapiens
  CDR3 for alpha chain variable domain of TCR clone 124160 (TRAV35, TRAJ28)
CAGQKYSGAGSYQLTF

SEQ ID NO: 248320 - protein, 16 aa, Homo sapiens
  CDR3 for beta chain variable domain of TCR clone 124160 (TRBV4-1, TRBJ2-3)
CASSQSTSGAEDTQYF

SEQ ID NO: 248321 - protein, 14 aa, Homo sapiens
  CDR3 for alpha chain variable domain of TCR clone 124161 (TRAV2, TRAJ9)
CAVEDRSGGFKTIF

SEQ ID NO: 248322 - protein, 13 aa, Homo sapiens
  CDR3 for beta chain variable domain of TCR clone 124161 (TRBV25-1, TRBJ2-5)
CASSESGRETQYF

SEQ ID NO: 248323 - protein, 16 aa, Homo sapiens
  CDR3 for alpha chain variable domain of TCR clone 124162 (TRAV16, TRAJ4)
GALSRMFSGGYNKLIF

SEQ ID NO: 248324 - protein, 16 aa, Homo sapiens
  CDR3 for beta chain variable domain of TCR clone 124162 (TRBV24-1, TRBJ2-3)
CATSDPGTGATDTQYF

SEQ ID NO: 248325 - protein, 17 aa, Homo sapiens
  CDR3 for alpha chain variable domain of TCR clone 124163 (TRAV3, TRAJ28)
CAVREAYSGAGSYQLTF

SEQ ID NO: 248326 - protein, 14 aa, Homo sapiens
  CDR3 for beta chain variable domain of TCR clone 124163 (TRBV5-1, TRBJ2-7)
CASSLTSGGYEQYF

SEQ ID NO: 248327 - protein, 14 aa, Homo sapiens
  CDR3 for alpha chain variable domain of TCR clone 124164 (TRAV12-2, TRAJ9)
CAVNMEGGGFKTSF

SEQ ID NO: 248328 - protein, 14 aa, Homo sapiens
  CDR3 for beta chain variable domain of TCR clone 124164 (TRBV2, TRBJ2-5)
CASSEVLAQETQYF

SEQ ID NO: 248329 - protein, 15 aa, Homo sapiens
  CDR3 for alpha chain variable domain of TCR clone 124165 (TRAV8-3, TRAJ27)
CAVGPSKTNAGKSTF

SEQ ID NO: 248330 - protein, 16 aa, Homo sapiens
  CDR3 for beta chain variable domain of TCR clone 124165 (TRBV12-4, TRBJ2-5)
CASSFFVRGRQETQYF

SEQ ID NO: 248331 - protein, 14 aa, Homo sapiens
  CDR3 for alpha chain variable domain of TCR clone 124166 (TRAV12-2, TRAJ17)
CAVLFKAAGNKLTF

SEQ ID NO: 248332 - protein, 16 aa, Homo sapiens
  CDR3 for beta chain variable domain of TCR clone 124166 (TRBV29-1, TRBJ2-7)
CSVEDAEDGTAYEQYF

SEQ ID NO: 248333 - protein, 16 aa, Homo sapiens
  CDR3 for alpha chain variable domain of TCR clone 124167 (TRAV12-3, TRAJ53)
CAMSPGSGGSNYKLTF

SEQ ID NO: 248334 - protein, 16 aa, Homo sapiens
  CDR3 for beta chain variable domain of TCR clone 124167 (TRBV4-1, TRBJ2-3)
CASSQSTSGAEDTQYF

SEQ ID NO: 248335 - protein, 14 aa, Homo sapiens
  CDR3 for alpha chain variable domain of TCR clone 124168 (TRAV8-6, TRAJ29)
CAVSRASGNTPLVF

SEQ ID NO: 248336 - protein, 13 aa, Homo sapiens
  CDR3 for beta chain variable domain of TCR clone 124168 (TRBV19, TRBJ1-5)
CASSEGSKQPQHF

SEQ ID NO: 248337 - protein, 13 aa, Homo sapiens
  CDR3 for alpha chain variable domain of TCR clone 124169 (TRAV8-6, TRAJ50)
CAVIKTSYDKVIF

SEQ ID NO: 248338 - protein, 11 aa, Homo sapiens
  CDR3 for beta chain variable domain of TCR clone 124169 (TRBV7-3, TRBJ2-5)
CASSLSETQYF

SEQ ID NO: 248339 - protein, 14 aa, Homo sapiens
  CDR3 for alpha chain variable domain of TCR clone 124170 (TRAV1-2, TRAJ8)
CAVREDTGFQKLVF

SEQ ID NO: 248340 - protein, 17 aa, Homo sapiens
  CDR3 for beta chain variable domain of TCR clone 124170 (TRBV7-3, TRBJ2-3)
CASSPRGQGYGTDTQYF

SEQ ID NO: 248341 - protein, 17 aa, Homo sapiens
  CDR3 for alpha chain variable domain of TCR clone 124171 (TRAV36/DV7, TRAJ52)
CAVAQRAGGTSYGKLTF

SEQ ID NO: 248342 - protein, 13 aa, Homo sapiens
  CDR3 for beta chain variable domain of TCR clone 124171 (TRBV5-8, TRBJ1-1)
CASSLGGGTEAFF

SEQ ID NO: 248343 - protein, 11 aa, Homo sapiens
  CDR3 for alpha chain variable domain of TCR clone 124172 (TRAV17, TRAJ29)
CYVATDTPLVF

SEQ ID NO: 248344 - protein, 13 aa, Homo sapiens
  CDR3 for beta chain variable domain of TCR clone 124172 (TRBV20-1, TRBJ1-1)
CSARGGGNTEAFF

SEQ ID NO: 248345 - protein, 14 aa, Homo sapiens
  CDR3 for alpha chain variable domain of TCR clone 124173 (TRAV38-1, TRAJ57)
CAFMNTGGFEKLVF

SEQ ID NO: 248346 - protein, 12 aa, Homo sapiens
  CDR3 for beta chain variable domain of TCR clone 124173 (TRBV20-1, TRBJ1-5)
CSTSQGNQPQHF

SEQ ID NO: 248347 - protein, 12 aa, Homo sapiens
  CDR3 for alpha chain variable domain of TCR clone 124174 (TRAV1-2, TRAJ33)
CAALDSNYQLIW

SEQ ID NO: 248348 - protein, 13 aa, Homo sapiens
  CDR3 for beta chain variable domain of TCR clone 124174 (TRBV7-2, TRBJ2-7)
CASSCGQEKEQYF

SEQ ID NO: 248349 - protein, 14 aa, Homo sapiens
  CDR3 for alpha chain variable domain of TCR clone 124175 (TRAV22, TRAJ6)
CAGVGPGGSYIPTF

SEQ ID NO: 248350 - protein, 17 aa, Homo sapiens
  CDR3 for beta chain variable domain of TCR clone 124175 (TRBV7-8, TRBJ2-6)
CASSAGTGGAGANVLTF

SEQ ID NO: 248351 - protein, 17 aa, Homo sapiens
  CDR3 for alpha chain variable domain of TCR clone 124176 (TRAV12-3, TRAJ6)
CARSARGGAGGSYIPTF

SEQ ID NO: 248352 - protein, 12 aa, Homo sapiens
  CDR3 for beta chain variable domain of TCR clone 124176 (TRBV12-4, TRBJ2-3)
CASSTLPDTQYF

SEQ ID NO: 248353 - protein, 11 aa, Homo sapiens
  CDR3 for alpha chain variable domain of TCR clone 124177 (TRAV13-2, TRAJ23)
CAESPRGKLIF

SEQ ID NO: 248354 - protein, 16 aa, Homo sapiens
  CDR3 for beta chain variable domain of TCR clone 124177 (TRBV6-5, TRBJ2-7)
CASSPGGREWTYEQYF

SEQ ID NO: 248355 - protein, 11 aa, Homo sapiens
  CDR3 for alpha chain variable domain of TCR clone 124178 (TRAV1-1, TRAJ23)
CAVRQGGKLIF

SEQ ID NO: 248356 - protein, 13 aa, Homo sapiens
  CDR3 for beta chain variable domain of TCR clone 124178 (TRBV12-4, TRBJ1-1)
CASSPGTGFEAFF

SEQ ID NO: 248357 - protein, 11 aa, Homo sapiens
  CDR3 for alpha chain variable domain of TCR clone 124179 (TRAV2, TRAJ13)
CASGGYQKVTS

SEQ ID NO: 248358 - protein, 15 aa, Homo sapiens
  CDR3 for beta chain variable domain of TCR clone 124179 (TRBV5-4, TRBJ2-7)
CASSRFGTGSYEQYF

SEQ ID NO: 248359 - protein, 16 aa, Homo sapiens
  CDR3 for alpha chain variable domain of TCR clone 124180 (TRAV26-1, TRAJ37)
CIVRGDGAGNTGKLIF

SEQ ID NO: 248360 - protein, 15 aa, Homo sapiens
  CDR3 for beta chain variable domain of TCR clone 124180 (TRBV7-3, TRBJ2-1)
CASSPTGGGEVEQFF

SEQ ID NO: 248361 - protein, 17 aa, Homo sapiens
  CDR3 for alpha chain variable domain of TCR clone 124181 (TRAV17, TRAJ24)
CATANSMTTDSWGKLQF

SEQ ID NO: 248362 - protein, 15 aa, Homo sapiens
  CDR3 for beta chain variable domain of TCR clone 124181 (TRBV2, TRBJ1-2)
CASSEIGGANYGYTF

SEQ ID NO: 248363 - protein, 13 aa, Homo sapiens
  CDR3 for alpha chain variable domain of TCR clone 124182 (TRAV12-1, TRAJ13)
CVVTSGGYQKVSF

SEQ ID NO: 248364 - protein, 14 aa, Homo sapiens
  CDR3 for beta chain variable domain of TCR clone 124182 (TRBV27, TRBJ2-1)
CASSATGGYNEQFF

SEQ ID NO: 248365 - protein, 12 aa, Homo sapiens
  CDR3 for alpha chain variable domain of TCR clone 124183 (TRAV8-3, TRAJ41)
CAVALSGYALNF

SEQ ID NO: 248366 - protein, 18 aa, Homo sapiens
  CDR3 for beta chain variable domain of TCR clone 124183 (TRBV20-1, TRBJ2-6)
CGAETTPTHGSGANVLTF

SEQ ID NO: 248367 - protein, 12 aa, Homo sapiens
  CDR3 for alpha chain variable domain of TCR clone 124184 (TRAV26-1, TRAJ26)
CIVYNYGKNFVF

SEQ ID NO: 248368 - protein, 15 aa, Homo sapiens
  CDR3 for beta chain variable domain of TCR clone 124184 (TRBV7-2, TRBJ2-3)
CASSLRGGSTDTQYF

SEQ ID NO: 248369 - protein, 16 aa, Homo sapiens
  CDR3 for alpha chain variable domain of TCR clone 124185 (TRAV4, TRAJ5)
CLVVPDHGHGQESIYF

SEQ ID NO: 248370 - protein, 15 aa, Homo sapiens
  CDR3 for beta chain variable domain of TCR clone 124185 (TRBV27, TRBJ2-5)
CASSLIPSGGETQYF

SEQ ID NO: 248371 - protein, 13 aa, Homo sapiens
  CDR3 for alpha chain variable domain of TCR clone 124186 (TRAV27, TRAJ41)
CAGEGNSGYALNF

SEQ ID NO: 248372 - protein, 11 aa, Homo sapiens
  CDR3 for beta chain variable domain of TCR clone 124186 (TRBV25-1, TRBJ1-1)
PTWGGNTEAFF

SEQ ID NO: 248373 - protein, 10 aa, Homo sapiens
  CDR3 for alpha chain variable domain of TCR clone 124187 (TRAV26-1, TRAJ40)
CIAGTYKYIF

SEQ ID NO: 248374 - protein, 16 aa, Homo sapiens
  CDR3 for beta chain variable domain of TCR clone 124187 (TRBV2, TRBJ2-3)
CASSTSVEGVTDTQYF

SEQ ID NO: 248375 - protein, 14 aa, Homo sapiens
  CDR3 for alpha chain variable domain of TCR clone 124188 (TRAV8-4, TRAJ15)
CAVTIREAGTALLF

SEQ ID NO: 248376 - protein, 13 aa, Homo sapiens
  CDR3 for beta chain variable domain of TCR clone 124188 (TRBV10-3, TRBJ2-7)
CAISEKGGYEQYF

SEQ ID NO: 248377 - protein, 14 aa, Homo sapiens
  CDR3 for alpha chain variable domain of TCR clone 124189 (TRAV12-2, TRAJ13)
CAVKKTGGYQKVTF

SEQ ID NO: 248378 - protein, 13 aa, Homo sapiens
  CDR3 for beta chain variable domain of TCR clone 124189 (TRBV7-2, TRBJ2-2)
CASSSVRAGELFF

SEQ ID NO: 248379 - protein, 16 aa, Homo sapiens
  CDR3 for alpha chain variable domain of TCR clone 124190 (TRAV3, TRAJ37)
CAVRPHGSGNTGKLIF

SEQ ID NO: 248380 - protein, 16 aa, Homo sapiens
  CDR3 for beta chain variable domain of TCR clone 124190 (TRBV20-1, TRBJ1-4)
CSAPGQGLLTNDKLFF

SEQ ID NO: 248381 - protein, 11 aa, Homo sapiens
  CDR3 for alpha chain variable domain of TCR clone 124191 (TRAV1-1, TRAJ23)
CAVRHGGKLIF

SEQ ID NO: 248382 - protein, 13 aa, Homo sapiens
  CDR3 for beta chain variable domain of TCR clone 124191 (TRBV7-3, TRBJ1-1)
CASSQDWGAEAFF

SEQ ID NO: 248383 - protein, 15 aa, Homo sapiens
  CDR3 for alpha chain variable domain of TCR clone 124192 (TRAV17, TRAJ37)
CTTDHGSSNTGKLIF

SEQ ID NO: 248384 - protein, 14 aa, Homo sapiens
  CDR3 for beta chain variable domain of TCR clone 124192 (TRBV7-2, TRBJ2-3)
CASSRTSGADTQYF

SEQ ID NO: 248385 - protein, 13 aa, Homo sapiens
  CDR3 for alpha chain variable domain of TCR clone 124193 (TRAV29/DV5, TRAJ44)
CAASTGTASKLTF

SEQ ID NO: 248386 - protein, 14 aa, Homo sapiens
  CDR3 for beta chain variable domain of TCR clone 124193 (TRBV12-4, TRBJ2-5)
CASSLWQKQETQYF

SEQ ID NO: 248387 - protein, 23 aa, Homo sapiens
  CDR3 for alpha chain variable domain of TCR clone 124194 (TRAV12-2, TRAJ43)
SLLIRDSQPSDSATYLCAFDMRF

SEQ ID NO: 248388 - protein, 14 aa, Homo sapiens
  CDR3 for beta chain variable domain of TCR clone 124194 (TRBV20-1, TRBJ2-3)
RTSGGPGTTDTQYF

SEQ ID NO: 248389 - protein, 18 aa, Homo sapiens
  CDR3 for alpha chain variable domain of TCR clone 124195 (TRAV12-3, TRAJ52)
CAMSVGGAGGTSYGKLTF

SEQ ID NO: 248390 - protein, 15 aa, Homo sapiens
  CDR3 for beta chain variable domain of TCR clone 124195 (TRBV27, TRBJ1-6)
CASSFNRGLGSPLHF

SEQ ID NO: 248391 - protein, 13 aa, Homo sapiens
  CDR3 for alpha chain variable domain of TCR clone 124196 (TRAV22, TRAJ29)
CAVGGSGNTPLVF

SEQ ID NO: 248392 - protein, 16 aa, Homo sapiens
  CDR3 for beta chain variable domain of TCR clone 124196 (TRBV28, TRBJ2-6)
CASSNRRGSGANVLTF

SEQ ID NO: 248393 - protein, 16 aa, Homo sapiens
  CDR3 for alpha chain variable domain of TCR clone 124197 (TRAV16, TRAJ52)
CALSGVGGTSYGKLTF

SEQ ID NO: 248394 - protein, 13 aa, Homo sapiens
  CDR3 for beta chain variable domain of TCR clone 124197 (TRBV7-9, TRBJ1-2)
CASSLKQNYGYTF

SEQ ID NO: 248395 - protein, 13 aa, Homo sapiens
  CDR3 for alpha chain variable domain of TCR clone 124198 (TRAV12-1, TRAJ6)
CVVFPGGSYIPTF

SEQ ID NO: 248396 - protein, 14 aa, Homo sapiens
  CDR3 for beta chain variable domain of TCR clone 124198 (TRBV11-2, TRBJ2-1)
CASSPSRQGGGQFF

SEQ ID NO: 248397 - protein, 14 aa, Homo sapiens
  CDR3 for alpha chain variable domain of TCR clone 124199 (TRAV26-1, TRAJ38)
CISDNAGNNRKLIW

SEQ ID NO: 248398 - protein, 17 aa, Homo sapiens
  CDR3 for beta chain variable domain of TCR clone 124199 (TRBV7-9, TRBJ2-3)
CASSPTVAGDLTDTQYF

SEQ ID NO: 248399 - protein, 12 aa, Homo sapiens
  CDR3 for alpha chain variable domain of TCR clone 124200 (TRAV16, TRAJ15)
CALKPGRNCSDL

SEQ ID NO: 248400 - protein, 18 aa, Homo sapiens
  CDR3 for beta chain variable domain of TCR clone 124200 (TRBV11-2, TRBJ2-3)
CASSLGGASRGAPNTQYF

SEQ ID NO: 248401 - protein, 13 aa, Homo sapiens
  CDR3 for alpha chain variable domain of TCR clone 124201 (TRAV27, TRAJ29)
GAGAHSGNTPLVF

SEQ ID NO: 248402 - protein, 14 aa, Homo sapiens
  CDR3 for beta chain variable domain of TCR clone 124201 (TRBV7-9, TRBJ2-7)
CASSIGQGAGEQYF

SEQ ID NO: 248403 - protein, 17 aa, Homo sapiens
  CDR3 for alpha chain variable domain of TCR clone 124202 (TRAV3, TRAJ13)
CAVRDMRRTGGYQKVTF

SEQ ID NO: 248404 - protein, 15 aa, Homo sapiens
  CDR3 for beta chain variable domain of TCR clone 124202 (TRBV7-9, TRBJ1-4)
CASSRTGGFNEKLFF

SEQ ID NO: 248405 - protein, 14 aa, Homo sapiens
  CDR3 for alpha chain variable domain of TCR clone 124203 (TRAV1-2, TRAJ16)
CAVNRFSDGQKLLF

SEQ ID NO: 248406 - protein, 17 aa, Homo sapiens
  CDR3 for beta chain variable domain of TCR clone 124203 (TRBV13, TRBJ2-3)
CASSLSRVAGGMNTQYF

SEQ ID NO: 248407 - protein, 11 aa, Homo sapiens
  CDR3 for alpha chain variable domain of TCR clone 124204 (TRAV2, TRAJ33)
CAVDSSYQLIW

SEQ ID NO: 248408 - protein, 13 aa, Homo sapiens
  CDR3 for beta chain variable domain of TCR clone 124204 (TRBV7-2, TRBJ2-4)
CASSREHANIQYF

SEQ ID NO: 248409 - protein, 13 aa, Homo sapiens
  CDR3 for alpha chain variable domain of TCR clone 124205 (TRAV21, TRAJ37)
CAVSSGNTGKLIF

SEQ ID NO: 248410 - protein, 14 aa, Homo sapiens
  CDR3 for beta chain variable domain of TCR clone 124205 (TRBV28, TRBJ2-1)
CASSYYTAYNEQFF

SEQ ID NO: 248411 - protein, 10 aa, Homo sapiens
  CDR3 for alpha chain variable domain of TCR clone 124206 (TRAV2, TRAJ34)
CAVVNDKLIF

SEQ ID NO: 248412 - protein, 18 aa, Homo sapiens
  CDR3 for beta chain variable domain of TCR clone 124206 (TRBV7-9, TRBJ2-7)
CASSLTTSGSRTWYEQYF

SEQ ID NO: 248413 - protein, 13 aa, Homo sapiens
  CDR3 for alpha chain variable domain of TCR clone 124207 (TRAV2, TRAJ40)
CAVVTSGTYKYIF

SEQ ID NO: 248414 - protein, 16 aa, Homo sapiens
  CDR3 for beta chain variable domain of TCR clone 124207 (TRBV7-9, TRBJ1-3)
CASSLGAGSSGNTIHF

SEQ ID NO: 248415 - protein, 11 aa, Homo sapiens
  CDR3 for alpha chain variable domain of TCR clone 124208 (TRAV12-2, TRAJ29)
CAVTLRRPLVF

SEQ ID NO: 248416 - protein, 16 aa, Homo sapiens
  CDR3 for beta chain variable domain of TCR clone 124208 (TRBV19, TRBJ1-5)
CASSIDRGGPRQPQHF

SEQ ID NO: 248417 - protein, 14 aa, Homo sapiens
  CDR3 for alpha chain variable domain of TCR clone 124209 (TRAV1-2, TRAJ8)
CAVGEDTGFRKLVF

SEQ ID NO: 248418 - protein, 13 aa, Homo sapiens
  CDR3 for beta chain variable domain of TCR clone 124209 (TRBV14, TRBJ2-7)
CASSQDRRYEQYF

SEQ ID NO: 248419 - protein, 14 aa, Homo sapiens
  CDR3 for alpha chain variable domain of TCR clone 124210 (TRAV12-2, TRAJ24)
CAVTPADSWGKLQF

SEQ ID NO: 248420 - protein, 17 aa, Homo sapiens
  CDR3 for beta chain variable domain of TCR clone 124210 (TRBV18, TRBJ2-1)
CASSPRVAGGSYNEQFF

SEQ ID NO: 248421 - protein, 16 aa, Homo sapiens
  CDR3 for alpha chain variable domain of TCR clone 124211 (TRAV8-3, TRAJ44)
CAVGASNTGTASTLTF

SEQ ID NO: 248422 - protein, 15 aa, Homo sapiens
  CDR3 for beta chain variable domain of TCR clone 124211 (TRBV27, TRBJ1-5)
CASTFNRGSNQPQHF

SEQ ID NO: 248423 - protein, 12 aa, Homo sapiens
  CDR3 for alpha chain variable domain of TCR clone 124212 (TRAV13-2, TRAJ23)
CAERHRGGKLIF

SEQ ID NO: 248424 - protein, 15 aa, Homo sapiens
  CDR3 for beta chain variable domain of TCR clone 124212 (TRBV11-1, TRBJ2-1)
CASSGQAEPYNEQFF

SEQ ID NO: 248425 - protein, 12 aa, Homo sapiens
  CDR3 for alpha chain variable domain of TCR clone 124213 (TRAV2, TRAJ10)
CASTGGGNKLTF

SEQ ID NO: 248426 - protein, 13 aa, Homo sapiens
  CDR3 for beta chain variable domain of TCR clone 124213 (TRBV19, TRBJ1-5)
CASSMRGYQTQHF

SEQ ID NO: 248427 - protein, 11 aa, Homo sapiens
  CDR3 for alpha chain variable domain of TCR clone 124214 (TRAV21, TRAJ34)
CAHYNTDKLIF

SEQ ID NO: 248428 - protein, 14 aa, Homo sapiens
  CDR3 for beta chain variable domain of TCR clone 124214 (TRBV5-1, TRBJ2-7)
CASSRGESLYEQYF

SEQ ID NO: 248429 - protein, 13 aa, Homo sapiens
  CDR3 for alpha chain variable domain of TCR clone 124215 (TRAV26-2, TRAJ43)
CILRAVNNNDMRF

SEQ ID NO: 248430 - protein, 15 aa, Homo sapiens
  CDR3 for beta chain variable domain of TCR clone 124215 (TRBV7-2, TRBJ2-1)
CASTPGTGIYNEQFF

SEQ ID NO: 248431 - protein, 11 aa, Homo sapiens
  CDR3 for alpha chain variable domain of TCR clone 124216 (TRAV17, TRAJ9)
CATTGGFKTIF

SEQ ID NO: 248432 - protein, 17 aa, Homo sapiens
  CDR3 for beta chain variable domain of TCR clone 124216 (TRBV7-8, TRBJ2-6)
CASSAGTGGAGANVLTF

SEQ ID NO: 248433 - protein, 14 aa, Homo sapiens
  CDR3 for alpha chain variable domain of TCR clone 124217 (TRAV2, TRAJ9)
CAVVDRSGGFKTIF

SEQ ID NO: 248434 - protein, 17 aa, Homo sapiens
  CDR3 for beta chain variable domain of TCR clone 124217 (TRBV20-1, TRBJ2-7)
CSATRAGGVAGVEEQYF

SEQ ID NO: 248435 - protein, 14 aa, Homo sapiens
  CDR3 for alpha chain variable domain of TCR clone 124218 (TRAV35, TRAJ22)
CAGLRPGSARQLTF

SEQ ID NO: 248436 - protein, 13 aa, Homo sapiens
  CDR3 for beta chain variable domain of TCR clone 124218 (TRBV20-1, TRBJ2-7)
YSATHTSGYEQYF

SEQ ID NO: 248437 - protein, 19 aa, Homo sapiens
  CDR3 for alpha chain variable domain of TCR clone 124219 (TRAV2, )
CAVEEDIQNPDPAVYQLRD

SEQ ID NO: 248438 - protein, 16 aa, Homo sapiens
  CDR3 for beta chain variable domain of TCR clone 124219 (TRBV7-9, TRBJ2-1)
CASSDVAGGSYNEQFF

SEQ ID NO: 248439 - protein, 16 aa, Homo sapiens
  CDR3 for alpha chain variable domain of TCR clone 124220 (TRAV12-3, TRAJ10)
CAMKKGITGGGNKLTF

SEQ ID NO: 248440 - protein, 12 aa, Homo sapiens
  CDR3 for beta chain variable domain of TCR clone 124220 (TRBV20-1, TRBJ2-7)
CSAIAPTKEQYF

SEQ ID NO: 248441 - protein, 14 aa, Homo sapiens
  CDR3 for alpha chain variable domain of TCR clone 124221 (TRAV21, TRAJ38)
CAVMGAGNNRKLIW

SEQ ID NO: 248442 - protein, 13 aa, Homo sapiens
  CDR3 for beta chain variable domain of TCR clone 124221 (TRBV7-3, TRBJ2-5)
CASSIGFFENQYF

SEQ ID NO: 248443 - protein, 14 aa, Homo sapiens
  CDR3 for alpha chain variable domain of TCR clone 124222 (TRAV12-1, TRAJ43)
CVVNGRSNNNDMRF

SEQ ID NO: 248444 - protein, 13 aa, Homo sapiens
  CDR3 for beta chain variable domain of TCR clone 124222 (TRBV19, TRBJ1-2)
CASSVPGQDGYTF

SEQ ID NO: 248445 - protein, 16 aa, Homo sapiens
  CDR3 for alpha chain variable domain of TCR clone 124223 (TRAV1-2, TRAJ16)
CAVNGFQMARSCSLQG

SEQ ID NO: 248446 - protein, 15 aa, Homo sapiens
  CDR3 for beta chain variable domain of TCR clone 124223 (TRBV9, TRBJ1-6)
CASSVAGTGDSPLHF

SEQ ID NO: 248447 - protein, 14 aa, Homo sapiens
  CDR3 for alpha chain variable domain of TCR clone 124224 (TRAV38-2/DV8, TRAJ42)
CAYPEGGSQGNLIF

SEQ ID NO: 248448 - protein, 16 aa, Homo sapiens
  CDR3 for beta chain variable domain of TCR clone 124224 (TRBV19, TRBJ2-3)
CASSPGAASRTDTQYF

SEQ ID NO: 248449 - protein, 15 aa, Homo sapiens
  CDR3 for alpha chain variable domain of TCR clone 124225 (TRAV17, TRAJ17)
CATDASIIHRQQANF

SEQ ID NO: 248450 - protein, 12 aa, Homo sapiens
  CDR3 for beta chain variable domain of TCR clone 124225 (TRBV5-4, TRBJ2-5)
CASSSTRETQYF

SEQ ID NO: 248451 - protein, 15 aa, Homo sapiens
  CDR3 for alpha chain variable domain of TCR clone 124226 (TRAV8-3, TRAJ40)
CAVGPYTSGTYKYIF

SEQ ID NO: 248452 - protein, 16 aa, Homo sapiens
  CDR3 for beta chain variable domain of TCR clone 124226 (TRBV7-2, TRBJ2-7)
CASSLDPGGGSGVQYF

SEQ ID NO: 248453 - protein, 14 aa, Homo sapiens
  CDR3 for alpha chain variable domain of TCR clone 124227 (TRAV12-2, TRAJ13)
CAVKKTGGYQKVTF

SEQ ID NO: 248454 - protein, 17 aa, Homo sapiens
  CDR3 for beta chain variable domain of TCR clone 124227 (TRBV13, TRBJ2-3)
CASRLSRVAGGRNTQYF

SEQ ID NO: 248455 - protein, 13 aa, Homo sapiens
  CDR3 for alpha chain variable domain of TCR clone 124228 (TRAV17, TRAJ5)
CAPMETGRRALTF

SEQ ID NO: 248456 - protein, 15 aa, Homo sapiens
  CDR3 for beta chain variable domain of TCR clone 124228 (TRBV6-6, TRBJ2-5)
CASSPGGGLEETQYF

SEQ ID NO: 248457 - protein, 12 aa, Homo sapiens
  CDR3 for alpha chain variable domain of TCR clone 124229 (TRAV35, TRAJ39)
LAPNNAGNMLTF

SEQ ID NO: 248458 - protein, 16 aa, Homo sapiens
  CDR3 for beta chain variable domain of TCR clone 124229 (TRBV2, TRBJ2-3)
CARSTSVEGVTDTQYF

SEQ ID NO: 248459 - protein, 16 aa, Homo sapiens
  CDR3 for alpha chain variable domain of TCR clone 124230 (TRAV13-1, TRAJ52)
CAAIMRGGTSYGKLTF

SEQ ID NO: 248460 - protein, 15 aa, Homo sapiens
  CDR3 for beta chain variable domain of TCR clone 124230 (TRBV7-9, TRBJ1-6)
CASSSPGRGNSPLHF

SEQ ID NO: 248461 - protein, 13 aa, Homo sapiens
  CDR3 for alpha chain variable domain of TCR clone 124231 (TRAV8-6, TRAJ21)
CAVSPSSLNKFYF

SEQ ID NO: 248462 - protein, 14 aa, Homo sapiens
  CDR3 for beta chain variable domain of TCR clone 124231 (TRBV7-9, TRBJ2-5)
CAISLDTAQETQYF

SEQ ID NO: 248463 - protein, 14 aa, Homo sapiens
  CDR3 for alpha chain variable domain of TCR clone 124232 (TRAV13-2, TRAJ43)
CAEIPTYNNNDMRF

SEQ ID NO: 248464 - protein, 17 aa, Homo sapiens
  CDR3 for beta chain variable domain of TCR clone 124232 (TRBV7-8, TRBJ2-6)
CASSAGTGGAGANVLTF

SEQ ID NO: 248465 - protein, 17 aa, Homo sapiens
  CDR3 for alpha chain variable domain of TCR clone 124233 (TRAV3, TRAJ6)
CAVRDGPRAGGSYIPTF

SEQ ID NO: 248466 - protein, 16 aa, Homo sapiens
  CDR3 for beta chain variable domain of TCR clone 124233 (TRBV7-8, TRBJ2-3)
CASSTEGQRETDTQYV

SEQ ID NO: 248467 - protein, 16 aa, Homo sapiens
  CDR3 for alpha chain variable domain of TCR clone 124234 (TRAV16, TRAJ52)
CALSAAGGTSYGKLTF

SEQ ID NO: 248468 - protein, 19 aa, Homo sapiens
  CDR3 for beta chain variable domain of TCR clone 124234 (TRBV25-1, TRBJ2-2)
CAILVYRVDRGRKTGELFF

SEQ ID NO: 248469 - protein, 14 aa, Homo sapiens
  CDR3 for alpha chain variable domain of TCR clone 124235 (TRAV12-2, TRAJ13)
CAVKKTGGYKKVTF

SEQ ID NO: 248470 - protein, 11 aa, Homo sapiens
  CDR3 for beta chain variable domain of TCR clone 124235 (TRBV29-1, TRBJ2-5)
CSEDRTGTQYF

SEQ ID NO: 248471 - protein, 13 aa, Homo sapiens
  CDR3 for alpha chain variable domain of TCR clone 124236 (TRAV38-1, TRAJ42)
CARWGGSQGNLIF

SEQ ID NO: 248472 - protein, 10 aa, Homo sapiens
  CDR3 for beta chain variable domain of TCR clone 124236 (TRBV20-1, TRBJ2-1)
CSARDPLAEF

SEQ ID NO: 248473 - protein, 16 aa, Homo sapiens
  CDR3 for alpha chain variable domain of TCR clone 124237 (TRAV3, TRAJ37)
CAVRGKGSGNTGKLIF

SEQ ID NO: 248474 - protein, 22 aa, Homo sapiens
  CDR3 for beta chain variable domain of TCR clone 124237 (TRBV6-1, TRBJ1-3)
CASVQGGGWKHHIFWRGKLAHC

SEQ ID NO: 248475 - protein, 11 aa, Homo sapiens
  CDR3 for alpha chain variable domain of TCR clone 124238 (TRAV20, TRAJ23)
CACNQGGKPIF

SEQ ID NO: 248476 - protein, 16 aa, Homo sapiens
  CDR3 for beta chain variable domain of TCR clone 124238 (TRBV7-8, TRBJ2-5)
CASSFGGQPAQETQYF

SEQ ID NO: 248477 - protein, 14 aa, Homo sapiens
  CDR3 for alpha chain variable domain of TCR clone 124239 (TRAV23/DV6, TRAJ4)
CAAPSSGGYNKLIF

SEQ ID NO: 248478 - protein, 15 aa, Homo sapiens
  CDR3 for beta chain variable domain of TCR clone 124239 (TRBV27, TRBJ2-2)
CASSLSGFWVTGELF

SEQ ID NO: 248479 - protein, 13 aa, Homo sapiens
  CDR3 for alpha chain variable domain of TCR clone 124240 (TRAV21, TRAJ20)
CAVGLRVDYKLSF

SEQ ID NO: 248480 - protein, 15 aa, Homo sapiens
  CDR3 for beta chain variable domain of TCR clone 124240 (TRBV28, TRBJ1-1)
CASTSTRGLNTEAFF

SEQ ID NO: 248481 - protein, 16 aa, Homo sapiens
  CDR3 for alpha chain variable domain of TCR clone 124241 (TRAV25, TRAJ53)
CAGPKGSGGSNYKLTF

SEQ ID NO: 248482 - protein, 12 aa, Homo sapiens
  CDR3 for beta chain variable domain of TCR clone 124241 (TRBV7-9, TRBJ2-7)
CASSLEGYEQYF

SEQ ID NO: 248483 - protein, 14 aa, Homo sapiens
  CDR3 for alpha chain variable domain of TCR clone 124242 (TRAV16, TRAJ57)
CALSGQGGSEKLVF

SEQ ID NO: 248484 - protein, 13 aa, Homo sapiens
  CDR3 for beta chain variable domain of TCR clone 124242 (TRBV5-4, TRBJ2-1)
CASSVQGPREQFF

SEQ ID NO: 248485 - protein, 14 aa, Homo sapiens
  CDR3 for alpha chain variable domain of TCR clone 124243 (TRAV17, TRAJ22)
CATSPSGSARQLTF

SEQ ID NO: 248486 - protein, 16 aa, Homo sapiens
  CDR3 for beta chain variable domain of TCR clone 124243 (TRBV27, TRBJ2-2)
CASSFRGLVRTGELFF

SEQ ID NO: 248487 - protein, 23 aa, Homo sapiens
  CDR3 for alpha chain variable domain of TCR clone 124244 (TRAV8-3, )
CAVVTTRIPDIQNPDPAGYQLRD

SEQ ID NO: 248488 - protein, 14 aa, Homo sapiens
  CDR3 for beta chain variable domain of TCR clone 124244 (TRBV11-2, TRBJ2-7)
CASSPSTTSYEQYF

SEQ ID NO: 248489 - protein, 12 aa, Homo sapiens
  CDR3 for alpha chain variable domain of TCR clone 124245 (TRAV30, TRAJ43)
CGTEERGNDMRI

SEQ ID NO: 248490 - protein, 13 aa, Homo sapiens
  CDR3 for beta chain variable domain of TCR clone 124245 (TRBV27, TRBJ2-7)
CASSFSQGYEQYF

SEQ ID NO: 248491 - protein, 16 aa, Homo sapiens
  CDR3 for alpha chain variable domain of TCR clone 124246 (TRAV8-3, TRAJ13)
CAVGAYPSGGYQKVTF

SEQ ID NO: 248492 - protein, 14 aa, Homo sapiens
  CDR3 for beta chain variable domain of TCR clone 124246 (TRBV18, TRBJ2-5)
CASSPRASSETQYL

SEQ ID NO: 248493 - protein, 14 aa, Homo sapiens
  CDR3 for alpha chain variable domain of TCR clone 124247 (TRAV26-1, TRAJ38)
CIADNAGNNRKLIC

SEQ ID NO: 248494 - protein, 17 aa, Homo sapiens
  CDR3 for beta chain variable domain of TCR clone 124247 (TRBV15, TRBJ1-1)
CATSRVGGADGDTEAFF

SEQ ID NO: 248495 - protein, 13 aa, Homo sapiens
  CDR3 for alpha chain variable domain of TCR clone 124248 (TRAV12-3, TRAJ7)
CAMSASGNNRLAF

SEQ ID NO: 248496 - protein, 14 aa, Homo sapiens
  CDR3 for beta chain variable domain of TCR clone 124248 (TRBV13, TRBJ2-5)
CASSLCPRGETQYF

SEQ ID NO: 248497 - protein, 10 aa, Homo sapiens
  CDR3 for alpha chain variable domain of TCR clone 124249 (TRAV5, TRAJ34)
CAEDTDKLIF

SEQ ID NO: 248498 - protein, 11 aa, Homo sapiens
  CDR3 for beta chain variable domain of TCR clone 124249 (TRBV11-2, TRBJ2-2)
CQQPWRRELFF

SEQ ID NO: 248499 - protein, 14 aa, Homo sapiens
  CDR3 for alpha chain variable domain of TCR clone 124250 (TRAV1-2, TRAJ16)
CAVNRFSDGQKLLF

SEQ ID NO: 248500 - protein, 12 aa, Homo sapiens
  CDR3 for beta chain variable domain of TCR clone 124250 (TRBV7-3, TRBJ2-5)
CQQLPGGETQYF

SEQ ID NO: 248501 - protein, 17 aa, Homo sapiens
  CDR3 for alpha chain variable domain of TCR clone 124251 (TRAV4, TRAJ18)
CLVGERSVGSPLGRLYF

SEQ ID NO: 248502 - protein, 18 aa, Homo sapiens
  CDR3 for beta chain variable domain of TCR clone 124251 (TRBV11-2, TRBJ2-3)
CASSLGGASRGAPNTQYF

SEQ ID NO: 248503 - protein, 13 aa, Homo sapiens
  CDR3 for alpha chain variable domain of TCR clone 124252 (TRAV12-1, TRAJ7)
CAVNMRGNNRLAF

SEQ ID NO: 248504 - protein, 15 aa, Homo sapiens
  CDR3 for beta chain variable domain of TCR clone 124252 (TRBV27, TRBJ2-3)
CASSLGLAATDTQYF

SEQ ID NO: 248505 - protein, 16 aa, Homo sapiens
  CDR3 for alpha chain variable domain of TCR clone 124253 (TRAV27, TRAJ13)
CAGAKSDTGGYQKVTF

SEQ ID NO: 248506 - protein, 15 aa, Homo sapiens
  CDR3 for beta chain variable domain of TCR clone 124253 (TRBV29-1, TRBJ2-1)
CSVGRHALFYNEQFF

SEQ ID NO: 248507 - protein, 15 aa, Homo sapiens
  CDR3 for alpha chain variable domain of TCR clone 124254 (TRAV26-1, TRAJ48)
CIARWSWFGNEKLTF

SEQ ID NO: 248508 - protein, 12 aa, Homo sapiens
  CDR3 for beta chain variable domain of TCR clone 124254 (TRBV19, TRBJ2-5)
CASSISEETQYV

SEQ ID NO: 248509 - protein, 14 aa, Homo sapiens
  CDR3 for alpha chain variable domain of TCR clone 124255 (TRAV12-2, TRAJ13)
CAVNPSGCYQKVTF

SEQ ID NO: 248510 - protein, 14 aa, Homo sapiens
  CDR3 for beta chain variable domain of TCR clone 124255 (TRBV12-4, TRBJ1-1)
CASSLGTGGTEAFF

SEQ ID NO: 248511 - protein, 14 aa, Homo sapiens
  CDR3 for alpha chain variable domain of TCR clone 124256 (TRAV17, TRAJ20)
CATLSGSNDYKLSF

SEQ ID NO: 248512 - protein, 16 aa, Homo sapiens
  CDR3 for beta chain variable domain of TCR clone 124256 (TRBV12-5, TRBJ2-5)
CASGPRTSGNQETQYF

SEQ ID NO: 248513 - protein, 16 aa, Homo sapiens
  CDR3 for alpha chain variable domain of TCR clone 124257 (TRAV13-1, TRAJ48)
CSKYRESNFGNEKLTS

SEQ ID NO: 248514 - protein, 17 aa, Homo sapiens
  CDR3 for beta chain variable domain of TCR clone 124257 (TRBV28, TRBJ2-1)
CASSYARQALTYNEQFF

SEQ ID NO: 248515 - protein, 15 aa, Homo sapiens
  CDR3 for alpha chain variable domain of TCR clone 124258 (TRAV21, TRAJ53)
CATLNSGGSNYKLTF

SEQ ID NO: 248516 - protein, 12 aa, Homo sapiens
  CDR3 for beta chain variable domain of TCR clone 124258 (TRBV7-9, TRBJ2-7)
CASRTGFDEQYF

SEQ ID NO: 248517 - protein, 15 aa, Homo sapiens
  CDR3 for alpha chain variable domain of TCR clone 124259 (TRAV26-1, TRAJ29)
CIVRVEGSGNTHPVF

SEQ ID NO: 248518 - protein, 15 aa, Homo sapiens
  CDR3 for beta chain variable domain of TCR clone 124259 (TRBV7-9, TRBJ1-5)
CASSQGHQPNQPQHF

SEQ ID NO: 248519 - protein, 18 aa, Homo sapiens
  CDR3 for alpha chain variable domain of TCR clone 124260 (TRAV26-1, TRAJ23)
CIVRVGLEVWNQGGKLIF

SEQ ID NO: 248520 - protein, 15 aa, Homo sapiens
  CDR3 for beta chain variable domain of TCR clone 124260 (TRBV10-1, TRBJ2-3)
CASSATSGGFDTQYF

SEQ ID NO: 248521 - protein, 12 aa, Homo sapiens
  CDR3 for alpha chain variable domain of TCR clone 124261 (TRAV13-2, TRAJ23)
CAERHRGGKLIF

SEQ ID NO: 248522 - protein, 13 aa, Homo sapiens
  CDR3 for beta chain variable domain of TCR clone 124261 (TRBV27, TRBJ1-6)
CASSLVLVSPLHF

SEQ ID NO: 248523 - protein, 14 aa, Homo sapiens
  CDR3 for alpha chain variable domain of TCR clone 124262 (TRAV12-2, TRAJ45)
CAVNIGGGADGLTF

SEQ ID NO: 248524 - protein, 17 aa, Homo sapiens
  CDR3 for beta chain variable domain of TCR clone 124262 (TRBV7-8, TRBJ2-6)
CASSAGTGGAGANVLTL

SEQ ID NO: 248525 - protein, 13 aa, Homo sapiens
  CDR3 for alpha chain variable domain of TCR clone 124263 (TRAV17, TRAJ33)
CATDADSNYQLIW

SEQ ID NO: 248526 - protein, 15 aa, Homo sapiens
  CDR3 for beta chain variable domain of TCR clone 124263 (TRBV20-1, TRBJ2-7)
CSARDRVSGMDEQYF

SEQ ID NO: 248527 - protein, 15 aa, Homo sapiens
  CDR3 for alpha chain variable domain of TCR clone 124264 (TRAV13-2, TRAJ23)
CAARGFYNQGGKLIF

SEQ ID NO: 248528 - protein, 14 aa, Homo sapiens
  CDR3 for beta chain variable domain of TCR clone 124264 (TRBV4-1, TRBJ2-3)
CASSQDWSTDTQYF

SEQ ID NO: 248529 - protein, 14 aa, Homo sapiens
  CDR3 for alpha chain variable domain of TCR clone 124265 (TRAV23/DV6, TRAJ37)
CAASTSSNTGKLIF

SEQ ID NO: 248530 - protein, 13 aa, Homo sapiens
  CDR3 for beta chain variable domain of TCR clone 124265 (TRBV7-7, TRBJ1-1)
CASSLGANTETFF

SEQ ID NO: 248531 - protein, 15 aa, Homo sapiens
  CDR3 for alpha chain variable domain of TCR clone 124266 (TRAV12-3, TRAJ6)
CAMSATTGGSYIPTF

SEQ ID NO: 248532 - protein, 14 aa, Homo sapiens
  CDR3 for beta chain variable domain of TCR clone 124266 (TRBV18, TRBJ2-5)
CASSPGVSQETQYF

SEQ ID NO: 248533 - protein, 15 aa, Homo sapiens
  CDR3 for alpha chain variable domain of TCR clone 124267 (TRAV8-4, TRAJ3)
CAVTGENLVQQCFQD

SEQ ID NO: 248534 - protein, 16 aa, Homo sapiens
  CDR3 for beta chain variable domain of TCR clone 124267 (TRBV4-2, TRBJ1-1)
CASSQAGFEMNTEAFF

SEQ ID NO: 248535 - protein, 15 aa, Homo sapiens
  CDR3 for alpha chain variable domain of TCR clone 124268 (TRAV35, TRAJ40)
CAGQLGTSGTYKYIF

SEQ ID NO: 248536 - protein, 19 aa, Homo sapiens
  CDR3 for beta chain variable domain of TCR clone 124268 (TRBV23-1, TRBJ2-7)
CASILLRDRARAVLRAGHH

SEQ ID NO: 248537 - protein, 15 aa, Homo sapiens
  CDR3 for alpha chain variable domain of TCR clone 124269 (TRAV3, TRAJ9)
CAVRDSNTGGFKTIF

SEQ ID NO: 248538 - protein, 16 aa, Homo sapiens
  CDR3 for beta chain variable domain of TCR clone 124269 (TRBV15, TRBJ2-5)
CATSRTTGQGMETQYF

SEQ ID NO: 248539 - protein, 16 aa, Homo sapiens
  CDR3 for alpha chain variable domain of TCR clone 124270 (TRAV3, TRAJ37)
CAVRPHSSGNTGKLIF

SEQ ID NO: 248540 - protein, 14 aa, Homo sapiens
  CDR3 for beta chain variable domain of TCR clone 124270 (TRBV25-1, TRBJ1-1)
CASTHLGGNTEAFF

SEQ ID NO: 248541 - protein, 16 aa, Homo sapiens
  CDR3 for alpha chain variable domain of TCR clone 124271 (TRAV3, TRAJ10)
CAVRDMRAGGGNKLTF

SEQ ID NO: 248542 - protein, 20 aa, Homo sapiens
  CDR3 for beta chain variable domain of TCR clone 124271 (TRBV28, TRBJ2-1)
CASTPIGRSPGLAGGNGQFF

SEQ ID NO: 248543 - protein, 14 aa, Homo sapiens
  CDR3 for alpha chain variable domain of TCR clone 124272 (TRAV1-2, TRAJ8)
CAVREDTGFQKPVF

SEQ ID NO: 248544 - protein, 17 aa, Homo sapiens
  CDR3 for beta chain variable domain of TCR clone 124272 (TRBV13, TRBJ2-3)
CASSLSRVAGGRNTQYF

SEQ ID NO: 248545 - protein, 12 aa, Homo sapiens
  CDR3 for alpha chain variable domain of TCR clone 124273 (TRAV2, TRAJ33)
CAVWVSNYQLIW

SEQ ID NO: 248546 - protein, 16 aa, Homo sapiens
  CDR3 for beta chain variable domain of TCR clone 124273 (TRBV20-1, TRBJ1-4)
CSAPGQGLLTNEKLFF

SEQ ID NO: 248547 - protein, 12 aa, Homo sapiens
  CDR3 for alpha chain variable domain of TCR clone 124274 (TRAV35, TRAJ30)
CAGQLADDKIIF

SEQ ID NO: 248548 - protein, 18 aa, Homo sapiens
  CDR3 for beta chain variable domain of TCR clone 124274 (TRBV2, TRBJ2-3)
CASRLGLAGSLSTDTQYF

SEQ ID NO: 248549 - protein, 15 aa, Homo sapiens
  CDR3 for alpha chain variable domain of TCR clone 124275 (TRAV2, TRAJ11)
CAVGGRNSGYSTLTF

SEQ ID NO: 248550 - protein, 13 aa, Homo sapiens
  CDR3 for beta chain variable domain of TCR clone 124275 (TRBV10-3, TRBJ2-7)
CASKLAVNYEQYF

SEQ ID NO: 248551 - protein, 19 aa, Homo sapiens
  CDR3 for alpha chain variable domain of TCR clone 124276 (TRAV29/DV5, TRAJ49)
CSVLLCSKLTVATGNQFYF

SEQ ID NO: 248552 - protein, 17 aa, Homo sapiens
  CDR3 for beta chain variable domain of TCR clone 124276 (TRBV13, TRBJ2-3)
CASSLSRVAGGRNTQYF

SEQ ID NO: 248553 - protein, 16 aa, Homo sapiens
  CDR3 for alpha chain variable domain of TCR clone 124277 (TRAV12-3, TRAJ53)
CAMSPGSGGSNYNLTF

SEQ ID NO: 248554 - protein, 14 aa, Homo sapiens
  CDR3 for beta chain variable domain of TCR clone 124277 (TRBV4-2, TRBJ2-1)
CASGLDRAYNEQFF

SEQ ID NO: 248555 - protein, 16 aa, Homo sapiens
  CDR3 for alpha chain variable domain of TCR clone 124278 (TRAV26-1, TRAJ32)
CIVRTNYGGATNELIF

SEQ ID NO: 248556 - protein, 15 aa, Homo sapiens
  CDR3 for beta chain variable domain of TCR clone 124278 (TRBV27, TRBJ2-1)
CASSNGGGSSNEQFF

SEQ ID NO: 248557 - protein, 12 aa, Homo sapiens
  CDR3 for alpha chain variable domain of TCR clone 124279 (TRAV12-3, TRAJ3)
CAIDSSASKIFF

SEQ ID NO: 248558 - protein, 17 aa, Homo sapiens
  CDR3 for beta chain variable domain of TCR clone 124279 (TRBV7-9, TRBJ2-3)
CASSLEEAGAYPDTQYF

SEQ ID NO: 248559 - protein, 12 aa, Homo sapiens
  CDR3 for alpha chain variable domain of TCR clone 124280 (TRAV13-1, TRAJ21)
CAAKEGFNKFYF

SEQ ID NO: 248560 - protein, 15 aa, Homo sapiens
  CDR3 for beta chain variable domain of TCR clone 124280 (TRBV2, TRBJ2-1)
CASSELAGSYNGQFF

SEQ ID NO: 248561 - protein, 11 aa, Homo sapiens
  CDR3 for alpha chain variable domain of TCR clone 124281 (TRAV12-3, TRAJ17)
CNDAYGNKLTF

SEQ ID NO: 248562 - protein, 15 aa, Homo sapiens
  CDR3 for beta chain variable domain of TCR clone 124281 (TRBV20-1, TRBJ2-7)
CSARDRVSGMDEQYF

SEQ ID NO: 248563 - protein, 13 aa, Homo sapiens
  CDR3 for alpha chain variable domain of TCR clone 124282 (TRAV8-3, TRAJ44)
CAVVPGTASKLTF

SEQ ID NO: 248564 - protein, 13 aa, Homo sapiens
  CDR3 for beta chain variable domain of TCR clone 124282 (TRBV11-2, TRBJ2-5)
CASSRGPSETQYF

SEQ ID NO: 248565 - protein, 18 aa, Homo sapiens
  CDR3 for alpha chain variable domain of TCR clone 124283 (TRAV3, TRAJ17)
CAVRARRGGRSCRQQANF

SEQ ID NO: 248566 - protein, 16 aa, Homo sapiens
  CDR3 for beta chain variable domain of TCR clone 124283 (TRBV11-2, TRBJ2-7)
CASSPTTGGVSYEQYF

SEQ ID NO: 248567 - protein, 11 aa, Homo sapiens
  CDR3 for alpha chain variable domain of TCR clone 124284 (TRAV12-1, TRAJ30)
CVVNGQDNIIF

SEQ ID NO: 248568 - protein, 12 aa, Homo sapiens
  CDR3 for beta chain variable domain of TCR clone 124284 (TRBV27, TRBJ2-2)
CASKLFTGELFF

SEQ ID NO: 248569 - protein, 12 aa, Homo sapiens
  CDR3 for alpha chain variable domain of TCR clone 124285 (TRAV12-2, TRAJ43)
CAVNVNNNDMRF

SEQ ID NO: 248570 - protein, 20 aa, Homo sapiens
  CDR3 for beta chain variable domain of TCR clone 124285 (TRBV7-8, TRBJ2-2)
CASSHLFPGPTIHITGELFF

SEQ ID NO: 248571 - protein, 16 aa, Homo sapiens
  CDR3 for alpha chain variable domain of TCR clone 124286 (TRAV3, TRAJ10)
CAVRDMNAGGGNKLTS

SEQ ID NO: 248572 - protein, 15 aa, Homo sapiens
  CDR3 for beta chain variable domain of TCR clone 124286 (TRBV19, TRBJ1-1)
CASRLRAIQNTEAFF

SEQ ID NO: 248573 - protein, 11 aa, Homo sapiens
  CDR3 for alpha chain variable domain of TCR clone 124287 (TRAV35, TRAJ34)
CWARNTYKLIF

SEQ ID NO: 248574 - protein, 13 aa, Homo sapiens
  CDR3 for beta chain variable domain of TCR clone 124287 (TRBV19, TRBJ2-7)
CASSIDRTYEQYF

SEQ ID NO: 248575 - protein, 15 aa, Homo sapiens
  CDR3 for alpha chain variable domain of TCR clone 124288 (TRAV8-6, TRAJ6)
CAVSGESGGSYIPTF

SEQ ID NO: 248576 - protein, 14 aa, Homo sapiens
  CDR3 for beta chain variable domain of TCR clone 124288 (TRBV7-9, TRBJ2-1)
CASSSMVGFGEQFF

SEQ ID NO: 248577 - protein, 12 aa, Homo sapiens
  CDR3 for alpha chain variable domain of TCR clone 124289 (TRAV3, TRAJ20)
CAVRDGDYKLSF

SEQ ID NO: 248578 - protein, 15 aa, Homo sapiens
  CDR3 for beta chain variable domain of TCR clone 124289 (TRBV12-4, TRBJ2-5)
CASSPPTGLQETQYF

SEQ ID NO: 248579 - protein, 15 aa, Homo sapiens
  CDR3 for alpha chain variable domain of TCR clone 124290 (TRAV3, TRAJ4)
CAVRDGTGGYNKLIF

SEQ ID NO: 248580 - protein, 13 aa, Homo sapiens
  CDR3 for beta chain variable domain of TCR clone 124290 (TRBV12-5, TRBJ1-2)
CASGVRTGNGYIF

SEQ ID NO: 248581 - protein, 13 aa, Homo sapiens
  CDR3 for alpha chain variable domain of TCR clone 124291 (TRAV35, TRAJ26)
CAGRDNYGQNFVF

SEQ ID NO: 248582 - protein, 13 aa, Homo sapiens
  CDR3 for beta chain variable domain of TCR clone 124291 (TRBV7-3, TRBJ1-2)
CASSLKRGYGYTF

SEQ ID NO: 248583 - protein, 14 aa, Homo sapiens
  CDR3 for alpha chain variable domain of TCR clone 124292 (TRAV1-2, TRAJ16)
CAVNRFSDGQKLLL

SEQ ID NO: 248584 - protein, 13 aa, Homo sapiens
  CDR3 for beta chain variable domain of TCR clone 124292 (TRBV19, TRBJ2-7)
CASRKAGGSEQYF

SEQ ID NO: 248585 - protein, 15 aa, Homo sapiens
  CDR3 for alpha chain variable domain of TCR clone 124293 (TRAV21, TRAJ53)
CATFNSGGSNYKLTF

SEQ ID NO: 248586 - protein, 16 aa, Homo sapiens
  CDR3 for beta chain variable domain of TCR clone 124293 (TRBV9, TRBJ2-1)
CASSVGGGGNYNEQFF

SEQ ID NO: 248587 - protein, 13 aa, Homo sapiens
  CDR3 for alpha chain variable domain of TCR clone 124294 (TRAV12-1, TRAJ16)
CVVNGPDGQTLLF

SEQ ID NO: 248588 - protein, 13 aa, Homo sapiens
  CDR3 for beta chain variable domain of TCR clone 124294 (TRBV2, TRBJ1-1)
CARNPTGGFHAFF

SEQ ID NO: 248589 - protein, 14 aa, Homo sapiens
  CDR3 for alpha chain variable domain of TCR clone 124295 (TRAV16, TRAJ48)
CALTPGFGNEKLTF

SEQ ID NO: 248590 - protein, 15 aa, Homo sapiens
  CDR3 for beta chain variable domain of TCR clone 124295 (TRBV11-2, TRBJ2-2)
CASSSDRVNAGELFF

SEQ ID NO: 248591 - protein, 14 aa, Homo sapiens
  CDR3 for alpha chain variable domain of TCR clone 124296 (TRAV1-2, TRAJ16)
CAVNRFSDGQKLLF

SEQ ID NO: 248592 - protein, 14 aa, Homo sapiens
  CDR3 for beta chain variable domain of TCR clone 124296 (TRBV19, TRBJ2-1)
CASKDPSSYNEQFF

SEQ ID NO: 248593 - protein, 12 aa, Homo sapiens
  CDR3 for alpha chain variable domain of TCR clone 124297 (TRAV26-1, TRAJ36)
CIVRVGADNLFF

SEQ ID NO: 248594 - protein, 13 aa, Homo sapiens
  CDR3 for beta chain variable domain of TCR clone 124297 (TRBV11-2, TRBJ2-5)
CASSRGPSETQYF

SEQ ID NO: 248595 - protein, 11 aa, Homo sapiens
  CDR3 for alpha chain variable domain of TCR clone 124298 (TRAV21, TRAJ34)
CAHYNTDKLIL

SEQ ID NO: 248596 - protein, 16 aa, Homo sapiens
  CDR3 for beta chain variable domain of TCR clone 124298 (TRBV2, TRBJ2-7)
CASSEPWTGPSYEQYF

SEQ ID NO: 248597 - protein, 17 aa, Homo sapiens
  CDR3 for alpha chain variable domain of TCR clone 124299 (TRAV3, TRAJ6)
CAVRDGPRAGGSDIPTF

SEQ ID NO: 248598 - protein, 14 aa, Homo sapiens
  CDR3 for beta chain variable domain of TCR clone 124299 (TRBV7-2, TRBJ2-7)
RASSPKTSFYEQYF

SEQ ID NO: 248599 - protein, 16 aa, Homo sapiens
  CDR3 for alpha chain variable domain of TCR clone 124300 (TRAV12-3, TRAJ53)
CAMSPGSGGSNYKLTF

SEQ ID NO: 248600 - protein, 16 aa, Homo sapiens
  CDR3 for beta chain variable domain of TCR clone 124300 (TRBV28, TRBJ1-6)
CASSPLGGEDNSPLHF

SEQ ID NO: 248601 - protein, 15 aa, Homo sapiens
  CDR3 for alpha chain variable domain of TCR clone 124301 (TRAV17, TRAJ57)
CATGPSQGGSEKLVF

SEQ ID NO: 248602 - protein, 12 aa, Homo sapiens
  CDR3 for beta chain variable domain of TCR clone 124301 (TRBV7-8, TRBJ2-7)
CASSLGDREQYF

SEQ ID NO: 248603 - protein, 13 aa, Homo sapiens
  CDR3 for alpha chain variable domain of TCR clone 124302 (TRAV13-2, TRAJ10)
CAENTGGGNKLNF

SEQ ID NO: 248604 - protein, 15 aa, Homo sapiens
  CDR3 for beta chain variable domain of TCR clone 124302 (TRBV12-4, TRBJ2-2)
CASSRQGANTGELFF

SEQ ID NO: 248605 - protein, 13 aa, Homo sapiens
  CDR3 for alpha chain variable domain of TCR clone 124303 (TRAV8-3, TRAJ28)
CAVGAVGSYQLTF

SEQ ID NO: 248606 - protein, 15 aa, Homo sapiens
  CDR3 for beta chain variable domain of TCR clone 124303 (TRBV7-9, TRBJ1-5)
CASSQGHQPIQPQHF

SEQ ID NO: 248607 - protein, 13 aa, Homo sapiens
  CDR3 for alpha chain variable domain of TCR clone 124304 (TRAV8-3, TRAJ28)
CAVGAVGSYQLTF

SEQ ID NO: 248608 - protein, 13 aa, Homo sapiens
  CDR3 for beta chain variable domain of TCR clone 124304 (TRBV12-4, TRBJ2-5)
CASSLGGSRTQYF

SEQ ID NO: 248609 - protein, 11 aa, Homo sapiens
  CDR3 for alpha chain variable domain of TCR clone 124305 (TRAV25, TRAJ47)
YAGLYGNKLVF

SEQ ID NO: 248610 - protein, 14 aa, Homo sapiens
  CDR3 for beta chain variable domain of TCR clone 124305 (TRBV19, TRBJ2-1)
CASKEGVQVNEQFF

SEQ ID NO: 248611 - protein, 14 aa, Homo sapiens
  CDR3 for alpha chain variable domain of TCR clone 124306 (TRAV16, TRAJ39)
CALSKNNAGNMLTF

SEQ ID NO: 248612 - protein, 16 aa, Homo sapiens
  CDR3 for beta chain variable domain of TCR clone 124306 (TRBV19, TRBJ2-1)
CASSIETGSPYNEQFF

SEQ ID NO: 248613 - protein, 11 aa, Homo sapiens
  CDR3 for alpha chain variable domain of TCR clone 124307 (TRAV35, TRAJ34)
CWARNTDKLIF

SEQ ID NO: 248614 - protein, 14 aa, Homo sapiens
  CDR3 for beta chain variable domain of TCR clone 124307 (TRBV5-1, TRBJ2-7)
CTSSRGESLYEQYF

SEQ ID NO: 248615 - protein, 15 aa, Homo sapiens
  CDR3 for alpha chain variable domain of TCR clone 124308 (TRAV8-3, TRAJ45)
CASSYSGGGADGLTF

SEQ ID NO: 248616 - protein, 13 aa, Homo sapiens
  CDR3 for beta chain variable domain of TCR clone 124308 (TRBV10-3, TRBJ2-7)
CASKLAVNYEQYF

SEQ ID NO: 248617 - protein, 15 aa, Homo sapiens
  CDR3 for alpha chain variable domain of TCR clone 124309 (TRAV3, TRAJ47)
CAVRDIGEYGNKLVF

SEQ ID NO: 248618 - protein, 13 aa, Homo sapiens
  CDR3 for beta chain variable domain of TCR clone 124309 (TRBV2, TRBJ1-1)
CASRWTVNTEAFF

SEQ ID NO: 248619 - protein, 12 aa, Homo sapiens
  CDR3 for alpha chain variable domain of TCR clone 124310 (TRAV21, TRAJ33)
CAKMDSNYQLIW

SEQ ID NO: 248620 - protein, 15 aa, Homo sapiens
  CDR3 for beta chain variable domain of TCR clone 124310 (TRBV28, TRBJ2-7)
CASSPGGRGFYEQYF

SEQ ID NO: 248621 - protein, 14 aa, Homo sapiens
  CDR3 for alpha chain variable domain of TCR clone 124311 (TRAV12-2, TRAJ40)
CAVKIPSGTYKYIF

SEQ ID NO: 248622 - protein, 17 aa, Homo sapiens
  CDR3 for beta chain variable domain of TCR clone 124311 (TRBV25-1, TRBJ2-7)
CASSDARVVFSSYEQYF

SEQ ID NO: 248623 - protein, 14 aa, Homo sapiens
  CDR3 for alpha chain variable domain of TCR clone 124312 (TRAV8-3, TRAJ4)
CAVGAAGGYNKLIF

SEQ ID NO: 248624 - protein, 15 aa, Homo sapiens
  CDR3 for beta chain variable domain of TCR clone 124312 (TRBV6-5, TRBJ2-1)
CASSYDAGAGNEQCF

SEQ ID NO: 248625 - protein, 12 aa, Homo sapiens
  CDR3 for alpha chain variable domain of TCR clone 124313 (TRAV27, TRAJ42)
WAGGGSQGNLIF

SEQ ID NO: 248626 - protein, 13 aa, Homo sapiens
  CDR3 for beta chain variable domain of TCR clone 124313 (TRBV19, TRBJ2-7)
CASSIRSSYEQYF

SEQ ID NO: 248627 - protein, 13 aa, Homo sapiens
  CDR3 for alpha chain variable domain of TCR clone 124314 (TRAV20, TRAJ45)
CAVKKRRCRRTDL

SEQ ID NO: 248628 - protein, 14 aa, Homo sapiens
  CDR3 for beta chain variable domain of TCR clone 124314 (TRBV15, TRBJ2-5)
CATSIGGLGETQYF

SEQ ID NO: 248629 - protein, 16 aa, Homo sapiens
  CDR3 for alpha chain variable domain of TCR clone 124315 (TRAV3, TRAJ13)
CAVRDPNSGGYQKVTF

SEQ ID NO: 248630 - protein, 13 aa, Homo sapiens
  CDR3 for beta chain variable domain of TCR clone 124315 (TRBV7-9, TRBJ2-7)
CASSLQGFYEQYF

SEQ ID NO: 248631 - protein, 14 aa, Homo sapiens
  CDR3 for alpha chain variable domain of TCR clone 124316 (TRAV35, TRAJ33)
CAGSSQDSNYQLIW

SEQ ID NO: 248632 - protein, 15 aa, Homo sapiens
  CDR3 for beta chain variable domain of TCR clone 124316 (TRBV20-1, TRBJ2-7)
CSAESGTSAAYEQYF

SEQ ID NO: 248633 - protein, 14 aa, Homo sapiens
  CDR3 for alpha chain variable domain of TCR clone 124317 (TRAV13-1, TRAJ10)
CAALFTGGGNKLTL

SEQ ID NO: 248634 - protein, 15 aa, Homo sapiens
  CDR3 for beta chain variable domain of TCR clone 124317 (TRBV10-3, TRBJ2-2)
CAISEGDRAAGELFF

SEQ ID NO: 248635 - protein, 13 aa, Homo sapiens
  CDR3 for alpha chain variable domain of TCR clone 124318 (TRAV12-2, TRAJ42)
CAVKRGSQGNLIF

SEQ ID NO: 248636 - protein, 16 aa, Homo sapiens
  CDR3 for beta chain variable domain of TCR clone 124318 (TRBV9, TRBJ2-2)
CVSSAMGKGNTGELFF

SEQ ID NO: 248637 - protein, 14 aa, Homo sapiens
  CDR3 for alpha chain variable domain of TCR clone 124319 (TRAV12-2, TRAJ40)
CAVKITSGTYKYIF

SEQ ID NO: 248638 - protein, 17 aa, Homo sapiens
  CDR3 for beta chain variable domain of TCR clone 124319 (TRBV11-2, TRBJ2-1)
CASSLYPPGVEYNEQFF

SEQ ID NO: 248639 - protein, 11 aa, Homo sapiens
  CDR3 for alpha chain variable domain of TCR clone 124320 (TRAV21, TRAJ34)
CAHYNTDKLIF

SEQ ID NO: 248640 - protein, 14 aa, Homo sapiens
  CDR3 for beta chain variable domain of TCR clone 124320 (TRBV7-2, TRBJ2-7)
CASRSQGAAYEQYF

SEQ ID NO: 248641 - protein, 14 aa, Homo sapiens
  CDR3 for alpha chain variable domain of TCR clone 124321 (TRAV1-2, TRAJ16)
CAVKRFSDGQKLLF

SEQ ID NO: 248642 - protein, 15 aa, Homo sapiens
  CDR3 for beta chain variable domain of TCR clone 124321 (TRBV20-1, TRBJ2-7)
CSARDRVSGMDEQYF

SEQ ID NO: 248643 - protein, 13 aa, Homo sapiens
  CDR3 for alpha chain variable domain of TCR clone 124322 (TRAV17, TRAJ5)
CAPMDTGRRALTF

SEQ ID NO: 248644 - protein, 15 aa, Homo sapiens
  CDR3 for beta chain variable domain of TCR clone 124322 (TRBV6-5, TRBJ2-5)
CASSPGGGLEETQYF

SEQ ID NO: 248645 - protein, 13 aa, Homo sapiens
  CDR3 for alpha chain variable domain of TCR clone 124323 (TRAV25, TRAJ10)
CAGRTGGGNKLTF

SEQ ID NO: 248646 - protein, 15 aa, Homo sapiens
  CDR3 for beta chain variable domain of TCR clone 124323 (TRBV19, TRBJ2-1)
CASSSPGGPLDEQFF

SEQ ID NO: 248647 - protein, 19 aa, Homo sapiens
  CDR3 for alpha chain variable domain of TCR clone 124324 (TRAV26-1, TRAJ52)
CIVRGHRNAGGTSYGKLTF

SEQ ID NO: 248648 - protein, 15 aa, Homo sapiens
  CDR3 for beta chain variable domain of TCR clone 124324 (TRBV29-1, TRBJ2-1)
CSGRDRKSSYNEQFF

SEQ ID NO: 248649 - protein, 14 aa, Homo sapiens
  CDR3 for alpha chain variable domain of TCR clone 124325 (TRAV13-1, TRAJ44)
CAAKATGTASKLTF

SEQ ID NO: 248650 - protein, 11 aa, Homo sapiens
  CDR3 for beta chain variable domain of TCR clone 124325 (TRBV27, TRBJ2-3)
CASSLGDTRYF

SEQ ID NO: 248651 - protein, 15 aa, Homo sapiens
  CDR3 for alpha chain variable domain of TCR clone 124326 (TRAV26-1, TRAJ24)
CIVPLTTDSWGKFQF

SEQ ID NO: 248652 - protein, 16 aa, Homo sapiens
  CDR3 for beta chain variable domain of TCR clone 124326 (TRBV20-1, TRBJ2-1)
CSARDLKQGMNNEQFF

SEQ ID NO: 248653 - protein, 17 aa, Homo sapiens
  CDR3 for alpha chain variable domain of TCR clone 124327 (TRAV13-1, TRAJ28)
CAASPPYSGAGSYQLTF

SEQ ID NO: 248654 - protein, 14 aa, Homo sapiens
  CDR3 for beta chain variable domain of TCR clone 124327 (TRBV25-1, TRBJ1-1)
CASTHLGGNTEAFF

SEQ ID NO: 248655 - protein, 14 aa, Homo sapiens
  CDR3 for alpha chain variable domain of TCR clone 124328 (TRAV12-3, TRAJ10)
SHLPLTGGGNKLTF

SEQ ID NO: 248656 - protein, 14 aa, Homo sapiens
  CDR3 for beta chain variable domain of TCR clone 124328 (TRBV6-1, TRBJ1-3)
CASVQGGGGNIIYF

SEQ ID NO: 248657 - protein, 16 aa, Homo sapiens
  CDR3 for alpha chain variable domain of TCR clone 124329 (TRAV21, TRAJ37)
CAVRPRGSSNTGKLIF

SEQ ID NO: 248658 - protein, 13 aa, Homo sapiens
  CDR3 for beta chain variable domain of TCR clone 124329 (TRBV7-9, TRBJ2-5)
SASLSPGQETQYF

SEQ ID NO: 248659 - protein, 13 aa, Homo sapiens
  CDR3 for alpha chain variable domain of TCR clone 124330 (TRAV12-2, TRAJ6)
CAVNVSRKLHTYI

SEQ ID NO: 248660 - protein, 12 aa, Homo sapiens
  CDR3 for beta chain variable domain of TCR clone 124330 (TRBV29-1, TRBJ2-3)
CSVTGGADEQYF

SEQ ID NO: 248661 - protein, 12 aa, Homo sapiens
  CDR3 for alpha chain variable domain of TCR clone 124331 (TRAV30, TRAJ43)
CGSEERGNDMRF

SEQ ID NO: 248662 - protein, 13 aa, Homo sapiens
  CDR3 for beta chain variable domain of TCR clone 124331 (TRBV27, TRBJ2-7)
CASSFSQGYEQYF

SEQ ID NO: 248663 - protein, 14 aa, Homo sapiens
  CDR3 for alpha chain variable domain of TCR clone 124332 (TRAV1-2, TRAJ16)
CAVNRFSDGQKLLF

SEQ ID NO: 248664 - protein, 17 aa, Homo sapiens
  CDR3 for beta chain variable domain of TCR clone 124332 (TRBV7-8, TRBJ2-6)
CASSGGTGGAGANVLTF

SEQ ID NO: 248665 - protein, 15 aa, Homo sapiens
  CDR3 for alpha chain variable domain of TCR clone 124333 (TRAV4, TRAJ10)
CLVGDGSGGGNKLTF

SEQ ID NO: 248666 - protein, 13 aa, Homo sapiens
  CDR3 for beta chain variable domain of TCR clone 124333 (TRBV24-1, TRBJ2-2)
CATSDWSTGELFF

SEQ ID NO: 248667 - protein, 16 aa, Homo sapiens
  CDR3 for alpha chain variable domain of TCR clone 124334 (TRAV3, TRAJ32)
CAVRENYGGSTNKLIF

SEQ ID NO: 248668 - protein, 12 aa, Homo sapiens
  CDR3 for beta chain variable domain of TCR clone 124334 (TRBV20-1, TRBJ1-2)
CSVTPEGYGYTF

SEQ ID NO: 248669 - protein, 14 aa, Homo sapiens
  CDR3 for alpha chain variable domain of TCR clone 124335 (TRAV17, TRAJ56)
CATAPAGANSKLTF

SEQ ID NO: 248670 - protein, 13 aa, Homo sapiens
  CDR3 for beta chain variable domain of TCR clone 124335 (TRBV12-4, TRBJ2-2)
CASSITGSGELFF

SEQ ID NO: 248671 - protein, 12 aa, Homo sapiens
  CDR3 for alpha chain variable domain of TCR clone 124336 (TRAV3, TRAJ20)
CAVRDPYYKLSF

SEQ ID NO: 248672 - protein, 11 aa, Homo sapiens
  CDR3 for beta chain variable domain of TCR clone 124336 (TRBV28, TRBJ2-5)
CASSLKETQYF

SEQ ID NO: 248673 - protein, 14 aa, Homo sapiens
  CDR3 for alpha chain variable domain of TCR clone 124337 (TRAV13-1, TRAJ40)
CAASMTSGTYKYIF

SEQ ID NO: 248674 - protein, 16 aa, Homo sapiens
  CDR3 for beta chain variable domain of TCR clone 124337 (TRBV19, TRBJ2-1)
CASSMGGGSSYNEQFF

SEQ ID NO: 248675 - protein, 16 aa, Homo sapiens
  CDR3 for alpha chain variable domain of TCR clone 124338 (TRAV3, TRAJ10)
CAVRDMRAGGGNKLTF

SEQ ID NO: 248676 - protein, 13 aa, Homo sapiens
  CDR3 for beta chain variable domain of TCR clone 124338 (TRBV18, TRBJ2-7)
CASSPGQDYEQYF

SEQ ID NO: 248677 - protein, 13 aa, Homo sapiens
  CDR3 for alpha chain variable domain of TCR clone 124339 (TRAV13-2, TRAJ13)
CAERPGGYQKVTF

SEQ ID NO: 248678 - protein, 15 aa, Homo sapiens
  CDR3 for beta chain variable domain of TCR clone 124339 (TRBV11-3, TRBJ2-7)
CASSPGAASSYEQYF

SEQ ID NO: 248679 - protein, 13 aa, Homo sapiens
  CDR3 for alpha chain variable domain of TCR clone 124340 (TRAV21, TRAJ27)
CAARPGNAGKSTF

SEQ ID NO: 248680 - protein, 12 aa, Homo sapiens
  CDR3 for beta chain variable domain of TCR clone 124340 (TRBV12-4, TRBJ2-1)
CASSPGRNEQFF

SEQ ID NO: 248681 - protein, 17 aa, Homo sapiens
  CDR3 for alpha chain variable domain of TCR clone 124341 (TRAV26-1, TRAJ58)
CIVRVGAEETSGSRLTF

SEQ ID NO: 248682 - protein, 13 aa, Homo sapiens
  CDR3 for beta chain variable domain of TCR clone 124341 (TRBV12-5, TRBJ1-2)
CASGVRTGNGYAF

SEQ ID NO: 248683 - protein, 14 aa, Homo sapiens
  CDR3 for alpha chain variable domain of TCR clone 124342 (TRAV26-1, TRAJ22)
CIVRVCGSARQLTF

SEQ ID NO: 248684 - protein, 17 aa, Homo sapiens
  CDR3 for beta chain variable domain of TCR clone 124342 (TRBV7-3, TRBJ2-3)
CASSPGGLAGFGDTQYF

SEQ ID NO: 248685 - protein, 11 aa, Homo sapiens
  CDR3 for alpha chain variable domain of TCR clone 124343 (TRAV23/DV6, TRAJ9)
CAASLSPPNTG

SEQ ID NO: 248686 - protein, 15 aa, Homo sapiens
  CDR3 for beta chain variable domain of TCR clone 124343 (TRBV2, TRBJ2-7)
CASSEGLARSYEQYF

SEQ ID NO: 248687 - protein, 18 aa, Homo sapiens
  CDR3 for alpha chain variable domain of TCR clone 124344 (TRAV13-1, TRAJ52)
CAAKNPNAGGTSYGKLTF

SEQ ID NO: 248688 - protein, 14 aa, Homo sapiens
  CDR3 for beta chain variable domain of TCR clone 124344 (TRBV4-1, TRBJ2-2)
CASSQAVNTGELLF

SEQ ID NO: 248689 - protein, 13 aa, Homo sapiens
  CDR3 for alpha chain variable domain of TCR clone 124345 (TRAV3, TRAJ27)
CAVTNTNAGKSTF

SEQ ID NO: 248690 - protein, 15 aa, Homo sapiens
  CDR3 for beta chain variable domain of TCR clone 124345 (TRBV3-1, TRBJ2-7)
CASSQGVGVKVEQYF

SEQ ID NO: 248691 - protein, 14 aa, Homo sapiens
  CDR3 for alpha chain variable domain of TCR clone 124346 (TRAV29/DV5, TRAJ36)
CAARRKTGANNLFF

SEQ ID NO: 248692 - protein, 18 aa, Homo sapiens
  CDR3 for beta chain variable domain of TCR clone 124346 (TRBV7-9, TRBJ2-7)
CASSLTTSGSRTWYEQYF

SEQ ID NO: 248693 - protein, 14 aa, Homo sapiens
  CDR3 for alpha chain variable domain of TCR clone 124347 (TRAV12-2, TRAJ40)
CAVKIPSGAYKYIF

SEQ ID NO: 248694 - protein, 17 aa, Homo sapiens
  CDR3 for beta chain variable domain of TCR clone 124347 (TRBV13, TRBJ2-3)
CASSLSRVAGGRNTQYF

SEQ ID NO: 248695 - protein, 14 aa, Homo sapiens
  CDR3 for alpha chain variable domain of TCR clone 124348 (TRAV13-1, TRAJ44)
CAAKATGTASKLTF

SEQ ID NO: 248696 - protein, 12 aa, Homo sapiens
  CDR3 for beta chain variable domain of TCR clone 124348 (TRBV7-8, TRBJ2-7)
CASSRGDREQYF

SEQ ID NO: 248697 - protein, 14 aa, Homo sapiens
  CDR3 for alpha chain variable domain of TCR clone 124349 (TRAV2, TRAJ43)
TTVLWRTNNNDMRF

SEQ ID NO: 248698 - protein, 14 aa, Homo sapiens
  CDR3 for beta chain variable domain of TCR clone 124349 (TRBV27, TRBJ2-2)
CASRPGVNTGELFF

SEQ ID NO: 248699 - protein, 13 aa, Homo sapiens
  CDR3 for alpha chain variable domain of TCR clone 124350 (TRAV17, TRAJ9)
CATDYTGGFKTIF

SEQ ID NO: 248700 - protein, 14 aa, Homo sapiens
  CDR3 for beta chain variable domain of TCR clone 124350 (TRBV19, TRBJ2-5)
CPSSMTGQQETQYF

SEQ ID NO: 248701 - protein, 15 aa, Homo sapiens
  CDR3 for alpha chain variable domain of TCR clone 124351 (TRAV8-3, TRAJ7)
CAVGSISYGNNRLAL

SEQ ID NO: 248702 - protein, 15 aa, Homo sapiens
  CDR3 for beta chain variable domain of TCR clone 124351 (TRBV4-2, TRBJ1-1)
CASSQEDLPRTEAFF

SEQ ID NO: 248703 - protein, 15 aa, Homo sapiens
  CDR3 for alpha chain variable domain of TCR clone 124352 (TRAV12-3, TRAJ27)
CAMRAYHTNAGKSTF

SEQ ID NO: 248704 - protein, 13 aa, Homo sapiens
  CDR3 for beta chain variable domain of TCR clone 124352 (TRBV11-2, TRBJ2-5)
CASSRGPSETQYF

SEQ ID NO: 248705 - protein, 15 aa, Homo sapiens
  CDR3 for alpha chain variable domain of TCR clone 124353 (TRAV12-3, TRAJ6)
CAMSATTGGSYIPTF

SEQ ID NO: 248706 - protein, 13 aa, Homo sapiens
  CDR3 for beta chain variable domain of TCR clone 124353 (TRBV12-4, TRBJ2-5)
CASSAQVRETQYF

SEQ ID NO: 248707 - protein, 10 aa, Homo sapiens
  CDR3 for alpha chain variable domain of TCR clone 124354 (TRAV1-2, TRAJ31)
CVSEDARLMF

SEQ ID NO: 248708 - protein, 13 aa, Homo sapiens
  CDR3 for beta chain variable domain of TCR clone 124354 (TRBV7-3, TRBJ1-1)
CASSQDWGAEAFF

SEQ ID NO: 248709 - protein, 14 aa, Homo sapiens
  CDR3 for alpha chain variable domain of TCR clone 124355 (TRAV12-2, TRAJ9)
CSVNALEGGFKTIF

SEQ ID NO: 248710 - protein, 16 aa, Homo sapiens
  CDR3 for beta chain variable domain of TCR clone 124355 (TRBV19, TRBJ1-6)
CASSVAPVAGNSPLHF

SEQ ID NO: 248711 - protein, 15 aa, Homo sapiens
  CDR3 for alpha chain variable domain of TCR clone 124356 (TRAV13-1, TRAJ3)
RAASKLASSASKIIF

SEQ ID NO: 248712 - protein, 16 aa, Homo sapiens
  CDR3 for beta chain variable domain of TCR clone 124356 (TRBV25-1, TRBJ1-5)
CASGAPTVNSNQPQHF

SEQ ID NO: 248713 - protein, 11 aa, Homo sapiens
  CDR3 for alpha chain variable domain of TCR clone 124357 (TRAV1-1, TRAJ16)
CAAGDGQKLLF

SEQ ID NO: 248714 - protein, 15 aa, Homo sapiens
  CDR3 for beta chain variable domain of TCR clone 124357 (TRBV28, TRBJ1-2)
CASIPQGSDDYGYNF

SEQ ID NO: 248715 - protein, 12 aa, Homo sapiens
  CDR3 for alpha chain variable domain of TCR clone 124358 (TRAV12-3, TRAJ20)
CAMVRGDYKLSF

SEQ ID NO: 248716 - protein, 16 aa, Homo sapiens
  CDR3 for beta chain variable domain of TCR clone 124358 (TRBV7-2, TRBJ1-6)
CASSSFESSYNSPLHF

SEQ ID NO: 248717 - protein, 13 aa, Homo sapiens
  CDR3 for alpha chain variable domain of TCR clone 124359 (TRAV2, TRAJ40)
CAVVTSGTYKYIF

SEQ ID NO: 248718 - protein, 16 aa, Homo sapiens
  CDR3 for beta chain variable domain of TCR clone 124359 (TRBV4-1, TRBJ2-3)
CASSQSTSGAEDTQYF

SEQ ID NO: 248719 - protein, 18 aa, Homo sapiens
  CDR3 for alpha chain variable domain of TCR clone 124360 (TRAV3, TRAJ32)
CAVRDIRGYGGATNKLIF

SEQ ID NO: 248720 - protein, 10 aa, Homo sapiens
  CDR3 for beta chain variable domain of TCR clone 124360 (TRBV12-4, TRBJ2-2)
CASSLGVRHA

SEQ ID NO: 248721 - protein, 12 aa, Homo sapiens
  CDR3 for alpha chain variable domain of TCR clone 124361 (TRAV26-1, TRAJ13)
CIVSRGYQKVTF

SEQ ID NO: 248722 - protein, 13 aa, Homo sapiens
  CDR3 for beta chain variable domain of TCR clone 124361 (TRBV7-9, TRBJ1-2)
CASSLKQNYGYTF

SEQ ID NO: 248723 - protein, 17 aa, Homo sapiens
  CDR3 for alpha chain variable domain of TCR clone 124362 (TRAV4, TRAJ13)
CLVGVQGSSGGYQKVTF

SEQ ID NO: 248724 - protein, 17 aa, Homo sapiens
  CDR3 for beta chain variable domain of TCR clone 124362 (TRBV7-3, TRBJ2-3)
CASSLMKRMRGADTQYF

SEQ ID NO: 248725 - protein, 16 aa, Homo sapiens
  CDR3 for alpha chain variable domain of TCR clone 124363 (TRAV26-1, TRAJ50)
CIVRALMKTSYDKVIF

SEQ ID NO: 248726 - protein, 15 aa, Homo sapiens
  CDR3 for beta chain variable domain of TCR clone 124363 (TRBV28, TRBJ2-1)
CASSIIAGGRNEQFF

SEQ ID NO: 248727 - protein, 14 aa, Homo sapiens
  CDR3 for alpha chain variable domain of TCR clone 124364 (TRAV12-2, TRAJ5)
CAVNRSTGRRALTF

SEQ ID NO: 248728 - protein, 12 aa, Homo sapiens
  CDR3 for beta chain variable domain of TCR clone 124364 (TRBV19, TRBJ1-5)
CASSIAQQPEHF

SEQ ID NO: 248729 - protein, 23 aa, Homo sapiens
  CDR3 for alpha chain variable domain of TCR clone 124365 (TRAV3, TRAJ24)
CAVRDKMTAGGNCSLEQGPRLRS

SEQ ID NO: 248730 - protein, 14 aa, Homo sapiens
  CDR3 for beta chain variable domain of TCR clone 124365 (TRBV7-2, TRBJ2-3)
CASSQTGSSYTQYF

SEQ ID NO: 248731 - protein, 14 aa, Homo sapiens
  CDR3 for alpha chain variable domain of TCR clone 124366 (TRAV26-1, TRAJ38)
CIADNAGNNRKLIW

SEQ ID NO: 248732 - protein, 17 aa, Homo sapiens
  CDR3 for beta chain variable domain of TCR clone 124366 (TRBV15, TRBJ1-1)
CATSRVGGADGDTEVFF

SEQ ID NO: 248733 - protein, 17 aa, Homo sapiens
  CDR3 for alpha chain variable domain of TCR clone 124367 (TRAV36/DV7, TRAJ52)
CAVAQRAGGTSYGKLTF

SEQ ID NO: 248734 - protein, 14 aa, Homo sapiens
  CDR3 for beta chain variable domain of TCR clone 124367 (TRBV20-1, TRBJ1-1)
CSAQTRIGSTEAFF

SEQ ID NO: 248735 - protein, 14 aa, Homo sapiens
  CDR3 for alpha chain variable domain of TCR clone 124368 (TRAV12-2, TRAJ40)
CAVKIPSGTYKYIF

SEQ ID NO: 248736 - protein, 11 aa, Homo sapiens
  CDR3 for beta chain variable domain of TCR clone 124368 (TRBV7-9, TRBJ2-3)
CASSPTDTQYF

SEQ ID NO: 248737 - protein, 15 aa, Homo sapiens
  CDR3 for alpha chain variable domain of TCR clone 124369 (TRAV8-4, TRAJ47)
CAVSDLLGYGNNLVF

SEQ ID NO: 248738 - protein, 16 aa, Homo sapiens
  CDR3 for beta chain variable domain of TCR clone 124369 (TRBV19, TRBJ2-2)
CASSPSGGLNTGELFF

SEQ ID NO: 248739 - protein, 11 aa, Homo sapiens
  CDR3 for alpha chain variable domain of TCR clone 124370 (TRAV2, TRAJ33)
CAVESNYQLIW

SEQ ID NO: 248740 - protein, 13 aa, Homo sapiens
  CDR3 for beta chain variable domain of TCR clone 124370 (TRBV11-3, TRBJ1-1)
CATEEGLNTEAFF

SEQ ID NO: 248741 - protein, 12 aa, Homo sapiens
  CDR3 for alpha chain variable domain of TCR clone 124371 (TRAV35, TRAJ40)
CAGRAGTYKYIF

SEQ ID NO: 248742 - protein, 15 aa, Homo sapiens
  CDR3 for beta chain variable domain of TCR clone 124371 (TRBV7-9, TRBJ1-6)
CASSSPGRGNSPLHF

SEQ ID NO: 248743 - protein, 14 aa, Homo sapiens
  CDR3 for alpha chain variable domain of TCR clone 124372 (TRAV8-4, TRAJ9)
CAVILNTGGFKTIF

SEQ ID NO: 248744 - protein, 11 aa, Homo sapiens
  CDR3 for beta chain variable domain of TCR clone 124372 (TRBV7-9, TRBJ2-6)
CASPRVNVLTF

SEQ ID NO: 248745 - protein, 14 aa, Homo sapiens
  CDR3 for alpha chain variable domain of TCR clone 124373 (TRAV16, TRAJ48)
CALTPGFGNEKLTF

SEQ ID NO: 248746 - protein, 13 aa, Homo sapiens
  CDR3 for beta chain variable domain of TCR clone 124373 (TRBV12-5, TRBJ2-3)
CASGDRQSDTQYF

SEQ ID NO: 248747 - protein, 15 aa, Homo sapiens
  CDR3 for alpha chain variable domain of TCR clone 124374 (TRAV25, TRAJ23)
CALAPNYNPGGKLIF

SEQ ID NO: 248748 - protein, 13 aa, Homo sapiens
  CDR3 for beta chain variable domain of TCR clone 124374 (TRBV11-3, TRBJ1-1)
CASSWDGNTEAFF

SEQ ID NO: 248749 - protein, 14 aa, Homo sapiens
  CDR3 for alpha chain variable domain of TCR clone 124375 (TRAV8-4, TRAJ53)
CCEWSGGSNYKLTF

SEQ ID NO: 248750 - protein, 13 aa, Homo sapiens
  CDR3 for beta chain variable domain of TCR clone 124375 (TRBV7-9, TRBJ1-2)
CASSLKQNYGYTF

SEQ ID NO: 248751 - protein, 15 aa, Homo sapiens
  CDR3 for alpha chain variable domain of TCR clone 124376 (TRAV2, TRAJ9)
CAVEERGTGGFKTIF

SEQ ID NO: 248752 - protein, 14 aa, Homo sapiens
  CDR3 for beta chain variable domain of TCR clone 124376 (TRBV4-1, TRBJ2-2)
CASSQAVNTGELFF

SEQ ID NO: 248753 - protein, 15 aa, Homo sapiens
  CDR3 for alpha chain variable domain of TCR clone 124377 (TRAV12-3, TRAJ49)
CAMAVTPNTGNQCYF

SEQ ID NO: 248754 - protein, 18 aa, Homo sapiens
  CDR3 for beta chain variable domain of TCR clone 124377 (TRBV4-1, TRBJ1-5)
CASSQDPRGQGLNQPQHF

SEQ ID NO: 248755 - protein, 14 aa, Homo sapiens
  CDR3 for alpha chain variable domain of TCR clone 124378 (TRAV13-1, TRAJ3)
CAAEGYSSASKIIF

SEQ ID NO: 248756 - protein, 16 aa, Homo sapiens
  CDR3 for beta chain variable domain of TCR clone 124378 (TRBV25-1, TRBJ1-5)
CASGAPTVNSNQPQHF

SEQ ID NO: 248757 - protein, 15 aa, Homo sapiens
  CDR3 for alpha chain variable domain of TCR clone 124379 (TRAV27, TRAJ53)
CRAINSGGSNYKLTF

SEQ ID NO: 248758 - protein, 14 aa, Homo sapiens
  CDR3 for beta chain variable domain of TCR clone 124379 (TRBV7-3, TRBJ2-1)
CGSSLAGGTNEQFF

SEQ ID NO: 248759 - protein, 17 aa, Homo sapiens
  CDR3 for alpha chain variable domain of TCR clone 124380 (TRAV26-1, TRAJ58)
CIVRVGAEETSGPRLTF

SEQ ID NO: 248760 - protein, 13 aa, Homo sapiens
  CDR3 for beta chain variable domain of TCR clone 124380 (TRBV12-5, TRBJ1-2)
CASGVRTGNGYTF

SEQ ID NO: 248761 - protein, 13 aa, Homo sapiens
  CDR3 for alpha chain variable domain of TCR clone 124381 (TRAV9-2, TRAJ49)
CALIQIGGNQFYF

SEQ ID NO: 248762 - protein, 13 aa, Homo sapiens
  CDR3 for beta chain variable domain of TCR clone 124381 (TRBV5-5, TRBJ1-2)
CASSFWRGEDYSF

SEQ ID NO: 248763 - protein, 13 aa, Homo sapiens
  CDR3 for alpha chain variable domain of TCR clone 124382 (TRAV29/DV5, TRAJ47)
CAASAEYGNKLVF

SEQ ID NO: 248764 - protein, 15 aa, Homo sapiens
  CDR3 for beta chain variable domain of TCR clone 124382 (TRBV7-9, TRBJ1-4)
CASSARTGGNDKLFF

SEQ ID NO: 248765 - protein, 10 aa, Homo sapiens
  CDR3 for alpha chain variable domain of TCR clone 124383 (TRAV1-2, TRAJ20)
CALNDYKLSF

SEQ ID NO: 248766 - protein, 16 aa, Homo sapiens
  CDR3 for beta chain variable domain of TCR clone 124383 (TRBV20-1, TRBJ1-1)
CSARALTQGMNTESFF

SEQ ID NO: 248767 - protein, 12 aa, Homo sapiens
  CDR3 for alpha chain variable domain of TCR clone 124384 (TRAV27, TRAJ35)
CAGADFGNVLHC

SEQ ID NO: 248768 - protein, 16 aa, Homo sapiens
  CDR3 for beta chain variable domain of TCR clone 124384 (TRBV6-1, TRBJ2-1)
CASILRQGRSYNEQFF

SEQ ID NO: 248769 - protein, 15 aa, Homo sapiens
  CDR3 for alpha chain variable domain of TCR clone 124385 (TRAV3, TRAJ5)
CAVRDRKTGRRALTF

SEQ ID NO: 248770 - protein, 15 aa, Homo sapiens
  CDR3 for beta chain variable domain of TCR clone 124385 (TRBV7-8, TRBJ2-1)
CPSSLADSLYNEQFF

SEQ ID NO: 248771 - protein, 14 aa, Homo sapiens
  CDR3 for alpha chain variable domain of TCR clone 124386 (TRAV1-2, TRAJ16)
CAANRFSDGQKLLF

SEQ ID NO: 248772 - protein, 12 aa, Homo sapiens
  CDR3 for beta chain variable domain of TCR clone 124386 (TRBV20-1, TRBJ2-5)
CSAPRSQETQYF

SEQ ID NO: 248773 - protein, 12 aa, Homo sapiens
  CDR3 for alpha chain variable domain of TCR clone 124387 (TRAV21, TRAJ43)
CAVSWNNNDMSF

SEQ ID NO: 248774 - protein, 15 aa, Homo sapiens
  CDR3 for beta chain variable domain of TCR clone 124387 (TRBV20-1, TRBJ2-1)
CSASPPSGGYNEQFF

SEQ ID NO: 248775 - protein, 14 aa, Homo sapiens
  CDR3 for alpha chain variable domain of TCR clone 124388 (TRAV9-2, TRAJ39)
CALYIYNAGNMLTF

SEQ ID NO: 248776 - protein, 13 aa, Homo sapiens
  CDR3 for beta chain variable domain of TCR clone 124388 (TRBV20-1, TRBJ1-1)
CSAPLGGGTEAFF

SEQ ID NO: 248777 - protein, 13 aa, Homo sapiens
  CDR3 for alpha chain variable domain of TCR clone 124389 (TRAV8-3, TRAJ48)
CAVVPFGNEKLSF

SEQ ID NO: 248778 - protein, 15 aa, Homo sapiens
  CDR3 for beta chain variable domain of TCR clone 124389 (TRBV11-2, TRBJ2-1)
CASSSPSTRYNEQFF

SEQ ID NO: 248779 - protein, 14 aa, Homo sapiens
  CDR3 for alpha chain variable domain of TCR clone 124390 (TRAV1-2, TRAJ16)
CAVNRFSDGQKLLF

SEQ ID NO: 248780 - protein, 14 aa, Homo sapiens
  CDR3 for beta chain variable domain of TCR clone 124390 (TRBV19, TRBJ2-7)
CASSMGQGASEQYF

SEQ ID NO: 248781 - protein, 17 aa, Homo sapiens
  CDR3 for alpha chain variable domain of TCR clone 124391 (TRAV3, TRAJ12)
CAVRDGGRMDSSYKLIF

SEQ ID NO: 248782 - protein, 13 aa, Homo sapiens
  CDR3 for beta chain variable domain of TCR clone 124391 (TRBV15, TRBJ1-6)
CATSGGLNSTLHF

SEQ ID NO: 248783 - protein, 11 aa, Homo sapiens
  CDR3 for alpha chain variable domain of TCR clone 124392 (TRAV3, TRAJ21)
CAVGNFNKFYF

SEQ ID NO: 248784 - protein, 16 aa, Homo sapiens
  CDR3 for beta chain variable domain of TCR clone 124392 (TRBV11-2, TRBJ1-2)
CASSLDTGGADYGYTF

SEQ ID NO: 248785 - protein, 12 aa, Homo sapiens
  CDR3 for alpha chain variable domain of TCR clone 124393 (TRAV21, TRAJ41)
CAVREFRVCTQL

SEQ ID NO: 248786 - protein, 15 aa, Homo sapiens
  CDR3 for beta chain variable domain of TCR clone 124393 (TRBV18, TRBJ1-5)
CASSPQARSKQPQHF

SEQ ID NO: 248787 - protein, 17 aa, Homo sapiens
  CDR3 for alpha chain variable domain of TCR clone 124394 (TRAV17, TRAJ7)
CATLGRLAFGKGNQVVV

SEQ ID NO: 248788 - protein, 13 aa, Homo sapiens
  CDR3 for beta chain variable domain of TCR clone 124394 (TRBV12-4, TRBJ2-7)
CASSLERAREQYF

SEQ ID NO: 248789 - protein, 13 aa, Homo sapiens
  CDR3 for alpha chain variable domain of TCR clone 124395 (TRAV14/DV4, TRAJ12)
CAMREKPGYKLIF

SEQ ID NO: 248790 - protein, 15 aa, Homo sapiens
  CDR3 for beta chain variable domain of TCR clone 124395 (TRBV28, TRBJ2-5)
CASSFRQGALETQYF

SEQ ID NO: 248791 - protein, 16 aa, Homo sapiens
  CDR3 for alpha chain variable domain of TCR clone 124396 (TRAV3, TRAJ37)
CAVRGKGSGNTGKLNF

SEQ ID NO: 248792 - protein, 13 aa, Homo sapiens
  CDR3 for beta chain variable domain of TCR clone 124396 (TRBV14, TRBJ2-7)
CASSQDRRYEQYF

SEQ ID NO: 248793 - protein, 14 aa, Homo sapiens
  CDR3 for alpha chain variable domain of TCR clone 124397 (TRAV12-3, TRAJ10)
SHLPLTGGGNKLTF

SEQ ID NO: 248794 - protein, 14 aa, Homo sapiens
  CDR3 for beta chain variable domain of TCR clone 124397 (TRBV6-1, TRBJ1-3)
CSSVQGGGGNTIYF

SEQ ID NO: 248795 - protein, 15 aa, Homo sapiens
  CDR3 for alpha chain variable domain of TCR clone 124398 (TRAV2, TRAJ9)
CAVAALNTGGFKTIF

SEQ ID NO: 248796 - protein, 12 aa, Homo sapiens
  CDR3 for beta chain variable domain of TCR clone 124398 (TRBV19, TRBJ1-4)
CASKDWPGGLFF

SEQ ID NO: 248797 - protein, 13 aa, Homo sapiens
  CDR3 for alpha chain variable domain of TCR clone 124399 (TRAV1-1, TRAJ33)
CAVRRDSNYQLIW

SEQ ID NO: 248798 - protein, 14 aa, Homo sapiens
  CDR3 for beta chain variable domain of TCR clone 124399 (TRBV19, TRBJ2-1)
CASSRLASINEQFF

SEQ ID NO: 248799 - protein, 13 aa, Homo sapiens
  CDR3 for alpha chain variable domain of TCR clone 124400 (TRAV3, TRAJ4)
CAVRDGGYNKLIF

SEQ ID NO: 248800 - protein, 15 aa, Homo sapiens
  CDR3 for beta chain variable domain of TCR clone 124400 (TRBV5-1, TRBJ2-1)
CASSPPMAPYNEQFF

SEQ ID NO: 248801 - protein, 11 aa, Homo sapiens
  CDR3 for alpha chain variable domain of TCR clone 124401 (TRAV1-1, TRAJ23)
FAVRQGGKLIF

SEQ ID NO: 248802 - protein, 12 aa, Homo sapiens
  CDR3 for beta chain variable domain of TCR clone 124401 (TRBV19, TRBJ1-5)
CASSIAQQPQHF

SEQ ID NO: 248803 - protein, 10 aa, Homo sapiens
  CDR3 for alpha chain variable domain of TCR clone 124402 (TRAV8-4, TRAJ43)
CAVSADDMRF

SEQ ID NO: 248804 - protein, 15 aa, Homo sapiens
  CDR3 for beta chain variable domain of TCR clone 124402 (TRBV5-1, TRBJ2-1)
CASSPPRAPYNEQFF

SEQ ID NO: 248805 - protein, 11 aa, Homo sapiens
  CDR3 for alpha chain variable domain of TCR clone 124403 (TRAV20, TRAJ23)
CACNQGGKLIF

SEQ ID NO: 248806 - protein, 16 aa, Homo sapiens
  CDR3 for beta chain variable domain of TCR clone 124403 (TRBV7-3, TRBJ2-1)
CASSLEGYRSYNEQFF

SEQ ID NO: 248807 - protein, 12 aa, Homo sapiens
  CDR3 for alpha chain variable domain of TCR clone 124404 (TRAV38-2/DV8, TRAJ48)
CAYRRGREKLTF

SEQ ID NO: 248808 - protein, 15 aa, Homo sapiens
  CDR3 for beta chain variable domain of TCR clone 124404 (TRBV7-2, TRBJ2-1)
CASTHGTGIYNEQFF

SEQ ID NO: 248809 - protein, 23 aa, Homo sapiens
  CDR3 for alpha chain variable domain of TCR clone 124405 (TRAV26-1, TRAJ38)
CIAANAGNNHIQNPDPAVYQLRD

SEQ ID NO: 248810 - protein, 12 aa, Homo sapiens
  CDR3 for beta chain variable domain of TCR clone 124405 (TRBV11-2, TRBJ2-2)
CASSLGGGELFF

SEQ ID NO: 248811 - protein, 11 aa, Homo sapiens
  CDR3 for alpha chain variable domain of TCR clone 124406 (TRAV12-1, TRAJ31)
CVGRVQCQTHV

SEQ ID NO: 248812 - protein, 12 aa, Homo sapiens
  CDR3 for beta chain variable domain of TCR clone 124406 (TRBV7-8, TRBJ2-7)
CASSLGDREQYF

SEQ ID NO: 248813 - protein, 11 aa, Homo sapiens
  CDR3 for alpha chain variable domain of TCR clone 124407 (TRAV3, TRAJ43)
CERGRNNDMRF

SEQ ID NO: 248814 - protein, 12 aa, Homo sapiens
  CDR3 for beta chain variable domain of TCR clone 124407 (TRBV5-1, TRBJ2-7)
CASSLDSYEQYF

SEQ ID NO: 248815 - protein, 16 aa, Homo sapiens
  CDR3 for alpha chain variable domain of TCR clone 124408 (TRAV8-3, TRAJ52)
CAVQPAGGTSYGELTF

SEQ ID NO: 248816 - protein, 15 aa, Homo sapiens
  CDR3 for beta chain variable domain of TCR clone 124408 (TRBV11-2, TRBJ2-7)
CASSLAGGVATEQYF

SEQ ID NO: 248817 - protein, 15 aa, Homo sapiens
  CDR3 for alpha chain variable domain of TCR clone 124409 (TRAV29/DV5, TRAJ29)
CAASERSSGNTPLVF

SEQ ID NO: 248818 - protein, 17 aa, Homo sapiens
  CDR3 for beta chain variable domain of TCR clone 124409 (TRBV4-1, TRBJ1-4)
RASSQEGPRGVEEKLFF

SEQ ID NO: 248819 - protein, 17 aa, Homo sapiens
  CDR3 for alpha chain variable domain of TCR clone 124410 (TRAV3, TRAJ12)
CAVRDGGRMDSSYKLIF

SEQ ID NO: 248820 - protein, 13 aa, Homo sapiens
  CDR3 for beta chain variable domain of TCR clone 124410 (TRBV15, TRBJ1-6)
CATSGGLNSPLLF

SEQ ID NO: 248821 - protein, 12 aa, Homo sapiens
  CDR3 for alpha chain variable domain of TCR clone 124411 (TRAV35, TRAJ49)
CAGWNTGNQFYF

SEQ ID NO: 248822 - protein, 13 aa, Homo sapiens
  CDR3 for beta chain variable domain of TCR clone 124411 (TRBV12-4, TRBJ2-5)
CASSPGTEETQYF

SEQ ID NO: 248823 - protein, 16 aa, Homo sapiens
  CDR3 for alpha chain variable domain of TCR clone 124412 (TRAV4, TRAJ9)
CLVGDPNRPGGFKTSF

SEQ ID NO: 248824 - protein, 16 aa, Homo sapiens
  CDR3 for beta chain variable domain of TCR clone 124412 (TRBV28, TRBJ1-4)
CASSPPYRGRSEKLFF

SEQ ID NO: 248825 - protein, 13 aa, Homo sapiens
  CDR3 for alpha chain variable domain of TCR clone 124413 (TRAV38-1, TRAJ42)
CARWGGSLGNLIF

SEQ ID NO: 248826 - protein, 17 aa, Homo sapiens
  CDR3 for beta chain variable domain of TCR clone 124413 (TRBV20-1, TRBJ2-1)
CSARDPLAGVWDNEQFF

SEQ ID NO: 248827 - protein, 15 aa, Homo sapiens
  CDR3 for alpha chain variable domain of TCR clone 124414 (TRAV12-3, TRAJ17)
CAMSPSLAAGNKLTF

SEQ ID NO: 248828 - protein, 14 aa, Homo sapiens
  CDR3 for beta chain variable domain of TCR clone 124414 (TRBV19, TRBJ2-1)
CASPTFVLSGEQFF

SEQ ID NO: 248829 - protein, 19 aa, Homo sapiens
  CDR3 for alpha chain variable domain of TCR clone 124415 (TRAV21, TRAJ20)
SLVTQPPTSVLPNDYKLSF

SEQ ID NO: 248830 - protein, 14 aa, Homo sapiens
  CDR3 for beta chain variable domain of TCR clone 124415 (TRBV7-2, TRBJ1-3)
CASSRLRSVNTIYF

SEQ ID NO: 248831 - protein, 14 aa, Homo sapiens
  CDR3 for alpha chain variable domain of TCR clone 124416 (TRAV8-3, TRAJ35)
CAVVPQGFGNVLRC

SEQ ID NO: 248832 - protein, 15 aa, Homo sapiens
  CDR3 for beta chain variable domain of TCR clone 124416 (TRBV6-1, TRBJ2-2)
CASSAGQGYTGELFF

SEQ ID NO: 248833 - protein, 12 aa, Homo sapiens
  CDR3 for alpha chain variable domain of TCR clone 124417 (TRAV12-3, TRAJ17)
CAMTLTGNKLTF

SEQ ID NO: 248834 - protein, 14 aa, Homo sapiens
  CDR3 for beta chain variable domain of TCR clone 124417 (TRBV27, TRBJ1-1)
CASSLLSGLSEAFF

SEQ ID NO: 248835 - protein, 14 aa, Homo sapiens
  CDR3 for alpha chain variable domain of TCR clone 124418 (TRAV8-2, TRAJ4)
CVVSPSGGYNKLIF

SEQ ID NO: 248836 - protein, 15 aa, Homo sapiens
  CDR3 for beta chain variable domain of TCR clone 124418 (TRBV7-2, TRBJ2-2)
CASRRPGQNTGELFF

SEQ ID NO: 248837 - protein, 14 aa, Homo sapiens
  CDR3 for alpha chain variable domain of TCR clone 124419 (TRAV17, TRAJ34)
CATDSLEGTEKLIF

SEQ ID NO: 248838 - protein, 15 aa, Homo sapiens
  CDR3 for beta chain variable domain of TCR clone 124419 (TRBV12-4, TRBJ1-2)
CASSPITGGGYGYTF

SEQ ID NO: 248839 - protein, 14 aa, Homo sapiens
  CDR3 for alpha chain variable domain of TCR clone 124420 (TRAV2, TRAJ9)
CAVDPHTGGFKTIF

SEQ ID NO: 248840 - protein, 13 aa, Homo sapiens
  CDR3 for beta chain variable domain of TCR clone 124420 (TRBV20-1, TRBJ2-1)
CSASTGTSNEQFF

SEQ ID NO: 248841 - protein, 14 aa, Homo sapiens
  CDR3 for alpha chain variable domain of TCR clone 124421 (TRAV26-1, TRAJ34)
CIVRVAYNTDKLIF

SEQ ID NO: 248842 - protein, 15 aa, Homo sapiens
  CDR3 for beta chain variable domain of TCR clone 124421 (TRBV20-1, TRBJ2-7)
CSARVPAACFYEQYF

SEQ ID NO: 248843 - protein, 18 aa, Homo sapiens
  CDR3 for alpha chain variable domain of TCR clone 124422 (TRAV13-1, TRAJ52)
CAASRRSAGGTSYGKLTF

SEQ ID NO: 248844 - protein, 15 aa, Homo sapiens
  CDR3 for beta chain variable domain of TCR clone 124422 (TRBV20-1, TRBJ2-7)
CSARTPGTITYGQYF

SEQ ID NO: 248845 - protein, 13 aa, Homo sapiens
  CDR3 for alpha chain variable domain of TCR clone 124423 (TRAV27, TRAJ41)
CAGEGNSGYALNF

SEQ ID NO: 248846 - protein, 14 aa, Homo sapiens
  CDR3 for beta chain variable domain of TCR clone 124423 (TRBV25-1, TRBJ1-1)
CASAHLGGNTEAFF

SEQ ID NO: 248847 - protein, 17 aa, Homo sapiens
  CDR3 for alpha chain variable domain of TCR clone 124424 (TRAV3, TRAJ6)
CAVRDGPRAGGSYIPTF

SEQ ID NO: 248848 - protein, 13 aa, Homo sapiens
  CDR3 for beta chain variable domain of TCR clone 124424 (TRBV4-1, TRBJ2-2)
CVSSQENTGELFF

SEQ ID NO: 248849 - protein, 18 aa, Homo sapiens
  CDR3 for alpha chain variable domain of TCR clone 124425 (TRAV26-2, TRAJ45)
CILRVDKYSGGGADGLTF

SEQ ID NO: 248850 - protein, 11 aa, Homo sapiens
  CDR3 for beta chain variable domain of TCR clone 124425 (TRBV29-1, TRBJ2-5)
CSEDRTGTHYF

SEQ ID NO: 248851 - protein, 14 aa, Homo sapiens
  CDR3 for alpha chain variable domain of TCR clone 124426 (TRAV1-2, TRAJ8)
CAVREDTGFQKLVF

SEQ ID NO: 248852 - protein, 18 aa, Homo sapiens
  CDR3 for beta chain variable domain of TCR clone 124426 (TRBV4-1, TRBJ1-4)
CASSPRTGGAWTNEKLFF

SEQ ID NO: 248853 - protein, 16 aa, Homo sapiens
  CDR3 for alpha chain variable domain of TCR clone 124427 (TRAV35, TRAJ28)
CAGQKYSGAGSYQLTF

SEQ ID NO: 248854 - protein, 15 aa, Homo sapiens
  CDR3 for beta chain variable domain of TCR clone 124427 (TRBV18, TRBJ2-7)
CASSPRSGTAYEQYF

SEQ ID NO: 248855 - protein, 17 aa, Homo sapiens
  CDR3 for alpha chain variable domain of TCR clone 124428 (TRAV3, TRAJ6)
CAVRDGPRAGGSYLTTF

SEQ ID NO: 248856 - protein, 14 aa, Homo sapiens
  CDR3 for beta chain variable domain of TCR clone 124428 (TRBV7-2, TRBJ2-7)
CASSPKTSFYEQYF

SEQ ID NO: 248857 - protein, 17 aa, Homo sapiens
  CDR3 for alpha chain variable domain of TCR clone 124429 (TRAV3, TRAJ6)
CAVRDGPRAGGIYIPTF

SEQ ID NO: 248858 - protein, 13 aa, Homo sapiens
  CDR3 for beta chain variable domain of TCR clone 124429 (TRBV7-9, TRBJ1-2)
CASSLRQNYGYTF

SEQ ID NO: 248859 - protein, 14 aa, Homo sapiens
  CDR3 for alpha chain variable domain of TCR clone 124430 (TRAV1-2, TRAJ16)
CAVNRFSDGQRLLF

SEQ ID NO: 248860 - protein, 16 aa, Homo sapiens
  CDR3 for beta chain variable domain of TCR clone 124430 (TRBV12-5, TRBJ2-5)
CASGPRTSGNQETQYF

SEQ ID NO: 248861 - protein, 15 aa, Homo sapiens
  CDR3 for alpha chain variable domain of TCR clone 124431 (TRAV26-1, TRAJ56)
CIVRVATGANSKLAF

SEQ ID NO: 248862 - protein, 15 aa, Homo sapiens
  CDR3 for beta chain variable domain of TCR clone 124431 (TRBV27, TRBJ2-7)
CASSPQREGQREQYF

SEQ ID NO: 248863 - protein, 14 aa, Homo sapiens
  CDR3 for alpha chain variable domain of TCR clone 124432 (TRAV8-3, TRAJ4)
CAVGAAGGYNKLIF

SEQ ID NO: 248864 - protein, 14 aa, Homo sapiens
  CDR3 for beta chain variable domain of TCR clone 124432 (TRBV7-9, TRBJ2-2)
CASSLVQDTGELFF

SEQ ID NO: 248865 - protein, 14 aa, Homo sapiens
  CDR3 for alpha chain variable domain of TCR clone 124433 (TRAV21, TRAJ35)
CAVMRIGFGNVLHC

SEQ ID NO: 248866 - protein, 12 aa, Homo sapiens
  CDR3 for beta chain variable domain of TCR clone 124433 (TRBV7-9, TRBJ2-7)
CASSIKREEQYF

SEQ ID NO: 248867 - protein, 15 aa, Homo sapiens
  CDR3 for alpha chain variable domain of TCR clone 124434 (TRAV25, TRAJ10)
CAGPLLTGGGNKRTF

SEQ ID NO: 248868 - protein, 15 aa, Homo sapiens
  CDR3 for beta chain variable domain of TCR clone 124434 (TRBV12-5, TRBJ2-2)
CASGRLGGNTGELFF

SEQ ID NO: 248869 - protein, 13 aa, Homo sapiens
  CDR3 for alpha chain variable domain of TCR clone 124435 (TRAV36/DV7, TRAJ37)
CAVFSSNTGKLIF

SEQ ID NO: 248870 - protein, 13 aa, Homo sapiens
  CDR3 for beta chain variable domain of TCR clone 124435 (TRBV20-1, TRBJ2-7)
CSATHTSGYEQYF

SEQ ID NO: 248871 - protein, 13 aa, Homo sapiens
  CDR3 for alpha chain variable domain of TCR clone 124436 (TRAV8-4, TRAJ47)
CAVTALYGNKLVF

SEQ ID NO: 248872 - protein, 14 aa, Homo sapiens
  CDR3 for beta chain variable domain of TCR clone 124436 (TRBV19, TRBJ2-7)
CAGSIGGAVAEQYF

SEQ ID NO: 248873 - protein, 13 aa, Homo sapiens
  CDR3 for alpha chain variable domain of TCR clone 124437 (TRAV36/DV7, TRAJ37)
CAVFSSNTGKLIF

SEQ ID NO: 248874 - protein, 18 aa, Homo sapiens
  CDR3 for beta chain variable domain of TCR clone 124437 (TRBV11-2, TRBJ2-3)
CASSLGGAARGAPNTQYF

SEQ ID NO: 248875 - protein, 11 aa, Homo sapiens
  CDR3 for alpha chain variable domain of TCR clone 124438 (TRAV1-2, TRAJ20)
CAVANDYKLSF

SEQ ID NO: 248876 - protein, 14 aa, Homo sapiens
  CDR3 for beta chain variable domain of TCR clone 124438 (TRBV7-9, TRBJ1-1)
CASTLLQSYTEAFF

SEQ ID NO: 248877 - protein, 14 aa, Homo sapiens
  CDR3 for alpha chain variable domain of TCR clone 124439 (TRAV12-2, TRAJ11)
CAVKRESGYSTLTF

SEQ ID NO: 248878 - protein, 10 aa, Homo sapiens
  CDR3 for beta chain variable domain of TCR clone 124439 (TRBV20-1, TRBJ2-5)
CSARFETQYF

SEQ ID NO: 248879 - protein, 14 aa, Homo sapiens
  CDR3 for alpha chain variable domain of TCR clone 124440 (TRAV12-1, TRAJ30)
CVVRGMNRDDKIIF

SEQ ID NO: 248880 - protein, 14 aa, Homo sapiens
  CDR3 for beta chain variable domain of TCR clone 124440 (TRBV7-2, TRBJ2-7)
CASRSQGAAYEQYF

SEQ ID NO: 248881 - protein, 12 aa, Homo sapiens
  CDR3 for alpha chain variable domain of TCR clone 124441 (TRAV16, TRAJ10)
RSRTGGGNKLTF

SEQ ID NO: 248882 - protein, 12 aa, Homo sapiens
  CDR3 for beta chain variable domain of TCR clone 124441 (TRBV11-3, TRBJ1-1)
CASSHRQGEAFF

SEQ ID NO: 248883 - protein, 15 aa, Homo sapiens
  CDR3 for alpha chain variable domain of TCR clone 124442 (TRAV35, TRAJ21)
CAGSSATSTNFTLDL

SEQ ID NO: 248884 - protein, 11 aa, Homo sapiens
  CDR3 for beta chain variable domain of TCR clone 124442 (TRBV7-6, TRBJ2-5)
CASSSQETQYF

SEQ ID NO: 248885 - protein, 16 aa, Homo sapiens
  CDR3 for alpha chain variable domain of TCR clone 124443 (TRAV30, TRAJ24)
CGTEIVDADSWVKFQF

SEQ ID NO: 248886 - protein, 15 aa, Homo sapiens
  CDR3 for beta chain variable domain of TCR clone 124443 (TRBV20-1, TRBJ2-7)
CSARDRVSGMDEQYF

SEQ ID NO: 248887 - protein, 14 aa, Homo sapiens
  CDR3 for alpha chain variable domain of TCR clone 124444 (TRAV26-1, TRAJ34)
CIVRVAYNTDKLIF

SEQ ID NO: 248888 - protein, 15 aa, Homo sapiens
  CDR3 for beta chain variable domain of TCR clone 124444 (TRBV20-1, TRBJ2-7)
CSARVPAAHFYEQYF

SEQ ID NO: 248889 - protein, 12 aa, Homo sapiens
  CDR3 for alpha chain variable domain of TCR clone 124445 (TRAV26-1, TRAJ43)
CIVRPRGDDMRF

SEQ ID NO: 248890 - protein, 16 aa, Homo sapiens
  CDR3 for beta chain variable domain of TCR clone 124445 (TRBV3-1, TRBJ2-1)
CASSQGGRRSSDEQFF

SEQ ID NO: 248891 - protein, 10 aa, Homo sapiens
  CDR3 for alpha chain variable domain of TCR clone 124446 (TRAV23/DV6, TRAJ49)
CSRTGNQFYF

SEQ ID NO: 248892 - protein, 13 aa, Homo sapiens
  CDR3 for beta chain variable domain of TCR clone 124446 (TRBV6-1, TRBJ1-1)
CASSRQGNTEAFF

SEQ ID NO: 248893 - protein, 13 aa, Homo sapiens
  CDR3 for alpha chain variable domain of TCR clone 124447 (TRAV13-1, TRAJ43)
CAASMNNNNDTRF

SEQ ID NO: 248894 - protein, 13 aa, Homo sapiens
  CDR3 for beta chain variable domain of TCR clone 124447 (TRBV29-1, TRBJ2-1)
CSVDGGASDEQFF

SEQ ID NO: 248895 - protein, 12 aa, Homo sapiens
  CDR3 for alpha chain variable domain of TCR clone 124448 (TRAV13-1, TRAJ21)
CAAKEGFNKFYF

SEQ ID NO: 248896 - protein, 14 aa, Homo sapiens
  CDR3 for beta chain variable domain of TCR clone 124448 (TRBV12-5, TRBJ2-5)
CASGLEGYQETQYF

SEQ ID NO: 248897 - protein, 17 aa, Homo sapiens
  CDR3 for alpha chain variable domain of TCR clone 124449 (TRAV2, TRAJ36)
CAVDDRGNWGKQPLLWD

SEQ ID NO: 248898 - protein, 14 aa, Homo sapiens
  CDR3 for beta chain variable domain of TCR clone 124449 (TRBV7-9, TRBJ2-5)
CASSLDTAQETQYF

SEQ ID NO: 248899 - protein, 14 aa, Homo sapiens
  CDR3 for alpha chain variable domain of TCR clone 124450 (TRAV12-3, TRAJ53)
CGATSGGSNYKLPF

SEQ ID NO: 248900 - protein, 13 aa, Homo sapiens
  CDR3 for beta chain variable domain of TCR clone 124450 (TRBV19, TRBJ1-5)
CASSTQDGQPQHF

SEQ ID NO: 248901 - protein, 15 aa, Homo sapiens
  CDR3 for alpha chain variable domain of TCR clone 124451 (TRAV13-1, TRAJ43)
CAATPELGGNNDMRL

SEQ ID NO: 248902 - protein, 15 aa, Homo sapiens
  CDR3 for beta chain variable domain of TCR clone 124451 (TRBV10-2, TRBJ2-6)
CASSEQGTGANVLTF

SEQ ID NO: 248903 - protein, 16 aa, Homo sapiens
  CDR3 for alpha chain variable domain of TCR clone 124452 (TRAV22, TRAJ45)
CAVERGKRGGADGLTF

SEQ ID NO: 248904 - protein, 13 aa, Homo sapiens
  CDR3 for beta chain variable domain of TCR clone 124452 (TRBV12-4, TRBJ1-1)
CASSLSIGAEAFF

SEQ ID NO: 248905 - protein, 14 aa, Homo sapiens
  CDR3 for alpha chain variable domain of TCR clone 124453 (TRAV1-2, TRAJ16)
CAVNRFSDGQKLLF

SEQ ID NO: 248906 - protein, 14 aa, Homo sapiens
  CDR3 for beta chain variable domain of TCR clone 124453 (TRBV18, TRBJ1-1)
CASSPPTGRTEAFF

SEQ ID NO: 248907 - protein, 11 aa, Homo sapiens
  CDR3 for alpha chain variable domain of TCR clone 124454 (TRAV23/DV6, TRAJ42)
CAAASTLNYGG

SEQ ID NO: 248908 - protein, 16 aa, Homo sapiens
  CDR3 for beta chain variable domain of TCR clone 124454 (TRBV12-4, TRBJ1-5)
CASSRPVGGSNQPQHF

SEQ ID NO: 248909 - protein, 14 aa, Homo sapiens
  CDR3 for alpha chain variable domain of TCR clone 124455 (TRAV12-3, TRAJ10)
SHLPLTGGGNKLTF

SEQ ID NO: 248910 - protein, 16 aa, Homo sapiens
  CDR3 for beta chain variable domain of TCR clone 124455 (TRBV18, TRBJ1-3)
CASSLGILNGENTMYF

SEQ ID NO: 248911 - protein, 12 aa, Homo sapiens
  CDR3 for alpha chain variable domain of TCR clone 124456 (TRAV8-3, TRAJ26)
CAGDNYGQYFVF

SEQ ID NO: 248912 - protein, 15 aa, Homo sapiens
  CDR3 for beta chain variable domain of TCR clone 124456 (TRBV9, TRBJ2-1)
CASSLAGSSYNEQFF

SEQ ID NO: 248913 - protein, 16 aa, Homo sapiens
  CDR3 for alpha chain variable domain of TCR clone 124457 (TRAV13-2, TRAJ32)
CAENMNYGGATNKLIF

SEQ ID NO: 248914 - protein, 15 aa, Homo sapiens
  CDR3 for beta chain variable domain of TCR clone 124457 (TRBV25-1, TRBJ1-2)
CASSETGGPSYGYTF

SEQ ID NO: 248915 - protein, 17 aa, Homo sapiens
  CDR3 for alpha chain variable domain of TCR clone 124458 (TRAV3, TRAJ6)
CAVRDGPRAGGSYIPTF

SEQ ID NO: 248916 - protein, 19 aa, Homo sapiens
  CDR3 for beta chain variable domain of TCR clone 124458 (TRBV4-1, TRBJ1-1)
CASSRIILTPRGVNTEAFF

SEQ ID NO: 248917 - protein, 17 aa, Homo sapiens
  CDR3 for alpha chain variable domain of TCR clone 124459 (TRAV8-6, TRAJ58)
CAVSSWVGETSGSRLTF

SEQ ID NO: 248918 - protein, 14 aa, Homo sapiens
  CDR3 for beta chain variable domain of TCR clone 124459 (TRBV4-2, TRBJ2-1)
CASGLDRAYNEQFF

SEQ ID NO: 248919 - protein, 11 aa, Homo sapiens
  CDR3 for alpha chain variable domain of TCR clone 124460 (TRAV29/DV5, TRAJ31)
CAARYRDRLMF

SEQ ID NO: 248920 - protein, 19 aa, Homo sapiens
  CDR3 for beta chain variable domain of TCR clone 124460 (TRBV19, TRBJ2-5)
CASSIGQVTDFFLGETQYF

SEQ ID NO: 248921 - protein, 15 aa, Homo sapiens
  CDR3 for alpha chain variable domain of TCR clone 124461 (TRAV24, TRAJ48)
CASFPVNFGNEKLTF

SEQ ID NO: 248922 - protein, 14 aa, Homo sapiens
  CDR3 for beta chain variable domain of TCR clone 124461 (TRBV11-2, TRBJ1-2)
CASSLGTANYGYTF

SEQ ID NO: 248923 - protein, 16 aa, Homo sapiens
  CDR3 for alpha chain variable domain of TCR clone 124462 (TRAV30, TRAJ26)
CGTESVGDNYGQNFVF

SEQ ID NO: 248924 - protein, 13 aa, Homo sapiens
  CDR3 for beta chain variable domain of TCR clone 124462 (TRBV19, TRBJ1-2)
CASSISEDYGYSF

SEQ ID NO: 248925 - protein, 13 aa, Homo sapiens
  CDR3 for alpha chain variable domain of TCR clone 124463 (TRAV29/DV5, TRAJ31)
CAASRNNNARLMF

SEQ ID NO: 248926 - protein, 13 aa, Homo sapiens
  CDR3 for beta chain variable domain of TCR clone 124463 (TRBV12-4, TRBJ2-5)
CASRLAVQETQYF

SEQ ID NO: 248927 - protein, 15 aa, Homo sapiens
  CDR3 for alpha chain variable domain of TCR clone 124464 (TRAV35, TRAJ22)
CAGTISSGSARQLTF

SEQ ID NO: 248928 - protein, 14 aa, Homo sapiens
  CDR3 for beta chain variable domain of TCR clone 124464 (TRBV19, TRBJ2-1)
CASPTFVLSGEQFF

SEQ ID NO: 248929 - protein, 13 aa, Homo sapiens
  CDR3 for alpha chain variable domain of TCR clone 124465 (TRAV36/DV7, TRAJ29)
CAVEPSGNTPLAF

SEQ ID NO: 248930 - protein, 11 aa, Homo sapiens
  CDR3 for beta chain variable domain of TCR clone 124465 (TRBV19, TRBJ2-7)
CASGNSYEQYF

SEQ ID NO: 248931 - protein, 14 aa, Homo sapiens
  CDR3 for alpha chain variable domain of TCR clone 124466 (TRAV2, TRAJ37)
CAVDFTSNTGKLIF

SEQ ID NO: 248932 - protein, 13 aa, Homo sapiens
  CDR3 for beta chain variable domain of TCR clone 124466 (TRBV4-1, TRBJ2-2)
CASSQENNGELFF

SEQ ID NO: 248933 - protein, 11 aa, Homo sapiens
  CDR3 for alpha chain variable domain of TCR clone 124467 (TRAV12-3, TRAJ43)
CAMSVSNDMRF

SEQ ID NO: 248934 - protein, 15 aa, Homo sapiens
  CDR3 for beta chain variable domain of TCR clone 124467 (TRBV20-1, TRBJ1-1)
CSAPLGGGTEAFLDK

SEQ ID NO: 248935 - protein, 12 aa, Homo sapiens
  CDR3 for alpha chain variable domain of TCR clone 124468 (TRAV1-2, TRAJ37)
CAFPGNTGKLIF

SEQ ID NO: 248936 - protein, 14 aa, Homo sapiens
  CDR3 for beta chain variable domain of TCR clone 124468 (TRBV18, TRBJ2-7)
CASSPRGGAYEQYF

SEQ ID NO: 248937 - protein, 21 aa, Homo sapiens
  CDR3 for alpha chain variable domain of TCR clone 124469 (TRAV25, TRAJ47)
TATQTRDVGTYFWEYGNKLVF

SEQ ID NO: 248938 - protein, 16 aa, Homo sapiens
  CDR3 for beta chain variable domain of TCR clone 124469 (TRBV6-6, TRBJ2-1)
CASSWGGQGPYNEQFF

SEQ ID NO: 248939 - protein, 12 aa, Homo sapiens
  CDR3 for alpha chain variable domain of TCR clone 124470 (TRAV3, TRAJ31)
CAVRPRGPRLMF

SEQ ID NO: 248940 - protein, 17 aa, Homo sapiens
  CDR3 for beta chain variable domain of TCR clone 124470 (TRBV7-9, TRBJ1-5)
CAISASQGGYSNQPQHF

SEQ ID NO: 248941 - protein, 13 aa, Homo sapiens
  CDR3 for alpha chain variable domain of TCR clone 124471 (TRAV5, TRAJ11)
CAETTSGYSTLTF

SEQ ID NO: 248942 - protein, 17 aa, Homo sapiens
  CDR3 for beta chain variable domain of TCR clone 124471 (TRBV7-9, TRBJ2-1)
CASSLVASYPSYNEQFF

SEQ ID NO: 248943 - protein, 15 aa, Homo sapiens
  CDR3 for alpha chain variable domain of TCR clone 124472 (TRAV3, TRAJ29)
CAVRAPLSGNTPLFF

SEQ ID NO: 248944 - protein, 15 aa, Homo sapiens
  CDR3 for beta chain variable domain of TCR clone 124472 (TRBV28, TRBJ1-1)
CASRIKGGLNTEAFF

SEQ ID NO: 248945 - protein, 13 aa, Homo sapiens
  CDR3 for alpha chain variable domain of TCR clone 124473 (TRAV13-1, TRAJ20)
CAARVSNVYKLSF

SEQ ID NO: 248946 - protein, 12 aa, Homo sapiens
  CDR3 for beta chain variable domain of TCR clone 124473 (TRBV20-1, TRBJ2-1)
CSARLGTDEQFF

SEQ ID NO: 248947 - protein, 16 aa, Homo sapiens
  CDR3 for alpha chain variable domain of TCR clone 124474 (TRAV8-3, TRAJ42)
CAVGEGNGGSQGNLIF

SEQ ID NO: 248948 - protein, 15 aa, Homo sapiens
  CDR3 for beta chain variable domain of TCR clone 124474 (TRBV18, TRBJ1-5)
CASSETGGNNQPQHF

SEQ ID NO: 248949 - protein, 13 aa, Homo sapiens
  CDR3 for alpha chain variable domain of TCR clone 124475 (TRAV35, TRAJ9)
CAGHEFGNEKLTF

SEQ ID NO: 248950 - protein, 16 aa, Homo sapiens
  CDR3 for beta chain variable domain of TCR clone 124475 (TRBV19, TRBJ2-3)
CASSPEWDRGTDTQYF

SEQ ID NO: 248951 - protein, 12 aa, Homo sapiens
  CDR3 for alpha chain variable domain of TCR clone 124476 (TRAV23/DV6, TRAJ30)
CAASKGDDKIIV

SEQ ID NO: 248952 - protein, 18 aa, Homo sapiens
  CDR3 for beta chain variable domain of TCR clone 124476 (TRBV10-3, TRBJ2-3)
CAISESRVGPMRGDTQYF

SEQ ID NO: 248953 - protein, 12 aa, Homo sapiens
  CDR3 for alpha chain variable domain of TCR clone 124477 (TRAV21, TRAJ31)
CAVWGNNARLMF

SEQ ID NO: 248954 - protein, 15 aa, Homo sapiens
  CDR3 for beta chain variable domain of TCR clone 124477 (TRBV3-1, TRBJ2-2)
CASSQDWTRAGELFF

SEQ ID NO: 248955 - protein, 13 aa, Homo sapiens
  CDR3 for alpha chain variable domain of TCR clone 124478 (TRAV12-2, TRAJ7)
CAGLIYGNNRLAF

SEQ ID NO: 248956 - protein, 17 aa, Homo sapiens
  CDR3 for beta chain variable domain of TCR clone 124478 (TRBV13, TRBJ2-3)
CASSLSRVAGGRNTQYF

SEQ ID NO: 248957 - protein, 17 aa, Homo sapiens
  CDR3 for alpha chain variable domain of TCR clone 124479 (TRAV3, TRAJ28)
CAVREAYPGAGSYQLTF

SEQ ID NO: 248958 - protein, 14 aa, Homo sapiens
  CDR3 for beta chain variable domain of TCR clone 124479 (TRBV7-2, TRBJ2-7)
CASSPKTSFYEQYF

SEQ ID NO: 248959 - protein, 19 aa, Homo sapiens
  CDR3 for alpha chain variable domain of TCR clone 124480 (TRAV25, TRAJ43)
TATQTTDVGTYFCAVFMRF

SEQ ID NO: 248960 - protein, 13 aa, Homo sapiens
  CDR3 for beta chain variable domain of TCR clone 124480 (TRBV7-9, TRBJ1-2)
CASSLKQNYGYSF

SEQ ID NO: 248961 - protein, 14 aa, Homo sapiens
  CDR3 for alpha chain variable domain of TCR clone 124481 (TRAV12-1, TRAJ47)
CVVGRREYGNKLVF

SEQ ID NO: 248962 - protein, 14 aa, Homo sapiens
  CDR3 for beta chain variable domain of TCR clone 124481 (TRBV20-1, TRBJ1-1)
CSAQTRIGGTEAFF

SEQ ID NO: 248963 - protein, 15 aa, Homo sapiens
  CDR3 for alpha chain variable domain of TCR clone 124482 (TRAV29/DV5, TRAJ53)
CAASASGGSNYKLTF

SEQ ID NO: 248964 - protein, 14 aa, Homo sapiens
  CDR3 for beta chain variable domain of TCR clone 124482 (TRBV5-1, TRBJ2-3)
VASGGITTTDTQYF

SEQ ID NO: 248965 - protein, 14 aa, Homo sapiens
  CDR3 for alpha chain variable domain of TCR clone 124483 (TRAV12-3, TRAJ10)
SHLPLTGGGNKLTF

SEQ ID NO: 248966 - protein, 15 aa, Homo sapiens
  CDR3 for beta chain variable domain of TCR clone 124483 (TRBV7-2, TRBJ2-1)
CASTSASGDYNEQFF

SEQ ID NO: 248967 - protein, 15 aa, Homo sapiens
  CDR3 for alpha chain variable domain of TCR clone 124484 (TRAV13-2, TRAJ57)
CAEHFRQGGSEKLVF

SEQ ID NO: 248968 - protein, 14 aa, Homo sapiens
  CDR3 for beta chain variable domain of TCR clone 124484 (TRBV7-2, TRBJ2-7)
CASRSQGAAYEQYF

SEQ ID NO: 248969 - protein, 12 aa, Homo sapiens
  CDR3 for alpha chain variable domain of TCR clone 124485 (TRAV1-2, TRAJ26)
CAVRYYGQNFVF

SEQ ID NO: 248970 - protein, 15 aa, Homo sapiens
  CDR3 for beta chain variable domain of TCR clone 124485 (TRBV28, TRBJ2-1)
CASSRIAGGRSEQFF

SEQ ID NO: 248971 - protein, 14 aa, Homo sapiens
  CDR3 for alpha chain variable domain of TCR clone 124486 (TRAV9-2, TRAJ39)
CALYIYNAGNMLTF

SEQ ID NO: 248972 - protein, 15 aa, Homo sapiens
  CDR3 for beta chain variable domain of TCR clone 124486 (TRBV2, TRBJ2-5)
CASTRDGGPQETQYF

SEQ ID NO: 248973 - protein, 12 aa, Homo sapiens
  CDR3 for alpha chain variable domain of TCR clone 124487 (TRAV21, TRAJ11)
CAATSGNSTLTF

SEQ ID NO: 248974 - protein, 14 aa, Homo sapiens
  CDR3 for beta chain variable domain of TCR clone 124487 (TRBV20-1, TRBJ2-7)
CSAPELAGVGEQYF

SEQ ID NO: 248975 - protein, 13 aa, Homo sapiens
  CDR3 for alpha chain variable domain of TCR clone 124488 (TRAV1-1, TRAJ33)
CAARRDSNYQLIW

SEQ ID NO: 248976 - protein, 16 aa, Homo sapiens
  CDR3 for beta chain variable domain of TCR clone 124488 (TRBV6-1, TRBJ2-2)
CASSAFRGGDTGELFF

SEQ ID NO: 248977 - protein, 18 aa, Homo sapiens
  CDR3 for alpha chain variable domain of TCR clone 124489 (TRAV13-1, TRAJ52)
CSAKNPNAGGTSYGKLTF

SEQ ID NO: 248978 - protein, 15 aa, Homo sapiens
  CDR3 for beta chain variable domain of TCR clone 124489 (TRBV28, TRBJ2-1)
CASSIIAGGRSEQFF

SEQ ID NO: 248979 - protein, 14 aa, Homo sapiens
  CDR3 for alpha chain variable domain of TCR clone 124490 (TRAV13-1, TRAJ35)
CAASKGGFGNVLHC

SEQ ID NO: 248980 - protein, 13 aa, Homo sapiens
  CDR3 for beta chain variable domain of TCR clone 124490 (TRBV7-3, TRBJ1-1)
CATSQDWGAEAFF

SEQ ID NO: 248981 - protein, 14 aa, Homo sapiens
  CDR3 for alpha chain variable domain of TCR clone 124491 (TRAV36/DV7, TRAJ44)
CCGANTGTASKLTF

SEQ ID NO: 248982 - protein, 13 aa, Homo sapiens
  CDR3 for beta chain variable domain of TCR clone 124491 (TRBV7-2, TRBJ1-4)
CASSLAGLEKLFF

SEQ ID NO: 248983 - protein, 13 aa, Homo sapiens
  CDR3 for alpha chain variable domain of TCR clone 124492 (TRAV17, TRAJ57)
TSVLRTASEKLVF

SEQ ID NO: 248984 - protein, 13 aa, Homo sapiens
  CDR3 for beta chain variable domain of TCR clone 124492 (TRBV7-9, TRBJ2-7)
CASSFAGAYEQYF

SEQ ID NO: 248985 - protein, 14 aa, Homo sapiens
  CDR3 for alpha chain variable domain of TCR clone 124493 (TRAV35, TRAJ38)
CAGSNAGNNRKLIW

SEQ ID NO: 248986 - protein, 16 aa, Homo sapiens
  CDR3 for beta chain variable domain of TCR clone 124493 (TRBV29-1, TRBJ2-7)
CSVEVVGTSGSYEQYF

SEQ ID NO: 248987 - protein, 13 aa, Homo sapiens
  CDR3 for alpha chain variable domain of TCR clone 124494 (TRAV3, TRAJ3)
CAVADSSASKVIF

SEQ ID NO: 248988 - protein, 16 aa, Homo sapiens
  CDR3 for beta chain variable domain of TCR clone 124494 (TRBV5-1, TRBJ2-3)
CASSLGLAVYTDTQYF

SEQ ID NO: 248989 - protein, 11 aa, Homo sapiens
  CDR3 for alpha chain variable domain of TCR clone 124495 (TRAV25, TRAJ49)
CAGGTGNKFYF

SEQ ID NO: 248990 - protein, 12 aa, Homo sapiens
  CDR3 for beta chain variable domain of TCR clone 124495 (TRBV6-5, TRBJ2-1)
CASRNDRGQQFF

SEQ ID NO: 248991 - protein, 14 aa, Homo sapiens
  CDR3 for alpha chain variable domain of TCR clone 124496 (TRAV12-3, TRAJ56)
CSMSVTGANSKLTF

SEQ ID NO: 248992 - protein, 17 aa, Homo sapiens
  CDR3 for beta chain variable domain of TCR clone 124496 (TRBV20-1, TRBJ2-3)
CSASLLGRGGSADTQYF

SEQ ID NO: 248993 - protein, 22 aa, Homo sapiens
  CDR3 for alpha chain variable domain of TCR clone 124497 (TRAV40, )
CLLGDGIPDIQNPDLAVYQLRD

SEQ ID NO: 248994 - protein, 16 aa, Homo sapiens
  CDR3 for beta chain variable domain of TCR clone 124497 (TRBV20-1, TRBJ1-5)
CSAELPGQQTNQPQHF

SEQ ID NO: 248995 - protein, 12 aa, Homo sapiens
  CDR3 for alpha chain variable domain of TCR clone 124498 (TRAV35, TRAJ31)
CAAASNNARLMF

SEQ ID NO: 248996 - protein, 16 aa, Homo sapiens
  CDR3 for beta chain variable domain of TCR clone 124498 (TRBV19, TRBJ2-2)
CASRSPGTGATGELFF

SEQ ID NO: 248997 - protein, 14 aa, Homo sapiens
  CDR3 for alpha chain variable domain of TCR clone 124499 (TRAV2, TRAJ37)
CAVDFTSNTGKLIF

SEQ ID NO: 248998 - protein, 14 aa, Homo sapiens
  CDR3 for beta chain variable domain of TCR clone 124499 (TRBV7-3, TRBJ2-2)
CASSSGGYTGELFF

SEQ ID NO: 248999 - protein, 12 aa, Homo sapiens
  CDR3 for alpha chain variable domain of TCR clone 124500 (TRAV13-1, TRAJ48)
CAANFGNEKLTF

SEQ ID NO: 249000 - protein, 16 aa, Homo sapiens
  CDR3 for beta chain variable domain of TCR clone 124500 (TRBV27, TRBJ2-2)
CASSFRGLVRTGELFF

SEQ ID NO: 249001 - protein, 14 aa, Homo sapiens
  CDR3 for alpha chain variable domain of TCR clone 124501 (TRAV17, TRAJ57)
CATDPQGGSEKRVF

SEQ ID NO: 249002 - protein, 14 aa, Homo sapiens
  CDR3 for beta chain variable domain of TCR clone 124501 (TRBV7-8, TRBJ2-7)
CASSPRDRVYEQYF

SEQ ID NO: 249003 - protein, 15 aa, Homo sapiens
  CDR3 for alpha chain variable domain of TCR clone 124502 (TRAV40, TRAJ45)
CLLGDLGGGADGLTF

SEQ ID NO: 249004 - protein, 13 aa, Homo sapiens
  CDR3 for beta chain variable domain of TCR clone 124502 (TRBV7-9, TRBJ1-2)
CANSLKQNYGYTF

SEQ ID NO: 249005 - protein, 14 aa, Homo sapiens
  CDR3 for alpha chain variable domain of TCR clone 124503 (TRAV27, TRAJ22)
CAGVSVLGKRQLNF

SEQ ID NO: 249006 - protein, 17 aa, Homo sapiens
  CDR3 for beta chain variable domain of TCR clone 124503 (TRBV14, TRBJ2-1)
CASSQDRRVTSYNEQFF

SEQ ID NO: 249007 - protein, 17 aa, Homo sapiens
  CDR3 for alpha chain variable domain of TCR clone 124504 (TRAV3, TRAJ42)
CAVRDRDYGGSQGNLIF

SEQ ID NO: 249008 - protein, 14 aa, Homo sapiens
  CDR3 for beta chain variable domain of TCR clone 124504 (TRBV7-2, TRBJ2-5)
CASSPRGSSETQFF

SEQ ID NO: 249009 - protein, 15 aa, Homo sapiens
  CDR3 for alpha chain variable domain of TCR clone 124505 (TRAV34, TRAJ38)
CGADFTPGNNRKLIW

SEQ ID NO: 249010 - protein, 17 aa, Homo sapiens
  CDR3 for beta chain variable domain of TCR clone 124505 (TRBV7-8, TRBJ2-1)
CASSPPTGTLAYNEQFF

SEQ ID NO: 249011 - protein, 10 aa, Homo sapiens
  CDR3 for alpha chain variable domain of TCR clone 124506 (TRAV30, TRAJ48)
CGIGNEKLTF

SEQ ID NO: 249012 - protein, 12 aa, Homo sapiens
  CDR3 for beta chain variable domain of TCR clone 124506 (TRBV5-1, TRBJ2-3)
CASSLAADTQYF

SEQ ID NO: 249013 - protein, 14 aa, Homo sapiens
  CDR3 for alpha chain variable domain of TCR clone 124507 (TRAV26-1, TRAJ21)
CIVRPPYNFNKFYF

SEQ ID NO: 249014 - protein, 15 aa, Homo sapiens
  CDR3 for beta chain variable domain of TCR clone 124507 (TRBV2, TRBJ2-1)
CASSELAGSYNEQFF

SEQ ID NO: 249015 - protein, 11 aa, Homo sapiens
  CDR3 for alpha chain variable domain of TCR clone 124508 (TRAV35, TRAJ12)
RRMYSSYKLIF

SEQ ID NO: 249016 - protein, 14 aa, Homo sapiens
  CDR3 for beta chain variable domain of TCR clone 124508 (TRBV19, TRBJ1-1)
CASSPNRGDTEAFF

SEQ ID NO: 249017 - protein, 10 aa, Homo sapiens
  CDR3 for alpha chain variable domain of TCR clone 124509 (TRAV2, TRAJ34)
CAVVNDKLIF

SEQ ID NO: 249018 - protein, 16 aa, Homo sapiens
  CDR3 for beta chain variable domain of TCR clone 124509 (TRBV13, TRBJ2-2)
CASSPRTGEHTGELFF

SEQ ID NO: 249019 - protein, 22 aa, Homo sapiens
  CDR3 for alpha chain variable domain of TCR clone 124510 (TRAV2, TRAJ10)
ILQVREADAAVYYTGGGSKLTF

SEQ ID NO: 249020 - protein, 16 aa, Homo sapiens
  CDR3 for beta chain variable domain of TCR clone 124510 (TRBV5-7, TRBJ1-2)
CASSRGVTGGSYGYTF

SEQ ID NO: 249021 - protein, 15 aa, Homo sapiens
  CDR3 for alpha chain variable domain of TCR clone 124511 (TRAV12-2, TRAJ20)
CAGKGGFGAGTTVTV

SEQ ID NO: 249022 - protein, 13 aa, Homo sapiens
  CDR3 for beta chain variable domain of TCR clone 124511 (TRBV12-4, TRBJ2-7)
CASSPGQLYEQYF

SEQ ID NO: 249023 - protein, 13 aa, Homo sapiens
  CDR3 for alpha chain variable domain of TCR clone 124512 (TRAV39, TRAJ53)
CAVDKGSNYKLTF

SEQ ID NO: 249024 - protein, 17 aa, Homo sapiens
  CDR3 for beta chain variable domain of TCR clone 124512 (TRBV11-2, TRBJ2-1)
CASSLYPPGVEYNEQFF

SEQ ID NO: 249025 - protein, 12 aa, Homo sapiens
  CDR3 for alpha chain variable domain of TCR clone 124513 (TRAV2, TRAJ34)
CAVERNTDKLIF

SEQ ID NO: 249026 - protein, 13 aa, Homo sapiens
  CDR3 for beta chain variable domain of TCR clone 124513 (TRBV7-9, TRBJ2-3)
CASSPGSTDTQYF

SEQ ID NO: 249027 - protein, 17 aa, Homo sapiens
  CDR3 for alpha chain variable domain of TCR clone 124514 (TRAV13-1, TRAJ52)
CAAGRNAGGISYGKLTF

SEQ ID NO: 249028 - protein, 13 aa, Homo sapiens
  CDR3 for beta chain variable domain of TCR clone 124514 (TRBV7-2, TRBJ1-1)
CASNLKGAKVAFF

SEQ ID NO: 249029 - protein, 11 aa, Homo sapiens
  CDR3 for alpha chain variable domain of TCR clone 124515 (TRAV13-1, TRAJ40)
CAVSGTYKYIF

SEQ ID NO: 249030 - protein, 15 aa, Homo sapiens
  CDR3 for beta chain variable domain of TCR clone 124515 (TRBV7-9, TRBJ1-6)
CASSSPGRGNSPLHF

SEQ ID NO: 249031 - protein, 21 aa, Homo sapiens
  CDR3 for alpha chain variable domain of TCR clone 124516 (TRAV26-1, TRAJ22)
CIVRVSFWFCKATDLWIWVTI

SEQ ID NO: 249032 - protein, 13 aa, Homo sapiens
  CDR3 for beta chain variable domain of TCR clone 124516 (TRBV7-9, TRBJ1-2)
CASSLKQNYGYTF

SEQ ID NO: 249033 - protein, 16 aa, Homo sapiens
  CDR3 for alpha chain variable domain of TCR clone 124517 (TRAV30, TRAJ57)
CGAGWAPQGGSEKLVF

SEQ ID NO: 249034 - protein, 14 aa, Homo sapiens
  CDR3 for beta chain variable domain of TCR clone 124517 (TRBV18, TRBJ1-1)
CASSPGFQGVEAFF

SEQ ID NO: 249035 - protein, 15 aa, Homo sapiens
  CDR3 for alpha chain variable domain of TCR clone 124518 (TRAV17, TRAJ35)
CATAFVIGFGNVLHF

SEQ ID NO: 249036 - protein, 14 aa, Homo sapiens
  CDR3 for beta chain variable domain of TCR clone 124518 (TRBV12-5, TRBJ2-5)
CASGSRTHQETQYF

SEQ ID NO: 249037 - protein, 15 aa, Homo sapiens
  CDR3 for alpha chain variable domain of TCR clone 124519 (TRAV8-3, TRAJ40)
CAAPSLGSGTYKYIF

SEQ ID NO: 249038 - protein, 12 aa, Homo sapiens
  CDR3 for beta chain variable domain of TCR clone 124519 (TRBV11-2, TRBJ2-2)
CASSLGGGELFF

SEQ ID NO: 249039 - protein, 14 aa, Homo sapiens
  CDR3 for alpha chain variable domain of TCR clone 124520 (TRAV35, TRAJ13)
CAGSPSGGYQKVTF

SEQ ID NO: 249040 - protein, 13 aa, Homo sapiens
  CDR3 for beta chain variable domain of TCR clone 124520 (TRBV29-1, TRBJ1-1)
CSVGDSRNTEAFF

SEQ ID NO: 249041 - protein, 14 aa, Homo sapiens
  CDR3 for alpha chain variable domain of TCR clone 124521 (TRAV12-2, TRAJ39)
CAVKGGNAGNMLTL

SEQ ID NO: 249042 - protein, 13 aa, Homo sapiens
  CDR3 for beta chain variable domain of TCR clone 124521 (TRBV12-4, TRBJ1-1)
CASSSGRGTEAFF

SEQ ID NO: 249043 - protein, 14 aa, Homo sapiens
  CDR3 for alpha chain variable domain of TCR clone 124522 (TRAV12-2, TRAJ45)
CALPERGGADVLTF

SEQ ID NO: 249044 - protein, 14 aa, Homo sapiens
  CDR3 for beta chain variable domain of TCR clone 124522 (TRBV18, TRBJ1-5)
CASSPGNSNQPQHF

SEQ ID NO: 249045 - protein, 13 aa, Homo sapiens
  CDR3 for alpha chain variable domain of TCR clone 124523 (TRAV12-3, TRAJ33)
CAMSVNSNYQLIW

SEQ ID NO: 249046 - protein, 13 aa, Homo sapiens
  CDR3 for beta chain variable domain of TCR clone 124523 (TRBV10-2, TRBJ1-1)
CASNDQMNTEAFF

SEQ ID NO: 249047 - protein, 14 aa, Homo sapiens
  CDR3 for alpha chain variable domain of TCR clone 124524 (TRAV1-2, TRAJ16)
CAVNRFSDGQKLLF

SEQ ID NO: 249048 - protein, 15 aa, Homo sapiens
  CDR3 for beta chain variable domain of TCR clone 124524 (TRBV7-2, TRBJ2-1)
CASSLVAGRYNEQFF

SEQ ID NO: 249049 - protein, 15 aa, Homo sapiens
  CDR3 for alpha chain variable domain of TCR clone 124525 (TRAV26-1, TRAJ48)
CIVRVGDFGNEKLTF

SEQ ID NO: 249050 - protein, 15 aa, Homo sapiens
  CDR3 for beta chain variable domain of TCR clone 124525 (TRBV12-4, TRBJ1-2)
CASSFVDRGNYGYTF

SEQ ID NO: 249051 - protein, 16 aa, Homo sapiens
  CDR3 for alpha chain variable domain of TCR clone 124526 (TRAV16, TRAJ52)
CALSAAGGTSYGKLTF

SEQ ID NO: 249052 - protein, 14 aa, Homo sapiens
  CDR3 for beta chain variable domain of TCR clone 124526 (TRBV19, TRBJ2-1)
CASSAGLSGNEQFF

SEQ ID NO: 249053 - protein, 12 aa, Homo sapiens
  CDR3 for alpha chain variable domain of TCR clone 124527 (TRAV17, TRAJ4)
CAVPGGYNKLIF

SEQ ID NO: 249054 - protein, 13 aa, Homo sapiens
  CDR3 for beta chain variable domain of TCR clone 124527 (TRBV6-1, TRBJ1-1)
CASSEGWGTEAFF

SEQ ID NO: 249055 - protein, 13 aa, Homo sapiens
  CDR3 for alpha chain variable domain of TCR clone 124528 (TRAV27, TRAJ53)
FAGQGGSNYKLTF

SEQ ID NO: 249056 - protein, 13 aa, Homo sapiens
  CDR3 for beta chain variable domain of TCR clone 124528 (TRBV29-1, TRBJ1-1)
CSVESGFGTEAFF

SEQ ID NO: 249057 - protein, 12 aa, Homo sapiens
  CDR3 for alpha chain variable domain of TCR clone 124529 (TRAV1-2, TRAJ9)
CAGYTGGFKNIF

SEQ ID NO: 249058 - protein, 15 aa, Homo sapiens
  CDR3 for beta chain variable domain of TCR clone 124529 (TRBV11-2, TRBJ2-1)
CASSPAGQSLNEQFF

SEQ ID NO: 249059 - protein, 13 aa, Homo sapiens
  CDR3 for alpha chain variable domain of TCR clone 124530 (TRAV27, TRAJ17)
CAGAATAGNELTF

SEQ ID NO: 249060 - protein, 15 aa, Homo sapiens
  CDR3 for beta chain variable domain of TCR clone 124530 (TRBV5-1, TRBJ2-3)
CASRNQAGSTDTQYF

SEQ ID NO: 249061 - protein, 13 aa, Homo sapiens
  CDR3 for alpha chain variable domain of TCR clone 124531 (TRAV3, TRAJ20)
CAVRGTPRYKLSF

SEQ ID NO: 249062 - protein, 16 aa, Homo sapiens
  CDR3 for beta chain variable domain of TCR clone 124531 (TRBV20-1, TRBJ2-7)
CSARAPGLALSYEQYF

SEQ ID NO: 249063 - protein, 19 aa, Homo sapiens
  CDR3 for alpha chain variable domain of TCR clone 124532 (TRAV12-1, TRAJ10)
CVVRDGRRKQTHLWDRHSA

SEQ ID NO: 249064 - protein, 14 aa, Homo sapiens
  CDR3 for beta chain variable domain of TCR clone 124532 (TRBV19, TRBJ2-5)
CASSMTGQQETQYF

SEQ ID NO: 249065 - protein, 12 aa, Homo sapiens
  CDR3 for alpha chain variable domain of TCR clone 124533 (TRAV17, TRAJ20)
CATDSNDYKLSF

SEQ ID NO: 249066 - protein, 16 aa, Homo sapiens
  CDR3 for beta chain variable domain of TCR clone 124533 (TRBV13, TRBJ2-2)
CASSPRTGEHTGELFF

SEQ ID NO: 249067 - protein, 15 aa, Homo sapiens
  CDR3 for alpha chain variable domain of TCR clone 124534 (TRAV17, TRAJ57)
CATGPSQGGSEKLVF

SEQ ID NO: 249068 - protein, 16 aa, Homo sapiens
  CDR3 for beta chain variable domain of TCR clone 124534 (TRBV12-4, TRBJ1-5)
CASSRPFGGSNQPQHF

SEQ ID NO: 249069 - protein, 17 aa, Homo sapiens
  CDR3 for alpha chain variable domain of TCR clone 124535 (TRAV3, TRAJ42)
CAVRARDYGGSQGNLIF

SEQ ID NO: 249070 - protein, 14 aa, Homo sapiens
  CDR3 for beta chain variable domain of TCR clone 124535 (TRBV19, TRBJ2-5)
CASSMTGQQETQYF

SEQ ID NO: 249071 - protein, 16 aa, Homo sapiens
  CDR3 for alpha chain variable domain of TCR clone 124536 (TRAV8-3, TRAJ8)
CAVPRDGNTGFQQLVF

SEQ ID NO: 249072 - protein, 14 aa, Homo sapiens
  CDR3 for beta chain variable domain of TCR clone 124536 (TRBV28, TRBJ1-1)
CASSESGRGTEAFF

SEQ ID NO: 249073 - protein, 13 aa, Homo sapiens
  CDR3 for alpha chain variable domain of TCR clone 124537 (TRAV12-3, TRAJ6)
CANPSGGSYIPTL

SEQ ID NO: 249074 - protein, 14 aa, Homo sapiens
  CDR3 for beta chain variable domain of TCR clone 124537 (TRBV19, TRBJ1-1)
CASSRDRDATEAFF

SEQ ID NO: 249075 - protein, 11 aa, Homo sapiens
  CDR3 for alpha chain variable domain of TCR clone 124538 (TRAV12-2, TRAJ29)
CAVTLRIPLVF

SEQ ID NO: 249076 - protein, 16 aa, Homo sapiens
  CDR3 for beta chain variable domain of TCR clone 124538 (TRBV19, TRBJ1-5)
CASSIDRGGPRQPQHF

SEQ ID NO: 249077 - protein, 13 aa, Homo sapiens
  CDR3 for alpha chain variable domain of TCR clone 124539 (TRAV8-6, TRAJ33)
CAVRADSNYQLIW

SEQ ID NO: 249078 - protein, 15 aa, Homo sapiens
  CDR3 for beta chain variable domain of TCR clone 124539 (TRBV20-1, TRBJ2-7)
CSARDRVSGMDEQYF

SEQ ID NO: 249079 - protein, 11 aa, Homo sapiens
  CDR3 for alpha chain variable domain of TCR clone 124540 (TRAV1-2, TRAJ20)
CAVAKDYKLSF

SEQ ID NO: 249080 - protein, 18 aa, Homo sapiens
  CDR3 for beta chain variable domain of TCR clone 124540 (TRBV20-1, TRBJ2-6)
CSAETTPTHGSGANVLTF

SEQ ID NO: 249081 - protein, 14 aa, Homo sapiens
  CDR3 for alpha chain variable domain of TCR clone 124541 (TRAV1-2, TRAJ16)
CAVNRFSDGQKLLF

SEQ ID NO: 249082 - protein, 17 aa, Homo sapiens
  CDR3 for beta chain variable domain of TCR clone 124541 (TRBV7-9, TRBJ2-1)
CASSLVASYPAYNEQFF

SEQ ID NO: 249083 - protein, 17 aa, Homo sapiens
  CDR3 for alpha chain variable domain of TCR clone 124542 (TRAV13-1, TRAJ31)
CAPRDRLMFGDGTQLVV

SEQ ID NO: 249084 - protein, 14 aa, Homo sapiens
  CDR3 for beta chain variable domain of TCR clone 124542 (TRBV7-8, TRBJ2-3)
CASSLEAGTDTQYF

SEQ ID NO: 249085 - protein, 16 aa, Homo sapiens
  CDR3 for alpha chain variable domain of TCR clone 124543 (TRAV26-1, TRAJ53)
CIVRVAMGGSNYKLTF

SEQ ID NO: 249086 - protein, 15 aa, Homo sapiens
  CDR3 for beta chain variable domain of TCR clone 124543 (TRBV19, TRBJ2-5)
CASSIGGGPRETQYF

SEQ ID NO: 249087 - protein, 15 aa, Homo sapiens
  CDR3 for alpha chain variable domain of TCR clone 124544 (TRAV12-2, TRAJ50)
CAVNEVKTSYDKVIF

SEQ ID NO: 249088 - protein, 14 aa, Homo sapiens
  CDR3 for beta chain variable domain of TCR clone 124544 (TRBV7-8, TRBJ2-3)
CASSLEAGTDTQYF

SEQ ID NO: 249089 - protein, 15 aa, Homo sapiens
  CDR3 for alpha chain variable domain of TCR clone 124545 (TRAV2, TRAJ28)
CAVPYSGAGSYQLTF

SEQ ID NO: 249090 - protein, 14 aa, Homo sapiens
  CDR3 for beta chain variable domain of TCR clone 124545 (TRBV19, TRBJ2-5)
CASSMTGQQETQYF

SEQ ID NO: 249091 - protein, 15 aa, Homo sapiens
  CDR3 for alpha chain variable domain of TCR clone 124546 (TRAV14/DV4, TRAJ12)
CAMREERNSSYKLIF

SEQ ID NO: 249092 - protein, 16 aa, Homo sapiens
  CDR3 for beta chain variable domain of TCR clone 124546 (TRBV11-2, TRBJ1-2)
CASSLDTGGADYGYTF

SEQ ID NO: 249093 - protein, 14 aa, Homo sapiens
  CDR3 for alpha chain variable domain of TCR clone 124547 (TRAV35, TRAJ13)
RAGSPSGGYQKVTF

SEQ ID NO: 249094 - protein, 13 aa, Homo sapiens
  CDR3 for beta chain variable domain of TCR clone 124547 (TRBV29-1, TRBJ1-1)
CSVGDSRNTEAFF

SEQ ID NO: 249095 - protein, 18 aa, Homo sapiens
  CDR3 for alpha chain variable domain of TCR clone 124548 (TRAV13-1, TRAJ52)
CAASKRSAGGTSYGKLTF

SEQ ID NO: 249096 - protein, 12 aa, Homo sapiens
  CDR3 for beta chain variable domain of TCR clone 124548 (TRBV5-5, TRBJ2-5)
CASSYFGETQYL

SEQ ID NO: 249097 - protein, 13 aa, Homo sapiens
  CDR3 for alpha chain variable domain of TCR clone 124549 (TRAV29/DV5, TRAJ29)
CAASAAGNTPLFF

SEQ ID NO: 249098 - protein, 14 aa, Homo sapiens
  CDR3 for beta chain variable domain of TCR clone 124549 (TRBV19, TRBJ2-3)
CASSAPRGTDTQYF

SEQ ID NO: 249099 - protein, 11 aa, Homo sapiens
  CDR3 for alpha chain variable domain of TCR clone 124550 (TRAV1-1, TRAJ23)
CAVRQGGKLIF

SEQ ID NO: 249100 - protein, 13 aa, Homo sapiens
  CDR3 for beta chain variable domain of TCR clone 124550 (TRBV11-3, TRBJ2-5)
CASSRGPSETQYF

SEQ ID NO: 249101 - protein, 16 aa, Homo sapiens
  CDR3 for alpha chain variable domain of TCR clone 124551 (TRAV30, TRAJ24)
CGTEIVDADSWGKFQF

SEQ ID NO: 249102 - protein, 12 aa, Homo sapiens
  CDR3 for beta chain variable domain of TCR clone 124551 (TRBV20-1, TRBJ2-3)
CSADGAGDTQYF

SEQ ID NO: 249103 - protein, 16 aa, Homo sapiens
  CDR3 for alpha chain variable domain of TCR clone 124552 (TRAV3, TRAJ37)
CVVRGKGSGNTGKLIF

SEQ ID NO: 249104 - protein, 15 aa, Homo sapiens
  CDR3 for beta chain variable domain of TCR clone 124552 (TRBV9, TRBJ1-6)
CASSVAGTGDSPLHF

SEQ ID NO: 249105 - protein, 11 aa, Homo sapiens
  CDR3 for alpha chain variable domain of TCR clone 124553 (TRAV4, TRAJ23)
CLVAPGGKLIF

SEQ ID NO: 249106 - protein, 15 aa, Homo sapiens
  CDR3 for beta chain variable domain of TCR clone 124553 (TRBV7-2, TRBJ2-1)
CASSLQADEYNEQFF

SEQ ID NO: 249107 - protein, 12 aa, Homo sapiens
  CDR3 for alpha chain variable domain of TCR clone 124554 (TRAV2, TRAJ10)
CASTGGGNKLTF

SEQ ID NO: 249108 - protein, 13 aa, Homo sapiens
  CDR3 for beta chain variable domain of TCR clone 124554 (TRBV7-2, TRBJ2-2)
CSRGQGAAGELFF

SEQ ID NO: 249109 - protein, 14 aa, Homo sapiens
  CDR3 for alpha chain variable domain of TCR clone 124555 (TRAV1-2, TRAJ8)
CAVREDTGFQQLVF

SEQ ID NO: 249110 - protein, 12 aa, Homo sapiens
  CDR3 for beta chain variable domain of TCR clone 124555 (TRBV11-2, TRBJ2-2)
CASSLGGGELFF

SEQ ID NO: 249111 - protein, 12 aa, Homo sapiens
  CDR3 for alpha chain variable domain of TCR clone 124556 (TRAV26-1, TRAJ36)
CIVRVRADNLFF

SEQ ID NO: 249112 - protein, 17 aa, Homo sapiens
  CDR3 for beta chain variable domain of TCR clone 124556 (TRBV7-3, TRBJ2-3)
CASSPRGQGYGTDTQYF

SEQ ID NO: 249113 - protein, 14 aa, Homo sapiens
  CDR3 for alpha chain variable domain of TCR clone 124557 (TRAV1-2, TRAJ15)
CAVRDRQAGTALIF

SEQ ID NO: 249114 - protein, 12 aa, Homo sapiens
  CDR3 for beta chain variable domain of TCR clone 124557 (TRBV11-2, TRBJ2-2)
CASSLGGGELFF

SEQ ID NO: 249115 - protein, 14 aa, Homo sapiens
  CDR3 for alpha chain variable domain of TCR clone 124558 (TRAV16, TRAJ33)
CALSAMDSNYQLIW

SEQ ID NO: 249116 - protein, 14 aa, Homo sapiens
  CDR3 for beta chain variable domain of TCR clone 124558 (TRBV6-6, TRBJ2-7)
CASSDSGAGYEQYF

SEQ ID NO: 249117 - protein, 13 aa, Homo sapiens
  CDR3 for alpha chain variable domain of TCR clone 124559 (TRAV12-2, TRAJ24)
CAVSTDSWGKLQF

SEQ ID NO: 249118 - protein, 11 aa, Homo sapiens
  CDR3 for beta chain variable domain of TCR clone 124559 (TRBV25-1, TRBJ1-1)
PTWGGNTEAFF

SEQ ID NO: 249119 - protein, 15 aa, Homo sapiens
  CDR3 for alpha chain variable domain of TCR clone 124560 (TRAV13-1, TRAJ10)
CAAEVVTGGGNKITF

SEQ ID NO: 249120 - protein, 13 aa, Homo sapiens
  CDR3 for beta chain variable domain of TCR clone 124560 (TRBV28, TRBJ2-5)
CAGVSRGEETQYF

SEQ ID NO: 249121 - protein, 12 aa, Homo sapiens
  CDR3 for alpha chain variable domain of TCR clone 124561 (TRAV3, TRAJ20)
CAVRDPDYKLSF

SEQ ID NO: 249122 - protein, 12 aa, Homo sapiens
  CDR3 for beta chain variable domain of TCR clone 124561 (TRBV14, TRBJ2-4)
CASSNLKSIQYF

SEQ ID NO: 249123 - protein, 15 aa, Homo sapiens
  CDR3 for alpha chain variable domain of TCR clone 124562 (TRAV25, TRAJ53)
CAATGGGSSNYKLTF

SEQ ID NO: 249124 - protein, 19 aa, Homo sapiens
  CDR3 for beta chain variable domain of TCR clone 124562 (TRBV7-2, TRBJ2-3)
CASSFLSRNWGGGTDTQYF

SEQ ID NO: 249125 - protein, 14 aa, Homo sapiens
  CDR3 for alpha chain variable domain of TCR clone 124563 (TRAV23/DV6, TRAJ23)
CAASRRGQGGKLIF

SEQ ID NO: 249126 - protein, 12 aa, Homo sapiens
  CDR3 for beta chain variable domain of TCR clone 124563 (TRBV11-2, TRBJ2-1)
CASSPGNNEQFF

SEQ ID NO: 249127 - protein, 14 aa, Homo sapiens
  CDR3 for alpha chain variable domain of TCR clone 124564 (TRAV6, TRAJ6)
CALPTSGGSYIPTF

SEQ ID NO: 249128 - protein, 14 aa, Homo sapiens
  CDR3 for beta chain variable domain of TCR clone 124564 (TRBV12-5, TRBJ2-5)
CASGSRTHQETQYF

SEQ ID NO: 249129 - protein, 17 aa, Homo sapiens
  CDR3 for alpha chain variable domain of TCR clone 124565 (TRAV3, TRAJ6)
CAVRGGPRAGGSYIPTF

SEQ ID NO: 249130 - protein, 16 aa, Homo sapiens
  CDR3 for beta chain variable domain of TCR clone 124565 (TRBV7-8, TRBJ2-3)
CASSTEGQRETDTQYF

SEQ ID NO: 249131 - protein, 11 aa, Homo sapiens
  CDR3 for alpha chain variable domain of TCR clone 124566 (TRAV13-1, TRAJ39)
CASHAGNMLTF

SEQ ID NO: 249132 - protein, 14 aa, Homo sapiens
  CDR3 for beta chain variable domain of TCR clone 124566 (TRBV4-1, TRBJ2-2)
CASSLTENTGELFF

SEQ ID NO: 249133 - protein, 13 aa, Homo sapiens
  CDR3 for alpha chain variable domain of TCR clone 124567 (TRAV16, TRAJ11)
CALMNSGYSTLTF

SEQ ID NO: 249134 - protein, 16 aa, Homo sapiens
  CDR3 for beta chain variable domain of TCR clone 124567 (TRBV12-5, TRBJ2-5)
CASGPRTSGNQETQYF

SEQ ID NO: 249135 - protein, 15 aa, Homo sapiens
  CDR3 for alpha chain variable domain of TCR clone 124568 (TRAV23/DV6, TRAJ44)
RAARTLTGTASKLTF

SEQ ID NO: 249136 - protein, 17 aa, Homo sapiens
  CDR3 for beta chain variable domain of TCR clone 124568 (TRBV24-1, TRBJ2-1)
CATSDVSTSGTYNEQFF

SEQ ID NO: 249137 - protein, 11 aa, Homo sapiens
  CDR3 for alpha chain variable domain of TCR clone 124569 (TRAV2, TRAJ33)
CSVDSNYQLIW

SEQ ID NO: 249138 - protein, 14 aa, Homo sapiens
  CDR3 for beta chain variable domain of TCR clone 124569 (TRBV11-2, TRBJ2-3)
CASSRLARTDTQYF

SEQ ID NO: 249139 - protein, 15 aa, Homo sapiens
  CDR3 for alpha chain variable domain of TCR clone 124570 (TRAV23/DV6, TRAJ44)
CAARTLTGTARKLTF

SEQ ID NO: 249140 - protein, 17 aa, Homo sapiens
  CDR3 for beta chain variable domain of TCR clone 124570 (TRBV24-1, TRBJ2-1)
CATSDVSTSGTYNEQFF

SEQ ID NO: 249141 - protein, 16 aa, Homo sapiens
  CDR3 for alpha chain variable domain of TCR clone 124571 (TRAV30, TRAJ24)
CGTEIVDAGSWGKFQF

SEQ ID NO: 249142 - protein, 16 aa, Homo sapiens
  CDR3 for beta chain variable domain of TCR clone 124571 (TRBV7-3, TRBJ2-2)
CASSLKRGTLSGELFF

SEQ ID NO: 249143 - protein, 18 aa, Homo sapiens
  CDR3 for alpha chain variable domain of TCR clone 124572 (TRAV16, TRAJ10)
CAPARRRKQTHLWDRHSA

SEQ ID NO: 249144 - protein, 15 aa, Homo sapiens
  CDR3 for beta chain variable domain of TCR clone 124572 (TRBV6-3, TRBJ2-7)
CASSSPGTVFYEQYF

SEQ ID NO: 249145 - protein, 12 aa, Homo sapiens
  CDR3 for alpha chain variable domain of TCR clone 124573 (TRAV13-2, TRAJ8)
CAPWLGFHKLVF

SEQ ID NO: 249146 - protein, 14 aa, Homo sapiens
  CDR3 for beta chain variable domain of TCR clone 124573 (TRBV18, TRBJ1-5)
CASSRQQRNQPQHF

SEQ ID NO: 249147 - protein, 12 aa, Homo sapiens
  CDR3 for alpha chain variable domain of TCR clone 124574 (TRAV12-3, TRAJ20)
CAMVRGDYKLSF

SEQ ID NO: 249148 - protein, 12 aa, Homo sapiens
  CDR3 for beta chain variable domain of TCR clone 124574 (TRBV6-1, TRBJ2-7)
YASSDYSYEQYF

SEQ ID NO: 249149 - protein, 14 aa, Homo sapiens
  CDR3 for alpha chain variable domain of TCR clone 124575 (TRAV3, TRAJ21)
CAVRDKYNFNKFYF

SEQ ID NO: 249150 - protein, 14 aa, Homo sapiens
  CDR3 for beta chain variable domain of TCR clone 124575 (TRBV27, TRBJ2-3)
CASRYSPITDTQYF

SEQ ID NO: 249151 - protein, 16 aa, Homo sapiens
  CDR3 for alpha chain variable domain of TCR clone 124576 (TRAV3, TRAJ37)
CAVRGKGSGNTGKLIF

SEQ ID NO: 249152 - protein, 11 aa, Homo sapiens
  CDR3 for beta chain variable domain of TCR clone 124576 (TRBV11-2, TRBJ1-1)
CASSINTEAFF

SEQ ID NO: 249153 - protein, 14 aa, Homo sapiens
  CDR3 for alpha chain variable domain of TCR clone 124577 (TRAV1-2, TRAJ16)
CAVNRFSDGQKLLF

SEQ ID NO: 249154 - protein, 15 aa, Homo sapiens
  CDR3 for beta chain variable domain of TCR clone 124577 (TRBV7-3, TRBJ2-1)
CASSLAGAGADEQFF

SEQ ID NO: 249155 - protein, 13 aa, Homo sapiens
  CDR3 for alpha chain variable domain of TCR clone 124578 (TRAV17, TRAJ9)
CATDYTGGFKTIF

SEQ ID NO: 249156 - protein, 14 aa, Homo sapiens
  CDR3 for beta chain variable domain of TCR clone 124578 (TRBV19, TRBJ2-5)
CASSMTAQQETQYF

SEQ ID NO: 249157 - protein, 12 aa, Homo sapiens
  CDR3 for alpha chain variable domain of TCR clone 124579 (TRAV12-1, TRAJ23)
CVVNIPGGKIIF

SEQ ID NO: 249158 - protein, 13 aa, Homo sapiens
  CDR3 for beta chain variable domain of TCR clone 124579 (TRBV9, TRBJ2-7)
CASSVAEYYEQYF

SEQ ID NO: 249159 - protein, 14 aa, Homo sapiens
  CDR3 for alpha chain variable domain of TCR clone 124580 (TRAV13-1, TRAJ44)
CAAKATGAASKLTF

SEQ ID NO: 249160 - protein, 12 aa, Homo sapiens
  CDR3 for beta chain variable domain of TCR clone 124580 (TRBV7-8, TRBJ2-7)
CASSLGDREQYF

SEQ ID NO: 249161 - protein, 15 aa, Homo sapiens
  CDR3 for alpha chain variable domain of TCR clone 124581 (TRAV23/DV6, TRAJ12)
CAAIDLGAMDSSYKL

SEQ ID NO: 249162 - protein, 15 aa, Homo sapiens
  CDR3 for beta chain variable domain of TCR clone 124581 (TRBV12-4, TRBJ2-5)
CASTLNRGRGETQYF

SEQ ID NO: 249163 - protein, 12 aa, Homo sapiens
  CDR3 for alpha chain variable domain of TCR clone 124582 (TRAV35, TRAJ49)
CAGWNTGNQFYF

SEQ ID NO: 249164 - protein, 14 aa, Homo sapiens
  CDR3 for beta chain variable domain of TCR clone 124582 (TRBV5-1, TRBJ2-7)
CASSRGESLYEQYF

SEQ ID NO: 249165 - protein, 14 aa, Homo sapiens
  CDR3 for alpha chain variable domain of TCR clone 124583 (TRAV17, TRAJ4)
CATAPLGGYNKLIF

SEQ ID NO: 249166 - protein, 14 aa, Homo sapiens
  CDR3 for beta chain variable domain of TCR clone 124583 (TRBV12-4, TRBJ2-2)
CASNQGANTGELFF

SEQ ID NO: 249167 - protein, 12 aa, Homo sapiens
  CDR3 for alpha chain variable domain of TCR clone 124584 (TRAV2, TRAJ36)
CAELTGANNLFF

SEQ ID NO: 249168 - protein, 14 aa, Homo sapiens
  CDR3 for beta chain variable domain of TCR clone 124584 (TRBV18, TRBJ2-7)
CASSPRGGSYEQYF

SEQ ID NO: 249169 - protein, 13 aa, Homo sapiens
  CDR3 for alpha chain variable domain of TCR clone 124585 (TRAV30, TRAJ24)
CGTVTDSWGKLQF

SEQ ID NO: 249170 - protein, 14 aa, Homo sapiens
  CDR3 for beta chain variable domain of TCR clone 124585 (TRBV7-2, TRBJ2-1)
CASSLSGVYNEQFF

SEQ ID NO: 249171 - protein, 12 aa, Homo sapiens
  CDR3 for alpha chain variable domain of TCR clone 124586 (TRAV1-1, TRAJ8)
CAGGTGFQKLVF

SEQ ID NO: 249172 - protein, 15 aa, Homo sapiens
  CDR3 for beta chain variable domain of TCR clone 124586 (TRBV19, TRBJ1-1)
CASTSGQIQNTEAFF

SEQ ID NO: 249173 - protein, 15 aa, Homo sapiens
  CDR3 for alpha chain variable domain of TCR clone 124587 (TRAV13-2, TRAJ10)
CAENRETGGGNKLTF

SEQ ID NO: 249174 - protein, 16 aa, Homo sapiens
  CDR3 for beta chain variable domain of TCR clone 124587 (TRBV2, TRBJ1-3)
CASSRTGGSTGNTIYF

SEQ ID NO: 249175 - protein, 15 aa, Homo sapiens
  CDR3 for alpha chain variable domain of TCR clone 124588 (TRAV12-3, TRAJ49)
CAMAVTPNTGNQSYF

SEQ ID NO: 249176 - protein, 18 aa, Homo sapiens
  CDR3 for beta chain variable domain of TCR clone 124588 (TRBV4-1, TRBJ1-5)
CASSQDPRGQGLNQPQHF

SEQ ID NO: 249177 - protein, 13 aa, Homo sapiens
  CDR3 for alpha chain variable domain of TCR clone 124589 (TRAV12-3, TRAJ7)
CAMTPYGNNRLAF

SEQ ID NO: 249178 - protein, 13 aa, Homo sapiens
  CDR3 for beta chain variable domain of TCR clone 124589 (TRBV7-9, TRBJ2-3)
CASSPGSTDTQYF

SEQ ID NO: 249179 - protein, 13 aa, Homo sapiens
  CDR3 for alpha chain variable domain of TCR clone 124590 (TRAV26-2, TRAJ57)
FILSRGGSEKLVF

SEQ ID NO: 249180 - protein, 16 aa, Homo sapiens
  CDR3 for beta chain variable domain of TCR clone 124590 (TRBV18, TRBJ1-5)
CASSPRTGGGNQPQHF

SEQ ID NO: 249181 - protein, 12 aa, Homo sapiens
  CDR3 for alpha chain variable domain of TCR clone 124591 (TRAV21, TRAJ31)
CAVWGNNARLMF

SEQ ID NO: 249182 - protein, 14 aa, Homo sapiens
  CDR3 for beta chain variable domain of TCR clone 124591 (TRBV12-4, TRBJ1-1)
CASSLGTGGTEAFF

SEQ ID NO: 249183 - protein, 13 aa, Homo sapiens
  CDR3 for alpha chain variable domain of TCR clone 124592 (TRAV12-3, TRAJ33)
CAMSVNSNYQLIW

SEQ ID NO: 249184 - protein, 13 aa, Homo sapiens
  CDR3 for beta chain variable domain of TCR clone 124592 (TRBV7-2, TRBJ2-2)
CASSLAVTGDLFF

SEQ ID NO: 249185 - protein, 13 aa, Homo sapiens
  CDR3 for alpha chain variable domain of TCR clone 124593 (TRAV12-2, TRAJ52)
CAGGGTSYGKLTF

SEQ ID NO: 249186 - protein, 14 aa, Homo sapiens
  CDR3 for beta chain variable domain of TCR clone 124593 (TRBV19, TRBJ2-1)
CASPTFVLSGEQFF

SEQ ID NO: 249187 - protein, 13 aa, Homo sapiens
  CDR3 for alpha chain variable domain of TCR clone 124594 (TRAV12-2, TRAJ39)
CAVNNNAGNMLTF

SEQ ID NO: 249188 - protein, 18 aa, Homo sapiens
  CDR3 for beta chain variable domain of TCR clone 124594 (TRBV4-1, TRBJ1-5)
CASSQDPRGQGLNQPQHF

SEQ ID NO: 249189 - protein, 17 aa, Homo sapiens
  CDR3 for alpha chain variable domain of TCR clone 124595 (TRAV3, TRAJ42)
CAVRDRDYGGSQGNIIF

SEQ ID NO: 249190 - protein, 14 aa, Homo sapiens
  CDR3 for beta chain variable domain of TCR clone 124595 (TRBV7-2, TRBJ2-5)
CASSPRGSSETQYF

SEQ ID NO: 249191 - protein, 13 aa, Homo sapiens
  CDR3 for alpha chain variable domain of TCR clone 124596 (TRAV1-2, TRAJ33)
CAVSEDSNYQLIW

SEQ ID NO: 249192 - protein, 16 aa, Homo sapiens
  CDR3 for beta chain variable domain of TCR clone 124596 (TRBV4-2, TRBJ2-7)
CASRQDGVERGYEQYF

SEQ ID NO: 249193 - protein, 14 aa, Homo sapiens
  CDR3 for alpha chain variable domain of TCR clone 124597 (TRAV8-3, TRAJ9)
CAVVYNTGGFKTII

SEQ ID NO: 249194 - protein, 14 aa, Homo sapiens
  CDR3 for beta chain variable domain of TCR clone 124597 (TRBV7-3, TRBJ2-2)
CASSSGGYTGELFF

SEQ ID NO: 249195 - protein, 15 aa, Homo sapiens
  CDR3 for alpha chain variable domain of TCR clone 124598 (TRAV12-3, TRAJ6)
CAMSATSGGRYIPTF

SEQ ID NO: 249196 - protein, 11 aa, Homo sapiens
  CDR3 for beta chain variable domain of TCR clone 124598 (TRBV20-1, TRBJ1-5)
CSAQGDQPQHF

SEQ ID NO: 249197 - protein, 13 aa, Homo sapiens
  CDR3 for alpha chain variable domain of TCR clone 124599 (TRAV13-2, TRAJ40)
CAEFTSGTYKYIF

SEQ ID NO: 249198 - protein, 16 aa, Homo sapiens
  CDR3 for beta chain variable domain of TCR clone 124599 (TRBV9, TRBJ1-2)
CASSVEEKVSPYGYTF

SEQ ID NO: 249199 - protein, 13 aa, Homo sapiens
  CDR3 for alpha chain variable domain of TCR clone 124600 (TRAV14/DV4, TRAJ26)
CAMREAYGQNFVF

SEQ ID NO: 249200 - protein, 19 aa, Homo sapiens
  CDR3 for beta chain variable domain of TCR clone 124600 (TRBV13, TRBJ2-6)
CASSFVHRDRGAGANVLTF

SEQ ID NO: 249201 - protein, 17 aa, Homo sapiens
  CDR3 for alpha chain variable domain of TCR clone 124601 (TRAV8-6, TRAJ58)
CAVSSWVGETSGSRLTF

SEQ ID NO: 249202 - protein, 14 aa, Homo sapiens
  CDR3 for beta chain variable domain of TCR clone 124601 (TRBV19, TRBJ2-1)
CASSPGLAPNEQFF

SEQ ID NO: 249203 - protein, 13 aa, Homo sapiens
  CDR3 for alpha chain variable domain of TCR clone 124602 (TRAV9-2, TRAJ53)
CALSGGSNYKLTF

SEQ ID NO: 249204 - protein, 15 aa, Homo sapiens
  CDR3 for beta chain variable domain of TCR clone 124602 (TRBV4-1, TRBJ1-4)
CASSDTGGTNEKLFF

SEQ ID NO: 249205 - protein, 16 aa, Homo sapiens
  CDR3 for alpha chain variable domain of TCR clone 124603 (TRAV38-2/DV8, TRAJ47)
CAYRSAIMEYGNKLVF

SEQ ID NO: 249206 - protein, 14 aa, Homo sapiens
  CDR3 for beta chain variable domain of TCR clone 124603 (TRBV7-9, TRBJ2-7)
CASSLSQGSYEQYF

SEQ ID NO: 249207 - protein, 15 aa, Homo sapiens
  CDR3 for alpha chain variable domain of TCR clone 124604 (TRAV12-2, TRAJ53)
CDVNGGGGSNYKLTF

SEQ ID NO: 249208 - protein, 12 aa, Homo sapiens
  CDR3 for beta chain variable domain of TCR clone 124604 (TRBV7-6, TRBJ2-5)
CASSLSQETQYF

SEQ ID NO: 249209 - protein, 14 aa, Homo sapiens
  CDR3 for alpha chain variable domain of TCR clone 124605 (TRAV8-1, TRAJ10)
CAVIFTGGGNKLTF

SEQ ID NO: 249210 - protein, 12 aa, Homo sapiens
  CDR3 for beta chain variable domain of TCR clone 124605 (TRBV12-4, TRBJ2-3)
CASSSTTDTQYF

SEQ ID NO: 249211 - protein, 15 aa, Homo sapiens
  CDR3 for alpha chain variable domain of TCR clone 124606 (TRAV12-2, TRAJ43)
CAFDMRFGAGTRLTV

SEQ ID NO: 249212 - protein, 12 aa, Homo sapiens
  CDR3 for beta chain variable domain of TCR clone 124606 (TRBV5-5, TRBJ2-5)
CASSYFGETQYF

SEQ ID NO: 249213 - protein, 12 aa, Homo sapiens
  CDR3 for alpha chain variable domain of TCR clone 124607 (TRAV12-3, TRAJ39)
CAMTQAGNMPTF

SEQ ID NO: 249214 - protein, 13 aa, Homo sapiens
  CDR3 for beta chain variable domain of TCR clone 124607 (TRBV20-1, TRBJ1-1)
CSAPEGGNTEAFF

SEQ ID NO: 249215 - protein, 14 aa, Homo sapiens
  CDR3 for alpha chain variable domain of TCR clone 124608 (TRAV26-1, TRAJ39)
CIVRGSRAGNMPTF

SEQ ID NO: 249216 - protein, 14 aa, Homo sapiens
  CDR3 for beta chain variable domain of TCR clone 124608 (TRBV25-1, TRBJ1-1)
CASTHLGGNTEAFF

SEQ ID NO: 249217 - protein, 15 aa, Homo sapiens
  CDR3 for alpha chain variable domain of TCR clone 124609 (TRAV8-3, TRAJ27)
CAVGPSKTNAGKSTF

SEQ ID NO: 249218 - protein, 15 aa, Homo sapiens
  CDR3 for beta chain variable domain of TCR clone 124609 (TRBV6-3, TRBJ2-7)
CASSSPGTVFYEQYF

SEQ ID NO: 249219 - protein, 15 aa, Homo sapiens
  CDR3 for alpha chain variable domain of TCR clone 124610 (TRAV26-1, TRAJ12)
IASSELMDSSYKLIF

SEQ ID NO: 249220 - protein, 14 aa, Homo sapiens
  CDR3 for beta chain variable domain of TCR clone 124610 (TRBV11-2, TRBJ2-3)
CASSRLARTDTQYF

SEQ ID NO: 249221 - protein, 14 aa, Homo sapiens
  CDR3 for alpha chain variable domain of TCR clone 124611 (TRAV26-1, TRAJ40)
CIVRGARGTYKYIF

SEQ ID NO: 249222 - protein, 14 aa, Homo sapiens
  CDR3 for beta chain variable domain of TCR clone 124611 (TRBV7-3, TRBJ2-7)
CASSLKADSYEQYF

SEQ ID NO: 249223 - protein, 13 aa, Homo sapiens
  CDR3 for alpha chain variable domain of TCR clone 124612 (TRAV35, TRAJ42)
CAGFPGSQGNLIF

SEQ ID NO: 249224 - protein, 13 aa, Homo sapiens
  CDR3 for beta chain variable domain of TCR clone 124612 (TRBV18, TRBJ2-7)
CASQSGGGYEQYF

SEQ ID NO: 249225 - protein, 15 aa, Homo sapiens
  CDR3 for alpha chain variable domain of TCR clone 124613 (TRAV17, TRAJ57)
CATGPSQGGSEKLVF

SEQ ID NO: 249226 - protein, 16 aa, Homo sapiens
  CDR3 for beta chain variable domain of TCR clone 124613 (TRBV12-4, TRBJ1-5)
CASSRPVGGSNQPQHF

SEQ ID NO: 249227 - protein, 10 aa, Homo sapiens
  CDR3 for alpha chain variable domain of TCR clone 124614 (TRAV6, TRAJ43)
CARHKPRFGA

SEQ ID NO: 249228 - protein, 16 aa, Homo sapiens
  CDR3 for beta chain variable domain of TCR clone 124614 (TRBV6-5, TRBJ2-1)
CASSYSLAGGYNEQFF

SEQ ID NO: 249229 - protein, 14 aa, Homo sapiens
  CDR3 for alpha chain variable domain of TCR clone 124615 (TRAV9-2, TRAJ39)
CALYIYNAGNMLTF

SEQ ID NO: 249230 - protein, 16 aa, Homo sapiens
  CDR3 for beta chain variable domain of TCR clone 124615 (TRBV18, TRBJ1-3)
CASSLGILNGENTIYF

SEQ ID NO: 249231 - protein, 14 aa, Homo sapiens
  CDR3 for alpha chain variable domain of TCR clone 124616 (TRAV16, TRAJ33)
CALSAMDSNYQLIW

SEQ ID NO: 249232 - protein, 16 aa, Homo sapiens
  CDR3 for beta chain variable domain of TCR clone 124616 (TRBV25-1, TRBJ2-7)
CASCELTGGGIYEQYF

SEQ ID NO: 249233 - protein, 14 aa, Homo sapiens
  CDR3 for alpha chain variable domain of TCR clone 124617 (TRAV9-2, TRAJ39)
CALYIYNAGNMLTF

SEQ ID NO: 249234 - protein, 14 aa, Homo sapiens
  CDR3 for beta chain variable domain of TCR clone 124617 (TRBV6-1, TRBJ1-3)
CASVQGGGGNTTYF

SEQ ID NO: 249235 - protein, 15 aa, Homo sapiens
  CDR3 for alpha chain variable domain of TCR clone 124618 (TRAV26-1, TRAJ44)
CIVRANTGTASKLTF

SEQ ID NO: 249236 - protein, 16 aa, Homo sapiens
  CDR3 for beta chain variable domain of TCR clone 124618 (TRBV7-7, TRBJ2-1)
CASSLASGTSYNEKFF

SEQ ID NO: 249237 - protein, 14 aa, Homo sapiens
  CDR3 for alpha chain variable domain of TCR clone 124619 (TRAV35, TRAJ22)
CAGLRPGSARQLTF

SEQ ID NO: 249238 - protein, 10 aa, Homo sapiens
  CDR3 for beta chain variable domain of TCR clone 124619 (TRBV2, TRBJ2-5)
CASSAATQYF

SEQ ID NO: 249239 - protein, 16 aa, Homo sapiens
  CDR3 for alpha chain variable domain of TCR clone 124620 (TRAV30, TRAJ24)
CGTEIVDADSWGKFQF

SEQ ID NO: 249240 - protein, 17 aa, Homo sapiens
  CDR3 for beta chain variable domain of TCR clone 124620 (TRBV19, TRBJ1-5)
CASSPGAYSGENQPQHF

SEQ ID NO: 249241 - protein, 16 aa, Homo sapiens
  CDR3 for alpha chain variable domain of TCR clone 124621 (TRAV12-2, TRAJ6)
CAAPIAGSGGSYIPTF

SEQ ID NO: 249242 - protein, 10 aa, Homo sapiens
  CDR3 for beta chain variable domain of TCR clone 124621 (TRBV28, TRBJ1-2)
CASSSDRAVF

SEQ ID NO: 249243 - protein, 14 aa, Homo sapiens
  CDR3 for alpha chain variable domain of TCR clone 124622 (TRAV12-2, TRAJ13)
CAVKKTGGYQNVTF

SEQ ID NO: 249244 - protein, 15 aa, Homo sapiens
  CDR3 for beta chain variable domain of TCR clone 124622 (TRBV28, TRBJ2-5)
CASSPPWSYQETQYF

SEQ ID NO: 249245 - protein, 14 aa, Homo sapiens
  CDR3 for alpha chain variable domain of TCR clone 124623 (TRAV2, TRAJ9)
CAVEDRGGGFKTIF

SEQ ID NO: 249246 - protein, 14 aa, Homo sapiens
  CDR3 for beta chain variable domain of TCR clone 124623 (TRBV7-3, TRBJ2-1)
CASSLAGGTNEQFF

SEQ ID NO: 249247 - protein, 16 aa, Homo sapiens
  CDR3 for alpha chain variable domain of TCR clone 124624 (TRAV3, TRAJ10)
CAVRDMRAGGGNKRTF

SEQ ID NO: 249248 - protein, 13 aa, Homo sapiens
  CDR3 for beta chain variable domain of TCR clone 124624 (TRBV12-4, TRBJ2-7)
CASSPTETYEQYF

SEQ ID NO: 249249 - protein, 13 aa, Homo sapiens
  CDR3 for alpha chain variable domain of TCR clone 124625 (TRAV27, TRAJ49)
CAPRPSTGNQFYF

SEQ ID NO: 249250 - protein, 18 aa, Homo sapiens
  CDR3 for beta chain variable domain of TCR clone 124625 (TRBV7-3, TRBJ2-5)
CASSLGGAAQGRWETQYF

SEQ ID NO: 249251 - protein, 11 aa, Homo sapiens
  CDR3 for alpha chain variable domain of TCR clone 124626 (TRAV3, TRAJ21)
CAVGNFNKFYF

SEQ ID NO: 249252 - protein, 15 aa, Homo sapiens
  CDR3 for beta chain variable domain of TCR clone 124626 (TRBV5-1, TRBJ2-7)
CASSLDLTSSYEQYF

SEQ ID NO: 249253 - protein, 12 aa, Homo sapiens
  CDR3 for alpha chain variable domain of TCR clone 124627 (TRAV8-3, TRAJ34)
LASGYNTDKLIF

SEQ ID NO: 249254 - protein, 13 aa, Homo sapiens
  CDR3 for beta chain variable domain of TCR clone 124627 (TRBV6-4, TRBJ2-3)
CASSVSWADTQYF

SEQ ID NO: 249255 - protein, 14 aa, Homo sapiens
  CDR3 for alpha chain variable domain of TCR clone 124628 (TRAV13-1, TRAJ9)
CAASALTGGFKTIF

SEQ ID NO: 249256 - protein, 16 aa, Homo sapiens
  CDR3 for beta chain variable domain of TCR clone 124628 (TRBV12-4, TRBJ2-3)
CAGSFGTGGISDTQYF

SEQ ID NO: 249257 - protein, 13 aa, Homo sapiens
  CDR3 for alpha chain variable domain of TCR clone 124629 (TRAV14/DV4, TRAJ26)
CAMREAYGQNFVF

SEQ ID NO: 249258 - protein, 19 aa, Homo sapiens
  CDR3 for beta chain variable domain of TCR clone 124629 (TRBV13, TRBJ2-6)
CASSLVRRDRGAGANVLTF

SEQ ID NO: 249259 - protein, 10 aa, Homo sapiens
  CDR3 for alpha chain variable domain of TCR clone 124630 (TRAV2, TRAJ34)
CDVVNDKLIF

SEQ ID NO: 249260 - protein, 15 aa, Homo sapiens
  CDR3 for beta chain variable domain of TCR clone 124630 (TRBV3-1, TRBJ2-2)
CASSQDWTRAGELFF

SEQ ID NO: 249261 - protein, 14 aa, Homo sapiens
  CDR3 for alpha chain variable domain of TCR clone 124631 (TRAV12-2, TRAJ29)
CAVRRNSGNTTLVF

SEQ ID NO: 249262 - protein, 13 aa, Homo sapiens
  CDR3 for beta chain variable domain of TCR clone 124631 (TRBV12-4, TRBJ2-1)
CASSHYTDNEQFF

SEQ ID NO: 249263 - protein, 14 aa, Homo sapiens
  CDR3 for alpha chain variable domain of TCR clone 124632 (TRAV26-1, TRAJ52)
CIVKGGTSYGKLTF

SEQ ID NO: 249264 - protein, 13 aa, Homo sapiens
  CDR3 for beta chain variable domain of TCR clone 124632 (TRBV19, TRBJ1-2)
CASSIGQVYGYTF

SEQ ID NO: 249265 - protein, 15 aa, Homo sapiens
  CDR3 for alpha chain variable domain of TCR clone 124633 (TRAV12-1, TRAJ42)
CVVTRDGGSQGHLIF

SEQ ID NO: 249266 - protein, 14 aa, Homo sapiens
  CDR3 for beta chain variable domain of TCR clone 124633 (TRBV11-2, TRBJ2-3)
CASSLGGGANTQYF

SEQ ID NO: 249267 - protein, 11 aa, Homo sapiens
  CDR3 for alpha chain variable domain of TCR clone 124634 (TRAV3, TRAJ32)
CAVREGIMVVL

SEQ ID NO: 249268 - protein, 12 aa, Homo sapiens
  CDR3 for beta chain variable domain of TCR clone 124634 (TRBV14, TRBJ2-5)
CASSHLKETQYF

SEQ ID NO: 249269 - protein, 14 aa, Homo sapiens
  CDR3 for alpha chain variable domain of TCR clone 124635 (TRAV20, TRAJ32)
CCGRYGGATNKLIF

SEQ ID NO: 249270 - protein, 14 aa, Homo sapiens
  CDR3 for beta chain variable domain of TCR clone 124635 (TRBV19, TRBJ2-1)
CASPTFVLSGEQFF

SEQ ID NO: 249271 - protein, 16 aa, Homo sapiens
  CDR3 for alpha chain variable domain of TCR clone 124636 (TRAV23/DV6, TRAJ9)
CAASIGGNTGGFKHIF

SEQ ID NO: 249272 - protein, 14 aa, Homo sapiens
  CDR3 for beta chain variable domain of TCR clone 124636 (TRBV9, TRBJ2-7)
CASSVGVGSYEQYF

SEQ ID NO: 249273 - protein, 12 aa, Homo sapiens
  CDR3 for alpha chain variable domain of TCR clone 124637 (TRAV21, TRAJ31)
CVLAGNNARLMS

SEQ ID NO: 249274 - protein, 16 aa, Homo sapiens
  CDR3 for beta chain variable domain of TCR clone 124637 (TRBV27, TRBJ2-5)
CASSFGPGGTKETQYF

SEQ ID NO: 249275 - protein, 12 aa, Homo sapiens
  CDR3 for alpha chain variable domain of TCR clone 124638 (TRAV21, TRAJ49)
CAVRNTGNQFYF

SEQ ID NO: 249276 - protein, 16 aa, Homo sapiens
  CDR3 for beta chain variable domain of TCR clone 124638 (TRBV19, TRBJ2-1)
CASSKAGPSSYNEQFF

SEQ ID NO: 249277 - protein, 16 aa, Homo sapiens
  CDR3 for alpha chain variable domain of TCR clone 124639 (TRAV12-3, TRAJ53)
CAMSPGSGGSNYKLTF

SEQ ID NO: 249278 - protein, 15 aa, Homo sapiens
  CDR3 for beta chain variable domain of TCR clone 124639 (TRBV5-5, TRBJ1-5)
CASSSTPGSNQPQHF

SEQ ID NO: 249279 - protein, 11 aa, Homo sapiens
  CDR3 for alpha chain variable domain of TCR clone 124640 (TRAV2, TRAJ13)
CASGGYQKVTF

SEQ ID NO: 249280 - protein, 18 aa, Homo sapiens
  CDR3 for beta chain variable domain of TCR clone 124640 (TRBV19, TRBJ2-6)
CASIGPTSGGSGANALTF

SEQ ID NO: 249281 - protein, 14 aa, Homo sapiens
  CDR3 for alpha chain variable domain of TCR clone 124641 (TRAV12-1, TRAJ6)
CVVPTSGGSYIPTF

SEQ ID NO: 249282 - protein, 19 aa, Homo sapiens
  CDR3 for beta chain variable domain of TCR clone 124641 (TRBV20-1, TRBJ2-3)
CSARGVSGGTVSSTDTQYF

SEQ ID NO: 249283 - protein, 16 aa, Homo sapiens
  CDR3 for alpha chain variable domain of TCR clone 124642 (TRAV12-3, TRAJ53)
CAMSPGIGGSNYKLTF

SEQ ID NO: 249284 - protein, 16 aa, Homo sapiens
  CDR3 for beta chain variable domain of TCR clone 124642 (TRBV4-2, TRBJ1-1)
CASSQAGFGMNTEAFF

SEQ ID NO: 249285 - protein, 13 aa, Homo sapiens
  CDR3 for alpha chain variable domain of TCR clone 124643 (TRAV8-3, TRAJ30)
CAVGGWRDDKIIF

SEQ ID NO: 249286 - protein, 14 aa, Homo sapiens
  CDR3 for beta chain variable domain of TCR clone 124643 (TRBV12-4, TRBJ1-1)
CASSLGTGGTEAFF

SEQ ID NO: 249287 - protein, 12 aa, Homo sapiens
  CDR3 for alpha chain variable domain of TCR clone 124644 (TRAV13-1, TRAJ27)
CAAHTNAGKSTF

SEQ ID NO: 249288 - protein, 14 aa, Homo sapiens
  CDR3 for beta chain variable domain of TCR clone 124644 (TRBV19, TRBJ2-2)
CASSGQGIAGELLF

SEQ ID NO: 249289 - protein, 14 aa, Homo sapiens
  CDR3 for alpha chain variable domain of TCR clone 124645 (TRAV1-2, TRAJ8)
CAVTEDTGFQKLVF

SEQ ID NO: 249290 - protein, 12 aa, Homo sapiens
  CDR3 for beta chain variable domain of TCR clone 124645 (TRBV24-1, TRBJ1-1)
CATLYPDTEAFF

SEQ ID NO: 249291 - protein, 14 aa, Homo sapiens
  CDR3 for alpha chain variable domain of TCR clone 124646 (TRAV19, TRAJ49)
CALSEGNTGNQFYF

SEQ ID NO: 249292 - protein, 15 aa, Homo sapiens
  CDR3 for beta chain variable domain of TCR clone 124646 (TRBV10-3, TRBJ2-3)
CAISLTSGGTDTRYF

SEQ ID NO: 249293 - protein, 13 aa, Homo sapiens
  CDR3 for alpha chain variable domain of TCR clone 124647 (TRAV12-3, TRAJ13)
CAMRSGGYQKVTF

SEQ ID NO: 249294 - protein, 13 aa, Homo sapiens
  CDR3 for beta chain variable domain of TCR clone 124647 (TRBV10-3, TRBJ2-7)
CASKLAVNYEQYF

SEQ ID NO: 249295 - protein, 15 aa, Homo sapiens
  CDR3 for alpha chain variable domain of TCR clone 124648 (TRAV8-2, TRAJ15)
CVVTMGDQAGTALIF

SEQ ID NO: 249296 - protein, 16 aa, Homo sapiens
  CDR3 for beta chain variable domain of TCR clone 124648 (TRBV12-4, TRBJ1-5)
CASSRPVGGSNQPQHF

SEQ ID NO: 249297 - protein, 19 aa, Homo sapiens
  CDR3 for alpha chain variable domain of TCR clone 124649 (TRAV17, TRAJ17)
CATDGRPGVIKAAGKKLTF

SEQ ID NO: 249298 - protein, 17 aa, Homo sapiens
  CDR3 for beta chain variable domain of TCR clone 124649 (TRBV12-4, TRBJ1-1)
CASSLSGFRTMNTEAFF

SEQ ID NO: 249299 - protein, 12 aa, Homo sapiens
  CDR3 for alpha chain variable domain of TCR clone 124650 (TRAV1-1, TRAJ39)
CAVPVGGNMLTF

SEQ ID NO: 249300 - protein, 15 aa, Homo sapiens
  CDR3 for beta chain variable domain of TCR clone 124650 (TRBV7-3, TRBJ2-2)
CASSETGQGTGELFF

SEQ ID NO: 249301 - protein, 17 aa, Homo sapiens
  CDR3 for alpha chain variable domain of TCR clone 124651 (TRAV12-2, TRAJ36)
CAVKDNLFFGTGTRLTV

SEQ ID NO: 249302 - protein, 15 aa, Homo sapiens
  CDR3 for beta chain variable domain of TCR clone 124651 (TRBV28, TRBJ2-2)
CASTVAGANTGGLFF

SEQ ID NO: 249303 - protein, 14 aa, Homo sapiens
  CDR3 for alpha chain variable domain of TCR clone 124652 (TRAV23/DV6, TRAJ8)
CAASKNTGFQKLVL

SEQ ID NO: 249304 - protein, 16 aa, Homo sapiens
  CDR3 for beta chain variable domain of TCR clone 124652 (TRBV4-1, TRBJ2-6)
CASSQVGDPGANVLTF

SEQ ID NO: 249305 - protein, 13 aa, Homo sapiens
  CDR3 for alpha chain variable domain of TCR clone 124653 (TRAV21, TRAJ20)
CAVGLRVDHKLGF

SEQ ID NO: 249306 - protein, 13 aa, Homo sapiens
  CDR3 for beta chain variable domain of TCR clone 124653 (TRBV6-1, TRBJ1-1)
CASSRQGNTEAFF

SEQ ID NO: 249307 - protein, 13 aa, Homo sapiens
  CDR3 for alpha chain variable domain of TCR clone 124654 (TRAV17, TRAJ39)
CAISTNAGNMLTF

SEQ ID NO: 249308 - protein, 16 aa, Homo sapiens
  CDR3 for beta chain variable domain of TCR clone 124654 (TRBV7-3, TRBJ2-2)
CASSLKRGTLSGELFF

SEQ ID NO: 249309 - protein, 11 aa, Homo sapiens
  CDR3 for alpha chain variable domain of TCR clone 124655 (TRAV2, TRAJ13)
CASGGYQKVTF

SEQ ID NO: 249310 - protein, 16 aa, Homo sapiens
  CDR3 for beta chain variable domain of TCR clone 124655 (TRBV7-8, TRBJ2-4)
CASSAERTLAKNIQYF

SEQ ID NO: 249311 - protein, 14 aa, Homo sapiens
  CDR3 for alpha chain variable domain of TCR clone 124656 (TRAV16, TRAJ42)
CALLAGGSQGNLIF

SEQ ID NO: 249312 - protein, 15 aa, Homo sapiens
  CDR3 for beta chain variable domain of TCR clone 124656 (TRBV2, TRBJ2-1)
CATLPSGLPYNEQFF

SEQ ID NO: 249313 - protein, 14 aa, Homo sapiens
  CDR3 for alpha chain variable domain of TCR clone 124657 (TRAV35, TRAJ13)
CAGSPSGVYQKVTF

SEQ ID NO: 249314 - protein, 17 aa, Homo sapiens
  CDR3 for beta chain variable domain of TCR clone 124657 (TRBV18, TRBJ1-5)
CQLTTCRVRQNNQPQHF

SEQ ID NO: 249315 - protein, 22 aa, Homo sapiens
  CDR3 for alpha chain variable domain of TCR clone 124658 (TRAV4, TRAJ38)
CLVGTNAGNNHIQNPDPAVYQL

SEQ ID NO: 249316 - protein, 14 aa, Homo sapiens
  CDR3 for beta chain variable domain of TCR clone 124658 (TRBV4-2, TRBJ2-1)
CASGLDRAYNEQFF

SEQ ID NO: 249317 - protein, 16 aa, Homo sapiens
  CDR3 for alpha chain variable domain of TCR clone 124659 (TRAV4, TRAJ8)
CLVGGSGNTGFQKLVF

SEQ ID NO: 249318 - protein, 15 aa, Homo sapiens
  CDR3 for beta chain variable domain of TCR clone 124659 (TRBV15, TRBJ1-2)
CATSRVRASGSGYTF

SEQ ID NO: 249319 - protein, 20 aa, Homo sapiens
  CDR3 for alpha chain variable domain of TCR clone 124660 (TRAV26-1, )
CIVSHRVEGFWNQIPDIQNP

SEQ ID NO: 249320 - protein, 14 aa, Homo sapiens
  CDR3 for beta chain variable domain of TCR clone 124660 (TRBV20-1, TRBJ2-7)
CSAWTALSSYEQYF

SEQ ID NO: 249321 - protein, 14 aa, Homo sapiens
  CDR3 for alpha chain variable domain of TCR clone 124661 (TRAV1-2, TRAJ16)
CAVNRFSDGQKLLF

SEQ ID NO: 249322 - protein, 16 aa, Homo sapiens
  CDR3 for beta chain variable domain of TCR clone 124661 (TRBV2, TRBJ1-1)
CASSPPNRGMNTEAFF

SEQ ID NO: 249323 - protein, 13 aa, Homo sapiens
  CDR3 for alpha chain variable domain of TCR clone 124662 (TRAV21, TRAJ20)
CAVGLRVDYKLSF

SEQ ID NO: 249324 - protein, 13 aa, Homo sapiens
  CDR3 for beta chain variable domain of TCR clone 124662 (TRBV6-1, TRBJ1-1)
CASSRQGKTEAFF

SEQ ID NO: 249325 - protein, 16 aa, Homo sapiens
  CDR3 for alpha chain variable domain of TCR clone 124663 (TRAV12-3, TRAJ53)
CAMSPGSGGSNYKLTF

SEQ ID NO: 249326 - protein, 13 aa, Homo sapiens
  CDR3 for beta chain variable domain of TCR clone 124663 (TRBV7-2, TRBJ2-5)
CASSQTSVETQCF

SEQ ID NO: 249327 - protein, 14 aa, Homo sapiens
  CDR3 for alpha chain variable domain of TCR clone 124664 (TRAV12-2, TRAJ13)
CAVKKTGGYQKVTF

SEQ ID NO: 249328 - protein, 17 aa, Homo sapiens
  CDR3 for beta chain variable domain of TCR clone 124664 (TRBV12-4, TRBJ2-3)
CASSGPGLAGGADTQYF

SEQ ID NO: 249329 - protein, 17 aa, Homo sapiens
  CDR3 for alpha chain variable domain of TCR clone 124665 (TRAV2, TRAJ36)
CAVEDRGNWGKQPLLWD

SEQ ID NO: 249330 - protein, 14 aa, Homo sapiens
  CDR3 for beta chain variable domain of TCR clone 124665 (TRBV7-9, TRBJ2-5)
YASSLDTAQETQYF

SEQ ID NO: 249331 - protein, 12 aa, Homo sapiens
  CDR3 for alpha chain variable domain of TCR clone 124666 (TRAV8-3, TRAJ41)
CAVALSGHALNF

SEQ ID NO: 249332 - protein, 18 aa, Homo sapiens
  CDR3 for beta chain variable domain of TCR clone 124666 (TRBV20-1, TRBJ2-6)
CSAETTPTHGSGANVLTF

SEQ ID NO: 249333 - protein, 16 aa, Homo sapiens
  CDR3 for alpha chain variable domain of TCR clone 124667 (TRAV12-2, TRAJ10)
CAVNRVLTGGGNKLTF

SEQ ID NO: 249334 - protein, 12 aa, Homo sapiens
  CDR3 for beta chain variable domain of TCR clone 124667 (TRBV11-2, TRBJ2-2)
CASSLGGGELFF

SEQ ID NO: 249335 - protein, 12 aa, Homo sapiens
  CDR3 for alpha chain variable domain of TCR clone 124668 (TRAV12-3, TRAJ17)
CAMTLTGNKLTF

SEQ ID NO: 249336 - protein, 13 aa, Homo sapiens
  CDR3 for beta chain variable domain of TCR clone 124668 (TRBV7-9, TRBJ1-2)
CASSLEQNYGYTF

SEQ ID NO: 249337 - protein, 11 aa, Homo sapiens
  CDR3 for alpha chain variable domain of TCR clone 124669 (TRAV2, TRAJ33)
CAVDSNYQLIW

SEQ ID NO: 249338 - protein, 12 aa, Homo sapiens
  CDR3 for beta chain variable domain of TCR clone 124669 (TRBV11-2, TRBJ2-2)
CASSLGGGGLFF

SEQ ID NO: 249339 - protein, 13 aa, Homo sapiens
  CDR3 for alpha chain variable domain of TCR clone 124670 (TRAV12-3, TRAJ9)
CAMRNTGGFKTIF

SEQ ID NO: 249340 - protein, 16 aa, Homo sapiens
  CDR3 for beta chain variable domain of TCR clone 124670 (TRBV15, TRBJ1-2)
CATSRGPRTGGGGYTF

SEQ ID NO: 249341 - protein, 12 aa, Homo sapiens
  CDR3 for alpha chain variable domain of TCR clone 124671 (TRAV21, TRAJ33)
CAKMDSNYQLIW

SEQ ID NO: 249342 - protein, 14 aa, Homo sapiens
  CDR3 for beta chain variable domain of TCR clone 124671 (TRBV10-3, TRBJ2-1)
CAISSDLAYNEQFF

SEQ ID NO: 249343 - protein, 13 aa, Homo sapiens
  CDR3 for alpha chain variable domain of TCR clone 124672 (TRAV27, TRAJ53)
CAGEGGSNYKLTF

SEQ ID NO: 249344 - protein, 13 aa, Homo sapiens
  CDR3 for beta chain variable domain of TCR clone 124672 (TRBV29-1, TRBJ1-1)
CSVESGFGTEAFF

SEQ ID NO: 249345 - protein, 13 aa, Homo sapiens
  CDR3 for alpha chain variable domain of TCR clone 124673 (TRAV12-2, TRAJ20)
CAVYPSNDYKLSF

SEQ ID NO: 249346 - protein, 15 aa, Homo sapiens
  CDR3 for beta chain variable domain of TCR clone 124673 (TRBV27, TRBJ2-5)
CASSLYARGGETQYF

SEQ ID NO: 249347 - protein, 14 aa, Homo sapiens
  CDR3 for alpha chain variable domain of TCR clone 124674 (TRAV8-2, TRAJ37)
CVVSGSGNTGKLIF

SEQ ID NO: 249348 - protein, 12 aa, Homo sapiens
  CDR3 for beta chain variable domain of TCR clone 124674 (TRBV7-9, TRBJ1-5)
CASSPQGQPQHF

SEQ ID NO: 249349 - protein, 11 aa, Homo sapiens
  CDR3 for alpha chain variable domain of TCR clone 124675 (TRAV3, TRAJ20)
CAVRPSVTTTS

SEQ ID NO: 249350 - protein, 16 aa, Homo sapiens
  CDR3 for beta chain variable domain of TCR clone 124675 (TRBV12-5, TRBJ2-5)
CASGPRTSGNQETQYF

SEQ ID NO: 249351 - protein, 16 aa, Homo sapiens
  CDR3 for alpha chain variable domain of TCR clone 124676 (TRAV21, TRAJ37)
CAVRTAGSSNTGKLIF

SEQ ID NO: 249352 - protein, 13 aa, Homo sapiens
  CDR3 for beta chain variable domain of TCR clone 124676 (TRBV7-9, TRBJ2-5)
CASLPLGRETQYF

SEQ ID NO: 249353 - protein, 11 aa, Homo sapiens
  CDR3 for alpha chain variable domain of TCR clone 124677 (TRAV13-2, TRAJ39)
CASHAGNMLTF

SEQ ID NO: 249354 - protein, 14 aa, Homo sapiens
  CDR3 for beta chain variable domain of TCR clone 124677 (TRBV11-2, TRBJ1-5)
CASSLDRGRQPQHF

SEQ ID NO: 249355 - protein, 12 aa, Homo sapiens
  CDR3 for alpha chain variable domain of TCR clone 124678 (TRAV2, TRAJ31)
CAVEDNNARLMF

SEQ ID NO: 249356 - protein, 16 aa, Homo sapiens
  CDR3 for beta chain variable domain of TCR clone 124678 (TRBV4-2, TRBJ1-2)
CASSQEIGGASYGYTF

SEQ ID NO: 249357 - protein, 15 aa, Homo sapiens
  CDR3 for alpha chain variable domain of TCR clone 124679 (TRAV23/DV6, TRAJ30)
CAASSRESRDDKIIF

SEQ ID NO: 249358 - protein, 13 aa, Homo sapiens
  CDR3 for beta chain variable domain of TCR clone 124679 (TRBV4-2, TRBJ1-1)
CASSQAGNTEAFF

SEQ ID NO: 249359 - protein, 16 aa, Homo sapiens
  CDR3 for alpha chain variable domain of TCR clone 124680 (TRAV26-1, TRAJ6)
CIVRVPRTGGSYIPTL

SEQ ID NO: 249360 - protein, 15 aa, Homo sapiens
  CDR3 for beta chain variable domain of TCR clone 124680 (TRBV6-3, TRBJ2-7)
CASSSPGTVFYEQYF

SEQ ID NO: 249361 - protein, 16 aa, Homo sapiens
  CDR3 for alpha chain variable domain of TCR clone 124681 (TRAV30, TRAJ24)
CGTEIVDADSWGKFQF

SEQ ID NO: 249362 - protein, 12 aa, Homo sapiens
  CDR3 for beta chain variable domain of TCR clone 124681 (TRBV7-8, TRBJ2-5)
CASSPRVETQYF

SEQ ID NO: 249363 - protein, 14 aa, Homo sapiens
  CDR3 for alpha chain variable domain of TCR clone 124682 (TRAV8-4, TRAJ8)
CAVSVGTGFQKLVF

SEQ ID NO: 249364 - protein, 15 aa, Homo sapiens
  CDR3 for beta chain variable domain of TCR clone 124682 (TRBV2, TRBJ2-3)
CASSGEGTGTDTQYS

SEQ ID NO: 249365 - protein, 11 aa, Homo sapiens
  CDR3 for alpha chain variable domain of TCR clone 124683 (TRAV4, TRAJ31)
CLVGDNARLMF

SEQ ID NO: 249366 - protein, 16 aa, Homo sapiens
  CDR3 for beta chain variable domain of TCR clone 124683 (TRBV7-2, TRBJ2-5)
CASSSKRLSGQETQYF

SEQ ID NO: 249367 - protein, 14 aa, Homo sapiens
  CDR3 for alpha chain variable domain of TCR clone 124684 (TRAV12-2, TRAJ13)
CAVKKTGGYQKVTF

SEQ ID NO: 249368 - protein, 13 aa, Homo sapiens
  CDR3 for beta chain variable domain of TCR clone 124684 (TRBV20-1, TRBJ1-1)
CSARGGGNTEDFF

SEQ ID NO: 249369 - protein, 14 aa, Homo sapiens
  CDR3 for alpha chain variable domain of TCR clone 124685 (TRAV1-2, TRAJ16)
CAVNRFSDGQKLLF

SEQ ID NO: 249370 - protein, 20 aa, Homo sapiens
  CDR3 for beta chain variable domain of TCR clone 124685 (TRBV7-8, TRBJ2-2)
CASSRLFPGPTIHITGELFF

SEQ ID NO: 249371 - protein, 12 aa, Homo sapiens
  CDR3 for alpha chain variable domain of TCR clone 124686 (TRAV1-2, TRAJ33)
CAALDSNSQLIW

SEQ ID NO: 249372 - protein, 13 aa, Homo sapiens
  CDR3 for beta chain variable domain of TCR clone 124686 (TRBV7-2, TRBJ2-7)
CASSFGQEKEQYF

SEQ ID NO: 249373 - protein, 12 aa, Homo sapiens
  CDR3 for alpha chain variable domain of TCR clone 124687 (TRAV30, TRAJ43)
CGTEERGNDMRF

SEQ ID NO: 249374 - protein, 16 aa, Homo sapiens
  CDR3 for beta chain variable domain of TCR clone 124687 (TRBV20-1, TRBJ1-4)
CSAPGQGLLTNEKLFF

SEQ ID NO: 249375 - protein, 11 aa, Homo sapiens
  CDR3 for alpha chain variable domain of TCR clone 124688 (TRAV1-1, TRAJ23)
CAVRQGGKLIF

SEQ ID NO: 249376 - protein, 16 aa, Homo sapiens
  CDR3 for beta chain variable domain of TCR clone 124688 (TRBV10-3, TRBJ2-1)
CAIRGGGRGDYNEQFF

SEQ ID NO: 249377 - protein, 14 aa, Homo sapiens
  CDR3 for alpha chain variable domain of TCR clone 124689 (TRAV26-1, TRAJ21)
CIAHTTSTNFTLDL

SEQ ID NO: 249378 - protein, 15 aa, Homo sapiens
  CDR3 for beta chain variable domain of TCR clone 124689 (TRBV20-1, TRBJ2-7)
CSARDRVSGMDGQYF

SEQ ID NO: 249379 - protein, 14 aa, Homo sapiens
  CDR3 for alpha chain variable domain of TCR clone 124690 (TRAV1-2, TRAJ8)
CAVREDTGFQKLVF

SEQ ID NO: 249380 - protein, 12 aa, Homo sapiens
  CDR3 for beta chain variable domain of TCR clone 124690 (TRBV28, TRBJ2-3)
CASSLYRDTQYV

SEQ ID NO: 249381 - protein, 13 aa, Homo sapiens
  CDR3 for alpha chain variable domain of TCR clone 124691 (TRAV1-1, TRAJ23)
CAVVASQGGKLIF

SEQ ID NO: 249382 - protein, 16 aa, Homo sapiens
  CDR3 for beta chain variable domain of TCR clone 124691 (TRBV5-5, TRBJ1-2)
CASSPTWGRGLYGYTF

SEQ ID NO: 249383 - protein, 15 aa, Homo sapiens
  CDR3 for alpha chain variable domain of TCR clone 124692 (TRAV2, TRAJ24)
CAVVRLKNSWGKLQF

SEQ ID NO: 249384 - protein, 16 aa, Homo sapiens
  CDR3 for beta chain variable domain of TCR clone 124692 (TRBV7-7, TRBJ2-3)
CASSPGTSGSTETQYF

SEQ ID NO: 249385 - protein, 13 aa, Homo sapiens
  CDR3 for alpha chain variable domain of TCR clone 124693 (TRAV13-2, TRAJ48)
CAEMDFGNDKLTF

SEQ ID NO: 249386 - protein, 12 aa, Homo sapiens
  CDR3 for beta chain variable domain of TCR clone 124693 (TRBV11-2, TRBJ2-2)
CASSLGGGELFF

SEQ ID NO: 249387 - protein, 15 aa, Homo sapiens
  CDR3 for alpha chain variable domain of TCR clone 124694 (TRAV17, TRAJ35)
CATAFVIGFGNVLHC

SEQ ID NO: 249388 - protein, 15 aa, Homo sapiens
  CDR3 for beta chain variable domain of TCR clone 124694 (TRBV7-9, TRBJ2-7)
CASSLALAEAYERYF

SEQ ID NO: 249389 - protein, 14 aa, Homo sapiens
  CDR3 for alpha chain variable domain of TCR clone 124695 (TRAV1-2, TRAJ16)
CAVNRFSAGQKLLF

SEQ ID NO: 249390 - protein, 12 aa, Homo sapiens
  CDR3 for beta chain variable domain of TCR clone 124695 (TRBV11-2, TRBJ2-2)
CASSLGGGELFF

SEQ ID NO: 249391 - protein, 13 aa, Homo sapiens
  CDR3 for alpha chain variable domain of TCR clone 124696 (TRAV8-1, TRAJ28)
CAVSGDGSYQLTF

SEQ ID NO: 249392 - protein, 14 aa, Homo sapiens
  CDR3 for beta chain variable domain of TCR clone 124696 (TRBV7-2, TRBJ2-2)
CASRGQGAAGELFF

SEQ ID NO: 249393 - protein, 13 aa, Homo sapiens
  CDR3 for alpha chain variable domain of TCR clone 124697 (TRAV21, TRAJ57)
CAVTQGGSEKLVF

SEQ ID NO: 249394 - protein, 16 aa, Homo sapiens
  CDR3 for beta chain variable domain of TCR clone 124697 (TRBV2, TRBJ2-1)
CASSVGGSLSYNEQFF

SEQ ID NO: 249395 - protein, 13 aa, Homo sapiens
  CDR3 for alpha chain variable domain of TCR clone 124698 (TRAV29/DV5, TRAJ31)
CAASRNNNARLMF

SEQ ID NO: 249396 - protein, 12 aa, Homo sapiens
  CDR3 for beta chain variable domain of TCR clone 124698 (TRBV14, TRBJ2-7)
CASSLYKGEQYF

SEQ ID NO: 249397 - protein, 17 aa, Homo sapiens
  CDR3 for alpha chain variable domain of TCR clone 124699 (TRAV3, )
CAVSSNSGYPEPRPCRV

SEQ ID NO: 249398 - protein, 13 aa, Homo sapiens
  CDR3 for beta chain variable domain of TCR clone 124699 (TRBV20-1, TRBJ2-2)
CSALSGGAGELFF

SEQ ID NO: 249399 - protein, 14 aa, Homo sapiens
  CDR3 for alpha chain variable domain of TCR clone 124700 (TRAV1-1, TRAJ33)
CAVRPEDSNYQLIW

SEQ ID NO: 249400 - protein, 15 aa, Homo sapiens
  CDR3 for beta chain variable domain of TCR clone 124700 (TRBV20-1, TRBJ2-1)
CSARSPRGPGNEQFF

SEQ ID NO: 249401 - protein, 14 aa, Homo sapiens
  CDR3 for alpha chain variable domain of TCR clone 124701 (TRAV8-1, TRAJ5)
CAVRTDTGRRALTF

SEQ ID NO: 249402 - protein, 14 aa, Homo sapiens
  CDR3 for beta chain variable domain of TCR clone 124701 (TRBV2, TRBJ1-5)
CASSGTVSNQPQHF

SEQ ID NO: 249403 - protein, 13 aa, Homo sapiens
  CDR3 for alpha chain variable domain of TCR clone 124702 (TRAV21, TRAJ57)
CAVTQGGSEKLVF

SEQ ID NO: 249404 - protein, 13 aa, Homo sapiens
  CDR3 for beta chain variable domain of TCR clone 124702 (TRBV7-2, TRBJ2-2)
CASSLAVTGELFF

SEQ ID NO: 249405 - protein, 13 aa, Homo sapiens
  CDR3 for alpha chain variable domain of TCR clone 124703 (TRAV2, TRAJ15)
CAVASQAGTALIF

SEQ ID NO: 249406 - protein, 15 aa, Homo sapiens
  CDR3 for beta chain variable domain of TCR clone 124703 (TRBV2, TRBJ2-1)
CASSEEREGDNEQFF

SEQ ID NO: 249407 - protein, 13 aa, Homo sapiens
  CDR3 for alpha chain variable domain of TCR clone 124704 (TRAV21, TRAJ15)
CAVRNLAGTALIF

SEQ ID NO: 249408 - protein, 16 aa, Homo sapiens
  CDR3 for beta chain variable domain of TCR clone 124704 (TRBV20-1, TRBJ2-5)
CSPGGTSGGYMETQYF

SEQ ID NO: 249409 - protein, 18 aa, Homo sapiens
  CDR3 for alpha chain variable domain of TCR clone 124705 (TRAV21, TRAJ52)
CAVRPSPAGGISYGKLTF

SEQ ID NO: 249410 - protein, 14 aa, Homo sapiens
  CDR3 for beta chain variable domain of TCR clone 124705 (TRBV4-1, TRBJ2-2)
CASSQAANTGELFF

SEQ ID NO: 249411 - protein, 11 aa, Homo sapiens
  CDR3 for alpha chain variable domain of TCR clone 124706 (TRAV2, TRAJ13)
CASGGYQKVTF

SEQ ID NO: 249412 - protein, 19 aa, Homo sapiens
  CDR3 for beta chain variable domain of TCR clone 124706 (TRBV19, TRBJ2-5)
CASSIGQVTDFFLGETQYF

SEQ ID NO: 249413 - protein, 15 aa, Homo sapiens
  CDR3 for alpha chain variable domain of TCR clone 124707 (TRAV17, TRAJ56)
TSVLRTPGANSKLTF

SEQ ID NO: 249414 - protein, 13 aa, Homo sapiens
  CDR3 for beta chain variable domain of TCR clone 124707 (TRBV23-1, TRBJ1-4)
CASRGKFNEKLFF

SEQ ID NO: 249415 - protein, 13 aa, Homo sapiens
  CDR3 for alpha chain variable domain of TCR clone 124708 (TRAV13-1, TRAJ5)
CAASDTGRRALTF

SEQ ID NO: 249416 - protein, 14 aa, Homo sapiens
  CDR3 for beta chain variable domain of TCR clone 124708 (TRBV7-6, TRBJ2-3)
CASSLGTVTDTQYF

SEQ ID NO: 249417 - protein, 16 aa, Homo sapiens
  CDR3 for alpha chain variable domain of TCR clone 124709 (TRAV23/DV6, TRAJ9)
CAASIGGNTGGFKTIF

SEQ ID NO: 249418 - protein, 17 aa, Homo sapiens
  CDR3 for beta chain variable domain of TCR clone 124709 (TRBV13, TRBJ2-3)
CSSSLSRVAGGRNTQYF

SEQ ID NO: 249419 - protein, 13 aa, Homo sapiens
  CDR3 for alpha chain variable domain of TCR clone 124710 (TRAV13-1, TRAJ33)
CAASRAGNYQLIR

SEQ ID NO: 249420 - protein, 14 aa, Homo sapiens
  CDR3 for beta chain variable domain of TCR clone 124710 (TRBV19, TRBJ2-3)
CASSAPRGTDTQYF

SEQ ID NO: 249421 - protein, 15 aa, Homo sapiens
  CDR3 for alpha chain variable domain of TCR clone 124711 (TRAV35, TRAJ40)
CAGVPGASGTYKYIF

SEQ ID NO: 249422 - protein, 14 aa, Homo sapiens
  CDR3 for beta chain variable domain of TCR clone 124711 (TRBV11-2, TRBJ2-5)
CASSRTGGIEAQYF

SEQ ID NO: 249423 - protein, 13 aa, Homo sapiens
  CDR3 for alpha chain variable domain of TCR clone 124712 (TRAV17, TRAJ9)
CAPDYTGGFKTIF

SEQ ID NO: 249424 - protein, 16 aa, Homo sapiens
  CDR3 for beta chain variable domain of TCR clone 124712 (TRBV7-7, TRBJ2-1)
CASSLASGTSYNEQFF

SEQ ID NO: 249425 - protein, 13 aa, Homo sapiens
  CDR3 for alpha chain variable domain of TCR clone 124713 (TRAV3, TRAJ20)
CAVRPLNDYKLSF

SEQ ID NO: 249426 - protein, 14 aa, Homo sapiens
  CDR3 for beta chain variable domain of TCR clone 124713 (TRBV19, TRBJ2-1)
CASPTFVLSGEQFF

SEQ ID NO: 249427 - protein, 13 aa, Homo sapiens
  CDR3 for alpha chain variable domain of TCR clone 124714 (TRAV21, TRAJ27)
CAARPGNAGKSTC

SEQ ID NO: 249428 - protein, 14 aa, Homo sapiens
  CDR3 for beta chain variable domain of TCR clone 124714 (TRBV11-2, TRBJ2-7)
CASSLGAGAYEQYF

SEQ ID NO: 249429 - protein, 14 aa, Homo sapiens
  CDR3 for alpha chain variable domain of TCR clone 124715 (TRAV12-1, TRAJ3)
CGAARYSSASKIIF

SEQ ID NO: 249430 - protein, 14 aa, Homo sapiens
  CDR3 for beta chain variable domain of TCR clone 124715 (TRBV18, TRBJ2-5)
CASSPGVSQETQYF

SEQ ID NO: 249431 - protein, 18 aa, Homo sapiens
  CDR3 for alpha chain variable domain of TCR clone 124716 (TRAV21, TRAJ52)
CAVRPSPAGGTSYGKLTF

SEQ ID NO: 249432 - protein, 15 aa, Homo sapiens
  CDR3 for beta chain variable domain of TCR clone 124716 (TRBV5-1, TRBJ2-7)
CASSLMTSGSNEQYF

SEQ ID NO: 249433 - protein, 12 aa, Homo sapiens
  CDR3 for alpha chain variable domain of TCR clone 124717 (TRAV13-2, TRAJ23)
CAERHRGGKLIF

SEQ ID NO: 249434 - protein, 14 aa, Homo sapiens
  CDR3 for beta chain variable domain of TCR clone 124717 (TRBV13, TRBJ2-7)
CASSLKGASYEQYF

SEQ ID NO: 249435 - protein, 15 aa, Homo sapiens
  CDR3 for alpha chain variable domain of TCR clone 124718 (TRAV8-3, TRAJ45)
CASSYSGGGADGLTF

SEQ ID NO: 249436 - protein, 13 aa, Homo sapiens
  CDR3 for beta chain variable domain of TCR clone 124718 (TRBV7-2, TRBJ2-4)
CASSREHANIQYF

SEQ ID NO: 249437 - protein, 11 aa, Homo sapiens
  CDR3 for alpha chain variable domain of TCR clone 124719 (TRAV4, TRAJ23)
CLVAPGGKLIF

SEQ ID NO: 249438 - protein, 13 aa, Homo sapiens
  CDR3 for beta chain variable domain of TCR clone 124719 (TRBV7-9, TRBJ1-2)
CASSLKQNYGDTF

SEQ ID NO: 249439 - protein, 14 aa, Homo sapiens
  CDR3 for alpha chain variable domain of TCR clone 124720 (TRAV8-3, TRAJ30)
CAVGDMNRADKIIF

SEQ ID NO: 249440 - protein, 17 aa, Homo sapiens
  CDR3 for beta chain variable domain of TCR clone 124720 (TRBV19, TRBJ2-2)
CASSRNPGGFGTGELFF

SEQ ID NO: 249441 - protein, 13 aa, Homo sapiens
  CDR3 for alpha chain variable domain of TCR clone 124721 (TRAV26-1, TRAJ36)
CVVVGTGANNLFF

SEQ ID NO: 249442 - protein, 16 aa, Homo sapiens
  CDR3 for beta chain variable domain of TCR clone 124721 (TRBV10-3, TRBJ2-1)
CAISGVGDGGGGEQFF

SEQ ID NO: 249443 - protein, 13 aa, Homo sapiens
  CDR3 for alpha chain variable domain of TCR clone 124722 (TRAV36/DV7, TRAJ57)
CAVVLGGSEKLVF

SEQ ID NO: 249444 - protein, 14 aa, Homo sapiens
  CDR3 for beta chain variable domain of TCR clone 124722 (TRBV4-1, TRBJ1-2)
CASSHDGQVRGYTF

SEQ ID NO: 249445 - protein, 15 aa, Homo sapiens
  CDR3 for alpha chain variable domain of TCR clone 124723 (TRAV13-1, TRAJ44)
CSASRGGGTASKLTF

SEQ ID NO: 249446 - protein, 14 aa, Homo sapiens
  CDR3 for beta chain variable domain of TCR clone 124723 (TRBV7-2, TRBJ2-5)
CASSPRGSSETQYF

SEQ ID NO: 249447 - protein, 13 aa, Homo sapiens
  CDR3 for alpha chain variable domain of TCR clone 124724 (TRAV12-3, TRAJ9)
CAMRNTGGFKTIF

SEQ ID NO: 249448 - protein, 14 aa, Homo sapiens
  CDR3 for beta chain variable domain of TCR clone 124724 (TRBV11-2, TRBJ2-7)
RASSSTGEGYEQYF

SEQ ID NO: 249449 - protein, 13 aa, Homo sapiens
  CDR3 for alpha chain variable domain of TCR clone 124725 (TRAV8-6, TRAJ49)
CAVITNTGNQFYF

SEQ ID NO: 249450 - protein, 12 aa, Homo sapiens
  CDR3 for beta chain variable domain of TCR clone 124725 (TRBV28, TRBJ2-6)
CAIQAGANVLTF

SEQ ID NO: 249451 - protein, 10 aa, Homo sapiens
  CDR3 for alpha chain variable domain of TCR clone 124726 (TRAV23/DV6, TRAJ57)
CAASSTLFQG

SEQ ID NO: 249452 - protein, 14 aa, Homo sapiens
  CDR3 for beta chain variable domain of TCR clone 124726 (TRBV7-8, TRBJ2-5)
CASSATGGQETQYF

SEQ ID NO: 249453 - protein, 15 aa, Homo sapiens
  CDR3 for alpha chain variable domain of TCR clone 124727 (TRAV38-1, TRAJ37)
CAFIFGSGNTGKLIF

SEQ ID NO: 249454 - protein, 14 aa, Homo sapiens
  CDR3 for beta chain variable domain of TCR clone 124727 (TRBV4-3, TRBJ1-4)
CASSPLQRNEKLFF

SEQ ID NO: 249455 - protein, 13 aa, Homo sapiens
  CDR3 for alpha chain variable domain of TCR clone 124728 (TRAV3, TRAJ20)
CAVRDTPRYKLSF

SEQ ID NO: 249456 - protein, 13 aa, Homo sapiens
  CDR3 for beta chain variable domain of TCR clone 124728 (TRBV4-1, TRBJ2-2)
CASSQENTGELFF

SEQ ID NO: 249457 - protein, 16 aa, Homo sapiens
  CDR3 for alpha chain variable domain of TCR clone 124729 (TRAV13-2, TRAJ32)
FVQRRVYGGATNKLIF

SEQ ID NO: 249458 - protein, 16 aa, Homo sapiens
  CDR3 for beta chain variable domain of TCR clone 124729 (TRBV7-9, TRBJ1-2)
CASSISLDRGGYGYTF

SEQ ID NO: 249459 - protein, 14 aa, Homo sapiens
  CDR3 for alpha chain variable domain of TCR clone 124730 (TRAV12-3, TRAJ58)
CAMSTETSGSRLTF

SEQ ID NO: 249460 - protein, 15 aa, Homo sapiens
  CDR3 for beta chain variable domain of TCR clone 124730 (TRBV5-1, TRBJ1-4)
FAPAAWKDGNEKLFF

SEQ ID NO: 249461 - protein, 14 aa, Homo sapiens
  CDR3 for alpha chain variable domain of TCR clone 124731 (TRAV1-2, TRAJ8)
CAVREDTGFQKLVF

SEQ ID NO: 249462 - protein, 16 aa, Homo sapiens
  CDR3 for beta chain variable domain of TCR clone 124731 (TRBV13, TRBJ1-1)
CASSRDRVRLNTEAFF

SEQ ID NO: 249463 - protein, 14 aa, Homo sapiens
  CDR3 for alpha chain variable domain of TCR clone 124732 (TRAV13-1, TRAJ44)
CAAKATGTASKLTF

SEQ ID NO: 249464 - protein, 14 aa, Homo sapiens
  CDR3 for beta chain variable domain of TCR clone 124732 (TRBV11-2, TRBJ2-3)
CASSRLARTDTQYF

SEQ ID NO: 249465 - protein, 13 aa, Homo sapiens
  CDR3 for alpha chain variable domain of TCR clone 124733 (TRAV13-1, TRAJ39)
CAASIWAGNMLTF

SEQ ID NO: 249466 - protein, 11 aa, Homo sapiens
  CDR3 for beta chain variable domain of TCR clone 124733 (TRBV7-8, TRBJ2-7)
CASSLSLEQYF

SEQ ID NO: 249467 - protein, 13 aa, Homo sapiens
  CDR3 for alpha chain variable domain of TCR clone 124734 (TRAV8-3, TRAJ12)
WVLRMDSSYKLIF

SEQ ID NO: 249468 - protein, 12 aa, Homo sapiens
  CDR3 for beta chain variable domain of TCR clone 124734 (TRBV7-9, TRBJ1-5)
CASSPQGQPQHF

SEQ ID NO: 249469 - protein, 13 aa, Homo sapiens
  CDR3 for alpha chain variable domain of TCR clone 124735 (TRAV8-3, TRAJ44)
CAVVPGTASKLTF

SEQ ID NO: 249470 - protein, 14 aa, Homo sapiens
  CDR3 for beta chain variable domain of TCR clone 124735 (TRBV11-2, TRBJ2-3)
CASSRLARTHTQYF

SEQ ID NO: 249471 - protein, 14 aa, Homo sapiens
  CDR3 for alpha chain variable domain of TCR clone 124736 (TRAV13-2, TRAJ44)
CAEINTGTASKLTF

SEQ ID NO: 249472 - protein, 15 aa, Homo sapiens
  CDR3 for beta chain variable domain of TCR clone 124736 (TRBV18, TRBJ1-1)
CASSPMGQGAAEAFF

SEQ ID NO: 249473 - protein, 11 aa, Homo sapiens
  CDR3 for alpha chain variable domain of TCR clone 124737 (TRAV8-6, TRAJ34)
CAVWNTEKLIF

SEQ ID NO: 249474 - protein, 16 aa, Homo sapiens
  CDR3 for beta chain variable domain of TCR clone 124737 (TRBV5-1, TRBJ2-7)
CASSYASTSSGGEQYF

SEQ ID NO: 249475 - protein, 19 aa, Homo sapiens
  CDR3 for alpha chain variable domain of TCR clone 124738 (TRAV2, TRAJ20)
ILQVREADAAVYRDCKLSF

SEQ ID NO: 249476 - protein, 12 aa, Homo sapiens
  CDR3 for beta chain variable domain of TCR clone 124738 (TRBV11-2, TRBJ2-2)
CASSLPTGELFF

SEQ ID NO: 249477 - protein, 11 aa, Homo sapiens
  CDR3 for alpha chain variable domain of TCR clone 124739 (TRAV21, TRAJ48)
CAVDGNETLTF

SEQ ID NO: 249478 - protein, 16 aa, Homo sapiens
  CDR3 for beta chain variable domain of TCR clone 124739 (TRBV12-4, TRBJ1-5)
CASSSGPRGSNQPQHF

SEQ ID NO: 249479 - protein, 13 aa, Homo sapiens
  CDR3 for alpha chain variable domain of TCR clone 124740 (TRAV13-1, TRAJ39)
CSKYSNAGNMLTF

SEQ ID NO: 249480 - protein, 16 aa, Homo sapiens
  CDR3 for beta chain variable domain of TCR clone 124740 (TRBV7-2, TRBJ1-4)
CASSPVGRFDREKLFF

SEQ ID NO: 249481 - protein, 17 aa, Homo sapiens
  CDR3 for alpha chain variable domain of TCR clone 124741 (TRAV12-2, TRAJ39)
CAVNNMLTFGGGTRLVV

SEQ ID NO: 249482 - protein, 16 aa, Homo sapiens
  CDR3 for beta chain variable domain of TCR clone 124741 (TRBV9, TRBJ2-7)
CASSAGPDRSPYEQYF

SEQ ID NO: 249483 - protein, 15 aa, Homo sapiens
  CDR3 for alpha chain variable domain of TCR clone 124742 (TRAV17, TRAJ57)
CAPGPSQGGSEKLGF

SEQ ID NO: 249484 - protein, 16 aa, Homo sapiens
  CDR3 for beta chain variable domain of TCR clone 124742 (TRBV12-4, TRBJ1-5)
CASSRPVGGSNQPQHF

SEQ ID NO: 249485 - protein, 17 aa, Homo sapiens
  CDR3 for alpha chain variable domain of TCR clone 124743 (TRAV26-1, TRAJ22)
CIVRVSFWFCKATDLLI

SEQ ID NO: 249486 - protein, 13 aa, Homo sapiens
  CDR3 for beta chain variable domain of TCR clone 124743 (TRBV7-9, TRBJ1-2)
CASSLKQNYGYTF

SEQ ID NO: 249487 - protein, 17 aa, Homo sapiens
  CDR3 for alpha chain variable domain of TCR clone 124744 (TRAV4, TRAJ18)
CLVGERSVGSTLGRPYF

SEQ ID NO: 249488 - protein, 16 aa, Homo sapiens
  CDR3 for beta chain variable domain of TCR clone 124744 (TRBV19, TRBJ2-1)
CASSKAGPSSYNEQFF

SEQ ID NO: 249489 - protein, 14 aa, Homo sapiens
  CDR3 for alpha chain variable domain of TCR clone 124745 (TRAV2, TRAJ37)
CAVDFTGNTGKLIF

SEQ ID NO: 249490 - protein, 13 aa, Homo sapiens
  CDR3 for beta chain variable domain of TCR clone 124745 (TRBV20-1, TRBJ1-1)
CSAPLGGGTEAFF

SEQ ID NO: 249491 - protein, 17 aa, Homo sapiens
  CDR3 for alpha chain variable domain of TCR clone 124746 (TRAV26-2, TRAJ42)
CVLRDVGYGGSQGNLIF

SEQ ID NO: 249492 - protein, 16 aa, Homo sapiens
  CDR3 for beta chain variable domain of TCR clone 124746 (TRBV12-4, TRBJ2-7)
CASSLIGGTGTYEQYF

SEQ ID NO: 249493 - protein, 13 aa, Homo sapiens
  CDR3 for alpha chain variable domain of TCR clone 124747 (TRAV12-1, TRAJ16)
CVVNGPDSQKLLF

SEQ ID NO: 249494 - protein, 13 aa, Homo sapiens
  CDR3 for beta chain variable domain of TCR clone 124747 (TRBV2, TRBJ1-1)
CARNPTGGFHAFF

SEQ ID NO: 249495 - protein, 17 aa, Homo sapiens
  CDR3 for alpha chain variable domain of TCR clone 124748 (TRAV26-2, TRAJ37)
CILRDRGGSSNTGKLIF

SEQ ID NO: 249496 - protein, 13 aa, Homo sapiens
  CDR3 for beta chain variable domain of TCR clone 124748 (TRBV23-1, TRBJ1-4)
CASRGKFNEKLFF

SEQ ID NO: 249497 - protein, 16 aa, Homo sapiens
  CDR3 for alpha chain variable domain of TCR clone 124749 (TRAV26-1, TRAJ38)
CIVRVELGGNNRKRIW

SEQ ID NO: 249498 - protein, 14 aa, Homo sapiens
  CDR3 for beta chain variable domain of TCR clone 124749 (TRBV5-1, TRBJ2-3)
CASSPGLAADTQYF

SEQ ID NO: 249499 - protein, 14 aa, Homo sapiens
  CDR3 for alpha chain variable domain of TCR clone 124750 (TRAV1-2, TRAJ8)
CAVREDTGFQKLVF

SEQ ID NO: 249500 - protein, 17 aa, Homo sapiens
  CDR3 for beta chain variable domain of TCR clone 124750 (TRBV7-9, TRBJ2-3)
CASSPTVAGDLTDTQYF

SEQ ID NO: 249501 - protein, 15 aa, Homo sapiens
  CDR3 for alpha chain variable domain of TCR clone 124751 (TRAV26-1, TRAJ23)
CIVRGLNNQGGKLIF

SEQ ID NO: 249502 - protein, 15 aa, Homo sapiens
  CDR3 for beta chain variable domain of TCR clone 124751 (TRBV7-3, TRBJ2-1)
CASSFGQSNYNEQFF

SEQ ID NO: 249503 - protein, 12 aa, Homo sapiens
  CDR3 for alpha chain variable domain of TCR clone 124752 (TRAV13-1, TRAJ27)
CAAHTHAGKSTF

SEQ ID NO: 249504 - protein, 14 aa, Homo sapiens
  CDR3 for beta chain variable domain of TCR clone 124752 (TRBV19, TRBJ2-2)
CTSSGQGIAGELFF

SEQ ID NO: 249505 - protein, 18 aa, Homo sapiens
  CDR3 for alpha chain variable domain of TCR clone 124753 (TRAV21, TRAJ52)
CAVRPSPAGGTSYGKLTF

SEQ ID NO: 249506 - protein, 15 aa, Homo sapiens
  CDR3 for beta chain variable domain of TCR clone 124753 (TRBV6-1, TRBJ2-6)
CASSSRPSGANVLTF

SEQ ID NO: 249507 - protein, 14 aa, Homo sapiens
  CDR3 for alpha chain variable domain of TCR clone 124754 (TRAV8-3, TRAJ39)
CAVGANNAGNMLTV

SEQ ID NO: 249508 - protein, 12 aa, Homo sapiens
  CDR3 for beta chain variable domain of TCR clone 124754 (TRBV11-3, TRBJ1-1)
CASSHRQGEAFF

SEQ ID NO: 249509 - protein, 12 aa, Homo sapiens
  CDR3 for alpha chain variable domain of TCR clone 124755 (TRAV13-1, TRAJ32)
VTDGGATNKLIF

SEQ ID NO: 249510 - protein, 17 aa, Homo sapiens
  CDR3 for beta chain variable domain of TCR clone 124755 (TRBV15, TRBJ1-2)
CATSGREIDVVNYGYTF

SEQ ID NO: 249511 - protein, 15 aa, Homo sapiens
  CDR3 for alpha chain variable domain of TCR clone 124756 (TRAV2, TRAJ37)
CAVEDGSSNTGKLIF

SEQ ID NO: 249512 - protein, 13 aa, Homo sapiens
  CDR3 for beta chain variable domain of TCR clone 124756 (TRBV20-1, TRBJ1-6)
CSTFREGNSHLHF

SEQ ID NO: 249513 - protein, 16 aa, Homo sapiens
  CDR3 for alpha chain variable domain of TCR clone 124757 (TRAV3, TRAJ37)
CAVRGKGAGNTGKLIF

SEQ ID NO: 249514 - protein, 14 aa, Homo sapiens
  CDR3 for beta chain variable domain of TCR clone 124757 (TRBV7-2, TRBJ2-7)
CASSPKTSFYEQYF

SEQ ID NO: 249515 - protein, 17 aa, Homo sapiens
  CDR3 for alpha chain variable domain of TCR clone 124758 (TRAV3, TRAJ6)
CAVRDGPRAGGSHIPTF

SEQ ID NO: 249516 - protein, 16 aa, Homo sapiens
  CDR3 for beta chain variable domain of TCR clone 124758 (TRBV7-8, TRBJ2-3)
CASSTEGQRETDTQYF

SEQ ID NO: 249517 - protein, 13 aa, Homo sapiens
  CDR3 for alpha chain variable domain of TCR clone 124759 (TRAV8-6, TRAJ8)
CAVSNTGFQKLVS

SEQ ID NO: 249518 - protein, 15 aa, Homo sapiens
  CDR3 for beta chain variable domain of TCR clone 124759 (TRBV28, TRBJ2-5)
CASSSGRTIQETQYF

SEQ ID NO: 249519 - protein, 14 aa, Homo sapiens
  CDR3 for alpha chain variable domain of TCR clone 124760 (TRAV9-2, TRAJ39)
CALYIYNAGNMLTF

SEQ ID NO: 249520 - protein, 13 aa, Homo sapiens
  CDR3 for beta chain variable domain of TCR clone 124760 (TRBV18, TRBJ2-5)
CASSLQGQETQYS

SEQ ID NO: 249521 - protein, 11 aa, Homo sapiens
  CDR3 for alpha chain variable domain of TCR clone 124761 (TRAV12-1, TRAJ21)
CVVNNFNKFYF

SEQ ID NO: 249522 - protein, 16 aa, Homo sapiens
  CDR3 for beta chain variable domain of TCR clone 124761 (TRBV7-3, TRBJ2-2)
CASSLKRGTLSGELFF

SEQ ID NO: 249523 - protein, 11 aa, Homo sapiens
  CDR3 for alpha chain variable domain of TCR clone 124762 (TRAV3, TRAJ21)
CAVGNFNKFPF

SEQ ID NO: 249524 - protein, 16 aa, Homo sapiens
  CDR3 for beta chain variable domain of TCR clone 124762 (TRBV19, TRBJ2-1)
CASSKAGPSSYNEQFF

SEQ ID NO: 249525 - protein, 15 aa, Homo sapiens
  CDR3 for alpha chain variable domain of TCR clone 124763 (TRAV26-1, TRAJ29)
CIVRVEGSGNTPLVF

SEQ ID NO: 249526 - protein, 14 aa, Homo sapiens
  CDR3 for beta chain variable domain of TCR clone 124763 (TRBV25-1, TRBJ1-1)
CASTHLGGNNEAFF

SEQ ID NO: 249527 - protein, 16 aa, Homo sapiens
  CDR3 for alpha chain variable domain of TCR clone 124764 (TRAV21, TRAJ37)
CAVRTAGSSNTGKLIF

SEQ ID NO: 249528 - protein, 14 aa, Homo sapiens
  CDR3 for beta chain variable domain of TCR clone 124764 (TRBV12-4, TRBJ2-3)
CASSLSGATDTQYF

SEQ ID NO: 249529 - protein, 15 aa, Homo sapiens
  CDR3 for alpha chain variable domain of TCR clone 124765 (TRAV13-1, TRAJ17)
CAASRAGAAGNKLTF

SEQ ID NO: 249530 - protein, 17 aa, Homo sapiens
  CDR3 for beta chain variable domain of TCR clone 124765 (TRBV25-1, TRBJ2-1)
CASSAYGQGRGVYEQFF

SEQ ID NO: 249531 - protein, 15 aa, Homo sapiens
  CDR3 for alpha chain variable domain of TCR clone 124766 (TRAV26-1, TRAJ44)
CIVRIGTGTASKLTF

SEQ ID NO: 249532 - protein, 15 aa, Homo sapiens
  CDR3 for beta chain variable domain of TCR clone 124766 (TRBV7-6, TRBJ2-1)
CASSSRAGEGNEQFF

SEQ ID NO: 249533 - protein, 16 aa, Homo sapiens
  CDR3 for alpha chain variable domain of TCR clone 124767 (TRAV17, TRAJ52)
CATGIIGGTSYGKLTF

SEQ ID NO: 249534 - protein, 12 aa, Homo sapiens
  CDR3 for beta chain variable domain of TCR clone 124767 (TRBV7-3, TRBJ2-1)
CASSFIDNEQFF

SEQ ID NO: 249535 - protein, 14 aa, Homo sapiens
  CDR3 for alpha chain variable domain of TCR clone 124768 (TRAV8-3, TRAJ10)
CAVGNAGGGNKLTF

SEQ ID NO: 249536 - protein, 12 aa, Homo sapiens
  CDR3 for beta chain variable domain of TCR clone 124768 (TRBV5-1, TRBJ2-5)
CASSLGLETQYF

SEQ ID NO: 249537 - protein, 14 aa, Homo sapiens
  CDR3 for alpha chain variable domain of TCR clone 124769 (TRAV27, TRAJ22)
CAGLPSGSARQLTF

SEQ ID NO: 249538 - protein, 14 aa, Homo sapiens
  CDR3 for beta chain variable domain of TCR clone 124769 (TRBV18, TRBJ2-7)
CASSPRGGAYEQYF

SEQ ID NO: 249539 - protein, 13 aa, Homo sapiens
  CDR3 for alpha chain variable domain of TCR clone 124770 (TRAV25, TRAJ30)
CAGRVDRDDKIIF

SEQ ID NO: 249540 - protein, 13 aa, Homo sapiens
  CDR3 for beta chain variable domain of TCR clone 124770 (TRBV6-4, TRBJ1-5)
CASSADLNQPQHF

SEQ ID NO: 249541 - protein, 10 aa, Homo sapiens
  CDR3 for alpha chain variable domain of TCR clone 124771 (TRAV1-2, TRAJ23)
CAGQGGKPIF

SEQ ID NO: 249542 - protein, 13 aa, Homo sapiens
  CDR3 for beta chain variable domain of TCR clone 124771 (TRBV7-7, TRBJ2-3)
CASSLSRADTQYF

SEQ ID NO: 249543 - protein, 12 aa, Homo sapiens
  CDR3 for alpha chain variable domain of TCR clone 124772 (TRAV21, TRAJ31)
CAVWGNNARLMF

SEQ ID NO: 249544 - protein, 16 aa, Homo sapiens
  CDR3 for beta chain variable domain of TCR clone 124772 (TRBV27, TRBJ2-5)
CASSHGPGGQKETQYF

SEQ ID NO: 249545 - protein, 23 aa, Homo sapiens
  CDR3 for alpha chain variable domain of TCR clone 124773 (TRAV1-1, TRAJ29)
LLQELQMKDSASYFLWGNTPLVF

SEQ ID NO: 249546 - protein, 13 aa, Homo sapiens
  CDR3 for beta chain variable domain of TCR clone 124773 (TRBV25-1, TRBJ2-7)
CASSEDGDYEQYF

SEQ ID NO: 249547 - protein, 10 aa, Homo sapiens
  CDR3 for alpha chain variable domain of TCR clone 124774 (TRAV36/DV7, TRAJ38)
CAANNRKLIW

SEQ ID NO: 249548 - protein, 15 aa, Homo sapiens
  CDR3 for beta chain variable domain of TCR clone 124774 (TRBV20-1, TRBJ2-7)
CSARDRVSGMDEQYV

SEQ ID NO: 249549 - protein, 10 aa, Homo sapiens
  CDR3 for alpha chain variable domain of TCR clone 124775 (TRAV21, TRAJ31)
CAVDNARLMF

SEQ ID NO: 249550 - protein, 13 aa, Homo sapiens
  CDR3 for beta chain variable domain of TCR clone 124775 (TRBV4-1, TRBJ2-5)
CASSLTRGETQYF

SEQ ID NO: 249551 - protein, 12 aa, Homo sapiens
  CDR3 for alpha chain variable domain of TCR clone 124776 (TRAV21, TRAJ33)
CAKMDSNYQLIW

SEQ ID NO: 249552 - protein, 17 aa, Homo sapiens
  CDR3 for beta chain variable domain of TCR clone 124776 (TRBV20-1, TRBJ2-1)
CSASSSGLAGSYNEQSF

SEQ ID NO: 249553 - protein, 16 aa, Homo sapiens
  CDR3 for alpha chain variable domain of TCR clone 124777 (TRAV3, TRAJ37)
CAVRPHGSGNTGRLIF

SEQ ID NO: 249554 - protein, 14 aa, Homo sapiens
  CDR3 for beta chain variable domain of TCR clone 124777 (TRBV2, TRBJ2-1)
CASSDRAYYNEQFF

SEQ ID NO: 249555 - protein, 14 aa, Homo sapiens
  CDR3 for alpha chain variable domain of TCR clone 124778 (TRAV20, TRAJ42)
CAVQAGGRPGNLIF

SEQ ID NO: 249556 - protein, 14 aa, Homo sapiens
  CDR3 for beta chain variable domain of TCR clone 124778 (TRBV28, TRBJ1-2)
CASRIQGANYGYTF

SEQ ID NO: 249557 - protein, 14 aa, Homo sapiens
  CDR3 for alpha chain variable domain of TCR clone 124779 (TRAV1-2, TRAJ16)
CAVNRFSDGQKLLF

SEQ ID NO: 249558 - protein, 14 aa, Homo sapiens
  CDR3 for beta chain variable domain of TCR clone 124779 (TRBV2, TRBJ2-3)
CASRLAGLKDTQYF

SEQ ID NO: 249559 - protein, 13 aa, Homo sapiens
  CDR3 for alpha chain variable domain of TCR clone 124780 (TRAV20, TRAJ37)
CAGCSSNTGKLIF

SEQ ID NO: 249560 - protein, 17 aa, Homo sapiens
  CDR3 for beta chain variable domain of TCR clone 124780 (TRBV5-1, TRBJ2-5)
CASSLLGLAANQETQYF

SEQ ID NO: 249561 - protein, 14 aa, Homo sapiens
  CDR3 for alpha chain variable domain of TCR clone 124781 (TRAV3, TRAJ21)
CAVRDAYNFNKFYF

SEQ ID NO: 249562 - protein, 17 aa, Homo sapiens
  CDR3 for beta chain variable domain of TCR clone 124781 (TRBV5-1, TRBJ2-2)
CASSPRTGGMNTGELFF

SEQ ID NO: 249563 - protein, 11 aa, Homo sapiens
  CDR3 for alpha chain variable domain of TCR clone 124782 (TRAV2, TRAJ23)
CAVETRGKLIF

SEQ ID NO: 249564 - protein, 14 aa, Homo sapiens
  CDR3 for beta chain variable domain of TCR clone 124782 (TRBV12-5, TRBJ2-5)
CASGTRTHQETQYF

SEQ ID NO: 249565 - protein, 12 aa, Homo sapiens
  CDR3 for alpha chain variable domain of TCR clone 124783 (TRAV3, TRAJ31)
CAVRDGNARLMF

SEQ ID NO: 249566 - protein, 12 aa, Homo sapiens
  CDR3 for beta chain variable domain of TCR clone 124783 (TRBV12-4, TRBJ2-7)
CASSLGGYEQYF

SEQ ID NO: 249567 - protein, 17 aa, Homo sapiens
  CDR3 for alpha chain variable domain of TCR clone 124784 (TRAV13-1, TRAJ28)
CAASPPYSGAGSYQLTF

SEQ ID NO: 249568 - protein, 12 aa, Homo sapiens
  CDR3 for beta chain variable domain of TCR clone 124784 (TRBV5-1, TRBJ1-2)
CASSQDTYGYTF

SEQ ID NO: 249569 - protein, 14 aa, Homo sapiens
  CDR3 for alpha chain variable domain of TCR clone 124785 (TRAV17, TRAJ5)
CATVALTGRKALTF

SEQ ID NO: 249570 - protein, 14 aa, Homo sapiens
  CDR3 for beta chain variable domain of TCR clone 124785 (TRBV28, TRBJ2-7)
CASSPYGMAYEQYF

SEQ ID NO: 249571 - protein, 13 aa, Homo sapiens
  CDR3 for alpha chain variable domain of TCR clone 124786 (TRAV21, TRAJ15)
CAVANQAGTALIF

SEQ ID NO: 249572 - protein, 14 aa, Homo sapiens
  CDR3 for beta chain variable domain of TCR clone 124786 (TRBV27, TRBJ2-2)
CASRLGAATGELFF

SEQ ID NO: 249573 - protein, 11 aa, Homo sapiens
  CDR3 for alpha chain variable domain of TCR clone 124787 (TRAV21, TRAJ34)
CAHYNTYKLIF

SEQ ID NO: 249574 - protein, 13 aa, Homo sapiens
  CDR3 for beta chain variable domain of TCR clone 124787 (TRBV7-6, TRBJ1-2)
CASSLVADYGYTF

SEQ ID NO: 249575 - protein, 15 aa, Homo sapiens
  CDR3 for alpha chain variable domain of TCR clone 124788 (TRAV21, TRAJ37)
CAVRPTLSNTGKLIV

SEQ ID NO: 249576 - protein, 16 aa, Homo sapiens
  CDR3 for beta chain variable domain of TCR clone 124788 (TRBV24-1, TRBJ2-3)
CATSDRRQDLTDTQYF

SEQ ID NO: 249577 - protein, 13 aa, Homo sapiens
  CDR3 for alpha chain variable domain of TCR clone 124789 (TRAV1-2, TRAJ9)
CAALNTGGFKTIF

SEQ ID NO: 249578 - protein, 13 aa, Homo sapiens
  CDR3 for beta chain variable domain of TCR clone 124789 (TRBV19, TRBJ1-1)
CASSPSNGGEAFF

SEQ ID NO: 249579 - protein, 13 aa, Homo sapiens
  CDR3 for alpha chain variable domain of TCR clone 124790 (TRAV27, TRAJ41)
CAGEGNSGYALNF

SEQ ID NO: 249580 - protein, 13 aa, Homo sapiens
  CDR3 for beta chain variable domain of TCR clone 124790 (TRBV4-2, TRBJ1-1)
CASSQAGNTEAFF

SEQ ID NO: 249581 - protein, 18 aa, Homo sapiens
  CDR3 for alpha chain variable domain of TCR clone 124791 (TRAV38-2/DV8, TRAJ42)
CACRSADLTGGSQGNLIF

SEQ ID NO: 249582 - protein, 12 aa, Homo sapiens
  CDR3 for beta chain variable domain of TCR clone 124791 (TRBV11-2, TRBJ2-2)
CASSLGGGELFF

SEQ ID NO: 249583 - protein, 13 aa, Homo sapiens
  CDR3 for alpha chain variable domain of TCR clone 124792 (TRAV26-1, TRAJ40)
CIVRVEGTYKYIF

SEQ ID NO: 249584 - protein, 13 aa, Homo sapiens
  CDR3 for beta chain variable domain of TCR clone 124792 (TRBV12-4, TRBJ1-2)
CASSLRQGKGYTF

SEQ ID NO: 249585 - protein, 15 aa, Homo sapiens
  CDR3 for alpha chain variable domain of TCR clone 124793 (TRAV12-1, TRAJ45)
CVVLSGGGGADGLTF

SEQ ID NO: 249586 - protein, 12 aa, Homo sapiens
  CDR3 for beta chain variable domain of TCR clone 124793 (TRBV12-5, TRBJ2-5)
RASGQGVETQYF

SEQ ID NO: 249587 - protein, 15 aa, Homo sapiens
  CDR3 for alpha chain variable domain of TCR clone 124794 (TRAV26-1, TRAJ15)
CIVRAANQAGTALIF

SEQ ID NO: 249588 - protein, 13 aa, Homo sapiens
  CDR3 for beta chain variable domain of TCR clone 124794 (TRBV7-2, TRBJ2-2)
CASSLAVTGELFF

SEQ ID NO: 249589 - protein, 14 aa, Homo sapiens
  CDR3 for alpha chain variable domain of TCR clone 124795 (TRAV16, TRAJ33)
CALSAMDSNYQLIW

SEQ ID NO: 249590 - protein, 15 aa, Homo sapiens
  CDR3 for beta chain variable domain of TCR clone 124795 (TRBV15, TRBJ2-7)
CATSSGTTTTYEQYF

SEQ ID NO: 249591 - protein, 13 aa, Homo sapiens
  CDR3 for alpha chain variable domain of TCR clone 124796 (TRAV35, TRAJ42)
CAGFPGSQGNLIF

SEQ ID NO: 249592 - protein, 20 aa, Homo sapiens
  CDR3 for beta chain variable domain of TCR clone 124796 (TRBV19, TRBJ2-1)
CASSISRTVTSTRLNNEQFF

SEQ ID NO: 249593 - protein, 13 aa, Homo sapiens
  CDR3 for alpha chain variable domain of TCR clone 124797 (TRAV12-3, TRAJ33)
CAMSVNSNYQLIW

SEQ ID NO: 249594 - protein, 15 aa, Homo sapiens
  CDR3 for beta chain variable domain of TCR clone 124797 (TRBV27, TRBJ2-5)
CASSLYPRGGETQYF

SEQ ID NO: 249595 - protein, 11 aa, Homo sapiens
  CDR3 for alpha chain variable domain of TCR clone 124798 (TRAV1-1, TRAJ23)
CAVRQGGKLIL

SEQ ID NO: 249596 - protein, 15 aa, Homo sapiens
  CDR3 for beta chain variable domain of TCR clone 124798 (TRBV20-1, TRBJ1-1)
CSASRGVTGNTEAFF

SEQ ID NO: 249597 - protein, 15 aa, Homo sapiens
  CDR3 for alpha chain variable domain of TCR clone 124799 (TRAV21, TRAJ53)
CATLNSGGSNYKLTF

SEQ ID NO: 249598 - protein, 15 aa, Homo sapiens
  CDR3 for beta chain variable domain of TCR clone 124799 (TRBV18, TRBJ2-1)
CASSPPGASYNEQFF

SEQ ID NO: 249599 - protein, 10 aa, Homo sapiens
  CDR3 for alpha chain variable domain of TCR clone 124800 (TRAV13-1, TRAJ53)
VGGSNYKLTF

SEQ ID NO: 249600 - protein, 12 aa, Homo sapiens
  CDR3 for beta chain variable domain of TCR clone 124800 (TRBV28, TRBJ2-1)
CASSVQINEQFF

SEQ ID NO: 249601 - protein, 10 aa, Homo sapiens
  CDR3 for alpha chain variable domain of TCR clone 124801 (TRAV1-2, TRAJ18)
CAVRGEAQPW

SEQ ID NO: 249602 - protein, 14 aa, Homo sapiens
  CDR3 for beta chain variable domain of TCR clone 124801 (TRBV7-2, TRBJ2-7)
CASRSQGAAYEQYF

SEQ ID NO: 249603 - protein, 15 aa, Homo sapiens
  CDR3 for alpha chain variable domain of TCR clone 124802 (TRAV3, TRAJ20)
CAVRDIKLSDYKLSF

SEQ ID NO: 249604 - protein, 13 aa, Homo sapiens
  CDR3 for beta chain variable domain of TCR clone 124802 (TRBV12-5, TRBJ2-3)
CASGDRQSDTQYF

SEQ ID NO: 249605 - protein, 14 aa, Homo sapiens
  CDR3 for alpha chain variable domain of TCR clone 124803 (TRAV12-3, TRAJ6)
CAISATGGSYIPTF

SEQ ID NO: 249606 - protein, 16 aa, Homo sapiens
  CDR3 for beta chain variable domain of TCR clone 124803 (TRBV4-2, TRBJ2-1)
CASSPRAGQGANEQFF

SEQ ID NO: 249607 - protein, 18 aa, Homo sapiens
  CDR3 for alpha chain variable domain of TCR clone 124804 (TRAV12-3, TRAJ52)
CAMSVGGAGGTSYGKLTF

SEQ ID NO: 249608 - protein, 14 aa, Homo sapiens
  CDR3 for beta chain variable domain of TCR clone 124804 (TRBV7-8, TRBJ2-3)
CAGSLEAGTDTQYF

SEQ ID NO: 249609 - protein, 15 aa, Homo sapiens
  CDR3 for alpha chain variable domain of TCR clone 124805 (TRAV3, TRAJ4)
CAQNMFSGGYNKLIF

SEQ ID NO: 249610 - protein, 16 aa, Homo sapiens
  CDR3 for beta chain variable domain of TCR clone 124805 (TRBV3-1, TRBJ1-6)
CASSHEFQGSYSPLHF

SEQ ID NO: 249611 - protein, 17 aa, Homo sapiens
  CDR3 for alpha chain variable domain of TCR clone 124806 (TRAV3, TRAJ6)
CAVRDGPRAEGSYIPTF

SEQ ID NO: 249612 - protein, 16 aa, Homo sapiens
  CDR3 for beta chain variable domain of TCR clone 124806 (TRBV12-4, TRBJ2-7)
CASSLIGGTGTYEQYF

SEQ ID NO: 249613 - protein, 18 aa, Homo sapiens
  CDR3 for alpha chain variable domain of TCR clone 124807 (TRAV13-1, TRAJ52)
CAAKNPNAGGTSYGKLTF

SEQ ID NO: 249614 - protein, 17 aa, Homo sapiens
  CDR3 for beta chain variable domain of TCR clone 124807 (TRBV7-9, TRBJ2-3)
CASSPTVAGDLTDTQYF

SEQ ID NO: 249615 - protein, 16 aa, Homo sapiens
  CDR3 for alpha chain variable domain of TCR clone 124808 (TRAV30, TRAJ24)
CGPEIVDAASWGKFQF

SEQ ID NO: 249616 - protein, 14 aa, Homo sapiens
  CDR3 for beta chain variable domain of TCR clone 124808 (TRBV12-5, TRBJ2-5)
CASGSRTHQETQYF

SEQ ID NO: 249617 - protein, 14 aa, Homo sapiens
  CDR3 for alpha chain variable domain of TCR clone 124809 (TRAV1-1, TRAJ35)
CAVRSIGFGNVLHC

SEQ ID NO: 249618 - protein, 14 aa, Homo sapiens
  CDR3 for beta chain variable domain of TCR clone 124809 (TRBV5-7, TRBJ2-7)
CASSGGLGSYEQYF

SEQ ID NO: 249619 - protein, 14 aa, Homo sapiens
  CDR3 for alpha chain variable domain of TCR clone 124810 (TRAV26-1, TRAJ26)
CIVRATFLGQNFVF

SEQ ID NO: 249620 - protein, 15 aa, Homo sapiens
  CDR3 for beta chain variable domain of TCR clone 124810 (TRBV19, TRBJ1-2)
CASSVGQVLNYGYTF

SEQ ID NO: 249621 - protein, 13 aa, Homo sapiens
  CDR3 for alpha chain variable domain of TCR clone 124811 (TRAV21, TRAJ20)
CAVGLRVDYKLSF

SEQ ID NO: 249622 - protein, 16 aa, Homo sapiens
  CDR3 for beta chain variable domain of TCR clone 124811 (TRBV7-9, TRBJ1-2)
CASSLGFSSGEDGYTF

SEQ ID NO: 249623 - protein, 14 aa, Homo sapiens
  CDR3 for alpha chain variable domain of TCR clone 124812 (TRAV1-2, TRAJ16)
CAVNRFSDGQKLLL

SEQ ID NO: 249624 - protein, 11 aa, Homo sapiens
  CDR3 for beta chain variable domain of TCR clone 124812 (TRBV29-1, TRBJ2-5)
CSEDRTGTQYF

SEQ ID NO: 249625 - protein, 14 aa, Homo sapiens
  CDR3 for alpha chain variable domain of TCR clone 124813 (TRAV8-4, TRAJ9)
CAVRINTGGFKTIF

SEQ ID NO: 249626 - protein, 14 aa, Homo sapiens
  CDR3 for beta chain variable domain of TCR clone 124813 (TRBV23-1, TRBJ2-5)
CASSFLRSQETQYF

SEQ ID NO: 249627 - protein, 13 aa, Homo sapiens
  CDR3 for alpha chain variable domain of TCR clone 124814 (TRAV27, TRAJ45)
CRSSGGGADGLTF

SEQ ID NO: 249628 - protein, 17 aa, Homo sapiens
  CDR3 for beta chain variable domain of TCR clone 124814 (TRBV11-2, TRBJ2-1)
CASSLYPPGVVYNEQFF

SEQ ID NO: 249629 - protein, 14 aa, Homo sapiens
  CDR3 for alpha chain variable domain of TCR clone 124815 (TRAV17, TRAJ56)
CATVPAGANSKLTF

SEQ ID NO: 249630 - protein, 15 aa, Homo sapiens
  CDR3 for beta chain variable domain of TCR clone 124815 (TRBV7-9, TRBJ1-5)
CASSQGHQPNQPQHF

SEQ ID NO: 249631 - protein, 15 aa, Homo sapiens
  CDR3 for alpha chain variable domain of TCR clone 124816 (TRAV21, TRAJ37)
CAVRPTLSSTGKLIF

SEQ ID NO: 249632 - protein, 16 aa, Homo sapiens
  CDR3 for beta chain variable domain of TCR clone 124816 (TRBV24-1, TRBJ2-3)
CATSGRRQDLTDTQYF

SEQ ID NO: 249633 - protein, 15 aa, Homo sapiens
  CDR3 for alpha chain variable domain of TCR clone 124817 (TRAV21, TRAJ53)
CATLNSGGSNYKRTF

SEQ ID NO: 249634 - protein, 14 aa, Homo sapiens
  CDR3 for beta chain variable domain of TCR clone 124817 (TRBV7-2, TRBJ2-7)
CASRSQGAAYEQYF

SEQ ID NO: 249635 - protein, 15 aa, Homo sapiens
  CDR3 for alpha chain variable domain of TCR clone 124818 (TRAV17, TRAJ23)
CATDAEDNQEESLSS

SEQ ID NO: 249636 - protein, 12 aa, Homo sapiens
  CDR3 for beta chain variable domain of TCR clone 124818 (TRBV2, TRBJ2-1)
CAKREGYNEQFF

SEQ ID NO: 249637 - protein, 16 aa, Homo sapiens
  CDR3 for alpha chain variable domain of TCR clone 124819 (TRAV3, TRAJ37)
CAVRPHGSGYTGKLIF

SEQ ID NO: 249638 - protein, 16 aa, Homo sapiens
  CDR3 for beta chain variable domain of TCR clone 124819 (TRBV9, TRBJ1-2)
CASSVEEKVSPYGYTF

SEQ ID NO: 249639 - protein, 13 aa, Homo sapiens
  CDR3 for alpha chain variable domain of TCR clone 124820 (TRAV3, TRAJ20)
CAVRSLNDSKLSF

SEQ ID NO: 249640 - protein, 13 aa, Homo sapiens
  CDR3 for beta chain variable domain of TCR clone 124820 (TRBV6-1, TRBJ2-1)
CAGMDPTNNEQFF

SEQ ID NO: 249641 - protein, 15 aa, Homo sapiens
  CDR3 for alpha chain variable domain of TCR clone 124821 (TRAV3, TRAJ22)
CAVRDRGGSARQLTF

SEQ ID NO: 249642 - protein, 17 aa, Homo sapiens
  CDR3 for beta chain variable domain of TCR clone 124821 (TRBV7-2, TRBJ2-2)
CASSPRGAGEGTGELFF

SEQ ID NO: 249643 - protein, 15 aa, Homo sapiens
  CDR3 for alpha chain variable domain of TCR clone 124822 (TRAV8-3, TRAJ45)
CASSYSGGGADGLPF

SEQ ID NO: 249644 - protein, 15 aa, Homo sapiens
  CDR3 for beta chain variable domain of TCR clone 124822 (TRBV18, TRBJ1-1)
CASSPRQGENTEAFF

SEQ ID NO: 249645 - protein, 14 aa, Homo sapiens
  CDR3 for alpha chain variable domain of TCR clone 124823 (TRAV17, TRAJ34)
CATDSLEGTDKLIF

SEQ ID NO: 249646 - protein, 13 aa, Homo sapiens
  CDR3 for beta chain variable domain of TCR clone 124823 (TRBV11-2, TRBJ2-7)
YASSGTRPYEQYF

SEQ ID NO: 249647 - protein, 10 aa, Homo sapiens
  CDR3 for alpha chain variable domain of TCR clone 124824 (TRAV1-2, TRAJ31)
CAFFDARLMF

SEQ ID NO: 249648 - protein, 13 aa, Homo sapiens
  CDR3 for beta chain variable domain of TCR clone 124824 (TRBV7-9, TRBJ1-2)
CASSLKQNYGYTL

SEQ ID NO: 249649 - protein, 14 aa, Homo sapiens
  CDR3 for alpha chain variable domain of TCR clone 124825 (TRAV27, TRAJ49)
CAGRPEGTGNQFYF

SEQ ID NO: 249650 - protein, 14 aa, Homo sapiens
  CDR3 for beta chain variable domain of TCR clone 124825 (TRBV7-2, TRBJ2-7)
CASRSQGAAYEQYF

SEQ ID NO: 249651 - protein, 15 aa, Homo sapiens
  CDR3 for alpha chain variable domain of TCR clone 124826 (TRAV1-2, TRAJ13)
CAVRGSYGGYQKVTF

SEQ ID NO: 249652 - protein, 15 aa, Homo sapiens
  CDR3 for beta chain variable domain of TCR clone 124826 (TRBV11-3, TRBJ1-3)
CASSLSGTSGNTIYF

SEQ ID NO: 249653 - protein, 11 aa, Homo sapiens
  CDR3 for alpha chain variable domain of TCR clone 124827 (TRAV1-2, TRAJ11)
CAVRGYSTLTF

SEQ ID NO: 249654 - protein, 15 aa, Homo sapiens
  CDR3 for beta chain variable domain of TCR clone 124827 (TRBV6-6, TRBJ2-7)
CASSYSYGGSYEQYF

SEQ ID NO: 249655 - protein, 11 aa, Homo sapiens
  CDR3 for alpha chain variable domain of TCR clone 124828 (TRAV2, TRAJ13)
CASGGYQKVTL

SEQ ID NO: 249656 - protein, 15 aa, Homo sapiens
  CDR3 for beta chain variable domain of TCR clone 124828 (TRBV7-2, TRBJ2-1)
CASSSGLAGGNEQFF

SEQ ID NO: 249657 - protein, 13 aa, Homo sapiens
  CDR3 for alpha chain variable domain of TCR clone 124829 (TRAV12-3, TRAJ33)
CAMSVNSNYQLIW

SEQ ID NO: 249658 - protein, 13 aa, Homo sapiens
  CDR3 for beta chain variable domain of TCR clone 124829 (TRBV20-1, TRBJ2-1)
CSARDLVSNEQFF

SEQ ID NO: 249659 - protein, 14 aa, Homo sapiens
  CDR3 for alpha chain variable domain of TCR clone 124830 (TRAV2, TRAJ9)
CAVEERSGGFKTIF

SEQ ID NO: 249660 - protein, 14 aa, Homo sapiens
  CDR3 for beta chain variable domain of TCR clone 124830 (TRBV7-3, TRBJ2-1)
CASSLAGGTNEQFF

SEQ ID NO: 249661 - protein, 15 aa, Homo sapiens
  CDR3 for alpha chain variable domain of TCR clone 124831 (TRAV12-3, TRAJ27)
CAMRAYNTNAGKSTF

SEQ ID NO: 249662 - protein, 13 aa, Homo sapiens
  CDR3 for beta chain variable domain of TCR clone 124831 (TRBV11-2, TRBJ2-5)
CASSRGLSETQYF

SEQ ID NO: 249663 - protein, 16 aa, Homo sapiens
  CDR3 for alpha chain variable domain of TCR clone 124832 (TRAV3, TRAJ37)
CAVRPHGSVNTGKLIF

SEQ ID NO: 249664 - protein, 17 aa, Homo sapiens
  CDR3 for beta chain variable domain of TCR clone 124832 (TRBV20-1, TRBJ2-1)
CSASSSGLAGSYNEQFF

SEQ ID NO: 249665 - protein, 15 aa, Homo sapiens
  CDR3 for alpha chain variable domain of TCR clone 124833 (TRAV8-3, TRAJ37)
CAVGARSSNTGKLIF

SEQ ID NO: 249666 - protein, 15 aa, Homo sapiens
  CDR3 for beta chain variable domain of TCR clone 124833 (TRBV5-4, TRBJ2-3)
CASSLAGRVTDTQYF

SEQ ID NO: 249667 - protein, 11 aa, Homo sapiens
  CDR3 for alpha chain variable domain of TCR clone 124834 (TRAV21, TRAJ41)
RAVRSGYALNF

SEQ ID NO: 249668 - protein, 13 aa, Homo sapiens
  CDR3 for beta chain variable domain of TCR clone 124834 (TRBV7-9, TRBJ1-2)
CASSLKQNYGYTF

SEQ ID NO: 249669 - protein, 11 aa, Homo sapiens
  CDR3 for alpha chain variable domain of TCR clone 124835 (TRAV12-3, TRAJ27)
CAMANAGKSTF

SEQ ID NO: 249670 - protein, 16 aa, Homo sapiens
  CDR3 for beta chain variable domain of TCR clone 124835 (TRBV7-2, TRBJ1-2)
CASSSNQDRRGHGYTF

SEQ ID NO: 249671 - protein, 11 aa, Homo sapiens
  CDR3 for alpha chain variable domain of TCR clone 124836 (TRAV2, TRAJ33)
CAVDSNYQVIW

SEQ ID NO: 249672 - protein, 15 aa, Homo sapiens
  CDR3 for beta chain variable domain of TCR clone 124836 (TRBV19, TRBJ1-2)
CASSVGQVLNYGYTF

SEQ ID NO: 249673 - protein, 13 aa, Homo sapiens
  CDR3 for alpha chain variable domain of TCR clone 124837 (TRAV12-1, TRAJ33)
CGDAPDSNYQLIW

SEQ ID NO: 249674 - protein, 15 aa, Homo sapiens
  CDR3 for beta chain variable domain of TCR clone 124837 (TRBV27, TRBJ2-1)
CASSNGGGSSNAQFF

SEQ ID NO: 249675 - protein, 13 aa, Homo sapiens
  CDR3 for alpha chain variable domain of TCR clone 124838 (TRAV36/DV7, TRAJ37)
CAVFSSNTGKLIF

SEQ ID NO: 249676 - protein, 13 aa, Homo sapiens
  CDR3 for beta chain variable domain of TCR clone 124838 (TRBV4-1, TRBJ2-2)
CASSQENTGELFF

SEQ ID NO: 249677 - protein, 15 aa, Homo sapiens
  CDR3 for alpha chain variable domain of TCR clone 124839 (TRAV8-4, TRAJ47)
CAVSDPEEYGNKLVF

SEQ ID NO: 249678 - protein, 15 aa, Homo sapiens
  CDR3 for beta chain variable domain of TCR clone 124839 (TRBV11-2, TRBJ2-1)
CASSLGPDSYNAQFF

SEQ ID NO: 249679 - protein, 15 aa, Homo sapiens
  CDR3 for alpha chain variable domain of TCR clone 124840 (TRAV8-4, TRAJ37)
CAVSRGSGNTGKLIF

SEQ ID NO: 249680 - protein, 13 aa, Homo sapiens
  CDR3 for beta chain variable domain of TCR clone 124840 (TRBV20-1, TRBJ2-7)
CSATHTSEYEQYF

SEQ ID NO: 249681 - protein, 16 aa, Homo sapiens
  CDR3 for alpha chain variable domain of TCR clone 124841 (TRAV3, TRAJ37)
CAVRPHGSGNTGKLIF

SEQ ID NO: 249682 - protein, 13 aa, Homo sapiens
  CDR3 for beta chain variable domain of TCR clone 124841 (TRBV2, TRBJ1-1)
CASSVSGYTEAFF

SEQ ID NO: 249683 - protein, 14 aa, Homo sapiens
  CDR3 for alpha chain variable domain of TCR clone 124842 (TRAV1-2, TRAJ6)
CAVCLSGGSYIPTF

SEQ ID NO: 249684 - protein, 15 aa, Homo sapiens
  CDR3 for beta chain variable domain of TCR clone 124842 (TRBV28, TRBJ2-7)
CASSPGGRGFYEQYF

SEQ ID NO: 249685 - protein, 11 aa, Homo sapiens
  CDR3 for alpha chain variable domain of TCR clone 124843 (TRAV2, TRAJ33)
CAVESNYQLVW

SEQ ID NO: 249686 - protein, 14 aa, Homo sapiens
  CDR3 for beta chain variable domain of TCR clone 124843 (TRBV19, TRBJ2-1)
CASPTFVLSGEQFF

SEQ ID NO: 249687 - protein, 12 aa, Homo sapiens
  CDR3 for alpha chain variable domain of TCR clone 124844 (TRAV8-3, TRAJ26)
CAGDNYGQNFVF

SEQ ID NO: 249688 - protein, 17 aa, Homo sapiens
  CDR3 for beta chain variable domain of TCR clone 124844 (TRBV7-3, TRBJ2-3)
CASSLMKRMRGADTQYF

SEQ ID NO: 249689 - protein, 10 aa, Homo sapiens
  CDR3 for alpha chain variable domain of TCR clone 124845 (TRAV8-4, TRAJ43)
CAVSADDRRF

SEQ ID NO: 249690 - protein, 15 aa, Homo sapiens
  CDR3 for beta chain variable domain of TCR clone 124845 (TRBV5-1, TRBJ2-3)
CASSVTSGSTDTQYF

SEQ ID NO: 249691 - protein, 13 aa, Homo sapiens
  CDR3 for alpha chain variable domain of TCR clone 124846 (TRAV2, TRAJ15)
CAVASQAGTDLIF

SEQ ID NO: 249692 - protein, 12 aa, Homo sapiens
  CDR3 for beta chain variable domain of TCR clone 124846 (TRBV28, TRBJ2-6)
CAIQAGANVLTF

SEQ ID NO: 249693 - protein, 18 aa, Homo sapiens
  CDR3 for alpha chain variable domain of TCR clone 124847 (TRAV13-1, TRAJ52)
CAASKRSAGGTSYGKLTF

SEQ ID NO: 249694 - protein, 12 aa, Homo sapiens
  CDR3 for beta chain variable domain of TCR clone 124847 (TRBV7-9, TRBJ2-7)
CASSLEGYEQYF

SEQ ID NO: 249695 - protein, 13 aa, Homo sapiens
  CDR3 for alpha chain variable domain of TCR clone 124848 (TRAV30, TRAJ16)
CGTFGGDGQKLLF

SEQ ID NO: 249696 - protein, 14 aa, Homo sapiens
  CDR3 for beta chain variable domain of TCR clone 124848 (TRBV18, TRBJ2-5)
CASSPGVSQETQYF

SEQ ID NO: 249697 - protein, 17 aa, Homo sapiens
  CDR3 for alpha chain variable domain of TCR clone 124849 (TRAV3, TRAJ42)
CAVRDRDYGGSQGNLIF

SEQ ID NO: 249698 - protein, 12 aa, Homo sapiens
  CDR3 for beta chain variable domain of TCR clone 124849 (TRBV11-2, TRBJ2-1)
CASSPGNNEQLF

SEQ ID NO: 249699 - protein, 15 aa, Homo sapiens
  CDR3 for alpha chain variable domain of TCR clone 124850 (TRAV34, TRAJ38)
CGADFTPGNNRKLIW

SEQ ID NO: 249700 - protein, 16 aa, Homo sapiens
  CDR3 for beta chain variable domain of TCR clone 124850 (TRBV12-5, TRBJ2-5)
CASVPRTSGNQETQYF

SEQ ID NO: 249701 - protein, 13 aa, Homo sapiens
  CDR3 for alpha chain variable domain of TCR clone 124851 (TRAV20, TRAJ37)
CAGCSSNTGKLIF

SEQ ID NO: 249702 - protein, 17 aa, Homo sapiens
  CDR3 for beta chain variable domain of TCR clone 124851 (TRBV20-1, TRBJ2-1)
CSARDPLAGVWDNEQFF

SEQ ID NO: 249703 - protein, 14 aa, Homo sapiens
  CDR3 for alpha chain variable domain of TCR clone 124852 (TRAV36/DV7, TRAJ13)
WGSGENGGYQQVTF

SEQ ID NO: 249704 - protein, 15 aa, Homo sapiens
  CDR3 for beta chain variable domain of TCR clone 124852 (TRBV19, TRBJ2-1)
CASSTGTSSYNEQFF

SEQ ID NO: 249705 - protein, 14 aa, Homo sapiens
  CDR3 for alpha chain variable domain of TCR clone 124853 (TRAV1-2, TRAJ16)
CAVNRFSDGQKLLV

SEQ ID NO: 249706 - protein, 14 aa, Homo sapiens
  CDR3 for beta chain variable domain of TCR clone 124853 (TRBV7-9, TRBJ2-3)
CASSLEDGTDTQYF

SEQ ID NO: 249707 - protein, 14 aa, Homo sapiens
  CDR3 for alpha chain variable domain of TCR clone 124854 (TRAV12-2, TRAJ5)
CAVNRSTGRRALTF

SEQ ID NO: 249708 - protein, 12 aa, Homo sapiens
  CDR3 for beta chain variable domain of TCR clone 124854 (TRBV19, TRBJ1-5)
CTSSIAQQPQHF

SEQ ID NO: 249709 - protein, 14 aa, Homo sapiens
  CDR3 for alpha chain variable domain of TCR clone 124855 (TRAV12-2, TRAJ17)
CAVLFKAAGNKLTF

SEQ ID NO: 249710 - protein, 14 aa, Homo sapiens
  CDR3 for beta chain variable domain of TCR clone 124855 (TRBV7-2, TRBJ2-7)
CASRSQGAAYAQYF

SEQ ID NO: 249711 - protein, 18 aa, Homo sapiens
  CDR3 for alpha chain variable domain of TCR clone 124856 (TRAV16, TRAJ52)
CALSGADAGGTSYGKLTF

SEQ ID NO: 249712 - protein, 15 aa, Homo sapiens
  CDR3 for beta chain variable domain of TCR clone 124856 (TRBV11-3, TRBJ2-3)
CASSAGTVVTNTQYF

SEQ ID NO: 249713 - protein, 10 aa, Homo sapiens
  CDR3 for alpha chain variable domain of TCR clone 124857 (TRAV30, TRAJ48)
CGIGNEKLTF

SEQ ID NO: 249714 - protein, 17 aa, Homo sapiens
  CDR3 for beta chain variable domain of TCR clone 124857 (TRBV24-1, TRBJ2-1)
CATSDVSTSGTYNEQFF

SEQ ID NO: 249715 - protein, 14 aa, Homo sapiens
  CDR3 for alpha chain variable domain of TCR clone 124858 (TRAV12-2, TRAJ17)
CAVNIKAAGNNLTF

SEQ ID NO: 249716 - protein, 16 aa, Homo sapiens
  CDR3 for beta chain variable domain of TCR clone 124858 (TRBV20-1, TRBJ2-6)
CSASSQGYDGANVLTF

SEQ ID NO: 249717 - protein, 17 aa, Homo sapiens
  CDR3 for alpha chain variable domain of TCR clone 124859 (TRAV3, TRAJ6)
CAVSRRTDTGGRYIPTF

SEQ ID NO: 249718 - protein, 18 aa, Homo sapiens
  CDR3 for beta chain variable domain of TCR clone 124859 (TRBV7-2, TRBJ2-3)
CASSLETSRGRKADTQYF

SEQ ID NO: 249719 - protein, 14 aa, Homo sapiens
  CDR3 for alpha chain variable domain of TCR clone 124860 (TRAV17, TRAJ22)
CATSPSASARQLTF

SEQ ID NO: 249720 - protein, 15 aa, Homo sapiens
  CDR3 for beta chain variable domain of TCR clone 124860 (TRBV4-1, TRBJ2-5)
CASSQWDLYQETQYF

SEQ ID NO: 249721 - protein, 13 aa, Homo sapiens
  CDR3 for alpha chain variable domain of TCR clone 124861 (TRAV35, TRAJ32)
CAGVGGATNKLIL

SEQ ID NO: 249722 - protein, 17 aa, Homo sapiens
  CDR3 for beta chain variable domain of TCR clone 124861 (TRBV4-3, TRBJ2-1)
CASSQFSSGRASGEQFF

SEQ ID NO: 249723 - protein, 15 aa, Homo sapiens
  CDR3 for alpha chain variable domain of TCR clone 124862 (TRAV8-4, TRAJ37)
CAVSKVSGNTGKLIF

SEQ ID NO: 249724 - protein, 16 aa, Homo sapiens
  CDR3 for beta chain variable domain of TCR clone 124862 (TRBV19, TRBJ2-1)
CASSKAGPSSYNEQFF

SEQ ID NO: 249725 - protein, 12 aa, Homo sapiens
  CDR3 for alpha chain variable domain of TCR clone 124863 (TRAV17, TRAJ49)
CATVTTGNQFYF

SEQ ID NO: 249726 - protein, 18 aa, Homo sapiens
  CDR3 for beta chain variable domain of TCR clone 124863 (TRBV11-2, TRBJ2-6)
CASSLNPFLGTGANVLSF

SEQ ID NO: 249727 - protein, 13 aa, Homo sapiens
  CDR3 for alpha chain variable domain of TCR clone 124864 (TRAV3, TRAJ8)
CAVRFTCFQKLVF

SEQ ID NO: 249728 - protein, 12 aa, Homo sapiens
  CDR3 for beta chain variable domain of TCR clone 124864 (TRBV2, TRBJ1-2)
CASSGQTYGYTF

SEQ ID NO: 249729 - protein, 12 aa, Homo sapiens
  CDR3 for alpha chain variable domain of TCR clone 124865 (TRAV3, TRAJ20)
CAVRDGDYKLSF

SEQ ID NO: 249730 - protein, 15 aa, Homo sapiens
  CDR3 for beta chain variable domain of TCR clone 124865 (TRBV7-9, TRBJ2-7)
CASSPGGGLTYEQYF

SEQ ID NO: 249731 - protein, 23 aa, Homo sapiens
  CDR3 for alpha chain variable domain of TCR clone 124866 (TRAV26-1, TRAJ38)
CIADNAGNNHIQNPDPAVYQLRD

SEQ ID NO: 249732 - protein, 13 aa, Homo sapiens
  CDR3 for beta chain variable domain of TCR clone 124866 (TRBV20-1, TRBJ1-1)
CRARGGGNTEAFF

SEQ ID NO: 249733 - protein, 16 aa, Homo sapiens
  CDR3 for alpha chain variable domain of TCR clone 124867 (TRAV30, TRAJ24)
CGTEIVDSDSWGKFQF

SEQ ID NO: 249734 - protein, 15 aa, Homo sapiens
  CDR3 for beta chain variable domain of TCR clone 124867 (TRBV28, TRBJ2-1)
CASSIIAGGRSEQFF

SEQ ID NO: 249735 - protein, 12 aa, Homo sapiens
  CDR3 for alpha chain variable domain of TCR clone 124868 (TRAV25, TRAJ20)
CAGRSNDYKLSF

SEQ ID NO: 249736 - protein, 15 aa, Homo sapiens
  CDR3 for beta chain variable domain of TCR clone 124868 (TRBV7-6, TRBJ2-7)
CASSGRRDTLGEQYF

SEQ ID NO: 249737 - protein, 12 aa, Homo sapiens
  CDR3 for alpha chain variable domain of TCR clone 124869 (TRAV2, TRAJ31)
CAVEDNNARLMF

SEQ ID NO: 249738 - protein, 16 aa, Homo sapiens
  CDR3 for beta chain variable domain of TCR clone 124869 (TRBV10-3, TRBJ2-1)
CAISGVGDGGGGEQVF

SEQ ID NO: 249739 - protein, 17 aa, Homo sapiens
  CDR3 for alpha chain variable domain of TCR clone 124870 (TRAV27, TRAJ18)
CAGIHRGRGSTLGRLYF

SEQ ID NO: 249740 - protein, 14 aa, Homo sapiens
  CDR3 for beta chain variable domain of TCR clone 124870 (TRBV20-1, TRBJ1-5)
CSARGRGSNQPQHF

SEQ ID NO: 249741 - protein, 10 aa, Homo sapiens
  CDR3 for alpha chain variable domain of TCR clone 124871 (TRAV25, TRAJ20)
CAGNDYKLSF

SEQ ID NO: 249742 - protein, 14 aa, Homo sapiens
  CDR3 for beta chain variable domain of TCR clone 124871 (TRBV7-2, TRBJ2-7)
CASSPKTSFYEQYF

SEQ ID NO: 249743 - protein, 15 aa, Homo sapiens
  CDR3 for alpha chain variable domain of TCR clone 124872 (TRAV25, TRAJ53)
CAATGGGGSNYKLTF

SEQ ID NO: 249744 - protein, 18 aa, Homo sapiens
  CDR3 for beta chain variable domain of TCR clone 124872 (TRBV4-2, TRBJ1-2)
CASSQDKVGHTVNYGYTF

SEQ ID NO: 249745 - protein, 15 aa, Homo sapiens
  CDR3 for alpha chain variable domain of TCR clone 124873 (TRAV34, TRAJ38)
CGADFTPGNNRKLIW

SEQ ID NO: 249746 - protein, 15 aa, Homo sapiens
  CDR3 for beta chain variable domain of TCR clone 124873 (TRBV11-2, TRBJ2-1)
CASSKNRGLIYEQFF

SEQ ID NO: 249747 - protein, 14 aa, Homo sapiens
  CDR3 for alpha chain variable domain of TCR clone 124874 (TRAV3, TRAJ9)
CAVRLNTGGFKTIF

SEQ ID NO: 249748 - protein, 13 aa, Homo sapiens
  CDR3 for beta chain variable domain of TCR clone 124874 (TRBV20-1, TRBJ1-1)
CSARVGGNTEAFF

SEQ ID NO: 249749 - protein, 14 aa, Homo sapiens
  CDR3 for alpha chain variable domain of TCR clone 124875 (TRAV8-3, TRAJ4)
CSVGASGGYNKLIF

SEQ ID NO: 249750 - protein, 16 aa, Homo sapiens
  CDR3 for beta chain variable domain of TCR clone 124875 (TRBV4-3, TRBJ2-2)
CASSHLQGSGTGELFF

SEQ ID NO: 249751 - protein, 10 aa, Homo sapiens
  CDR3 for alpha chain variable domain of TCR clone 124876 (TRAV2, TRAJ15)
MGQAGTALIF

SEQ ID NO: 249752 - protein, 12 aa, Homo sapiens
  CDR3 for beta chain variable domain of TCR clone 124876 (TRBV11-2, TRBJ2-2)
CASSLGGGELFF

SEQ ID NO: 249753 - protein, 10 aa, Homo sapiens
  CDR3 for alpha chain variable domain of TCR clone 124877 (TRAV13-1, TRAJ26)
CAPYGQNFVF

SEQ ID NO: 249754 - protein, 19 aa, Homo sapiens
  CDR3 for beta chain variable domain of TCR clone 124877 (TRBV7-2, TRBJ2-3)
CASSFLSRNWGGGTDTQYF

SEQ ID NO: 249755 - protein, 14 aa, Homo sapiens
  CDR3 for alpha chain variable domain of TCR clone 124878 (TRAV29/DV5, TRAJ34)
CAASASRETDTLIF

SEQ ID NO: 249756 - protein, 15 aa, Homo sapiens
  CDR3 for beta chain variable domain of TCR clone 124878 (TRBV7-8, TRBJ2-7)
CASSLERAGSYEQYF

SEQ ID NO: 249757 - protein, 12 aa, Homo sapiens
  CDR3 for alpha chain variable domain of TCR clone 124879 (TRAV23/DV6, TRAJ30)
CAASKGDDKIII

SEQ ID NO: 249758 - protein, 15 aa, Homo sapiens
  CDR3 for beta chain variable domain of TCR clone 124879 (TRBV12-4, TRBJ2-1)
CASRPTRTGYNEQFF

SEQ ID NO: 249759 - protein, 12 aa, Homo sapiens
  CDR3 for alpha chain variable domain of TCR clone 124880 (TRAV12-3, TRAJ17)
CAMTLTGNKLTL

SEQ ID NO: 249760 - protein, 13 aa, Homo sapiens
  CDR3 for beta chain variable domain of TCR clone 124880 (TRBV7-3, TRBJ1-1)
CASSQDWGAEAFF

SEQ ID NO: 249761 - protein, 13 aa, Homo sapiens
  CDR3 for alpha chain variable domain of TCR clone 124881 (TRAV2, TRAJ15)
CAVASQAGTALIF

SEQ ID NO: 249762 - protein, 16 aa, Homo sapiens
  CDR3 for beta chain variable domain of TCR clone 124881 (TRBV5-1, TRBJ1-1)
CASSSGGNSLDTEAFF

SEQ ID NO: 249763 - protein, 11 aa, Homo sapiens
  CDR3 for alpha chain variable domain of TCR clone 124882 (TRAV12-1, TRAJ30)
CVVNGQDKIIF

SEQ ID NO: 249764 - protein, 13 aa, Homo sapiens
  CDR3 for beta chain variable domain of TCR clone 124882 (TRBV7-3, TRBJ1-1)
CASSQDWGAEAFF

SEQ ID NO: 249765 - protein, 22 aa, Homo sapiens
  CDR3 for alpha chain variable domain of TCR clone 124883 (TRAV13-1, TRAJ35)
CAASKGGFGNVLHCGSGPPVIV

SEQ ID NO: 249766 - protein, 13 aa, Homo sapiens
  CDR3 for beta chain variable domain of TCR clone 124883 (TRBV7-3, TRBJ1-1)
CASSQDWGAEAFF

SEQ ID NO: 249767 - protein, 16 aa, Homo sapiens
  CDR3 for alpha chain variable domain of TCR clone 124884 (TRAV12-1, TRAJ48)
CVVNMVSNFGNEKLTF

SEQ ID NO: 249768 - protein, 18 aa, Homo sapiens
  CDR3 for beta chain variable domain of TCR clone 124884 (TRBV11-2, TRBJ2-6)
CASSLNPFLGTGANVLNF

SEQ ID NO: 249769 - protein, 15 aa, Homo sapiens
  CDR3 for alpha chain variable domain of TCR clone 124885 (TRAV17, TRAJ56)
CATDANTGATSKLTF

SEQ ID NO: 249770 - protein, 14 aa, Homo sapiens
  CDR3 for beta chain variable domain of TCR clone 124885 (TRBV19, TRBJ1-5)
CASSLGTGGQPQHF

SEQ ID NO: 249771 - protein, 14 aa, Homo sapiens
  CDR3 for alpha chain variable domain of TCR clone 124886 (TRAV8-3, TRAJ45)
WVSYSGGGADGLTF

SEQ ID NO: 249772 - protein, 11 aa, Homo sapiens
  CDR3 for beta chain variable domain of TCR clone 124886 (TRBV20-1, TRBJ2-5)
CSADRAETQYF

SEQ ID NO: 249773 - protein, 17 aa, Homo sapiens
  CDR3 for alpha chain variable domain of TCR clone 124887 (TRAV3, TRAJ42)
CAVRDRDYGGSQGNLIF

SEQ ID NO: 249774 - protein, 15 aa, Homo sapiens
  CDR3 for beta chain variable domain of TCR clone 124887 (TRBV5-1, TRBJ2-5)
CASSFKGGDQETQYF

SEQ ID NO: 249775 - protein, 15 aa, Homo sapiens
  CDR3 for alpha chain variable domain of TCR clone 124888 (TRAV1-2, TRAJ32)
RAVRGYGGATNKLIF

SEQ ID NO: 249776 - protein, 15 aa, Homo sapiens
  CDR3 for beta chain variable domain of TCR clone 124888 (TRBV25-1, TRBJ2-5)
CASSDTGTHQETQYF

SEQ ID NO: 249777 - protein, 18 aa, Homo sapiens
  CDR3 for alpha chain variable domain of TCR clone 124889 (TRAV13-2, TRAJ20)
CSYSTWRLSCLLVHKLSF

SEQ ID NO: 249778 - protein, 14 aa, Homo sapiens
  CDR3 for beta chain variable domain of TCR clone 124889 (TRBV18, TRBJ2-7)
CASSPRGGAYEQYF

SEQ ID NO: 249779 - protein, 14 aa, Homo sapiens
  CDR3 for alpha chain variable domain of TCR clone 124890 (TRAV12-2, TRAJ13)
CAVKKTRGYQKVTF

SEQ ID NO: 249780 - protein, 14 aa, Homo sapiens
  CDR3 for beta chain variable domain of TCR clone 124890 (TRBV5-5, TRBJ2-7)
CASSLGQGTYEQYF

SEQ ID NO: 249781 - protein, 16 aa, Homo sapiens
  CDR3 for alpha chain variable domain of TCR clone 124891 (TRAV13-2, TRAJ32)
CAENMNYGGATNKLIF

SEQ ID NO: 249782 - protein, 14 aa, Homo sapiens
  CDR3 for beta chain variable domain of TCR clone 124891 (TRBV15, TRBJ2-5)
CATSSTGYQETKYF

SEQ ID NO: 249783 - protein, 16 aa, Homo sapiens
  CDR3 for alpha chain variable domain of TCR clone 124892 (TRAV3, TRAJ10)
CAVRDMRAGGGNKLTL

SEQ ID NO: 249784 - protein, 13 aa, Homo sapiens
  CDR3 for beta chain variable domain of TCR clone 124892 (TRBV4-2, TRBJ1-1)
CASSQAGNTEAFF

SEQ ID NO: 249785 - protein, 14 aa, Homo sapiens
  CDR3 for alpha chain variable domain of TCR clone 124893 (TRAV12-3, TRAJ42)
CAMNYGGSQGNLIF

SEQ ID NO: 249786 - protein, 15 aa, Homo sapiens
  CDR3 for beta chain variable domain of TCR clone 124893 (TRBV5-7, TRBJ1-5)
CASSYGKLWDQAQHF

SEQ ID NO: 249787 - protein, 13 aa, Homo sapiens
  CDR3 for alpha chain variable domain of TCR clone 124894 (TRAV12-3, TRAJ47)
CAMKREYGNKLVF

SEQ ID NO: 249788 - protein, 15 aa, Homo sapiens
  CDR3 for beta chain variable domain of TCR clone 124894 (TRBV20-1, TRBJ2-7)
CSARDRVSGMDEQYF

SEQ ID NO: 249789 - protein, 18 aa, Homo sapiens
  CDR3 for alpha chain variable domain of TCR clone 124895 (TRAV13-1, TRAJ52)
CAASKRSAGGTSYGKLTF

SEQ ID NO: 249790 - protein, 13 aa, Homo sapiens
  CDR3 for beta chain variable domain of TCR clone 124895 (TRBV12-4, TRBJ1-2)
CSSSLRQGKGYTF

SEQ ID NO: 249791 - protein, 13 aa, Homo sapiens
  CDR3 for alpha chain variable domain of TCR clone 124896 (TRAV27, TRAJ45)
CRSSGGGADGLTF

SEQ ID NO: 249792 - protein, 17 aa, Homo sapiens
  CDR3 for beta chain variable domain of TCR clone 124896 (TRBV11-2, TRBJ2-1)
CASILYPPGVEYNEQFF

SEQ ID NO: 249793 - protein, 23 aa, Homo sapiens
  CDR3 for alpha chain variable domain of TCR clone 124897 (TRAV26-1, TRAJ38)
CIADNAGNNHIQNPDPAVYQLRD

SEQ ID NO: 249794 - protein, 13 aa, Homo sapiens
  CDR3 for beta chain variable domain of TCR clone 124897 (TRBV20-1, TRBJ1-1)
CSARGGGNTEAFV

SEQ ID NO: 249795 - protein, 11 aa, Homo sapiens
  CDR3 for alpha chain variable domain of TCR clone 124898 (TRAV2, TRAJ13)
CASGGYQKVTF

SEQ ID NO: 249796 - protein, 14 aa, Homo sapiens
  CDR3 for beta chain variable domain of TCR clone 124898 (TRBV9, TRBJ2-7)
CASSVGVGSYEQYF

SEQ ID NO: 249797 - protein, 13 aa, Homo sapiens
  CDR3 for alpha chain variable domain of TCR clone 124899 (TRAV17, TRAJ9)
CATDYTGGFKTIF

SEQ ID NO: 249798 - protein, 13 aa, Homo sapiens
  CDR3 for beta chain variable domain of TCR clone 124899 (TRBV19, TRBJ2-2)
CASKVSAAGELFF

SEQ ID NO: 249799 - protein, 14 aa, Homo sapiens
  CDR3 for alpha chain variable domain of TCR clone 124900 (TRAV2, TRAJ29)
CAGPFQYGNTPLFF

SEQ ID NO: 249800 - protein, 11 aa, Homo sapiens
  CDR3 for beta chain variable domain of TCR clone 124900 (TRBV29-1, TRBJ2-5)
CSEDRTGTQYF

SEQ ID NO: 249801 - protein, 12 aa, Homo sapiens
  CDR3 for alpha chain variable domain of TCR clone 124901 (TRAV12-1, TRAJ40)
CVVYSGTYKYIF

SEQ ID NO: 249802 - protein, 15 aa, Homo sapiens
  CDR3 for beta chain variable domain of TCR clone 124901 (TRBV5-1, TRBJ2-2)
CASSSQGGNTGELFF

SEQ ID NO: 249803 - protein, 17 aa, Homo sapiens
  CDR3 for alpha chain variable domain of TCR clone 124902 (TRAV29/DV5, TRAJ10)
CSVLLGRATGGGNKLTF

SEQ ID NO: 249804 - protein, 14 aa, Homo sapiens
  CDR3 for beta chain variable domain of TCR clone 124902 (TRBV19, TRBJ2-1)
CASPTFVLSGEQFF

SEQ ID NO: 249805 - protein, 14 aa, Homo sapiens
  CDR3 for alpha chain variable domain of TCR clone 124903 (TRAV12-3, TRAJ9)
CAMSPNTGGFKTIF

SEQ ID NO: 249806 - protein, 11 aa, Homo sapiens
  CDR3 for beta chain variable domain of TCR clone 124903 (TRBV19, TRBJ2-7)
CASGLSHEQYF

SEQ ID NO: 249807 - protein, 15 aa, Homo sapiens
  CDR3 for alpha chain variable domain of TCR clone 124904 (TRAV16, TRAJ27)
FAPCGGGTNAGKSTF

SEQ ID NO: 249808 - protein, 15 aa, Homo sapiens
  CDR3 for beta chain variable domain of TCR clone 124904 (TRBV6-6, TRBJ2-3)
CASSYRRGGTDTQYF

SEQ ID NO: 249809 - protein, 13 aa, Homo sapiens
  CDR3 for alpha chain variable domain of TCR clone 124905 (TRAV2, TRAJ40)
CAVVTSGTYKYIF

SEQ ID NO: 249810 - protein, 14 aa, Homo sapiens
  CDR3 for beta chain variable domain of TCR clone 124905 (TRBV7-9, TRBJ2-2)
CASSGLADTGELFF

SEQ ID NO: 249811 - protein, 14 aa, Homo sapiens
  CDR3 for alpha chain variable domain of TCR clone 124906 (TRAV1-1, TRAJ28)
CAAPSGAGSYQLTF

SEQ ID NO: 249812 - protein, 12 aa, Homo sapiens
  CDR3 for beta chain variable domain of TCR clone 124906 (TRBV6-3, TRBJ2-1)
CASSGSYNEQFF

SEQ ID NO: 249813 - protein, 10 aa, Homo sapiens
  CDR3 for alpha chain variable domain of TCR clone 124907 (TRAV13-1, TRAJ27)
CAPLARQVNL

SEQ ID NO: 249814 - protein, 13 aa, Homo sapiens
  CDR3 for beta chain variable domain of TCR clone 124907 (TRBV7-3, TRBJ1-1)
CASSQDWGAEAFF

SEQ ID NO: 249815 - protein, 14 aa, Homo sapiens
  CDR3 for alpha chain variable domain of TCR clone 124908 (TRAV36/DV7, TRAJ21)
CAVYTTSKNFTLDL

SEQ ID NO: 249816 - protein, 13 aa, Homo sapiens
  CDR3 for beta chain variable domain of TCR clone 124908 (TRBV7-9, TRBJ2-5)
CASLPSGRETQYF

SEQ ID NO: 249817 - protein, 15 aa, Homo sapiens
  CDR3 for alpha chain variable domain of TCR clone 124909 (TRAV8-3, TRAJ23)
CAVGDRYNQGGKVIF

SEQ ID NO: 249818 - protein, 22 aa, Homo sapiens
  CDR3 for beta chain variable domain of TCR clone 124909 (TRBV29-1, TRBJ2-5)
TVSNMSPEDSSIYLCSAGTQYF

SEQ ID NO: 249819 - protein, 15 aa, Homo sapiens
  CDR3 for alpha chain variable domain of TCR clone 124910 (TRAV35, TRAJ41)
FAGQLFSNSGYALNF

SEQ ID NO: 249820 - protein, 14 aa, Homo sapiens
  CDR3 for beta chain variable domain of TCR clone 124910 (TRBV7-2, TRBJ1-2)
CASSRGGTNYGYTF

SEQ ID NO: 249821 - protein, 11 aa, Homo sapiens
  CDR3 for alpha chain variable domain of TCR clone 124911 (TRAV1-1, TRAJ23)
CAVRQGVKLIF

SEQ ID NO: 249822 - protein, 13 aa, Homo sapiens
  CDR3 for beta chain variable domain of TCR clone 124911 (TRBV7-3, TRBJ1-1)
CASSQDWGAEAFF

SEQ ID NO: 249823 - protein, 14 aa, Homo sapiens
  CDR3 for alpha chain variable domain of TCR clone 124912 (TRAV23/DV6, TRAJ37)
CAASTSSNTGKLIF

SEQ ID NO: 249824 - protein, 17 aa, Homo sapiens
  CDR3 for beta chain variable domain of TCR clone 124912 (TRBV11-2, TRBJ2-1)
CASSLYPPGVEYNEQFF

SEQ ID NO: 249825 - protein, 15 aa, Homo sapiens
  CDR3 for alpha chain variable domain of TCR clone 124913 (TRAV8-3, TRAJ45)
CASSYSGGGADGLTF

SEQ ID NO: 249826 - protein, 14 aa, Homo sapiens
  CDR3 for beta chain variable domain of TCR clone 124913 (TRBV7-7, TRBJ2-7)
CASSLGRGVGEQYF

SEQ ID NO: 249827 - protein, 15 aa, Homo sapiens
  CDR3 for alpha chain variable domain of TCR clone 124914 (TRAV29/DV5, TRAJ8)
CAASGRNTGFQKLVF

SEQ ID NO: 249828 - protein, 14 aa, Homo sapiens
  CDR3 for beta chain variable domain of TCR clone 124914 (TRBV19, TRBJ2-1)
CASPTFVLSGEQFF

SEQ ID NO: 249829 - protein, 17 aa, Homo sapiens
  CDR3 for alpha chain variable domain of TCR clone 124915 (TRAV3, TRAJ6)
CAVRDGPRAGGSYIPTF

SEQ ID NO: 249830 - protein, 14 aa, Homo sapiens
  CDR3 for beta chain variable domain of TCR clone 124915 (TRBV6-5, TRBJ1-2)
CASTRGGGSDGYTF

SEQ ID NO: 249831 - protein, 20 aa, Homo sapiens
  CDR3 for alpha chain variable domain of TCR clone 124916 (TRAV25, TRAJ21)
TATQTTDVGTYPLSFNKFYF

SEQ ID NO: 249832 - protein, 14 aa, Homo sapiens
  CDR3 for beta chain variable domain of TCR clone 124916 (TRBV20-1, TRBJ2-1)
CSAQIGGSANEQFF

SEQ ID NO: 249833 - protein, 16 aa, Homo sapiens
  CDR3 for alpha chain variable domain of TCR clone 124917 (TRAV1-2, TRAJ27)
CAVSRGSNTNAGKSTF

SEQ ID NO: 249834 - protein, 13 aa, Homo sapiens
  CDR3 for beta chain variable domain of TCR clone 124917 (TRBV12-4, TRBJ1-1)
CASSPGTGFEAFF

SEQ ID NO: 249835 - protein, 13 aa, Homo sapiens
  CDR3 for alpha chain variable domain of TCR clone 124918 (TRAV13-1, TRAJ43)
CAASLSNNNDMRF

SEQ ID NO: 249836 - protein, 13 aa, Homo sapiens
  CDR3 for beta chain variable domain of TCR clone 124918 (TRBV7-8, TRBJ2-3)
CVSSLRGPDTQYF

SEQ ID NO: 249837 - protein, 14 aa, Homo sapiens
  CDR3 for alpha chain variable domain of TCR clone 124919 (TRAV23/DV6, TRAJ57)
CAASNQGGSEKLVF

SEQ ID NO: 249838 - protein, 13 aa, Homo sapiens
  CDR3 for beta chain variable domain of TCR clone 124919 (TRBV11-2, TRBJ2-7)
CASSNYPSYEQYF

SEQ ID NO: 249839 - protein, 13 aa, Homo sapiens
  CDR3 for alpha chain variable domain of TCR clone 124920 (TRAV2, TRAJ40)
CAVVTSGTYKYIF

SEQ ID NO: 249840 - protein, 15 aa, Homo sapiens
  CDR3 for beta chain variable domain of TCR clone 124920 (TRBV11-3, TRBJ2-3)
CASLKDGGEGDTQYF

SEQ ID NO: 249841 - protein, 14 aa, Homo sapiens
  CDR3 for alpha chain variable domain of TCR clone 124921 (TRAV2, TRAJ42)
CAVVGGGSQGNLIF

SEQ ID NO: 249842 - protein, 16 aa, Homo sapiens
  CDR3 for beta chain variable domain of TCR clone 124921 (TRBV7-3, TRBJ2-1)
CASSKPLAGGYNEQFF

SEQ ID NO: 249843 - protein, 13 aa, Homo sapiens
  CDR3 for alpha chain variable domain of TCR clone 124922 (TRAV12-3, TRAJ33)
CAMNVNSNYQLIW

SEQ ID NO: 249844 - protein, 16 aa, Homo sapiens
  CDR3 for beta chain variable domain of TCR clone 124922 (TRBV7-3, TRBJ2-2)
CASSLKRGTLSGELFF

SEQ ID NO: 249845 - protein, 15 aa, Homo sapiens
  CDR3 for alpha chain variable domain of TCR clone 124923 (TRAV3, TRAJ3)
CAVRDGHSSASKIIF

SEQ ID NO: 249846 - protein, 14 aa, Homo sapiens
  CDR3 for beta chain variable domain of TCR clone 124923 (TRBV7-8, TRBJ1-5)
CASSLGAFNQPQHF

SEQ ID NO: 249847 - protein, 14 aa, Homo sapiens
  CDR3 for alpha chain variable domain of TCR clone 124924 (TRAV12-2, TRAJ11)
CAVEGRSGYSTLTF

SEQ ID NO: 249848 - protein, 11 aa, Homo sapiens
  CDR3 for beta chain variable domain of TCR clone 124924 (TRBV12-4, TRBJ2-3)
CASTATDTQYF

SEQ ID NO: 249849 - protein, 14 aa, Homo sapiens
  CDR3 for alpha chain variable domain of TCR clone 124925 (TRAV12-2, TRAJ5)
CAVNRSTGRRALTF

SEQ ID NO: 249850 - protein, 16 aa, Homo sapiens
  CDR3 for beta chain variable domain of TCR clone 124925 (TRBV6-4, TRBJ1-2)
CASSEAVGDPNYGYTF

SEQ ID NO: 249851 - protein, 14 aa, Homo sapiens
  CDR3 for alpha chain variable domain of TCR clone 124926 (TRAV26-1, TRAJ45)
CIEVTGGGADGLPF

SEQ ID NO: 249852 - protein, 12 aa, Homo sapiens
  CDR3 for beta chain variable domain of TCR clone 124926 (TRBV12-4, TRBJ2-7)
CASSLGGYEQYF

SEQ ID NO: 249853 - protein, 11 aa, Homo sapiens
  CDR3 for alpha chain variable domain of TCR clone 124927 (TRAV12-1, TRAJ34)
CVVNKGRELIF

SEQ ID NO: 249854 - protein, 12 aa, Homo sapiens
  CDR3 for beta chain variable domain of TCR clone 124927 (TRBV2, TRBJ2-1)
CAYGPPSNEQFF

SEQ ID NO: 249855 - protein, 14 aa, Homo sapiens
  CDR3 for alpha chain variable domain of TCR clone 124928 (TRAV12-1, TRAJ3)
CGAARYSSASKIIF

SEQ ID NO: 249856 - protein, 14 aa, Homo sapiens
  CDR3 for beta chain variable domain of TCR clone 124928 (TRBV7-2, TRBJ2-7)
CASSPKTSFYEQYF

SEQ ID NO: 249857 - protein, 13 aa, Homo sapiens
  CDR3 for alpha chain variable domain of TCR clone 124929 (TRAV12-1, TRAJ16)
CVVNGPDGQKLLF

SEQ ID NO: 249858 - protein, 13 aa, Homo sapiens
  CDR3 for beta chain variable domain of TCR clone 124929 (TRBV2, TRBJ1-1)
CARDPTGGFHAFF

SEQ ID NO: 249859 - protein, 12 aa, Homo sapiens
  CDR3 for alpha chain variable domain of TCR clone 124930 (TRAV13-2, TRAJ23)
CAERHRGGKLIF

SEQ ID NO: 249860 - protein, 21 aa, Homo sapiens
  CDR3 for beta chain variable domain of TCR clone 124930 (TRBV4-2, TRBJ2-3)
PCSQKTRPCISVPAAPDTQYF

SEQ ID NO: 249861 - protein, 15 aa, Homo sapiens
  CDR3 for alpha chain variable domain of TCR clone 124931 (TRAV17, TRAJ22)
CATVAPSGSARQLTF

SEQ ID NO: 249862 - protein, 14 aa, Homo sapiens
  CDR3 for beta chain variable domain of TCR clone 124931 (TRBV19, TRBJ2-1)
CASPTFVLSGEQFF

SEQ ID NO: 249863 - protein, 12 aa, Homo sapiens
  CDR3 for alpha chain variable domain of TCR clone 124932 (TRAV1-1, TRAJ9)
CAVDTGGFKTIF

SEQ ID NO: 249864 - protein, 11 aa, Homo sapiens
  CDR3 for beta chain variable domain of TCR clone 124932 (TRBV12-4, TRBJ2-3)
CASTATDTQYF

SEQ ID NO: 249865 - protein, 15 aa, Homo sapiens
  CDR3 for alpha chain variable domain of TCR clone 124933 (TRAV2, TRAJ11)
CAVGGRNSGYSTLTF

SEQ ID NO: 249866 - protein, 14 aa, Homo sapiens
  CDR3 for beta chain variable domain of TCR clone 124933 (TRBV5-1, TRBJ2-7)
CASSRGESLYEQYF

SEQ ID NO: 249867 - protein, 14 aa, Homo sapiens
  CDR3 for alpha chain variable domain of TCR clone 124934 (TRAV27, TRAJ22)
CAGVVPGSARQLTF

SEQ ID NO: 249868 - protein, 15 aa, Homo sapiens
  CDR3 for beta chain variable domain of TCR clone 124934 (TRBV7-9, TRBJ2-7)
CASSPGGGLTYEQYF

SEQ ID NO: 249869 - protein, 16 aa, Homo sapiens
  CDR3 for alpha chain variable domain of TCR clone 124935 (TRAV23/DV6, TRAJ48)
CAASGVVNFGNEKLTF

SEQ ID NO: 249870 - protein, 15 aa, Homo sapiens
  CDR3 for beta chain variable domain of TCR clone 124935 (TRBV20-1, TRBJ2-5)
CSAGLAGVSQETQFF

SEQ ID NO: 249871 - protein, 13 aa, Homo sapiens
  CDR3 for alpha chain variable domain of TCR clone 124936 (TRAV3, TRAJ21)
CAVREPDFNKFYF

SEQ ID NO: 249872 - protein, 14 aa, Homo sapiens
  CDR3 for beta chain variable domain of TCR clone 124936 (TRBV18, TRBJ2-5)
CASSPVVSQETQYF

SEQ ID NO: 249873 - protein, 15 aa, Homo sapiens
  CDR3 for alpha chain variable domain of TCR clone 124937 (TRAV2, TRAJ9)
CAVEDRGTGGFKTIF

SEQ ID NO: 249874 - protein, 13 aa, Homo sapiens
  CDR3 for beta chain variable domain of TCR clone 124937 (TRBV12-4, TRBJ1-1)
CASSPGTGFEAFF

SEQ ID NO: 249875 - protein, 14 aa, Homo sapiens
  CDR3 for alpha chain variable domain of TCR clone 124938 (TRAV12-2, TRAJ17)
CSALFKAAGNKLTF

SEQ ID NO: 249876 - protein, 16 aa, Homo sapiens
  CDR3 for beta chain variable domain of TCR clone 124938 (TRBV20-1, TRBJ2-2)
CSASASGIPGAGELFF

SEQ ID NO: 249877 - protein, 12 aa, Homo sapiens
  CDR3 for alpha chain variable domain of TCR clone 124939 (TRAV12-3, TRAJ54)
SGADRGAQKLVF

SEQ ID NO: 249878 - protein, 15 aa, Homo sapiens
  CDR3 for beta chain variable domain of TCR clone 124939 (TRBV27, TRBJ2-1)
CASSLAGGPFNEQFF

SEQ ID NO: 249879 - protein, 13 aa, Homo sapiens
  CDR3 for alpha chain variable domain of TCR clone 124940 (TRAV25, TRAJ30)
CAGRVDRDDKIIF

SEQ ID NO: 249880 - protein, 19 aa, Homo sapiens
  CDR3 for beta chain variable domain of TCR clone 124940 (TRBV7-3, TRBJ2-2)
CASSLRAGGSGPNTGELFF

SEQ ID NO: 249881 - protein, 12 aa, Homo sapiens
  CDR3 for alpha chain variable domain of TCR clone 124941 (TRAV13-1, TRAJ48)
CAANFGNEKLTF

SEQ ID NO: 249882 - protein, 13 aa, Homo sapiens
  CDR3 for beta chain variable domain of TCR clone 124941 (TRBV7-3, TRBJ1-1)
CASSQGWGAEAFF

SEQ ID NO: 249883 - protein, 11 aa, Homo sapiens
  CDR3 for alpha chain variable domain of TCR clone 124942 (TRAV8-2, TRAJ26)
CVVTLLLGSVF

SEQ ID NO: 249884 - protein, 15 aa, Homo sapiens
  CDR3 for beta chain variable domain of TCR clone 124942 (TRBV11-2, TRBJ2-2)
CASSSDRVNAGELFF

SEQ ID NO: 249885 - protein, 13 aa, Homo sapiens
  CDR3 for alpha chain variable domain of TCR clone 124943 (TRAV8-3, TRAJ43)
CAVGPDNNNDMRF

SEQ ID NO: 249886 - protein, 13 aa, Homo sapiens
  CDR3 for beta chain variable domain of TCR clone 124943 (TRBV19, TRBJ2-5)
CASSIPYGETQYF

SEQ ID NO: 249887 - protein, 10 aa, Homo sapiens
  CDR3 for alpha chain variable domain of TCR clone 124944 (TRAV3, TRAJ30)
CAVREIEIIF

SEQ ID NO: 249888 - protein, 12 aa, Homo sapiens
  CDR3 for beta chain variable domain of TCR clone 124944 (TRBV20-1, TRBJ2-3)
CSADRAGDTQYF

SEQ ID NO: 249889 - protein, 13 aa, Homo sapiens
  CDR3 for alpha chain variable domain of TCR clone 124945 (TRAV13-1, TRAJ39)
CAASIWAGNMLTF

SEQ ID NO: 249890 - protein, 13 aa, Homo sapiens
  CDR3 for beta chain variable domain of TCR clone 124945 (TRBV12-5, TRBJ2-3)
CASGDRQSDTQYF

SEQ ID NO: 249891 - protein, 13 aa, Homo sapiens
  CDR3 for alpha chain variable domain of TCR clone 124946 (TRAV13-1, TRAJ5)
CAARVTGRRALTF

SEQ ID NO: 249892 - protein, 16 aa, Homo sapiens
  CDR3 for beta chain variable domain of TCR clone 124946 (TRBV2, TRBJ2-3)
CASSTSVEGVTDTQYF

SEQ ID NO: 249893 - protein, 16 aa, Homo sapiens
  CDR3 for alpha chain variable domain of TCR clone 124947 (TRAV8-3, TRAJ52)
CAVQPAGGTSYGQLTF

SEQ ID NO: 249894 - protein, 15 aa, Homo sapiens
  CDR3 for beta chain variable domain of TCR clone 124947 (TRBV11-2, TRBJ2-7)
CASSLAGGVATEQYF

SEQ ID NO: 249895 - protein, 14 aa, Homo sapiens
  CDR3 for alpha chain variable domain of TCR clone 124948 (TRAV1-2, TRAJ16)
CAVNRFPDGQKLLF

SEQ ID NO: 249896 - protein, 18 aa, Homo sapiens
  CDR3 for beta chain variable domain of TCR clone 124948 (TRBV20-1, TRBJ2-3)
CSASGLAGGPGTTDTQYF

SEQ ID NO: 249897 - protein, 12 aa, Homo sapiens
  CDR3 for alpha chain variable domain of TCR clone 124949 (TRAV29/DV5, TRAJ49)
CAATDTGNQFYF

SEQ ID NO: 249898 - protein, 13 aa, Homo sapiens
  CDR3 for beta chain variable domain of TCR clone 124949 (TRBV4-1, TRBJ2-1)
CASSQAGGDEQFF

SEQ ID NO: 249899 - protein, 14 aa, Homo sapiens
  CDR3 for alpha chain variable domain of TCR clone 124950 (TRAV12-2, TRAJ45)
CAVNKGGGADGLTF

SEQ ID NO: 249900 - protein, 15 aa, Homo sapiens
  CDR3 for beta chain variable domain of TCR clone 124950 (TRBV9, TRBJ1-6)
CASSVAGTGDSTLHF

SEQ ID NO: 249901 - protein, 13 aa, Homo sapiens
  CDR3 for alpha chain variable domain of TCR clone 124951 (TRAV17, TRAJ26)
CATVDNYGQNFVF

SEQ ID NO: 249902 - protein, 15 aa, Homo sapiens
  CDR3 for beta chain variable domain of TCR clone 124951 (TRBV4-1, TRBJ2-5)
CASSQWDLYQETQYF

SEQ ID NO: 249903 - protein, 12 aa, Homo sapiens
  CDR3 for alpha chain variable domain of TCR clone 124952 (TRAV13-2, TRAJ8)
CAPWLGFQKLVF

SEQ ID NO: 249904 - protein, 14 aa, Homo sapiens
  CDR3 for beta chain variable domain of TCR clone 124952 (TRBV4-1, TRBJ2-2)
CASSQAVNTGELFF

SEQ ID NO: 249905 - protein, 14 aa, Homo sapiens
  CDR3 for alpha chain variable domain of TCR clone 124953 (TRAV16, TRAJ29)
CALTRNSGNTPLVF

SEQ ID NO: 249906 - protein, 12 aa, Homo sapiens
  CDR3 for beta chain variable domain of TCR clone 124953 (TRBV2, TRBJ2-1)
CAKREGYNEQLF

SEQ ID NO: 249907 - protein, 14 aa, Homo sapiens
  CDR3 for alpha chain variable domain of TCR clone 124954 (TRAV20, TRAJ42)
CAVQAGGSQGNLIF

SEQ ID NO: 249908 - protein, 14 aa, Homo sapiens
  CDR3 for beta chain variable domain of TCR clone 124954 (TRBV28, TRBJ1-2)
CASRIRGANYGYTF

SEQ ID NO: 249909 - protein, 15 aa, Homo sapiens
  CDR3 for alpha chain variable domain of TCR clone 124955 (TRAV1-1, TRAJ11)
CAVTSAYYPYSTLTF

SEQ ID NO: 249910 - protein, 16 aa, Homo sapiens
  CDR3 for beta chain variable domain of TCR clone 124955 (TRBV5-1, TRBJ1-1)
CASSSGGNSLNTEAFF

SEQ ID NO: 249911 - protein, 15 aa, Homo sapiens
  CDR3 for alpha chain variable domain of TCR clone 124956 (TRAV21, TRAJ24)
CAARSSTDSWGKLQF

SEQ ID NO: 249912 - protein, 12 aa, Homo sapiens
  CDR3 for beta chain variable domain of TCR clone 124956 (TRBV7-3, TRBJ2-1)
CASSFINNEQFF

SEQ ID NO: 249913 - protein, 20 aa, Homo sapiens
  CDR3 for alpha chain variable domain of TCR clone 124957 (TRAV12-3, TRAJ41)
SLFIRDSQPGDSATPEALNF

SEQ ID NO: 249914 - protein, 15 aa, Homo sapiens
  CDR3 for beta chain variable domain of TCR clone 124957 (TRBV5-1, TRBJ2-7)
CASSLDLTSSYEQYF

SEQ ID NO: 249915 - protein, 11 aa, Homo sapiens
  CDR3 for alpha chain variable domain of TCR clone 124958 (TRAV2, TRAJ33)
CAVESNYQLIW

SEQ ID NO: 249916 - protein, 15 aa, Homo sapiens
  CDR3 for beta chain variable domain of TCR clone 124958 (TRBV19, TRBJ1-1)
CASTSGQMQNTEAFF

SEQ ID NO: 249917 - protein, 13 aa, Homo sapiens
  CDR3 for alpha chain variable domain of TCR clone 124959 (TRAV3, TRAJ27)
CAVRPLGAGKSTF

SEQ ID NO: 249918 - protein, 13 aa, Homo sapiens
  CDR3 for beta chain variable domain of TCR clone 124959 (TRBV28, TRBJ2-7)
CASSLPSRYEQYF

SEQ ID NO: 249919 - protein, 16 aa, Homo sapiens
  CDR3 for alpha chain variable domain of TCR clone 124960 (TRAV26-1, TRAJ40)
CIVRGYPTPGTYKYIF

SEQ ID NO: 249920 - protein, 14 aa, Homo sapiens
  CDR3 for beta chain variable domain of TCR clone 124960 (TRBV5-1, TRBJ1-4)
CASSSGQGGEKLFF

SEQ ID NO: 249921 - protein, 15 aa, Homo sapiens
  CDR3 for alpha chain variable domain of TCR clone 124961 (TRAV21, TRAJ24)
CAARSSTDSWGKLQF

SEQ ID NO: 249922 - protein, 12 aa, Homo sapiens
  CDR3 for beta chain variable domain of TCR clone 124961 (TRBV19, TRBJ1-1)
CASSTTGIEAFF

SEQ ID NO: 249923 - protein, 18 aa, Homo sapiens
  CDR3 for alpha chain variable domain of TCR clone 124962 (TRAV26-2, TRAJ54)
CILRDVEVGIQGAQKLVF

SEQ ID NO: 249924 - protein, 13 aa, Homo sapiens
  CDR3 for beta chain variable domain of TCR clone 124962 (TRBV4-2, TRBJ1-1)
CASSQAGNTEAFF

SEQ ID NO: 249925 - protein, 12 aa, Homo sapiens
  CDR3 for alpha chain variable domain of TCR clone 124963 (TRAV3, TRAJ26)
CAVRDYGQNFVF

SEQ ID NO: 249926 - protein, 14 aa, Homo sapiens
  CDR3 for beta chain variable domain of TCR clone 124963 (TRBV7-6, TRBJ2-3)
CASSVAGGTDTQYF

SEQ ID NO: 249927 - protein, 14 aa, Homo sapiens
  CDR3 for alpha chain variable domain of TCR clone 124964 (TRAV26-2, TRAJ54)
CILRDVRGAQKLVF

SEQ ID NO: 249928 - protein, 15 aa, Homo sapiens
  CDR3 for beta chain variable domain of TCR clone 124964 (TRBV20-1, TRBJ1-1)
CSASRGVTGNTEAFF

SEQ ID NO: 249929 - protein, 13 aa, Homo sapiens
  CDR3 for alpha chain variable domain of TCR clone 124965 (TRAV1-2, TRAJ9)
CAALNTGGFKTIF

SEQ ID NO: 249930 - protein, 14 aa, Homo sapiens
  CDR3 for beta chain variable domain of TCR clone 124965 (TRBV19, TRBJ2-1)
CASSRLASINEQFF

SEQ ID NO: 249931 - protein, 15 aa, Homo sapiens
  CDR3 for alpha chain variable domain of TCR clone 124966 (TRAV2, TRAJ15)
CAVEDRGQAGTALLF

SEQ ID NO: 249932 - protein, 15 aa, Homo sapiens
  CDR3 for beta chain variable domain of TCR clone 124966 (TRBV20-1, TRBJ1-5)
CSATSDRGLGQPQHF

SEQ ID NO: 249933 - protein, 14 aa, Homo sapiens
  CDR3 for alpha chain variable domain of TCR clone 124967 (TRAV16, TRAJ39)
CALSKNNAGNMLTF

SEQ ID NO: 249934 - protein, 13 aa, Homo sapiens
  CDR3 for beta chain variable domain of TCR clone 124967 (TRBV10-2, TRBJ2-7)
CASGASGGYEQYF

SEQ ID NO: 249935 - protein, 12 aa, Homo sapiens
  CDR3 for alpha chain variable domain of TCR clone 124968 (TRAV12-3, TRAJ17)
CAMTLTGNKLTF

SEQ ID NO: 249936 - protein, 15 aa, Homo sapiens
  CDR3 for beta chain variable domain of TCR clone 124968 (TRBV7-6, TRBJ1-1)
CASSPQGGANTEAFF

SEQ ID NO: 249937 - protein, 14 aa, Homo sapiens
  CDR3 for alpha chain variable domain of TCR clone 124969 (TRAV27, TRAJ37)
CAGERSSNTGKLIF

SEQ ID NO: 249938 - protein, 15 aa, Homo sapiens
  CDR3 for beta chain variable domain of TCR clone 124969 (TRBV11-3, TRBJ1-6)
CASSLDWGANSPLLF

SEQ ID NO: 249939 - protein, 14 aa, Homo sapiens
  CDR3 for alpha chain variable domain of TCR clone 124970 (TRAV8-6, TRAJ54)
CAVSPALGAQKLVF

SEQ ID NO: 249940 - protein, 15 aa, Homo sapiens
  CDR3 for beta chain variable domain of TCR clone 124970 (TRBV28, TRBJ2-2)
CASRLAGARTGELFF

SEQ ID NO: 249941 - protein, 12 aa, Homo sapiens
  CDR3 for alpha chain variable domain of TCR clone 124971 (TRAV12-3, TRAJ17)
CAMTLTGNKLTF

SEQ ID NO: 249942 - protein, 14 aa, Homo sapiens
  CDR3 for beta chain variable domain of TCR clone 124971 (TRBV19, TRBJ2-1)
CASPTFVLSGEQLF

SEQ ID NO: 249943 - protein, 14 aa, Homo sapiens
  CDR3 for alpha chain variable domain of TCR clone 124972 (TRAV8-4, TRAJ37)
CAVSEPSNTGKLIF

SEQ ID NO: 249944 - protein, 14 aa, Homo sapiens
  CDR3 for beta chain variable domain of TCR clone 124972 (TRBV28, TRBJ2-1)
CAIHSTGARTEQFF

SEQ ID NO: 249945 - protein, 13 aa, Homo sapiens
  CDR3 for alpha chain variable domain of TCR clone 124973 (TRAV8-4, TRAJ10)
CAAFTGGGNKLTF

SEQ ID NO: 249946 - protein, 15 aa, Homo sapiens
  CDR3 for beta chain variable domain of TCR clone 124973 (TRBV2, TRBJ2-3)
CASSDFEKATDMQYF

SEQ ID NO: 249947 - protein, 13 aa, Homo sapiens
  CDR3 for alpha chain variable domain of TCR clone 124974 (TRAV38-1, TRAJ42)
CARWGGSQGNLIF

SEQ ID NO: 249948 - protein, 16 aa, Homo sapiens
  CDR3 for beta chain variable domain of TCR clone 124974 (TRBV12-4, TRBJ1-5)
CASSRPVGGSNQPQHF

SEQ ID NO: 249949 - protein, 15 aa, Homo sapiens
  CDR3 for alpha chain variable domain of TCR clone 124975 (TRAV21, TRAJ53)
CATLNSGGSNYKLTF

SEQ ID NO: 249950 - protein, 15 aa, Homo sapiens
  CDR3 for beta chain variable domain of TCR clone 124975 (TRBV7-6, TRBJ1-5)
CASSQSSGISQPQHF

SEQ ID NO: 249951 - protein, 10 aa, Homo sapiens
  CDR3 for alpha chain variable domain of TCR clone 124976 (TRAV8-4, TRAJ43)
CAVSADDMRF

SEQ ID NO: 249952 - protein, 15 aa, Homo sapiens
  CDR3 for beta chain variable domain of TCR clone 124976 (TRBV5-1, TRBJ2-3)
CASSVTSGSIDTQYF

SEQ ID NO: 249953 - protein, 11 aa, Homo sapiens
  CDR3 for alpha chain variable domain of TCR clone 124977 (TRAV3, TRAJ13)
CAVTSYQKVTF

SEQ ID NO: 249954 - protein, 15 aa, Homo sapiens
  CDR3 for beta chain variable domain of TCR clone 124977 (TRBV7-9, TRBJ1-6)
CASSSPGRGNSPLHF

SEQ ID NO: 249955 - protein, 13 aa, Homo sapiens
  CDR3 for alpha chain variable domain of TCR clone 124978 (TRAV8-3, TRAJ28)
CAVGAVGSYQLTF

SEQ ID NO: 249956 - protein, 14 aa, Homo sapiens
  CDR3 for beta chain variable domain of TCR clone 124978 (TRBV11-2, TRBJ2-5)
CASSRTGGIETQYF

SEQ ID NO: 249957 - protein, 13 aa, Homo sapiens
  CDR3 for alpha chain variable domain of TCR clone 124979 (TRAV12-1, TRAJ40)
CVVPTSGTYKYIF

SEQ ID NO: 249958 - protein, 14 aa, Homo sapiens
  CDR3 for beta chain variable domain of TCR clone 124979 (TRBV5-4, TRBJ1-1)
CASSLDSRRDEAFF

SEQ ID NO: 249959 - protein, 14 aa, Homo sapiens
  CDR3 for alpha chain variable domain of TCR clone 124980 (TRAV12-2, TRAJ13)
CAVKKTGGYQKVTF

SEQ ID NO: 249960 - protein, 16 aa, Homo sapiens
  CDR3 for beta chain variable domain of TCR clone 124980 (TRBV25-1, TRBJ2-7)
CASSELTGGGIYEQYF

SEQ ID NO: 249961 - protein, 13 aa, Homo sapiens
  CDR3 for alpha chain variable domain of TCR clone 124981 (TRAV12-3, TRAJ13)
CAMSSGGYHKVTF

SEQ ID NO: 249962 - protein, 13 aa, Homo sapiens
  CDR3 for beta chain variable domain of TCR clone 124981 (TRBV20-1, TRBJ1-1)
CSAPPGGHTEAFF

SEQ ID NO: 249963 - protein, 18 aa, Homo sapiens
  CDR3 for alpha chain variable domain of TCR clone 124982 (TRAV12-3, TRAJ52)
CAMSVGGAGGTSYGKLTF

SEQ ID NO: 249964 - protein, 23 aa, Homo sapiens
  CDR3 for beta chain variable domain of TCR clone 124982 (TRBV7-9, TRBJ1-2)
EAQLEKSRLLSDRFSSGEDGYTF

SEQ ID NO: 249965 - protein, 15 aa, Homo sapiens
  CDR3 for alpha chain variable domain of TCR clone 124983 (TRAV1-2, TRAJ32)
CAVRGYGGATNKLIF

SEQ ID NO: 249966 - protein, 15 aa, Homo sapiens
  CDR3 for beta chain variable domain of TCR clone 124983 (TRBV25-1, TRBJ2-5)
CASSDTGTHHETQYF

SEQ ID NO: 249967 - protein, 16 aa, Homo sapiens
  CDR3 for alpha chain variable domain of TCR clone 124984 (TRAV3, TRAJ21)
CAVRDIERGNFNKFYF

SEQ ID NO: 249968 - protein, 15 aa, Homo sapiens
  CDR3 for beta chain variable domain of TCR clone 124984 (TRBV10-3, TRBJ2-3)
RAISLTSGGTDTQYF

SEQ ID NO: 249969 - protein, 10 aa, Homo sapiens
  CDR3 for alpha chain variable domain of TCR clone 124985 (TRAV38-2/DV8, TRAJ40)
CASGTYKYIF

SEQ ID NO: 249970 - protein, 13 aa, Homo sapiens
  CDR3 for beta chain variable domain of TCR clone 124985 (TRBV7-9, TRBJ2-1)
CQQPRDSLYEQFF

SEQ ID NO: 249971 - protein, 13 aa, Homo sapiens
  CDR3 for alpha chain variable domain of TCR clone 124986 (TRAV38-1, TRAJ20)
CAFRRDNDYKLSF

SEQ ID NO: 249972 - protein, 12 aa, Homo sapiens
  CDR3 for beta chain variable domain of TCR clone 124986 (TRBV18, TRBJ2-5)
CASSPSKETQYF

SEQ ID NO: 249973 - protein, 12 aa, Homo sapiens
  CDR3 for alpha chain variable domain of TCR clone 124987 (TRAV13-1, TRAJ21)
CSAKEGFNKFYF

SEQ ID NO: 249974 - protein, 15 aa, Homo sapiens
  CDR3 for beta chain variable domain of TCR clone 124987 (TRBV27, TRBJ2-1)
CASSNGGGSSNEQFF

SEQ ID NO: 249975 - protein, 16 aa, Homo sapiens
  CDR3 for alpha chain variable domain of TCR clone 124988 (TRAV8-3, TRAJ44)
CAVGTLMTGTASKLTF

SEQ ID NO: 249976 - protein, 15 aa, Homo sapiens
  CDR3 for beta chain variable domain of TCR clone 124988 (TRBV10-2, TRBJ2-6)
CASSGQGTGANVLTF

SEQ ID NO: 249977 - protein, 12 aa, Homo sapiens
  CDR3 for alpha chain variable domain of TCR clone 124989 (TRAV3, TRAJ27)
CAARDGAGKSTF

SEQ ID NO: 249978 - protein, 13 aa, Homo sapiens
  CDR3 for beta chain variable domain of TCR clone 124989 (TRBV10-3, TRBJ1-2)
CAINADLNYGYTF

SEQ ID NO: 249979 - protein, 16 aa, Homo sapiens
  CDR3 for alpha chain variable domain of TCR clone 124990 (TRAV30, TRAJ24)
CGTEIVDADSWGKFQF

SEQ ID NO: 249980 - protein, 16 aa, Homo sapiens
  CDR3 for beta chain variable domain of TCR clone 124990 (TRBV7-2, TRBJ1-3)
CASSRLEASSGNTIYF

SEQ ID NO: 249981 - protein, 17 aa, Homo sapiens
  CDR3 for alpha chain variable domain of TCR clone 124991 (TRAV3, TRAJ6)
CAVRDGPRAGGSYIPTF

SEQ ID NO: 249982 - protein, 15 aa, Homo sapiens
  CDR3 for beta chain variable domain of TCR clone 124991 (TRBV6-6, TRBJ1-1)
CASSPRGDVETEAFF

SEQ ID NO: 249983 - protein, 13 aa, Homo sapiens
  CDR3 for alpha chain variable domain of TCR clone 124992 (TRAV35, TRAJ40)
CAGQLSGTYKYIF

SEQ ID NO: 249984 - protein, 14 aa, Homo sapiens
  CDR3 for beta chain variable domain of TCR clone 124992 (TRBV3-1, TRBJ2-5)
CASSLQLAVETQYF

SEQ ID NO: 249985 - protein, 14 aa, Homo sapiens
  CDR3 for alpha chain variable domain of TCR clone 124993 (TRAV2, TRAJ37)
CAVDFTSNTGKLIF

SEQ ID NO: 249986 - protein, 12 aa, Homo sapiens
  CDR3 for beta chain variable domain of TCR clone 124993 (TRBV11-2, TRBJ2-1)
CASSPGNNEQFF

SEQ ID NO: 249987 - protein, 14 aa, Homo sapiens
  CDR3 for alpha chain variable domain of TCR clone 124994 (TRAV12-1, TRAJ26)
CVVKGSNYGQNFVF

SEQ ID NO: 249988 - protein, 17 aa, Homo sapiens
  CDR3 for beta chain variable domain of TCR clone 124994 (TRBV11-2, TRBJ2-6)
CASSHRDIFSGANVLTF

SEQ ID NO: 249989 - protein, 12 aa, Homo sapiens
  CDR3 for alpha chain variable domain of TCR clone 124995 (TRAV17, TRAJ53)
CATEGSNYKLTF

SEQ ID NO: 249990 - protein, 13 aa, Homo sapiens
  CDR3 for beta chain variable domain of TCR clone 124995 (TRBV4-2, TRBJ1-1)
CASSQAGNTEAFF

SEQ ID NO: 249991 - protein, 15 aa, Homo sapiens
  CDR3 for alpha chain variable domain of TCR clone 124996 (TRAV3, TRAJ5)
CAVRDLDTGRRALTF

SEQ ID NO: 249992 - protein, 14 aa, Homo sapiens
  CDR3 for beta chain variable domain of TCR clone 124996 (TRBV5-1, TRBJ2-7)
CASSRGESLYEQYF

SEQ ID NO: 249993 - protein, 13 aa, Homo sapiens
  CDR3 for alpha chain variable domain of TCR clone 124997 (TRAV27, TRAJ41)
CAGEGNSGYALNF

SEQ ID NO: 249994 - protein, 15 aa, Homo sapiens
  CDR3 for beta chain variable domain of TCR clone 124997 (TRBV19, TRBJ2-1)
CASSSPGVPLDEQFF

SEQ ID NO: 249995 - protein, 16 aa, Homo sapiens
  CDR3 for alpha chain variable domain of TCR clone 124998 (TRAV12-2, TRAJ18)
CAVTTDRGSTLGRLYF

SEQ ID NO: 249996 - protein, 13 aa, Homo sapiens
  CDR3 for beta chain variable domain of TCR clone 124998 (TRBV27, TRBJ2-7)
CASSLTTGYEQYF

SEQ ID NO: 249997 - protein, 13 aa, Homo sapiens
  CDR3 for alpha chain variable domain of TCR clone 124999 (TRAV20, TRAJ37)
CAGCSSNTGKLIF

SEQ ID NO: 249998 - protein, 14 aa, Homo sapiens
  CDR3 for beta chain variable domain of TCR clone 124999 (TRBV5-1, TRBJ2-7)
CASSRGESLYEQYF

SEQ ID NO: 249999 - protein, 14 aa, Homo sapiens
  CDR3 for alpha chain variable domain of TCR clone 125000 (TRAV8-4, TRAJ9)
RAVRINTGGFKTIF

SEQ ID NO: 250000 - protein, 16 aa, Homo sapiens
  CDR3 for beta chain variable domain of TCR clone 125000 (TRBV12-5, TRBJ2-5)
CASGPRTSGNQETQYF

SEQ ID NO: 250001 - protein, 13 aa, Homo sapiens
  CDR3 for alpha chain variable domain of TCR clone 125001 (TRAV12-2, TRAJ39)
CAVNNNAGNMLTF

SEQ ID NO: 250002 - protein, 19 aa, Homo sapiens
  CDR3 for beta chain variable domain of TCR clone 125001 (TRBV2, TRBJ2-2)
CASSQPGLAGGGNTGELFF

SEQ ID NO: 250003 - protein, 16 aa, Homo sapiens
  CDR3 for alpha chain variable domain of TCR clone 125002 (TRAV3, TRAJ28)
CAVLPRSGAGSYQLTF

SEQ ID NO: 250004 - protein, 14 aa, Homo sapiens
  CDR3 for beta chain variable domain of TCR clone 125002 (TRBV25-1, TRBJ1-1)
CASTHLGGNTEAFF

SEQ ID NO: 250005 - protein, 14 aa, Homo sapiens
  CDR3 for alpha chain variable domain of TCR clone 125003 (TRAV35, TRAJ42)
CAGRYGGSQGNLTF

SEQ ID NO: 250006 - protein, 15 aa, Homo sapiens
  CDR3 for beta chain variable domain of TCR clone 125003 (TRBV7-9, TRBJ2-1)
CASSLGWGRANEQFF

SEQ ID NO: 250007 - protein, 12 aa, Homo sapiens
  CDR3 for alpha chain variable domain of TCR clone 125004 (TRAV12-1, )
CVVNSWISRTLT

SEQ ID NO: 250008 - protein, 14 aa, Homo sapiens
  CDR3 for beta chain variable domain of TCR clone 125004 (TRBV12-5, TRBJ2-5)
CASGSRTHQETQYF

SEQ ID NO: 250009 - protein, 11 aa, Homo sapiens
  CDR3 for alpha chain variable domain of TCR clone 125005 (TRAV2, TRAJ37)
CAVDHTGKLIF

SEQ ID NO: 250010 - protein, 14 aa, Homo sapiens
  CDR3 for beta chain variable domain of TCR clone 125005 (TRBV20-1, TRBJ2-1)
CSATLAGGLGEQFF

SEQ ID NO: 250011 - protein, 15 aa, Homo sapiens
  CDR3 for alpha chain variable domain of TCR clone 125006 (TRAV20, TRAJ50)
CAVRQMKTSYDKVIF

SEQ ID NO: 250012 - protein, 15 aa, Homo sapiens
  CDR3 for beta chain variable domain of TCR clone 125006 (TRBV7-8, TRBJ2-1)
CASSLADSLYNEQFF

SEQ ID NO: 250013 - protein, 15 aa, Homo sapiens
  CDR3 for alpha chain variable domain of TCR clone 125007 (TRAV8-4, TRAJ8)
CAVSDLNTGFQKLVF

SEQ ID NO: 250014 - protein, 14 aa, Homo sapiens
  CDR3 for beta chain variable domain of TCR clone 125007 (TRBV7-2, TRBJ2-3)
CASRQTGSSYTQYF

SEQ ID NO: 250015 - protein, 11 aa, Homo sapiens
  CDR3 for alpha chain variable domain of TCR clone 125008 (TRAV21, TRAJ9)
CAVPGGFKTIF

SEQ ID NO: 250016 - protein, 20 aa, Homo sapiens
  CDR3 for beta chain variable domain of TCR clone 125008 (TRBV7-9, TRBJ2-5)
RGTRPCISGPLQGAQETQYF

SEQ ID NO: 250017 - protein, 15 aa, Homo sapiens
  CDR3 for alpha chain variable domain of TCR clone 125009 (TRAV26-1, TRAJ29)
CIVRVEGSGNTPLVF

SEQ ID NO: 250018 - protein, 15 aa, Homo sapiens
  CDR3 for beta chain variable domain of TCR clone 125009 (TRBV7-9, TRBJ2-2)
CASGPLDTFPGELFF

SEQ ID NO: 250019 - protein, 14 aa, Homo sapiens
  CDR3 for alpha chain variable domain of TCR clone 125010 (TRAV17, TRAJ57)
CATDPQGGSEKLVF

SEQ ID NO: 250020 - protein, 15 aa, Homo sapiens
  CDR3 for beta chain variable domain of TCR clone 125010 (TRBV28, TRBJ2-7)
CASRPWDRFSYEQYF

SEQ ID NO: 250021 - protein, 13 aa, Homo sapiens
  CDR3 for alpha chain variable domain of TCR clone 125011 (TRAV12-2, TRAJ49)
CAVETRAGNQFYF

SEQ ID NO: 250022 - protein, 15 aa, Homo sapiens
  CDR3 for beta chain variable domain of TCR clone 125011 (TRBV7-9, TRBJ2-1)
CASSLGWGRANEQFF

SEQ ID NO: 250023 - protein, 15 aa, Homo sapiens
  CDR3 for alpha chain variable domain of TCR clone 125012 (TRAV35, TRAJ40)
CAGQLGTSGTYKYIF

SEQ ID NO: 250024 - protein, 14 aa, Homo sapiens
  CDR3 for beta chain variable domain of TCR clone 125012 (TRBV7-3, TRBJ2-1)
WASSLAGGTNEQFF

SEQ ID NO: 250025 - protein, 13 aa, Homo sapiens
  CDR3 for alpha chain variable domain of TCR clone 125013 (TRAV2, TRAJ40)
CAVVTSGTYKYIF

SEQ ID NO: 250026 - protein, 14 aa, Homo sapiens
  CDR3 for beta chain variable domain of TCR clone 125013 (TRBV19, TRBJ1-3)
CASNRGNSGNTIYF

SEQ ID NO: 250027 - protein, 13 aa, Homo sapiens
  CDR3 for alpha chain variable domain of TCR clone 125014 (TRAV27, TRAJ45)
CRSSGGGADGLTF

SEQ ID NO: 250028 - protein, 14 aa, Homo sapiens
  CDR3 for beta chain variable domain of TCR clone 125014 (TRBV11-3, TRBJ1-6)
CASSFSGGDSPLHF

SEQ ID NO: 250029 - protein, 13 aa, Homo sapiens
  CDR3 for alpha chain variable domain of TCR clone 125015 (TRAV23/DV6, TRAJ16)
CAASISDGQKLLF

SEQ ID NO: 250030 - protein, 15 aa, Homo sapiens
  CDR3 for beta chain variable domain of TCR clone 125015 (TRBV28, TRBJ2-5)
CASSSGRTIQETQYF

SEQ ID NO: 250031 - protein, 15 aa, Homo sapiens
  CDR3 for alpha chain variable domain of TCR clone 125016 (TRAV12-3, TRAJ6)
CAMSATTGGSYIPTF

SEQ ID NO: 250032 - protein, 15 aa, Homo sapiens
  CDR3 for beta chain variable domain of TCR clone 125016 (TRBV28, TRBJ2-3)
CASGFGTRLADTQYF

SEQ ID NO: 250033 - protein, 11 aa, Homo sapiens
  CDR3 for alpha chain variable domain of TCR clone 125017 (TRAV12-3, TRAJ43)
CAMSVSNDMRF

SEQ ID NO: 250034 - protein, 13 aa, Homo sapiens
  CDR3 for beta chain variable domain of TCR clone 125017 (TRBV7-9, TRBJ2-3)
CASSPGSTDTQYF

SEQ ID NO: 250035 - protein, 14 aa, Homo sapiens
  CDR3 for alpha chain variable domain of TCR clone 125018 (TRAV12-1, TRAJ17)
CVVNYKAAGNKLTF

SEQ ID NO: 250036 - protein, 14 aa, Homo sapiens
  CDR3 for beta chain variable domain of TCR clone 125018 (TRBV6-1, TRBJ1-3)
CASVQGGGGNTIYF

SEQ ID NO: 250037 - protein, 14 aa, Homo sapiens
  CDR3 for alpha chain variable domain of TCR clone 125019 (TRAV13-1, TRAJ20)
CAARPGSNDYKLSF

SEQ ID NO: 250038 - protein, 12 aa, Homo sapiens
  CDR3 for beta chain variable domain of TCR clone 125019 (TRBV7-8, TRBJ2-7)
CASGLGDREQYF

SEQ ID NO: 250039 - protein, 14 aa, Homo sapiens
  CDR3 for alpha chain variable domain of TCR clone 125020 (TRAV12-1, TRAJ17)
CVVNYKAAGNKLTF

SEQ ID NO: 250040 - protein, 16 aa, Homo sapiens
  CDR3 for beta chain variable domain of TCR clone 125020 (TRBV12-4, TRBJ1-5)
CASSRPVGGSNQPQHV

SEQ ID NO: 250041 - protein, 15 aa, Homo sapiens
  CDR3 for alpha chain variable domain of TCR clone 125021 (TRAV4, TRAJ36)
CLVGDRQTGANNLFF

SEQ ID NO: 250042 - protein, 15 aa, Homo sapiens
  CDR3 for beta chain variable domain of TCR clone 125021 (TRBV7-6, TRBJ2-1)
CASSSRAGEGNEQFF

SEQ ID NO: 250043 - protein, 15 aa, Homo sapiens
  CDR3 for alpha chain variable domain of TCR clone 125022 (TRAV2, TRAJ42)
FAVEGYGGSQGNLIF

SEQ ID NO: 250044 - protein, 14 aa, Homo sapiens
  CDR3 for beta chain variable domain of TCR clone 125022 (TRBV11-3, TRBJ2-7)
CASSPDRNTYEQYF

SEQ ID NO: 250045 - protein, 14 aa, Homo sapiens
  CDR3 for alpha chain variable domain of TCR clone 125023 (TRAV8-2, TRAJ44)
CVVSLTGTASNLTF

SEQ ID NO: 250046 - protein, 15 aa, Homo sapiens
  CDR3 for beta chain variable domain of TCR clone 125023 (TRBV7-2, TRBJ2-1)
CASSFSGGIYNEQFF

SEQ ID NO: 250047 - protein, 14 aa, Homo sapiens
  CDR3 for alpha chain variable domain of TCR clone 125024 (TRAV3, TRAJ33)
CAVREMDSNYQLIW

SEQ ID NO: 250048 - protein, 19 aa, Homo sapiens
  CDR3 for beta chain variable domain of TCR clone 125024 (TRBV7-3, TRBJ1-2)
CASSFPQGNDGELWLHLRF

SEQ ID NO: 250049 - protein, 14 aa, Homo sapiens
  CDR3 for alpha chain variable domain of TCR clone 125025 (TRAV12-2, TRAJ40)
CAVKIPSGTDKYIF

SEQ ID NO: 250050 - protein, 14 aa, Homo sapiens
  CDR3 for beta chain variable domain of TCR clone 125025 (TRBV20-1, TRBJ1-1)
CSAQTRIGGTEAFF

SEQ ID NO: 250051 - protein, 14 aa, Homo sapiens
  CDR3 for alpha chain variable domain of TCR clone 125026 (TRAV8-3, TRAJ4)
CAVGAAGGYNKLIF

SEQ ID NO: 250052 - protein, 15 aa, Homo sapiens
  CDR3 for beta chain variable domain of TCR clone 125026 (TRBV7-3, TRBJ2-2)
CASKANGANTGELFF

SEQ ID NO: 250053 - protein, 14 aa, Homo sapiens
  CDR3 for alpha chain variable domain of TCR clone 125027 (TRAV1-2, TRAJ16)
CAVNRFSDGQKLLF

SEQ ID NO: 250054 - protein, 13 aa, Homo sapiens
  CDR3 for beta chain variable domain of TCR clone 125027 (TRBV4-1, TRBJ2-1)
CASSQTGGDEQFF

SEQ ID NO: 250055 - protein, 17 aa, Homo sapiens
  CDR3 for alpha chain variable domain of TCR clone 125028 (TRAV3, TRAJ6)
RAVRDGPRAGGSYIPTF

SEQ ID NO: 250056 - protein, 14 aa, Homo sapiens
  CDR3 for beta chain variable domain of TCR clone 125028 (TRBV7-8, TRBJ2-5)
CASSATGGQEAQYF

SEQ ID NO: 250057 - protein, 13 aa, Homo sapiens
  CDR3 for alpha chain variable domain of TCR clone 125029 (TRAV12-1, TRAJ33)
CGDAPDSNYQLIW

SEQ ID NO: 250058 - protein, 14 aa, Homo sapiens
  CDR3 for beta chain variable domain of TCR clone 125029 (TRBV7-2, TRBJ2-2)
CASRGQGAAGELFF

SEQ ID NO: 250059 - protein, 13 aa, Homo sapiens
  CDR3 for alpha chain variable domain of TCR clone 125030 (TRAV13-1, TRAJ10)
CAATAGGGNKLTF

SEQ ID NO: 250060 - protein, 14 aa, Homo sapiens
  CDR3 for beta chain variable domain of TCR clone 125030 (TRBV12-4, TRBJ2-7)
CASSPAGLKCEQYF

SEQ ID NO: 250061 - protein, 13 aa, Homo sapiens
  CDR3 for alpha chain variable domain of TCR clone 125031 (TRAV30, TRAJ24)
CGTVTASWGKLQF

SEQ ID NO: 250062 - protein, 14 aa, Homo sapiens
  CDR3 for beta chain variable domain of TCR clone 125031 (TRBV6-3, TRBJ2-2)
CASTYTPDTGELFF

SEQ ID NO: 250063 - protein, 15 aa, Homo sapiens
  CDR3 for alpha chain variable domain of TCR clone 125032 (TRAV27, TRAJ50)
CAGVGRGTSDDKVIF

SEQ ID NO: 250064 - protein, 14 aa, Homo sapiens
  CDR3 for beta chain variable domain of TCR clone 125032 (TRBV7-2, TRBJ1-1)
CASSFYDLNTEAFF

SEQ ID NO: 250065 - protein, 14 aa, Homo sapiens
  CDR3 for alpha chain variable domain of TCR clone 125033 (TRAV8-3, TRAJ31)
CAVGRGLNNARLMV

SEQ ID NO: 250066 - protein, 15 aa, Homo sapiens
  CDR3 for beta chain variable domain of TCR clone 125033 (TRBV7-2, TRBJ2-2)
CASSLAGGLTGELFF

SEQ ID NO: 250067 - protein, 14 aa, Homo sapiens
  CDR3 for alpha chain variable domain of TCR clone 125034 (TRAV17, TRAJ16)
CATADFSEGQKLLF

SEQ ID NO: 250068 - protein, 15 aa, Homo sapiens
  CDR3 for beta chain variable domain of TCR clone 125034 (TRBV18, TRBJ2-1)
CASSPPSASYDEQFF

SEQ ID NO: 250069 - protein, 15 aa, Homo sapiens
  CDR3 for alpha chain variable domain of TCR clone 125035 (TRAV12-3, TRAJ6)
CAMSATTGGSYIPTF

SEQ ID NO: 250070 - protein, 16 aa, Homo sapiens
  CDR3 for beta chain variable domain of TCR clone 125035 (TRBV5-4, TRBJ2-3)
CASQQPGAGGADTQYF

SEQ ID NO: 250071 - protein, 22 aa, Homo sapiens
  CDR3 for alpha chain variable domain of TCR clone 125036 (TRAV3, )
CAVRDCLNAGNNHIQNPDPAVY

SEQ ID NO: 250072 - protein, 19 aa, Homo sapiens
  CDR3 for beta chain variable domain of TCR clone 125036 (TRBV7-2, TRBJ2-3)
CASSFLSRNWGGGTDTQYF

SEQ ID NO: 250073 - protein, 14 aa, Homo sapiens
  CDR3 for alpha chain variable domain of TCR clone 125037 (TRAV23/DV6, TRAJ4)
CAANLSGGYNKLIF

SEQ ID NO: 250074 - protein, 11 aa, Homo sapiens
  CDR3 for beta chain variable domain of TCR clone 125037 (TRBV7-9, TRBJ2-3)
CASSHTDTQYF

SEQ ID NO: 250075 - protein, 15 aa, Homo sapiens
  CDR3 for alpha chain variable domain of TCR clone 125038 (TRAV20, TRAJ50)
CAVRQMKTSYNKVIF

SEQ ID NO: 250076 - protein, 17 aa, Homo sapiens
  CDR3 for beta chain variable domain of TCR clone 125038 (TRBV28, TRBJ2-7)
CASSPLHRASGVYEQYF

SEQ ID NO: 250077 - protein, 15 aa, Homo sapiens
  CDR3 for alpha chain variable domain of TCR clone 125039 (TRAV9-2, TRAJ23)
CALSDLYNQGGKLIF

SEQ ID NO: 250078 - protein, 15 aa, Homo sapiens
  CDR3 for beta chain variable domain of TCR clone 125039 (TRBV29-1, TRBJ2-7)
CSVEFFDRGSYEQYF

SEQ ID NO: 250079 - protein, 12 aa, Homo sapiens
  CDR3 for alpha chain variable domain of TCR clone 125040 (TRAV13-1, TRAJ53)
AASGGSNYKLTC

SEQ ID NO: 250080 - protein, 15 aa, Homo sapiens
  CDR3 for beta chain variable domain of TCR clone 125040 (TRBV5-1, TRBJ2-1)
CASSPPRAPYNEQFF

SEQ ID NO: 250081 - protein, 14 aa, Homo sapiens
  CDR3 for alpha chain variable domain of TCR clone 125041 (TRAV8-6, TRAJ5)
CAVRVDTGRRALTF

SEQ ID NO: 250082 - protein, 11 aa, Homo sapiens
  CDR3 for beta chain variable domain of TCR clone 125041 (TRBV7-3, TRBJ2-5)
CASSLSETQYF

SEQ ID NO: 250083 - protein, 16 aa, Homo sapiens
  CDR3 for alpha chain variable domain of TCR clone 125042 (TRAV1-2, TRAJ10)
CAVRGVLTGGGNKLTF

SEQ ID NO: 250084 - protein, 13 aa, Homo sapiens
  CDR3 for beta chain variable domain of TCR clone 125042 (TRBV20-1, TRBJ1-1)
CSARGEGNTEAFF

SEQ ID NO: 250085 - protein, 15 aa, Homo sapiens
  CDR3 for alpha chain variable domain of TCR clone 125043 (TRAV3, TRAJ22)
CAVRDRGGSARQLTF

SEQ ID NO: 250086 - protein, 14 aa, Homo sapiens
  CDR3 for beta chain variable domain of TCR clone 125043 (TRBV19, TRBJ2-1)
CASGKSTQYNEQFF

SEQ ID NO: 250087 - protein, 12 aa, Homo sapiens
  CDR3 for alpha chain variable domain of TCR clone 125044 (TRAV13-1, TRAJ49)
CAASIRSNQVYF

SEQ ID NO: 250088 - protein, 14 aa, Homo sapiens
  CDR3 for beta chain variable domain of TCR clone 125044 (TRBV7-2, TRBJ2-1)
CASSPGLAGNEQFF

SEQ ID NO: 250089 - protein, 14 aa, Homo sapiens
  CDR3 for alpha chain variable domain of TCR clone 125045 (TRAV25, TRAJ52)
CAGEGGTSYGKLTF

SEQ ID NO: 250090 - protein, 16 aa, Homo sapiens
  CDR3 for beta chain variable domain of TCR clone 125045 (TRBV7-3, TRBJ2-2)
CASSLKRGTLSGELFF

SEQ ID NO: 250091 - protein, 12 aa, Homo sapiens
  CDR3 for alpha chain variable domain of TCR clone 125046 (TRAV16, TRAJ10)
CSRTGGGNKLTF

SEQ ID NO: 250092 - protein, 13 aa, Homo sapiens
  CDR3 for beta chain variable domain of TCR clone 125046 (TRBV7-2, TRBJ2-7)
CASSSPSGSEQYF

SEQ ID NO: 250093 - protein, 13 aa, Homo sapiens
  CDR3 for alpha chain variable domain of TCR clone 125047 (TRAV2, TRAJ40)
CAVVTSGTYKYIF

SEQ ID NO: 250094 - protein, 15 aa, Homo sapiens
  CDR3 for beta chain variable domain of TCR clone 125047 (TRBV11-3, TRBJ2-3)
CASLKDGREGDSQYF

SEQ ID NO: 250095 - protein, 14 aa, Homo sapiens
  CDR3 for alpha chain variable domain of TCR clone 125048 (TRAV20, TRAJ22)
CAVALGGSARQLTF

SEQ ID NO: 250096 - protein, 16 aa, Homo sapiens
  CDR3 for beta chain variable domain of TCR clone 125048 (TRBV7-6, TRBJ2-1)
CASSAPGPSSYNEQFF

SEQ ID NO: 250097 - protein, 15 aa, Homo sapiens
  CDR3 for alpha chain variable domain of TCR clone 125049 (TRAV3, TRAJ22)
CAVRDRGGSARQLTF

SEQ ID NO: 250098 - protein, 16 aa, Homo sapiens
  CDR3 for beta chain variable domain of TCR clone 125049 (TRBV5-4, TRBJ2-3)
RASQQPGAGGADTQYF

SEQ ID NO: 250099 - protein, 17 aa, Homo sapiens
  CDR3 for alpha chain variable domain of TCR clone 125050 (TRAV3, TRAJ6)
CAVRDGPRAGGSYIPTF

SEQ ID NO: 250100 - protein, 12 aa, Homo sapiens
  CDR3 for beta chain variable domain of TCR clone 125050 (TRBV19, TRBJ2-1)
CASSQISNEQFF

SEQ ID NO: 250101 - protein, 15 aa, Homo sapiens
  CDR3 for alpha chain variable domain of TCR clone 125051 (TRAV12-1, TRAJ9)
CVVSFGDTGGFKTIF

SEQ ID NO: 250102 - protein, 13 aa, Homo sapiens
  CDR3 for beta chain variable domain of TCR clone 125051 (TRBV2, TRBJ1-4)
CASRERAGEKLFF

SEQ ID NO: 250103 - protein, 12 aa, Homo sapiens
  CDR3 for alpha chain variable domain of TCR clone 125052 (TRAV8-3, TRAJ20)
CAVGANDYKLSF

SEQ ID NO: 250104 - protein, 16 aa, Homo sapiens
  CDR3 for beta chain variable domain of TCR clone 125052 (TRBV19, TRBJ2-2)
CASRSPGTGATGEQFF

SEQ ID NO: 250105 - protein, 14 aa, Homo sapiens
  CDR3 for alpha chain variable domain of TCR clone 125053 (TRAV1-2, TRAJ16)
CAVNRFSDGQKLLF

SEQ ID NO: 250106 - protein, 13 aa, Homo sapiens
  CDR3 for beta chain variable domain of TCR clone 125053 (TRBV11-2, TRBJ1-3)
CASSLEPVNTIYF

SEQ ID NO: 250107 - protein, 12 aa, Homo sapiens
  CDR3 for alpha chain variable domain of TCR clone 125054 (TRAV16, TRAJ10)
CSRTGGGNKLTF

SEQ ID NO: 250108 - protein, 14 aa, Homo sapiens
  CDR3 for beta chain variable domain of TCR clone 125054 (TRBV7-2, TRBJ2-1)
CASSLVAGRNEQFF

SEQ ID NO: 250109 - protein, 16 aa, Homo sapiens
  CDR3 for alpha chain variable domain of TCR clone 125055 (TRAV3, TRAJ18)
FAVRDGRGSTLGRLYF

SEQ ID NO: 250110 - protein, 15 aa, Homo sapiens
  CDR3 for beta chain variable domain of TCR clone 125055 (TRBV7-9, TRBJ1-6)
CASSSPGRGNSPLHF

SEQ ID NO: 250111 - protein, 13 aa, Homo sapiens
  CDR3 for alpha chain variable domain of TCR clone 125056 (TRAV8-3, TRAJ43)
CAVVPDNNNDMRF

SEQ ID NO: 250112 - protein, 17 aa, Homo sapiens
  CDR3 for beta chain variable domain of TCR clone 125056 (TRBV7-7, TRBJ1-1)
CASIGDRPNLGVTEAFF

SEQ ID NO: 250113 - protein, 14 aa, Homo sapiens
  CDR3 for alpha chain variable domain of TCR clone 125057 (TRAV1-2, TRAJ16)
CAVNRFSDGQKLLF

SEQ ID NO: 250114 - protein, 14 aa, Homo sapiens
  CDR3 for beta chain variable domain of TCR clone 125057 (TRBV7-9, TRBJ1-1)
CASTPLQSYTEAFF

SEQ ID NO: 250115 - protein, 15 aa, Homo sapiens
  CDR3 for alpha chain variable domain of TCR clone 125058 (TRAV21, TRAJ38)
CAVRQDAGNNRKLIW

SEQ ID NO: 250116 - protein, 15 aa, Homo sapiens
  CDR3 for beta chain variable domain of TCR clone 125058 (TRBV4-1, TRBJ2-5)
CASSQWDLYQETQYF

SEQ ID NO: 250117 - protein, 16 aa, Homo sapiens
  CDR3 for alpha chain variable domain of TCR clone 125059 (TRAV12-1, TRAJ43)
CVVNPHRFGAGTRLTV

SEQ ID NO: 250118 - protein, 16 aa, Homo sapiens
  CDR3 for beta chain variable domain of TCR clone 125059 (TRBV12-5, TRBJ2-5)
CASGPRTSGNQETQYF

SEQ ID NO: 250119 - protein, 14 aa, Homo sapiens
  CDR3 for alpha chain variable domain of TCR clone 125060 (TRAV35, TRAJ10)
CAGILTGGGNKLTF

SEQ ID NO: 250120 - protein, 15 aa, Homo sapiens
  CDR3 for beta chain variable domain of TCR clone 125060 (TRBV7-9, TRBJ1-6)
CASSSPGRGNSPLHF

SEQ ID NO: 250121 - protein, 11 aa, Homo sapiens
  CDR3 for alpha chain variable domain of TCR clone 125061 (TRAV12-3, TRAJ27)
CAMANAGKSTF

SEQ ID NO: 250122 - protein, 13 aa, Homo sapiens
  CDR3 for beta chain variable domain of TCR clone 125061 (TRBV20-1, TRBJ1-1)
CSARVGGNNEAFF

SEQ ID NO: 250123 - protein, 13 aa, Homo sapiens
  CDR3 for alpha chain variable domain of TCR clone 125062 (TRAV12-2, TRAJ47)
CAVFMEYGKKLVF

SEQ ID NO: 250124 - protein, 14 aa, Homo sapiens
  CDR3 for beta chain variable domain of TCR clone 125062 (TRBV4-1, TRBJ1-5)
CASSQGPTNQPQHF

SEQ ID NO: 250125 - protein, 18 aa, Homo sapiens
  CDR3 for alpha chain variable domain of TCR clone 125063 (TRAV1-2, TRAJ18)
CAVRDMGDRGSTLGRLYF

SEQ ID NO: 250126 - protein, 16 aa, Homo sapiens
  CDR3 for beta chain variable domain of TCR clone 125063 (TRBV29-1, TRBJ1-2)
CSVEANRDIANYCYTF

SEQ ID NO: 250127 - protein, 14 aa, Homo sapiens
  CDR3 for alpha chain variable domain of TCR clone 125064 (TRAV26-1, TRAJ38)
CIADNAGNNHKLIW

SEQ ID NO: 250128 - protein, 15 aa, Homo sapiens
  CDR3 for beta chain variable domain of TCR clone 125064 (TRBV7-6, TRBJ1-4)
CASSLGAGAGEKLFF

SEQ ID NO: 250129 - protein, 14 aa, Homo sapiens
  CDR3 for alpha chain variable domain of TCR clone 125065 (TRAV12-2, TRAJ9)
CAVNMEGGGFKTIF

SEQ ID NO: 250130 - protein, 14 aa, Homo sapiens
  CDR3 for beta chain variable domain of TCR clone 125065 (TRBV27, TRBJ2-3)
CASRTGGRTDTQYF

SEQ ID NO: 250131 - protein, 13 aa, Homo sapiens
  CDR3 for alpha chain variable domain of TCR clone 125066 (TRAV17, TRAJ5)
CAPMDTGRRALTF

SEQ ID NO: 250132 - protein, 13 aa, Homo sapiens
  CDR3 for beta chain variable domain of TCR clone 125066 (TRBV10-2, TRBJ2-7)
CASGASGGYEQYF

SEQ ID NO: 250133 - protein, 14 aa, Homo sapiens
  CDR3 for alpha chain variable domain of TCR clone 125067 (TRAV12-1, TRAJ8)
CVVNSNTGFEKLVF

SEQ ID NO: 250134 - protein, 17 aa, Homo sapiens
  CDR3 for beta chain variable domain of TCR clone 125067 (TRBV7-8, TRBJ2-6)
CASSAGTGGAGANVLTF

SEQ ID NO: 250135 - protein, 16 aa, Homo sapiens
  CDR3 for alpha chain variable domain of TCR clone 125068 (TRAV12-3, TRAJ53)
CSMSPGSGGSNYKLTF

SEQ ID NO: 250136 - protein, 13 aa, Homo sapiens
  CDR3 for beta chain variable domain of TCR clone 125068 (TRBV7-2, TRBJ2-5)
CASSQTSVETQYF

SEQ ID NO: 250137 - protein, 14 aa, Homo sapiens
  CDR3 for alpha chain variable domain of TCR clone 125069 (TRAV12-1, TRAJ10)
CVAILTGGGSKLTF

SEQ ID NO: 250138 - protein, 15 aa, Homo sapiens
  CDR3 for beta chain variable domain of TCR clone 125069 (TRBV20-1, TRBJ2-7)
CSARGFRPQTYEQYF

SEQ ID NO: 250139 - protein, 13 aa, Homo sapiens
  CDR3 for alpha chain variable domain of TCR clone 125070 (TRAV9-2, TRAJ53)
CALIGGSNYKLTF

SEQ ID NO: 250140 - protein, 17 aa, Homo sapiens
  CDR3 for beta chain variable domain of TCR clone 125070 (TRBV11-2, TRBJ2-1)
CASSLYPPGVEYNEQFF

SEQ ID NO: 250141 - protein, 11 aa, Homo sapiens
  CDR3 for alpha chain variable domain of TCR clone 125071 (TRAV1-2, TRAJ20)
CAVANDYKLSF

SEQ ID NO: 250142 - protein, 18 aa, Homo sapiens
  CDR3 for beta chain variable domain of TCR clone 125071 (TRBV20-1, TRBJ2-6)
CSAQTTPTHGSGANVLTF

SEQ ID NO: 250143 - protein, 15 aa, Homo sapiens
  CDR3 for alpha chain variable domain of TCR clone 125072 (TRAV34, TRAJ38)
CGADFTPGNNRKLIW

SEQ ID NO: 250144 - protein, 15 aa, Homo sapiens
  CDR3 for beta chain variable domain of TCR clone 125072 (TRBV25-1, TRBJ1-4)
CASSPGDSTNEKLFF

SEQ ID NO: 250145 - protein, 15 aa, Homo sapiens
  CDR3 for alpha chain variable domain of TCR clone 125073 (TRAV12-2, TRAJ53)
CAVNGGGGSNYKRTF

SEQ ID NO: 250146 - protein, 14 aa, Homo sapiens
  CDR3 for beta chain variable domain of TCR clone 125073 (TRBV18, TRBJ2-7)
CASSPRGGAYEQYF

SEQ ID NO: 250147 - protein, 17 aa, Homo sapiens
  CDR3 for alpha chain variable domain of TCR clone 125074 (TRAV8-6, TRAJ58)
CAVSSWVGETSGARLTF

SEQ ID NO: 250148 - protein, 15 aa, Homo sapiens
  CDR3 for beta chain variable domain of TCR clone 125074 (TRBV6-5, TRBJ2-1)
CASSYDAGAGNEQFF

SEQ ID NO: 250149 - protein, 11 aa, Homo sapiens
  CDR3 for alpha chain variable domain of TCR clone 125075 (TRAV3, TRAJ21)
CAVGNFNKFYF

SEQ ID NO: 250150 - protein, 13 aa, Homo sapiens
  CDR3 for beta chain variable domain of TCR clone 125075 (TRBV7-2, TRBJ2-4)
CASSREHANIQYF

SEQ ID NO: 250151 - protein, 14 aa, Homo sapiens
  CDR3 for alpha chain variable domain of TCR clone 125076 (TRAV17, TRAJ44)
CATGRTGTASKLTF

SEQ ID NO: 250152 - protein, 14 aa, Homo sapiens
  CDR3 for beta chain variable domain of TCR clone 125076 (TRBV12-5, TRBJ2-5)
CASGSRTHQETQYF

SEQ ID NO: 250153 - protein, 13 aa, Homo sapiens
  CDR3 for alpha chain variable domain of TCR clone 125077 (TRAV12-3, TRAJ43)
CAMIRPNNNDMRF

SEQ ID NO: 250154 - protein, 14 aa, Homo sapiens
  CDR3 for beta chain variable domain of TCR clone 125077 (TRBV12-5, TRBJ2-5)
CASGSRTHQETQYF

SEQ ID NO: 250155 - protein, 13 aa, Homo sapiens
  CDR3 for alpha chain variable domain of TCR clone 125078 (TRAV38-2/DV8, TRAJ34)
CAYRTWNTDKLIF

SEQ ID NO: 250156 - protein, 14 aa, Homo sapiens
  CDR3 for beta chain variable domain of TCR clone 125078 (TRBV7-2, TRBJ2-7)
CASSPKTSFYEQYF

SEQ ID NO: 250157 - protein, 15 aa, Homo sapiens
  CDR3 for alpha chain variable domain of TCR clone 125079 (TRAV27, TRAJ38)
CAARRNAGNNRQLIC

SEQ ID NO: 250158 - protein, 13 aa, Homo sapiens
  CDR3 for beta chain variable domain of TCR clone 125079 (TRBV12-5, TRBJ2-3)
CASGDRQSDTQYF

SEQ ID NO: 250159 - protein, 12 aa, Homo sapiens
  CDR3 for alpha chain variable domain of TCR clone 125080 (TRAV13-2, TRAJ23)
CAERHRGGKLIF

SEQ ID NO: 250160 - protein, 14 aa, Homo sapiens
  CDR3 for beta chain variable domain of TCR clone 125080 (TRBV18, TRBJ2-5)
CASSPGVSQETQYF

SEQ ID NO: 250161 - protein, 14 aa, Homo sapiens
  CDR3 for alpha chain variable domain of TCR clone 125081 (TRAV1-2, TRAJ16)
CAVNRFSDGQKLLF

SEQ ID NO: 250162 - protein, 15 aa, Homo sapiens
  CDR3 for beta chain variable domain of TCR clone 125081 (TRBV29-1, TRBJ2-7)
CSVEFFDRESYEQYF

SEQ ID NO: 250163 - protein, 16 aa, Homo sapiens
  CDR3 for alpha chain variable domain of TCR clone 125082 (TRAV14/DV4, TRAJ53)
CAMREGGGGSNYKLTF

SEQ ID NO: 250164 - protein, 12 aa, Homo sapiens
  CDR3 for beta chain variable domain of TCR clone 125082 (TRBV28, TRBJ2-3)
CASSLYRDTQYF

SEQ ID NO: 250165 - protein, 15 aa, Homo sapiens
  CDR3 for alpha chain variable domain of TCR clone 125083 (TRAV3, TRAJ22)
CAVRDRAGSARQLTF

SEQ ID NO: 250166 - protein, 16 aa, Homo sapiens
  CDR3 for beta chain variable domain of TCR clone 125083 (TRBV5-4, TRBJ2-3)
CASQQPGAGGADTQYF

SEQ ID NO: 250167 - protein, 15 aa, Homo sapiens
  CDR3 for alpha chain variable domain of TCR clone 125084 (TRAV12-2, TRAJ43)
CAFDMRFGAGTRLTV

SEQ ID NO: 250168 - protein, 18 aa, Homo sapiens
  CDR3 for beta chain variable domain of TCR clone 125084 (TRBV20-1, TRBJ2-3)
CSASGLAGGPGTTETQYL

SEQ ID NO: 250169 - protein, 15 aa, Homo sapiens
  CDR3 for alpha chain variable domain of TCR clone 125085 (TRAV20, TRAJ4)
CAVEGSSGGYNKLIL

SEQ ID NO: 250170 - protein, 14 aa, Homo sapiens
  CDR3 for beta chain variable domain of TCR clone 125085 (TRBV7-8, TRBJ2-7)
CASTLGGALGEQYF

SEQ ID NO: 250171 - protein, 14 aa, Homo sapiens
  CDR3 for alpha chain variable domain of TCR clone 125086 (TRAV17, TRAJ31)
CATVLRNNNARLMF

SEQ ID NO: 250172 - protein, 13 aa, Homo sapiens
  CDR3 for beta chain variable domain of TCR clone 125086 (TRBV7-3, TRBJ1-1)
CASSQDWGAEAFF

SEQ ID NO: 250173 - protein, 17 aa, Homo sapiens
  CDR3 for alpha chain variable domain of TCR clone 125087 (TRAV3, TRAJ42)
CAVRDRDYGGSQGNLIF

SEQ ID NO: 250174 - protein, 14 aa, Homo sapiens
  CDR3 for beta chain variable domain of TCR clone 125087 (TRBV19, TRBJ2-1)
CASKDPSSYNEQFF

SEQ ID NO: 250175 - protein, 15 aa, Homo sapiens
  CDR3 for alpha chain variable domain of TCR clone 125088 (TRAV8-3, TRAJ11)
CAVGLLNSGYSTLTF

SEQ ID NO: 250176 - protein, 13 aa, Homo sapiens
  CDR3 for beta chain variable domain of TCR clone 125088 (TRBV20-1, TRBJ1-1)
CSARGGGNTEAFF

SEQ ID NO: 250177 - protein, 15 aa, Homo sapiens
  CDR3 for alpha chain variable domain of TCR clone 125089 (TRAV38-1, TRAJ37)
CAFIVGSGNTGKLIF

SEQ ID NO: 250178 - protein, 12 aa, Homo sapiens
  CDR3 for beta chain variable domain of TCR clone 125089 (TRBV7-9, TRBJ2-7)
CASSLEGYEQYF

SEQ ID NO: 250179 - protein, 18 aa, Homo sapiens
  CDR3 for alpha chain variable domain of TCR clone 125090 (TRAV26-1, TRAJ23)
CIVRVGLEVWNQGGKLIF

SEQ ID NO: 250180 - protein, 14 aa, Homo sapiens
  CDR3 for beta chain variable domain of TCR clone 125090 (TRBV7-6, TRBJ2-3)
CAGSLGTVTDTQYF

SEQ ID NO: 250181 - protein, 16 aa, Homo sapiens
  CDR3 for alpha chain variable domain of TCR clone 125091 (TRAV21, TRAJ52)
CSVTNAGGTSYGKLTF

SEQ ID NO: 250182 - protein, 11 aa, Homo sapiens
  CDR3 for beta chain variable domain of TCR clone 125091 (TRBV2, TRBJ1-1)
CASREGTEAFF

SEQ ID NO: 250183 - protein, 11 aa, Homo sapiens
  CDR3 for alpha chain variable domain of TCR clone 125092 (TRAV16, TRAJ20)
CALSEGFKAAL

SEQ ID NO: 250184 - protein, 13 aa, Homo sapiens
  CDR3 for beta chain variable domain of TCR clone 125092 (TRBV7-3, TRBJ2-1)
CASSLDGYNEQFF

SEQ ID NO: 250185 - protein, 12 aa, Homo sapiens
  CDR3 for alpha chain variable domain of TCR clone 125093 (TRAV12-1, TRAJ40)
CVVYSGTYKYIF

SEQ ID NO: 250186 - protein, 14 aa, Homo sapiens
  CDR3 for beta chain variable domain of TCR clone 125093 (TRBV7-6, TRBJ2-1)
CASSLGGGADEQLF

SEQ ID NO: 250187 - protein, 17 aa, Homo sapiens
  CDR3 for alpha chain variable domain of TCR clone 125094 (TRAV3, TRAJ12)
CAVRDGVRMDSSYKLIF

SEQ ID NO: 250188 - protein, 12 aa, Homo sapiens
  CDR3 for beta chain variable domain of TCR clone 125094 (TRBV11-2, TRBJ2-2)
CASSLGGGELFF

SEQ ID NO: 250189 - protein, 17 aa, Homo sapiens
  CDR3 for alpha chain variable domain of TCR clone 125095 (TRAV4, TRAJ18)
CLVGERSVGSTLGRLYF

SEQ ID NO: 250190 - protein, 16 aa, Homo sapiens
  CDR3 for beta chain variable domain of TCR clone 125095 (TRBV12-5, TRBJ2-5)
CASGPRTSGNQETQYF

SEQ ID NO: 250191 - protein, 12 aa, Homo sapiens
  CDR3 for alpha chain variable domain of TCR clone 125096 (TRAV12-1, TRAJ23)
CVVNNQGGKLIF

SEQ ID NO: 250192 - protein, 16 aa, Homo sapiens
  CDR3 for beta chain variable domain of TCR clone 125096 (TRBV11-1, TRBJ2-7)
CASRAQTGTLSYEQYF

SEQ ID NO: 250193 - protein, 15 aa, Homo sapiens
  CDR3 for alpha chain variable domain of TCR clone 125097 (TRAV26-2, TRAJ39)
CSRRGNNNAGNMLTF

SEQ ID NO: 250194 - protein, 15 aa, Homo sapiens
  CDR3 for beta chain variable domain of TCR clone 125097 (TRBV5-4, TRBJ1-1)
CASSSLGWANTEAFF

SEQ ID NO: 250195 - protein, 11 aa, Homo sapiens
  CDR3 for alpha chain variable domain of TCR clone 125098 (TRAV12-3, TRAJ43)
CAMSVSNDMRF

SEQ ID NO: 250196 - protein, 15 aa, Homo sapiens
  CDR3 for beta chain variable domain of TCR clone 125098 (TRBV6-6, TRBJ1-2)
CASSYADRGNYGYTF

SEQ ID NO: 250197 - protein, 13 aa, Homo sapiens
  CDR3 for alpha chain variable domain of TCR clone 125099 (TRAV17, TRAJ9)
CATFLTGGFKTIF

SEQ ID NO: 250198 - protein, 16 aa, Homo sapiens
  CDR3 for beta chain variable domain of TCR clone 125099 (TRBV7-2, TRBJ2-7)
CASSLVMGVGSYEQYF

SEQ ID NO: 250199 - protein, 14 aa, Homo sapiens
  CDR3 for alpha chain variable domain of TCR clone 125100 (TRAV12-2, TRAJ5)
CAVNRSTGRRALTF

SEQ ID NO: 250200 - protein, 14 aa, Homo sapiens
  CDR3 for beta chain variable domain of TCR clone 125100 (TRBV7-2, TRBJ2-7)
CASSPKTSFYEQYF

SEQ ID NO: 250201 - protein, 15 aa, Homo sapiens
  CDR3 for alpha chain variable domain of TCR clone 125101 (TRAV14/DV4, TRAJ12)
CAMREERDSSYKLIF

SEQ ID NO: 250202 - protein, 16 aa, Homo sapiens
  CDR3 for beta chain variable domain of TCR clone 125101 (TRBV4-1, TRBJ1-2)
CASSQDAGQVLYGYTF

SEQ ID NO: 250203 - protein, 16 aa, Homo sapiens
  CDR3 for alpha chain variable domain of TCR clone 125102 (TRAV3, TRAJ37)
CAVRVRGSGNTGKLIF

SEQ ID NO: 250204 - protein, 11 aa, Homo sapiens
  CDR3 for beta chain variable domain of TCR clone 125102 (TRBV11-2, TRBJ2-2)
CASSVPGELFF

SEQ ID NO: 250205 - protein, 13 aa, Homo sapiens
  CDR3 for alpha chain variable domain of TCR clone 125103 (TRAV12-3, TRAJ33)
CAMSVNSNYQLIW

SEQ ID NO: 250206 - protein, 16 aa, Homo sapiens
  CDR3 for beta chain variable domain of TCR clone 125103 (TRBV13, TRBJ2-5)
CASSLRTGGSWENQYF

SEQ ID NO: 250207 - protein, 13 aa, Homo sapiens
  CDR3 for alpha chain variable domain of TCR clone 125104 (TRAV20, TRAJ37)
CAGCSSNTGKLIF

SEQ ID NO: 250208 - protein, 15 aa, Homo sapiens
  CDR3 for beta chain variable domain of TCR clone 125104 (TRBV7-2, TRBJ2-2)
CASRRPGQNTGELFF

SEQ ID NO: 250209 - protein, 16 aa, Homo sapiens
  CDR3 for alpha chain variable domain of TCR clone 125105 (TRAV12-2, TRAJ10)
CAVNRVLTGGGNKLTC

SEQ ID NO: 250210 - protein, 16 aa, Homo sapiens
  CDR3 for beta chain variable domain of TCR clone 125105 (TRBV12-5, TRBJ2-5)
CASGPRTSGNQETQYF

SEQ ID NO: 250211 - protein, 11 aa, Homo sapiens
  CDR3 for alpha chain variable domain of TCR clone 125106 (TRAV3, TRAJ21)
CAVGNFNKFYF

SEQ ID NO: 250212 - protein, 15 aa, Homo sapiens
  CDR3 for beta chain variable domain of TCR clone 125106 (TRBV19, TRBJ2-1)
CASSPPGQGPNEQFF

SEQ ID NO: 250213 - protein, 12 aa, Homo sapiens
  CDR3 for alpha chain variable domain of TCR clone 125107 (TRAV1-2, TRAJ42)
CVAGGSQGNLIF

SEQ ID NO: 250214 - protein, 14 aa, Homo sapiens
  CDR3 for beta chain variable domain of TCR clone 125107 (TRBV5-4, TRBJ2-5)
CAGSLVRGQETQYF

SEQ ID NO: 250215 - protein, 10 aa, Homo sapiens
  CDR3 for alpha chain variable domain of TCR clone 125108 (TRAV26-1, TRAJ22)
RSGSARQLTF

SEQ ID NO: 250216 - protein, 13 aa, Homo sapiens
  CDR3 for beta chain variable domain of TCR clone 125108 (TRBV7-9, TRBJ1-2)
CASSLKQNYGHTF

SEQ ID NO: 250217 - protein, 15 aa, Homo sapiens
  CDR3 for alpha chain variable domain of TCR clone 125109 (TRAV4, TRAJ42)
CLVGGYGGSQGNLIF

SEQ ID NO: 250218 - protein, 16 aa, Homo sapiens
  CDR3 for beta chain variable domain of TCR clone 125109 (TRBV27, TRBJ1-1)
RASSTRTGGVGTEAFF

SEQ ID NO: 250219 - protein, 17 aa, Homo sapiens
  CDR3 for alpha chain variable domain of TCR clone 125110 (TRAV3, TRAJ6)
CAVRDGPRAGVSYIPTF

SEQ ID NO: 250220 - protein, 16 aa, Homo sapiens
  CDR3 for beta chain variable domain of TCR clone 125110 (TRBV7-8, TRBJ2-3)
CASSTEGQRETDTQYF

SEQ ID NO: 250221 - protein, 15 aa, Homo sapiens
  CDR3 for alpha chain variable domain of TCR clone 125111 (TRAV16, TRAJ16)
CALQGGGSDGQKLLF

SEQ ID NO: 250222 - protein, 14 aa, Homo sapiens
  CDR3 for beta chain variable domain of TCR clone 125111 (TRBV6-1, TRBJ2-7)
CASSEGVNPYEQYF

SEQ ID NO: 250223 - protein, 15 aa, Homo sapiens
  CDR3 for alpha chain variable domain of TCR clone 125112 (TRAV20, TRAJ23)
CAVQAVRNQGGKLIF

SEQ ID NO: 250224 - protein, 18 aa, Homo sapiens
  CDR3 for beta chain variable domain of TCR clone 125112 (TRBV4-1, TRBJ1-6)
CASSQWDKRIIHPSTLGT

SEQ ID NO: 250225 - protein, 14 aa, Homo sapiens
  CDR3 for alpha chain variable domain of TCR clone 125113 (TRAV38-1, TRAJ45)
CASHSGGGADGLTF

SEQ ID NO: 250226 - protein, 13 aa, Homo sapiens
  CDR3 for beta chain variable domain of TCR clone 125113 (TRBV10-3, TRBJ1-2)
CAISERDSYGYIF

SEQ ID NO: 250227 - protein, 13 aa, Homo sapiens
  CDR3 for alpha chain variable domain of TCR clone 125114 (TRAV35, TRAJ37)
CAGSSGNTGKLIF

SEQ ID NO: 250228 - protein, 16 aa, Homo sapiens
  CDR3 for beta chain variable domain of TCR clone 125114 (TRBV10-3, TRBJ2-1)
CATSLTSGNSYNEQFF

SEQ ID NO: 250229 - protein, 17 aa, Homo sapiens
  CDR3 for alpha chain variable domain of TCR clone 125115 (TRAV3, TRAJ6)
CAVRDGPRAGGSYIPPF

SEQ ID NO: 250230 - protein, 13 aa, Homo sapiens
  CDR3 for beta chain variable domain of TCR clone 125115 (TRBV12-5, TRBJ2-3)
CASGDRQSDTQYF

SEQ ID NO: 250231 - protein, 16 aa, Homo sapiens
  CDR3 for alpha chain variable domain of TCR clone 125116 (TRAV14/DV4, TRAJ21)
CAMREGQENNFNKFYF

SEQ ID NO: 250232 - protein, 12 aa, Homo sapiens
  CDR3 for beta chain variable domain of TCR clone 125116 (TRBV29-1, TRBJ2-2)
CSVDKYTGELFF

SEQ ID NO: 250233 - protein, 13 aa, Homo sapiens
  CDR3 for alpha chain variable domain of TCR clone 125117 (TRAV8-3, TRAJ4)
WVFSSGGYNKLIF

SEQ ID NO: 250234 - protein, 16 aa, Homo sapiens
  CDR3 for beta chain variable domain of TCR clone 125117 (TRBV7-8, TRBJ2-3)
CASSTEGQRETDTQYF

SEQ ID NO: 250235 - protein, 11 aa, Homo sapiens
  CDR3 for alpha chain variable domain of TCR clone 125118 (TRAV3, TRAJ21)
CAVGNFNKFYF

SEQ ID NO: 250236 - protein, 15 aa, Homo sapiens
  CDR3 for beta chain variable domain of TCR clone 125118 (TRBV7-2, TRBJ1-5)
CASSSGTGGGQPQHF

SEQ ID NO: 250237 - protein, 13 aa, Homo sapiens
  CDR3 for alpha chain variable domain of TCR clone 125119 (TRAV8-4, TRAJ10)
CAAFTGGGDKLTF

SEQ ID NO: 250238 - protein, 15 aa, Homo sapiens
  CDR3 for beta chain variable domain of TCR clone 125119 (TRBV2, TRBJ2-3)
CASSGFEKATDTQYF

SEQ ID NO: 250239 - protein, 15 aa, Homo sapiens
  CDR3 for alpha chain variable domain of TCR clone 125120 (TRAV3, TRAJ3)
CAVRDRDSSASKIIF

SEQ ID NO: 250240 - protein, 18 aa, Homo sapiens
  CDR3 for beta chain variable domain of TCR clone 125120 (TRBV25-1, TRBJ1-2)
CASSGLQNGQGVIFGYTF

SEQ ID NO: 250241 - protein, 12 aa, Homo sapiens
  CDR3 for alpha chain variable domain of TCR clone 125121 (TRAV21, TRAJ33)
CAKMDSNYQLIW

SEQ ID NO: 250242 - protein, 20 aa, Homo sapiens
  CDR3 for beta chain variable domain of TCR clone 125121 (TRBV19, TRBJ2-1)
CASSISRTVTSTRLNNEQFF

SEQ ID NO: 250243 - protein, 13 aa, Homo sapiens
  CDR3 for alpha chain variable domain of TCR clone 125122 (TRAV8-4, TRAJ47)
CAVTALYGNKLVF

SEQ ID NO: 250244 - protein, 14 aa, Homo sapiens
  CDR3 for beta chain variable domain of TCR clone 125122 (TRBV19, TRBJ2-7)
CASSIGGAVDEQYF

SEQ ID NO: 250245 - protein, 14 aa, Homo sapiens
  CDR3 for alpha chain variable domain of TCR clone 125123 (TRAV12-3, TRAJ6)
CAMSATGGSYIPTF

SEQ ID NO: 250246 - protein, 12 aa, Homo sapiens
  CDR3 for beta chain variable domain of TCR clone 125123 (TRBV7-2, TRBJ1-6)
CASSLSSSPLHF

SEQ ID NO: 250247 - protein, 11 aa, Homo sapiens
  CDR3 for alpha chain variable domain of TCR clone 125124 (TRAV21, TRAJ34)
CAVTNTDKLIF

SEQ ID NO: 250248 - protein, 12 aa, Homo sapiens
  CDR3 for beta chain variable domain of TCR clone 125124 (TRBV7-9, TRBJ1-1)
CASSLVRGEAFL

SEQ ID NO: 250249 - protein, 13 aa, Homo sapiens
  CDR3 for alpha chain variable domain of TCR clone 125125 (TRAV12-2, TRAJ4)
CAGFSGGYNTLIF

SEQ ID NO: 250250 - protein, 14 aa, Homo sapiens
  CDR3 for beta chain variable domain of TCR clone 125125 (TRBV24-1, TRBJ1-1)
CATSIPRGDTEAFF

SEQ ID NO: 250251 - protein, 14 aa, Homo sapiens
  CDR3 for alpha chain variable domain of TCR clone 125126 (TRAV38-1, TRAJ40)
CALRPTSGTYKYIF

SEQ ID NO: 250252 - protein, 13 aa, Homo sapiens
  CDR3 for beta chain variable domain of TCR clone 125126 (TRBV2, TRBJ1-1)
CASRWTVNTEAFF

SEQ ID NO: 250253 - protein, 14 aa, Homo sapiens
  CDR3 for alpha chain variable domain of TCR clone 125127 (TRAV35, TRAJ22)
CAGLRPGSARQLTF

SEQ ID NO: 250254 - protein, 11 aa, Homo sapiens
  CDR3 for beta chain variable domain of TCR clone 125127 (TRBV11-2, TRBJ1-1)
CASSINTEAFF

SEQ ID NO: 250255 - protein, 14 aa, Homo sapiens
  CDR3 for alpha chain variable domain of TCR clone 125128 (TRAV1-2, TRAJ16)
CAVNRFSDGQKPLF

SEQ ID NO: 250256 - protein, 17 aa, Homo sapiens
  CDR3 for beta chain variable domain of TCR clone 125128 (TRBV20-1, TRBJ2-1)
CSASSSGLAGSYNEQFF

SEQ ID NO: 250257 - protein, 17 aa, Homo sapiens
  CDR3 for alpha chain variable domain of TCR clone 125129 (TRAV13-1, TRAJ31)
CAPRDRLMFGDGTQLVV

SEQ ID NO: 250258 - protein, 12 aa, Homo sapiens
  CDR3 for beta chain variable domain of TCR clone 125129 (TRBV7-8, TRBJ2-7)
CASSLGDREQYF

SEQ ID NO: 250259 - protein, 14 aa, Homo sapiens
  CDR3 for alpha chain variable domain of TCR clone 125130 (TRAV12-1, TRAJ12)
CVVTRMDSSYKFIF

SEQ ID NO: 250260 - protein, 13 aa, Homo sapiens
  CDR3 for beta chain variable domain of TCR clone 125130 (TRBV20-1, TRBJ1-1)
CSARGGGNTEAFF

SEQ ID NO: 250261 - protein, 14 aa, Homo sapiens
  CDR3 for alpha chain variable domain of TCR clone 125131 (TRAV12-2, TRAJ17)
CAALFKAAGNKLTS

SEQ ID NO: 250262 - protein, 16 aa, Homo sapiens
  CDR3 for beta chain variable domain of TCR clone 125131 (TRBV20-1, TRBJ2-2)
CSASASGIPGAGELFF

SEQ ID NO: 250263 - protein, 12 aa, Homo sapiens
  CDR3 for alpha chain variable domain of TCR clone 125132 (TRAV25, TRAJ5)
CAGGGGRRELTF

SEQ ID NO: 250264 - protein, 15 aa, Homo sapiens
  CDR3 for beta chain variable domain of TCR clone 125132 (TRBV19, TRBJ2-4)
CASRGPRRGENIQYF

SEQ ID NO: 250265 - protein, 12 aa, Homo sapiens
  CDR3 for alpha chain variable domain of TCR clone 125133 (TRAV13-1, TRAJ27)
CAAHTNAGKSTF

SEQ ID NO: 250266 - protein, 18 aa, Homo sapiens
  CDR3 for beta chain variable domain of TCR clone 125133 (TRBV6-6, TRBJ1-3)
CASSYSKWDSISGNTIYF

SEQ ID NO: 250267 - protein, 11 aa, Homo sapiens
  CDR3 for alpha chain variable domain of TCR clone 125134 (TRAV27, TRAJ40)
SLTSGTYKYIF

SEQ ID NO: 250268 - protein, 16 aa, Homo sapiens
  CDR3 for beta chain variable domain of TCR clone 125134 (TRBV7-9, TRBJ2-1)
CASSDVAGGSYNEQFF

SEQ ID NO: 250269 - protein, 17 aa, Homo sapiens
  CDR3 for alpha chain variable domain of TCR clone 125135 (TRAV3, TRAJ42)
CAVRDRDYGGSQGNLIF

SEQ ID NO: 250270 - protein, 14 aa, Homo sapiens
  CDR3 for beta chain variable domain of TCR clone 125135 (TRBV11-3, TRBJ2-1)
CASSATTSGSIQFF

SEQ ID NO: 250271 - protein, 14 aa, Homo sapiens
  CDR3 for alpha chain variable domain of TCR clone 125136 (TRAV38-1, TRAJ45)
CAYYSGGGADGLTF

SEQ ID NO: 250272 - protein, 20 aa, Homo sapiens
  CDR3 for beta chain variable domain of TCR clone 125136 (TRBV28, TRBJ2-1)
CASTPIGRSPRLAGGNEQFF

SEQ ID NO: 250273 - protein, 15 aa, Homo sapiens
  CDR3 for alpha chain variable domain of TCR clone 125137 (TRAV8-6, TRAJ28)
CAVRPLRAGSYQLTF

SEQ ID NO: 250274 - protein, 12 aa, Homo sapiens
  CDR3 for beta chain variable domain of TCR clone 125137 (TRBV28, TRBJ2-3)
CASSLYRDTQYF

SEQ ID NO: 250275 - protein, 13 aa, Homo sapiens
  CDR3 for alpha chain variable domain of TCR clone 125138 (TRAV12-2, TRAJ39)
CAVNSNAGNMLTF

SEQ ID NO: 250276 - protein, 13 aa, Homo sapiens
  CDR3 for beta chain variable domain of TCR clone 125138 (TRBV2, TRBJ2-7)
CASSGGQANEQYF

SEQ ID NO: 250277 - protein, 15 aa, Homo sapiens
  CDR3 for alpha chain variable domain of TCR clone 125139 (TRAV21, TRAJ53)
CATLNSGGSNYKLTF

SEQ ID NO: 250278 - protein, 14 aa, Homo sapiens
  CDR3 for beta chain variable domain of TCR clone 125139 (TRBV14, TRBJ2-1)
CASSQVQGRGEQFF

SEQ ID NO: 250279 - protein, 19 aa, Homo sapiens
  CDR3 for alpha chain variable domain of TCR clone 125140 (TRAV4, TRAJ5)
CATASWGRTMDTGRRALTF

SEQ ID NO: 250280 - protein, 15 aa, Homo sapiens
  CDR3 for beta chain variable domain of TCR clone 125140 (TRBV27, TRBJ2-5)
CASSLIPSGGETQYF

SEQ ID NO: 250281 - protein, 16 aa, Homo sapiens
  CDR3 for alpha chain variable domain of TCR clone 125141 (TRAV12-3, TRAJ53)
CAMSPGSGGSNYKLTF

SEQ ID NO: 250282 - protein, 14 aa, Homo sapiens
  CDR3 for beta chain variable domain of TCR clone 125141 (TRBV11-2, TRBJ2-5)
CASSRTGGIETQYF

SEQ ID NO: 250283 - protein, 13 aa, Homo sapiens
  CDR3 for alpha chain variable domain of TCR clone 125142 (TRAV21, TRAJ15)
CAVANQAGTALIF

SEQ ID NO: 250284 - protein, 13 aa, Homo sapiens
  CDR3 for beta chain variable domain of TCR clone 125142 (TRBV27, TRBJ1-1)
CASSLSIGAEAFF

SEQ ID NO: 250285 - protein, 13 aa, Homo sapiens
  CDR3 for alpha chain variable domain of TCR clone 125143 (TRAV1-2, TRAJ9)
CAVLNTGGFKTIF

SEQ ID NO: 250286 - protein, 14 aa, Homo sapiens
  CDR3 for beta chain variable domain of TCR clone 125143 (TRBV7-6, TRBJ2-3)
CASSLGTVTDTQYF

SEQ ID NO: 250287 - protein, 14 aa, Homo sapiens
  CDR3 for alpha chain variable domain of TCR clone 125144 (TRAV8-4, TRAJ13)
CAVTLSGGYQKVTF

SEQ ID NO: 250288 - protein, 16 aa, Homo sapiens
  CDR3 for beta chain variable domain of TCR clone 125144 (TRBV19, TRBJ2-2)
GASRSPGTGATGELFF

SEQ ID NO: 250289 - protein, 15 aa, Homo sapiens
  CDR3 for alpha chain variable domain of TCR clone 125145 (TRAV8-4, TRAJ47)
CAVSDPEEYGNKLIF

SEQ ID NO: 250290 - protein, 15 aa, Homo sapiens
  CDR3 for beta chain variable domain of TCR clone 125145 (TRBV11-2, TRBJ2-1)
CASSLGPDSYNEQFF

SEQ ID NO: 250291 - protein, 10 aa, Homo sapiens
  CDR3 for alpha chain variable domain of TCR clone 125146 (TRAV5, TRAJ34)
CAEDTDKLMF

SEQ ID NO: 250292 - protein, 12 aa, Homo sapiens
  CDR3 for beta chain variable domain of TCR clone 125146 (TRBV11-2, TRBJ2-2)
CASSLGGGELFF

SEQ ID NO: 250293 - protein, 16 aa, Homo sapiens
  CDR3 for alpha chain variable domain of TCR clone 125147 (TRAV3, TRAJ23)
CAVKIGIYNHGGKLIF

SEQ ID NO: 250294 - protein, 17 aa, Homo sapiens
  CDR3 for beta chain variable domain of TCR clone 125147 (TRBV10-3, TRBJ2-6)
CAISESTAPSGANVLTF

SEQ ID NO: 250295 - protein, 14 aa, Homo sapiens
  CDR3 for alpha chain variable domain of TCR clone 125148 (TRAV4, TRAJ9)
CLVGSGTGGFKTIF

SEQ ID NO: 250296 - protein, 13 aa, Homo sapiens
  CDR3 for beta chain variable domain of TCR clone 125148 (TRBV20-1, TRBJ1-3)
CSARLGVGNTIYF

SEQ ID NO: 250297 - protein, 12 aa, Homo sapiens
  CDR3 for alpha chain variable domain of TCR clone 125149 (TRAV16, TRAJ26)
CASKDGGQNFVF

SEQ ID NO: 250298 - protein, 13 aa, Homo sapiens
  CDR3 for beta chain variable domain of TCR clone 125149 (TRBV25-1, TRBJ1-1)
CASSDRGRAKAFF

SEQ ID NO: 250299 - protein, 14 aa, Homo sapiens
  CDR3 for alpha chain variable domain of TCR clone 125150 (TRAV12-1, TRAJ3)
CVVNPGSSAAKIIF

SEQ ID NO: 250300 - protein, 14 aa, Homo sapiens
  CDR3 for beta chain variable domain of TCR clone 125150 (TRBV20-1, TRBJ2-3)
CSARGGTSTDTQYF

SEQ ID NO: 250301 - protein, 14 aa, Homo sapiens
  CDR3 for alpha chain variable domain of TCR clone 125151 (TRAV8-1, TRAJ5)
CAVRTDTGRRALTF

SEQ ID NO: 250302 - protein, 16 aa, Homo sapiens
  CDR3 for beta chain variable domain of TCR clone 125151 (TRBV29-1, TRBJ2-7)
CSVEDAEDGTAYEQYF

SEQ ID NO: 250303 - protein, 13 aa, Homo sapiens
  CDR3 for alpha chain variable domain of TCR clone 125152 (TRAV30, TRAJ16)
CGTFGGDGQKLLF

SEQ ID NO: 250304 - protein, 14 aa, Homo sapiens
  CDR3 for beta chain variable domain of TCR clone 125152 (TRBV18, TRBJ2-7)
CASSPRGGAYEQYF

SEQ ID NO: 250305 - protein, 13 aa, Homo sapiens
  CDR3 for alpha chain variable domain of TCR clone 125153 (TRAV39, TRAJ58)
CAGEETSGSRVTF

SEQ ID NO: 250306 - protein, 13 aa, Homo sapiens
  CDR3 for beta chain variable domain of TCR clone 125153 (TRBV15, TRBJ2-7)
CATSTTGHYEQYF

SEQ ID NO: 250307 - protein, 14 aa, Homo sapiens
  CDR3 for alpha chain variable domain of TCR clone 125154 (TRAV21, TRAJ24)
CCSVFNWQLGKLQF

SEQ ID NO: 250308 - protein, 13 aa, Homo sapiens
  CDR3 for beta chain variable domain of TCR clone 125154 (TRBV10-3, TRBJ2-7)
CASKLAVNYEQYF

SEQ ID NO: 250309 - protein, 13 aa, Homo sapiens
  CDR3 for alpha chain variable domain of TCR clone 125155 (TRAV35, TRAJ42)
CAWFPGSQGNLIF

SEQ ID NO: 250310 - protein, 14 aa, Homo sapiens
  CDR3 for beta chain variable domain of TCR clone 125155 (TRBV4-1, TRBJ2-2)
CASSQAVNTGELFF

SEQ ID NO: 250311 - protein, 13 aa, Homo sapiens
  CDR3 for alpha chain variable domain of TCR clone 125156 (TRAV16, TRAJ54)
CSLMVQGAQKLVF

SEQ ID NO: 250312 - protein, 12 aa, Homo sapiens
  CDR3 for beta chain variable domain of TCR clone 125156 (TRBV18, TRBJ2-7)
CASSTAMGEQYF

SEQ ID NO: 250313 - protein, 14 aa, Homo sapiens
  CDR3 for alpha chain variable domain of TCR clone 125157 (TRAV1-2, TRAJ8)
CAVREDTGFQKLVF

SEQ ID NO: 250314 - protein, 13 aa, Homo sapiens
  CDR3 for beta chain variable domain of TCR clone 125157 (TRBV12-4, TRBJ1-2)
CASSVRQGKGYTF

SEQ ID NO: 250315 - protein, 10 aa, Homo sapiens
  CDR3 for alpha chain variable domain of TCR clone 125158 (TRAV30, TRAJ16)
CGTGGQKLLF

SEQ ID NO: 250316 - protein, 14 aa, Homo sapiens
  CDR3 for beta chain variable domain of TCR clone 125158 (TRBV6-1, TRBJ1-2)
CARSTGWPPTGYTF

SEQ ID NO: 250317 - protein, 13 aa, Homo sapiens
  CDR3 for alpha chain variable domain of TCR clone 125159 (TRAV12-2, TRAJ37)
CAGGSGNTGTLIF

SEQ ID NO: 250318 - protein, 14 aa, Homo sapiens
  CDR3 for beta chain variable domain of TCR clone 125159 (TRBV6-1, TRBJ2-6)
CASQQGAGANVLTF

SEQ ID NO: 250319 - protein, 14 aa, Homo sapiens
  CDR3 for alpha chain variable domain of TCR clone 125160 (TRAV1-2, TRAJ15)
CAVRGRQAGTALIF

SEQ ID NO: 250320 - protein, 14 aa, Homo sapiens
  CDR3 for beta chain variable domain of TCR clone 125160 (TRBV7-8, TRBJ2-7)
CASSPRDRVYEQYF

SEQ ID NO: 250321 - protein, 13 aa, Homo sapiens
  CDR3 for alpha chain variable domain of TCR clone 125161 (TRAV12-1, TRAJ11)
CVVNRAGYSTLTF

SEQ ID NO: 250322 - protein, 15 aa, Homo sapiens
  CDR3 for beta chain variable domain of TCR clone 125161 (TRBV11-2, TRBJ2-2)
CASRGLAANTGELFF

SEQ ID NO: 250323 - protein, 14 aa, Homo sapiens
  CDR3 for alpha chain variable domain of TCR clone 125162 (TRAV12-1, TRAJ4)
CVVTPSGGYNKLIF

SEQ ID NO: 250324 - protein, 15 aa, Homo sapiens
  CDR3 for beta chain variable domain of TCR clone 125162 (TRBV11-3, TRBJ1-1)
CASSLGGPGDTEAFF

SEQ ID NO: 250325 - protein, 13 aa, Homo sapiens
  CDR3 for alpha chain variable domain of TCR clone 125163 (TRAV2, TRAJ40)
CAVVTSGTYKYIF

SEQ ID NO: 250326 - protein, 16 aa, Homo sapiens
  CDR3 for beta chain variable domain of TCR clone 125163 (TRBV6-3, TRBJ2-1)
CASSYRTSGIGNEQFF

SEQ ID NO: 250327 - protein, 13 aa, Homo sapiens
  CDR3 for alpha chain variable domain of TCR clone 125164 (TRAV17, TRAJ5)
CATGDTGRRALTF

SEQ ID NO: 250328 - protein, 13 aa, Homo sapiens
  CDR3 for beta chain variable domain of TCR clone 125164 (TRBV19, TRBJ1-5)
CASSIELVQPQHF

SEQ ID NO: 250329 - protein, 15 aa, Homo sapiens
  CDR3 for alpha chain variable domain of TCR clone 125165 (TRAV8-3, TRAJ27)
CAVGPSKTNAGKSTF

SEQ ID NO: 250330 - protein, 15 aa, Homo sapiens
  CDR3 for beta chain variable domain of TCR clone 125165 (TRBV5-1, TRBJ2-1)
CASSPPRAPYNEQFF

SEQ ID NO: 250331 - protein, 14 aa, Homo sapiens
  CDR3 for alpha chain variable domain of TCR clone 125166 (TRAV14/DV4, TRAJ57)
CAMREEGGSEKLVF

SEQ ID NO: 250332 - protein, 14 aa, Homo sapiens
  CDR3 for beta chain variable domain of TCR clone 125166 (TRBV10-3, TRBJ1-2)
CAISETRDRGLSMA

SEQ ID NO: 250333 - protein, 15 aa, Homo sapiens
  CDR3 for alpha chain variable domain of TCR clone 125167 (TRAV2, TRAJ9)
CAVEDRGTGGFKTIF

SEQ ID NO: 250334 - protein, 17 aa, Homo sapiens
  CDR3 for beta chain variable domain of TCR clone 125167 (TRBV7-8, TRBJ2-6)
CASSAGTGGAGANVLTF

SEQ ID NO: 250335 - protein, 16 aa, Homo sapiens
  CDR3 for alpha chain variable domain of TCR clone 125168 (TRAV30, TRAJ24)
CGTEIVDADSWGKFQF

SEQ ID NO: 250336 - protein, 15 aa, Homo sapiens
  CDR3 for beta chain variable domain of TCR clone 125168 (TRBV12-4, TRBJ2-5)
CASSGTGQAQETQYF

SEQ ID NO: 250337 - protein, 17 aa, Homo sapiens
  CDR3 for alpha chain variable domain of TCR clone 125169 (TRAV26-1, TRAJ37)
CIVRVITVSSNTGKLIF

SEQ ID NO: 250338 - protein, 12 aa, Homo sapiens
  CDR3 for beta chain variable domain of TCR clone 125169 (TRBV11-2, TRBJ2-1)
CASSPGNNEQFF

SEQ ID NO: 250339 - protein, 14 aa, Homo sapiens
  CDR3 for alpha chain variable domain of TCR clone 125170 (TRAV12-3, TRAJ13)
CAMKNSGGYQRVTF

SEQ ID NO: 250340 - protein, 13 aa, Homo sapiens
  CDR3 for beta chain variable domain of TCR clone 125170 (TRBV29-1, TRBJ2-5)
CSARDRVEETQYF

SEQ ID NO: 250341 - protein, 14 aa, Homo sapiens
  CDR3 for alpha chain variable domain of TCR clone 125171 (TRAV26-1, TRAJ48)
CIVRVGFGNEKLTF

SEQ ID NO: 250342 - protein, 13 aa, Homo sapiens
  CDR3 for beta chain variable domain of TCR clone 125171 (TRBV7-7, TRBJ2-7)
CASSLFSGYEQYF

SEQ ID NO: 250343 - protein, 15 aa, Homo sapiens
  CDR3 for alpha chain variable domain of TCR clone 125172 (TRAV1-2, TRAJ28)
CAVQYSGAGSYQLTF

SEQ ID NO: 250344 - protein, 13 aa, Homo sapiens
  CDR3 for beta chain variable domain of TCR clone 125172 (TRBV20-1, TRBJ2-7)
CSATHTSGYEPYF

SEQ ID NO: 250345 - protein, 16 aa, Homo sapiens
  CDR3 for alpha chain variable domain of TCR clone 125173 (TRAV21, TRAJ37)
CAVRPAGSSNTGKLIF

SEQ ID NO: 250346 - protein, 13 aa, Homo sapiens
  CDR3 for beta chain variable domain of TCR clone 125173 (TRBV7-9, TRBJ2-5)
CASLPSGRETQYF

SEQ ID NO: 250347 - protein, 13 aa, Homo sapiens
  CDR3 for alpha chain variable domain of TCR clone 125174 (TRAV13-1, TRAJ6)
YAASKGGSYIPTF

SEQ ID NO: 250348 - protein, 13 aa, Homo sapiens
  CDR3 for beta chain variable domain of TCR clone 125174 (TRBV7-9, TRBJ2-5)
CASLPSGRETQYF

SEQ ID NO: 250349 - protein, 14 aa, Homo sapiens
  CDR3 for alpha chain variable domain of TCR clone 125175 (TRAV1-2, TRAJ8)
CAVREDKGFQKLVF

SEQ ID NO: 250350 - protein, 12 aa, Homo sapiens
  CDR3 for beta chain variable domain of TCR clone 125175 (TRBV7-8, TRBJ2-7)
CASSLGDREQYF

SEQ ID NO: 250351 - protein, 14 aa, Homo sapiens
  CDR3 for alpha chain variable domain of TCR clone 125176 (TRAV29/DV5, TRAJ49)
CAASLSNTGNQFYF

SEQ ID NO: 250352 - protein, 13 aa, Homo sapiens
  CDR3 for beta chain variable domain of TCR clone 125176 (TRBV5-7, TRBJ2-5)
CASSADYRETQYF

SEQ ID NO: 250353 - protein, 12 aa, Homo sapiens
  CDR3 for alpha chain variable domain of TCR clone 125177 (TRAV2, TRAJ33)
CAVPDSNYQLIW

SEQ ID NO: 250354 - protein, 14 aa, Homo sapiens
  CDR3 for beta chain variable domain of TCR clone 125177 (TRBV11-2, TRBJ2-3)
CASSSIASTDTQYF

SEQ ID NO: 250355 - protein, 15 aa, Homo sapiens
  CDR3 for alpha chain variable domain of TCR clone 125178 (TRAV13-2, TRAJ10)
CAENRDTGGGNKLTF

SEQ ID NO: 250356 - protein, 18 aa, Homo sapiens
  CDR3 for beta chain variable domain of TCR clone 125178 (TRBV11-2, TRBJ2-3)
CASSLGGASRGAPNTQYF

SEQ ID NO: 250357 - protein, 11 aa, Homo sapiens
  CDR3 for alpha chain variable domain of TCR clone 125179 (TRAV12-3, TRAJ27)
CAMANAGKSTF

SEQ ID NO: 250358 - protein, 11 aa, Homo sapiens
  CDR3 for beta chain variable domain of TCR clone 125179 (TRBV27, TRBJ2-3)
CASSLGDTQYF

SEQ ID NO: 250359 - protein, 13 aa, Homo sapiens
  CDR3 for alpha chain variable domain of TCR clone 125180 (TRAV4, TRAJ42)
CLVGGGSQGNLIF

SEQ ID NO: 250360 - protein, 16 aa, Homo sapiens
  CDR3 for beta chain variable domain of TCR clone 125180 (TRBV5-1, TRBJ2-3)
GASSLQGRVGADTQYF

SEQ ID NO: 250361 - protein, 11 aa, Homo sapiens
  CDR3 for alpha chain variable domain of TCR clone 125181 (TRAV2, TRAJ13)
CASVGYQKVTF

SEQ ID NO: 250362 - protein, 13 aa, Homo sapiens
  CDR3 for beta chain variable domain of TCR clone 125181 (TRBV20-1, TRBJ1-1)
CSARVGGNTEAFF

SEQ ID NO: 250363 - protein, 14 aa, Homo sapiens
  CDR3 for alpha chain variable domain of TCR clone 125182 (TRAV2, TRAJ23)
CAVGLRNQGGKLIF

SEQ ID NO: 250364 - protein, 14 aa, Homo sapiens
  CDR3 for beta chain variable domain of TCR clone 125182 (TRBV2, TRBJ1-1)
CAGTVGPMNTEAFF

SEQ ID NO: 250365 - protein, 14 aa, Homo sapiens
  CDR3 for alpha chain variable domain of TCR clone 125183 (TRAV25, TRAJ18)
CAGRQRLNPGEAIL

SEQ ID NO: 250366 - protein, 15 aa, Homo sapiens
  CDR3 for beta chain variable domain of TCR clone 125183 (TRBV6-3, TRBJ2-7)
CASSSPGTVFYEQYF

SEQ ID NO: 250367 - protein, 13 aa, Homo sapiens
  CDR3 for alpha chain variable domain of TCR clone 125184 (TRAV20, TRAJ15)
CATINQAGTALIF

SEQ ID NO: 250368 - protein, 13 aa, Homo sapiens
  CDR3 for beta chain variable domain of TCR clone 125184 (TRBV12-4, TRBJ2-1)
CASREPSNNEQFF

SEQ ID NO: 250369 - protein, 14 aa, Homo sapiens
  CDR3 for alpha chain variable domain of TCR clone 125185 (TRAV13-2, TRAJ43)
CAEIPTYNNNDMRF

SEQ ID NO: 250370 - protein, 14 aa, Homo sapiens
  CDR3 for beta chain variable domain of TCR clone 125185 (TRBV18, TRBJ2-5)
CASSPGVSQETQYF

SEQ ID NO: 250371 - protein, 17 aa, Homo sapiens
  CDR3 for alpha chain variable domain of TCR clone 125186 (TRAV3, TRAJ42)
CAVRDRDYGGGQGNLIF

SEQ ID NO: 250372 - protein, 14 aa, Homo sapiens
  CDR3 for beta chain variable domain of TCR clone 125186 (TRBV25-1, TRBJ1-1)
CASTHLGGNTEAFF

SEQ ID NO: 250373 - protein, 15 aa, Homo sapiens
  CDR3 for alpha chain variable domain of TCR clone 125187 (TRAV13-1, TRAJ57)
CAASNTQGGSEKLVF

SEQ ID NO: 250374 - protein, 16 aa, Homo sapiens
  CDR3 for beta chain variable domain of TCR clone 125187 (TRBV19, TRBJ2-1)
CTSSKAGPSSYNEQFF

SEQ ID NO: 250375 - protein, 14 aa, Homo sapiens
  CDR3 for alpha chain variable domain of TCR clone 125188 (TRAV13-1, TRAJ20)
CAARPGSNDYKISF

SEQ ID NO: 250376 - protein, 13 aa, Homo sapiens
  CDR3 for beta chain variable domain of TCR clone 125188 (TRBV20-1, TRBJ1-1)
CSAPPGGHTEAFF

SEQ ID NO: 250377 - protein, 15 aa, Homo sapiens
  CDR3 for alpha chain variable domain of TCR clone 125189 (TRAV21, TRAJ52)
CAVRGGGTSYGNLTF

SEQ ID NO: 250378 - protein, 15 aa, Homo sapiens
  CDR3 for beta chain variable domain of TCR clone 125189 (TRBV18, TRBJ1-5)
CASSPSDRSNQPQHF

SEQ ID NO: 250379 - protein, 14 aa, Homo sapiens
  CDR3 for alpha chain variable domain of TCR clone 125190 (TRAV16, TRAJ33)
CALSAMDSNYQLIW

SEQ ID NO: 250380 - protein, 15 aa, Homo sapiens
  CDR3 for beta chain variable domain of TCR clone 125190 (TRBV12-4, TRBJ2-5)
CASSPPTGLQETQYF

SEQ ID NO: 250381 - protein, 13 aa, Homo sapiens
  CDR3 for alpha chain variable domain of TCR clone 125191 (TRAV16, TRAJ10)
CALLTGGGNKPTF

SEQ ID NO: 250382 - protein, 12 aa, Homo sapiens
  CDR3 for beta chain variable domain of TCR clone 125191 (TRBV28, TRBJ2-7)
CASTGNHYEQYF

SEQ ID NO: 250383 - protein, 12 aa, Homo sapiens
  CDR3 for alpha chain variable domain of TCR clone 125192 (TRAV16, TRAJ10)
CSRTGGGNKLTF

SEQ ID NO: 250384 - protein, 14 aa, Homo sapiens
  CDR3 for beta chain variable domain of TCR clone 125192 (TRBV18, TRBJ2-7)
CASSPRGGAYEQYF

SEQ ID NO: 250385 - protein, 12 aa, Homo sapiens
  CDR3 for alpha chain variable domain of TCR clone 125193 (TRAV13-1, TRAJ53)
AASGGSNYKLTF

SEQ ID NO: 250386 - protein, 15 aa, Homo sapiens
  CDR3 for beta chain variable domain of TCR clone 125193 (TRBV6-3, TRBJ2-7)
CASSRTGVNLYEQYF

SEQ ID NO: 250387 - protein, 14 aa, Homo sapiens
  CDR3 for alpha chain variable domain of TCR clone 125194 (TRAV12-3, TRAJ10)
SHLPLTGGGNKLIF

SEQ ID NO: 250388 - protein, 12 aa, Homo sapiens
  CDR3 for beta chain variable domain of TCR clone 125194 (TRBV7-8, TRBJ2-7)
CASSLGDREQYF

SEQ ID NO: 250389 - protein, 16 aa, Homo sapiens
  CDR3 for alpha chain variable domain of TCR clone 125195 (TRAV20, TRAJ38)
CAVQVSNAGNNRKPIW

SEQ ID NO: 250390 - protein, 16 aa, Homo sapiens
  CDR3 for beta chain variable domain of TCR clone 125195 (TRBV7-8, TRBJ2-6)
CASRVGDSSGANVLTF

SEQ ID NO: 250391 - protein, 14 aa, Homo sapiens
  CDR3 for alpha chain variable domain of TCR clone 125196 (TRAV17, TRAJ22)
CATSPSGSARQLTF

SEQ ID NO: 250392 - protein, 15 aa, Homo sapiens
  CDR3 for beta chain variable domain of TCR clone 125196 (TRBV5-1, TRBJ2-2)
CASSLFGQNTGELFF

SEQ ID NO: 250393 - protein, 14 aa, Homo sapiens
  CDR3 for alpha chain variable domain of TCR clone 125197 (TRAV2, TRAJ9)
CAVEERSGGFKTIF

SEQ ID NO: 250394 - protein, 14 aa, Homo sapiens
  CDR3 for beta chain variable domain of TCR clone 125197 (TRBV18, TRBJ1-5)
CASSRQQRNQPQHF

SEQ ID NO: 250395 - protein, 11 aa, Homo sapiens
  CDR3 for alpha chain variable domain of TCR clone 125198 (TRAV2, TRAJ21)
CAVFNFNKFYF

SEQ ID NO: 250396 - protein, 14 aa, Homo sapiens
  CDR3 for beta chain variable domain of TCR clone 125198 (TRBV12-4, TRBJ1-1)
CASSLGTGGTEAFF

SEQ ID NO: 250397 - protein, 13 aa, Homo sapiens
  CDR3 for alpha chain variable domain of TCR clone 125199 (TRAV27, TRAJ6)
CAGGTRGSYIPTF

SEQ ID NO: 250398 - protein, 15 aa, Homo sapiens
  CDR3 for beta chain variable domain of TCR clone 125199 (TRBV5-5, TRBJ2-7)
CASSLAAPLSYEQHF

SEQ ID NO: 250399 - protein, 14 aa, Homo sapiens
  CDR3 for alpha chain variable domain of TCR clone 125200 (TRAV17, TRAJ12)
CAILPMDSRYKLIF

SEQ ID NO: 250400 - protein, 11 aa, Homo sapiens
  CDR3 for beta chain variable domain of TCR clone 125200 (TRBV19, TRBJ1-1)
CASSIGSEAFF

SEQ ID NO: 250401 - protein, 13 aa, Homo sapiens
  CDR3 for alpha chain variable domain of TCR clone 125201 (TRAV29/DV5, TRAJ47)
CAASAEYGNKMVF

SEQ ID NO: 250402 - protein, 15 aa, Homo sapiens
  CDR3 for beta chain variable domain of TCR clone 125201 (TRBV7-9, TRBJ1-4)
CASSARTGGNEKLFF

SEQ ID NO: 250403 - protein, 20 aa, Homo sapiens
  CDR3 for alpha chain variable domain of TCR clone 125202 (TRAV29/DV5, TRAJ48)
CSVLLCSTQNTLFGNEKLTF

SEQ ID NO: 250404 - protein, 14 aa, Homo sapiens
  CDR3 for beta chain variable domain of TCR clone 125202 (TRBV19, TRBJ2-1)
CASPTFVLSGEQFF

SEQ ID NO: 250405 - protein, 13 aa, Homo sapiens
  CDR3 for alpha chain variable domain of TCR clone 125203 (TRAV17, TRAJ9)
CATDYTGGFKTIF

SEQ ID NO: 250406 - protein, 16 aa, Homo sapiens
  CDR3 for beta chain variable domain of TCR clone 125203 (TRBV7-7, TRBJ2-1)
CASSLPSGTSYNEQFF

SEQ ID NO: 250407 - protein, 13 aa, Homo sapiens
  CDR3 for alpha chain variable domain of TCR clone 125204 (TRAV3, TRAJ27)
CAVRPLGAGKSTF

SEQ ID NO: 250408 - protein, 16 aa, Homo sapiens
  CDR3 for beta chain variable domain of TCR clone 125204 (TRBV12-4, TRBJ1-5)
CASSRPVGGSNQPQHF

SEQ ID NO: 250409 - protein, 14 aa, Homo sapiens
  CDR3 for alpha chain variable domain of TCR clone 125205 (TRAV1-2, TRAJ16)
CAVNRFSDGQKPLF

SEQ ID NO: 250410 - protein, 14 aa, Homo sapiens
  CDR3 for beta chain variable domain of TCR clone 125205 (TRBV20-1, TRBJ2-1)
CSAQIGGSANEQFF

SEQ ID NO: 250411 - protein, 11 aa, Homo sapiens
  CDR3 for alpha chain variable domain of TCR clone 125206 (TRAV1-1, TRAJ23)
CAVRQGGKLIF

SEQ ID NO: 250412 - protein, 13 aa, Homo sapiens
  CDR3 for beta chain variable domain of TCR clone 125206 (TRBV12-4, TRBJ1-2)
CASSLRQGKGYTF

SEQ ID NO: 250413 - protein, 13 aa, Homo sapiens
  CDR3 for alpha chain variable domain of TCR clone 125207 (TRAV13-1, TRAJ35)
CAASLGFGNVLHC

SEQ ID NO: 250414 - protein, 15 aa, Homo sapiens
  CDR3 for beta chain variable domain of TCR clone 125207 (TRBV20-1, TRBJ2-7)
CSARDRVSGMDEQYF

SEQ ID NO: 250415 - protein, 14 aa, Homo sapiens
  CDR3 for alpha chain variable domain of TCR clone 125208 (TRAV26-1, TRAJ38)
CIADDAGNNRKLIW

SEQ ID NO: 250416 - protein, 13 aa, Homo sapiens
  CDR3 for beta chain variable domain of TCR clone 125208 (TRBV7-9, TRBJ1-2)
CASSLKQNYGYTF

SEQ ID NO: 250417 - protein, 16 aa, Homo sapiens
  CDR3 for alpha chain variable domain of TCR clone 125209 (TRAV3, TRAJ37)
CAVRGKGSGNTGKLIF

SEQ ID NO: 250418 - protein, 16 aa, Homo sapiens
  CDR3 for beta chain variable domain of TCR clone 125209 (TRBV12-4, TRBJ1-5)
CASSLPVGGSNQPQHF

SEQ ID NO: 250419 - protein, 16 aa, Homo sapiens
  CDR3 for alpha chain variable domain of TCR clone 125210 (TRAV8-1, TRAJ42)
CAVTSRYGGSQGNLIF

SEQ ID NO: 250420 - protein, 12 aa, Homo sapiens
  CDR3 for beta chain variable domain of TCR clone 125210 (TRBV6-3, TRBJ2-7)
CASSLGRRGLHF

SEQ ID NO: 250421 - protein, 15 aa, Homo sapiens
  CDR3 for alpha chain variable domain of TCR clone 125211 (TRAV8-3, TRAJ45)
CASSYSGGGADGLTF

SEQ ID NO: 250422 - protein, 15 aa, Homo sapiens
  CDR3 for beta chain variable domain of TCR clone 125211 (TRBV7-2, TRBJ2-2)
CASRRPGQNTGELFF

SEQ ID NO: 250423 - protein, 12 aa, Homo sapiens
  CDR3 for alpha chain variable domain of TCR clone 125212 (TRAV12-3, TRAJ17)
CAMTLTGNELTF

SEQ ID NO: 250424 - protein, 16 aa, Homo sapiens
  CDR3 for beta chain variable domain of TCR clone 125212 (TRBV13, TRBJ2-2)
CASSPRTGEHTGELFF

SEQ ID NO: 250425 - protein, 10 aa, Homo sapiens
  CDR3 for alpha chain variable domain of TCR clone 125213 (TRAV23/DV6, TRAJ43)
CAAAVAALEQ

SEQ ID NO: 250426 - protein, 16 aa, Homo sapiens
  CDR3 for beta chain variable domain of TCR clone 125213 (TRBV3-1, TRBJ2-7)
CASSQGATGVAYEQYF

SEQ ID NO: 250427 - protein, 14 aa, Homo sapiens
  CDR3 for alpha chain variable domain of TCR clone 125214 (TRAV12-1, TRAJ17)
CVVNYKAAGNKLTF

SEQ ID NO: 250428 - protein, 13 aa, Homo sapiens
  CDR3 for beta chain variable domain of TCR clone 125214 (TRBV7-9, TRBJ2-7)
CASSFAGAYEQYF

SEQ ID NO: 250429 - protein, 13 aa, Homo sapiens
  CDR3 for alpha chain variable domain of TCR clone 125215 (TRAV12-1, TRAJ21)
CVVTLYNFNKFYF

SEQ ID NO: 250430 - protein, 10 aa, Homo sapiens
  CDR3 for beta chain variable domain of TCR clone 125215 (TRBV7-8, TRBJ2-1)
CASSLAHRLA

SEQ ID NO: 250431 - protein, 13 aa, Homo sapiens
  CDR3 for alpha chain variable domain of TCR clone 125216 (TRAV12-3, TRAJ33)
CAMSVNSNYQLIW

SEQ ID NO: 250432 - protein, 14 aa, Homo sapiens
  CDR3 for beta chain variable domain of TCR clone 125216 (TRBV7-2, TRBJ2-3)
CASSRTSGADTQYF

SEQ ID NO: 250433 - protein, 14 aa, Homo sapiens
  CDR3 for alpha chain variable domain of TCR clone 125217 (TRAV17, TRAJ56)
CATVPAGANSKLTV

SEQ ID NO: 250434 - protein, 13 aa, Homo sapiens
  CDR3 for beta chain variable domain of TCR clone 125217 (TRBV12-4, TRBJ2-2)
CASSITGSGELFF

SEQ ID NO: 250435 - protein, 17 aa, Homo sapiens
  CDR3 for alpha chain variable domain of TCR clone 125218 (TRAV16, TRAJ10)
CHVLLCSRTGGGNKLTF

SEQ ID NO: 250436 - protein, 15 aa, Homo sapiens
  CDR3 for beta chain variable domain of TCR clone 125218 (TRBV6-3, TRBJ2-7)
CASSSPGTVFYEQYF

SEQ ID NO: 250437 - protein, 12 aa, Homo sapiens
  CDR3 for alpha chain variable domain of TCR clone 125219 (TRAV8-4, TRAJ43)
CAVSVNSNDMRF

SEQ ID NO: 250438 - protein, 14 aa, Homo sapiens
  CDR3 for beta chain variable domain of TCR clone 125219 (TRBV12-4, TRBJ1-1)
CASSPIRRTGEAFF

SEQ ID NO: 250439 - protein, 18 aa, Homo sapiens
  CDR3 for alpha chain variable domain of TCR clone 125220 (TRAV21, TRAJ52)
CAARPSPAGGTSYGKLTF

SEQ ID NO: 250440 - protein, 15 aa, Homo sapiens
  CDR3 for beta chain variable domain of TCR clone 125220 (TRBV7-9, TRBJ2-7)
CASSSSGLAVYEQYF

SEQ ID NO: 250441 - protein, 14 aa, Homo sapiens
  CDR3 for alpha chain variable domain of TCR clone 125221 (TRAV12-1, TRAJ17)
CVVSYKAAGNKLTL

SEQ ID NO: 250442 - protein, 17 aa, Homo sapiens
  CDR3 for beta chain variable domain of TCR clone 125221 (TRBV20-1, TRBJ2-1)
CSASSSGLAGSYNEQFF

SEQ ID NO: 250443 - protein, 14 aa, Homo sapiens
  CDR3 for alpha chain variable domain of TCR clone 125222 (TRAV8-3, TRAJ4)
CAVGASGGYTKLIF

SEQ ID NO: 250444 - protein, 16 aa, Homo sapiens
  CDR3 for beta chain variable domain of TCR clone 125222 (TRBV4-3, TRBJ2-2)
CASSHLQGSGTGELFF

SEQ ID NO: 250445 - protein, 13 aa, Homo sapiens
  CDR3 for alpha chain variable domain of TCR clone 125223 (TRAV8-6, TRAJ50)
CAVIKTSCDKVIF

SEQ ID NO: 250446 - protein, 15 aa, Homo sapiens
  CDR3 for beta chain variable domain of TCR clone 125223 (TRBV7-2, TRBJ2-2)
CASRRPGQNTGELFF

SEQ ID NO: 250447 - protein, 11 aa, Homo sapiens
  CDR3 for alpha chain variable domain of TCR clone 125224 (TRAV8-2, TRAJ26)
LLFSSGQNFVF

SEQ ID NO: 250448 - protein, 15 aa, Homo sapiens
  CDR3 for beta chain variable domain of TCR clone 125224 (TRBV11-2, TRBJ2-2)
CASSSDRVNAGELFF

SEQ ID NO: 250449 - protein, 12 aa, Homo sapiens
  CDR3 for alpha chain variable domain of TCR clone 125225 (TRAV12-1, TRAJ34)
CVVAGATDKLIF

SEQ ID NO: 250450 - protein, 13 aa, Homo sapiens
  CDR3 for beta chain variable domain of TCR clone 125225 (TRBV19, TRBJ1-2)
CASSQGQVYGYTF

SEQ ID NO: 250451 - protein, 12 aa, Homo sapiens
  CDR3 for alpha chain variable domain of TCR clone 125226 (TRAV8-4, TRAJ43)
CAVSVNNNDMRF

SEQ ID NO: 250452 - protein, 14 aa, Homo sapiens
  CDR3 for beta chain variable domain of TCR clone 125226 (TRBV11-2, TRBJ1-2)
CASSLGTDNYGYTF

SEQ ID NO: 250453 - protein, 14 aa, Homo sapiens
  CDR3 for alpha chain variable domain of TCR clone 125227 (TRAV12-2, TRAJ45)
CALPERGGADGLTF

SEQ ID NO: 250454 - protein, 14 aa, Homo sapiens
  CDR3 for beta chain variable domain of TCR clone 125227 (TRBV18, TRBJ1-5)
CASSQGNSNQPQHF

SEQ ID NO: 250455 - protein, 13 aa, Homo sapiens
  CDR3 for alpha chain variable domain of TCR clone 125228 (TRAV8-6, TRAJ49)
CAVITNTGNQFYF

SEQ ID NO: 250456 - protein, 14 aa, Homo sapiens
  CDR3 for beta chain variable domain of TCR clone 125228 (TRBV5-1, TRBJ2-1)
CASSALWAGNEQFF

SEQ ID NO: 250457 - protein, 17 aa, Homo sapiens
  CDR3 for alpha chain variable domain of TCR clone 125229 (TRAV3, TRAJ42)
CAVRDRDYGGRQGNLIF

SEQ ID NO: 250458 - protein, 14 aa, Homo sapiens
  CDR3 for beta chain variable domain of TCR clone 125229 (TRBV19, TRBJ2-5)
CASSMTGQQETQYF

SEQ ID NO: 250459 - protein, 12 aa, Homo sapiens
  CDR3 for alpha chain variable domain of TCR clone 125230 (TRAV2, TRAJ10)
CASTGGGNKLTF

SEQ ID NO: 250460 - protein, 19 aa, Homo sapiens
  CDR3 for beta chain variable domain of TCR clone 125230 (TRBV7-2, TRBJ2-5)
CASSLSGGGGDPVLRARHA

SEQ ID NO: 250461 - protein, 15 aa, Homo sapiens
  CDR3 for alpha chain variable domain of TCR clone 125231 (TRAV12-2, TRAJ50)
CAVNGLETSYAKVIF

SEQ ID NO: 250462 - protein, 14 aa, Homo sapiens
  CDR3 for beta chain variable domain of TCR clone 125231 (TRBV7-2, TRBJ1-1)
CASSFLTGTTEAFF

SEQ ID NO: 250463 - protein, 14 aa, Homo sapiens
  CDR3 for alpha chain variable domain of TCR clone 125232 (TRAV12-3, TRAJ42)
CAMNYGGSQGNLIF

SEQ ID NO: 250464 - protein, 15 aa, Homo sapiens
  CDR3 for beta chain variable domain of TCR clone 125232 (TRBV5-7, TRBJ1-5)
CASSYGKLWDQPQHV

SEQ ID NO: 250465 - protein, 15 aa, Homo sapiens
  CDR3 for alpha chain variable domain of TCR clone 125233 (TRAV17, TRAJ57)
CATGPSQGGSEKLVF

SEQ ID NO: 250466 - protein, 13 aa, Homo sapiens
  CDR3 for beta chain variable domain of TCR clone 125233 (TRBV10-2, TRBJ2-7)
CASGTSGGYEQYF

SEQ ID NO: 250467 - protein, 13 aa, Homo sapiens
  CDR3 for alpha chain variable domain of TCR clone 125234 (TRAV17, TRAJ9)
CATLLTGGFKTIF

SEQ ID NO: 250468 - protein, 16 aa, Homo sapiens
  CDR3 for beta chain variable domain of TCR clone 125234 (TRBV5-7, TRBJ1-4)
CASSPSGGLKTEKLFF

SEQ ID NO: 250469 - protein, 13 aa, Homo sapiens
  CDR3 for alpha chain variable domain of TCR clone 125235 (TRAV3, TRAJ27)
CAVRPLGAGKSTF

SEQ ID NO: 250470 - protein, 14 aa, Homo sapiens
  CDR3 for beta chain variable domain of TCR clone 125235 (TRBV19, TRBJ2-2)
CASSTGQGAGELFF

SEQ ID NO: 250471 - protein, 14 aa, Homo sapiens
  CDR3 for alpha chain variable domain of TCR clone 125236 (TRAV12-3, TRAJ22)
CAMSLFGSARQLTF

SEQ ID NO: 250472 - protein, 14 aa, Homo sapiens
  CDR3 for beta chain variable domain of TCR clone 125236 (TRBV6-1, TRBJ1-3)
CASVQGGGGNTIYF

SEQ ID NO: 250473 - protein, 13 aa, Homo sapiens
  CDR3 for alpha chain variable domain of TCR clone 125237 (TRAV13-2, TRAJ40)
CAEFTSGTYKYIF

SEQ ID NO: 250474 - protein, 15 aa, Homo sapiens
  CDR3 for beta chain variable domain of TCR clone 125237 (TRBV20-1, TRBJ2-7)
CSARDRVSGMDEQYF

SEQ ID NO: 250475 - protein, 19 aa, Homo sapiens
  CDR3 for alpha chain variable domain of TCR clone 125238 (TRAV26-1, TRAJ52)
CIVRAHRNAGGTSYGKLTS

SEQ ID NO: 250476 - protein, 15 aa, Homo sapiens
  CDR3 for beta chain variable domain of TCR clone 125238 (TRBV29-1, TRBJ2-1)
CSGRDRKSSYNEQFF

SEQ ID NO: 250477 - protein, 14 aa, Homo sapiens
  CDR3 for alpha chain variable domain of TCR clone 125239 (TRAV26-1, TRAJ38)
CIADNAGNNRKLIW

SEQ ID NO: 250478 - protein, 17 aa, Homo sapiens
  CDR3 for beta chain variable domain of TCR clone 125239 (TRBV4-1, TRBJ1-4)
CASSQEGPRGVEEKLFF

SEQ ID NO: 250479 - protein, 13 aa, Homo sapiens
  CDR3 for alpha chain variable domain of TCR clone 125240 (TRAV36/DV7, TRAJ38)
CVANAGNNRKLNW

SEQ ID NO: 250480 - protein, 14 aa, Homo sapiens
  CDR3 for beta chain variable domain of TCR clone 125240 (TRBV7-2, TRBJ2-7)
CASSLRWEVNEQYF

SEQ ID NO: 250481 - protein, 12 aa, Homo sapiens
  CDR3 for alpha chain variable domain of TCR clone 125241 (TRAV17, TRAJ57)
CATDGGSDKLVF

SEQ ID NO: 250482 - protein, 12 aa, Homo sapiens
  CDR3 for beta chain variable domain of TCR clone 125241 (TRBV29-1, TRBJ2-2)
CSVDKYTGELFF

SEQ ID NO: 250483 - protein, 13 aa, Homo sapiens
  CDR3 for alpha chain variable domain of TCR clone 125242 (TRAV30, TRAJ24)
CGTVTDSWGKLQF

SEQ ID NO: 250484 - protein, 15 aa, Homo sapiens
  CDR3 for beta chain variable domain of TCR clone 125242 (TRBV25-1, TRBJ1-4)
CASSPGDRTNEKLFF

SEQ ID NO: 250485 - protein, 14 aa, Homo sapiens
  CDR3 for alpha chain variable domain of TCR clone 125243 (TRAV26-1, TRAJ39)
CFVRGSRAGNMLTF

SEQ ID NO: 250486 - protein, 15 aa, Homo sapiens
  CDR3 for beta chain variable domain of TCR clone 125243 (TRBV7-9, TRBJ1-5)
CASSQGHQPNQPQHF

SEQ ID NO: 250487 - protein, 16 aa, Homo sapiens
  CDR3 for alpha chain variable domain of TCR clone 125244 (TRAV3, TRAJ37)
CAVRGKGSGNTGKLSF

SEQ ID NO: 250488 - protein, 20 aa, Homo sapiens
  CDR3 for beta chain variable domain of TCR clone 125244 (TRBV7-8, TRBJ2-2)
CASSHLFPGPTIHITGELFF

SEQ ID NO: 250489 - protein, 14 aa, Homo sapiens
  CDR3 for alpha chain variable domain of TCR clone 125245 (TRAV1-2, TRAJ16)
CAVNRFSDGQKLRF

SEQ ID NO: 250490 - protein, 12 aa, Homo sapiens
  CDR3 for beta chain variable domain of TCR clone 125245 (TRBV11-2, TRBJ2-1)
CASSPGNNEQFF

SEQ ID NO: 250491 - protein, 15 aa, Homo sapiens
  CDR3 for alpha chain variable domain of TCR clone 125246 (TRAV2, TRAJ9)
CAVEDRGTGGFKTIF

SEQ ID NO: 250492 - protein, 14 aa, Homo sapiens
  CDR3 for beta chain variable domain of TCR clone 125246 (TRBV20-1, TRBJ2-1)
CSAQIGGSANEQFF

SEQ ID NO: 250493 - protein, 15 aa, Homo sapiens
  CDR3 for alpha chain variable domain of TCR clone 125247 (TRAV17, TRAJ23)
CATDAEDNQGGKPIF

SEQ ID NO: 250494 - protein, 14 aa, Homo sapiens
  CDR3 for beta chain variable domain of TCR clone 125247 (TRBV6-1, TRBJ1-3)
CASVQGGGGNTIYF

SEQ ID NO: 250495 - protein, 14 aa, Homo sapiens
  CDR3 for alpha chain variable domain of TCR clone 125248 (TRAV17, TRAJ39)
CATDPVRAGNMLTV

SEQ ID NO: 250496 - protein, 15 aa, Homo sapiens
  CDR3 for beta chain variable domain of TCR clone 125248 (TRBV13, TRBJ1-5)
CASSFGQGGVQPQHF

SEQ ID NO: 250497 - protein, 13 aa, Homo sapiens
  CDR3 for alpha chain variable domain of TCR clone 125249 (TRAV25, TRAJ40)
CAGSASGTYQYIF

SEQ ID NO: 250498 - protein, 14 aa, Homo sapiens
  CDR3 for beta chain variable domain of TCR clone 125249 (TRBV7-2, TRBJ2-7)
CASRSQGAAYEQYF

SEQ ID NO: 250499 - protein, 14 aa, Homo sapiens
  CDR3 for alpha chain variable domain of TCR clone 125250 (TRAV35, TRAJ33)
CAGPSQDSNYQLIW

SEQ ID NO: 250500 - protein, 15 aa, Homo sapiens
  CDR3 for beta chain variable domain of TCR clone 125250 (TRBV28, TRBJ2-5)
CASSPGQGSIETQYF

SEQ ID NO: 250501 - protein, 15 aa, Homo sapiens
  CDR3 for alpha chain variable domain of TCR clone 125251 (TRAV3, TRAJ45)
CAVRTPWGGADGLTF

SEQ ID NO: 250502 - protein, 16 aa, Homo sapiens
  CDR3 for beta chain variable domain of TCR clone 125251 (TRBV6-1, TRBJ2-2)
CARSFGQGANTGELFF

SEQ ID NO: 250503 - protein, 13 aa, Homo sapiens
  CDR3 for alpha chain variable domain of TCR clone 125252 (TRAV1-2, TRAJ31)
CAVRPNNNARRMF

SEQ ID NO: 250504 - protein, 14 aa, Homo sapiens
  CDR3 for beta chain variable domain of TCR clone 125252 (TRBV11-2, TRBJ2-1)
CASSLSGPYNEQFF

SEQ ID NO: 250505 - protein, 15 aa, Homo sapiens
  CDR3 for alpha chain variable domain of TCR clone 125253 (TRAV36/DV7, TRAJ54)
CAVEKPVQGAQKMVF

SEQ ID NO: 250506 - protein, 14 aa, Homo sapiens
  CDR3 for beta chain variable domain of TCR clone 125253 (TRBV4-3, TRBJ2-2)
CASSQGHVTGELFF

SEQ ID NO: 250507 - protein, 21 aa, Homo sapiens
  CDR3 for alpha chain variable domain of TCR clone 125254 (TRAV25, TRAJ47)
TATQTTDVGTHFWEYGNKLVF

SEQ ID NO: 250508 - protein, 16 aa, Homo sapiens
  CDR3 for beta chain variable domain of TCR clone 125254 (TRBV6-6, TRBJ2-1)
CASSWGGQGPYNEQFF

SEQ ID NO: 250509 - protein, 16 aa, Homo sapiens
  CDR3 for alpha chain variable domain of TCR clone 125255 (TRAV21, TRAJ33)
CAVSPASMDSNYQSIW

SEQ ID NO: 250510 - protein, 17 aa, Homo sapiens
  CDR3 for beta chain variable domain of TCR clone 125255 (TRBV2, TRBJ1-4)
CASSKRELTQGEEKLFF

SEQ ID NO: 250511 - protein, 13 aa, Homo sapiens
  CDR3 for alpha chain variable domain of TCR clone 125256 (TRAV36/DV7, TRAJ37)
CAVFSSNTGQLIF

SEQ ID NO: 250512 - protein, 15 aa, Homo sapiens
  CDR3 for beta chain variable domain of TCR clone 125256 (TRBV20-1, TRBJ1-1)
CSARDPRGEYTEAFF

SEQ ID NO: 250513 - protein, 10 aa, Homo sapiens
  CDR3 for alpha chain variable domain of TCR clone 125257 (TRAV8-3, TRAJ43)
CAVALAYMRF

SEQ ID NO: 250514 - protein, 14 aa, Homo sapiens
  CDR3 for beta chain variable domain of TCR clone 125257 (TRBV4-2, TRBJ2-1)
CASGLDRAYNEQFF

SEQ ID NO: 250515 - protein, 16 aa, Homo sapiens
  CDR3 for alpha chain variable domain of TCR clone 125258 (TRAV12-3, TRAJ53)
CAMSPGSGGSNYKLTF

SEQ ID NO: 250516 - protein, 14 aa, Homo sapiens
  CDR3 for beta chain variable domain of TCR clone 125258 (TRBV7-2, TRBJ2-1)
CASSLEGGYNEQFF

SEQ ID NO: 250517 - protein, 13 aa, Homo sapiens
  CDR3 for alpha chain variable domain of TCR clone 125259 (TRAV8-6, TRAJ50)
CAVINTSYDKVIF

SEQ ID NO: 250518 - protein, 15 aa, Homo sapiens
  CDR3 for beta chain variable domain of TCR clone 125259 (TRBV7-2, TRBJ2-2)
CASRRPGQNTGELFF

SEQ ID NO: 250519 - protein, 15 aa, Homo sapiens
  CDR3 for alpha chain variable domain of TCR clone 125260 (TRAV38-1, TRAJ37)
CAYIFGSGNTGKLIF

SEQ ID NO: 250520 - protein, 12 aa, Homo sapiens
  CDR3 for beta chain variable domain of TCR clone 125260 (TRBV7-9, TRBJ2-7)
CASSLEGYEQYF

SEQ ID NO: 250521 - protein, 13 aa, Homo sapiens
  CDR3 for alpha chain variable domain of TCR clone 125261 (TRAV23/DV6, TRAJ16)
CAASISDGQKLLF

SEQ ID NO: 250522 - protein, 15 aa, Homo sapiens
  CDR3 for beta chain variable domain of TCR clone 125261 (TRBV2, TRBJ2-2)
CAGSRETVGTGELFF

SEQ ID NO: 250523 - protein, 15 aa, Homo sapiens
  CDR3 for alpha chain variable domain of TCR clone 125262 (TRAV21, TRAJ40)
CAVRPQTSGTYKYIF

SEQ ID NO: 250524 - protein, 15 aa, Homo sapiens
  CDR3 for beta chain variable domain of TCR clone 125262 (TRBV2, TRBJ2-1)
CASSEEREGDNEQFF

SEQ ID NO: 250525 - protein, 13 aa, Homo sapiens
  CDR3 for alpha chain variable domain of TCR clone 125263 (TRAV27, TRAJ17)
CAGAATAGNKLTF

SEQ ID NO: 250526 - protein, 14 aa, Homo sapiens
  CDR3 for beta chain variable domain of TCR clone 125263 (TRBV12-5, TRBJ2-5)
CASGSRTHQETQYF

SEQ ID NO: 250527 - protein, 12 aa, Homo sapiens
  CDR3 for alpha chain variable domain of TCR clone 125264 (TRAV35, TRAJ39)
LAPNNSGNMLTF

SEQ ID NO: 250528 - protein, 16 aa, Homo sapiens
  CDR3 for beta chain variable domain of TCR clone 125264 (TRBV2, TRBJ2-3)
CASSTSVEGVTDTQYF

SEQ ID NO: 250529 - protein, 15 aa, Homo sapiens
  CDR3 for alpha chain variable domain of TCR clone 125265 (TRAV23/DV6, TRAJ13)
CAAWPWGGGYQKVTF

SEQ ID NO: 250530 - protein, 17 aa, Homo sapiens
  CDR3 for beta chain variable domain of TCR clone 125265 (TRBV19, TRBJ2-7)
CASSISFYDSYPYEQYF

SEQ ID NO: 250531 - protein, 13 aa, Homo sapiens
  CDR3 for alpha chain variable domain of TCR clone 125266 (TRAV30, TRAJ24)
CGTVTDSWGKLQF

SEQ ID NO: 250532 - protein, 15 aa, Homo sapiens
  CDR3 for beta chain variable domain of TCR clone 125266 (TRBV28, TRBJ2-1)
CASSIIAGGRSEQFF

SEQ ID NO: 250533 - protein, 17 aa, Homo sapiens
  CDR3 for alpha chain variable domain of TCR clone 125267 (TRAV13-1, TRAJ28)
CAASTPYSGAGSYQLTF

SEQ ID NO: 250534 - protein, 12 aa, Homo sapiens
  CDR3 for beta chain variable domain of TCR clone 125267 (TRBV11-2, TRBJ2-2)
CASSLPTGELFF

SEQ ID NO: 250535 - protein, 17 aa, Homo sapiens
  CDR3 for alpha chain variable domain of TCR clone 125268 (TRAV13-1, TRAJ31)
CAPRDRLMFGDGTQLVV

SEQ ID NO: 250536 - protein, 14 aa, Homo sapiens
  CDR3 for beta chain variable domain of TCR clone 125268 (TRBV7-2, TRBJ2-7)
CASSPKTSFYEQYF

SEQ ID NO: 250537 - protein, 14 aa, Homo sapiens
  CDR3 for alpha chain variable domain of TCR clone 125269 (TRAV27, TRAJ22)
CAGVSALGKRQLTF

SEQ ID NO: 250538 - protein, 17 aa, Homo sapiens
  CDR3 for beta chain variable domain of TCR clone 125269 (TRBV14, TRBJ2-1)
CASSQDRRVTSYNEQFF

SEQ ID NO: 250539 - protein, 14 aa, Homo sapiens
  CDR3 for alpha chain variable domain of TCR clone 125270 (TRAV12-1, TRAJ12)
CVATRMDSSYKLIF

SEQ ID NO: 250540 - protein, 16 aa, Homo sapiens
  CDR3 for beta chain variable domain of TCR clone 125270 (TRBV7-9, TRBJ1-2)
CASSLGFSSGEDGYTF

SEQ ID NO: 250541 - protein, 13 aa, Homo sapiens
  CDR3 for alpha chain variable domain of TCR clone 125271 (TRAV2, TRAJ15)
CAVDSQAGTALIF

SEQ ID NO: 250542 - protein, 16 aa, Homo sapiens
  CDR3 for beta chain variable domain of TCR clone 125271 (TRBV5-1, TRBJ1-1)
CASSSGGNTLNTEAFF

SEQ ID NO: 250543 - protein, 10 aa, Homo sapiens
  CDR3 for alpha chain variable domain of TCR clone 125272 (TRAV2, TRAJ34)
CAVVNDKLIF

SEQ ID NO: 250544 - protein, 15 aa, Homo sapiens
  CDR3 for beta chain variable domain of TCR clone 125272 (TRBV3-1, TRBJ2-2)
CASSQGWTRAGELFF

SEQ ID NO: 250545 - protein, 11 aa, Homo sapiens
  CDR3 for alpha chain variable domain of TCR clone 125273 (TRAV27, TRAJ45)
CAGAQEVVLTD

SEQ ID NO: 250546 - protein, 17 aa, Homo sapiens
  CDR3 for beta chain variable domain of TCR clone 125273 (TRBV11-2, TRBJ2-1)
CASSLYPPGVEYNEQFF

SEQ ID NO: 250547 - protein, 13 aa, Homo sapiens
  CDR3 for alpha chain variable domain of TCR clone 125274 (TRAV2, TRAJ40)
CAVVTSGTYKYIF

SEQ ID NO: 250548 - protein, 15 aa, Homo sapiens
  CDR3 for beta chain variable domain of TCR clone 125274 (TRBV20-1, TRBJ2-1)
CSARGIGGTYNEQFF

SEQ ID NO: 250549 - protein, 13 aa, Homo sapiens
  CDR3 for alpha chain variable domain of TCR clone 125275 (TRAV21, TRAJ57)
CAVTQGGSEKLVF

SEQ ID NO: 250550 - protein, 16 aa, Homo sapiens
  CDR3 for beta chain variable domain of TCR clone 125275 (TRBV7-2, TRBJ1-4)
CASSLAPGRRDEKLFF

SEQ ID NO: 250551 - protein, 16 aa, Homo sapiens
  CDR3 for alpha chain variable domain of TCR clone 125276 (TRAV26-1, TRAJ37)
CIVRGDGPGNTGKLIF

SEQ ID NO: 250552 - protein, 13 aa, Homo sapiens
  CDR3 for beta chain variable domain of TCR clone 125276 (TRBV4-1, TRBJ2-2)
CASSQENTGELFF

SEQ ID NO: 250553 - protein, 15 aa, Homo sapiens
  CDR3 for alpha chain variable domain of TCR clone 125277 (TRAV3, TRAJ20)
CAVRDIKLSDYKLSF

SEQ ID NO: 250554 - protein, 15 aa, Homo sapiens
  CDR3 for beta chain variable domain of TCR clone 125277 (TRBV7-9, TRBJ1-6)
CASNSPGRGNSPLHF

SEQ ID NO: 250555 - protein, 13 aa, Homo sapiens
  CDR3 for alpha chain variable domain of TCR clone 125278 (TRAV3, TRAJ4)
CAVRDGGYNKMIF

SEQ ID NO: 250556 - protein, 15 aa, Homo sapiens
  CDR3 for beta chain variable domain of TCR clone 125278 (TRBV5-1, TRBJ2-1)
CASSPPRAPYNEQFF

SEQ ID NO: 250557 - protein, 13 aa, Homo sapiens
  CDR3 for alpha chain variable domain of TCR clone 125279 (TRAV13-2, TRAJ40)
CAEFTSGTYKYIF

SEQ ID NO: 250558 - protein, 13 aa, Homo sapiens
  CDR3 for beta chain variable domain of TCR clone 125279 (TRBV4-2, TRBJ1-1)
CASSQAGNTEAFF

SEQ ID NO: 250559 - protein, 15 aa, Homo sapiens
  CDR3 for alpha chain variable domain of TCR clone 125280 (TRAV12-1, TRAJ15)
CVVTRANQAGTALIF

SEQ ID NO: 250560 - protein, 14 aa, Homo sapiens
  CDR3 for beta chain variable domain of TCR clone 125280 (TRBV5-1, TRBJ1-1)
CASSLVAINTEAFF

SEQ ID NO: 250561 - protein, 15 aa, Homo sapiens
  CDR3 for alpha chain variable domain of TCR clone 125281 (TRAV38-2/DV8, TRAJ48)
CAYRSPERGNEKLTF

SEQ ID NO: 250562 - protein, 13 aa, Homo sapiens
  CDR3 for beta chain variable domain of TCR clone 125281 (TRBV4-2, TRBJ1-2)
CASSLSASGGYTF

SEQ ID NO: 250563 - protein, 14 aa, Homo sapiens
  CDR3 for alpha chain variable domain of TCR clone 125282 (TRAV12-2, TRAJ53)
CAVKGGGSNYKLTF

SEQ ID NO: 250564 - protein, 13 aa, Homo sapiens
  CDR3 for beta chain variable domain of TCR clone 125282 (TRBV7-9, TRBJ1-2)
CASSLKQNYGYTF

SEQ ID NO: 250565 - protein, 12 aa, Homo sapiens
  CDR3 for alpha chain variable domain of TCR clone 125283 (TRAV3, TRAJ20)
CAVRDPDYKLSF

SEQ ID NO: 250566 - protein, 16 aa, Homo sapiens
  CDR3 for beta chain variable domain of TCR clone 125283 (TRBV12-4, TRBJ2-7)
CASSPEGQGSSYEQYF

SEQ ID NO: 250567 - protein, 15 aa, Homo sapiens
  CDR3 for alpha chain variable domain of TCR clone 125284 (TRAV17, TRAJ57)
CDTGPSQGGSEKLVF

SEQ ID NO: 250568 - protein, 12 aa, Homo sapiens
  CDR3 for beta chain variable domain of TCR clone 125284 (TRBV7-8, TRBJ2-7)
CASSLGDREQYF

SEQ ID NO: 250569 - protein, 16 aa, Homo sapiens
  CDR3 for alpha chain variable domain of TCR clone 125285 (TRAV3, TRAJ10)
CAVRDMRAGGGNKLTF

SEQ ID NO: 250570 - protein, 15 aa, Homo sapiens
  CDR3 for beta chain variable domain of TCR clone 125285 (TRBV11-2, TRBJ1-6)
CASTGFGTAVSLLHF

SEQ ID NO: 250571 - protein, 13 aa, Homo sapiens
  CDR3 for alpha chain variable domain of TCR clone 125286 (TRAV2, TRAJ40)
CAVVTSGTYKYIF

SEQ ID NO: 250572 - protein, 16 aa, Homo sapiens
  CDR3 for beta chain variable domain of TCR clone 125286 (TRBV7-8, TRBJ2-1)
CASSRLPGILYNEQFF

SEQ ID NO: 250573 - protein, 17 aa, Homo sapiens
  CDR3 for alpha chain variable domain of TCR clone 125287 (TRAV23/DV6, TRAJ57)
CAASSTLSQGGSEKLVF

SEQ ID NO: 250574 - protein, 16 aa, Homo sapiens
  CDR3 for beta chain variable domain of TCR clone 125287 (TRBV19, TRBJ2-1)
CASSSKGTRSYNEQFF

SEQ ID NO: 250575 - protein, 14 aa, Homo sapiens
  CDR3 for alpha chain variable domain of TCR clone 125288 (TRAV38-1, TRAJ40)
CALRPTSGTYKYIF

SEQ ID NO: 250576 - protein, 18 aa, Homo sapiens
  CDR3 for beta chain variable domain of TCR clone 125288 (TRBV4-2, TRBJ2-7)
CASSPGLAGRSLSYEQYF

SEQ ID NO: 250577 - protein, 10 aa, Homo sapiens
  CDR3 for alpha chain variable domain of TCR clone 125289 (TRAV23/DV6, TRAJ43)
CAAAVAALEQ

SEQ ID NO: 250578 - protein, 15 aa, Homo sapiens
  CDR3 for beta chain variable domain of TCR clone 125289 (TRBV10-2, TRBJ2-6)
CASSEQGTGANVLTF

SEQ ID NO: 250579 - protein, 14 aa, Homo sapiens
  CDR3 for alpha chain variable domain of TCR clone 125290 (TRAV1-2, TRAJ16)
CAVNRFSDGQKLLF

SEQ ID NO: 250580 - protein, 13 aa, Homo sapiens
  CDR3 for beta chain variable domain of TCR clone 125290 (TRBV7-3, TRBJ1-1)
CASSQDGGAEAFF

SEQ ID NO: 250581 - protein, 11 aa, Homo sapiens
  CDR3 for alpha chain variable domain of TCR clone 125291 (TRAV12-2, TRAJ43)
CAMSVSNDMRF

SEQ ID NO: 250582 - protein, 13 aa, Homo sapiens
  CDR3 for beta chain variable domain of TCR clone 125291 (TRBV20-1, TRBJ1-1)
CSAPLGGGTEAFF

SEQ ID NO: 250583 - protein, 15 aa, Homo sapiens
  CDR3 for alpha chain variable domain of TCR clone 125292 (TRAV23/DV6, TRAJ30)
CAASSQESRDDKIIF

SEQ ID NO: 250584 - protein, 17 aa, Homo sapiens
  CDR3 for beta chain variable domain of TCR clone 125292 (TRBV4-3, TRBJ2-1)
CASSQFSSGRASGEQFV

SEQ ID NO: 250585 - protein, 13 aa, Homo sapiens
  CDR3 for alpha chain variable domain of TCR clone 125293 (TRAV27, TRAJ28)
CAISGAGSYQLTF

SEQ ID NO: 250586 - protein, 15 aa, Homo sapiens
  CDR3 for beta chain variable domain of TCR clone 125293 (TRBV27, TRBJ2-1)
CASSNGGGSSNEQFF

SEQ ID NO: 250587 - protein, 16 aa, Homo sapiens
  CDR3 for alpha chain variable domain of TCR clone 125294 (TRAV38-1, TRAJ28)
CAFPDDSGAGSYQLTF

SEQ ID NO: 250588 - protein, 19 aa, Homo sapiens
  CDR3 for beta chain variable domain of TCR clone 125294 (TRBV25-1, TRBJ2-2)
CAILVYRVDRGRKTGELFF

SEQ ID NO: 250589 - protein, 12 aa, Homo sapiens
  CDR3 for alpha chain variable domain of TCR clone 125295 (TRAV29/DV5, TRAJ49)
CAATDTGNQFYF

SEQ ID NO: 250590 - protein, 15 aa, Homo sapiens
  CDR3 for beta chain variable domain of TCR clone 125295 (TRBV6-5, TRBJ1-2)
CASSYSQAFNYGYTF

SEQ ID NO: 250591 - protein, 11 aa, Homo sapiens
  CDR3 for alpha chain variable domain of TCR clone 125296 (TRAV12-1, TRAJ34)
CVVNMGRELIF

SEQ ID NO: 250592 - protein, 12 aa, Homo sapiens
  CDR3 for beta chain variable domain of TCR clone 125296 (TRBV2, TRBJ2-1)
CAYGPPGNEQFF

SEQ ID NO: 250593 - protein, 11 aa, Homo sapiens
  CDR3 for alpha chain variable domain of TCR clone 125297 (TRAV1-2, TRAJ40)
CAVPGTYKYIF

SEQ ID NO: 250594 - protein, 16 aa, Homo sapiens
  CDR3 for beta chain variable domain of TCR clone 125297 (TRBV29-1, TRBJ2-7)
CSVEVVRTSGSYEQYF

SEQ ID NO: 250595 - protein, 12 aa, Homo sapiens
  CDR3 for alpha chain variable domain of TCR clone 125298 (TRAV8-2, TRAJ5)
CVVSDIGGALTF

SEQ ID NO: 250596 - protein, 14 aa, Homo sapiens
  CDR3 for beta chain variable domain of TCR clone 125298 (TRBV19, TRBJ2-7)
CASNFRDTFTGMYF

SEQ ID NO: 250597 - protein, 16 aa, Homo sapiens
  CDR3 for alpha chain variable domain of TCR clone 125299 (TRAV20, TRAJ4)
CAVAAPFSGGYNKLIF

SEQ ID NO: 250598 - protein, 15 aa, Homo sapiens
  CDR3 for beta chain variable domain of TCR clone 125299 (TRBV19, TRBJ1-2)
CASSVGQVLNYGYTF

SEQ ID NO: 250599 - protein, 19 aa, Homo sapiens
  CDR3 for alpha chain variable domain of TCR clone 125300 (TRAV26-1, TRAJ22)
CCVLLHRWVFSGSARQLTF

SEQ ID NO: 250600 - protein, 19 aa, Homo sapiens
  CDR3 for beta chain variable domain of TCR clone 125300 (TRBV19, TRBJ2-5)
CASIIGQVTDFFLGETQYF

SEQ ID NO: 250601 - protein, 13 aa, Homo sapiens
  CDR3 for alpha chain variable domain of TCR clone 125301 (TRAV12-1, TRAJ26)
CVVRRDYGQNFVF

SEQ ID NO: 250602 - protein, 15 aa, Homo sapiens
  CDR3 for beta chain variable domain of TCR clone 125301 (TRBV20-1, TRBJ2-7)
CSARDRVSGMDEQYF

SEQ ID NO: 250603 - protein, 14 aa, Homo sapiens
  CDR3 for alpha chain variable domain of TCR clone 125302 (TRAV8-4, TRAJ13)
CAVTLSGGYQKVTF

SEQ ID NO: 250604 - protein, 14 aa, Homo sapiens
  CDR3 for beta chain variable domain of TCR clone 125302 (TRBV7-2, TRBJ1-2)
CASSQMGSTYGYTF

SEQ ID NO: 250605 - protein, 14 aa, Homo sapiens
  CDR3 for alpha chain variable domain of TCR clone 125303 (TRAV12-1, TRAJ4)
CVVPLKSGYNKLIF

SEQ ID NO: 250606 - protein, 13 aa, Homo sapiens
  CDR3 for beta chain variable domain of TCR clone 125303 (TRBV27, TRBJ2-7)
CTSGRGGAYEQYF

SEQ ID NO: 250607 - protein, 13 aa, Homo sapiens
  CDR3 for alpha chain variable domain of TCR clone 125304 (TRAV13-2, TRAJ53)
CAENMGRDYKLTF

SEQ ID NO: 250608 - protein, 13 aa, Homo sapiens
  CDR3 for beta chain variable domain of TCR clone 125304 (TRBV4-1, TRBJ2-2)
CASSQENTGELFF

SEQ ID NO: 250609 - protein, 16 aa, Homo sapiens
  CDR3 for alpha chain variable domain of TCR clone 125305 (TRAV3, TRAJ6)
CAVRDWMGRRKLHTYI

SEQ ID NO: 250610 - protein, 15 aa, Homo sapiens
  CDR3 for beta chain variable domain of TCR clone 125305 (TRBV9, TRBJ2-1)
CASSLAGSSYNEQFF

SEQ ID NO: 250611 - protein, 15 aa, Homo sapiens
  CDR3 for alpha chain variable domain of TCR clone 125306 (TRAV12-2, TRAJ53)
CAVNGGGGSNYKLTF

SEQ ID NO: 250612 - protein, 12 aa, Homo sapiens
  CDR3 for beta chain variable domain of TCR clone 125306 (TRBV7-9, TRBJ2-7)
CASSLEGYEQYF

SEQ ID NO: 250613 - protein, 11 aa, Homo sapiens
  CDR3 for alpha chain variable domain of TCR clone 125307 (TRAV35, TRAJ34)
CWARNTDKLIF

SEQ ID NO: 250614 - protein, 16 aa, Homo sapiens
  CDR3 for beta chain variable domain of TCR clone 125307 (TRBV2, TRBJ2-1)
CASSVGGSLSYNEQFF

SEQ ID NO: 250615 - protein, 12 aa, Homo sapiens
  CDR3 for alpha chain variable domain of TCR clone 125308 (TRAV12-3, TRAJ17)
CAMTLTGNKLTF

SEQ ID NO: 250616 - protein, 16 aa, Homo sapiens
  CDR3 for beta chain variable domain of TCR clone 125308 (TRBV6-1, TRBJ2-1)
CASILRQGSSYNEQFF

SEQ ID NO: 250617 - protein, 12 aa, Homo sapiens
  CDR3 for alpha chain variable domain of TCR clone 125309 (TRAV27, TRAJ9)
CAGESGGFKTIF

SEQ ID NO: 250618 - protein, 14 aa, Homo sapiens
  CDR3 for beta chain variable domain of TCR clone 125309 (TRBV4-1, TRBJ2-3)
CASSQDGRTDTQYF

SEQ ID NO: 250619 - protein, 18 aa, Homo sapiens
  CDR3 for alpha chain variable domain of TCR clone 125310 (TRAV21, TRAJ52)
CAVRPSPAGGTSYGKLTF

SEQ ID NO: 250620 - protein, 15 aa, Homo sapiens
  CDR3 for beta chain variable domain of TCR clone 125310 (TRBV19, TRBJ2-7)
CASRPTPGLSIEQYF

SEQ ID NO: 250621 - protein, 11 aa, Homo sapiens
  CDR3 for alpha chain variable domain of TCR clone 125311 (TRAV1-2, TRAJ40)
CAVPGTYKYIF

SEQ ID NO: 250622 - protein, 15 aa, Homo sapiens
  CDR3 for beta chain variable domain of TCR clone 125311 (TRBV5-7, TRBJ1-5)
CASSYGKLWDQPQHL

SEQ ID NO: 250623 - protein, 23 aa, Homo sapiens
  CDR3 for alpha chain variable domain of TCR clone 125312 (TRAV26-1, TRAJ38)
CIADNAGNNHIQYPDPAVYQLRD

SEQ ID NO: 250624 - protein, 13 aa, Homo sapiens
  CDR3 for beta chain variable domain of TCR clone 125312 (TRBV20-1, TRBJ1-1)
CSARGGGNTEAFF

SEQ ID NO: 250625 - protein, 16 aa, Homo sapiens
  CDR3 for alpha chain variable domain of TCR clone 125313 (TRAV23/DV6, TRAJ9)
CAASIGGNTAGFKTIF

SEQ ID NO: 250626 - protein, 14 aa, Homo sapiens
  CDR3 for beta chain variable domain of TCR clone 125313 (TRBV9, TRBJ2-7)
CASSVGVGSYEQYF

SEQ ID NO: 250627 - protein, 13 aa, Homo sapiens
  CDR3 for alpha chain variable domain of TCR clone 125314 (TRAV39, TRAJ48)
CAAGNFGNEKLTF

SEQ ID NO: 250628 - protein, 12 aa, Homo sapiens
  CDR3 for beta chain variable domain of TCR clone 125314 (TRBV5-5, TRBJ2-5)
CASSYFGETQYF

SEQ ID NO: 250629 - protein, 16 aa, Homo sapiens
  CDR3 for alpha chain variable domain of TCR clone 125315 (TRAV30, TRAJ24)
CGTEIVDAESWGKFQF

SEQ ID NO: 250630 - protein, 19 aa, Homo sapiens
  CDR3 for beta chain variable domain of TCR clone 125315 (TRBV25-1, TRBJ2-2)
CAILVYRVDRGRKTGELFF

SEQ ID NO: 250631 - protein, 12 aa, Homo sapiens
  CDR3 for alpha chain variable domain of TCR clone 125316 (TRAV13-2, TRAJ8)
CAPWLGFQKLVF

SEQ ID NO: 250632 - protein, 15 aa, Homo sapiens
  CDR3 for beta chain variable domain of TCR clone 125316 (TRBV7-2, TRBJ2-1)
CASTHGTGIYNEQFF

SEQ ID NO: 250633 - protein, 13 aa, Homo sapiens
  CDR3 for alpha chain variable domain of TCR clone 125317 (TRAV3, TRAJ21)
CAVREPDFNKFYF

SEQ ID NO: 250634 - protein, 19 aa, Homo sapiens
  CDR3 for beta chain variable domain of TCR clone 125317 (TRBV7-2, TRBJ2-3)
CAGSFLSRNWGGGTDTQYF

SEQ ID NO: 250635 - protein, 10 aa, Homo sapiens
  CDR3 for alpha chain variable domain of TCR clone 125318 (TRAV26-1, TRAJ22)
RAGSARQLTF

SEQ ID NO: 250636 - protein, 13 aa, Homo sapiens
  CDR3 for beta chain variable domain of TCR clone 125318 (TRBV7-9, TRBJ1-2)
CASSLKQNYGYTF

SEQ ID NO: 250637 - protein, 17 aa, Homo sapiens
  CDR3 for alpha chain variable domain of TCR clone 125319 (TRAV38-2/DV8, TRAJ28)
CAFLTLYSGAGSYRLTF

SEQ ID NO: 250638 - protein, 14 aa, Homo sapiens
  CDR3 for beta chain variable domain of TCR clone 125319 (TRBV7-2, TRBJ2-5)
CASSLSGGGETQYF

SEQ ID NO: 250639 - protein, 17 aa, Homo sapiens
  CDR3 for alpha chain variable domain of TCR clone 125320 (TRAV9-2, TRAJ45)
CALSGYYSGGGADGLTF

SEQ ID NO: 250640 - protein, 14 aa, Homo sapiens
  CDR3 for beta chain variable domain of TCR clone 125320 (TRBV2, TRBJ2-7)
CASSLTSGGYEQYF

SEQ ID NO: 250641 - protein, 15 aa, Homo sapiens
  CDR3 for alpha chain variable domain of TCR clone 125321 (TRAV27, TRAJ38)
CAARRNAGNNRKLIW

SEQ ID NO: 250642 - protein, 13 aa, Homo sapiens
  CDR3 for beta chain variable domain of TCR clone 125321 (TRBV12-5, TRBJ2-3)
CASGDRQSATQYF

SEQ ID NO: 250643 - protein, 16 aa, Homo sapiens
  CDR3 for alpha chain variable domain of TCR clone 125322 (TRAV36/DV7, TRAJ30)
CAVETYGLDRDDKIIF

SEQ ID NO: 250644 - protein, 12 aa, Homo sapiens
  CDR3 for beta chain variable domain of TCR clone 125322 (TRBV11-2, TRBJ2-1)
CASSPGNNEQFF

SEQ ID NO: 250645 - protein, 15 aa, Homo sapiens
  CDR3 for alpha chain variable domain of TCR clone 125323 (TRAV38-1, TRAJ57)
CAFMDSQGGSEKLVF

SEQ ID NO: 250646 - protein, 16 aa, Homo sapiens
  CDR3 for beta chain variable domain of TCR clone 125323 (TRBV10-3, TRBJ2-1)
CAIRGGSRGDYNEQFF

SEQ ID NO: 250647 - protein, 15 aa, Homo sapiens
  CDR3 for alpha chain variable domain of TCR clone 125324 (TRAV21, TRAJ45)
CAASYSGGGADGLTF

SEQ ID NO: 250648 - protein, 13 aa, Homo sapiens
  CDR3 for beta chain variable domain of TCR clone 125324 (TRBV20-1, TRBJ2-5)
CSAATELQETQYF

SEQ ID NO: 250649 - protein, 14 aa, Homo sapiens
  CDR3 for alpha chain variable domain of TCR clone 125325 (TRAV23/DV6, TRAJ11)
CAALIGGGYSNPTF

SEQ ID NO: 250650 - protein, 13 aa, Homo sapiens
  CDR3 for beta chain variable domain of TCR clone 125325 (TRBV11-3, TRBJ1-1)
CASSLGGNTEAFF

SEQ ID NO: 250651 - protein, 10 aa, Homo sapiens
  CDR3 for alpha chain variable domain of TCR clone 125326 (TRAV36/DV7, TRAJ48)
CAVGNEKLTF

SEQ ID NO: 250652 - protein, 14 aa, Homo sapiens
  CDR3 for beta chain variable domain of TCR clone 125326 (TRBV13, TRBJ2-5)
CASSLGPRGETQYF

SEQ ID NO: 250653 - protein, 11 aa, Homo sapiens
  CDR3 for alpha chain variable domain of TCR clone 125327 (TRAV2, TRAJ33)
CAVDSNYQLIW

SEQ ID NO: 250654 - protein, 14 aa, Homo sapiens
  CDR3 for beta chain variable domain of TCR clone 125327 (TRBV11-2, TRBJ2-3)
CASSRLASTDTQYF

SEQ ID NO: 250655 - protein, 13 aa, Homo sapiens
  CDR3 for alpha chain variable domain of TCR clone 125328 (TRAV27, TRAJ41)
CAGEGNSGYALNF

SEQ ID NO: 250656 - protein, 16 aa, Homo sapiens
  CDR3 for beta chain variable domain of TCR clone 125328 (TRBV7-9, TRBJ2-3)
CASSPWREVGTDTQYF

SEQ ID NO: 250657 - protein, 13 aa, Homo sapiens
  CDR3 for alpha chain variable domain of TCR clone 125329 (TRAV12-3, TRAJ31)
CAMSANNNASLMF

SEQ ID NO: 250658 - protein, 16 aa, Homo sapiens
  CDR3 for beta chain variable domain of TCR clone 125329 (TRBV7-9, TRBJ1-2)
CASSLGFSSGEDGYTF

SEQ ID NO: 250659 - protein, 16 aa, Homo sapiens
  CDR3 for alpha chain variable domain of TCR clone 125330 (TRAV8-3, TRAJ10)
CAVGPILTGGGNKLTF

SEQ ID NO: 250660 - protein, 16 aa, Homo sapiens
  CDR3 for beta chain variable domain of TCR clone 125330 (TRBV7-2, TRBJ2-5)
CASSSKWSSGQETQYF

SEQ ID NO: 250661 - protein, 11 aa, Homo sapiens
  CDR3 for alpha chain variable domain of TCR clone 125331 (TRAV21, TRAJ48)
CAVDGNEKLTF

SEQ ID NO: 250662 - protein, 16 aa, Homo sapiens
  CDR3 for beta chain variable domain of TCR clone 125331 (TRBV12-4, TRBJ1-5)
CASSSGPRGSNQAQHF

SEQ ID NO: 250663 - protein, 12 aa, Homo sapiens
  CDR3 for alpha chain variable domain of TCR clone 125332 (TRAV17, TRAJ20)
CATLANDYKLSF

SEQ ID NO: 250664 - protein, 13 aa, Homo sapiens
  CDR3 for beta chain variable domain of TCR clone 125332 (TRBV7-2, TRBJ2-2)
CASSLAVTGELFF

SEQ ID NO: 250665 - protein, 11 aa, Homo sapiens
  CDR3 for alpha chain variable domain of TCR clone 125333 (TRAV35, TRAJ30)
CAPGGDDKIVF

SEQ ID NO: 250666 - protein, 14 aa, Homo sapiens
  CDR3 for beta chain variable domain of TCR clone 125333 (TRBV7-6, TRBJ2-1)
CASSLGGGADEQFF

SEQ ID NO: 250667 - protein, 16 aa, Homo sapiens
  CDR3 for alpha chain variable domain of TCR clone 125334 (TRAV3, TRAJ10)
CAVRDMRAGGGNKLTF

SEQ ID NO: 250668 - protein, 14 aa, Homo sapiens
  CDR3 for beta chain variable domain of TCR clone 125334 (TRBV23-1, TRBJ2-5)
CASSFLRSQETQYF

SEQ ID NO: 250669 - protein, 13 aa, Homo sapiens
  CDR3 for alpha chain variable domain of TCR clone 125335 (TRAV20, TRAJ34)
CAVSSYNTDKLIF

SEQ ID NO: 250670 - protein, 15 aa, Homo sapiens
  CDR3 for beta chain variable domain of TCR clone 125335 (TRBV20-1, TRBJ1-2)
CSAAGEGARIYGYTL

SEQ ID NO: 250671 - protein, 14 aa, Homo sapiens
  CDR3 for alpha chain variable domain of TCR clone 125336 (TRAV13-2, TRAJ32)
CAENYGGATNKLIF

SEQ ID NO: 250672 - protein, 17 aa, Homo sapiens
  CDR3 for beta chain variable domain of TCR clone 125336 (TRBV7-8, TRBJ2-6)
CASSAGTGGAGANGLTF

SEQ ID NO: 250673 - protein, 15 aa, Homo sapiens
  CDR3 for alpha chain variable domain of TCR clone 125337 (TRAV10, TRAJ3)
CVVSVRYSSASKIIF

SEQ ID NO: 250674 - protein, 15 aa, Homo sapiens
  CDR3 for beta chain variable domain of TCR clone 125337 (TRBV10-2, TRBJ2-6)
CASSEQGTGANVLTF

SEQ ID NO: 250675 - protein, 14 aa, Homo sapiens
  CDR3 for alpha chain variable domain of TCR clone 125338 (TRAV35, TRAJ22)
CAGLRPGSARQLTF

SEQ ID NO: 250676 - protein, 15 aa, Homo sapiens
  CDR3 for beta chain variable domain of TCR clone 125338 (TRBV12-4, TRBJ2-5)
CATSPPTGLQETQYF

SEQ ID NO: 250677 - protein, 14 aa, Homo sapiens
  CDR3 for alpha chain variable domain of TCR clone 125339 (TRAV12-3, TRAJ10)
SHLPLTGGGNKLTF

SEQ ID NO: 250678 - protein, 12 aa, Homo sapiens
  CDR3 for beta chain variable domain of TCR clone 125339 (TRBV19, TRBJ2-5)
CASSISEETQYF

SEQ ID NO: 250679 - protein, 12 aa, Homo sapiens
  CDR3 for alpha chain variable domain of TCR clone 125340 (TRAV12-3, TRAJ17)
CAMTLTGTKLPF

SEQ ID NO: 250680 - protein, 15 aa, Homo sapiens
  CDR3 for beta chain variable domain of TCR clone 125340 (TRBV20-1, TRBJ2-7)
CSARDRVSGMDEQYF

SEQ ID NO: 250681 - protein, 14 aa, Homo sapiens
  CDR3 for alpha chain variable domain of TCR clone 125341 (TRAV8-6, TRAJ49)
CAVSDPGTGNQFYL

SEQ ID NO: 250682 - protein, 16 aa, Homo sapiens
  CDR3 for beta chain variable domain of TCR clone 125341 (TRBV24-1, TRBJ2-1)
CATSGVAGANYNEQFF

SEQ ID NO: 250683 - protein, 19 aa, Homo sapiens
  CDR3 for alpha chain variable domain of TCR clone 125342 (TRAV26-1, TRAJ52)
CIVRAHRNAGGTSYGRLTF

SEQ ID NO: 250684 - protein, 15 aa, Homo sapiens
  CDR3 for beta chain variable domain of TCR clone 125342 (TRBV12-4, TRBJ2-5)
CASSPPTGLQETQYF

SEQ ID NO: 250685 - protein, 11 aa, Homo sapiens
  CDR3 for alpha chain variable domain of TCR clone 125343 (TRAV23/DV6, TRAJ21)
CAANNFNKLYF

SEQ ID NO: 250686 - protein, 12 aa, Homo sapiens
  CDR3 for beta chain variable domain of TCR clone 125343 (TRBV11-2, TRBJ2-1)
CASSPGNNEQFF

SEQ ID NO: 250687 - protein, 14 aa, Homo sapiens
  CDR3 for alpha chain variable domain of TCR clone 125344 (TRAV12-3, TRAJ10)
SHLPLTGGGNKLTF

SEQ ID NO: 250688 - protein, 14 aa, Homo sapiens
  CDR3 for beta chain variable domain of TCR clone 125344 (TRBV7-2, TRBJ2-7)
CASSPKTSLYEQYF

SEQ ID NO: 250689 - protein, 15 aa, Homo sapiens
  CDR3 for alpha chain variable domain of TCR clone 125345 (TRAV3, TRAJ22)
CAVRDLGGSARQLTF

SEQ ID NO: 250690 - protein, 14 aa, Homo sapiens
  CDR3 for beta chain variable domain of TCR clone 125345 (TRBV19, TRBJ2-1)
CASSRLASINEQFF

SEQ ID NO: 250691 - protein, 14 aa, Homo sapiens
  CDR3 for alpha chain variable domain of TCR clone 125346 (TRAV1-2, TRAJ17)
CALRRGAAGNKLTF

SEQ ID NO: 250692 - protein, 14 aa, Homo sapiens
  CDR3 for beta chain variable domain of TCR clone 125346 (TRBV12-5, TRBJ2-5)
CASGSRTHQETQYF

SEQ ID NO: 250693 - protein, 14 aa, Homo sapiens
  CDR3 for alpha chain variable domain of TCR clone 125347 (TRAV26-1, TRAJ48)
CIVRAGFGNEKLTF

SEQ ID NO: 250694 - protein, 13 aa, Homo sapiens
  CDR3 for beta chain variable domain of TCR clone 125347 (TRBV11-3, TRBJ2-3)
CASSHDTKDTQYF

SEQ ID NO: 250695 - protein, 12 aa, Homo sapiens
  CDR3 for alpha chain variable domain of TCR clone 125348 (TRAV10, TRAJ43)
CVVVRVGNDMRF

SEQ ID NO: 250696 - protein, 14 aa, Homo sapiens
  CDR3 for beta chain variable domain of TCR clone 125348 (TRBV7-9, TRBJ2-7)
CASSLQQGGYEQYF

SEQ ID NO: 250697 - protein, 13 aa, Homo sapiens
  CDR3 for alpha chain variable domain of TCR clone 125349 (TRAV21, TRAJ57)
CAVTQGGSEKLVF

SEQ ID NO: 250698 - protein, 17 aa, Homo sapiens
  CDR3 for beta chain variable domain of TCR clone 125349 (TRBV13, TRBJ2-3)
CASSRSRVAGGRNTQYF

SEQ ID NO: 250699 - protein, 11 aa, Homo sapiens
  CDR3 for alpha chain variable domain of TCR clone 125350 (TRAV3, TRAJ17)
CAEAAGNKLTF

SEQ ID NO: 250700 - protein, 13 aa, Homo sapiens
  CDR3 for beta chain variable domain of TCR clone 125350 (TRBV7-9, TRBJ1-2)
CASSLKQNYGYTF

SEQ ID NO: 250701 - protein, 12 aa, Homo sapiens
  CDR3 for alpha chain variable domain of TCR clone 125351 (TRAV35, TRAJ39)
LAPNNAGTMLTF

SEQ ID NO: 250702 - protein, 16 aa, Homo sapiens
  CDR3 for beta chain variable domain of TCR clone 125351 (TRBV2, TRBJ2-3)
CASSTSVEGVTDTQYF

SEQ ID NO: 250703 - protein, 14 aa, Homo sapiens
  CDR3 for alpha chain variable domain of TCR clone 125352 (TRAV12-2, TRAJ3)
CAVKGYSSASKIIF

SEQ ID NO: 250704 - protein, 18 aa, Homo sapiens
  CDR3 for beta chain variable domain of TCR clone 125352 (TRBV3-1, TRBJ2-5)
CASSQAGTSGGGRETQYF

SEQ ID NO: 250705 - protein, 11 aa, Homo sapiens
  CDR3 for alpha chain variable domain of TCR clone 125353 (TRAV2, TRAJ21)
CAVFNFNKFYF

SEQ ID NO: 250706 - protein, 14 aa, Homo sapiens
  CDR3 for beta chain variable domain of TCR clone 125353 (TRBV15, TRBJ2-3)
CATRSGTSTNTQYF

SEQ ID NO: 250707 - protein, 16 aa, Homo sapiens
  CDR3 for alpha chain variable domain of TCR clone 125354 (TRAV8-2, TRAJ7)
CVVSEGPYYGNNRLAF

SEQ ID NO: 250708 - protein, 15 aa, Homo sapiens
  CDR3 for beta chain variable domain of TCR clone 125354 (TRBV27, TRBJ2-3)
CASSLGRAATDTQYF

SEQ ID NO: 250709 - protein, 13 aa, Homo sapiens
  CDR3 for alpha chain variable domain of TCR clone 125355 (TRAV27, TRAJ3)
ASLRGSSASKIIF

SEQ ID NO: 250710 - protein, 15 aa, Homo sapiens
  CDR3 for beta chain variable domain of TCR clone 125355 (TRBV28, TRBJ1-3)
CASSMSWASGNTIYF

SEQ ID NO: 250711 - protein, 11 aa, Homo sapiens
  CDR3 for alpha chain variable domain of TCR clone 125356 (TRAV3, TRAJ32)
CAVRDGIMVVL

SEQ ID NO: 250712 - protein, 13 aa, Homo sapiens
  CDR3 for beta chain variable domain of TCR clone 125356 (TRBV2, TRBJ1-1)
CASSEGGNTEAFF

SEQ ID NO: 250713 - protein, 15 aa, Homo sapiens
  CDR3 for alpha chain variable domain of TCR clone 125357 (TRAV4, TRAJ39)
CLVGPNNNAGNMLTF

SEQ ID NO: 250714 - protein, 15 aa, Homo sapiens
  CDR3 for beta chain variable domain of TCR clone 125357 (TRBV5-1, TRBJ2-1)
CASSPLRAPYNEQFF

SEQ ID NO: 250715 - protein, 12 aa, Homo sapiens
  CDR3 for alpha chain variable domain of TCR clone 125358 (TRAV1-1, TRAJ39)
FAVPVVGNMLTF

SEQ ID NO: 250716 - protein, 13 aa, Homo sapiens
  CDR3 for beta chain variable domain of TCR clone 125358 (TRBV7-9, TRBJ2-1)
CASSSSNFNEQFF

SEQ ID NO: 250717 - protein, 12 aa, Homo sapiens
  CDR3 for alpha chain variable domain of TCR clone 125359 (TRAV1-1, TRAJ8)
CAGGTGFQKLVF

SEQ ID NO: 250718 - protein, 14 aa, Homo sapiens
  CDR3 for beta chain variable domain of TCR clone 125359 (TRBV7-9, TRBJ1-4)
CASSLEGQSEKLFF

SEQ ID NO: 250719 - protein, 16 aa, Homo sapiens
  CDR3 for alpha chain variable domain of TCR clone 125360 (TRAV12-2, TRAJ32)
CAVNLCQGGATNKLIF

SEQ ID NO: 250720 - protein, 15 aa, Homo sapiens
  CDR3 for beta chain variable domain of TCR clone 125360 (TRBV20-1, TRBJ2-7)
CSARGPLAGGREQYF

SEQ ID NO: 250721 - protein, 11 aa, Homo sapiens
  CDR3 for alpha chain variable domain of TCR clone 125361 (TRAV12-1, TRAJ34)
CVVNKGRGLIF

SEQ ID NO: 250722 - protein, 12 aa, Homo sapiens
  CDR3 for beta chain variable domain of TCR clone 125361 (TRBV2, TRBJ2-1)
CAYGPPGNEQFF

SEQ ID NO: 250723 - protein, 19 aa, Homo sapiens
  CDR3 for alpha chain variable domain of TCR clone 125362 (TRAV35, TRAJ42)
SDVGIYSPSYGGSQGNLIF

SEQ ID NO: 250724 - protein, 16 aa, Homo sapiens
  CDR3 for beta chain variable domain of TCR clone 125362 (TRBV20-1, TRBJ2-7)
CSAKGLANGGSYEQYF

SEQ ID NO: 250725 - protein, 11 aa, Homo sapiens
  CDR3 for alpha chain variable domain of TCR clone 125363 (TRAV13-2, TRAJ23)
CAESPRGKLIF

SEQ ID NO: 250726 - protein, 13 aa, Homo sapiens
  CDR3 for beta chain variable domain of TCR clone 125363 (TRBV7-3, TRBJ1-1)
CASSQDWGAEAFF

SEQ ID NO: 250727 - protein, 13 aa, Homo sapiens
  CDR3 for alpha chain variable domain of TCR clone 125364 (TRAV3, TRAJ27)
CAVRPLGAGKSTF

SEQ ID NO: 250728 - protein, 12 aa, Homo sapiens
  CDR3 for beta chain variable domain of TCR clone 125364 (TRBV28, TRBJ2-3)
CASSLYRDTQYF

SEQ ID NO: 250729 - protein, 18 aa, Homo sapiens
  CDR3 for alpha chain variable domain of TCR clone 125365 (TRAV13-1, TRAJ52)
CAASKRSAGGPSYGKLTF

SEQ ID NO: 250730 - protein, 13 aa, Homo sapiens
  CDR3 for beta chain variable domain of TCR clone 125365 (TRBV12-4, TRBJ1-2)
CASSLRQGKGYTF

SEQ ID NO: 250731 - protein, 14 aa, Homo sapiens
  CDR3 for alpha chain variable domain of TCR clone 125366 (TRAV8-4, TRAJ8)
CAVSLNTGFQKPVF

SEQ ID NO: 250732 - protein, 13 aa, Homo sapiens
  CDR3 for beta chain variable domain of TCR clone 125366 (TRBV7-9, TRBJ2-3)
CASSPGSTDTQYF

SEQ ID NO: 250733 - protein, 14 aa, Homo sapiens
  CDR3 for alpha chain variable domain of TCR clone 125367 (TRAV12-2, TRAJ17)
CAVNIKAAGNKLTF

SEQ ID NO: 250734 - protein, 16 aa, Homo sapiens
  CDR3 for beta chain variable domain of TCR clone 125367 (TRBV20-1, TRBJ2-6)
CSASSQVYDGANVLTF

SEQ ID NO: 250735 - protein, 13 aa, Homo sapiens
  CDR3 for alpha chain variable domain of TCR clone 125368 (TRAV21, TRAJ27)
CAARPGNAGKSTF

SEQ ID NO: 250736 - protein, 15 aa, Homo sapiens
  CDR3 for beta chain variable domain of TCR clone 125368 (TRBV18, TRBJ2-7)
CASSPSSTGNYEQYF

SEQ ID NO: 250737 - protein, 12 aa, Homo sapiens
  CDR3 for alpha chain variable domain of TCR clone 125369 (TRAV12-3, TRAJ17)
CAMTLTGNKLTF

SEQ ID NO: 250738 - protein, 18 aa, Homo sapiens
  CDR3 for beta chain variable domain of TCR clone 125369 (TRBV4-3, TRBJ1-6)
CASSQETPASSYKSPLHF

SEQ ID NO: 250739 - protein, 12 aa, Homo sapiens
  CDR3 for alpha chain variable domain of TCR clone 125370 (TRAV12-3, TRAJ4)
CAMTGAGTRLAV

SEQ ID NO: 250740 - protein, 14 aa, Homo sapiens
  CDR3 for beta chain variable domain of TCR clone 125370 (TRBV10-3, TRBJ1-1)
CAISDTDRGVEAVF

SEQ ID NO: 250741 - protein, 14 aa, Homo sapiens
  CDR3 for alpha chain variable domain of TCR clone 125371 (TRAV12-2, TRAJ17)
CAVLFKAAGNKLTF

SEQ ID NO: 250742 - protein, 14 aa, Homo sapiens
  CDR3 for beta chain variable domain of TCR clone 125371 (TRBV4-1, TRBJ1-1)
CASSRSGQSFEAFF

SEQ ID NO: 250743 - protein, 11 aa, Homo sapiens
  CDR3 for alpha chain variable domain of TCR clone 125372 (TRAV8-6, TRAJ20)
CAVSYDYKLSF

SEQ ID NO: 250744 - protein, 14 aa, Homo sapiens
  CDR3 for beta chain variable domain of TCR clone 125372 (TRBV10-2, TRBJ2-2)
CASSERSNAGELFF

SEQ ID NO: 250745 - protein, 14 aa, Homo sapiens
  CDR3 for alpha chain variable domain of TCR clone 125373 (TRAV8-4, TRAJ13)
CAVTLSGGYQKVTF

SEQ ID NO: 250746 - protein, 18 aa, Homo sapiens
  CDR3 for beta chain variable domain of TCR clone 125373 (TRBV7-9, TRBJ1-3)
CASSARTGGSYSGNTIYF

SEQ ID NO: 250747 - protein, 13 aa, Homo sapiens
  CDR3 for alpha chain variable domain of TCR clone 125374 (TRAV27, TRAJ45)
CRSSGGGADGLTF

SEQ ID NO: 250748 - protein, 14 aa, Homo sapiens
  CDR3 for beta chain variable domain of TCR clone 125374 (TRBV7-9, TRBJ2-1)
CASSSMVGFGEQSF

SEQ ID NO: 250749 - protein, 14 aa, Homo sapiens
  CDR3 for alpha chain variable domain of TCR clone 125375 (TRAV22, TRAJ6)
CAGVGPGGSYIPTF

SEQ ID NO: 250750 - protein, 14 aa, Homo sapiens
  CDR3 for beta chain variable domain of TCR clone 125375 (TRBV11-2, TRBJ1-5)
CASSLDRGRQPQHF

SEQ ID NO: 250751 - protein, 17 aa, Homo sapiens
  CDR3 for alpha chain variable domain of TCR clone 125376 (TRAV3, TRAJ6)
CAVSRRTDTGGSYIPTF

SEQ ID NO: 250752 - protein, 16 aa, Homo sapiens
  CDR3 for beta chain variable domain of TCR clone 125376 (TRBV7-9, TRBJ1-2)
CASSLGFSSGEDGYTF

SEQ ID NO: 250753 - protein, 10 aa, Homo sapiens
  CDR3 for alpha chain variable domain of TCR clone 125377 (TRAV2, TRAJ34)
CAAVNDKLIF

SEQ ID NO: 250754 - protein, 14 aa, Homo sapiens
  CDR3 for beta chain variable domain of TCR clone 125377 (TRBV11-2, TRBJ2-3)
CASSRLARTDTQYF

SEQ ID NO: 250755 - protein, 15 aa, Homo sapiens
  CDR3 for alpha chain variable domain of TCR clone 125378 (TRAV10, TRAJ6)
CVVRTRTGGSYIPTF

SEQ ID NO: 250756 - protein, 15 aa, Homo sapiens
  CDR3 for beta chain variable domain of TCR clone 125378 (TRBV20-1, TRBJ2-7)
CSARDRVSGMDEQYL

SEQ ID NO: 250757 - protein, 13 aa, Homo sapiens
  CDR3 for alpha chain variable domain of TCR clone 125379 (TRAV27, TRAJ8)
CAGGPTGSQKLVF

SEQ ID NO: 250758 - protein, 15 aa, Homo sapiens
  CDR3 for beta chain variable domain of TCR clone 125379 (TRBV6-1, TRBJ2-7)
CASSESMGDFYEQYF

SEQ ID NO: 250759 - protein, 15 aa, Homo sapiens
  CDR3 for alpha chain variable domain of TCR clone 125380 (TRAV12-2, TRAJ53)
CAVSGGGGSNYKLTF

SEQ ID NO: 250760 - protein, 17 aa, Homo sapiens
  CDR3 for beta chain variable domain of TCR clone 125380 (TRBV7-3, TRBJ2-3)
RASSLMKRMRGADTQYF

SEQ ID NO: 250761 - protein, 15 aa, Homo sapiens
  CDR3 for alpha chain variable domain of TCR clone 125381 (TRAV17, TRAJ6)
CATDLPSGGSYIPTF

SEQ ID NO: 250762 - protein, 16 aa, Homo sapiens
  CDR3 for beta chain variable domain of TCR clone 125381 (TRBV4-1, TRBJ2-7)
CASSQDPAGYSYEQYF

SEQ ID NO: 250763 - protein, 11 aa, Homo sapiens
  CDR3 for alpha chain variable domain of TCR clone 125382 (TRAV1-2, TRAJ20)
CAVSNDYKLSF

SEQ ID NO: 250764 - protein, 13 aa, Homo sapiens
  CDR3 for beta chain variable domain of TCR clone 125382 (TRBV18, TRBJ1-1)
CASSPETKPEAFF

SEQ ID NO: 250765 - protein, 15 aa, Homo sapiens
  CDR3 for alpha chain variable domain of TCR clone 125383 (TRAV13-1, TRAJ17)
CAASIERAAGNKLTF

SEQ ID NO: 250766 - protein, 18 aa, Homo sapiens
  CDR3 for beta chain variable domain of TCR clone 125383 (TRBV7-9, TRBJ2-1)
CASSLAVSGTSGRNEQFF

SEQ ID NO: 250767 - protein, 11 aa, Homo sapiens
  CDR3 for alpha chain variable domain of TCR clone 125384 (TRAV12-1, TRAJ21)
CVVNNFNKFYF

SEQ ID NO: 250768 - protein, 14 aa, Homo sapiens
  CDR3 for beta chain variable domain of TCR clone 125384 (TRBV7-2, TRBJ2-7)
CASSPKTSFYEQYF

SEQ ID NO: 250769 - protein, 14 aa, Homo sapiens
  CDR3 for alpha chain variable domain of TCR clone 125385 (TRAV12-2, TRAJ17)
CAVNIKAAGNKLTF

SEQ ID NO: 250770 - protein, 16 aa, Homo sapiens
  CDR3 for beta chain variable domain of TCR clone 125385 (TRBV20-1, TRBJ2-6)
CSASSHGYDGANVLTF

SEQ ID NO: 250771 - protein, 11 aa, Homo sapiens
  CDR3 for alpha chain variable domain of TCR clone 125386 (TRAV21, TRAJ41)
CAVRSGYALNL

SEQ ID NO: 250772 - protein, 13 aa, Homo sapiens
  CDR3 for beta chain variable domain of TCR clone 125386 (TRBV7-9, TRBJ1-2)
CASSLKQNYGYTF

SEQ ID NO: 250773 - protein, 14 aa, Homo sapiens
  CDR3 for alpha chain variable domain of TCR clone 125387 (TRAV16, TRAJ29)
CALTRNSGDTPLVF

SEQ ID NO: 250774 - protein, 12 aa, Homo sapiens
  CDR3 for beta chain variable domain of TCR clone 125387 (TRBV2, TRBJ2-1)
CAKREGYNEQFF

SEQ ID NO: 250775 - protein, 12 aa, Homo sapiens
  CDR3 for alpha chain variable domain of TCR clone 125388 (TRAV38-1, TRAJ32)
CAPLGATNKLIF

SEQ ID NO: 250776 - protein, 14 aa, Homo sapiens
  CDR3 for beta chain variable domain of TCR clone 125388 (TRBV29-1, TRBJ2-5)
CSVGTSGSGETQYF

SEQ ID NO: 250777 - protein, 15 aa, Homo sapiens
  CDR3 for alpha chain variable domain of TCR clone 125389 (TRAV38-2/DV8, TRAJ57)
CASARAQGGSEKLVF

SEQ ID NO: 250778 - protein, 15 aa, Homo sapiens
  CDR3 for beta chain variable domain of TCR clone 125389 (TRBV12-4, TRBJ2-1)
CASSLLGRTYNEQFF

SEQ ID NO: 250779 - protein, 14 aa, Homo sapiens
  CDR3 for alpha chain variable domain of TCR clone 125390 (TRAV8-3, TRAJ21)
CAVDARDNFNKFYF

SEQ ID NO: 250780 - protein, 16 aa, Homo sapiens
  CDR3 for beta chain variable domain of TCR clone 125390 (TRBV20-1, TRBJ2-1)
CSARDLAGHSYNEQFF

SEQ ID NO: 250781 - protein, 12 aa, Homo sapiens
  CDR3 for alpha chain variable domain of TCR clone 125391 (TRAV27, TRAJ58)
CAGARDTSRLTF

SEQ ID NO: 250782 - protein, 17 aa, Homo sapiens
  CDR3 for beta chain variable domain of TCR clone 125391 (TRBV7-8, TRBJ2-6)
CASSAGTGGAGANVLTF

SEQ ID NO: 250783 - protein, 14 aa, Homo sapiens
  CDR3 for alpha chain variable domain of TCR clone 125392 (TRAV1-2, TRAJ16)
CAVNRFSDGQKLLF

SEQ ID NO: 250784 - protein, 15 aa, Homo sapiens
  CDR3 for beta chain variable domain of TCR clone 125392 (TRBV20-1, TRBJ2-7)
CSASDRVSGMDEQYF

SEQ ID NO: 250785 - protein, 13 aa, Homo sapiens
  CDR3 for alpha chain variable domain of TCR clone 125393 (TRAV12-1, TRAJ49)
CVVNGVTGNQFYF

SEQ ID NO: 250786 - protein, 15 aa, Homo sapiens
  CDR3 for beta chain variable domain of TCR clone 125393 (TRBV7-8, TRBJ2-1)
CASSLADSLYNEQFF

SEQ ID NO: 250787 - protein, 14 aa, Homo sapiens
  CDR3 for alpha chain variable domain of TCR clone 125394 (TRAV2, TRAJ24)
CCEVLTDSWGKFQF

SEQ ID NO: 250788 - protein, 14 aa, Homo sapiens
  CDR3 for beta chain variable domain of TCR clone 125394 (TRBV19, TRBJ2-1)
CASSMGSGRRSSSS

SEQ ID NO: 250789 - protein, 12 aa, Homo sapiens
  CDR3 for alpha chain variable domain of TCR clone 125395 (TRAV20, TRAJ56)
CAVTGANSKLTF

SEQ ID NO: 250790 - protein, 14 aa, Homo sapiens
  CDR3 for beta chain variable domain of TCR clone 125395 (TRBV20-1, TRBJ2-5)
CSTLVPGYQETQYF

SEQ ID NO: 250791 - protein, 17 aa, Homo sapiens
  CDR3 for alpha chain variable domain of TCR clone 125396 (TRAV3, TRAJ42)
CAVRDRDYGGSQGKLIF

SEQ ID NO: 250792 - protein, 13 aa, Homo sapiens
  CDR3 for beta chain variable domain of TCR clone 125396 (TRBV10-3, TRBJ2-7)
CASKLAVNYEQYF

SEQ ID NO: 250793 - protein, 16 aa, Homo sapiens
  CDR3 for alpha chain variable domain of TCR clone 125397 (TRAV12-1, TRAJ13)
RVVNLEVSGGYQKVTF

SEQ ID NO: 250794 - protein, 16 aa, Homo sapiens
  CDR3 for beta chain variable domain of TCR clone 125397 (TRBV24-1, TRBJ2-6)
CATSDRRASGANVLTF

SEQ ID NO: 250795 - protein, 14 aa, Homo sapiens
  CDR3 for alpha chain variable domain of TCR clone 125398 (TRAV9-2, TRAJ39)
CALYIYNAGNMLTF

SEQ ID NO: 250796 - protein, 12 aa, Homo sapiens
  CDR3 for beta chain variable domain of TCR clone 125398 (TRBV12-4, TRBJ2-1)
CASSPGRNEQFF

SEQ ID NO: 250797 - protein, 12 aa, Homo sapiens
  CDR3 for alpha chain variable domain of TCR clone 125399 (TRAV21, TRAJ31)
CVLAGNNARLMF

SEQ ID NO: 250798 - protein, 15 aa, Homo sapiens
  CDR3 for beta chain variable domain of TCR clone 125399 (TRBV27, TRBJ2-5)
CQQFRSRWHQRDQYF

SEQ ID NO: 250799 - protein, 17 aa, Homo sapiens
  CDR3 for alpha chain variable domain of TCR clone 125400 (TRAV12-2, TRAJ48)
CASNEKLTFGTGTRLTI

SEQ ID NO: 250800 - protein, 14 aa, Homo sapiens
  CDR3 for beta chain variable domain of TCR clone 125400 (TRBV18, TRBJ2-7)
CASSPRGGAYEQYF

SEQ ID NO: 250801 - protein, 13 aa, Homo sapiens
  CDR3 for alpha chain variable domain of TCR clone 125401 (TRAV8-6, TRAJ21)
CAVSPSSLNKFYF

SEQ ID NO: 250802 - protein, 14 aa, Homo sapiens
  CDR3 for beta chain variable domain of TCR clone 125401 (TRBV7-9, TRBJ2-5)
CASSLDTAQETQHF

SEQ ID NO: 250803 - protein, 14 aa, Homo sapiens
  CDR3 for alpha chain variable domain of TCR clone 125402 (TRAV1-2, TRAJ8)
CAVREDTGFQKLVF

SEQ ID NO: 250804 - protein, 15 aa, Homo sapiens
  CDR3 for beta chain variable domain of TCR clone 125402 (TRBV4-1, TRBJ2-7)
CASSQKTGRLYEQYF

SEQ ID NO: 250805 - protein, 16 aa, Homo sapiens
  CDR3 for alpha chain variable domain of TCR clone 125403 (TRAV12-3, TRAJ53)
CAMSPRSGGSNYNLTF

SEQ ID NO: 250806 - protein, 11 aa, Homo sapiens
  CDR3 for beta chain variable domain of TCR clone 125403 (TRBV29-1, TRBJ2-5)
CSEDRTGTQYF

SEQ ID NO: 250807 - protein, 15 aa, Homo sapiens
  CDR3 for alpha chain variable domain of TCR clone 125404 (TRAV17, TRAJ57)
CATGPSQGGSEKLVF

SEQ ID NO: 250808 - protein, 16 aa, Homo sapiens
  CDR3 for beta chain variable domain of TCR clone 125404 (TRBV28, TRBJ2-1)
CASSSPEYPRDNEQFF

SEQ ID NO: 250809 - protein, 15 aa, Homo sapiens
  CDR3 for alpha chain variable domain of TCR clone 125405 (TRAV12-3, TRAJ6)
CAMSATTGGSYIPTF

SEQ ID NO: 250810 - protein, 16 aa, Homo sapiens
  CDR3 for beta chain variable domain of TCR clone 125405 (TRBV6-1, TRBJ2-5)
CASSETLDRGAETQYF

SEQ ID NO: 250811 - protein, 12 aa, Homo sapiens
  CDR3 for alpha chain variable domain of TCR clone 125406 (TRAV8-3, TRAJ26)
CAGDNYCQNFVF

SEQ ID NO: 250812 - protein, 15 aa, Homo sapiens
  CDR3 for beta chain variable domain of TCR clone 125406 (TRBV11-2, TRBJ2-1)
CASSLGTSGLNEQFF

SEQ ID NO: 250813 - protein, 16 aa, Homo sapiens
  CDR3 for alpha chain variable domain of TCR clone 125407 (TRAV16, TRAJ52)
FALSAAGGTSYGKLTF

SEQ ID NO: 250814 - protein, 17 aa, Homo sapiens
  CDR3 for beta chain variable domain of TCR clone 125407 (TRBV11-2, TRBJ2-1)
CASSLYPPGVEYNEQFF

SEQ ID NO: 250815 - protein, 16 aa, Homo sapiens
  CDR3 for alpha chain variable domain of TCR clone 125408 (TRAV12-2, TRAJ45)
CAVKRNPGGGAAGLTF

SEQ ID NO: 250816 - protein, 12 aa, Homo sapiens
  CDR3 for beta chain variable domain of TCR clone 125408 (TRBV6-1, TRBJ2-5)
CASSEGRETQYF

SEQ ID NO: 250817 - protein, 16 aa, Homo sapiens
  CDR3 for alpha chain variable domain of TCR clone 125409 (TRAV13-2, TRAJ53)
CAENANRGGSNYKLTF

SEQ ID NO: 250818 - protein, 19 aa, Homo sapiens
  CDR3 for beta chain variable domain of TCR clone 125409 (TRBV28, TRBJ2-7)
CASSYSGTSRLGWVYEQYF

SEQ ID NO: 250819 - protein, 16 aa, Homo sapiens
  CDR3 for alpha chain variable domain of TCR clone 125410 (TRAV3, TRAJ13)
CAVRDPNSGGYQKVTF

SEQ ID NO: 250820 - protein, 13 aa, Homo sapiens
  CDR3 for beta chain variable domain of TCR clone 125410 (TRBV7-9, TRBJ2-7)
CASRLQGSYEQYF

SEQ ID NO: 250821 - protein, 15 aa, Homo sapiens
  CDR3 for alpha chain variable domain of TCR clone 125411 (TRAV12-3, TRAJ6)
CAMSATSGGSYIPTF

SEQ ID NO: 250822 - protein, 20 aa, Homo sapiens
  CDR3 for beta chain variable domain of TCR clone 125411 (TRBV7-8, TRBJ2-2)
CASSHLFPGPTIHITGELFF

SEQ ID NO: 250823 - protein, 13 aa, Homo sapiens
  CDR3 for alpha chain variable domain of TCR clone 125412 (TRAV13-2, TRAJ22)
CRDPSGSARQLTF

SEQ ID NO: 250824 - protein, 15 aa, Homo sapiens
  CDR3 for beta chain variable domain of TCR clone 125412 (TRBV7-2, TRBJ2-1)
CASTHGTGIYNEQFF

SEQ ID NO: 250825 - protein, 13 aa, Homo sapiens
  CDR3 for alpha chain variable domain of TCR clone 125413 (TRAV13-1, TRAJ29)
CAASIGLKTPLVF

SEQ ID NO: 250826 - protein, 14 aa, Homo sapiens
  CDR3 for beta chain variable domain of TCR clone 125413 (TRBV20-1, TRBJ2-5)
CSASDSGSGETQYF

SEQ ID NO: 250827 - protein, 14 aa, Homo sapiens
  CDR3 for alpha chain variable domain of TCR clone 125414 (TRAV2, TRAJ22)
CAVARGGSARQLTF

SEQ ID NO: 250828 - protein, 12 aa, Homo sapiens
  CDR3 for beta chain variable domain of TCR clone 125414 (TRBV19, TRBJ2-1)
CASSMQDTEQFF

SEQ ID NO: 250829 - protein, 17 aa, Homo sapiens
  CDR3 for alpha chain variable domain of TCR clone 125415 (TRAV3, TRAJ42)
CAVRDRDYGGSKGNLIF

SEQ ID NO: 250830 - protein, 15 aa, Homo sapiens
  CDR3 for beta chain variable domain of TCR clone 125415 (TRBV4-1, TRBJ2-5)
CASSQWDLYQETQYF

SEQ ID NO: 250831 - protein, 12 aa, Homo sapiens
  CDR3 for alpha chain variable domain of TCR clone 125416 (TRAV12-3, TRAJ17)
CATTLTGTKLTF

SEQ ID NO: 250832 - protein, 15 aa, Homo sapiens
  CDR3 for beta chain variable domain of TCR clone 125416 (TRBV20-1, TRBJ2-7)
CSARDRVSGMDEQYF

SEQ ID NO: 250833 - protein, 14 aa, Homo sapiens
  CDR3 for alpha chain variable domain of TCR clone 125417 (TRAV12-3, TRAJ15)
RAMIPPQAGTALIF

SEQ ID NO: 250834 - protein, 12 aa, Homo sapiens
  CDR3 for beta chain variable domain of TCR clone 125417 (TRBV11-2, TRBJ2-2)
CASSFGGGELFF

SEQ ID NO: 250835 - protein, 17 aa, Homo sapiens
  CDR3 for alpha chain variable domain of TCR clone 125418 (TRAV8-1, TRAJ43)
CAVTNDMRFGAGTRLTV

SEQ ID NO: 250836 - protein, 15 aa, Homo sapiens
  CDR3 for beta chain variable domain of TCR clone 125418 (TRBV19, TRBJ1-2)
CASSVGQVLNYGYTF

SEQ ID NO: 250837 - protein, 13 aa, Homo sapiens
  CDR3 for alpha chain variable domain of TCR clone 125419 (TRAV1-2, TRAJ12)
CAVSMDSSYKLIF

SEQ ID NO: 250838 - protein, 13 aa, Homo sapiens
  CDR3 for beta chain variable domain of TCR clone 125419 (TRBV2, TRBJ1-1)
CARNPTGGFHAFF

SEQ ID NO: 250839 - protein, 13 aa, Homo sapiens
  CDR3 for alpha chain variable domain of TCR clone 125420 (TRAV35, TRAJ42)
CAGFPGSQGNRIF

SEQ ID NO: 250840 - protein, 14 aa, Homo sapiens
  CDR3 for beta chain variable domain of TCR clone 125420 (TRBV19, TRBJ2-1)
CASPTFVLSGEQFF

SEQ ID NO: 250841 - protein, 15 aa, Homo sapiens
  CDR3 for alpha chain variable domain of TCR clone 125421 (TRAV20, TRAJ43)
CAVQAGKSSNNDMRF

SEQ ID NO: 250842 - protein, 14 aa, Homo sapiens
  CDR3 for beta chain variable domain of TCR clone 125421 (TRBV27, TRBJ2-1)
CARRHLGGGKEQFF

SEQ ID NO: 250843 - protein, 13 aa, Homo sapiens
  CDR3 for alpha chain variable domain of TCR clone 125422 (TRAV26-1, TRAJ29)
CIVRRSGNTPLVF

SEQ ID NO: 250844 - protein, 16 aa, Homo sapiens
  CDR3 for beta chain variable domain of TCR clone 125422 (TRBV11-2, TRBJ2-7)
CAISLAPTGVNYEQYF

SEQ ID NO: 250845 - protein, 15 aa, Homo sapiens
  CDR3 for alpha chain variable domain of TCR clone 125423 (TRAV3, TRAJ9)
CAVRARNTGGFKTIF

SEQ ID NO: 250846 - protein, 12 aa, Homo sapiens
  CDR3 for beta chain variable domain of TCR clone 125423 (TRBV4-1, TRBJ2-1)
CASSQPGQGQLF

SEQ ID NO: 250847 - protein, 13 aa, Homo sapiens
  CDR3 for alpha chain variable domain of TCR clone 125424 (TRAV29/DV5, TRAJ44)
CAASTGTASKLTV

SEQ ID NO: 250848 - protein, 13 aa, Homo sapiens
  CDR3 for beta chain variable domain of TCR clone 125424 (TRBV19, TRBJ2-7)
CASRKAGGSEQYF

SEQ ID NO: 250849 - protein, 12 aa, Homo sapiens
  CDR3 for alpha chain variable domain of TCR clone 125425 (TRAV3, TRAJ27)
CAVRDGAGKSTF

SEQ ID NO: 250850 - protein, 13 aa, Homo sapiens
  CDR3 for beta chain variable domain of TCR clone 125425 (TRBV10-3, TRBJ1-2)
CAINADLNYGYTV

SEQ ID NO: 250851 - protein, 12 aa, Homo sapiens
  CDR3 for alpha chain variable domain of TCR clone 125426 (TRAV21, TRAJ29)
CAVTSGNTPLVF

SEQ ID NO: 250852 - protein, 16 aa, Homo sapiens
  CDR3 for beta chain variable domain of TCR clone 125426 (TRBV19, TRBJ2-1)
CASSKAGPSSYNEQFF

SEQ ID NO: 250853 - protein, 17 aa, Homo sapiens
  CDR3 for alpha chain variable domain of TCR clone 125427 (TRAV3, TRAJ6)
CAVRDGPRAGGSYLPKF

SEQ ID NO: 250854 - protein, 14 aa, Homo sapiens
  CDR3 for beta chain variable domain of TCR clone 125427 (TRBV7-2, TRBJ2-7)
CASSPKTSFYEQYF

SEQ ID NO: 250855 - protein, 16 aa, Homo sapiens
  CDR3 for alpha chain variable domain of TCR clone 125428 (TRAV21, TRAJ37)
CAVRPRGSRNTGKLIF

SEQ ID NO: 250856 - protein, 13 aa, Homo sapiens
  CDR3 for beta chain variable domain of TCR clone 125428 (TRBV7-9, TRBJ2-5)
CASLSPGQETQYF

SEQ ID NO: 250857 - protein, 16 aa, Homo sapiens
  CDR3 for alpha chain variable domain of TCR clone 125429 (TRAV12-2, TRAJ32)
CAVNMNHGGATNKLIF

SEQ ID NO: 250858 - protein, 16 aa, Homo sapiens
  CDR3 for beta chain variable domain of TCR clone 125429 (TRBV7-8, TRBJ2-3)
CASSTEGQRETDTQYF

SEQ ID NO: 250859 - protein, 13 aa, Homo sapiens
  CDR3 for alpha chain variable domain of TCR clone 125430 (TRAV8-3, TRAJ45)
GSYSGGGADGLTF

SEQ ID NO: 250860 - protein, 11 aa, Homo sapiens
  CDR3 for beta chain variable domain of TCR clone 125430 (TRBV20-1, TRBJ2-5)
CSADRAETQYF

SEQ ID NO: 250861 - protein, 12 aa, Homo sapiens
  CDR3 for alpha chain variable domain of TCR clone 125431 (TRAV12-3, TRAJ17)
CAMTLTGNRLTF

SEQ ID NO: 250862 - protein, 15 aa, Homo sapiens
  CDR3 for beta chain variable domain of TCR clone 125431 (TRBV20-1, TRBJ2-7)
CSARDRVSGMDERYF

SEQ ID NO: 250863 - protein, 17 aa, Homo sapiens
  CDR3 for alpha chain variable domain of TCR clone 125432 (TRAV3, TRAJ6)
CAVRDGPRAGGSYVPPF

SEQ ID NO: 250864 - protein, 14 aa, Homo sapiens
  CDR3 for beta chain variable domain of TCR clone 125432 (TRBV7-2, TRBJ2-7)
CASSPKTSFYEQYF

SEQ ID NO: 250865 - protein, 14 aa, Homo sapiens
  CDR3 for alpha chain variable domain of TCR clone 125433 (TRAV12-2, TRAJ13)
CAVKKTGGDQKVTF

SEQ ID NO: 250866 - protein, 15 aa, Homo sapiens
  CDR3 for beta chain variable domain of TCR clone 125433 (TRBV9, TRBJ1-6)
CASSVAGTGDSPLHF

SEQ ID NO: 250867 - protein, 12 aa, Homo sapiens
  CDR3 for alpha chain variable domain of TCR clone 125434 (TRAV38-1, TRAJ30)
CASMGRDDKIIF

SEQ ID NO: 250868 - protein, 11 aa, Homo sapiens
  CDR3 for beta chain variable domain of TCR clone 125434 (TRBV19, TRBJ1-1)
CASSTTGQAFF

SEQ ID NO: 250869 - protein, 12 aa, Homo sapiens
  CDR3 for alpha chain variable domain of TCR clone 125435 (TRAV13-1, TRAJ21)
CAAKEAFNKFYF

SEQ ID NO: 250870 - protein, 14 aa, Homo sapiens
  CDR3 for beta chain variable domain of TCR clone 125435 (TRBV5-4, TRBJ1-1)
CASSLDSRRDEAFF

SEQ ID NO: 250871 - protein, 15 aa, Homo sapiens
  CDR3 for alpha chain variable domain of TCR clone 125436 (TRAV21, TRAJ53)
CATLHSGGSNYKLTF

SEQ ID NO: 250872 - protein, 16 aa, Homo sapiens
  CDR3 for beta chain variable domain of TCR clone 125436 (TRBV9, TRBJ2-1)
CASSVGGGGNYNEQFF

SEQ ID NO: 250873 - protein, 16 aa, Homo sapiens
  CDR3 for alpha chain variable domain of TCR clone 125437 (TRAV13-1, TRAJ37)
CAASSLGSSNTGKLTF

SEQ ID NO: 250874 - protein, 12 aa, Homo sapiens
  CDR3 for beta chain variable domain of TCR clone 125437 (TRBV6-1, TRBJ2-5)
CASSEGRETQYF

SEQ ID NO: 250875 - protein, 13 aa, Homo sapiens
  CDR3 for alpha chain variable domain of TCR clone 125438 (TRAV12-3, TRAJ40)
CAMSDSGTYKYIF

SEQ ID NO: 250876 - protein, 14 aa, Homo sapiens
  CDR3 for beta chain variable domain of TCR clone 125438 (TRBV7-2, TRBJ1-5)
CASSTQGAGKPQHF

SEQ ID NO: 250877 - protein, 18 aa, Homo sapiens
  CDR3 for alpha chain variable domain of TCR clone 125439 (TRAV1-2, TRAJ18)
CAVRDMGDRGSTLGRLYF

SEQ ID NO: 250878 - protein, 15 aa, Homo sapiens
  CDR3 for beta chain variable domain of TCR clone 125439 (TRBV7-9, TRBJ1-5)
CASSQGHQPNQPQHF

SEQ ID NO: 250879 - protein, 17 aa, Homo sapiens
  CDR3 for alpha chain variable domain of TCR clone 125440 (TRAV8-3, TRAJ34)
CAIPGKLIFGTWTRLQV

SEQ ID NO: 250880 - protein, 15 aa, Homo sapiens
  CDR3 for beta chain variable domain of TCR clone 125440 (TRBV5-7, TRBJ2-1)
CASSRRLAGDNEQFF

SEQ ID NO: 250881 - protein, 16 aa, Homo sapiens
  CDR3 for alpha chain variable domain of TCR clone 125441 (TRAV9-2, TRAJ5)
CALLYLMDTGRRALTF

SEQ ID NO: 250882 - protein, 15 aa, Homo sapiens
  CDR3 for beta chain variable domain of TCR clone 125441 (TRBV7-8, TRBJ2-1)
CASSLAGGLYNEQFF

SEQ ID NO: 250883 - protein, 12 aa, Homo sapiens
  CDR3 for alpha chain variable domain of TCR clone 125442 (TRAV26-1, TRAJ13)
CIVSRGYQKVTF

SEQ ID NO: 250884 - protein, 16 aa, Homo sapiens
  CDR3 for beta chain variable domain of TCR clone 125442 (TRBV27, TRBJ2-1)
CASSLSKGFGLDEQFL

SEQ ID NO: 250885 - protein, 12 aa, Homo sapiens
  CDR3 for alpha chain variable domain of TCR clone 125443 (TRAV4, TRAJ34)
CLVGEGTDKLVF

SEQ ID NO: 250886 - protein, 13 aa, Homo sapiens
  CDR3 for beta chain variable domain of TCR clone 125443 (TRBV2, TRBJ2-7)
CATSMGLVYEQYF

SEQ ID NO: 250887 - protein, 18 aa, Homo sapiens
  CDR3 for alpha chain variable domain of TCR clone 125444 (TRAV29/DV5, TRAJ52)
CAAGFRGAGGTSYGKLTF

SEQ ID NO: 250888 - protein, 16 aa, Homo sapiens
  CDR3 for beta chain variable domain of TCR clone 125444 (TRBV7-3, TRBJ2-2)
CASSLKRGTLSEELFF

SEQ ID NO: 250889 - protein, 14 aa, Homo sapiens
  CDR3 for alpha chain variable domain of TCR clone 125445 (TRAV1-2, TRAJ16)
CSVNRFSDGQKLLF

SEQ ID NO: 250890 - protein, 13 aa, Homo sapiens
  CDR3 for beta chain variable domain of TCR clone 125445 (TRBV19, TRBJ1-2)
CASSVPGQDGYTF

SEQ ID NO: 250891 - protein, 14 aa, Homo sapiens
  CDR3 for alpha chain variable domain of TCR clone 125446 (TRAV26-1, TRAJ38)
CIADNAGNNRKLIW

SEQ ID NO: 250892 - protein, 15 aa, Homo sapiens
  CDR3 for beta chain variable domain of TCR clone 125446 (TRBV12-4, TRBJ1-2)
CASSFPRGLSYGYTF

SEQ ID NO: 250893 - protein, 13 aa, Homo sapiens
  CDR3 for alpha chain variable domain of TCR clone 125447 (TRAV8-3, TRAJ43)
CAVGPDNNNDRRF

SEQ ID NO: 250894 - protein, 14 aa, Homo sapiens
  CDR3 for beta chain variable domain of TCR clone 125447 (TRBV19, TRBJ2-1)
CASPTFVLSGEQFF

SEQ ID NO: 250895 - protein, 13 aa, Homo sapiens
  CDR3 for alpha chain variable domain of TCR clone 125448 (TRAV8-3, TRAJ9)
CAVGITGGFKTIF

SEQ ID NO: 250896 - protein, 13 aa, Homo sapiens
  CDR3 for beta chain variable domain of TCR clone 125448 (TRBV7-9, TRBJ1-2)
CASSLKQNYGYTF

SEQ ID NO: 250897 - protein, 16 aa, Homo sapiens
  CDR3 for alpha chain variable domain of TCR clone 125449 (TRAV35, TRAJ20)
CWADPSSGFNDYKLSF

SEQ ID NO: 250898 - protein, 16 aa, Homo sapiens
  CDR3 for beta chain variable domain of TCR clone 125449 (TRBV4-3, TRBJ1-6)
CASSAQPGGEGSPLHL

SEQ ID NO: 250899 - protein, 18 aa, Homo sapiens
  CDR3 for alpha chain variable domain of TCR clone 125450 (TRAV21, TRAJ52)
CAVRPSPAGGTSYGKLTF

SEQ ID NO: 250900 - protein, 15 aa, Homo sapiens
  CDR3 for beta chain variable domain of TCR clone 125450 (TRBV6-1, TRBJ2-3)
CASSERGGITDTQYF

SEQ ID NO: 250901 - protein, 14 aa, Homo sapiens
  CDR3 for alpha chain variable domain of TCR clone 125451 (TRAV3, TRAJ37)
CAVKESGNTGKLIF

SEQ ID NO: 250902 - protein, 12 aa, Homo sapiens
  CDR3 for beta chain variable domain of TCR clone 125451 (TRBV11-2, TRBJ2-1)
CASSPGNNEQFF

SEQ ID NO: 250903 - protein, 14 aa, Homo sapiens
  CDR3 for alpha chain variable domain of TCR clone 125452 (TRAV3, TRAJ16)
CCERLKSDGQKLLF

SEQ ID NO: 250904 - protein, 15 aa, Homo sapiens
  CDR3 for beta chain variable domain of TCR clone 125452 (TRBV28, TRBJ2-7)
CASSPGGRCFYEQYF

SEQ ID NO: 250905 - protein, 18 aa, Homo sapiens
  CDR3 for alpha chain variable domain of TCR clone 125453 (TRAV12-3, TRAJ52)
CAMSVGGAGGTSYGKLTF

SEQ ID NO: 250906 - protein, 14 aa, Homo sapiens
  CDR3 for beta chain variable domain of TCR clone 125453 (TRBV20-1, TRBJ1-3)
CSASPTGAGNTIYF

SEQ ID NO: 250907 - protein, 14 aa, Homo sapiens
  CDR3 for alpha chain variable domain of TCR clone 125454 (TRAV16, TRAJ29)
CALTRNSGNTPLVF

SEQ ID NO: 250908 - protein, 16 aa, Homo sapiens
  CDR3 for beta chain variable domain of TCR clone 125454 (TRBV19, TRBJ2-1)
CASSKAGPSSYNEQFF

SEQ ID NO: 250909 - protein, 11 aa, Homo sapiens
  CDR3 for alpha chain variable domain of TCR clone 125455 (TRAV36/DV7, TRAJ45)
SGGGGADGLTF

SEQ ID NO: 250910 - protein, 17 aa, Homo sapiens
  CDR3 for beta chain variable domain of TCR clone 125455 (TRBV4-1, TRBJ1-3)
CASSPQRGIRFGNTIYF

SEQ ID NO: 250911 - protein, 14 aa, Homo sapiens
  CDR3 for alpha chain variable domain of TCR clone 125456 (TRAV3, TRAJ9)
CAVRLNTGGSKTIF

SEQ ID NO: 250912 - protein, 15 aa, Homo sapiens
  CDR3 for beta chain variable domain of TCR clone 125456 (TRBV7-2, TRBJ2-1)
CASSLASGRGNEQFF

SEQ ID NO: 250913 - protein, 14 aa, Homo sapiens
  CDR3 for alpha chain variable domain of TCR clone 125457 (TRAV13-1, TRAJ6)
CAASITGGSYVPTF

SEQ ID NO: 250914 - protein, 15 aa, Homo sapiens
  CDR3 for beta chain variable domain of TCR clone 125457 (TRBV19, TRBJ2-5)
CASSLGTSGKETQYF

SEQ ID NO: 250915 - protein, 11 aa, Homo sapiens
  CDR3 for alpha chain variable domain of TCR clone 125458 (TRAV12-2, TRAJ29)
CAVTLRSPLVF

SEQ ID NO: 250916 - protein, 16 aa, Homo sapiens
  CDR3 for beta chain variable domain of TCR clone 125458 (TRBV19, TRBJ1-5)
CASSIDRGGPRQPQHV

SEQ ID NO: 250917 - protein, 16 aa, Homo sapiens
  CDR3 for alpha chain variable domain of TCR clone 125459 (TRAV3, TRAJ10)
CAVRDMRAGGGNKLPF

SEQ ID NO: 250918 - protein, 20 aa, Homo sapiens
  CDR3 for beta chain variable domain of TCR clone 125459 (TRBV11-3, TRBJ2-7)
CASSQRTSGSLRAVLRAGHQ

SEQ ID NO: 250919 - protein, 14 aa, Homo sapiens
  CDR3 for alpha chain variable domain of TCR clone 125460 (TRAV2, TRAJ39)
CAVEGDNAGTMLTF

SEQ ID NO: 250920 - protein, 14 aa, Homo sapiens
  CDR3 for beta chain variable domain of TCR clone 125460 (TRBV28, TRBJ2-7)
CASSLRARGNEQYF

SEQ ID NO: 250921 - protein, 14 aa, Homo sapiens
  CDR3 for alpha chain variable domain of TCR clone 125461 (TRAV1-2, TRAJ16)
CAVNRFSDGQKLLF

SEQ ID NO: 250922 - protein, 17 aa, Homo sapiens
  CDR3 for beta chain variable domain of TCR clone 125461 (TRBV20-1, TRBJ2-1)
CSASASGLAGSYNEQFF

SEQ ID NO: 250923 - protein, 12 aa, Homo sapiens
  CDR3 for alpha chain variable domain of TCR clone 125462 (TRAV13-1, TRAJ5)
CAVDTGRRALTF

SEQ ID NO: 250924 - protein, 12 aa, Homo sapiens
  CDR3 for beta chain variable domain of TCR clone 125462 (TRBV28, TRBJ2-1)
CASSFYRHGQFF

SEQ ID NO: 250925 - protein, 14 aa, Homo sapiens
  CDR3 for alpha chain variable domain of TCR clone 125463 (TRAV13-1, TRAJ35)
CAASKGGFGNVLHC

SEQ ID NO: 250926 - protein, 11 aa, Homo sapiens
  CDR3 for beta chain variable domain of TCR clone 125463 (TRBV12-4, TRBJ2-3)
CASTATDTQYF

SEQ ID NO: 250927 - protein, 13 aa, Homo sapiens
  CDR3 for alpha chain variable domain of TCR clone 125464 (TRAV2, TRAJ40)
CAVVTSGTYKYIF

SEQ ID NO: 250928 - protein, 14 aa, Homo sapiens
  CDR3 for beta chain variable domain of TCR clone 125464 (TRBV5-1, TRBJ2-5)
CASSLAGKQETQYF

SEQ ID NO: 250929 - protein, 17 aa, Homo sapiens
  CDR3 for alpha chain variable domain of TCR clone 125465 (TRAV26-1, TRAJ53)
CIVIVDDSGGSNYKLTF

SEQ ID NO: 250930 - protein, 15 aa, Homo sapiens
  CDR3 for beta chain variable domain of TCR clone 125465 (TRBV20-1, TRBJ2-7)
CSARVPAAYFYEQYF

SEQ ID NO: 250931 - protein, 18 aa, Homo sapiens
  CDR3 for alpha chain variable domain of TCR clone 125466 (TRAV12-3, TRAJ52)
CAMSRTNAGGTSYGKLTF

SEQ ID NO: 250932 - protein, 15 aa, Homo sapiens
  CDR3 for beta chain variable domain of TCR clone 125466 (TRBV6-5, TRBJ1-5)
CASSYSWDSNQPQHF

SEQ ID NO: 250933 - protein, 11 aa, Homo sapiens
  CDR3 for alpha chain variable domain of TCR clone 125467 (TRAV2, TRAJ20)
CAVKNDYKLSF

SEQ ID NO: 250934 - protein, 16 aa, Homo sapiens
  CDR3 for beta chain variable domain of TCR clone 125467 (TRBV19, TRBJ2-2)
CASRSPGTGATGELFF

SEQ ID NO: 250935 - protein, 12 aa, Homo sapiens
  CDR3 for alpha chain variable domain of TCR clone 125468 (TRAV12-2, TRAJ7)
CAPKMGTTDSLL

SEQ ID NO: 250936 - protein, 17 aa, Homo sapiens
  CDR3 for beta chain variable domain of TCR clone 125468 (TRBV13, TRBJ2-3)
CASSLSRVAGGRNTQYF

SEQ ID NO: 250937 - protein, 17 aa, Homo sapiens
  CDR3 for alpha chain variable domain of TCR clone 125469 (TRAV38-2/DV8, TRAJ23)
CALSRKLIFGQGTELSV

SEQ ID NO: 250938 - protein, 17 aa, Homo sapiens
  CDR3 for beta chain variable domain of TCR clone 125469 (TRBV5-4, TRBJ2-1)
CASSSAGGGGPYNEQFF

SEQ ID NO: 250939 - protein, 16 aa, Homo sapiens
  CDR3 for alpha chain variable domain of TCR clone 125470 (TRAV3, TRAJ21)
CAVRDIERGNFNKCYF

SEQ ID NO: 250940 - protein, 13 aa, Homo sapiens
  CDR3 for beta chain variable domain of TCR clone 125470 (TRBV27, TRBJ2-7)
CASSLTTGYEQYF

SEQ ID NO: 250941 - protein, 11 aa, Homo sapiens
  CDR3 for alpha chain variable domain of TCR clone 125471 (TRAV3, TRAJ21)
CAVGNFNKFYF

SEQ ID NO: 250942 - protein, 15 aa, Homo sapiens
  CDR3 for beta chain variable domain of TCR clone 125471 (TRBV7-6, TRBJ2-7)
CASSGRRDTFGEQYF

SEQ ID NO: 250943 - protein, 12 aa, Homo sapiens
  CDR3 for alpha chain variable domain of TCR clone 125472 (TRAV26-1, TRAJ43)
CIVRPQGDDMRF

SEQ ID NO: 250944 - protein, 16 aa, Homo sapiens
  CDR3 for beta chain variable domain of TCR clone 125472 (TRBV3-1, TRBJ2-1)
CASSQGGRRSFDEQFF

SEQ ID NO: 250945 - protein, 16 aa, Homo sapiens
  CDR3 for alpha chain variable domain of TCR clone 125473 (TRAV30, TRAJ24)
CVTEIVDADSWGKFQF

SEQ ID NO: 250946 - protein, 12 aa, Homo sapiens
  CDR3 for beta chain variable domain of TCR clone 125473 (TRBV11-2, TRBJ2-2)
CASSLPTGELFF

SEQ ID NO: 250947 - protein, 14 aa, Homo sapiens
  CDR3 for alpha chain variable domain of TCR clone 125474 (TRAV12-2, TRAJ17)
CAVLFKAAGNRLTF

SEQ ID NO: 250948 - protein, 12 aa, Homo sapiens
  CDR3 for beta chain variable domain of TCR clone 125474 (TRBV11-2, TRBJ2-2)
CASSLGGGELFF

SEQ ID NO: 250949 - protein, 11 aa, Homo sapiens
  CDR3 for alpha chain variable domain of TCR clone 125475 (TRAV35, TRAJ30)
CSGERDDKIIF

SEQ ID NO: 250950 - protein, 14 aa, Homo sapiens
  CDR3 for beta chain variable domain of TCR clone 125475 (TRBV15, TRBJ2-5)
CATSGDRGQETQYF

SEQ ID NO: 250951 - protein, 20 aa, Homo sapiens
  CDR3 for alpha chain variable domain of TCR clone 125476 (TRAV21, TRAJ30)
CAVRRRMTRSSLERGHDFIF

SEQ ID NO: 250952 - protein, 15 aa, Homo sapiens
  CDR3 for beta chain variable domain of TCR clone 125476 (TRBV6-6, TRBJ2-7)
CASSYSYGGSYEQYF

SEQ ID NO: 250953 - protein, 14 aa, Homo sapiens
  CDR3 for alpha chain variable domain of TCR clone 125477 (TRAV12-2, TRAJ17)
CAVLFKAAGNKLTF

SEQ ID NO: 250954 - protein, 14 aa, Homo sapiens
  CDR3 for beta chain variable domain of TCR clone 125477 (TRBV29-1, TRBJ2-1)
CSIGAVAGGNEQFF

SEQ ID NO: 250955 - protein, 13 aa, Homo sapiens
  CDR3 for alpha chain variable domain of TCR clone 125478 (TRAV2, TRAJ40)
CAVVTSGTYKYIF

SEQ ID NO: 250956 - protein, 16 aa, Homo sapiens
  CDR3 for beta chain variable domain of TCR clone 125478 (TRBV19, TRBJ2-1)
CASSMGGGSSYNEQFF

SEQ ID NO: 250957 - protein, 14 aa, Homo sapiens
  CDR3 for alpha chain variable domain of TCR clone 125479 (TRAV1-2, TRAJ6)
CTVSLPGGSYIPTF

SEQ ID NO: 250958 - protein, 14 aa, Homo sapiens
  CDR3 for beta chain variable domain of TCR clone 125479 (TRBV13, TRBJ2-7)
CASSLSRISYEQYF

SEQ ID NO: 250959 - protein, 13 aa, Homo sapiens
  CDR3 for alpha chain variable domain of TCR clone 125480 (TRAV1-2, TRAJ9)
CAVLNSGGFKTIF

SEQ ID NO: 250960 - protein, 14 aa, Homo sapiens
  CDR3 for beta chain variable domain of TCR clone 125480 (TRBV20-1, TRBJ2-3)
CSARGGTSTDTQYF

SEQ ID NO: 250961 - protein, 15 aa, Homo sapiens
  CDR3 for alpha chain variable domain of TCR clone 125481 (TRAV21, TRAJ40)
CAVRPQTSGTYKYIF

SEQ ID NO: 250962 - protein, 15 aa, Homo sapiens
  CDR3 for beta chain variable domain of TCR clone 125481 (TRBV20-1, TRBJ1-1)
CSASRGVTGNTEAFF

SEQ ID NO: 250963 - protein, 14 aa, Homo sapiens
  CDR3 for alpha chain variable domain of TCR clone 125482 (TRAV20, TRAJ42)
CAMQAGGSQGNLLF

SEQ ID NO: 250964 - protein, 14 aa, Homo sapiens
  CDR3 for beta chain variable domain of TCR clone 125482 (TRBV28, TRBJ1-2)
CASRIQGANYGYTF

SEQ ID NO: 250965 - protein, 15 aa, Homo sapiens
  CDR3 for alpha chain variable domain of TCR clone 125483 (TRAV2, TRAJ24)
CAVEVLNDSWGKFQF

SEQ ID NO: 250966 - protein, 14 aa, Homo sapiens
  CDR3 for beta chain variable domain of TCR clone 125483 (TRBV19, TRBJ2-1)
CASSMGSGRRSSSS

SEQ ID NO: 250967 - protein, 15 aa, Homo sapiens
  CDR3 for alpha chain variable domain of TCR clone 125484 (TRAV3, TRAJ5)
CAVRDRKTGRRALTF

SEQ ID NO: 250968 - protein, 15 aa, Homo sapiens
  CDR3 for beta chain variable domain of TCR clone 125484 (TRBV7-8, TRBJ2-1)
CSSSLADSLYNEQFF

SEQ ID NO: 250969 - protein, 12 aa, Homo sapiens
  CDR3 for alpha chain variable domain of TCR clone 125485 (TRAV13-2, TRAJ23)
CAERHRGGKLIF

SEQ ID NO: 250970 - protein, 13 aa, Homo sapiens
  CDR3 for beta chain variable domain of TCR clone 125485 (TRBV7-9, TRBJ1-2)
CASSLRQNYGYTF

SEQ ID NO: 250971 - protein, 12 aa, Homo sapiens
  CDR3 for alpha chain variable domain of TCR clone 125486 (TRAV13-2, TRAJ37)
CAEKGNTGKLIF

SEQ ID NO: 250972 - protein, 15 aa, Homo sapiens
  CDR3 for beta chain variable domain of TCR clone 125486 (TRBV4-1, TRBJ2-7)
CASSQQGQGFDEQYF

SEQ ID NO: 250973 - protein, 16 aa, Homo sapiens
  CDR3 for alpha chain variable domain of TCR clone 125487 (TRAV30, TRAJ24)
CGPEIVDADSWGKFQF

SEQ ID NO: 250974 - protein, 14 aa, Homo sapiens
  CDR3 for beta chain variable domain of TCR clone 125487 (TRBV7-2, TRBJ1-2)
CASSQTGSTYGYTF

SEQ ID NO: 250975 - protein, 12 aa, Homo sapiens
  CDR3 for alpha chain variable domain of TCR clone 125488 (TRAV30, TRAJ43)
CGTEERRNDMRF

SEQ ID NO: 250976 - protein, 13 aa, Homo sapiens
  CDR3 for beta chain variable domain of TCR clone 125488 (TRBV27, TRBJ2-7)
CASSFSQGYEQYF

SEQ ID NO: 250977 - protein, 14 aa, Homo sapiens
  CDR3 for alpha chain variable domain of TCR clone 125489 (TRAV12-3, TRAJ43)
CAMSLGGAGTRLTE

SEQ ID NO: 250978 - protein, 13 aa, Homo sapiens
  CDR3 for beta chain variable domain of TCR clone 125489 (TRBV7-9, TRBJ1-2)
CASSLKQNYGYTF

SEQ ID NO: 250979 - protein, 15 aa, Homo sapiens
  CDR3 for alpha chain variable domain of TCR clone 125490 (TRAV4, TRAJ39)
FLVGPNNNAGNMLTF

SEQ ID NO: 250980 - protein, 16 aa, Homo sapiens
  CDR3 for beta chain variable domain of TCR clone 125490 (TRBV27, TRBJ2-2)
CASSFRGLVRTGELFF

SEQ ID NO: 250981 - protein, 18 aa, Homo sapiens
  CDR3 for alpha chain variable domain of TCR clone 125491 (TRAV9-2, TRAJ52)
CALSRHNAGGTSYGKLTF

SEQ ID NO: 250982 - protein, 13 aa, Homo sapiens
  CDR3 for beta chain variable domain of TCR clone 125491 (TRBV4-1, TRBJ2-2)
CASSQENTGELFF

SEQ ID NO: 250983 - protein, 15 aa, Homo sapiens
  CDR3 for alpha chain variable domain of TCR clone 125492 (TRAV26-2, TRAJ45)
CILRDRVDQQEVLTD

SEQ ID NO: 250984 - protein, 15 aa, Homo sapiens
  CDR3 for beta chain variable domain of TCR clone 125492 (TRBV7-6, TRBJ2-5)
CASSKPTGPQETQYF

SEQ ID NO: 250985 - protein, 13 aa, Homo sapiens
  CDR3 for alpha chain variable domain of TCR clone 125493 (TRAV12-1, TRAJ39)
CVVNYNAGNMLTS

SEQ ID NO: 250986 - protein, 12 aa, Homo sapiens
  CDR3 for beta chain variable domain of TCR clone 125493 (TRBV5-7, TRBJ1-1)
CASSLGRGKAFF

SEQ ID NO: 250987 - protein, 14 aa, Homo sapiens
  CDR3 for alpha chain variable domain of TCR clone 125494 (TRAV16, TRAJ33)
CALSAMDSNYQLIW

SEQ ID NO: 250988 - protein, 16 aa, Homo sapiens
  CDR3 for beta chain variable domain of TCR clone 125494 (TRBV12-4, TRBJ2-3)
CASSCPSNTNTDTQCF

SEQ ID NO: 250989 - protein, 14 aa, Homo sapiens
  CDR3 for alpha chain variable domain of TCR clone 125495 (TRAV2, TRAJ9)
CAVEDRSGGFKTIF

SEQ ID NO: 250990 - protein, 14 aa, Homo sapiens
  CDR3 for beta chain variable domain of TCR clone 125495 (TRBV5-1, TRBJ2-7)
CASSRGESLYEQYF

SEQ ID NO: 250991 - protein, 17 aa, Homo sapiens
  CDR3 for alpha chain variable domain of TCR clone 125496 (TRAV26-1, TRAJ37)
CIVRVITVSSNTGKLIF

SEQ ID NO: 250992 - protein, 16 aa, Homo sapiens
  CDR3 for beta chain variable domain of TCR clone 125496 (TRBV6-1, TRBJ2-5)
CASSETLDRGAETQYF

SEQ ID NO: 250993 - protein, 13 aa, Homo sapiens
  CDR3 for alpha chain variable domain of TCR clone 125497 (TRAV26-2, TRAJ43)
CILRAVSNNDMRF

SEQ ID NO: 250994 - protein, 15 aa, Homo sapiens
  CDR3 for beta chain variable domain of TCR clone 125497 (TRBV7-2, TRBJ2-1)
CASTHGTGIYNEQFF

SEQ ID NO: 250995 - protein, 14 aa, Homo sapiens
  CDR3 for alpha chain variable domain of TCR clone 125498 (TRAV12-2, TRAJ9)
CAVNALEGGFKTIF

SEQ ID NO: 250996 - protein, 16 aa, Homo sapiens
  CDR3 for beta chain variable domain of TCR clone 125498 (TRBV19, TRBJ1-6)
CAWSVAPVAGNSPLHF

SEQ ID NO: 250997 - protein, 13 aa, Homo sapiens
  CDR3 for alpha chain variable domain of TCR clone 125499 (TRAV21, TRAJ27)
CAARPGNTGKSTF

SEQ ID NO: 250998 - protein, 11 aa, Homo sapiens
  CDR3 for beta chain variable domain of TCR clone 125499 (TRBV11-2, TRBJ2-2)
CASSLPGELFF

SEQ ID NO: 250999 - protein, 14 aa, Homo sapiens
  CDR3 for alpha chain variable domain of TCR clone 125500 (TRAV38-1, TRAJ45)
CASHSGGGADGLTF

SEQ ID NO: 251000 - protein, 17 aa, Homo sapiens
  CDR3 for beta chain variable domain of TCR clone 125500 (TRBV11-2, TRBJ2-1)
CASSLYPPGVEYNEQFF

SEQ ID NO: 251001 - protein, 14 aa, Homo sapiens
  CDR3 for alpha chain variable domain of TCR clone 125501 (TRAV17, TRAJ16)
CATADFSDGQKLLF

SEQ ID NO: 251002 - protein, 13 aa, Homo sapiens
  CDR3 for beta chain variable domain of TCR clone 125501 (TRBV14, TRBJ1-2)
CASSQVAVYGYTF

SEQ ID NO: 251003 - protein, 15 aa, Homo sapiens
  CDR3 for alpha chain variable domain of TCR clone 125502 (TRAV12-1, TRAJ42)
CVVTRDGGSQVNLIF

SEQ ID NO: 251004 - protein, 14 aa, Homo sapiens
  CDR3 for beta chain variable domain of TCR clone 125502 (TRBV11-2, TRBJ2-3)
CASSLGGGANTQYF

SEQ ID NO: 251005 - protein, 11 aa, Homo sapiens
  CDR3 for alpha chain variable domain of TCR clone 125503 (TRAV2, TRAJ33)
CAVESNYQLIW

SEQ ID NO: 251006 - protein, 15 aa, Homo sapiens
  CDR3 for beta chain variable domain of TCR clone 125503 (TRBV28, TRBJ2-3)
CASSPDRQGANTQYF

SEQ ID NO: 251007 - protein, 14 aa, Homo sapiens
  CDR3 for alpha chain variable domain of TCR clone 125504 (TRAV12-2, TRAJ13)
CAVKKTGGYQKVTF

SEQ ID NO: 251008 - protein, 15 aa, Homo sapiens
  CDR3 for beta chain variable domain of TCR clone 125504 (TRBV7-9, TRBJ2-1)
CASSGTGGDYNEQFF

SEQ ID NO: 251009 - protein, 13 aa, Homo sapiens
  CDR3 for alpha chain variable domain of TCR clone 125505 (TRAV8-3, TRAJ4)
WVFYSGGYNKLIF

SEQ ID NO: 251010 - protein, 14 aa, Homo sapiens
  CDR3 for beta chain variable domain of TCR clone 125505 (TRBV7-9, TRBJ2-3)
CASSVEDGTDTQYF

SEQ ID NO: 251011 - protein, 12 aa, Homo sapiens
  CDR3 for alpha chain variable domain of TCR clone 125506 (TRAV25, TRAJ11)
CAGASGYSTLTF

SEQ ID NO: 251012 - protein, 14 aa, Homo sapiens
  CDR3 for beta chain variable domain of TCR clone 125506 (TRBV5-8, TRBJ2-3)
CASSVGQGTDTQYF

SEQ ID NO: 251013 - protein, 18 aa, Homo sapiens
  CDR3 for alpha chain variable domain of TCR clone 125507 (TRAV17, TRAJ45)
CATSLDLYSGGGAEGLTF

SEQ ID NO: 251014 - protein, 15 aa, Homo sapiens
  CDR3 for beta chain variable domain of TCR clone 125507 (TRBV11-2, TRBJ2-1)
CASSKNRGLIYEQFF

SEQ ID NO: 251015 - protein, 13 aa, Homo sapiens
  CDR3 for alpha chain variable domain of TCR clone 125508 (TRAV13-2, TRAJ48)
CAEMDFGNEKLTF

SEQ ID NO: 251016 - protein, 16 aa, Homo sapiens
  CDR3 for beta chain variable domain of TCR clone 125508 (TRBV7-3, TRBJ2-1)
CASSLEGYRSYNEQFF

SEQ ID NO: 251017 - protein, 14 aa, Homo sapiens
  CDR3 for alpha chain variable domain of TCR clone 125509 (TRAV12-2, TRAJ45)
CALPERGGADGLTF

SEQ ID NO: 251018 - protein, 14 aa, Homo sapiens
  CDR3 for beta chain variable domain of TCR clone 125509 (TRBV18, TRBJ1-5)
CSSSPGNSNQPQHF

SEQ ID NO: 251019 - protein, 12 aa, Homo sapiens
  CDR3 for alpha chain variable domain of TCR clone 125510 (TRAV21, TRAJ27)
CAPPGNAGKSTF

SEQ ID NO: 251020 - protein, 13 aa, Homo sapiens
  CDR3 for beta chain variable domain of TCR clone 125510 (TRBV2, TRBJ1-1)
CARNPTGGLHAFF

SEQ ID NO: 251021 - protein, 13 aa, Homo sapiens
  CDR3 for alpha chain variable domain of TCR clone 125511 (TRAV38-1, TRAJ52)
CAFRGTSYGKLTF

SEQ ID NO: 251022 - protein, 15 aa, Homo sapiens
  CDR3 for beta chain variable domain of TCR clone 125511 (TRBV7-8, TRBJ2-5)
CASGDAAGSQETQYF

SEQ ID NO: 251023 - protein, 12 aa, Homo sapiens
  CDR3 for alpha chain variable domain of TCR clone 125512 (TRAV12-2, TRAJ45)
CAVMGGADGLTF

SEQ ID NO: 251024 - protein, 14 aa, Homo sapiens
  CDR3 for beta chain variable domain of TCR clone 125512 (TRBV5-5, TRBJ2-7)
CASSLGQGTYEQYF

SEQ ID NO: 251025 - protein, 14 aa, Homo sapiens
  CDR3 for alpha chain variable domain of TCR clone 125513 (TRAV14/DV4, TRAJ20)
CAMRESLNDYKLSF

SEQ ID NO: 251026 - protein, 15 aa, Homo sapiens
  CDR3 for beta chain variable domain of TCR clone 125513 (TRBV5-7, TRBJ1-5)
CASSYGKLWDQTQHF

SEQ ID NO: 251027 - protein, 13 aa, Homo sapiens
  CDR3 for alpha chain variable domain of TCR clone 125514 (TRAV13-1, TRAJ21)
CAASIYNFNKFYF

SEQ ID NO: 251028 - protein, 13 aa, Homo sapiens
  CDR3 for beta chain variable domain of TCR clone 125514 (TRBV27, TRBJ1-4)
CASSLRGDEKLFF

SEQ ID NO: 251029 - protein, 13 aa, Homo sapiens
  CDR3 for alpha chain variable domain of TCR clone 125515 (TRAV20, TRAJ34)
CAVSSYNTDKLIF

SEQ ID NO: 251030 - protein, 12 aa, Homo sapiens
  CDR3 for beta chain variable domain of TCR clone 125515 (TRBV20-1, TRBJ1-2)
CSAAGEGPGYMA

SEQ ID NO: 251031 - protein, 13 aa, Homo sapiens
  CDR3 for alpha chain variable domain of TCR clone 125516 (TRAV13-1, TRAJ10)
CAALEGGGNKLTF

SEQ ID NO: 251032 - protein, 15 aa, Homo sapiens
  CDR3 for beta chain variable domain of TCR clone 125516 (TRBV27, TRBJ1-6)
CASSFDRGLGSPLHF

SEQ ID NO: 251033 - protein, 14 aa, Homo sapiens
  CDR3 for alpha chain variable domain of TCR clone 125517 (TRAV1-2, TRAJ8)
CAVREYTGFQKLVF

SEQ ID NO: 251034 - protein, 12 aa, Homo sapiens
  CDR3 for beta chain variable domain of TCR clone 125517 (TRBV11-2, TRBJ2-2)
CASSLPTGELFF

SEQ ID NO: 251035 - protein, 15 aa, Homo sapiens
  CDR3 for alpha chain variable domain of TCR clone 125518 (TRAV3, TRAJ9)
CAVRARNTGGFKTIF

SEQ ID NO: 251036 - protein, 15 aa, Homo sapiens
  CDR3 for beta chain variable domain of TCR clone 125518 (TRBV10-3, TRBJ2-5)
CAIRPGDVDLGTQYF

SEQ ID NO: 251037 - protein, 17 aa, Homo sapiens
  CDR3 for alpha chain variable domain of TCR clone 125519 (TRAV3, TRAJ6)
CAVRDGPRAGGSYIPTF

SEQ ID NO: 251038 - protein, 13 aa, Homo sapiens
  CDR3 for beta chain variable domain of TCR clone 125519 (TRBV2, TRBJ1-4)
CASSERAGEKLLF

SEQ ID NO: 251039 - protein, 12 aa, Homo sapiens
  CDR3 for alpha chain variable domain of TCR clone 125520 (TRAV12-3, TRAJ17)
CAMTLTGNKLTF

SEQ ID NO: 251040 - protein, 14 aa, Homo sapiens
  CDR3 for beta chain variable domain of TCR clone 125520 (TRBV7-3, TRBJ2-3)
CASSSTGVADTQYF

SEQ ID NO: 251041 - protein, 12 aa, Homo sapiens
  CDR3 for alpha chain variable domain of TCR clone 125521 (TRAV13-1, TRAJ21)
CAAKEGFNKFYF

SEQ ID NO: 251042 - protein, 15 aa, Homo sapiens
  CDR3 for beta chain variable domain of TCR clone 125521 (TRBV7-9, TRBJ2-7)
CASSSSGLAVYEQYF

SEQ ID NO: 251043 - protein, 13 aa, Homo sapiens
  CDR3 for alpha chain variable domain of TCR clone 125522 (TRAV25, TRAJ30)
CAGRVDRDDKIIF

SEQ ID NO: 251044 - protein, 17 aa, Homo sapiens
  CDR3 for beta chain variable domain of TCR clone 125522 (TRBV7-9, TRBJ2-6)
CASSFGAGYSGANVLTV

SEQ ID NO: 251045 - protein, 15 aa, Homo sapiens
  CDR3 for alpha chain variable domain of TCR clone 125523 (TRAV17, TRAJ57)
CATGPSQGGSEKLGF

SEQ ID NO: 251046 - protein, 14 aa, Homo sapiens
  CDR3 for beta chain variable domain of TCR clone 125523 (TRBV11-2, TRBJ1-2)
CASSLYRGNYGYTF

SEQ ID NO: 251047 - protein, 13 aa, Homo sapiens
  CDR3 for alpha chain variable domain of TCR clone 125524 (TRAV8-3, TRAJ28)
CAVGAVGSYQLAF

SEQ ID NO: 251048 - protein, 13 aa, Homo sapiens
  CDR3 for beta chain variable domain of TCR clone 125524 (TRBV7-2, TRBJ1-6)
CASSLKFDSPLHF

SEQ ID NO: 251049 - protein, 15 aa, Homo sapiens
  CDR3 for alpha chain variable domain of TCR clone 125525 (TRAV3, TRAJ20)
CAVRDIKLSDYKLSF

SEQ ID NO: 251050 - protein, 15 aa, Homo sapiens
  CDR3 for beta chain variable domain of TCR clone 125525 (TRBV7-9, TRBJ1-6)
CASSCPGRGNSPLHF

SEQ ID NO: 251051 - protein, 10 aa, Homo sapiens
  CDR3 for alpha chain variable domain of TCR clone 125526 (TRAV12-2, TRAJ52)
QSTSYGKLTF

SEQ ID NO: 251052 - protein, 11 aa, Homo sapiens
  CDR3 for beta chain variable domain of TCR clone 125526 (TRBV11-2, TRBJ2-2)
CASSLPGELFF

SEQ ID NO: 251053 - protein, 16 aa, Homo sapiens
  CDR3 for alpha chain variable domain of TCR clone 125527 (TRAV8-4, TRAJ5)
CAVSPLTDTGRRALTF

SEQ ID NO: 251054 - protein, 14 aa, Homo sapiens
  CDR3 for beta chain variable domain of TCR clone 125527 (TRBV19, TRBJ1-6)
CASSADGWNSPLHF

SEQ ID NO: 251055 - protein, 12 aa, Homo sapiens
  CDR3 for alpha chain variable domain of TCR clone 125528 (TRAV36/DV7, TRAJ54)
RAVVRGAQKLVF

SEQ ID NO: 251056 - protein, 14 aa, Homo sapiens
  CDR3 for beta chain variable domain of TCR clone 125528 (TRBV7-3, TRBJ1-1)
CASSLKGGKTEAFF

SEQ ID NO: 251057 - protein, 12 aa, Homo sapiens
  CDR3 for alpha chain variable domain of TCR clone 125529 (TRAV12-1, TRAJ24)
CVVYSGTYKYIF

SEQ ID NO: 251058 - protein, 16 aa, Homo sapiens
  CDR3 for beta chain variable domain of TCR clone 125529 (TRBV13, TRBJ2-2)
CASSEVFGANTGELFF

SEQ ID NO: 251059 - protein, 12 aa, Homo sapiens
  CDR3 for alpha chain variable domain of TCR clone 125530 (TRAV4, TRAJ9)
CLVPTGGFKTIF

SEQ ID NO: 251060 - protein, 15 aa, Homo sapiens
  CDR3 for beta chain variable domain of TCR clone 125530 (TRBV19, TRBJ1-2)
CASSVGQVLNYGYTF

SEQ ID NO: 251061 - protein, 11 aa, Homo sapiens
  CDR3 for alpha chain variable domain of TCR clone 125531 (TRAV3, TRAJ21)
CAVGNFNKFYF

SEQ ID NO: 251062 - protein, 16 aa, Homo sapiens
  CDR3 for beta chain variable domain of TCR clone 125531 (TRBV12-4, TRBJ2-5)
CASSFFVRGRQETQYF

SEQ ID NO: 251063 - protein, 16 aa, Homo sapiens
  CDR3 for alpha chain variable domain of TCR clone 125532 (TRAV14/DV4, TRAJ53)
CAMREGGGGSNYKLTF

SEQ ID NO: 251064 - protein, 12 aa, Homo sapiens
  CDR3 for beta chain variable domain of TCR clone 125532 (TRBV7-8, TRBJ2-7)
CASSLGDREQYF

SEQ ID NO: 251065 - protein, 13 aa, Homo sapiens
  CDR3 for alpha chain variable domain of TCR clone 125533 (TRAV17, TRAJ34)
CATDLYNTDKLIF

SEQ ID NO: 251066 - protein, 15 aa, Homo sapiens
  CDR3 for beta chain variable domain of TCR clone 125533 (TRBV20-1, TRBJ2-3)
CSATGTSGLTDTQYF

SEQ ID NO: 251067 - protein, 18 aa, Homo sapiens
  CDR3 for alpha chain variable domain of TCR clone 125534 (TRAV1-2, TRAJ18)
CAVRDMGDRGSTRGRLYF

SEQ ID NO: 251068 - protein, 16 aa, Homo sapiens
  CDR3 for beta chain variable domain of TCR clone 125534 (TRBV29-1, TRBJ1-2)
CSVEANRDIANYGYTF

SEQ ID NO: 251069 - protein, 12 aa, Homo sapiens
  CDR3 for alpha chain variable domain of TCR clone 125535 (TRAV17, TRAJ20)
CATDSNDYKLSF

SEQ ID NO: 251070 - protein, 15 aa, Homo sapiens
  CDR3 for beta chain variable domain of TCR clone 125535 (TRBV20-1, TRBJ2-7)
CSARDRVSGMDEQYF

SEQ ID NO: 251071 - protein, 14 aa, Homo sapiens
  CDR3 for alpha chain variable domain of TCR clone 125536 (TRAV12-2, TRAJ44)
CAVNKAGTASKLTF

SEQ ID NO: 251072 - protein, 11 aa, Homo sapiens
  CDR3 for beta chain variable domain of TCR clone 125536 (TRBV29-1, TRBJ2-5)
CSEDRTGTQYF

SEQ ID NO: 251073 - protein, 17 aa, Homo sapiens
  CDR3 for alpha chain variable domain of TCR clone 125537 (TRAV3, TRAJ6)
CAVRDGPRAGGSYIPTF

SEQ ID NO: 251074 - protein, 14 aa, Homo sapiens
  CDR3 for beta chain variable domain of TCR clone 125537 (TRBV28, TRBJ2-2)
CASSMQGYTGELFF

SEQ ID NO: 251075 - protein, 15 aa, Homo sapiens
  CDR3 for alpha chain variable domain of TCR clone 125538 (TRAV8-3, TRAJ40)
RAAPSLGSGTYKYIF

SEQ ID NO: 251076 - protein, 16 aa, Homo sapiens
  CDR3 for beta chain variable domain of TCR clone 125538 (TRBV7-3, TRBJ2-3)
CASSLSGYRPEDTQYF

SEQ ID NO: 251077 - protein, 22 aa, Homo sapiens
  CDR3 for alpha chain variable domain of TCR clone 125539 (TRAV12-2, TRAJ53)
SPVIQPPTSVPPILSSNYKLTF

SEQ ID NO: 251078 - protein, 13 aa, Homo sapiens
  CDR3 for beta chain variable domain of TCR clone 125539 (TRBV7-7, TRBJ2-3)
CASSLSRTDTQYF

SEQ ID NO: 251079 - protein, 12 aa, Homo sapiens
  CDR3 for alpha chain variable domain of TCR clone 125540 (TRAV17, TRAJ40)
CWALGGTYKYIF

SEQ ID NO: 251080 - protein, 18 aa, Homo sapiens
  CDR3 for beta chain variable domain of TCR clone 125540 (TRBV7-2, TRBJ1-4)
CASSLAPGRRDEKLFLAV

SEQ ID NO: 251081 - protein, 13 aa, Homo sapiens
  CDR3 for alpha chain variable domain of TCR clone 125541 (TRAV12-2, TRAJ26)
CAVNENYGQNFVF

SEQ ID NO: 251082 - protein, 13 aa, Homo sapiens
  CDR3 for beta chain variable domain of TCR clone 125541 (TRBV18, TRBJ2-2)
CASAPTRGGELFF

SEQ ID NO: 251083 - protein, 12 aa, Homo sapiens
  CDR3 for alpha chain variable domain of TCR clone 125542 (TRAV27, TRAJ13)
CAGVRGYQQVTF

SEQ ID NO: 251084 - protein, 16 aa, Homo sapiens
  CDR3 for beta chain variable domain of TCR clone 125542 (TRBV28, TRBJ2-1)
CASSSSYSGSLNEQFF

SEQ ID NO: 251085 - protein, 15 aa, Homo sapiens
  CDR3 for alpha chain variable domain of TCR clone 125543 (TRAV13-2, TRAJ45)
CAENNSGGGADGLTF

SEQ ID NO: 251086 - protein, 13 aa, Homo sapiens
  CDR3 for beta chain variable domain of TCR clone 125543 (TRBV25-1, TRBJ2-6)
CAGRGPGANVLTF

SEQ ID NO: 251087 - protein, 13 aa, Homo sapiens
  CDR3 for alpha chain variable domain of TCR clone 125544 (TRAV12-1, TRAJ15)
CVAPNQAGTALIF

SEQ ID NO: 251088 - protein, 12 aa, Homo sapiens
  CDR3 for beta chain variable domain of TCR clone 125544 (TRBV11-2, TRBJ2-2)
CASSLGGGELFF

SEQ ID NO: 251089 - protein, 12 aa, Homo sapiens
  CDR3 for alpha chain variable domain of TCR clone 125545 (TRAV26-1, TRAJ26)
CIVYNYGQNFVF

SEQ ID NO: 251090 - protein, 15 aa, Homo sapiens
  CDR3 for beta chain variable domain of TCR clone 125545 (TRBV7-2, TRBJ2-3)
CASGLRGGSTDTQYF

SEQ ID NO: 251091 - protein, 17 aa, Homo sapiens
  CDR3 for alpha chain variable domain of TCR clone 125546 (TRAV3, TRAJ6)
CAVRDGPRAGGSYIPTF

SEQ ID NO: 251092 - protein, 14 aa, Homo sapiens
  CDR3 for beta chain variable domain of TCR clone 125546 (TRBV7-2, TRBJ2-5)
CASSPKTSFYEQYF

SEQ ID NO: 251093 - protein, 15 aa, Homo sapiens
  CDR3 for alpha chain variable domain of TCR clone 125547 (TRAV20, TRAJ43)
CAVQAGESSNNDMRF

SEQ ID NO: 251094 - protein, 14 aa, Homo sapiens
  CDR3 for beta chain variable domain of TCR clone 125547 (TRBV27, TRBJ2-1)
CASRHLGGGKEQFF

SEQ ID NO: 251095 - protein, 13 aa, Homo sapiens
  CDR3 for alpha chain variable domain of TCR clone 125548 (TRAV21, TRAJ45)
CAVMGGGADGLTF

SEQ ID NO: 251096 - protein, 15 aa, Homo sapiens
  CDR3 for beta chain variable domain of TCR clone 125548 (TRBV7-2, TRBJ1-3)
CASSPQGGSGNTIYF

SEQ ID NO: 251097 - protein, 14 aa, Homo sapiens
  CDR3 for alpha chain variable domain of TCR clone 125549 (TRAV13-2, TRAJ9)
CAENSFTGGFTTIF

SEQ ID NO: 251098 - protein, 13 aa, Homo sapiens
  CDR3 for beta chain variable domain of TCR clone 125549 (TRBV19, TRBJ2-7)
CASSIDRTYEQYF

SEQ ID NO: 251099 - protein, 10 aa, Homo sapiens
  CDR3 for alpha chain variable domain of TCR clone 125550 (TRAV12-2, TRAJ10)
CAAWTGVETH

SEQ ID NO: 251100 - protein, 16 aa, Homo sapiens
  CDR3 for beta chain variable domain of TCR clone 125550 (TRBV4-2, TRBJ1-4)
CASSQARGPTNEKLFF

SEQ ID NO: 251101 - protein, 17 aa, Homo sapiens
  CDR3 for alpha chain variable domain of TCR clone 125551 (TRAV12-3, TRAJ18)
CAMIRADRGSTLGRLYF

SEQ ID NO: 251102 - protein, 14 aa, Homo sapiens
  CDR3 for beta chain variable domain of TCR clone 125551 (TRBV5-7, TRBJ1-6)
CASTPWPAESPLHF

SEQ ID NO: 251103 - protein, 13 aa, Homo sapiens
  CDR3 for alpha chain variable domain of TCR clone 125552 (TRAV27, TRAJ45)
CRSSGGGADGLTF

SEQ ID NO: 251104 - protein, 15 aa, Homo sapiens
  CDR3 for beta chain variable domain of TCR clone 125552 (TRBV7-2, TRBJ2-1)
CASSSGLAGGNEQFF

SEQ ID NO: 251105 - protein, 16 aa, Homo sapiens
  CDR3 for alpha chain variable domain of TCR clone 125553 (TRAV12-2, TRAJ32)
CAVNLGQGGATNKPIF

SEQ ID NO: 251106 - protein, 14 aa, Homo sapiens
  CDR3 for beta chain variable domain of TCR clone 125553 (TRBV11-2, TRBJ2-3)
CASSRLARTDTQHF

SEQ ID NO: 251107 - protein, 14 aa, Homo sapiens
  CDR3 for alpha chain variable domain of TCR clone 125554 (TRAV20, TRAJ40)
CAVQAVPGTYKYIF

SEQ ID NO: 251108 - protein, 13 aa, Homo sapiens
  CDR3 for beta chain variable domain of TCR clone 125554 (TRBV27, TRBJ1-4)
CASSLMGDEKLFF

SEQ ID NO: 251109 - protein, 18 aa, Homo sapiens
  CDR3 for alpha chain variable domain of TCR clone 125555 (TRAV8-2, TRAJ41)
CVVGELRRTQIPGMHSTS

SEQ ID NO: 251110 - protein, 14 aa, Homo sapiens
  CDR3 for beta chain variable domain of TCR clone 125555 (TRBV28, TRBJ1-5)
CASSLFPGVQPQHF

SEQ ID NO: 251111 - protein, 16 aa, Homo sapiens
  CDR3 for alpha chain variable domain of TCR clone 125556 (TRAV12-3, TRAJ53)
CAMSPGSGGSNYKLTF

SEQ ID NO: 251112 - protein, 14 aa, Homo sapiens
  CDR3 for beta chain variable domain of TCR clone 125556 (TRBV20-1, TRBJ1-5)
CSARDDRGSQPQHF

SEQ ID NO: 251113 - protein, 12 aa, Homo sapiens
  CDR3 for alpha chain variable domain of TCR clone 125557 (TRAV16, TRAJ26)
CALRSYGQNFVF

SEQ ID NO: 251114 - protein, 17 aa, Homo sapiens
  CDR3 for beta chain variable domain of TCR clone 125557 (TRBV25-1, TRBJ1-2)
CASSEFGSATTNYGYTF

SEQ ID NO: 251115 - protein, 14 aa, Homo sapiens
  CDR3 for alpha chain variable domain of TCR clone 125558 (TRAV12-2, TRAJ44)
CAVNPAGTASKLTF

SEQ ID NO: 251116 - protein, 15 aa, Homo sapiens
  CDR3 for beta chain variable domain of TCR clone 125558 (TRBV2, TRBJ1-2)
CASRRDRRSNYGYNF

SEQ ID NO: 251117 - protein, 12 aa, Homo sapiens
  CDR3 for alpha chain variable domain of TCR clone 125559 (TRAV12-3, TRAJ20)
CAMVTGDYKLSF

SEQ ID NO: 251118 - protein, 13 aa, Homo sapiens
  CDR3 for beta chain variable domain of TCR clone 125559 (TRBV23-1, TRBJ1-4)
CASRGKFNEKLFF

SEQ ID NO: 251119 - protein, 11 aa, Homo sapiens
  CDR3 for alpha chain variable domain of TCR clone 125560 (TRAV21, TRAJ11)
CAVNGYSTLTF

SEQ ID NO: 251120 - protein, 11 aa, Homo sapiens
  CDR3 for beta chain variable domain of TCR clone 125560 (TRBV19, TRBJ1-1)
CANSIGSEAFF

SEQ ID NO: 251121 - protein, 11 aa, Homo sapiens
  CDR3 for alpha chain variable domain of TCR clone 125561 (TRAV27, TRAJ47)
SIVEYGNKRVF

SEQ ID NO: 251122 - protein, 18 aa, Homo sapiens
  CDR3 for beta chain variable domain of TCR clone 125561 (TRBV2, TRBJ2-1)
CASRGLAGGPRTYNEQFF

SEQ ID NO: 251123 - protein, 13 aa, Homo sapiens
  CDR3 for alpha chain variable domain of TCR clone 125562 (TRAV26-2, TRAJ43)
CILRAVNNNDMRF

SEQ ID NO: 251124 - protein, 15 aa, Homo sapiens
  CDR3 for beta chain variable domain of TCR clone 125562 (TRBV7-2, TRBJ2-1)
CASTHGTWIYNEQFF

SEQ ID NO: 251125 - protein, 14 aa, Homo sapiens
  CDR3 for alpha chain variable domain of TCR clone 125563 (TRAV1-1, TRAJ27)
CAVIYNTNAGKSTF

SEQ ID NO: 251126 - protein, 14 aa, Homo sapiens
  CDR3 for beta chain variable domain of TCR clone 125563 (TRBV6-1, TRBJ1-3)
CASVQGGGGNTIYF

SEQ ID NO: 251127 - protein, 13 aa, Homo sapiens
  CDR3 for alpha chain variable domain of TCR clone 125564 (TRAV3, TRAJ27)
CAVRPLGAGKSTF

SEQ ID NO: 251128 - protein, 13 aa, Homo sapiens
  CDR3 for beta chain variable domain of TCR clone 125564 (TRBV12-4, TRBJ2-7)
CASSLSGVYEQYF

SEQ ID NO: 251129 - protein, 14 aa, Homo sapiens
  CDR3 for alpha chain variable domain of TCR clone 125565 (TRAV12-2, TRAJ45)
CAVYSGGGADGLTF

SEQ ID NO: 251130 - protein, 14 aa, Homo sapiens
  CDR3 for beta chain variable domain of TCR clone 125565 (TRBV7-2, TRBJ2-7)
CASRSQGAAYEQYF

SEQ ID NO: 251131 - protein, 16 aa, Homo sapiens
  CDR3 for alpha chain variable domain of TCR clone 125566 (TRAV26-1, TRAJ32)
CIVRTNYGGATNKLIF

SEQ ID NO: 251132 - protein, 15 aa, Homo sapiens
  CDR3 for beta chain variable domain of TCR clone 125566 (TRBV29-1, TRBJ2-1)
CSGRDRKSSYNEQFF

SEQ ID NO: 251133 - protein, 14 aa, Homo sapiens
  CDR3 for alpha chain variable domain of TCR clone 125567 (TRAV36/DV7, TRAJ45)
CPLYSGGGADGLTF

SEQ ID NO: 251134 - protein, 14 aa, Homo sapiens
  CDR3 for beta chain variable domain of TCR clone 125567 (TRBV19, TRBJ2-1)
CASPTFVLSGEQFF

SEQ ID NO: 251135 - protein, 14 aa, Homo sapiens
  CDR3 for alpha chain variable domain of TCR clone 125568 (TRAV12-3, TRAJ10)
SYLPLTGGGNKLTF

SEQ ID NO: 251136 - protein, 15 aa, Homo sapiens
  CDR3 for beta chain variable domain of TCR clone 125568 (TRBV11-2, TRBJ1-3)
CASGLDGTVGNTIYF

SEQ ID NO: 251137 - protein, 14 aa, Homo sapiens
  CDR3 for alpha chain variable domain of TCR clone 125569 (TRAV12-2, TRAJ13)
CAVQKTGGYQKVTF

SEQ ID NO: 251138 - protein, 14 aa, Homo sapiens
  CDR3 for beta chain variable domain of TCR clone 125569 (TRBV7-2, TRBJ2-7)
CASSPKTSFYEQYF

SEQ ID NO: 251139 - protein, 12 aa, Homo sapiens
  CDR3 for alpha chain variable domain of TCR clone 125570 (TRAV13-2, TRAJ8)
CAPWLGFQKLVF

SEQ ID NO: 251140 - protein, 13 aa, Homo sapiens
  CDR3 for beta chain variable domain of TCR clone 125570 (TRBV13, TRBJ2-1)
CASILGGRGEQFF

SEQ ID NO: 251141 - protein, 10 aa, Homo sapiens
  CDR3 for alpha chain variable domain of TCR clone 125571 (TRAV21, TRAJ43)
CAMRIGDMRF

SEQ ID NO: 251142 - protein, 13 aa, Homo sapiens
  CDR3 for beta chain variable domain of TCR clone 125571 (TRBV20-1, TRBJ2-7)
CSAPGLADYEQYF

SEQ ID NO: 251143 - protein, 15 aa, Homo sapiens
  CDR3 for alpha chain variable domain of TCR clone 125572 (TRAV3, TRAJ29)
CAVRDLYSGNTPLVF

SEQ ID NO: 251144 - protein, 16 aa, Homo sapiens
  CDR3 for beta chain variable domain of TCR clone 125572 (TRBV19, TRBJ2-1)
CASSKAGPSSYNEQFF

SEQ ID NO: 251145 - protein, 14 aa, Homo sapiens
  CDR3 for alpha chain variable domain of TCR clone 125573 (TRAV1-2, TRAJ16)
CAVNRFSDGQKLLY

SEQ ID NO: 251146 - protein, 15 aa, Homo sapiens
  CDR3 for beta chain variable domain of TCR clone 125573 (TRBV5-1, TRBJ2-2)
CASSSQGGNTGELFF

SEQ ID NO: 251147 - protein, 12 aa, Homo sapiens
  CDR3 for alpha chain variable domain of TCR clone 125574 (TRAV3, TRAJ20)
CAVRDHDYKLSF

SEQ ID NO: 251148 - protein, 15 aa, Homo sapiens
  CDR3 for beta chain variable domain of TCR clone 125574 (TRBV2, TRBJ2-2)
CASSRETVGTGELFF

SEQ ID NO: 251149 - protein, 17 aa, Homo sapiens
  CDR3 for alpha chain variable domain of TCR clone 125575 (TRAV12-3, TRAJ6)
CAMSARGGAGGSYIPTF

SEQ ID NO: 251150 - protein, 12 aa, Homo sapiens
  CDR3 for beta chain variable domain of TCR clone 125575 (TRBV12-4, TRBJ2-3)
CANSTLPDTQYF

SEQ ID NO: 251151 - protein, 16 aa, Homo sapiens
  CDR3 for alpha chain variable domain of TCR clone 125576 (TRAV3, TRAJ37)
CAVRGKGSGNTGKLIF

SEQ ID NO: 251152 - protein, 14 aa, Homo sapiens
  CDR3 for beta chain variable domain of TCR clone 125576 (TRBV7-3, TRBJ2-1)
CASSLAGGTNEQFF

SEQ ID NO: 251153 - protein, 13 aa, Homo sapiens
  CDR3 for alpha chain variable domain of TCR clone 125577 (TRAV12-3, TRAJ43)
CAMIRPNNNDMRF

SEQ ID NO: 251154 - protein, 14 aa, Homo sapiens
  CDR3 for beta chain variable domain of TCR clone 125577 (TRBV11-2, TRBJ1-2)
CASSLYRGNYGYTF

SEQ ID NO: 251155 - protein, 14 aa, Homo sapiens
  CDR3 for alpha chain variable domain of TCR clone 125578 (TRAV17, TRAJ35)
CATWTIGFGNVLHC

SEQ ID NO: 251156 - protein, 15 aa, Homo sapiens
  CDR3 for beta chain variable domain of TCR clone 125578 (TRBV7-2, TRBJ2-5)
CASSPLGLDKETQYF

SEQ ID NO: 251157 - protein, 13 aa, Homo sapiens
  CDR3 for alpha chain variable domain of TCR clone 125579 (TRAV3, TRAJ27)
CAVRPLSAGKSTV

SEQ ID NO: 251158 - protein, 13 aa, Homo sapiens
  CDR3 for beta chain variable domain of TCR clone 125579 (TRBV7-9, TRBJ2-3)
CASSPGSTDTQYF

SEQ ID NO: 251159 - protein, 15 aa, Homo sapiens
  CDR3 for alpha chain variable domain of TCR clone 125580 (TRAV13-1, TRAJ9)
CAASTLNTGGFKTIF

SEQ ID NO: 251160 - protein, 15 aa, Homo sapiens
  CDR3 for beta chain variable domain of TCR clone 125580 (TRBV6-5, TRBJ2-4)
CASSPRESPKNIQYF

SEQ ID NO: 251161 - protein, 13 aa, Homo sapiens
  CDR3 for alpha chain variable domain of TCR clone 125581 (TRAV36/DV7, TRAJ7)
CAGTRYGNNRLAF

SEQ ID NO: 251162 - protein, 14 aa, Homo sapiens
  CDR3 for beta chain variable domain of TCR clone 125581 (TRBV19, TRBJ2-1)
CASPTLVLSGEQFF

SEQ ID NO: 251163 - protein, 15 aa, Homo sapiens
  CDR3 for alpha chain variable domain of TCR clone 125582 (TRAV27, TRAJ38)
CAARRNAGNNRKLIW

SEQ ID NO: 251164 - protein, 14 aa, Homo sapiens
  CDR3 for beta chain variable domain of TCR clone 125582 (TRBV11-2, TRBJ1-5)
CASSLDRGRQPQHF

SEQ ID NO: 251165 - protein, 13 aa, Homo sapiens
  CDR3 for alpha chain variable domain of TCR clone 125583 (TRAV30, TRAJ24)
CGTVTDSWGKLQF

SEQ ID NO: 251166 - protein, 18 aa, Homo sapiens
  CDR3 for beta chain variable domain of TCR clone 125583 (TRBV7-9, TRBJ2-7)
CASSLTTSGSRTWYEQYF

SEQ ID NO: 251167 - protein, 13 aa, Homo sapiens
  CDR3 for alpha chain variable domain of TCR clone 125584 (TRAV12-3, TRAJ33)
CAMSVNSNYQLIW

SEQ ID NO: 251168 - protein, 14 aa, Homo sapiens
  CDR3 for beta chain variable domain of TCR clone 125584 (TRBV18, TRBJ2-5)
CASSPGVSQETQYF

SEQ ID NO: 251169 - protein, 14 aa, Homo sapiens
  CDR3 for alpha chain variable domain of TCR clone 125585 (TRAV8-3, TRAJ10)
CAVGNAGGGNKLTF

SEQ ID NO: 251170 - protein, 16 aa, Homo sapiens
  CDR3 for beta chain variable domain of TCR clone 125585 (TRBV11-2, TRBJ1-2)
CASSLDTGGAYYGYTF

SEQ ID NO: 251171 - protein, 14 aa, Homo sapiens
  CDR3 for alpha chain variable domain of TCR clone 125586 (TRAV12-3, TRAJ29)
CAMSPYSGYTPLVF

SEQ ID NO: 251172 - protein, 15 aa, Homo sapiens
  CDR3 for beta chain variable domain of TCR clone 125586 (TRBV27, TRBJ2-1)
CASSNGGGSSNEQFF

SEQ ID NO: 251173 - protein, 13 aa, Homo sapiens
  CDR3 for alpha chain variable domain of TCR clone 125587 (TRAV12-2, TRAJ39)
CAVNNNAGNMHTF

SEQ ID NO: 251174 - protein, 13 aa, Homo sapiens
  CDR3 for beta chain variable domain of TCR clone 125587 (TRBV2, TRBJ1-5)
CATAGPGNQPQHF

SEQ ID NO: 251175 - protein, 15 aa, Homo sapiens
  CDR3 for alpha chain variable domain of TCR clone 125588 (TRAV26-1, TRAJ22)
CIVRVSFWFCKATVL

SEQ ID NO: 251176 - protein, 13 aa, Homo sapiens
  CDR3 for beta chain variable domain of TCR clone 125588 (TRBV7-9, TRBJ1-2)
CASSLKQNYGYTF

SEQ ID NO: 251177 - protein, 11 aa, Homo sapiens
  CDR3 for alpha chain variable domain of TCR clone 125589 (TRAV23/DV6, TRAJ49)
CAARAGNQFYF

SEQ ID NO: 251178 - protein, 11 aa, Homo sapiens
  CDR3 for beta chain variable domain of TCR clone 125589 (TRBV7-9, TRBJ2-3)
CASSYTDTQYF

SEQ ID NO: 251179 - protein, 14 aa, Homo sapiens
  CDR3 for alpha chain variable domain of TCR clone 125590 (TRAV12-2, TRAJ13)
CAVKKAGGYQKVTF

SEQ ID NO: 251180 - protein, 12 aa, Homo sapiens
  CDR3 for beta chain variable domain of TCR clone 125590 (TRBV12-4, TRBJ1-2)
CASSFIWLHLRF

SEQ ID NO: 251181 - protein, 13 aa, Homo sapiens
  CDR3 for alpha chain variable domain of TCR clone 125591 (TRAV25, TRAJ16)
CAGRTARSRSLQG

SEQ ID NO: 251182 - protein, 18 aa, Homo sapiens
  CDR3 for beta chain variable domain of TCR clone 125591 (TRBV6-5, TRBJ1-1)
CTSVPALFDGLLNTEAFF

SEQ ID NO: 251183 - protein, 13 aa, Homo sapiens
  CDR3 for alpha chain variable domain of TCR clone 125592 (TRAV12-1, TRAJ40)
CVVNSSGTYKYIL

SEQ ID NO: 251184 - protein, 14 aa, Homo sapiens
  CDR3 for beta chain variable domain of TCR clone 125592 (TRBV2, TRBJ1-6)
CASEVSSYNSPLHC

SEQ ID NO: 251185 - protein, 21 aa, Homo sapiens
  CDR3 for alpha chain variable domain of TCR clone 125593 (TRAV1-1, TRAJ6)
CLLLLRCERLERTGGSYIPTF

SEQ ID NO: 251186 - protein, 13 aa, Homo sapiens
  CDR3 for beta chain variable domain of TCR clone 125593 (TRBV10-2, TRBJ2-7)
CASEASGGYEQYF

SEQ ID NO: 251187 - protein, 11 aa, Homo sapiens
  CDR3 for alpha chain variable domain of TCR clone 125594 (TRAV13-1, TRAJ40)
CVVSGTYIYIF

SEQ ID NO: 251188 - protein, 13 aa, Homo sapiens
  CDR3 for beta chain variable domain of TCR clone 125594 (TRBV19, TRBJ1-5)
CASSIGGNQPQHF

SEQ ID NO: 251189 - protein, 14 aa, Homo sapiens
  CDR3 for alpha chain variable domain of TCR clone 125595 (TRAV8-6, TRAJ13)
CAVSDSGGYQKVTF

SEQ ID NO: 251190 - protein, 15 aa, Homo sapiens
  CDR3 for beta chain variable domain of TCR clone 125595 (TRBV7-3, TRBJ2-6)
CASSRTGTGANVLTF

SEQ ID NO: 251191 - protein, 11 aa, Homo sapiens
  CDR3 for alpha chain variable domain of TCR clone 125596 (TRAV23/DV6, TRAJ58)
CAARLLRGETS

SEQ ID NO: 251192 - protein, 11 aa, Homo sapiens
  CDR3 for beta chain variable domain of TCR clone 125596 (TRBV12-4, TRBJ2-3)
CASTATDTQYF

SEQ ID NO: 251193 - protein, 14 aa, Homo sapiens
  CDR3 for alpha chain variable domain of TCR clone 125597 (TRAV26-1, TRAJ38)
CIADNAGNNRKLIW

SEQ ID NO: 251194 - protein, 13 aa, Homo sapiens
  CDR3 for beta chain variable domain of TCR clone 125597 (TRBV20-1, TRBJ1-1)
CSARGGGNPEAFF

SEQ ID NO: 251195 - protein, 14 aa, Homo sapiens
  CDR3 for alpha chain variable domain of TCR clone 125598 (TRAV12-1, TRAJ45)
CVVNIGGGADGPTF

SEQ ID NO: 251196 - protein, 15 aa, Homo sapiens
  CDR3 for beta chain variable domain of TCR clone 125598 (TRBV7-2, TRBJ2-7)
CASSLKGALTYEQYF

SEQ ID NO: 251197 - protein, 13 aa, Homo sapiens
  CDR3 for alpha chain variable domain of TCR clone 125599 (TRAV16, TRAJ31)
CALSAHNNSRLMF

SEQ ID NO: 251198 - protein, 17 aa, Homo sapiens
  CDR3 for beta chain variable domain of TCR clone 125599 (TRBV12-4, TRBJ2-1)
CASSPGLAGGRINEQFF

SEQ ID NO: 251199 - protein, 14 aa, Homo sapiens
  CDR3 for alpha chain variable domain of TCR clone 125600 (TRAV26-1, TRAJ38)
RIADNAGNDRKLIW

SEQ ID NO: 251200 - protein, 13 aa, Homo sapiens
  CDR3 for beta chain variable domain of TCR clone 125600 (TRBV20-1, TRBJ1-1)
CSARGGGNTEAFF

SEQ ID NO: 251201 - protein, 14 aa, Homo sapiens
  CDR3 for alpha chain variable domain of TCR clone 125601 (TRAV12-2, TRAJ45)
CAVNIGGGADGHTF

SEQ ID NO: 251202 - protein, 17 aa, Homo sapiens
  CDR3 for beta chain variable domain of TCR clone 125601 (TRBV7-8, TRBJ2-6)
CASSAGTGGAGANVLTF

SEQ ID NO: 251203 - protein, 11 aa, Homo sapiens
  CDR3 for alpha chain variable domain of TCR clone 125602 (TRAV2, TRAJ21)
CAVFNFNKFYF

SEQ ID NO: 251204 - protein, 20 aa, Homo sapiens
  CDR3 for beta chain variable domain of TCR clone 125602 (TRBV28, TRBJ2-1)
CASTPIGRSPGLAGGNEQFF

SEQ ID NO: 251205 - protein, 14 aa, Homo sapiens
  CDR3 for alpha chain variable domain of TCR clone 125603 (TRAV13-1, TRAJ35)
CAASKGGFGNVLHC

SEQ ID NO: 251206 - protein, 13 aa, Homo sapiens
  CDR3 for beta chain variable domain of TCR clone 125603 (TRBV7-3, TRBJ1-2)
CASSLKQNYGYTF

SEQ ID NO: 251207 - protein, 14 aa, Homo sapiens
  CDR3 for alpha chain variable domain of TCR clone 125604 (TRAV1-1, TRAJ27)
CAVIYNTNAGKSTF

SEQ ID NO: 251208 - protein, 14 aa, Homo sapiens
  CDR3 for beta chain variable domain of TCR clone 125604 (TRBV5-1, TRBJ2-3)
CASSLFRPTDTQYF

SEQ ID NO: 251209 - protein, 11 aa, Homo sapiens
  CDR3 for alpha chain variable domain of TCR clone 125605 (TRAV21, TRAJ34)
CAHYNTDKLIF

SEQ ID NO: 251210 - protein, 16 aa, Homo sapiens
  CDR3 for beta chain variable domain of TCR clone 125605 (TRBV19, TRBJ2-1)
CASSKAGPSSYNEQFF

SEQ ID NO: 251211 - protein, 14 aa, Homo sapiens
  CDR3 for alpha chain variable domain of TCR clone 125606 (TRAV3, TRAJ9)
CAVRGNTGRFKTIF

SEQ ID NO: 251212 - protein, 14 aa, Homo sapiens
  CDR3 for beta chain variable domain of TCR clone 125606 (TRBV15, TRBJ2-1)
CATSGVEDYNEQFF

SEQ ID NO: 251213 - protein, 16 aa, Homo sapiens
  CDR3 for alpha chain variable domain of TCR clone 125607 (TRAV8-3, TRAJ13)
CAVGAYPFGGYQKVTF

SEQ ID NO: 251214 - protein, 14 aa, Homo sapiens
  CDR3 for beta chain variable domain of TCR clone 125607 (TRBV18, TRBJ2-5)
CASSPRASSETQYF

SEQ ID NO: 251215 - protein, 10 aa, Homo sapiens
  CDR3 for alpha chain variable domain of TCR clone 125608 (TRAV26-1, TRAJ40)
CIAGTYKYIF

SEQ ID NO: 251216 - protein, 15 aa, Homo sapiens
  CDR3 for beta chain variable domain of TCR clone 125608 (TRBV19, TRBJ2-1)
CASSSPGVPRDEQFF

SEQ ID NO: 251217 - protein, 14 aa, Homo sapiens
  CDR3 for alpha chain variable domain of TCR clone 125609 (TRAV13-1, TRAJ53)
CAASISGSNYKLPF

SEQ ID NO: 251218 - protein, 15 aa, Homo sapiens
  CDR3 for beta chain variable domain of TCR clone 125609 (TRBV4-1, TRBJ1-4)
CASSDTGGTNEKLFF

SEQ ID NO: 251219 - protein, 18 aa, Homo sapiens
  CDR3 for alpha chain variable domain of TCR clone 125610 (TRAV21, TRAJ52)
CAVRPSPAGGTSYGKLTF

SEQ ID NO: 251220 - protein, 15 aa, Homo sapiens
  CDR3 for beta chain variable domain of TCR clone 125610 (TRBV7-9, TRBJ2-7)
CASSSSGLAVYEQYL

SEQ ID NO: 251221 - protein, 10 aa, Homo sapiens
  CDR3 for alpha chain variable domain of TCR clone 125611 (TRAV2, TRAJ34)
CAVVNDKLTF

SEQ ID NO: 251222 - protein, 14 aa, Homo sapiens
  CDR3 for beta chain variable domain of TCR clone 125611 (TRBV20-1, TRBJ2-3)
CSARGGTSTDTQYF

SEQ ID NO: 251223 - protein, 14 aa, Homo sapiens
  CDR3 for alpha chain variable domain of TCR clone 125612 (TRAV21, TRAJ35)
CAVMPIGFGNVLHC

SEQ ID NO: 251224 - protein, 12 aa, Homo sapiens
  CDR3 for beta chain variable domain of TCR clone 125612 (TRBV7-9, TRBJ2-7)
YAGSIKREEQYF

SEQ ID NO: 251225 - protein, 14 aa, Homo sapiens
  CDR3 for alpha chain variable domain of TCR clone 125613 (TRAV8-2, TRAJ37)
CVVSISGNTGKLIF

SEQ ID NO: 251226 - protein, 16 aa, Homo sapiens
  CDR3 for beta chain variable domain of TCR clone 125613 (TRBV4-2, TRBJ1-1)
CASRPLDGGGDTEAFF

SEQ ID NO: 251227 - protein, 13 aa, Homo sapiens
  CDR3 for alpha chain variable domain of TCR clone 125614 (TRAV3, TRAJ21)
CAVREPDFNKFYF

SEQ ID NO: 251228 - protein, 16 aa, Homo sapiens
  CDR3 for beta chain variable domain of TCR clone 125614 (TRBV28, TRBJ2-1)
CASSSPEYPRDNEQFF

SEQ ID NO: 251229 - protein, 21 aa, Homo sapiens
  CDR3 for alpha chain variable domain of TCR clone 125615 (TRAV36/DV7, TRAJ39)
TATQTGDSAIYLPNAGNMLTF

SEQ ID NO: 251230 - protein, 16 aa, Homo sapiens
  CDR3 for beta chain variable domain of TCR clone 125615 (TRBV7-3, TRBJ2-2)
CASSLKRGTLSGELFF

SEQ ID NO: 251231 - protein, 12 aa, Homo sapiens
  CDR3 for alpha chain variable domain of TCR clone 125616 (TRAV8-3, TRAJ41)
CAVALSGYALNF

SEQ ID NO: 251232 - protein, 18 aa, Homo sapiens
  CDR3 for beta chain variable domain of TCR clone 125616 (TRBV20-1, TRBJ2-6)
CSAETTPTHGAGANVLTF

SEQ ID NO: 251233 - protein, 12 aa, Homo sapiens
  CDR3 for alpha chain variable domain of TCR clone 125617 (TRAV35, TRAJ30)
CAGLNRDDEIIF

SEQ ID NO: 251234 - protein, 15 aa, Homo sapiens
  CDR3 for beta chain variable domain of TCR clone 125617 (TRBV9, TRBJ1-6)
CASSVAGTGDSPLHF

SEQ ID NO: 251235 - protein, 11 aa, Homo sapiens
  CDR3 for alpha chain variable domain of TCR clone 125618 (TRAV2, TRAJ13)
CASGGYQKVTF

SEQ ID NO: 251236 - protein, 12 aa, Homo sapiens
  CDR3 for beta chain variable domain of TCR clone 125618 (TRBV11-2, TRBJ2-2)
CASSLGGGELSF

SEQ ID NO: 251237 - protein, 14 aa, Homo sapiens
  CDR3 for alpha chain variable domain of TCR clone 125619 (TRAV30, TRAJ33)
CGTVAPRSNYQLIW

SEQ ID NO: 251238 - protein, 14 aa, Homo sapiens
  CDR3 for beta chain variable domain of TCR clone 125619 (TRBV2, TRBJ2-7)
CASSLTSGGYEQYF

SEQ ID NO: 251239 - protein, 15 aa, Homo sapiens
  CDR3 for alpha chain variable domain of TCR clone 125620 (TRAV23/DV6, TRAJ12)
CAAIDLGAMDSSYKL

SEQ ID NO: 251240 - protein, 15 aa, Homo sapiens
  CDR3 for beta chain variable domain of TCR clone 125620 (TRBV12-4, TRBJ2-5)
CASTLNSGRGENQYF

SEQ ID NO: 251241 - protein, 15 aa, Homo sapiens
  CDR3 for alpha chain variable domain of TCR clone 125621 (TRAV26-1, TRAJ29)
CIVRVEGPGNTPLVF

SEQ ID NO: 251242 - protein, 14 aa, Homo sapiens
  CDR3 for beta chain variable domain of TCR clone 125621 (TRBV18, TRBJ2-5)
CASPPGVSQETQYF

SEQ ID NO: 251243 - protein, 20 aa, Homo sapiens
  CDR3 for alpha chain variable domain of TCR clone 125622 (TRAV17, TRAJ30)
CVPEREMTRSSLEKGHDFIF

SEQ ID NO: 251244 - protein, 14 aa, Homo sapiens
  CDR3 for beta chain variable domain of TCR clone 125622 (TRBV7-7, TRBJ2-2)
CAGSRDRSTGELFF

SEQ ID NO: 251245 - protein, 13 aa, Homo sapiens
  CDR3 for alpha chain variable domain of TCR clone 125623 (TRAV8-4, TRAJ48)
CAVSLFGNEKLTF

SEQ ID NO: 251246 - protein, 13 aa, Homo sapiens
  CDR3 for beta chain variable domain of TCR clone 125623 (TRBV18, TRBJ2-7)
CASQSGGGYEQYF

SEQ ID NO: 251247 - protein, 15 aa, Homo sapiens
  CDR3 for alpha chain variable domain of TCR clone 125624 (TRAV13-1, TRAJ5)
CAASKADTGRRELTF

SEQ ID NO: 251248 - protein, 15 aa, Homo sapiens
  CDR3 for beta chain variable domain of TCR clone 125624 (TRBV19, TRBJ2-1)
CASSMGWNSNNEQFF

SEQ ID NO: 251249 - protein, 10 aa, Homo sapiens
  CDR3 for alpha chain variable domain of TCR clone 125625 (TRAV23/DV6, TRAJ57)
CAASSTPSQG

SEQ ID NO: 251250 - protein, 14 aa, Homo sapiens
  CDR3 for beta chain variable domain of TCR clone 125625 (TRBV25-1, TRBJ1-1)
CASTYLGGNTEAFF

SEQ ID NO: 251251 - protein, 10 aa, Homo sapiens
  CDR3 for alpha chain variable domain of TCR clone 125626 (TRAV8-6, TRAJ34)
CAVNTDKLIF

SEQ ID NO: 251252 - protein, 14 aa, Homo sapiens
  CDR3 for beta chain variable domain of TCR clone 125626 (TRBV7-2, TRBJ2-7)
CASSPKTSFYEQYF

SEQ ID NO: 251253 - protein, 15 aa, Homo sapiens
  CDR3 for alpha chain variable domain of TCR clone 125627 (TRAV12-3, TRAJ42)
CAMSGHGGSQGNLIF

SEQ ID NO: 251254 - protein, 14 aa, Homo sapiens
  CDR3 for beta chain variable domain of TCR clone 125627 (TRBV19, TRBJ2-1)
CASPTFVLSGEQFF

SEQ ID NO: 251255 - protein, 13 aa, Homo sapiens
  CDR3 for alpha chain variable domain of TCR clone 125628 (TRAV24, TRAJ42)
CAFSTGSQGNLIF

SEQ ID NO: 251256 - protein, 15 aa, Homo sapiens
  CDR3 for beta chain variable domain of TCR clone 125628 (TRBV11-2, TRBJ2-1)
CASSKNRGLIYEQFF

SEQ ID NO: 251257 - protein, 14 aa, Homo sapiens
  CDR3 for alpha chain variable domain of TCR clone 125629 (TRAV8-1, TRAJ4)
CAVPFSGGYNKLLF

SEQ ID NO: 251258 - protein, 16 aa, Homo sapiens
  CDR3 for beta chain variable domain of TCR clone 125629 (TRBV6-1, TRBJ1-2)
CASSGAWQGRSHGYTF

SEQ ID NO: 251259 - protein, 16 aa, Homo sapiens
  CDR3 for alpha chain variable domain of TCR clone 125630 (TRAV12-2, TRAJ50)
CAVGTATKTYYDKVIF

SEQ ID NO: 251260 - protein, 12 aa, Homo sapiens
  CDR3 for beta chain variable domain of TCR clone 125630 (TRBV12-4, TRBJ1-5)
CASSLGRQPQHF

SEQ ID NO: 251261 - protein, 15 aa, Homo sapiens
  CDR3 for alpha chain variable domain of TCR clone 125631 (TRAV2, TRAJ11)
CAVGGRNSGYSTLTF

SEQ ID NO: 251262 - protein, 14 aa, Homo sapiens
  CDR3 for beta chain variable domain of TCR clone 125631 (TRBV7-2, TRBJ2-7)
CASSPKTSFYEQYF

SEQ ID NO: 251263 - protein, 12 aa, Homo sapiens
  CDR3 for alpha chain variable domain of TCR clone 125632 (TRAV13-2, TRAJ23)
CAERRRGGKLIF

SEQ ID NO: 251264 - protein, 16 aa, Homo sapiens
  CDR3 for beta chain variable domain of TCR clone 125632 (TRBV7-9, TRBJ1-2)
CASSLGFSSGEDGYTF

SEQ ID NO: 251265 - protein, 11 aa, Homo sapiens
  CDR3 for alpha chain variable domain of TCR clone 125633 (TRAV1-2, TRAJ20)
CAVSNDYKLSF

SEQ ID NO: 251266 - protein, 16 aa, Homo sapiens
  CDR3 for beta chain variable domain of TCR clone 125633 (TRBV29-1, TRBJ2-6)
CRVEDITYSGANVLTF

SEQ ID NO: 251267 - protein, 15 aa, Homo sapiens
  CDR3 for alpha chain variable domain of TCR clone 125634 (TRAV26-1, TRAJ44)
CIVRANTGTASKLTF

SEQ ID NO: 251268 - protein, 17 aa, Homo sapiens
  CDR3 for beta chain variable domain of TCR clone 125634 (TRBV7-3, TRBJ2-3)
CASSLMKRMRGADTQYF

SEQ ID NO: 251269 - protein, 16 aa, Homo sapiens
  CDR3 for alpha chain variable domain of TCR clone 125635 (TRAV8-2, TRAJ45)
CVVSEGTGGGADGLTF

SEQ ID NO: 251270 - protein, 15 aa, Homo sapiens
  CDR3 for beta chain variable domain of TCR clone 125635 (TRBV20-1, TRBJ2-7)
CSARDRVSGMDEQYF

SEQ ID NO: 251271 - protein, 13 aa, Homo sapiens
  CDR3 for alpha chain variable domain of TCR clone 125636 (TRAV27, TRAJ49)
CAPRPYTGNQFYF

SEQ ID NO: 251272 - protein, 12 aa, Homo sapiens
  CDR3 for beta chain variable domain of TCR clone 125636 (TRBV7-8, TRBJ2-7)
CASSLGDREQYF

SEQ ID NO: 251273 - protein, 12 aa, Homo sapiens
  CDR3 for alpha chain variable domain of TCR clone 125637 (TRAV20, TRAJ6)
CVHAGGSYIPTF

SEQ ID NO: 251274 - protein, 16 aa, Homo sapiens
  CDR3 for beta chain variable domain of TCR clone 125637 (TRBV5-1, TRBJ2-5)
CASSLRRTSGQETQYF

SEQ ID NO: 251275 - protein, 12 aa, Homo sapiens
  CDR3 for alpha chain variable domain of TCR clone 125638 (TRAV8-3, TRAJ41)
CAVALSGYALNF

SEQ ID NO: 251276 - protein, 10 aa, Homo sapiens
  CDR3 for beta chain variable domain of TCR clone 125638 (TRBV7-3, TRBJ2-2)
CASSLSGTSG

SEQ ID NO: 251277 - protein, 13 aa, Homo sapiens
  CDR3 for alpha chain variable domain of TCR clone 125639 (TRAV12-3, TRAJ40)
CAMSARGTYKYIF

SEQ ID NO: 251278 - protein, 15 aa, Homo sapiens
  CDR3 for beta chain variable domain of TCR clone 125639 (TRBV2, TRBJ1-5)
CASSVNRPSNQPQHF

SEQ ID NO: 251279 - protein, 14 aa, Homo sapiens
  CDR3 for alpha chain variable domain of TCR clone 125640 (TRAV12-2, TRAJ9)
CAVLFKAAGNKLTF

SEQ ID NO: 251280 - protein, 13 aa, Homo sapiens
  CDR3 for beta chain variable domain of TCR clone 125640 (TRBV19, TRBJ1-2)
CASSVPGQDGYTF

SEQ ID NO: 251281 - protein, 16 aa, Homo sapiens
  CDR3 for alpha chain variable domain of TCR clone 125641 (TRAV17, TRAJ52)
CATSNASGTSYGKLTF

SEQ ID NO: 251282 - protein, 13 aa, Homo sapiens
  CDR3 for beta chain variable domain of TCR clone 125641 (TRBV27, TRBJ1-6)
CASSLVLVSPLHF

SEQ ID NO: 251283 - protein, 14 aa, Homo sapiens
  CDR3 for alpha chain variable domain of TCR clone 125642 (TRAV1-1, TRAJ27)
CAVGDTTNAGKSTF

SEQ ID NO: 251284 - protein, 14 aa, Homo sapiens
  CDR3 for beta chain variable domain of TCR clone 125642 (TRBV10-2, TRBJ1-5)
CASSSTGRNQPQHF

SEQ ID NO: 251285 - protein, 18 aa, Homo sapiens
  CDR3 for alpha chain variable domain of TCR clone 125643 (TRAV26-1, TRAJ45)
CIVRPGGYSGGGADGLTF

SEQ ID NO: 251286 - protein, 13 aa, Homo sapiens
  CDR3 for beta chain variable domain of TCR clone 125643 (TRBV4-1, TRBJ2-1)
CASSQEVQYEQFF

SEQ ID NO: 251287 - protein, 14 aa, Homo sapiens
  CDR3 for alpha chain variable domain of TCR clone 125644 (TRAV9-2, TRAJ39)
CALYIYNAGNMLTF

SEQ ID NO: 251288 - protein, 15 aa, Homo sapiens
  CDR3 for beta chain variable domain of TCR clone 125644 (TRBV10-3, TRBJ2-1)
CAIRNGTSGHNEQFF

SEQ ID NO: 251289 - protein, 13 aa, Homo sapiens
  CDR3 for alpha chain variable domain of TCR clone 125645 (TRAV13-1, TRAJ39)
CAASIWAGNMLTF

SEQ ID NO: 251290 - protein, 15 aa, Homo sapiens
  CDR3 for beta chain variable domain of TCR clone 125645 (TRBV7-9, TRBJ1-1)
CASSLLEQGGTESFF

SEQ ID NO: 251291 - protein, 16 aa, Homo sapiens
  CDR3 for alpha chain variable domain of TCR clone 125646 (TRAV26-1, TRAJ40)
CIVRGYPTSGTYKYIF

SEQ ID NO: 251292 - protein, 14 aa, Homo sapiens
  CDR3 for beta chain variable domain of TCR clone 125646 (TRBV5-1, TRBJ1-4)
RASSSGQGGEKLFF

SEQ ID NO: 251293 - protein, 13 aa, Homo sapiens
  CDR3 for alpha chain variable domain of TCR clone 125647 (TRAV2, TRAJ29)
CAAGNSGNTPLVF

SEQ ID NO: 251294 - protein, 16 aa, Homo sapiens
  CDR3 for beta chain variable domain of TCR clone 125647 (TRBV7-9, TRBJ1-2)
CASSPGGGAINYGYIF

SEQ ID NO: 251295 - protein, 12 aa, Homo sapiens
  CDR3 for alpha chain variable domain of TCR clone 125648 (TRAV1-2, TRAJ26)
CAVGYYGQNFVF

SEQ ID NO: 251296 - protein, 14 aa, Homo sapiens
  CDR3 for beta chain variable domain of TCR clone 125648 (TRBV11-1, TRBJ2-7)
CASSFRQGSYEQYF

SEQ ID NO: 251297 - protein, 18 aa, Homo sapiens
  CDR3 for alpha chain variable domain of TCR clone 125649 (TRAV29/DV5, TRAJ52)
CAAGFRGAGGTSYGKLTF

SEQ ID NO: 251298 - protein, 15 aa, Homo sapiens
  CDR3 for beta chain variable domain of TCR clone 125649 (TRBV20-1, TRBJ2-7)
CSAESGTSGAYEQYF

SEQ ID NO: 251299 - protein, 16 aa, Homo sapiens
  CDR3 for alpha chain variable domain of TCR clone 125650 (TRAV3, TRAJ42)
CAVRDIEGGSQGNLIF

SEQ ID NO: 251300 - protein, 14 aa, Homo sapiens
  CDR3 for beta chain variable domain of TCR clone 125650 (TRBV18, TRBJ1-1)
CASAPPTGRTEAFF

SEQ ID NO: 251301 - protein, 18 aa, Homo sapiens
  CDR3 for alpha chain variable domain of TCR clone 125651 (TRAV13-1, TRAJ52)
CAEKNPNAGGTSYGKLTF

SEQ ID NO: 251302 - protein, 15 aa, Homo sapiens
  CDR3 for beta chain variable domain of TCR clone 125651 (TRBV6-1, TRBJ2-3)
CASSERGGITDTQYF

SEQ ID NO: 251303 - protein, 18 aa, Homo sapiens
  CDR3 for alpha chain variable domain of TCR clone 125652 (TRAV29/DV5, TRAJ52)
CPAGFRGAGGTSYGKLTF

SEQ ID NO: 251304 - protein, 16 aa, Homo sapiens
  CDR3 for beta chain variable domain of TCR clone 125652 (TRBV7-3, TRBJ2-2)
CASSLKRGTLSGELFF

SEQ ID NO: 251305 - protein, 12 aa, Homo sapiens
  CDR3 for alpha chain variable domain of TCR clone 125653 (TRAV27, TRAJ35)
CAGADIGNVLHC

SEQ ID NO: 251306 - protein, 16 aa, Homo sapiens
  CDR3 for beta chain variable domain of TCR clone 125653 (TRBV3-1, TRBJ2-5)
CASSQDWASGQETQYF

SEQ ID NO: 251307 - protein, 16 aa, Homo sapiens
  CDR3 for alpha chain variable domain of TCR clone 125654 (TRAV30, TRAJ24)
CGTEIVEADSWGKFQF

SEQ ID NO: 251308 - protein, 13 aa, Homo sapiens
  CDR3 for beta chain variable domain of TCR clone 125654 (TRBV10-3, TRBJ2-7)
CASKLAVNYEQYF

SEQ ID NO: 251309 - protein, 13 aa, Homo sapiens
  CDR3 for alpha chain variable domain of TCR clone 125655 (TRAV21, TRAJ20)
YAVSRLGDYKLSF

SEQ ID NO: 251310 - protein, 13 aa, Homo sapiens
  CDR3 for beta chain variable domain of TCR clone 125655 (TRBV7-3, TRBJ1-1)
CASSPAGGLEAFF

SEQ ID NO: 251311 - protein, 18 aa, Homo sapiens
  CDR3 for alpha chain variable domain of TCR clone 125656 (TRAV13-1, TRAJ52)
CAAKNPNAGGTSYGKLTF

SEQ ID NO: 251312 - protein, 16 aa, Homo sapiens
  CDR3 for beta chain variable domain of TCR clone 125656 (TRBV28, TRBJ2-7)
CASSLFFETGGPEQYF

SEQ ID NO: 251313 - protein, 14 aa, Homo sapiens
  CDR3 for alpha chain variable domain of TCR clone 125657 (TRAV1-2, TRAJ15)
CAVRDRQAGTALIF

SEQ ID NO: 251314 - protein, 14 aa, Homo sapiens
  CDR3 for beta chain variable domain of TCR clone 125657 (TRBV2, TRBJ2-1)
CASSEALDGNEQFF

SEQ ID NO: 251315 - protein, 14 aa, Homo sapiens
  CDR3 for alpha chain variable domain of TCR clone 125658 (TRAV12-2, TRAJ33)
CAGKRARSNYQLIW

SEQ ID NO: 251316 - protein, 12 aa, Homo sapiens
  CDR3 for beta chain variable domain of TCR clone 125658 (TRBV24-1, TRBJ2-3)
CATSDSTDTQYF

SEQ ID NO: 251317 - protein, 16 aa, Homo sapiens
  CDR3 for alpha chain variable domain of TCR clone 125659 (TRAV3, TRAJ21)
CAVRDIERGNFNKFYF

SEQ ID NO: 251318 - protein, 15 aa, Homo sapiens
  CDR3 for beta chain variable domain of TCR clone 125659 (TRBV28, TRBJ2-1)
CASSLDTSSYNEQFF

SEQ ID NO: 251319 - protein, 14 aa, Homo sapiens
  CDR3 for alpha chain variable domain of TCR clone 125660 (TRAV16, TRAJ33)
CALSAMDSNYKLIW

SEQ ID NO: 251320 - protein, 12 aa, Homo sapiens
  CDR3 for beta chain variable domain of TCR clone 125660 (TRBV28, TRBJ2-6)
CAIQAGANVLTF

SEQ ID NO: 251321 - protein, 14 aa, Homo sapiens
  CDR3 for alpha chain variable domain of TCR clone 125661 (TRAV12-2, TRAJ45)
CVVYSGGGADGLTF

SEQ ID NO: 251322 - protein, 12 aa, Homo sapiens
  CDR3 for beta chain variable domain of TCR clone 125661 (TRBV5-1, TRBJ2-7)
CASSFRGYEQYF

SEQ ID NO: 251323 - protein, 14 aa, Homo sapiens
  CDR3 for alpha chain variable domain of TCR clone 125662 (TRAV12-2, TRAJ15)
CAPHTGQAGTALIF

SEQ ID NO: 251324 - protein, 13 aa, Homo sapiens
  CDR3 for beta chain variable domain of TCR clone 125662 (TRBV19, TRBJ2-5)
CASRDSRRETQYF

SEQ ID NO: 251325 - protein, 13 aa, Homo sapiens
  CDR3 for alpha chain variable domain of TCR clone 125663 (TRAV2, TRAJ40)
CAVVTSGTYKYIF

SEQ ID NO: 251326 - protein, 18 aa, Homo sapiens
  CDR3 for beta chain variable domain of TCR clone 125663 (TRBV11-2, TRBJ2-3)
CASSLGGASRGAPNTQYV

SEQ ID NO: 251327 - protein, 23 aa, Homo sapiens
  CDR3 for alpha chain variable domain of TCR clone 125664 (TRAV26-1, TRAJ38)
CIVRQLNAGNNHIQNPDPAVYQL

SEQ ID NO: 251328 - protein, 13 aa, Homo sapiens
  CDR3 for beta chain variable domain of TCR clone 125664 (TRBV18, TRBJ1-1)
CASSPNGDTEAFF

SEQ ID NO: 251329 - protein, 14 aa, Homo sapiens
  CDR3 for alpha chain variable domain of TCR clone 125665 (TRAV12-3, TRAJ10)
SHLPLTGGGNKLTF

SEQ ID NO: 251330 - protein, 17 aa, Homo sapiens
  CDR3 for beta chain variable domain of TCR clone 125665 (TRBV11-2, TRBJ2-1)
CACSLYPPGVEYNEQFF

SEQ ID NO: 251331 - protein, 16 aa, Homo sapiens
  CDR3 for alpha chain variable domain of TCR clone 125666 (TRAV30, TRAJ24)
CGTEIVDADSWGKFQF

SEQ ID NO: 251332 - protein, 16 aa, Homo sapiens
  CDR3 for beta chain variable domain of TCR clone 125666 (TRBV12-4, TRBJ1-5)
CASRQPVEGSNQPQHF

SEQ ID NO: 251333 - protein, 15 aa, Homo sapiens
  CDR3 for alpha chain variable domain of TCR clone 125667 (TRAV13-1, TRAJ17)
CAASIERAAGNKLTF

SEQ ID NO: 251334 - protein, 12 aa, Homo sapiens
  CDR3 for beta chain variable domain of TCR clone 125667 (TRBV5-7, TRBJ1-1)
CASSLGRGKAFC

SEQ ID NO: 251335 - protein, 13 aa, Homo sapiens
  CDR3 for alpha chain variable domain of TCR clone 125668 (TRAV38-1, TRAJ42)
CARWGGSQGNLIF

SEQ ID NO: 251336 - protein, 14 aa, Homo sapiens
  CDR3 for beta chain variable domain of TCR clone 125668 (TRBV6-1, TRBJ1-3)
RASVQGGGGNTIYF

SEQ ID NO: 251337 - protein, 13 aa, Homo sapiens
  CDR3 for alpha chain variable domain of TCR clone 125669 (TRAV1-2, TRAJ9)
CAALNTGGFTTIF

SEQ ID NO: 251338 - protein, 12 aa, Homo sapiens
  CDR3 for beta chain variable domain of TCR clone 125669 (TRBV11-3, TRBJ1-1)
CASSHRQGEAFF

SEQ ID NO: 251339 - protein, 15 aa, Homo sapiens
  CDR3 for alpha chain variable domain of TCR clone 125670 (TRAV12-1, TRAJ44)
CVVFVNTGTASKLTF

SEQ ID NO: 251340 - protein, 15 aa, Homo sapiens
  CDR3 for beta chain variable domain of TCR clone 125670 (TRBV27, TRBJ2-7)
CASSTAGTGSYEQYF

SEQ ID NO: 251341 - protein, 15 aa, Homo sapiens
  CDR3 for alpha chain variable domain of TCR clone 125671 (TRAV12-3, TRAJ27)
CAMRAYNTNAGKSTF

SEQ ID NO: 251342 - protein, 14 aa, Homo sapiens
  CDR3 for beta chain variable domain of TCR clone 125671 (TRBV7-2, TRBJ1-1)
CASSFLTGTTEAFF

SEQ ID NO: 251343 - protein, 17 aa, Homo sapiens
  CDR3 for alpha chain variable domain of TCR clone 125672 (TRAV38-2/DV8, TRAJ38)
CAYRSARGAGNNRKLIW

SEQ ID NO: 251344 - protein, 13 aa, Homo sapiens
  CDR3 for beta chain variable domain of TCR clone 125672 (TRBV6-5, TRBJ2-1)
CASGGRVGNEQFF

SEQ ID NO: 251345 - protein, 15 aa, Homo sapiens
  CDR3 for alpha chain variable domain of TCR clone 125673 (TRAV8-3, TRAJ23)
CAVGDRYNQGGKLIF

SEQ ID NO: 251346 - protein, 22 aa, Homo sapiens
  CDR3 for beta chain variable domain of TCR clone 125673 (TRBV29-1, TRBJ2-5)
TVSNMSPEDSSRYLCSAGTQYF

SEQ ID NO: 251347 - protein, 13 aa, Homo sapiens
  CDR3 for alpha chain variable domain of TCR clone 125674 (TRAV12-1, TRAJ40)
CVVPTSGTYKYIF

SEQ ID NO: 251348 - protein, 18 aa, Homo sapiens
  CDR3 for beta chain variable domain of TCR clone 125674 (TRBV7-6, TRBJ2-1)
CVSSPRTSGMSSYNEQFF

SEQ ID NO: 251349 - protein, 15 aa, Homo sapiens
  CDR3 for alpha chain variable domain of TCR clone 125675 (TRAV21, TRAJ53)
RATLNSGGSNYKLTF

SEQ ID NO: 251350 - protein, 13 aa, Homo sapiens
  CDR3 for beta chain variable domain of TCR clone 125675 (TRBV12-5, TRBJ2-1)
CASGLGRGNEQFF

SEQ ID NO: 251351 - protein, 11 aa, Homo sapiens
  CDR3 for alpha chain variable domain of TCR clone 125676 (TRAV12-2, TRAJ49)
CALQGGNQFYF

SEQ ID NO: 251352 - protein, 14 aa, Homo sapiens
  CDR3 for beta chain variable domain of TCR clone 125676 (TRBV7-2, TRBJ2-7)
CASSPKTSFYEQYV

SEQ ID NO: 251353 - protein, 14 aa, Homo sapiens
  CDR3 for alpha chain variable domain of TCR clone 125677 (TRAV12-2, TRAJ44)
CAVNPAGTASKLTF

SEQ ID NO: 251354 - protein, 17 aa, Homo sapiens
  CDR3 for beta chain variable domain of TCR clone 125677 (TRBV11-2, TRBJ2-1)
CASSLYPPGVEYNEQFF

SEQ ID NO: 251355 - protein, 15 aa, Homo sapiens
  CDR3 for alpha chain variable domain of TCR clone 125678 (TRAV3, TRAJ20)
CAVRDIKLSDYKLSF

SEQ ID NO: 251356 - protein, 16 aa, Homo sapiens
  CDR3 for beta chain variable domain of TCR clone 125678 (TRBV20-1, TRBJ1-4)
CSATGQGLLTNEKLFF

SEQ ID NO: 251357 - protein, 16 aa, Homo sapiens
  CDR3 for alpha chain variable domain of TCR clone 125679 (TRAV8-3, TRAJ8)
CAVPRDGNTGFQKLVF

SEQ ID NO: 251358 - protein, 12 aa, Homo sapiens
  CDR3 for beta chain variable domain of TCR clone 125679 (TRBV11-2, TRBJ2-2)
CASSLGGGELFF

SEQ ID NO: 251359 - protein, 14 aa, Homo sapiens
  CDR3 for alpha chain variable domain of TCR clone 125680 (TRAV1-2, TRAJ16)
CAVNRFSDGQKLLF

SEQ ID NO: 251360 - protein, 17 aa, Homo sapiens
  CDR3 for beta chain variable domain of TCR clone 125680 (TRBV28, TRBJ2-5)
CASSTPEGDALKETQYF

SEQ ID NO: 251361 - protein, 13 aa, Homo sapiens
  CDR3 for alpha chain variable domain of TCR clone 125681 (TRAV3, TRAJ20)
CAVRDGGDYKLSF

SEQ ID NO: 251362 - protein, 13 aa, Homo sapiens
  CDR3 for beta chain variable domain of TCR clone 125681 (TRBV29-1, TRBJ1-1)
CSVGDSRNTEAFF

SEQ ID NO: 251363 - protein, 13 aa, Homo sapiens
  CDR3 for alpha chain variable domain of TCR clone 125682 (TRAV2, TRAJ15)
CSVASQAGTALIF

SEQ ID NO: 251364 - protein, 16 aa, Homo sapiens
  CDR3 for beta chain variable domain of TCR clone 125682 (TRBV20-1, TRBJ1-4)
CSAPGQGLLTNEKLFF

SEQ ID NO: 251365 - protein, 12 aa, Homo sapiens
  CDR3 for alpha chain variable domain of TCR clone 125683 (TRAV13-2, TRAJ23)
CAERHRGGKPIF

SEQ ID NO: 251366 - protein, 12 aa, Homo sapiens
  CDR3 for beta chain variable domain of TCR clone 125683 (TRBV11-2, TRBJ2-2)
CASSLGGGELFF

SEQ ID NO: 251367 - protein, 13 aa, Homo sapiens
  CDR3 for alpha chain variable domain of TCR clone 125684 (TRAV17, TRAJ5)
CAPMDTGRRALTF

SEQ ID NO: 251368 - protein, 16 aa, Homo sapiens
  CDR3 for beta chain variable domain of TCR clone 125684 (TRBV20-1, TRBJ1-4)
CSAPGQGLLTNEKLFF

SEQ ID NO: 251369 - protein, 15 aa, Homo sapiens
  CDR3 for alpha chain variable domain of TCR clone 125685 (TRAV8-2, TRAJ40)
CVVLGTTSGTYKYSF

SEQ ID NO: 251370 - protein, 16 aa, Homo sapiens
  CDR3 for beta chain variable domain of TCR clone 125685 (TRBV7-3, TRBJ2-1)
CASSLEGYRSYNEQFF

SEQ ID NO: 251371 - protein, 14 aa, Homo sapiens
  CDR3 for alpha chain variable domain of TCR clone 125686 (TRAV17, TRAJ57)
CATDPQGGSEKLVF

SEQ ID NO: 251372 - protein, 15 aa, Homo sapiens
  CDR3 for beta chain variable domain of TCR clone 125686 (TRBV10-2, TRBJ2-6)
CASSEQGTGANVLTF

SEQ ID NO: 251373 - protein, 12 aa, Homo sapiens
  CDR3 for alpha chain variable domain of TCR clone 125687 (TRAV1-2, TRAJ42)
CVAGGSQGNLIF

SEQ ID NO: 251374 - protein, 20 aa, Homo sapiens
  CDR3 for beta chain variable domain of TCR clone 125687 (TRBV28, TRBJ2-1)
CASTPIGRSPGLAGGNEQFF

SEQ ID NO: 251375 - protein, 14 aa, Homo sapiens
  CDR3 for alpha chain variable domain of TCR clone 125688 (TRAV4, TRAJ17)
CLGGDMAAGNKLTF

SEQ ID NO: 251376 - protein, 13 aa, Homo sapiens
  CDR3 for beta chain variable domain of TCR clone 125688 (TRBV18, TRBJ2-7)
CASQSGGGYEQYF

SEQ ID NO: 251377 - protein, 13 aa, Homo sapiens
  CDR3 for alpha chain variable domain of TCR clone 125689 (TRAV13-1, TRAJ5)
CAARVTGRRALTF

SEQ ID NO: 251378 - protein, 15 aa, Homo sapiens
  CDR3 for beta chain variable domain of TCR clone 125689 (TRBV7-9, TRBJ2-7)
CASSPGGGLTYEHYF

SEQ ID NO: 251379 - protein, 15 aa, Homo sapiens
  CDR3 for alpha chain variable domain of TCR clone 125690 (TRAV8-3, TRAJ45)
CASSYSGGGADGLTF

SEQ ID NO: 251380 - protein, 13 aa, Homo sapiens
  CDR3 for beta chain variable domain of TCR clone 125690 (TRBV19, TRBJ1-3)
CASRLSLGNTIYF

SEQ ID NO: 251381 - protein, 11 aa, Homo sapiens
  CDR3 for alpha chain variable domain of TCR clone 125691 (TRAV21, TRAJ34)
CAHYNTDKLIL

SEQ ID NO: 251382 - protein, 14 aa, Homo sapiens
  CDR3 for beta chain variable domain of TCR clone 125691 (TRBV19, TRBJ2-1)
CASPTFVLSGEQFF

SEQ ID NO: 251383 - protein, 14 aa, Homo sapiens
  CDR3 for alpha chain variable domain of TCR clone 125692 (TRAV8-4, TRAJ48)
CAVSETFGNEKLTF

SEQ ID NO: 251384 - protein, 15 aa, Homo sapiens
  CDR3 for beta chain variable domain of TCR clone 125692 (TRBV28, TRBJ2-1)
CASSFQEGVYNEQFF

SEQ ID NO: 251385 - protein, 14 aa, Homo sapiens
  CDR3 for alpha chain variable domain of TCR clone 125693 (TRAV12-2, TRAJ40)
CAVKIPSGTYKYIF

SEQ ID NO: 251386 - protein, 17 aa, Homo sapiens
  CDR3 for beta chain variable domain of TCR clone 125693 (TRBV20-1, TRBJ2-1)
CSAFSGTSGSLYKEQFF

SEQ ID NO: 251387 - protein, 18 aa, Homo sapiens
  CDR3 for alpha chain variable domain of TCR clone 125694 (TRAV12-3, TRAJ52)
CAMSVGGAGGTSYGKPTF

SEQ ID NO: 251388 - protein, 14 aa, Homo sapiens
  CDR3 for beta chain variable domain of TCR clone 125694 (TRBV7-2, TRBJ2-7)
CASMSQGAAYEQYF

SEQ ID NO: 251389 - protein, 18 aa, Homo sapiens
  CDR3 for alpha chain variable domain of TCR clone 125695 (TRAV26-1, TRAJ23)
CIVRVGLEVWNQGGKLIF

SEQ ID NO: 251390 - protein, 13 aa, Homo sapiens
  CDR3 for beta chain variable domain of TCR clone 125695 (TRBV27, TRBJ2-7)
CASSLTTGYEQYF

SEQ ID NO: 251391 - protein, 15 aa, Homo sapiens
  CDR3 for alpha chain variable domain of TCR clone 125696 (TRAV3, TRAJ3)
CAVRDRDSSASKIIF

SEQ ID NO: 251392 - protein, 18 aa, Homo sapiens
  CDR3 for beta chain variable domain of TCR clone 125696 (TRBV25-1, TRBJ1-2)
YASSGLQNGQGLIFGYTF

SEQ ID NO: 251393 - protein, 14 aa, Homo sapiens
  CDR3 for alpha chain variable domain of TCR clone 125697 (TRAV12-1, TRAJ38)
CGELKAGNNRKLIW

SEQ ID NO: 251394 - protein, 12 aa, Homo sapiens
  CDR3 for beta chain variable domain of TCR clone 125697 (TRBV6-3, TRBJ2-7)
CASSEPGFEQYF

SEQ ID NO: 251395 - protein, 14 aa, Homo sapiens
  CDR3 for alpha chain variable domain of TCR clone 125698 (TRAV1-2, TRAJ16)
CAVNRFSDGQKLLF

SEQ ID NO: 251396 - protein, 16 aa, Homo sapiens
  CDR3 for beta chain variable domain of TCR clone 125698 (TRBV28, TRBJ2-4)
CASSLIQGSLGNSQYF

SEQ ID NO: 251397 - protein, 13 aa, Homo sapiens
  CDR3 for alpha chain variable domain of TCR clone 125699 (TRAV36/DV7, TRAJ54)
CAVLIQGAQKLVF

SEQ ID NO: 251398 - protein, 13 aa, Homo sapiens
  CDR3 for beta chain variable domain of TCR clone 125699 (TRBV29-1, TRBJ2-4)
CSVGEWTKNIQYF

SEQ ID NO: 251399 - protein, 13 aa, Homo sapiens
  CDR3 for alpha chain variable domain of TCR clone 125700 (TRAV8-3, TRAJ47)
CAVSMEYGNKLVF

SEQ ID NO: 251400 - protein, 14 aa, Homo sapiens
  CDR3 for beta chain variable domain of TCR clone 125700 (TRBV12-5, TRBJ2-5)
CASGSRTHQETQYF

SEQ ID NO: 251401 - protein, 13 aa, Homo sapiens
  CDR3 for alpha chain variable domain of TCR clone 125701 (TRAV1-2, TRAJ9)
CAALNTGGFKTIF

SEQ ID NO: 251402 - protein, 12 aa, Homo sapiens
  CDR3 for beta chain variable domain of TCR clone 125701 (TRBV7-9, TRBJ1-5)
CASSPQGQPQHF

SEQ ID NO: 251403 - protein, 18 aa, Homo sapiens
  CDR3 for alpha chain variable domain of TCR clone 125702 (TRAV12-2, )
CAVEDIQNPDPAVYQLRD

SEQ ID NO: 251404 - protein, 12 aa, Homo sapiens
  CDR3 for beta chain variable domain of TCR clone 125702 (TRBV11-2, TRBJ2-2)
CASSLGGGELFF

SEQ ID NO: 251405 - protein, 15 aa, Homo sapiens
  CDR3 for alpha chain variable domain of TCR clone 125703 (TRAV3, TRAJ22)
CAVRDRGGSARQLTF

SEQ ID NO: 251406 - protein, 19 aa, Homo sapiens
  CDR3 for beta chain variable domain of TCR clone 125703 (TRBV19, TRBJ2-5)
CASSIGQVTDFFLGETQYF

SEQ ID NO: 251407 - protein, 12 aa, Homo sapiens
  CDR3 for alpha chain variable domain of TCR clone 125704 (TRAV12-3, TRAJ17)
CAMTLTGNKITF

SEQ ID NO: 251408 - protein, 20 aa, Homo sapiens
  CDR3 for beta chain variable domain of TCR clone 125704 (TRBV7-8, TRBJ2-2)
CASSHLFPGPTIHITGELFF

SEQ ID NO: 251409 - protein, 16 aa, Homo sapiens
  CDR3 for alpha chain variable domain of TCR clone 125705 (TRAV21, TRAJ52)
CAVTNAGCTSYGKLTF

SEQ ID NO: 251410 - protein, 16 aa, Homo sapiens
  CDR3 for beta chain variable domain of TCR clone 125705 (TRBV2, TRBJ2-1)
CASSVGGSLSYNEQFF

SEQ ID NO: 251411 - protein, 15 aa, Homo sapiens
  CDR3 for alpha chain variable domain of TCR clone 125706 (TRAV13-1, TRAJ52)
CAATSPRTSYGKLTS

SEQ ID NO: 251412 - protein, 16 aa, Homo sapiens
  CDR3 for beta chain variable domain of TCR clone 125706 (TRBV7-3, TRBJ2-2)
CASSLKRGTLSGELFF

SEQ ID NO: 251413 - protein, 15 aa, Homo sapiens
  CDR3 for alpha chain variable domain of TCR clone 125707 (TRAV16, TRAJ16)
CALQGGGSYGQKLLF

SEQ ID NO: 251414 - protein, 15 aa, Homo sapiens
  CDR3 for beta chain variable domain of TCR clone 125707 (TRBV20-1, TRBJ2-7)
CSARDRVSGMDEQYF

SEQ ID NO: 251415 - protein, 15 aa, Homo sapiens
  CDR3 for alpha chain variable domain of TCR clone 125708 (TRAV34, TRAJ38)
CGADFTPGNNRKLIW

SEQ ID NO: 251416 - protein, 12 aa, Homo sapiens
  CDR3 for beta chain variable domain of TCR clone 125708 (TRBV7-9, TRBJ2-7)
CAARTDAYEQYF

SEQ ID NO: 251417 - protein, 16 aa, Homo sapiens
  CDR3 for alpha chain variable domain of TCR clone 125709 (TRAV26-1, TRAJ28)
CIVRPYSGAGSYHLTF

SEQ ID NO: 251418 - protein, 18 aa, Homo sapiens
  CDR3 for beta chain variable domain of TCR clone 125709 (TRBV20-1, TRBJ2-2)
CSARDLTSGSMDTGELFF

SEQ ID NO: 251419 - protein, 13 aa, Homo sapiens
  CDR3 for alpha chain variable domain of TCR clone 125710 (TRAV21, TRAJ20)
CAVGLRVDYKLSV

SEQ ID NO: 251420 - protein, 13 aa, Homo sapiens
  CDR3 for beta chain variable domain of TCR clone 125710 (TRBV6-1, TRBJ1-1)
CASSRQGNTEAFF

SEQ ID NO: 251421 - protein, 12 aa, Homo sapiens
  CDR3 for alpha chain variable domain of TCR clone 125711 (TRAV8-4, TRAJ43)
CAVSVNNNDIRF

SEQ ID NO: 251422 - protein, 16 aa, Homo sapiens
  CDR3 for beta chain variable domain of TCR clone 125711 (TRBV7-2, TRBJ2-6)
CASSLAGRSGANVLTF

SEQ ID NO: 251423 - protein, 23 aa, Homo sapiens
  CDR3 for alpha chain variable domain of TCR clone 125712 (TRAV8-2, TRAJ38)
CARLNAGNNHIQNPDPAVYQLRD

SEQ ID NO: 251424 - protein, 14 aa, Homo sapiens
  CDR3 for beta chain variable domain of TCR clone 125712 (TRBV7-8, TRBJ2-3)
CASSLEAGTDTQYF

SEQ ID NO: 251425 - protein, 16 aa, Homo sapiens
  CDR3 for alpha chain variable domain of TCR clone 125713 (TRAV27, TRAJ13)
CAGAKSDSGGYQKVTF

SEQ ID NO: 251426 - protein, 15 aa, Homo sapiens
  CDR3 for beta chain variable domain of TCR clone 125713 (TRBV29-1, TRBJ2-1)
CSVGRHVLFYNEQFF

SEQ ID NO: 251427 - protein, 12 aa, Homo sapiens
  CDR3 for alpha chain variable domain of TCR clone 125714 (TRAV1-2, TRAJ42)
CVAGGSQGNLIF

SEQ ID NO: 251428 - protein, 12 aa, Homo sapiens
  CDR3 for beta chain variable domain of TCR clone 125714 (TRBV5-1, TRBJ1-2)
CASSQDTYGYTF

SEQ ID NO: 251429 - protein, 15 aa, Homo sapiens
  CDR3 for alpha chain variable domain of TCR clone 125715 (TRAV3, TRAJ22)
CAVRDRGGSARQLTF

SEQ ID NO: 251430 - protein, 16 aa, Homo sapiens
  CDR3 for beta chain variable domain of TCR clone 125715 (TRBV5-4, TRBJ2-3)
CASQQPWAGGADTQYF

SEQ ID NO: 251431 - protein, 14 aa, Homo sapiens
  CDR3 for alpha chain variable domain of TCR clone 125716 (TRAV12-2, TRAJ48)
CAVTDNFGNEKLTF

SEQ ID NO: 251432 - protein, 12 aa, Homo sapiens
  CDR3 for beta chain variable domain of TCR clone 125716 (TRBV12-4, TRBJ2-7)
CASSLGGYEQYF

SEQ ID NO: 251433 - protein, 11 aa, Homo sapiens
  CDR3 for alpha chain variable domain of TCR clone 125717 (TRAV23/DV6, TRAJ48)
CAHRWGEKLTF

SEQ ID NO: 251434 - protein, 14 aa, Homo sapiens
  CDR3 for beta chain variable domain of TCR clone 125717 (TRBV29-1, TRBJ1-3)
CSVADRVVGNTIYF

SEQ ID NO: 251435 - protein, 12 aa, Homo sapiens
  CDR3 for alpha chain variable domain of TCR clone 125718 (TRAV27, TRAJ35)
CAGADFGNVLHW

SEQ ID NO: 251436 - protein, 16 aa, Homo sapiens
  CDR3 for beta chain variable domain of TCR clone 125718 (TRBV6-1, TRBJ2-1)
CASILRQGSSYNEQFF

SEQ ID NO: 251437 - protein, 13 aa, Homo sapiens
  CDR3 for alpha chain variable domain of TCR clone 125719 (TRAV1-2, TRAJ9)
CAALNTGGFKTIF

SEQ ID NO: 251438 - protein, 14 aa, Homo sapiens
  CDR3 for beta chain variable domain of TCR clone 125719 (TRBV19, TRBJ2-2)
CASSGQGIAGELFF

SEQ ID NO: 251439 - protein, 12 aa, Homo sapiens
  CDR3 for alpha chain variable domain of TCR clone 125720 (TRAV12-3, TRAJ17)
CAMTLTGNKLTF

SEQ ID NO: 251440 - protein, 15 aa, Homo sapiens
  CDR3 for beta chain variable domain of TCR clone 125720 (TRBV20-1, TRBJ2-7)
CSARDRVSGMDRQYF

SEQ ID NO: 251441 - protein, 13 aa, Homo sapiens
  CDR3 for alpha chain variable domain of TCR clone 125721 (TRAV17, TRAJ5)
CALRGTGRRALTF

SEQ ID NO: 251442 - protein, 20 aa, Homo sapiens
  CDR3 for beta chain variable domain of TCR clone 125721 (TRBV7-8, TRBJ2-2)
CASSHLFPGPTIHITGELFF

SEQ ID NO: 251443 - protein, 11 aa, Homo sapiens
  CDR3 for alpha chain variable domain of TCR clone 125722 (TRAV1-2, TRAJ20)
CAVSNDYKLSF

SEQ ID NO: 251444 - protein, 17 aa, Homo sapiens
  CDR3 for beta chain variable domain of TCR clone 125722 (TRBV7-8, TRBJ2-6)
CASSAGTGGAGANGLTF

SEQ ID NO: 251445 - protein, 15 aa, Homo sapiens
  CDR3 for alpha chain variable domain of TCR clone 125723 (TRAV21, TRAJ52)
CAVRGGGTSYGKPTF

SEQ ID NO: 251446 - protein, 12 aa, Homo sapiens
  CDR3 for beta chain variable domain of TCR clone 125723 (TRBV11-2, TRBJ2-2)
CASSLGGGELFF

SEQ ID NO: 251447 - protein, 14 aa, Homo sapiens
  CDR3 for alpha chain variable domain of TCR clone 125724 (TRAV29/DV5, TRAJ45)
CAASFRGGADGLTF

SEQ ID NO: 251448 - protein, 13 aa, Homo sapiens
  CDR3 for beta chain variable domain of TCR clone 125724 (TRBV12-5, TRBJ2-3)
CASGDRQSDTQYF

SEQ ID NO: 251449 - protein, 14 aa, Homo sapiens
  CDR3 for alpha chain variable domain of TCR clone 125725 (TRAV12-2, TRAJ39)
CAVKGGNAGNMLTF

SEQ ID NO: 251450 - protein, 13 aa, Homo sapiens
  CDR3 for beta chain variable domain of TCR clone 125725 (TRBV12-4, TRBJ1-1)
CASSAGRGTEAFF

SEQ ID NO: 251451 - protein, 13 aa, Homo sapiens
  CDR3 for alpha chain variable domain of TCR clone 125726 (TRAV3, TRAJ33)
CAVRDWSNYQLIW

SEQ ID NO: 251452 - protein, 16 aa, Homo sapiens
  CDR3 for beta chain variable domain of TCR clone 125726 (TRBV4-2, TRBJ2-7)
CASSQDRGTSSYEQYF

SEQ ID NO: 251453 - protein, 17 aa, Homo sapiens
  CDR3 for alpha chain variable domain of TCR clone 125727 (TRAV3, TRAJ38)
CAVRDCLNAGNNRKLIW

SEQ ID NO: 251454 - protein, 15 aa, Homo sapiens
  CDR3 for beta chain variable domain of TCR clone 125727 (TRBV7-8, TRBJ2-1)
CASSLHGGPYNEQFF

SEQ ID NO: 251455 - protein, 13 aa, Homo sapiens
  CDR3 for alpha chain variable domain of TCR clone 125728 (TRAV17, TRAJ9)
CATDYTGGFKTIF

SEQ ID NO: 251456 - protein, 16 aa, Homo sapiens
  CDR3 for beta chain variable domain of TCR clone 125728 (TRBV7-7, TRBJ2-1)
CASSLASETSYNEQFF

SEQ ID NO: 251457 - protein, 13 aa, Homo sapiens
  CDR3 for alpha chain variable domain of TCR clone 125729 (TRAV20, TRAJ37)
CAGCSSNTGKLIF

SEQ ID NO: 251458 - protein, 12 aa, Homo sapiens
  CDR3 for beta chain variable domain of TCR clone 125729 (TRBV5-1, TRBJ2-3)
CASSLAEGTQYF

SEQ ID NO: 251459 - protein, 13 aa, Homo sapiens
  CDR3 for alpha chain variable domain of TCR clone 125730 (TRAV38-2/DV8, TRAJ34)
CAYRTWNTDKLIF

SEQ ID NO: 251460 - protein, 19 aa, Homo sapiens
  CDR3 for beta chain variable domain of TCR clone 125730 (TRBV7-2, TRBJ2-3)
CASSFLSRNWGGGTDTQYF

SEQ ID NO: 251461 - protein, 16 aa, Homo sapiens
  CDR3 for alpha chain variable domain of TCR clone 125731 (TRAV26-1, TRAJ47)
CIVRVVLSHYGNKLVF

SEQ ID NO: 251462 - protein, 16 aa, Homo sapiens
  CDR3 for beta chain variable domain of TCR clone 125731 (TRBV5-1, TRBJ2-1)
CASSFGVSGSYNEQFF

SEQ ID NO: 251463 - protein, 16 aa, Homo sapiens
  CDR3 for alpha chain variable domain of TCR clone 125732 (TRAV20, TRAJ53)
CAVRRGSGGSNYKLTF

SEQ ID NO: 251464 - protein, 12 aa, Homo sapiens
  CDR3 for beta chain variable domain of TCR clone 125732 (TRBV29-1, TRBJ2-3)
CSVVLGADTQYF

SEQ ID NO: 251465 - protein, 16 aa, Homo sapiens
  CDR3 for alpha chain variable domain of TCR clone 125733 (TRAV20, TRAJ53)
CAVQGNSGGSNYKMTF

SEQ ID NO: 251466 - protein, 14 aa, Homo sapiens
  CDR3 for beta chain variable domain of TCR clone 125733 (TRBV6-5, TRBJ2-7)
CASSPHRGLREQYF

SEQ ID NO: 251467 - protein, 18 aa, Homo sapiens
  CDR3 for alpha chain variable domain of TCR clone 125734 (TRAV21, TRAJ53)
CAVKGGENSGGSKYKLTF

SEQ ID NO: 251468 - protein, 13 aa, Homo sapiens
  CDR3 for beta chain variable domain of TCR clone 125734 (TRBV9, TRBJ2-1)
CASSPSGGSEQFF

SEQ ID NO: 251469 - protein, 16 aa, Homo sapiens
  CDR3 for alpha chain variable domain of TCR clone 125735 (TRAV26-2, TRAJ45)
CTTASPIGGGADGLTF

SEQ ID NO: 251470 - protein, 20 aa, Homo sapiens
  CDR3 for beta chain variable domain of TCR clone 125735 (TRBV28, TRBJ2-1)
CASTPIGRSPGLAGGSEQFF

SEQ ID NO: 251471 - protein, 11 aa, Homo sapiens
  CDR3 for alpha chain variable domain of TCR clone 125736 (TRAV26-2, TRAJ8)
CILTGFQKLVF

SEQ ID NO: 251472 - protein, 19 aa, Homo sapiens
  CDR3 for beta chain variable domain of TCR clone 125736 (TRBV20-1, TRBJ2-1)
CSARGETRGNSPQIDEQFF

SEQ ID NO: 251473 - protein, 16 aa, Homo sapiens
  CDR3 for alpha chain variable domain of TCR clone 125737 (TRAV8-3, TRAJ13)
CAVGAYPSEGYQKVTF

SEQ ID NO: 251474 - protein, 15 aa, Homo sapiens
  CDR3 for beta chain variable domain of TCR clone 125737 (TRBV19, TRBJ1-5)
CASSIVWADNQPQHF

SEQ ID NO: 251475 - protein, 11 aa, Homo sapiens
  CDR3 for alpha chain variable domain of TCR clone 125738 (TRAV13-2, TRAJ20)
CADSSDYKLSF

SEQ ID NO: 251476 - protein, 12 aa, Homo sapiens
  CDR3 for beta chain variable domain of TCR clone 125738 (TRBV5-1, TRBJ2-3)
CASSLAADTQHF

SEQ ID NO: 251477 - protein, 15 aa, Homo sapiens
  CDR3 for alpha chain variable domain of TCR clone 125739 (TRAV26-1, TRAJ37)
CIVKTGSSDTGKLIF

SEQ ID NO: 251478 - protein, 12 aa, Homo sapiens
  CDR3 for beta chain variable domain of TCR clone 125739 (TRBV7-8, TRBJ2-7)
CASSLGDREQYF

SEQ ID NO: 251479 - protein, 14 aa, Homo sapiens
  CDR3 for alpha chain variable domain of TCR clone 125740 (TRAV13-1, TRAJ12)
CAASYMDRSYKLIF

SEQ ID NO: 251480 - protein, 13 aa, Homo sapiens
  CDR3 for beta chain variable domain of TCR clone 125740 (TRBV2, TRBJ2-5)
CASSDGIQETQYF

SEQ ID NO: 251481 - protein, 14 aa, Homo sapiens
  CDR3 for alpha chain variable domain of TCR clone 125741 (TRAV38-1, TRAJ29)
CAFITPSGNTPLVF

SEQ ID NO: 251482 - protein, 16 aa, Homo sapiens
  CDR3 for beta chain variable domain of TCR clone 125741 (TRBV7-9, TRBJ1-2)
CASSLGFSSGEDGYTF

SEQ ID NO: 251483 - protein, 14 aa, Homo sapiens
  CDR3 for alpha chain variable domain of TCR clone 125742 (TRAV8-3, TRAJ17)
CAVGAQTAGNKLTF

SEQ ID NO: 251484 - protein, 14 aa, Homo sapiens
  CDR3 for beta chain variable domain of TCR clone 125742 (TRBV25-1, TRBJ1-1)
CASTHLGGNTEAFF

SEQ ID NO: 251485 - protein, 15 aa, Homo sapiens
  CDR3 for alpha chain variable domain of TCR clone 125743 (TRAV3, TRAJ13)
CAGRVYSGGYQKVTF

SEQ ID NO: 251486 - protein, 15 aa, Homo sapiens
  CDR3 for beta chain variable domain of TCR clone 125743 (TRBV5-7, TRBJ1-2)
CASSLGVAANYGYTF

SEQ ID NO: 251487 - protein, 18 aa, Homo sapiens
  CDR3 for alpha chain variable domain of TCR clone 125744 (TRAV21, TRAJ52)
CAVRPSPAGGTSHGKLTF

SEQ ID NO: 251488 - protein, 17 aa, Homo sapiens
  CDR3 for beta chain variable domain of TCR clone 125744 (TRBV20-1, TRBJ2-2)
CSASGSGQGGLTGELFF

SEQ ID NO: 251489 - protein, 10 aa, Homo sapiens
  CDR3 for alpha chain variable domain of TCR clone 125745 (TRAV27, TRAJ43)
CAGANNDMRF

SEQ ID NO: 251490 - protein, 13 aa, Homo sapiens
  CDR3 for beta chain variable domain of TCR clone 125745 (TRBV19, TRBJ1-2)
CASSVPGQDGYTF

SEQ ID NO: 251491 - protein, 14 aa, Homo sapiens
  CDR3 for alpha chain variable domain of TCR clone 125746 (TRAV1-2, TRAJ8)
CAVREDTGLQKLVF

SEQ ID NO: 251492 - protein, 14 aa, Homo sapiens
  CDR3 for beta chain variable domain of TCR clone 125746 (TRBV7-2, TRBJ2-7)
CASSLYPGRYEQYF

SEQ ID NO: 251493 - protein, 14 aa, Homo sapiens
  CDR3 for alpha chain variable domain of TCR clone 125747 (TRAV12-2, TRAJ13)
CAVNPSGGYQKVTF

SEQ ID NO: 251494 - protein, 13 aa, Homo sapiens
  CDR3 for beta chain variable domain of TCR clone 125747 (TRBV20-1, TRBJ1-6)
FSAKLGGTSPLHF

SEQ ID NO: 251495 - protein, 14 aa, Homo sapiens
  CDR3 for alpha chain variable domain of TCR clone 125748 (TRAV1-2, TRAJ8)
CAVREDTGFQKLVF

SEQ ID NO: 251496 - protein, 13 aa, Homo sapiens
  CDR3 for beta chain variable domain of TCR clone 125748 (TRBV28, TRBJ2-2)
CASIRESTGELFF

SEQ ID NO: 251497 - protein, 14 aa, Homo sapiens
  CDR3 for alpha chain variable domain of TCR clone 125749 (TRAV16, TRAJ33)
CALSAMDSNYQLIW

SEQ ID NO: 251498 - protein, 15 aa, Homo sapiens
  CDR3 for beta chain variable domain of TCR clone 125749 (TRBV6-3, TRBJ2-7)
CASGSPGTVFYEQYF

SEQ ID NO: 251499 - protein, 16 aa, Homo sapiens
  CDR3 for alpha chain variable domain of TCR clone 125750 (TRAV3, TRAJ37)
CAVRGKGSGNPGKLIF

SEQ ID NO: 251500 - protein, 13 aa, Homo sapiens
  CDR3 for beta chain variable domain of TCR clone 125750 (TRBV19, TRBJ1-2)
CASSVPGQDGYTF

SEQ ID NO: 251501 - protein, 14 aa, Homo sapiens
  CDR3 for alpha chain variable domain of TCR clone 125751 (TRAV23/DV6, TRAJ8)
CAASKATGFQKLLF

SEQ ID NO: 251502 - protein, 15 aa, Homo sapiens
  CDR3 for beta chain variable domain of TCR clone 125751 (TRBV28, TRBJ2-3)
CASSPDRQGANTQYF

SEQ ID NO: 251503 - protein, 17 aa, Homo sapiens
  CDR3 for alpha chain variable domain of TCR clone 125752 (TRAV3, TRAJ6)
CAVRDGPRAGGSYIPTF

SEQ ID NO: 251504 - protein, 15 aa, Homo sapiens
  CDR3 for beta chain variable domain of TCR clone 125752 (TRBV10-3, TRBJ2-3)
CTISLTSGGTDTQYF

SEQ ID NO: 251505 - protein, 14 aa, Homo sapiens
  CDR3 for alpha chain variable domain of TCR clone 125753 (TRAV12-1, TRAJ8)
CVVNSDTGFQKLVF

SEQ ID NO: 251506 - protein, 16 aa, Homo sapiens
  CDR3 for beta chain variable domain of TCR clone 125753 (TRBV20-1, TRBJ2-2)
CSARDDRVGLTGELFF

SEQ ID NO: 251507 - protein, 15 aa, Homo sapiens
  CDR3 for alpha chain variable domain of TCR clone 125754 (TRAV8-3, TRAJ45)
CALSYSGGGADVLTF

SEQ ID NO: 251508 - protein, 13 aa, Homo sapiens
  CDR3 for beta chain variable domain of TCR clone 125754 (TRBV10-3, TRBJ2-7)
CASKLAVNYEQYF

SEQ ID NO: 251509 - protein, 16 aa, Homo sapiens
  CDR3 for alpha chain variable domain of TCR clone 125755 (TRAV1-2, TRAJ10)
CAVRGVLTAGGNKLTF

SEQ ID NO: 251510 - protein, 12 aa, Homo sapiens
  CDR3 for beta chain variable domain of TCR clone 125755 (TRBV7-8, TRBJ2-7)
CASSLGDREQYF

SEQ ID NO: 251511 - protein, 12 aa, Homo sapiens
  CDR3 for alpha chain variable domain of TCR clone 125756 (TRAV30, TRAJ43)
CGIEERGNDMRF

SEQ ID NO: 251512 - protein, 13 aa, Homo sapiens
  CDR3 for beta chain variable domain of TCR clone 125756 (TRBV27, TRBJ2-7)
CASSFSQGYEQYF

SEQ ID NO: 251513 - protein, 12 aa, Homo sapiens
  CDR3 for alpha chain variable domain of TCR clone 125757 (TRAV4, TRAJ26)
CLVGDYGQNFVF

SEQ ID NO: 251514 - protein, 15 aa, Homo sapiens
  CDR3 for beta chain variable domain of TCR clone 125757 (TRBV7-2, TRBJ2-1)
CASRKTGSSYNEQFF

SEQ ID NO: 251515 - protein, 18 aa, Homo sapiens
  CDR3 for alpha chain variable domain of TCR clone 125758 (TRAV13-1, TRAJ52)
CAASKRSAGGTSYGKLRF

SEQ ID NO: 251516 - protein, 13 aa, Homo sapiens
  CDR3 for beta chain variable domain of TCR clone 125758 (TRBV12-4, TRBJ1-2)
CASSLRQGKGYTF

SEQ ID NO: 251517 - protein, 17 aa, Homo sapiens
  CDR3 for alpha chain variable domain of TCR clone 125759 (TRAV27, TRAJ18)
CAGLHRGRGSTLGRLYF

SEQ ID NO: 251518 - protein, 14 aa, Homo sapiens
  CDR3 for beta chain variable domain of TCR clone 125759 (TRBV20-1, TRBJ1-5)
CSARGRGSNQTQHF

SEQ ID NO: 251519 - protein, 14 aa, Homo sapiens
  CDR3 for alpha chain variable domain of TCR clone 125760 (TRAV12-3, TRAJ10)
SHLPLTGGGNKLTF

SEQ ID NO: 251520 - protein, 11 aa, Homo sapiens
  CDR3 for beta chain variable domain of TCR clone 125760 (TRBV13, TRBJ2-2)
CASSPRTGEHT

SEQ ID NO: 251521 - protein, 15 aa, Homo sapiens
  CDR3 for alpha chain variable domain of TCR clone 125761 (TRAV35, TRAJ58)
CAGRRQETSGSRLTL

SEQ ID NO: 251522 - protein, 16 aa, Homo sapiens
  CDR3 for beta chain variable domain of TCR clone 125761 (TRBV2, TRBJ2-1)
CASSVGGSLSYNEQFF

SEQ ID NO: 251523 - protein, 14 aa, Homo sapiens
  CDR3 for alpha chain variable domain of TCR clone 125762 (TRAV12-2, TRAJ45)
CAVYSGGGADGLTF

SEQ ID NO: 251524 - protein, 14 aa, Homo sapiens
  CDR3 for beta chain variable domain of TCR clone 125762 (TRBV12-5, TRBJ2-5)
CASGSRTHQETQYF

SEQ ID NO: 251525 - protein, 14 aa, Homo sapiens
  CDR3 for alpha chain variable domain of TCR clone 125763 (TRAV1-2, TRAJ8)
CAVREDTGSQKLVF

SEQ ID NO: 251526 - protein, 16 aa, Homo sapiens
  CDR3 for beta chain variable domain of TCR clone 125763 (TRBV28, TRBJ2-7)
CASSLFFETGGPEQYF

SEQ ID NO: 251527 - protein, 14 aa, Homo sapiens
  CDR3 for alpha chain variable domain of TCR clone 125764 (TRAV8-4, TRAJ54)
CAVSEVLGAQKLVF

SEQ ID NO: 251528 - protein, 12 aa, Homo sapiens
  CDR3 for beta chain variable domain of TCR clone 125764 (TRBV11-2, TRBJ2-2)
CASSLPTGELFF

SEQ ID NO: 251529 - protein, 16 aa, Homo sapiens
  CDR3 for alpha chain variable domain of TCR clone 125765 (TRAV8-3, TRAJ44)
RAVGASNTGTASKLTF

SEQ ID NO: 251530 - protein, 15 aa, Homo sapiens
  CDR3 for beta chain variable domain of TCR clone 125765 (TRBV27, TRBJ1-5)
CASTFNRGSNQPQHF

SEQ ID NO: 251531 - protein, 11 aa, Homo sapiens
  CDR3 for alpha chain variable domain of TCR clone 125766 (TRAV2, TRAJ33)
CAVESNYQLIW

SEQ ID NO: 251532 - protein, 16 aa, Homo sapiens
  CDR3 for beta chain variable domain of TCR clone 125766 (TRBV4-1, TRBJ2-6)
CASSQVGDPGANVLTF

SEQ ID NO: 251533 - protein, 14 aa, Homo sapiens
  CDR3 for alpha chain variable domain of TCR clone 125767 (TRAV29/DV5, TRAJ26)
CAASVSPRVRILSF

SEQ ID NO: 251534 - protein, 17 aa, Homo sapiens
  CDR3 for beta chain variable domain of TCR clone 125767 (TRBV20-1, TRBJ2-2)
CSASGSGQGGLTGELFF

SEQ ID NO: 251535 - protein, 14 aa, Homo sapiens
  CDR3 for alpha chain variable domain of TCR clone 125768 (TRAV17, TRAJ15)
CATDRGQAVTALIF

SEQ ID NO: 251536 - protein, 17 aa, Homo sapiens
  CDR3 for beta chain variable domain of TCR clone 125768 (TRBV29-1, TRBJ2-1)
CSVVGLAGAYSYNEQFF

SEQ ID NO: 251537 - protein, 13 aa, Homo sapiens
  CDR3 for alpha chain variable domain of TCR clone 125769 (TRAV16, TRAJ9)
CSLSNTGGFKTIF

SEQ ID NO: 251538 - protein, 14 aa, Homo sapiens
  CDR3 for beta chain variable domain of TCR clone 125769 (TRBV5-1, TRBJ2-1)
CASSLEGPVYEQFF

SEQ ID NO: 251539 - protein, 19 aa, Homo sapiens
  CDR3 for alpha chain variable domain of TCR clone 125770 (TRAV2, TRAJ20)
ILQVREADAAVYRDCKLSF

SEQ ID NO: 251540 - protein, 13 aa, Homo sapiens
  CDR3 for beta chain variable domain of TCR clone 125770 (TRBV15, TRBJ1-6)
CATSGGLKSPLHF

SEQ ID NO: 251541 - protein, 14 aa, Homo sapiens
  CDR3 for alpha chain variable domain of TCR clone 125771 (TRAV12-2, TRAJ17)
CAVLFKAAGNKLTF

SEQ ID NO: 251542 - protein, 17 aa, Homo sapiens
  CDR3 for beta chain variable domain of TCR clone 125771 (TRBV20-1, TRBJ2-2)
CSASGSGQGGLTGALFF

SEQ ID NO: 251543 - protein, 14 aa, Homo sapiens
  CDR3 for alpha chain variable domain of TCR clone 125772 (TRAV17, TRAJ35)
CATDRPGFGNVLHC

SEQ ID NO: 251544 - protein, 16 aa, Homo sapiens
  CDR3 for beta chain variable domain of TCR clone 125772 (TRBV7-9, TRBJ1-2)
CASSLGFSSGEDGYTF

SEQ ID NO: 251545 - protein, 14 aa, Homo sapiens
  CDR3 for alpha chain variable domain of TCR clone 125773 (TRAV23/DV6, TRAJ57)
CAASNQGGSEKLVF

SEQ ID NO: 251546 - protein, 16 aa, Homo sapiens
  CDR3 for beta chain variable domain of TCR clone 125773 (TRBV19, TRBJ2-2)
CASRSPGTGATGELFF

SEQ ID NO: 251547 - protein, 16 aa, Homo sapiens
  CDR3 for alpha chain variable domain of TCR clone 125774 (TRAV8-3, TRAJ13)
CAVGAYPSGGYQKVTF

SEQ ID NO: 251548 - protein, 16 aa, Homo sapiens
  CDR3 for beta chain variable domain of TCR clone 125774 (TRBV13, TRBJ2-2)
CASSPRTGEHTGELFF

SEQ ID NO: 251549 - protein, 12 aa, Homo sapiens
  CDR3 for alpha chain variable domain of TCR clone 125775 (TRAV1-1, TRAJ9)
CAVDTGGFKTLF

SEQ ID NO: 251550 - protein, 14 aa, Homo sapiens
  CDR3 for beta chain variable domain of TCR clone 125775 (TRBV7-8, TRBJ2-5)
CASSATGGQETQYF

SEQ ID NO: 251551 - protein, 14 aa, Homo sapiens
  CDR3 for alpha chain variable domain of TCR clone 125776 (TRAV1-2, TRAJ8)
CAVREDTGFQKLVF

SEQ ID NO: 251552 - protein, 17 aa, Homo sapiens
  CDR3 for beta chain variable domain of TCR clone 125776 (TRBV28, TRBJ2-5)
CASSFGGEWGGQETQYF

SEQ ID NO: 251553 - protein, 11 aa, Homo sapiens
  CDR3 for alpha chain variable domain of TCR clone 125777 (TRAV1-1, TRAJ23)
CAVRPGGKLIF

SEQ ID NO: 251554 - protein, 14 aa, Homo sapiens
  CDR3 for beta chain variable domain of TCR clone 125777 (TRBV7-8, TRBJ2-3)
CASSLEAGTDTQYF

SEQ ID NO: 251555 - protein, 15 aa, Homo sapiens
  CDR3 for alpha chain variable domain of TCR clone 125778 (TRAV2, TRAJ9)
CAVEDRGTGGFITIF

SEQ ID NO: 251556 - protein, 16 aa, Homo sapiens
  CDR3 for beta chain variable domain of TCR clone 125778 (TRBV24-1, TRBJ2-3)
CATSDPGTGATDTQYF

SEQ ID NO: 251557 - protein, 15 aa, Homo sapiens
  CDR3 for alpha chain variable domain of TCR clone 125779 (TRAV13-1, TRAJ44)
CAASRNTGTSSKLTF

SEQ ID NO: 251558 - protein, 14 aa, Homo sapiens
  CDR3 for beta chain variable domain of TCR clone 125779 (TRBV11-2, TRBJ1-2)
CASSLYRGNYGYTF

SEQ ID NO: 251559 - protein, 18 aa, Homo sapiens
  CDR3 for alpha chain variable domain of TCR clone 125780 (TRAV26-1, TRAJ23)
CIVRVGLEVWNQGGKLIF

SEQ ID NO: 251560 - protein, 13 aa, Homo sapiens
  CDR3 for beta chain variable domain of TCR clone 125780 (TRBV4-1, TRBJ1-1)
CASSRKMNTEAFF

SEQ ID NO: 251561 - protein, 14 aa, Homo sapiens
  CDR3 for alpha chain variable domain of TCR clone 125781 (TRAV8-3, TRAJ4)
CAVGAACGYNKLIF

SEQ ID NO: 251562 - protein, 15 aa, Homo sapiens
  CDR3 for beta chain variable domain of TCR clone 125781 (TRBV20-1, TRBJ2-5)
CSAPPRTGFGETQYF

SEQ ID NO: 251563 - protein, 13 aa, Homo sapiens
  CDR3 for alpha chain variable domain of TCR clone 125782 (TRAV12-2, TRAJ10)
CAVPTGGGNKLTF

SEQ ID NO: 251564 - protein, 13 aa, Homo sapiens
  CDR3 for beta chain variable domain of TCR clone 125782 (TRBV13, TRBJ2-5)
CASSPEVGETQYF

SEQ ID NO: 251565 - protein, 15 aa, Homo sapiens
  CDR3 for alpha chain variable domain of TCR clone 125783 (TRAV3, TRAJ38)
CAVRDCLNAGNNHIQ

SEQ ID NO: 251566 - protein, 13 aa, Homo sapiens
  CDR3 for beta chain variable domain of TCR clone 125783 (TRBV23-1, TRBJ1-4)
CASRGKFNEKLFF

SEQ ID NO: 251567 - protein, 13 aa, Homo sapiens
  CDR3 for alpha chain variable domain of TCR clone 125784 (TRAV12-3, TRAJ33)
CAMSVNSNYQLIW

SEQ ID NO: 251568 - protein, 14 aa, Homo sapiens
  CDR3 for beta chain variable domain of TCR clone 125784 (TRBV5-7, TRBJ1-2)
CASSLVRGDYGYTF

SEQ ID NO: 251569 - protein, 14 aa, Homo sapiens
  CDR3 for alpha chain variable domain of TCR clone 125785 (TRAV1-2, TRAJ8)
CAAREDTGFQKLVF

SEQ ID NO: 251570 - protein, 13 aa, Homo sapiens
  CDR3 for beta chain variable domain of TCR clone 125785 (TRBV19, TRBJ1-2)
CASSVPGQDGDTF

SEQ ID NO: 251571 - protein, 13 aa, Homo sapiens
  CDR3 for alpha chain variable domain of TCR clone 125786 (TRAV12-3, TRAJ7)
CAMSASGNNRLAF

SEQ ID NO: 251572 - protein, 14 aa, Homo sapiens
  CDR3 for beta chain variable domain of TCR clone 125786 (TRBV13, TRBJ2-5)
RASSLGPRGETQYF

SEQ ID NO: 251573 - protein, 15 aa, Homo sapiens
  CDR3 for alpha chain variable domain of TCR clone 125787 (TRAV34, TRAJ38)
CGADFTPGNNRKLIW

SEQ ID NO: 251574 - protein, 15 aa, Homo sapiens
  CDR3 for beta chain variable domain of TCR clone 125787 (TRBV29-1, TRBJ2-6)
CSVGDRGSGANVLTF

SEQ ID NO: 251575 - protein, 12 aa, Homo sapiens
  CDR3 for alpha chain variable domain of TCR clone 125788 (TRAV12-1, TRAJ40)
CVVYSGTYKYIF

SEQ ID NO: 251576 - protein, 12 aa, Homo sapiens
  CDR3 for beta chain variable domain of TCR clone 125788 (TRBV12-4, TRBJ2-1)
CASTYVLNEQFF

SEQ ID NO: 251577 - protein, 13 aa, Homo sapiens
  CDR3 for alpha chain variable domain of TCR clone 125789 (TRAV35, TRAJ48)
CAGHEFGNEKLTF

SEQ ID NO: 251578 - protein, 15 aa, Homo sapiens
  CDR3 for beta chain variable domain of TCR clone 125789 (TRBV27, TRBJ2-7)
CASSPQREGEREQYF

SEQ ID NO: 251579 - protein, 14 aa, Homo sapiens
  CDR3 for alpha chain variable domain of TCR clone 125790 (TRAV38-1, TRAJ40)
CALRPTSGTYKYIF

SEQ ID NO: 251580 - protein, 16 aa, Homo sapiens
  CDR3 for beta chain variable domain of TCR clone 125790 (TRBV27, TRBJ2-2)
CASSFRGLVRTGELFF

SEQ ID NO: 251581 - protein, 11 aa, Homo sapiens
  CDR3 for alpha chain variable domain of TCR clone 125791 (TRAV27, TRAJ20)
CAGADDYKLSF

SEQ ID NO: 251582 - protein, 14 aa, Homo sapiens
  CDR3 for beta chain variable domain of TCR clone 125791 (TRBV4-1, TRBJ2-2)
CASSQAVNTGELFF

SEQ ID NO: 251583 - protein, 15 aa, Homo sapiens
  CDR3 for alpha chain variable domain of TCR clone 125792 (TRAV26-1, TRAJ29)
CIVRVEGSGNTPLVF

SEQ ID NO: 251584 - protein, 15 aa, Homo sapiens
  CDR3 for beta chain variable domain of TCR clone 125792 (TRBV7-9, TRBJ1-5)
CASSQGHEPNQPQHF

SEQ ID NO: 251585 - protein, 14 aa, Homo sapiens
  CDR3 for alpha chain variable domain of TCR clone 125793 (TRAV2, TRAJ9)
CAVEDRSGGFKTIF

SEQ ID NO: 251586 - protein, 14 aa, Homo sapiens
  CDR3 for beta chain variable domain of TCR clone 125793 (TRBV7-3, TRBJ2-1)
CASSLAGRTNEQFF

SEQ ID NO: 251587 - protein, 15 aa, Homo sapiens
  CDR3 for alpha chain variable domain of TCR clone 125794 (TRAV8-2, TRAJ16)
CVVSDGFSGGQKLLL

SEQ ID NO: 251588 - protein, 14 aa, Homo sapiens
  CDR3 for beta chain variable domain of TCR clone 125794 (TRBV7-3, TRBJ1-1)
CASSLGTGYTEAFF

SEQ ID NO: 251589 - protein, 14 aa, Homo sapiens
  CDR3 for alpha chain variable domain of TCR clone 125795 (TRAV12-2, TRAJ53)
CAVKGGGSNYKLTS

SEQ ID NO: 251590 - protein, 16 aa, Homo sapiens
  CDR3 for beta chain variable domain of TCR clone 125795 (TRBV7-3, TRBJ2-2)
CASSLKRGTLSGELFF

SEQ ID NO: 251591 - protein, 14 aa, Homo sapiens
  CDR3 for alpha chain variable domain of TCR clone 125796 (TRAV13-1, TRAJ40)
CAASMTSGTYKYIF

SEQ ID NO: 251592 - protein, 15 aa, Homo sapiens
  CDR3 for beta chain variable domain of TCR clone 125796 (TRBV7-3, TRBJ2-1)
CDSSPTGGGEVEQFF

SEQ ID NO: 251593 - protein, 12 aa, Homo sapiens
  CDR3 for alpha chain variable domain of TCR clone 125797 (TRAV12-1, TRAJ40)
CVVYSGTYKYIF

SEQ ID NO: 251594 - protein, 17 aa, Homo sapiens
  CDR3 for beta chain variable domain of TCR clone 125797 (TRBV11-2, TRBJ2-3)
CQQLRGAPRGAPNTQYF

SEQ ID NO: 251595 - protein, 16 aa, Homo sapiens
  CDR3 for alpha chain variable domain of TCR clone 125798 (TRAV30, TRAJ24)
CGTEIVGADSWGKFQF

SEQ ID NO: 251596 - protein, 16 aa, Homo sapiens
  CDR3 for beta chain variable domain of TCR clone 125798 (TRBV20-1, TRBJ1-1)
CSARALTQGMNTEAFF

SEQ ID NO: 251597 - protein, 11 aa, Homo sapiens
  CDR3 for alpha chain variable domain of TCR clone 125799 (TRAV3, TRAJ21)
CAAGNFNKFYF

SEQ ID NO: 251598 - protein, 14 aa, Homo sapiens
  CDR3 for beta chain variable domain of TCR clone 125799 (TRBV29-1, TRBJ2-2)
CSGRGSGNTGELFF

SEQ ID NO: 251599 - protein, 14 aa, Homo sapiens
  CDR3 for alpha chain variable domain of TCR clone 125800 (TRAV17, TRAJ57)
CATDASGGAEKLVF

SEQ ID NO: 251600 - protein, 14 aa, Homo sapiens
  CDR3 for beta chain variable domain of TCR clone 125800 (TRBV4-2, TRBJ2-1)
CASGLDRAYNEQFF

SEQ ID NO: 251601 - protein, 10 aa, Homo sapiens
  CDR3 for alpha chain variable domain of TCR clone 125801 (TRAV36/DV7, TRAJ48)
CAVGNEKLTL

SEQ ID NO: 251602 - protein, 14 aa, Homo sapiens
  CDR3 for beta chain variable domain of TCR clone 125801 (TRBV7-3, TRBJ2-2)
CASSLNSNTGELFF

SEQ ID NO: 251603 - protein, 17 aa, Homo sapiens
  CDR3 for alpha chain variable domain of TCR clone 125802 (TRAV13-2, TRAJ42)
CAEKGKNYGGSQGNLIF

SEQ ID NO: 251604 - protein, 16 aa, Homo sapiens
  CDR3 for beta chain variable domain of TCR clone 125802 (TRBV7-9, TRBJ2-1)
CASSLCTGWDYNEQFF

SEQ ID NO: 251605 - protein, 14 aa, Homo sapiens
  CDR3 for alpha chain variable domain of TCR clone 125803 (TRAV12-3, TRAJ10)
NHLPLTGGGNKLTF

SEQ ID NO: 251606 - protein, 17 aa, Homo sapiens
  CDR3 for beta chain variable domain of TCR clone 125803 (TRBV28, TRBJ2-3)
CASSPTPAGGRVDTQYF

SEQ ID NO: 251607 - protein, 12 aa, Homo sapiens
  CDR3 for alpha chain variable domain of TCR clone 125804 (TRAV13-2, TRAJ8)
CAPWLGFQKLVF

SEQ ID NO: 251608 - protein, 14 aa, Homo sapiens
  CDR3 for beta chain variable domain of TCR clone 125804 (TRBV7-2, TRBJ2-7)
CASSPKTSFYEQYF

SEQ ID NO: 251609 - protein, 16 aa, Homo sapiens
  CDR3 for alpha chain variable domain of TCR clone 125805 (TRAV3, TRAJ6)
CAVRRTPSGGSYIPTF

SEQ ID NO: 251610 - protein, 15 aa, Homo sapiens
  CDR3 for beta chain variable domain of TCR clone 125805 (TRBV7-9, TRBJ1-5)
CASSQGHQPNQPQHF

SEQ ID NO: 251611 - protein, 14 aa, Homo sapiens
  CDR3 for alpha chain variable domain of TCR clone 125806 (TRAV12-2, TRAJ13)
CAVNPSGGHQKVTF

SEQ ID NO: 251612 - protein, 13 aa, Homo sapiens
  CDR3 for beta chain variable domain of TCR clone 125806 (TRBV20-1, TRBJ1-6)
CSAKLGGTSPLHF

SEQ ID NO: 251613 - protein, 14 aa, Homo sapiens
  CDR3 for alpha chain variable domain of TCR clone 125807 (TRAV1-2, TRAJ8)
CAVREDTGFQKLVF

SEQ ID NO: 251614 - protein, 16 aa, Homo sapiens
  CDR3 for beta chain variable domain of TCR clone 125807 (TRBV12-4, TRBJ1-5)
CASSRPVGGSDQPQHF

SEQ ID NO: 251615 - protein, 15 aa, Homo sapiens
  CDR3 for alpha chain variable domain of TCR clone 125808 (TRAV12-1, TRAJ42)
CVVTRDGGSKGNLIF

SEQ ID NO: 251616 - protein, 14 aa, Homo sapiens
  CDR3 for beta chain variable domain of TCR clone 125808 (TRBV11-2, TRBJ2-3)
CASSLGGGANTQYF

SEQ ID NO: 251617 - protein, 13 aa, Homo sapiens
  CDR3 for alpha chain variable domain of TCR clone 125809 (TRAV17, TRAJ5)
CALRGTGRRALTF

SEQ ID NO: 251618 - protein, 15 aa, Homo sapiens
  CDR3 for beta chain variable domain of TCR clone 125809 (TRBV5-1, TRBJ2-1)
CASSPPRAPYNEQFF

SEQ ID NO: 251619 - protein, 11 aa, Homo sapiens
  CDR3 for alpha chain variable domain of TCR clone 125810 (TRAV2, TRAJ33)
CAVDSNYQLIW

SEQ ID NO: 251620 - protein, 15 aa, Homo sapiens
  CDR3 for beta chain variable domain of TCR clone 125810 (TRBV19, TRBJ1-2)
FASSVGQVLNYGYTF

SEQ ID NO: 251621 - protein, 13 aa, Homo sapiens
  CDR3 for alpha chain variable domain of TCR clone 125811 (TRAV20, TRAJ49)
CAVQARTGNPFYF

SEQ ID NO: 251622 - protein, 14 aa, Homo sapiens
  CDR3 for beta chain variable domain of TCR clone 125811 (TRBV5-1, TRBJ1-1)
CASSLQGASTEAFF

SEQ ID NO: 251623 - protein, 16 aa, Homo sapiens
  CDR3 for alpha chain variable domain of TCR clone 125812 (TRAV23/DV6, TRAJ57)
CSASSTLSQGGSEKLF

SEQ ID NO: 251624 - protein, 14 aa, Homo sapiens
  CDR3 for beta chain variable domain of TCR clone 125812 (TRBV25-1, TRBJ1-1)
CASTHLGGNTEAFF

SEQ ID NO: 251625 - protein, 13 aa, Homo sapiens
  CDR3 for alpha chain variable domain of TCR clone 125813 (TRAV38-1, TRAJ52)
CAFRGTSYGKLTF

SEQ ID NO: 251626 - protein, 15 aa, Homo sapiens
  CDR3 for beta chain variable domain of TCR clone 125813 (TRBV7-8, TRBJ2-5)
CASSDAAGSQEAQYF

SEQ ID NO: 251627 - protein, 11 aa, Homo sapiens
  CDR3 for alpha chain variable domain of TCR clone 125814 (TRAV3, TRAJ32)
CAVREGIMVVL

SEQ ID NO: 251628 - protein, 13 aa, Homo sapiens
  CDR3 for beta chain variable domain of TCR clone 125814 (TRBV2, TRBJ1-1)
CASSEGRNTEAFF

SEQ ID NO: 251629 - protein, 13 aa, Homo sapiens
  CDR3 for alpha chain variable domain of TCR clone 125815 (TRAV12-1, TRAJ26)
CVVRRNYGQNFVF

SEQ ID NO: 251630 - protein, 14 aa, Homo sapiens
  CDR3 for beta chain variable domain of TCR clone 125815 (TRBV6-3, TRBJ1-1)
CASRYTGESTEALF

SEQ ID NO: 251631 - protein, 13 aa, Homo sapiens
  CDR3 for alpha chain variable domain of TCR clone 125816 (TRAV35, TRAJ42)
CSGFPGSQGNLIF

SEQ ID NO: 251632 - protein, 14 aa, Homo sapiens
  CDR3 for beta chain variable domain of TCR clone 125816 (TRBV19, TRBJ2-1)
CASPTFVLSGEQFF

SEQ ID NO: 251633 - protein, 15 aa, Homo sapiens
  CDR3 for alpha chain variable domain of TCR clone 125817 (TRAV12-3, TRAJ6)
CAMSAASGRSYIPTF

SEQ ID NO: 251634 - protein, 13 aa, Homo sapiens
  CDR3 for beta chain variable domain of TCR clone 125817 (TRBV20-1, TRBJ1-2)
CSASTERIYGYTF

SEQ ID NO: 251635 - protein, 15 aa, Homo sapiens
  CDR3 for alpha chain variable domain of TCR clone 125818 (TRAV30, TRAJ32)
CGTEILGGSTNKLIF

SEQ ID NO: 251636 - protein, 13 aa, Homo sapiens
  CDR3 for beta chain variable domain of TCR clone 125818 (TRBV6-3, TRBJ2-7)
CASSFSGGYEQYF

SEQ ID NO: 251637 - protein, 13 aa, Homo sapiens
  CDR3 for alpha chain variable domain of TCR clone 125819 (TRAV3, TRAJ15)
CAVKDQAGTALIF

SEQ ID NO: 251638 - protein, 15 aa, Homo sapiens
  CDR3 for beta chain variable domain of TCR clone 125819 (TRBV11-1, TRBJ2-7)
CASSLNYGASYEQYF

SEQ ID NO: 251639 - protein, 12 aa, Homo sapiens
  CDR3 for alpha chain variable domain of TCR clone 125820 (TRAV23/DV6, TRAJ31)
CAARRIGARLML

SEQ ID NO: 251640 - protein, 13 aa, Homo sapiens
  CDR3 for beta chain variable domain of TCR clone 125820 (TRBV28, TRBJ2-7)
CASKAGGVYEQYF

SEQ ID NO: 251641 - protein, 10 aa, Homo sapiens
  CDR3 for alpha chain variable domain of TCR clone 125821 (TRAV36/DV7, TRAJ48)
CAVGNEKLTF

SEQ ID NO: 251642 - protein, 16 aa, Homo sapiens
  CDR3 for beta chain variable domain of TCR clone 125821 (TRBV13, TRBJ2-2)
CASSPRTGEHTGELFF

SEQ ID NO: 251643 - protein, 13 aa, Homo sapiens
  CDR3 for alpha chain variable domain of TCR clone 125822 (TRAV1-2, TRAJ9)
CAVLNTGGFKTIF

SEQ ID NO: 251644 - protein, 14 aa, Homo sapiens
  CDR3 for beta chain variable domain of TCR clone 125822 (TRBV7-9, TRBJ1-4)
CASSLEGQSEKLFF

SEQ ID NO: 251645 - protein, 20 aa, Homo sapiens
  CDR3 for alpha chain variable domain of TCR clone 125823 (TRAV25, TRAJ21)
TATQTTDVGTYPLSFNKFYF

SEQ ID NO: 251646 - protein, 14 aa, Homo sapiens
  CDR3 for beta chain variable domain of TCR clone 125823 (TRBV7-8, TRBJ2-7)
CASSPRDRVYEQYF

SEQ ID NO: 251647 - protein, 17 aa, Homo sapiens
  CDR3 for alpha chain variable domain of TCR clone 125824 (TRAV4, TRAJ13)
CLVGVQGSSGGYQKVTF

SEQ ID NO: 251648 - protein, 14 aa, Homo sapiens
  CDR3 for beta chain variable domain of TCR clone 125824 (TRBV7-3, TRBJ1-1)
CASSPTGGVSEAFF

SEQ ID NO: 251649 - protein, 15 aa, Homo sapiens
  CDR3 for alpha chain variable domain of TCR clone 125825 (TRAV13-1, TRAJ57)
QVPPLSQGGSEKLVF

SEQ ID NO: 251650 - protein, 17 aa, Homo sapiens
  CDR3 for beta chain variable domain of TCR clone 125825 (TRBV7-3, TRBJ2-3)
SASSLMKRMRGADTQYF

SEQ ID NO: 251651 - protein, 14 aa, Homo sapiens
  CDR3 for alpha chain variable domain of TCR clone 125826 (TRAV26-1, TRAJ38)
CIADNAGNNRKLLL

SEQ ID NO: 251652 - protein, 13 aa, Homo sapiens
  CDR3 for beta chain variable domain of TCR clone 125826 (TRBV20-1, TRBJ1-1)
CSARGGGNTEAFF

SEQ ID NO: 251653 - protein, 13 aa, Homo sapiens
  CDR3 for alpha chain variable domain of TCR clone 125827 (TRAV16, TRAJ27)
CSLRRTNAGKSTF

SEQ ID NO: 251654 - protein, 15 aa, Homo sapiens
  CDR3 for beta chain variable domain of TCR clone 125827 (TRBV18, TRBJ2-1)
CASSPPSASYNEQFF

SEQ ID NO: 251655 - protein, 14 aa, Homo sapiens
  CDR3 for alpha chain variable domain of TCR clone 125828 (TRAV13-1, TRAJ40)
CAASMTSGTYKHTF

SEQ ID NO: 251656 - protein, 15 aa, Homo sapiens
  CDR3 for beta chain variable domain of TCR clone 125828 (TRBV7-3, TRBJ2-1)
CASSPTGGGEVEQFF

SEQ ID NO: 251657 - protein, 14 aa, Homo sapiens
  CDR3 for alpha chain variable domain of TCR clone 125829 (TRAV8-2, TRAJ32)
CVVSAGGATNKLIF

SEQ ID NO: 251658 - protein, 18 aa, Homo sapiens
  CDR3 for beta chain variable domain of TCR clone 125829 (TRBV6-6, TRBJ1-3)
CASSYSKWDSISGNTIYF

SEQ ID NO: 251659 - protein, 18 aa, Homo sapiens
  CDR3 for alpha chain variable domain of TCR clone 125830 (TRAV26-1, TRAJ23)
CFVRVGLEVWNQGGKLIF

SEQ ID NO: 251660 - protein, 16 aa, Homo sapiens
  CDR3 for beta chain variable domain of TCR clone 125830 (TRBV12-4, TRBJ2-5)
CASSFFVGGRQETQYF

SEQ ID NO: 251661 - protein, 13 aa, Homo sapiens
  CDR3 for alpha chain variable domain of TCR clone 125831 (TRAV29/DV5, TRAJ31)
CAASRNNNARLMF

SEQ ID NO: 251662 - protein, 16 aa, Homo sapiens
  CDR3 for beta chain variable domain of TCR clone 125831 (TRBV5-1, TRBJ2-2)
CASSLWDTTNTGELFF

SEQ ID NO: 251663 - protein, 12 aa, Homo sapiens
  CDR3 for alpha chain variable domain of TCR clone 125832 (TRAV13-2, TRAJ8)
CAPWLGFQKLVF

SEQ ID NO: 251664 - protein, 15 aa, Homo sapiens
  CDR3 for beta chain variable domain of TCR clone 125832 (TRBV12-4, TRBJ2-5)
CVSSLSGAFQETQYF

SEQ ID NO: 251665 - protein, 16 aa, Homo sapiens
  CDR3 for alpha chain variable domain of TCR clone 125833 (TRAV1-2, TRAJ10)
CAVRGVLTGGGNKLTF

SEQ ID NO: 251666 - protein, 12 aa, Homo sapiens
  CDR3 for beta chain variable domain of TCR clone 125833 (TRBV12-4, TRBJ2-7)
CASSLGGYGQYF

SEQ ID NO: 251667 - protein, 14 aa, Homo sapiens
  CDR3 for alpha chain variable domain of TCR clone 125834 (TRAV12-3, TRAJ10)
SHLPLTGGGNKLTF

SEQ ID NO: 251668 - protein, 12 aa, Homo sapiens
  CDR3 for beta chain variable domain of TCR clone 125834 (TRBV7-8, TRBJ2-7)
CASSLGEREQYF

SEQ ID NO: 251669 - protein, 15 aa, Homo sapiens
  CDR3 for alpha chain variable domain of TCR clone 125835 (TRAV13-1, TRAJ49)
CAASTEGNTGNQIYF

SEQ ID NO: 251670 - protein, 12 aa, Homo sapiens
  CDR3 for beta chain variable domain of TCR clone 125835 (TRBV11-2, TRBJ2-2)
CASSLGGGELFF

SEQ ID NO: 251671 - protein, 12 aa, Homo sapiens
  CDR3 for alpha chain variable domain of TCR clone 125836 (TRAV26-1, TRAJ26)
CIVFIYGQNFVF

SEQ ID NO: 251672 - protein, 14 aa, Homo sapiens
  CDR3 for beta chain variable domain of TCR clone 125836 (TRBV6-1, TRBJ2-5)
CASSGSGGAETQYF

SEQ ID NO: 251673 - protein, 18 aa, Homo sapiens
  CDR3 for alpha chain variable domain of TCR clone 125837 (TRAV29/DV5, TRAJ52)
CAAGFRGAGGTSYGKLTF

SEQ ID NO: 251674 - protein, 16 aa, Homo sapiens
  CDR3 for beta chain variable domain of TCR clone 125837 (TRBV7-3, TRBJ2-2)
CASSLKWGTLSGELFF

SEQ ID NO: 251675 - protein, 11 aa, Homo sapiens
  CDR3 for alpha chain variable domain of TCR clone 125838 (TRAV17, TRAJ43)
CATPRSNYMRF

SEQ ID NO: 251676 - protein, 15 aa, Homo sapiens
  CDR3 for beta chain variable domain of TCR clone 125838 (TRBV11-2, TRBJ2-1)
CASSLGTSGLNEQFF

SEQ ID NO: 251677 - protein, 14 aa, Homo sapiens
  CDR3 for alpha chain variable domain of TCR clone 125839 (TRAV38-1, TRAJ29)
CAFITPSGNTPLVF

SEQ ID NO: 251678 - protein, 15 aa, Homo sapiens
  CDR3 for beta chain variable domain of TCR clone 125839 (TRBV20-1, TRBJ2-1)
CSAVIGTGTYNEQFF

SEQ ID NO: 251679 - protein, 17 aa, Homo sapiens
  CDR3 for alpha chain variable domain of TCR clone 125840 (TRAV23/DV6, TRAJ57)
CAASPTLPQGGSEKLVF

SEQ ID NO: 251680 - protein, 14 aa, Homo sapiens
  CDR3 for beta chain variable domain of TCR clone 125840 (TRBV25-1, TRBJ1-1)
CASTHLGGNTEAFF

SEQ ID NO: 251681 - protein, 16 aa, Homo sapiens
  CDR3 for alpha chain variable domain of TCR clone 125841 (TRAV12-3, TRAJ53)
CAMSPGSGGSNYKLTF

SEQ ID NO: 251682 - protein, 11 aa, Homo sapiens
  CDR3 for beta chain variable domain of TCR clone 125841 (TRBV29-1, TRBJ2-5)
CSEDGAGTQYF

SEQ ID NO: 251683 - protein, 11 aa, Homo sapiens
  CDR3 for alpha chain variable domain of TCR clone 125842 (TRAV12-3, TRAJ22)
CAMTLARQLTF

SEQ ID NO: 251684 - protein, 17 aa, Homo sapiens
  CDR3 for beta chain variable domain of TCR clone 125842 (TRBV11-2, TRBJ2-1)
CTSSLYPPGVEYNEQFF

SEQ ID NO: 251685 - protein, 11 aa, Homo sapiens
  CDR3 for alpha chain variable domain of TCR clone 125843 (TRAV12-1, TRAJ15)
CVVNAETALIF

SEQ ID NO: 251686 - protein, 16 aa, Homo sapiens
  CDR3 for beta chain variable domain of TCR clone 125843 (TRBV28, TRBJ2-1)
CASSSRVRDSYNEQFF

SEQ ID NO: 251687 - protein, 11 aa, Homo sapiens
  CDR3 for alpha chain variable domain of TCR clone 125844 (TRAV2, TRAJ13)
CASGGYQKVTF

SEQ ID NO: 251688 - protein, 16 aa, Homo sapiens
  CDR3 for beta chain variable domain of TCR clone 125844 (TRBV6-1, TRBJ2-5)
CASSETLDTGAETQYF

SEQ ID NO: 251689 - protein, 14 aa, Homo sapiens
  CDR3 for alpha chain variable domain of TCR clone 125845 (TRAV26-1, TRAJ38)
CIADNAGNNRKLIW

SEQ ID NO: 251690 - protein, 13 aa, Homo sapiens
  CDR3 for beta chain variable domain of TCR clone 125845 (TRBV19, TRBJ1-2)
CASSVPGQDGYTF

SEQ ID NO: 251691 - protein, 12 aa, Homo sapiens
  CDR3 for alpha chain variable domain of TCR clone 125846 (TRAV8-6, TRAJ36)
CAVSDWLGQTTS

SEQ ID NO: 251692 - protein, 17 aa, Homo sapiens
  CDR3 for beta chain variable domain of TCR clone 125846 (TRBV15, TRBJ1-4)
CATSRYGTGDPNEKLFF

SEQ ID NO: 251693 - protein, 11 aa, Homo sapiens
  CDR3 for alpha chain variable domain of TCR clone 125847 (TRAV21, TRAJ23)
CAPRRRGKLIF

SEQ ID NO: 251694 - protein, 14 aa, Homo sapiens
  CDR3 for beta chain variable domain of TCR clone 125847 (TRBV12-4, TRBJ1-1)
CASTWTGHDTEAFF

SEQ ID NO: 251695 - protein, 16 aa, Homo sapiens
  CDR3 for alpha chain variable domain of TCR clone 125848 (TRAV2, TRAJ4)
CAVEDRFSGGYNKLIF

SEQ ID NO: 251696 - protein, 13 aa, Homo sapiens
  CDR3 for beta chain variable domain of TCR clone 125848 (TRBV7-7, TRBJ2-5)
CASSSSGQETQYF

SEQ ID NO: 251697 - protein, 14 aa, Homo sapiens
  CDR3 for alpha chain variable domain of TCR clone 125849 (TRAV1-2, TRAJ6)
WAVSLSGGSYIPTF

SEQ ID NO: 251698 - protein, 15 aa, Homo sapiens
  CDR3 for beta chain variable domain of TCR clone 125849 (TRBV28, TRBJ2-7)
CASSPGGRGFYEQYF

SEQ ID NO: 251699 - protein, 14 aa, Homo sapiens
  CDR3 for alpha chain variable domain of TCR clone 125850 (TRAV10, TRAJ29)
CVVSANSGNTPPVF

SEQ ID NO: 251700 - protein, 13 aa, Homo sapiens
  CDR3 for beta chain variable domain of TCR clone 125850 (TRBV12-4, TRBJ1-1)
CASSPGTGFEAFF

SEQ ID NO: 251701 - protein, 13 aa, Homo sapiens
  CDR3 for alpha chain variable domain of TCR clone 125851 (TRAV20, TRAJ54)
CAVQAGGAQKLVF

SEQ ID NO: 251702 - protein, 14 aa, Homo sapiens
  CDR3 for beta chain variable domain of TCR clone 125851 (TRBV20-1, TRBJ2-7)
CSAKPGTGGYEQYF

SEQ ID NO: 251703 - protein, 14 aa, Homo sapiens
  CDR3 for alpha chain variable domain of TCR clone 125852 (TRAV12-2, TRAJ17)
CAVLFKAAGNKLTF

SEQ ID NO: 251704 - protein, 13 aa, Homo sapiens
  CDR3 for beta chain variable domain of TCR clone 125852 (TRBV7-9, TRBJ2-1)
CASSLDVGNEQFF

SEQ ID NO: 251705 - protein, 14 aa, Homo sapiens
  CDR3 for alpha chain variable domain of TCR clone 125853 (TRAV1-2, TRAJ16)
CAVNRFSDGQRLLF

SEQ ID NO: 251706 - protein, 11 aa, Homo sapiens
  CDR3 for beta chain variable domain of TCR clone 125853 (TRBV7-9, TRBJ2-3)
CASSPTDTQYF

SEQ ID NO: 251707 - protein, 12 aa, Homo sapiens
  CDR3 for alpha chain variable domain of TCR clone 125854 (TRAV17, TRAJ4)
CATGGGYNKLIF

SEQ ID NO: 251708 - protein, 13 aa, Homo sapiens
  CDR3 for beta chain variable domain of TCR clone 125854 (TRBV29-1, TRBJ2-2)
CSTTGVNTGELFF

SEQ ID NO: 251709 - protein, 14 aa, Homo sapiens
  CDR3 for alpha chain variable domain of TCR clone 125855 (TRAV25, TRAJ6)
CAGRESGGSYIPTF

SEQ ID NO: 251710 - protein, 15 aa, Homo sapiens
  CDR3 for beta chain variable domain of TCR clone 125855 (TRBV20-1, TRBJ2-7)
CSARDRVSGMDEQYF

SEQ ID NO: 251711 - protein, 10 aa, Homo sapiens
  CDR3 for alpha chain variable domain of TCR clone 125856 (TRAV5, TRAJ34)
CAEDTDKRIF

SEQ ID NO: 251712 - protein, 12 aa, Homo sapiens
  CDR3 for beta chain variable domain of TCR clone 125856 (TRBV11-2, TRBJ2-2)
CASSLGGGELFF

SEQ ID NO: 251713 - protein, 16 aa, Homo sapiens
  CDR3 for alpha chain variable domain of TCR clone 125857 (TRAV30, TRAJ24)
FGTEIVDADSWGKFQF

SEQ ID NO: 251714 - protein, 16 aa, Homo sapiens
  CDR3 for beta chain variable domain of TCR clone 125857 (TRBV2, TRBJ1-3)
CASSGGAGRSGNTIYF

SEQ ID NO: 251715 - protein, 11 aa, Homo sapiens
  CDR3 for alpha chain variable domain of TCR clone 125858 (TRAV12-1, TRAJ8)
CVVTGFQKLVF

SEQ ID NO: 251716 - protein, 14 aa, Homo sapiens
  CDR3 for beta chain variable domain of TCR clone 125858 (TRBV19, TRBJ2-1)
CASGKSTQYDEQFF

SEQ ID NO: 251717 - protein, 14 aa, Homo sapiens
  CDR3 for alpha chain variable domain of TCR clone 125859 (TRAV8-6, TRAJ13)
CAVFSSGGYQRVTF

SEQ ID NO: 251718 - protein, 14 aa, Homo sapiens
  CDR3 for beta chain variable domain of TCR clone 125859 (TRBV7-2, TRBJ1-5)
CASSLTGNNQPQHF

SEQ ID NO: 251719 - protein, 14 aa, Homo sapiens
  CDR3 for alpha chain variable domain of TCR clone 125860 (TRAV20, TRAJ20)
CAVRRGYNDYKLSF

SEQ ID NO: 251720 - protein, 13 aa, Homo sapiens
  CDR3 for beta chain variable domain of TCR clone 125860 (TRBV12-4, TRBJ1-2)
CASSLRQGKGYTF

SEQ ID NO: 251721 - protein, 12 aa, Homo sapiens
  CDR3 for alpha chain variable domain of TCR clone 125861 (TRAV26-2, TRAJ23)
CILRGQGGKLIF

SEQ ID NO: 251722 - protein, 13 aa, Homo sapiens
  CDR3 for beta chain variable domain of TCR clone 125861 (TRBV7-9, TRBJ2-7)
CASSLPLTYEQYF

SEQ ID NO: 251723 - protein, 12 aa, Homo sapiens
  CDR3 for alpha chain variable domain of TCR clone 125862 (TRAV8-4, TRAJ3)
CAVTGENLVQQC

SEQ ID NO: 251724 - protein, 16 aa, Homo sapiens
  CDR3 for beta chain variable domain of TCR clone 125862 (TRBV4-2, TRBJ1-1)
CASSQAGFGMNTEAFF

SEQ ID NO: 251725 - protein, 13 aa, Homo sapiens
  CDR3 for alpha chain variable domain of TCR clone 125863 (TRAV1-2, TRAJ31)
CAVRGYNNARLMF

SEQ ID NO: 251726 - protein, 15 aa, Homo sapiens
  CDR3 for beta chain variable domain of TCR clone 125863 (TRBV5-6, TRBJ2-7)
CASSLGPGRGHEQYF

SEQ ID NO: 251727 - protein, 17 aa, Homo sapiens
  CDR3 for alpha chain variable domain of TCR clone 125864 (TRAV26-1, TRAJ22)
CIVRVSFWFCKATDLLF

SEQ ID NO: 251728 - protein, 13 aa, Homo sapiens
  CDR3 for beta chain variable domain of TCR clone 125864 (TRBV7-9, TRBJ1-2)
CASSLKQNYGYTF

SEQ ID NO: 251729 - protein, 12 aa, Homo sapiens
  CDR3 for alpha chain variable domain of TCR clone 125865 (TRAV12-1, TRAJ23)
CVANIPGGKLIF

SEQ ID NO: 251730 - protein, 15 aa, Homo sapiens
  CDR3 for beta chain variable domain of TCR clone 125865 (TRBV6-3, TRBJ2-7)
CASSSPGTVFYEQYF

SEQ ID NO: 251731 - protein, 14 aa, Homo sapiens
  CDR3 for alpha chain variable domain of TCR clone 125866 (TRAV12-3, TRAJ10)
SHLPLTGGGNKLTF

SEQ ID NO: 251732 - protein, 18 aa, Homo sapiens
  CDR3 for beta chain variable domain of TCR clone 125866 (TRBV12-4, TRBJ2-7)
CASSSSDSQPTGSYEQYF

SEQ ID NO: 251733 - protein, 10 aa, Homo sapiens
  CDR3 for alpha chain variable domain of TCR clone 125867 (TRAV30, TRAJ48)
CGIGNEKLTF

SEQ ID NO: 251734 - protein, 14 aa, Homo sapiens
  CDR3 for beta chain variable domain of TCR clone 125867 (TRBV7-6, TRBJ2-3)
CASSVAGGTDTKYF

SEQ ID NO: 251735 - protein, 14 aa, Homo sapiens
  CDR3 for alpha chain variable domain of TCR clone 125868 (TRAV12-1, TRAJ4)
CVGDFSGGYNKLIF

SEQ ID NO: 251736 - protein, 13 aa, Homo sapiens
  CDR3 for beta chain variable domain of TCR clone 125868 (TRBV12-5, TRBJ2-3)
CASGDRQSDTQYF

SEQ ID NO: 251737 - protein, 14 aa, Homo sapiens
  CDR3 for alpha chain variable domain of TCR clone 125869 (TRAV23/DV6, TRAJ4)
CAAPSFGGYNKLIF

SEQ ID NO: 251738 - protein, 16 aa, Homo sapiens
  CDR3 for beta chain variable domain of TCR clone 125869 (TRBV19, TRBJ1-1)
CASRFGGPVTGTEAFF

SEQ ID NO: 251739 - protein, 13 aa, Homo sapiens
  CDR3 for alpha chain variable domain of TCR clone 125870 (TRAV8-3, TRAJ4)
WVFYSGGYNKLIF

SEQ ID NO: 251740 - protein, 18 aa, Homo sapiens
  CDR3 for beta chain variable domain of TCR clone 125870 (TRBV11-2, TRBJ2-3)
CASSLGGASRGAPNTQYF

SEQ ID NO: 251741 - protein, 11 aa, Homo sapiens
  CDR3 for alpha chain variable domain of TCR clone 125871 (TRAV2, TRAJ33)
CAVDCNYQLIW

SEQ ID NO: 251742 - protein, 14 aa, Homo sapiens
  CDR3 for beta chain variable domain of TCR clone 125871 (TRBV11-2, TRBJ2-3)
CASSRLARTDTQYF

SEQ ID NO: 251743 - protein, 11 aa, Homo sapiens
  CDR3 for alpha chain variable domain of TCR clone 125872 (TRAV21, TRAJ39)
LLVNAGNMLTF

SEQ ID NO: 251744 - protein, 13 aa, Homo sapiens
  CDR3 for beta chain variable domain of TCR clone 125872 (TRBV7-2, TRBJ2-7)
CASSSPSGSEQYF

SEQ ID NO: 251745 - protein, 14 aa, Homo sapiens
  CDR3 for alpha chain variable domain of TCR clone 125873 (TRAV20, TRAJ56)
CAVQFGGANSKLTF

SEQ ID NO: 251746 - protein, 16 aa, Homo sapiens
  CDR3 for beta chain variable domain of TCR clone 125873 (TRBV2, TRBJ2-1)
CASRSPAGGKYNEQFF

SEQ ID NO: 251747 - protein, 14 aa, Homo sapiens
  CDR3 for alpha chain variable domain of TCR clone 125874 (TRAV3, TRAJ16)
CCERLKSDGQQLLF

SEQ ID NO: 251748 - protein, 15 aa, Homo sapiens
  CDR3 for beta chain variable domain of TCR clone 125874 (TRBV28, TRBJ2-7)
CASSPGGRGFYEQYF

SEQ ID NO: 251749 - protein, 13 aa, Homo sapiens
  CDR3 for alpha chain variable domain of TCR clone 125875 (TRAV3, TRAJ21)
CAVREPDFNKFFF

SEQ ID NO: 251750 - protein, 13 aa, Homo sapiens
  CDR3 for beta chain variable domain of TCR clone 125875 (TRBV9, TRBJ2-1)
CASSPSGGNEQFF

SEQ ID NO: 251751 - protein, 14 aa, Homo sapiens
  CDR3 for alpha chain variable domain of TCR clone 125876 (TRAV26-2, TRAJ11)
CIPRLNSGYSTLTF

SEQ ID NO: 251752 - protein, 14 aa, Homo sapiens
  CDR3 for beta chain variable domain of TCR clone 125876 (TRBV12-4, TRBJ2-3)
CASSGQGSTDTQYF

SEQ ID NO: 251753 - protein, 12 aa, Homo sapiens
  CDR3 for alpha chain variable domain of TCR clone 125877 (TRAV12-3, TRAJ17)
CAMTLTGNKLTF

SEQ ID NO: 251754 - protein, 18 aa, Homo sapiens
  CDR3 for beta chain variable domain of TCR clone 125877 (TRBV11-2, TRBJ2-6)
CASSLNPFLGTGANVLTF

SEQ ID NO: 251755 - protein, 11 aa, Homo sapiens
  CDR3 for alpha chain variable domain of TCR clone 125878 (TRAV23/DV6, TRAJ49)
CAVAPVTSSIL

SEQ ID NO: 251756 - protein, 13 aa, Homo sapiens
  CDR3 for beta chain variable domain of TCR clone 125878 (TRBV2, TRBJ1-1)
CASRWTVNTEAFF

SEQ ID NO: 251757 - protein, 14 aa, Homo sapiens
  CDR3 for alpha chain variable domain of TCR clone 125879 (TRAV17, TRAJ37)
CATDGSSNAGKLIF

SEQ ID NO: 251758 - protein, 13 aa, Homo sapiens
  CDR3 for beta chain variable domain of TCR clone 125879 (TRBV11-2, TRBJ2-1)
CASSLDLVNEQFF

SEQ ID NO: 251759 - protein, 15 aa, Homo sapiens
  CDR3 for alpha chain variable domain of TCR clone 125880 (TRAV17, TRAJ57)
CATGPSQGGSEKLDF

SEQ ID NO: 251760 - protein, 14 aa, Homo sapiens
  CDR3 for beta chain variable domain of TCR clone 125880 (TRBV12-5, TRBJ2-5)
CASGSRTHQETQYF

SEQ ID NO: 251761 - protein, 14 aa, Homo sapiens
  CDR3 for alpha chain variable domain of TCR clone 125881 (TRAV12-1, TRAJ17)
CVVNYKAAGNKLTF

SEQ ID NO: 251762 - protein, 16 aa, Homo sapiens
  CDR3 for beta chain variable domain of TCR clone 125881 (TRBV20-1, TRBJ1-2)
CSASMGQGVANYGYTF

SEQ ID NO: 251763 - protein, 15 aa, Homo sapiens
  CDR3 for alpha chain variable domain of TCR clone 125882 (TRAV12-3, TRAJ11)
CAMSEEKSGYSTLTF

SEQ ID NO: 251764 - protein, 16 aa, Homo sapiens
  CDR3 for beta chain variable domain of TCR clone 125882 (TRBV5-1, TRBJ2-7)
CASSLEGLAGLYEQYF

SEQ ID NO: 251765 - protein, 12 aa, Homo sapiens
  CDR3 for alpha chain variable domain of TCR clone 125883 (TRAV3, TRAJ20)
CAVRDPDYKLSF

SEQ ID NO: 251766 - protein, 12 aa, Homo sapiens
  CDR3 for beta chain variable domain of TCR clone 125883 (TRBV28, TRBJ2-3)
CASSLYRDTQYF

SEQ ID NO: 251767 - protein, 17 aa, Homo sapiens
  CDR3 for alpha chain variable domain of TCR clone 125884 (TRAV26-1, TRAJ46)
IASSESEKKSSGDKMTF

SEQ ID NO: 251768 - protein, 13 aa, Homo sapiens
  CDR3 for beta chain variable domain of TCR clone 125884 (TRBV12-5, TRBJ2-3)
CASGDRQSDTQYF

SEQ ID NO: 251769 - protein, 15 aa, Homo sapiens
  CDR3 for alpha chain variable domain of TCR clone 125885 (TRAV12-3, TRAJ27)
CAMRAYNTNAGKSTF

SEQ ID NO: 251770 - protein, 13 aa, Homo sapiens
  CDR3 for beta chain variable domain of TCR clone 125885 (TRBV19, TRBJ1-2)
CASSVPGQDGYTF

SEQ ID NO: 251771 - protein, 12 aa, Homo sapiens
  CDR3 for alpha chain variable domain of TCR clone 125886 (TRAV26-1, TRAJ26)
CIVFIYGQNFVF

SEQ ID NO: 251772 - protein, 15 aa, Homo sapiens
  CDR3 for beta chain variable domain of TCR clone 125886 (TRBV9, TRBJ1-6)
CASSVAGTGDSPLHF

SEQ ID NO: 251773 - protein, 12 aa, Homo sapiens
  CDR3 for alpha chain variable domain of TCR clone 125887 (TRAV22, TRAJ21)
CAVSYNFNKFYF

SEQ ID NO: 251774 - protein, 15 aa, Homo sapiens
  CDR3 for beta chain variable domain of TCR clone 125887 (TRBV18, TRBJ1-6)
CASSPASAAGSPLHF

SEQ ID NO: 251775 - protein, 15 aa, Homo sapiens
  CDR3 for alpha chain variable domain of TCR clone 125888 (TRAV25, TRAJ53)
CPTSNSGGSNYKLTF

SEQ ID NO: 251776 - protein, 16 aa, Homo sapiens
  CDR3 for beta chain variable domain of TCR clone 125888 (TRBV4-1, TRBJ1-4)
CASSQDLRRGGEKLFF

SEQ ID NO: 251777 - protein, 11 aa, Homo sapiens
  CDR3 for alpha chain variable domain of TCR clone 125889 (TRAV13-2, TRAJ15)
CSHQAGTALIF

SEQ ID NO: 251778 - protein, 12 aa, Homo sapiens
  CDR3 for beta chain variable domain of TCR clone 125889 (TRBV11-2, TRBJ2-2)
CASSLGGGELFF

SEQ ID NO: 251779 - protein, 14 aa, Homo sapiens
  CDR3 for alpha chain variable domain of TCR clone 125890 (TRAV1-2, TRAJ8)
CAVREDTGFQKLVF

SEQ ID NO: 251780 - protein, 16 aa, Homo sapiens
  CDR3 for beta chain variable domain of TCR clone 125890 (TRBV12-5, TRBJ2-5)
CASGTRTSGNQETQYF

SEQ ID NO: 251781 - protein, 10 aa, Homo sapiens
  CDR3 for alpha chain variable domain of TCR clone 125891 (TRAV3, TRAJ20)
CAVRDPRLQA

SEQ ID NO: 251782 - protein, 14 aa, Homo sapiens
  CDR3 for beta chain variable domain of TCR clone 125891 (TRBV4-2, TRBJ2-1)
CASGLDRAYNEQFF

SEQ ID NO: 251783 - protein, 16 aa, Homo sapiens
  CDR3 for alpha chain variable domain of TCR clone 125892 (TRAV3, TRAJ37)
CAVRGKGSVNTGKLIF

SEQ ID NO: 251784 - protein, 16 aa, Homo sapiens
  CDR3 for beta chain variable domain of TCR clone 125892 (TRBV12-4, TRBJ1-5)
CASSRPVGGSNQPQHF

SEQ ID NO: 251785 - protein, 12 aa, Homo sapiens
  CDR3 for alpha chain variable domain of TCR clone 125893 (TRAV12-1, TRAJ40)
CVVPSGTYKYIF

SEQ ID NO: 251786 - protein, 13 aa, Homo sapiens
  CDR3 for beta chain variable domain of TCR clone 125893 (TRBV7-2, TRBJ1-1)
CASNLKGAKVAFF

SEQ ID NO: 251787 - protein, 13 aa, Homo sapiens
  CDR3 for alpha chain variable domain of TCR clone 125894 (TRAV20, TRAJ31)
CAVQAIGGARLMF

SEQ ID NO: 251788 - protein, 14 aa, Homo sapiens
  CDR3 for beta chain variable domain of TCR clone 125894 (TRBV7-9, TRBJ2-5)
CASSLAFGQETQYF

SEQ ID NO: 251789 - protein, 17 aa, Homo sapiens
  CDR3 for alpha chain variable domain of TCR clone 125895 (TRAV3, TRAJ42)
CAVRDRDYGGSQGNLIF

SEQ ID NO: 251790 - protein, 13 aa, Homo sapiens
  CDR3 for beta chain variable domain of TCR clone 125895 (TRBV4-1, TRBJ2-2)
CASSQENTGELFF

SEQ ID NO: 251791 - protein, 14 aa, Homo sapiens
  CDR3 for alpha chain variable domain of TCR clone 125896 (TRAV17, TRAJ31)
CATVPLSGNARLML

SEQ ID NO: 251792 - protein, 15 aa, Homo sapiens
  CDR3 for beta chain variable domain of TCR clone 125896 (TRBV15, TRBJ2-2)
CATSGTGGRVGELFF

SEQ ID NO: 251793 - protein, 13 aa, Homo sapiens
  CDR3 for alpha chain variable domain of TCR clone 125897 (TRAV12-3, TRAJ7)
CAMSASGNNRLAF

SEQ ID NO: 251794 - protein, 14 aa, Homo sapiens
  CDR3 for beta chain variable domain of TCR clone 125897 (TRBV13, TRBJ2-5)
CASSLGARGETQYF

SEQ ID NO: 251795 - protein, 18 aa, Homo sapiens
  CDR3 for alpha chain variable domain of TCR clone 125898 (TRAV35, TRAJ28)
CAGHNYPLSGAGSYQLTF

SEQ ID NO: 251796 - protein, 16 aa, Homo sapiens
  CDR3 for beta chain variable domain of TCR clone 125898 (TRBV7-3, TRBJ2-2)
CASSLKRGTLSGELLF

SEQ ID NO: 251797 - protein, 14 aa, Homo sapiens
  CDR3 for alpha chain variable domain of TCR clone 125899 (TRAV8-3, TRAJ24)
CAVGSTDSWGKLQF

SEQ ID NO: 251798 - protein, 14 aa, Homo sapiens
  CDR3 for beta chain variable domain of TCR clone 125899 (TRBV6-1, TRBJ1-3)
CASVQGGGGNTIYF

SEQ ID NO: 251799 - protein, 15 aa, Homo sapiens
  CDR3 for alpha chain variable domain of TCR clone 125900 (TRAV21, TRAJ53)
CATLDSGGSNYKLTF

SEQ ID NO: 251800 - protein, 16 aa, Homo sapiens
  CDR3 for beta chain variable domain of TCR clone 125900 (TRBV24-1, TRBJ2-3)
CATSDPGTGATDTQYF

SEQ ID NO: 251801 - protein, 11 aa, Homo sapiens
  CDR3 for alpha chain variable domain of TCR clone 125901 (TRAV1-2, TRAJ20)
CAVANDYKLSF

SEQ ID NO: 251802 - protein, 18 aa, Homo sapiens
  CDR3 for beta chain variable domain of TCR clone 125901 (TRBV20-1, TRBJ2-6)
CSAETRPTHGSGANVLTF

SEQ ID NO: 251803 - protein, 12 aa, Homo sapiens
  CDR3 for alpha chain variable domain of TCR clone 125902 (TRAV26-1, TRAJ36)
CIVRVRADNVFF

SEQ ID NO: 251804 - protein, 13 aa, Homo sapiens
  CDR3 for beta chain variable domain of TCR clone 125902 (TRBV11-2, TRBJ2-5)
CASSRGPSETQYF

SEQ ID NO: 251805 - protein, 23 aa, Homo sapiens
  CDR3 for alpha chain variable domain of TCR clone 125903 (TRAV26-1, TRAJ38)
CIADNAGNNHIQNPDPAVYQLRD

SEQ ID NO: 251806 - protein, 13 aa, Homo sapiens
  CDR3 for beta chain variable domain of TCR clone 125903 (TRBV20-1, TRBJ1-1)
CSARGGGITEAFF

SEQ ID NO: 251807 - protein, 14 aa, Homo sapiens
  CDR3 for alpha chain variable domain of TCR clone 125904 (TRAV27, TRAJ42)
CAGGDGGSQGNLIF

SEQ ID NO: 251808 - protein, 13 aa, Homo sapiens
  CDR3 for beta chain variable domain of TCR clone 125904 (TRBV15, TRBJ2-7)
CATSTTGHYEQYF

SEQ ID NO: 251809 - protein, 16 aa, Homo sapiens
  CDR3 for alpha chain variable domain of TCR clone 125905 (TRAV35, TRAJ28)
CAGYLYSGAGSYQLTF

SEQ ID NO: 251810 - protein, 11 aa, Homo sapiens
  CDR3 for beta chain variable domain of TCR clone 125905 (TRBV10-3, TRBJ2-7)
CAISEGLEQYF

SEQ ID NO: 251811 - protein, 12 aa, Homo sapiens
  CDR3 for alpha chain variable domain of TCR clone 125906 (TRAV12-3, TRAJ41)
CAMSYSGYALNF

SEQ ID NO: 251812 - protein, 15 aa, Homo sapiens
  CDR3 for beta chain variable domain of TCR clone 125906 (TRBV5-7, TRBJ1-5)
CAGSYGKLWDQPQHF

SEQ ID NO: 251813 - protein, 14 aa, Homo sapiens
  CDR3 for alpha chain variable domain of TCR clone 125907 (TRAV38-1, TRAJ45)
CAYYSGGGADGLTF

SEQ ID NO: 251814 - protein, 20 aa, Homo sapiens
  CDR3 for beta chain variable domain of TCR clone 125907 (TRBV28, TRBJ2-1)
CASTPIGRSPGLAGGNEQFF

SEQ ID NO: 251815 - protein, 13 aa, Homo sapiens
  CDR3 for alpha chain variable domain of TCR clone 125908 (TRAV9-2, TRAJ53)
CALSGGSNYTLTF

SEQ ID NO: 251816 - protein, 17 aa, Homo sapiens
  CDR3 for beta chain variable domain of TCR clone 125908 (TRBV11-2, TRBJ2-1)
CASSLYPPGVEYNEQFF

SEQ ID NO: 251817 - protein, 14 aa, Homo sapiens
  CDR3 for alpha chain variable domain of TCR clone 125909 (TRAV23/DV6, TRAJ22)
CAASVSGSARHLTF

SEQ ID NO: 251818 - protein, 16 aa, Homo sapiens
  CDR3 for beta chain variable domain of TCR clone 125909 (TRBV19, TRBJ2-2)
CASSFPGQGLAGELFF

SEQ ID NO: 251819 - protein, 13 aa, Homo sapiens
  CDR3 for alpha chain variable domain of TCR clone 125910 (TRAV13-1, TRAJ13)
CAASKGGYQKVTF

SEQ ID NO: 251820 - protein, 16 aa, Homo sapiens
  CDR3 for beta chain variable domain of TCR clone 125910 (TRBV18, TRBJ1-2)
CASAPPERVTIYGYTF

SEQ ID NO: 251821 - protein, 14 aa, Homo sapiens
  CDR3 for alpha chain variable domain of TCR clone 125911 (TRAV12-3, TRAJ10)
SHLPLTGGGNKLTF

SEQ ID NO: 251822 - protein, 15 aa, Homo sapiens
  CDR3 for beta chain variable domain of TCR clone 125911 (TRBV7-9, TRBJ1-4)
CASSRTGGFNEKLVF

SEQ ID NO: 251823 - protein, 17 aa, Homo sapiens
  CDR3 for alpha chain variable domain of TCR clone 125912 (TRAV3, TRAJ6)
CAVRDGPRAGGSYIPTF

SEQ ID NO: 251824 - protein, 17 aa, Homo sapiens
  CDR3 for beta chain variable domain of TCR clone 125912 (TRBV7-2, TRBJ2-3)
CASSLEARGTSTDTQYF

SEQ ID NO: 251825 - protein, 14 aa, Homo sapiens
  CDR3 for alpha chain variable domain of TCR clone 125913 (TRAV12-1, TRAJ12)
CVVTRMDSSYKLIF

SEQ ID NO: 251826 - protein, 14 aa, Homo sapiens
  CDR3 for beta chain variable domain of TCR clone 125913 (TRBV4-1, TRBJ2-7)
CASSPAAGGDEQYF

SEQ ID NO: 251827 - protein, 10 aa, Homo sapiens
  CDR3 for alpha chain variable domain of TCR clone 125914 (TRAV23/DV6, TRAJ57)
CAASSTLSQG

SEQ ID NO: 251828 - protein, 14 aa, Homo sapiens
  CDR3 for beta chain variable domain of TCR clone 125914 (TRBV25-1, TRBJ1-1)
CASTHLGGNTEGFF

SEQ ID NO: 251829 - protein, 13 aa, Homo sapiens
  CDR3 for alpha chain variable domain of TCR clone 125915 (TRAV17, TRAJ39)
CATEDNAGNMLTF

SEQ ID NO: 251830 - protein, 14 aa, Homo sapiens
  CDR3 for beta chain variable domain of TCR clone 125915 (TRBV19, TRBJ1-2)
CASSPTGGAGGYAF

SEQ ID NO: 251831 - protein, 10 aa, Homo sapiens
  CDR3 for alpha chain variable domain of TCR clone 125916 (TRAV23/DV6, TRAJ31)
CPRGGARLMF

SEQ ID NO: 251832 - protein, 14 aa, Homo sapiens
  CDR3 for beta chain variable domain of TCR clone 125916 (TRBV7-8, TRBJ1-2)
CASSPDSLSYGYTF

SEQ ID NO: 251833 - protein, 17 aa, Homo sapiens
  CDR3 for alpha chain variable domain of TCR clone 125917 (TRAV13-1, TRAJ5)
CSNPSLSRDTGRRTLTF

SEQ ID NO: 251834 - protein, 17 aa, Homo sapiens
  CDR3 for beta chain variable domain of TCR clone 125917 (TRBV24-1, TRBJ2-1)
CATSDVSTSGTYNEQFF

SEQ ID NO: 251835 - protein, 15 aa, Homo sapiens
  CDR3 for alpha chain variable domain of TCR clone 125918 (TRAV17, TRAJ42)
CATDHYGGSQGNLIF

SEQ ID NO: 251836 - protein, 14 aa, Homo sapiens
  CDR3 for beta chain variable domain of TCR clone 125918 (TRBV12-5, TRBJ2-5)
CASGSRTHQETQYF

SEQ ID NO: 251837 - protein, 13 aa, Homo sapiens
  CDR3 for alpha chain variable domain of TCR clone 125919 (TRAV8-1, TRAJ30)
CAVIMNRDDKIIF

SEQ ID NO: 251838 - protein, 15 aa, Homo sapiens
  CDR3 for beta chain variable domain of TCR clone 125919 (TRBV6-3, TRBJ1-2)
CASSYRGQGRVGYTF

SEQ ID NO: 251839 - protein, 10 aa, Homo sapiens
  CDR3 for alpha chain variable domain of TCR clone 125920 (TRAV3, TRAJ30)
CAVREIEIIF

SEQ ID NO: 251840 - protein, 13 aa, Homo sapiens
  CDR3 for beta chain variable domain of TCR clone 125920 (TRBV12-4, TRBJ2-7)
CASSPTETYEQYF

SEQ ID NO: 251841 - protein, 14 aa, Homo sapiens
  CDR3 for alpha chain variable domain of TCR clone 125921 (TRAV26-1, TRAJ30)
CIVRATNRDDKIIF

SEQ ID NO: 251842 - protein, 12 aa, Homo sapiens
  CDR3 for beta chain variable domain of TCR clone 125921 (TRBV28, TRBJ2-1)
CASSVQINEQFF

SEQ ID NO: 251843 - protein, 11 aa, Homo sapiens
  CDR3 for alpha chain variable domain of TCR clone 125922 (TRAV12-3, TRAJ27)
CAMANAGKSTF

SEQ ID NO: 251844 - protein, 15 aa, Homo sapiens
  CDR3 for beta chain variable domain of TCR clone 125922 (TRBV20-1, TRBJ2-4)
CSVTTGLLAKNIQYF

SEQ ID NO: 251845 - protein, 13 aa, Homo sapiens
  CDR3 for alpha chain variable domain of TCR clone 125923 (TRAV1-2, TRAJ9)
CAVLNTGGVKTIF

SEQ ID NO: 251846 - protein, 14 aa, Homo sapiens
  CDR3 for beta chain variable domain of TCR clone 125923 (TRBV20-1, TRBJ2-3)
CSARGGTSTDTQYF

SEQ ID NO: 251847 - protein, 14 aa, Homo sapiens
  CDR3 for alpha chain variable domain of TCR clone 125924 (TRAV1-2, TRAJ8)
CAVREDTGFQELVF

SEQ ID NO: 251848 - protein, 15 aa, Homo sapiens
  CDR3 for beta chain variable domain of TCR clone 125924 (TRBV28, TRBJ2-6)
CASSLAGSGANVLTF

SEQ ID NO: 251849 - protein, 14 aa, Homo sapiens
  CDR3 for alpha chain variable domain of TCR clone 125925 (TRAV12-2, TRAJ5)
CAVNRSTGRRSLTF

SEQ ID NO: 251850 - protein, 12 aa, Homo sapiens
  CDR3 for beta chain variable domain of TCR clone 125925 (TRBV19, TRBJ1-5)
CASSIAQQPQHF

SEQ ID NO: 251851 - protein, 11 aa, Homo sapiens
  CDR3 for alpha chain variable domain of TCR clone 125926 (TRAV12-3, TRAJ43)
CAMSVSNDMRF

SEQ ID NO: 251852 - protein, 15 aa, Homo sapiens
  CDR3 for beta chain variable domain of TCR clone 125926 (TRBV24-1, TRBJ2-5)
CATSEMTGAVGAQYF

SEQ ID NO: 251853 - protein, 15 aa, Homo sapiens
  CDR3 for alpha chain variable domain of TCR clone 125927 (TRAV13-1, TRAJ49)
CAASAEGNTGNQFYF

SEQ ID NO: 251854 - protein, 12 aa, Homo sapiens
  CDR3 for beta chain variable domain of TCR clone 125927 (TRBV11-2, TRBJ2-2)
CASSLGGGELFF

SEQ ID NO: 251855 - protein, 19 aa, Homo sapiens
  CDR3 for alpha chain variable domain of TCR clone 125928 (TRAV26-1, TRAJ52)
CIVRAHRNAGGTSYGKLTF

SEQ ID NO: 251856 - protein, 15 aa, Homo sapiens
  CDR3 for beta chain variable domain of TCR clone 125928 (TRBV29-1, TRBJ2-1)
CSGRDRKRAYNEQFF

SEQ ID NO: 251857 - protein, 14 aa, Homo sapiens
  CDR3 for alpha chain variable domain of TCR clone 125929 (TRAV12-3, TRAJ54)
CAMRGIQGAQKLAF

SEQ ID NO: 251858 - protein, 13 aa, Homo sapiens
  CDR3 for beta chain variable domain of TCR clone 125929 (TRBV19, TRBJ1-1)
CASSPSNGGEAFF

SEQ ID NO: 251859 - protein, 12 aa, Homo sapiens
  CDR3 for alpha chain variable domain of TCR clone 125930 (TRAV13-1, TRAJ21)
CAAKEGFNKFYF

SEQ ID NO: 251860 - protein, 14 aa, Homo sapiens
  CDR3 for beta chain variable domain of TCR clone 125930 (TRBV15, TRBJ2-5)
CATSIGGLGETQYF

SEQ ID NO: 251861 - protein, 14 aa, Homo sapiens
  CDR3 for alpha chain variable domain of TCR clone 125931 (TRAV38-1, TRAJ45)
CAFHSGGGADGLTF

SEQ ID NO: 251862 - protein, 13 aa, Homo sapiens
  CDR3 for beta chain variable domain of TCR clone 125931 (TRBV10-3, TRBJ1-2)
CAISERDSYGYTF

SEQ ID NO: 251863 - protein, 12 aa, Homo sapiens
  CDR3 for alpha chain variable domain of TCR clone 125932 (TRAV13-2, TRAJ23)
CAERHRGGKLIF

SEQ ID NO: 251864 - protein, 16 aa, Homo sapiens
  CDR3 for beta chain variable domain of TCR clone 125932 (TRBV4-1, TRBJ1-2)
CASSQDRAVPVGGYTF

SEQ ID NO: 251865 - protein, 13 aa, Homo sapiens
  CDR3 for alpha chain variable domain of TCR clone 125933 (TRAV12-3, TRAJ33)
CAMSLNSNYQLIW

SEQ ID NO: 251866 - protein, 15 aa, Homo sapiens
  CDR3 for beta chain variable domain of TCR clone 125933 (TRBV20-1, TRBJ2-7)
CSAEPGTSGAYEQYF

SEQ ID NO: 251867 - protein, 16 aa, Homo sapiens
  CDR3 for alpha chain variable domain of TCR clone 125934 (TRAV3, TRAJ42)
CSVRDIEGGSQGNLIF

SEQ ID NO: 251868 - protein, 15 aa, Homo sapiens
  CDR3 for beta chain variable domain of TCR clone 125934 (TRBV9, TRBJ2-2)
CASSDFAGASGELFF

SEQ ID NO: 251869 - protein, 16 aa, Homo sapiens
  CDR3 for alpha chain variable domain of TCR clone 125935 (TRAV3, TRAJ37)
CAVRPHGSGNTGKPIF

SEQ ID NO: 251870 - protein, 13 aa, Homo sapiens
  CDR3 for beta chain variable domain of TCR clone 125935 (TRBV2, TRBJ1-5)
CASGTGGYQPQHF

SEQ ID NO: 251871 - protein, 12 aa, Homo sapiens
  CDR3 for alpha chain variable domain of TCR clone 125936 (TRAV9-2, TRAJ40)
CALTSGTYKYIF

SEQ ID NO: 251872 - protein, 16 aa, Homo sapiens
  CDR3 for beta chain variable domain of TCR clone 125936 (TRBV7-7, TRBJ2-2)
CASSLRTGLNTGELFF

SEQ ID NO: 251873 - protein, 11 aa, Homo sapiens
  CDR3 for alpha chain variable domain of TCR clone 125937 (TRAV12-3, TRAJ27)
CAMANAGKSTF

SEQ ID NO: 251874 - protein, 16 aa, Homo sapiens
  CDR3 for beta chain variable domain of TCR clone 125937 (TRBV4-2, TRBJ2-3)
CASSQDGARGGVKQYF

SEQ ID NO: 251875 - protein, 13 aa, Homo sapiens
  CDR3 for alpha chain variable domain of TCR clone 125938 (TRAV12-1, TRAJ40)
CVVPPSGTYKYIF

SEQ ID NO: 251876 - protein, 18 aa, Homo sapiens
  CDR3 for beta chain variable domain of TCR clone 125938 (TRBV7-6, TRBJ2-1)
CASSPRTSGMSSYNEQFF

SEQ ID NO: 251877 - protein, 14 aa, Homo sapiens
  CDR3 for alpha chain variable domain of TCR clone 125939 (TRAV16, TRAJ32)
CALKSGGATNKLIF

SEQ ID NO: 251878 - protein, 13 aa, Homo sapiens
  CDR3 for beta chain variable domain of TCR clone 125939 (TRBV7-9, TRBJ1-2)
CASSLKQNYGYTF

SEQ ID NO: 251879 - protein, 17 aa, Homo sapiens
  CDR3 for alpha chain variable domain of TCR clone 125940 (TRAV3, TRAJ42)
CAVRDRDYGGSQGNLIF

SEQ ID NO: 251880 - protein, 14 aa, Homo sapiens
  CDR3 for beta chain variable domain of TCR clone 125940 (TRBV2, TRBJ2-3)
CASSEGQNTDTQYF

SEQ ID NO: 251881 - protein, 14 aa, Homo sapiens
  CDR3 for alpha chain variable domain of TCR clone 125941 (TRAV12-3, TRAJ10)
SHLPLTGGGNKLSF

SEQ ID NO: 251882 - protein, 15 aa, Homo sapiens
  CDR3 for beta chain variable domain of TCR clone 125941 (TRBV7-9, TRBJ1-4)
CASSRTGGFNEKLFF

SEQ ID NO: 251883 - protein, 12 aa, Homo sapiens
  CDR3 for alpha chain variable domain of TCR clone 125942 (TRAV1-2, TRAJ33)
CAALDSNYQLIW

SEQ ID NO: 251884 - protein, 13 aa, Homo sapiens
  CDR3 for beta chain variable domain of TCR clone 125942 (TRBV14, TRBJ2-7)
CASSPRRPYEQYF

SEQ ID NO: 251885 - protein, 15 aa, Homo sapiens
  CDR3 for alpha chain variable domain of TCR clone 125943 (TRAV27, TRAJ38)
CAAHRNAGNNRKLIW

SEQ ID NO: 251886 - protein, 13 aa, Homo sapiens
  CDR3 for beta chain variable domain of TCR clone 125943 (TRBV20-1, TRBJ1-1)
CSARAGGNTEAFF

SEQ ID NO: 251887 - protein, 13 aa, Homo sapiens
  CDR3 for alpha chain variable domain of TCR clone 125944 (TRAV21, TRAJ15)
CAIANQAGTALIF

SEQ ID NO: 251888 - protein, 12 aa, Homo sapiens
  CDR3 for beta chain variable domain of TCR clone 125944 (TRBV11-2, TRBJ2-5)
CASSLVGETQYF

SEQ ID NO: 251889 - protein, 14 aa, Homo sapiens
  CDR3 for alpha chain variable domain of TCR clone 125945 (TRAV35, TRAJ22)
CAGLRPGSARQLTF

SEQ ID NO: 251890 - protein, 14 aa, Homo sapiens
  CDR3 for beta chain variable domain of TCR clone 125945 (TRBV13, TRBJ1-1)
CASTVITVNTEAFF

SEQ ID NO: 251891 - protein, 14 aa, Homo sapiens
  CDR3 for alpha chain variable domain of TCR clone 125946 (TRAV4, TRAJ17)
CLVGDMAAGNKLTF

SEQ ID NO: 251892 - protein, 14 aa, Homo sapiens
  CDR3 for beta chain variable domain of TCR clone 125946 (TRBV18, TRBJ2-3)
CASSRDRGTDTQYF

SEQ ID NO: 251893 - protein, 14 aa, Homo sapiens
  CDR3 for alpha chain variable domain of TCR clone 125947 (TRAV1-2, TRAJ16)
CAVRSASDGQKLLF

SEQ ID NO: 251894 - protein, 17 aa, Homo sapiens
  CDR3 for beta chain variable domain of TCR clone 125947 (TRBV7-3, TRBJ2-3)
CASSLMKRMRGANTQYF

SEQ ID NO: 251895 - protein, 13 aa, Homo sapiens
  CDR3 for alpha chain variable domain of TCR clone 125948 (TRAV4, TRAJ42)
CLVGGGSQGKLIF

SEQ ID NO: 251896 - protein, 16 aa, Homo sapiens
  CDR3 for beta chain variable domain of TCR clone 125948 (TRBV5-1, TRBJ2-3)
CASSLQGRVGADTQYF

SEQ ID NO: 251897 - protein, 17 aa, Homo sapiens
  CDR3 for alpha chain variable domain of TCR clone 125949 (TRAV14/DV4, TRAJ3)
CAMREGPEYSSASKIIF

SEQ ID NO: 251898 - protein, 16 aa, Homo sapiens
  CDR3 for beta chain variable domain of TCR clone 125949 (TRBV7-7, TRBJ2-1)
CASSLASGTSYNEQFF

SEQ ID NO: 251899 - protein, 15 aa, Homo sapiens
  CDR3 for alpha chain variable domain of TCR clone 125950 (TRAV27, TRAJ38)
CAARRNAGNNRKLIW

SEQ ID NO: 251900 - protein, 18 aa, Homo sapiens
  CDR3 for beta chain variable domain of TCR clone 125950 (TRBV18, TRBJ2-3)
CASSYTSGAAGGTDTQYF

SEQ ID NO: 251901 - protein, 15 aa, Homo sapiens
  CDR3 for alpha chain variable domain of TCR clone 125951 (TRAV13-1, TRAJ10)
CAATILTGGGNKLTF

SEQ ID NO: 251902 - protein, 15 aa, Homo sapiens
  CDR3 for beta chain variable domain of TCR clone 125951 (TRBV2, TRBJ2-7)
CASTLLDSGATEQYF

SEQ ID NO: 251903 - protein, 16 aa, Homo sapiens
  CDR3 for alpha chain variable domain of TCR clone 125952 (TRAV3, TRAJ37)
CAVRGKGSGNTGKLIF

SEQ ID NO: 251904 - protein, 22 aa, Homo sapiens
  CDR3 for beta chain variable domain of TCR clone 125952 (TRBV15, TRBJ2-1)
QAWGTQPCTCVPPAEVDTARFF

SEQ ID NO: 251905 - protein, 15 aa, Homo sapiens
  CDR3 for alpha chain variable domain of TCR clone 125953 (TRAV26-2, TRAJ13)
CILRDLSGGYQKVTL

SEQ ID NO: 251906 - protein, 14 aa, Homo sapiens
  CDR3 for beta chain variable domain of TCR clone 125953 (TRBV4-1, TRBJ2-3)
CASSQEGSTDTQYF

SEQ ID NO: 251907 - protein, 13 aa, Homo sapiens
  CDR3 for alpha chain variable domain of TCR clone 125954 (TRAV8-3, TRAJ44)
CAVVPGTASKLTF

SEQ ID NO: 251908 - protein, 13 aa, Homo sapiens
  CDR3 for beta chain variable domain of TCR clone 125954 (TRBV19, TRBJ2-1)
CAGSTGGSNEQFF

SEQ ID NO: 251909 - protein, 13 aa, Homo sapiens
  CDR3 for alpha chain variable domain of TCR clone 125955 (TRAV24, TRAJ42)
CAFSTGSQGNLIF

SEQ ID NO: 251910 - protein, 17 aa, Homo sapiens
  CDR3 for beta chain variable domain of TCR clone 125955 (TRBV7-8, TRBJ2-6)
CASSAGTGGAGANVLTF

SEQ ID NO: 251911 - protein, 16 aa, Homo sapiens
  CDR3 for alpha chain variable domain of TCR clone 125956 (TRAV30, TRAJ24)
CGTEIVDADSWGKFQF

SEQ ID NO: 251912 - protein, 13 aa, Homo sapiens
  CDR3 for beta chain variable domain of TCR clone 125956 (TRBV2, TRBJ2-7)
CASSVGGSGEQYF

SEQ ID NO: 251913 - protein, 14 aa, Homo sapiens
  CDR3 for alpha chain variable domain of TCR clone 125957 (TRAV23/DV6, TRAJ34)
CAASMVGNTDKLIF

SEQ ID NO: 251914 - protein, 15 aa, Homo sapiens
  CDR3 for beta chain variable domain of TCR clone 125957 (TRBV19, TRBJ1-1)
CASTSGQIQNTEAFF

SEQ ID NO: 251915 - protein, 14 aa, Homo sapiens
  CDR3 for alpha chain variable domain of TCR clone 125958 (TRAV13-2, TRAJ43)
CAEIPTYHNNDMRF

SEQ ID NO: 251916 - protein, 15 aa, Homo sapiens
  CDR3 for beta chain variable domain of TCR clone 125958 (TRBV7-9, TRBJ2-2)
CASGPLDTFPGELFF

SEQ ID NO: 251917 - protein, 12 aa, Homo sapiens
  CDR3 for alpha chain variable domain of TCR clone 125959 (TRAV16, TRAJ10)
CSRTGGGNKLTF

SEQ ID NO: 251918 - protein, 12 aa, Homo sapiens
  CDR3 for beta chain variable domain of TCR clone 125959 (TRBV2, TRBJ1-1)
YCRWTVSTEAFF

SEQ ID NO: 251919 - protein, 12 aa, Homo sapiens
  CDR3 for alpha chain variable domain of TCR clone 125960 (TRAV13-1, TRAJ9)
CASHTGGIKTIF

SEQ ID NO: 251920 - protein, 13 aa, Homo sapiens
  CDR3 for beta chain variable domain of TCR clone 125960 (TRBV12-4, TRBJ1-2)
CASSSGSKDGYTF

SEQ ID NO: 251921 - protein, 13 aa, Homo sapiens
  CDR3 for alpha chain variable domain of TCR clone 125961 (TRAV13-2, TRAJ48)
CAEMDFGNEKLTF

SEQ ID NO: 251922 - protein, 16 aa, Homo sapiens
  CDR3 for beta chain variable domain of TCR clone 125961 (TRBV2, TRBJ2-1)
CASSVGGSLSYNEQFF

SEQ ID NO: 251923 - protein, 14 aa, Homo sapiens
  CDR3 for alpha chain variable domain of TCR clone 125962 (TRAV20, TRAJ18)
CAVGRGSTLGRLYF

SEQ ID NO: 251924 - protein, 14 aa, Homo sapiens
  CDR3 for beta chain variable domain of TCR clone 125962 (TRBV28, TRBJ2-4)
CASTQVTGVNSQYF

SEQ ID NO: 251925 - protein, 15 aa, Homo sapiens
  CDR3 for alpha chain variable domain of TCR clone 125963 (TRAV8-4, TRAJ8)
CAVSDLNTGFQKLVF

SEQ ID NO: 251926 - protein, 17 aa, Homo sapiens
  CDR3 for beta chain variable domain of TCR clone 125963 (TRBV28, TRBJ2-7)
CASSPGLAGGDSSEQYF

SEQ ID NO: 251927 - protein, 18 aa, Homo sapiens
  CDR3 for alpha chain variable domain of TCR clone 125964 (TRAV21, TRAJ52)
CAVRPSPAGGTSHGKLTF

SEQ ID NO: 251928 - protein, 15 aa, Homo sapiens
  CDR3 for beta chain variable domain of TCR clone 125964 (TRBV20-1, TRBJ2-7)
CSARDRVSGMDEQYF

SEQ ID NO: 251929 - protein, 12 aa, Homo sapiens
  CDR3 for alpha chain variable domain of TCR clone 125965 (TRAV12-1, TRAJ30)
CVVNPRDDKIIF

SEQ ID NO: 251930 - protein, 17 aa, Homo sapiens
  CDR3 for beta chain variable domain of TCR clone 125965 (TRBV13, TRBJ2-3)
CASSLSRVAGGRNTQYF

SEQ ID NO: 251931 - protein, 13 aa, Homo sapiens
  CDR3 for alpha chain variable domain of TCR clone 125966 (TRAV29/DV5, TRAJ54)
CAAHLQGAQKLVF

SEQ ID NO: 251932 - protein, 12 aa, Homo sapiens
  CDR3 for beta chain variable domain of TCR clone 125966 (TRBV7-8, TRBJ2-7)
CASSLGDREQYF

SEQ ID NO: 251933 - protein, 14 aa, Homo sapiens
  CDR3 for alpha chain variable domain of TCR clone 125967 (TRAV1-1, TRAJ30)
CAVSSLNRDDKIIF

SEQ ID NO: 251934 - protein, 14 aa, Homo sapiens
  CDR3 for beta chain variable domain of TCR clone 125967 (TRBV7-8, TRBJ2-3)
CASSLEAGTDTQYF

SEQ ID NO: 251935 - protein, 20 aa, Homo sapiens
  CDR3 for alpha chain variable domain of TCR clone 125968 (TRAV12-3, TRAJ41)
SLFIRDSQPSDSATPEALNF

SEQ ID NO: 251936 - protein, 15 aa, Homo sapiens
  CDR3 for beta chain variable domain of TCR clone 125968 (TRBV27, TRBJ2-1)
CASSNGGGSSNEQFF

SEQ ID NO: 251937 - protein, 11 aa, Homo sapiens
  CDR3 for alpha chain variable domain of TCR clone 125969 (TRAV21, TRAJ34)
CAHYNTDKLIF

SEQ ID NO: 251938 - protein, 13 aa, Homo sapiens
  CDR3 for beta chain variable domain of TCR clone 125969 (TRBV7-6, TRBJ1-2)
CASSLVADYVYTF

SEQ ID NO: 251939 - protein, 14 aa, Homo sapiens
  CDR3 for alpha chain variable domain of TCR clone 125970 (TRAV13-1, TRAJ35)
CAASKGGFGNVLHC

SEQ ID NO: 251940 - protein, 12 aa, Homo sapiens
  CDR3 for beta chain variable domain of TCR clone 125970 (TRBV5-4, TRBJ2-5)
CASSSTRETQYF

SEQ ID NO: 251941 - protein, 14 aa, Homo sapiens
  CDR3 for alpha chain variable domain of TCR clone 125971 (TRAV1-2, TRAJ16)
CAVNRFSDGKKLLF

SEQ ID NO: 251942 - protein, 16 aa, Homo sapiens
  CDR3 for beta chain variable domain of TCR clone 125971 (TRBV20-1, TRBJ1-2)
CSASMGQGVANYGYTF

SEQ ID NO: 251943 - protein, 13 aa, Homo sapiens
  CDR3 for alpha chain variable domain of TCR clone 125972 (TRAV38-1, TRAJ42)
CARWGGSQGNLIF

SEQ ID NO: 251944 - protein, 17 aa, Homo sapiens
  CDR3 for beta chain variable domain of TCR clone 125972 (TRBV20-1, TRBJ2-1)
CSARDPIAGVWDNEQFF

SEQ ID NO: 251945 - protein, 12 aa, Homo sapiens
  CDR3 for alpha chain variable domain of TCR clone 125973 (TRAV21, TRAJ37)
CAVRGNTGKLIF

SEQ ID NO: 251946 - protein, 14 aa, Homo sapiens
  CDR3 for beta chain variable domain of TCR clone 125973 (TRBV19, TRBJ2-1)
CASEVAGARNEQFF

SEQ ID NO: 251947 - protein, 12 aa, Homo sapiens
  CDR3 for alpha chain variable domain of TCR clone 125974 (TRAV8-3, TRAJ26)
CAGDNYGQNFVF

SEQ ID NO: 251948 - protein, 15 aa, Homo sapiens
  CDR3 for beta chain variable domain of TCR clone 125974 (TRBV7-2, TRBJ1-2)
CASSWSRDRVSGYTF

SEQ ID NO: 251949 - protein, 11 aa, Homo sapiens
  CDR3 for alpha chain variable domain of TCR clone 125975 (TRAV1-2, TRAJ31)
CAVKNNARLMF

SEQ ID NO: 251950 - protein, 15 aa, Homo sapiens
  CDR3 for beta chain variable domain of TCR clone 125975 (TRBV28, TRBJ2-1)
CASSIIAGGRSEQFF

SEQ ID NO: 251951 - protein, 17 aa, Homo sapiens
  CDR3 for alpha chain variable domain of TCR clone 125976 (TRAV13-1, TRAJ52)
CAAGRDAGGTSYGKLTF

SEQ ID NO: 251952 - protein, 13 aa, Homo sapiens
  CDR3 for beta chain variable domain of TCR clone 125976 (TRBV7-2, TRBJ1-1)
CASNLKGAKVAFF

SEQ ID NO: 251953 - protein, 14 aa, Homo sapiens
  CDR3 for alpha chain variable domain of TCR clone 125977 (TRAV1-2, TRAJ8)
CAVREDTGFQKLVF

SEQ ID NO: 251954 - protein, 15 aa, Homo sapiens
  CDR3 for beta chain variable domain of TCR clone 125977 (TRBV6-3, TRBJ2-7)
CASSSPGTVFYEEYF

SEQ ID NO: 251955 - protein, 16 aa, Homo sapiens
  CDR3 for alpha chain variable domain of TCR clone 125978 (TRAV13-2, TRAJ53)
CAENANSGGSNYKLTF

SEQ ID NO: 251956 - protein, 19 aa, Homo sapiens
  CDR3 for beta chain variable domain of TCR clone 125978 (TRBV28, TRBJ2-7)
CASSYAGTSRLGWVYEQYF

SEQ ID NO: 251957 - protein, 12 aa, Homo sapiens
  CDR3 for alpha chain variable domain of TCR clone 125979 (TRAV13-2, TRAJ23)
CAERHRGGKLIF

SEQ ID NO: 251958 - protein, 14 aa, Homo sapiens
  CDR3 for beta chain variable domain of TCR clone 125979 (TRBV7-2, TRBJ2-5)
CASSPRGSSETQYF

SEQ ID NO: 251959 - protein, 15 aa, Homo sapiens
  CDR3 for alpha chain variable domain of TCR clone 125980 (TRAV12-3, TRAJ11)
CAMSEENSGYSTLTF

SEQ ID NO: 251960 - protein, 14 aa, Homo sapiens
  CDR3 for beta chain variable domain of TCR clone 125980 (TRBV6-1, TRBJ1-3)
CASVQGGGGNTIYF

SEQ ID NO: 251961 - protein, 13 aa, Homo sapiens
  CDR3 for alpha chain variable domain of TCR clone 125981 (TRAV38-1, TRAJ42)
CARWGGSQGNLIF

SEQ ID NO: 251962 - protein, 17 aa, Homo sapiens
  CDR3 for beta chain variable domain of TCR clone 125981 (TRBV20-1, TRBJ2-1)
CSARYPLAGVWDNEQFF

SEQ ID NO: 251963 - protein, 12 aa, Homo sapiens
  CDR3 for alpha chain variable domain of TCR clone 125982 (TRAV2, TRAJ33)
CAVPDSNYQLIW

SEQ ID NO: 251964 - protein, 18 aa, Homo sapiens
  CDR3 for beta chain variable domain of TCR clone 125982 (TRBV7-6, TRBJ2-2)
CASSSSRQGGGNTGELFF

SEQ ID NO: 251965 - protein, 14 aa, Homo sapiens
  CDR3 for alpha chain variable domain of TCR clone 125983 (TRAV12-2, TRAJ40)
CAVKIPSGTYKYIF

SEQ ID NO: 251966 - protein, 14 aa, Homo sapiens
  CDR3 for beta chain variable domain of TCR clone 125983 (TRBV5-1, TRBJ2-7)
CASSLVRGSGEQYF

SEQ ID NO: 251967 - protein, 15 aa, Homo sapiens
  CDR3 for alpha chain variable domain of TCR clone 125984 (TRAV12-3, TRAJ11)
CAMSEENSGYSTLTF

SEQ ID NO: 251968 - protein, 16 aa, Homo sapiens
  CDR3 for beta chain variable domain of TCR clone 125984 (TRBV28, TRBJ2-7)
CASSFPDRRLTYEQYF

SEQ ID NO: 251969 - protein, 14 aa, Homo sapiens
  CDR3 for alpha chain variable domain of TCR clone 125985 (TRAV21, TRAJ48)
CAVIAHFGNEKLTF

SEQ ID NO: 251970 - protein, 13 aa, Homo sapiens
  CDR3 for beta chain variable domain of TCR clone 125985 (TRBV19, TRBJ1-2)
CASSVPGQDGYTF

SEQ ID NO: 251971 - protein, 13 aa, Homo sapiens
  CDR3 for alpha chain variable domain of TCR clone 125986 (TRAV36/DV7, TRAJ37)
CAVFSSNTGKLIF

SEQ ID NO: 251972 - protein, 13 aa, Homo sapiens
  CDR3 for beta chain variable domain of TCR clone 125986 (TRBV19, TRBJ1-2)
RASSVPGQDGYTF

SEQ ID NO: 251973 - protein, 12 aa, Homo sapiens
  CDR3 for alpha chain variable domain of TCR clone 125987 (TRAV38-1, TRAJ43)
CAFMTRLADMRF

SEQ ID NO: 251974 - protein, 13 aa, Homo sapiens
  CDR3 for beta chain variable domain of TCR clone 125987 (TRBV7-9, TRBJ1-2)
CASSLKQNYGYTF

SEQ ID NO: 251975 - protein, 18 aa, Homo sapiens
  CDR3 for alpha chain variable domain of TCR clone 125988 (TRAV13-1, TRAJ52)
CAAKNPNAGGTSYGKLTF

SEQ ID NO: 251976 - protein, 14 aa, Homo sapiens
  CDR3 for beta chain variable domain of TCR clone 125988 (TRBV11-2, TRBJ2-3)
CASSRLARTDTQYF

SEQ ID NO: 251977 - protein, 16 aa, Homo sapiens
  CDR3 for alpha chain variable domain of TCR clone 125989 (TRAV13-1, TRAJ22)
CAAKGGRSGSAGQLTF

SEQ ID NO: 251978 - protein, 15 aa, Homo sapiens
  CDR3 for beta chain variable domain of TCR clone 125989 (TRBV9, TRBJ1-6)
CASSVAGTGDSPLHF

SEQ ID NO: 251979 - protein, 18 aa, Homo sapiens
  CDR3 for alpha chain variable domain of TCR clone 125990 (TRAV21, TRAJ52)
CAVRPSPAGGTSYGELPF

SEQ ID NO: 251980 - protein, 17 aa, Homo sapiens
  CDR3 for beta chain variable domain of TCR clone 125990 (TRBV13, TRBJ2-3)
CASSLSRVAGGRNTQYF

SEQ ID NO: 251981 - protein, 14 aa, Homo sapiens
  CDR3 for alpha chain variable domain of TCR clone 125991 (TRAV3, TRAJ4)
CAVRDSWWLQYADF

SEQ ID NO: 251982 - protein, 18 aa, Homo sapiens
  CDR3 for beta chain variable domain of TCR clone 125991 (TRBV12-4, TRBJ2-2)
CASSRSGGAIPNTGELFF

SEQ ID NO: 251983 - protein, 14 aa, Homo sapiens
  CDR3 for alpha chain variable domain of TCR clone 125992 (TRAV3, TRAJ22)
CAVRDYGSARQLTF

SEQ ID NO: 251984 - protein, 15 aa, Homo sapiens
  CDR3 for beta chain variable domain of TCR clone 125992 (TRBV11-3, TRBJ2-3)
CASRSGGPSTDTQYF

SEQ ID NO: 251985 - protein, 16 aa, Homo sapiens
  CDR3 for alpha chain variable domain of TCR clone 125993 (TRAV12-2, TRAJ45)
CSVIFLSGGGADGLTF

SEQ ID NO: 251986 - protein, 19 aa, Homo sapiens
  CDR3 for beta chain variable domain of TCR clone 125993 (TRBV28, TRBJ2-4)
CASSFQPGGPAHSKNIQYF

SEQ ID NO: 251987 - protein, 14 aa, Homo sapiens
  CDR3 for alpha chain variable domain of TCR clone 125994 (TRAV12-2, TRAJ3)
CAVSLYSSASQIIF

SEQ ID NO: 251988 - protein, 14 aa, Homo sapiens
  CDR3 for beta chain variable domain of TCR clone 125994 (TRBV27, TRBJ2-1)
CAGSIAETYNEQFF

SEQ ID NO: 251989 - protein, 14 aa, Homo sapiens
  CDR3 for alpha chain variable domain of TCR clone 125995 (TRAV3, TRAJ9)
CAVRLNTGGVKTIF

SEQ ID NO: 251990 - protein, 15 aa, Homo sapiens
  CDR3 for beta chain variable domain of TCR clone 125995 (TRBV7-2, TRBJ2-1)
CASSLASGRVNEQFF

SEQ ID NO: 251991 - protein, 14 aa, Homo sapiens
  CDR3 for alpha chain variable domain of TCR clone 125996 (TRAV35, TRAJ53)
CAGNRGGSNYKLTF

SEQ ID NO: 251992 - protein, 15 aa, Homo sapiens
  CDR3 for beta chain variable domain of TCR clone 125996 (TRBV7-9, TRBJ2-1)
CASSLGWGRANEQFF

SEQ ID NO: 251993 - protein, 14 aa, Homo sapiens
  CDR3 for alpha chain variable domain of TCR clone 125997 (TRAV3, TRAJ9)
CAVRLNTGGFKTIF

SEQ ID NO: 251994 - protein, 13 aa, Homo sapiens
  CDR3 for beta chain variable domain of TCR clone 125997 (TRBV15, TRBJ1-6)
CATSGGLNSPLHF

SEQ ID NO: 251995 - protein, 16 aa, Homo sapiens
  CDR3 for alpha chain variable domain of TCR clone 125998 (TRAV1-2, TRAJ10)
CAVRGVLTGGGNKLTF

SEQ ID NO: 251996 - protein, 15 aa, Homo sapiens
  CDR3 for beta chain variable domain of TCR clone 125998 (TRBV28, TRBJ2-5)
CASSSGRTIQETQYF

SEQ ID NO: 251997 - protein, 13 aa, Homo sapiens
  CDR3 for alpha chain variable domain of TCR clone 125999 (TRAV22, TRAJ29)
CAVGGSGNTPLVF

SEQ ID NO: 251998 - protein, 15 aa, Homo sapiens
  CDR3 for beta chain variable domain of TCR clone 125999 (TRBV2, TRBJ2-7)
CASSEGLARSYEQYF

SEQ ID NO: 251999 - protein, 12 aa, Homo sapiens
  CDR3 for alpha chain variable domain of TCR clone 126000 (TRAV12-2, TRAJ9)
CAVNTGGFKTIF

SEQ ID NO: 252000 - protein, 14 aa, Homo sapiens
  CDR3 for beta chain variable domain of TCR clone 126000 (TRBV5-1, TRBJ2-7)
CASSRGESLYEQYF

SEQ ID NO: 252001 - protein, 15 aa, Homo sapiens
  CDR3 for alpha chain variable domain of TCR clone 126001 (TRAV13-1, TRAJ11)
CAASNRNSGYSNLTF

SEQ ID NO: 252002 - protein, 11 aa, Homo sapiens
  CDR3 for beta chain variable domain of TCR clone 126001 (TRBV20-1, TRBJ2-7)
CSARLSYEQYF

SEQ ID NO: 252003 - protein, 16 aa, Homo sapiens
  CDR3 for alpha chain variable domain of TCR clone 126002 (TRAV3, TRAJ10)
CAVRDMRAGGGNKLTF

SEQ ID NO: 252004 - protein, 15 aa, Homo sapiens
  CDR3 for beta chain variable domain of TCR clone 126002 (TRBV7-3, TRBJ2-2)
CASSETGQGTGELFF

SEQ ID NO: 252005 - protein, 14 aa, Homo sapiens
  CDR3 for alpha chain variable domain of TCR clone 126003 (TRAV4, TRAJ15)
CLLSPEGAGTALIF

SEQ ID NO: 252006 - protein, 15 aa, Homo sapiens
  CDR3 for beta chain variable domain of TCR clone 126003 (TRBV7-6, TRBJ2-2)
CASRRTSGNTGELFF

SEQ ID NO: 252007 - protein, 13 aa, Homo sapiens
  CDR3 for alpha chain variable domain of TCR clone 126004 (TRAV2, TRAJ40)
CAAVTSGTYKYIF

SEQ ID NO: 252008 - protein, 14 aa, Homo sapiens
  CDR3 for beta chain variable domain of TCR clone 126004 (TRBV19, TRBJ2-1)
CASPTFVVSGEQFF

SEQ ID NO: 252009 - protein, 14 aa, Homo sapiens
  CDR3 for alpha chain variable domain of TCR clone 126005 (TRAV8-1, TRAJ10)
CAVIFTGGGNKLTF

SEQ ID NO: 252010 - protein, 14 aa, Homo sapiens
  CDR3 for beta chain variable domain of TCR clone 126005 (TRBV25-1, TRBJ1-1)
CASTHLGGNTEAFF

SEQ ID NO: 252011 - protein, 15 aa, Homo sapiens
  CDR3 for alpha chain variable domain of TCR clone 126006 (TRAV25, TRAJ52)
CAGTSGGTSYGKLTF

SEQ ID NO: 252012 - protein, 16 aa, Homo sapiens
  CDR3 for beta chain variable domain of TCR clone 126006 (TRBV4-1, TRBJ2-3)
CASSQSTSGAEDTQYF

SEQ ID NO: 252013 - protein, 16 aa, Homo sapiens
  CDR3 for alpha chain variable domain of TCR clone 126007 (TRAV30, TRAJ24)
CGTEIVDADSWGKFQF

SEQ ID NO: 252014 - protein, 15 aa, Homo sapiens
  CDR3 for beta chain variable domain of TCR clone 126007 (TRBV9, TRBJ1-6)
CASGVAGTGDSPLHF

SEQ ID NO: 252015 - protein, 13 aa, Homo sapiens
  CDR3 for alpha chain variable domain of TCR clone 126008 (TRAV16, TRAJ54)
CALKVRGAQKLVF

SEQ ID NO: 252016 - protein, 12 aa, Homo sapiens
  CDR3 for beta chain variable domain of TCR clone 126008 (TRBV12-4, TRBJ1-3)
CASSFSGNTIYF

SEQ ID NO: 252017 - protein, 13 aa, Homo sapiens
  CDR3 for alpha chain variable domain of TCR clone 126009 (TRAV27, TRAJ6)
CAGGTRGSYIPTF

SEQ ID NO: 252018 - protein, 15 aa, Homo sapiens
  CDR3 for beta chain variable domain of TCR clone 126009 (TRBV11-2, TRBJ1-3)
CASSLSPLVRDTKYF

SEQ ID NO: 252019 - protein, 13 aa, Homo sapiens
  CDR3 for alpha chain variable domain of TCR clone 126010 (TRAV1-2, TRAJ9)
CAALNTGGFKTIF

SEQ ID NO: 252020 - protein, 15 aa, Homo sapiens
  CDR3 for beta chain variable domain of TCR clone 126010 (TRBV7-8, TRBJ1-5)
CASSLALGGQQPQHF

SEQ ID NO: 252021 - protein, 11 aa, Homo sapiens
  CDR3 for alpha chain variable domain of TCR clone 126011 (TRAV2, TRAJ13)
CASGGYQKVTF

SEQ ID NO: 252022 - protein, 12 aa, Homo sapiens
  CDR3 for beta chain variable domain of TCR clone 126011 (TRBV25-1, TRBJ2-7)
CASKRGTGEQYF

SEQ ID NO: 252023 - protein, 15 aa, Homo sapiens
  CDR3 for alpha chain variable domain of TCR clone 126012 (TRAV35, TRAJ40)
CAGQLGTSGTYKYIF

SEQ ID NO: 252024 - protein, 13 aa, Homo sapiens
  CDR3 for beta chain variable domain of TCR clone 126012 (TRBV4-2, TRBJ1-1)
CASSQAGNTEAFF

SEQ ID NO: 252025 - protein, 17 aa, Homo sapiens
  CDR3 for alpha chain variable domain of TCR clone 126013 (TRAV3, TRAJ12)
CAVRDGGRMDSSYKLIF

SEQ ID NO: 252026 - protein, 15 aa, Homo sapiens
  CDR3 for beta chain variable domain of TCR clone 126013 (TRBV28, TRBJ2-1)
CASSIIAGGRSEQFF

SEQ ID NO: 252027 - protein, 13 aa, Homo sapiens
  CDR3 for alpha chain variable domain of TCR clone 126014 (TRAV12-2, TRAJ20)
CAVYPSNDYKLSF

SEQ ID NO: 252028 - protein, 11 aa, Homo sapiens
  CDR3 for beta chain variable domain of TCR clone 126014 (TRBV29-1, TRBJ2-5)
CSEDRTGTQYF

SEQ ID NO: 252029 - protein, 17 aa, Homo sapiens
  CDR3 for alpha chain variable domain of TCR clone 126015 (TRAV3, TRAJ42)
CAVRDRDYGGSQGNLIF

SEQ ID NO: 252030 - protein, 14 aa, Homo sapiens
  CDR3 for beta chain variable domain of TCR clone 126015 (TRBV2, TRBJ1-2)
CASSEGGRNYGYTF

SEQ ID NO: 252031 - protein, 14 aa, Homo sapiens
  CDR3 for alpha chain variable domain of TCR clone 126016 (TRAV1-2, TRAJ8)
CAVREDTGFQELVF

SEQ ID NO: 252032 - protein, 15 aa, Homo sapiens
  CDR3 for beta chain variable domain of TCR clone 126016 (TRBV20-1, TRBJ2-7)
CSAESGTSGAYEQYF

SEQ ID NO: 252033 - protein, 15 aa, Homo sapiens
  CDR3 for alpha chain variable domain of TCR clone 126017 (TRAV23/DV6, TRAJ30)
CAASSQESRDDKIIF

SEQ ID NO: 252034 - protein, 13 aa, Homo sapiens
  CDR3 for beta chain variable domain of TCR clone 126017 (TRBV27, TRBJ1-1)
CASSLSIGAEAFF

SEQ ID NO: 252035 - protein, 14 aa, Homo sapiens
  CDR3 for alpha chain variable domain of TCR clone 126018 (TRAV12-2, TRAJ44)
CAVNPAGTASKLTF

SEQ ID NO: 252036 - protein, 13 aa, Homo sapiens
  CDR3 for beta chain variable domain of TCR clone 126018 (TRBV20-1, TRBJ1-6)
CSATLGVGSPLHF

SEQ ID NO: 252037 - protein, 12 aa, Homo sapiens
  CDR3 for alpha chain variable domain of TCR clone 126019 (TRAV12-1, TRAJ34)
CVVTFNTDKLIF

SEQ ID NO: 252038 - protein, 14 aa, Homo sapiens
  CDR3 for beta chain variable domain of TCR clone 126019 (TRBV19, TRBJ1-1)
CASLRTGLNTEAFL

SEQ ID NO: 252039 - protein, 17 aa, Homo sapiens
  CDR3 for alpha chain variable domain of TCR clone 126020 (TRAV13-1, TRAJ31)
CAPRDRLMFGDGTQLVV

SEQ ID NO: 252040 - protein, 11 aa, Homo sapiens
  CDR3 for beta chain variable domain of TCR clone 126020 (TRBV12-4, TRBJ2-3)
CASTATDTQYF

SEQ ID NO: 252041 - protein, 15 aa, Homo sapiens
  CDR3 for alpha chain variable domain of TCR clone 126021 (TRAV1-2, TRAJ30)
CAVRPHGNRDDKIIF

SEQ ID NO: 252042 - protein, 14 aa, Homo sapiens
  CDR3 for beta chain variable domain of TCR clone 126021 (TRBV5-1, TRBJ2-7)
CASSRGESLYEQYF

SEQ ID NO: 252043 - protein, 16 aa, Homo sapiens
  CDR3 for alpha chain variable domain of TCR clone 126022 (TRAV3, TRAJ37)
CAVRGKGSGNTGKLIF

SEQ ID NO: 252044 - protein, 15 aa, Homo sapiens
  CDR3 for beta chain variable domain of TCR clone 126022 (TRBV7-9, TRBJ2-2)
RASGPLDTFPGELFF

SEQ ID NO: 252045 - protein, 13 aa, Homo sapiens
  CDR3 for alpha chain variable domain of TCR clone 126023 (TRAV21, TRAJ27)
CAARPGNAGKSTF

SEQ ID NO: 252046 - protein, 14 aa, Homo sapiens
  CDR3 for beta chain variable domain of TCR clone 126023 (TRBV28, TRBJ2-4)
CASTQVTGVNIQYF

SEQ ID NO: 252047 - protein, 22 aa, Homo sapiens
  CDR3 for alpha chain variable domain of TCR clone 126024 (TRAV4, )
CLVGPHNYDIQNTDPAVYQLRD

SEQ ID NO: 252048 - protein, 17 aa, Homo sapiens
  CDR3 for beta chain variable domain of TCR clone 126024 (TRBV24-1, TRBJ2-1)
CATSDVSTSGTYNEQFF

SEQ ID NO: 252049 - protein, 14 aa, Homo sapiens
  CDR3 for alpha chain variable domain of TCR clone 126025 (TRAV35, TRAJ22)
CSGLRPGSARQLTF

SEQ ID NO: 252050 - protein, 14 aa, Homo sapiens
  CDR3 for beta chain variable domain of TCR clone 126025 (TRBV4-1, TRBJ2-7)
CASSPVAGGDEQYF

SEQ ID NO: 252051 - protein, 13 aa, Homo sapiens
  CDR3 for alpha chain variable domain of TCR clone 126026 (TRAV12-2, TRAJ20)
CAVYPSNDYKLSF

SEQ ID NO: 252052 - protein, 15 aa, Homo sapiens
  CDR3 for beta chain variable domain of TCR clone 126026 (TRBV27, TRBJ2-5)
CASSLYPRWGETQYF

SEQ ID NO: 252053 - protein, 22 aa, Homo sapiens
  CDR3 for alpha chain variable domain of TCR clone 126027 (TRAV12-2, TRAJ32)
CSSETPSPVIQPPKSATNKLIF

SEQ ID NO: 252054 - protein, 14 aa, Homo sapiens
  CDR3 for beta chain variable domain of TCR clone 126027 (TRBV19, TRBJ2-1)
CASPTFVLSGEQFF

SEQ ID NO: 252055 - protein, 15 aa, Homo sapiens
  CDR3 for alpha chain variable domain of TCR clone 126028 (TRAV3, TRAJ22)
CAVRDRGGSARQPTF

SEQ ID NO: 252056 - protein, 13 aa, Homo sapiens
  CDR3 for beta chain variable domain of TCR clone 126028 (TRBV20-1, TRBJ1-1)
CSARVGGNTEAFF

SEQ ID NO: 252057 - protein, 13 aa, Homo sapiens
  CDR3 for alpha chain variable domain of TCR clone 126029 (TRAV3, TRAJ20)
CAVRDGGDYKLSF

SEQ ID NO: 252058 - protein, 16 aa, Homo sapiens
  CDR3 for beta chain variable domain of TCR clone 126029 (TRBV4-1, TRBJ2-5)
CASSHTSGGPLETQYF

SEQ ID NO: 252059 - protein, 14 aa, Homo sapiens
  CDR3 for alpha chain variable domain of TCR clone 126030 (TRAV12-2, TRAJ9)
CAVNLNTGGFKTTF

SEQ ID NO: 252060 - protein, 17 aa, Homo sapiens
  CDR3 for beta chain variable domain of TCR clone 126030 (TRBV20-1, TRBJ2-2)
CSASRQVGQGYTGELFF

SEQ ID NO: 252061 - protein, 13 aa, Homo sapiens
  CDR3 for alpha chain variable domain of TCR clone 126031 (TRAV12-2, TRAJ49)
CAVNMRTGNQFYL

SEQ ID NO: 252062 - protein, 11 aa, Homo sapiens
  CDR3 for beta chain variable domain of TCR clone 126031 (TRBV5-5, TRBJ1-1)
CASSLGVEAFF

SEQ ID NO: 252063 - protein, 15 aa, Homo sapiens
  CDR3 for alpha chain variable domain of TCR clone 126032 (TRAV38-1, TRAJ57)
CAFMDSQGGSEKLVF

SEQ ID NO: 252064 - protein, 15 aa, Homo sapiens
  CDR3 for beta chain variable domain of TCR clone 126032 (TRBV10-3, TRBJ2-1)
CHPGVGRGDYNEQFF

SEQ ID NO: 252065 - protein, 15 aa, Homo sapiens
  CDR3 for alpha chain variable domain of TCR clone 126033 (TRAV1-1, TRAJ22)
CAVRVSSGSARQLTF

SEQ ID NO: 252066 - protein, 15 aa, Homo sapiens
  CDR3 for beta chain variable domain of TCR clone 126033 (TRBV2, TRBJ1-2)
CASSESRTVNYGYTF

SEQ ID NO: 252067 - protein, 13 aa, Homo sapiens
  CDR3 for alpha chain variable domain of TCR clone 126034 (TRAV16, TRAJ31)
CALSAHTNARLMF

SEQ ID NO: 252068 - protein, 17 aa, Homo sapiens
  CDR3 for beta chain variable domain of TCR clone 126034 (TRBV12-4, TRBJ2-1)
CASSPGLAGGRINEQFF

SEQ ID NO: 252069 - protein, 19 aa, Homo sapiens
  CDR3 for alpha chain variable domain of TCR clone 126035 (TRAV26-1, TRAJ52)
CIVRAHRNSGGTSYGKLTF

SEQ ID NO: 252070 - protein, 15 aa, Homo sapiens
  CDR3 for beta chain variable domain of TCR clone 126035 (TRBV29-1, TRBJ2-1)
CSGRDRKSSYNEQFF

SEQ ID NO: 252071 - protein, 14 aa, Homo sapiens
  CDR3 for alpha chain variable domain of TCR clone 126036 (TRAV38-1, TRAJ29)
CAFITPSGNTPLVF

SEQ ID NO: 252072 - protein, 14 aa, Homo sapiens
  CDR3 for beta chain variable domain of TCR clone 126036 (TRBV18, TRBJ2-7)
CASSTRGGAYEQYF

SEQ ID NO: 252073 - protein, 12 aa, Homo sapiens
  CDR3 for alpha chain variable domain of TCR clone 126037 (TRAV13-1, TRAJ17)
FAARTAGNKLTF

SEQ ID NO: 252074 - protein, 15 aa, Homo sapiens
  CDR3 for beta chain variable domain of TCR clone 126037 (TRBV7-6, TRBJ1-1)
CASSPQGGANTEAFF

SEQ ID NO: 252075 - protein, 19 aa, Homo sapiens
  CDR3 for alpha chain variable domain of TCR clone 126038 (TRAV1-2, TRAJ26)
CLLPLCCERPDNYGQNFVF

SEQ ID NO: 252076 - protein, 12 aa, Homo sapiens
  CDR3 for beta chain variable domain of TCR clone 126038 (TRBV20-1, TRBJ2-1)
CSAQYTYNEQVF

SEQ ID NO: 252077 - protein, 16 aa, Homo sapiens
  CDR3 for alpha chain variable domain of TCR clone 126039 (TRAV4, TRAJ22)
CLVGDLYSCSARQLTF

SEQ ID NO: 252078 - protein, 16 aa, Homo sapiens
  CDR3 for beta chain variable domain of TCR clone 126039 (TRBV7-9, TRBJ2-3)
CASSPWREVGTDTQYF

SEQ ID NO: 252079 - protein, 11 aa, Homo sapiens
  CDR3 for alpha chain variable domain of TCR clone 126040 (TRAV1-2, TRAJ40)
CAVPGTYKYIF

SEQ ID NO: 252080 - protein, 16 aa, Homo sapiens
  CDR3 for beta chain variable domain of TCR clone 126040 (TRBV29-1, TRBJ2-7)
CSVEVVGTSGSHEQYF

SEQ ID NO: 252081 - protein, 12 aa, Homo sapiens
  CDR3 for alpha chain variable domain of TCR clone 126041 (TRAV2, TRAJ31)
CAVEDNNARLMF

SEQ ID NO: 252082 - protein, 18 aa, Homo sapiens
  CDR3 for beta chain variable domain of TCR clone 126041 (TRBV7-9, TRBJ2-1)
CASSTGLAEGSSYNEQFF

SEQ ID NO: 252083 - protein, 17 aa, Homo sapiens
  CDR3 for alpha chain variable domain of TCR clone 126042 (TRAV1-1, )
CAVRDRWLATTISRTLA

SEQ ID NO: 252084 - protein, 12 aa, Homo sapiens
  CDR3 for beta chain variable domain of TCR clone 126042 (TRBV14, TRBJ1-1)
CASRPYETEAFF

SEQ ID NO: 252085 - protein, 11 aa, Homo sapiens
  CDR3 for alpha chain variable domain of TCR clone 126043 (TRAV13-1, TRAJ30)
CAASRDEKIIF

SEQ ID NO: 252086 - protein, 15 aa, Homo sapiens
  CDR3 for beta chain variable domain of TCR clone 126043 (TRBV18, TRBJ1-1)
CASSPSSWVNTEAFF

SEQ ID NO: 252087 - protein, 15 aa, Homo sapiens
  CDR3 for alpha chain variable domain of TCR clone 126044 (TRAV23/DV6, TRAJ44)
CEAALNTGTASKLTF

SEQ ID NO: 252088 - protein, 12 aa, Homo sapiens
  CDR3 for beta chain variable domain of TCR clone 126044 (TRBV20-1, TRBJ1-5)
CSARAPDQPQHF

SEQ ID NO: 252089 - protein, 12 aa, Homo sapiens
  CDR3 for alpha chain variable domain of TCR clone 126045 (TRAV8-3, TRAJ26)
CAGDNYGQNFVF

SEQ ID NO: 252090 - protein, 17 aa, Homo sapiens
  CDR3 for beta chain variable domain of TCR clone 126045 (TRBV5-1, TRBJ2-5)
CASSLAETSGFQETQYF

SEQ ID NO: 252091 - protein, 16 aa, Homo sapiens
  CDR3 for alpha chain variable domain of TCR clone 126046 (TRAV3, TRAJ18)
CAVRDGRGSTLGRLYF

SEQ ID NO: 252092 - protein, 13 aa, Homo sapiens
  CDR3 for beta chain variable domain of TCR clone 126046 (TRBV4-1, TRBJ2-2)
CASSQENTGELFF

SEQ ID NO: 252093 - protein, 15 aa, Homo sapiens
  CDR3 for alpha chain variable domain of TCR clone 126047 (TRAV13-1, TRAJ27)
CAASGGNTNAGKSTL

SEQ ID NO: 252094 - protein, 15 aa, Homo sapiens
  CDR3 for beta chain variable domain of TCR clone 126047 (TRBV12-4, TRBJ1-5)
CASTRQGSGNQPQHF

SEQ ID NO: 252095 - protein, 16 aa, Homo sapiens
  CDR3 for alpha chain variable domain of TCR clone 126048 (TRAV13-1, TRAJ48)
CAASIFGNFGNEKLNF

SEQ ID NO: 252096 - protein, 12 aa, Homo sapiens
  CDR3 for beta chain variable domain of TCR clone 126048 (TRBV14, TRBJ2-4)
CASSNLKSIQYF

SEQ ID NO: 252097 - protein, 14 aa, Homo sapiens
  CDR3 for alpha chain variable domain of TCR clone 126049 (TRAV12-2, TRAJ9)
CAVNMEGGGFKTIF

SEQ ID NO: 252098 - protein, 14 aa, Homo sapiens
  CDR3 for beta chain variable domain of TCR clone 126049 (TRBV2, TRBJ2-5)
CASSEVLAQETQYL

SEQ ID NO: 252099 - protein, 12 aa, Homo sapiens
  CDR3 for alpha chain variable domain of TCR clone 126050 (TRAV3, TRAJ20)
CAVRDPDYKLSF

SEQ ID NO: 252100 - protein, 14 aa, Homo sapiens
  CDR3 for beta chain variable domain of TCR clone 126050 (TRBV28, TRBJ2-1)
CASSIQGTVGEQFF

SEQ ID NO: 252101 - protein, 13 aa, Homo sapiens
  CDR3 for alpha chain variable domain of TCR clone 126051 (TRAV8-3, TRAJ44)
CAVVPGTASKLTF

SEQ ID NO: 252102 - protein, 14 aa, Homo sapiens
  CDR3 for beta chain variable domain of TCR clone 126051 (TRBV11-2, TRBJ2-3)
FASSRLARTDTQYF

SEQ ID NO: 252103 - protein, 13 aa, Homo sapiens
  CDR3 for alpha chain variable domain of TCR clone 126052 (TRAV13-1, TRAJ49)
CAAMLYTGNQYYF

SEQ ID NO: 252104 - protein, 15 aa, Homo sapiens
  CDR3 for beta chain variable domain of TCR clone 126052 (TRBV12-4, TRBJ1-5)
CASTRGSGFGQPQHF

SEQ ID NO: 252105 - protein, 12 aa, Homo sapiens
  CDR3 for alpha chain variable domain of TCR clone 126053 (TRAV17, TRAJ12)
CATLRSSYKLIF

SEQ ID NO: 252106 - protein, 16 aa, Homo sapiens
  CDR3 for beta chain variable domain of TCR clone 126053 (TRBV28, TRBJ2-7)
CSSSLFFETGGPEQYF

SEQ ID NO: 252107 - protein, 14 aa, Homo sapiens
  CDR3 for alpha chain variable domain of TCR clone 126054 (TRAV12-1, TRAJ17)
CAVNYKAAGNKLTF

SEQ ID NO: 252108 - protein, 15 aa, Homo sapiens
  CDR3 for beta chain variable domain of TCR clone 126054 (TRBV20-1, TRBJ2-7)
CSARDRVSGMDEQYF

SEQ ID NO: 252109 - protein, 11 aa, Homo sapiens
  CDR3 for alpha chain variable domain of TCR clone 126055 (TRAV2, TRAJ23)
CAVETRGKLIF

SEQ ID NO: 252110 - protein, 16 aa, Homo sapiens
  CDR3 for beta chain variable domain of TCR clone 126055 (TRBV2, TRBJ1-3)
CASSGQGPSSGNTIYF

SEQ ID NO: 252111 - protein, 17 aa, Homo sapiens
  CDR3 for alpha chain variable domain of TCR clone 126056 (TRAV3, TRAJ42)
CAVRVRDYGGSQGNLIF

SEQ ID NO: 252112 - protein, 15 aa, Homo sapiens
  CDR3 for beta chain variable domain of TCR clone 126056 (TRBV6-6, TRBJ2-7)
CASSYSYGGSYEQYF

SEQ ID NO: 252113 - protein, 14 aa, Homo sapiens
  CDR3 for alpha chain variable domain of TCR clone 126057 (TRAV29/DV5, TRAJ36)
CAARRKTGANNLFF

SEQ ID NO: 252114 - protein, 14 aa, Homo sapiens
  CDR3 for beta chain variable domain of TCR clone 126057 (TRBV5-1, TRBJ2-7)
CASSRGESLYEQYF

SEQ ID NO: 252115 - protein, 15 aa, Homo sapiens
  CDR3 for alpha chain variable domain of TCR clone 126058 (TRAV17, TRAJ52)
CATEAGGTSYGKLTF

SEQ ID NO: 252116 - protein, 14 aa, Homo sapiens
  CDR3 for beta chain variable domain of TCR clone 126058 (TRBV28, TRBJ1-5)
CASSLGVLAKPQHF

SEQ ID NO: 252117 - protein, 11 aa, Homo sapiens
  CDR3 for alpha chain variable domain of TCR clone 126059 (TRAV4, TRAJ23)
CLVAPGGKLIF

SEQ ID NO: 252118 - protein, 14 aa, Homo sapiens
  CDR3 for beta chain variable domain of TCR clone 126059 (TRBV19, TRBJ2-1)
CASPTFVLSGEQFF

SEQ ID NO: 252119 - protein, 13 aa, Homo sapiens
  CDR3 for alpha chain variable domain of TCR clone 126060 (TRAV27, TRAJ45)
CRSSGGGADGLTF

SEQ ID NO: 252120 - protein, 17 aa, Homo sapiens
  CDR3 for beta chain variable domain of TCR clone 126060 (TRBV10-3, TRBJ2-4)
CTSMPSVNKGSKNIQYF

SEQ ID NO: 252121 - protein, 15 aa, Homo sapiens
  CDR3 for alpha chain variable domain of TCR clone 126061 (TRAV8-4, TRAJ37)
CAVSRGSGNKGKLIF

SEQ ID NO: 252122 - protein, 16 aa, Homo sapiens
  CDR3 for beta chain variable domain of TCR clone 126061 (TRBV7-3, TRBJ2-3)
CASSLSGYRPEDTQYF

SEQ ID NO: 252123 - protein, 14 aa, Homo sapiens
  CDR3 for alpha chain variable domain of TCR clone 126062 (TRAV29/DV5, TRAJ36)
CAARRKTGANNLFF

SEQ ID NO: 252124 - protein, 14 aa, Homo sapiens
  CDR3 for beta chain variable domain of TCR clone 126062 (TRBV20-1, TRBJ1-1)
CSAQTRIGGTEAFF

SEQ ID NO: 252125 - protein, 16 aa, Homo sapiens
  CDR3 for alpha chain variable domain of TCR clone 126063 (TRAV3, TRAJ37)
CAVRGKGSGNTGKLIF

SEQ ID NO: 252126 - protein, 16 aa, Homo sapiens
  CDR3 for beta chain variable domain of TCR clone 126063 (TRBV12-5, TRBJ2-5)
CASGARTSGSQETQYF

SEQ ID NO: 252127 - protein, 16 aa, Homo sapiens
  CDR3 for alpha chain variable domain of TCR clone 126064 (TRAV4, TRAJ22)
CLVGDLYSGSARQLTF

SEQ ID NO: 252128 - protein, 16 aa, Homo sapiens
  CDR3 for beta chain variable domain of TCR clone 126064 (TRBV19, TRBJ2-1)
CASSKAGPSSYNEQFF

SEQ ID NO: 252129 - protein, 14 aa, Homo sapiens
  CDR3 for alpha chain variable domain of TCR clone 126065 (TRAV8-3, TRAJ10)
CAVGNAGGGNKLTL

SEQ ID NO: 252130 - protein, 16 aa, Homo sapiens
  CDR3 for beta chain variable domain of TCR clone 126065 (TRBV11-2, TRBJ1-2)
CASSLDTGGADYGYTF

SEQ ID NO: 252131 - protein, 15 aa, Homo sapiens
  CDR3 for alpha chain variable domain of TCR clone 126066 (TRAV8-3, TRAJ27)
CAVGPSKTNGGKSTF

SEQ ID NO: 252132 - protein, 15 aa, Homo sapiens
  CDR3 for beta chain variable domain of TCR clone 126066 (TRBV7-2, TRBJ2-1)
CASSSGLAGGNEQFF

SEQ ID NO: 252133 - protein, 14 aa, Homo sapiens
  CDR3 for alpha chain variable domain of TCR clone 126067 (TRAV8-4, TRAJ17)
CAVSEGAAGNKLTF

SEQ ID NO: 252134 - protein, 18 aa, Homo sapiens
  CDR3 for beta chain variable domain of TCR clone 126067 (TRBV20-1, TRBJ2-6)
CSAETTPTHGSGANVLTF

SEQ ID NO: 252135 - protein, 13 aa, Homo sapiens
  CDR3 for alpha chain variable domain of TCR clone 126068 (TRAV26-1, TRAJ34)
CFVRPWITDKLIF

SEQ ID NO: 252136 - protein, 13 aa, Homo sapiens
  CDR3 for beta chain variable domain of TCR clone 126068 (TRBV5-1, TRBJ2-1)
CASSLGSYNEQFF

SEQ ID NO: 252137 - protein, 13 aa, Homo sapiens
  CDR3 for alpha chain variable domain of TCR clone 126069 (TRAV21, TRAJ57)
CAVTQGGSEKLVF

SEQ ID NO: 252138 - protein, 12 aa, Homo sapiens
  CDR3 for beta chain variable domain of TCR clone 126069 (TRBV7-9, TRBJ2-7)
CASSLEGYEQYF

SEQ ID NO: 252139 - protein, 13 aa, Homo sapiens
  CDR3 for alpha chain variable domain of TCR clone 126070 (TRAV2, TRAJ12)
CAVGADSSYRLIF

SEQ ID NO: 252140 - protein, 13 aa, Homo sapiens
  CDR3 for beta chain variable domain of TCR clone 126070 (TRBV20-1, TRBJ2-1)
CSARSSPRDEQFF

SEQ ID NO: 252141 - protein, 13 aa, Homo sapiens
  CDR3 for alpha chain variable domain of TCR clone 126071 (TRAV8-3, TRAJ43)
CAVGPDNNNNMRF

SEQ ID NO: 252142 - protein, 12 aa, Homo sapiens
  CDR3 for beta chain variable domain of TCR clone 126071 (TRBV7-2, TRBJ1-6)
CASSLSSSPLHF

SEQ ID NO: 252143 - protein, 13 aa, Homo sapiens
  CDR3 for alpha chain variable domain of TCR clone 126072 (TRAV3, TRAJ27)
CAVRPLGAGKSTF

SEQ ID NO: 252144 - protein, 15 aa, Homo sapiens
  CDR3 for beta chain variable domain of TCR clone 126072 (TRBV7-2, TRBJ2-3)
CASSSTGLETDTQYF

SEQ ID NO: 252145 - protein, 14 aa, Homo sapiens
  CDR3 for alpha chain variable domain of TCR clone 126073 (TRAV12-2, TRAJ17)
CAALFKAAGNKLTF

SEQ ID NO: 252146 - protein, 16 aa, Homo sapiens
  CDR3 for beta chain variable domain of TCR clone 126073 (TRBV20-1, TRBJ2-2)
CSASARGIPGAGELFF

SEQ ID NO: 252147 - protein, 12 aa, Homo sapiens
  CDR3 for alpha chain variable domain of TCR clone 126074 (TRAV10, TRAJ20)
CVVSASDYKLSF

SEQ ID NO: 252148 - protein, 15 aa, Homo sapiens
  CDR3 for beta chain variable domain of TCR clone 126074 (TRBV3-1, TRBJ2-1)
YASSQDYTPRGEQFF

SEQ ID NO: 252149 - protein, 10 aa, Homo sapiens
  CDR3 for alpha chain variable domain of TCR clone 126075 (TRAV1-2, TRAJ20)
CACNDYKLSF

SEQ ID NO: 252150 - protein, 15 aa, Homo sapiens
  CDR3 for beta chain variable domain of TCR clone 126075 (TRBV7-9, TRBJ2-2)
CASGPLDTFPGELFF

SEQ ID NO: 252151 - protein, 12 aa, Homo sapiens
  CDR3 for alpha chain variable domain of TCR clone 126076 (TRAV21, TRAJ23)
CAVGPQGGKLIF

SEQ ID NO: 252152 - protein, 13 aa, Homo sapiens
  CDR3 for beta chain variable domain of TCR clone 126076 (TRBV20-1, TRBJ2-7)
CSATHTSGYEQYF

SEQ ID NO: 252153 - protein, 16 aa, Homo sapiens
  CDR3 for alpha chain variable domain of TCR clone 126077 (TRAV26-1, TRAJ40)
CIVRVGTTSGTYKYIF

SEQ ID NO: 252154 - protein, 15 aa, Homo sapiens
  CDR3 for beta chain variable domain of TCR clone 126077 (TRBV10-3, TRBJ2-1)
CAIRNGTSGHNEQFF

SEQ ID NO: 252155 - protein, 12 aa, Homo sapiens
  CDR3 for alpha chain variable domain of TCR clone 126078 (TRAV13-2, TRAJ58)
CAERRLDSRLTF

SEQ ID NO: 252156 - protein, 14 aa, Homo sapiens
  CDR3 for beta chain variable domain of TCR clone 126078 (TRBV18, TRBJ2-5)
CASSPGVSQETQYF

SEQ ID NO: 252157 - protein, 11 aa, Homo sapiens
  CDR3 for alpha chain variable domain of TCR clone 126079 (TRAV2, TRAJ33)
CAVESNYQLIW

SEQ ID NO: 252158 - protein, 19 aa, Homo sapiens
  CDR3 for beta chain variable domain of TCR clone 126079 (TRBV7-2, TRBJ2-3)
CASSFLSRNWGGGTDTQYF

SEQ ID NO: 252159 - protein, 16 aa, Homo sapiens
  CDR3 for alpha chain variable domain of TCR clone 126080 (TRAV1-1, TRAJ45)
CAVRAYSGGSADGLTF

SEQ ID NO: 252160 - protein, 13 aa, Homo sapiens
  CDR3 for beta chain variable domain of TCR clone 126080 (TRBV20-1, TRBJ1-2)
CSARGTADYGYTF

SEQ ID NO: 252161 - protein, 14 aa, Homo sapiens
  CDR3 for alpha chain variable domain of TCR clone 126081 (TRAV2, TRAJ9)
CAVEDRSGGFKTIL

SEQ ID NO: 252162 - protein, 15 aa, Homo sapiens
  CDR3 for beta chain variable domain of TCR clone 126081 (TRBV19, TRBJ2-1)
CASSHRDRGPNEQFF

SEQ ID NO: 252163 - protein, 16 aa, Homo sapiens
  CDR3 for alpha chain variable domain of TCR clone 126082 (TRAV3, TRAJ10)
CAVRDMRAGGGNKLTF

SEQ ID NO: 252164 - protein, 16 aa, Homo sapiens
  CDR3 for beta chain variable domain of TCR clone 126082 (TRBV12-4, TRBJ1-5)
CASSRPVGGSNQHQHF

SEQ ID NO: 252165 - protein, 13 aa, Homo sapiens
  CDR3 for alpha chain variable domain of TCR clone 126083 (TRAV30, TRAJ24)
CGTVTDSWGKLQF

SEQ ID NO: 252166 - protein, 15 aa, Homo sapiens
  CDR3 for beta chain variable domain of TCR clone 126083 (TRBV19, TRBJ1-6)
CASSTQGAVGSPLHF

SEQ ID NO: 252167 - protein, 16 aa, Homo sapiens
  CDR3 for alpha chain variable domain of TCR clone 126084 (TRAV26-1, TRAJ48)
CIVRVGANFGNEKLTF

SEQ ID NO: 252168 - protein, 15 aa, Homo sapiens
  CDR3 for beta chain variable domain of TCR clone 126084 (TRBV9, TRBJ1-6)
CASSVAGTGDSPLHF

SEQ ID NO: 252169 - protein, 12 aa, Homo sapiens
  CDR3 for alpha chain variable domain of TCR clone 126085 (TRAV41, TRAJ58)
CAVETSGSRLTF

SEQ ID NO: 252170 - protein, 15 aa, Homo sapiens
  CDR3 for beta chain variable domain of TCR clone 126085 (TRBV29-1, TRBJ2-6)
CSVGDRGAGANVLTF

SEQ ID NO: 252171 - protein, 12 aa, Homo sapiens
  CDR3 for alpha chain variable domain of TCR clone 126086 (TRAV30, TRAJ43)
CGTEERGNDMRF

SEQ ID NO: 252172 - protein, 11 aa, Homo sapiens
  CDR3 for beta chain variable domain of TCR clone 126086 (TRBV29-1, TRBJ2-5)
CSEDRTGIQYF

SEQ ID NO: 252173 - protein, 10 aa, Homo sapiens
  CDR3 for alpha chain variable domain of TCR clone 126087 (TRAV26-1, TRAJ22)
CIAGSRQLTF

SEQ ID NO: 252174 - protein, 14 aa, Homo sapiens
  CDR3 for beta chain variable domain of TCR clone 126087 (TRBV7-2, TRBJ2-7)
CASRSQGAAYEQYF

SEQ ID NO: 252175 - protein, 12 aa, Homo sapiens
  CDR3 for alpha chain variable domain of TCR clone 126088 (TRAV10, TRAJ43)
CVVVRVGYDMRF

SEQ ID NO: 252176 - protein, 15 aa, Homo sapiens
  CDR3 for beta chain variable domain of TCR clone 126088 (TRBV2, TRBJ2-7)
CASSEGLARSYEQYF

SEQ ID NO: 252177 - protein, 11 aa, Homo sapiens
  CDR3 for alpha chain variable domain of TCR clone 126089 (TRAV12-2, TRAJ43)
CASPIGNDMRF

SEQ ID NO: 252178 - protein, 14 aa, Homo sapiens
  CDR3 for beta chain variable domain of TCR clone 126089 (TRBV19, TRBJ2-1)
CASPTFVLSGEQFF

SEQ ID NO: 252179 - protein, 17 aa, Homo sapiens
  CDR3 for alpha chain variable domain of TCR clone 126090 (TRAV3, TRAJ6)
FAVRDGPRAGGRYIPTF

SEQ ID NO: 252180 - protein, 14 aa, Homo sapiens
  CDR3 for beta chain variable domain of TCR clone 126090 (TRBV7-2, TRBJ2-7)
CASSPKTSFYEQYF

SEQ ID NO: 252181 - protein, 12 aa, Homo sapiens
  CDR3 for alpha chain variable domain of TCR clone 126091 (TRAV17, TRAJ12)
CATLRSSYKLIF

SEQ ID NO: 252182 - protein, 20 aa, Homo sapiens
  CDR3 for beta chain variable domain of TCR clone 126091 (TRBV7-8, TRBJ2-2)
CASSHLFPGPTIHITGELFF

SEQ ID NO: 252183 - protein, 14 aa, Homo sapiens
  CDR3 for alpha chain variable domain of TCR clone 126092 (TRAV8-3, TRAJ4)
CAVGAAGGYNKLIF

SEQ ID NO: 252184 - protein, 13 aa, Homo sapiens
  CDR3 for beta chain variable domain of TCR clone 126092 (TRBV15, TRBJ1-6)
CATSGGLNSPLHF

SEQ ID NO: 252185 - protein, 14 aa, Homo sapiens
  CDR3 for alpha chain variable domain of TCR clone 126093 (TRAV12-3, TRAJ10)
SHLPLTGGGNKLTF

SEQ ID NO: 252186 - protein, 15 aa, Homo sapiens
  CDR3 for beta chain variable domain of TCR clone 126093 (TRBV19, TRBJ2-4)
CASRGPRRGENIQYF

SEQ ID NO: 252187 - protein, 15 aa, Homo sapiens
  CDR3 for alpha chain variable domain of TCR clone 126094 (TRAV26-1, TRAJ39)
CTVRVARNAGNMLTF

SEQ ID NO: 252188 - protein, 16 aa, Homo sapiens
  CDR3 for beta chain variable domain of TCR clone 126094 (TRBV5-1, TRBJ2-1)
CASSLTLAGGRNEQFF

SEQ ID NO: 252189 - protein, 15 aa, Homo sapiens
  CDR3 for alpha chain variable domain of TCR clone 126095 (TRAV3, TRAJ36)
CAVRASQTGANNIFF

SEQ ID NO: 252190 - protein, 13 aa, Homo sapiens
  CDR3 for beta chain variable domain of TCR clone 126095 (TRBV10-3, TRBJ1-2)
CAISERDSYGYTF

SEQ ID NO: 252191 - protein, 12 aa, Homo sapiens
  CDR3 for alpha chain variable domain of TCR clone 126096 (TRAV12-3, TRAJ17)
CAMTLTGNELTF

SEQ ID NO: 252192 - protein, 15 aa, Homo sapiens
  CDR3 for beta chain variable domain of TCR clone 126096 (TRBV19, TRBJ2-1)
CASSILGEGRNEQFF

SEQ ID NO: 252193 - protein, 11 aa, Homo sapiens
  CDR3 for alpha chain variable domain of TCR clone 126097 (TRAV13-1, TRAJ39)
CASHAGNMLTF

SEQ ID NO: 252194 - protein, 14 aa, Homo sapiens
  CDR3 for beta chain variable domain of TCR clone 126097 (TRBV11-2, TRBJ1-5)
CASSLDRGRQAQHF

SEQ ID NO: 252195 - protein, 16 aa, Homo sapiens
  CDR3 for alpha chain variable domain of TCR clone 126098 (TRAV8-3, TRAJ8)
CAVPRDGNTGFQKRVF

SEQ ID NO: 252196 - protein, 14 aa, Homo sapiens
  CDR3 for beta chain variable domain of TCR clone 126098 (TRBV28, TRBJ1-1)
CASSESGRGTEAFF

SEQ ID NO: 252197 - protein, 18 aa, Homo sapiens
  CDR3 for alpha chain variable domain of TCR clone 126099 (TRAV26-1, TRAJ23)
CIVRVGLEVWNQGGKPIF

SEQ ID NO: 252198 - protein, 15 aa, Homo sapiens
  CDR3 for beta chain variable domain of TCR clone 126099 (TRBV10-3, TRBJ2-3)
CAISDWDRDTDTQYF

SEQ ID NO: 252199 - protein, 15 aa, Homo sapiens
  CDR3 for alpha chain variable domain of TCR clone 126100 (TRAV13-1, TRAJ11)
CTASNRNSGYSTLTF

SEQ ID NO: 252200 - protein, 11 aa, Homo sapiens
  CDR3 for beta chain variable domain of TCR clone 126100 (TRBV20-1, TRBJ2-7)
CSARLSYEQYF

SEQ ID NO: 252201 - protein, 18 aa, Homo sapiens
  CDR3 for alpha chain variable domain of TCR clone 126101 (TRAV26-1, TRAJ23)
CIVRVGLEVWNQGGKLIF

SEQ ID NO: 252202 - protein, 15 aa, Homo sapiens
  CDR3 for beta chain variable domain of TCR clone 126101 (TRBV6-3, TRBJ2-7)
CASSSPGTVFYEQYF

SEQ ID NO: 252203 - protein, 16 aa, Homo sapiens
  CDR3 for alpha chain variable domain of TCR clone 126102 (TRAV16, TRAJ4)
CALSRMFSGGYNKLIF

SEQ ID NO: 252204 - protein, 16 aa, Homo sapiens
  CDR3 for beta chain variable domain of TCR clone 126102 (TRBV24-1, TRBJ2-3)
CATSDRGTGATDTQYF

SEQ ID NO: 252205 - protein, 10 aa, Homo sapiens
  CDR3 for alpha chain variable domain of TCR clone 126103 (TRAV30, TRAJ16)
CGTGGQKLLF

SEQ ID NO: 252206 - protein, 17 aa, Homo sapiens
  CDR3 for beta chain variable domain of TCR clone 126103 (TRBV2, TRBJ2-7)
CASSQALTGWDSYEQYF

SEQ ID NO: 252207 - protein, 15 aa, Homo sapiens
  CDR3 for alpha chain variable domain of TCR clone 126104 (TRAV8-3, TRAJ40)
CAAPSLGSGTYIYIF

SEQ ID NO: 252208 - protein, 16 aa, Homo sapiens
  CDR3 for beta chain variable domain of TCR clone 126104 (TRBV7-3, TRBJ2-3)
CASSLSGYRPEDTQYF

SEQ ID NO: 252209 - protein, 15 aa, Homo sapiens
  CDR3 for alpha chain variable domain of TCR clone 126105 (TRAV25, TRAJ10)
CAGPLLTGGGNKLTF

SEQ ID NO: 252210 - protein, 15 aa, Homo sapiens
  CDR3 for beta chain variable domain of TCR clone 126105 (TRBV12-5, TRBJ2-2)
CASGRLGGNAGELFF

SEQ ID NO: 252211 - protein, 11 aa, Homo sapiens
  CDR3 for alpha chain variable domain of TCR clone 126106 (TRAV3, TRAJ21)
CAVGNFNKFYF

SEQ ID NO: 252212 - protein, 14 aa, Homo sapiens
  CDR3 for beta chain variable domain of TCR clone 126106 (TRBV15, TRBJ2-5)
CATSSTGYQETQYF

SEQ ID NO: 252213 - protein, 15 aa, Homo sapiens
  CDR3 for alpha chain variable domain of TCR clone 126107 (TRAV14/DV4, TRAJ10)
CAMRELTVGGNKLTF

SEQ ID NO: 252214 - protein, 18 aa, Homo sapiens
  CDR3 for beta chain variable domain of TCR clone 126107 (TRBV7-9, TRBJ2-7)
CASSLTTSGSRTWYEQYF

SEQ ID NO: 252215 - protein, 13 aa, Homo sapiens
  CDR3 for alpha chain variable domain of TCR clone 126108 (TRAV25, TRAJ26)
CAGMDNYGQNLVF

SEQ ID NO: 252216 - protein, 15 aa, Homo sapiens
  CDR3 for beta chain variable domain of TCR clone 126108 (TRBV10-3, TRBJ2-1)
CAIRNGTSGHNEQFF

SEQ ID NO: 252217 - protein, 16 aa, Homo sapiens
  CDR3 for alpha chain variable domain of TCR clone 126109 (TRAV16, TRAJ52)
CALSAAGGTSYGKLTF

SEQ ID NO: 252218 - protein, 17 aa, Homo sapiens
  CDR3 for beta chain variable domain of TCR clone 126109 (TRBV11-2, TRBJ2-1)
CASSLYPPGVGYNEQFF

SEQ ID NO: 252219 - protein, 14 aa, Homo sapiens
  CDR3 for alpha chain variable domain of TCR clone 126110 (TRAV27, TRAJ13)
CRSSNSGGYQKVTF

SEQ ID NO: 252220 - protein, 18 aa, Homo sapiens
  CDR3 for beta chain variable domain of TCR clone 126110 (TRBV7-6, TRBJ2-1)
GHVSLGQQLGGGADEQFF

SEQ ID NO: 252221 - protein, 18 aa, Homo sapiens
  CDR3 for alpha chain variable domain of TCR clone 126111 (TRAV21, TRAJ52)
CAVRPSPAGGTSYGKLTF

SEQ ID NO: 252222 - protein, 16 aa, Homo sapiens
  CDR3 for beta chain variable domain of TCR clone 126111 (TRBV7-3, TRBJ2-1)
CASSLEGYRSYNEQFL

SEQ ID NO: 252223 - protein, 14 aa, Homo sapiens
  CDR3 for alpha chain variable domain of TCR clone 126112 (TRAV13-1, TRAJ5)
CAALGLAGRRALTF

SEQ ID NO: 252224 - protein, 15 aa, Homo sapiens
  CDR3 for beta chain variable domain of TCR clone 126112 (TRBV20-1, TRBJ1-1)
CSASRGVTGNTEAFF

SEQ ID NO: 252225 - protein, 13 aa, Homo sapiens
  CDR3 for alpha chain variable domain of TCR clone 126113 (TRAV3, TRAJ20)
CCEAFCNDYKLSF

SEQ ID NO: 252226 - protein, 16 aa, Homo sapiens
  CDR3 for beta chain variable domain of TCR clone 126113 (TRBV19, TRBJ2-1)
CASSKAGPSSYNEQFF

SEQ ID NO: 252227 - protein, 17 aa, Homo sapiens
  CDR3 for alpha chain variable domain of TCR clone 126114 (TRAV4, TRAJ20)
CTTSSWVKGNNDYKLSF

SEQ ID NO: 252228 - protein, 17 aa, Homo sapiens
  CDR3 for beta chain variable domain of TCR clone 126114 (TRBV11-2, TRBJ2-1)
CASSLYPPGVEYNEQFF

SEQ ID NO: 252229 - protein, 12 aa, Homo sapiens
  CDR3 for alpha chain variable domain of TCR clone 126115 (TRAV12-3, TRAJ20)
CAMVRGDYKPSF

SEQ ID NO: 252230 - protein, 12 aa, Homo sapiens
  CDR3 for beta chain variable domain of TCR clone 126115 (TRBV6-1, TRBJ2-7)
CASSDYSYEQYF

SEQ ID NO: 252231 - protein, 14 aa, Homo sapiens
  CDR3 for alpha chain variable domain of TCR clone 126116 (TRAV8-3, TRAJ6)
CAVGASGGSYIPTF

SEQ ID NO: 252232 - protein, 17 aa, Homo sapiens
  CDR3 for beta chain variable domain of TCR clone 126116 (TRBV18, TRBJ2-2)
CASSPSDPWKNTGELFF

SEQ ID NO: 252233 - protein, 13 aa, Homo sapiens
  CDR3 for alpha chain variable domain of TCR clone 126117 (TRAV13-1, TRAJ39)
CSKYSNAANMLTF

SEQ ID NO: 252234 - protein, 16 aa, Homo sapiens
  CDR3 for beta chain variable domain of TCR clone 126117 (TRBV20-1, TRBJ1-4)
CSAPGQGLLTNEKLFF

SEQ ID NO: 252235 - protein, 11 aa, Homo sapiens
  CDR3 for alpha chain variable domain of TCR clone 126118 (TRAV16, TRAJ31)
CALFNNARLMF

SEQ ID NO: 252236 - protein, 15 aa, Homo sapiens
  CDR3 for beta chain variable domain of TCR clone 126118 (TRBV18, TRBJ1-1)
CASSPRQGENTEAFS

SEQ ID NO: 252237 - protein, 12 aa, Homo sapiens
  CDR3 for alpha chain variable domain of TCR clone 126119 (TRAV12-2, TRAJ9)
CAVNTGGFNTIF

SEQ ID NO: 252238 - protein, 13 aa, Homo sapiens
  CDR3 for beta chain variable domain of TCR clone 126119 (TRBV10-3, TRBJ2-7)
CASKLAVNYEQYF

SEQ ID NO: 252239 - protein, 15 aa, Homo sapiens
  CDR3 for alpha chain variable domain of TCR clone 126120 (TRAV17, TRAJ4)
CATGTWSGGYNKLIF

SEQ ID NO: 252240 - protein, 15 aa, Homo sapiens
  CDR3 for beta chain variable domain of TCR clone 126120 (TRBV20-1, TRBJ2-7)
CSARDRFSGMDEQYF

SEQ ID NO: 252241 - protein, 15 aa, Homo sapiens
  CDR3 for alpha chain variable domain of TCR clone 126121 (TRAV21, TRAJ37)
CAVRPTLSNTGKLLF

SEQ ID NO: 252242 - protein, 16 aa, Homo sapiens
  CDR3 for beta chain variable domain of TCR clone 126121 (TRBV24-1, TRBJ2-3)
CATSDRRQDLTDTQYF

SEQ ID NO: 252243 - protein, 13 aa, Homo sapiens
  CDR3 for alpha chain variable domain of TCR clone 126122 (TRAV26-1, TRAJ34)
CIVRTWITDKLIF

SEQ ID NO: 252244 - protein, 13 aa, Homo sapiens
  CDR3 for beta chain variable domain of TCR clone 126122 (TRBV5-1, TRBJ2-1)
CASSLGSYNEQFF

SEQ ID NO: 252245 - protein, 16 aa, Homo sapiens
  CDR3 for alpha chain variable domain of TCR clone 126123 (TRAV17, TRAJ17)
CATALQEEAAGNKLTF

SEQ ID NO: 252246 - protein, 20 aa, Homo sapiens
  CDR3 for beta chain variable domain of TCR clone 126123 (TRBV7-8, TRBJ2-2)
CASSHLFPGPTIHITGELFF

SEQ ID NO: 252247 - protein, 15 aa, Homo sapiens
  CDR3 for alpha chain variable domain of TCR clone 126124 (TRAV26-1, TRAJ40)
CIVRVTTSGTYKYIF

SEQ ID NO: 252248 - protein, 12 aa, Homo sapiens
  CDR3 for beta chain variable domain of TCR clone 126124 (TRBV7-9, TRBJ1-4)
CASSTYREKLFF

SEQ ID NO: 252249 - protein, 12 aa, Homo sapiens
  CDR3 for alpha chain variable domain of TCR clone 126125 (TRAV12-2, TRAJ10)
WGVTGGGNKLTF

SEQ ID NO: 252250 - protein, 16 aa, Homo sapiens
  CDR3 for beta chain variable domain of TCR clone 126125 (TRBV6-4, TRBJ1-2)
RASSEAVGDPNYGYTF

SEQ ID NO: 252251 - protein, 16 aa, Homo sapiens
  CDR3 for alpha chain variable domain of TCR clone 126126 (TRAV26-1, TRAJ32)
CIVRMNYGGATNKLIF

SEQ ID NO: 252252 - protein, 14 aa, Homo sapiens
  CDR3 for beta chain variable domain of TCR clone 126126 (TRBV27, TRBJ1-1)
CASSLLSGLSEAFF

SEQ ID NO: 252253 - protein, 12 aa, Homo sapiens
  CDR3 for alpha chain variable domain of TCR clone 126127 (TRAV1-1, TRAJ8)
CAGGTGFQKLVF

SEQ ID NO: 252254 - protein, 15 aa, Homo sapiens
  CDR3 for beta chain variable domain of TCR clone 126127 (TRBV6-1, TRBJ2-3)
CASSERGGITDTQYF

SEQ ID NO: 252255 - protein, 17 aa, Homo sapiens
  CDR3 for alpha chain variable domain of TCR clone 126128 (TRAV3, TRAJ6)
CAVRDGPRAGGSYRPTF

SEQ ID NO: 252256 - protein, 16 aa, Homo sapiens
  CDR3 for beta chain variable domain of TCR clone 126128 (TRBV12-4, TRBJ2-7)
CASSLIGGTGTYEQYF

SEQ ID NO: 252257 - protein, 11 aa, Homo sapiens
  CDR3 for alpha chain variable domain of TCR clone 126129 (TRAV2, TRAJ13)
CASGGYQKVTF

SEQ ID NO: 252258 - protein, 16 aa, Homo sapiens
  CDR3 for beta chain variable domain of TCR clone 126129 (TRBV6-1, TRBJ1-3)
CASVQGGVETPYILER

SEQ ID NO: 252259 - protein, 12 aa, Homo sapiens
  CDR3 for alpha chain variable domain of TCR clone 126130 (TRAV3, TRAJ26)
CAVRDYGQNFVF

SEQ ID NO: 252260 - protein, 15 aa, Homo sapiens
  CDR3 for beta chain variable domain of TCR clone 126130 (TRBV5-1, TRBJ2-1)
CASSPPRAPYNEQFF

SEQ ID NO: 252261 - protein, 14 aa, Homo sapiens
  CDR3 for alpha chain variable domain of TCR clone 126131 (TRAV23/DV6, TRAJ13)
CAAMYSGGYQKVTF

SEQ ID NO: 252262 - protein, 14 aa, Homo sapiens
  CDR3 for beta chain variable domain of TCR clone 126131 (TRBV7-9, TRBJ2-1)
CASSHRDSLYEQFF

SEQ ID NO: 252263 - protein, 16 aa, Homo sapiens
  CDR3 for alpha chain variable domain of TCR clone 126132 (TRAV23/DV6, TRAJ3)
CAASIYSPSSASKIIF

SEQ ID NO: 252264 - protein, 15 aa, Homo sapiens
  CDR3 for beta chain variable domain of TCR clone 126132 (TRBV20-1, TRBJ2-7)
CSARDRVSGMDEQYF

SEQ ID NO: 252265 - protein, 18 aa, Homo sapiens
  CDR3 for alpha chain variable domain of TCR clone 126133 (TRAV21, TRAJ52)
CAVRPSPAGGTSYGKLTF

SEQ ID NO: 252266 - protein, 14 aa, Homo sapiens
  CDR3 for beta chain variable domain of TCR clone 126133 (TRBV24-1, TRBJ1-1)
CATSIPRGDTEAFF

SEQ ID NO: 252267 - protein, 12 aa, Homo sapiens
  CDR3 for alpha chain variable domain of TCR clone 126134 (TRAV30, TRAJ43)
CGTEERGTDMRF

SEQ ID NO: 252268 - protein, 13 aa, Homo sapiens
  CDR3 for beta chain variable domain of TCR clone 126134 (TRBV7-9, TRBJ2-3)
CASSPGSTDTQYF

SEQ ID NO: 252269 - protein, 13 aa, Homo sapiens
  CDR3 for alpha chain variable domain of TCR clone 126135 (TRAV21, TRAJ27)
CAARPGHAGKSTF

SEQ ID NO: 252270 - protein, 13 aa, Homo sapiens
  CDR3 for beta chain variable domain of TCR clone 126135 (TRBV18, TRBJ2-7)
CASQSGGGYEQYF

SEQ ID NO: 252271 - protein, 15 aa, Homo sapiens
  CDR3 for alpha chain variable domain of TCR clone 126136 (TRAV29/DV5, TRAJ42)
CAAKTDGGSQGNLIF

SEQ ID NO: 252272 - protein, 15 aa, Homo sapiens
  CDR3 for beta chain variable domain of TCR clone 126136 (TRBV6-3, TRBJ2-7)
CASSSPGTVFYEQYF

SEQ ID NO: 252273 - protein, 11 aa, Homo sapiens
  CDR3 for alpha chain variable domain of TCR clone 126137 (TRAV3, TRAJ21)
CAVATSTNFTF

SEQ ID NO: 252274 - protein, 16 aa, Homo sapiens
  CDR3 for beta chain variable domain of TCR clone 126137 (TRBV19, TRBJ2-1)
CASSKAGPSSYNEQFF

SEQ ID NO: 252275 - protein, 14 aa, Homo sapiens
  CDR3 for alpha chain variable domain of TCR clone 126138 (TRAV12-2, TRAJ33)
CAVKRARSKYQLIW

SEQ ID NO: 252276 - protein, 12 aa, Homo sapiens
  CDR3 for beta chain variable domain of TCR clone 126138 (TRBV24-1, TRBJ2-3)
CATSDSTDTQYF

SEQ ID NO: 252277 - protein, 15 aa, Homo sapiens
  CDR3 for alpha chain variable domain of TCR clone 126139 (TRAV3, TRAJ20)
CAVRDIKLSDYKLSF

SEQ ID NO: 252278 - protein, 14 aa, Homo sapiens
  CDR3 for beta chain variable domain of TCR clone 126139 (TRBV7-2, TRBJ1-1)
CASSHRQGRTEAFF

SEQ ID NO: 252279 - protein, 14 aa, Homo sapiens
  CDR3 for alpha chain variable domain of TCR clone 126140 (TRAV8-4, TRAJ9)
CAVRINTGGFKTIF

SEQ ID NO: 252280 - protein, 13 aa, Homo sapiens
  CDR3 for beta chain variable domain of TCR clone 126140 (TRBV12-5, TRBJ2-3)
CASGDRQSDTQYF

SEQ ID NO: 252281 - protein, 17 aa, Homo sapiens
  CDR3 for alpha chain variable domain of TCR clone 126141 (TRAV3, TRAJ42)
CAVRDRDYGGSQGNLIF

SEQ ID NO: 252282 - protein, 14 aa, Homo sapiens
  CDR3 for beta chain variable domain of TCR clone 126141 (TRBV11-3, TRBJ1-1)
CASSPGAWNTEAFF

SEQ ID NO: 252283 - protein, 16 aa, Homo sapiens
  CDR3 for alpha chain variable domain of TCR clone 126142 (TRAV8-3, TRAJ18)
CAVALDRGPTLGRLYF

SEQ ID NO: 252284 - protein, 11 aa, Homo sapiens
  CDR3 for beta chain variable domain of TCR clone 126142 (TRBV29-1, TRBJ1-1)
CSVEILTEAFF

SEQ ID NO: 252285 - protein, 14 aa, Homo sapiens
  CDR3 for alpha chain variable domain of TCR clone 126143 (TRAV17, TRAJ23)
CATASYNQGGKLIF

SEQ ID NO: 252286 - protein, 16 aa, Homo sapiens
  CDR3 for beta chain variable domain of TCR clone 126143 (TRBV12-4, TRBJ1-5)
CASNRPVGGSNQPQHF

SEQ ID NO: 252287 - protein, 14 aa, Homo sapiens
  CDR3 for alpha chain variable domain of TCR clone 126144 (TRAV12-3, TRAJ10)
SHLPLMGGGNKLTF

SEQ ID NO: 252288 - protein, 14 aa, Homo sapiens
  CDR3 for beta chain variable domain of TCR clone 126144 (TRBV6-1, TRBJ1-3)
CASVQGGGGNTIYF

SEQ ID NO: 252289 - protein, 15 aa, Homo sapiens
  CDR3 for alpha chain variable domain of TCR clone 126145 (TRAV17, TRAJ57)
CATGLSQGGSEKLVF

SEQ ID NO: 252290 - protein, 14 aa, Homo sapiens
  CDR3 for beta chain variable domain of TCR clone 126145 (TRBV12-5, TRBJ2-5)
CASGSRTHQETQYF

SEQ ID NO: 252291 - protein, 13 aa, Homo sapiens
  CDR3 for alpha chain variable domain of TCR clone 126146 (TRAV13-1, TRAJ5)
CAASVTGRRALTF

SEQ ID NO: 252292 - protein, 15 aa, Homo sapiens
  CDR3 for beta chain variable domain of TCR clone 126146 (TRBV7-9, TRBJ2-7)
CASSPGGGLTYEQYF

SEQ ID NO: 252293 - protein, 13 aa, Homo sapiens
  CDR3 for alpha chain variable domain of TCR clone 126147 (TRAV30, TRAJ8)
CGTPNTGFQKLVF

SEQ ID NO: 252294 - protein, 18 aa, Homo sapiens
  CDR3 for beta chain variable domain of TCR clone 126147 (TRBV11-2, TRBJ2-3)
CASSLGGASRGAPNTQYL

SEQ ID NO: 252295 - protein, 14 aa, Homo sapiens
  CDR3 for alpha chain variable domain of TCR clone 126148 (TRAV12-1, TRAJ3)
CVVNLGSSASKIIF

SEQ ID NO: 252296 - protein, 18 aa, Homo sapiens
  CDR3 for beta chain variable domain of TCR clone 126148 (TRBV4-2, TRBJ1-2)
CASSQDKVGHTVNYGYTF

SEQ ID NO: 252297 - protein, 14 aa, Homo sapiens
  CDR3 for alpha chain variable domain of TCR clone 126149 (TRAV12-2, TRAJ17)
CAVLFKAAGNKLTF

SEQ ID NO: 252298 - protein, 13 aa, Homo sapiens
  CDR3 for beta chain variable domain of TCR clone 126149 (TRBV28, TRBJ2-5)
CASSFAGGETQYF

SEQ ID NO: 252299 - protein, 14 aa, Homo sapiens
  CDR3 for alpha chain variable domain of TCR clone 126150 (TRAV13-1, TRAJ40)
CAARSTSGTYNYIF

SEQ ID NO: 252300 - protein, 15 aa, Homo sapiens
  CDR3 for beta chain variable domain of TCR clone 126150 (TRBV18, TRBJ1-5)
CASSETGGNNQPQHF

SEQ ID NO: 252301 - protein, 14 aa, Homo sapiens
  CDR3 for alpha chain variable domain of TCR clone 126151 (TRAV12-2, TRAJ53)
CAVKGGGSNYKLPF

SEQ ID NO: 252302 - protein, 14 aa, Homo sapiens
  CDR3 for beta chain variable domain of TCR clone 126151 (TRBV7-7, TRBJ2-2)
CATRQDSDTGELFF

SEQ ID NO: 252303 - protein, 15 aa, Homo sapiens
  CDR3 for alpha chain variable domain of TCR clone 126152 (TRAV8-3, TRAJ15)
CAVGALNQAGTALIF

SEQ ID NO: 252304 - protein, 14 aa, Homo sapiens
  CDR3 for beta chain variable domain of TCR clone 126152 (TRBV20-1, TRBJ2-1)
CSPNDEASYNEQFF

SEQ ID NO: 252305 - protein, 13 aa, Homo sapiens
  CDR3 for alpha chain variable domain of TCR clone 126153 (TRAV2, TRAJ40)
CAVVTPGTYKYIF

SEQ ID NO: 252306 - protein, 15 aa, Homo sapiens
  CDR3 for beta chain variable domain of TCR clone 126153 (TRBV11-3, TRBJ2-3)
CASLKDGRDGDTQYF

SEQ ID NO: 252307 - protein, 14 aa, Homo sapiens
  CDR3 for alpha chain variable domain of TCR clone 126154 (TRAV1-2, TRAJ16)
CAVNRFSDGQRLLF

SEQ ID NO: 252308 - protein, 13 aa, Homo sapiens
  CDR3 for beta chain variable domain of TCR clone 126154 (TRBV18, TRBJ2-5)
CASSPAGKETQYF

SEQ ID NO: 252309 - protein, 13 aa, Homo sapiens
  CDR3 for alpha chain variable domain of TCR clone 126155 (TRAV8-4, TRAJ30)
CAVSVNRDDKIIF

SEQ ID NO: 252310 - protein, 17 aa, Homo sapiens
  CDR3 for beta chain variable domain of TCR clone 126155 (TRBV5-1, TRBJ2-5)
CASSPVALGQNQETQYF

SEQ ID NO: 252311 - protein, 14 aa, Homo sapiens
  CDR3 for alpha chain variable domain of TCR clone 126156 (TRAV23/DV6, TRAJ37)
CAASTSSNTGKLIL

SEQ ID NO: 252312 - protein, 13 aa, Homo sapiens
  CDR3 for beta chain variable domain of TCR clone 126156 (TRBV18, TRBJ2-5)
CASSPIPGETQYF

SEQ ID NO: 252313 - protein, 16 aa, Homo sapiens
  CDR3 for alpha chain variable domain of TCR clone 126157 (TRAV8-3, TRAJ10)
CAVGPILTGGGNKLTF

SEQ ID NO: 252314 - protein, 15 aa, Homo sapiens
  CDR3 for beta chain variable domain of TCR clone 126157 (TRBV20-1, TRBJ2-7)
CSARDRVSGMDEQYF

SEQ ID NO: 252315 - protein, 15 aa, Homo sapiens
  CDR3 for alpha chain variable domain of TCR clone 126158 (TRAV27, TRAJ45)
CAVRYSGGGADGLTF

SEQ ID NO: 252316 - protein, 20 aa, Homo sapiens
  CDR3 for beta chain variable domain of TCR clone 126158 (TRBV7-8, TRBJ2-2)
CASSHLFPGPTIHITGELFF

SEQ ID NO: 252317 - protein, 14 aa, Homo sapiens
  CDR3 for alpha chain variable domain of TCR clone 126159 (TRAV1-2, TRAJ8)
CAVREDTGFQKLVF

SEQ ID NO: 252318 - protein, 15 aa, Homo sapiens
  CDR3 for beta chain variable domain of TCR clone 126159 (TRBV11-2, TRBJ2-2)
CASSRTGGYTGELFF

SEQ ID NO: 252319 - protein, 18 aa, Homo sapiens
  CDR3 for alpha chain variable domain of TCR clone 126160 (TRAV26-2, TRAJ54)
CILRDVEVGIQGAQKLVF

SEQ ID NO: 252320 - protein, 12 aa, Homo sapiens
  CDR3 for beta chain variable domain of TCR clone 126160 (TRBV7-9, TRBJ2-7)
CASSIKREEQYF

SEQ ID NO: 252321 - protein, 15 aa, Homo sapiens
  CDR3 for alpha chain variable domain of TCR clone 126161 (TRAV17, TRAJ52)
CSTEAGGTSYGKLTF

SEQ ID NO: 252322 - protein, 14 aa, Homo sapiens
  CDR3 for beta chain variable domain of TCR clone 126161 (TRBV28, TRBJ1-5)
CASSLGVLVKPQHF

SEQ ID NO: 252323 - protein, 10 aa, Homo sapiens
  CDR3 for alpha chain variable domain of TCR clone 126162 (TRAV2, TRAJ34)
CAVVNNKLIF

SEQ ID NO: 252324 - protein, 14 aa, Homo sapiens
  CDR3 for beta chain variable domain of TCR clone 126162 (TRBV11-2, TRBJ2-3)
CASSRLARTDTQYF

SEQ ID NO: 252325 - protein, 13 aa, Homo sapiens
  CDR3 for alpha chain variable domain of TCR clone 126163 (TRAV16, TRAJ31)
CALSAHNNARLMF

SEQ ID NO: 252326 - protein, 14 aa, Homo sapiens
  CDR3 for beta chain variable domain of TCR clone 126163 (TRBV25-1, TRBJ1-1)
CASTHLGGNTEAFF

SEQ ID NO: 252327 - protein, 12 aa, Homo sapiens
  CDR3 for alpha chain variable domain of TCR clone 126164 (TRAV16, TRAJ9)
CALSSGGFKTIF

SEQ ID NO: 252328 - protein, 14 aa, Homo sapiens
  CDR3 for beta chain variable domain of TCR clone 126164 (TRBV7-9, TRBJ2-1)
CASSLAGPYNEQLF

SEQ ID NO: 252329 - protein, 13 aa, Homo sapiens
  CDR3 for alpha chain variable domain of TCR clone 126165 (TRAV26-1, TRAJ33)
CIVRVEGNDQLIW

SEQ ID NO: 252330 - protein, 16 aa, Homo sapiens
  CDR3 for beta chain variable domain of TCR clone 126165 (TRBV15, TRBJ2-7)
CATSRDRGRRRGEQYF

SEQ ID NO: 252331 - protein, 14 aa, Homo sapiens
  CDR3 for alpha chain variable domain of TCR clone 126166 (TRAV13-1, TRAJ48)
CAASTDFGNEKLTF

SEQ ID NO: 252332 - protein, 13 aa, Homo sapiens
  CDR3 for beta chain variable domain of TCR clone 126166 (TRBV10-3, TRBJ2-7)
CASKLAVNYEQYF

SEQ ID NO: 252333 - protein, 12 aa, Homo sapiens
  CDR3 for alpha chain variable domain of TCR clone 126167 (TRAV3, TRAJ31)
CAVRPRGPRLMF

SEQ ID NO: 252334 - protein, 17 aa, Homo sapiens
  CDR3 for beta chain variable domain of TCR clone 126167 (TRBV7-9, TRBJ1-5)
CASSASQGGYSNQPQHS

SEQ ID NO: 252335 - protein, 14 aa, Homo sapiens
  CDR3 for alpha chain variable domain of TCR clone 126168 (TRAV12-3, TRAJ10)
SYLPLTGGGNKLTF

SEQ ID NO: 252336 - protein, 14 aa, Homo sapiens
  CDR3 for beta chain variable domain of TCR clone 126168 (TRBV18, TRBJ2-7)
CASSPRGGAYEQYF

SEQ ID NO: 252337 - protein, 14 aa, Homo sapiens
  CDR3 for alpha chain variable domain of TCR clone 126169 (TRAV4, TRAJ23)
CLVGSYNQGGKLIF

SEQ ID NO: 252338 - protein, 17 aa, Homo sapiens
  CDR3 for beta chain variable domain of TCR clone 126169 (TRBV11-2, TRBJ2-1)
CASSLYPPGVEYNEQFF

SEQ ID NO: 252339 - protein, 13 aa, Homo sapiens
  CDR3 for alpha chain variable domain of TCR clone 126170 (TRAV12-3, TRAJ33)
CAMSVNSNYQLIW

SEQ ID NO: 252340 - protein, 13 aa, Homo sapiens
  CDR3 for beta chain variable domain of TCR clone 126170 (TRBV7-2, TRBJ2-2)
CASRLAVTGELFF

SEQ ID NO: 252341 - protein, 14 aa, Homo sapiens
  CDR3 for alpha chain variable domain of TCR clone 126171 (TRAV8-3, TRAJ4)
CAEGASGGYNKLIF

SEQ ID NO: 252342 - protein, 16 aa, Homo sapiens
  CDR3 for beta chain variable domain of TCR clone 126171 (TRBV4-3, TRBJ2-2)
CASSHLQGSGTGELFF

SEQ ID NO: 252343 - protein, 14 aa, Homo sapiens
  CDR3 for alpha chain variable domain of TCR clone 126172 (TRAV23/DV6, TRAJ4)
CAAPSSGGYNKLIF

SEQ ID NO: 252344 - protein, 12 aa, Homo sapiens
  CDR3 for beta chain variable domain of TCR clone 126172 (TRBV11-2, TRBJ2-2)
CASSLGGGELFF

SEQ ID NO: 252345 - protein, 14 aa, Homo sapiens
  CDR3 for alpha chain variable domain of TCR clone 126173 (TRAV16, TRAJ17)
CALRGRAAGNKLTF

SEQ ID NO: 252346 - protein, 17 aa, Homo sapiens
  CDR3 for beta chain variable domain of TCR clone 126173 (TRBV18, TRBJ2-6)
CASSPRQGAVGANVLTF

SEQ ID NO: 252347 - protein, 15 aa, Homo sapiens
  CDR3 for alpha chain variable domain of TCR clone 126174 (TRAV8-2, TRAJ16)
CVVSDGFSHGQKLLF

SEQ ID NO: 252348 - protein, 14 aa, Homo sapiens
  CDR3 for beta chain variable domain of TCR clone 126174 (TRBV7-3, TRBJ1-1)
CASSLGTGYTEAFF

SEQ ID NO: 252349 - protein, 17 aa, Homo sapiens
  CDR3 for alpha chain variable domain of TCR clone 126175 (TRAV38-2/DV8, TRAJ23)
CALSRKLIFGQGTELSV

SEQ ID NO: 252350 - protein, 12 aa, Homo sapiens
  CDR3 for beta chain variable domain of TCR clone 126175 (TRBV18, TRBJ2-1)
CASASDEDEQFF

SEQ ID NO: 252351 - protein, 14 aa, Homo sapiens
  CDR3 for alpha chain variable domain of TCR clone 126176 (TRAV12-3, TRAJ42)
CAMNYGGSQGNLIF

SEQ ID NO: 252352 - protein, 17 aa, Homo sapiens
  CDR3 for beta chain variable domain of TCR clone 126176 (TRBV12-4, TRBJ2-7)
CASSYHGWDRASYEQYF

SEQ ID NO: 252353 - protein, 15 aa, Homo sapiens
  CDR3 for alpha chain variable domain of TCR clone 126177 (TRAV35, TRAJ40)
CAGQLGTSGTYKYIF

SEQ ID NO: 252354 - protein, 15 aa, Homo sapiens
  CDR3 for beta chain variable domain of TCR clone 126177 (TRBV6-1, TRBJ1-5)
CASSEALRGEQPQHF

SEQ ID NO: 252355 - protein, 15 aa, Homo sapiens
  CDR3 for alpha chain variable domain of TCR clone 126178 (TRAV9-2, TRAJ9)
CALSLTNTGGFKTIF

SEQ ID NO: 252356 - protein, 12 aa, Homo sapiens
  CDR3 for beta chain variable domain of TCR clone 126178 (TRBV7-3, TRBJ2-5)
CQQLPGGETQYF

SEQ ID NO: 252357 - protein, 13 aa, Homo sapiens
  CDR3 for alpha chain variable domain of TCR clone 126179 (TRAV21, TRAJ20)
CAVGLRVDYKLSF

SEQ ID NO: 252358 - protein, 14 aa, Homo sapiens
  CDR3 for beta chain variable domain of TCR clone 126179 (TRBV7-2, TRBJ2-1)
CASSPPGAPNEQFF

SEQ ID NO: 252359 - protein, 13 aa, Homo sapiens
  CDR3 for alpha chain variable domain of TCR clone 126180 (TRAV12-1, TRAJ9)
CVVLNTGGFNTIF

SEQ ID NO: 252360 - protein, 13 aa, Homo sapiens
  CDR3 for beta chain variable domain of TCR clone 126180 (TRBV20-1, TRBJ1-1)
CSARGGGNTEAFF

SEQ ID NO: 252361 - protein, 14 aa, Homo sapiens
  CDR3 for alpha chain variable domain of TCR clone 126181 (TRAV38-1, TRAJ45)
CASHSGGGADGLAF

SEQ ID NO: 252362 - protein, 13 aa, Homo sapiens
  CDR3 for beta chain variable domain of TCR clone 126181 (TRBV10-3, TRBJ1-2)
CAISERDSYGYTF

SEQ ID NO: 252363 - protein, 13 aa, Homo sapiens
  CDR3 for alpha chain variable domain of TCR clone 126182 (TRAV12-1, TRAJ34)
CVVTGYNTDKLIF

SEQ ID NO: 252364 - protein, 13 aa, Homo sapiens
  CDR3 for beta chain variable domain of TCR clone 126182 (TRBV28, TRBJ2-7)
YASKAGGVYEQYF

SEQ ID NO: 252365 - protein, 13 aa, Homo sapiens
  CDR3 for alpha chain variable domain of TCR clone 126183 (TRAV1-2, TRAJ9)
CAALNTGGFKTIF

SEQ ID NO: 252366 - protein, 13 aa, Homo sapiens
  CDR3 for beta chain variable domain of TCR clone 126183 (TRBV19, TRBJ1-2)
CASSVPGQDRYTF

SEQ ID NO: 252367 - protein, 15 aa, Homo sapiens
  CDR3 for alpha chain variable domain of TCR clone 126184 (TRAV14/DV4, TRAJ47)
CAMREAMEYGNKLVF

SEQ ID NO: 252368 - protein, 15 aa, Homo sapiens
  CDR3 for beta chain variable domain of TCR clone 126184 (TRBV5-1, TRBJ2-5)
CASSFKGGDQETQYF

SEQ ID NO: 252369 - protein, 13 aa, Homo sapiens
  CDR3 for alpha chain variable domain of TCR clone 126185 (TRAV36/DV7, TRAJ54)
CAVDIQGAQKLVF

SEQ ID NO: 252370 - protein, 14 aa, Homo sapiens
  CDR3 for beta chain variable domain of TCR clone 126185 (TRBV19, TRBJ2-7)
CAINFRDTFTGMYF

SEQ ID NO: 252371 - protein, 12 aa, Homo sapiens
  CDR3 for alpha chain variable domain of TCR clone 126186 (TRAV12-1, TRAJ40)
CVVYSGTYKYIF

SEQ ID NO: 252372 - protein, 14 aa, Homo sapiens
  CDR3 for beta chain variable domain of TCR clone 126186 (TRBV7-6, TRBJ2-1)
CARSLGGGADEQFF

SEQ ID NO: 252373 - protein, 14 aa, Homo sapiens
  CDR3 for alpha chain variable domain of TCR clone 126187 (TRAV21, TRAJ35)
CAVMPIGFGNVLHC

SEQ ID NO: 252374 - protein, 12 aa, Homo sapiens
  CDR3 for beta chain variable domain of TCR clone 126187 (TRBV12-4, TRBJ2-3)
CASSLGQDTQYF

SEQ ID NO: 252375 - protein, 17 aa, Homo sapiens
  CDR3 for alpha chain variable domain of TCR clone 126188 (TRAV13-1, TRAJ52)
CAASSGAGGTSYGKLTF

SEQ ID NO: 252376 - protein, 15 aa, Homo sapiens
  CDR3 for beta chain variable domain of TCR clone 126188 (TRBV2, TRBJ2-1)
SASSELAGSYNEQFF

SEQ ID NO: 252377 - protein, 16 aa, Homo sapiens
  CDR3 for alpha chain variable domain of TCR clone 126189 (TRAV30, TRAJ24)
CGTEIVDADSWGKFQF

SEQ ID NO: 252378 - protein, 13 aa, Homo sapiens
  CDR3 for beta chain variable domain of TCR clone 126189 (TRBV25-1, TRBJ2-5)
CASSPGGVETQYF

SEQ ID NO: 252379 - protein, 12 aa, Homo sapiens
  CDR3 for alpha chain variable domain of TCR clone 126190 (TRAV12-1, TRAJ40)
CVFCSGTYKYIF

SEQ ID NO: 252380 - protein, 18 aa, Homo sapiens
  CDR3 for beta chain variable domain of TCR clone 126190 (TRBV12-4, TRBJ2-2)
CASSLVAGTRGRTGELFF

SEQ ID NO: 252381 - protein, 16 aa, Homo sapiens
  CDR3 for alpha chain variable domain of TCR clone 126191 (TRAV29/DV5, TRAJ36)
CAASAGVETGANNLSF

SEQ ID NO: 252382 - protein, 16 aa, Homo sapiens
  CDR3 for beta chain variable domain of TCR clone 126191 (TRBV5-1, TRBJ2-3)
CASSLGLAVYTDTQYF

SEQ ID NO: 252383 - protein, 14 aa, Homo sapiens
  CDR3 for alpha chain variable domain of TCR clone 126192 (TRAV8-3, TRAJ4)
CAVGAAGGYNKLIF

SEQ ID NO: 252384 - protein, 16 aa, Homo sapiens
  CDR3 for beta chain variable domain of TCR clone 126192 (TRBV28, TRBJ2-7)
CASSLFFETGGPEQYF

SEQ ID NO: 252385 - protein, 16 aa, Homo sapiens
  CDR3 for alpha chain variable domain of TCR clone 126193 (TRAV3, TRAJ10)
CAVRDMRAGGGNKLTF

SEQ ID NO: 252386 - protein, 14 aa, Homo sapiens
  CDR3 for beta chain variable domain of TCR clone 126193 (TRBV7-3, TRBJ1-1)
CASSLGTGYTEAFF

SEQ ID NO: 252387 - protein, 16 aa, Homo sapiens
  CDR3 for alpha chain variable domain of TCR clone 126194 (TRAV30, TRAJ24)
CGTEIVDADSWGKFQF

SEQ ID NO: 252388 - protein, 14 aa, Homo sapiens
  CDR3 for beta chain variable domain of TCR clone 126194 (TRBV11-3, TRBJ1-6)
CASSFSGGDSPLHF

SEQ ID NO: 252389 - protein, 14 aa, Homo sapiens
  CDR3 for alpha chain variable domain of TCR clone 126195 (TRAV17, TRAJ22)
CATSPSGSARQLTF

SEQ ID NO: 252390 - protein, 15 aa, Homo sapiens
  CDR3 for beta chain variable domain of TCR clone 126195 (TRBV4-1, TRBJ2-5)
CASSPWDLYQETQYF

SEQ ID NO: 252391 - protein, 13 aa, Homo sapiens
  CDR3 for alpha chain variable domain of TCR clone 126196 (TRAV20, TRAJ42)
CAVQGGSQGNLIF

SEQ ID NO: 252392 - protein, 17 aa, Homo sapiens
  CDR3 for beta chain variable domain of TCR clone 126196 (TRBV10-3, TRBJ2-6)
CAISESTAPSGANVLTF

SEQ ID NO: 252393 - protein, 13 aa, Homo sapiens
  CDR3 for alpha chain variable domain of TCR clone 126197 (TRAV36/DV7, TRAJ49)
CAGDSNTGNQFYF

SEQ ID NO: 252394 - protein, 12 aa, Homo sapiens
  CDR3 for beta chain variable domain of TCR clone 126197 (TRBV11-2, TRBJ2-2)
CASSLGGGELLF

SEQ ID NO: 252395 - protein, 13 aa, Homo sapiens
  CDR3 for alpha chain variable domain of TCR clone 126198 (TRAV17, TRAJ26)
CATVDNYGQNFVF

SEQ ID NO: 252396 - protein, 17 aa, Homo sapiens
  CDR3 for beta chain variable domain of TCR clone 126198 (TRBV13, TRBJ2-3)
CASSLSRVAGGRNTQYF

SEQ ID NO: 252397 - protein, 16 aa, Homo sapiens
  CDR3 for alpha chain variable domain of TCR clone 126199 (TRAV3, TRAJ37)
CAVRPHGSGNTGKLLF

SEQ ID NO: 252398 - protein, 15 aa, Homo sapiens
  CDR3 for beta chain variable domain of TCR clone 126199 (TRBV20-1, TRBJ2-7)
CSARDRVSGMDEQYF

SEQ ID NO: 252399 - protein, 22 aa, Homo sapiens
  CDR3 for alpha chain variable domain of TCR clone 126200 (TRAV27, TRAJ38)
CAARRNAGNNHIQNPNPAVYQL

SEQ ID NO: 252400 - protein, 13 aa, Homo sapiens
  CDR3 for beta chain variable domain of TCR clone 126200 (TRBV12-5, TRBJ2-3)
CASGDRQSDTQYF

SEQ ID NO: 252401 - protein, 14 aa, Homo sapiens
  CDR3 for alpha chain variable domain of TCR clone 126201 (TRAV26-1, TRAJ38)
CIADNAGNNRKLIW

SEQ ID NO: 252402 - protein, 12 aa, Homo sapiens
  CDR3 for beta chain variable domain of TCR clone 126201 (TRBV20-1, TRBJ1-1)
QSRGGGNTEAFF

SEQ ID NO: 252403 - protein, 14 aa, Homo sapiens
  CDR3 for alpha chain variable domain of TCR clone 126202 (TRAV12-1, TRAJ13)
CVVIDSGGYQKVTF

SEQ ID NO: 252404 - protein, 14 aa, Homo sapiens
  CDR3 for beta chain variable domain of TCR clone 126202 (TRBV19, TRBJ2-1)
CASPTFVLSGEQFF

SEQ ID NO: 252405 - protein, 14 aa, Homo sapiens
  CDR3 for alpha chain variable domain of TCR clone 126203 (TRAV1-2, TRAJ16)
CAVNRFSDGQKLLF

SEQ ID NO: 252406 - protein, 14 aa, Homo sapiens
  CDR3 for beta chain variable domain of TCR clone 126203 (TRBV18, TRBJ1-2)
CASSPDRVVYGYTF

SEQ ID NO: 252407 - protein, 14 aa, Homo sapiens
  CDR3 for alpha chain variable domain of TCR clone 126204 (TRAV13-1, TRAJ12)
CSNYPVDSSYKLIF

SEQ ID NO: 252408 - protein, 11 aa, Homo sapiens
  CDR3 for beta chain variable domain of TCR clone 126204 (TRBV20-1, TRBJ2-1)
CSLSSGSEQFF

SEQ ID NO: 252409 - protein, 12 aa, Homo sapiens
  CDR3 for alpha chain variable domain of TCR clone 126205 (TRAV21, TRAJ11)
CAATPGYSTLTF

SEQ ID NO: 252410 - protein, 14 aa, Homo sapiens
  CDR3 for beta chain variable domain of TCR clone 126205 (TRBV20-1, TRBJ2-7)
CSAPELAGVGEQYL

SEQ ID NO: 252411 - protein, 16 aa, Homo sapiens
  CDR3 for alpha chain variable domain of TCR clone 126206 (TRAV13-1, TRAJ48)
CAASIFGNFGNEKLTF

SEQ ID NO: 252412 - protein, 13 aa, Homo sapiens
  CDR3 for beta chain variable domain of TCR clone 126206 (TRBV7-9, TRBJ1-2)
CASSLKQNYGYTF

SEQ ID NO: 252413 - protein, 14 aa, Homo sapiens
  CDR3 for alpha chain variable domain of TCR clone 126207 (TRAV1-2, TRAJ13)
CAVKHSGGYQKVTF

SEQ ID NO: 252414 - protein, 15 aa, Homo sapiens
  CDR3 for beta chain variable domain of TCR clone 126207 (TRBV20-1, TRBJ2-7)
CSARVPAAYFYEQYF

SEQ ID NO: 252415 - protein, 15 aa, Homo sapiens
  CDR3 for alpha chain variable domain of TCR clone 126208 (TRAV8-3, TRAJ45)
CASSYSGGGADGLTF

SEQ ID NO: 252416 - protein, 15 aa, Homo sapiens
  CDR3 for beta chain variable domain of TCR clone 126208 (TRBV7-9, TRBJ1-2)
CASSLDREPNYGYTF

SEQ ID NO: 252417 - protein, 14 aa, Homo sapiens
  CDR3 for alpha chain variable domain of TCR clone 126209 (TRAV12-3, TRAJ39)
SATYLPNAGNMLTF

SEQ ID NO: 252418 - protein, 13 aa, Homo sapiens
  CDR3 for beta chain variable domain of TCR clone 126209 (TRBV28, TRBJ1-2)
CASSPGSRNGYTF

SEQ ID NO: 252419 - protein, 14 aa, Homo sapiens
  CDR3 for alpha chain variable domain of TCR clone 126210 (TRAV20, TRAJ32)
CCGRYGCATNKLIF

SEQ ID NO: 252420 - protein, 16 aa, Homo sapiens
  CDR3 for beta chain variable domain of TCR clone 126210 (TRBV19, TRBJ2-2)
CASRSPGTGATGELFF

SEQ ID NO: 252421 - protein, 12 aa, Homo sapiens
  CDR3 for alpha chain variable domain of TCR clone 126211 (TRAV13-1, TRAJ48)
CAANFGNEKLTF

SEQ ID NO: 252422 - protein, 15 aa, Homo sapiens
  CDR3 for beta chain variable domain of TCR clone 126211 (TRBV7-3, TRBJ2-1)
CASSPTGGGEVEQFF

SEQ ID NO: 252423 - protein, 15 aa, Homo sapiens
  CDR3 for alpha chain variable domain of TCR clone 126212 (TRAV26-1, TRAJ22)
CIVRVSFWFCKATDL

SEQ ID NO: 252424 - protein, 18 aa, Homo sapiens
  CDR3 for beta chain variable domain of TCR clone 126212 (TRBV11-2, TRBJ2-3)
CASSLGGASRGAPNTQYF

SEQ ID NO: 252425 - protein, 18 aa, Homo sapiens
  CDR3 for alpha chain variable domain of TCR clone 126213 (TRAV8-4, TRAJ52)
CAVTRANAGGTSYGKLTF

SEQ ID NO: 252426 - protein, 14 aa, Homo sapiens
  CDR3 for beta chain variable domain of TCR clone 126213 (TRBV13, TRBJ2-5)
CASSLGPRGETQYF

SEQ ID NO: 252427 - protein, 15 aa, Homo sapiens
  CDR3 for alpha chain variable domain of TCR clone 126214 (TRAV21, TRAJ38)
SAVRQDAGNNRKLIW

SEQ ID NO: 252428 - protein, 16 aa, Homo sapiens
  CDR3 for beta chain variable domain of TCR clone 126214 (TRBV4-2, TRBJ1-1)
CASRPLDGGGDTEAFF

SEQ ID NO: 252429 - protein, 12 aa, Homo sapiens
  CDR3 for alpha chain variable domain of TCR clone 126215 (TRAV16, TRAJ9)
CALRSGGFKTIF

SEQ ID NO: 252430 - protein, 13 aa, Homo sapiens
  CDR3 for beta chain variable domain of TCR clone 126215 (TRBV4-3, TRBJ1-1)
CASSQVEGSMAFF

SEQ ID NO: 252431 - protein, 14 aa, Homo sapiens
  CDR3 for alpha chain variable domain of TCR clone 126216 (TRAV12-3, TRAJ10)
SHLPLTGGGNKLTF

SEQ ID NO: 252432 - protein, 16 aa, Homo sapiens
  CDR3 for beta chain variable domain of TCR clone 126216 (TRBV11-2, TRBJ1-1)
CASSLRQGGEHSKAFF

SEQ ID NO: 252433 - protein, 15 aa, Homo sapiens
  CDR3 for alpha chain variable domain of TCR clone 126217 (TRAV4, TRAJ26)
CLVGDMNNYGQNFVF

SEQ ID NO: 252434 - protein, 18 aa, Homo sapiens
  CDR3 for beta chain variable domain of TCR clone 126217 (TRBV28, TRBJ1-4)
CASSSRTGAANEKLFLAV

SEQ ID NO: 252435 - protein, 15 aa, Homo sapiens
  CDR3 for alpha chain variable domain of TCR clone 126218 (TRAV29/DV5, TRAJ42)
CAAKTDGGSQGNLIF

SEQ ID NO: 252436 - protein, 16 aa, Homo sapiens
  CDR3 for beta chain variable domain of TCR clone 126218 (TRBV13, TRBJ2-2)
CASSPRTGEHTGELFF

SEQ ID NO: 252437 - protein, 17 aa, Homo sapiens
  CDR3 for alpha chain variable domain of TCR clone 126219 (TRAV3, TRAJ42)
CAVRDRDYGGSQGNLIF

SEQ ID NO: 252438 - protein, 14 aa, Homo sapiens
  CDR3 for beta chain variable domain of TCR clone 126219 (TRBV19, TRBJ2-1)
CASSMGSGATEQFF

SEQ ID NO: 252439 - protein, 15 aa, Homo sapiens
  CDR3 for alpha chain variable domain of TCR clone 126220 (TRAV26-1, TRAJ22)
CIVRVSFWFCKATDL

SEQ ID NO: 252440 - protein, 13 aa, Homo sapiens
  CDR3 for beta chain variable domain of TCR clone 126220 (TRBV7-9, TRBJ1-2)
CACSLKQNYGYTF

SEQ ID NO: 252441 - protein, 13 aa, Homo sapiens
  CDR3 for alpha chain variable domain of TCR clone 126221 (TRAV2, TRAJ33)
CAVEDGSNYQLIW

SEQ ID NO: 252442 - protein, 13 aa, Homo sapiens
  CDR3 for beta chain variable domain of TCR clone 126221 (TRBV27, TRBJ1-1)
CASSLSIGAEAFF

SEQ ID NO: 252443 - protein, 12 aa, Homo sapiens
  CDR3 for alpha chain variable domain of TCR clone 126222 (TRAV21, TRAJ23)
CAVGPQGGKRIF

SEQ ID NO: 252444 - protein, 13 aa, Homo sapiens
  CDR3 for beta chain variable domain of TCR clone 126222 (TRBV20-1, TRBJ2-7)
CSARTGAGYEQYF

SEQ ID NO: 252445 - protein, 13 aa, Homo sapiens
  CDR3 for alpha chain variable domain of TCR clone 126223 (TRAV12-3, TRAJ7)
CAMTPYGNNRLDF

SEQ ID NO: 252446 - protein, 13 aa, Homo sapiens
  CDR3 for beta chain variable domain of TCR clone 126223 (TRBV10-3, TRBJ1-2)
CAINADLNYGYTF

SEQ ID NO: 252447 - protein, 15 aa, Homo sapiens
  CDR3 for alpha chain variable domain of TCR clone 126224 (TRAV23/DV6, TRAJ18)
CAASFRGSTLGRLYF

SEQ ID NO: 252448 - protein, 13 aa, Homo sapiens
  CDR3 for beta chain variable domain of TCR clone 126224 (TRBV28, TRBJ2-7)
CASLDRAGGEQYF

SEQ ID NO: 252449 - protein, 11 aa, Homo sapiens
  CDR3 for alpha chain variable domain of TCR clone 126225 (TRAV1-2, TRAJ31)
CAVNNNARLMF

SEQ ID NO: 252450 - protein, 15 aa, Homo sapiens
  CDR3 for beta chain variable domain of TCR clone 126225 (TRBV28, TRBJ2-1)
YASSIIAGGRSEQFF

SEQ ID NO: 252451 - protein, 13 aa, Homo sapiens
  CDR3 for alpha chain variable domain of TCR clone 126226 (TRAV4, TRAJ21)
CLVGAYNFNKFYF

SEQ ID NO: 252452 - protein, 16 aa, Homo sapiens
  CDR3 for beta chain variable domain of TCR clone 126226 (TRBV19, TRBJ2-1)
CASSKAGPSSYNEQFF

SEQ ID NO: 252453 - protein, 11 aa, Homo sapiens
  CDR3 for alpha chain variable domain of TCR clone 126227 (TRAV26-2, TRAJ8)
FILTGFQKLVF

SEQ ID NO: 252454 - protein, 19 aa, Homo sapiens
  CDR3 for beta chain variable domain of TCR clone 126227 (TRBV20-1, TRBJ2-1)
CSARGETSGNSPQIDEQFF

SEQ ID NO: 252455 - protein, 23 aa, Homo sapiens
  CDR3 for alpha chain variable domain of TCR clone 126228 (TRAV8-6, TRAJ38)
CAVRNAGNNHIQNPDPAVYQLRD

SEQ ID NO: 252456 - protein, 15 aa, Homo sapiens
  CDR3 for beta chain variable domain of TCR clone 126228 (TRBV4-1, TRBJ2-2)
CASSKGQGITGELFF

SEQ ID NO: 252457 - protein, 14 aa, Homo sapiens
  CDR3 for alpha chain variable domain of TCR clone 126229 (TRAV20, TRAJ32)
CCGRYVGATNKLIF

SEQ ID NO: 252458 - protein, 16 aa, Homo sapiens
  CDR3 for beta chain variable domain of TCR clone 126229 (TRBV19, TRBJ2-2)
CASRSPGTGATGELFF

SEQ ID NO: 252459 - protein, 11 aa, Homo sapiens
  CDR3 for alpha chain variable domain of TCR clone 126230 (TRAV12-3, TRAJ26)
CAMSHGQNFVF

SEQ ID NO: 252460 - protein, 13 aa, Homo sapiens
  CDR3 for beta chain variable domain of TCR clone 126230 (TRBV12-4, TRBJ2-5)
CASSLGGSRTQYF

SEQ ID NO: 252461 - protein, 16 aa, Homo sapiens
  CDR3 for alpha chain variable domain of TCR clone 126231 (TRAV3, TRAJ21)
CAVRDIERGNFNKFYF

SEQ ID NO: 252462 - protein, 14 aa, Homo sapiens
  CDR3 for beta chain variable domain of TCR clone 126231 (TRBV9, TRBJ2-7)
CASSVGVGSYEQYL

SEQ ID NO: 252463 - protein, 16 aa, Homo sapiens
  CDR3 for alpha chain variable domain of TCR clone 126232 (TRAV2, TRAJ4)
CAVEDRFSGGYNKLIF

SEQ ID NO: 252464 - protein, 14 aa, Homo sapiens
  CDR3 for beta chain variable domain of TCR clone 126232 (TRBV4-1, TRBJ2-2)
CASSQAVNTGELFF

SEQ ID NO: 252465 - protein, 13 aa, Homo sapiens
  CDR3 for alpha chain variable domain of TCR clone 126233 (TRAV36/DV7, TRAJ57)
CAVVLGGSDKLVF

SEQ ID NO: 252466 - protein, 14 aa, Homo sapiens
  CDR3 for beta chain variable domain of TCR clone 126233 (TRBV4-1, TRBJ1-2)
CASSQDGQVRGYTF

SEQ ID NO: 252467 - protein, 16 aa, Homo sapiens
  CDR3 for alpha chain variable domain of TCR clone 126234 (TRAV20, TRAJ52)
CAVLPDGGTSYGKLTF

SEQ ID NO: 252468 - protein, 12 aa, Homo sapiens
  CDR3 for beta chain variable domain of TCR clone 126234 (TRBV19, TRBJ2-1)
CASSQIRNEQFF

SEQ ID NO: 252469 - protein, 12 aa, Homo sapiens
  CDR3 for alpha chain variable domain of TCR clone 126235 (TRAV8-3, TRAJ43)
CAVGAGNNDMRF

SEQ ID NO: 252470 - protein, 14 aa, Homo sapiens
  CDR3 for beta chain variable domain of TCR clone 126235 (TRBV4-2, TRBJ1-5)
CASSRNRGNQPQHF

SEQ ID NO: 252471 - protein, 17 aa, Homo sapiens
  CDR3 for alpha chain variable domain of TCR clone 126236 (TRAV3, TRAJ38)
CAVRDCLNAGNNRKLIW

SEQ ID NO: 252472 - protein, 14 aa, Homo sapiens
  CDR3 for beta chain variable domain of TCR clone 126236 (TRBV4-1, TRBJ2-2)
CASSQAVNTGELFF

SEQ ID NO: 252473 - protein, 14 aa, Homo sapiens
  CDR3 for alpha chain variable domain of TCR clone 126237 (TRAV1-2, TRAJ8)
CAVREDTGFQKLVS

SEQ ID NO: 252474 - protein, 13 aa, Homo sapiens
  CDR3 for beta chain variable domain of TCR clone 126237 (TRBV20-1, TRBJ1-4)
CSARTPYNEKLFF

SEQ ID NO: 252475 - protein, 16 aa, Homo sapiens
  CDR3 for alpha chain variable domain of TCR clone 126238 (TRAV16, TRAJ52)
CALSAAGGTSYGKLTF

SEQ ID NO: 252476 - protein, 13 aa, Homo sapiens
  CDR3 for beta chain variable domain of TCR clone 126238 (TRBV12-4, TRBJ1-1)
CASSPGTGFEAFF

SEQ ID NO: 252477 - protein, 18 aa, Homo sapiens
  CDR3 for alpha chain variable domain of TCR clone 126239 (TRAV12-3, TRAJ52)
CAMSRTNAGGTSYGKLTF

SEQ ID NO: 252478 - protein, 17 aa, Homo sapiens
  CDR3 for beta chain variable domain of TCR clone 126239 (TRBV7-3, TRBJ2-3)
CASSLMRRMRGADTRYF

SEQ ID NO: 252479 - protein, 12 aa, Homo sapiens
  CDR3 for alpha chain variable domain of TCR clone 126240 (TRAV16, TRAJ27)
CALHHQCRQINL

SEQ ID NO: 252480 - protein, 14 aa, Homo sapiens
  CDR3 for beta chain variable domain of TCR clone 126240 (TRBV11-2, TRBJ1-5)
CASSLDRGRQPQHF

SEQ ID NO: 252481 - protein, 10 aa, Homo sapiens
  CDR3 for alpha chain variable domain of TCR clone 126241 (TRAV20, TRAJ43)
CAVQADDMRF

SEQ ID NO: 252482 - protein, 14 aa, Homo sapiens
  CDR3 for beta chain variable domain of TCR clone 126241 (TRBV7-6, TRBJ2-3)
CASSLGTVTDTQYF

SEQ ID NO: 252483 - protein, 13 aa, Homo sapiens
  CDR3 for alpha chain variable domain of TCR clone 126242 (TRAV16, TRAJ39)
CSSKNNAGNMLTF

SEQ ID NO: 252484 - protein, 16 aa, Homo sapiens
  CDR3 for beta chain variable domain of TCR clone 126242 (TRBV6-6, TRBJ2-1)
CASSYSFSGSYNEQFF

SEQ ID NO: 252485 - protein, 12 aa, Homo sapiens
  CDR3 for alpha chain variable domain of TCR clone 126243 (TRAV12-1, TRAJ40)
CVFYSGTYKYIF

SEQ ID NO: 252486 - protein, 18 aa, Homo sapiens
  CDR3 for beta chain variable domain of TCR clone 126243 (TRBV12-4, TRBJ2-2)
CASSLVAGTRGRTGELFY

SEQ ID NO: 252487 - protein, 11 aa, Homo sapiens
  CDR3 for alpha chain variable domain of TCR clone 126244 (TRAV1-2, TRAJ31)
CAVKNNARLMF

SEQ ID NO: 252488 - protein, 12 aa, Homo sapiens
  CDR3 for beta chain variable domain of TCR clone 126244 (TRBV20-1, TRBJ2-5)
CSAPRSQEAQYF

SEQ ID NO: 252489 - protein, 15 aa, Homo sapiens
  CDR3 for alpha chain variable domain of TCR clone 126245 (TRAV8-4, TRAJ37)
CAVSRGPGNTGKLIF

SEQ ID NO: 252490 - protein, 14 aa, Homo sapiens
  CDR3 for beta chain variable domain of TCR clone 126245 (TRBV7-9, TRBJ2-5)
CASSLDTAQETQYF

SEQ ID NO: 252491 - protein, 12 aa, Homo sapiens
  CDR3 for alpha chain variable domain of TCR clone 126246 (TRAV12-1, TRAJ9)
CVVPLAGFKTIF

SEQ ID NO: 252492 - protein, 14 aa, Homo sapiens
  CDR3 for beta chain variable domain of TCR clone 126246 (TRBV6-6, TRBJ2-7)
CASSYGGSSYEQYF

SEQ ID NO: 252493 - protein, 14 aa, Homo sapiens
  CDR3 for alpha chain variable domain of TCR clone 126247 (TRAV34, TRAJ44)
CGADGTGTASKLTF

SEQ ID NO: 252494 - protein, 14 aa, Homo sapiens
  CDR3 for beta chain variable domain of TCR clone 126247 (TRBV7-3, TRBJ2-1)
CASSLAGGTNEQFF

SEQ ID NO: 252495 - protein, 16 aa, Homo sapiens
  CDR3 for alpha chain variable domain of TCR clone 126248 (TRAV30, TRAJ24)
CGTEIVDADSWGKFQF

SEQ ID NO: 252496 - protein, 12 aa, Homo sapiens
  CDR3 for beta chain variable domain of TCR clone 126248 (TRBV3-1, TRBJ2-5)
CASSQRGETQYF

SEQ ID NO: 252497 - protein, 11 aa, Homo sapiens
  CDR3 for alpha chain variable domain of TCR clone 126249 (TRAV17, TRAJ49)
CATDAGNQFYF

SEQ ID NO: 252498 - protein, 16 aa, Homo sapiens
  CDR3 for beta chain variable domain of TCR clone 126249 (TRBV7-2, TRBJ1-2)
CASSPTSGTSLGGDTF

SEQ ID NO: 252499 - protein, 11 aa, Homo sapiens
  CDR3 for alpha chain variable domain of TCR clone 126250 (TRAV35, TRAJ30)
CAGLRDDKIIF

SEQ ID NO: 252500 - protein, 14 aa, Homo sapiens
  CDR3 for beta chain variable domain of TCR clone 126250 (TRBV7-2, TRBJ2-7)
CASSPKTSFYEQYF

SEQ ID NO: 252501 - protein, 15 aa, Homo sapiens
  CDR3 for alpha chain variable domain of TCR clone 126251 (TRAV38-1, TRAJ37)
CAFIFGSGNTGKLIF

SEQ ID NO: 252502 - protein, 14 aa, Homo sapiens
  CDR3 for beta chain variable domain of TCR clone 126251 (TRBV12-5, TRBJ2-5)
CASGSRTHQETQYF

SEQ ID NO: 252503 - protein, 12 aa, Homo sapiens
  CDR3 for alpha chain variable domain of TCR clone 126252 (TRAV16, TRAJ27)
CALNHQCRQINL

SEQ ID NO: 252504 - protein, 14 aa, Homo sapiens
  CDR3 for beta chain variable domain of TCR clone 126252 (TRBV11-2, TRBJ1-5)
CASSLDRGRKPQHF

SEQ ID NO: 252505 - protein, 12 aa, Homo sapiens
  CDR3 for alpha chain variable domain of TCR clone 126253 (TRAV13-1, TRAJ21)
CAAKEGFNKFYF

SEQ ID NO: 252506 - protein, 15 aa, Homo sapiens
  CDR3 for beta chain variable domain of TCR clone 126253 (TRBV7-9, TRBJ1-6)
CASSAPGRGNSPLHF

SEQ ID NO: 252507 - protein, 22 aa, Homo sapiens
  CDR3 for alpha chain variable domain of TCR clone 126254 (TRAV16, )
CALRTQIPDIQNPDPAVYQLRD

SEQ ID NO: 252508 - protein, 16 aa, Homo sapiens
  CDR3 for beta chain variable domain of TCR clone 126254 (TRBV7-2, TRBJ1-2)
CASSPNQDRRGHGYTF

SEQ ID NO: 252509 - protein, 12 aa, Homo sapiens
  CDR3 for alpha chain variable domain of TCR clone 126255 (TRAV8-6, TRAJ43)
CAVSNNNNHMRF

SEQ ID NO: 252510 - protein, 15 aa, Homo sapiens
  CDR3 for beta chain variable domain of TCR clone 126255 (TRBV7-3, TRBJ2-6)
CASSLGGSGANVLTF

SEQ ID NO: 252511 - protein, 15 aa, Homo sapiens
  CDR3 for alpha chain variable domain of TCR clone 126256 (TRAV8-3, TRAJ45)
CALSYSGGGADRLTF

SEQ ID NO: 252512 - protein, 13 aa, Homo sapiens
  CDR3 for beta chain variable domain of TCR clone 126256 (TRBV10-3, TRBJ2-7)
CASKLAVNYEQYF

SEQ ID NO: 252513 - protein, 10 aa, Homo sapiens
  CDR3 for alpha chain variable domain of TCR clone 126257 (TRAV25, TRAJ20)
CAVNDYKLSF

SEQ ID NO: 252514 - protein, 20 aa, Homo sapiens
  CDR3 for beta chain variable domain of TCR clone 126257 (TRBV7-8, TRBJ2-2)
CASSHLFPGPTIHITGELFF

SEQ ID NO: 252515 - protein, 15 aa, Homo sapiens
  CDR3 for alpha chain variable domain of TCR clone 126258 (TRAV17, TRAJ57)
CATGPSQGGSEKLVF

SEQ ID NO: 252516 - protein, 17 aa, Homo sapiens
  CDR3 for beta chain variable domain of TCR clone 126258 (TRBV11-3, TRBJ2-5)
CASSLPGVRGGKETQYF

SEQ ID NO: 252517 - protein, 13 aa, Homo sapiens
  CDR3 for alpha chain variable domain of TCR clone 126259 (TRAV12-3, TRAJ13)
CAMSSGGYQKVTF

SEQ ID NO: 252518 - protein, 14 aa, Homo sapiens
  CDR3 for beta chain variable domain of TCR clone 126259 (TRBV11-1, TRBJ1-1)
CASSLEHPNTEAFF

SEQ ID NO: 252519 - protein, 15 aa, Homo sapiens
  CDR3 for alpha chain variable domain of TCR clone 126260 (TRAV2, TRAJ24)
CAVVRLKNSWGKLQF

SEQ ID NO: 252520 - protein, 16 aa, Homo sapiens
  CDR3 for beta chain variable domain of TCR clone 126260 (TRBV7-7, TRBJ2-3)
CASSPGNSGSTDTQYF

SEQ ID NO: 252521 - protein, 15 aa, Homo sapiens
  CDR3 for alpha chain variable domain of TCR clone 126261 (TRAV12-3, TRAJ5)
CAMSGFGTGRRALTF

SEQ ID NO: 252522 - protein, 16 aa, Homo sapiens
  CDR3 for beta chain variable domain of TCR clone 126261 (TRBV20-1, TRBJ2-3)
CSARLHSAGAIDTQYF

SEQ ID NO: 252523 - protein, 13 aa, Homo sapiens
  CDR3 for alpha chain variable domain of TCR clone 126262 (TRAV2, TRAJ40)
CAVVTSGTYKYIF

SEQ ID NO: 252524 - protein, 16 aa, Homo sapiens
  CDR3 for beta chain variable domain of TCR clone 126262 (TRBV6-1, TRBJ2-1)
CASILRQGSSYNEQFF

SEQ ID NO: 252525 - protein, 16 aa, Homo sapiens
  CDR3 for alpha chain variable domain of TCR clone 126263 (TRAV1-2, TRAJ6)
CAVRDQGTGGSYISTF

SEQ ID NO: 252526 - protein, 13 aa, Homo sapiens
  CDR3 for beta chain variable domain of TCR clone 126263 (TRBV28, TRBJ2-7)
CASTPGLAGEQYF

SEQ ID NO: 252527 - protein, 14 aa, Homo sapiens
  CDR3 for alpha chain variable domain of TCR clone 126264 (TRAV1-2, TRAJ16)
CAVNRFSDGHKLLF

SEQ ID NO: 252528 - protein, 16 aa, Homo sapiens
  CDR3 for beta chain variable domain of TCR clone 126264 (TRBV29-1, TRBJ2-7)
CSVEVVGTSGSYEQYF

SEQ ID NO: 252529 - protein, 13 aa, Homo sapiens
  CDR3 for alpha chain variable domain of TCR clone 126265 (TRAV26-1, TRAJ31)
CIVRVDGNARLMF

SEQ ID NO: 252530 - protein, 17 aa, Homo sapiens
  CDR3 for beta chain variable domain of TCR clone 126265 (TRBV11-2, TRBJ2-1)
CASSLCPPGVEYNEQFF

SEQ ID NO: 252531 - protein, 10 aa, Homo sapiens
  CDR3 for alpha chain variable domain of TCR clone 126266 (TRAV1-2, TRAJ31)
CAFFRCQTHV

SEQ ID NO: 252532 - protein, 13 aa, Homo sapiens
  CDR3 for beta chain variable domain of TCR clone 126266 (TRBV7-9, TRBJ1-2)
CASSLKQNYGDTF

SEQ ID NO: 252533 - protein, 14 aa, Homo sapiens
  CDR3 for alpha chain variable domain of TCR clone 126267 (TRAV2, TRAJ37)
CAVDFTSNTGKLIF

SEQ ID NO: 252534 - protein, 16 aa, Homo sapiens
  CDR3 for beta chain variable domain of TCR clone 126267 (TRBV5-1, TRBJ2-3)
CASSPPAGGPPDTQYF

SEQ ID NO: 252535 - protein, 23 aa, Homo sapiens
  CDR3 for alpha chain variable domain of TCR clone 126268 (TRAV26-1, TRAJ38)
CIADNAGNNHIQNPDPAVYQLRD

SEQ ID NO: 252536 - protein, 13 aa, Homo sapiens
  CDR3 for beta chain variable domain of TCR clone 126268 (TRBV10-3, TRBJ2-7)
CASKLAVNYEEYF

SEQ ID NO: 252537 - protein, 17 aa, Homo sapiens
  CDR3 for alpha chain variable domain of TCR clone 126269 (TRAV35, TRAJ28)
CAGLQVYSGAGSYQLNF

SEQ ID NO: 252538 - protein, 15 aa, Homo sapiens
  CDR3 for beta chain variable domain of TCR clone 126269 (TRBV2, TRBJ1-2)
CASSEIGGANYGYTF

SEQ ID NO: 252539 - protein, 14 aa, Homo sapiens
  CDR3 for alpha chain variable domain of TCR clone 126270 (TRAV12-2, TRAJ5)
CAANRSTGRRALTL

SEQ ID NO: 252540 - protein, 12 aa, Homo sapiens
  CDR3 for beta chain variable domain of TCR clone 126270 (TRBV19, TRBJ1-5)
CASSIAQQPQHF

SEQ ID NO: 252541 - protein, 14 aa, Homo sapiens
  CDR3 for alpha chain variable domain of TCR clone 126271 (TRAV12-2, TRAJ17)
CAVLFKAAGNKLTF

SEQ ID NO: 252542 - protein, 14 aa, Homo sapiens
  CDR3 for beta chain variable domain of TCR clone 126271 (TRBV19, TRBJ2-7)
CASSMGQGAIEQYF

SEQ ID NO: 252543 - protein, 11 aa, Homo sapiens
  CDR3 for alpha chain variable domain of TCR clone 126272 (TRAV1-2, TRAJ40)
CAVPGTYTYIF

SEQ ID NO: 252544 - protein, 16 aa, Homo sapiens
  CDR3 for beta chain variable domain of TCR clone 126272 (TRBV7-3, TRBJ2-2)
CASSLKRGTLSGELFF

SEQ ID NO: 252545 - protein, 18 aa, Homo sapiens
  CDR3 for alpha chain variable domain of TCR clone 126273 (TRAV26-1, TRAJ37)
CIVRVDMHGSSNTGKIIF

SEQ ID NO: 252546 - protein, 15 aa, Homo sapiens
  CDR3 for beta chain variable domain of TCR clone 126273 (TRBV20-1, TRBJ2-7)
CSARVLASPLYEQYF

SEQ ID NO: 252547 - protein, 11 aa, Homo sapiens
  CDR3 for alpha chain variable domain of TCR clone 126274 (TRAV3, TRAJ21)
CAVGNFNKFYF

SEQ ID NO: 252548 - protein, 13 aa, Homo sapiens
  CDR3 for beta chain variable domain of TCR clone 126274 (TRBV19, TRBJ1-2)
CASSVPGQDGYAF

SEQ ID NO: 252549 - protein, 11 aa, Homo sapiens
  CDR3 for alpha chain variable domain of TCR clone 126275 (TRAV35, TRAJ34)
CWAMNTDKLIF

SEQ ID NO: 252550 - protein, 14 aa, Homo sapiens
  CDR3 for beta chain variable domain of TCR clone 126275 (TRBV5-1, TRBJ2-7)
CASSRGESLYEQYF

SEQ ID NO: 252551 - protein, 12 aa, Homo sapiens
  CDR3 for alpha chain variable domain of TCR clone 126276 (TRAV8-3, TRAJ20)
CAVDFNDYKLGF

SEQ ID NO: 252552 - protein, 13 aa, Homo sapiens
  CDR3 for beta chain variable domain of TCR clone 126276 (TRBV5-7, TRBJ2-3)
CASSLGRTDTQYF

SEQ ID NO: 252553 - protein, 14 aa, Homo sapiens
  CDR3 for alpha chain variable domain of TCR clone 126277 (TRAV17, TRAJ45)
CATASGGCADGLTF

SEQ ID NO: 252554 - protein, 15 aa, Homo sapiens
  CDR3 for beta chain variable domain of TCR clone 126277 (TRBV11-2, TRBJ2-1)
CASSRNRGLMYEQFF

SEQ ID NO: 252555 - protein, 14 aa, Homo sapiens
  CDR3 for alpha chain variable domain of TCR clone 126278 (TRAV1-2, TRAJ8)
CAVREDTGFQKLVF

SEQ ID NO: 252556 - protein, 15 aa, Homo sapiens
  CDR3 for beta chain variable domain of TCR clone 126278 (TRBV3-1, TRBJ1-2)
CASSHPGTPGYGYTF

SEQ ID NO: 252557 - protein, 10 aa, Homo sapiens
  CDR3 for alpha chain variable domain of TCR clone 126279 (TRAV8-1, TRAJ21)
CAVNGTKFYF

SEQ ID NO: 252558 - protein, 16 aa, Homo sapiens
  CDR3 for beta chain variable domain of TCR clone 126279 (TRBV7-2, TRBJ1-5)
CASSPWGPEGNRPQHF

SEQ ID NO: 252559 - protein, 13 aa, Homo sapiens
  CDR3 for alpha chain variable domain of TCR clone 126280 (TRAV1-2, TRAJ9)
CAALNIGGFKTIF

SEQ ID NO: 252560 - protein, 13 aa, Homo sapiens
  CDR3 for beta chain variable domain of TCR clone 126280 (TRBV10-3, TRBJ1-2)
CAISERDSYGYTF

SEQ ID NO: 252561 - protein, 12 aa, Homo sapiens
  CDR3 for alpha chain variable domain of TCR clone 126281 (TRAV3, TRAJ17)
CAVKAAGNKLTF

SEQ ID NO: 252562 - protein, 15 aa, Homo sapiens
  CDR3 for beta chain variable domain of TCR clone 126281 (TRBV3-1, TRBJ2-1)
CASSQVVDDGEEQFF

SEQ ID NO: 252563 - protein, 14 aa, Homo sapiens
  CDR3 for alpha chain variable domain of TCR clone 126282 (TRAV1-2, TRAJ8)
CAVREDTGFQKLVF

SEQ ID NO: 252564 - protein, 14 aa, Homo sapiens
  CDR3 for beta chain variable domain of TCR clone 126282 (TRBV6-3, TRBJ2-7)
CASSYLQQGGEQYF

SEQ ID NO: 252565 - protein, 15 aa, Homo sapiens
  CDR3 for alpha chain variable domain of TCR clone 126283 (TRAV23/DV6, TRAJ18)
CAARYRGSTLGRLYF

SEQ ID NO: 252566 - protein, 14 aa, Homo sapiens
  CDR3 for beta chain variable domain of TCR clone 126283 (TRBV4-2, TRBJ2-1)
CASGLDRAYNEQFF

SEQ ID NO: 252567 - protein, 16 aa, Homo sapiens
  CDR3 for alpha chain variable domain of TCR clone 126284 (TRAV21, TRAJ17)
CAVRPGEEAAGNKLTF

SEQ ID NO: 252568 - protein, 16 aa, Homo sapiens
  CDR3 for beta chain variable domain of TCR clone 126284 (TRBV2, TRBJ2-7)
CASSEPWTGPAYEQYF

SEQ ID NO: 252569 - protein, 13 aa, Homo sapiens
  CDR3 for alpha chain variable domain of TCR clone 126285 (TRAV2, TRAJ15)
CAAASQAGTALIF

SEQ ID NO: 252570 - protein, 17 aa, Homo sapiens
  CDR3 for beta chain variable domain of TCR clone 126285 (TRBV20-1, TRBJ2-2)
CSAGGSGQGGLTGELFF

SEQ ID NO: 252571 - protein, 16 aa, Homo sapiens
  CDR3 for alpha chain variable domain of TCR clone 126286 (TRAV3, TRAJ10)
CAVRDMRAGGGNKLTF

SEQ ID NO: 252572 - protein, 13 aa, Homo sapiens
  CDR3 for beta chain variable domain of TCR clone 126286 (TRBV4-1, TRBJ2-2)
CASSQENTGELFF

SEQ ID NO: 252573 - protein, 13 aa, Homo sapiens
  CDR3 for alpha chain variable domain of TCR clone 126287 (TRAV1-2, TRAJ9)
CSALNTGGFKTIF

SEQ ID NO: 252574 - protein, 13 aa, Homo sapiens
  CDR3 for beta chain variable domain of TCR clone 126287 (TRBV15, TRBJ1-6)
CATSGGLNSPLHF

SEQ ID NO: 252575 - protein, 10 aa, Homo sapiens
  CDR3 for alpha chain variable domain of TCR clone 126288 (TRAV21, TRAJ31)
CAVENARLMF

SEQ ID NO: 252576 - protein, 13 aa, Homo sapiens
  CDR3 for beta chain variable domain of TCR clone 126288 (TRBV4-1, TRBJ1-1)
CASSRKMNTEAFF

SEQ ID NO: 252577 - protein, 11 aa, Homo sapiens
  CDR3 for alpha chain variable domain of TCR clone 126289 (TRAV13-1, TRAJ43)
CAASGANDMRF

SEQ ID NO: 252578 - protein, 14 aa, Homo sapiens
  CDR3 for beta chain variable domain of TCR clone 126289 (TRBV4-1, TRBJ1-1)
CSSSPPGVNTEAFF

SEQ ID NO: 252579 - protein, 13 aa, Homo sapiens
  CDR3 for alpha chain variable domain of TCR clone 126290 (TRAV8-6, TRAJ32)
LARYGGATNKLIF

SEQ ID NO: 252580 - protein, 13 aa, Homo sapiens
  CDR3 for beta chain variable domain of TCR clone 126290 (TRBV11-2, TRBJ2-5)
CASGHGAKETQYF

SEQ ID NO: 252581 - protein, 17 aa, Homo sapiens
  CDR3 for alpha chain variable domain of TCR clone 126291 (TRAV3, TRAJ42)
CAVRDRVYGGSQGNLIF

SEQ ID NO: 252582 - protein, 12 aa, Homo sapiens
  CDR3 for beta chain variable domain of TCR clone 126291 (TRBV11-2, TRBJ2-1)
CASSPGNNEQFF

SEQ ID NO: 252583 - protein, 16 aa, Homo sapiens
  CDR3 for alpha chain variable domain of TCR clone 126292 (TRAV30, TRAJ24)
CGTEIVDADSWGKFQF

SEQ ID NO: 252584 - protein, 14 aa, Homo sapiens
  CDR3 for beta chain variable domain of TCR clone 126292 (TRBV7-3, TRBJ2-2)
CASSRRPVGTELFF

SEQ ID NO: 252585 - protein, 17 aa, Homo sapiens
  CDR3 for alpha chain variable domain of TCR clone 126293 (TRAV13-1, )
CAANIQNPDPAVYQLRD

SEQ ID NO: 252586 - protein, 15 aa, Homo sapiens
  CDR3 for beta chain variable domain of TCR clone 126293 (TRBV2, TRBJ2-3)
CASSDFEKATDTQYF

SEQ ID NO: 252587 - protein, 14 aa, Homo sapiens
  CDR3 for alpha chain variable domain of TCR clone 126294 (TRAV17, TRAJ37)
CATDGSSNTGKLIF

SEQ ID NO: 252588 - protein, 13 aa, Homo sapiens
  CDR3 for beta chain variable domain of TCR clone 126294 (TRBV7-3, TRBJ1-1)
CASSQDWGAEAFF

SEQ ID NO: 252589 - protein, 15 aa, Homo sapiens
  CDR3 for alpha chain variable domain of TCR clone 126295 (TRAV12-3, TRAJ6)
CAMSATTGGSYIPTF

SEQ ID NO: 252590 - protein, 16 aa, Homo sapiens
  CDR3 for beta chain variable domain of TCR clone 126295 (TRBV10-3, TRBJ2-1)
CAIRGGGRGDYNEQFF

SEQ ID NO: 252591 - protein, 15 aa, Homo sapiens
  CDR3 for alpha chain variable domain of TCR clone 126296 (TRAV12-1, TRAJ44)
CVVSVNTGTASKLTF

SEQ ID NO: 252592 - protein, 17 aa, Homo sapiens
  CDR3 for beta chain variable domain of TCR clone 126296 (TRBV7-8, TRBJ2-6)
CANSAGTGGAGANVLTF

SEQ ID NO: 252593 - protein, 11 aa, Homo sapiens
  CDR3 for alpha chain variable domain of TCR clone 126297 (TRAV2, TRAJ33)
CAVESNYQLIW

SEQ ID NO: 252594 - protein, 15 aa, Homo sapiens
  CDR3 for beta chain variable domain of TCR clone 126297 (TRBV28, TRBJ2-7)
CASSPGGRGFYEQYF

SEQ ID NO: 252595 - protein, 16 aa, Homo sapiens
  CDR3 for alpha chain variable domain of TCR clone 126298 (TRAV30, TRAJ24)
CGTEIVDADSWGKFQF

SEQ ID NO: 252596 - protein, 15 aa, Homo sapiens
  CDR3 for beta chain variable domain of TCR clone 126298 (TRBV7-6, TRBJ2-5)
CASSKPTGPQETQYF

SEQ ID NO: 252597 - protein, 17 aa, Homo sapiens
  CDR3 for alpha chain variable domain of TCR clone 126299 (TRAV8-2, )
CVVNIQNPGPAVYQLRD

SEQ ID NO: 252598 - protein, 14 aa, Homo sapiens
  CDR3 for beta chain variable domain of TCR clone 126299 (TRBV7-9, TRBJ2-5)
CASSLVGGEETQYF

SEQ ID NO: 252599 - protein, 12 aa, Homo sapiens
  CDR3 for alpha chain variable domain of TCR clone 126300 (TRAV8-3, TRAJ26)
CAGDNYGQKFVF

SEQ ID NO: 252600 - protein, 11 aa, Homo sapiens
  CDR3 for beta chain variable domain of TCR clone 126300 (TRBV19, TRBJ1-1)
CASSIGSEAFF

SEQ ID NO: 252601 - protein, 12 aa, Homo sapiens
  CDR3 for alpha chain variable domain of TCR clone 126301 (TRAV16, TRAJ27)
CALNHQCRQINL

SEQ ID NO: 252602 - protein, 17 aa, Homo sapiens
  CDR3 for beta chain variable domain of TCR clone 126301 (TRBV4-1, TRBJ2-7)
CASSRDPMGVRGGEQYF

SEQ ID NO: 252603 - protein, 12 aa, Homo sapiens
  CDR3 for alpha chain variable domain of TCR clone 126302 (TRAV8-3, TRAJ20)
CAVGANDYKLSF

SEQ ID NO: 252604 - protein, 16 aa, Homo sapiens
  CDR3 for beta chain variable domain of TCR clone 126302 (TRBV15, TRBJ1-2)
CATSRGPRTGGGGYTF

SEQ ID NO: 252605 - protein, 15 aa, Homo sapiens
  CDR3 for alpha chain variable domain of TCR clone 126303 (TRAV3, TRAJ5)
CAVRDLATGRRALTF

SEQ ID NO: 252606 - protein, 16 aa, Homo sapiens
  CDR3 for beta chain variable domain of TCR clone 126303 (TRBV20-1, TRBJ1-2)
CSASMGQGVANYGYTF

SEQ ID NO: 252607 - protein, 15 aa, Homo sapiens
  CDR3 for alpha chain variable domain of TCR clone 126304 (TRAV27, TRAJ38)
CAARRNAGNNRKLIW

SEQ ID NO: 252608 - protein, 17 aa, Homo sapiens
  CDR3 for beta chain variable domain of TCR clone 126304 (TRBV13, TRBJ2-3)
CASSPSRVAGGRNTQYF

SEQ ID NO: 252609 - protein, 16 aa, Homo sapiens
  CDR3 for alpha chain variable domain of TCR clone 126305 (TRAV16, TRAJ42)
CARKMNHGGSQGNLIF

SEQ ID NO: 252610 - protein, 14 aa, Homo sapiens
  CDR3 for beta chain variable domain of TCR clone 126305 (TRBV14, TRBJ2-3)
CQQPDDRDTDTQYF

SEQ ID NO: 252611 - protein, 12 aa, Homo sapiens
  CDR3 for alpha chain variable domain of TCR clone 126306 (TRAV20, TRAJ37)
CALPSNTGILIF

SEQ ID NO: 252612 - protein, 14 aa, Homo sapiens
  CDR3 for beta chain variable domain of TCR clone 126306 (TRBV19, TRBJ2-1)
CASPTFVLSGEQFF

SEQ ID NO: 252613 - protein, 16 aa, Homo sapiens
  CDR3 for alpha chain variable domain of TCR clone 126307 (TRAV16, TRAJ4)
CALSRMFSGGYNKLIF

SEQ ID NO: 252614 - protein, 15 aa, Homo sapiens
  CDR3 for beta chain variable domain of TCR clone 126307 (TRBV13, TRBJ1-2)
CASSLGRQPGYGYTF

SEQ ID NO: 252615 - protein, 14 aa, Homo sapiens
  CDR3 for alpha chain variable domain of TCR clone 126308 (TRAV20, TRAJ20)
CAVRRGYNDYKLRF

SEQ ID NO: 252616 - protein, 13 aa, Homo sapiens
  CDR3 for beta chain variable domain of TCR clone 126308 (TRBV19, TRBJ2-5)
CASSETAPETQYF

SEQ ID NO: 252617 - protein, 13 aa, Homo sapiens
  CDR3 for alpha chain variable domain of TCR clone 126309 (TRAV12-2, TRAJ6)
CAVNVSRKLHTYI

SEQ ID NO: 252618 - protein, 15 aa, Homo sapiens
  CDR3 for beta chain variable domain of TCR clone 126309 (TRBV19, TRBJ2-1)
CASSIGLAGWDEQFF

SEQ ID NO: 252619 - protein, 12 aa, Homo sapiens
  CDR3 for alpha chain variable domain of TCR clone 126310 (TRAV8-3, TRAJ26)
CAGDNYGQNFVF

SEQ ID NO: 252620 - protein, 16 aa, Homo sapiens
  CDR3 for beta chain variable domain of TCR clone 126310 (TRBV9, TRBJ2-1)
CASSVGGGGNYNEQFF

SEQ ID NO: 252621 - protein, 14 aa, Homo sapiens
  CDR3 for alpha chain variable domain of TCR clone 126311 (TRAV12-3, TRAJ10)
SHLPLTGGGNKLTF

SEQ ID NO: 252622 - protein, 15 aa, Homo sapiens
  CDR3 for beta chain variable domain of TCR clone 126311 (TRBV11-2, TRBJ2-2)
CASRGLAANTGELFF

SEQ ID NO: 252623 - protein, 15 aa, Homo sapiens
  CDR3 for alpha chain variable domain of TCR clone 126312 (TRAV12-1, TRAJ43)
CVVNRGRYNNNDMRF

SEQ ID NO: 252624 - protein, 11 aa, Homo sapiens
  CDR3 for beta chain variable domain of TCR clone 126312 (TRBV2, TRBJ2-2)
CASSPYGELFF

SEQ ID NO: 252625 - protein, 14 aa, Homo sapiens
  CDR3 for alpha chain variable domain of TCR clone 126313 (TRAV12-2, TRAJ13)
CAVKKTGGYQKVTF

SEQ ID NO: 252626 - protein, 14 aa, Homo sapiens
  CDR3 for beta chain variable domain of TCR clone 126313 (TRBV5-5, TRBJ2-7)
CASSLGQGTYEHYF

SEQ ID NO: 252627 - protein, 11 aa, Homo sapiens
  CDR3 for alpha chain variable domain of TCR clone 126314 (TRAV17, TRAJ49)
CATDAGNQFYF

SEQ ID NO: 252628 - protein, 17 aa, Homo sapiens
  CDR3 for beta chain variable domain of TCR clone 126314 (TRBV19, TRBJ2-7)
CASSISFYDSYPYEQYF

SEQ ID NO: 252629 - protein, 15 aa, Homo sapiens
  CDR3 for alpha chain variable domain of TCR clone 126315 (TRAV8-3, TRAJ45)
CASSYSGGGADGLTF

SEQ ID NO: 252630 - protein, 17 aa, Homo sapiens
  CDR3 for beta chain variable domain of TCR clone 126315 (TRBV7-8, TRBJ1-2)
CASSLRPLQGYLYGYTF

SEQ ID NO: 252631 - protein, 16 aa, Homo sapiens
  CDR3 for alpha chain variable domain of TCR clone 126316 (TRAV14/DV4, TRAJ53)
CAMREGGGGSNYKLTF

SEQ ID NO: 252632 - protein, 16 aa, Homo sapiens
  CDR3 for beta chain variable domain of TCR clone 126316 (TRBV12-4, TRBJ2-5)
CASSFFVRGRQETQYF

SEQ ID NO: 252633 - protein, 14 aa, Homo sapiens
  CDR3 for alpha chain variable domain of TCR clone 126317 (TRAV1-1, TRAJ27)
CAVIYNTNAGKSTF

SEQ ID NO: 252634 - protein, 14 aa, Homo sapiens
  CDR3 for beta chain variable domain of TCR clone 126317 (TRBV25-1, TRBJ1-1)
CAGTHLGGNTEAFF

SEQ ID NO: 252635 - protein, 13 aa, Homo sapiens
  CDR3 for alpha chain variable domain of TCR clone 126318 (TRAV12-1, TRAJ11)
CVVNIGGYSTLTF

SEQ ID NO: 252636 - protein, 13 aa, Homo sapiens
  CDR3 for beta chain variable domain of TCR clone 126318 (TRBV19, TRBJ1-2)
CASSQGQVYGYTF

SEQ ID NO: 252637 - protein, 11 aa, Homo sapiens
  CDR3 for alpha chain variable domain of TCR clone 126319 (TRAV17, TRAJ9)
CATTGGFKTIF

SEQ ID NO: 252638 - protein, 11 aa, Homo sapiens
  CDR3 for beta chain variable domain of TCR clone 126319 (TRBV7-2, TRBJ2-3)
CASSSSDTQYF

SEQ ID NO: 252639 - protein, 12 aa, Homo sapiens
  CDR3 for alpha chain variable domain of TCR clone 126320 (TRAV13-1, TRAJ8)
CAALTGFQKLVF

SEQ ID NO: 252640 - protein, 18 aa, Homo sapiens
  CDR3 for beta chain variable domain of TCR clone 126320 (TRBV11-2, TRBJ2-3)
CASSLGGASRGAPNTQYF

SEQ ID NO: 252641 - protein, 17 aa, Homo sapiens
  CDR3 for alpha chain variable domain of TCR clone 126321 (TRAV14/DV4, TRAJ32)
CAMRERSFGGATNKLIF

SEQ ID NO: 252642 - protein, 17 aa, Homo sapiens
  CDR3 for beta chain variable domain of TCR clone 126321 (TRBV19, TRBJ2-6)
CASSTGQVFSGANVLTF

SEQ ID NO: 252643 - protein, 14 aa, Homo sapiens
  CDR3 for alpha chain variable domain of TCR clone 126322 (TRAV8-4, TRAJ17)
CAVSDQAAGTKLTF

SEQ ID NO: 252644 - protein, 15 aa, Homo sapiens
  CDR3 for beta chain variable domain of TCR clone 126322 (TRBV7-2, TRBJ1-2)
CASSLAPDRGLGYTF

SEQ ID NO: 252645 - protein, 13 aa, Homo sapiens
  CDR3 for alpha chain variable domain of TCR clone 126323 (TRAV26-1, TRAJ40)
CIVATSGAYKYIF

SEQ ID NO: 252646 - protein, 16 aa, Homo sapiens
  CDR3 for beta chain variable domain of TCR clone 126323 (TRBV7-2, TRBJ2-2)
CASSLYRGPNTGELFF

SEQ ID NO: 252647 - protein, 12 aa, Homo sapiens
  CDR3 for alpha chain variable domain of TCR clone 126324 (TRAV13-1, TRAJ21)
CAAKEGFNNFYF

SEQ ID NO: 252648 - protein, 14 aa, Homo sapiens
  CDR3 for beta chain variable domain of TCR clone 126324 (TRBV23-1, TRBJ2-5)
CASSFLRSQETQYF

SEQ ID NO: 252649 - protein, 17 aa, Homo sapiens
  CDR3 for alpha chain variable domain of TCR clone 126325 (TRAV3, TRAJ6)
CAVRDGPRAGGSYMPTF

SEQ ID NO: 252650 - protein, 15 aa, Homo sapiens
  CDR3 for beta chain variable domain of TCR clone 126325 (TRBV20-1, TRBJ1-1)
CSASWDRFLNTEAFF

SEQ ID NO: 252651 - protein, 15 aa, Homo sapiens
  CDR3 for alpha chain variable domain of TCR clone 126326 (TRAV1-2, TRAJ30)
CAVRPHGNRDDKIIF

SEQ ID NO: 252652 - protein, 13 aa, Homo sapiens
  CDR3 for beta chain variable domain of TCR clone 126326 (TRBV19, TRBJ1-2)
CASSVPGQDGYTF

SEQ ID NO: 252653 - protein, 11 aa, Homo sapiens
  CDR3 for alpha chain variable domain of TCR clone 126327 (TRAV35, TRAJ34)
CWARNTDMLIF

SEQ ID NO: 252654 - protein, 13 aa, Homo sapiens
  CDR3 for beta chain variable domain of TCR clone 126327 (TRBV19, TRBJ2-7)
CASSIDRTYEQYF

SEQ ID NO: 252655 - protein, 12 aa, Homo sapiens
  CDR3 for alpha chain variable domain of TCR clone 126328 (TRAV26-2, TRAJ21)
CILKGDFNKFYF

SEQ ID NO: 252656 - protein, 12 aa, Homo sapiens
  CDR3 for beta chain variable domain of TCR clone 126328 (TRBV12-4, TRBJ2-7)
CASSLGGYEQYF

SEQ ID NO: 252657 - protein, 11 aa, Homo sapiens
  CDR3 for alpha chain variable domain of TCR clone 126329 (TRAV3, TRAJ21)
CAVGNFNKFYF

SEQ ID NO: 252658 - protein, 12 aa, Homo sapiens
  CDR3 for beta chain variable domain of TCR clone 126329 (TRBV29-1, TRBJ2-3)
CSVTGGADTHYF

SEQ ID NO: 252659 - protein, 13 aa, Homo sapiens
  CDR3 for alpha chain variable domain of TCR clone 126330 (TRAV13-1, TRAJ6)
CARGAGGSYIPTF

SEQ ID NO: 252660 - protein, 17 aa, Homo sapiens
  CDR3 for beta chain variable domain of TCR clone 126330 (TRBV7-8, TRBJ2-1)
CASSPPTGTLAYNEQFF

SEQ ID NO: 252661 - protein, 16 aa, Homo sapiens
  CDR3 for alpha chain variable domain of TCR clone 126331 (TRAV16, TRAJ4)
CITVLPFSGGYNKLLF

SEQ ID NO: 252662 - protein, 14 aa, Homo sapiens
  CDR3 for beta chain variable domain of TCR clone 126331 (TRBV19, TRBJ2-7)
CASSMGQGAIEQYF

SEQ ID NO: 252663 - protein, 12 aa, Homo sapiens
  CDR3 for alpha chain variable domain of TCR clone 126332 (TRAV12-3, TRAJ17)
CAMTLTGNKLTF

SEQ ID NO: 252664 - protein, 16 aa, Homo sapiens
  CDR3 for beta chain variable domain of TCR clone 126332 (TRBV7-2, TRBJ2-7)
CASSLVMGVGSYEQYF

SEQ ID NO: 252665 - protein, 16 aa, Homo sapiens
  CDR3 for alpha chain variable domain of TCR clone 126333 (TRAV3, TRAJ10)
CAVRDIRAGGGNKLTF

SEQ ID NO: 252666 - protein, 14 aa, Homo sapiens
  CDR3 for beta chain variable domain of TCR clone 126333 (TRBV7-2, TRBJ1-4)
CASSVVEGGEKLFF

SEQ ID NO: 252667 - protein, 12 aa, Homo sapiens
  CDR3 for alpha chain variable domain of TCR clone 126334 (TRAV12-3, TRAJ17)
CAMTLTGNKLTF

SEQ ID NO: 252668 - protein, 13 aa, Homo sapiens
  CDR3 for beta chain variable domain of TCR clone 126334 (TRBV5-1, TRBJ1-1)
CASSVDWDTEAFF

SEQ ID NO: 252669 - protein, 14 aa, Homo sapiens
  CDR3 for alpha chain variable domain of TCR clone 126335 (TRAV13-2, TRAJ17)
CAENAKAAGNKLTF

SEQ ID NO: 252670 - protein, 11 aa, Homo sapiens
  CDR3 for beta chain variable domain of TCR clone 126335 (TRBV6-3, TRBJ2-3)
CATGQADTQYF

SEQ ID NO: 252671 - protein, 18 aa, Homo sapiens
  CDR3 for alpha chain variable domain of TCR clone 126336 (TRAV12-3, TRAJ52)
CAMSVGGAGGTSYGKLTF

SEQ ID NO: 252672 - protein, 16 aa, Homo sapiens
  CDR3 for beta chain variable domain of TCR clone 126336 (TRBV15, TRBJ2-7)
CATSARQARSSYEQYF

SEQ ID NO: 252673 - protein, 14 aa, Homo sapiens
  CDR3 for alpha chain variable domain of TCR clone 126337 (TRAV12-1, TRAJ33)
CVVNPEDSNYQLIW

SEQ ID NO: 252674 - protein, 11 aa, Homo sapiens
  CDR3 for beta chain variable domain of TCR clone 126337 (TRBV7-6, TRBJ2-1)
CACSNYGEQFF

SEQ ID NO: 252675 - protein, 13 aa, Homo sapiens
  CDR3 for alpha chain variable domain of TCR clone 126338 (TRAV26-1, TRAJ29)
CIVRRSGNTPLVF

SEQ ID NO: 252676 - protein, 16 aa, Homo sapiens
  CDR3 for beta chain variable domain of TCR clone 126338 (TRBV7-3, TRBJ2-2)
CASSLKRGTLSGELFF

SEQ ID NO: 252677 - protein, 14 aa, Homo sapiens
  CDR3 for alpha chain variable domain of TCR clone 126339 (TRAV12-1, TRAJ37)
CVVTGSSTTGKLIF

SEQ ID NO: 252678 - protein, 20 aa, Homo sapiens
  CDR3 for beta chain variable domain of TCR clone 126339 (TRBV23-1, TRBJ2-5)
CISAPAVPERVLLIQETQYF

SEQ ID NO: 252679 - protein, 13 aa, Homo sapiens
  CDR3 for alpha chain variable domain of TCR clone 126340 (TRAV12-3, TRAJ34)
CAVRGYNTDKLIF

SEQ ID NO: 252680 - protein, 13 aa, Homo sapiens
  CDR3 for beta chain variable domain of TCR clone 126340 (TRBV29-1, TRBJ2-1)
CSVEGGRVNEQFF

SEQ ID NO: 252681 - protein, 15 aa, Homo sapiens
  CDR3 for alpha chain variable domain of TCR clone 126341 (TRAV13-1, TRAJ10)
CAATILTGGGNKLTF

SEQ ID NO: 252682 - protein, 15 aa, Homo sapiens
  CDR3 for beta chain variable domain of TCR clone 126341 (TRBV2, TRBJ2-7)
CACTLLGSGATEQYF

SEQ ID NO: 252683 - protein, 13 aa, Homo sapiens
  CDR3 for alpha chain variable domain of TCR clone 126342 (TRAV3, TRAJ29)
CAVRDIIDTPLVF

SEQ ID NO: 252684 - protein, 14 aa, Homo sapiens
  CDR3 for beta chain variable domain of TCR clone 126342 (TRBV27, TRBJ2-1)
CASSATGGYNEQFL

SEQ ID NO: 252685 - protein, 21 aa, Homo sapiens
  CDR3 for alpha chain variable domain of TCR clone 126343 (TRAV21, TRAJ41)
SLVTQPPTSVLCENSGYALNF

SEQ ID NO: 252686 - protein, 15 aa, Homo sapiens
  CDR3 for beta chain variable domain of TCR clone 126343 (TRBV18, TRBJ1-5)
CASSPQARSNQPQHF

SEQ ID NO: 252687 - protein, 15 aa, Homo sapiens
  CDR3 for alpha chain variable domain of TCR clone 126344 (TRAV8-4, TRAJ9)
CAVSDLEGGGFKTIF

SEQ ID NO: 252688 - protein, 14 aa, Homo sapiens
  CDR3 for beta chain variable domain of TCR clone 126344 (TRBV7-2, TRBJ2-7)
RASSGLAGRGEQYF

SEQ ID NO: 252689 - protein, 13 aa, Homo sapiens
  CDR3 for alpha chain variable domain of TCR clone 126345 (TRAV3, TRAJ3)
CAVADSSASKIIF

SEQ ID NO: 252690 - protein, 13 aa, Homo sapiens
  CDR3 for beta chain variable domain of TCR clone 126345 (TRBV27, TRBJ2-7)
CASSLTTGYEQYF

SEQ ID NO: 252691 - protein, 13 aa, Homo sapiens
  CDR3 for alpha chain variable domain of TCR clone 126346 (TRAV17, TRAJ29)
CATDAFRKHTSCL

SEQ ID NO: 252692 - protein, 13 aa, Homo sapiens
  CDR3 for beta chain variable domain of TCR clone 126346 (TRBV7-9, TRBJ1-2)
CASSLKQNYGYTF

SEQ ID NO: 252693 - protein, 16 aa, Homo sapiens
  CDR3 for alpha chain variable domain of TCR clone 126347 (TRAV38-1, TRAJ22)
CAFMAISSGSARQLTF

SEQ ID NO: 252694 - protein, 15 aa, Homo sapiens
  CDR3 for beta chain variable domain of TCR clone 126347 (TRBV4-1, TRBJ1-4)
CASSDTGGTNEKLFF

SEQ ID NO: 252695 - protein, 17 aa, Homo sapiens
  CDR3 for alpha chain variable domain of TCR clone 126348 (TRAV3, TRAJ13)
CAVRGMRRTGGYQKVTF

SEQ ID NO: 252696 - protein, 14 aa, Homo sapiens
  CDR3 for beta chain variable domain of TCR clone 126348 (TRBV5-1, TRBJ2-7)
CASSLTGSGYEQYF

SEQ ID NO: 252697 - protein, 18 aa, Homo sapiens
  CDR3 for alpha chain variable domain of TCR clone 126349 (TRAV26-2, TRAJ33)
CCVLLHPEEPASNYQLIW

SEQ ID NO: 252698 - protein, 13 aa, Homo sapiens
  CDR3 for beta chain variable domain of TCR clone 126349 (TRBV24-1, TRBJ2-2)
CATSDWPTGELFF

SEQ ID NO: 252699 - protein, 18 aa, Homo sapiens
  CDR3 for alpha chain variable domain of TCR clone 126350 (TRAV21, TRAJ52)
CAVRPSPAGGTSYGKLTF

SEQ ID NO: 252700 - protein, 16 aa, Homo sapiens
  CDR3 for beta chain variable domain of TCR clone 126350 (TRBV10-3, TRBJ1-1)
CAISTGFPAMNTEAFF

SEQ ID NO: 252701 - protein, 14 aa, Homo sapiens
  CDR3 for alpha chain variable domain of TCR clone 126351 (TRAV8-3, TRAJ33)
CAVCPLGGNYQLIW

SEQ ID NO: 252702 - protein, 12 aa, Homo sapiens
  CDR3 for beta chain variable domain of TCR clone 126351 (TRBV19, TRBJ2-3)
CATTSSTDTQYF

SEQ ID NO: 252703 - protein, 15 aa, Homo sapiens
  CDR3 for alpha chain variable domain of TCR clone 126352 (TRAV27, TRAJ38)
CAARRNAGNNRKLIW

SEQ ID NO: 252704 - protein, 14 aa, Homo sapiens
  CDR3 for beta chain variable domain of TCR clone 126352 (TRBV7-9, TRBJ2-3)
CASSLEDGTDTQYF

SEQ ID NO: 252705 - protein, 14 aa, Homo sapiens
  CDR3 for alpha chain variable domain of TCR clone 126353 (TRAV13-1, TRAJ44)
CAAKATGTASKLTF

SEQ ID NO: 252706 - protein, 15 aa, Homo sapiens
  CDR3 for beta chain variable domain of TCR clone 126353 (TRBV7-9, TRBJ1-2)
CASSLDREPNYGYTF

SEQ ID NO: 252707 - protein, 20 aa, Homo sapiens
  CDR3 for alpha chain variable domain of TCR clone 126354 (TRAV8-3, TRAJ45)
LSTSVLWGSYSGGGSDGLTF

SEQ ID NO: 252708 - protein, 11 aa, Homo sapiens
  CDR3 for beta chain variable domain of TCR clone 126354 (TRBV20-1, TRBJ2-5)
CSADRAETQYF

SEQ ID NO: 252709 - protein, 13 aa, Homo sapiens
  CDR3 for alpha chain variable domain of TCR clone 126355 (TRAV3, TRAJ26)
CAVSRGYGQNFVF

SEQ ID NO: 252710 - protein, 14 aa, Homo sapiens
  CDR3 for beta chain variable domain of TCR clone 126355 (TRBV18, TRBJ2-5)
CASSPGVSQETQYF

SEQ ID NO: 252711 - protein, 14 aa, Homo sapiens
  CDR3 for alpha chain variable domain of TCR clone 126356 (TRAV8-3, TRAJ13)
RAVGAQEGYQKVTF

SEQ ID NO: 252712 - protein, 13 aa, Homo sapiens
  CDR3 for beta chain variable domain of TCR clone 126356 (TRBV11-2, TRBJ2-5)
CASSSTGEEAQYF

SEQ ID NO: 252713 - protein, 15 aa, Homo sapiens
  CDR3 for alpha chain variable domain of TCR clone 126357 (TRAV12-2, TRAJ53)
CAVNGGGGSNYKLTF

SEQ ID NO: 252714 - protein, 13 aa, Homo sapiens
  CDR3 for beta chain variable domain of TCR clone 126357 (TRBV7-6, TRBJ1-2)
CASSLVADYGYTF

SEQ ID NO: 252715 - protein, 12 aa, Homo sapiens
  CDR3 for alpha chain variable domain of TCR clone 126358 (TRAV13-1, TRAJ43)
CAAGRFNNDMRF

SEQ ID NO: 252716 - protein, 14 aa, Homo sapiens
  CDR3 for beta chain variable domain of TCR clone 126358 (TRBV7-8, TRBJ2-3)
CASSLEAGTDTQYF

SEQ ID NO: 252717 - protein, 15 aa, Homo sapiens
  CDR3 for alpha chain variable domain of TCR clone 126359 (TRAV17, TRAJ45)
TSVLRTGGGSDGLTF

SEQ ID NO: 252718 - protein, 15 aa, Homo sapiens
  CDR3 for beta chain variable domain of TCR clone 126359 (TRBV5-7, TRBJ1-5)
CASSYGKLWDQPQHF

SEQ ID NO: 252719 - protein, 14 aa, Homo sapiens
  CDR3 for alpha chain variable domain of TCR clone 126360 (TRAV16, TRAJ54)
CALSLIQGAQKLEF

SEQ ID NO: 252720 - protein, 17 aa, Homo sapiens
  CDR3 for beta chain variable domain of TCR clone 126360 (TRBV11-2, TRBJ2-4)
CASSSVGPGGHRNIQYF

SEQ ID NO: 252721 - protein, 15 aa, Homo sapiens
  CDR3 for alpha chain variable domain of TCR clone 126361 (TRAV8-2, TRAJ23)
CVVSPLITREESLSS

SEQ ID NO: 252722 - protein, 15 aa, Homo sapiens
  CDR3 for beta chain variable domain of TCR clone 126361 (TRBV7-3, TRBJ2-2)
CASSETGQGTGELFF

SEQ ID NO: 252723 - protein, 11 aa, Homo sapiens
  CDR3 for alpha chain variable domain of TCR clone 126362 (TRAV12-3, TRAJ27)
CAMANAGKSTF

SEQ ID NO: 252724 - protein, 15 aa, Homo sapiens
  CDR3 for beta chain variable domain of TCR clone 126362 (TRBV20-1, TRBJ1-1)
CSARVAGTLKLSLDK

SEQ ID NO: 252725 - protein, 13 aa, Homo sapiens
  CDR3 for alpha chain variable domain of TCR clone 126363 (TRAV17, TRAJ11)
CATRSSGYSTLTF

SEQ ID NO: 252726 - protein, 14 aa, Homo sapiens
  CDR3 for beta chain variable domain of TCR clone 126363 (TRBV5-1, TRBJ1-2)
CASSPQGANYGYTF

SEQ ID NO: 252727 - protein, 13 aa, Homo sapiens
  CDR3 for alpha chain variable domain of TCR clone 126364 (TRAV12-3, TRAJ35)
CAMAIGFGNVLHG

SEQ ID NO: 252728 - protein, 15 aa, Homo sapiens
  CDR3 for beta chain variable domain of TCR clone 126364 (TRBV20-1, TRBJ2-1)
CSARGSGTYYNEQFF

SEQ ID NO: 252729 - protein, 10 aa, Homo sapiens
  CDR3 for alpha chain variable domain of TCR clone 126365 (TRAV1-1, TRAJ4)
CAAGYNKLIF

SEQ ID NO: 252730 - protein, 14 aa, Homo sapiens
  CDR3 for beta chain variable domain of TCR clone 126365 (TRBV19, TRBJ2-1)
CASPTFVLSGEQFF

SEQ ID NO: 252731 - protein, 11 aa, Homo sapiens
  CDR3 for alpha chain variable domain of TCR clone 126366 (TRAV2, TRAJ13)
CASGGYQKVAF

SEQ ID NO: 252732 - protein, 14 aa, Homo sapiens
  CDR3 for beta chain variable domain of TCR clone 126366 (TRBV7-3, TRBJ2-1)
CASSLAGGTNEQFF

SEQ ID NO: 252733 - protein, 12 aa, Homo sapiens
  CDR3 for alpha chain variable domain of TCR clone 126367 (TRAV21, TRAJ33)
CAKMDSNYQLIW

SEQ ID NO: 252734 - protein, 13 aa, Homo sapiens
  CDR3 for beta chain variable domain of TCR clone 126367 (TRBV19, TRBJ1-2)
CASSQGQVYGYTF

SEQ ID NO: 252735 - protein, 14 aa, Homo sapiens
  CDR3 for alpha chain variable domain of TCR clone 126368 (TRAV17, TRAJ12)
CAILPMDSSYKLIF

SEQ ID NO: 252736 - protein, 14 aa, Homo sapiens
  CDR3 for beta chain variable domain of TCR clone 126368 (TRBV18, TRBJ2-7)
CASSPRGGAYEQYF

SEQ ID NO: 252737 - protein, 15 aa, Homo sapiens
  CDR3 for alpha chain variable domain of TCR clone 126369 (TRAV35, TRAJ58)
CTGRRQETSGSRLTF

SEQ ID NO: 252738 - protein, 14 aa, Homo sapiens
  CDR3 for beta chain variable domain of TCR clone 126369 (TRBV7-7, TRBJ2-2)
CASRSTGNTGELFF

SEQ ID NO: 252739 - protein, 18 aa, Homo sapiens
  CDR3 for alpha chain variable domain of TCR clone 126370 (TRAV13-1, TRAJ10)
CAASKGRAVTGGGNKLTF

SEQ ID NO: 252740 - protein, 15 aa, Homo sapiens
  CDR3 for beta chain variable domain of TCR clone 126370 (TRBV7-9, TRBJ1-6)
CASSSPGRGNSPLHF

SEQ ID NO: 252741 - protein, 14 aa, Homo sapiens
  CDR3 for alpha chain variable domain of TCR clone 126371 (TRAV2, TRAJ37)
CAVGFTSNTGKLIF

SEQ ID NO: 252742 - protein, 14 aa, Homo sapiens
  CDR3 for beta chain variable domain of TCR clone 126371 (TRBV5-1, TRBJ2-5)
CASSFGGSQETQYF

SEQ ID NO: 252743 - protein, 14 aa, Homo sapiens
  CDR3 for alpha chain variable domain of TCR clone 126372 (TRAV12-3, TRAJ10)
SHLPLTGGGNKLTF

SEQ ID NO: 252744 - protein, 15 aa, Homo sapiens
  CDR3 for beta chain variable domain of TCR clone 126372 (TRBV3-1, TRBJ2-5)
CASSQEVRLEETQYF

SEQ ID NO: 252745 - protein, 12 aa, Homo sapiens
  CDR3 for alpha chain variable domain of TCR clone 126373 (TRAV12-3, TRAJ17)
CAMTLTGNKLTF

SEQ ID NO: 252746 - protein, 15 aa, Homo sapiens
  CDR3 for beta chain variable domain of TCR clone 126373 (TRBV20-1, TRBJ2-7)
CSARDRVAGTDEQYF

SEQ ID NO: 252747 - protein, 14 aa, Homo sapiens
  CDR3 for alpha chain variable domain of TCR clone 126374 (TRAV20, TRAJ40)
CAVSLTSGTYEYIF

SEQ ID NO: 252748 - protein, 21 aa, Homo sapiens
  CDR3 for beta chain variable domain of TCR clone 126374 (TRBV27, TRBJ1-1)
CASSFLETARREFSLKLSLDK

SEQ ID NO: 252749 - protein, 15 aa, Homo sapiens
  CDR3 for alpha chain variable domain of TCR clone 126375 (TRAV12-1, TRAJ44)
CVVDEYTGTTSKLTF

SEQ ID NO: 252750 - protein, 14 aa, Homo sapiens
  CDR3 for beta chain variable domain of TCR clone 126375 (TRBV5-1, TRBJ1-2)
CASSLEPVNYGYTF

SEQ ID NO: 252751 - protein, 14 aa, Homo sapiens
  CDR3 for alpha chain variable domain of TCR clone 126376 (TRAV1-2, TRAJ16)
CAVNRFSDGQKLLF

SEQ ID NO: 252752 - protein, 16 aa, Homo sapiens
  CDR3 for beta chain variable domain of TCR clone 126376 (TRBV7-2, TRBJ2-7)
RASSLDLSGGAYEQYF

SEQ ID NO: 252753 - protein, 14 aa, Homo sapiens
  CDR3 for alpha chain variable domain of TCR clone 126377 (TRAV1-2, TRAJ8)
CAVREDTGFQKLVF

SEQ ID NO: 252754 - protein, 16 aa, Homo sapiens
  CDR3 for beta chain variable domain of TCR clone 126377 (TRBV7-6, TRBJ2-6)
CASSLPGLSGASVLTF

SEQ ID NO: 252755 - protein, 15 aa, Homo sapiens
  CDR3 for alpha chain variable domain of TCR clone 126378 (TRAV3, TRAJ4)
CAVRDGTGGYNKLIF

SEQ ID NO: 252756 - protein, 16 aa, Homo sapiens
  CDR3 for beta chain variable domain of TCR clone 126378 (TRBV27, TRBJ2-2)
CASSSSGVSNTGELFC

SEQ ID NO: 252757 - protein, 14 aa, Homo sapiens
  CDR3 for alpha chain variable domain of TCR clone 126379 (TRAV23/DV6, TRAJ58)
CAGMRETSSSRLTF

SEQ ID NO: 252758 - protein, 13 aa, Homo sapiens
  CDR3 for beta chain variable domain of TCR clone 126379 (TRBV28, TRBJ2-7)
CASRSSGVYEQYF

SEQ ID NO: 252759 - protein, 12 aa, Homo sapiens
  CDR3 for alpha chain variable domain of TCR clone 126380 (TRAV17, TRAJ39)
CATGAAGNMLSF

SEQ ID NO: 252760 - protein, 14 aa, Homo sapiens
  CDR3 for beta chain variable domain of TCR clone 126380 (TRBV7-9, TRBJ1-2)
CASSRQGANYGYTF

SEQ ID NO: 252761 - protein, 17 aa, Homo sapiens
  CDR3 for alpha chain variable domain of TCR clone 126381 (TRAV12-3, TRAJ18)
CAMIRADRGSTLGRLYF

SEQ ID NO: 252762 - protein, 14 aa, Homo sapiens
  CDR3 for beta chain variable domain of TCR clone 126381 (TRBV5-7, TRBJ1-6)
CASTPGPADSPLHF

SEQ ID NO: 252763 - protein, 16 aa, Homo sapiens
  CDR3 for alpha chain variable domain of TCR clone 126382 (TRAV30, TRAJ24)
CGAEIVDADSWGKFQF

SEQ ID NO: 252764 - protein, 13 aa, Homo sapiens
  CDR3 for beta chain variable domain of TCR clone 126382 (TRBV20-1, TRBJ1-1)
CSAPPGGHTEAFF

SEQ ID NO: 252765 - protein, 14 aa, Homo sapiens
  CDR3 for alpha chain variable domain of TCR clone 126383 (TRAV12-3, TRAJ10)
SHLPLTGGGNKLTF

SEQ ID NO: 252766 - protein, 15 aa, Homo sapiens
  CDR3 for beta chain variable domain of TCR clone 126383 (TRBV11-2, TRBJ2-3)
CASSPGGGATDTQYF

SEQ ID NO: 252767 - protein, 13 aa, Homo sapiens
  CDR3 for alpha chain variable domain of TCR clone 126384 (TRAV8-3, TRAJ28)
CAVGAVGSYQLTF

SEQ ID NO: 252768 - protein, 13 aa, Homo sapiens
  CDR3 for beta chain variable domain of TCR clone 126384 (TRBV7-9, TRBJ2-3)
CASSPGSTDTQYF

SEQ ID NO: 252769 - protein, 16 aa, Homo sapiens
  CDR3 for alpha chain variable domain of TCR clone 126385 (TRAV29/DV5, TRAJ30)
QRTSVQQANRDDKIIF

SEQ ID NO: 252770 - protein, 13 aa, Homo sapiens
  CDR3 for beta chain variable domain of TCR clone 126385 (TRBV12-5, TRBJ2-3)
CASQNRGTDTQYF

SEQ ID NO: 252771 - protein, 14 aa, Homo sapiens
  CDR3 for alpha chain variable domain of TCR clone 126386 (TRAV34, TRAJ44)
CGADGTGTASKLTF

SEQ ID NO: 252772 - protein, 13 aa, Homo sapiens
  CDR3 for beta chain variable domain of TCR clone 126386 (TRBV19, TRBJ1-1)
CASKLPLNTEAFF

SEQ ID NO: 252773 - protein, 11 aa, Homo sapiens
  CDR3 for alpha chain variable domain of TCR clone 126387 (TRAV21, TRAJ31)
CAVRNNARLMF

SEQ ID NO: 252774 - protein, 13 aa, Homo sapiens
  CDR3 for beta chain variable domain of TCR clone 126387 (TRBV20-1, TRBJ1-1)
CSARGGGNTEAFF

SEQ ID NO: 252775 - protein, 15 aa, Homo sapiens
  CDR3 for alpha chain variable domain of TCR clone 126388 (TRAV26-2, TRAJ21)
CILSNTTSTNFTLDL

SEQ ID NO: 252776 - protein, 16 aa, Homo sapiens
  CDR3 for beta chain variable domain of TCR clone 126388 (TRBV4-2, TRBJ2-6)
CASSQVRSSGANVLTF

SEQ ID NO: 252777 - protein, 14 aa, Homo sapiens
  CDR3 for alpha chain variable domain of TCR clone 126389 (TRAV38-2/DV8, TRAJ29)
CAYRSRSGNTPLVF

SEQ ID NO: 252778 - protein, 17 aa, Homo sapiens
  CDR3 for beta chain variable domain of TCR clone 126389 (TRBV6-1, TRBJ1-2)
CASSGTHSQRGNYGYAF

SEQ ID NO: 252779 - protein, 15 aa, Homo sapiens
  CDR3 for alpha chain variable domain of TCR clone 126390 (TRAV25, TRAJ53)
CAATGGGGSNYKLPF

SEQ ID NO: 252780 - protein, 19 aa, Homo sapiens
  CDR3 for beta chain variable domain of TCR clone 126390 (TRBV7-2, TRBJ2-3)
CASSFLSRNWGGGTDTQYF

SEQ ID NO: 252781 - protein, 12 aa, Homo sapiens
  CDR3 for alpha chain variable domain of TCR clone 126391 (TRAV12-1, TRAJ40)
CVVYSGTYKYIF

SEQ ID NO: 252782 - protein, 14 aa, Homo sapiens
  CDR3 for beta chain variable domain of TCR clone 126391 (TRBV2, TRBJ1-2)
CASSELQVNYGYTF

SEQ ID NO: 252783 - protein, 12 aa, Homo sapiens
  CDR3 for alpha chain variable domain of TCR clone 126392 (TRAV12-3, TRAJ40)
CAMSSGTYKYIF

SEQ ID NO: 252784 - protein, 15 aa, Homo sapiens
  CDR3 for beta chain variable domain of TCR clone 126392 (TRBV24-1, TRBJ2-1)
CATSEPGQGYNEQFF

SEQ ID NO: 252785 - protein, 12 aa, Homo sapiens
  CDR3 for alpha chain variable domain of TCR clone 126393 (TRAV2, TRAJ37)
CAVTMNTGKLIF

SEQ ID NO: 252786 - protein, 15 aa, Homo sapiens
  CDR3 for beta chain variable domain of TCR clone 126393 (TRBV5-1, TRBJ2-5)
CASSFGGPPKRPSTS

SEQ ID NO: 252787 - protein, 14 aa, Homo sapiens
  CDR3 for alpha chain variable domain of TCR clone 126394 (TRAV29/DV5, TRAJ36)
CAARRKTGANNLFF

SEQ ID NO: 252788 - protein, 12 aa, Homo sapiens
  CDR3 for beta chain variable domain of TCR clone 126394 (TRBV28, TRBJ2-7)
CASTGNHYEQYF

SEQ ID NO: 252789 - protein, 14 aa, Homo sapiens
  CDR3 for alpha chain variable domain of TCR clone 126395 (TRAV1-1, TRAJ27)
CAVIYNTNAGKSTF

SEQ ID NO: 252790 - protein, 13 aa, Homo sapiens
  CDR3 for beta chain variable domain of TCR clone 126395 (TRBV4-1, TRBJ2-2)
CASSQENTGELFF

SEQ ID NO: 252791 - protein, 13 aa, Homo sapiens
  CDR3 for alpha chain variable domain of TCR clone 126396 (TRAV20, TRAJ40)
CAVPFSGTYKYIF

SEQ ID NO: 252792 - protein, 13 aa, Homo sapiens
  CDR3 for beta chain variable domain of TCR clone 126396 (TRBV15, TRBJ2-5)
CATSQIGEETQYL

SEQ ID NO: 252793 - protein, 13 aa, Homo sapiens
  CDR3 for alpha chain variable domain of TCR clone 126397 (TRAV12-2, TRAJ6)
CAVNVSRKLHTSI

SEQ ID NO: 252794 - protein, 12 aa, Homo sapiens
  CDR3 for beta chain variable domain of TCR clone 126397 (TRBV29-1, TRBJ2-3)
CSVTGGADTQYF

SEQ ID NO: 252795 - protein, 14 aa, Homo sapiens
  CDR3 for alpha chain variable domain of TCR clone 126398 (TRAV13-1, TRAJ35)
CAASKGGFGNVLHC

SEQ ID NO: 252796 - protein, 16 aa, Homo sapiens
  CDR3 for beta chain variable domain of TCR clone 126398 (TRBV6-1, TRBJ2-1)
CASILRQGSSYNEQFF

SEQ ID NO: 252797 - protein, 13 aa, Homo sapiens
  CDR3 for alpha chain variable domain of TCR clone 126399 (TRAV12-1, TRAJ9)
RVVLNTGGFKTIF

SEQ ID NO: 252798 - protein, 15 aa, Homo sapiens
  CDR3 for beta chain variable domain of TCR clone 126399 (TRBV20-1, TRBJ2-7)
CSARVPAAHFYEQYF

SEQ ID NO: 252799 - protein, 14 aa, Homo sapiens
  CDR3 for alpha chain variable domain of TCR clone 126400 (TRAV29/DV5, TRAJ36)
CAARRKTGANNLFF

SEQ ID NO: 252800 - protein, 14 aa, Homo sapiens
  CDR3 for beta chain variable domain of TCR clone 126400 (TRBV12-5, TRBJ2-5)
CASGSRTHQETEYF

SEQ ID NO: 252801 - protein, 12 aa, Homo sapiens
  CDR3 for alpha chain variable domain of TCR clone 126401 (TRAV20, TRAJ56)
SAVTGANSKLTF

SEQ ID NO: 252802 - protein, 14 aa, Homo sapiens
  CDR3 for beta chain variable domain of TCR clone 126401 (TRBV20-1, TRBJ2-5)
CSALVPGYQETQYF

SEQ ID NO: 252803 - protein, 16 aa, Homo sapiens
  CDR3 for alpha chain variable domain of TCR clone 126402 (TRAV12-1, TRAJ12)
CVVNTLLMDRSYKLIF

SEQ ID NO: 252804 - protein, 13 aa, Homo sapiens
  CDR3 for beta chain variable domain of TCR clone 126402 (TRBV11-2, TRBJ2-1)
CASSSEAYNEQFF

SEQ ID NO: 252805 - protein, 13 aa, Homo sapiens
  CDR3 for alpha chain variable domain of TCR clone 126403 (TRAV8-6, TRAJ36)
CAVIGPGANNLFF

SEQ ID NO: 252806 - protein, 13 aa, Homo sapiens
  CDR3 for beta chain variable domain of TCR clone 126403 (TRBV7-3, TRBJ1-1)
CASSQDWGAEAFF

SEQ ID NO: 252807 - protein, 12 aa, Homo sapiens
  CDR3 for alpha chain variable domain of TCR clone 126404 (TRAV23/DV6, TRAJ30)
CAASKGDDKIIF

SEQ ID NO: 252808 - protein, 15 aa, Homo sapiens
  CDR3 for beta chain variable domain of TCR clone 126404 (TRBV29-1, TRBJ2-1)
CSGRDRKSSYNEQFF

SEQ ID NO: 252809 - protein, 16 aa, Homo sapiens
  CDR3 for alpha chain variable domain of TCR clone 126405 (TRAV3, TRAJ18)
CAVRDGRGSTLGRLYF

SEQ ID NO: 252810 - protein, 16 aa, Homo sapiens
  CDR3 for beta chain variable domain of TCR clone 126405 (TRBV19, TRBJ2-1)
CASSKAGPSSYNEQFF

SEQ ID NO: 252811 - protein, 13 aa, Homo sapiens
  CDR3 for alpha chain variable domain of TCR clone 126406 (TRAV3, TRAJ21)
CAVREPDFNKFYF

SEQ ID NO: 252812 - protein, 18 aa, Homo sapiens
  CDR3 for beta chain variable domain of TCR clone 126406 (TRBV11-2, TRBJ2-3)
CASSLGGALRGAPNTQYF

SEQ ID NO: 252813 - protein, 10 aa, Homo sapiens
  CDR3 for alpha chain variable domain of TCR clone 126407 (TRAV20, TRAJ22)
CAAPARQLTF

SEQ ID NO: 252814 - protein, 14 aa, Homo sapiens
  CDR3 for beta chain variable domain of TCR clone 126407 (TRBV19, TRBJ2-1)
CANSMGSGATEQFF

SEQ ID NO: 252815 - protein, 13 aa, Homo sapiens
  CDR3 for alpha chain variable domain of TCR clone 126408 (TRAV12-3, TRAJ13)
CAMSSGGYQKVTF

SEQ ID NO: 252816 - protein, 20 aa, Homo sapiens
  CDR3 for beta chain variable domain of TCR clone 126408 (TRBV28, TRBJ2-1)
CASTPIGRSPGLAGGNEQFF

SEQ ID NO: 252817 - protein, 15 aa, Homo sapiens
  CDR3 for alpha chain variable domain of TCR clone 126409 (TRAV17, TRAJ56)
CATEPFTGANIKLTF

SEQ ID NO: 252818 - protein, 14 aa, Homo sapiens
  CDR3 for beta chain variable domain of TCR clone 126409 (TRBV19, TRBJ2-1)
CASPTFVLSGEQFF

SEQ ID NO: 252819 - protein, 12 aa, Homo sapiens
  CDR3 for alpha chain variable domain of TCR clone 126410 (TRAV8-3, TRAJ43)
CAVGAGNTDMRF

SEQ ID NO: 252820 - protein, 14 aa, Homo sapiens
  CDR3 for beta chain variable domain of TCR clone 126410 (TRBV4-2, TRBJ1-5)
CASSRDRGNQPQHF

SEQ ID NO: 252821 - protein, 14 aa, Homo sapiens
  CDR3 for alpha chain variable domain of TCR clone 126411 (TRAV3, TRAJ21)
CAVESQANFNKFYF

SEQ ID NO: 252822 - protein, 12 aa, Homo sapiens
  CDR3 for beta chain variable domain of TCR clone 126411 (TRBV6-3, TRBJ2-7)
CASSLTPYGQYF

SEQ ID NO: 252823 - protein, 15 aa, Homo sapiens
  CDR3 for alpha chain variable domain of TCR clone 126412 (TRAV4, TRAJ17)
CLVGDIGAAGNKQTF

SEQ ID NO: 252824 - protein, 14 aa, Homo sapiens
  CDR3 for beta chain variable domain of TCR clone 126412 (TRBV6-3, TRBJ2-7)
CASSYSVRVYEQYF

SEQ ID NO: 252825 - protein, 14 aa, Homo sapiens
  CDR3 for alpha chain variable domain of TCR clone 126413 (TRAV8-4, TRAJ54)
CAVSEVLGAQKLGF

SEQ ID NO: 252826 - protein, 17 aa, Homo sapiens
  CDR3 for beta chain variable domain of TCR clone 126413 (TRBV4-1, TRBJ1-4)
CASSQEGPRGVEEKLFF

SEQ ID NO: 252827 - protein, 14 aa, Homo sapiens
  CDR3 for alpha chain variable domain of TCR clone 126414 (TRAV3, TRAJ17)
CAVRERSCRQQANF

SEQ ID NO: 252828 - protein, 17 aa, Homo sapiens
  CDR3 for beta chain variable domain of TCR clone 126414 (TRBV13, TRBJ2-3)
CASSLPRVAGGRNTQYF

SEQ ID NO: 252829 - protein, 17 aa, Homo sapiens
  CDR3 for alpha chain variable domain of TCR clone 126415 (TRAV13-1, TRAJ52)
CAASSVAGGTSYGKLTF

SEQ ID NO: 252830 - protein, 15 aa, Homo sapiens
  CDR3 for beta chain variable domain of TCR clone 126415 (TRBV2, TRBJ2-1)
CASSELAGSYNEQFF

SEQ ID NO: 252831 - protein, 12 aa, Homo sapiens
  CDR3 for alpha chain variable domain of TCR clone 126416 (TRAV8-3, TRAJ20)
CAVGANDYKLSF

SEQ ID NO: 252832 - protein, 16 aa, Homo sapiens
  CDR3 for beta chain variable domain of TCR clone 126416 (TRBV20-1, TRBJ1-4)
CSAPGQGLLTNEKLFF

SEQ ID NO: 252833 - protein, 12 aa, Homo sapiens
  CDR3 for alpha chain variable domain of TCR clone 126417 (TRAV17, TRAJ4)
CAVSGDYNKLIF

SEQ ID NO: 252834 - protein, 13 aa, Homo sapiens
  CDR3 for beta chain variable domain of TCR clone 126417 (TRBV6-1, TRBJ1-1)
CASSEGWGTEAFF

SEQ ID NO: 252835 - protein, 12 aa, Homo sapiens
  CDR3 for alpha chain variable domain of TCR clone 126418 (TRAV21, TRAJ33)
CAKMDSNYQLIW

SEQ ID NO: 252836 - protein, 17 aa, Homo sapiens
  CDR3 for beta chain variable domain of TCR clone 126418 (TRBV20-1, TRBJ2-2)
RSASGSGQGGLTGELFF

SEQ ID NO: 252837 - protein, 11 aa, Homo sapiens
  CDR3 for alpha chain variable domain of TCR clone 126419 (TRAV23/DV6, TRAJ58)
CAARLLRGETS

SEQ ID NO: 252838 - protein, 14 aa, Homo sapiens
  CDR3 for beta chain variable domain of TCR clone 126419 (TRBV7-9, TRBJ2-2)
CASSGLADTGELFF

SEQ ID NO: 252839 - protein, 12 aa, Homo sapiens
  CDR3 for alpha chain variable domain of TCR clone 126420 (TRAV8-3, TRAJ20)
CAVGANDYKLSF

SEQ ID NO: 252840 - protein, 13 aa, Homo sapiens
  CDR3 for beta chain variable domain of TCR clone 126420 (TRBV6-6, TRBJ1-2)
CASSYGWGDDGDF

SEQ ID NO: 252841 - protein, 18 aa, Homo sapiens
  CDR3 for alpha chain variable domain of TCR clone 126421 (TRAV12-3, TRAJ52)
CAMSRTNAGGTSYGNLTF

SEQ ID NO: 252842 - protein, 17 aa, Homo sapiens
  CDR3 for beta chain variable domain of TCR clone 126421 (TRBV13, TRBJ2-3)
CASSLSRVAGGRNTQYF

SEQ ID NO: 252843 - protein, 14 aa, Homo sapiens
  CDR3 for alpha chain variable domain of TCR clone 126422 (TRAV8-3, TRAJ3)
CAVVPRSSASKIIF

SEQ ID NO: 252844 - protein, 14 aa, Homo sapiens
  CDR3 for beta chain variable domain of TCR clone 126422 (TRBV18, TRBJ2-7)
CASSPRGGAYEQYF

SEQ ID NO: 252845 - protein, 15 aa, Homo sapiens
  CDR3 for alpha chain variable domain of TCR clone 126423 (TRAV13-1, TRAJ17)
CAASIERAAGNKLTF

SEQ ID NO: 252846 - protein, 15 aa, Homo sapiens
  CDR3 for beta chain variable domain of TCR clone 126423 (TRBV6-5, TRBJ2-1)
CASSYDAGAGNEQFF

SEQ ID NO: 252847 - protein, 13 aa, Homo sapiens
  CDR3 for alpha chain variable domain of TCR clone 126424 (TRAV21, TRAJ20)
CAVGLRVDYKLSF

SEQ ID NO: 252848 - protein, 11 aa, Homo sapiens
  CDR3 for beta chain variable domain of TCR clone 126424 (TRBV20-1, TRBJ1-5)
CSAQGDQPQHF

SEQ ID NO: 252849 - protein, 13 aa, Homo sapiens
  CDR3 for alpha chain variable domain of TCR clone 126425 (TRAV8-3, TRAJ28)
CAVGAVGSYQLTF

SEQ ID NO: 252850 - protein, 16 aa, Homo sapiens
  CDR3 for beta chain variable domain of TCR clone 126425 (TRBV2, TRBJ2-1)
CASRSPAGGKYNEQFF

SEQ ID NO: 252851 - protein, 12 aa, Homo sapiens
  CDR3 for alpha chain variable domain of TCR clone 126426 (TRAV16, TRAJ22)
CALEVSARQLTF

SEQ ID NO: 252852 - protein, 14 aa, Homo sapiens
  CDR3 for beta chain variable domain of TCR clone 126426 (TRBV18, TRBJ2-7)
CASSPRGGAYEQYF

SEQ ID NO: 252853 - protein, 12 aa, Homo sapiens
  CDR3 for alpha chain variable domain of TCR clone 126427 (TRAV3, TRAJ43)
CAVRDPNNDMRF

SEQ ID NO: 252854 - protein, 14 aa, Homo sapiens
  CDR3 for beta chain variable domain of TCR clone 126427 (TRBV6-1, TRBJ1-3)
CASVQGGGGNTIYF

SEQ ID NO: 252855 - protein, 13 aa, Homo sapiens
  CDR3 for alpha chain variable domain of TCR clone 126428 (TRAV12-2, TRAJ24)
CAVSTDSWGKLQF

SEQ ID NO: 252856 - protein, 12 aa, Homo sapiens
  CDR3 for beta chain variable domain of TCR clone 126428 (TRBV7-6, TRBJ2-7)
CARSLADSEQYF

SEQ ID NO: 252857 - protein, 12 aa, Homo sapiens
  CDR3 for alpha chain variable domain of TCR clone 126429 (TRAV3, TRAJ31)
CAVRDGNARLMF

SEQ ID NO: 252858 - protein, 13 aa, Homo sapiens
  CDR3 for beta chain variable domain of TCR clone 126429 (TRBV9, TRBJ2-1)
CASSPSGGNEQFF

SEQ ID NO: 252859 - protein, 16 aa, Homo sapiens
  CDR3 for alpha chain variable domain of TCR clone 126430 (TRAV3, TRAJ37)
CAVRGKGYGNTGKLIF

SEQ ID NO: 252860 - protein, 20 aa, Homo sapiens
  CDR3 for beta chain variable domain of TCR clone 126430 (TRBV7-8, TRBJ2-2)
CASSHLFPGPTIHITGELFF

SEQ ID NO: 252861 - protein, 13 aa, Homo sapiens
  CDR3 for alpha chain variable domain of TCR clone 126431 (TRAV21, TRAJ20)
CAVGLRIDYKLSF

SEQ ID NO: 252862 - protein, 13 aa, Homo sapiens
  CDR3 for beta chain variable domain of TCR clone 126431 (TRBV6-1, TRBJ1-1)
CASSRQGNTEAFF

SEQ ID NO: 252863 - protein, 12 aa, Homo sapiens
  CDR3 for alpha chain variable domain of TCR clone 126432 (TRAV26-1, TRAJ43)
CIVRHRGDDMRF

SEQ ID NO: 252864 - protein, 16 aa, Homo sapiens
  CDR3 for beta chain variable domain of TCR clone 126432 (TRBV3-1, TRBJ2-1)
CASSQGGRRSFDEQFF

SEQ ID NO: 252865 - protein, 15 aa, Homo sapiens
  CDR3 for alpha chain variable domain of TCR clone 126433 (TRAV8-3, TRAJ45)
CASSYSGGGADGLTF

SEQ ID NO: 252866 - protein, 16 aa, Homo sapiens
  CDR3 for beta chain variable domain of TCR clone 126433 (TRBV4-2, TRBJ1-1)
CASSQAGFGMNTEAFF

SEQ ID NO: 252867 - protein, 15 aa, Homo sapiens
  CDR3 for alpha chain variable domain of TCR clone 126434 (TRAV29/DV5, TRAJ53)
CAASASGGSNYKLTF

SEQ ID NO: 252868 - protein, 13 aa, Homo sapiens
  CDR3 for beta chain variable domain of TCR clone 126434 (TRBV7-9, TRBJ2-7)
CASSPNPDLGQYF

SEQ ID NO: 252869 - protein, 13 aa, Homo sapiens
  CDR3 for alpha chain variable domain of TCR clone 126435 (TRAV1-1, TRAJ9)
CAAKNTGGFKTIF

SEQ ID NO: 252870 - protein, 14 aa, Homo sapiens
  CDR3 for beta chain variable domain of TCR clone 126435 (TRBV2, TRBJ2-7)
CASSLTSGGYEQYF

SEQ ID NO: 252871 - protein, 15 aa, Homo sapiens
  CDR3 for alpha chain variable domain of TCR clone 126436 (TRAV8-4, TRAJ37)
CAVSKVSGNTGKLIF

SEQ ID NO: 252872 - protein, 13 aa, Homo sapiens
  CDR3 for beta chain variable domain of TCR clone 126436 (TRBV28, TRBJ2-2)
CASIGGLGGELFF

SEQ ID NO: 252873 - protein, 13 aa, Homo sapiens
  CDR3 for alpha chain variable domain of TCR clone 126437 (TRAV12-3, TRAJ29)
CAMTLSGNTPLVF

SEQ ID NO: 252874 - protein, 15 aa, Homo sapiens
  CDR3 for beta chain variable domain of TCR clone 126437 (TRBV6-3, TRBJ2-2)
CASSFLATLTGELFF

SEQ ID NO: 252875 - protein, 12 aa, Homo sapiens
  CDR3 for alpha chain variable domain of TCR clone 126438 (TRAV12-3, TRAJ17)
CAMTLTGNKLTF

SEQ ID NO: 252876 - protein, 15 aa, Homo sapiens
  CDR3 for beta chain variable domain of TCR clone 126438 (TRBV6-3, TRBJ2-2)
CASRGMTVDTGELFF

SEQ ID NO: 252877 - protein, 16 aa, Homo sapiens
  CDR3 for alpha chain variable domain of TCR clone 126439 (TRAV3, TRAJ10)
CAVRDMNAGGGNKLTV

SEQ ID NO: 252878 - protein, 16 aa, Homo sapiens
  CDR3 for beta chain variable domain of TCR clone 126439 (TRBV6-3, TRBJ1-2)
CASSYSRRASNYGYTF

SEQ ID NO: 252879 - protein, 17 aa, Homo sapiens
  CDR3 for alpha chain variable domain of TCR clone 126440 (TRAV13-1, TRAJ52)
CAASSGAGGTSYGKLTF

SEQ ID NO: 252880 - protein, 15 aa, Homo sapiens
  CDR3 for beta chain variable domain of TCR clone 126440 (TRBV28, TRBJ2-4)
CAAGSGTLLMGMQYF

SEQ ID NO: 252881 - protein, 21 aa, Homo sapiens
  CDR3 for alpha chain variable domain of TCR clone 126441 (TRAV12-1, TRAJ32)
SSVIQPPTSMNYGGATNKLIF

SEQ ID NO: 252882 - protein, 20 aa, Homo sapiens
  CDR3 for beta chain variable domain of TCR clone 126441 (TRBV7-8, TRBJ2-2)
CASSHLFPGPTIHITGELFF

SEQ ID NO: 252883 - protein, 11 aa, Homo sapiens
  CDR3 for alpha chain variable domain of TCR clone 126442 (TRAV16, TRAJ33)
CALYSNYQLIW

SEQ ID NO: 252884 - protein, 15 aa, Homo sapiens
  CDR3 for beta chain variable domain of TCR clone 126442 (TRBV4-1, TRBJ2-7)
CASSQQGQGFDEQYF

SEQ ID NO: 252885 - protein, 13 aa, Homo sapiens
  CDR3 for alpha chain variable domain of TCR clone 126443 (TRAV38-2/DV8, TRAJ53)
CASGGGSNYKLTV

SEQ ID NO: 252886 - protein, 16 aa, Homo sapiens
  CDR3 for beta chain variable domain of TCR clone 126443 (TRBV28, TRBJ1-5)
CASRFRGAVQNQPQHF

SEQ ID NO: 252887 - protein, 12 aa, Homo sapiens
  CDR3 for alpha chain variable domain of TCR clone 126444 (TRAV17, TRAJ39)
CATGAAGNMLTF

SEQ ID NO: 252888 - protein, 14 aa, Homo sapiens
  CDR3 for beta chain variable domain of TCR clone 126444 (TRBV7-9, TRBJ1-2)
CASSRQCANYGYTF

SEQ ID NO: 252889 - protein, 14 aa, Homo sapiens
  CDR3 for alpha chain variable domain of TCR clone 126445 (TRAV1-2, TRAJ8)
CAVREDTGFQKLVF

SEQ ID NO: 252890 - protein, 16 aa, Homo sapiens
  CDR3 for beta chain variable domain of TCR clone 126445 (TRBV4-1, TRBJ2-3)
CASSSWSGGARDTQYF

SEQ ID NO: 252891 - protein, 13 aa, Homo sapiens
  CDR3 for alpha chain variable domain of TCR clone 126446 (TRAV2, TRAJ40)
CAVVTSGTYKYIF

SEQ ID NO: 252892 - protein, 13 aa, Homo sapiens
  CDR3 for beta chain variable domain of TCR clone 126446 (TRBV11-2, TRBJ2-1)
CASSSEAYNEQFF

SEQ ID NO: 252893 - protein, 16 aa, Homo sapiens
  CDR3 for alpha chain variable domain of TCR clone 126447 (TRAV1-2, TRAJ10)
CAVRGVLTGGGNKLTF

SEQ ID NO: 252894 - protein, 15 aa, Homo sapiens
  CDR3 for beta chain variable domain of TCR clone 126447 (TRBV7-9, TRBJ1-6)
CASSSPGRGNSPLRF

SEQ ID NO: 252895 - protein, 16 aa, Homo sapiens
  CDR3 for alpha chain variable domain of TCR clone 126448 (TRAV30, TRAJ24)
CGTEIVDADSWGKSQF

SEQ ID NO: 252896 - protein, 18 aa, Homo sapiens
  CDR3 for beta chain variable domain of TCR clone 126448 (TRBV20-1, TRBJ2-6)
CSAETTPTHGSGANVLTF

SEQ ID NO: 252897 - protein, 16 aa, Homo sapiens
  CDR3 for alpha chain variable domain of TCR clone 126449 (TRAV26-2, TRAJ57)
CILRDVGTGGSEKLVF

SEQ ID NO: 252898 - protein, 13 aa, Homo sapiens
  CDR3 for beta chain variable domain of TCR clone 126449 (TRBV18, TRBJ2-3)
CASSPGVTDTQYF

SEQ ID NO: 252899 - protein, 13 aa, Homo sapiens
  CDR3 for alpha chain variable domain of TCR clone 126450 (TRAV3, TRAJ29)
CAVRDLIDTPLVF

SEQ ID NO: 252900 - protein, 14 aa, Homo sapiens
  CDR3 for beta chain variable domain of TCR clone 126450 (TRBV27, TRBJ2-1)
CASSATGGYNEQFF

SEQ ID NO: 252901 - protein, 14 aa, Homo sapiens
  CDR3 for alpha chain variable domain of TCR clone 126451 (TRAV23/DV6, TRAJ45)
CAASWGGGADGLPF

SEQ ID NO: 252902 - protein, 15 aa, Homo sapiens
  CDR3 for beta chain variable domain of TCR clone 126451 (TRBV4-2, TRBJ1-2)
CASSRNTGAGYGYTF

SEQ ID NO: 252903 - protein, 15 aa, Homo sapiens
  CDR3 for alpha chain variable domain of TCR clone 126452 (TRAV21, TRAJ24)
CAARSSTDSWGKLQF

SEQ ID NO: 252904 - protein, 15 aa, Homo sapiens
  CDR3 for beta chain variable domain of TCR clone 126452 (TRBV20-1, TRBJ2-7)
CSARVPAAYFYEQYF

SEQ ID NO: 252905 - protein, 15 aa, Homo sapiens
  CDR3 for alpha chain variable domain of TCR clone 126453 (TRAV38-1, TRAJ45)
CAFMKGGGGAGGLTF

SEQ ID NO: 252906 - protein, 13 aa, Homo sapiens
  CDR3 for beta chain variable domain of TCR clone 126453 (TRBV7-9, TRBJ1-2)
CASSLKQNYGYTF

SEQ ID NO: 252907 - protein, 13 aa, Homo sapiens
  CDR3 for alpha chain variable domain of TCR clone 126454 (TRAV21, TRAJ27)
CAARPGNAGNSTF

SEQ ID NO: 252908 - protein, 14 aa, Homo sapiens
  CDR3 for beta chain variable domain of TCR clone 126454 (TRBV7-9, TRBJ2-5)
CASSLDTAQETQYF

SEQ ID NO: 252909 - protein, 16 aa, Homo sapiens
  CDR3 for alpha chain variable domain of TCR clone 126455 (TRAV29/DV5, TRAJ36)
CAASAHYQSGANNLFF

SEQ ID NO: 252910 - protein, 12 aa, Homo sapiens
  CDR3 for beta chain variable domain of TCR clone 126455 (TRBV2, TRBJ1-2)
CASSGQTYGYTF

SEQ ID NO: 252911 - protein, 13 aa, Homo sapiens
  CDR3 for alpha chain variable domain of TCR clone 126456 (TRAV13-1, TRAJ40)
CAASKGGTYKYIF

SEQ ID NO: 252912 - protein, 13 aa, Homo sapiens
  CDR3 for beta chain variable domain of TCR clone 126456 (TRBV7-6, TRBJ1-2)
CASSLVADYGYNF

SEQ ID NO: 252913 - protein, 11 aa, Homo sapiens
  CDR3 for alpha chain variable domain of TCR clone 126457 (TRAV17, TRAJ9)
CATTGGFKTIF

SEQ ID NO: 252914 - protein, 14 aa, Homo sapiens
  CDR3 for beta chain variable domain of TCR clone 126457 (TRBV7-7, TRBJ2-2)
CATRQDSDTGELFF

SEQ ID NO: 252915 - protein, 14 aa, Homo sapiens
  CDR3 for alpha chain variable domain of TCR clone 126458 (TRAV16, TRAJ57)
CALPTQGGSEKLVF

SEQ ID NO: 252916 - protein, 14 aa, Homo sapiens
  CDR3 for beta chain variable domain of TCR clone 126458 (TRBV28, TRBJ1-3)
CASWGGISLETPYI

SEQ ID NO: 252917 - protein, 16 aa, Homo sapiens
  CDR3 for alpha chain variable domain of TCR clone 126459 (TRAV8-3, TRAJ42)
CAVCEGNGGSQGNLIF

SEQ ID NO: 252918 - protein, 14 aa, Homo sapiens
  CDR3 for beta chain variable domain of TCR clone 126459 (TRBV7-2, TRBJ2-1)
CASSRGGARNEQFF

SEQ ID NO: 252919 - protein, 12 aa, Homo sapiens
  CDR3 for alpha chain variable domain of TCR clone 126460 (TRAV1-2, TRAJ33)
CAALDSNYQLIW

SEQ ID NO: 252920 - protein, 12 aa, Homo sapiens
  CDR3 for beta chain variable domain of TCR clone 126460 (TRBV14, TRBJ2-5)
CASSQLKETQYF

SEQ ID NO: 252921 - protein, 13 aa, Homo sapiens
  CDR3 for alpha chain variable domain of TCR clone 126461 (TRAV21, TRAJ15)
CAVANQAGTALIF

SEQ ID NO: 252922 - protein, 15 aa, Homo sapiens
  CDR3 for beta chain variable domain of TCR clone 126461 (TRBV6-3, TRBJ2-7)
CASSSPGTVFYEQYF

SEQ ID NO: 252923 - protein, 13 aa, Homo sapiens
  CDR3 for alpha chain variable domain of TCR clone 126462 (TRAV12-3, TRAJ54)
CAMSVQGAQKLVF

SEQ ID NO: 252924 - protein, 13 aa, Homo sapiens
  CDR3 for beta chain variable domain of TCR clone 126462 (TRBV2, TRBJ1-6)
CADSGSYNSPLLF

SEQ ID NO: 252925 - protein, 17 aa, Homo sapiens
  CDR3 for alpha chain variable domain of TCR clone 126463 (TRAV12-3, TRAJ6)
CAMSARGGAVGSYIPTF

SEQ ID NO: 252926 - protein, 12 aa, Homo sapiens
  CDR3 for beta chain variable domain of TCR clone 126463 (TRBV12-4, TRBJ2-3)
CASSTLPDTQYF

SEQ ID NO: 252927 - protein, 16 aa, Homo sapiens
  CDR3 for alpha chain variable domain of TCR clone 126464 (TRAV30, TRAJ24)
CGTEIVDADSWGKFQF

SEQ ID NO: 252928 - protein, 16 aa, Homo sapiens
  CDR3 for beta chain variable domain of TCR clone 126464 (TRBV20-1, TRBJ2-3)
CSAVRDRGPIADTQYF

SEQ ID NO: 252929 - protein, 14 aa, Homo sapiens
  CDR3 for alpha chain variable domain of TCR clone 126465 (TRAV17, TRAJ57)
CATDPQGGSEKLAF

SEQ ID NO: 252930 - protein, 18 aa, Homo sapiens
  CDR3 for beta chain variable domain of TCR clone 126465 (TRBV6-6, TRBJ1-3)
CASSYSKWDSISGNTMYF

SEQ ID NO: 252931 - protein, 14 aa, Homo sapiens
  CDR3 for alpha chain variable domain of TCR clone 126466 (TRAV4, TRAJ30)
CLLTLMNRDDKIIF

SEQ ID NO: 252932 - protein, 14 aa, Homo sapiens
  CDR3 for beta chain variable domain of TCR clone 126466 (TRBV7-2, TRBJ2-7)
CASSPKTSFYEQYF

SEQ ID NO: 252933 - protein, 12 aa, Homo sapiens
  CDR3 for alpha chain variable domain of TCR clone 126467 (TRAV2, TRAJ9)
CAVGAGGFKTIF

SEQ ID NO: 252934 - protein, 16 aa, Homo sapiens
  CDR3 for beta chain variable domain of TCR clone 126467 (TRBV13, TRBJ2-2)
CASSPRTGEHSGELFF

SEQ ID NO: 252935 - protein, 15 aa, Homo sapiens
  CDR3 for alpha chain variable domain of TCR clone 126468 (TRAV3, TRAJ9)
CAVRARNTGGSKTIF

SEQ ID NO: 252936 - protein, 15 aa, Homo sapiens
  CDR3 for beta chain variable domain of TCR clone 126468 (TRBV27, TRBJ1-1)
CASSPYADPYTEAFF

SEQ ID NO: 252937 - protein, 14 aa, Homo sapiens
  CDR3 for alpha chain variable domain of TCR clone 126469 (TRAV26-1, TRAJ38)
CIADNAGNNRKLIW

SEQ ID NO: 252938 - protein, 13 aa, Homo sapiens
  CDR3 for beta chain variable domain of TCR clone 126469 (TRBV19, TRBJ1-2)
CASSVPGQDGYIF

SEQ ID NO: 252939 - protein, 17 aa, Homo sapiens
  CDR3 for alpha chain variable domain of TCR clone 126470 (TRAV13-1, TRAJ52)
CAASSGAGGTSYGKLTI

SEQ ID NO: 252940 - protein, 15 aa, Homo sapiens
  CDR3 for beta chain variable domain of TCR clone 126470 (TRBV2, TRBJ2-1)
CASSELAGSYNEQFF

SEQ ID NO: 252941 - protein, 13 aa, Homo sapiens
  CDR3 for alpha chain variable domain of TCR clone 126471 (TRAV13-2, TRAJ48)
CAEMDFGNEKLTF

SEQ ID NO: 252942 - protein, 15 aa, Homo sapiens
  CDR3 for beta chain variable domain of TCR clone 126471 (TRBV7-9, TRBJ1-6)
CASSSPGRGNSPLQF

SEQ ID NO: 252943 - protein, 13 aa, Homo sapiens
  CDR3 for alpha chain variable domain of TCR clone 126472 (TRAV26-1, TRAJ48)
CIVRVVGDEKLTF

SEQ ID NO: 252944 - protein, 19 aa, Homo sapiens
  CDR3 for beta chain variable domain of TCR clone 126472 (TRBV11-3, TRBJ2-2)
CASSTRTGAKTTNTGELFF

SEQ ID NO: 252945 - protein, 13 aa, Homo sapiens
  CDR3 for alpha chain variable domain of TCR clone 126473 (TRAV17, TRAJ40)
CAGALGGTYKYIF

SEQ ID NO: 252946 - protein, 16 aa, Homo sapiens
  CDR3 for beta chain variable domain of TCR clone 126473 (TRBV11-2, TRBJ1-2)
CASSLDTGGADYGCTL

SEQ ID NO: 252947 - protein, 15 aa, Homo sapiens
  CDR3 for alpha chain variable domain of TCR clone 126474 (TRAV3, TRAJ22)
CAVRDRGGSARQLTF

SEQ ID NO: 252948 - protein, 16 aa, Homo sapiens
  CDR3 for beta chain variable domain of TCR clone 126474 (TRBV6-6, TRBJ2-1)
CASSWGGQGPYDEQFF

SEQ ID NO: 252949 - protein, 13 aa, Homo sapiens
  CDR3 for alpha chain variable domain of TCR clone 126475 (TRAV2, TRAJ40)
CAVVTSGTYKYIF

SEQ ID NO: 252950 - protein, 17 aa, Homo sapiens
  CDR3 for beta chain variable domain of TCR clone 126475 (TRBV28, TRBJ2-7)
CASSPGLAGGDSSEQYF

SEQ ID NO: 252951 - protein, 13 aa, Homo sapiens
  CDR3 for alpha chain variable domain of TCR clone 126476 (TRAV16, TRAJ48)
CSPLNFGNEQLTF

SEQ ID NO: 252952 - protein, 11 aa, Homo sapiens
  CDR3 for beta chain variable domain of TCR clone 126476 (TRBV7-9, TRBJ2-3)
CASSPTDTQYF

SEQ ID NO: 252953 - protein, 14 aa, Homo sapiens
  CDR3 for alpha chain variable domain of TCR clone 126477 (TRAV16, TRAJ54)
CALSLIQGAQKLVF

SEQ ID NO: 252954 - protein, 17 aa, Homo sapiens
  CDR3 for beta chain variable domain of TCR clone 126477 (TRBV11-3, TRBJ2-4)
CASSSVGPGGHRNIQYF

SEQ ID NO: 252955 - protein, 14 aa, Homo sapiens
  CDR3 for alpha chain variable domain of TCR clone 126478 (TRAV26-1, TRAJ45)
CIEVTGGGADGLTF

SEQ ID NO: 252956 - protein, 14 aa, Homo sapiens
  CDR3 for beta chain variable domain of TCR clone 126478 (TRBV25-1, TRBJ1-1)
CASTHLGGNTEAFF

SEQ ID NO: 252957 - protein, 12 aa, Homo sapiens
  CDR3 for alpha chain variable domain of TCR clone 126479 (TRAV36/DV7, TRAJ54)
CAVVRGAQKLVF

SEQ ID NO: 252958 - protein, 14 aa, Homo sapiens
  CDR3 for beta chain variable domain of TCR clone 126479 (TRBV4-1, TRBJ2-5)
CASSRSGSGETQYF

SEQ ID NO: 252959 - protein, 17 aa, Homo sapiens
  CDR3 for alpha chain variable domain of TCR clone 126480 (TRAV26-1, TRAJ53)
CIVRVDDSGGSNYKLTF

SEQ ID NO: 252960 - protein, 15 aa, Homo sapiens
  CDR3 for beta chain variable domain of TCR clone 126480 (TRBV20-1, TRBJ2-7)
CSARGPAAYFYEQYF

SEQ ID NO: 252961 - protein, 11 aa, Homo sapiens
  CDR3 for alpha chain variable domain of TCR clone 126481 (TRAV4, TRAJ23)
CLVAPGGKLIF

SEQ ID NO: 252962 - protein, 14 aa, Homo sapiens
  CDR3 for beta chain variable domain of TCR clone 126481 (TRBV19, TRBJ2-2)
CASTVTANTGELFF

SEQ ID NO: 252963 - protein, 17 aa, Homo sapiens
  CDR3 for alpha chain variable domain of TCR clone 126482 (TRAV27, TRAJ18)
CAGLHRGRGSTLGRLYF

SEQ ID NO: 252964 - protein, 14 aa, Homo sapiens
  CDR3 for beta chain variable domain of TCR clone 126482 (TRBV20-1, TRBJ1-5)
CSARGRGSNQPQRF

SEQ ID NO: 252965 - protein, 14 aa, Homo sapiens
  CDR3 for alpha chain variable domain of TCR clone 126483 (TRAV12-2, TRAJ40)
CAVKIPSGTYKYIF

SEQ ID NO: 252966 - protein, 18 aa, Homo sapiens
  CDR3 for beta chain variable domain of TCR clone 126483 (TRBV12-4, TRBJ2-4)
CASSRTGAVDVAKNIQYF

SEQ ID NO: 252967 - protein, 13 aa, Homo sapiens
  CDR3 for alpha chain variable domain of TCR clone 126484 (TRAV3, TRAJ21)
CAVREPHFNKFYF

SEQ ID NO: 252968 - protein, 13 aa, Homo sapiens
  CDR3 for beta chain variable domain of TCR clone 126484 (TRBV9, TRBJ2-1)
CASSPSGGNEQFF

SEQ ID NO: 252969 - protein, 15 aa, Homo sapiens
  CDR3 for alpha chain variable domain of TCR clone 126485 (TRAV20, TRAJ53)
CAVQASGGSNYQLTF

SEQ ID NO: 252970 - protein, 12 aa, Homo sapiens
  CDR3 for beta chain variable domain of TCR clone 126485 (TRBV7-8, TRBJ2-7)
CASSLGDREQYF

SEQ ID NO: 252971 - protein, 14 aa, Homo sapiens
  CDR3 for alpha chain variable domain of TCR clone 126486 (TRAV26-1, TRAJ34)
CIVRVAYNTDKLIF

SEQ ID NO: 252972 - protein, 17 aa, Homo sapiens
  CDR3 for beta chain variable domain of TCR clone 126486 (TRBV11-2, TRBJ2-6)
CASSQRDIFSGANVLTF

SEQ ID NO: 252973 - protein, 18 aa, Homo sapiens
  CDR3 for alpha chain variable domain of TCR clone 126487 (TRAV17, TRAJ45)
CATSLDLYSGGGADGLTF

SEQ ID NO: 252974 - protein, 15 aa, Homo sapiens
  CDR3 for beta chain variable domain of TCR clone 126487 (TRBV11-2, TRBJ2-1)
CASSKNRALIYEQFF

SEQ ID NO: 252975 - protein, 14 aa, Homo sapiens
  CDR3 for alpha chain variable domain of TCR clone 126488 (TRAV13-1, TRAJ3)
CAASKSSSASKIIF

SEQ ID NO: 252976 - protein, 15 aa, Homo sapiens
  CDR3 for beta chain variable domain of TCR clone 126488 (TRBV19, TRBJ1-2)
CASSVGQVLNYGYTF

SEQ ID NO: 252977 - protein, 14 aa, Homo sapiens
  CDR3 for alpha chain variable domain of TCR clone 126489 (TRAV12-2, TRAJ24)
CAVTPADSWGKLQF

SEQ ID NO: 252978 - protein, 15 aa, Homo sapiens
  CDR3 for beta chain variable domain of TCR clone 126489 (TRBV19, TRBJ1-1)
CASTSGQIQNTEAFF

SEQ ID NO: 252979 - protein, 13 aa, Homo sapiens
  CDR3 for alpha chain variable domain of TCR clone 126490 (TRAV13-2, TRAJ53)
CAENMGSNYKLTF

SEQ ID NO: 252980 - protein, 13 aa, Homo sapiens
  CDR3 for beta chain variable domain of TCR clone 126490 (TRBV7-9, TRBJ1-2)
CASSLKQNYGYTF

SEQ ID NO: 252981 - protein, 12 aa, Homo sapiens
  CDR3 for alpha chain variable domain of TCR clone 126491 (TRAV9-2, TRAJ36)
YALRKGANNLFF

SEQ ID NO: 252982 - protein, 13 aa, Homo sapiens
  CDR3 for beta chain variable domain of TCR clone 126491 (TRBV27, TRBJ1-1)
CASSLSIGAEAFF

SEQ ID NO: 252983 - protein, 15 aa, Homo sapiens
  CDR3 for alpha chain variable domain of TCR clone 126492 (TRAV8-3, TRAJ45)
CASSYSGGGADGLTF

SEQ ID NO: 252984 - protein, 15 aa, Homo sapiens
  CDR3 for beta chain variable domain of TCR clone 126492 (TRBV7-6, TRBJ2-5)
CASSKPTGPQETQYF

SEQ ID NO: 252985 - protein, 14 aa, Homo sapiens
  CDR3 for alpha chain variable domain of TCR clone 126493 (TRAV12-3, TRAJ10)
SHLPLTGGGNKLTF

SEQ ID NO: 252986 - protein, 11 aa, Homo sapiens
  CDR3 for beta chain variable domain of TCR clone 126493 (TRBV29-1, TRBJ2-5)
CSEDRTETQYF

SEQ ID NO: 252987 - protein, 12 aa, Homo sapiens
  CDR3 for alpha chain variable domain of TCR clone 126494 (TRAV8-3, TRAJ20)
CAVDFNDYKLSF

SEQ ID NO: 252988 - protein, 12 aa, Homo sapiens
  CDR3 for beta chain variable domain of TCR clone 126494 (TRBV29-1, TRBJ2-3)
CSVTGGAETQYF

SEQ ID NO: 252989 - protein, 15 aa, Homo sapiens
  CDR3 for alpha chain variable domain of TCR clone 126495 (TRAV26-1, TRAJ29)
CIVRVEGSGNTPLVF

SEQ ID NO: 252990 - protein, 13 aa, Homo sapiens
  CDR3 for beta chain variable domain of TCR clone 126495 (TRBV11-2, TRBJ2-5)
CASSLSSQETQYF

SEQ ID NO: 252991 - protein, 17 aa, Homo sapiens
  CDR3 for alpha chain variable domain of TCR clone 126496 (TRAV8-6, TRAJ58)
CAVSSWVGETSGSRLTF

SEQ ID NO: 252992 - protein, 15 aa, Homo sapiens
  CDR3 for beta chain variable domain of TCR clone 126496 (TRBV7-9, TRBJ1-4)
CASSATGGNNEKLFF

SEQ ID NO: 252993 - protein, 15 aa, Homo sapiens
  CDR3 for alpha chain variable domain of TCR clone 126497 (TRAV8-3, TRAJ45)
CASSYSGGGADGLHF

SEQ ID NO: 252994 - protein, 13 aa, Homo sapiens
  CDR3 for beta chain variable domain of TCR clone 126497 (TRBV10-3, TRBJ2-7)
CASKLAVNYEQYF

SEQ ID NO: 252995 - protein, 14 aa, Homo sapiens
  CDR3 for alpha chain variable domain of TCR clone 126498 (TRAV1-2, TRAJ16)
CAVNQFSDGQKLLF

SEQ ID NO: 252996 - protein, 16 aa, Homo sapiens
  CDR3 for beta chain variable domain of TCR clone 126498 (TRBV19, TRBJ2-1)
CASSKAGPSSYNEQFF

SEQ ID NO: 252997 - protein, 13 aa, Homo sapiens
  CDR3 for alpha chain variable domain of TCR clone 126499 (TRAV8-3, TRAJ44)
CAVVPGTASKLTF

SEQ ID NO: 252998 - protein, 14 aa, Homo sapiens
  CDR3 for beta chain variable domain of TCR clone 126499 (TRBV7-2, TRBJ1-1)
CASSFLTGTTEAFF

SEQ ID NO: 252999 - protein, 16 aa, Homo sapiens
  CDR3 for alpha chain variable domain of TCR clone 126500 (TRAV3, TRAJ37)
CAVRGKGSGNTGKLIF

SEQ ID NO: 253000 - protein, 13 aa, Homo sapiens
  CDR3 for beta chain variable domain of TCR clone 126500 (TRBV4-1, TRBJ2-2)
CASSQENTGELFF

SEQ ID NO: 253001 - protein, 13 aa, Homo sapiens
  CDR3 for alpha chain variable domain of TCR clone 126501 (TRAV17, TRAJ5)
CALRGTGRRALTF

SEQ ID NO: 253002 - protein, 16 aa, Homo sapiens
  CDR3 for beta chain variable domain of TCR clone 126501 (TRBV2, TRBJ2-5)
CASSTLRDRDRETQYF

SEQ ID NO: 253003 - protein, 12 aa, Homo sapiens
  CDR3 for alpha chain variable domain of TCR clone 126502 (TRAV3, TRAJ26)
CAVRDYGQNFVF

SEQ ID NO: 253004 - protein, 16 aa, Homo sapiens
  CDR3 for beta chain variable domain of TCR clone 126502 (TRBV11-3, TRBJ1-2)
CASSPSGREANYGYTF

SEQ ID NO: 253005 - protein, 14 aa, Homo sapiens
  CDR3 for alpha chain variable domain of TCR clone 126503 (TRAV26-2, TRAJ32)
CILFRGGATNKLIF

SEQ ID NO: 253006 - protein, 15 aa, Homo sapiens
  CDR3 for beta chain variable domain of TCR clone 126503 (TRBV9, TRBJ1-6)
CASSVAGTGDSPLHF

SEQ ID NO: 253007 - protein, 12 aa, Homo sapiens
  CDR3 for alpha chain variable domain of TCR clone 126504 (TRAV13-1, TRAJ21)
CAAKEGFNKFYF

SEQ ID NO: 253008 - protein, 18 aa, Homo sapiens
  CDR3 for beta chain variable domain of TCR clone 126504 (TRBV20-1, TRBJ2-6)
CSAETTTTHGSGANGLTF

SEQ ID NO: 253009 - protein, 14 aa, Homo sapiens
  CDR3 for alpha chain variable domain of TCR clone 126505 (TRAV17, TRAJ57)
CATDPQGGSEKLVF

SEQ ID NO: 253010 - protein, 14 aa, Homo sapiens
  CDR3 for beta chain variable domain of TCR clone 126505 (TRBV7-2, TRBJ1-2)
CASSQTGSTYGYTF

SEQ ID NO: 253011 - protein, 12 aa, Homo sapiens
  CDR3 for alpha chain variable domain of TCR clone 126506 (TRAV8-3, TRAJ26)
CSGDNYGQNFVF

SEQ ID NO: 253012 - protein, 13 aa, Homo sapiens
  CDR3 for beta chain variable domain of TCR clone 126506 (TRBV20-1, TRBJ1-1)
CSAPLGGGTEAFF

SEQ ID NO: 253013 - protein, 15 aa, Homo sapiens
  CDR3 for alpha chain variable domain of TCR clone 126507 (TRAV26-2, TRAJ54)
CILRDVGQGAQKLVF

SEQ ID NO: 253014 - protein, 13 aa, Homo sapiens
  CDR3 for beta chain variable domain of TCR clone 126507 (TRBV6-5, TRBJ1-1)
QTSVYFCALRAFF

SEQ ID NO: 253015 - protein, 13 aa, Homo sapiens
  CDR3 for alpha chain variable domain of TCR clone 126508 (TRAV2, TRAJ40)
CAVVTSGTYEYIF

SEQ ID NO: 253016 - protein, 15 aa, Homo sapiens
  CDR3 for beta chain variable domain of TCR clone 126508 (TRBV18, TRBJ2-1)
CASSPPSASYNEQFF

SEQ ID NO: 253017 - protein, 16 aa, Homo sapiens
  CDR3 for alpha chain variable domain of TCR clone 126509 (TRAV4, TRAJ22)
CLVGDLYSGSARQLTF

SEQ ID NO: 253018 - protein, 15 aa, Homo sapiens
  CDR3 for beta chain variable domain of TCR clone 126509 (TRBV6-6, TRBJ2-7)
CASSYSYGGSYEQYF

SEQ ID NO: 253019 - protein, 14 aa, Homo sapiens
  CDR3 for alpha chain variable domain of TCR clone 126510 (TRAV29/DV5, TRAJ32)
CAAAYGGATNKLIF

SEQ ID NO: 253020 - protein, 11 aa, Homo sapiens
  CDR3 for beta chain variable domain of TCR clone 126510 (TRBV11-2, TRBJ2-2)
CASSVPGELFF

SEQ ID NO: 253021 - protein, 15 aa, Homo sapiens
  CDR3 for alpha chain variable domain of TCR clone 126511 (TRAV21, TRAJ53)
CATLNSGGSNYKLTF

SEQ ID NO: 253022 - protein, 14 aa, Homo sapiens
  CDR3 for beta chain variable domain of TCR clone 126511 (TRBV7-2, TRBJ2-3)
CASSSGISTDTQYF

SEQ ID NO: 253023 - protein, 13 aa, Homo sapiens
  CDR3 for alpha chain variable domain of TCR clone 126512 (TRAV13-2, TRAJ48)
CAEMDFGNEKLTL

SEQ ID NO: 253024 - protein, 15 aa, Homo sapiens
  CDR3 for beta chain variable domain of TCR clone 126512 (TRBV7-9, TRBJ1-6)
CASSSPGRGNSPLHF

SEQ ID NO: 253025 - protein, 15 aa, Homo sapiens
  CDR3 for alpha chain variable domain of TCR clone 126513 (TRAV8-3, TRAJ37)
CAVGARASNTGTLIF

SEQ ID NO: 253026 - protein, 15 aa, Homo sapiens
  CDR3 for beta chain variable domain of TCR clone 126513 (TRBV5-4, TRBJ2-3)
CASSLAGRVTDTQYF

SEQ ID NO: 253027 - protein, 13 aa, Homo sapiens
  CDR3 for alpha chain variable domain of TCR clone 126514 (TRAV8-1, TRAJ28)
CAVSGAGSYQLTF

SEQ ID NO: 253028 - protein, 14 aa, Homo sapiens
  CDR3 for beta chain variable domain of TCR clone 126514 (TRBV28, TRBJ2-7)
CASSLLRISYEQYF

SEQ ID NO: 253029 - protein, 14 aa, Homo sapiens
  CDR3 for alpha chain variable domain of TCR clone 126515 (TRAV8-6, TRAJ29)
CAVSRASGYTPLVF

SEQ ID NO: 253030 - protein, 13 aa, Homo sapiens
  CDR3 for beta chain variable domain of TCR clone 126515 (TRBV19, TRBJ1-5)
CASSEGSNQPQHF

SEQ ID NO: 253031 - protein, 14 aa, Homo sapiens
  CDR3 for alpha chain variable domain of TCR clone 126516 (TRAV12-1, TRAJ17)
CVVCYKAAGNKLTF

SEQ ID NO: 253032 - protein, 17 aa, Homo sapiens
  CDR3 for beta chain variable domain of TCR clone 126516 (TRBV20-1, TRBJ2-1)
CSASSSGLAGSYNEQFF

SEQ ID NO: 253033 - protein, 11 aa, Homo sapiens
  CDR3 for alpha chain variable domain of TCR clone 126517 (TRAV1-2, TRAJ20)
CAVANDYKLSF

SEQ ID NO: 253034 - protein, 11 aa, Homo sapiens
  CDR3 for beta chain variable domain of TCR clone 126517 (TRBV29-1, TRBJ2-5)
CSEDRTGAQYF

SEQ ID NO: 253035 - protein, 17 aa, Homo sapiens
  CDR3 for alpha chain variable domain of TCR clone 126518 (TRAV26-2, TRAJ37)
CILRELVGSSKTGKLIF

SEQ ID NO: 253036 - protein, 16 aa, Homo sapiens
  CDR3 for beta chain variable domain of TCR clone 126518 (TRBV6-1, TRBJ2-3)
CASSGNRGRGTDTQYF

SEQ ID NO: 253037 - protein, 11 aa, Homo sapiens
  CDR3 for alpha chain variable domain of TCR clone 126519 (TRAV4, TRAJ23)
CLVAPGGKLIF

SEQ ID NO: 253038 - protein, 19 aa, Homo sapiens
  CDR3 for beta chain variable domain of TCR clone 126519 (TRBV4-1, TRBJ2-1)
CASSQGPLPGLGSRNEQFF

SEQ ID NO: 253039 - protein, 14 aa, Homo sapiens
  CDR3 for alpha chain variable domain of TCR clone 126520 (TRAV16, TRAJ39)
CALSKNNAGKMLTF

SEQ ID NO: 253040 - protein, 16 aa, Homo sapiens
  CDR3 for beta chain variable domain of TCR clone 126520 (TRBV6-6, TRBJ2-1)
CASSYSFSGSYNEQFF

SEQ ID NO: 253041 - protein, 13 aa, Homo sapiens
  CDR3 for alpha chain variable domain of TCR clone 126521 (TRAV21, TRAJ20)
CAVGLRVDYKLSC

SEQ ID NO: 253042 - protein, 13 aa, Homo sapiens
  CDR3 for beta chain variable domain of TCR clone 126521 (TRBV6-1, TRBJ1-1)
CASSRQGNTGAFF

SEQ ID NO: 253043 - protein, 14 aa, Homo sapiens
  CDR3 for alpha chain variable domain of TCR clone 126522 (TRAV8-1, TRAJ5)
CAVRTATGRRALTF

SEQ ID NO: 253044 - protein, 12 aa, Homo sapiens
  CDR3 for beta chain variable domain of TCR clone 126522 (TRBV11-2, TRBJ2-1)
CASSPGNNEQFF

SEQ ID NO: 253045 - protein, 13 aa, Homo sapiens
  CDR3 for alpha chain variable domain of TCR clone 126523 (TRAV21, TRAJ20)
CAVGLRVDYKLSF

SEQ ID NO: 253046 - protein, 15 aa, Homo sapiens
  CDR3 for beta chain variable domain of TCR clone 126523 (TRBV19, TRBJ2-7)
CASSIGGGLVNEQYF

SEQ ID NO: 253047 - protein, 14 aa, Homo sapiens
  CDR3 for alpha chain variable domain of TCR clone 126524 (TRAV8-3, TRAJ42)
CAVGAWGSQGNLIF

SEQ ID NO: 253048 - protein, 11 aa, Homo sapiens
  CDR3 for beta chain variable domain of TCR clone 126524 (TRBV29-1, TRBJ2-5)
CSEDRTGTQYF

SEQ ID NO: 253049 - protein, 12 aa, Homo sapiens
  CDR3 for alpha chain variable domain of TCR clone 126525 (TRAV1-1, TRAJ39)
CAVPVVGNMLTV

SEQ ID NO: 253050 - protein, 18 aa, Homo sapiens
  CDR3 for beta chain variable domain of TCR clone 126525 (TRBV7-9, TRBJ2-7)
CASSLTTSGSRTWYEQYF

SEQ ID NO: 253051 - protein, 16 aa, Homo sapiens
  CDR3 for alpha chain variable domain of TCR clone 126526 (TRAV12-3, TRAJ53)
CAMSPGSGGSNYKLTV

SEQ ID NO: 253052 - protein, 14 aa, Homo sapiens
  CDR3 for beta chain variable domain of TCR clone 126526 (TRBV4-2, TRBJ2-1)
CASGLDRAYNEQFF

SEQ ID NO: 253053 - protein, 18 aa, Homo sapiens
  CDR3 for alpha chain variable domain of TCR clone 126527 (TRAV9-2, TRAJ52)
CALSLHNAGGTSYGKLTF

SEQ ID NO: 253054 - protein, 13 aa, Homo sapiens
  CDR3 for beta chain variable domain of TCR clone 126527 (TRBV7-9, TRBJ1-2)
CASSLKQNYGYTF

SEQ ID NO: 253055 - protein, 12 aa, Homo sapiens
  CDR3 for alpha chain variable domain of TCR clone 126528 (TRAV12-3, TRAJ17)
CEMTLTGNKLTF

SEQ ID NO: 253056 - protein, 20 aa, Homo sapiens
  CDR3 for beta chain variable domain of TCR clone 126528 (TRBV7-8, TRBJ2-2)
CASSHLFPGPTIHITGELFF

SEQ ID NO: 253057 - protein, 14 aa, Homo sapiens
  CDR3 for alpha chain variable domain of TCR clone 126529 (TRAV1-2, TRAJ16)
CAVKRFSDGQKLLF

SEQ ID NO: 253058 - protein, 16 aa, Homo sapiens
  CDR3 for beta chain variable domain of TCR clone 126529 (TRBV7-2, TRBJ2-7)
CASSLDLSGGAYEQYF

SEQ ID NO: 253059 - protein, 16 aa, Homo sapiens
  CDR3 for alpha chain variable domain of TCR clone 126530 (TRAV30, TRAJ24)
CGTEIVDADSRGKFQF

SEQ ID NO: 253060 - protein, 15 aa, Homo sapiens
  CDR3 for beta chain variable domain of TCR clone 126530 (TRBV20-1, TRBJ2-7)
CSARDRVSGMDEQYF

SEQ ID NO: 253061 - protein, 12 aa, Homo sapiens
  CDR3 for alpha chain variable domain of TCR clone 126531 (TRAV25, TRAJ11)
CAGASGYSTLTF

SEQ ID NO: 253062 - protein, 14 aa, Homo sapiens
  CDR3 for beta chain variable domain of TCR clone 126531 (TRBV12-4, TRBJ1-1)
CASSLGTGGTEAFF

SEQ ID NO: 253063 - protein, 13 aa, Homo sapiens
  CDR3 for alpha chain variable domain of TCR clone 126532 (TRAV21, TRAJ37)
CAVSSGNTGNLIF

SEQ ID NO: 253064 - protein, 17 aa, Homo sapiens
  CDR3 for beta chain variable domain of TCR clone 126532 (TRBV5-1, TRBJ2-5)
CASSLLGLAANQETQYF

SEQ ID NO: 253065 - protein, 14 aa, Homo sapiens
  CDR3 for alpha chain variable domain of TCR clone 126533 (TRAV14/DV4, TRAJ32)
SNVLLLTPTNKLIF

SEQ ID NO: 253066 - protein, 14 aa, Homo sapiens
  CDR3 for beta chain variable domain of TCR clone 126533 (TRBV7-2, TRBJ2-7)
CASSPKTSFYEQYF

SEQ ID NO: 253067 - protein, 12 aa, Homo sapiens
  CDR3 for alpha chain variable domain of TCR clone 126534 (TRAV23/DV6, TRAJ30)
CAASKGDAKIIF

SEQ ID NO: 253068 - protein, 18 aa, Homo sapiens
  CDR3 for beta chain variable domain of TCR clone 126534 (TRBV10-3, TRBJ2-3)
CAISESRVGPMRGDTQYF

SEQ ID NO: 253069 - protein, 13 aa, Homo sapiens
  CDR3 for alpha chain variable domain of TCR clone 126535 (TRAV27, TRAJ56)
CAGKPGANSKLTF

SEQ ID NO: 253070 - protein, 11 aa, Homo sapiens
  CDR3 for beta chain variable domain of TCR clone 126535 (TRBV19, TRBJ1-1)
CASSIGSEAFF

SEQ ID NO: 253071 - protein, 16 aa, Homo sapiens
  CDR3 for alpha chain variable domain of TCR clone 126536 (TRAV12-3, TRAJ53)
CAMSPVSGGSNYKLTF

SEQ ID NO: 253072 - protein, 11 aa, Homo sapiens
  CDR3 for beta chain variable domain of TCR clone 126536 (TRBV29-1, TRBJ2-5)
YSEDRTGTQYF

SEQ ID NO: 253073 - protein, 13 aa, Homo sapiens
  CDR3 for alpha chain variable domain of TCR clone 126537 (TRAV3, TRAJ27)
CAVRPLGAGKSTF

SEQ ID NO: 253074 - protein, 12 aa, Homo sapiens
  CDR3 for beta chain variable domain of TCR clone 126537 (TRBV7-9, TRBJ2-3)
CSSPGSTDTQYF

SEQ ID NO: 253075 - protein, 17 aa, Homo sapiens
  CDR3 for alpha chain variable domain of TCR clone 126538 (TRAV2, TRAJ22)
ILQVREADAAEQRQLTF

SEQ ID NO: 253076 - protein, 14 aa, Homo sapiens
  CDR3 for beta chain variable domain of TCR clone 126538 (TRBV19, TRBJ2-1)
CASPTFVLSGEQFF

SEQ ID NO: 253077 - protein, 13 aa, Homo sapiens
  CDR3 for alpha chain variable domain of TCR clone 126539 (TRAV8-3, TRAJ44)
CAVVPGTASKLTF

SEQ ID NO: 253078 - protein, 17 aa, Homo sapiens
  CDR3 for beta chain variable domain of TCR clone 126539 (TRBV13, TRBJ2-3)
CASSLSRVAGGRNTQYF

SEQ ID NO: 253079 - protein, 13 aa, Homo sapiens
  CDR3 for alpha chain variable domain of TCR clone 126540 (TRAV20, TRAJ37)
CAGCSSNTGKLLF

SEQ ID NO: 253080 - protein, 15 aa, Homo sapiens
  CDR3 for beta chain variable domain of TCR clone 126540 (TRBV7-2, TRBJ2-1)
CASSFQADEYNEQFF

SEQ ID NO: 253081 - protein, 14 aa, Homo sapiens
  CDR3 for alpha chain variable domain of TCR clone 126541 (TRAV38-1, TRAJ40)
CALRPTSGTYKYIF

SEQ ID NO: 253082 - protein, 13 aa, Homo sapiens
  CDR3 for beta chain variable domain of TCR clone 126541 (TRBV10-1, TRBJ1-1)
CASRLRENTEAFF

SEQ ID NO: 253083 - protein, 12 aa, Homo sapiens
  CDR3 for alpha chain variable domain of TCR clone 126542 (TRAV20, TRAJ31)
CCAGDRGARLMF

SEQ ID NO: 253084 - protein, 14 aa, Homo sapiens
  CDR3 for beta chain variable domain of TCR clone 126542 (TRBV2, TRBJ1-5)
CASSGTVSNQPQHF

SEQ ID NO: 253085 - protein, 13 aa, Homo sapiens
  CDR3 for alpha chain variable domain of TCR clone 126543 (TRAV12-2, TRAJ20)
CAVYPSNDYKLSF

SEQ ID NO: 253086 - protein, 13 aa, Homo sapiens
  CDR3 for beta chain variable domain of TCR clone 126543 (TRBV7-2, TRBJ2-2)
CASSSVRAGELFF

SEQ ID NO: 253087 - protein, 14 aa, Homo sapiens
  CDR3 for alpha chain variable domain of TCR clone 126544 (TRAV26-1, TRAJ39)
CIVFTNNAGNMLTF

SEQ ID NO: 253088 - protein, 15 aa, Homo sapiens
  CDR3 for beta chain variable domain of TCR clone 126544 (TRBV19, TRBJ2-4)
CASSLTGLTKNTQYF

SEQ ID NO: 253089 - protein, 13 aa, Homo sapiens
  CDR3 for alpha chain variable domain of TCR clone 126545 (TRAV12-3, TRAJ9)
CAMRNTGGFKTIF

SEQ ID NO: 253090 - protein, 14 aa, Homo sapiens
  CDR3 for beta chain variable domain of TCR clone 126545 (TRBV5-4, TRBJ1-1)
CASSLDSRRDEAFF

SEQ ID NO: 253091 - protein, 14 aa, Homo sapiens
  CDR3 for alpha chain variable domain of TCR clone 126546 (TRAV38-1, TRAJ39)
CAFAYNNAGNMLTF

SEQ ID NO: 253092 - protein, 15 aa, Homo sapiens
  CDR3 for beta chain variable domain of TCR clone 126546 (TRBV19, TRBJ2-6)
YASSIGPSGANVLTF

SEQ ID NO: 253093 - protein, 14 aa, Homo sapiens
  CDR3 for alpha chain variable domain of TCR clone 126547 (TRAV36/DV7, TRAJ40)
CAVETTSGTYKYIF

SEQ ID NO: 253094 - protein, 15 aa, Homo sapiens
  CDR3 for beta chain variable domain of TCR clone 126547 (TRBV7-9, TRBJ1-4)
CASGARTGGNEKLFF

SEQ ID NO: 253095 - protein, 15 aa, Homo sapiens
  CDR3 for alpha chain variable domain of TCR clone 126548 (TRAV3, TRAJ42)
CAVRGGTGSQGNLIF

SEQ ID NO: 253096 - protein, 14 aa, Homo sapiens
  CDR3 for beta chain variable domain of TCR clone 126548 (TRBV4-1, TRBJ2-2)
CASSQAVNTRELFF

SEQ ID NO: 253097 - protein, 14 aa, Homo sapiens
  CDR3 for alpha chain variable domain of TCR clone 126549 (TRAV38-1, TRAJ40)
CALRPTSGTYKYIF

SEQ ID NO: 253098 - protein, 13 aa, Homo sapiens
  CDR3 for beta chain variable domain of TCR clone 126549 (TRBV4-2, TRBJ1-1)
CASSQAGNTEAFF

SEQ ID NO: 253099 - protein, 12 aa, Homo sapiens
  CDR3 for alpha chain variable domain of TCR clone 126550 (TRAV13-2, TRAJ23)
CAERHRGGKLIF

SEQ ID NO: 253100 - protein, 14 aa, Homo sapiens
  CDR3 for beta chain variable domain of TCR clone 126550 (TRBV7-3, TRBJ1-1)
CASSLKGGNTEAFF

SEQ ID NO: 253101 - protein, 16 aa, Homo sapiens
  CDR3 for alpha chain variable domain of TCR clone 126551 (TRAV26-1, TRAJ32)
CIVRTNYGGATNKLIF

SEQ ID NO: 253102 - protein, 14 aa, Homo sapiens
  CDR3 for beta chain variable domain of TCR clone 126551 (TRBV19, TRBJ2-1)
CASPTFVLSGEQFF

SEQ ID NO: 253103 - protein, 14 aa, Homo sapiens
  CDR3 for alpha chain variable domain of TCR clone 126552 (TRAV13-2, TRAJ43)
CADIPTYNNNDMRF

SEQ ID NO: 253104 - protein, 15 aa, Homo sapiens
  CDR3 for beta chain variable domain of TCR clone 126552 (TRBV7-9, TRBJ2-2)
CASGPLDTFPGELFF

SEQ ID NO: 253105 - protein, 14 aa, Homo sapiens
  CDR3 for alpha chain variable domain of TCR clone 126553 (TRAV13-1, TRAJ3)
CASEGYSSASKIIF

SEQ ID NO: 253106 - protein, 16 aa, Homo sapiens
  CDR3 for beta chain variable domain of TCR clone 126553 (TRBV27, TRBJ1-1)
CASSLLAGTGETEAFF

SEQ ID NO: 253107 - protein, 13 aa, Homo sapiens
  CDR3 for alpha chain variable domain of TCR clone 126554 (TRAV27, TRAJ45)
CRSSGGGADGLTF

SEQ ID NO: 253108 - protein, 15 aa, Homo sapiens
  CDR3 for beta chain variable domain of TCR clone 126554 (TRBV28, TRBJ2-1)
CASSIIAGGRSEQFF

SEQ ID NO: 253109 - protein, 13 aa, Homo sapiens
  CDR3 for alpha chain variable domain of TCR clone 126555 (TRAV8-1, TRAJ30)
CAVIMNREDKIIF

SEQ ID NO: 253110 - protein, 14 aa, Homo sapiens
  CDR3 for beta chain variable domain of TCR clone 126555 (TRBV7-2, TRBJ1-6)
CASSLQGANSPLHF

SEQ ID NO: 253111 - protein, 13 aa, Homo sapiens
  CDR3 for alpha chain variable domain of TCR clone 126556 (TRAV13-2, TRAJ48)
CAEMDFGNEKLTF

SEQ ID NO: 253112 - protein, 13 aa, Homo sapiens
  CDR3 for beta chain variable domain of TCR clone 126556 (TRBV13, TRBJ2-5)
CASSPEVGETQYS

SEQ ID NO: 253113 - protein, 13 aa, Homo sapiens
  CDR3 for alpha chain variable domain of TCR clone 126557 (TRAV12-2, TRAJ24)
CAVSTDSWGKLQF

SEQ ID NO: 253114 - protein, 16 aa, Homo sapiens
  CDR3 for beta chain variable domain of TCR clone 126557 (TRBV11-2, TRBJ1-2)
CASSPSGREANYGYTF

SEQ ID NO: 253115 - protein, 11 aa, Homo sapiens
  CDR3 for alpha chain variable domain of TCR clone 126558 (TRAV12-3, TRAJ27)
CAMANAGKSTL

SEQ ID NO: 253116 - protein, 12 aa, Homo sapiens
  CDR3 for beta chain variable domain of TCR clone 126558 (TRBV11-2, TRBJ2-2)
CASSLGGGELFF

SEQ ID NO: 253117 - protein, 13 aa, Homo sapiens
  CDR3 for alpha chain variable domain of TCR clone 126559 (TRAV39, TRAJ49)
CAVDRNTGNQVYF

SEQ ID NO: 253118 - protein, 14 aa, Homo sapiens
  CDR3 for beta chain variable domain of TCR clone 126559 (TRBV4-1, TRBJ1-1)
CASSRSGQSFEAFF

SEQ ID NO: 253119 - protein, 13 aa, Homo sapiens
  CDR3 for alpha chain variable domain of TCR clone 126560 (TRAV35, TRAJ22)
CAGLSGSARQLTF

SEQ ID NO: 253120 - protein, 16 aa, Homo sapiens
  CDR3 for beta chain variable domain of TCR clone 126560 (TRBV7-9, TRBJ2-1)
CASRLVLTGQGNEQFF

SEQ ID NO: 253121 - protein, 14 aa, Homo sapiens
  CDR3 for alpha chain variable domain of TCR clone 126561 (TRAV20, TRAJ42)
CAVQAGGSQGNLIF

SEQ ID NO: 253122 - protein, 13 aa, Homo sapiens
  CDR3 for beta chain variable domain of TCR clone 126561 (TRBV20-1, TRBJ2-2)
CSASAAGTGELFF

SEQ ID NO: 253123 - protein, 11 aa, Homo sapiens
  CDR3 for alpha chain variable domain of TCR clone 126562 (TRAV1-2, TRAJ34)
CAGYNTDKLIF

SEQ ID NO: 253124 - protein, 15 aa, Homo sapiens
  CDR3 for beta chain variable domain of TCR clone 126562 (TRBV5-1, TRBJ2-7)
CASSLGDFTTYEQYF

SEQ ID NO: 253125 - protein, 11 aa, Homo sapiens
  CDR3 for alpha chain variable domain of TCR clone 126563 (TRAV21, TRAJ11)
CAVNGYSTLTF

SEQ ID NO: 253126 - protein, 11 aa, Homo sapiens
  CDR3 for beta chain variable domain of TCR clone 126563 (TRBV19, TRBJ1-1)
YASSIGSEAFF

SEQ ID NO: 253127 - protein, 11 aa, Homo sapiens
  CDR3 for alpha chain variable domain of TCR clone 126564 (TRAV3, TRAJ21)
CAVGNFNRFYF

SEQ ID NO: 253128 - protein, 16 aa, Homo sapiens
  CDR3 for beta chain variable domain of TCR clone 126564 (TRBV19, TRBJ2-1)
CASSKAGPRSYNEQFF

SEQ ID NO: 253129 - protein, 13 aa, Homo sapiens
  CDR3 for alpha chain variable domain of TCR clone 126565 (TRAV12-3, TRAJ29)
CAMTLSGNTPLVF

SEQ ID NO: 253130 - protein, 14 aa, Homo sapiens
  CDR3 for beta chain variable domain of TCR clone 126565 (TRBV7-9, TRBJ2-1)
CASSPRDSLYEQFF

SEQ ID NO: 253131 - protein, 15 aa, Homo sapiens
  CDR3 for alpha chain variable domain of TCR clone 126566 (TRAV12-3, TRAJ6)
CAMSATTGGSYIPTF

SEQ ID NO: 253132 - protein, 14 aa, Homo sapiens
  CDR3 for beta chain variable domain of TCR clone 126566 (TRBV11-2, TRBJ2-5)
CASRPLAGRETQYF

SEQ ID NO: 253133 - protein, 12 aa, Homo sapiens
  CDR3 for alpha chain variable domain of TCR clone 126567 (TRAV17, TRAJ20)
CATQSNDYKLSF

SEQ ID NO: 253134 - protein, 16 aa, Homo sapiens
  CDR3 for beta chain variable domain of TCR clone 126567 (TRBV19, TRBJ2-1)
CASSKAGPSSYNEQFF

SEQ ID NO: 253135 - protein, 14 aa, Homo sapiens
  CDR3 for alpha chain variable domain of TCR clone 126568 (TRAV35, TRAJ42)
CCVPYGGNQGNLIF

SEQ ID NO: 253136 - protein, 18 aa, Homo sapiens
  CDR3 for beta chain variable domain of TCR clone 126568 (TRBV13, TRBJ2-6)
CASSPMTSGGSGANVLTF

SEQ ID NO: 253137 - protein, 14 aa, Homo sapiens
  CDR3 for alpha chain variable domain of TCR clone 126569 (TRAV8-2, TRAJ4)
CVVSPSAGYNKLIF

SEQ ID NO: 253138 - protein, 15 aa, Homo sapiens
  CDR3 for beta chain variable domain of TCR clone 126569 (TRBV4-1, TRBJ1-4)
CASSDTGGTNEKLFF

SEQ ID NO: 253139 - protein, 15 aa, Homo sapiens
  CDR3 for alpha chain variable domain of TCR clone 126570 (TRAV13-1, TRAJ44)
CAASRGGGTASKLTF

SEQ ID NO: 253140 - protein, 12 aa, Homo sapiens
  CDR3 for beta chain variable domain of TCR clone 126570 (TRBV11-2, TRBJ2-2)
CASSIGGGELFF

SEQ ID NO: 253141 - protein, 13 aa, Homo sapiens
  CDR3 for alpha chain variable domain of TCR clone 126571 (TRAV13-1, TRAJ37)
CAARSGNTGQLIF

SEQ ID NO: 253142 - protein, 14 aa, Homo sapiens
  CDR3 for beta chain variable domain of TCR clone 126571 (TRBV12-4, TRBJ2-3)
CASSLGQGTDTQYF

SEQ ID NO: 253143 - protein, 13 aa, Homo sapiens
  CDR3 for alpha chain variable domain of TCR clone 126572 (TRAV17, TRAJ54)
CATSWGGAQKLVF

SEQ ID NO: 253144 - protein, 17 aa, Homo sapiens
  CDR3 for beta chain variable domain of TCR clone 126572 (TRBV20-1, TRBJ2-1)
CSASSSGLAGSYNEQFF

SEQ ID NO: 253145 - protein, 20 aa, Homo sapiens
  CDR3 for alpha chain variable domain of TCR clone 126573 (TRAV25, TRAJ21)
TATQTTDVGTYPLSFNKFYF

SEQ ID NO: 253146 - protein, 13 aa, Homo sapiens
  CDR3 for beta chain variable domain of TCR clone 126573 (TRBV7-3, TRBJ1-2)
CASSLKRGYGYTF

SEQ ID NO: 253147 - protein, 12 aa, Homo sapiens
  CDR3 for alpha chain variable domain of TCR clone 126574 (TRAV27, TRAJ13)
CAGAGGYQKVTF

SEQ ID NO: 253148 - protein, 14 aa, Homo sapiens
  CDR3 for beta chain variable domain of TCR clone 126574 (TRBV7-9, TRBJ2-1)
CASSPRDSLYEQFF

SEQ ID NO: 253149 - protein, 14 aa, Homo sapiens
  CDR3 for alpha chain variable domain of TCR clone 126575 (TRAV1-2, TRAJ16)
CAVNRFSDGQTLLF

SEQ ID NO: 253150 - protein, 13 aa, Homo sapiens
  CDR3 for beta chain variable domain of TCR clone 126575 (TRBV7-9, TRBJ1-2)
CASSLKQNYGYTF

SEQ ID NO: 253151 - protein, 13 aa, Homo sapiens
  CDR3 for alpha chain variable domain of TCR clone 126576 (TRAV8-6, TRAJ50)
CAVIKTSYDKVIF

SEQ ID NO: 253152 - protein, 13 aa, Homo sapiens
  CDR3 for beta chain variable domain of TCR clone 126576 (TRBV6-4, TRBJ1-5)
CASSADLNQPQHF

SEQ ID NO: 253153 - protein, 10 aa, Homo sapiens
  CDR3 for alpha chain variable domain of TCR clone 126577 (TRAV23/DV6, TRAJ9)
CAASLSPPNT

SEQ ID NO: 253154 - protein, 18 aa, Homo sapiens
  CDR3 for beta chain variable domain of TCR clone 126577 (TRBV4-1, TRBJ2-7)
CASSQDTGAGSGLNEQYF

SEQ ID NO: 253155 - protein, 11 aa, Homo sapiens
  CDR3 for alpha chain variable domain of TCR clone 126578 (TRAV35, TRAJ34)
CWARNTDKLIF

SEQ ID NO: 253156 - protein, 16 aa, Homo sapiens
  CDR3 for beta chain variable domain of TCR clone 126578 (TRBV7-3, TRBJ2-1)
CASSRPLAGGYNEQFF

SEQ ID NO: 253157 - protein, 15 aa, Homo sapiens
  CDR3 for alpha chain variable domain of TCR clone 126579 (TRAV25, TRAJ52)
CAGTSGGTSYGKLTL

SEQ ID NO: 253158 - protein, 13 aa, Homo sapiens
  CDR3 for beta chain variable domain of TCR clone 126579 (TRBV6-5, TRBJ2-5)
CASSPQGGETQYF

SEQ ID NO: 253159 - protein, 14 aa, Homo sapiens
  CDR3 for alpha chain variable domain of TCR clone 126580 (TRAV1-2, TRAJ8)
CAVREDTGFQKLVF

SEQ ID NO: 253160 - protein, 15 aa, Homo sapiens
  CDR3 for beta chain variable domain of TCR clone 126580 (TRBV7-9, TRBJ2-2)
CASGPLDTFPRELFF

SEQ ID NO: 253161 - protein, 16 aa, Homo sapiens
  CDR3 for alpha chain variable domain of TCR clone 126581 (TRAV20, TRAJ10)
CAVLRGLTGGGNKLTF

SEQ ID NO: 253162 - protein, 14 aa, Homo sapiens
  CDR3 for beta chain variable domain of TCR clone 126581 (TRBV19, TRBJ1-5)
CASGAPDSFLSQHF

SEQ ID NO: 253163 - protein, 18 aa, Homo sapiens
  CDR3 for alpha chain variable domain of TCR clone 126582 (TRAV13-1, TRAJ52)
CAASKRSAGGTSYGKLTF

SEQ ID NO: 253164 - protein, 15 aa, Homo sapiens
  CDR3 for beta chain variable domain of TCR clone 126582 (TRBV7-6, TRBJ1-2)
CASSSGGRGGYGYTF

SEQ ID NO: 253165 - protein, 17 aa, Homo sapiens
  CDR3 for alpha chain variable domain of TCR clone 126583 (TRAV36/DV7, TRAJ52)
CAVAQRAGGTSSGKLTF

SEQ ID NO: 253166 - protein, 15 aa, Homo sapiens
  CDR3 for beta chain variable domain of TCR clone 126583 (TRBV6-5, TRBJ1-2)
CASSYSQAFNYGYTF

SEQ ID NO: 253167 - protein, 16 aa, Homo sapiens
  CDR3 for alpha chain variable domain of TCR clone 126584 (TRAV1-2, TRAJ10)
CAVRGVLTGGGNKLTF

SEQ ID NO: 253168 - protein, 12 aa, Homo sapiens
  CDR3 for beta chain variable domain of TCR clone 126584 (TRBV7-8, TRBJ2-7)
CASSQGDREQYF

SEQ ID NO: 253169 - protein, 13 aa, Homo sapiens
  CDR3 for alpha chain variable domain of TCR clone 126585 (TRAV3, TRAJ3)
CAVADSSASKILF

SEQ ID NO: 253170 - protein, 16 aa, Homo sapiens
  CDR3 for beta chain variable domain of TCR clone 126585 (TRBV5-1, TRBJ2-3)
CASSLGLAVYTDTQYF

SEQ ID NO: 253171 - protein, 13 aa, Homo sapiens
  CDR3 for alpha chain variable domain of TCR clone 126586 (TRAV26-1, TRAJ30)
CIVRVESNDNIIF

SEQ ID NO: 253172 - protein, 17 aa, Homo sapiens
  CDR3 for beta chain variable domain of TCR clone 126586 (TRBV13, TRBJ2-3)
CASSLSRVAGGRNTQYF

SEQ ID NO: 253173 - protein, 14 aa, Homo sapiens
  CDR3 for alpha chain variable domain of TCR clone 126587 (TRAV13-1, TRAJ44)
CAAKATGTASKLTF

SEQ ID NO: 253174 - protein, 13 aa, Homo sapiens
  CDR3 for beta chain variable domain of TCR clone 126587 (TRBV27, TRBJ2-1)
CASRTLGVGEQFF

SEQ ID NO: 253175 - protein, 11 aa, Homo sapiens
  CDR3 for alpha chain variable domain of TCR clone 126588 (TRAV12-1, TRAJ34)
CVVNKGRELIF

SEQ ID NO: 253176 - protein, 15 aa, Homo sapiens
  CDR3 for beta chain variable domain of TCR clone 126588 (TRBV18, TRBJ2-2)
CASSPPVGFTGELFF

SEQ ID NO: 253177 - protein, 14 aa, Homo sapiens
  CDR3 for alpha chain variable domain of TCR clone 126589 (TRAV1-2, TRAJ16)
CAVNRFSDGQKLLF

SEQ ID NO: 253178 - protein, 20 aa, Homo sapiens
  CDR3 for beta chain variable domain of TCR clone 126589 (TRBV7-8, TRBJ2-1)
CASSLAHRLAGVRSYNEQFF

SEQ ID NO: 253179 - protein, 14 aa, Homo sapiens
  CDR3 for alpha chain variable domain of TCR clone 126590 (TRAV35, TRAJ42)
CAGRYGGSQGNLIF

SEQ ID NO: 253180 - protein, 15 aa, Homo sapiens
  CDR3 for beta chain variable domain of TCR clone 126590 (TRBV7-9, TRBJ2-1)
CASSLGWGRANEQFL

SEQ ID NO: 253181 - protein, 10 aa, Homo sapiens
  CDR3 for alpha chain variable domain of TCR clone 126591 (TRAV1-2, TRAJ31)
CAFFDARLMF

SEQ ID NO: 253182 - protein, 16 aa, Homo sapiens
  CDR3 for beta chain variable domain of TCR clone 126591 (TRBV12-4, TRBJ1-5)
CASSRPVGGSNQPQHF

SEQ ID NO: 253183 - protein, 13 aa, Homo sapiens
  CDR3 for alpha chain variable domain of TCR clone 126592 (TRAV20, TRAJ37)
CAGCSSNTGKLIF

SEQ ID NO: 253184 - protein, 15 aa, Homo sapiens
  CDR3 for beta chain variable domain of TCR clone 126592 (TRBV6-1, TRBJ2-3)
CASSERGGITDTQYF

SEQ ID NO: 253185 - protein, 16 aa, Homo sapiens
  CDR3 for alpha chain variable domain of TCR clone 126593 (TRAV30, TRAJ24)
CGTEIVDADSWGKFQF

SEQ ID NO: 253186 - protein, 18 aa, Homo sapiens
  CDR3 for beta chain variable domain of TCR clone 126593 (TRBV20-1, TRBJ2-6)
CSARGSGTTRSGANVLTF

SEQ ID NO: 253187 - protein, 14 aa, Homo sapiens
  CDR3 for alpha chain variable domain of TCR clone 126594 (TRAV12-1, TRAJ3)
CGAARYSSSSKIIF

SEQ ID NO: 253188 - protein, 15 aa, Homo sapiens
  CDR3 for beta chain variable domain of TCR clone 126594 (TRBV7-2, TRBJ2-6)
CASSREGSGANVLTF

SEQ ID NO: 253189 - protein, 13 aa, Homo sapiens
  CDR3 for alpha chain variable domain of TCR clone 126595 (TRAV13-2, TRAJ48)
CAEMDFGNEKLTF

SEQ ID NO: 253190 - protein, 14 aa, Homo sapiens
  CDR3 for beta chain variable domain of TCR clone 126595 (TRBV4-1, TRBJ2-2)
CASSQAVNTGELFF

SEQ ID NO: 253191 - protein, 13 aa, Homo sapiens
  CDR3 for alpha chain variable domain of TCR clone 126596 (TRAV35, TRAJ48)
CWGLNFGNEKLTF

SEQ ID NO: 253192 - protein, 17 aa, Homo sapiens
  CDR3 for beta chain variable domain of TCR clone 126596 (TRBV13, TRBJ2-3)
CASSLSRVAGGRNTQYF

SEQ ID NO: 253193 - protein, 11 aa, Homo sapiens
  CDR3 for alpha chain variable domain of TCR clone 126597 (TRAV3, TRAJ21)
CAVGNFNKFYF

SEQ ID NO: 253194 - protein, 16 aa, Homo sapiens
  CDR3 for beta chain variable domain of TCR clone 126597 (TRBV2, TRBJ2-5)
CASSETQGVGEETQYF

SEQ ID NO: 253195 - protein, 12 aa, Homo sapiens
  CDR3 for alpha chain variable domain of TCR clone 126598 (TRAV16, TRAJ26)
CASKDGGQNFVF

SEQ ID NO: 253196 - protein, 13 aa, Homo sapiens
  CDR3 for beta chain variable domain of TCR clone 126598 (TRBV25-1, TRBJ1-1)
CASSDRGRAEAVF

SEQ ID NO: 253197 - protein, 14 aa, Homo sapiens
  CDR3 for alpha chain variable domain of TCR clone 126599 (TRAV12-2, TRAJ11)
CAVEGGSGYSTLTF

SEQ ID NO: 253198 - protein, 13 aa, Homo sapiens
  CDR3 for beta chain variable domain of TCR clone 126599 (TRBV7-2, TRBJ2-7)
CASSSPSGSEQYF

SEQ ID NO: 253199 - protein, 13 aa, Homo sapiens
  CDR3 for alpha chain variable domain of TCR clone 126600 (TRAV27, TRAJ41)
CAGEGNSGYALNF

SEQ ID NO: 253200 - protein, 15 aa, Homo sapiens
  CDR3 for beta chain variable domain of TCR clone 126600 (TRBV11-3, TRBJ2-3)
CASLKDGREGDTQYF

SEQ ID NO: 253201 - protein, 12 aa, Homo sapiens
  CDR3 for alpha chain variable domain of TCR clone 126601 (TRAV21, TRAJ39)
CAADNAGNMLTF

SEQ ID NO: 253202 - protein, 15 aa, Homo sapiens
  CDR3 for beta chain variable domain of TCR clone 126601 (TRBV7-9, TRBJ1-2)
CASSLGRTVNYGYTF

SEQ ID NO: 253203 - protein, 10 aa, Homo sapiens
  CDR3 for alpha chain variable domain of TCR clone 126602 (TRAV12-2, TRAJ41)
CAVTGYAVNF

SEQ ID NO: 253204 - protein, 15 aa, Homo sapiens
  CDR3 for beta chain variable domain of TCR clone 126602 (TRBV4-2, TRBJ2-1)
CASSQDVGLAGEQFF

SEQ ID NO: 253205 - protein, 17 aa, Homo sapiens
  CDR3 for alpha chain variable domain of TCR clone 126603 (TRAV26-1, TRAJ28)
CIVRALYSGAGSYQLPF

SEQ ID NO: 253206 - protein, 12 aa, Homo sapiens
  CDR3 for beta chain variable domain of TCR clone 126603 (TRBV12-4, TRBJ2-1)
CASRQTENEQFF

SEQ ID NO: 253207 - protein, 11 aa, Homo sapiens
  CDR3 for alpha chain variable domain of TCR clone 126604 (TRAV12-2, TRAJ33)
CAVGSNYQLIW

SEQ ID NO: 253208 - protein, 14 aa, Homo sapiens
  CDR3 for beta chain variable domain of TCR clone 126604 (TRBV19, TRBJ2-1)
CASPTFVLSGEQFF

SEQ ID NO: 253209 - protein, 12 aa, Homo sapiens
  CDR3 for alpha chain variable domain of TCR clone 126605 (TRAV12-3, TRAJ17)
CAMTLTGNKLTF

SEQ ID NO: 253210 - protein, 15 aa, Homo sapiens
  CDR3 for beta chain variable domain of TCR clone 126605 (TRBV7-2, TRBJ2-7)
CASSSGLAGRREQYF

SEQ ID NO: 253211 - protein, 13 aa, Homo sapiens
  CDR3 for alpha chain variable domain of TCR clone 126606 (TRAV26-1, TRAJ40)
CIVGGTGTYKYIF

SEQ ID NO: 253212 - protein, 16 aa, Homo sapiens
  CDR3 for beta chain variable domain of TCR clone 126606 (TRBV20-1, TRBJ1-1)
CSARDRTLSMNTEAFF

SEQ ID NO: 253213 - protein, 14 aa, Homo sapiens
  CDR3 for alpha chain variable domain of TCR clone 126607 (TRAV26-1, TRAJ34)
CIVRVAYNTDKLIF

SEQ ID NO: 253214 - protein, 17 aa, Homo sapiens
  CDR3 for beta chain variable domain of TCR clone 126607 (TRBV20-1, TRBJ2-7)
CSARVQPRTSTSSTSGR

SEQ ID NO: 253215 - protein, 14 aa, Homo sapiens
  CDR3 for alpha chain variable domain of TCR clone 126608 (TRAV16, TRAJ57)
CALPTQGGPEKLVF

SEQ ID NO: 253216 - protein, 17 aa, Homo sapiens
  CDR3 for beta chain variable domain of TCR clone 126608 (TRBV28, TRBJ1-3)
CASWGGISLETPYILER

SEQ ID NO: 253217 - protein, 13 aa, Homo sapiens
  CDR3 for alpha chain variable domain of TCR clone 126609 (TRAV3, TRAJ3)
CAVADSSASKIIF

SEQ ID NO: 253218 - protein, 16 aa, Homo sapiens
  CDR3 for beta chain variable domain of TCR clone 126609 (TRBV5-1, TRBJ2-3)
CANSLGLAVYTDTQYF

SEQ ID NO: 253219 - protein, 14 aa, Homo sapiens
  CDR3 for alpha chain variable domain of TCR clone 126610 (TRAV1-2, TRAJ16)
CDVNRFSDGQKLLF

SEQ ID NO: 253220 - protein, 13 aa, Homo sapiens
  CDR3 for beta chain variable domain of TCR clone 126610 (TRBV10-3, TRBJ2-7)
CASKLAVNYEQYF

SEQ ID NO: 253221 - protein, 13 aa, Homo sapiens
  CDR3 for alpha chain variable domain of TCR clone 126611 (TRAV21, TRAJ27)
CAARPGNASKSTF

SEQ ID NO: 253222 - protein, 13 aa, Homo sapiens
  CDR3 for beta chain variable domain of TCR clone 126611 (TRBV18, TRBJ2-7)
CASQSGGGYEQYF

SEQ ID NO: 253223 - protein, 12 aa, Homo sapiens
  CDR3 for alpha chain variable domain of TCR clone 126612 (TRAV12-2, TRAJ43)
CAVSVNNNDMRF

SEQ ID NO: 253224 - protein, 17 aa, Homo sapiens
  CDR3 for beta chain variable domain of TCR clone 126612 (TRBV3-1, TRBJ2-2)
CASSQFRDKVDTGELFF

SEQ ID NO: 253225 - protein, 12 aa, Homo sapiens
  CDR3 for alpha chain variable domain of TCR clone 126613 (TRAV9-2, TRAJ49)
CALSNTGNQFYF

SEQ ID NO: 253226 - protein, 16 aa, Homo sapiens
  CDR3 for beta chain variable domain of TCR clone 126613 (TRBV7-9, TRBJ2-3)
CASSPWREVGTDTQYF

SEQ ID NO: 253227 - protein, 13 aa, Homo sapiens
  CDR3 for alpha chain variable domain of TCR clone 126614 (TRAV12-1, TRAJ6)
CVVFPGGSYIPTF

SEQ ID NO: 253228 - protein, 13 aa, Homo sapiens
  CDR3 for beta chain variable domain of TCR clone 126614 (TRBV7-2, TRBJ2-7)
CASSSPSGSEQYF

SEQ ID NO: 253229 - protein, 14 aa, Homo sapiens
  CDR3 for alpha chain variable domain of TCR clone 126615 (TRAV12-3, TRAJ15)
CAMIPPQAGTALIF

SEQ ID NO: 253230 - protein, 12 aa, Homo sapiens
  CDR3 for beta chain variable domain of TCR clone 126615 (TRBV11-2, TRBJ2-2)
CASSLGGGELFF

SEQ ID NO: 253231 - protein, 13 aa, Homo sapiens
  CDR3 for alpha chain variable domain of TCR clone 126616 (TRAV39, TRAJ58)
CAGEETGGSRLTF

SEQ ID NO: 253232 - protein, 13 aa, Homo sapiens
  CDR3 for beta chain variable domain of TCR clone 126616 (TRBV15, TRBJ2-7)
CATSTTGHYEQYF

SEQ ID NO: 253233 - protein, 14 aa, Homo sapiens
  CDR3 for alpha chain variable domain of TCR clone 126617 (TRAV1-2, TRAJ16)
CAVNRFSDGHKLLF

SEQ ID NO: 253234 - protein, 13 aa, Homo sapiens
  CDR3 for beta chain variable domain of TCR clone 126617 (TRBV4-1, TRBJ2-1)
CASSQAGGDEQFF

SEQ ID NO: 253235 - protein, 14 aa, Homo sapiens
  CDR3 for alpha chain variable domain of TCR clone 126618 (TRAV2, TRAJ9)
CAVEDRSGGFKTIF

SEQ ID NO: 253236 - protein, 15 aa, Homo sapiens
  CDR3 for beta chain variable domain of TCR clone 126618 (TRBV7-2, TRBJ1-1)
CASSFAGDRDTEAFF

SEQ ID NO: 253237 - protein, 13 aa, Homo sapiens
  CDR3 for alpha chain variable domain of TCR clone 126619 (TRAV17, TRAJ5)
CAPMDTGRRALTF

SEQ ID NO: 253238 - protein, 15 aa, Homo sapiens
  CDR3 for beta chain variable domain of TCR clone 126619 (TRBV7-9, TRBJ1-6)
CASSSPGRGNSPLHF

SEQ ID NO: 253239 - protein, 11 aa, Homo sapiens
  CDR3 for alpha chain variable domain of TCR clone 126620 (TRAV13-1, TRAJ39)
GASHAGNMLTF

SEQ ID NO: 253240 - protein, 14 aa, Homo sapiens
  CDR3 for beta chain variable domain of TCR clone 126620 (TRBV11-2, TRBJ1-5)
CASSLDRGRQPQHF

SEQ ID NO: 253241 - protein, 13 aa, Homo sapiens
  CDR3 for alpha chain variable domain of TCR clone 126621 (TRAV29/DV5, TRAJ31)
CAASRNNNARLMF

SEQ ID NO: 253242 - protein, 14 aa, Homo sapiens
  CDR3 for beta chain variable domain of TCR clone 126621 (TRBV28, TRBJ1-2)
CASRIQGANYGYTF

SEQ ID NO: 253243 - protein, 13 aa, Homo sapiens
  CDR3 for alpha chain variable domain of TCR clone 126622 (TRAV2, TRAJ40)
CAVVTSGTYKYIF

SEQ ID NO: 253244 - protein, 15 aa, Homo sapiens
  CDR3 for beta chain variable domain of TCR clone 126622 (TRBV7-2, TRBJ2-2)
CASRRPGQNTGELFF

SEQ ID NO: 253245 - protein, 13 aa, Homo sapiens
  CDR3 for alpha chain variable domain of TCR clone 126623 (TRAV38-1, TRAJ42)
CARWGGSQGNLIF

SEQ ID NO: 253246 - protein, 10 aa, Homo sapiens
  CDR3 for beta chain variable domain of TCR clone 126623 (TRBV2, TRBJ2-5)
CASSAATQHF

SEQ ID NO: 253247 - protein, 12 aa, Homo sapiens
  CDR3 for alpha chain variable domain of TCR clone 126624 (TRAV12-1, TRAJ40)
CVVSSGTYKYIF

SEQ ID NO: 253248 - protein, 14 aa, Homo sapiens
  CDR3 for beta chain variable domain of TCR clone 126624 (TRBV20-1, TRBJ2-2)
CSAPDTANTGELVF

SEQ ID NO: 253249 - protein, 14 aa, Homo sapiens
  CDR3 for alpha chain variable domain of TCR clone 126625 (TRAV20, TRAJ42)
CAVQAGGSQGNLIF

SEQ ID NO: 253250 - protein, 12 aa, Homo sapiens
  CDR3 for beta chain variable domain of TCR clone 126625 (TRBV7-8, TRBJ2-7)
CASSLGDREQYF

SEQ ID NO: 253251 - protein, 14 aa, Homo sapiens
  CDR3 for alpha chain variable domain of TCR clone 126626 (TRAV3, TRAJ21)
CAVRDAYNFNKFYF

SEQ ID NO: 253252 - protein, 17 aa, Homo sapiens
  CDR3 for beta chain variable domain of TCR clone 126626 (TRBV20-1, TRBJ1-6)
CSARGGYTFSYNSPLHC

SEQ ID NO: 253253 - protein, 14 aa, Homo sapiens
  CDR3 for alpha chain variable domain of TCR clone 126627 (TRAV3, TRAJ34)
CAVRAPGNTDKLIF

SEQ ID NO: 253254 - protein, 14 aa, Homo sapiens
  CDR3 for beta chain variable domain of TCR clone 126627 (TRBV12-5, TRBJ2-5)
CASGSRTHQETQYF

SEQ ID NO: 253255 - protein, 12 aa, Homo sapiens
  CDR3 for alpha chain variable domain of TCR clone 126628 (TRAV12-3, TRAJ40)
CVVYSGTYKYIF

SEQ ID NO: 253256 - protein, 18 aa, Homo sapiens
  CDR3 for beta chain variable domain of TCR clone 126628 (TRBV11-3, TRBJ2-3)
CASSLGGASRGAPNTQYF

SEQ ID NO: 253257 - protein, 12 aa, Homo sapiens
  CDR3 for alpha chain variable domain of TCR clone 126629 (TRAV13-1, TRAJ21)
RAAKEGFNKFYF

SEQ ID NO: 253258 - protein, 13 aa, Homo sapiens
  CDR3 for beta chain variable domain of TCR clone 126629 (TRBV29-1, TRBJ1-3)
CSVEGGSGNTIYF

SEQ ID NO: 253259 - protein, 16 aa, Homo sapiens
  CDR3 for alpha chain variable domain of TCR clone 126630 (TRAV30, TRAJ57)
CGTGWVPQGGSEKLVF

SEQ ID NO: 253260 - protein, 14 aa, Homo sapiens
  CDR3 for beta chain variable domain of TCR clone 126630 (TRBV18, TRBJ1-1)
CASSPGFQGVEAFF

SEQ ID NO: 253261 - protein, 12 aa, Homo sapiens
  CDR3 for alpha chain variable domain of TCR clone 126631 (TRAV21, TRAJ31)
CAVWGNNARLMF

SEQ ID NO: 253262 - protein, 16 aa, Homo sapiens
  CDR3 for beta chain variable domain of TCR clone 126631 (TRBV27, TRBJ2-5)
CASSYGPGGQKDTQYF

SEQ ID NO: 253263 - protein, 13 aa, Homo sapiens
  CDR3 for alpha chain variable domain of TCR clone 126632 (TRAV20, TRAJ37)
CAGCSSNTGKLIF

SEQ ID NO: 253264 - protein, 15 aa, Homo sapiens
  CDR3 for beta chain variable domain of TCR clone 126632 (TRBV9, TRBJ1-6)
CASSVAGTGDSPLHF

SEQ ID NO: 253265 - protein, 14 aa, Homo sapiens
  CDR3 for alpha chain variable domain of TCR clone 126633 (TRAV26-1, TRAJ39)
CIVFTDNAGNMLTF

SEQ ID NO: 253266 - protein, 15 aa, Homo sapiens
  CDR3 for beta chain variable domain of TCR clone 126633 (TRBV19, TRBJ2-4)
CASSLTGLTKNIQYF

SEQ ID NO: 253267 - protein, 14 aa, Homo sapiens
  CDR3 for alpha chain variable domain of TCR clone 126634 (TRAV35, TRAJ22)
CAGLRPGSARQLTF

SEQ ID NO: 253268 - protein, 15 aa, Homo sapiens
  CDR3 for beta chain variable domain of TCR clone 126634 (TRBV7-9, TRBJ2-7)
CASSLALAEAYEQYF

SEQ ID NO: 253269 - protein, 14 aa, Homo sapiens
  CDR3 for alpha chain variable domain of TCR clone 126635 (TRAV12-2, TRAJ53)
CAVKGGGSNFKLTF

SEQ ID NO: 253270 - protein, 14 aa, Homo sapiens
  CDR3 for beta chain variable domain of TCR clone 126635 (TRBV7-7, TRBJ2-2)
CATRQDSDTGELFF

SEQ ID NO: 253271 - protein, 14 aa, Homo sapiens
  CDR3 for alpha chain variable domain of TCR clone 126636 (TRAV17, TRAJ53)
CATDAGGSNYKLTF

SEQ ID NO: 253272 - protein, 12 aa, Homo sapiens
  CDR3 for beta chain variable domain of TCR clone 126636 (TRBV27, TRBJ2-1)
CASRGFYNEQFF

SEQ ID NO: 253273 - protein, 15 aa, Homo sapiens
  CDR3 for alpha chain variable domain of TCR clone 126637 (TRAV20, TRAJ43)
CAVQAGKSSNNDMRV

SEQ ID NO: 253274 - protein, 14 aa, Homo sapiens
  CDR3 for beta chain variable domain of TCR clone 126637 (TRBV27, TRBJ2-1)
CASRHLGGGKEQFF

SEQ ID NO: 253275 - protein, 10 aa, Homo sapiens
  CDR3 for alpha chain variable domain of TCR clone 126638 (TRAV1-2, TRAJ20)
CALNDSKLSF

SEQ ID NO: 253276 - protein, 14 aa, Homo sapiens
  CDR3 for beta chain variable domain of TCR clone 126638 (TRBV19, TRBJ2-1)
CASPTFVLSGEQFF

SEQ ID NO: 253277 - protein, 11 aa, Homo sapiens
  CDR3 for alpha chain variable domain of TCR clone 126639 (TRAV12-3, TRAJ43)
CAMSVSNDMRF

SEQ ID NO: 253278 - protein, 13 aa, Homo sapiens
  CDR3 for beta chain variable domain of TCR clone 126639 (TRBV20-1, TRBJ1-1)
CSAGTVGNTEAFF

SEQ ID NO: 253279 - protein, 14 aa, Homo sapiens
  CDR3 for alpha chain variable domain of TCR clone 126640 (TRAV1-2, TRAJ16)
CAVNRFSDGQKLLF

SEQ ID NO: 253280 - protein, 14 aa, Homo sapiens
  CDR3 for beta chain variable domain of TCR clone 126640 (TRBV7-2, TRBJ1-6)
CASSLQGANSPLHF

SEQ ID NO: 253281 - protein, 16 aa, Homo sapiens
  CDR3 for alpha chain variable domain of TCR clone 126641 (TRAV21, TRAJ37)
CAVRTAGSSNTGKVIF

SEQ ID NO: 253282 - protein, 13 aa, Homo sapiens
  CDR3 for beta chain variable domain of TCR clone 126641 (TRBV7-9, TRBJ2-5)
CASLPSGRETQYF

SEQ ID NO: 253283 - protein, 10 aa, Homo sapiens
  CDR3 for alpha chain variable domain of TCR clone 126642 (TRAV26-1, TRAJ40)
CIAGTYKYIF

SEQ ID NO: 253284 - protein, 16 aa, Homo sapiens
  CDR3 for beta chain variable domain of TCR clone 126642 (TRBV12-5, TRBJ2-5)
CASGPRTSGNQETQYF

SEQ ID NO: 253285 - protein, 13 aa, Homo sapiens
  CDR3 for alpha chain variable domain of TCR clone 126643 (TRAV3, TRAJ21)
CAVREPDFNKFYF

SEQ ID NO: 253286 - protein, 16 aa, Homo sapiens
  CDR3 for beta chain variable domain of TCR clone 126643 (TRBV27, TRBJ2-2)
CASSCRGLVRTGELFF

SEQ ID NO: 253287 - protein, 12 aa, Homo sapiens
  CDR3 for alpha chain variable domain of TCR clone 126644 (TRAV12-3, TRAJ17)
CAMTLTGNKLTF

SEQ ID NO: 253288 - protein, 16 aa, Homo sapiens
  CDR3 for beta chain variable domain of TCR clone 126644 (TRBV19, TRBJ1-1)
CASRVDVTGAAWGAFF

SEQ ID NO: 253289 - protein, 11 aa, Homo sapiens
  CDR3 for alpha chain variable domain of TCR clone 126645 (TRAV21, TRAJ34)
CAVTNTDKLIF

SEQ ID NO: 253290 - protein, 15 aa, Homo sapiens
  CDR3 for beta chain variable domain of TCR clone 126645 (TRBV11-3, TRBJ2-3)
CASLKDGREGDTQYF

SEQ ID NO: 253291 - protein, 15 aa, Homo sapiens
  CDR3 for alpha chain variable domain of TCR clone 126646 (TRAV12-3, TRAJ6)
CAMSATTGGSYIPTF

SEQ ID NO: 253292 - protein, 16 aa, Homo sapiens
  CDR3 for beta chain variable domain of TCR clone 126646 (TRBV2, TRBJ1-4)
CASNLLQGATNEKLFF

SEQ ID NO: 253293 - protein, 13 aa, Homo sapiens
  CDR3 for alpha chain variable domain of TCR clone 126647 (TRAV26-1, TRAJ36)
CIVVGTGANNLFF

SEQ ID NO: 253294 - protein, 13 aa, Homo sapiens
  CDR3 for beta chain variable domain of TCR clone 126647 (TRBV6-5, TRBJ2-6)
CASSTSGPIRLDF

SEQ ID NO: 253295 - protein, 16 aa, Homo sapiens
  CDR3 for alpha chain variable domain of TCR clone 126648 (TRAV30, TRAJ24)
CGTEIVVADSWGKFQF

SEQ ID NO: 253296 - protein, 12 aa, Homo sapiens
  CDR3 for beta chain variable domain of TCR clone 126648 (TRBV11-2, TRBJ2-2)
CASSLGGGELFF

SEQ ID NO: 253297 - protein, 16 aa, Homo sapiens
  CDR3 for alpha chain variable domain of TCR clone 126649 (TRAV30, TRAJ24)
CGPEVVDADSWGKFQF

SEQ ID NO: 253298 - protein, 14 aa, Homo sapiens
  CDR3 for beta chain variable domain of TCR clone 126649 (TRBV12-5, TRBJ2-5)
CASGSRTHQETQYF

SEQ ID NO: 253299 - protein, 14 aa, Homo sapiens
  CDR3 for alpha chain variable domain of TCR clone 126650 (TRAV9-2, TRAJ39)
CALYIYNAGNMLTF

SEQ ID NO: 253300 - protein, 14 aa, Homo sapiens
  CDR3 for beta chain variable domain of TCR clone 126650 (TRBV7-2, TRBJ1-5)
CASSTQGAGQPQHF

SEQ ID NO: 253301 - protein, 15 aa, Homo sapiens
  CDR3 for alpha chain variable domain of TCR clone 126651 (TRAV12-3, TRAJ5)
CAMSGLGTGRRELTF

SEQ ID NO: 253302 - protein, 16 aa, Homo sapiens
  CDR3 for beta chain variable domain of TCR clone 126651 (TRBV20-1, TRBJ2-3)
CSARLHSAGAIDTQYF

SEQ ID NO: 253303 - protein, 13 aa, Homo sapiens
  CDR3 for alpha chain variable domain of TCR clone 126652 (TRAV21, TRAJ27)
CAARPGNAGKSTF

SEQ ID NO: 253304 - protein, 16 aa, Homo sapiens
  CDR3 for beta chain variable domain of TCR clone 126652 (TRBV7-2, TRBJ2-5)
CASSPFPTGGEETQYF

SEQ ID NO: 253305 - protein, 11 aa, Homo sapiens
  CDR3 for alpha chain variable domain of TCR clone 126653 (TRAV12-1, TRAJ30)
CVVNGQDKIIF

SEQ ID NO: 253306 - protein, 12 aa, Homo sapiens
  CDR3 for beta chain variable domain of TCR clone 126653 (TRBV27, TRBJ2-2)
CASKLFTGELFF

SEQ ID NO: 253307 - protein, 11 aa, Homo sapiens
  CDR3 for alpha chain variable domain of TCR clone 126654 (TRAV17, TRAJ49)
CATDAGNQFYF

SEQ ID NO: 253308 - protein, 16 aa, Homo sapiens
  CDR3 for beta chain variable domain of TCR clone 126654 (TRBV7-2, TRBJ1-2)
CASSTTSGTSLGGYTF

SEQ ID NO: 253309 - protein, 11 aa, Homo sapiens
  CDR3 for alpha chain variable domain of TCR clone 126655 (TRAV13-1, TRAJ39)
CASHAGNMLTF

SEQ ID NO: 253310 - protein, 14 aa, Homo sapiens
  CDR3 for beta chain variable domain of TCR clone 126655 (TRBV7-6, TRBJ2-3)
CASSLGTVTDTQYF

SEQ ID NO: 253311 - protein, 12 aa, Homo sapiens
  CDR3 for alpha chain variable domain of TCR clone 126656 (TRAV12-1, TRAJ40)
CVVYSGTYKYIF

SEQ ID NO: 253312 - protein, 18 aa, Homo sapiens
  CDR3 for beta chain variable domain of TCR clone 126656 (TRBV11-2, TRBJ2-3)
CSSSFGGASRGAPNTQYF

SEQ ID NO: 253313 - protein, 14 aa, Homo sapiens
  CDR3 for alpha chain variable domain of TCR clone 126657 (TRAV12-1, TRAJ17)
CVVNYKAAGNNLTF

SEQ ID NO: 253314 - protein, 14 aa, Homo sapiens
  CDR3 for beta chain variable domain of TCR clone 126657 (TRBV7-8, TRBJ2-3)
CASSLEAGTDTQYF

SEQ ID NO: 253315 - protein, 15 aa, Homo sapiens
  CDR3 for alpha chain variable domain of TCR clone 126658 (TRAV17, TRAJ16)
CATALRFSDGQKLLF

SEQ ID NO: 253316 - protein, 12 aa, Homo sapiens
  CDR3 for beta chain variable domain of TCR clone 126658 (TRBV2, TRBJ2-7)
CASCDPDYEQYF

SEQ ID NO: 253317 - protein, 19 aa, Homo sapiens
  CDR3 for alpha chain variable domain of TCR clone 126659 (TRAV2, TRAJ20)
ILQVREADAAVYRDCKLSF

SEQ ID NO: 253318 - protein, 11 aa, Homo sapiens
  CDR3 for beta chain variable domain of TCR clone 126659 (TRBV11-2, TRBJ2-2)
CASSLPGELFF

SEQ ID NO: 253319 - protein, 14 aa, Homo sapiens
  CDR3 for alpha chain variable domain of TCR clone 126660 (TRAV12-1, TRAJ17)
CVVNYKAAGNKLTF

SEQ ID NO: 253320 - protein, 17 aa, Homo sapiens
  CDR3 for beta chain variable domain of TCR clone 126660 (TRBV20-1, TRBJ2-1)
CSASSSGLAGSYNEQFY

SEQ ID NO: 253321 - protein, 13 aa, Homo sapiens
  CDR3 for alpha chain variable domain of TCR clone 126661 (TRAV38-1, TRAJ57)
CALVQGGSEKLVF

SEQ ID NO: 253322 - protein, 17 aa, Homo sapiens
  CDR3 for beta chain variable domain of TCR clone 126661 (TRBV29-1, TRBJ2-3)
CSVDSPPRGARTDTKYF

SEQ ID NO: 253323 - protein, 14 aa, Homo sapiens
  CDR3 for alpha chain variable domain of TCR clone 126662 (TRAV1-2, TRAJ16)
CAVNRFSYGQKLLF

SEQ ID NO: 253324 - protein, 15 aa, Homo sapiens
  CDR3 for beta chain variable domain of TCR clone 126662 (TRBV11-3, TRBJ2-7)
CASSPGPASSYEQYF

SEQ ID NO: 253325 - protein, 12 aa, Homo sapiens
  CDR3 for alpha chain variable domain of TCR clone 126663 (TRAV12-1, TRAJ40)
CVVYSGTYKYIF

SEQ ID NO: 253326 - protein, 14 aa, Homo sapiens
  CDR3 for beta chain variable domain of TCR clone 126663 (TRBV7-6, TRBJ2-1)
CASSLGGGADEQFL

SEQ ID NO: 253327 - protein, 13 aa, Homo sapiens
  CDR3 for alpha chain variable domain of TCR clone 126664 (TRAV12-3, TRAJ41)
CALAPNSGYALNF

SEQ ID NO: 253328 - protein, 14 aa, Homo sapiens
  CDR3 for beta chain variable domain of TCR clone 126664 (TRBV7-2, TRBJ1-3)
CASSLGTAGNTIYF

SEQ ID NO: 253329 - protein, 13 aa, Homo sapiens
  CDR3 for alpha chain variable domain of TCR clone 126665 (TRAV27, TRAJ45)
CRSSGGGADGLTF

SEQ ID NO: 253330 - protein, 13 aa, Homo sapiens
  CDR3 for beta chain variable domain of TCR clone 126665 (TRBV14, TRBJ1-1)
CASSREFGTEAFF

SEQ ID NO: 253331 - protein, 14 aa, Homo sapiens
  CDR3 for alpha chain variable domain of TCR clone 126666 (TRAV1-2, TRAJ8)
CAVREDTGFQKLVF

SEQ ID NO: 253332 - protein, 16 aa, Homo sapiens
  CDR3 for beta chain variable domain of TCR clone 126666 (TRBV7-3, TRBJ2-1)
CASSSTGRRSYNEQFF

SEQ ID NO: 253333 - protein, 14 aa, Homo sapiens
  CDR3 for alpha chain variable domain of TCR clone 126667 (TRAV1-2, TRAJ16)
CAVNRFSDGQKLLF

SEQ ID NO: 253334 - protein, 15 aa, Homo sapiens
  CDR3 for beta chain variable domain of TCR clone 126667 (TRBV6-1, TRBJ2-7)
CASSESMGDFYEQYF

SEQ ID NO: 253335 - protein, 14 aa, Homo sapiens
  CDR3 for alpha chain variable domain of TCR clone 126668 (TRAV1-2, TRAJ17)
CALRRGAAGNKLTF

SEQ ID NO: 253336 - protein, 15 aa, Homo sapiens
  CDR3 for beta chain variable domain of TCR clone 126668 (TRBV7-2, TRBJ1-2)
CASSLAPDRGLGYTF

SEQ ID NO: 253337 - protein, 12 aa, Homo sapiens
  CDR3 for alpha chain variable domain of TCR clone 126669 (TRAV13-1, TRAJ21)
CAAFFNFNKFYF

SEQ ID NO: 253338 - protein, 13 aa, Homo sapiens
  CDR3 for beta chain variable domain of TCR clone 126669 (TRBV10-3, TRBJ2-7)
CASKLAVNYEQYF

SEQ ID NO: 253339 - protein, 15 aa, Homo sapiens
  CDR3 for alpha chain variable domain of TCR clone 126670 (TRAV36/DV7, TRAJ53)
WEGENSGGSNYKLTF

SEQ ID NO: 253340 - protein, 13 aa, Homo sapiens
  CDR3 for beta chain variable domain of TCR clone 126670 (TRBV7-3, TRBJ2-1)
CASSLDSYNEQFF

SEQ ID NO: 253341 - protein, 14 aa, Homo sapiens
  CDR3 for alpha chain variable domain of TCR clone 126671 (TRAV17, TRAJ12)
CAILPMDSSYKLIF

SEQ ID NO: 253342 - protein, 15 aa, Homo sapiens
  CDR3 for beta chain variable domain of TCR clone 126671 (TRBV7-9, TRBJ1-5)
CASSQGHQPNQPQHF

SEQ ID NO: 253343 - protein, 14 aa, Homo sapiens
  CDR3 for alpha chain variable domain of TCR clone 126672 (TRAV13-1, TRAJ44)
CAAKATGTASKLTF

SEQ ID NO: 253344 - protein, 13 aa, Homo sapiens
  CDR3 for beta chain variable domain of TCR clone 126672 (TRBV20-1, TRBJ1-1)
CSARVGGNTEAFF

SEQ ID NO: 253345 - protein, 17 aa, Homo sapiens
  CDR3 for alpha chain variable domain of TCR clone 126673 (TRAV3, TRAJ13)
CAVRDMRRTGGYQKVTF

SEQ ID NO: 253346 - protein, 14 aa, Homo sapiens
  CDR3 for beta chain variable domain of TCR clone 126673 (TRBV5-1, TRBJ2-7)
CARSLTGSGYEQYF

SEQ ID NO: 253347 - protein, 15 aa, Homo sapiens
  CDR3 for alpha chain variable domain of TCR clone 126674 (TRAV3, TRAJ22)
CAVRDRGGSARQLTF

SEQ ID NO: 253348 - protein, 13 aa, Homo sapiens
  CDR3 for beta chain variable domain of TCR clone 126674 (TRBV27, TRBJ2-1)
CASSLSRSHEQFF

SEQ ID NO: 253349 - protein, 17 aa, Homo sapiens
  CDR3 for alpha chain variable domain of TCR clone 126675 (TRAV4, TRAJ13)
CLVGVQGSSRGYQKVTF

SEQ ID NO: 253350 - protein, 16 aa, Homo sapiens
  CDR3 for beta chain variable domain of TCR clone 126675 (TRBV28, TRBJ2-7)
CASSLFFETGGPEQYF

SEQ ID NO: 253351 - protein, 12 aa, Homo sapiens
  CDR3 for alpha chain variable domain of TCR clone 126676 (TRAV21, TRAJ33)
CAKMDSNYQLIW

SEQ ID NO: 253352 - protein, 15 aa, Homo sapiens
  CDR3 for beta chain variable domain of TCR clone 126676 (TRBV4-1, TRBJ2-7)
CASSQQGQGFDEQYF

SEQ ID NO: 253353 - protein, 15 aa, Homo sapiens
  CDR3 for alpha chain variable domain of TCR clone 126677 (TRAV21, TRAJ40)
CALRPQTSGTYKYIF

SEQ ID NO: 253354 - protein, 13 aa, Homo sapiens
  CDR3 for beta chain variable domain of TCR clone 126677 (TRBV7-2, TRBJ2-2)
CASSSVRAGELFF

SEQ ID NO: 253355 - protein, 13 aa, Homo sapiens
  CDR3 for alpha chain variable domain of TCR clone 126678 (TRAV30, TRAJ24)
CGTVTDSWGKLQF

SEQ ID NO: 253356 - protein, 15 aa, Homo sapiens
  CDR3 for beta chain variable domain of TCR clone 126678 (TRBV4-1, TRBJ2-1)
CASSQDAGNYNEQFF

SEQ ID NO: 253357 - protein, 17 aa, Homo sapiens
  CDR3 for alpha chain variable domain of TCR clone 126679 (TRAV4, TRAJ18)
CLVGERSVGSTLGRLYF

SEQ ID NO: 253358 - protein, 14 aa, Homo sapiens
  CDR3 for beta chain variable domain of TCR clone 126679 (TRBV25-1, TRBJ1-1)
CASTHLGGNTEAFF

SEQ ID NO: 253359 - protein, 10 aa, Homo sapiens
  CDR3 for alpha chain variable domain of TCR clone 126680 (TRAV36/DV7, TRAJ49)
CALTGNQFYF

SEQ ID NO: 253360 - protein, 13 aa, Homo sapiens
  CDR3 for beta chain variable domain of TCR clone 126680 (TRBV4-1, TRBJ2-7)
CASSQGQAYEQYL

SEQ ID NO: 253361 - protein, 14 aa, Homo sapiens
  CDR3 for alpha chain variable domain of TCR clone 126681 (TRAV1-2, TRAJ16)
CAVNRFSDGQKLLF

SEQ ID NO: 253362 - protein, 13 aa, Homo sapiens
  CDR3 for beta chain variable domain of TCR clone 126681 (TRBV7-9, TRBJ1-1)
CASSLASNTEAFF

SEQ ID NO: 253363 - protein, 19 aa, Homo sapiens
  CDR3 for alpha chain variable domain of TCR clone 126682 (TRAV2, TRAJ20)
ILQLREADAAVYRDCKLSF

SEQ ID NO: 253364 - protein, 13 aa, Homo sapiens
  CDR3 for beta chain variable domain of TCR clone 126682 (TRBV15, TRBJ1-6)
CATSGGLNSPLHF

SEQ ID NO: 253365 - protein, 12 aa, Homo sapiens
  CDR3 for alpha chain variable domain of TCR clone 126683 (TRAV8-1, TRAJ26)
CAVNNYGQNFFF

SEQ ID NO: 253366 - protein, 15 aa, Homo sapiens
  CDR3 for beta chain variable domain of TCR clone 126683 (TRBV20-1, TRBJ1-1)
CSASWDRFLNTEAFF

SEQ ID NO: 253367 - protein, 15 aa, Homo sapiens
  CDR3 for alpha chain variable domain of TCR clone 126684 (TRAV27, TRAJ38)
CAGRFNAGNNRKLIW

SEQ ID NO: 253368 - protein, 17 aa, Homo sapiens
  CDR3 for beta chain variable domain of TCR clone 126684 (TRBV13, TRBJ2-3)
CASSLSRVAGGRNTQYF

SEQ ID NO: 253369 - protein, 15 aa, Homo sapiens
  CDR3 for alpha chain variable domain of TCR clone 126685 (TRAV26-1, TRAJ3)
CIVRSGYSSASKIIF

SEQ ID NO: 253370 - protein, 14 aa, Homo sapiens
  CDR3 for beta chain variable domain of TCR clone 126685 (TRBV13, TRBJ2-5)
CASYRRLAEETQYF

SEQ ID NO: 253371 - protein, 13 aa, Homo sapiens
  CDR3 for alpha chain variable domain of TCR clone 126686 (TRAV3, TRAJ13)
CAVRDGGYQKVTF

SEQ ID NO: 253372 - protein, 16 aa, Homo sapiens
  CDR3 for beta chain variable domain of TCR clone 126686 (TRBV4-2, TRBJ2-3)
CASSQELAGDTDTQYF

SEQ ID NO: 253373 - protein, 14 aa, Homo sapiens
  CDR3 for alpha chain variable domain of TCR clone 126687 (TRAV38-1, TRAJ45)
CASHSGGGADGLTF

SEQ ID NO: 253374 - protein, 16 aa, Homo sapiens
  CDR3 for beta chain variable domain of TCR clone 126687 (TRBV7-9, TRBJ2-1)
CASSDVAGGSYNEQFF

SEQ ID NO: 253375 - protein, 16 aa, Homo sapiens
  CDR3 for alpha chain variable domain of TCR clone 126688 (TRAV1-1, TRAJ20)
CLLLLRCERQNYKLSF

SEQ ID NO: 253376 - protein, 18 aa, Homo sapiens
  CDR3 for beta chain variable domain of TCR clone 126688 (TRBV20-1, TRBJ2-6)
CSAETTPTHGSGANVLTF

SEQ ID NO: 253377 - protein, 14 aa, Homo sapiens
  CDR3 for alpha chain variable domain of TCR clone 126689 (TRAV2, TRAJ37)
CAVDFTSNTGKLIF

SEQ ID NO: 253378 - protein, 17 aa, Homo sapiens
  CDR3 for beta chain variable domain of TCR clone 126689 (TRBV4-1, TRBJ1-4)
CASSQEGPRGVEEKLFF

SEQ ID NO: 253379 - protein, 12 aa, Homo sapiens
  CDR3 for alpha chain variable domain of TCR clone 126690 (TRAV26-2, TRAJ21)
CILKGNFSKFYF

SEQ ID NO: 253380 - protein, 14 aa, Homo sapiens
  CDR3 for beta chain variable domain of TCR clone 126690 (TRBV12-4, TRBJ1-1)
CASSLGTGGTEAFF

SEQ ID NO: 253381 - protein, 16 aa, Homo sapiens
  CDR3 for alpha chain variable domain of TCR clone 126691 (TRAV3, TRAJ37)
CAVRGKGSGNTGKLIF

SEQ ID NO: 253382 - protein, 13 aa, Homo sapiens
  CDR3 for beta chain variable domain of TCR clone 126691 (TRBV19, TRBJ1-2)
CASSVPGQDGYAF

SEQ ID NO: 253383 - protein, 13 aa, Homo sapiens
  CDR3 for alpha chain variable domain of TCR clone 126692 (TRAV23/DV6, TRAJ36)
CAAGQTGANNLFF

SEQ ID NO: 253384 - protein, 13 aa, Homo sapiens
  CDR3 for beta chain variable domain of TCR clone 126692 (TRBV7-9, TRBJ1-2)
CASSLKQNYGYTF

SEQ ID NO: 253385 - protein, 14 aa, Homo sapiens
  CDR3 for alpha chain variable domain of TCR clone 126693 (TRAV38-2/DV8, TRAJ30)
CAYRSADRDDKIIF

SEQ ID NO: 253386 - protein, 15 aa, Homo sapiens
  CDR3 for beta chain variable domain of TCR clone 126693 (TRBV7-8, TRBJ1-2)
CASSLVRDGGLGYTF

SEQ ID NO: 253387 - protein, 14 aa, Homo sapiens
  CDR3 for alpha chain variable domain of TCR clone 126694 (TRAV23/DV6, TRAJ11)
CAALIGGGYSTLTF

SEQ ID NO: 253388 - protein, 13 aa, Homo sapiens
  CDR3 for beta chain variable domain of TCR clone 126694 (TRBV11-3, TRBJ1-1)
CASSLEGNTEAFF

SEQ ID NO: 253389 - protein, 14 aa, Homo sapiens
  CDR3 for alpha chain variable domain of TCR clone 126695 (TRAV13-1, TRAJ44)
CAAKATGTASKLTF

SEQ ID NO: 253390 - protein, 17 aa, Homo sapiens
  CDR3 for beta chain variable domain of TCR clone 126695 (TRBV7-3, TRBJ2-3)
RASSLMKRMRGADKQYF

SEQ ID NO: 253391 - protein, 15 aa, Homo sapiens
  CDR3 for alpha chain variable domain of TCR clone 126696 (TRAV21, TRAJ13)
CAVRPTSGGYQKVTF

SEQ ID NO: 253392 - protein, 13 aa, Homo sapiens
  CDR3 for beta chain variable domain of TCR clone 126696 (TRBV5-1, TRBJ1-5)
CASSLGAGQPQHF

SEQ ID NO: 253393 - protein, 15 aa, Homo sapiens
  CDR3 for alpha chain variable domain of TCR clone 126697 (TRAV21, TRAJ38)
CAVRQDAGNNRKLIL

SEQ ID NO: 253394 - protein, 16 aa, Homo sapiens
  CDR3 for beta chain variable domain of TCR clone 126697 (TRBV4-2, TRBJ1-1)
CASRPLDGGGDTEAFF

SEQ ID NO: 253395 - protein, 14 aa, Homo sapiens
  CDR3 for alpha chain variable domain of TCR clone 126698 (TRAV23/DV6, TRAJ4)
CAAPSSGGYIKLIF

SEQ ID NO: 253396 - protein, 16 aa, Homo sapiens
  CDR3 for beta chain variable domain of TCR clone 126698 (TRBV19, TRBJ1-1)
CASRFGGPVTGTEAFF

SEQ ID NO: 253397 - protein, 18 aa, Homo sapiens
  CDR3 for alpha chain variable domain of TCR clone 126699 (TRAV21, TRAJ52)
CAVRPSPAGCTSYGKLTF

SEQ ID NO: 253398 - protein, 12 aa, Homo sapiens
  CDR3 for beta chain variable domain of TCR clone 126699 (TRBV11-2, TRBJ2-2)
CASSLGGGELFF

SEQ ID NO: 253399 - protein, 18 aa, Homo sapiens
  CDR3 for alpha chain variable domain of TCR clone 126700 (TRAV21, TRAJ52)
CAVGPSPAGGTSYGKLTF

SEQ ID NO: 253400 - protein, 14 aa, Homo sapiens
  CDR3 for beta chain variable domain of TCR clone 126700 (TRBV4-1, TRBJ2-2)
CASSQAVNTGELFF

SEQ ID NO: 253401 - protein, 16 aa, Homo sapiens
  CDR3 for alpha chain variable domain of TCR clone 126701 (TRAV23/DV6, TRAJ9)
CAASIGGNTVGFKTIF

SEQ ID NO: 253402 - protein, 18 aa, Homo sapiens
  CDR3 for beta chain variable domain of TCR clone 126701 (TRBV7-9, TRBJ2-7)
CASSLTTSGSRTWYEQYF

SEQ ID NO: 253403 - protein, 13 aa, Homo sapiens
  CDR3 for alpha chain variable domain of TCR clone 126702 (TRAV3, TRAJ20)
CAVRSLNDYNLSF

SEQ ID NO: 253404 - protein, 13 aa, Homo sapiens
  CDR3 for beta chain variable domain of TCR clone 126702 (TRBV7-3, TRBJ1-1)
CASSQDWGAEAFF

SEQ ID NO: 253405 - protein, 18 aa, Homo sapiens
  CDR3 for alpha chain variable domain of TCR clone 126703 (TRAV12-3, TRAJ52)
CAMSGGGAGGTSYGKLTF

SEQ ID NO: 253406 - protein, 14 aa, Homo sapiens
  CDR3 for beta chain variable domain of TCR clone 126703 (TRBV7-2, TRBJ2-7)
CASRSQGAAYEQYF

SEQ ID NO: 253407 - protein, 14 aa, Homo sapiens
  CDR3 for alpha chain variable domain of TCR clone 126704 (TRAV16, TRAJ54)
CALSLIQGDQKLVF

SEQ ID NO: 253408 - protein, 17 aa, Homo sapiens
  CDR3 for beta chain variable domain of TCR clone 126704 (TRBV11-2, TRBJ2-4)
CASSSVGPGGHRNIQYF

SEQ ID NO: 253409 - protein, 16 aa, Homo sapiens
  CDR3 for alpha chain variable domain of TCR clone 126705 (TRAV12-2, TRAJ43)
CAGDDMRFGAGTRLTG

SEQ ID NO: 253410 - protein, 16 aa, Homo sapiens
  CDR3 for beta chain variable domain of TCR clone 126705 (TRBV2, TRBJ2-4)
CASSEAPGGEQNIQYF

SEQ ID NO: 253411 - protein, 13 aa, Homo sapiens
  CDR3 for alpha chain variable domain of TCR clone 126706 (TRAV2, TRAJ40)
CAVVTSGTYKYIF

SEQ ID NO: 253412 - protein, 13 aa, Homo sapiens
  CDR3 for beta chain variable domain of TCR clone 126706 (TRBV20-1, TRBJ2-7)
CSATHTSGYEQYF

SEQ ID NO: 253413 - protein, 13 aa, Homo sapiens
  CDR3 for alpha chain variable domain of TCR clone 126707 (TRAV35, TRAJ42)
CAGFPGSQGNLIF

SEQ ID NO: 253414 - protein, 14 aa, Homo sapiens
  CDR3 for beta chain variable domain of TCR clone 126707 (TRBV4-1, TRBJ2-2)
CASSQAVYTGELFF

SEQ ID NO: 253415 - protein, 13 aa, Homo sapiens
  CDR3 for alpha chain variable domain of TCR clone 126708 (TRAV8-4, TRAJ10)
CAAFTGGGNKLTF

SEQ ID NO: 253416 - protein, 15 aa, Homo sapiens
  CDR3 for beta chain variable domain of TCR clone 126708 (TRBV25-1, TRBJ1-4)
CASSPGDSTNEKLFF

SEQ ID NO: 253417 - protein, 14 aa, Homo sapiens
  CDR3 for alpha chain variable domain of TCR clone 126709 (TRAV3, TRAJ33)
CAVRAMDSNYQLIW

SEQ ID NO: 253418 - protein, 19 aa, Homo sapiens
  CDR3 for beta chain variable domain of TCR clone 126709 (TRBV7-3, TRBJ1-2)
CASSFPQGNDGELWLHLRF

SEQ ID NO: 253419 - protein, 13 aa, Homo sapiens
  CDR3 for alpha chain variable domain of TCR clone 126710 (TRAV20, TRAJ20)
CAVRDFNDYKLSF

SEQ ID NO: 253420 - protein, 12 aa, Homo sapiens
  CDR3 for beta chain variable domain of TCR clone 126710 (TRBV7-8, TRBJ2-1)
CASSLGHNEQFF

SEQ ID NO: 253421 - protein, 15 aa, Homo sapiens
  CDR3 for alpha chain variable domain of TCR clone 126711 (TRAV3, TRAJ4)
CAVRDGTGGYNKLIF

SEQ ID NO: 253422 - protein, 16 aa, Homo sapiens
  CDR3 for beta chain variable domain of TCR clone 126711 (TRBV27, TRBJ2-2)
GASSSSGVSNTGELFF

SEQ ID NO: 253423 - protein, 15 aa, Homo sapiens
  CDR3 for alpha chain variable domain of TCR clone 126712 (TRAV26-2, TRAJ26)
CILRDFDNYGQNFVF

SEQ ID NO: 253424 - protein, 16 aa, Homo sapiens
  CDR3 for beta chain variable domain of TCR clone 126712 (TRBV9, TRBJ2-3)
CASSGTSGKDTDTQYF

SEQ ID NO: 253425 - protein, 12 aa, Homo sapiens
  CDR3 for alpha chain variable domain of TCR clone 126713 (TRAV17, TRAJ4)
CATDGGFNKLIF

SEQ ID NO: 253426 - protein, 13 aa, Homo sapiens
  CDR3 for beta chain variable domain of TCR clone 126713 (TRBV29-1, TRBJ2-2)
CSTTGVNTGELFF

SEQ ID NO: 253427 - protein, 14 aa, Homo sapiens
  CDR3 for alpha chain variable domain of TCR clone 126714 (TRAV26-1, TRAJ39)
CIVFTNNAGNMPTF

SEQ ID NO: 253428 - protein, 15 aa, Homo sapiens
  CDR3 for beta chain variable domain of TCR clone 126714 (TRBV19, TRBJ2-4)
CASSLTGLTKNIQYF

SEQ ID NO: 253429 - protein, 12 aa, Homo sapiens
  CDR3 for alpha chain variable domain of TCR clone 126715 (TRAV16, TRAJ9)
CALRAGGFKTIF

SEQ ID NO: 253430 - protein, 13 aa, Homo sapiens
  CDR3 for beta chain variable domain of TCR clone 126715 (TRBV4-3, TRBJ1-1)
CASSQVERSMAFF

SEQ ID NO: 253431 - protein, 15 aa, Homo sapiens
  CDR3 for alpha chain variable domain of TCR clone 126716 (TRAV2, TRAJ15)
CAVEDRGQAGTALIF

SEQ ID NO: 253432 - protein, 15 aa, Homo sapiens
  CDR3 for beta chain variable domain of TCR clone 126716 (TRBV19, TRBJ1-1)
CASTSGQIQNTEAFF

SEQ ID NO: 253433 - protein, 14 aa, Homo sapiens
  CDR3 for alpha chain variable domain of TCR clone 126717 (TRAV8-3, TRAJ4)
CAVGAAGGYNKLIF

SEQ ID NO: 253434 - protein, 17 aa, Homo sapiens
  CDR3 for beta chain variable domain of TCR clone 126717 (TRBV7-8, TRBJ2-6)
CASSAGTGGAGANVLTF

SEQ ID NO: 253435 - protein, 10 aa, Homo sapiens
  CDR3 for alpha chain variable domain of TCR clone 126718 (TRAV8-4, TRAJ43)
CAVRADDMRF

SEQ ID NO: 253436 - protein, 13 aa, Homo sapiens
  CDR3 for beta chain variable domain of TCR clone 126718 (TRBV12-4, TRBJ2-5)
CASSPGTEETQYF

SEQ ID NO: 253437 - protein, 14 aa, Homo sapiens
  CDR3 for alpha chain variable domain of TCR clone 126719 (TRAV12-3, TRAJ33)
CSMSVPGSNYQLIW

SEQ ID NO: 253438 - protein, 12 aa, Homo sapiens
  CDR3 for beta chain variable domain of TCR clone 126719 (TRBV7-8, TRBJ2-7)
CASSLGDREQYF

SEQ ID NO: 253439 - protein, 13 aa, Homo sapiens
  CDR3 for alpha chain variable domain of TCR clone 126720 (TRAV12-3, TRAJ33)
CAMSVNSNYQLIW

SEQ ID NO: 253440 - protein, 14 aa, Homo sapiens
  CDR3 for beta chain variable domain of TCR clone 126720 (TRBV7-9, TRBJ2-1)
CASSPRDSLYEQFF

SEQ ID NO: 253441 - protein, 12 aa, Homo sapiens
  CDR3 for alpha chain variable domain of TCR clone 126721 (TRAV21, TRAJ58)
CAAETSGSRLTV

SEQ ID NO: 253442 - protein, 15 aa, Homo sapiens
  CDR3 for beta chain variable domain of TCR clone 126721 (TRBV20-1, TRBJ2-7)
CSARDPVKGEGEQYF

SEQ ID NO: 253443 - protein, 14 aa, Homo sapiens
  CDR3 for alpha chain variable domain of TCR clone 126722 (TRAV26-1, TRAJ47)
IASSSMEYGNKLVF

SEQ ID NO: 253444 - protein, 13 aa, Homo sapiens
  CDR3 for beta chain variable domain of TCR clone 126722 (TRBV24-1, TRBJ2-7)
CATSDLGPYEQYF

SEQ ID NO: 253445 - protein, 14 aa, Homo sapiens
  CDR3 for alpha chain variable domain of TCR clone 126723 (TRAV1-2, TRAJ8)
CAVREDTGFQKLVF

SEQ ID NO: 253446 - protein, 15 aa, Homo sapiens
  CDR3 for beta chain variable domain of TCR clone 126723 (TRBV6-3, TRBJ2-7)
CASSRTGVNLYEQYF

SEQ ID NO: 253447 - protein, 15 aa, Homo sapiens
  CDR3 for alpha chain variable domain of TCR clone 126724 (TRAV12-3, TRAJ11)
CAMSEENSGYSTLTF

SEQ ID NO: 253448 - protein, 14 aa, Homo sapiens
  CDR3 for beta chain variable domain of TCR clone 126724 (TRBV7-3, TRBJ2-1)
CASSLSGSYNEQFF

SEQ ID NO: 253449 - protein, 13 aa, Homo sapiens
  CDR3 for alpha chain variable domain of TCR clone 126725 (TRAV8-3, TRAJ43)
CAVGPDNNNDMRF

SEQ ID NO: 253450 - protein, 13 aa, Homo sapiens
  CDR3 for beta chain variable domain of TCR clone 126725 (TRBV7-3, TRBJ1-1)
CASSQDWGAEAFF

SEQ ID NO: 253451 - protein, 15 aa, Homo sapiens
  CDR3 for alpha chain variable domain of TCR clone 126726 (TRAV2, TRAJ15)
CAVEDRGQAGTALIF

SEQ ID NO: 253452 - protein, 13 aa, Homo sapiens
  CDR3 for beta chain variable domain of TCR clone 126726 (TRBV10-2, TRBJ2-7)
CASGASRGYEQYF

SEQ ID NO: 253453 - protein, 17 aa, Homo sapiens
  CDR3 for alpha chain variable domain of TCR clone 126727 (TRAV16, TRAJ42)
CALSPKLYGGGQGNLIF

SEQ ID NO: 253454 - protein, 13 aa, Homo sapiens
  CDR3 for beta chain variable domain of TCR clone 126727 (TRBV19, TRBJ1-5)
CASSTRRDQPQHF

SEQ ID NO: 253455 - protein, 14 aa, Homo sapiens
  CDR3 for alpha chain variable domain of TCR clone 126728 (TRAV12-3, TRAJ9)
CAMSPNTGGFKTIF

SEQ ID NO: 253456 - protein, 12 aa, Homo sapiens
  CDR3 for beta chain variable domain of TCR clone 126728 (TRBV19, TRBJ1-5)
CACSIAQQPQHF

SEQ ID NO: 253457 - protein, 14 aa, Homo sapiens
  CDR3 for alpha chain variable domain of TCR clone 126729 (TRAV8-4, TRAJ12)
CAVSPMDSSHKLIF

SEQ ID NO: 253458 - protein, 15 aa, Homo sapiens
  CDR3 for beta chain variable domain of TCR clone 126729 (TRBV5-5, TRBJ2-1)
CASSPEAETYNEQFF

SEQ ID NO: 253459 - protein, 16 aa, Homo sapiens
  CDR3 for alpha chain variable domain of TCR clone 126730 (TRAV30, TRAJ24)
CGTEIVDADSWGKFQF

SEQ ID NO: 253460 - protein, 14 aa, Homo sapiens
  CDR3 for beta chain variable domain of TCR clone 126730 (TRBV5-4, TRBJ1-3)
RASSSQSAGNTIYF

SEQ ID NO: 253461 - protein, 14 aa, Homo sapiens
  CDR3 for alpha chain variable domain of TCR clone 126731 (TRAV23/DV6, TRAJ6)
CAASRSGGSYIPTF

SEQ ID NO: 253462 - protein, 17 aa, Homo sapiens
  CDR3 for beta chain variable domain of TCR clone 126731 (TRBV20-1, TRBJ2-1)
CSASASVLAGSYNEQFF

SEQ ID NO: 253463 - protein, 16 aa, Homo sapiens
  CDR3 for alpha chain variable domain of TCR clone 126732 (TRAV1-2, TRAJ10)
CAVRGVLTGGGNKLTF

SEQ ID NO: 253464 - protein, 14 aa, Homo sapiens
  CDR3 for beta chain variable domain of TCR clone 126732 (TRBV11-2, TRBJ2-7)
CASSSTGEGYEQYF

SEQ ID NO: 253465 - protein, 13 aa, Homo sapiens
  CDR3 for alpha chain variable domain of TCR clone 126733 (TRAV3, TRAJ15)
CAVRDQAGTALIF

SEQ ID NO: 253466 - protein, 16 aa, Homo sapiens
  CDR3 for beta chain variable domain of TCR clone 126733 (TRBV3-1, TRBJ2-5)
CASSQDWASGQETQYF

SEQ ID NO: 253467 - protein, 11 aa, Homo sapiens
  CDR3 for alpha chain variable domain of TCR clone 126734 (TRAV1-1, TRAJ23)
CAVRQGGKLIF

SEQ ID NO: 253468 - protein, 15 aa, Homo sapiens
  CDR3 for beta chain variable domain of TCR clone 126734 (TRBV12-4, TRBJ2-5)
CASSPPTGLQETQYF

SEQ ID NO: 253469 - protein, 13 aa, Homo sapiens
  CDR3 for alpha chain variable domain of TCR clone 126735 (TRAV17, TRAJ5)
CAPMDTGRRALTF

SEQ ID NO: 253470 - protein, 15 aa, Homo sapiens
  CDR3 for beta chain variable domain of TCR clone 126735 (TRBV5-1, TRBJ2-1)
CASTGSGRTYNEQFF

SEQ ID NO: 253471 - protein, 14 aa, Homo sapiens
  CDR3 for alpha chain variable domain of TCR clone 126736 (TRAV21, TRAJ35)
CAVMPIGFGNVLHC

SEQ ID NO: 253472 - protein, 14 aa, Homo sapiens
  CDR3 for beta chain variable domain of TCR clone 126736 (TRBV25-1, TRBJ1-1)
CASTHLGGNTEAFF

SEQ ID NO: 253473 - protein, 13 aa, Homo sapiens
  CDR3 for alpha chain variable domain of TCR clone 126737 (TRAV12-2, TRAJ9)
CAVRWAGGFKTIF

SEQ ID NO: 253474 - protein, 15 aa, Homo sapiens
  CDR3 for beta chain variable domain of TCR clone 126737 (TRBV5-1, TRBJ1-4)
CASSLTADSDEKLFS

SEQ ID NO: 253475 - protein, 12 aa, Homo sapiens
  CDR3 for alpha chain variable domain of TCR clone 126738 (TRAV13-1, TRAJ21)
CAAKEGFNKFYF

SEQ ID NO: 253476 - protein, 15 aa, Homo sapiens
  CDR3 for beta chain variable domain of TCR clone 126738 (TRBV11-2, TRBJ2-1)
CASSLGTSGLNEQFF

SEQ ID NO: 253477 - protein, 16 aa, Homo sapiens
  CDR3 for alpha chain variable domain of TCR clone 126739 (TRAV13-1, TRAJ13)
CTAFFLGVTRKLPFEL

SEQ ID NO: 253478 - protein, 15 aa, Homo sapiens
  CDR3 for beta chain variable domain of TCR clone 126739 (TRBV7-8, TRBJ2-1)
CASSLADSLYNEQFF

SEQ ID NO: 253479 - protein, 17 aa, Homo sapiens
  CDR3 for alpha chain variable domain of TCR clone 126740 (TRAV3, TRAJ6)
CAVRDGPRAGGSYIPNF

SEQ ID NO: 253480 - protein, 14 aa, Homo sapiens
  CDR3 for beta chain variable domain of TCR clone 126740 (TRBV7-2, TRBJ2-7)
CASSPKTSFYEQYF

SEQ ID NO: 253481 - protein, 13 aa, Homo sapiens
  CDR3 for alpha chain variable domain of TCR clone 126741 (TRAV8-4, TRAJ48)
CAVSLFGNEKLNF

SEQ ID NO: 253482 - protein, 15 aa, Homo sapiens
  CDR3 for beta chain variable domain of TCR clone 126741 (TRBV20-1, TRBJ2-7)
CSARKGLAESYEQYF

SEQ ID NO: 253483 - protein, 15 aa, Homo sapiens
  CDR3 for alpha chain variable domain of TCR clone 126742 (TRAV12-3, TRAJ10)
CASYIPTGGGNKLTF

SEQ ID NO: 253484 - protein, 15 aa, Homo sapiens
  CDR3 for beta chain variable domain of TCR clone 126742 (TRBV7-2, TRBJ1-6)
CASSLGPDRGMPLHF

SEQ ID NO: 253485 - protein, 14 aa, Homo sapiens
  CDR3 for alpha chain variable domain of TCR clone 126743 (TRAV12-3, TRAJ42)
CAMNYGGSQGNLIF

SEQ ID NO: 253486 - protein, 15 aa, Homo sapiens
  CDR3 for beta chain variable domain of TCR clone 126743 (TRBV29-1, TRBJ2-7)
CSVEFFDRGSYEQYF

SEQ ID NO: 253487 - protein, 14 aa, Homo sapiens
  CDR3 for alpha chain variable domain of TCR clone 126744 (TRAV29/DV5, TRAJ36)
CAARRKTGANNLFF

SEQ ID NO: 253488 - protein, 13 aa, Homo sapiens
  CDR3 for beta chain variable domain of TCR clone 126744 (TRBV12-5, TRBJ2-3)
CASGDRQSDTQYF

SEQ ID NO: 253489 - protein, 12 aa, Homo sapiens
  CDR3 for alpha chain variable domain of TCR clone 126745 (TRAV30, TRAJ43)
CGTEERGNDMRF

SEQ ID NO: 253490 - protein, 19 aa, Homo sapiens
  CDR3 for beta chain variable domain of TCR clone 126745 (TRBV7-9, TRBJ2-6)
CASSLESATVLPGANVLTF

SEQ ID NO: 253491 - protein, 16 aa, Homo sapiens
  CDR3 for alpha chain variable domain of TCR clone 126746 (TRAV30, TRAJ24)
CGTEIVDADSWGKFQF

SEQ ID NO: 253492 - protein, 15 aa, Homo sapiens
  CDR3 for beta chain variable domain of TCR clone 126746 (TRBV5-1, TRBJ2-7)
CASSLNPAGSYEQYF

SEQ ID NO: 253493 - protein, 14 aa, Homo sapiens
  CDR3 for alpha chain variable domain of TCR clone 126747 (TRAV12-2, TRAJ11)
CAVEGGSGYSTLTF

SEQ ID NO: 253494 - protein, 16 aa, Homo sapiens
  CDR3 for beta chain variable domain of TCR clone 126747 (TRBV12-5, TRBJ2-5)
CASGPRTSGNQETQYF

SEQ ID NO: 253495 - protein, 14 aa, Homo sapiens
  CDR3 for alpha chain variable domain of TCR clone 126748 (TRAV26-1, TRAJ39)
CIVRGSRAGNMLTF

SEQ ID NO: 253496 - protein, 15 aa, Homo sapiens
  CDR3 for beta chain variable domain of TCR clone 126748 (TRBV7-9, TRBJ1-5)
YASSQGHQPNQPQHF

SEQ ID NO: 253497 - protein, 15 aa, Homo sapiens
  CDR3 for alpha chain variable domain of TCR clone 126749 (TRAV8-4, TRAJ7)
CAVSGGNYGNNRLAF

SEQ ID NO: 253498 - protein, 11 aa, Homo sapiens
  CDR3 for beta chain variable domain of TCR clone 126749 (TRBV20-1, TRBJ2-1)
CSLSSGSERFF

SEQ ID NO: 253499 - protein, 12 aa, Homo sapiens
  CDR3 for alpha chain variable domain of TCR clone 126750 (TRAV3, TRAJ27)
CAVRDGAGNSTF

SEQ ID NO: 253500 - protein, 13 aa, Homo sapiens
  CDR3 for beta chain variable domain of TCR clone 126750 (TRBV10-3, TRBJ1-2)
CAINADLNYGYTF

SEQ ID NO: 253501 - protein, 12 aa, Homo sapiens
  CDR3 for alpha chain variable domain of TCR clone 126751 (TRAV13-2, TRAJ8)
CAPWLGFQKLVF

SEQ ID NO: 253502 - protein, 15 aa, Homo sapiens
  CDR3 for beta chain variable domain of TCR clone 126751 (TRBV7-8, TRBJ1-5)
CASSLALGGQQPQHF

SEQ ID NO: 253503 - protein, 14 aa, Homo sapiens
  CDR3 for alpha chain variable domain of TCR clone 126752 (TRAV12-3, TRAJ10)
SHLPLTGGGNKLTF

SEQ ID NO: 253504 - protein, 14 aa, Homo sapiens
  CDR3 for beta chain variable domain of TCR clone 126752 (TRBV7-2, TRBJ1-2)
CASSRGGTNYGYTF

SEQ ID NO: 253505 - protein, 14 aa, Homo sapiens
  CDR3 for alpha chain variable domain of TCR clone 126753 (TRAV16, TRAJ31)
CALSGRNNNARPMF

SEQ ID NO: 253506 - protein, 12 aa, Homo sapiens
  CDR3 for beta chain variable domain of TCR clone 126753 (TRBV11-2, TRBJ1-2)
CASSREGDGYTF

SEQ ID NO: 253507 - protein, 15 aa, Homo sapiens
  CDR3 for alpha chain variable domain of TCR clone 126754 (TRAV12-3, TRAJ6)
CAMSATTGGSYIPTF

SEQ ID NO: 253508 - protein, 15 aa, Homo sapiens
  CDR3 for beta chain variable domain of TCR clone 126754 (TRBV12-4, TRBJ2-5)
CASSPPTGLQETQFF

SEQ ID NO: 253509 - protein, 14 aa, Homo sapiens
  CDR3 for alpha chain variable domain of TCR clone 126755 (TRAV8-3, TRAJ4)
CAVGAAGGYNKLIF

SEQ ID NO: 253510 - protein, 15 aa, Homo sapiens
  CDR3 for beta chain variable domain of TCR clone 126755 (TRBV5-4, TRBJ2-6)
CASSSGRTGANVLTF

SEQ ID NO: 253511 - protein, 11 aa, Homo sapiens
  CDR3 for alpha chain variable domain of TCR clone 126756 (TRAV2, TRAJ13)
CASGGYQKVTF

SEQ ID NO: 253512 - protein, 12 aa, Homo sapiens
  CDR3 for beta chain variable domain of TCR clone 126756 (TRBV2, TRBJ2-1)
GRGLPSYNEQFF

SEQ ID NO: 253513 - protein, 20 aa, Homo sapiens
  CDR3 for alpha chain variable domain of TCR clone 126757 (TRAV12-3, TRAJ41)
SLFIRDSQPSDSATPEALNF

SEQ ID NO: 253514 - protein, 14 aa, Homo sapiens
  CDR3 for beta chain variable domain of TCR clone 126757 (TRBV6-1, TRBJ1-3)
CASVQGGGGNTIYF

SEQ ID NO: 253515 - protein, 12 aa, Homo sapiens
  CDR3 for alpha chain variable domain of TCR clone 126758 (TRAV3, TRAJ20)
CAVRDGDYKLSF

SEQ ID NO: 253516 - protein, 13 aa, Homo sapiens
  CDR3 for beta chain variable domain of TCR clone 126758 (TRBV9, TRBJ2-1)
CASSVGQVGEQFF

SEQ ID NO: 253517 - protein, 15 aa, Homo sapiens
  CDR3 for alpha chain variable domain of TCR clone 126759 (TRAV21, TRAJ52)
CATRGGGTSYGKLTF

SEQ ID NO: 253518 - protein, 15 aa, Homo sapiens
  CDR3 for beta chain variable domain of TCR clone 126759 (TRBV7-9, TRBJ1-6)
CASSSPGRGNSPLHF

SEQ ID NO: 253519 - protein, 15 aa, Homo sapiens
  CDR3 for alpha chain variable domain of TCR clone 126760 (TRAV21, TRAJ53)
CATLNSGGSNYKLTF

SEQ ID NO: 253520 - protein, 15 aa, Homo sapiens
  CDR3 for beta chain variable domain of TCR clone 126760 (TRBV7-6, TRBJ1-5)
CASGQSSGINQPQHF

SEQ ID NO: 253521 - protein, 17 aa, Homo sapiens
  CDR3 for alpha chain variable domain of TCR clone 126761 (TRAV20, TRAJ42)
CAVQAWGYGGSQGNLIF

SEQ ID NO: 253522 - protein, 16 aa, Homo sapiens
  CDR3 for beta chain variable domain of TCR clone 126761 (TRBV29-1, TRBJ2-5)
CSVEGLAGDYQEIQYF

SEQ ID NO: 253523 - protein, 13 aa, Homo sapiens
  CDR3 for alpha chain variable domain of TCR clone 126762 (TRAV23/DV6, TRAJ12)
CAPRVDSSYKLIF

SEQ ID NO: 253524 - protein, 14 aa, Homo sapiens
  CDR3 for beta chain variable domain of TCR clone 126762 (TRBV7-6, TRBJ2-3)
CASSLGTVTDTQYF

SEQ ID NO: 253525 - protein, 15 aa, Homo sapiens
  CDR3 for alpha chain variable domain of TCR clone 126763 (TRAV12-3, TRAJ6)
CAMSATTGGSYIPTF

SEQ ID NO: 253526 - protein, 17 aa, Homo sapiens
  CDR3 for beta chain variable domain of TCR clone 126763 (TRBV5-4, TRBJ2-1)
CASSSAGGRGPYNEQFF

SEQ ID NO: 253527 - protein, 16 aa, Homo sapiens
  CDR3 for alpha chain variable domain of TCR clone 126764 (TRAV30, TRAJ24)
CGTEIVDADSWGRFQF

SEQ ID NO: 253528 - protein, 13 aa, Homo sapiens
  CDR3 for beta chain variable domain of TCR clone 126764 (TRBV20-1, TRBJ1-1)
CSARGGGNTEAFF

SEQ ID NO: 253529 - protein, 13 aa, Homo sapiens
  CDR3 for alpha chain variable domain of TCR clone 126765 (TRAV23/DV6, TRAJ43)
CAASMGGNNDMRF

SEQ ID NO: 253530 - protein, 12 aa, Homo sapiens
  CDR3 for beta chain variable domain of TCR clone 126765 (TRBV11-2, TRBJ2-2)
CASSLGGGELFF

SEQ ID NO: 253531 - protein, 12 aa, Homo sapiens
  CDR3 for alpha chain variable domain of TCR clone 126766 (TRAV16, TRAJ9)
CALSSGGFKTIF

SEQ ID NO: 253532 - protein, 14 aa, Homo sapiens
  CDR3 for beta chain variable domain of TCR clone 126766 (TRBV7-9, TRBJ2-1)
CASSLAGPYNELFF

SEQ ID NO: 253533 - protein, 16 aa, Homo sapiens
  CDR3 for alpha chain variable domain of TCR clone 126767 (TRAV13-1, TRAJ48)
CAASIFGNFGHEKLTF

SEQ ID NO: 253534 - protein, 12 aa, Homo sapiens
  CDR3 for beta chain variable domain of TCR clone 126767 (TRBV14, TRBJ2-4)
CASSNLKSIQYF

SEQ ID NO: 253535 - protein, 12 aa, Homo sapiens
  CDR3 for alpha chain variable domain of TCR clone 126768 (TRAV21, TRAJ11)
CAVRGGNSTLTF

SEQ ID NO: 253536 - protein, 16 aa, Homo sapiens
  CDR3 for beta chain variable domain of TCR clone 126768 (TRBV5-1, TRBJ2-1)
CASSIRSGGSYNEQFF

SEQ ID NO: 253537 - protein, 14 aa, Homo sapiens
  CDR3 for alpha chain variable domain of TCR clone 126769 (TRAV1-2, TRAJ16)
CAVNRFSDGQKLLF

SEQ ID NO: 253538 - protein, 14 aa, Homo sapiens
  CDR3 for beta chain variable domain of TCR clone 126769 (TRBV7-3, TRBJ1-1)
CQQLRGQMNTEAFF

SEQ ID NO: 253539 - protein, 10 aa, Homo sapiens
  CDR3 for alpha chain variable domain of TCR clone 126770 (TRAV8-4, TRAJ43)
CAVSADDMRF

SEQ ID NO: 253540 - protein, 15 aa, Homo sapiens
  CDR3 for beta chain variable domain of TCR clone 126770 (TRBV5-1, TRBJ2-3)
CASSVTSGATDTQYF

SEQ ID NO: 253541 - protein, 15 aa, Homo sapiens
  CDR3 for alpha chain variable domain of TCR clone 126771 (TRAV12-2, TRAJ9)
CAVNNERTGGFKTIF

SEQ ID NO: 253542 - protein, 14 aa, Homo sapiens
  CDR3 for beta chain variable domain of TCR clone 126771 (TRBV4-1, TRBJ1-4)
CANSQERKNEKLFF

SEQ ID NO: 253543 - protein, 13 aa, Homo sapiens
  CDR3 for alpha chain variable domain of TCR clone 126772 (TRAV36/DV7, TRAJ37)
CAVFSSNTGKLIF

SEQ ID NO: 253544 - protein, 13 aa, Homo sapiens
  CDR3 for beta chain variable domain of TCR clone 126772 (TRBV2, TRBJ2-3)
CASILAGGQGQYF

SEQ ID NO: 253545 - protein, 16 aa, Homo sapiens
  CDR3 for alpha chain variable domain of TCR clone 126773 (TRAV8-3, TRAJ13)
CAVGAYPSGGYQKVTF

SEQ ID NO: 253546 - protein, 15 aa, Homo sapiens
  CDR3 for beta chain variable domain of TCR clone 126773 (TRBV19, TRBJ1-5)
GASSIVWADNQPQHF

SEQ ID NO: 253547 - protein, 16 aa, Homo sapiens
  CDR3 for alpha chain variable domain of TCR clone 126774 (TRAV30, TRAJ24)
CGTEIVDADSWGKFPF

SEQ ID NO: 253548 - protein, 14 aa, Homo sapiens
  CDR3 for beta chain variable domain of TCR clone 126774 (TRBV6-1, TRBJ1-3)
CASVQGGGGNTIYF

SEQ ID NO: 253549 - protein, 16 aa, Homo sapiens
  CDR3 for alpha chain variable domain of TCR clone 126775 (TRAV30, TRAJ24)
CGTEIVDADSWGKFQF

SEQ ID NO: 253550 - protein, 15 aa, Homo sapiens
  CDR3 for beta chain variable domain of TCR clone 126775 (TRBV20-1, TRBJ2-6)
CSARDRGPGANVLIF

SEQ ID NO: 253551 - protein, 16 aa, Homo sapiens
  CDR3 for alpha chain variable domain of TCR clone 126776 (TRAV4, TRAJ22)
CLVGDIYSGSARQLTF

SEQ ID NO: 253552 - protein, 16 aa, Homo sapiens
  CDR3 for beta chain variable domain of TCR clone 126776 (TRBV7-9, TRBJ2-3)
CASSPWREVGTDTQYF

SEQ ID NO: 253553 - protein, 19 aa, Homo sapiens
  CDR3 for alpha chain variable domain of TCR clone 126777 (TRAV26-1, TRAJ52)
CIVRANRNAGGTSYGKLTF

SEQ ID NO: 253554 - protein, 15 aa, Homo sapiens
  CDR3 for beta chain variable domain of TCR clone 126777 (TRBV12-4, TRBJ2-5)
CASSPPTGLQETQYF

SEQ ID NO: 253555 - protein, 14 aa, Homo sapiens
  CDR3 for alpha chain variable domain of TCR clone 126778 (TRAV12-2, TRAJ13)
CAVKKTGGYQKVTF

SEQ ID NO: 253556 - protein, 15 aa, Homo sapiens
  CDR3 for beta chain variable domain of TCR clone 126778 (TRBV20-1, TRBJ2-7)
CSAKDRVSGMDEQYF

SEQ ID NO: 253557 - protein, 16 aa, Homo sapiens
  CDR3 for alpha chain variable domain of TCR clone 126779 (TRAV8-6, TRAJ37)
CAVSGLGSSNTGKLIF

SEQ ID NO: 253558 - protein, 15 aa, Homo sapiens
  CDR3 for beta chain variable domain of TCR clone 126779 (TRBV20-1, TRBJ1-5)
CSARSGPSMSQPQHF

SEQ ID NO: 253559 - protein, 11 aa, Homo sapiens
  CDR3 for alpha chain variable domain of TCR clone 126780 (TRAV1-1, TRAJ23)
CAVRQGGKLIF

SEQ ID NO: 253560 - protein, 15 aa, Homo sapiens
  CDR3 for beta chain variable domain of TCR clone 126780 (TRBV4-1, TRBJ2-3)
CASSRGQGIPDTQYF

SEQ ID NO: 253561 - protein, 14 aa, Homo sapiens
  CDR3 for alpha chain variable domain of TCR clone 126781 (TRAV4, TRAJ43)
CLVGPMYNNNDMRF

SEQ ID NO: 253562 - protein, 14 aa, Homo sapiens
  CDR3 for beta chain variable domain of TCR clone 126781 (TRBV19, TRBJ2-1)
CASPTFVLSGEQFF

SEQ ID NO: 253563 - protein, 11 aa, Homo sapiens
  CDR3 for alpha chain variable domain of TCR clone 126782 (TRAV1-1, TRAJ23)
CAVRQGGKLIF

SEQ ID NO: 253564 - protein, 15 aa, Homo sapiens
  CDR3 for beta chain variable domain of TCR clone 126782 (TRBV19, TRBJ2-3)
CASRETMGSRNTQYF

SEQ ID NO: 253565 - protein, 12 aa, Homo sapiens
  CDR3 for alpha chain variable domain of TCR clone 126783 (TRAV16, TRAJ21)
CALLGNFNKFYF

SEQ ID NO: 253566 - protein, 17 aa, Homo sapiens
  CDR3 for beta chain variable domain of TCR clone 126783 (TRBV4-1, TRBJ1-4)
CASSQEGPRGVEEKLFF

SEQ ID NO: 253567 - protein, 15 aa, Homo sapiens
  CDR3 for alpha chain variable domain of TCR clone 126784 (TRAV8-3, TRAJ45)
CASSYSGGGADGLTF

SEQ ID NO: 253568 - protein, 16 aa, Homo sapiens
  CDR3 for beta chain variable domain of TCR clone 126784 (TRBV6-5, TRBJ2-7)
CASSSDPTSGFYEQYF

SEQ ID NO: 253569 - protein, 12 aa, Homo sapiens
  CDR3 for alpha chain variable domain of TCR clone 126785 (TRAV27, TRAJ20)
CAGASNDYKLSF

SEQ ID NO: 253570 - protein, 13 aa, Homo sapiens
  CDR3 for beta chain variable domain of TCR clone 126785 (TRBV7-2, TRBJ2-7)
CASSSPSGSEQYF

SEQ ID NO: 253571 - protein, 12 aa, Homo sapiens
  CDR3 for alpha chain variable domain of TCR clone 126786 (TRAV12-3, TRAJ17)
CAMTLTGNKLTF

SEQ ID NO: 253572 - protein, 13 aa, Homo sapiens
  CDR3 for beta chain variable domain of TCR clone 126786 (TRBV7-3, TRBJ1-1)
CASSQDWGAEAFL

SEQ ID NO: 253573 - protein, 12 aa, Homo sapiens
  CDR3 for alpha chain variable domain of TCR clone 126787 (TRAV36/DV7, TRAJ54)
CAVVRGAQKLVF

SEQ ID NO: 253574 - protein, 13 aa, Homo sapiens
  CDR3 for beta chain variable domain of TCR clone 126787 (TRBV20-1, TRBJ1-1)
CSARGAGNTEAFF

SEQ ID NO: 253575 - protein, 14 aa, Homo sapiens
  CDR3 for alpha chain variable domain of TCR clone 126788 (TRAV27, TRAJ49)
CAGRPEGTGNQLYF

SEQ ID NO: 253576 - protein, 14 aa, Homo sapiens
  CDR3 for beta chain variable domain of TCR clone 126788 (TRBV18, TRBJ2-5)
CASSPGVSQETQYF

SEQ ID NO: 253577 - protein, 15 aa, Homo sapiens
  CDR3 for alpha chain variable domain of TCR clone 126789 (TRAV8-3, TRAJ27)
CAVGPSKTNAGKSTL

SEQ ID NO: 253578 - protein, 12 aa, Homo sapiens
  CDR3 for beta chain variable domain of TCR clone 126789 (TRBV11-2, TRBJ2-2)
CASSLGGGELFF

SEQ ID NO: 253579 - protein, 11 aa, Homo sapiens
  CDR3 for alpha chain variable domain of TCR clone 126790 (TRAV12-1, TRAJ30)
CVVNGQDKIIF

SEQ ID NO: 253580 - protein, 15 aa, Homo sapiens
  CDR3 for beta chain variable domain of TCR clone 126790 (TRBV12-4, TRBJ1-2)
CASSPITGGGYGYTF

SEQ ID NO: 253581 - protein, 15 aa, Homo sapiens
  CDR3 for alpha chain variable domain of TCR clone 126791 (TRAV35, TRAJ23)
CAGPLGNNQGGKIIF

SEQ ID NO: 253582 - protein, 14 aa, Homo sapiens
  CDR3 for beta chain variable domain of TCR clone 126791 (TRBV7-9, TRBJ1-1)
CASTPLQSYTEAFF

SEQ ID NO: 253583 - protein, 14 aa, Homo sapiens
  CDR3 for alpha chain variable domain of TCR clone 126792 (TRAV26-1, TRAJ5)
CIVRVRFNRRALTF

SEQ ID NO: 253584 - protein, 17 aa, Homo sapiens
  CDR3 for beta chain variable domain of TCR clone 126792 (TRBV29-1, TRBJ2-3)
CSVEVPAGETSTDTQYF

SEQ ID NO: 253585 - protein, 14 aa, Homo sapiens
  CDR3 for alpha chain variable domain of TCR clone 126793 (TRAV27, TRAJ49)
CAGRPEGTGNQFYF

SEQ ID NO: 253586 - protein, 15 aa, Homo sapiens
  CDR3 for beta chain variable domain of TCR clone 126793 (TRBV5-5, TRBJ1-5)
CASSLKGGGEQPQHF

SEQ ID NO: 253587 - protein, 16 aa, Homo sapiens
  CDR3 for alpha chain variable domain of TCR clone 126794 (TRAV12-3, TRAJ53)
CAMSPGSGGSNYKLTF

SEQ ID NO: 253588 - protein, 16 aa, Homo sapiens
  CDR3 for beta chain variable domain of TCR clone 126794 (TRBV4-2, TRBJ1-1)
CASSQSGFGMNTEAFF

SEQ ID NO: 253589 - protein, 14 aa, Homo sapiens
  CDR3 for alpha chain variable domain of TCR clone 126795 (TRAV26-1, TRAJ45)
CIVRVVGGSDRLTF

SEQ ID NO: 253590 - protein, 16 aa, Homo sapiens
  CDR3 for beta chain variable domain of TCR clone 126795 (TRBV7-9, TRBJ1-1)
CASSLTQVRSNTEAFF

SEQ ID NO: 253591 - protein, 14 aa, Homo sapiens
  CDR3 for alpha chain variable domain of TCR clone 126796 (TRAV12-2, TRAJ17)
CAVLFKAAGNKLTF

SEQ ID NO: 253592 - protein, 15 aa, Homo sapiens
  CDR3 for beta chain variable domain of TCR clone 126796 (TRBV2, TRBJ2-1)
CASSEEREGDNEQFF

SEQ ID NO: 253593 - protein, 12 aa, Homo sapiens
  CDR3 for alpha chain variable domain of TCR clone 126797 (TRAV12-3, TRAJ17)
CAMTLTGNKLTF

SEQ ID NO: 253594 - protein, 15 aa, Homo sapiens
  CDR3 for beta chain variable domain of TCR clone 126797 (TRBV28, TRBJ2-4)
CAAGSGTLLMGIQYF

SEQ ID NO: 253595 - protein, 15 aa, Homo sapiens
  CDR3 for alpha chain variable domain of TCR clone 126798 (TRAV2, TRAJ22)
CAVPSRGGSARQLTF

SEQ ID NO: 253596 - protein, 14 aa, Homo sapiens
  CDR3 for beta chain variable domain of TCR clone 126798 (TRBV7-3, TRBJ2-1)
CASSLAGGTNEQFF

SEQ ID NO: 253597 - protein, 14 aa, Homo sapiens
  CDR3 for alpha chain variable domain of TCR clone 126799 (TRAV12-2, TRAJ40)
CAVKIPSGTYKYIF

SEQ ID NO: 253598 - protein, 16 aa, Homo sapiens
  CDR3 for beta chain variable domain of TCR clone 126799 (TRBV7-8, TRBJ2-4)
CASSAERTLAKNIQYF

SEQ ID NO: 253599 - protein, 23 aa, Homo sapiens
  CDR3 for alpha chain variable domain of TCR clone 126800 (TRAV8-3, )
CAVVTTRIPDIQNPDPAVSQLRD

SEQ ID NO: 253600 - protein, 14 aa, Homo sapiens
  CDR3 for beta chain variable domain of TCR clone 126800 (TRBV11-2, TRBJ2-7)
CASSPSTTSYEQYF

SEQ ID NO: 253601 - protein, 12 aa, Homo sapiens
  CDR3 for alpha chain variable domain of TCR clone 126801 (TRAV12-1, TRAJ40)
CVFYSGTYKYSF

SEQ ID NO: 253602 - protein, 18 aa, Homo sapiens
  CDR3 for beta chain variable domain of TCR clone 126801 (TRBV12-4, TRBJ2-2)
CASSLVAGTRGRTGELFF

SEQ ID NO: 253603 - protein, 16 aa, Homo sapiens
  CDR3 for alpha chain variable domain of TCR clone 126802 (TRAV8-1, TRAJ42)
CAVTSSYGGSQGNLIF

SEQ ID NO: 253604 - protein, 12 aa, Homo sapiens
  CDR3 for beta chain variable domain of TCR clone 126802 (TRBV6-3, TRBJ2-7)
CASSLGRRGLYF

SEQ ID NO: 253605 - protein, 14 aa, Homo sapiens
  CDR3 for alpha chain variable domain of TCR clone 126803 (TRAV16, TRAJ17)
CALSGRAAGNKLTF

SEQ ID NO: 253606 - protein, 14 aa, Homo sapiens
  CDR3 for beta chain variable domain of TCR clone 126803 (TRBV3-1, TRBJ1-2)
CQQPYSPPEGGYTF

SEQ ID NO: 253607 - protein, 12 aa, Homo sapiens
  CDR3 for alpha chain variable domain of TCR clone 126804 (TRAV12-3, TRAJ17)
CAMTLTGNKLTF

SEQ ID NO: 253608 - protein, 16 aa, Homo sapiens
  CDR3 for beta chain variable domain of TCR clone 126804 (TRBV7-3, TRBJ2-1)
CASSVEGYRSYNEQFF

SEQ ID NO: 253609 - protein, 17 aa, Homo sapiens
  CDR3 for alpha chain variable domain of TCR clone 126805 (TRAV26-1, TRAJ11)
CIVRVGQSNSGYSTLTF

SEQ ID NO: 253610 - protein, 15 aa, Homo sapiens
  CDR3 for beta chain variable domain of TCR clone 126805 (TRBV27, TRBJ2-5)
CASSLIPSGGENQYF

SEQ ID NO: 253611 - protein, 14 aa, Homo sapiens
  CDR3 for alpha chain variable domain of TCR clone 126806 (TRAV13-1, TRAJ44)
CAAKATGTASKLTF

SEQ ID NO: 253612 - protein, 14 aa, Homo sapiens
  CDR3 for beta chain variable domain of TCR clone 126806 (TRBV5-1, TRBJ2-7)
CASSATGGYDEQYF

SEQ ID NO: 253613 - protein, 11 aa, Homo sapiens
  CDR3 for alpha chain variable domain of TCR clone 126807 (TRAV1-2, TRAJ20)
CAVSNDYKLSF

SEQ ID NO: 253614 - protein, 13 aa, Homo sapiens
  CDR3 for beta chain variable domain of TCR clone 126807 (TRBV7-2, TRBJ2-7)
CASSSPSGSEQYF

SEQ ID NO: 253615 - protein, 13 aa, Homo sapiens
  CDR3 for alpha chain variable domain of TCR clone 126808 (TRAV9-2, TRAJ49)
CALIQIGGNQFYF

SEQ ID NO: 253616 - protein, 12 aa, Homo sapiens
  CDR3 for beta chain variable domain of TCR clone 126808 (TRBV11-2, TRBJ2-2)
CASSLGGGELFF

SEQ ID NO: 253617 - protein, 18 aa, Homo sapiens
  CDR3 for alpha chain variable domain of TCR clone 126809 (TRAV26-1, TRAJ52)
CIVRVEGAGGTSYGKLTF

SEQ ID NO: 253618 - protein, 13 aa, Homo sapiens
  CDR3 for beta chain variable domain of TCR clone 126809 (TRBV7-3, TRBJ1-2)
CASSLKRGYGYTC

SEQ ID NO: 253619 - protein, 14 aa, Homo sapiens
  CDR3 for alpha chain variable domain of TCR clone 126810 (TRAV12-2, TRAJ24)
CAVTPADSWGKLQF

SEQ ID NO: 253620 - protein, 15 aa, Homo sapiens
  CDR3 for beta chain variable domain of TCR clone 126810 (TRBV28, TRBJ2-1)
CASSIIAGGRSEQFF

SEQ ID NO: 253621 - protein, 15 aa, Homo sapiens
  CDR3 for alpha chain variable domain of TCR clone 126811 (TRAV9-2, TRAJ13)
CALSDWSGGYQKVTF

SEQ ID NO: 253622 - protein, 15 aa, Homo sapiens
  CDR3 for beta chain variable domain of TCR clone 126811 (TRBV20-1, TRBJ2-7)
CSARGPLAGGREQYF

SEQ ID NO: 253623 - protein, 15 aa, Homo sapiens
  CDR3 for alpha chain variable domain of TCR clone 126812 (TRAV17, TRAJ57)
CATGPSQGGSEKLVF

SEQ ID NO: 253624 - protein, 15 aa, Homo sapiens
  CDR3 for beta chain variable domain of TCR clone 126812 (TRBV4-1, TRBJ1-4)
CASSDTGGTNEKLFF

SEQ ID NO: 253625 - protein, 17 aa, Homo sapiens
  CDR3 for alpha chain variable domain of TCR clone 126813 (TRAV3, TRAJ6)
CAVRDGPRAGGSYIPTF

SEQ ID NO: 253626 - protein, 18 aa, Homo sapiens
  CDR3 for beta chain variable domain of TCR clone 126813 (TRBV7-9, TRBJ2-7)
CASSLTTSGSRTWYEQYS

SEQ ID NO: 253627 - protein, 12 aa, Homo sapiens
  CDR3 for alpha chain variable domain of TCR clone 126814 (TRAV1-1, TRAJ39)
CAVPVVGNMLTF

SEQ ID NO: 253628 - protein, 13 aa, Homo sapiens
  CDR3 for beta chain variable domain of TCR clone 126814 (TRBV7-2, TRBJ1-1)
CASNLKGAKVAFF

SEQ ID NO: 253629 - protein, 12 aa, Homo sapiens
  CDR3 for alpha chain variable domain of TCR clone 126815 (TRAV36/DV7, TRAJ54)
RAVVRGAQKLVF

SEQ ID NO: 253630 - protein, 14 aa, Homo sapiens
  CDR3 for beta chain variable domain of TCR clone 126815 (TRBV7-3, TRBJ1-1)
CASSVKGGNTEAFF

SEQ ID NO: 253631 - protein, 12 aa, Homo sapiens
  CDR3 for alpha chain variable domain of TCR clone 126816 (TRAV25, TRAJ45)
DYSGGGADGLTF

SEQ ID NO: 253632 - protein, 19 aa, Homo sapiens
  CDR3 for beta chain variable domain of TCR clone 126816 (TRBV28, TRBJ2-7)
WASSYSGTSRLGWVYEQYF

SEQ ID NO: 253633 - protein, 12 aa, Homo sapiens
  CDR3 for alpha chain variable domain of TCR clone 126817 (TRAV3, TRAJ27)
CAVRDGAGKSTF

SEQ ID NO: 253634 - protein, 13 aa, Homo sapiens
  CDR3 for beta chain variable domain of TCR clone 126817 (TRBV10-3, TRBJ1-2)
CAINADRNYGYTF

SEQ ID NO: 253635 - protein, 12 aa, Homo sapiens
  CDR3 for alpha chain variable domain of TCR clone 126818 (TRAV12-1, TRAJ40)
CVVYSGTYRYIF

SEQ ID NO: 253636 - protein, 15 aa, Homo sapiens
  CDR3 for beta chain variable domain of TCR clone 126818 (TRBV7-9, TRBJ1-6)
CASSSPGRGNSPLHF

SEQ ID NO: 253637 - protein, 18 aa, Homo sapiens
  CDR3 for alpha chain variable domain of TCR clone 126819 (TRAV21, TRAJ52)
CAVRPSPAGGTSYGKLTF

SEQ ID NO: 253638 - protein, 13 aa, Homo sapiens
  CDR3 for beta chain variable domain of TCR clone 126819 (TRBV7-2, TRBJ1-1)
CASNLKGAKVAFF

SEQ ID NO: 253639 - protein, 13 aa, Homo sapiens
  CDR3 for alpha chain variable domain of TCR clone 126820 (TRAV8-3, TRAJ28)
CAVGAVGSYQLTF

SEQ ID NO: 253640 - protein, 16 aa, Homo sapiens
  CDR3 for beta chain variable domain of TCR clone 126820 (TRBV7-2, TRBJ2-7)
CASRSRGRRTSSTSGR

SEQ ID NO: 253641 - protein, 14 aa, Homo sapiens
  CDR3 for alpha chain variable domain of TCR clone 126821 (TRAV26-1, TRAJ38)
CIADNAGNNRELIW

SEQ ID NO: 253642 - protein, 15 aa, Homo sapiens
  CDR3 for beta chain variable domain of TCR clone 126821 (TRBV7-6, TRBJ1-4)
CASSLGAGAGEKLFF

SEQ ID NO: 253643 - protein, 13 aa, Homo sapiens
  CDR3 for alpha chain variable domain of TCR clone 126822 (TRAV1-1, TRAJ9)
CAATHTGGFKTIF

SEQ ID NO: 253644 - protein, 14 aa, Homo sapiens
  CDR3 for beta chain variable domain of TCR clone 126822 (TRBV20-1, TRBJ2-1)
CSAQIGGSANEQFF

SEQ ID NO: 253645 - protein, 13 aa, Homo sapiens
  CDR3 for alpha chain variable domain of TCR clone 126823 (TRAV21, TRAJ56)
CAVRLGANSKLTF

SEQ ID NO: 253646 - protein, 12 aa, Homo sapiens
  CDR3 for beta chain variable domain of TCR clone 126823 (TRBV12-4, TRBJ2-3)
CASSSTTDTQYC

SEQ ID NO: 253647 - protein, 21 aa, Homo sapiens
  CDR3 for alpha chain variable domain of TCR clone 126824 (TRAV26-1, TRAJ38)
CIADNAGNNHIQNPDPAVSQL

SEQ ID NO: 253648 - protein, 13 aa, Homo sapiens
  CDR3 for beta chain variable domain of TCR clone 126824 (TRBV20-1, TRBJ1-1)
CSARGGGNTEAFF

SEQ ID NO: 253649 - protein, 12 aa, Homo sapiens
  CDR3 for alpha chain variable domain of TCR clone 126825 (TRAV12-2, TRAJ58)
CAVEWSGSRLTF

SEQ ID NO: 253650 - protein, 17 aa, Homo sapiens
  CDR3 for beta chain variable domain of TCR clone 126825 (TRBV7-8, TRBJ2-6)
CASSAGTGGAGANVLTF

SEQ ID NO: 253651 - protein, 12 aa, Homo sapiens
  CDR3 for alpha chain variable domain of TCR clone 126826 (TRAV29/DV5, TRAJ26)
FAAIPSGQNFVF

SEQ ID NO: 253652 - protein, 15 aa, Homo sapiens
  CDR3 for beta chain variable domain of TCR clone 126826 (TRBV19, TRBJ1-5)
CASSDSGPRNQPQHF

SEQ ID NO: 253653 - protein, 15 aa, Homo sapiens
  CDR3 for alpha chain variable domain of TCR clone 126827 (TRAV12-3, TRAJ49)
CAMAVTSNTGNQFYF

SEQ ID NO: 253654 - protein, 18 aa, Homo sapiens
  CDR3 for beta chain variable domain of TCR clone 126827 (TRBV4-1, TRBJ1-5)
CASSQDPRGQGLNQPQHF

SEQ ID NO: 253655 - protein, 10 aa, Homo sapiens
  CDR3 for alpha chain variable domain of TCR clone 126828 (TRAV12-2, TRAJ27)
CGANAGKSTF

SEQ ID NO: 253656 - protein, 13 aa, Homo sapiens
  CDR3 for beta chain variable domain of TCR clone 126828 (TRBV12-5, TRBJ2-3)
CASGDRQSDTQYF

SEQ ID NO: 253657 - protein, 13 aa, Homo sapiens
  CDR3 for alpha chain variable domain of TCR clone 126829 (TRAV26-1, TRAJ33)
CIVRVEGNYQLIW

SEQ ID NO: 253658 - protein, 16 aa, Homo sapiens
  CDR3 for beta chain variable domain of TCR clone 126829 (TRBV15, TRBJ2-7)
CATSRDRGRRRGEQYC

SEQ ID NO: 253659 - protein, 12 aa, Homo sapiens
  CDR3 for alpha chain variable domain of TCR clone 126830 (TRAV12-3, TRAJ17)
CAMTLTGNKLTL

SEQ ID NO: 253660 - protein, 15 aa, Homo sapiens
  CDR3 for beta chain variable domain of TCR clone 126830 (TRBV20-1, TRBJ2-7)
CSAGDRVSGMDEQYF

SEQ ID NO: 253661 - protein, 15 aa, Homo sapiens
  CDR3 for alpha chain variable domain of TCR clone 126831 (TRAV23/DV6, )
CAADIRNPDPAVYQL

SEQ ID NO: 253662 - protein, 14 aa, Homo sapiens
  CDR3 for beta chain variable domain of TCR clone 126831 (TRBV5-7, TRBJ1-6)
CASSFAGHNSPLHF

SEQ ID NO: 253663 - protein, 18 aa, Homo sapiens
  CDR3 for alpha chain variable domain of TCR clone 126832 (TRAV29/DV5, TRAJ53)
CSVLLCSKRGGSNYKLTF

SEQ ID NO: 253664 - protein, 20 aa, Homo sapiens
  CDR3 for beta chain variable domain of TCR clone 126832 (TRBV7-8, TRBJ2-2)
CASSHLFPGPTIHITGELFF

SEQ ID NO: 253665 - protein, 12 aa, Homo sapiens
  CDR3 for alpha chain variable domain of TCR clone 126833 (TRAV12-1, TRAJ16)
CVVFRDGQKLLF

SEQ ID NO: 253666 - protein, 15 aa, Homo sapiens
  CDR3 for beta chain variable domain of TCR clone 126833 (TRBV13, TRBJ1-5)
CASSFGQGGVQPQHF

SEQ ID NO: 253667 - protein, 15 aa, Homo sapiens
  CDR3 for alpha chain variable domain of TCR clone 126834 (TRAV27, TRAJ38)
CSARRNAGNNRKLIW

SEQ ID NO: 253668 - protein, 17 aa, Homo sapiens
  CDR3 for beta chain variable domain of TCR clone 126834 (TRBV20-1, TRBJ2-2)
CSASGSGQGGLTGELFF

SEQ ID NO: 253669 - protein, 13 aa, Homo sapiens
  CDR3 for alpha chain variable domain of TCR clone 126835 (TRAV27, TRAJ45)
CRSSGGGADGLTF

SEQ ID NO: 253670 - protein, 17 aa, Homo sapiens
  CDR3 for beta chain variable domain of TCR clone 126835 (TRBV11-2, TRBJ2-1)
CASSLYPPGVEYNVQFF

SEQ ID NO: 253671 - protein, 14 aa, Homo sapiens
  CDR3 for alpha chain variable domain of TCR clone 126836 (TRAV1-2, TRAJ16)
CAVNRFSDGQKLLF

SEQ ID NO: 253672 - protein, 13 aa, Homo sapiens
  CDR3 for beta chain variable domain of TCR clone 126836 (TRBV2, TRBJ1-1)
CARNPTGGFHAFF

SEQ ID NO: 253673 - protein, 16 aa, Homo sapiens
  CDR3 for alpha chain variable domain of TCR clone 126837 (TRAV26-1, TRAJ37)
CIVRGDGSGNTGKLIF

SEQ ID NO: 253674 - protein, 17 aa, Homo sapiens
  CDR3 for beta chain variable domain of TCR clone 126837 (TRBV4-1, TRBJ2-7)
YASSRDPLGVRGGEQYF

SEQ ID NO: 253675 - protein, 13 aa, Homo sapiens
  CDR3 for alpha chain variable domain of TCR clone 126838 (TRAV8-3, TRAJ28)
CAVGAVGSYQLTF

SEQ ID NO: 253676 - protein, 14 aa, Homo sapiens
  CDR3 for beta chain variable domain of TCR clone 126838 (TRBV7-2, TRBJ2-7)
GASRSQGAAYEQYF

SEQ ID NO: 253677 - protein, 11 aa, Homo sapiens
  CDR3 for alpha chain variable domain of TCR clone 126839 (TRAV12-1, TRAJ34)
CVVNKGRELIF

SEQ ID NO: 253678 - protein, 14 aa, Homo sapiens
  CDR3 for beta chain variable domain of TCR clone 126839 (TRBV2, TRBJ2-7)
CASSLTSGGYEQYF

SEQ ID NO: 253679 - protein, 14 aa, Homo sapiens
  CDR3 for alpha chain variable domain of TCR clone 126840 (TRAV8-1, TRAJ22)
CAAPSSVSARQLTF

SEQ ID NO: 253680 - protein, 14 aa, Homo sapiens
  CDR3 for beta chain variable domain of TCR clone 126840 (TRBV9, TRBJ2-2)
CASSVGQGAGELFF

SEQ ID NO: 253681 - protein, 14 aa, Homo sapiens
  CDR3 for alpha chain variable domain of TCR clone 126841 (TRAV12-1, TRAJ9)
CVVTGYTGGFKTIF

SEQ ID NO: 253682 - protein, 13 aa, Homo sapiens
  CDR3 for beta chain variable domain of TCR clone 126841 (TRBV20-1, TRBJ1-1)
CSARDGGNTEAFF

SEQ ID NO: 253683 - protein, 17 aa, Homo sapiens
  CDR3 for alpha chain variable domain of TCR clone 126842 (TRAV13-1, TRAJ52)
CAASSGAGGTSYGKLTF

SEQ ID NO: 253684 - protein, 15 aa, Homo sapiens
  CDR3 for beta chain variable domain of TCR clone 126842 (TRBV2, TRBJ2-1)
CASSELAGSYNEQVF

SEQ ID NO: 253685 - protein, 17 aa, Homo sapiens
  CDR3 for alpha chain variable domain of TCR clone 126843 (TRAV13-1, TRAJ31)
CVPRDRLMFGDGTQLVV

SEQ ID NO: 253686 - protein, 12 aa, Homo sapiens
  CDR3 for beta chain variable domain of TCR clone 126843 (TRBV7-9, TRBJ2-7)
CASSLEGYEQYF

SEQ ID NO: 253687 - protein, 15 aa, Homo sapiens
  CDR3 for alpha chain variable domain of TCR clone 126844 (TRAV2, TRAJ24)
CSVVRLKNSWGKLQF

SEQ ID NO: 253688 - protein, 16 aa, Homo sapiens
  CDR3 for beta chain variable domain of TCR clone 126844 (TRBV7-7, TRBJ2-3)
CASSPGTSGSTDTQYF

SEQ ID NO: 253689 - protein, 14 aa, Homo sapiens
  CDR3 for alpha chain variable domain of TCR clone 126845 (TRAV1-2, TRAJ16)
CAVNRSSDGQKLLF

SEQ ID NO: 253690 - protein, 16 aa, Homo sapiens
  CDR3 for beta chain variable domain of TCR clone 126845 (TRBV20-1, TRBJ1-4)
CSAPGQGLLTNEKLFF

SEQ ID NO: 253691 - protein, 14 aa, Homo sapiens
  CDR3 for alpha chain variable domain of TCR clone 126846 (TRAV12-1, TRAJ3)
CGAARYSSASKIIF

SEQ ID NO: 253692 - protein, 15 aa, Homo sapiens
  CDR3 for beta chain variable domain of TCR clone 126846 (TRBV7-2, TRBJ2-6)
CASSREGSGANVLTF

SEQ ID NO: 253693 - protein, 15 aa, Homo sapiens
  CDR3 for alpha chain variable domain of TCR clone 126847 (TRAV8-2, TRAJ15)
CVVTMGNQAGTALIF

SEQ ID NO: 253694 - protein, 12 aa, Homo sapiens
  CDR3 for beta chain variable domain of TCR clone 126847 (TRBV11-2, TRBJ2-1)
CASSPGNNEQFF

SEQ ID NO: 253695 - protein, 11 aa, Homo sapiens
  CDR3 for alpha chain variable domain of TCR clone 126848 (TRAV35, TRAJ30)
CAGPGDDKTIF

SEQ ID NO: 253696 - protein, 18 aa, Homo sapiens
  CDR3 for beta chain variable domain of TCR clone 126848 (TRBV7-6, TRBJ2-1)
CASSPRTSGMSSYNEQFF

SEQ ID NO: 253697 - protein, 13 aa, Homo sapiens
  CDR3 for alpha chain variable domain of TCR clone 126849 (TRAV29/DV5, TRAJ29)
CAASAAGNTPLVF

SEQ ID NO: 253698 - protein, 11 aa, Homo sapiens
  CDR3 for beta chain variable domain of TCR clone 126849 (TRBV12-4, TRBJ2-3)
CASTATDTQYF

SEQ ID NO: 253699 - protein, 16 aa, Homo sapiens
  CDR3 for alpha chain variable domain of TCR clone 126850 (TRAV3, TRAJ4)
CAVRAFFSGGYNKLIF

SEQ ID NO: 253700 - protein, 14 aa, Homo sapiens
  CDR3 for beta chain variable domain of TCR clone 126850 (TRBV15, TRBJ2-7)
CATSRVARGYEQYF

SEQ ID NO: 253701 - protein, 15 aa, Homo sapiens
  CDR3 for alpha chain variable domain of TCR clone 126851 (TRAV26-1, TRAJ42)
FIVRVKGGSQGNLIF

SEQ ID NO: 253702 - protein, 14 aa, Homo sapiens
  CDR3 for beta chain variable domain of TCR clone 126851 (TRBV19, TRBJ2-2)
CATMGHANTGELFF

SEQ ID NO: 253703 - protein, 17 aa, Homo sapiens
  CDR3 for alpha chain variable domain of TCR clone 126852 (TRAV3, TRAJ42)
CAVRDRDYGGSQGNLIF

SEQ ID NO: 253704 - protein, 15 aa, Homo sapiens
  CDR3 for beta chain variable domain of TCR clone 126852 (TRBV19, TRBJ2-1)
CASSTGTSSYNEQFF

SEQ ID NO: 253705 - protein, 14 aa, Homo sapiens
  CDR3 for alpha chain variable domain of TCR clone 126853 (TRAV12-3, TRAJ10)
SHLPLTGGGNKLTF

SEQ ID NO: 253706 - protein, 13 aa, Homo sapiens
  CDR3 for beta chain variable domain of TCR clone 126853 (TRBV19, TRBJ1-4)
CASPTQGNEKLFF

SEQ ID NO: 253707 - protein, 12 aa, Homo sapiens
  CDR3 for alpha chain variable domain of TCR clone 126854 (TRAV12-1, TRAJ23)
CVVNIPGGKLIF

SEQ ID NO: 253708 - protein, 15 aa, Homo sapiens
  CDR3 for beta chain variable domain of TCR clone 126854 (TRBV7-2, TRBJ2-7)
CARSLVSSGSYEQYF

SEQ ID NO: 253709 - protein, 14 aa, Homo sapiens
  CDR3 for alpha chain variable domain of TCR clone 126855 (TRAV1-2, TRAJ16)
CAVNRFSDGQKLLF

SEQ ID NO: 253710 - protein, 16 aa, Homo sapiens
  CDR3 for beta chain variable domain of TCR clone 126855 (TRBV4-1, TRBJ2-3)
CASSQSTSGAEDTQYY

SEQ ID NO: 253711 - protein, 13 aa, Homo sapiens
  CDR3 for alpha chain variable domain of TCR clone 126856 (TRAV2, TRAJ9)
CAVESTGGFKTIF

SEQ ID NO: 253712 - protein, 15 aa, Homo sapiens
  CDR3 for beta chain variable domain of TCR clone 126856 (TRBV5-1, TRBJ2-3)
CASSVTSGSTDTQYF

SEQ ID NO: 253713 - protein, 14 aa, Homo sapiens
  CDR3 for alpha chain variable domain of TCR clone 126857 (TRAV12-2, TRAJ13)
CAVKKTGGYQKVTF

SEQ ID NO: 253714 - protein, 13 aa, Homo sapiens
  CDR3 for beta chain variable domain of TCR clone 126857 (TRBV4-1, TRBJ2-1)
CASSQTGGDEQFF

SEQ ID NO: 253715 - protein, 13 aa, Homo sapiens
  CDR3 for alpha chain variable domain of TCR clone 126858 (TRAV8-3, TRAJ28)
CAVGAVGIYQLTF

SEQ ID NO: 253716 - protein, 17 aa, Homo sapiens
  CDR3 for beta chain variable domain of TCR clone 126858 (TRBV11-2, TRBJ2-1)
CASSLYPPGVEYNEQFF

SEQ ID NO: 253717 - protein, 15 aa, Homo sapiens
  CDR3 for alpha chain variable domain of TCR clone 126859 (TRAV21, TRAJ53)
CATLNSGGSNYKLTF

SEQ ID NO: 253718 - protein, 12 aa, Homo sapiens
  CDR3 for beta chain variable domain of TCR clone 126859 (TRBV7-6, TRBJ2-7)
CASSLADSEQYF

SEQ ID NO: 253719 - protein, 13 aa, Homo sapiens
  CDR3 for alpha chain variable domain of TCR clone 126860 (TRAV3, TRAJ27)
CAVRPLGAGKSTF

SEQ ID NO: 253720 - protein, 14 aa, Homo sapiens
  CDR3 for beta chain variable domain of TCR clone 126860 (TRBV25-1, TRBJ1-1)
CASTHLGGNTEALF

SEQ ID NO: 253721 - protein, 16 aa, Homo sapiens
  CDR3 for alpha chain variable domain of TCR clone 126861 (TRAV3, TRAJ10)
CAVRDMRAGGGNKLTF

SEQ ID NO: 253722 - protein, 13 aa, Homo sapiens
  CDR3 for beta chain variable domain of TCR clone 126861 (TRBV12-4, TRBJ2-7)
FASSPTETYEQYF

SEQ ID NO: 253723 - protein, 16 aa, Homo sapiens
  CDR3 for alpha chain variable domain of TCR clone 126862 (TRAV16, TRAJ57)
CAPYLITQGGSEKLAF

SEQ ID NO: 253724 - protein, 17 aa, Homo sapiens
  CDR3 for beta chain variable domain of TCR clone 126862 (TRBV24-1, TRBJ2-4)
CATSDAEARGVRNIQYF

SEQ ID NO: 253725 - protein, 16 aa, Homo sapiens
  CDR3 for alpha chain variable domain of TCR clone 126863 (TRAV30, TRAJ24)
CGTEIVDADSWGKFQF

SEQ ID NO: 253726 - protein, 14 aa, Homo sapiens
  CDR3 for beta chain variable domain of TCR clone 126863 (TRBV7-2, TRBJ2-3)
CASSQTGSSYTQYF

SEQ ID NO: 253727 - protein, 11 aa, Homo sapiens
  CDR3 for alpha chain variable domain of TCR clone 126864 (TRAV39, TRAJ49)
CAVDISTQFYF

SEQ ID NO: 253728 - protein, 11 aa, Homo sapiens
  CDR3 for beta chain variable domain of TCR clone 126864 (TRBV7-8, TRBJ2-7)
CASSLALEQYF

SEQ ID NO: 253729 - protein, 14 aa, Homo sapiens
  CDR3 for alpha chain variable domain of TCR clone 126865 (TRAV8-3, TRAJ4)
CAVGAAGGYNMLIF

SEQ ID NO: 253730 - protein, 15 aa, Homo sapiens
  CDR3 for beta chain variable domain of TCR clone 126865 (TRBV6-5, TRBJ2-1)
CASSYDAGAGNEQFF

SEQ ID NO: 253731 - protein, 14 aa, Homo sapiens
  CDR3 for alpha chain variable domain of TCR clone 126866 (TRAV1-2, TRAJ16)
CAVNRFSDGQKLLF

SEQ ID NO: 253732 - protein, 11 aa, Homo sapiens
  CDR3 for beta chain variable domain of TCR clone 126866 (TRBV20-1, TRBJ1-2)
CSVQGAGGYTF

SEQ ID NO: 253733 - protein, 14 aa, Homo sapiens
  CDR3 for alpha chain variable domain of TCR clone 126867 (TRAV25, TRAJ52)
CRASCGTSYGKLTF

SEQ ID NO: 253734 - protein, 17 aa, Homo sapiens
  CDR3 for beta chain variable domain of TCR clone 126867 (TRBV7-8, TRBJ2-6)
CASSAGTGGAGANVLTF

SEQ ID NO: 253735 - protein, 13 aa, Homo sapiens
  CDR3 for alpha chain variable domain of TCR clone 126868 (TRAV2, TRAJ40)
CAVVTSGTYKYIF

SEQ ID NO: 253736 - protein, 18 aa, Homo sapiens
  CDR3 for beta chain variable domain of TCR clone 126868 (TRBV24-1, TRBJ2-2)
CATSDSGQGTANTGELFF

SEQ ID NO: 253737 - protein, 13 aa, Homo sapiens
  CDR3 for alpha chain variable domain of TCR clone 126869 (TRAV20, TRAJ37)
CAGCSSNTGKLIF

SEQ ID NO: 253738 - protein, 11 aa, Homo sapiens
  CDR3 for beta chain variable domain of TCR clone 126869 (TRBV12-4, TRBJ2-3)
RASTASDTQYF

SEQ ID NO: 253739 - protein, 14 aa, Homo sapiens
  CDR3 for alpha chain variable domain of TCR clone 126870 (TRAV12-3, TRAJ10)
SHLPLTGGGNKLTF

SEQ ID NO: 253740 - protein, 14 aa, Homo sapiens
  CDR3 for beta chain variable domain of TCR clone 126870 (TRBV19, TRBJ2-1)
CARGARSFQWEQFF

SEQ ID NO: 253741 - protein, 13 aa, Homo sapiens
  CDR3 for alpha chain variable domain of TCR clone 126871 (TRAV12-3, TRAJ13)
CAMSSGGYQKVTF

SEQ ID NO: 253742 - protein, 15 aa, Homo sapiens
  CDR3 for beta chain variable domain of TCR clone 126871 (TRBV5-1, TRBJ2-1)
CASSPPRAPYNEQFF

SEQ ID NO: 253743 - protein, 13 aa, Homo sapiens
  CDR3 for alpha chain variable domain of TCR clone 126872 (TRAV35, TRAJ36)
CAGPRIGANTLFF

SEQ ID NO: 253744 - protein, 15 aa, Homo sapiens
  CDR3 for beta chain variable domain of TCR clone 126872 (TRBV28, TRBJ2-5)
CASSPPWSYQETQYF

SEQ ID NO: 253745 - protein, 17 aa, Homo sapiens
  CDR3 for alpha chain variable domain of TCR clone 126873 (TRAV3, TRAJ6)
CAVRDGPRAGGSYIPTF

SEQ ID NO: 253746 - protein, 13 aa, Homo sapiens
  CDR3 for beta chain variable domain of TCR clone 126873 (TRBV7-2, TRBJ2-7)
CQSPKTSFYEQYF

SEQ ID NO: 253747 - protein, 17 aa, Homo sapiens
  CDR3 for alpha chain variable domain of TCR clone 126874 (TRAV26-1, TRAJ37)
CIVRVITVSSNTGKLIF

SEQ ID NO: 253748 - protein, 12 aa, Homo sapiens
  CDR3 for beta chain variable domain of TCR clone 126874 (TRBV12-4, TRBJ2-7)
CASSLGGYEQYF

SEQ ID NO: 253749 - protein, 14 aa, Homo sapiens
  CDR3 for alpha chain variable domain of TCR clone 126875 (TRAV3, TRAJ34)
CSVRDINNTDKLIF

SEQ ID NO: 253750 - protein, 13 aa, Homo sapiens
  CDR3 for beta chain variable domain of TCR clone 126875 (TRBV20-1, TRBJ1-1)
CSARGGGNTEAFF

SEQ ID NO: 253751 - protein, 15 aa, Homo sapiens
  CDR3 for alpha chain variable domain of TCR clone 126876 (TRAV27, TRAJ38)
CAGRFNAGNNRKLIW

SEQ ID NO: 253752 - protein, 13 aa, Homo sapiens
  CDR3 for beta chain variable domain of TCR clone 126876 (TRBV12-5, TRBJ2-3)
CASQNRGTETQYF

SEQ ID NO: 253753 - protein, 12 aa, Homo sapiens
  CDR3 for alpha chain variable domain of TCR clone 126877 (TRAV12-3, TRAJ17)
CAMTLTGSKLTF

SEQ ID NO: 253754 - protein, 20 aa, Homo sapiens
  CDR3 for beta chain variable domain of TCR clone 126877 (TRBV7-8, TRBJ2-2)
CASSHLFPGPTIHITGELFF

SEQ ID NO: 253755 - protein, 13 aa, Homo sapiens
  CDR3 for alpha chain variable domain of TCR clone 126878 (TRAV8-3, TRAJ6)
CAARRGGSYISTF

SEQ ID NO: 253756 - protein, 15 aa, Homo sapiens
  CDR3 for beta chain variable domain of TCR clone 126878 (TRBV4-1, TRBJ2-3)
CASSNLAGGRDTQYF

SEQ ID NO: 253757 - protein, 14 aa, Homo sapiens
  CDR3 for alpha chain variable domain of TCR clone 126879 (TRAV17, TRAJ15)
CDTAPNQAGTALIF

SEQ ID NO: 253758 - protein, 14 aa, Homo sapiens
  CDR3 for beta chain variable domain of TCR clone 126879 (TRBV19, TRBJ2-7)
CASSMGQGAIEQYF

SEQ ID NO: 253759 - protein, 16 aa, Homo sapiens
  CDR3 for alpha chain variable domain of TCR clone 126880 (TRAV3, TRAJ37)
CAVRGKGSGNTGKLIF

SEQ ID NO: 253760 - protein, 17 aa, Homo sapiens
  CDR3 for beta chain variable domain of TCR clone 126880 (TRBV19, TRBJ2-6)
CASSTGQVFSGANVLTF

SEQ ID NO: 253761 - protein, 14 aa, Homo sapiens
  CDR3 for alpha chain variable domain of TCR clone 126881 (TRAV35, TRAJ33)
CAGSSQDSNYQLIW

SEQ ID NO: 253762 - protein, 15 aa, Homo sapiens
  CDR3 for beta chain variable domain of TCR clone 126881 (TRBV2, TRBJ2-1)
CASRESGGAYNEQFF

SEQ ID NO: 253763 - protein, 12 aa, Homo sapiens
  CDR3 for alpha chain variable domain of TCR clone 126882 (TRAV36/DV7, TRAJ54)
CAVVRGAQKLVF

SEQ ID NO: 253764 - protein, 20 aa, Homo sapiens
  CDR3 for beta chain variable domain of TCR clone 126882 (TRBV19, TRBJ2-1)
CASSISRTVTSTRLNNEQFF

SEQ ID NO: 253765 - protein, 14 aa, Homo sapiens
  CDR3 for alpha chain variable domain of TCR clone 126883 (TRAV17, TRAJ5)
CATVALTGRRELTF

SEQ ID NO: 253766 - protein, 14 aa, Homo sapiens
  CDR3 for beta chain variable domain of TCR clone 126883 (TRBV28, TRBJ2-7)
CASSPYGMAYEQYF

SEQ ID NO: 253767 - protein, 13 aa, Homo sapiens
  CDR3 for alpha chain variable domain of TCR clone 126884 (TRAV13-1, TRAJ39)
CAASIVMQATFSP

SEQ ID NO: 253768 - protein, 16 aa, Homo sapiens
  CDR3 for beta chain variable domain of TCR clone 126884 (TRBV20-1, TRBJ1-4)
CSAPGQGLLTNEKLFF

SEQ ID NO: 253769 - protein, 13 aa, Homo sapiens
  CDR3 for alpha chain variable domain of TCR clone 126885 (TRAV21, TRAJ27)
CAARPGNAGKSTF

SEQ ID NO: 253770 - protein, 13 aa, Homo sapiens
  CDR3 for beta chain variable domain of TCR clone 126885 (TRBV29-1, TRBJ2-1)
CSVEGGRVNEQFF

SEQ ID NO: 253771 - protein, 13 aa, Homo sapiens
  CDR3 for alpha chain variable domain of TCR clone 126886 (TRAV26-2, TRAJ43)
CILRAVNNNDMRF

SEQ ID NO: 253772 - protein, 15 aa, Homo sapiens
  CDR3 for beta chain variable domain of TCR clone 126886 (TRBV7-2, TRBJ2-1)
CASNHGTGIYNEQFF

SEQ ID NO: 253773 - protein, 13 aa, Homo sapiens
  CDR3 for alpha chain variable domain of TCR clone 126887 (TRAV12-2, TRAJ48)
CAAPNFGNEKLTF

SEQ ID NO: 253774 - protein, 16 aa, Homo sapiens
  CDR3 for beta chain variable domain of TCR clone 126887 (TRBV12-5, TRBJ2-5)
CASGPRTSGNQETQYF

SEQ ID NO: 253775 - protein, 11 aa, Homo sapiens
  CDR3 for alpha chain variable domain of TCR clone 126888 (TRAV3, TRAJ21)
CAVGNFNKFYF

SEQ ID NO: 253776 - protein, 18 aa, Homo sapiens
  CDR3 for beta chain variable domain of TCR clone 126888 (TRBV20-1, TRBJ2-6)
CSAETTPTHGSGANVLTF

SEQ ID NO: 253777 - protein, 13 aa, Homo sapiens
  CDR3 for alpha chain variable domain of TCR clone 126889 (TRAV1-2, TRAJ12)
CAVSMDSSYKLIF

SEQ ID NO: 253778 - protein, 13 aa, Homo sapiens
  CDR3 for beta chain variable domain of TCR clone 126889 (TRBV7-3, TRBJ1-1)
CASSQDWGAEAFF

SEQ ID NO: 253779 - protein, 16 aa, Homo sapiens
  CDR3 for alpha chain variable domain of TCR clone 126890 (TRAV3, TRAJ10)
CAVRDMRAGGGNKLTF

SEQ ID NO: 253780 - protein, 13 aa, Homo sapiens
  CDR3 for beta chain variable domain of TCR clone 126890 (TRBV2, TRBJ1-5)
CATAGPGNQPQHF

SEQ ID NO: 253781 - protein, 12 aa, Homo sapiens
  CDR3 for alpha chain variable domain of TCR clone 126891 (TRAV12-3, TRAJ17)
CAMTLTGNKLTF

SEQ ID NO: 253782 - protein, 14 aa, Homo sapiens
  CDR3 for beta chain variable domain of TCR clone 126891 (TRBV7-3, TRBJ2-1)
CASSLAGGANEQFF

SEQ ID NO: 253783 - protein, 15 aa, Homo sapiens
  CDR3 for alpha chain variable domain of TCR clone 126892 (TRAV35, TRAJ58)
CAGRRQDTSGSRLTF

SEQ ID NO: 253784 - protein, 11 aa, Homo sapiens
  CDR3 for beta chain variable domain of TCR clone 126892 (TRBV11-2, TRBJ1-1)
CASSINTEAFF

SEQ ID NO: 253785 - protein, 16 aa, Homo sapiens
  CDR3 for alpha chain variable domain of TCR clone 126893 (TRAV30, TRAJ24)
CGTEIVDADGWGKFQF

SEQ ID NO: 253786 - protein, 14 aa, Homo sapiens
  CDR3 for beta chain variable domain of TCR clone 126893 (TRBV13, TRBJ2-1)
CASSPRPRYNEQFF

SEQ ID NO: 253787 - protein, 15 aa, Homo sapiens
  CDR3 for alpha chain variable domain of TCR clone 126894 (TRAV8-3, TRAJ7)
CAMGSISYGNNRLAF

SEQ ID NO: 253788 - protein, 15 aa, Homo sapiens
  CDR3 for beta chain variable domain of TCR clone 126894 (TRBV4-2, TRBJ1-1)
CASSQEDLPRTEAFF

SEQ ID NO: 253789 - protein, 14 aa, Homo sapiens
  CDR3 for alpha chain variable domain of TCR clone 126895 (TRAV12-1, TRAJ23)
CVVIVYNQGGKLIF

SEQ ID NO: 253790 - protein, 13 aa, Homo sapiens
  CDR3 for beta chain variable domain of TCR clone 126895 (TRBV11-2, TRBJ2-5)
CASSFTSQETQYF

SEQ ID NO: 253791 - protein, 15 aa, Homo sapiens
  CDR3 for alpha chain variable domain of TCR clone 126896 (TRAV8-4, TRAJ3)
CAMTGENLVQQCFQD

SEQ ID NO: 253792 - protein, 14 aa, Homo sapiens
  CDR3 for beta chain variable domain of TCR clone 126896 (TRBV7-6, TRBJ2-3)
CASSLGTVTDTQYF

SEQ ID NO: 253793 - protein, 12 aa, Homo sapiens
  CDR3 for alpha chain variable domain of TCR clone 126897 (TRAV29/DV5, TRAJ34)
CAASGNTDKLIF

SEQ ID NO: 253794 - protein, 15 aa, Homo sapiens
  CDR3 for beta chain variable domain of TCR clone 126897 (TRBV10-2, TRBJ2-6)
CASSEQVTGANVLTF

SEQ ID NO: 253795 - protein, 19 aa, Homo sapiens
  CDR3 for alpha chain variable domain of TCR clone 126898 (TRAV26-1, TRAJ52)
CIVRAHRNAGGNSYGKLTF

SEQ ID NO: 253796 - protein, 15 aa, Homo sapiens
  CDR3 for beta chain variable domain of TCR clone 126898 (TRBV12-4, TRBJ2-5)
CASSPPTGLQETQYF

SEQ ID NO: 253797 - protein, 16 aa, Homo sapiens
  CDR3 for alpha chain variable domain of TCR clone 126899 (TRAV3, TRAJ10)
CAVRDMRAGGGNKLTF

SEQ ID NO: 253798 - protein, 15 aa, Homo sapiens
  CDR3 for beta chain variable domain of TCR clone 126899 (TRBV27, TRBJ1-6)
CASSFDRGLGSPLHF

SEQ ID NO: 253799 - protein, 16 aa, Homo sapiens
  CDR3 for alpha chain variable domain of TCR clone 126900 (TRAV23/DV6, TRAJ21)
CAASSGGGTTSTNFTL

SEQ ID NO: 253800 - protein, 13 aa, Homo sapiens
  CDR3 for beta chain variable domain of TCR clone 126900 (TRBV20-1, TRBJ2-5)
CSARGDYQETQYF

SEQ ID NO: 253801 - protein, 17 aa, Homo sapiens
  CDR3 for alpha chain variable domain of TCR clone 126901 (TRAV13-1, TRAJ28)
CAASPPYSGAGSYQLTF

SEQ ID NO: 253802 - protein, 15 aa, Homo sapiens
  CDR3 for beta chain variable domain of TCR clone 126901 (TRBV7-9, TRBJ1-4)
CASSARTGGNEKLFF

SEQ ID NO: 253803 - protein, 14 aa, Homo sapiens
  CDR3 for alpha chain variable domain of TCR clone 126902 (TRAV8-4, TRAJ9)
CAVRINTGGFKTIF

SEQ ID NO: 253804 - protein, 21 aa, Homo sapiens
  CDR3 for beta chain variable domain of TCR clone 126902 (TRBV10-2, TRBJ2-6)
CASSEQGTGQRPDFRGRQQAD

SEQ ID NO: 253805 - protein, 15 aa, Homo sapiens
  CDR3 for alpha chain variable domain of TCR clone 126903 (TRAV1-2, TRAJ30)
CAVRPHGNRDDKLIF

SEQ ID NO: 253806 - protein, 13 aa, Homo sapiens
  CDR3 for beta chain variable domain of TCR clone 126903 (TRBV4-1, TRBJ2-7)
CASSQGQAYEQYF

SEQ ID NO: 253807 - protein, 12 aa, Homo sapiens
  CDR3 for alpha chain variable domain of TCR clone 126904 (TRAV26-1, TRAJ36)
CIVRVRADNLFF

SEQ ID NO: 253808 - protein, 14 aa, Homo sapiens
  CDR3 for beta chain variable domain of TCR clone 126904 (TRBV5-1, TRBJ2-7)
CASSRGESLYEQYF

SEQ ID NO: 253809 - protein, 14 aa, Homo sapiens
  CDR3 for alpha chain variable domain of TCR clone 126905 (TRAV29/DV5, TRAJ36)
CAARRKTGPNNLFF

SEQ ID NO: 253810 - protein, 14 aa, Homo sapiens
  CDR3 for beta chain variable domain of TCR clone 126905 (TRBV12-5, TRBJ2-5)
CASGSRTHQETQYF

SEQ ID NO: 253811 - protein, 14 aa, Homo sapiens
  CDR3 for alpha chain variable domain of TCR clone 126906 (TRAV16, TRAJ26)
CALSGCNYGQNFVF

SEQ ID NO: 253812 - protein, 13 aa, Homo sapiens
  CDR3 for beta chain variable domain of TCR clone 126906 (TRBV7-3, TRBJ1-1)
CASSQDWGAEAFF

SEQ ID NO: 253813 - protein, 13 aa, Homo sapiens
  CDR3 for alpha chain variable domain of TCR clone 126907 (TRAV1-1, TRAJ9)
CAATNTGGFNTIF

SEQ ID NO: 253814 - protein, 14 aa, Homo sapiens
  CDR3 for beta chain variable domain of TCR clone 126907 (TRBV20-1, TRBJ2-1)
CSAQIGGSANEQFF

SEQ ID NO: 253815 - protein, 15 aa, Homo sapiens
  CDR3 for alpha chain variable domain of TCR clone 126908 (TRAV8-3, TRAJ45)
CASSYSGGGADGLTF

SEQ ID NO: 253816 - protein, 15 aa, Homo sapiens
  CDR3 for beta chain variable domain of TCR clone 126908 (TRBV10-3, TRBJ2-7)
CASKLAVNYESTSGR

SEQ ID NO: 253817 - protein, 14 aa, Homo sapiens
  CDR3 for alpha chain variable domain of TCR clone 126909 (TRAV4, TRAJ26)
CLVCPHNYGQNFVF

SEQ ID NO: 253818 - protein, 17 aa, Homo sapiens
  CDR3 for beta chain variable domain of TCR clone 126909 (TRBV20-1, TRBJ2-1)
CSASSSGLAGSYNEQFF

SEQ ID NO: 253819 - protein, 10 aa, Homo sapiens
  CDR3 for alpha chain variable domain of TCR clone 126910 (TRAV1-2, TRAJ18)
CAVRGEAQPW

SEQ ID NO: 253820 - protein, 13 aa, Homo sapiens
  CDR3 for beta chain variable domain of TCR clone 126910 (TRBV6-1, TRBJ1-1)
CASSRQGNTEAFF

SEQ ID NO: 253821 - protein, 13 aa, Homo sapiens
  CDR3 for alpha chain variable domain of TCR clone 126911 (TRAV21, TRAJ27)
CAARPGNAGKSAF

SEQ ID NO: 253822 - protein, 14 aa, Homo sapiens
  CDR3 for beta chain variable domain of TCR clone 126911 (TRBV7-6, TRBJ2-3)
CASSLGTVTDTQYF

SEQ ID NO: 253823 - protein, 11 aa, Homo sapiens
  CDR3 for alpha chain variable domain of TCR clone 126912 (TRAV12-1, TRAJ21)
CVVNNFNKFYF

SEQ ID NO: 253824 - protein, 15 aa, Homo sapiens
  CDR3 for beta chain variable domain of TCR clone 126912 (TRBV7-2, TRBJ2-1)
CASSLVGSSYNEQFF

SEQ ID NO: 253825 - protein, 16 aa, Homo sapiens
  CDR3 for alpha chain variable domain of TCR clone 126913 (TRAV12-1, TRAJ45)
CVVIRYSGGGADGLTF

SEQ ID NO: 253826 - protein, 14 aa, Homo sapiens
  CDR3 for beta chain variable domain of TCR clone 126913 (TRBV7-2, TRBJ2-7)
CASSPKTSFYEQYF

SEQ ID NO: 253827 - protein, 15 aa, Homo sapiens
  CDR3 for alpha chain variable domain of TCR clone 126914 (TRAV17, TRAJ16)
CATALRFSDGQKLLF

SEQ ID NO: 253828 - protein, 12 aa, Homo sapiens
  CDR3 for beta chain variable domain of TCR clone 126914 (TRBV2, TRBJ2-7)
FASSDPDYEQYF

SEQ ID NO: 253829 - protein, 11 aa, Homo sapiens
  CDR3 for alpha chain variable domain of TCR clone 126915 (TRAV29/DV5, TRAJ31)
CAASYRDRRMF

SEQ ID NO: 253830 - protein, 19 aa, Homo sapiens
  CDR3 for beta chain variable domain of TCR clone 126915 (TRBV19, TRBJ2-5)
CASSIGQVTDFFLGETQYF

SEQ ID NO: 253831 - protein, 14 aa, Homo sapiens
  CDR3 for alpha chain variable domain of TCR clone 126916 (TRAV1-1, TRAJ27)
CAVIYNTNAGKSTF

SEQ ID NO: 253832 - protein, 15 aa, Homo sapiens
  CDR3 for beta chain variable domain of TCR clone 126916 (TRBV7-2, TRBJ2-1)
CASSSGLAGGSEQFF

SEQ ID NO: 253833 - protein, 18 aa, Homo sapiens
  CDR3 for alpha chain variable domain of TCR clone 126917 (TRAV21, TRAJ52)
CAVRPSPAGGTSYGKLTF

SEQ ID NO: 253834 - protein, 16 aa, Homo sapiens
  CDR3 for beta chain variable domain of TCR clone 126917 (TRBV27, TRBJ2-5)
CASSYGPGGQKETQYF

SEQ ID NO: 253835 - protein, 14 aa, Homo sapiens
  CDR3 for alpha chain variable domain of TCR clone 126918 (TRAV26-1, TRAJ38)
CIADNAGNNRKLLW

SEQ ID NO: 253836 - protein, 16 aa, Homo sapiens
  CDR3 for beta chain variable domain of TCR clone 126918 (TRBV19, TRBJ2-1)
CASSKAGPSSYNEQFF

SEQ ID NO: 253837 - protein, 12 aa, Homo sapiens
  CDR3 for alpha chain variable domain of TCR clone 126919 (TRAV8-3, TRAJ26)
CAGDNYGQNLVF

SEQ ID NO: 253838 - protein, 14 aa, Homo sapiens
  CDR3 for beta chain variable domain of TCR clone 126919 (TRBV27, TRBJ2-2)
CASSLGAATGELFF

SEQ ID NO: 253839 - protein, 16 aa, Homo sapiens
  CDR3 for alpha chain variable domain of TCR clone 126920 (TRAV26-1, TRAJ32)
CIVRTNYGGATNKLIF

SEQ ID NO: 253840 - protein, 14 aa, Homo sapiens
  CDR3 for beta chain variable domain of TCR clone 126920 (TRBV27, TRBJ1-1)
CASSLLSGLYEAFF

SEQ ID NO: 253841 - protein, 15 aa, Homo sapiens
  CDR3 for alpha chain variable domain of TCR clone 126921 (TRAV17, TRAJ22)
CATVAPAGSARQLTF

SEQ ID NO: 253842 - protein, 16 aa, Homo sapiens
  CDR3 for beta chain variable domain of TCR clone 126921 (TRBV10-3, TRBJ2-7)
CAISADFADRPYEQYF

SEQ ID NO: 253843 - protein, 14 aa, Homo sapiens
  CDR3 for alpha chain variable domain of TCR clone 126922 (TRAV17, TRAJ22)
CATSPSGSARQLTF

SEQ ID NO: 253844 - protein, 15 aa, Homo sapiens
  CDR3 for beta chain variable domain of TCR clone 126922 (TRBV4-1, TRBJ2-5)
CASSQSDLYQETQYF

SEQ ID NO: 253845 - protein, 13 aa, Homo sapiens
  CDR3 for alpha chain variable domain of TCR clone 126923 (TRAV8-3, TRAJ28)
CAVGAVGSYQLTF

SEQ ID NO: 253846 - protein, 13 aa, Homo sapiens
  CDR3 for beta chain variable domain of TCR clone 126923 (TRBV19, TRBJ2-7)
CASSPRQSYEQYF

SEQ ID NO: 253847 - protein, 14 aa, Homo sapiens
  CDR3 for alpha chain variable domain of TCR clone 126924 (TRAV35, TRAJ42)
CAGRYGGSQGNLIF

SEQ ID NO: 253848 - protein, 15 aa, Homo sapiens
  CDR3 for beta chain variable domain of TCR clone 126924 (TRBV7-8, TRBJ1-5)
CASSLERRGLEPQHF

SEQ ID NO: 253849 - protein, 13 aa, Homo sapiens
  CDR3 for alpha chain variable domain of TCR clone 126925 (TRAV2, TRAJ40)
CAVVTSGTYKYIF

SEQ ID NO: 253850 - protein, 14 aa, Homo sapiens
  CDR3 for beta chain variable domain of TCR clone 126925 (TRBV19, TRBJ2-1)
RASPTFVLSGERFF

SEQ ID NO: 253851 - protein, 14 aa, Homo sapiens
  CDR3 for alpha chain variable domain of TCR clone 126926 (TRAV13-1, TRAJ13)
CAASRVGGYQKVTF

SEQ ID NO: 253852 - protein, 14 aa, Homo sapiens
  CDR3 for beta chain variable domain of TCR clone 126926 (TRBV25-1, TRBJ1-1)
CASTHLGGNTEAFF

SEQ ID NO: 253853 - protein, 13 aa, Homo sapiens
  CDR3 for alpha chain variable domain of TCR clone 126927 (TRAV29/DV5, TRAJ31)
CAASRNNNARLMF

SEQ ID NO: 253854 - protein, 13 aa, Homo sapiens
  CDR3 for beta chain variable domain of TCR clone 126927 (TRBV4-2, TRBJ1-1)
CASSQAGNTEAFF

SEQ ID NO: 253855 - protein, 15 aa, Homo sapiens
  CDR3 for alpha chain variable domain of TCR clone 126928 (TRAV27, TRAJ38)
CAGRFNAGNNRKLIW

SEQ ID NO: 253856 - protein, 14 aa, Homo sapiens
  CDR3 for beta chain variable domain of TCR clone 126928 (TRBV20-1, TRBJ2-7)
CSAPELAGVGEQYF

SEQ ID NO: 253857 - protein, 15 aa, Homo sapiens
  CDR3 for alpha chain variable domain of TCR clone 126929 (TRAV8-2, TRAJ40)
CVVSDRGSGTYKYIF

SEQ ID NO: 253858 - protein, 15 aa, Homo sapiens
  CDR3 for beta chain variable domain of TCR clone 126929 (TRBV20-1, TRBJ2-7)
CSARDRVSGMDEQYF

SEQ ID NO: 253859 - protein, 13 aa, Homo sapiens
  CDR3 for alpha chain variable domain of TCR clone 126930 (TRAV14/DV4, TRAJ4)
CAMEAGGYNKLIF

SEQ ID NO: 253860 - protein, 15 aa, Homo sapiens
  CDR3 for beta chain variable domain of TCR clone 126930 (TRBV11-2, TRBJ1-2)
CASSLEGVQRNGYTF

SEQ ID NO: 253861 - protein, 14 aa, Homo sapiens
  CDR3 for alpha chain variable domain of TCR clone 126931 (TRAV9-2, TRAJ36)
CALPWRTGANNLFF

SEQ ID NO: 253862 - protein, 14 aa, Homo sapiens
  CDR3 for beta chain variable domain of TCR clone 126931 (TRBV2, TRBJ1-2)
CASSEIQVNYGYTF

SEQ ID NO: 253863 - protein, 13 aa, Homo sapiens
  CDR3 for alpha chain variable domain of TCR clone 126932 (TRAV8-6, TRAJ50)
CAVIKTSYDKVIF

SEQ ID NO: 253864 - protein, 13 aa, Homo sapiens
  CDR3 for beta chain variable domain of TCR clone 126932 (TRBV7-2, TRBJ2-2)
CASSLAVTGELFF

SEQ ID NO: 253865 - protein, 14 aa, Homo sapiens
  CDR3 for alpha chain variable domain of TCR clone 126933 (TRAV20, TRAJ22)
CAVALGGSARQLTF

SEQ ID NO: 253866 - protein, 15 aa, Homo sapiens
  CDR3 for beta chain variable domain of TCR clone 126933 (TRBV7-2, TRBJ1-1)
CASSFAGDRDTEAFL

SEQ ID NO: 253867 - protein, 12 aa, Homo sapiens
  CDR3 for alpha chain variable domain of TCR clone 126934 (TRAV26-1, TRAJ17)
RIVRSAGNKLTF

SEQ ID NO: 253868 - protein, 13 aa, Homo sapiens
  CDR3 for beta chain variable domain of TCR clone 126934 (TRBV5-5, TRBJ2-7)
CASSSQTRQRQYF

SEQ ID NO: 253869 - protein, 15 aa, Homo sapiens
  CDR3 for alpha chain variable domain of TCR clone 126935 (TRAV25, TRAJ52)
CAGTSGGTSYGKLTF

SEQ ID NO: 253870 - protein, 15 aa, Homo sapiens
  CDR3 for beta chain variable domain of TCR clone 126935 (TRBV7-2, TRBJ2-1)
CASSSGLAGGNEQFF

SEQ ID NO: 253871 - protein, 18 aa, Homo sapiens
  CDR3 for alpha chain variable domain of TCR clone 126936 (TRAV3, TRAJ42)
CAVRDPENYGGSQGNLIF

SEQ ID NO: 253872 - protein, 12 aa, Homo sapiens
  CDR3 for beta chain variable domain of TCR clone 126936 (TRBV11-2, TRBJ2-2)
CASSLGGGELFF

SEQ ID NO: 253873 - protein, 17 aa, Homo sapiens
  CDR3 for alpha chain variable domain of TCR clone 126937 (TRAV14/DV4, TRAJ28)
CAMREGYSGAGSYQLTF

SEQ ID NO: 253874 - protein, 16 aa, Homo sapiens
  CDR3 for beta chain variable domain of TCR clone 126937 (TRBV4-2, TRBJ1-5)
CASSQGQGASNQPQHF

SEQ ID NO: 253875 - protein, 11 aa, Homo sapiens
  CDR3 for alpha chain variable domain of TCR clone 126938 (TRAV1-2, TRAJ20)
CAVANDYKLSF

SEQ ID NO: 253876 - protein, 18 aa, Homo sapiens
  CDR3 for beta chain variable domain of TCR clone 126938 (TRBV20-1, TRBJ2-6)
CSAETTPTHGSGPNVLTF

SEQ ID NO: 253877 - protein, 11 aa, Homo sapiens
  CDR3 for alpha chain variable domain of TCR clone 126939 (TRAV2, TRAJ21)
CAVFNFNKFYF

SEQ ID NO: 253878 - protein, 18 aa, Homo sapiens
  CDR3 for beta chain variable domain of TCR clone 126939 (TRBV2, TRBJ2-3)
CASSEAGGQALGADTQYF

SEQ ID NO: 253879 - protein, 17 aa, Homo sapiens
  CDR3 for alpha chain variable domain of TCR clone 126940 (TRAV14/DV4, TRAJ12)
CAMRELPWMDSSYKLIF

SEQ ID NO: 253880 - protein, 14 aa, Homo sapiens
  CDR3 for beta chain variable domain of TCR clone 126940 (TRBV15, TRBJ2-1)
CATSGVEDYNEQFF

SEQ ID NO: 253881 - protein, 11 aa, Homo sapiens
  CDR3 for alpha chain variable domain of TCR clone 126941 (TRAV1-1, TRAJ23)
CAVRQGGKLIF

SEQ ID NO: 253882 - protein, 14 aa, Homo sapiens
  CDR3 for beta chain variable domain of TCR clone 126941 (TRBV7-8, TRBJ2-3)
CASSFPDGQDTQYF

SEQ ID NO: 253883 - protein, 15 aa, Homo sapiens
  CDR3 for alpha chain variable domain of TCR clone 126942 (TRAV21, TRAJ24)
CAARSSTDSWGKLQF

SEQ ID NO: 253884 - protein, 11 aa, Homo sapiens
  CDR3 for beta chain variable domain of TCR clone 126942 (TRBV20-1, TRBJ2-7)
CSARTSYEQYF

SEQ ID NO: 253885 - protein, 14 aa, Homo sapiens
  CDR3 for alpha chain variable domain of TCR clone 126943 (TRAV8-4, TRAJ9)
CAVRINTGGFKTIF

SEQ ID NO: 253886 - protein, 16 aa, Homo sapiens
  CDR3 for beta chain variable domain of TCR clone 126943 (TRBV7-3, TRBJ2-1)
CASSLEGYRSYNEQFF

SEQ ID NO: 253887 - protein, 13 aa, Homo sapiens
  CDR3 for alpha chain variable domain of TCR clone 126944 (TRAV12-2, TRAJ18)
CAVRGSTLGRLYF

SEQ ID NO: 253888 - protein, 18 aa, Homo sapiens
  CDR3 for beta chain variable domain of TCR clone 126944 (TRBV27, TRBJ2-3)
CASSLSGTSGKGTDTQYF

SEQ ID NO: 253889 - protein, 14 aa, Homo sapiens
  CDR3 for alpha chain variable domain of TCR clone 126945 (TRAV12-2, TRAJ17)
CAVNIKSAGNKLTF

SEQ ID NO: 253890 - protein, 16 aa, Homo sapiens
  CDR3 for beta chain variable domain of TCR clone 126945 (TRBV20-1, TRBJ2-6)
CSASSQGYDGANVLTF

SEQ ID NO: 253891 - protein, 12 aa, Homo sapiens
  CDR3 for alpha chain variable domain of TCR clone 126946 (TRAV22, TRAJ22)
CAPGGSARQLTF

SEQ ID NO: 253892 - protein, 13 aa, Homo sapiens
  CDR3 for beta chain variable domain of TCR clone 126946 (TRBV15, TRBJ1-6)
CATSGGLNSPLHV

SEQ ID NO: 253893 - protein, 14 aa, Homo sapiens
  CDR3 for alpha chain variable domain of TCR clone 126947 (TRAV12-2, TRAJ45)
CAVNIGGGADGLTF

SEQ ID NO: 253894 - protein, 13 aa, Homo sapiens
  CDR3 for beta chain variable domain of TCR clone 126947 (TRBV19, TRBJ2-2)
CASGIWSTGELFF

SEQ ID NO: 253895 - protein, 14 aa, Homo sapiens
  CDR3 for alpha chain variable domain of TCR clone 126948 (TRAV1-2, TRAJ16)
CAVNRFSDGQKLLF

SEQ ID NO: 253896 - protein, 15 aa, Homo sapiens
  CDR3 for beta chain variable domain of TCR clone 126948 (TRBV15, TRBJ2-7)
CATSSGTTTTYEQYF

SEQ ID NO: 253897 - protein, 12 aa, Homo sapiens
  CDR3 for alpha chain variable domain of TCR clone 126949 (TRAV12-3, TRAJ17)
CALTLTGNKLTF

SEQ ID NO: 253898 - protein, 12 aa, Homo sapiens
  CDR3 for beta chain variable domain of TCR clone 126949 (TRBV2, TRBJ2-1)
CAYGPPGNEQFF

SEQ ID NO: 253899 - protein, 15 aa, Homo sapiens
  CDR3 for alpha chain variable domain of TCR clone 126950 (TRAV3, TRAJ22)
CAVRDRGGSARQLTF

SEQ ID NO: 253900 - protein, 17 aa, Homo sapiens
  CDR3 for beta chain variable domain of TCR clone 126950 (TRBV13, TRBJ2-3)
SASSLSRVAGGRNTQYF

SEQ ID NO: 253901 - protein, 13 aa, Homo sapiens
  CDR3 for alpha chain variable domain of TCR clone 126951 (TRAV1-2, TRAJ9)
CAALNTGGFKTIF

SEQ ID NO: 253902 - protein, 15 aa, Homo sapiens
  CDR3 for beta chain variable domain of TCR clone 126951 (TRBV11-2, TRBJ1-2)
CASSLEGVQRNGYTF

SEQ ID NO: 253903 - protein, 16 aa, Homo sapiens
  CDR3 for alpha chain variable domain of TCR clone 126952 (TRAV16, TRAJ42)
CARKMNYGGSQGNLIF

SEQ ID NO: 253904 - protein, 14 aa, Homo sapiens
  CDR3 for beta chain variable domain of TCR clone 126952 (TRBV19, TRBJ2-1)
CASPTFVLSGEQFF

SEQ ID NO: 253905 - protein, 15 aa, Homo sapiens
  CDR3 for alpha chain variable domain of TCR clone 126953 (TRAV3, TRAJ45)
CAVRTPWGGADGLAF

SEQ ID NO: 253906 - protein, 16 aa, Homo sapiens
  CDR3 for beta chain variable domain of TCR clone 126953 (TRBV6-1, TRBJ2-2)
CASSFGQGANTGELFF

SEQ ID NO: 253907 - protein, 19 aa, Homo sapiens
  CDR3 for alpha chain variable domain of TCR clone 126954 (TRAV2, TRAJ20)
ILQVREADAAVYRDCKLSF

SEQ ID NO: 253908 - protein, 13 aa, Homo sapiens
  CDR3 for beta chain variable domain of TCR clone 126954 (TRBV15, TRBJ1-6)
CATSGGLNSPLHV

SEQ ID NO: 253909 - protein, 17 aa, Homo sapiens
  CDR3 for alpha chain variable domain of TCR clone 126955 (TRAV13-1, TRAJ52)
CAAGRNAGGNSYGKLTF

SEQ ID NO: 253910 - protein, 12 aa, Homo sapiens
  CDR3 for beta chain variable domain of TCR clone 126955 (TRBV29-1, TRBJ1-3)
CSTRDSGNTIYF

SEQ ID NO: 253911 - protein, 13 aa, Homo sapiens
  CDR3 for alpha chain variable domain of TCR clone 126956 (TRAV36/DV7, TRAJ41)
CAVEANSGYALNF

SEQ ID NO: 253912 - protein, 15 aa, Homo sapiens
  CDR3 for beta chain variable domain of TCR clone 126956 (TRBV6-1, TRBJ2-3)
CASSERWDSTDTQYF

SEQ ID NO: 253913 - protein, 15 aa, Homo sapiens
  CDR3 for alpha chain variable domain of TCR clone 126957 (TRAV12-3, TRAJ6)
CAMSASTGGSYIPTF

SEQ ID NO: 253914 - protein, 16 aa, Homo sapiens
  CDR3 for beta chain variable domain of TCR clone 126957 (TRBV20-1, TRBJ1-2)
CSASTGQGVANYGYTF

SEQ ID NO: 253915 - protein, 14 aa, Homo sapiens
  CDR3 for alpha chain variable domain of TCR clone 126958 (TRAV12-2, TRAJ17)
CAVLFKAAGNKLTF

SEQ ID NO: 253916 - protein, 14 aa, Homo sapiens
  CDR3 for beta chain variable domain of TCR clone 126958 (TRBV20-1, TRBJ1-1)
CSAQTRIGGTEAFF

SEQ ID NO: 253917 - protein, 12 aa, Homo sapiens
  CDR3 for alpha chain variable domain of TCR clone 126959 (TRAV13-2, TRAJ42)
CAEGGSQGNLIF

SEQ ID NO: 253918 - protein, 16 aa, Homo sapiens
  CDR3 for beta chain variable domain of TCR clone 126959 (TRBV7-2, TRBJ2-3)
CASSLVALYSTDTQYF

SEQ ID NO: 253919 - protein, 11 aa, Homo sapiens
  CDR3 for alpha chain variable domain of TCR clone 126960 (TRAV12-2, TRAJ49)
CAVWAGNQFYF

SEQ ID NO: 253920 - protein, 19 aa, Homo sapiens
  CDR3 for beta chain variable domain of TCR clone 126960 (TRBV11-2, TRBJ2-2)
LRTRPCISVPAAYPGSCFF

SEQ ID NO: 253921 - protein, 11 aa, Homo sapiens
  CDR3 for alpha chain variable domain of TCR clone 126961 (TRAV2, TRAJ33)
CAVESNYQFIW

SEQ ID NO: 253922 - protein, 15 aa, Homo sapiens
  CDR3 for beta chain variable domain of TCR clone 126961 (TRBV19, TRBJ1-1)
CASTSGQIQNTEAFF

SEQ ID NO: 253923 - protein, 16 aa, Homo sapiens
  CDR3 for alpha chain variable domain of TCR clone 126962 (TRAV8-3, TRAJ13)
CAVGAYPSGGYQKVTF

SEQ ID NO: 253924 - protein, 15 aa, Homo sapiens
  CDR3 for beta chain variable domain of TCR clone 126962 (TRBV19, TRBJ1-5)
RASSIVWADNQPQHF

SEQ ID NO: 253925 - protein, 14 aa, Homo sapiens
  CDR3 for alpha chain variable domain of TCR clone 126963 (TRAV14/DV4, TRAJ4)
CAMREQGGYNKLIF

SEQ ID NO: 253926 - protein, 15 aa, Homo sapiens
  CDR3 for beta chain variable domain of TCR clone 126963 (TRBV14, TRBJ2-1)
CASSLLAGIYNEQFF

SEQ ID NO: 253927 - protein, 15 aa, Homo sapiens
  CDR3 for alpha chain variable domain of TCR clone 126964 (TRAV3, TRAJ20)
RAVRDSRSNDYKLSF

SEQ ID NO: 253928 - protein, 14 aa, Homo sapiens
  CDR3 for beta chain variable domain of TCR clone 126964 (TRBV20-1, TRBJ2-7)
CSARRGNGIYEQYF

SEQ ID NO: 253929 - protein, 15 aa, Homo sapiens
  CDR3 for alpha chain variable domain of TCR clone 126965 (TRAV12-2, TRAJ53)
CAVNGGGGSNNKLTF

SEQ ID NO: 253930 - protein, 13 aa, Homo sapiens
  CDR3 for beta chain variable domain of TCR clone 126965 (TRBV3-1, TRBJ1-1)
CASSPGVITEAFF

SEQ ID NO: 253931 - protein, 16 aa, Homo sapiens
  CDR3 for alpha chain variable domain of TCR clone 126966 (TRAV14/DV4, TRAJ53)
CAMREGGGGSNYKPTF

SEQ ID NO: 253932 - protein, 17 aa, Homo sapiens
  CDR3 for beta chain variable domain of TCR clone 126966 (TRBV13, TRBJ2-3)
CASSLSRVAGGRNTQYF

SEQ ID NO: 253933 - protein, 17 aa, Homo sapiens
  CDR3 for alpha chain variable domain of TCR clone 126967 (TRAV5, TRAJ32)
CAEKGVNYGGATNKLIF

SEQ ID NO: 253934 - protein, 15 aa, Homo sapiens
  CDR3 for beta chain variable domain of TCR clone 126967 (TRBV7-2, TRBJ2-5)
CASSGILAGAETQYF

SEQ ID NO: 253935 - protein, 13 aa, Homo sapiens
  CDR3 for alpha chain variable domain of TCR clone 126968 (TRAV13-2, TRAJ40)
CAEFTSGTYKYIF

SEQ ID NO: 253936 - protein, 17 aa, Homo sapiens
  CDR3 for beta chain variable domain of TCR clone 126968 (TRBV10-2, TRBJ1-5)
CISAPAALQGGISPSIF

SEQ ID NO: 253937 - protein, 14 aa, Homo sapiens
  CDR3 for alpha chain variable domain of TCR clone 126969 (TRAV13-1, TRAJ9)
YTASALTGGFKTIF

SEQ ID NO: 253938 - protein, 13 aa, Homo sapiens
  CDR3 for beta chain variable domain of TCR clone 126969 (TRBV20-1, TRBJ1-1)
CSAGTVGNTEAFF

SEQ ID NO: 253939 - protein, 20 aa, Homo sapiens
  CDR3 for alpha chain variable domain of TCR clone 126970 (TRAV25, TRAJ21)
TATQTTDVGTYPLSFNKFYF

SEQ ID NO: 253940 - protein, 16 aa, Homo sapiens
  CDR3 for beta chain variable domain of TCR clone 126970 (TRBV12-5, TRBJ2-5)
CASGPRTSGNQETQYF

SEQ ID NO: 253941 - protein, 18 aa, Homo sapiens
  CDR3 for alpha chain variable domain of TCR clone 126971 (TRAV29/DV5, TRAJ53)
CSVLLFSKRGGSNYKLTF

SEQ ID NO: 253942 - protein, 17 aa, Homo sapiens
  CDR3 for beta chain variable domain of TCR clone 126971 (TRBV7-8, TRBJ2-6)
CASSAGTGGAGANVLTF

SEQ ID NO: 253943 - protein, 13 aa, Homo sapiens
  CDR3 for alpha chain variable domain of TCR clone 126972 (TRAV13-1, TRAJ39)
CSKYSNAVNMLTF

SEQ ID NO: 253944 - protein, 12 aa, Homo sapiens
  CDR3 for beta chain variable domain of TCR clone 126972 (TRBV12-4, TRBJ2-7)
CASSLGGYEQYF

SEQ ID NO: 253945 - protein, 12 aa, Homo sapiens
  CDR3 for alpha chain variable domain of TCR clone 126973 (TRAV12-3, TRAJ34)
CAMGYNTDKLIF

SEQ ID NO: 253946 - protein, 14 aa, Homo sapiens
  CDR3 for beta chain variable domain of TCR clone 126973 (TRBV4-1, TRBJ2-2)
CASSQAVNTGELFC

SEQ ID NO: 253947 - protein, 14 aa, Homo sapiens
  CDR3 for alpha chain variable domain of TCR clone 126974 (TRAV12-2, TRAJ17)
CAVNIKAAGNKLTF

SEQ ID NO: 253948 - protein, 15 aa, Homo sapiens
  CDR3 for beta chain variable domain of TCR clone 126974 (TRBV19, TRBJ1-1)
CASTSGQIQNTEAFF

SEQ ID NO: 253949 - protein, 20 aa, Homo sapiens
  CDR3 for alpha chain variable domain of TCR clone 126975 (TRAV12-1, TRAJ42)
SSVIQPPTSVKGGSQGNLIF

SEQ ID NO: 253950 - protein, 13 aa, Homo sapiens
  CDR3 for beta chain variable domain of TCR clone 126975 (TRBV7-9, TRBJ1-2)
CASSLKQNYGYTF

SEQ ID NO: 253951 - protein, 16 aa, Homo sapiens
  CDR3 for alpha chain variable domain of TCR clone 126976 (TRAV1-2, TRAJ10)
CAVRGVLTGGGNKLTF

SEQ ID NO: 253952 - protein, 17 aa, Homo sapiens
  CDR3 for beta chain variable domain of TCR clone 126976 (TRBV15, TRBJ1-4)
CATSRYGTGDPNEKLFF

SEQ ID NO: 253953 - protein, 11 aa, Homo sapiens
  CDR3 for alpha chain variable domain of TCR clone 126977 (TRAV9-2, TRAJ26)
CALRRPQNFVF

SEQ ID NO: 253954 - protein, 15 aa, Homo sapiens
  CDR3 for beta chain variable domain of TCR clone 126977 (TRBV7-3, TRBJ2-3)
CASSLAGGAGDTQYF

SEQ ID NO: 253955 - protein, 13 aa, Homo sapiens
  CDR3 for alpha chain variable domain of TCR clone 126978 (TRAV2, TRAJ40)
CAVVTSVTHKYIF

SEQ ID NO: 253956 - protein, 14 aa, Homo sapiens
  CDR3 for beta chain variable domain of TCR clone 126978 (TRBV19, TRBJ2-1)
CASPTFVLSGEQFF

SEQ ID NO: 253957 - protein, 12 aa, Homo sapiens
  CDR3 for alpha chain variable domain of TCR clone 126979 (TRAV12-3, TRAJ17)
CAMTLTGNKLTF

SEQ ID NO: 253958 - protein, 15 aa, Homo sapiens
  CDR3 for beta chain variable domain of TCR clone 126979 (TRBV11-3, TRBJ2-5)
CASSDTSGGIETQYF

SEQ ID NO: 253959 - protein, 12 aa, Homo sapiens
  CDR3 for alpha chain variable domain of TCR clone 126980 (TRAV13-1, TRAJ49)
CAAPNTGNQFYF

SEQ ID NO: 253960 - protein, 17 aa, Homo sapiens
  CDR3 for beta chain variable domain of TCR clone 126980 (TRBV25-1, TRBJ2-7)
CASSDARVFFSSYEQYF

SEQ ID NO: 253961 - protein, 13 aa, Homo sapiens
  CDR3 for alpha chain variable domain of TCR clone 126981 (TRAV12-3, TRAJ33)
CAMSVNSNYQLIC

SEQ ID NO: 253962 - protein, 11 aa, Homo sapiens
  CDR3 for beta chain variable domain of TCR clone 126981 (TRBV7-3, TRBJ2-5)
CASSLSETQYF

SEQ ID NO: 253963 - protein, 14 aa, Homo sapiens
  CDR3 for alpha chain variable domain of TCR clone 126982 (TRAV4, TRAJ26)
CLVGPHNYGQNFVF

SEQ ID NO: 253964 - protein, 15 aa, Homo sapiens
  CDR3 for beta chain variable domain of TCR clone 126982 (TRBV18, TRBJ1-1)
CASSPRQGENTEAFF

SEQ ID NO: 253965 - protein, 15 aa, Homo sapiens
  CDR3 for alpha chain variable domain of TCR clone 126983 (TRAV12-2, TRAJ52)
CAAPGGGTSYGKLTF

SEQ ID NO: 253966 - protein, 10 aa, Homo sapiens
  CDR3 for beta chain variable domain of TCR clone 126983 (TRBV11-2, TRBJ2-2)
CASRGLAANT

SEQ ID NO: 253967 - protein, 13 aa, Homo sapiens
  CDR3 for alpha chain variable domain of TCR clone 126984 (TRAV23/DV6, TRAJ22)
CAPYSGSARQLTF

SEQ ID NO: 253968 - protein, 15 aa, Homo sapiens
  CDR3 for beta chain variable domain of TCR clone 126984 (TRBV11-2, TRBJ1-6)
CASSLDPWAVSALHF

SEQ ID NO: 253969 - protein, 14 aa, Homo sapiens
  CDR3 for alpha chain variable domain of TCR clone 126985 (TRAV3, TRAJ8)
CAVSLNTGFQTLVF

SEQ ID NO: 253970 - protein, 14 aa, Homo sapiens
  CDR3 for beta chain variable domain of TCR clone 126985 (TRBV6-6, TRBJ1-5)
CASVDSGFNQPQHF

SEQ ID NO: 253971 - protein, 14 aa, Homo sapiens
  CDR3 for alpha chain variable domain of TCR clone 126986 (TRAV38-1, TRAJ45)
CASHSGGGGDGLTF

SEQ ID NO: 253972 - protein, 13 aa, Homo sapiens
  CDR3 for beta chain variable domain of TCR clone 126986 (TRBV10-3, TRBJ1-2)
CAISERDSYGYTF

SEQ ID NO: 253973 - protein, 12 aa, Homo sapiens
  CDR3 for alpha chain variable domain of TCR clone 126987 (TRAV30, TRAJ43)
CDTEERGNDMRF

SEQ ID NO: 253974 - protein, 13 aa, Homo sapiens
  CDR3 for beta chain variable domain of TCR clone 126987 (TRBV27, TRBJ2-7)
CASSFSQGYEQYF

SEQ ID NO: 253975 - protein, 14 aa, Homo sapiens
  CDR3 for alpha chain variable domain of TCR clone 126988 (TRAV41, TRAJ32)
CCPNYGGATNKLIF

SEQ ID NO: 253976 - protein, 15 aa, Homo sapiens
  CDR3 for beta chain variable domain of TCR clone 126988 (TRBV11-2, TRBJ2-1)
CASSKDRGLIYEQFF

SEQ ID NO: 253977 - protein, 14 aa, Homo sapiens
  CDR3 for alpha chain variable domain of TCR clone 126989 (TRAV16, TRAJ39)
CALSKNNAGNMLTF

SEQ ID NO: 253978 - protein, 14 aa, Homo sapiens
  CDR3 for beta chain variable domain of TCR clone 126989 (TRBV7-8, TRBJ2-3)
CASSLEAGTDTQYF

SEQ ID NO: 253979 - protein, 15 aa, Homo sapiens
  CDR3 for alpha chain variable domain of TCR clone 126990 (TRAV26-1, TRAJ56)
CIVRVDNGANSKLTF

SEQ ID NO: 253980 - protein, 15 aa, Homo sapiens
  CDR3 for beta chain variable domain of TCR clone 126990 (TRBV20-1, TRBJ2-7)
CSARDPAEVGHEQYF

SEQ ID NO: 253981 - protein, 14 aa, Homo sapiens
  CDR3 for alpha chain variable domain of TCR clone 126991 (TRAV12-3, TRAJ10)
SHLPLTGGGNKLTF

SEQ ID NO: 253982 - protein, 14 aa, Homo sapiens
  CDR3 for beta chain variable domain of TCR clone 126991 (TRBV7-9, TRBJ2-1)
CASRPTGLRNEQFF

SEQ ID NO: 253983 - protein, 12 aa, Homo sapiens
  CDR3 for alpha chain variable domain of TCR clone 126992 (TRAV17, TRAJ39)
CATGAAGNMLTF

SEQ ID NO: 253984 - protein, 15 aa, Homo sapiens
  CDR3 for beta chain variable domain of TCR clone 126992 (TRBV19, TRBJ1-2)
CASSVGQVLNYGYTF

SEQ ID NO: 253985 - protein, 17 aa, Homo sapiens
  CDR3 for alpha chain variable domain of TCR clone 126993 (TRAV3, TRAJ28)
CAVREAYSGAGSYQLTF

SEQ ID NO: 253986 - protein, 15 aa, Homo sapiens
  CDR3 for beta chain variable domain of TCR clone 126993 (TRBV10-1, TRBJ2-3)
CASSATSGGFDTQYF

SEQ ID NO: 253987 - protein, 11 aa, Homo sapiens
  CDR3 for alpha chain variable domain of TCR clone 126994 (TRAV35, TRAJ30)
CAGPGDDKIIF

SEQ ID NO: 253988 - protein, 16 aa, Homo sapiens
  CDR3 for beta chain variable domain of TCR clone 126994 (TRBV6-1, TRBJ2-5)
CASSETLDRGAETQYF

SEQ ID NO: 253989 - protein, 15 aa, Homo sapiens
  CDR3 for alpha chain variable domain of TCR clone 126995 (TRAV26-1, TRAJ23)
CIVRVAGYQGGKLIS

SEQ ID NO: 253990 - protein, 18 aa, Homo sapiens
  CDR3 for beta chain variable domain of TCR clone 126995 (TRBV28, TRBJ2-1)
CASSSTSGRANSYNEQFF

SEQ ID NO: 253991 - protein, 15 aa, Homo sapiens
  CDR3 for alpha chain variable domain of TCR clone 126996 (TRAV35, TRAJ40)
CAGQLGTSGTYKYIF

SEQ ID NO: 253992 - protein, 14 aa, Homo sapiens
  CDR3 for beta chain variable domain of TCR clone 126996 (TRBV7-3, TRBJ2-1)
CACSLAGGTNEQFF

SEQ ID NO: 253993 - protein, 14 aa, Homo sapiens
  CDR3 for alpha chain variable domain of TCR clone 126997 (TRAV1-2, TRAJ8)
CAVREDTGFQKLVL

SEQ ID NO: 253994 - protein, 15 aa, Homo sapiens
  CDR3 for beta chain variable domain of TCR clone 126997 (TRBV6-3, TRBJ2-7)
CASSSPGTVSYEQYF

SEQ ID NO: 253995 - protein, 14 aa, Homo sapiens
  CDR3 for alpha chain variable domain of TCR clone 126998 (TRAV13-2, TRAJ17)
CAENSKAAGNKLTF

SEQ ID NO: 253996 - protein, 14 aa, Homo sapiens
  CDR3 for beta chain variable domain of TCR clone 126998 (TRBV7-9, TRBJ2-1)
CASSPRDSLYEQFF

SEQ ID NO: 253997 - protein, 12 aa, Homo sapiens
  CDR3 for alpha chain variable domain of TCR clone 126999 (TRAV20, TRAJ20)
CAVRFNDSKLSF

SEQ ID NO: 253998 - protein, 14 aa, Homo sapiens
  CDR3 for beta chain variable domain of TCR clone 126999 (TRBV20-1, TRBJ2-1)
CSAQIGGSANEQFF

SEQ ID NO: 253999 - protein, 13 aa, Homo sapiens
  CDR3 for alpha chain variable domain of TCR clone 127000 (TRAV2, TRAJ13)
CAVESGGYKKVTF

SEQ ID NO: 254000 - protein, 13 aa, Homo sapiens
  CDR3 for beta chain variable domain of TCR clone 127000 (TRBV28, TRBJ2-5)
CASSFAGGETQYF

SEQ ID NO: 254001 - protein, 14 aa, Homo sapiens
  CDR3 for alpha chain variable domain of TCR clone 127001 (TRAV35, TRAJ33)
CAGSSQDSNYQLIW

SEQ ID NO: 254002 - protein, 15 aa, Homo sapiens
  CDR3 for beta chain variable domain of TCR clone 127001 (TRBV5-1, TRBJ1-4)
FAPAAWKDGDEKLFF

SEQ ID NO: 254003 - protein, 15 aa, Homo sapiens
  CDR3 for alpha chain variable domain of TCR clone 127002 (TRAV3, TRAJ4)
CAVRDGTGGYNKLIF

SEQ ID NO: 254004 - protein, 18 aa, Homo sapiens
  CDR3 for beta chain variable domain of TCR clone 127002 (TRBV20-1, TRBJ2-3)
CSASGLAGGPGTTDTQYF

SEQ ID NO: 254005 - protein, 12 aa, Homo sapiens
  CDR3 for alpha chain variable domain of TCR clone 127003 (TRAV30, TRAJ43)
CGTEERDNDMRF

SEQ ID NO: 254006 - protein, 13 aa, Homo sapiens
  CDR3 for beta chain variable domain of TCR clone 127003 (TRBV27, TRBJ2-7)
CASSFSQGYEQYF

SEQ ID NO: 254007 - protein, 12 aa, Homo sapiens
  CDR3 for alpha chain variable domain of TCR clone 127004 (TRAV13-1, TRAJ21)
CAAKEGSNKFYF

SEQ ID NO: 254008 - protein, 13 aa, Homo sapiens
  CDR3 for beta chain variable domain of TCR clone 127004 (TRBV20-1, TRBJ1-1)
CSAPLGGGTEAFF

SEQ ID NO: 254009 - protein, 11 aa, Homo sapiens
  CDR3 for alpha chain variable domain of TCR clone 127005 (TRAV17, TRAJ21)
CATGNFNKFYF

SEQ ID NO: 254010 - protein, 13 aa, Homo sapiens
  CDR3 for beta chain variable domain of TCR clone 127005 (TRBV10-3, TRBJ2-7)
CASKLAVNYEQYF

SEQ ID NO: 254011 - protein, 14 aa, Homo sapiens
  CDR3 for alpha chain variable domain of TCR clone 127006 (TRAV17, TRAJ54)
CATDANQGAQKLVF

SEQ ID NO: 254012 - protein, 12 aa, Homo sapiens
  CDR3 for beta chain variable domain of TCR clone 127006 (TRBV7-9, TRBJ2-7)
CASSIKREEQDF

SEQ ID NO: 254013 - protein, 13 aa, Homo sapiens
  CDR3 for alpha chain variable domain of TCR clone 127007 (TRAV13-1, TRAJ10)
CAATAGGGNKLTF

SEQ ID NO: 254014 - protein, 12 aa, Homo sapiens
  CDR3 for beta chain variable domain of TCR clone 127007 (TRBV7-3, TRBJ2-1)
CASSVQSGPQFF

SEQ ID NO: 254015 - protein, 14 aa, Homo sapiens
  CDR3 for alpha chain variable domain of TCR clone 127008 (TRAV1-2, TRAJ8)
CAVREDTGFQKLVF

SEQ ID NO: 254016 - protein, 16 aa, Homo sapiens
  CDR3 for beta chain variable domain of TCR clone 127008 (TRBV12-4, TRBJ2-1)
CASSAVGQGNGDEQFF

SEQ ID NO: 254017 - protein, 16 aa, Homo sapiens
  CDR3 for alpha chain variable domain of TCR clone 127009 (TRAV1-2, TRAJ18)
CAVRVERGSTLGRLYF

SEQ ID NO: 254018 - protein, 16 aa, Homo sapiens
  CDR3 for beta chain variable domain of TCR clone 127009 (TRBV20-1, TRBJ2-7)
CSASTSGRPSSYEQYF

SEQ ID NO: 254019 - protein, 12 aa, Homo sapiens
  CDR3 for alpha chain variable domain of TCR clone 127010 (TRAV12-3, TRAJ7)
CAMMDGNNRLAF

SEQ ID NO: 254020 - protein, 12 aa, Homo sapiens
  CDR3 for beta chain variable domain of TCR clone 127010 (TRBV11-2, TRBJ2-2)
CASSLPTGELFF

SEQ ID NO: 254021 - protein, 18 aa, Homo sapiens
  CDR3 for alpha chain variable domain of TCR clone 127011 (TRAV26-2, TRAJ45)
CILRLWGYSGGGADGLTF

SEQ ID NO: 254022 - protein, 17 aa, Homo sapiens
  CDR3 for beta chain variable domain of TCR clone 127011 (TRBV28, TRBJ2-3)
CASSPTPAGGRADTQYF

SEQ ID NO: 254023 - protein, 14 aa, Homo sapiens
  CDR3 for alpha chain variable domain of TCR clone 127012 (TRAV1-2, TRAJ16)
CAVNRISDGQKLLF

SEQ ID NO: 254024 - protein, 15 aa, Homo sapiens
  CDR3 for beta chain variable domain of TCR clone 127012 (TRBV11-3, TRBJ2-3)
CASLKDGREGDTQYF

SEQ ID NO: 254025 - protein, 13 aa, Homo sapiens
  CDR3 for alpha chain variable domain of TCR clone 127013 (TRAV29/DV5, TRAJ31)
CAASRNNNARLMF

SEQ ID NO: 254026 - protein, 15 aa, Homo sapiens
  CDR3 for beta chain variable domain of TCR clone 127013 (TRBV29-1, TRBJ1-2)
CSVVLEAGSNYGYTF

SEQ ID NO: 254027 - protein, 15 aa, Homo sapiens
  CDR3 for alpha chain variable domain of TCR clone 127014 (TRAV22, TRAJ56)
CAVEEYTGANSKLTF

SEQ ID NO: 254028 - protein, 13 aa, Homo sapiens
  CDR3 for beta chain variable domain of TCR clone 127014 (TRBV4-1, TRBJ2-2)
CASSQENTGELFF

SEQ ID NO: 254029 - protein, 12 aa, Homo sapiens
  CDR3 for alpha chain variable domain of TCR clone 127015 (TRAV21, TRAJ11)
CAVRGGNGTLTF

SEQ ID NO: 254030 - protein, 15 aa, Homo sapiens
  CDR3 for beta chain variable domain of TCR clone 127015 (TRBV6-1, TRBJ2-7)
CASSEPIAATTEQYF

SEQ ID NO: 254031 - protein, 14 aa, Homo sapiens
  CDR3 for alpha chain variable domain of TCR clone 127016 (TRAV17, TRAJ34)
CATDSLEGTDKLIF

SEQ ID NO: 254032 - protein, 16 aa, Homo sapiens
  CDR3 for beta chain variable domain of TCR clone 127016 (TRBV19, TRBJ2-1)
CASSKAGPSSYNEQFF

SEQ ID NO: 254033 - protein, 14 aa, Homo sapiens
  CDR3 for alpha chain variable domain of TCR clone 127017 (TRAV13-1, TRAJ9)
CAASALTGGFKTIF

SEQ ID NO: 254034 - protein, 14 aa, Homo sapiens
  CDR3 for beta chain variable domain of TCR clone 127017 (TRBV7-2, TRBJ2-7)
CASRSQGAAYEQYF

SEQ ID NO: 254035 - protein, 14 aa, Homo sapiens
  CDR3 for alpha chain variable domain of TCR clone 127018 (TRAV1-1, TRAJ23)
CAVSIYNQGGKLIF

SEQ ID NO: 254036 - protein, 11 aa, Homo sapiens
  CDR3 for beta chain variable domain of TCR clone 127018 (TRBV11-2, TRBJ2-2)
CASSLPGELFF

SEQ ID NO: 254037 - protein, 13 aa, Homo sapiens
  CDR3 for alpha chain variable domain of TCR clone 127019 (TRAV27, TRAJ6)
CAGGTRGSYIPTF

SEQ ID NO: 254038 - protein, 15 aa, Homo sapiens
  CDR3 for beta chain variable domain of TCR clone 127019 (TRBV7-9, TRBJ1-5)
CASSQGHQPNQPQHF

SEQ ID NO: 254039 - protein, 14 aa, Homo sapiens
  CDR3 for alpha chain variable domain of TCR clone 127020 (TRAV17, TRAJ32)
CATDPGGATNKFIF

SEQ ID NO: 254040 - protein, 14 aa, Homo sapiens
  CDR3 for beta chain variable domain of TCR clone 127020 (TRBV2, TRBJ1-5)
CASSENRGGQPQHF

SEQ ID NO: 254041 - protein, 13 aa, Homo sapiens
  CDR3 for alpha chain variable domain of TCR clone 127021 (TRAV2, TRAJ15)
CAVASQEGTALIF

SEQ ID NO: 254042 - protein, 16 aa, Homo sapiens
  CDR3 for beta chain variable domain of TCR clone 127021 (TRBV5-1, TRBJ1-1)
CASSSGGNSLNTEAFF

SEQ ID NO: 254043 - protein, 14 aa, Homo sapiens
  CDR3 for alpha chain variable domain of TCR clone 127022 (TRAV16, TRAJ33)
CALSAMDSNYQLIW

SEQ ID NO: 254044 - protein, 17 aa, Homo sapiens
  CDR3 for beta chain variable domain of TCR clone 127022 (TRBV25-1, TRBJ2-7)
CASSDARVVCSSYEQYF

SEQ ID NO: 254045 - protein, 12 aa, Homo sapiens
  CDR3 for alpha chain variable domain of TCR clone 127023 (TRAV8-1, TRAJ31)
CAVISNNARLMF

SEQ ID NO: 254046 - protein, 15 aa, Homo sapiens
  CDR3 for beta chain variable domain of TCR clone 127023 (TRBV20-1, TRBJ2-2)
CSARGGQGNTGELFF

SEQ ID NO: 254047 - protein, 11 aa, Homo sapiens
  CDR3 for alpha chain variable domain of TCR clone 127024 (TRAV21, TRAJ34)
YAHYNTDKLIF

SEQ ID NO: 254048 - protein, 11 aa, Homo sapiens
  CDR3 for beta chain variable domain of TCR clone 127024 (TRBV29-1, TRBJ2-5)
CSEDRTGTQYF

SEQ ID NO: 254049 - protein, 14 aa, Homo sapiens
  CDR3 for alpha chain variable domain of TCR clone 127025 (TRAV12-3, TRAJ10)
SHLPLTGGGNKLTF

SEQ ID NO: 254050 - protein, 15 aa, Homo sapiens
  CDR3 for beta chain variable domain of TCR clone 127025 (TRBV29-1, TRBJ2-7)
CSVEFFDRVSYEQYF

SEQ ID NO: 254051 - protein, 15 aa, Homo sapiens
  CDR3 for alpha chain variable domain of TCR clone 127026 (TRAV3, TRAJ17)
CAVRDTGAAGNKLTF

SEQ ID NO: 254052 - protein, 16 aa, Homo sapiens
  CDR3 for beta chain variable domain of TCR clone 127026 (TRBV20-1, TRBJ1-4)
CSAPGQGLLTNEKLFF

SEQ ID NO: 254053 - protein, 12 aa, Homo sapiens
  CDR3 for alpha chain variable domain of TCR clone 127027 (TRAV9-2, TRAJ36)
CALKKGANNLFF

SEQ ID NO: 254054 - protein, 16 aa, Homo sapiens
  CDR3 for beta chain variable domain of TCR clone 127027 (TRBV2, TRBJ2-3)
CASSTSVEGVTDTQYF

SEQ ID NO: 254055 - protein, 14 aa, Homo sapiens
  CDR3 for alpha chain variable domain of TCR clone 127028 (TRAV3, TRAJ28)
CAVRRGAGSYQLTV

SEQ ID NO: 254056 - protein, 16 aa, Homo sapiens
  CDR3 for beta chain variable domain of TCR clone 127028 (TRBV4-1, TRBJ2-7)
CASSQEWTSGPLEQYF

SEQ ID NO: 254057 - protein, 14 aa, Homo sapiens
  CDR3 for alpha chain variable domain of TCR clone 127029 (TRAV17, TRAJ31)
CATVLRNKNARLMF

SEQ ID NO: 254058 - protein, 14 aa, Homo sapiens
  CDR3 for beta chain variable domain of TCR clone 127029 (TRBV12-4, TRBJ2-5)
CASSLWQKQETQYF

SEQ ID NO: 254059 - protein, 14 aa, Homo sapiens
  CDR3 for alpha chain variable domain of TCR clone 127030 (TRAV12-2, TRAJ17)
CAVNIKAAGNKLTF

SEQ ID NO: 254060 - protein, 11 aa, Homo sapiens
  CDR3 for beta chain variable domain of TCR clone 127030 (TRBV25-1, TRBJ2-2)
CASSAQGDEHR

SEQ ID NO: 254061 - protein, 17 aa, Homo sapiens
  CDR3 for alpha chain variable domain of TCR clone 127031 (TRAV38-1, TRAJ28)
CAFMKPTSGAGSYQLTF

SEQ ID NO: 254062 - protein, 15 aa, Homo sapiens
  CDR3 for beta chain variable domain of TCR clone 127031 (TRBV5-1, TRBJ2-4)
CSSSLGGGGSYIQYF

SEQ ID NO: 254063 - protein, 16 aa, Homo sapiens
  CDR3 for alpha chain variable domain of TCR clone 127032 (TRAV26-1, TRAJ32)
CIVRTNYGGATNKLIF

SEQ ID NO: 254064 - protein, 16 aa, Homo sapiens
  CDR3 for beta chain variable domain of TCR clone 127032 (TRBV7-3, TRBJ2-2)
CASSLKRGTLSGELFF

SEQ ID NO: 254065 - protein, 17 aa, Homo sapiens
  CDR3 for alpha chain variable domain of TCR clone 127033 (TRAV8-3, TRAJ34)
CAIPGKLIFGTETRLQV

SEQ ID NO: 254066 - protein, 15 aa, Homo sapiens
  CDR3 for beta chain variable domain of TCR clone 127033 (TRBV5-7, TRBJ2-1)
CASSRRLAGDNEQFF

SEQ ID NO: 254067 - protein, 15 aa, Homo sapiens
  CDR3 for alpha chain variable domain of TCR clone 127034 (TRAV12-3, TRAJ6)
CAMSATTGGSYIPTF

SEQ ID NO: 254068 - protein, 15 aa, Homo sapiens
  CDR3 for beta chain variable domain of TCR clone 127034 (TRBV6-6, TRBJ2-7)
CASSYSYGGSYEQYF

SEQ ID NO: 254069 - protein, 17 aa, Homo sapiens
  CDR3 for alpha chain variable domain of TCR clone 127035 (TRAV13-1, TRAJ52)
CAASSGAGGTSYGKLTF

SEQ ID NO: 254070 - protein, 15 aa, Homo sapiens
  CDR3 for beta chain variable domain of TCR clone 127035 (TRBV7-9, TRBJ1-5)
CASSQGHQPNQPQHF

SEQ ID NO: 254071 - protein, 15 aa, Homo sapiens
  CDR3 for alpha chain variable domain of TCR clone 127036 (TRAV34, TRAJ38)
CGADFTPGHNRKLIW

SEQ ID NO: 254072 - protein, 16 aa, Homo sapiens
  CDR3 for beta chain variable domain of TCR clone 127036 (TRBV12-5, TRBJ2-5)
CASGPRTSGNQETQYF

SEQ ID NO: 254073 - protein, 12 aa, Homo sapiens
  CDR3 for alpha chain variable domain of TCR clone 127037 (TRAV26-1, TRAJ43)
CIVRPRGDDMRF

SEQ ID NO: 254074 - protein, 14 aa, Homo sapiens
  CDR3 for beta chain variable domain of TCR clone 127037 (TRBV7-2, TRBJ1-2)
CASSQTGSTYGYTF

SEQ ID NO: 254075 - protein, 17 aa, Homo sapiens
  CDR3 for alpha chain variable domain of TCR clone 127038 (TRAV8-6, TRAJ58)
CAVSSWVGETSGSRLTF

SEQ ID NO: 254076 - protein, 14 aa, Homo sapiens
  CDR3 for beta chain variable domain of TCR clone 127038 (TRBV4-3, TRBJ2-1)
FASGLDRAYNEQFF

SEQ ID NO: 254077 - protein, 11 aa, Homo sapiens
  CDR3 for alpha chain variable domain of TCR clone 127039 (TRAV1-1, TRAJ23)
CAVRQGGKLIF

SEQ ID NO: 254078 - protein, 14 aa, Homo sapiens
  CDR3 for beta chain variable domain of TCR clone 127039 (TRBV19, TRBJ2-5)
CASSMTGQQETQYF

SEQ ID NO: 254079 - protein, 14 aa, Homo sapiens
  CDR3 for alpha chain variable domain of TCR clone 127040 (TRAV2, TRAJ37)
CAVDFTSNTGKLIF

SEQ ID NO: 254080 - protein, 15 aa, Homo sapiens
  CDR3 for beta chain variable domain of TCR clone 127040 (TRBV20-1, TRBJ1-1)
WSASRGVTGNTEAFF

SEQ ID NO: 254081 - protein, 15 aa, Homo sapiens
  CDR3 for alpha chain variable domain of TCR clone 127041 (TRAV8-3, TRAJ27)
CAVGPSKTNAGKSTF

SEQ ID NO: 254082 - protein, 15 aa, Homo sapiens
  CDR3 for beta chain variable domain of TCR clone 127041 (TRBV5-1, TRBJ2-2)
CASSSQGGNTGELFF

SEQ ID NO: 254083 - protein, 15 aa, Homo sapiens
  CDR3 for alpha chain variable domain of TCR clone 127042 (TRAV21, TRAJ53)
CATLNSGGSNYKLTF

SEQ ID NO: 254084 - protein, 15 aa, Homo sapiens
  CDR3 for beta chain variable domain of TCR clone 127042 (TRBV18, TRBJ2-1)
CASSPPSASYNEQFV

SEQ ID NO: 254085 - protein, 13 aa, Homo sapiens
  CDR3 for alpha chain variable domain of TCR clone 127043 (TRAV27, TRAJ42)
CAGARGSQGNLIF

SEQ ID NO: 254086 - protein, 15 aa, Homo sapiens
  CDR3 for beta chain variable domain of TCR clone 127043 (TRBV10-3, TRBJ2-2)
CAIRIDREDTGELFF

SEQ ID NO: 254087 - protein, 16 aa, Homo sapiens
  CDR3 for alpha chain variable domain of TCR clone 127044 (TRAV3, TRAJ37)
CAVRGKGSGNTGKLIF

SEQ ID NO: 254088 - protein, 14 aa, Homo sapiens
  CDR3 for beta chain variable domain of TCR clone 127044 (TRBV12-4, TRBJ1-5)
CASSPTGPRGGTYF

SEQ ID NO: 254089 - protein, 16 aa, Homo sapiens
  CDR3 for alpha chain variable domain of TCR clone 127045 (TRAV30, TRAJ49)
SAAQRVGPNTGNQLYF

SEQ ID NO: 254090 - protein, 15 aa, Homo sapiens
  CDR3 for beta chain variable domain of TCR clone 127045 (TRBV2, TRBJ2-1)
CASSELAGSYNEQFF

SEQ ID NO: 254091 - protein, 14 aa, Homo sapiens
  CDR3 for alpha chain variable domain of TCR clone 127046 (TRAV12-3, TRAJ10)
SHLPLTGGVNKLTF

SEQ ID NO: 254092 - protein, 13 aa, Homo sapiens
  CDR3 for beta chain variable domain of TCR clone 127046 (TRBV9, TRBJ2-1)
CASSPSGGNEQFF

SEQ ID NO: 254093 - protein, 14 aa, Homo sapiens
  CDR3 for alpha chain variable domain of TCR clone 127047 (TRAV12-3, TRAJ29)
CAMILLSGNTPIVF

SEQ ID NO: 254094 - protein, 16 aa, Homo sapiens
  CDR3 for beta chain variable domain of TCR clone 127047 (TRBV28, TRBJ2-7)
CASSSGTSGRGYEQYF

SEQ ID NO: 254095 - protein, 14 aa, Homo sapiens
  CDR3 for alpha chain variable domain of TCR clone 127048 (TRAV26-1, TRAJ22)
CIVRVYGSVRQLTF

SEQ ID NO: 254096 - protein, 17 aa, Homo sapiens
  CDR3 for beta chain variable domain of TCR clone 127048 (TRBV7-3, TRBJ2-3)
CASSPGGLAGFGDTQYF

SEQ ID NO: 254097 - protein, 13 aa, Homo sapiens
  CDR3 for alpha chain variable domain of TCR clone 127049 (TRAV12-3, TRAJ33)
CAMSVNSNYQLIW

SEQ ID NO: 254098 - protein, 17 aa, Homo sapiens
  CDR3 for beta chain variable domain of TCR clone 127049 (TRBV13, TRBJ2-3)
CASSLSRVAGGRNTQYF

SEQ ID NO: 254099 - protein, 14 aa, Homo sapiens
  CDR3 for alpha chain variable domain of TCR clone 127050 (TRAV12-1, TRAJ17)
CVVNYKAAGNKLTF

SEQ ID NO: 254100 - protein, 13 aa, Homo sapiens
  CDR3 for beta chain variable domain of TCR clone 127050 (TRBV7-2, TRBJ2-5)
CASSQTSVETQYF

SEQ ID NO: 254101 - protein, 15 aa, Homo sapiens
  CDR3 for alpha chain variable domain of TCR clone 127051 (TRAV26-1, TRAJ29)
CIVRVEGSGNQPLVF

SEQ ID NO: 254102 - protein, 15 aa, Homo sapiens
  CDR3 for beta chain variable domain of TCR clone 127051 (TRBV7-9, TRBJ1-5)
CASSQGHQPNQPQHF

SEQ ID NO: 254103 - protein, 12 aa, Homo sapiens
  CDR3 for alpha chain variable domain of TCR clone 127052 (TRAV36/DV7, TRAJ54)
CAVVRGAQKLVF

SEQ ID NO: 254104 - protein, 14 aa, Homo sapiens
  CDR3 for beta chain variable domain of TCR clone 127052 (TRBV20-1, TRBJ1-2)
CSANPPPGRYGYTF

SEQ ID NO: 254105 - protein, 13 aa, Homo sapiens
  CDR3 for alpha chain variable domain of TCR clone 127053 (TRAV13-1, TRAJ43)
CAASKNNNNDMRF

SEQ ID NO: 254106 - protein, 15 aa, Homo sapiens
  CDR3 for beta chain variable domain of TCR clone 127053 (TRBV6-3, TRBJ2-7)
CASSSPGTVFYEQYF

SEQ ID NO: 254107 - protein, 18 aa, Homo sapiens
  CDR3 for alpha chain variable domain of TCR clone 127054 (TRAV26-2, TRAJ54)
CILRDVEVGIRGAQKLVF

SEQ ID NO: 254108 - protein, 14 aa, Homo sapiens
  CDR3 for beta chain variable domain of TCR clone 127054 (TRBV23-1, TRBJ1-1)
CASSQRPLKGGAFF

SEQ ID NO: 254109 - protein, 16 aa, Homo sapiens
  CDR3 for alpha chain variable domain of TCR clone 127055 (TRAV30, TRAJ24)
CGTEIVDADRWGKFQF

SEQ ID NO: 254110 - protein, 14 aa, Homo sapiens
  CDR3 for beta chain variable domain of TCR clone 127055 (TRBV7-2, TRBJ1-2)
CASSQTGSTYGYTF

SEQ ID NO: 254111 - protein, 18 aa, Homo sapiens
  CDR3 for alpha chain variable domain of TCR clone 127056 (TRAV26-1, TRAJ52)
CIVRVEGAGGTSYGKLTF

SEQ ID NO: 254112 - protein, 15 aa, Homo sapiens
  CDR3 for beta chain variable domain of TCR clone 127056 (TRBV28, TRBJ2-5)
CASSPGQGSIETQYF

SEQ ID NO: 254113 - protein, 14 aa, Homo sapiens
  CDR3 for alpha chain variable domain of TCR clone 127057 (TRAV20, TRAJ56)
CAVQFGGANSKLTF

SEQ ID NO: 254114 - protein, 13 aa, Homo sapiens
  CDR3 for beta chain variable domain of TCR clone 127057 (TRBV12-5, TRBJ2-3)
CASGDRQSDTQYF

SEQ ID NO: 254115 - protein, 11 aa, Homo sapiens
  CDR3 for alpha chain variable domain of TCR clone 127058 (TRAV2, TRAJ13)
CASGGYKKVTF

SEQ ID NO: 254116 - protein, 12 aa, Homo sapiens
  CDR3 for beta chain variable domain of TCR clone 127058 (TRBV29-1, TRBJ2-7)
CSARDRPYEQYF

SEQ ID NO: 254117 - protein, 13 aa, Homo sapiens
  CDR3 for alpha chain variable domain of TCR clone 127059 (TRAV21, TRAJ57)
CAVTQGGPEKLVF

SEQ ID NO: 254118 - protein, 15 aa, Homo sapiens
  CDR3 for beta chain variable domain of TCR clone 127059 (TRBV5-1, TRBJ1-1)
CASSSTTGTNTEAFF

SEQ ID NO: 254119 - protein, 15 aa, Homo sapiens
  CDR3 for alpha chain variable domain of TCR clone 127060 (TRAV8-4, TRAJ7)
CAVSGGNYGTNRLAF

SEQ ID NO: 254120 - protein, 11 aa, Homo sapiens
  CDR3 for beta chain variable domain of TCR clone 127060 (TRBV20-1, TRBJ2-1)
CSLSSGSEQFF

SEQ ID NO: 254121 - protein, 13 aa, Homo sapiens
  CDR3 for alpha chain variable domain of TCR clone 127061 (TRAV1-2, TRAJ9)
CAALNTGGFKTIF

SEQ ID NO: 254122 - protein, 15 aa, Homo sapiens
  CDR3 for beta chain variable domain of TCR clone 127061 (TRBV7-6, TRBJ2-5)
CASSKPTGPQETQYF

SEQ ID NO: 254123 - protein, 14 aa, Homo sapiens
  CDR3 for alpha chain variable domain of TCR clone 127062 (TRAV13-1, TRAJ44)
CAAKATGTASKLNF

SEQ ID NO: 254124 - protein, 13 aa, Homo sapiens
  CDR3 for beta chain variable domain of TCR clone 127062 (TRBV5-5, TRBJ1-2)
CASSFWRGEDYTF

SEQ ID NO: 254125 - protein, 13 aa, Homo sapiens
  CDR3 for alpha chain variable domain of TCR clone 127063 (TRAV10, TRAJ45)
CVGSGGGADGLTF

SEQ ID NO: 254126 - protein, 15 aa, Homo sapiens
  CDR3 for beta chain variable domain of TCR clone 127063 (TRBV5-1, TRBJ2-7)
CASSLYPDGGYEQYS

SEQ ID NO: 254127 - protein, 13 aa, Homo sapiens
  CDR3 for alpha chain variable domain of TCR clone 127064 (TRAV13-2, TRAJ15)
CAERPQAGTALIF

SEQ ID NO: 254128 - protein, 15 aa, Homo sapiens
  CDR3 for beta chain variable domain of TCR clone 127064 (TRBV11-2, TRBJ2-7)
CASRFPGTGGHEQYF

SEQ ID NO: 254129 - protein, 14 aa, Homo sapiens
  CDR3 for alpha chain variable domain of TCR clone 127065 (TRAV1-2, TRAJ8)
CAVREDTGFQKLVF

SEQ ID NO: 254130 - protein, 12 aa, Homo sapiens
  CDR3 for beta chain variable domain of TCR clone 127065 (TRBV11-2, TRBJ2-2)
CASSVPTGELFF

SEQ ID NO: 254131 - protein, 15 aa, Homo sapiens
  CDR3 for alpha chain variable domain of TCR clone 127066 (TRAV26-1, TRAJ22)
CIVRVSFWFCKATDL

SEQ ID NO: 254132 - protein, 13 aa, Homo sapiens
  CDR3 for beta chain variable domain of TCR clone 127066 (TRBV12-4, TRBJ2-1)
CASSLAENNEQFF

SEQ ID NO: 254133 - protein, 17 aa, Homo sapiens
  CDR3 for alpha chain variable domain of TCR clone 127067 (TRAV3, TRAJ12)
CAVRDGGRMDSSYKLIF

SEQ ID NO: 254134 - protein, 15 aa, Homo sapiens
  CDR3 for beta chain variable domain of TCR clone 127067 (TRBV9, TRBJ1-6)
CASSVAGTGDSPLHF

SEQ ID NO: 254135 - protein, 15 aa, Homo sapiens
  CDR3 for alpha chain variable domain of TCR clone 127068 (TRAV8-3, TRAJ27)
CAVGPSKTNAGKSTF

SEQ ID NO: 254136 - protein, 15 aa, Homo sapiens
  CDR3 for beta chain variable domain of TCR clone 127068 (TRBV7-2, TRBJ2-1)
CASSSGLAGGNEQVF

SEQ ID NO: 254137 - protein, 15 aa, Homo sapiens
  CDR3 for alpha chain variable domain of TCR clone 127069 (TRAV8-2, TRAJ40)
GVVLGTTSGTYKYIF

SEQ ID NO: 254138 - protein, 16 aa, Homo sapiens
  CDR3 for beta chain variable domain of TCR clone 127069 (TRBV7-3, TRBJ2-1)
CASSLEGYRSYNEQFF

SEQ ID NO: 254139 - protein, 14 aa, Homo sapiens
  CDR3 for alpha chain variable domain of TCR clone 127070 (TRAV38-1, TRAJ35)
CAFLTIGFGNVLHC

SEQ ID NO: 254140 - protein, 17 aa, Homo sapiens
  CDR3 for beta chain variable domain of TCR clone 127070 (TRBV28, TRBJ1-1)
CASSGDLRTESNTAAFF

SEQ ID NO: 254141 - protein, 14 aa, Homo sapiens
  CDR3 for alpha chain variable domain of TCR clone 127071 (TRAV8-1, TRAJ5)
CAVRTDTGRIALTF

SEQ ID NO: 254142 - protein, 15 aa, Homo sapiens
  CDR3 for beta chain variable domain of TCR clone 127071 (TRBV7-3, TRBJ2-1)
CASSPTGGGEVEQFF

SEQ ID NO: 254143 - protein, 13 aa, Homo sapiens
  CDR3 for alpha chain variable domain of TCR clone 127072 (TRAV2, TRAJ40)
CAVVTSGTYKYIF

SEQ ID NO: 254144 - protein, 12 aa, Homo sapiens
  CDR3 for beta chain variable domain of TCR clone 127072 (TRBV28, TRBJ1-2)
CASSRPNYGYTF

SEQ ID NO: 254145 - protein, 14 aa, Homo sapiens
  CDR3 for alpha chain variable domain of TCR clone 127073 (TRAV13-2, TRAJ15)
RAENPNQAGTALIF

SEQ ID NO: 254146 - protein, 16 aa, Homo sapiens
  CDR3 for beta chain variable domain of TCR clone 127073 (TRBV12-4, TRBJ1-2)
CASSPTATGKTRGYTF

SEQ ID NO: 254147 - protein, 14 aa, Homo sapiens
  CDR3 for alpha chain variable domain of TCR clone 127074 (TRAV12-1, TRAJ30)
CVVNVGGRDDKIIF

SEQ ID NO: 254148 - protein, 13 aa, Homo sapiens
  CDR3 for beta chain variable domain of TCR clone 127074 (TRBV12-5, TRBJ2-1)
CASGLGRGNEQFF

SEQ ID NO: 254149 - protein, 16 aa, Homo sapiens
  CDR3 for alpha chain variable domain of TCR clone 127075 (TRAV30, TRAJ24)
CGTEIVDADSWGKFQF

SEQ ID NO: 254150 - protein, 12 aa, Homo sapiens
  CDR3 for beta chain variable domain of TCR clone 127075 (TRBV11-3, TRBJ2-2)
CASSLGGGELFF

SEQ ID NO: 254151 - protein, 14 aa, Homo sapiens
  CDR3 for alpha chain variable domain of TCR clone 127076 (TRAV38-1, TRAJ26)
CAFMPDNYGQNFVF

SEQ ID NO: 254152 - protein, 13 aa, Homo sapiens
  CDR3 for beta chain variable domain of TCR clone 127076 (TRBV19, TRBJ2-7)
CASSPRQSYEQYF

SEQ ID NO: 254153 - protein, 16 aa, Homo sapiens
  CDR3 for alpha chain variable domain of TCR clone 127077 (TRAV8-3, TRAJ8)
CAVPRDGNTGFQKLVF

SEQ ID NO: 254154 - protein, 15 aa, Homo sapiens
  CDR3 for beta chain variable domain of TCR clone 127077 (TRBV10-3, TRBJ2-1)
CAIRDGTSGHNEQFF

SEQ ID NO: 254155 - protein, 17 aa, Homo sapiens
  CDR3 for alpha chain variable domain of TCR clone 127078 (TRAV26-2, TRAJ37)
CILRELVGSSNTGKLIF

SEQ ID NO: 254156 - protein, 18 aa, Homo sapiens
  CDR3 for beta chain variable domain of TCR clone 127078 (TRBV12-4, TRBJ2-4)
CASSRTGAVDVAKNIQYF

SEQ ID NO: 254157 - protein, 13 aa, Homo sapiens
  CDR3 for alpha chain variable domain of TCR clone 127079 (TRAV6, TRAJ20)
CALAASNDYKLSF

SEQ ID NO: 254158 - protein, 16 aa, Homo sapiens
  CDR3 for beta chain variable domain of TCR clone 127079 (TRBV7-9, TRBJ2-1)
CASSDVAGGSYNEQFF

SEQ ID NO: 254159 - protein, 11 aa, Homo sapiens
  CDR3 for alpha chain variable domain of TCR clone 127080 (TRAV12-1, TRAJ30)
CVVNGQDKIIF

SEQ ID NO: 254160 - protein, 12 aa, Homo sapiens
  CDR3 for beta chain variable domain of TCR clone 127080 (TRBV27, TRBJ2-2)
CASKLFTGELFF

SEQ ID NO: 254161 - protein, 15 aa, Homo sapiens
  CDR3 for alpha chain variable domain of TCR clone 127081 (TRAV2, TRAJ9)
CAVEDRGTGGFKTIF

SEQ ID NO: 254162 - protein, 13 aa, Homo sapiens
  CDR3 for beta chain variable domain of TCR clone 127081 (TRBV6-1, TRBJ2-7)
CASSADTSYERYF

SEQ ID NO: 254163 - protein, 13 aa, Homo sapiens
  CDR3 for alpha chain variable domain of TCR clone 127082 (TRAV12-3, TRAJ13)
CAMGTGGYQKVTF

SEQ ID NO: 254164 - protein, 11 aa, Homo sapiens
  CDR3 for beta chain variable domain of TCR clone 127082 (TRBV11-2, TRBJ2-3)
CASSLSDTQYF

SEQ ID NO: 254165 - protein, 15 aa, Homo sapiens
  CDR3 for alpha chain variable domain of TCR clone 127083 (TRAV26-1, TRAJ29)
CIVRVEGSGNTPLVF

SEQ ID NO: 254166 - protein, 15 aa, Homo sapiens
  CDR3 for beta chain variable domain of TCR clone 127083 (TRBV7-3, TRBJ2-1)
CASSQRGGALIEQFF

SEQ ID NO: 254167 - protein, 15 aa, Homo sapiens
  CDR3 for alpha chain variable domain of TCR clone 127084 (TRAV17, TRAJ16)
CATALRFSDGQKLLF

SEQ ID NO: 254168 - protein, 15 aa, Homo sapiens
  CDR3 for beta chain variable domain of TCR clone 127084 (TRBV7-9, TRBJ1-6)
CASSSPGRGNSPLHF

SEQ ID NO: 254169 - protein, 14 aa, Homo sapiens
  CDR3 for alpha chain variable domain of TCR clone 127085 (TRAV4, TRAJ9)
CLVGSGTGGFKTIF

SEQ ID NO: 254170 - protein, 15 aa, Homo sapiens
  CDR3 for beta chain variable domain of TCR clone 127085 (TRBV7-2, TRBJ2-3)
CASSLEQGGTDTQYF

SEQ ID NO: 254171 - protein, 15 aa, Homo sapiens
  CDR3 for alpha chain variable domain of TCR clone 127086 (TRAV8-3, TRAJ45)
CASSYSGGGADGLTF

SEQ ID NO: 254172 - protein, 15 aa, Homo sapiens
  CDR3 for beta chain variable domain of TCR clone 127086 (TRBV27, TRBJ1-4)
CDSSPRHATNEKLFF

SEQ ID NO: 254173 - protein, 15 aa, Homo sapiens
  CDR3 for alpha chain variable domain of TCR clone 127087 (TRAV12-3, TRAJ6)
CAMSAASGGSYIPTF

SEQ ID NO: 254174 - protein, 13 aa, Homo sapiens
  CDR3 for beta chain variable domain of TCR clone 127087 (TRBV20-1, TRBJ1-2)
CSASPEFNYGYAF

SEQ ID NO: 254175 - protein, 12 aa, Homo sapiens
  CDR3 for alpha chain variable domain of TCR clone 127088 (TRAV1-2, TRAJ33)
CAALDSNYQLIW

SEQ ID NO: 254176 - protein, 13 aa, Homo sapiens
  CDR3 for beta chain variable domain of TCR clone 127088 (TRBV19, TRBJ2-7)
CASRKAGGGEQYF

SEQ ID NO: 254177 - protein, 14 aa, Homo sapiens
  CDR3 for alpha chain variable domain of TCR clone 127089 (TRAV16, TRAJ33)
CDLSAMDSNYQLIW

SEQ ID NO: 254178 - protein, 12 aa, Homo sapiens
  CDR3 for beta chain variable domain of TCR clone 127089 (TRBV5-1, TRBJ1-2)
CASSQDTYGYTF

SEQ ID NO: 254179 - protein, 12 aa, Homo sapiens
  CDR3 for alpha chain variable domain of TCR clone 127090 (TRAV13-1, TRAJ21)
CAAKEGFNKFYF

SEQ ID NO: 254180 - protein, 16 aa, Homo sapiens
  CDR3 for beta chain variable domain of TCR clone 127090 (TRBV19, TRBJ2-2)
CASRSPGTGATGELFF

SEQ ID NO: 254181 - protein, 14 aa, Homo sapiens
  CDR3 for alpha chain variable domain of TCR clone 127091 (TRAV8-4, TRAJ40)
CAVIPTSGTYTYIF

SEQ ID NO: 254182 - protein, 15 aa, Homo sapiens
  CDR3 for beta chain variable domain of TCR clone 127091 (TRBV7-2, TRBJ2-1)
CASTSASGDYNEQFF

SEQ ID NO: 254183 - protein, 11 aa, Homo sapiens
  CDR3 for alpha chain variable domain of TCR clone 127092 (TRAV21, TRAJ27)
CAVRMQANQPL

SEQ ID NO: 254184 - protein, 16 aa, Homo sapiens
  CDR3 for beta chain variable domain of TCR clone 127092 (TRBV7-3, TRBJ2-2)
CASSLKRGTLSGELFF

SEQ ID NO: 254185 - protein, 13 aa, Homo sapiens
  CDR3 for alpha chain variable domain of TCR clone 127093 (TRAV12-1, TRAJ16)
CVANGPDGQKLLF

SEQ ID NO: 254186 - protein, 15 aa, Homo sapiens
  CDR3 for beta chain variable domain of TCR clone 127093 (TRBV6-3, TRBJ2-7)
CASSSPGTVFYEQYF

SEQ ID NO: 254187 - protein, 13 aa, Homo sapiens
  CDR3 for alpha chain variable domain of TCR clone 127094 (TRAV16, TRAJ26)
CITVLCLGQHFVF

SEQ ID NO: 254188 - protein, 12 aa, Homo sapiens
  CDR3 for beta chain variable domain of TCR clone 127094 (TRBV11-2, TRBJ2-1)
CASSPGNNEQFF

SEQ ID NO: 254189 - protein, 15 aa, Homo sapiens
  CDR3 for alpha chain variable domain of TCR clone 127095 (TRAV2, TRAJ9)
CAVEDRGTGGFKTIF

SEQ ID NO: 254190 - protein, 16 aa, Homo sapiens
  CDR3 for beta chain variable domain of TCR clone 127095 (TRBV19, TRBJ2-3)
CASSPGAASRTDTQYF

SEQ ID NO: 254191 - protein, 14 aa, Homo sapiens
  CDR3 for alpha chain variable domain of TCR clone 127096 (TRAV2, TRAJ9)
CAVEDRSGGFKTIF

SEQ ID NO: 254192 - protein, 14 aa, Homo sapiens
  CDR3 for beta chain variable domain of TCR clone 127096 (TRBV5-1, TRBJ2-7)
RASSRGESLYEQYF

SEQ ID NO: 254193 - protein, 13 aa, Homo sapiens
  CDR3 for alpha chain variable domain of TCR clone 127097 (TRAV13-2, TRAJ8)
WAFMNTGFQKLVF

SEQ ID NO: 254194 - protein, 17 aa, Homo sapiens
  CDR3 for beta chain variable domain of TCR clone 127097 (TRBV28, TRBJ2-1)
CASSSARQALTYNEQFF

SEQ ID NO: 254195 - protein, 16 aa, Homo sapiens
  CDR3 for alpha chain variable domain of TCR clone 127098 (TRAV14/DV4, TRAJ20)
CAMREGRSRDDYKLSF

SEQ ID NO: 254196 - protein, 13 aa, Homo sapiens
  CDR3 for beta chain variable domain of TCR clone 127098 (TRBV4-2, TRBJ1-1)
CASSQAGNTEAFF

SEQ ID NO: 254197 - protein, 14 aa, Homo sapiens
  CDR3 for alpha chain variable domain of TCR clone 127099 (TRAV1-2, TRAJ16)
CAVNRFSDGQKLLF

SEQ ID NO: 254198 - protein, 15 aa, Homo sapiens
  CDR3 for beta chain variable domain of TCR clone 127099 (TRBV11-2, TRBJ2-1)
CASSLAPRAHNEQFF

SEQ ID NO: 254199 - protein, 15 aa, Homo sapiens
  CDR3 for alpha chain variable domain of TCR clone 127100 (TRAV12-2, TRAJ11)
CAVGLLNSGYSTLTF

SEQ ID NO: 254200 - protein, 16 aa, Homo sapiens
  CDR3 for beta chain variable domain of TCR clone 127100 (TRBV7-9, TRBJ1-2)
CASSLGFSSGEDGYTF

SEQ ID NO: 254201 - protein, 14 aa, Homo sapiens
  CDR3 for alpha chain variable domain of TCR clone 127101 (TRAV8-4, TRAJ9)
CAVRINTGGFKTIF

SEQ ID NO: 254202 - protein, 16 aa, Homo sapiens
  CDR3 for beta chain variable domain of TCR clone 127101 (TRBV10-3, TRBJ2-7)
CAISADFADRPYEQYF

SEQ ID NO: 254203 - protein, 19 aa, Homo sapiens
  CDR3 for alpha chain variable domain of TCR clone 127102 (TRAV40, )
CLPIPDIQNPDPAVYQLRD

SEQ ID NO: 254204 - protein, 15 aa, Homo sapiens
  CDR3 for beta chain variable domain of TCR clone 127102 (TRBV2, TRBJ1-2)
CASSGIGGANYGYTF

SEQ ID NO: 254205 - protein, 11 aa, Homo sapiens
  CDR3 for alpha chain variable domain of TCR clone 127103 (TRAV20, TRAJ23)
CACNQGGKLIF

SEQ ID NO: 254206 - protein, 16 aa, Homo sapiens
  CDR3 for beta chain variable domain of TCR clone 127103 (TRBV7-8, TRBJ2-5)
CASSFGGQPAKETQYF

SEQ ID NO: 254207 - protein, 14 aa, Homo sapiens
  CDR3 for alpha chain variable domain of TCR clone 127104 (TRAV2, TRAJ9)
CAVEDRSGGFKTIL

SEQ ID NO: 254208 - protein, 11 aa, Homo sapiens
  CDR3 for beta chain variable domain of TCR clone 127104 (TRBV7-9, TRBJ2-5)
CASSLGETQYF

SEQ ID NO: 254209 - protein, 15 aa, Homo sapiens
  CDR3 for alpha chain variable domain of TCR clone 127105 (TRAV8-4, TRAJ3)
CAVTGENLVQHCFQD

SEQ ID NO: 254210 - protein, 16 aa, Homo sapiens
  CDR3 for beta chain variable domain of TCR clone 127105 (TRBV4-2, TRBJ1-1)
CASSQAGFGMNTEAFF

SEQ ID NO: 254211 - protein, 14 aa, Homo sapiens
  CDR3 for alpha chain variable domain of TCR clone 127106 (TRAV8-4, TRAJ16)
CAVSPVGRWPEAAL

SEQ ID NO: 254212 - protein, 15 aa, Homo sapiens
  CDR3 for beta chain variable domain of TCR clone 127106 (TRBV15, TRBJ2-1)
CATSRVGGKYNEQFF

SEQ ID NO: 254213 - protein, 14 aa, Homo sapiens
  CDR3 for alpha chain variable domain of TCR clone 127107 (TRAV13-2, TRAJ41)
CAERPDWAGYALNF

SEQ ID NO: 254214 - protein, 14 aa, Homo sapiens
  CDR3 for beta chain variable domain of TCR clone 127107 (TRBV2, TRBJ1-5)
CASSGTGFNQPQHF

SEQ ID NO: 254215 - protein, 13 aa, Homo sapiens
  CDR3 for alpha chain variable domain of TCR clone 127108 (TRAV13-2, TRAJ48)
CAEMDFGNEKLAF

SEQ ID NO: 254216 - protein, 14 aa, Homo sapiens
  CDR3 for beta chain variable domain of TCR clone 127108 (TRBV19, TRBJ2-7)
CASSMGQGAIEQYF

SEQ ID NO: 254217 - protein, 16 aa, Homo sapiens
  CDR3 for alpha chain variable domain of TCR clone 127109 (TRAV12-1, TRAJ12)
CVVNTLLMDSSYKLIF

SEQ ID NO: 254218 - protein, 13 aa, Homo sapiens
  CDR3 for beta chain variable domain of TCR clone 127109 (TRBV19, TRBJ1-2)
CASSVPGQDGYTF

SEQ ID NO: 254219 - protein, 17 aa, Homo sapiens
  CDR3 for alpha chain variable domain of TCR clone 127110 (TRAV29/DV5, TRAJ31)
CAASAIPDSCLEMELSW

SEQ ID NO: 254220 - protein, 14 aa, Homo sapiens
  CDR3 for beta chain variable domain of TCR clone 127110 (TRBV7-8, TRBJ2-7)
CASSVGQGAYEQYF

SEQ ID NO: 254221 - protein, 11 aa, Homo sapiens
  CDR3 for alpha chain variable domain of TCR clone 127111 (TRAV13-1, TRAJ39)
CASHAGNMITF

SEQ ID NO: 254222 - protein, 14 aa, Homo sapiens
  CDR3 for beta chain variable domain of TCR clone 127111 (TRBV11-2, TRBJ1-5)
CASSLDRGRQPQHF

SEQ ID NO: 254223 - protein, 12 aa, Homo sapiens
  CDR3 for alpha chain variable domain of TCR clone 127112 (TRAV21, TRAJ23)
CAVMLQGGKLTF

SEQ ID NO: 254224 - protein, 14 aa, Homo sapiens
  CDR3 for beta chain variable domain of TCR clone 127112 (TRBV7-9, TRBJ1-4)
CAITEGEANEKLFF

SEQ ID NO: 254225 - protein, 16 aa, Homo sapiens
  CDR3 for alpha chain variable domain of TCR clone 127113 (TRAV23/DV6, TRAJ21)
CAASSGGGTTSTNFTL

SEQ ID NO: 254226 - protein, 11 aa, Homo sapiens
  CDR3 for beta chain variable domain of TCR clone 127113 (TRBV7-8, TRBJ2-7)
CASSLSREQYF

SEQ ID NO: 254227 - protein, 16 aa, Homo sapiens
  CDR3 for alpha chain variable domain of TCR clone 127114 (TRAV30, TRAJ24)
CGTEIVDADSWGKFQF

SEQ ID NO: 254228 - protein, 16 aa, Homo sapiens
  CDR3 for beta chain variable domain of TCR clone 127114 (TRBV11-2, TRBJ2-3)
CASSSRTSGGAGTQYF

SEQ ID NO: 254229 - protein, 12 aa, Homo sapiens
  CDR3 for alpha chain variable domain of TCR clone 127115 (TRAV13-1, TRAJ15)
GAASQAGTALIF

SEQ ID NO: 254230 - protein, 14 aa, Homo sapiens
  CDR3 for beta chain variable domain of TCR clone 127115 (TRBV19, TRBJ2-2)
CASSTLHRSGELFF

SEQ ID NO: 254231 - protein, 19 aa, Homo sapiens
  CDR3 for alpha chain variable domain of TCR clone 127116 (TRAV38-1, TRAJ53)
CAFMKHGPESGGSNYKLTF

SEQ ID NO: 254232 - protein, 13 aa, Homo sapiens
  CDR3 for beta chain variable domain of TCR clone 127116 (TRBV19, TRBJ2-7)
CASSPRQSYGQYF

SEQ ID NO: 254233 - protein, 16 aa, Homo sapiens
  CDR3 for alpha chain variable domain of TCR clone 127117 (TRAV3, TRAJ37)
CAVRGKGSGNTGKLIF

SEQ ID NO: 254234 - protein, 15 aa, Homo sapiens
  CDR3 for beta chain variable domain of TCR clone 127117 (TRBV7-9, TRBJ1-6)
CASSSPGRGNSHLHF

SEQ ID NO: 254235 - protein, 13 aa, Homo sapiens
  CDR3 for alpha chain variable domain of TCR clone 127118 (TRAV12-1, TRAJ6)
CVVFPGGSYIPTF

SEQ ID NO: 254236 - protein, 15 aa, Homo sapiens
  CDR3 for beta chain variable domain of TCR clone 127118 (TRBV7-9, TRBJ1-6)
CASSSPGRGNSPLHF

SEQ ID NO: 254237 - protein, 14 aa, Homo sapiens
  CDR3 for alpha chain variable domain of TCR clone 127119 (TRAV1-2, TRAJ16)
CAVNRFSDGQKLLF

SEQ ID NO: 254238 - protein, 13 aa, Homo sapiens
  CDR3 for beta chain variable domain of TCR clone 127119 (TRBV19, TRBJ1-2)
CAGSVPGQDGYTF

SEQ ID NO: 254239 - protein, 14 aa, Homo sapiens
  CDR3 for alpha chain variable domain of TCR clone 127120 (TRAV13-1, TRAJ9)
CAASALTGGFNTIF

SEQ ID NO: 254240 - protein, 16 aa, Homo sapiens
  CDR3 for beta chain variable domain of TCR clone 127120 (TRBV12-4, TRBJ2-3)
CASSFGTGGISDTQYF

SEQ ID NO: 254241 - protein, 17 aa, Homo sapiens
  CDR3 for alpha chain variable domain of TCR clone 127121 (TRAV3, TRAJ6)
CAVRDGARAGGSYIPTF

SEQ ID NO: 254242 - protein, 12 aa, Homo sapiens
  CDR3 for beta chain variable domain of TCR clone 127121 (TRBV11-2, TRBJ2-1)
CASSPGNNEQFF

SEQ ID NO: 254243 - protein, 17 aa, Homo sapiens
  CDR3 for alpha chain variable domain of TCR clone 127122 (TRAV13-1, TRAJ52)
CVASSGAGGTSYGKLTF

SEQ ID NO: 254244 - protein, 15 aa, Homo sapiens
  CDR3 for beta chain variable domain of TCR clone 127122 (TRBV2, TRBJ2-1)
CASSELAGSYNEQFF

SEQ ID NO: 254245 - protein, 16 aa, Homo sapiens
  CDR3 for alpha chain variable domain of TCR clone 127123 (TRAV4, TRAJ18)
CCVLLIGGSTLGRLYF

SEQ ID NO: 254246 - protein, 17 aa, Homo sapiens
  CDR3 for beta chain variable domain of TCR clone 127123 (TRBV7-3, TRBJ2-3)
CASSLMKRMRGADTQYF

SEQ ID NO: 254247 - protein, 13 aa, Homo sapiens
  CDR3 for alpha chain variable domain of TCR clone 127124 (TRAV3, TRAJ21)
CAVREPAFNKFYF

SEQ ID NO: 254248 - protein, 18 aa, Homo sapiens
  CDR3 for beta chain variable domain of TCR clone 127124 (TRBV20-1, TRBJ2-6)
CSAETTPTHGSGANVLTF

SEQ ID NO: 254249 - protein, 13 aa, Homo sapiens
  CDR3 for alpha chain variable domain of TCR clone 127125 (TRAV12-2, TRAJ20)
CAVYPSNDYTLSF

SEQ ID NO: 254250 - protein, 15 aa, Homo sapiens
  CDR3 for beta chain variable domain of TCR clone 127125 (TRBV27, TRBJ2-5)
CASSLYPRGGETQYF

SEQ ID NO: 254251 - protein, 13 aa, Homo sapiens
  CDR3 for alpha chain variable domain of TCR clone 127126 (TRAV21, TRAJ11)
CAVPNSGYSTLTF

SEQ ID NO: 254252 - protein, 13 aa, Homo sapiens
  CDR3 for beta chain variable domain of TCR clone 127126 (TRBV3-1, TRBJ2-7)
CASSLRDGYEQYL

SEQ ID NO: 254253 - protein, 13 aa, Homo sapiens
  CDR3 for alpha chain variable domain of TCR clone 127127 (TRAV20, TRAJ48)
CAVQGVGNEKLTF

SEQ ID NO: 254254 - protein, 19 aa, Homo sapiens
  CDR3 for beta chain variable domain of TCR clone 127127 (TRBV2, TRBJ2-2)
WASSQPGRAGGGNTGELFF

SEQ ID NO: 254255 - protein, 14 aa, Homo sapiens
  CDR3 for alpha chain variable domain of TCR clone 127128 (TRAV1-2, TRAJ8)
CAVREDKGFQKLVF

SEQ ID NO: 254256 - protein, 15 aa, Homo sapiens
  CDR3 for beta chain variable domain of TCR clone 127128 (TRBV4-1, TRBJ2-7)
CASSQNTGRLYEQYF

SEQ ID NO: 254257 - protein, 11 aa, Homo sapiens
  CDR3 for alpha chain variable domain of TCR clone 127129 (TRAV3, TRAJ21)
CAVCNFNKFYF

SEQ ID NO: 254258 - protein, 17 aa, Homo sapiens
  CDR3 for beta chain variable domain of TCR clone 127129 (TRBV24-1, TRBJ2-1)
CATSDVSTSGTYNEQFF

SEQ ID NO: 254259 - protein, 17 aa, Homo sapiens
  CDR3 for alpha chain variable domain of TCR clone 127130 (TRAV40, TRAJ43)
CLPSNDMRFGAGTRLTV

SEQ ID NO: 254260 - protein, 15 aa, Homo sapiens
  CDR3 for beta chain variable domain of TCR clone 127130 (TRBV6-3, TRBJ2-7)
CASSSPGTVFYEQYF

SEQ ID NO: 254261 - protein, 17 aa, Homo sapiens
  CDR3 for alpha chain variable domain of TCR clone 127131 (TRAV3, TRAJ6)
CAVRDGPRAGGSYIPTF

SEQ ID NO: 254262 - protein, 13 aa, Homo sapiens
  CDR3 for beta chain variable domain of TCR clone 127131 (TRBV7-2, TRBJ2-7)
CASSPTSFYEQYF

SEQ ID NO: 254263 - protein, 13 aa, Homo sapiens
  CDR3 for alpha chain variable domain of TCR clone 127132 (TRAV23/DV6, TRAJ22)
CAPWGGSARQLTF

SEQ ID NO: 254264 - protein, 13 aa, Homo sapiens
  CDR3 for beta chain variable domain of TCR clone 127132 (TRBV18, TRBJ2-7)
CQLPTSGGYEQYF

SEQ ID NO: 254265 - protein, 15 aa, Homo sapiens
  CDR3 for alpha chain variable domain of TCR clone 127133 (TRAV30, TRAJ32)
CGTVILGGATNKLIF

SEQ ID NO: 254266 - protein, 13 aa, Homo sapiens
  CDR3 for beta chain variable domain of TCR clone 127133 (TRBV6-3, TRBJ2-7)
CASSFSGGYEQYF

SEQ ID NO: 254267 - protein, 11 aa, Homo sapiens
  CDR3 for alpha chain variable domain of TCR clone 127134 (TRAV2, TRAJ33)
CAVESNYQLIW

SEQ ID NO: 254268 - protein, 14 aa, Homo sapiens
  CDR3 for beta chain variable domain of TCR clone 127134 (TRBV7-9, TRBJ2-5)
CASSLDTAQETQYF

SEQ ID NO: 254269 - protein, 19 aa, Homo sapiens
  CDR3 for alpha chain variable domain of TCR clone 127135 (TRAV2, TRAJ20)
ILQVREADAAVYRDCKLSF

SEQ ID NO: 254270 - protein, 13 aa, Homo sapiens
  CDR3 for beta chain variable domain of TCR clone 127135 (TRBV15, TRBJ1-6)
CATSWGLNSPLHF

SEQ ID NO: 254271 - protein, 15 aa, Homo sapiens
  CDR3 for alpha chain variable domain of TCR clone 127136 (TRAV12-1, TRAJ42)
WVVTRDGGSQGNLIF

SEQ ID NO: 254272 - protein, 14 aa, Homo sapiens
  CDR3 for beta chain variable domain of TCR clone 127136 (TRBV11-2, TRBJ2-3)
CASSLGGGANTQYF

SEQ ID NO: 254273 - protein, 17 aa, Homo sapiens
  CDR3 for alpha chain variable domain of TCR clone 127137 (TRAV3, TRAJ6)
CAVRDGPRAGGSYISTF

SEQ ID NO: 254274 - protein, 14 aa, Homo sapiens
  CDR3 for beta chain variable domain of TCR clone 127137 (TRBV7-2, TRBJ2-7)
CASSPKTSFYEQYS

SEQ ID NO: 254275 - protein, 16 aa, Homo sapiens
  CDR3 for alpha chain variable domain of TCR clone 127138 (TRAV12-3, TRAJ53)
CAMSPGGGGSNYKLTF

SEQ ID NO: 254276 - protein, 16 aa, Homo sapiens
  CDR3 for beta chain variable domain of TCR clone 127138 (TRBV4-2, TRBJ1-1)
CASSQAGFGMNTEAFF

SEQ ID NO: 254277 - protein, 17 aa, Homo sapiens
  CDR3 for alpha chain variable domain of TCR clone 127139 (TRAV3, TRAJ38)
CAVRDCLNAGNNRKLIW

SEQ ID NO: 254278 - protein, 15 aa, Homo sapiens
  CDR3 for beta chain variable domain of TCR clone 127139 (TRBV6-1, TRBJ2-1)
CASSELRGQYNEQFF

SEQ ID NO: 254279 - protein, 13 aa, Homo sapiens
  CDR3 for alpha chain variable domain of TCR clone 127140 (TRAV3, TRAJ41)
CAVSSNYGYALNF

SEQ ID NO: 254280 - protein, 14 aa, Homo sapiens
  CDR3 for beta chain variable domain of TCR clone 127140 (TRBV7-2, TRBJ2-7)
CASSPKTSFYEQYF

SEQ ID NO: 254281 - protein, 10 aa, Homo sapiens
  CDR3 for alpha chain variable domain of TCR clone 127141 (TRAV30, TRAJ48)
CGIGNEKLTF

SEQ ID NO: 254282 - protein, 12 aa, Homo sapiens
  CDR3 for beta chain variable domain of TCR clone 127141 (TRBV28, TRBJ1-2)
CASLTLAEGYTF

SEQ ID NO: 254283 - protein, 16 aa, Homo sapiens
  CDR3 for alpha chain variable domain of TCR clone 127142 (TRAV26-1, TRAJ48)
CIVREPPNFGHEKLTF

SEQ ID NO: 254284 - protein, 12 aa, Homo sapiens
  CDR3 for beta chain variable domain of TCR clone 127142 (TRBV19, TRBJ2-1)
CASSRQGAEQFF

SEQ ID NO: 254285 - protein, 15 aa, Homo sapiens
  CDR3 for alpha chain variable domain of TCR clone 127143 (TRAV12-1, TRAJ44)
CVVFVNTGTASKLTF

SEQ ID NO: 254286 - protein, 13 aa, Homo sapiens
  CDR3 for beta chain variable domain of TCR clone 127143 (TRBV24-1, TRBJ1-4)
CATNNGRSEKLFF

SEQ ID NO: 254287 - protein, 12 aa, Homo sapiens
  CDR3 for alpha chain variable domain of TCR clone 127144 (TRAV26-1, TRAJ50)
CIVRPTYDKVIF

SEQ ID NO: 254288 - protein, 11 aa, Homo sapiens
  CDR3 for beta chain variable domain of TCR clone 127144 (TRBV11-2, TRBJ2-2)
CASSLPGELFF

SEQ ID NO: 254289 - protein, 11 aa, Homo sapiens
  CDR3 for alpha chain variable domain of TCR clone 127145 (TRAV3, TRAJ21)
CAVGNFNKFYF

SEQ ID NO: 254290 - protein, 13 aa, Homo sapiens
  CDR3 for beta chain variable domain of TCR clone 127145 (TRBV19, TRBJ2-2)
CASSIWSTGELFF

SEQ ID NO: 254291 - protein, 13 aa, Homo sapiens
  CDR3 for alpha chain variable domain of TCR clone 127146 (TRAV3, TRAJ27)
CAVRPLGAGKSTF

SEQ ID NO: 254292 - protein, 18 aa, Homo sapiens
  CDR3 for beta chain variable domain of TCR clone 127146 (TRBV12-4, TRBJ2-2)
CASRPFGAGALNTGELFF

SEQ ID NO: 254293 - protein, 14 aa, Homo sapiens
  CDR3 for alpha chain variable domain of TCR clone 127147 (TRAV34, TRAJ22)
CGADTSGSARQLTF

SEQ ID NO: 254294 - protein, 19 aa, Homo sapiens
  CDR3 for beta chain variable domain of TCR clone 127147 (TRBV11-3, TRBJ2-2)
CASSTRPGAKTTNTGELFF

SEQ ID NO: 254295 - protein, 11 aa, Homo sapiens
  CDR3 for alpha chain variable domain of TCR clone 127148 (TRAV12-3, TRAJ43)
CAMSVSNDIRF

SEQ ID NO: 254296 - protein, 18 aa, Homo sapiens
  CDR3 for beta chain variable domain of TCR clone 127148 (TRBV20-1, TRBJ2-3)
CSASGLAGGPGTTDTQYF

SEQ ID NO: 254297 - protein, 14 aa, Homo sapiens
  CDR3 for alpha chain variable domain of TCR clone 127149 (TRAV27, TRAJ22)
CAGLPSGSARQLTF

SEQ ID NO: 254298 - protein, 15 aa, Homo sapiens
  CDR3 for beta chain variable domain of TCR clone 127149 (TRBV6-3, TRBJ2-7)
CASSSPGTVFYEQYF

SEQ ID NO: 254299 - protein, 12 aa, Homo sapiens
  CDR3 for alpha chain variable domain of TCR clone 127150 (TRAV12-2, TRAJ9)
CAGYNGGFKTIF

SEQ ID NO: 254300 - protein, 14 aa, Homo sapiens
  CDR3 for beta chain variable domain of TCR clone 127150 (TRBV6-1, TRBJ1-5)
CASSETGMEQPQHF

SEQ ID NO: 254301 - protein, 13 aa, Homo sapiens
  CDR3 for alpha chain variable domain of TCR clone 127151 (TRAV12-1, TRAJ26)
SATYLYYGQNFVF

SEQ ID NO: 254302 - protein, 15 aa, Homo sapiens
  CDR3 for beta chain variable domain of TCR clone 127151 (TRBV5-1, TRBJ2-6)
CASSLDPSGANVLSF

SEQ ID NO: 254303 - protein, 15 aa, Homo sapiens
  CDR3 for alpha chain variable domain of TCR clone 127152 (TRAV3, TRAJ22)
CAVRDRGGSARQLTF

SEQ ID NO: 254304 - protein, 16 aa, Homo sapiens
  CDR3 for beta chain variable domain of TCR clone 127152 (TRBV5-4, TRBJ2-3)
GASQQPGAGGADTQYF

SEQ ID NO: 254305 - protein, 14 aa, Homo sapiens
  CDR3 for alpha chain variable domain of TCR clone 127153 (TRAV3, TRAJ9)
CAVRLNTGGFKTIF

SEQ ID NO: 254306 - protein, 16 aa, Homo sapiens
  CDR3 for beta chain variable domain of TCR clone 127153 (TRBV12-5, TRBJ2-5)
CASGPRTSGNQETQYV

SEQ ID NO: 254307 - protein, 15 aa, Homo sapiens
  CDR3 for alpha chain variable domain of TCR clone 127154 (TRAV26-1, TRAJ40)
CIVRVTTSGTYKYIF

SEQ ID NO: 254308 - protein, 17 aa, Homo sapiens
  CDR3 for beta chain variable domain of TCR clone 127154 (TRBV11-2, TRBJ2-1)
CASSLYPPGVEYNEQFF

SEQ ID NO: 254309 - protein, 14 aa, Homo sapiens
  CDR3 for alpha chain variable domain of TCR clone 127155 (TRAV4, TRAJ20)
CLVGRRSNDYKLSF

SEQ ID NO: 254310 - protein, 18 aa, Homo sapiens
  CDR3 for beta chain variable domain of TCR clone 127155 (TRBV2, TRBJ2-5)
CASSGDPQVRGAQETQYF

SEQ ID NO: 254311 - protein, 16 aa, Homo sapiens
  CDR3 for alpha chain variable domain of TCR clone 127156 (TRAV12-1, TRAJ45)
CVVIRYSGGGADGRTF

SEQ ID NO: 254312 - protein, 12 aa, Homo sapiens
  CDR3 for beta chain variable domain of TCR clone 127156 (TRBV6-5, TRBJ2-2)
CASRQITGELFF

SEQ ID NO: 254313 - protein, 12 aa, Homo sapiens
  CDR3 for alpha chain variable domain of TCR clone 127157 (TRAV3, TRAJ20)
CAVRDGDYKLNF

SEQ ID NO: 254314 - protein, 13 aa, Homo sapiens
  CDR3 for beta chain variable domain of TCR clone 127157 (TRBV9, TRBJ2-1)
CASSVGQGGEQFF

SEQ ID NO: 254315 - protein, 12 aa, Homo sapiens
  CDR3 for alpha chain variable domain of TCR clone 127158 (TRAV1-2, TRAJ24)
CAVGGSWGKFQF

SEQ ID NO: 254316 - protein, 16 aa, Homo sapiens
  CDR3 for beta chain variable domain of TCR clone 127158 (TRBV7-2, TRBJ1-3)
CASSSGRVLSGNTIYF

SEQ ID NO: 254317 - protein, 15 aa, Homo sapiens
  CDR3 for alpha chain variable domain of TCR clone 127159 (TRAV21, TRAJ53)
CATLNSGGSNYKLTF

SEQ ID NO: 254318 - protein, 16 aa, Homo sapiens
  CDR3 for beta chain variable domain of TCR clone 127159 (TRBV9, TRBJ2-1)
CASSVGVGGNYNEQFF

SEQ ID NO: 254319 - protein, 12 aa, Homo sapiens
  CDR3 for alpha chain variable domain of TCR clone 127160 (TRAV26-1, TRAJ26)
CIVYNYGQNFVF

SEQ ID NO: 254320 - protein, 16 aa, Homo sapiens
  CDR3 for beta chain variable domain of TCR clone 127160 (TRBV12-5, TRBJ2-5)
CASGPRTSGNQETQYF

SEQ ID NO: 254321 - protein, 21 aa, Homo sapiens
  CDR3 for alpha chain variable domain of TCR clone 127161 (TRAV3, )
CAVRPTPDIQNPDPAVYQLRD

SEQ ID NO: 254322 - protein, 16 aa, Homo sapiens
  CDR3 for beta chain variable domain of TCR clone 127161 (TRBV20-1, TRBJ2-3)
CSARDPSGGSTDTQYF

SEQ ID NO: 254323 - protein, 13 aa, Homo sapiens
  CDR3 for alpha chain variable domain of TCR clone 127162 (TRAV1-2, TRAJ9)
CAALNTGGFKTIF

SEQ ID NO: 254324 - protein, 13 aa, Homo sapiens
  CDR3 for beta chain variable domain of TCR clone 127162 (TRBV18, TRBJ2-7)
CASQSGGGYEQYF

SEQ ID NO: 254325 - protein, 15 aa, Homo sapiens
  CDR3 for alpha chain variable domain of TCR clone 127163 (TRAV17, TRAJ4)
CATGTWSGGYNKLIF

SEQ ID NO: 254326 - protein, 13 aa, Homo sapiens
  CDR3 for beta chain variable domain of TCR clone 127163 (TRBV9, TRBJ2-1)
CASSPSGGNEQFF

SEQ ID NO: 254327 - protein, 14 aa, Homo sapiens
  CDR3 for alpha chain variable domain of TCR clone 127164 (TRAV13-2, TRAJ17)
CAENSKAAGNKLTF

SEQ ID NO: 254328 - protein, 12 aa, Homo sapiens
  CDR3 for beta chain variable domain of TCR clone 127164 (TRBV14, TRBJ2-7)
CASSSLRGEQYF

SEQ ID NO: 254329 - protein, 16 aa, Homo sapiens
  CDR3 for alpha chain variable domain of TCR clone 127165 (TRAV9-2, TRAJ45)
CALSDHSGGGADGLTF

SEQ ID NO: 254330 - protein, 12 aa, Homo sapiens
  CDR3 for beta chain variable domain of TCR clone 127165 (TRBV29-1, TRBJ2-3)
CSVTGGADTQYF

SEQ ID NO: 254331 - protein, 14 aa, Homo sapiens
  CDR3 for alpha chain variable domain of TCR clone 127166 (TRAV16, TRAJ15)
CALSGPQVGTALIF

SEQ ID NO: 254332 - protein, 12 aa, Homo sapiens
  CDR3 for beta chain variable domain of TCR clone 127166 (TRBV18, TRBJ2-5)
CASPPSKETQYF

SEQ ID NO: 254333 - protein, 14 aa, Homo sapiens
  CDR3 for alpha chain variable domain of TCR clone 127167 (TRAV12-1, TRAJ33)
CVVNPEDSNYQLIW

SEQ ID NO: 254334 - protein, 12 aa, Homo sapiens
  CDR3 for beta chain variable domain of TCR clone 127167 (TRBV29-1, TRBJ2-3)
CSVTGGADTQYF

SEQ ID NO: 254335 - protein, 13 aa, Homo sapiens
  CDR3 for alpha chain variable domain of TCR clone 127168 (TRAV17, TRAJ7)
CATDNYGNNRLAF

SEQ ID NO: 254336 - protein, 16 aa, Homo sapiens
  CDR3 for beta chain variable domain of TCR clone 127168 (TRBV4-1, TRBJ2-5)
CASSQAIAASSATQFF

SEQ ID NO: 254337 - protein, 13 aa, Homo sapiens
  CDR3 for alpha chain variable domain of TCR clone 127169 (TRAV16, TRAJ26)
CITVLCLGQNFVF

SEQ ID NO: 254338 - protein, 12 aa, Homo sapiens
  CDR3 for beta chain variable domain of TCR clone 127169 (TRBV11-2, TRBJ2-1)
CAGSPGNNEQFF

SEQ ID NO: 254339 - protein, 16 aa, Homo sapiens
  CDR3 for alpha chain variable domain of TCR clone 127170 (TRAV27, TRAJ28)
CAGIAYSGAGSYQLTF

SEQ ID NO: 254340 - protein, 11 aa, Homo sapiens
  CDR3 for beta chain variable domain of TCR clone 127170 (TRBV28, TRBJ1-1)
CASSPTGEAFF

SEQ ID NO: 254341 - protein, 14 aa, Homo sapiens
  CDR3 for alpha chain variable domain of TCR clone 127171 (TRAV12-2, TRAJ12)
CAVINRDSSYKLIF

SEQ ID NO: 254342 - protein, 15 aa, Homo sapiens
  CDR3 for beta chain variable domain of TCR clone 127171 (TRBV4-3, TRBJ2-2)
CASSQGTGGTGELFF

SEQ ID NO: 254343 - protein, 14 aa, Homo sapiens
  CDR3 for alpha chain variable domain of TCR clone 127172 (TRAV13-1, TRAJ40)
CAARSTSGTYKYIF

SEQ ID NO: 254344 - protein, 15 aa, Homo sapiens
  CDR3 for beta chain variable domain of TCR clone 127172 (TRBV18, TRBJ1-5)
CASSETGGNKQPQHF

SEQ ID NO: 254345 - protein, 17 aa, Homo sapiens
  CDR3 for alpha chain variable domain of TCR clone 127173 (TRAV3, TRAJ6)
CAVRAGPRAGGSYIPPF

SEQ ID NO: 254346 - protein, 14 aa, Homo sapiens
  CDR3 for beta chain variable domain of TCR clone 127173 (TRBV7-2, TRBJ2-7)
CASSPKTSFYEQYF

SEQ ID NO: 254347 - protein, 15 aa, Homo sapiens
  CDR3 for alpha chain variable domain of TCR clone 127174 (TRAV17, TRAJ16)
CATALRFSDGQQLLF

SEQ ID NO: 254348 - protein, 15 aa, Homo sapiens
  CDR3 for beta chain variable domain of TCR clone 127174 (TRBV13, TRBJ1-5)
CASSFGQGGVQPQHF

SEQ ID NO: 254349 - protein, 14 aa, Homo sapiens
  CDR3 for alpha chain variable domain of TCR clone 127175 (TRAV8-2, TRAJ23)
CVVSDDNQGGKLIF

SEQ ID NO: 254350 - protein, 13 aa, Homo sapiens
  CDR3 for beta chain variable domain of TCR clone 127175 (TRBV10-3, TRBJ2-7)
CASKLAVNYEQYF

SEQ ID NO: 254351 - protein, 11 aa, Homo sapiens
  CDR3 for alpha chain variable domain of TCR clone 127176 (TRAV4, TRAJ20)
CLVGDKGTTTS

SEQ ID NO: 254352 - protein, 15 aa, Homo sapiens
  CDR3 for beta chain variable domain of TCR clone 127176 (TRBV18, TRBJ2-7)
CASSPSSTGNYEQYF

SEQ ID NO: 254353 - protein, 14 aa, Homo sapiens
  CDR3 for alpha chain variable domain of TCR clone 127177 (TRAV12-2, TRAJ48)
CAVNAFFGNEKLTF

SEQ ID NO: 254354 - protein, 13 aa, Homo sapiens
  CDR3 for beta chain variable domain of TCR clone 127177 (TRBV28, TRBJ2-7)
CAGAQRGLDEQYF

SEQ ID NO: 254355 - protein, 15 aa, Homo sapiens
  CDR3 for alpha chain variable domain of TCR clone 127178 (TRAV12-3, TRAJ6)
CAMSATTGGSYIPTF

SEQ ID NO: 254356 - protein, 15 aa, Homo sapiens
  CDR3 for beta chain variable domain of TCR clone 127178 (TRBV7-2, TRBJ1-2)
CASSPRAGWNYGYTF

SEQ ID NO: 254357 - protein, 14 aa, Homo sapiens
  CDR3 for alpha chain variable domain of TCR clone 127179 (TRAV38-1, TRAJ45)
CASHSGGGADGLTF

SEQ ID NO: 254358 - protein, 13 aa, Homo sapiens
  CDR3 for beta chain variable domain of TCR clone 127179 (TRBV4-1, TRBJ2-2)
CASSQESTGELFF

SEQ ID NO: 254359 - protein, 14 aa, Homo sapiens
  CDR3 for alpha chain variable domain of TCR clone 127180 (TRAV1-2, TRAJ16)
CAVNRFSDGQKLLF

SEQ ID NO: 254360 - protein, 13 aa, Homo sapiens
  CDR3 for beta chain variable domain of TCR clone 127180 (TRBV20-1, TRBJ2-5)
CSAREAFQETQYF

SEQ ID NO: 254361 - protein, 17 aa, Homo sapiens
  CDR3 for alpha chain variable domain of TCR clone 127181 (TRAV3, TRAJ42)
CAVRDRDYGGSQGNLIF

SEQ ID NO: 254362 - protein, 15 aa, Homo sapiens
  CDR3 for beta chain variable domain of TCR clone 127181 (TRBV6-6, TRBJ2-7)
CASSCSYGGSYEQYF

SEQ ID NO: 254363 - protein, 12 aa, Homo sapiens
  CDR3 for alpha chain variable domain of TCR clone 127182 (TRAV21, TRAJ8)
CAVNTGLQKLVF

SEQ ID NO: 254364 - protein, 13 aa, Homo sapiens
  CDR3 for beta chain variable domain of TCR clone 127182 (TRBV6-3, TRBJ2-1)
CASSYDNYNEQFF

SEQ ID NO: 254365 - protein, 15 aa, Homo sapiens
  CDR3 for alpha chain variable domain of TCR clone 127183 (TRAV38-1, TRAJ57)
CAFMDSQGGSGKLVF

SEQ ID NO: 254366 - protein, 16 aa, Homo sapiens
  CDR3 for beta chain variable domain of TCR clone 127183 (TRBV10-3, TRBJ2-1)
CAIRGGGRGDYNEQFF

SEQ ID NO: 254367 - protein, 16 aa, Homo sapiens
  CDR3 for alpha chain variable domain of TCR clone 127184 (TRAV16, TRAJ4)
CITVLPFSGCYNKLIF

SEQ ID NO: 254368 - protein, 14 aa, Homo sapiens
  CDR3 for beta chain variable domain of TCR clone 127184 (TRBV19, TRBJ2-7)
CASSMGQGAIEQYF

SEQ ID NO: 254369 - protein, 18 aa, Homo sapiens
  CDR3 for alpha chain variable domain of TCR clone 127185 (TRAV26-1, TRAJ5)
FIVRVVPPRDTGRRALTF

SEQ ID NO: 254370 - protein, 15 aa, Homo sapiens
  CDR3 for beta chain variable domain of TCR clone 127185 (TRBV7-9, TRBJ2-7)
CASSLPMGQANEQYF

SEQ ID NO: 254371 - protein, 11 aa, Homo sapiens
  CDR3 for alpha chain variable domain of TCR clone 127186 (TRAV17, TRAJ43)
CATPRSNDMRF

SEQ ID NO: 254372 - protein, 13 aa, Homo sapiens
  CDR3 for beta chain variable domain of TCR clone 127186 (TRBV2, TRBJ1-1)
CARNPTGGFHAFF

SEQ ID NO: 254373 - protein, 15 aa, Homo sapiens
  CDR3 for alpha chain variable domain of TCR clone 127187 (TRAV21, TRAJ45)
CAVSYSGGGADGLTF

SEQ ID NO: 254374 - protein, 13 aa, Homo sapiens
  CDR3 for beta chain variable domain of TCR clone 127187 (TRBV20-1, TRBJ2-5)
CSAATELQETQDF

SEQ ID NO: 254375 - protein, 13 aa, Homo sapiens
  CDR3 for alpha chain variable domain of TCR clone 127188 (TRAV17, TRAJ5)
CALRGTGRRALTF

SEQ ID NO: 254376 - protein, 17 aa, Homo sapiens
  CDR3 for beta chain variable domain of TCR clone 127188 (TRBV7-3, TRBJ2-3)
CASSLMKRMRGADTQYF

SEQ ID NO: 254377 - protein, 15 aa, Homo sapiens
  CDR3 for alpha chain variable domain of TCR clone 127189 (TRAV3, TRAJ22)
CAVRDRGGSARQLNF

SEQ ID NO: 254378 - protein, 16 aa, Homo sapiens
  CDR3 for beta chain variable domain of TCR clone 127189 (TRBV4-2, TRBJ2-4)
CASSQELRRAKNIQYF

SEQ ID NO: 254379 - protein, 14 aa, Homo sapiens
  CDR3 for alpha chain variable domain of TCR clone 127190 (TRAV13-1, TRAJ48)
CAASRSFGDEKLTF

SEQ ID NO: 254380 - protein, 12 aa, Homo sapiens
  CDR3 for beta chain variable domain of TCR clone 127190 (TRBV6-6, TRBJ2-5)
CASNRQSGTQYF

SEQ ID NO: 254381 - protein, 12 aa, Homo sapiens
  CDR3 for alpha chain variable domain of TCR clone 127191 (TRAV10, TRAJ34)
CVVSGNHRQAHL

SEQ ID NO: 254382 - protein, 14 aa, Homo sapiens
  CDR3 for beta chain variable domain of TCR clone 127191 (TRBV19, TRBJ2-1)
CASPTFVLSGEQFF

SEQ ID NO: 254383 - protein, 15 aa, Homo sapiens
  CDR3 for alpha chain variable domain of TCR clone 127192 (TRAV1-2, TRAJ28)
CAVQYSGAGSYQLTF

SEQ ID NO: 254384 - protein, 13 aa, Homo sapiens
  CDR3 for beta chain variable domain of TCR clone 127192 (TRBV4-2, TRBJ1-1)
CASSQAGNTEAFS

SEQ ID NO: 254385 - protein, 13 aa, Homo sapiens
  CDR3 for alpha chain variable domain of TCR clone 127193 (TRAV12-3, TRAJ13)
CAMSSGGYQKVTF

SEQ ID NO: 254386 - protein, 16 aa, Homo sapiens
  CDR3 for beta chain variable domain of TCR clone 127193 (TRBV11-3, TRBJ2-5)
CASSSVVAGSTETQYF

SEQ ID NO: 254387 - protein, 13 aa, Homo sapiens
  CDR3 for alpha chain variable domain of TCR clone 127194 (TRAV12-3, TRAJ9)
CAMRNTGGFKTIF

SEQ ID NO: 254388 - protein, 14 aa, Homo sapiens
  CDR3 for beta chain variable domain of TCR clone 127194 (TRBV11-2, TRBJ2-7)
CASSSTGEGYKQYF

SEQ ID NO: 254389 - protein, 13 aa, Homo sapiens
  CDR3 for alpha chain variable domain of TCR clone 127195 (TRAV38-1, TRAJ52)
CAFRGTSYGKLTF

SEQ ID NO: 254390 - protein, 15 aa, Homo sapiens
  CDR3 for beta chain variable domain of TCR clone 127195 (TRBV7-8, TRBJ2-5)
CASSDAAGSQETKYF

SEQ ID NO: 254391 - protein, 14 aa, Homo sapiens
  CDR3 for alpha chain variable domain of TCR clone 127196 (TRAV40, TRAJ41)
CLLGPPNSGHALNF

SEQ ID NO: 254392 - protein, 11 aa, Homo sapiens
  CDR3 for beta chain variable domain of TCR clone 127196 (TRBV19, TRBJ2-7)
CASSILGEQYF

SEQ ID NO: 254393 - protein, 16 aa, Homo sapiens
  CDR3 for alpha chain variable domain of TCR clone 127197 (TRAV3, TRAJ37)
CAVRGRGSGNTGKLIF

SEQ ID NO: 254394 - protein, 13 aa, Homo sapiens
  CDR3 for beta chain variable domain of TCR clone 127197 (TRBV14, TRBJ2-7)
GASSQDRRYEQYF

SEQ ID NO: 254395 - protein, 13 aa, Homo sapiens
  CDR3 for alpha chain variable domain of TCR clone 127198 (TRAV8-6, TRAJ49)
CAVITNTGNQFFF

SEQ ID NO: 254396 - protein, 17 aa, Homo sapiens
  CDR3 for beta chain variable domain of TCR clone 127198 (TRBV11-2, TRBJ2-1)
CASSLYPPGVEYNEQFF

SEQ ID NO: 254397 - protein, 13 aa, Homo sapiens
  CDR3 for alpha chain variable domain of TCR clone 127199 (TRAV3, TRAJ21)
CAVREPDFNKFYF

SEQ ID NO: 254398 - protein, 15 aa, Homo sapiens
  CDR3 for beta chain variable domain of TCR clone 127199 (TRBV6-6, TRBJ1-1)
CASSPRGDVETEAFF

SEQ ID NO: 254399 - protein, 12 aa, Homo sapiens
  CDR3 for alpha chain variable domain of TCR clone 127200 (TRAV13-2, TRAJ23)
CAVRHRGGKLIF

SEQ ID NO: 254400 - protein, 16 aa, Homo sapiens
  CDR3 for beta chain variable domain of TCR clone 127200 (TRBV20-1, TRBJ1-4)
CSAPGQGLLTNEKLFF

SEQ ID NO: 254401 - protein, 12 aa, Homo sapiens
  CDR3 for alpha chain variable domain of TCR clone 127201 (TRAV12-3, TRAJ40)
CAMSSGTYKYIF

SEQ ID NO: 254402 - protein, 15 aa, Homo sapiens
  CDR3 for beta chain variable domain of TCR clone 127201 (TRBV7-3, TRBJ2-3)
CASSLGLTLGDTQYF

SEQ ID NO: 254403 - protein, 15 aa, Homo sapiens
  CDR3 for alpha chain variable domain of TCR clone 127202 (TRAV8-4, TRAJ37)
CAVTYGSSNAGKLIF

SEQ ID NO: 254404 - protein, 13 aa, Homo sapiens
  CDR3 for beta chain variable domain of TCR clone 127202 (TRBV12-4, TRBJ2-5)
CASSLGGSRTQYF

SEQ ID NO: 254405 - protein, 12 aa, Homo sapiens
  CDR3 for alpha chain variable domain of TCR clone 127203 (TRAV8-3, TRAJ20)
CAVGGGDYKLSF

SEQ ID NO: 254406 - protein, 14 aa, Homo sapiens
  CDR3 for beta chain variable domain of TCR clone 127203 (TRBV5-1, TRBJ2-7)
CASSRGESLYEKYF

SEQ ID NO: 254407 - protein, 19 aa, Homo sapiens
  CDR3 for alpha chain variable domain of TCR clone 127204 (TRAV3, TRAJ6)
CAVRDGPGQEEATYPHLEE

SEQ ID NO: 254408 - protein, 14 aa, Homo sapiens
  CDR3 for beta chain variable domain of TCR clone 127204 (TRBV7-2, TRBJ2-7)
CASSPKTSFYEQYF

SEQ ID NO: 254409 - protein, 13 aa, Homo sapiens
  CDR3 for alpha chain variable domain of TCR clone 127205 (TRAV12-1, TRAJ20)
CVVNRETDYKLSF

SEQ ID NO: 254410 - protein, 15 aa, Homo sapiens
  CDR3 for beta chain variable domain of TCR clone 127205 (TRBV14, TRBJ2-1)
CDSSLGLAGGTEQFF

SEQ ID NO: 254411 - protein, 16 aa, Homo sapiens
  CDR3 for alpha chain variable domain of TCR clone 127206 (TRAV27, TRAJ13)
CAGAKSDSGGYQKVTF

SEQ ID NO: 254412 - protein, 15 aa, Homo sapiens
  CDR3 for beta chain variable domain of TCR clone 127206 (TRBV29-1, TRBJ2-1)
CSVGRHALFYNDQFF

SEQ ID NO: 254413 - protein, 18 aa, Homo sapiens
  CDR3 for alpha chain variable domain of TCR clone 127207 (TRAV29/DV5, TRAJ52)
CAAGFRGAGGTSYGKLTF

SEQ ID NO: 254414 - protein, 16 aa, Homo sapiens
  CDR3 for beta chain variable domain of TCR clone 127207 (TRBV4-2, TRBJ2-3)
CASSQELAGDTDTQYF

SEQ ID NO: 254415 - protein, 13 aa, Homo sapiens
  CDR3 for alpha chain variable domain of TCR clone 127208 (TRAV8-1, TRAJ30)
CAVIMNRDDKIIF

SEQ ID NO: 254416 - protein, 14 aa, Homo sapiens
  CDR3 for beta chain variable domain of TCR clone 127208 (TRBV7-2, TRBJ1-6)
CASSLQVANSPLHF

SEQ ID NO: 254417 - protein, 14 aa, Homo sapiens
  CDR3 for alpha chain variable domain of TCR clone 127209 (TRAV8-4, TRAJ54)
CAVSEVLGAQKLVF

SEQ ID NO: 254418 - protein, 13 aa, Homo sapiens
  CDR3 for beta chain variable domain of TCR clone 127209 (TRBV27, TRBJ2-7)
CASSFVSSYEQYV

SEQ ID NO: 254419 - protein, 13 aa, Homo sapiens
  CDR3 for alpha chain variable domain of TCR clone 127210 (TRAV12-2, TRAJ52)
CAVGGISYGKLTF

SEQ ID NO: 254420 - protein, 16 aa, Homo sapiens
  CDR3 for beta chain variable domain of TCR clone 127210 (TRBV28, TRBJ2-5)
CASSFSPAGGWETQYF

SEQ ID NO: 254421 - protein, 13 aa, Homo sapiens
  CDR3 for alpha chain variable domain of TCR clone 127211 (TRAV27, TRAJ39)
CAGVNNAGNMLTL

SEQ ID NO: 254422 - protein, 19 aa, Homo sapiens
  CDR3 for beta chain variable domain of TCR clone 127211 (TRBV5-1, TRBJ2-3)
CASSLWLAGGITTTDTQYF

SEQ ID NO: 254423 - protein, 13 aa, Homo sapiens
  CDR3 for alpha chain variable domain of TCR clone 127212 (TRAV29/DV5, TRAJ31)
CAASRNNNASLMF

SEQ ID NO: 254424 - protein, 16 aa, Homo sapiens
  CDR3 for beta chain variable domain of TCR clone 127212 (TRBV20-1, TRBJ1-4)
CSAPGQGLLTNEKLFF

SEQ ID NO: 254425 - protein, 14 aa, Homo sapiens
  CDR3 for alpha chain variable domain of TCR clone 127213 (TRAV12-3, TRAJ29)
CAMILLSGNTPLVF

SEQ ID NO: 254426 - protein, 20 aa, Homo sapiens
  CDR3 for beta chain variable domain of TCR clone 127213 (TRBV28, TRBJ2-1)
CASTPIGRSPGLAGGNEQFF

SEQ ID NO: 254427 - protein, 12 aa, Homo sapiens
  CDR3 for alpha chain variable domain of TCR clone 127214 (TRAV13-1, TRAJ27)
CAAHTNAGKSTF

SEQ ID NO: 254428 - protein, 15 aa, Homo sapiens
  CDR3 for beta chain variable domain of TCR clone 127214 (TRBV9, TRBJ1-6)
CASSVAGTGDSPLHF

SEQ ID NO: 254429 - protein, 13 aa, Homo sapiens
  CDR3 for alpha chain variable domain of TCR clone 127215 (TRAV3, TRAJ15)
CAVASQAGTALIF

SEQ ID NO: 254430 - protein, 16 aa, Homo sapiens
  CDR3 for beta chain variable domain of TCR clone 127215 (TRBV5-1, TRBJ1-1)
CASSSGGNSLNTEAFF

SEQ ID NO: 254431 - protein, 15 aa, Homo sapiens
  CDR3 for alpha chain variable domain of TCR clone 127216 (TRAV35, TRAJ58)
CAGRRQETSGSRLTF

SEQ ID NO: 254432 - protein, 15 aa, Homo sapiens
  CDR3 for beta chain variable domain of TCR clone 127216 (TRBV11-3, TRBJ2-3)
CASLKDGREGDTQYF

SEQ ID NO: 254433 - protein, 12 aa, Homo sapiens
  CDR3 for alpha chain variable domain of TCR clone 127217 (TRAV25, TRAJ20)
CAGSSNDYKLSF

SEQ ID NO: 254434 - protein, 12 aa, Homo sapiens
  CDR3 for beta chain variable domain of TCR clone 127217 (TRBV5-4, TRBJ2-7)
CASSPRTEEQYV

SEQ ID NO: 254435 - protein, 15 aa, Homo sapiens
  CDR3 for alpha chain variable domain of TCR clone 127218 (TRAV38-1, TRAJ37)
WAFIFGSGNTGKLIF

SEQ ID NO: 254436 - protein, 12 aa, Homo sapiens
  CDR3 for beta chain variable domain of TCR clone 127218 (TRBV7-9, TRBJ2-7)
CASSLEGYEQYF

SEQ ID NO: 254437 - protein, 15 aa, Homo sapiens
  CDR3 for alpha chain variable domain of TCR clone 127219 (TRAV12-3, TRAJ23)
CAMILIYNQGGKLIF

SEQ ID NO: 254438 - protein, 15 aa, Homo sapiens
  CDR3 for beta chain variable domain of TCR clone 127219 (TRBV11-2, TRBJ2-2)
CASSLDTGNTGELFF

SEQ ID NO: 254439 - protein, 17 aa, Homo sapiens
  CDR3 for alpha chain variable domain of TCR clone 127220 (TRAV8-6, TRAJ22)
CAVSLYPSSVSARQLTF

SEQ ID NO: 254440 - protein, 16 aa, Homo sapiens
  CDR3 for beta chain variable domain of TCR clone 127220 (TRBV19, TRBJ2-7)
CASSPAGSGSLNEQYF

SEQ ID NO: 254441 - protein, 14 aa, Homo sapiens
  CDR3 for alpha chain variable domain of TCR clone 127221 (TRAV2, TRAJ22)
CAVGRCGSARQLTF

SEQ ID NO: 254442 - protein, 12 aa, Homo sapiens
  CDR3 for beta chain variable domain of TCR clone 127221 (TRBV19, TRBJ2-1)
CASSMQDTEQFF

SEQ ID NO: 254443 - protein, 10 aa, Homo sapiens
  CDR3 for alpha chain variable domain of TCR clone 127222 (TRAV23/DV6, TRAJ57)
CAASFTLSQG

SEQ ID NO: 254444 - protein, 13 aa, Homo sapiens
  CDR3 for beta chain variable domain of TCR clone 127222 (TRBV12-4, TRBJ1-2)
CASSSGLTVISTF

SEQ ID NO: 254445 - protein, 10 aa, Homo sapiens
  CDR3 for alpha chain variable domain of TCR clone 127223 (TRAV25, TRAJ17)
CQAAGNKLTF

SEQ ID NO: 254446 - protein, 13 aa, Homo sapiens
  CDR3 for beta chain variable domain of TCR clone 127223 (TRBV6-5, TRBJ2-2)
CASSWPGVGELFF

SEQ ID NO: 254447 - protein, 12 aa, Homo sapiens
  CDR3 for alpha chain variable domain of TCR clone 127224 (TRAV23/DV6, TRAJ49)
CAATYTGHQFYF

SEQ ID NO: 254448 - protein, 17 aa, Homo sapiens
  CDR3 for beta chain variable domain of TCR clone 127224 (TRBV4-1, TRBJ2-3)
CASSQVLQGGGTDTQYF

SEQ ID NO: 254449 - protein, 11 aa, Homo sapiens
  CDR3 for alpha chain variable domain of TCR clone 127225 (TRAV2, TRAJ13)
CASGGYQKVTF

SEQ ID NO: 254450 - protein, 15 aa, Homo sapiens
  CDR3 for beta chain variable domain of TCR clone 127225 (TRBV2, TRBJ2-7)
CASSEGLARSYEQYF

SEQ ID NO: 254451 - protein, 16 aa, Homo sapiens
  CDR3 for alpha chain variable domain of TCR clone 127226 (TRAV3, TRAJ37)
CAVRGKGSGNTGKLIF

SEQ ID NO: 254452 - protein, 15 aa, Homo sapiens
  CDR3 for beta chain variable domain of TCR clone 127226 (TRBV27, TRBJ2-1)
CASSNGGGSSNEQFF

SEQ ID NO: 254453 - protein, 16 aa, Homo sapiens
  CDR3 for alpha chain variable domain of TCR clone 127227 (TRAV8-2, TRAJ7)
CVVSGGPYYGNNRLAF

SEQ ID NO: 254454 - protein, 15 aa, Homo sapiens
  CDR3 for beta chain variable domain of TCR clone 127227 (TRBV27, TRBJ2-3)
CASSLGLAATDTQYF

SEQ ID NO: 254455 - protein, 13 aa, Homo sapiens
  CDR3 for alpha chain variable domain of TCR clone 127228 (TRAV12-2, TRAJ37)
CAGGSGNTGKLIF

SEQ ID NO: 254456 - protein, 17 aa, Homo sapiens
  CDR3 for beta chain variable domain of TCR clone 127228 (TRBV11-2, TRBJ2-1)
CASSLYPPGFEYNEQFF

SEQ ID NO: 254457 - protein, 15 aa, Homo sapiens
  CDR3 for alpha chain variable domain of TCR clone 127229 (TRAV26-1, TRAJ23)
CIVRVLNNQGGKLIF

SEQ ID NO: 254458 - protein, 15 aa, Homo sapiens
  CDR3 for beta chain variable domain of TCR clone 127229 (TRBV7-3, TRBJ2-1)
CTSSFGQSNYNEQFF

SEQ ID NO: 254459 - protein, 11 aa, Homo sapiens
  CDR3 for alpha chain variable domain of TCR clone 127230 (TRAV2, TRAJ13)
CASGGYQKVTF

SEQ ID NO: 254460 - protein, 16 aa, Homo sapiens
  CDR3 for beta chain variable domain of TCR clone 127230 (TRBV6-1, TRBJ2-5)
CASSETLHRGAETQYF

SEQ ID NO: 254461 - protein, 12 aa, Homo sapiens
  CDR3 for alpha chain variable domain of TCR clone 127231 (TRAV27, TRAJ35)
CAGADFGNVLHC

SEQ ID NO: 254462 - protein, 12 aa, Homo sapiens
  CDR3 for beta chain variable domain of TCR clone 127231 (TRBV7-9, TRBJ2-7)
CASSIKREEQYF

SEQ ID NO: 254463 - protein, 11 aa, Homo sapiens
  CDR3 for alpha chain variable domain of TCR clone 127232 (TRAV2, TRAJ13)
CASGGYQKVTF

SEQ ID NO: 254464 - protein, 14 aa, Homo sapiens
  CDR3 for beta chain variable domain of TCR clone 127232 (TRBV19, TRBJ1-5)
CASRAPDSFLSQHF

SEQ ID NO: 254465 - protein, 14 aa, Homo sapiens
  CDR3 for alpha chain variable domain of TCR clone 127233 (TRAV12-2, TRAJ9)
CAVNALEGGFKTIF

SEQ ID NO: 254466 - protein, 17 aa, Homo sapiens
  CDR3 for beta chain variable domain of TCR clone 127233 (TRBV2, TRBJ2-7)
CASSGRGTGGRFYEQYF

SEQ ID NO: 254467 - protein, 17 aa, Homo sapiens
  CDR3 for alpha chain variable domain of TCR clone 127234 (TRAV3, TRAJ6)
CAVRDGPRAGGSYIPTF

SEQ ID NO: 254468 - protein, 18 aa, Homo sapiens
  CDR3 for beta chain variable domain of TCR clone 127234 (TRBV7-9, TRBJ2-7)
CASSLTTSGSRTWCEQYF

SEQ ID NO: 254469 - protein, 15 aa, Homo sapiens
  CDR3 for alpha chain variable domain of TCR clone 127235 (TRAV17, TRAJ13)
CATDAGSGGYQKVTS

SEQ ID NO: 254470 - protein, 17 aa, Homo sapiens
  CDR3 for beta chain variable domain of TCR clone 127235 (TRBV11-2, TRBJ2-1)
CASSLYPPGVEYNEQFF

SEQ ID NO: 254471 - protein, 13 aa, Homo sapiens
  CDR3 for alpha chain variable domain of TCR clone 127236 (TRAV27, TRAJ8)
CAGGPTGFQKLVF

SEQ ID NO: 254472 - protein, 14 aa, Homo sapiens
  CDR3 for beta chain variable domain of TCR clone 127236 (TRBV20-1, TRBJ1-1)
CSAQTRIGGTEAFF

SEQ ID NO: 254473 - protein, 12 aa, Homo sapiens
  CDR3 for alpha chain variable domain of TCR clone 127237 (TRAV2, TRAJ33)
CAGWGSNYQLIW

SEQ ID NO: 254474 - protein, 16 aa, Homo sapiens
  CDR3 for beta chain variable domain of TCR clone 127237 (TRBV20-1, TRBJ1-4)
CSAPGQGLLTNEKLFF

SEQ ID NO: 254475 - protein, 16 aa, Homo sapiens
  CDR3 for alpha chain variable domain of TCR clone 127238 (TRAV30, TRAJ24)
CGTEIVDADSWGKFQF

SEQ ID NO: 254476 - protein, 15 aa, Homo sapiens
  CDR3 for beta chain variable domain of TCR clone 127238 (TRBV15, TRBJ1-5)
CATSRDPVSNQTQHF

SEQ ID NO: 254477 - protein, 12 aa, Homo sapiens
  CDR3 for alpha chain variable domain of TCR clone 127239 (TRAV25, TRAJ20)
CAGRSNDYKLSF

SEQ ID NO: 254478 - protein, 15 aa, Homo sapiens
  CDR3 for beta chain variable domain of TCR clone 127239 (TRBV7-6, TRBJ2-7)
CASSGLRDTFGEQYF

SEQ ID NO: 254479 - protein, 12 aa, Homo sapiens
  CDR3 for alpha chain variable domain of TCR clone 127240 (TRAV1-2, TRAJ33)
CAALDSNYQLIW

SEQ ID NO: 254480 - protein, 16 aa, Homo sapiens
  CDR3 for beta chain variable domain of TCR clone 127240 (TRBV7-2, TRBJ1-5)
CASSPWGPEGNQPQHF

SEQ ID NO: 254481 - protein, 11 aa, Homo sapiens
  CDR3 for alpha chain variable domain of TCR clone 127241 (TRAV1-1, TRAJ23)
CAVRQGGKLIF

SEQ ID NO: 254482 - protein, 15 aa, Homo sapiens
  CDR3 for beta chain variable domain of TCR clone 127241 (TRBV7-8, TRBJ2-2)
CASSHLFPGPTIHIT

SEQ ID NO: 254483 - protein, 13 aa, Homo sapiens
  CDR3 for alpha chain variable domain of TCR clone 127242 (TRAV3, TRAJ15)
CAVRDRAGTALIF

SEQ ID NO: 254484 - protein, 15 aa, Homo sapiens
  CDR3 for beta chain variable domain of TCR clone 127242 (TRBV11-1, TRBJ2-7)
CASSLNYGASYEQYF

SEQ ID NO: 254485 - protein, 14 aa, Homo sapiens
  CDR3 for alpha chain variable domain of TCR clone 127243 (TRAV12-2, TRAJ44)
CAVNPAGTASKLTS

SEQ ID NO: 254486 - protein, 13 aa, Homo sapiens
  CDR3 for beta chain variable domain of TCR clone 127243 (TRBV20-1, TRBJ1-6)
CSAPLGVGSPLHF

SEQ ID NO: 254487 - protein, 14 aa, Homo sapiens
  CDR3 for alpha chain variable domain of TCR clone 127244 (TRAV1-2, TRAJ16)
CAVNRFSDGQKLLF

SEQ ID NO: 254488 - protein, 14 aa, Homo sapiens
  CDR3 for beta chain variable domain of TCR clone 127244 (TRBV7-9, TRBJ2-7)
CASSLQQGGYEQYF

SEQ ID NO: 254489 - protein, 13 aa, Homo sapiens
  CDR3 for alpha chain variable domain of TCR clone 127245 (TRAV29/DV5, TRAJ37)
CAASAEYGNKLIF

SEQ ID NO: 254490 - protein, 14 aa, Homo sapiens
  CDR3 for beta chain variable domain of TCR clone 127245 (TRBV20-1, TRBJ1-1)
CSARATGVGTEAFF

SEQ ID NO: 254491 - protein, 12 aa, Homo sapiens
  CDR3 for alpha chain variable domain of TCR clone 127246 (TRAV21, TRAJ26)
CAVDNYGQNFVF

SEQ ID NO: 254492 - protein, 10 aa, Homo sapiens
  CDR3 for beta chain variable domain of TCR clone 127246 (TRBV2, TRBJ2-5)
CASGAATQYF

SEQ ID NO: 254493 - protein, 16 aa, Homo sapiens
  CDR3 for alpha chain variable domain of TCR clone 127247 (TRAV3, TRAJ10)
CAVRDMRAGGGNKLTL

SEQ ID NO: 254494 - protein, 14 aa, Homo sapiens
  CDR3 for beta chain variable domain of TCR clone 127247 (TRBV7-2, TRBJ1-1)
CASSFLTGTTEAFF

SEQ ID NO: 254495 - protein, 15 aa, Homo sapiens
  CDR3 for alpha chain variable domain of TCR clone 127248 (TRAV20, TRAJ6)
CAVRLQSGGSYITTF

SEQ ID NO: 254496 - protein, 14 aa, Homo sapiens
  CDR3 for beta chain variable domain of TCR clone 127248 (TRBV12-4, TRBJ2-7)
CASSASGGWYEQYF

SEQ ID NO: 254497 - protein, 14 aa, Homo sapiens
  CDR3 for alpha chain variable domain of TCR clone 127249 (TRAV8-4, TRAJ9)
CAVRINTGGFKTIF

SEQ ID NO: 254498 - protein, 14 aa, Homo sapiens
  CDR3 for beta chain variable domain of TCR clone 127249 (TRBV25-1, TRBJ1-1)
CASTHLGGNTEAFF

SEQ ID NO: 254499 - protein, 14 aa, Homo sapiens
  CDR3 for alpha chain variable domain of TCR clone 127250 (TRAV12-3, TRAJ54)
CAMSALQGAQKLVF

SEQ ID NO: 254500 - protein, 15 aa, Homo sapiens
  CDR3 for beta chain variable domain of TCR clone 127250 (TRBV19, TRBJ2-4)
CASSTPGIAKDIQYF

SEQ ID NO: 254501 - protein, 19 aa, Homo sapiens
  CDR3 for alpha chain variable domain of TCR clone 127251 (TRAV26-1, TRAJ52)
CIVRAHRNAGGTSYGKLTF

SEQ ID NO: 254502 - protein, 13 aa, Homo sapiens
  CDR3 for beta chain variable domain of TCR clone 127251 (TRBV20-1, TRBJ1-6)
CSAPLGVGSPLHV

SEQ ID NO: 254503 - protein, 13 aa, Homo sapiens
  CDR3 for alpha chain variable domain of TCR clone 127252 (TRAV29/DV5, TRAJ31)
CAASRNNNARLMF

SEQ ID NO: 254504 - protein, 17 aa, Homo sapiens
  CDR3 for beta chain variable domain of TCR clone 127252 (TRBV7-2, TRBJ2-3)
CASSARSSGSPTDTQYF

SEQ ID NO: 254505 - protein, 14 aa, Homo sapiens
  CDR3 for alpha chain variable domain of TCR clone 127253 (TRAV12-1, TRAJ17)
CVVNYKAAGNKLTF

SEQ ID NO: 254506 - protein, 15 aa, Homo sapiens
  CDR3 for beta chain variable domain of TCR clone 127253 (TRBV7-2, TRBJ2-1)
CARTHGTGIYNEQFF

SEQ ID NO: 254507 - protein, 14 aa, Homo sapiens
  CDR3 for alpha chain variable domain of TCR clone 127254 (TRAV17, TRAJ48)
CATEGNFGNEKLTF

SEQ ID NO: 254508 - protein, 14 aa, Homo sapiens
  CDR3 for beta chain variable domain of TCR clone 127254 (TRBV11-1, TRBJ2-7)
CASSFRQGSYEQYF

SEQ ID NO: 254509 - protein, 18 aa, Homo sapiens
  CDR3 for alpha chain variable domain of TCR clone 127255 (TRAV26-1, TRAJ23)
CIVRVGLEVWNQGGKLIF

SEQ ID NO: 254510 - protein, 15 aa, Homo sapiens
  CDR3 for beta chain variable domain of TCR clone 127255 (TRBV12-4, TRBJ2-5)
CASSPPTGLQETQYF

SEQ ID NO: 254511 - protein, 16 aa, Homo sapiens
  CDR3 for alpha chain variable domain of TCR clone 127256 (TRAV12-3, TRAJ53)
CAMSPGSGGSNYKLTF

SEQ ID NO: 254512 - protein, 11 aa, Homo sapiens
  CDR3 for beta chain variable domain of TCR clone 127256 (TRBV11-2, TRBJ2-2)
CASSLPGELFS

SEQ ID NO: 254513 - protein, 14 aa, Homo sapiens
  CDR3 for alpha chain variable domain of TCR clone 127257 (TRAV26-1, TRAJ38)
CIADNAGNNRKLIL

SEQ ID NO: 254514 - protein, 15 aa, Homo sapiens
  CDR3 for beta chain variable domain of TCR clone 127257 (TRBV7-2, TRBJ2-1)
CASSLVAGRYNEQFF

SEQ ID NO: 254515 - protein, 16 aa, Homo sapiens
  CDR3 for alpha chain variable domain of TCR clone 127258 (TRAV13-1, TRAJ18)
CAASRMRGSTLGRLYF

SEQ ID NO: 254516 - protein, 16 aa, Homo sapiens
  CDR3 for beta chain variable domain of TCR clone 127258 (TRBV28, TRBJ2-7)
CASSFPDRCLTYEQYF

SEQ ID NO: 254517 - protein, 15 aa, Homo sapiens
  CDR3 for alpha chain variable domain of TCR clone 127259 (TRAV8-2, TRAJ23)
CVVSAFYNQGGKLIF

SEQ ID NO: 254518 - protein, 13 aa, Homo sapiens
  CDR3 for beta chain variable domain of TCR clone 127259 (TRBV4-1, TRBJ2-1)
CASSQAGGDEQFF

SEQ ID NO: 254519 - protein, 10 aa, Homo sapiens
  CDR3 for alpha chain variable domain of TCR clone 127260 (TRAV8-4, TRAJ43)
CAVSAADMRF

SEQ ID NO: 254520 - protein, 13 aa, Homo sapiens
  CDR3 for beta chain variable domain of TCR clone 127260 (TRBV12-4, TRBJ2-5)
CASSPGTEETQYF

SEQ ID NO: 254521 - protein, 10 aa, Homo sapiens
  CDR3 for alpha chain variable domain of TCR clone 127261 (TRAV30, TRAJ48)
CGIVNEKLTF

SEQ ID NO: 254522 - protein, 14 aa, Homo sapiens
  CDR3 for beta chain variable domain of TCR clone 127261 (TRBV7-6, TRBJ2-3)
CASSVAGGTDTQYF

SEQ ID NO: 254523 - protein, 21 aa, Homo sapiens
  CDR3 for alpha chain variable domain of TCR clone 127262 (TRAV38-1, TRAJ45)
CDVFLCFHAISSGGGADGLTF

SEQ ID NO: 254524 - protein, 15 aa, Homo sapiens
  CDR3 for beta chain variable domain of TCR clone 127262 (TRBV7-2, TRBJ2-3)
CASSLVVRGPDTQYF

SEQ ID NO: 254525 - protein, 10 aa, Homo sapiens
  CDR3 for alpha chain variable domain of TCR clone 127263 (TRAV25, TRAJ16)
CRANGQKLLF

SEQ ID NO: 254526 - protein, 18 aa, Homo sapiens
  CDR3 for beta chain variable domain of TCR clone 127263 (TRBV6-5, TRBJ1-1)
CTSVPALFDGLLNTEAFF

SEQ ID NO: 254527 - protein, 14 aa, Homo sapiens
  CDR3 for alpha chain variable domain of TCR clone 127264 (TRAV4, TRAJ26)
CLVGPHNYGQNFVF

SEQ ID NO: 254528 - protein, 17 aa, Homo sapiens
  CDR3 for beta chain variable domain of TCR clone 127264 (TRBV24-1, TRBJ2-1)
CATSDVLTSGTYNEQFF

SEQ ID NO: 254529 - protein, 14 aa, Homo sapiens
  CDR3 for alpha chain variable domain of TCR clone 127265 (TRAV9-2, TRAJ39)
CALYIYNAGNMLTF

SEQ ID NO: 254530 - protein, 15 aa, Homo sapiens
  CDR3 for beta chain variable domain of TCR clone 127265 (TRBV7-9, TRBJ1-4)
CASSATGGNNEKLFF

SEQ ID NO: 254531 - protein, 14 aa, Homo sapiens
  CDR3 for alpha chain variable domain of TCR clone 127266 (TRAV25, TRAJ27)
CAGPGYTNAGKSTF

SEQ ID NO: 254532 - protein, 16 aa, Homo sapiens
  CDR3 for beta chain variable domain of TCR clone 127266 (TRBV4-1, TRBJ2-6)
CASSQDGGPGANVLTF

SEQ ID NO: 254533 - protein, 13 aa, Homo sapiens
  CDR3 for alpha chain variable domain of TCR clone 127267 (TRAV8-1, TRAJ34)
CAVNAGNTDKLIF

SEQ ID NO: 254534 - protein, 17 aa, Homo sapiens
  CDR3 for beta chain variable domain of TCR clone 127267 (TRBV7-3, TRBJ2-3)
RASSLMKRMRGADTQYF

SEQ ID NO: 254535 - protein, 14 aa, Homo sapiens
  CDR3 for alpha chain variable domain of TCR clone 127268 (TRAV38-1, TRAJ40)
CALRPTSGTYKYIF

SEQ ID NO: 254536 - protein, 12 aa, Homo sapiens
  CDR3 for beta chain variable domain of TCR clone 127268 (TRBV11-2, TRBJ2-2)
CASSLGGGELFF

SEQ ID NO: 254537 - protein, 14 aa, Homo sapiens
  CDR3 for alpha chain variable domain of TCR clone 127269 (TRAV2, TRAJ9)
CAVEDRSGGFKTIF

SEQ ID NO: 254538 - protein, 14 aa, Homo sapiens
  CDR3 for beta chain variable domain of TCR clone 127269 (TRBV3-1, TRBJ2-5)
CASSQAPDQETQYF

SEQ ID NO: 254539 - protein, 21 aa, Homo sapiens
  CDR3 for alpha chain variable domain of TCR clone 127270 (TRAV8-3, TRAJ6)
CAVGGEEATYLHLEEEPALLF

SEQ ID NO: 254540 - protein, 17 aa, Homo sapiens
  CDR3 for beta chain variable domain of TCR clone 127270 (TRBV7-2, TRBJ2-3)
CASSLAGGLTGTAGQYF

SEQ ID NO: 254541 - protein, 14 aa, Homo sapiens
  CDR3 for alpha chain variable domain of TCR clone 127271 (TRAV8-4, TRAJ15)
CAVILNQAGTALIF

SEQ ID NO: 254542 - protein, 12 aa, Homo sapiens
  CDR3 for beta chain variable domain of TCR clone 127271 (TRBV7-9, TRBJ1-6)
CASSASDSPLHF

SEQ ID NO: 254543 - protein, 14 aa, Homo sapiens
  CDR3 for alpha chain variable domain of TCR clone 127272 (TRAV23/DV6, TRAJ8)
CAASKNTGFQKLVF

SEQ ID NO: 254544 - protein, 16 aa, Homo sapiens
  CDR3 for beta chain variable domain of TCR clone 127272 (TRBV4-1, TRBJ2-6)
CASSQVGDPGANVLAF

SEQ ID NO: 254545 - protein, 15 aa, Homo sapiens
  CDR3 for alpha chain variable domain of TCR clone 127273 (TRAV34, TRAJ38)
CGADFTPGNNRKLIW

SEQ ID NO: 254546 - protein, 13 aa, Homo sapiens
  CDR3 for beta chain variable domain of TCR clone 127273 (TRBV19, TRBJ1-5)
CASSTRRDQPQHF

SEQ ID NO: 254547 - protein, 14 aa, Homo sapiens
  CDR3 for alpha chain variable domain of TCR clone 127274 (TRAV1-2, TRAJ8)
CAVREDTGFQKLVF

SEQ ID NO: 254548 - protein, 12 aa, Homo sapiens
  CDR3 for beta chain variable domain of TCR clone 127274 (TRBV6-6, TRBJ2-3)
CASSSRGDTQYF

SEQ ID NO: 254549 - protein, 14 aa, Homo sapiens
  CDR3 for alpha chain variable domain of TCR clone 127275 (TRAV1-1, TRAJ27)
CAVIYNTNAGKSTV

SEQ ID NO: 254550 - protein, 15 aa, Homo sapiens
  CDR3 for beta chain variable domain of TCR clone 127275 (TRBV7-2, TRBJ2-1)
CASSSGLAGGNEQFF

SEQ ID NO: 254551 - protein, 12 aa, Homo sapiens
  CDR3 for alpha chain variable domain of TCR clone 127276 (TRAV1-1, TRAJ8)
CAGGTGFQKLVF

SEQ ID NO: 254552 - protein, 15 aa, Homo sapiens
  CDR3 for beta chain variable domain of TCR clone 127276 (TRBV7-9, TRBJ1-4)
CSSSRTGGFNEKLFF

SEQ ID NO: 254553 - protein, 11 aa, Homo sapiens
  CDR3 for alpha chain variable domain of TCR clone 127277 (TRAV23/DV6, TRAJ17)
CKWAAGNKLTF

SEQ ID NO: 254554 - protein, 14 aa, Homo sapiens
  CDR3 for beta chain variable domain of TCR clone 127277 (TRBV6-1, TRBJ2-7)
CARSGGSYLYEQYF

SEQ ID NO: 254555 - protein, 12 aa, Homo sapiens
  CDR3 for alpha chain variable domain of TCR clone 127278 (TRAV12-1, TRAJ40)
CVVYSGTYKYVF

SEQ ID NO: 254556 - protein, 18 aa, Homo sapiens
  CDR3 for beta chain variable domain of TCR clone 127278 (TRBV11-2, TRBJ2-3)
CASSLGGAARGAPNTQYF

SEQ ID NO: 254557 - protein, 15 aa, Homo sapiens
  CDR3 for alpha chain variable domain of TCR clone 127279 (TRAV21, TRAJ53)
CATLNSGVSNYKLTF

SEQ ID NO: 254558 - protein, 16 aa, Homo sapiens
  CDR3 for beta chain variable domain of TCR clone 127279 (TRBV9, TRBJ2-1)
CASSVGGGGNYNEQFF

SEQ ID NO: 254559 - protein, 15 aa, Homo sapiens
  CDR3 for alpha chain variable domain of TCR clone 127280 (TRAV3, TRAJ3)
SAVRDMSSSASKIIF

SEQ ID NO: 254560 - protein, 14 aa, Homo sapiens
  CDR3 for beta chain variable domain of TCR clone 127280 (TRBV6-6, TRBJ2-7)
CASSIAGGVDEQYF

SEQ ID NO: 254561 - protein, 10 aa, Homo sapiens
  CDR3 for alpha chain variable domain of TCR clone 127281 (TRAV12-3, TRAJ18)
CAMSAEAQPW

SEQ ID NO: 254562 - protein, 16 aa, Homo sapiens
  CDR3 for beta chain variable domain of TCR clone 127281 (TRBV7-9, TRBJ1-3)
CAGSLGAGSSGNTIYF

SEQ ID NO: 254563 - protein, 16 aa, Homo sapiens
  CDR3 for alpha chain variable domain of TCR clone 127282 (TRAV3, TRAJ10)
CAVRDMRAGGGNNLTF

SEQ ID NO: 254564 - protein, 13 aa, Homo sapiens
  CDR3 for beta chain variable domain of TCR clone 127282 (TRBV6-1, TRBJ1-1)
CASSRQGNTEAFF

SEQ ID NO: 254565 - protein, 16 aa, Homo sapiens
  CDR3 for alpha chain variable domain of TCR clone 127283 (TRAV3, TRAJ5)
CAVRNLMDAGRRALTF

SEQ ID NO: 254566 - protein, 16 aa, Homo sapiens
  CDR3 for beta chain variable domain of TCR clone 127283 (TRBV4-2, TRBJ2-7)
CASSQEGLAISYEQYF

SEQ ID NO: 254567 - protein, 12 aa, Homo sapiens
  CDR3 for alpha chain variable domain of TCR clone 127284 (TRAV12-1, TRAJ40)
CVFYSGTYKYIF

SEQ ID NO: 254568 - protein, 17 aa, Homo sapiens
  CDR3 for beta chain variable domain of TCR clone 127284 (TRBV7-3, TRBJ2-3)
CASSLMKRMRGADTQYF

SEQ ID NO: 254569 - protein, 17 aa, Homo sapiens
  CDR3 for alpha chain variable domain of TCR clone 127285 (TRAV4, TRAJ42)
FLVGVLNYGGSQGNLIF

SEQ ID NO: 254570 - protein, 12 aa, Homo sapiens
  CDR3 for beta chain variable domain of TCR clone 127285 (TRBV20-1, TRBJ2-1)
CSAQYTYNEQFF

SEQ ID NO: 254571 - protein, 15 aa, Homo sapiens
  CDR3 for alpha chain variable domain of TCR clone 127286 (TRAV21, TRAJ53)
CATLNSGGSNYKLTF

SEQ ID NO: 254572 - protein, 14 aa, Homo sapiens
  CDR3 for beta chain variable domain of TCR clone 127286 (TRBV4-2, TRBJ1-2)
CASSPGGSNYGYTF

SEQ ID NO: 254573 - protein, 13 aa, Homo sapiens
  CDR3 for alpha chain variable domain of TCR clone 127287 (TRAV30, TRAJ20)
CGTEDRSDYKLSF

SEQ ID NO: 254574 - protein, 15 aa, Homo sapiens
  CDR3 for beta chain variable domain of TCR clone 127287 (TRBV27, TRBJ2-1)
CASSNGGGSSNEQFF

SEQ ID NO: 254575 - protein, 15 aa, Homo sapiens
  CDR3 for alpha chain variable domain of TCR clone 127288 (TRAV21, TRAJ32)
CAAAPYGGATNKLIF

SEQ ID NO: 254576 - protein, 17 aa, Homo sapiens
  CDR3 for beta chain variable domain of TCR clone 127288 (TRBV18, TRBJ2-3)
CASSTFGDGGFTDTQYF

SEQ ID NO: 254577 - protein, 17 aa, Homo sapiens
  CDR3 for alpha chain variable domain of TCR clone 127289 (TRAV3, TRAJ6)
CAVRDGPRAGGSSIPTF

SEQ ID NO: 254578 - protein, 12 aa, Homo sapiens
  CDR3 for beta chain variable domain of TCR clone 127289 (TRBV11-2, TRBJ2-1)
CASSPGNNEQFF

SEQ ID NO: 254579 - protein, 12 aa, Homo sapiens
  CDR3 for alpha chain variable domain of TCR clone 127290 (TRAV12-3, TRAJ40)
CAMSSGTYKYSF

SEQ ID NO: 254580 - protein, 15 aa, Homo sapiens
  CDR3 for beta chain variable domain of TCR clone 127290 (TRBV7-3, TRBJ2-2)
CASSETGQGTGELFF

SEQ ID NO: 254581 - protein, 15 aa, Homo sapiens
  CDR3 for alpha chain variable domain of TCR clone 127291 (TRAV17, TRAJ4)
CATGTWSGGYNKLIF

SEQ ID NO: 254582 - protein, 16 aa, Homo sapiens
  CDR3 for beta chain variable domain of TCR clone 127291 (TRBV20-1, TRBJ1-4)
CSAPGQGLLTNEKLFL

SEQ ID NO: 254583 - protein, 13 aa, Homo sapiens
  CDR3 for alpha chain variable domain of TCR clone 127292 (TRAV14/DV4, TRAJ16)
CAMRKGSGQKLLF

SEQ ID NO: 254584 - protein, 15 aa, Homo sapiens
  CDR3 for beta chain variable domain of TCR clone 127292 (TRBV7-9, TRBJ2-7)
CASSLDLDRGYEQYF

SEQ ID NO: 254585 - protein, 16 aa, Homo sapiens
  CDR3 for alpha chain variable domain of TCR clone 127293 (TRAV30, TRAJ44)
CGTEDERTGTASKLTF

SEQ ID NO: 254586 - protein, 16 aa, Homo sapiens
  CDR3 for beta chain variable domain of TCR clone 127293 (TRBV10-2, TRBJ2-7)
CASSESPGSSGFEQYF

SEQ ID NO: 254587 - protein, 15 aa, Homo sapiens
  CDR3 for alpha chain variable domain of TCR clone 127294 (TRAV3, TRAJ30)
CAVRDEYGRDDKSIF

SEQ ID NO: 254588 - protein, 16 aa, Homo sapiens
  CDR3 for beta chain variable domain of TCR clone 127294 (TRBV5-1, TRBJ2-5)
CASSLANHRGRETQYF

SEQ ID NO: 254589 - protein, 14 aa, Homo sapiens
  CDR3 for alpha chain variable domain of TCR clone 127295 (TRAV38-2/DV8, TRAJ30)
CAYRTLNRDDKIIF

SEQ ID NO: 254590 - protein, 12 aa, Homo sapiens
  CDR3 for beta chain variable domain of TCR clone 127295 (TRBV7-9, TRBJ1-2)
CASSLGHYGYTF

SEQ ID NO: 254591 - protein, 13 aa, Homo sapiens
  CDR3 for alpha chain variable domain of TCR clone 127296 (TRAV1-2, TRAJ9)
CAALNTGGFKTIF

SEQ ID NO: 254592 - protein, 14 aa, Homo sapiens
  CDR3 for beta chain variable domain of TCR clone 127296 (TRBV4-2, TRBJ2-3)
CASSQERGTDTQYF

SEQ ID NO: 254593 - protein, 16 aa, Homo sapiens
  CDR3 for alpha chain variable domain of TCR clone 127297 (TRAV3, TRAJ37)
CAVRPHGSGNTGKLIF

SEQ ID NO: 254594 - protein, 15 aa, Homo sapiens
  CDR3 for beta chain variable domain of TCR clone 127297 (TRBV20-1, TRBJ2-7)
CSARDRVAGMDEQYF

SEQ ID NO: 254595 - protein, 12 aa, Homo sapiens
  CDR3 for alpha chain variable domain of TCR clone 127298 (TRAV13-1, TRAJ21)
CAAKEGFNKFYF

SEQ ID NO: 254596 - protein, 13 aa, Homo sapiens
  CDR3 for beta chain variable domain of TCR clone 127298 (TRBV7-9, TRBJ2-1)
CASSVGTVNEQFF

SEQ ID NO: 254597 - protein, 12 aa, Homo sapiens
  CDR3 for alpha chain variable domain of TCR clone 127299 (TRAV2, TRAJ31)
CAVEDNNARLMF

SEQ ID NO: 254598 - protein, 15 aa, Homo sapiens
  CDR3 for beta chain variable domain of TCR clone 127299 (TRBV10-3, TRBJ2-1)
CAISGVGDGGGEQFF

SEQ ID NO: 254599 - protein, 16 aa, Homo sapiens
  CDR3 for alpha chain variable domain of TCR clone 127300 (TRAV30, TRAJ24)
CGTGIVDADSWGKFQF

SEQ ID NO: 254600 - protein, 14 aa, Homo sapiens
  CDR3 for beta chain variable domain of TCR clone 127300 (TRBV12-5, TRBJ2-5)
RASGSRTHQETQYF

SEQ ID NO: 254601 - protein, 14 aa, Homo sapiens
  CDR3 for alpha chain variable domain of TCR clone 127301 (TRAV12-2, TRAJ44)
CAVNPAGTASKLTF

SEQ ID NO: 254602 - protein, 16 aa, Homo sapiens
  CDR3 for beta chain variable domain of TCR clone 127301 (TRBV5-1, TRBJ1-1)
CASSSGGNSLNTEAFF

SEQ ID NO: 254603 - protein, 13 aa, Homo sapiens
  CDR3 for alpha chain variable domain of TCR clone 127302 (TRAV29/DV5, TRAJ44)
CAASTGTASKLTF

SEQ ID NO: 254604 - protein, 13 aa, Homo sapiens
  CDR3 for beta chain variable domain of TCR clone 127302 (TRBV19, TRBJ1-2)
CASSVPGQDGYTF

SEQ ID NO: 254605 - protein, 16 aa, Homo sapiens
  CDR3 for alpha chain variable domain of TCR clone 127303 (TRAV3, TRAJ18)
CAVRDGRGSTLGRLYF

SEQ ID NO: 254606 - protein, 15 aa, Homo sapiens
  CDR3 for beta chain variable domain of TCR clone 127303 (TRBV7-9, TRBJ1-6)
CASSSQGRGNSPLHF

SEQ ID NO: 254607 - protein, 16 aa, Homo sapiens
  CDR3 for alpha chain variable domain of TCR clone 127304 (TRAV36/DV7, TRAJ30)
CAVETYGLDRDDKIIF

SEQ ID NO: 254608 - protein, 14 aa, Homo sapiens
  CDR3 for beta chain variable domain of TCR clone 127304 (TRBV6-1, TRBJ1-3)
CASVQGGGGNTIYF

SEQ ID NO: 254609 - protein, 14 aa, Homo sapiens
  CDR3 for alpha chain variable domain of TCR clone 127305 (TRAV26-1, TRAJ39)
CIVRGSWAGNMLTF

SEQ ID NO: 254610 - protein, 15 aa, Homo sapiens
  CDR3 for beta chain variable domain of TCR clone 127305 (TRBV7-9, TRBJ1-5)
CASSQGHQPNQPQHF

SEQ ID NO: 254611 - protein, 12 aa, Homo sapiens
  CDR3 for alpha chain variable domain of TCR clone 127306 (TRAV2, TRAJ33)
CAFMDSNYQLIW

SEQ ID NO: 254612 - protein, 16 aa, Homo sapiens
  CDR3 for beta chain variable domain of TCR clone 127306 (TRBV2, TRBJ2-7)
CASSEPWTGPSYEQYS

SEQ ID NO: 254613 - protein, 16 aa, Homo sapiens
  CDR3 for alpha chain variable domain of TCR clone 127307 (TRAV3, TRAJ37)
CAVRPHGSGNTGKLIF

SEQ ID NO: 254614 - protein, 13 aa, Homo sapiens
  CDR3 for beta chain variable domain of TCR clone 127307 (TRBV7-2, TRBJ2-2)
FASSLAVTGELFF

SEQ ID NO: 254615 - protein, 13 aa, Homo sapiens
  CDR3 for alpha chain variable domain of TCR clone 127308 (TRAV12-1, TRAJ39)
CVGNYNAGNMLTF

SEQ ID NO: 254616 - protein, 14 aa, Homo sapiens
  CDR3 for beta chain variable domain of TCR clone 127308 (TRBV27, TRBJ2-3)
CASSPLGTTDTQYF

SEQ ID NO: 254617 - protein, 14 aa, Homo sapiens
  CDR3 for alpha chain variable domain of TCR clone 127309 (TRAV17, TRAJ31)
CATVPLSGNAILMF

SEQ ID NO: 254618 - protein, 15 aa, Homo sapiens
  CDR3 for beta chain variable domain of TCR clone 127309 (TRBV15, TRBJ2-2)
CATSGTGGRVGELFF

SEQ ID NO: 254619 - protein, 14 aa, Homo sapiens
  CDR3 for alpha chain variable domain of TCR clone 127310 (TRAV8-3, TRAJ4)
CAVGAAGGYNKLIF

SEQ ID NO: 254620 - protein, 14 aa, Homo sapiens
  CDR3 for beta chain variable domain of TCR clone 127310 (TRBV7-3, TRBJ1-1)
CASSLGTGYTEAFF

SEQ ID NO: 254621 - protein, 14 aa, Homo sapiens
  CDR3 for alpha chain variable domain of TCR clone 127311 (TRAV30, TRAJ26)
CGTEIVSYGQNFVF

SEQ ID NO: 254622 - protein, 13 aa, Homo sapiens
  CDR3 for beta chain variable domain of TCR clone 127311 (TRBV7-3, TRBJ1-1)
YASSQDWGAEAFF

SEQ ID NO: 254623 - protein, 15 aa, Homo sapiens
  CDR3 for alpha chain variable domain of TCR clone 127312 (TRAV27, TRAJ38)
CAARRNAGNNRKLIW

SEQ ID NO: 254624 - protein, 15 aa, Homo sapiens
  CDR3 for beta chain variable domain of TCR clone 127312 (TRBV4-1, TRBJ2-5)
CASSQVLAGQETQYF

SEQ ID NO: 254625 - protein, 15 aa, Homo sapiens
  CDR3 for alpha chain variable domain of TCR clone 127313 (TRAV8-6, TRAJ38)
CAVSSNAGNNRKLIW

SEQ ID NO: 254626 - protein, 14 aa, Homo sapiens
  CDR3 for beta chain variable domain of TCR clone 127313 (TRBV6-1, TRBJ1-3)
CASVQGGGGNTIYF

SEQ ID NO: 254627 - protein, 10 aa, Homo sapiens
  CDR3 for alpha chain variable domain of TCR clone 127314 (TRAV12-2, TRAJ52)
RSTSYGKLTF

SEQ ID NO: 254628 - protein, 14 aa, Homo sapiens
  CDR3 for beta chain variable domain of TCR clone 127314 (TRBV4-2, TRBJ2-1)
CASGLDRAYNEQFF

SEQ ID NO: 254629 - protein, 13 aa, Homo sapiens
  CDR3 for alpha chain variable domain of TCR clone 127315 (TRAV17, TRAJ7)
CATDNYGNNRLAF

SEQ ID NO: 254630 - protein, 16 aa, Homo sapiens
  CDR3 for beta chain variable domain of TCR clone 127315 (TRBV4-1, TRBJ2-5)
CASSQAIAASSATQYC

SEQ ID NO: 254631 - protein, 16 aa, Homo sapiens
  CDR3 for alpha chain variable domain of TCR clone 127316 (TRAV13-2, TRAJ16)
CAENRTQMARSCSLQG

SEQ ID NO: 254632 - protein, 13 aa, Homo sapiens
  CDR3 for beta chain variable domain of TCR clone 127316 (TRBV11-2, TRBJ2-5)
CASSSTGEEAQYF

SEQ ID NO: 254633 - protein, 14 aa, Homo sapiens
  CDR3 for alpha chain variable domain of TCR clone 127317 (TRAV3, TRAJ9)
CAVRLNTGGFKTIF

SEQ ID NO: 254634 - protein, 15 aa, Homo sapiens
  CDR3 for beta chain variable domain of TCR clone 127317 (TRBV7-2, TRBJ2-1)
CASSLASGRVNVQFF

SEQ ID NO: 254635 - protein, 21 aa, Homo sapiens
  CDR3 for alpha chain variable domain of TCR clone 127318 (TRAV30, TRAJ43)
GLPAQLLRNLLPIIELNDLRF

SEQ ID NO: 254636 - protein, 14 aa, Homo sapiens
  CDR3 for beta chain variable domain of TCR clone 127318 (TRBV27, TRBJ2-1)
CASRHLGGGKEQFF

SEQ ID NO: 254637 - protein, 11 aa, Homo sapiens
  CDR3 for alpha chain variable domain of TCR clone 127319 (TRAV12-3, TRAJ43)
CAMSVSNDMRF

SEQ ID NO: 254638 - protein, 13 aa, Homo sapiens
  CDR3 for beta chain variable domain of TCR clone 127319 (TRBV20-1, TRBJ1-1)
CSARLGGGTEAFF

SEQ ID NO: 254639 - protein, 15 aa, Homo sapiens
  CDR3 for alpha chain variable domain of TCR clone 127320 (TRAV20, TRAJ53)
CAVQASGGRNYKLTF

SEQ ID NO: 254640 - protein, 12 aa, Homo sapiens
  CDR3 for beta chain variable domain of TCR clone 127320 (TRBV7-8, TRBJ2-7)
CASSLGDREQYF

SEQ ID NO: 254641 - protein, 14 aa, Homo sapiens
  CDR3 for alpha chain variable domain of TCR clone 127321 (TRAV1-2, TRAJ16)
CAVNRFSAGQKLLF

SEQ ID NO: 254642 - protein, 16 aa, Homo sapiens
  CDR3 for beta chain variable domain of TCR clone 127321 (TRBV12-5, TRBJ2-5)
CASGPRTSGNQETQYF

SEQ ID NO: 254643 - protein, 14 aa, Homo sapiens
  CDR3 for alpha chain variable domain of TCR clone 127322 (TRAV8-3, TRAJ6)
SAVGASGGSYIPTF

SEQ ID NO: 254644 - protein, 17 aa, Homo sapiens
  CDR3 for beta chain variable domain of TCR clone 127322 (TRBV18, TRBJ2-2)
CASSPSDPWQNTGELFF

SEQ ID NO: 254645 - protein, 13 aa, Homo sapiens
  CDR3 for alpha chain variable domain of TCR clone 127323 (TRAV13-1, TRAJ6)
CAARRGGSYIPTF

SEQ ID NO: 254646 - protein, 13 aa, Homo sapiens
  CDR3 for beta chain variable domain of TCR clone 127323 (TRBV10-3, TRBJ2-7)
CASKLAVNYEQYF

SEQ ID NO: 254647 - protein, 14 aa, Homo sapiens
  CDR3 for alpha chain variable domain of TCR clone 127324 (TRAV38-1, TRAJ45)
CAYYSGGGADGLTF

SEQ ID NO: 254648 - protein, 20 aa, Homo sapiens
  CDR3 for beta chain variable domain of TCR clone 127324 (TRBV28, TRBJ2-1)
CASTPIGRSSGLAGGNEQFF

SEQ ID NO: 254649 - protein, 15 aa, Homo sapiens
  CDR3 for alpha chain variable domain of TCR clone 127325 (TRAV1-2, TRAJ28)
CAVQYSGAGSYQLTF

SEQ ID NO: 254650 - protein, 13 aa, Homo sapiens
  CDR3 for beta chain variable domain of TCR clone 127325 (TRBV4-2, TRBJ1-1)
CASSQAGNSEAFF

SEQ ID NO: 254651 - protein, 11 aa, Homo sapiens
  CDR3 for alpha chain variable domain of TCR clone 127326 (TRAV3, TRAJ21)
CAVGNFNKFYF

SEQ ID NO: 254652 - protein, 16 aa, Homo sapiens
  CDR3 for beta chain variable domain of TCR clone 127326 (TRBV19, TRBJ2-1)
CASSKAGPGAYNEQFF

SEQ ID NO: 254653 - protein, 12 aa, Homo sapiens
  CDR3 for alpha chain variable domain of TCR clone 127327 (TRAV21, TRAJ11)
CAATSGYSTLTF

SEQ ID NO: 254654 - protein, 15 aa, Homo sapiens
  CDR3 for beta chain variable domain of TCR clone 127327 (TRBV7-3, TRBJ2-2)
CASSETGQGTGELFF

SEQ ID NO: 254655 - protein, 16 aa, Homo sapiens
  CDR3 for alpha chain variable domain of TCR clone 127328 (TRAV17, TRAJ35)
CATADGGIGFGNVLHC

SEQ ID NO: 254656 - protein, 16 aa, Homo sapiens
  CDR3 for beta chain variable domain of TCR clone 127328 (TRBV6-5, TRBJ2-7)
CASSSDPTSGFYEQYF

SEQ ID NO: 254657 - protein, 14 aa, Homo sapiens
  CDR3 for alpha chain variable domain of TCR clone 127329 (TRAV1-2, TRAJ16)
CAVNRFSDGQKLLF

SEQ ID NO: 254658 - protein, 15 aa, Homo sapiens
  CDR3 for beta chain variable domain of TCR clone 127329 (TRBV24-1, TRBJ2-1)
CATSEPGQGYNEQFF

SEQ ID NO: 254659 - protein, 16 aa, Homo sapiens
  CDR3 for alpha chain variable domain of TCR clone 127330 (TRAV13-2, TRAJ52)
CRESPTGGTSYGKLTF

SEQ ID NO: 254660 - protein, 15 aa, Homo sapiens
  CDR3 for beta chain variable domain of TCR clone 127330 (TRBV28, TRBJ2-7)
CASSQLGAGGHEQYF

SEQ ID NO: 254661 - protein, 11 aa, Homo sapiens
  CDR3 for alpha chain variable domain of TCR clone 127331 (TRAV12-3, TRAJ43)
CAMSVSNDMRF

SEQ ID NO: 254662 - protein, 16 aa, Homo sapiens
  CDR3 for beta chain variable domain of TCR clone 127331 (TRBV11-2, TRBJ1-2)
CASSLDTGGADYGYTF

SEQ ID NO: 254663 - protein, 11 aa, Homo sapiens
  CDR3 for alpha chain variable domain of TCR clone 127332 (TRAV1-1, TRAJ23)
CAVRQGGKLIF

SEQ ID NO: 254664 - protein, 20 aa, Homo sapiens
  CDR3 for beta chain variable domain of TCR clone 127332 (TRBV7-8, TRBJ2-2)
CASSHLLPGPTVHITGELFF

SEQ ID NO: 254665 - protein, 13 aa, Homo sapiens
  CDR3 for alpha chain variable domain of TCR clone 127333 (TRAV17, TRAJ7)
CATDNYGNNRLAF

SEQ ID NO: 254666 - protein, 16 aa, Homo sapiens
  CDR3 for beta chain variable domain of TCR clone 127333 (TRBV4-1, TRBJ2-5)
CASSQAIAAASATQYF

SEQ ID NO: 254667 - protein, 14 aa, Homo sapiens
  CDR3 for alpha chain variable domain of TCR clone 127334 (TRAV1-2, TRAJ8)
CAVRGDTGFQKLVF

SEQ ID NO: 254668 - protein, 14 aa, Homo sapiens
  CDR3 for beta chain variable domain of TCR clone 127334 (TRBV20-1, TRBJ1-1)
CSAQTRIGGTEAFF

SEQ ID NO: 254669 - protein, 18 aa, Homo sapiens
  CDR3 for alpha chain variable domain of TCR clone 127335 (TRAV21, TRAJ52)
CAVRPSPAGGTSYAKLTF

SEQ ID NO: 254670 - protein, 15 aa, Homo sapiens
  CDR3 for beta chain variable domain of TCR clone 127335 (TRBV7-9, TRBJ2-7)
CASSSSGLAVYEQYF

SEQ ID NO: 254671 - protein, 17 aa, Homo sapiens
  CDR3 for alpha chain variable domain of TCR clone 127336 (TRAV26-2, TRAJ42)
CILRDVGYGGIQGNLIF

SEQ ID NO: 254672 - protein, 16 aa, Homo sapiens
  CDR3 for beta chain variable domain of TCR clone 127336 (TRBV12-4, TRBJ2-7)
CASSLIGGTGTYEQYF

SEQ ID NO: 254673 - protein, 11 aa, Homo sapiens
  CDR3 for alpha chain variable domain of TCR clone 127337 (TRAV13-1, TRAJ43)
CAAHNNNDMRL

SEQ ID NO: 254674 - protein, 15 aa, Homo sapiens
  CDR3 for beta chain variable domain of TCR clone 127337 (TRBV6-1, TRBJ2-2)
CASSRLRGDTGELFF

SEQ ID NO: 254675 - protein, 15 aa, Homo sapiens
  CDR3 for alpha chain variable domain of TCR clone 127338 (TRAV26-1, TRAJ29)
CIVRVEGSGNTPLVF

SEQ ID NO: 254676 - protein, 16 aa, Homo sapiens
  CDR3 for beta chain variable domain of TCR clone 127338 (TRBV19, TRBJ1-1)
CASSPTRFWPGTEAFF

SEQ ID NO: 254677 - protein, 14 aa, Homo sapiens
  CDR3 for alpha chain variable domain of TCR clone 127339 (TRAV1-2, TRAJ16)
CAVNRFSDGQKLLF

SEQ ID NO: 254678 - protein, 17 aa, Homo sapiens
  CDR3 for beta chain variable domain of TCR clone 127339 (TRBV18, TRBJ2-2)
CASSQRSSGQGPGELFF

SEQ ID NO: 254679 - protein, 16 aa, Homo sapiens
  CDR3 for alpha chain variable domain of TCR clone 127340 (TRAV8-3, TRAJ44)
CAVGTLMTGTASKLIF

SEQ ID NO: 254680 - protein, 15 aa, Homo sapiens
  CDR3 for beta chain variable domain of TCR clone 127340 (TRBV10-2, TRBJ2-6)
CASSEQGTGANVLTF

SEQ ID NO: 254681 - protein, 13 aa, Homo sapiens
  CDR3 for alpha chain variable domain of TCR clone 127341 (TRAV17, TRAJ5)
CAPMDTGRRALTF

SEQ ID NO: 254682 - protein, 15 aa, Homo sapiens
  CDR3 for beta chain variable domain of TCR clone 127341 (TRBV6-4, TRBJ2-2)
CASSPGGGWTGELFF

SEQ ID NO: 254683 - protein, 14 aa, Homo sapiens
  CDR3 for alpha chain variable domain of TCR clone 127342 (TRAV8-3, TRAJ45)
CALNSGGGADGLTF

SEQ ID NO: 254684 - protein, 13 aa, Homo sapiens
  CDR3 for beta chain variable domain of TCR clone 127342 (TRBV7-9, TRBJ1-2)
CASSLKQNYGYTF

SEQ ID NO: 254685 - protein, 12 aa, Homo sapiens
  CDR3 for alpha chain variable domain of TCR clone 127343 (TRAV21, TRAJ33)
CAKMDSNYQLIW

SEQ ID NO: 254686 - protein, 14 aa, Homo sapiens
  CDR3 for beta chain variable domain of TCR clone 127343 (TRBV2, TRBJ2-7)
CASSLTSGRYEQYF

SEQ ID NO: 254687 - protein, 12 aa, Homo sapiens
  CDR3 for alpha chain variable domain of TCR clone 127344 (TRAV12-3, TRAJ17)
CAMTLTGNKLTL

SEQ ID NO: 254688 - protein, 13 aa, Homo sapiens
  CDR3 for beta chain variable domain of TCR clone 127344 (TRBV10-3, TRBJ2-7)
CASKLAVNYEQYF

SEQ ID NO: 254689 - protein, 11 aa, Homo sapiens
  CDR3 for alpha chain variable domain of TCR clone 127345 (TRAV12-1, TRAJ30)
CVVNGQDKIIF

SEQ ID NO: 254690 - protein, 13 aa, Homo sapiens
  CDR3 for beta chain variable domain of TCR clone 127345 (TRBV7-8, TRBJ2-7)
RRVRLTEMGEQYF

SEQ ID NO: 254691 - protein, 14 aa, Homo sapiens
  CDR3 for alpha chain variable domain of TCR clone 127346 (TRAV12-3, TRAJ18)
CNERRGSTLGRLCF

SEQ ID NO: 254692 - protein, 13 aa, Homo sapiens
  CDR3 for beta chain variable domain of TCR clone 127346 (TRBV15, TRBJ1-6)
CATSGGLNSPLHF

SEQ ID NO: 254693 - protein, 16 aa, Homo sapiens
  CDR3 for alpha chain variable domain of TCR clone 127347 (TRAV8-3, TRAJ13)
CAVGAYPSGGYQKVTF

SEQ ID NO: 254694 - protein, 15 aa, Homo sapiens
  CDR3 for beta chain variable domain of TCR clone 127347 (TRBV19, TRBJ1-5)
CAISIVWADNQPQHF

SEQ ID NO: 254695 - protein, 12 aa, Homo sapiens
  CDR3 for alpha chain variable domain of TCR clone 127348 (TRAV8-3, TRAJ41)
CAVGALGYALNL

SEQ ID NO: 254696 - protein, 16 aa, Homo sapiens
  CDR3 for beta chain variable domain of TCR clone 127348 (TRBV7-6, TRBJ2-3)
CASSDSRGEGTDTQYF

SEQ ID NO: 254697 - protein, 13 aa, Homo sapiens
  CDR3 for alpha chain variable domain of TCR clone 127349 (TRAV17, TRAJ5)
CAPMDTGRRALTF

SEQ ID NO: 254698 - protein, 12 aa, Homo sapiens
  CDR3 for beta chain variable domain of TCR clone 127349 (TRBV19, TRBJ1-4)
CASKDWPGGLFF

SEQ ID NO: 254699 - protein, 13 aa, Homo sapiens
  CDR3 for alpha chain variable domain of TCR clone 127350 (TRAV38-1, TRAJ42)
CARWGGSQGNLIF

SEQ ID NO: 254700 - protein, 17 aa, Homo sapiens
  CDR3 for beta chain variable domain of TCR clone 127350 (TRBV20-1, TRBJ2-1)
CSARDPLAGVWNNEQFF

SEQ ID NO: 254701 - protein, 15 aa, Homo sapiens
  CDR3 for alpha chain variable domain of TCR clone 127351 (TRAV12-2, TRAJ13)
CRESLGPGGYQKVTF

SEQ ID NO: 254702 - protein, 15 aa, Homo sapiens
  CDR3 for beta chain variable domain of TCR clone 127351 (TRBV6-5, TRBJ2-1)
CASRRAQLSYNEQFF

SEQ ID NO: 254703 - protein, 15 aa, Homo sapiens
  CDR3 for alpha chain variable domain of TCR clone 127352 (TRAV26-1, TRAJ22)
CIVRVSFWFCKATDL

SEQ ID NO: 254704 - protein, 12 aa, Homo sapiens
  CDR3 for beta chain variable domain of TCR clone 127352 (TRBV19, TRBJ1-1)
CASSTTGIEAFF

SEQ ID NO: 254705 - protein, 12 aa, Homo sapiens
  CDR3 for alpha chain variable domain of TCR clone 127353 (TRAV1-1, TRAJ9)
CAVDTGGFKTIF

SEQ ID NO: 254706 - protein, 15 aa, Homo sapiens
  CDR3 for beta chain variable domain of TCR clone 127353 (TRBV10-3, TRBJ2-5)
CAISEFGRGQETQYF

SEQ ID NO: 254707 - protein, 12 aa, Homo sapiens
  CDR3 for alpha chain variable domain of TCR clone 127354 (TRAV8-3, TRAJ26)
CAGDNYGQNFVF

SEQ ID NO: 254708 - protein, 16 aa, Homo sapiens
  CDR3 for beta chain variable domain of TCR clone 127354 (TRBV7-9, TRBJ2-5)
CASSPSGQGVKGTQYF

SEQ ID NO: 254709 - protein, 12 aa, Homo sapiens
  CDR3 for alpha chain variable domain of TCR clone 127355 (TRAV3, TRAJ13)
CAVSGGYQKVTF

SEQ ID NO: 254710 - protein, 14 aa, Homo sapiens
  CDR3 for beta chain variable domain of TCR clone 127355 (TRBV15, TRBJ2-1)
CATSRDLFKNEQFF

SEQ ID NO: 254711 - protein, 12 aa, Homo sapiens
  CDR3 for alpha chain variable domain of TCR clone 127356 (TRAV29/DV5, TRAJ41)
CAAISSGYALNF

SEQ ID NO: 254712 - protein, 17 aa, Homo sapiens
  CDR3 for beta chain variable domain of TCR clone 127356 (TRBV18, TRBJ2-1)
CASSKGLSGGADSEQFF

SEQ ID NO: 254713 - protein, 14 aa, Homo sapiens
  CDR3 for alpha chain variable domain of TCR clone 127357 (TRAV38-1, TRAJ40)
CALRPTSGTYKYIF

SEQ ID NO: 254714 - protein, 13 aa, Homo sapiens
  CDR3 for beta chain variable domain of TCR clone 127357 (TRBV7-8, TRBJ2-7)
CASSLTGGREQYF

SEQ ID NO: 254715 - protein, 16 aa, Homo sapiens
  CDR3 for alpha chain variable domain of TCR clone 127358 (TRAV30, TRAJ24)
CGTEIVDADSWGKFQF

SEQ ID NO: 254716 - protein, 19 aa, Homo sapiens
  CDR3 for beta chain variable domain of TCR clone 127358 (TRBV3-1, TRBJ2-2)
CASSQGGIFRTGYTGDLFF

SEQ ID NO: 254717 - protein, 10 aa, Homo sapiens
  CDR3 for alpha chain variable domain of TCR clone 127359 (TRAV26-1, TRAJ22)
RSGPARQLTF

SEQ ID NO: 254718 - protein, 13 aa, Homo sapiens
  CDR3 for beta chain variable domain of TCR clone 127359 (TRBV7-9, TRBJ1-2)
CASSLKQNYGYTF

SEQ ID NO: 254719 - protein, 14 aa, Homo sapiens
  CDR3 for alpha chain variable domain of TCR clone 127360 (TRAV12-3, TRAJ10)
SHLPLTGGGNKLTF

SEQ ID NO: 254720 - protein, 12 aa, Homo sapiens
  CDR3 for beta chain variable domain of TCR clone 127360 (TRBV7-9, TRBJ2-7)
CASSIKREEQYV

SEQ ID NO: 254721 - protein, 17 aa, Homo sapiens
  CDR3 for alpha chain variable domain of TCR clone 127361 (TRAV26-1, TRAJ46)
IASSESEKKSSGDKLTF

SEQ ID NO: 254722 - protein, 16 aa, Homo sapiens
  CDR3 for beta chain variable domain of TCR clone 127361 (TRBV27, TRBJ2-2)
CASSFRGLVRTWELFF

SEQ ID NO: 254723 - protein, 13 aa, Homo sapiens
  CDR3 for alpha chain variable domain of TCR clone 127362 (TRAV2, TRAJ12)
CAVGADSSYKLIF

SEQ ID NO: 254724 - protein, 13 aa, Homo sapiens
  CDR3 for beta chain variable domain of TCR clone 127362 (TRBV20-1, TRBJ2-1)
CSARSSPREEQFF

SEQ ID NO: 254725 - protein, 16 aa, Homo sapiens
  CDR3 for alpha chain variable domain of TCR clone 127363 (TRAV8-3, TRAJ13)
CAVGAYPSGGYEKVTF

SEQ ID NO: 254726 - protein, 15 aa, Homo sapiens
  CDR3 for beta chain variable domain of TCR clone 127363 (TRBV19, TRBJ1-5)
CASSIVWADNQPQHF

SEQ ID NO: 254727 - protein, 16 aa, Homo sapiens
  CDR3 for alpha chain variable domain of TCR clone 127364 (TRAV21, TRAJ37)
CTVRPRGSSNTGKLIF

SEQ ID NO: 254728 - protein, 13 aa, Homo sapiens
  CDR3 for beta chain variable domain of TCR clone 127364 (TRBV20-1, TRBJ2-2)
CSALSGGAGELFF

SEQ ID NO: 254729 - protein, 12 aa, Homo sapiens
  CDR3 for alpha chain variable domain of TCR clone 127365 (TRAV13-2, TRAJ39)
CAENNAGNMLTF

SEQ ID NO: 254730 - protein, 12 aa, Homo sapiens
  CDR3 for beta chain variable domain of TCR clone 127365 (TRBV11-2, TRBJ2-2)
CASSLGGGELLF

SEQ ID NO: 254731 - protein, 15 aa, Homo sapiens
  CDR3 for alpha chain variable domain of TCR clone 127366 (TRAV21, TRAJ32)
CAAAPYGGATNKLIF

SEQ ID NO: 254732 - protein, 12 aa, Homo sapiens
  CDR3 for beta chain variable domain of TCR clone 127366 (TRBV11-2, TRBJ2-2)
CASSLGGGELFF

SEQ ID NO: 254733 - protein, 20 aa, Homo sapiens
  CDR3 for alpha chain variable domain of TCR clone 127367 (TRAV13-1, )
CAASPMDIQNPDPAVYQLRD

SEQ ID NO: 254734 - protein, 15 aa, Homo sapiens
  CDR3 for beta chain variable domain of TCR clone 127367 (TRBV11-3, TRBJ2-7)
CASSPGPASSYEQYF

SEQ ID NO: 254735 - protein, 16 aa, Homo sapiens
  CDR3 for alpha chain variable domain of TCR clone 127368 (TRAV3, TRAJ37)
CAVRVRGSGNTGKLIF

SEQ ID NO: 254736 - protein, 11 aa, Homo sapiens
  CDR3 for beta chain variable domain of TCR clone 127368 (TRBV11-2, TRBJ2-2)
CASSLPGELFF

SEQ ID NO: 254737 - protein, 12 aa, Homo sapiens
  CDR3 for alpha chain variable domain of TCR clone 127369 (TRAV8-3, TRAJ22)
FGGQSSARQLTF

SEQ ID NO: 254738 - protein, 16 aa, Homo sapiens
  CDR3 for beta chain variable domain of TCR clone 127369 (TRBV29-1, TRBJ2-7)
CSVEDAEDGTAYEQYF

SEQ ID NO: 254739 - protein, 13 aa, Homo sapiens
  CDR3 for alpha chain variable domain of TCR clone 127370 (TRAV8-3, TRAJ28)
CAVGAVGSYQLTF

SEQ ID NO: 254740 - protein, 11 aa, Homo sapiens
  CDR3 for beta chain variable domain of TCR clone 127370 (TRBV19, TRBJ1-1)
CASSIGSEAFF

SEQ ID NO: 254741 - protein, 11 aa, Homo sapiens
  CDR3 for alpha chain variable domain of TCR clone 127371 (TRAV2, TRAJ33)
CAVESNYQLIW

SEQ ID NO: 254742 - protein, 15 aa, Homo sapiens
  CDR3 for beta chain variable domain of TCR clone 127371 (TRBV7-9, TRBJ1-6)
CASSSPGRGNSPLHF

SEQ ID NO: 254743 - protein, 18 aa, Homo sapiens
  CDR3 for alpha chain variable domain of TCR clone 127372 (TRAV26-2, TRAJ54)
CILRDVEVGIQGAQKLVF

SEQ ID NO: 254744 - protein, 14 aa, Homo sapiens
  CDR3 for beta chain variable domain of TCR clone 127372 (TRBV7-6, TRBJ2-3)
CASSLGTVTDTQYF

SEQ ID NO: 254745 - protein, 14 aa, Homo sapiens
  CDR3 for alpha chain variable domain of TCR clone 127373 (TRAV8-1, TRAJ15)
CAVNGQQAGTALIF

SEQ ID NO: 254746 - protein, 16 aa, Homo sapiens
  CDR3 for beta chain variable domain of TCR clone 127373 (TRBV11-3, TRBJ2-5)
CDSSSVVAGSTETQYF

SEQ ID NO: 254747 - protein, 16 aa, Homo sapiens
  CDR3 for alpha chain variable domain of TCR clone 127374 (TRAV1-2, TRAJ10)
CAVRGVLTGGGNKLTF

SEQ ID NO: 254748 - protein, 16 aa, Homo sapiens
  CDR3 for beta chain variable domain of TCR clone 127374 (TRBV12-5, TRBJ2-5)
CASGPRTSGDQETQYF

SEQ ID NO: 254749 - protein, 13 aa, Homo sapiens
  CDR3 for alpha chain variable domain of TCR clone 127375 (TRAV17, TRAJ31)
CATDENNNDRLMF

SEQ ID NO: 254750 - protein, 14 aa, Homo sapiens
  CDR3 for beta chain variable domain of TCR clone 127375 (TRBV11-2, TRBJ2-1)
CASSPSRQGGGQFF

SEQ ID NO: 254751 - protein, 12 aa, Homo sapiens
  CDR3 for alpha chain variable domain of TCR clone 127376 (TRAV3, TRAJ26)
CAVRDYGQNFVF

SEQ ID NO: 254752 - protein, 13 aa, Homo sapiens
  CDR3 for beta chain variable domain of TCR clone 127376 (TRBV24-1, TRBJ2-1)
CATSRGARNEQFF

SEQ ID NO: 254753 - protein, 14 aa, Homo sapiens
  CDR3 for alpha chain variable domain of TCR clone 127377 (TRAV38-1, TRAJ45)
CASHSGGGADGLTF

SEQ ID NO: 254754 - protein, 13 aa, Homo sapiens
  CDR3 for beta chain variable domain of TCR clone 127377 (TRBV10-3, TRBJ1-2)
SAISERDSYGYTF

SEQ ID NO: 254755 - protein, 11 aa, Homo sapiens
  CDR3 for alpha chain variable domain of TCR clone 127378 (TRAV39, TRAJ49)
LAVDISTQFYF

SEQ ID NO: 254756 - protein, 11 aa, Homo sapiens
  CDR3 for beta chain variable domain of TCR clone 127378 (TRBV7-8, TRBJ2-7)
CASSLSLEQYF

SEQ ID NO: 254757 - protein, 16 aa, Homo sapiens
  CDR3 for alpha chain variable domain of TCR clone 127379 (TRAV3, TRAJ37)
CAVRVRGSGNTGKLIF

SEQ ID NO: 254758 - protein, 13 aa, Homo sapiens
  CDR3 for beta chain variable domain of TCR clone 127379 (TRBV7-9, TRBJ1-2)
CASSLKQNYGDTF

SEQ ID NO: 254759 - protein, 13 aa, Homo sapiens
  CDR3 for alpha chain variable domain of TCR clone 127380 (TRAV20, TRAJ40)
CTVPFSGTYKYIF

SEQ ID NO: 254760 - protein, 13 aa, Homo sapiens
  CDR3 for beta chain variable domain of TCR clone 127380 (TRBV15, TRBJ2-5)
CATSQIGEETQYF

SEQ ID NO: 254761 - protein, 13 aa, Homo sapiens
  CDR3 for alpha chain variable domain of TCR clone 127381 (TRAV21, TRAJ27)
CAQWGGNAGRSTF

SEQ ID NO: 254762 - protein, 14 aa, Homo sapiens
  CDR3 for beta chain variable domain of TCR clone 127381 (TRBV2, TRBJ2-3)
CAVGGTISTDTQYF

SEQ ID NO: 254763 - protein, 15 aa, Homo sapiens
  CDR3 for alpha chain variable domain of TCR clone 127382 (TRAV3, TRAJ5)
CAVRDLDTGRRALTF

SEQ ID NO: 254764 - protein, 13 aa, Homo sapiens
  CDR3 for beta chain variable domain of TCR clone 127382 (TRBV12-4, TRBJ2-7)
CATSPTETYEQYF

SEQ ID NO: 254765 - protein, 12 aa, Homo sapiens
  CDR3 for alpha chain variable domain of TCR clone 127383 (TRAV9-2, TRAJ36)
FALKKGANNLFF

SEQ ID NO: 254766 - protein, 13 aa, Homo sapiens
  CDR3 for beta chain variable domain of TCR clone 127383 (TRBV27, TRBJ1-1)
CASSLSIGAEAFF

SEQ ID NO: 254767 - protein, 12 aa, Homo sapiens
  CDR3 for alpha chain variable domain of TCR clone 127384 (TRAV1-2, TRAJ29)
CAVPSGNTPLVF

SEQ ID NO: 254768 - protein, 13 aa, Homo sapiens
  CDR3 for beta chain variable domain of TCR clone 127384 (TRBV7-9, TRBJ1-2)
CASSLKQNYGYTF

SEQ ID NO: 254769 - protein, 15 aa, Homo sapiens
  CDR3 for alpha chain variable domain of TCR clone 127385 (TRAV8-4, TRAJ15)
CAVSDPVQAGTALIF

SEQ ID NO: 254770 - protein, 14 aa, Homo sapiens
  CDR3 for beta chain variable domain of TCR clone 127385 (TRBV7-2, TRBJ1-3)
CAGSLSRSGNTIYF

SEQ ID NO: 254771 - protein, 18 aa, Homo sapiens
  CDR3 for alpha chain variable domain of TCR clone 127386 (TRAV13-1, TRAJ52)
CAASKRSAGGTSYGKLTF

SEQ ID NO: 254772 - protein, 17 aa, Homo sapiens
  CDR3 for beta chain variable domain of TCR clone 127386 (TRBV4-2, TRBJ1-1)
CASTQFGGGSGNTEAFF

SEQ ID NO: 254773 - protein, 14 aa, Homo sapiens
  CDR3 for alpha chain variable domain of TCR clone 127387 (TRAV3, TRAJ9)
CTVRGNTGGFKTIF

SEQ ID NO: 254774 - protein, 14 aa, Homo sapiens
  CDR3 for beta chain variable domain of TCR clone 127387 (TRBV15, TRBJ2-1)
CATSGVEDYNEQFF

SEQ ID NO: 254775 - protein, 13 aa, Homo sapiens
  CDR3 for alpha chain variable domain of TCR clone 127388 (TRAV3, TRAJ41)
CAVSSNSGYALNY

SEQ ID NO: 254776 - protein, 13 aa, Homo sapiens
  CDR3 for beta chain variable domain of TCR clone 127388 (TRBV20-1, TRBJ2-2)
CSALSGGAGELFF

SEQ ID NO: 254777 - protein, 15 aa, Homo sapiens
  CDR3 for alpha chain variable domain of TCR clone 127389 (TRAV17, TRAJ52)
CATEAVGTSYGKLTF

SEQ ID NO: 254778 - protein, 14 aa, Homo sapiens
  CDR3 for beta chain variable domain of TCR clone 127389 (TRBV28, TRBJ1-5)
CASSLGVLVKPQHF

SEQ ID NO: 254779 - protein, 15 aa, Homo sapiens
  CDR3 for alpha chain variable domain of TCR clone 127390 (TRAV20, TRAJ41)
CAVQANSNSGYALNF

SEQ ID NO: 254780 - protein, 18 aa, Homo sapiens
  CDR3 for beta chain variable domain of TCR clone 127390 (TRBV7-9, TRBJ2-7)
RASSLTTSGSRTWYEQYF

SEQ ID NO: 254781 - protein, 22 aa, Homo sapiens
  CDR3 for alpha chain variable domain of TCR clone 127391 (TRAV8-2, TRAJ45)
HLTKPSAHMRDAAEYSADGLTF

SEQ ID NO: 254782 - protein, 13 aa, Homo sapiens
  CDR3 for beta chain variable domain of TCR clone 127391 (TRBV7-3, TRBJ2-1)
CASSPVAYNEQFF

SEQ ID NO: 254783 - protein, 19 aa, Homo sapiens
  CDR3 for alpha chain variable domain of TCR clone 127392 (TRAV26-1, TRAJ52)
CIVRADRNAGGTSYGKLTF

SEQ ID NO: 254784 - protein, 15 aa, Homo sapiens
  CDR3 for beta chain variable domain of TCR clone 127392 (TRBV12-4, TRBJ2-5)
CASSPPTGLQETQYF

SEQ ID NO: 254785 - protein, 14 aa, Homo sapiens
  CDR3 for alpha chain variable domain of TCR clone 127393 (TRAV8-2, TRAJ4)
CVVSPSGGYNKLIF

SEQ ID NO: 254786 - protein, 13 aa, Homo sapiens
  CDR3 for beta chain variable domain of TCR clone 127393 (TRBV7-3, TRBJ2-7)
CASSSGANYEQYF

SEQ ID NO: 254787 - protein, 14 aa, Homo sapiens
  CDR3 for alpha chain variable domain of TCR clone 127394 (TRAV2, TRAJ9)
CAVEDRCGGFKTIF

SEQ ID NO: 254788 - protein, 17 aa, Homo sapiens
  CDR3 for beta chain variable domain of TCR clone 127394 (TRBV20-1, TRBJ2-7)
CSATRAGGVAGVEEQYF

SEQ ID NO: 254789 - protein, 12 aa, Homo sapiens
  CDR3 for alpha chain variable domain of TCR clone 127395 (TRAV2, TRAJ10)
CASTGGGNKLTF

SEQ ID NO: 254790 - protein, 14 aa, Homo sapiens
  CDR3 for beta chain variable domain of TCR clone 127395 (TRBV7-2, TRBJ2-2)
CASRGQGASGELFF

SEQ ID NO: 254791 - protein, 14 aa, Homo sapiens
  CDR3 for alpha chain variable domain of TCR clone 127396 (TRAV12-3, TRAJ10)
SHLPLTGGGNKLTF

SEQ ID NO: 254792 - protein, 14 aa, Homo sapiens
  CDR3 for beta chain variable domain of TCR clone 127396 (TRBV20-1, TRBJ2-5)
CSAQVPGYQETQYF

SEQ ID NO: 254793 - protein, 11 aa, Homo sapiens
  CDR3 for alpha chain variable domain of TCR clone 127397 (TRAV23/DV6, TRAJ58)
CAARLLRGETS

SEQ ID NO: 254794 - protein, 18 aa, Homo sapiens
  CDR3 for beta chain variable domain of TCR clone 127397 (TRBV11-2, TRBJ2-3)
CASSLGGASRGAPNTQYF

SEQ ID NO: 254795 - protein, 13 aa, Homo sapiens
  CDR3 for alpha chain variable domain of TCR clone 127398 (TRAV17, TRAJ21)
CATDGGNFNKFYF

SEQ ID NO: 254796 - protein, 18 aa, Homo sapiens
  CDR3 for beta chain variable domain of TCR clone 127398 (TRBV11-2, TRBJ2-3)
CASSLGGASRGAPNTQYF

SEQ ID NO: 254797 - protein, 13 aa, Homo sapiens
  CDR3 for alpha chain variable domain of TCR clone 127399 (TRAV22, TRAJ29)
CAVGGSGNTPLVF

SEQ ID NO: 254798 - protein, 13 aa, Homo sapiens
  CDR3 for beta chain variable domain of TCR clone 127399 (TRBV7-9, TRBJ1-2)
CASSLKQNYGYTF

SEQ ID NO: 254799 - protein, 14 aa, Homo sapiens
  CDR3 for alpha chain variable domain of TCR clone 127400 (TRAV1-1, TRAJ23)
CAVIIYNQGGKLIF

SEQ ID NO: 254800 - protein, 15 aa, Homo sapiens
  CDR3 for beta chain variable domain of TCR clone 127400 (TRBV5-8, TRBJ2-2)
CASSLDRGATGELFF

SEQ ID NO: 254801 - protein, 11 aa, Homo sapiens
  CDR3 for alpha chain variable domain of TCR clone 127401 (TRAV2, TRAJ13)
CASGGYQKVTF

SEQ ID NO: 254802 - protein, 15 aa, Homo sapiens
  CDR3 for beta chain variable domain of TCR clone 127401 (TRBV12-4, TRBJ2-7)
CASSQTGAISYEQYF

SEQ ID NO: 254803 - protein, 13 aa, Homo sapiens
  CDR3 for alpha chain variable domain of TCR clone 127402 (TRAV12-2, TRAJ6)
CAVNVSRKLHTYI

SEQ ID NO: 254804 - protein, 12 aa, Homo sapiens
  CDR3 for beta chain variable domain of TCR clone 127402 (TRBV29-1, TRBJ2-3)
CSVTGRADTQYF

SEQ ID NO: 254805 - protein, 12 aa, Homo sapiens
  CDR3 for alpha chain variable domain of TCR clone 127403 (TRAV12-3, TRAJ17)
CAMTLTGNKLTF

SEQ ID NO: 254806 - protein, 15 aa, Homo sapiens
  CDR3 for beta chain variable domain of TCR clone 127403 (TRBV28, TRBJ1-5)
CASSLSGYSNQPQHF

SEQ ID NO: 254807 - protein, 14 aa, Homo sapiens
  CDR3 for alpha chain variable domain of TCR clone 127404 (TRAV35, TRAJ50)
CAGHRKTSYDKVIS

SEQ ID NO: 254808 - protein, 15 aa, Homo sapiens
  CDR3 for beta chain variable domain of TCR clone 127404 (TRBV6-3, TRBJ2-7)
CASSSPGTVFYEQYF

SEQ ID NO: 254809 - protein, 12 aa, Homo sapiens
  CDR3 for alpha chain variable domain of TCR clone 127405 (TRAV13-1, TRAJ53)
FAAGGSNYKLTF

SEQ ID NO: 254810 - protein, 11 aa, Homo sapiens
  CDR3 for beta chain variable domain of TCR clone 127405 (TRBV2, TRBJ1-1)
CASREGTEAFF

SEQ ID NO: 254811 - protein, 14 aa, Homo sapiens
  CDR3 for alpha chain variable domain of TCR clone 127406 (TRAV12-1, TRAJ30)
CVVNIGGRDDKIIF

SEQ ID NO: 254812 - protein, 14 aa, Homo sapiens
  CDR3 for beta chain variable domain of TCR clone 127406 (TRBV19, TRBJ1-2)
CASSVLGYNYGYTF

SEQ ID NO: 254813 - protein, 14 aa, Homo sapiens
  CDR3 for alpha chain variable domain of TCR clone 127407 (TRAV13-1, TRAJ40)
CAASMTSGTYKYIF

SEQ ID NO: 254814 - protein, 15 aa, Homo sapiens
  CDR3 for beta chain variable domain of TCR clone 127407 (TRBV7-3, TRBJ2-1)
YASSPTGGGEVEQFF

SEQ ID NO: 254815 - protein, 21 aa, Homo sapiens
  CDR3 for alpha chain variable domain of TCR clone 127408 (TRAV20, TRAJ9)
CAVPDTGGFKTILEQEQDYLL

SEQ ID NO: 254816 - protein, 15 aa, Homo sapiens
  CDR3 for beta chain variable domain of TCR clone 127408 (TRBV27, TRBJ2-7)
CASSKAGRGGYEQYF

SEQ ID NO: 254817 - protein, 16 aa, Homo sapiens
  CDR3 for alpha chain variable domain of TCR clone 127409 (TRAV4, TRAJ9)
CLVGDPNRPGGFKTIF

SEQ ID NO: 254818 - protein, 16 aa, Homo sapiens
  CDR3 for beta chain variable domain of TCR clone 127409 (TRBV28, TRBJ1-4)
CASSPPCRGRSEKLFF

SEQ ID NO: 254819 - protein, 13 aa, Homo sapiens
  CDR3 for alpha chain variable domain of TCR clone 127410 (TRAV13-1, TRAJ43)
CAASKNNNNDMRF

SEQ ID NO: 254820 - protein, 15 aa, Homo sapiens
  CDR3 for beta chain variable domain of TCR clone 127410 (TRBV7-6, TRBJ2-1)
RASSSLAGEGNEQFF

SEQ ID NO: 254821 - protein, 13 aa, Homo sapiens
  CDR3 for alpha chain variable domain of TCR clone 127411 (TRAV13-1, TRAJ5)
CAARVAGRRALTF

SEQ ID NO: 254822 - protein, 15 aa, Homo sapiens
  CDR3 for beta chain variable domain of TCR clone 127411 (TRBV7-9, TRBJ2-7)
CASSPGGGLTYEQYF

SEQ ID NO: 254823 - protein, 14 aa, Homo sapiens
  CDR3 for alpha chain variable domain of TCR clone 127412 (TRAV3, TRAJ21)
CALGRGSTNFTLDL

SEQ ID NO: 254824 - protein, 17 aa, Homo sapiens
  CDR3 for beta chain variable domain of TCR clone 127412 (TRBV25-1, TRBJ2-1)
CASSAYGQGRGVYEQFF

SEQ ID NO: 254825 - protein, 12 aa, Homo sapiens
  CDR3 for alpha chain variable domain of TCR clone 127413 (TRAV21, TRAJ15)
CAVNQAGTALIF

SEQ ID NO: 254826 - protein, 13 aa, Homo sapiens
  CDR3 for beta chain variable domain of TCR clone 127413 (TRBV11-2, TRBJ2-5)
CAGSSTGEETQYF

SEQ ID NO: 254827 - protein, 14 aa, Homo sapiens
  CDR3 for alpha chain variable domain of TCR clone 127414 (TRAV17, TRAJ54)
CATDANQGAQKLVF

SEQ ID NO: 254828 - protein, 10 aa, Homo sapiens
  CDR3 for beta chain variable domain of TCR clone 127414 (TRBV15, TRBJ2-7)
AETGGYEQYF

SEQ ID NO: 254829 - protein, 12 aa, Homo sapiens
  CDR3 for alpha chain variable domain of TCR clone 127415 (TRAV12-3, TRAJ17)
CAMTLTGNKLTF

SEQ ID NO: 254830 - protein, 16 aa, Homo sapiens
  CDR3 for beta chain variable domain of TCR clone 127415 (TRBV11-2, TRBJ2-7)
CASSLAPTGVNYEQYF

SEQ ID NO: 254831 - protein, 14 aa, Homo sapiens
  CDR3 for alpha chain variable domain of TCR clone 127416 (TRAV2, TRAJ9)
CAVEDRSGGFKTIF

SEQ ID NO: 254832 - protein, 15 aa, Homo sapiens
  CDR3 for beta chain variable domain of TCR clone 127416 (TRBV28, TRBJ2-1)
CASSLGTRLYNEQFF

SEQ ID NO: 254833 - protein, 14 aa, Homo sapiens
  CDR3 for alpha chain variable domain of TCR clone 127417 (TRAV12-3, TRAJ56)
CAMSVTGANSKLTF

SEQ ID NO: 254834 - protein, 15 aa, Homo sapiens
  CDR3 for beta chain variable domain of TCR clone 127417 (TRBV5-7, TRBJ2-1)
CASSLTGQVYNEQFF

SEQ ID NO: 254835 - protein, 14 aa, Homo sapiens
  CDR3 for alpha chain variable domain of TCR clone 127418 (TRAV27, TRAJ23)
CAGVLRNQGGKLIF

SEQ ID NO: 254836 - protein, 14 aa, Homo sapiens
  CDR3 for beta chain variable domain of TCR clone 127418 (TRBV2, TRBJ2-1)
CASRTGSSYNEQFF

SEQ ID NO: 254837 - protein, 13 aa, Homo sapiens
  CDR3 for alpha chain variable domain of TCR clone 127419 (TRAV12-3, TRAJ5)
CAMIYTGRKALTF

SEQ ID NO: 254838 - protein, 12 aa, Homo sapiens
  CDR3 for beta chain variable domain of TCR clone 127419 (TRBV18, TRBJ1-4)
CASSPSREKLFF

SEQ ID NO: 254839 - protein, 15 aa, Homo sapiens
  CDR3 for alpha chain variable domain of TCR clone 127420 (TRAV12-3, TRAJ10)
CASYILTGGGNKLTF

SEQ ID NO: 254840 - protein, 13 aa, Homo sapiens
  CDR3 for beta chain variable domain of TCR clone 127420 (TRBV7-9, TRBJ2-7)
CASSLAGAYEQYF

SEQ ID NO: 254841 - protein, 16 aa, Homo sapiens
  CDR3 for alpha chain variable domain of TCR clone 127421 (TRAV14/DV4, TRAJ54)
CAMREGLAWGAQKLVF

SEQ ID NO: 254842 - protein, 19 aa, Homo sapiens
  CDR3 for beta chain variable domain of TCR clone 127421 (TRBV7-9, TRBJ2-6)
CASSLKSATVLPGANVLTF

SEQ ID NO: 254843 - protein, 13 aa, Homo sapiens
  CDR3 for alpha chain variable domain of TCR clone 127422 (TRAV2, TRAJ40)
CAVVTSGTYKYIF

SEQ ID NO: 254844 - protein, 14 aa, Homo sapiens
  CDR3 for beta chain variable domain of TCR clone 127422 (TRBV19, TRBJ2-1)
CASLTSVLSGEQFF

SEQ ID NO: 254845 - protein, 14 aa, Homo sapiens
  CDR3 for alpha chain variable domain of TCR clone 127423 (TRAV12-2, TRAJ40)
CAVKIPSGTYKYIF

SEQ ID NO: 254846 - protein, 14 aa, Homo sapiens
  CDR3 for beta chain variable domain of TCR clone 127423 (TRBV20-1, TRBJ1-1)
CCAQTRIGGTEAFF

SEQ ID NO: 254847 - protein, 13 aa, Homo sapiens
  CDR3 for alpha chain variable domain of TCR clone 127424 (TRAV21, TRAJ27)
CAARPGNAGKSTF

SEQ ID NO: 254848 - protein, 11 aa, Homo sapiens
  CDR3 for beta chain variable domain of TCR clone 127424 (TRBV6-3, TRBJ2-7)
CASSFSYEQYF

SEQ ID NO: 254849 - protein, 14 aa, Homo sapiens
  CDR3 for alpha chain variable domain of TCR clone 127425 (TRAV16, TRAJ32)
CALKSGGATNKLIF

SEQ ID NO: 254850 - protein, 15 aa, Homo sapiens
  CDR3 for beta chain variable domain of TCR clone 127425 (TRBV19, TRBJ1-2)
CASSVGQVLNYGYTF

SEQ ID NO: 254851 - protein, 17 aa, Homo sapiens
  CDR3 for alpha chain variable domain of TCR clone 127426 (TRAV3, TRAJ6)
CAVRDGPRAGGSYIPTF

SEQ ID NO: 254852 - protein, 15 aa, Homo sapiens
  CDR3 for beta chain variable domain of TCR clone 127426 (TRBV28, TRBJ2-7)
CASSPGGRGFYEQYF

SEQ ID NO: 254853 - protein, 15 aa, Homo sapiens
  CDR3 for alpha chain variable domain of TCR clone 127427 (TRAV3, TRAJ17)
CAVSPKEAAGNKLTF

SEQ ID NO: 254854 - protein, 15 aa, Homo sapiens
  CDR3 for beta chain variable domain of TCR clone 127427 (TRBV5-5, TRBJ2-2)
CASSRQASGAGELFF

SEQ ID NO: 254855 - protein, 14 aa, Homo sapiens
  CDR3 for alpha chain variable domain of TCR clone 127428 (TRAV29/DV5, TRAJ32)
CAAAYGGATNKLIL

SEQ ID NO: 254856 - protein, 15 aa, Homo sapiens
  CDR3 for beta chain variable domain of TCR clone 127428 (TRBV27, TRBJ2-7)
CASSTAGTGSYEQYF

SEQ ID NO: 254857 - protein, 15 aa, Homo sapiens
  CDR3 for alpha chain variable domain of TCR clone 127429 (TRAV23/DV6, TRAJ30)
CAASSQESRDDTIIF

SEQ ID NO: 254858 - protein, 17 aa, Homo sapiens
  CDR3 for beta chain variable domain of TCR clone 127429 (TRBV4-3, TRBJ2-1)
CASSQFSSGRASGEQFF

SEQ ID NO: 254859 - protein, 13 aa, Homo sapiens
  CDR3 for alpha chain variable domain of TCR clone 127430 (TRAV26-1, TRAJ48)
CIVRVVGDEKLTF

SEQ ID NO: 254860 - protein, 17 aa, Homo sapiens
  CDR3 for beta chain variable domain of TCR clone 127430 (TRBV13, TRBJ2-3)
CASSLSRVAGGRNTQYF

SEQ ID NO: 254861 - protein, 16 aa, Homo sapiens
  CDR3 for alpha chain variable domain of TCR clone 127431 (TRAV21, TRAJ37)
CAVRTAGSSNTGKLIF

SEQ ID NO: 254862 - protein, 12 aa, Homo sapiens
  CDR3 for beta chain variable domain of TCR clone 127431 (TRBV7-9, TRBJ2-7)
CATRTDAYEQYF

SEQ ID NO: 254863 - protein, 10 aa, Homo sapiens
  CDR3 for alpha chain variable domain of TCR clone 127432 (TRAV24, TRAJ53)
SGGSNYKLTF

SEQ ID NO: 254864 - protein, 17 aa, Homo sapiens
  CDR3 for beta chain variable domain of TCR clone 127432 (TRBV7-8, TRBJ2-6)
CASSAGTGGAGANVLTF

SEQ ID NO: 254865 - protein, 11 aa, Homo sapiens
  CDR3 for alpha chain variable domain of TCR clone 127433 (TRAV3, TRAJ21)
CAVGNFNKFYF

SEQ ID NO: 254866 - protein, 13 aa, Homo sapiens
  CDR3 for beta chain variable domain of TCR clone 127433 (TRBV7-9, TRBJ2-1)
CASSWESYNEQFF

SEQ ID NO: 254867 - protein, 14 aa, Homo sapiens
  CDR3 for alpha chain variable domain of TCR clone 127434 (TRAV13-1, TRAJ39)
CAASKNNTGNMLTF

SEQ ID NO: 254868 - protein, 15 aa, Homo sapiens
  CDR3 for beta chain variable domain of TCR clone 127434 (TRBV7-9, TRBJ1-6)
CASSSPGRGNSPLHF

SEQ ID NO: 254869 - protein, 14 aa, Homo sapiens
  CDR3 for alpha chain variable domain of TCR clone 127435 (TRAV17, TRAJ31)
CATVLRSNNARLMF

SEQ ID NO: 254870 - protein, 14 aa, Homo sapiens
  CDR3 for beta chain variable domain of TCR clone 127435 (TRBV12-4, TRBJ2-5)
CASSLWQKQETQYF

SEQ ID NO: 254871 - protein, 14 aa, Homo sapiens
  CDR3 for alpha chain variable domain of TCR clone 127436 (TRAV12-3, TRAJ7)
CAMSEIGGNNRLAL

SEQ ID NO: 254872 - protein, 14 aa, Homo sapiens
  CDR3 for beta chain variable domain of TCR clone 127436 (TRBV28, TRBJ2-5)
CASRGSSFWETQYF

SEQ ID NO: 254873 - protein, 14 aa, Homo sapiens
  CDR3 for alpha chain variable domain of TCR clone 127437 (TRAV12-3, TRAJ10)
SHLPLTGGGNKLTF

SEQ ID NO: 254874 - protein, 13 aa, Homo sapiens
  CDR3 for beta chain variable domain of TCR clone 127437 (TRBV4-1, TRBJ2-2)
CASGQENAGELFF

SEQ ID NO: 254875 - protein, 18 aa, Homo sapiens
  CDR3 for alpha chain variable domain of TCR clone 127438 (TRAV21, TRAJ52)
CAVRPSPAGGTSYGKLTF

SEQ ID NO: 254876 - protein, 12 aa, Homo sapiens
  CDR3 for beta chain variable domain of TCR clone 127438 (TRBV11-2, TRBJ2-2)
CASSLGGGELLF

SEQ ID NO: 254877 - protein, 12 aa, Homo sapiens
  CDR3 for alpha chain variable domain of TCR clone 127439 (TRAV12-3, TRAJ17)
CAMTLTGSKLTF

SEQ ID NO: 254878 - protein, 14 aa, Homo sapiens
  CDR3 for beta chain variable domain of TCR clone 127439 (TRBV4-1, TRBJ2-7)
CASSQDREHVEQYF

SEQ ID NO: 254879 - protein, 14 aa, Homo sapiens
  CDR3 for alpha chain variable domain of TCR clone 127440 (TRAV21, TRAJ35)
CAVMPIGFGNALHC

SEQ ID NO: 254880 - protein, 12 aa, Homo sapiens
  CDR3 for beta chain variable domain of TCR clone 127440 (TRBV7-9, TRBJ2-7)
CASSIKREEQYF

SEQ ID NO: 254881 - protein, 13 aa, Homo sapiens
  CDR3 for alpha chain variable domain of TCR clone 127441 (TRAV12-3, TRAJ43)
CAMIRPNNNDMRF

SEQ ID NO: 254882 - protein, 13 aa, Homo sapiens
  CDR3 for beta chain variable domain of TCR clone 127441 (TRBV11-2, TRBJ2-5)
CASSSTGEETQYF

SEQ ID NO: 254883 - protein, 11 aa, Homo sapiens
  CDR3 for alpha chain variable domain of TCR clone 127442 (TRAV12-3, TRAJ43)
CAMSVSNDMSF

SEQ ID NO: 254884 - protein, 14 aa, Homo sapiens
  CDR3 for beta chain variable domain of TCR clone 127442 (TRBV12-5, TRBJ2-5)
CASGSRTHQETQYF

SEQ ID NO: 254885 - protein, 11 aa, Homo sapiens
  CDR3 for alpha chain variable domain of TCR clone 127443 (TRAV2, TRAJ40)
CAMEDPGNLQI

SEQ ID NO: 254886 - protein, 14 aa, Homo sapiens
  CDR3 for beta chain variable domain of TCR clone 127443 (TRBV19, TRBJ2-2)
CASSTLHRSGELFF

SEQ ID NO: 254887 - protein, 20 aa, Homo sapiens
  CDR3 for alpha chain variable domain of TCR clone 127444 (TRAV26-1, TRAJ42)
CCVLLHRQTYYGGSQGNLIF

SEQ ID NO: 254888 - protein, 14 aa, Homo sapiens
  CDR3 for beta chain variable domain of TCR clone 127444 (TRBV11-2, TRBJ2-1)
CASSLSGPYNEQFF

SEQ ID NO: 254889 - protein, 10 aa, Homo sapiens
  CDR3 for alpha chain variable domain of TCR clone 127445 (TRAV23/DV6, TRAJ57)
CAASSTLSQG

SEQ ID NO: 254890 - protein, 15 aa, Homo sapiens
  CDR3 for beta chain variable domain of TCR clone 127445 (TRBV7-3, TRBJ2-1)
CASSPTGGGEVEQFF

SEQ ID NO: 254891 - protein, 12 aa, Homo sapiens
  CDR3 for alpha chain variable domain of TCR clone 127446 (TRAV21, TRAJ31)
CAVWGNNARLMF

SEQ ID NO: 254892 - protein, 14 aa, Homo sapiens
  CDR3 for beta chain variable domain of TCR clone 127446 (TRBV7-2, TRBJ1-2)
CASSQTGSTYGYTF

SEQ ID NO: 254893 - protein, 19 aa, Homo sapiens
  CDR3 for alpha chain variable domain of TCR clone 127447 (TRAV3, TRAJ6)
CAVRDGPRAEEATYLHLEE

SEQ ID NO: 254894 - protein, 14 aa, Homo sapiens
  CDR3 for beta chain variable domain of TCR clone 127447 (TRBV7-2, TRBJ2-7)
CASSPKTSFYEQYF

SEQ ID NO: 254895 - protein, 14 aa, Homo sapiens
  CDR3 for alpha chain variable domain of TCR clone 127448 (TRAV12-2, TRAJ48)
CAVNAFFGNEKLTF

SEQ ID NO: 254896 - protein, 12 aa, Homo sapiens
  CDR3 for beta chain variable domain of TCR clone 127448 (TRBV28, TRBJ2-7)
CRAQQGLDEQYF

SEQ ID NO: 254897 - protein, 12 aa, Homo sapiens
  CDR3 for alpha chain variable domain of TCR clone 127449 (TRAV12-3, TRAJ32)
CAGGGATNKPIF

SEQ ID NO: 254898 - protein, 15 aa, Homo sapiens
  CDR3 for beta chain variable domain of TCR clone 127449 (TRBV4-3, TRBJ2-1)
CASSQESAIYNEQFF

SEQ ID NO: 254899 - protein, 18 aa, Homo sapiens
  CDR3 for alpha chain variable domain of TCR clone 127450 (TRAV26-2, TRAJ45)
CILRLWGYSGGGADGLTF

SEQ ID NO: 254900 - protein, 17 aa, Homo sapiens
  CDR3 for beta chain variable domain of TCR clone 127450 (TRBV28, TRBJ2-3)
RASSPTPAGGRVDTQYF

SEQ ID NO: 254901 - protein, 14 aa, Homo sapiens
  CDR3 for alpha chain variable domain of TCR clone 127451 (TRAV8-4, TRAJ23)
CAVSAPGSGGKLIF

SEQ ID NO: 254902 - protein, 17 aa, Homo sapiens
  CDR3 for beta chain variable domain of TCR clone 127451 (TRBV4-3, TRBJ2-3)
CASSQAPLAGAVDTQYF

SEQ ID NO: 254903 - protein, 12 aa, Homo sapiens
  CDR3 for alpha chain variable domain of TCR clone 127452 (TRAV13-1, TRAJ21)
CAAKEGFNKFYF

SEQ ID NO: 254904 - protein, 16 aa, Homo sapiens
  CDR3 for beta chain variable domain of TCR clone 127452 (TRBV7-3, TRBJ2-3)
CASSPTGYQSTDTQYF

SEQ ID NO: 254905 - protein, 10 aa, Homo sapiens
  CDR3 for alpha chain variable domain of TCR clone 127453 (TRAV2, TRAJ34)
CAVVNYKLIF

SEQ ID NO: 254906 - protein, 15 aa, Homo sapiens
  CDR3 for beta chain variable domain of TCR clone 127453 (TRBV3-1, TRBJ2-2)
CASSQDWTRAGELFF

SEQ ID NO: 254907 - protein, 16 aa, Homo sapiens
  CDR3 for alpha chain variable domain of TCR clone 127454 (TRAV30, TRAJ24)
CGTEIVDADSWANSSL

SEQ ID NO: 254908 - protein, 14 aa, Homo sapiens
  CDR3 for beta chain variable domain of TCR clone 127454 (TRBV12-5, TRBJ2-5)
CASGSRTHQETQYF

SEQ ID NO: 254909 - protein, 10 aa, Homo sapiens
  CDR3 for alpha chain variable domain of TCR clone 127455 (TRAV13-1, TRAJ26)
CAPYGQNFVF

SEQ ID NO: 254910 - protein, 14 aa, Homo sapiens
  CDR3 for beta chain variable domain of TCR clone 127455 (TRBV25-1, TRBJ1-1)
CACTHLGGNTEAFF

SEQ ID NO: 254911 - protein, 11 aa, Homo sapiens
  CDR3 for alpha chain variable domain of TCR clone 127456 (TRAV3, TRAJ21)
CAVGSFNKFYF

SEQ ID NO: 254912 - protein, 16 aa, Homo sapiens
  CDR3 for beta chain variable domain of TCR clone 127456 (TRBV5-1, TRBJ2-3)
CASSLGLAVYTDTQYF

SEQ ID NO: 254913 - protein, 16 aa, Homo sapiens
  CDR3 for alpha chain variable domain of TCR clone 127457 (TRAV12-3, TRAJ53)
CAMSVGGGGSNYKLTF

SEQ ID NO: 254914 - protein, 11 aa, Homo sapiens
  CDR3 for beta chain variable domain of TCR clone 127457 (TRBV29-1, TRBJ2-5)
CSVASGETQYF

SEQ ID NO: 254915 - protein, 17 aa, Homo sapiens
  CDR3 for alpha chain variable domain of TCR clone 127458 (TRAV38-2/DV8, TRAJ28)
CAFLTLYSGAGSYQLTF

SEQ ID NO: 254916 - protein, 11 aa, Homo sapiens
  CDR3 for beta chain variable domain of TCR clone 127458 (TRBV19, TRBJ1-1)
CASSIGSEAFF

SEQ ID NO: 254917 - protein, 20 aa, Homo sapiens
  CDR3 for alpha chain variable domain of TCR clone 127459 (TRAV1-1, TRAJ39)
CLLLLRCESSAYNACNMLTF

SEQ ID NO: 254918 - protein, 13 aa, Homo sapiens
  CDR3 for beta chain variable domain of TCR clone 127459 (TRBV12-4, TRBJ1-5)
CASSPDRAQPQHF

SEQ ID NO: 254919 - protein, 15 aa, Homo sapiens
  CDR3 for alpha chain variable domain of TCR clone 127460 (TRAV3, TRAJ17)
CAVSPKKAAGNKLTF

SEQ ID NO: 254920 - protein, 12 aa, Homo sapiens
  CDR3 for beta chain variable domain of TCR clone 127460 (TRBV7-9, TRBJ1-6)
CASSLMTSPLHF

SEQ ID NO: 254921 - protein, 13 aa, Homo sapiens
  CDR3 for alpha chain variable domain of TCR clone 127461 (TRAV13-2, TRAJ48)
CAEMDFGNEKLTF

SEQ ID NO: 254922 - protein, 15 aa, Homo sapiens
  CDR3 for beta chain variable domain of TCR clone 127461 (TRBV7-9, TRBJ1-6)
CASSSPGRGNSPLHC

SEQ ID NO: 254923 - protein, 14 aa, Homo sapiens
  CDR3 for alpha chain variable domain of TCR clone 127462 (TRAV12-2, TRAJ40)
CAVKIPSGTYKYIF

SEQ ID NO: 254924 - protein, 18 aa, Homo sapiens
  CDR3 for beta chain variable domain of TCR clone 127462 (TRBV7-3, TRBJ2-5)
CASSLGGAAQGRWETQYF

SEQ ID NO: 254925 - protein, 13 aa, Homo sapiens
  CDR3 for alpha chain variable domain of TCR clone 127463 (TRAV22, TRAJ29)
CAVGGSGNTPLVF

SEQ ID NO: 254926 - protein, 13 aa, Homo sapiens
  CDR3 for beta chain variable domain of TCR clone 127463 (TRBV4-2, TRBJ1-1)
CASSQAANTEAFF

SEQ ID NO: 254927 - protein, 14 aa, Homo sapiens
  CDR3 for alpha chain variable domain of TCR clone 127464 (TRAV2, TRAJ29)
CAVELPSGNTPLVF

SEQ ID NO: 254928 - protein, 13 aa, Homo sapiens
  CDR3 for beta chain variable domain of TCR clone 127464 (TRBV10-3, TRBJ2-7)
CASKLAVNYEQYF

SEQ ID NO: 254929 - protein, 13 aa, Homo sapiens
  CDR3 for alpha chain variable domain of TCR clone 127465 (TRAV27, TRAJ6)
CAGGTRGSYIPTF

SEQ ID NO: 254930 - protein, 14 aa, Homo sapiens
  CDR3 for beta chain variable domain of TCR clone 127465 (TRBV20-1, TRBJ2-4)
CSASGRVGENTQYF

SEQ ID NO: 254931 - protein, 16 aa, Homo sapiens
  CDR3 for alpha chain variable domain of TCR clone 127466 (TRAV30, TRAJ24)
CGTEMVDAASWGKFQF

SEQ ID NO: 254932 - protein, 14 aa, Homo sapiens
  CDR3 for beta chain variable domain of TCR clone 127466 (TRBV12-5, TRBJ2-5)
CASGSRTHQETQYF

SEQ ID NO: 254933 - protein, 17 aa, Homo sapiens
  CDR3 for alpha chain variable domain of TCR clone 127467 (TRAV3, TRAJ12)
CAVRDGGRMDSSDKLIF

SEQ ID NO: 254934 - protein, 13 aa, Homo sapiens
  CDR3 for beta chain variable domain of TCR clone 127467 (TRBV15, TRBJ1-6)
CATSGGLNSPLHF

SEQ ID NO: 254935 - protein, 14 aa, Homo sapiens
  CDR3 for alpha chain variable domain of TCR clone 127468 (TRAV12-1, TRAJ12)
CVVTRMDSSYKLIF

SEQ ID NO: 254936 - protein, 14 aa, Homo sapiens
  CDR3 for beta chain variable domain of TCR clone 127468 (TRBV4-1, TRBJ2-7)
CAGSPVAGGDEQHF

SEQ ID NO: 254937 - protein, 19 aa, Homo sapiens
  CDR3 for alpha chain variable domain of TCR clone 127469 (TRAV8-3, TRAJ8)
LSTSVLWDPMNTGFQKLVF

SEQ ID NO: 254938 - protein, 13 aa, Homo sapiens
  CDR3 for beta chain variable domain of TCR clone 127469 (TRBV2, TRBJ2-7)
CASSVGGSGEQYF

SEQ ID NO: 254939 - protein, 15 aa, Homo sapiens
  CDR3 for alpha chain variable domain of TCR clone 127470 (TRAV26-1, TRAJ38)
RIVRAEGGNNRKLIW

SEQ ID NO: 254940 - protein, 14 aa, Homo sapiens
  CDR3 for beta chain variable domain of TCR clone 127470 (TRBV7-6, TRBJ2-5)
CASSSPSGSETQYF

SEQ ID NO: 254941 - protein, 17 aa, Homo sapiens
  CDR3 for alpha chain variable domain of TCR clone 127471 (TRAV3, TRAJ42)
CAVRDRDYGGSQGNLIF

SEQ ID NO: 254942 - protein, 15 aa, Homo sapiens
  CDR3 for beta chain variable domain of TCR clone 127471 (TRBV6-6, TRBJ2-7)
CACSYSYGGSYEQYF

SEQ ID NO: 254943 - protein, 12 aa, Homo sapiens
  CDR3 for alpha chain variable domain of TCR clone 127472 (TRAV13-1, TRAJ5)
CAATLPYAGTRA

SEQ ID NO: 254944 - protein, 17 aa, Homo sapiens
  CDR3 for beta chain variable domain of TCR clone 127472 (TRBV24-1, TRBJ2-1)
CATSDVSTSGTYNEQFF

SEQ ID NO: 254945 - protein, 14 aa, Homo sapiens
  CDR3 for alpha chain variable domain of TCR clone 127473 (TRAV2, TRAJ9)
CAVVLNTGGFKTIF

SEQ ID NO: 254946 - protein, 16 aa, Homo sapiens
  CDR3 for beta chain variable domain of TCR clone 127473 (TRBV7-9, TRBJ2-3)
CASSLGKQGGTDTQYF

SEQ ID NO: 254947 - protein, 17 aa, Homo sapiens
  CDR3 for alpha chain variable domain of TCR clone 127474 (TRAV3, TRAJ38)
CAVRDCLNAGNNRKLIW

SEQ ID NO: 254948 - protein, 17 aa, Homo sapiens
  CDR3 for beta chain variable domain of TCR clone 127474 (TRBV28, TRBJ2-7)
CASSPGLAGGDSSEQYF

SEQ ID NO: 254949 - protein, 12 aa, Homo sapiens
  CDR3 for alpha chain variable domain of TCR clone 127475 (TRAV1-1, TRAJ43)
CAPRVSSNDMRF

SEQ ID NO: 254950 - protein, 14 aa, Homo sapiens
  CDR3 for beta chain variable domain of TCR clone 127475 (TRBV19, TRBJ2-1)
CASPTFVLSGEQFF

SEQ ID NO: 254951 - protein, 14 aa, Homo sapiens
  CDR3 for alpha chain variable domain of TCR clone 127476 (TRAV13-1, TRAJ9)
CAASALTGGFKTIF

SEQ ID NO: 254952 - protein, 13 aa, Homo sapiens
  CDR3 for beta chain variable domain of TCR clone 127476 (TRBV20-1, TRBJ1-1)
CSAGTVGNTEAFS

SEQ ID NO: 254953 - protein, 14 aa, Homo sapiens
  CDR3 for alpha chain variable domain of TCR clone 127477 (TRAV2, TRAJ9)
CAVEDRSGGFKTIF

SEQ ID NO: 254954 - protein, 13 aa, Homo sapiens
  CDR3 for beta chain variable domain of TCR clone 127477 (TRBV9, TRBJ2-7)
CASSVAEYYEQYF

SEQ ID NO: 254955 - protein, 14 aa, Homo sapiens
  CDR3 for alpha chain variable domain of TCR clone 127478 (TRAV12-2, TRAJ40)
CAVKVPSGTYKYIF

SEQ ID NO: 254956 - protein, 16 aa, Homo sapiens
  CDR3 for beta chain variable domain of TCR clone 127478 (TRBV28, TRBJ2-5)
CASSFSPAGGWETQYF

SEQ ID NO: 254957 - protein, 13 aa, Homo sapiens
  CDR3 for alpha chain variable domain of TCR clone 127479 (TRAV17, TRAJ4)
CATKSGGYNKLIF

SEQ ID NO: 254958 - protein, 16 aa, Homo sapiens
  CDR3 for beta chain variable domain of TCR clone 127479 (TRBV7-8, TRBJ2-4)
CASSAERTLAKNIQYF

SEQ ID NO: 254959 - protein, 16 aa, Homo sapiens
  CDR3 for alpha chain variable domain of TCR clone 127480 (TRAV26-1, TRAJ37)
CIVRGDGSGNTGKPIF

SEQ ID NO: 254960 - protein, 17 aa, Homo sapiens
  CDR3 for beta chain variable domain of TCR clone 127480 (TRBV4-1, TRBJ2-7)
CASSRDPLGVRGGEQYF

SEQ ID NO: 254961 - protein, 15 aa, Homo sapiens
  CDR3 for alpha chain variable domain of TCR clone 127481 (TRAV38-1, TRAJ37)
CAFIHGSGNTGKLIF

SEQ ID NO: 254962 - protein, 12 aa, Homo sapiens
  CDR3 for beta chain variable domain of TCR clone 127481 (TRBV11-2, TRBJ2-2)
CASSLPTGELFF

SEQ ID NO: 254963 - protein, 16 aa, Homo sapiens
  CDR3 for alpha chain variable domain of TCR clone 127482 (TRAV30, TRAJ24)
CGTEIVDADSWGKFQF

SEQ ID NO: 254964 - protein, 17 aa, Homo sapiens
  CDR3 for beta chain variable domain of TCR clone 127482 (TRBV20-1, TRBJ2-2)
CSASGSGQGGLAGELFF

SEQ ID NO: 254965 - protein, 16 aa, Homo sapiens
  CDR3 for alpha chain variable domain of TCR clone 127483 (TRAV4, TRAJ22)
CLVGDLYSGSARQLTF

SEQ ID NO: 254966 - protein, 13 aa, Homo sapiens
  CDR3 for beta chain variable domain of TCR clone 127483 (TRBV27, TRBJ2-2)
CASSWRNTGELFF

SEQ ID NO: 254967 - protein, 14 aa, Homo sapiens
  CDR3 for alpha chain variable domain of TCR clone 127484 (TRAV1-2, TRAJ8)
CAVREDTGFQKLVF

SEQ ID NO: 254968 - protein, 15 aa, Homo sapiens
  CDR3 for beta chain variable domain of TCR clone 127484 (TRBV18, TRBJ2-7)
CASSPTFMDSYEQYF

SEQ ID NO: 254969 - protein, 13 aa, Homo sapiens
  CDR3 for alpha chain variable domain of TCR clone 127485 (TRAV12-2, TRAJ20)
CAVYPSNDYKLSF

SEQ ID NO: 254970 - protein, 12 aa, Homo sapiens
  CDR3 for beta chain variable domain of TCR clone 127485 (TRBV6-3, TRBJ2-7)
CASSLTPYEQYF

SEQ ID NO: 254971 - protein, 14 aa, Homo sapiens
  CDR3 for alpha chain variable domain of TCR clone 127486 (TRAV1-2, TRAJ16)
CAVNQFSDGQKLLF

SEQ ID NO: 254972 - protein, 11 aa, Homo sapiens
  CDR3 for beta chain variable domain of TCR clone 127486 (TRBV7-9, TRBJ2-3)
CASSPTDTQYF

SEQ ID NO: 254973 - protein, 18 aa, Homo sapiens
  CDR3 for alpha chain variable domain of TCR clone 127487 (TRAV21, TRAJ52)
CAVRPSPAGGTSYGQLTF

SEQ ID NO: 254974 - protein, 16 aa, Homo sapiens
  CDR3 for beta chain variable domain of TCR clone 127487 (TRBV13, TRBJ2-2)
CASSPRTGEHTGELFF

SEQ ID NO: 254975 - protein, 15 aa, Homo sapiens
  CDR3 for alpha chain variable domain of TCR clone 127488 (TRAV21, TRAJ52)
CAARGGGTSYGKLTF

SEQ ID NO: 254976 - protein, 15 aa, Homo sapiens
  CDR3 for beta chain variable domain of TCR clone 127488 (TRBV18, TRBJ1-5)
CASSPSDRSNQPQHF

SEQ ID NO: 254977 - protein, 12 aa, Homo sapiens
  CDR3 for alpha chain variable domain of TCR clone 127489 (TRAV13-2, TRAJ8)
CAPWLGFQKLVF

SEQ ID NO: 254978 - protein, 15 aa, Homo sapiens
  CDR3 for beta chain variable domain of TCR clone 127489 (TRBV28, TRBJ2-1)
CASSLGTRLYNEQFF

SEQ ID NO: 254979 - protein, 12 aa, Homo sapiens
  CDR3 for alpha chain variable domain of TCR clone 127490 (TRAV12-3, TRAJ17)
CAMTLTGNKLTF

SEQ ID NO: 254980 - protein, 15 aa, Homo sapiens
  CDR3 for beta chain variable domain of TCR clone 127490 (TRBV28, TRBJ2-5)
CASSSGRVIQETQYF

SEQ ID NO: 254981 - protein, 14 aa, Homo sapiens
  CDR3 for alpha chain variable domain of TCR clone 127491 (TRAV21, TRAJ38)
CAVMGAGNNRKLIW

SEQ ID NO: 254982 - protein, 13 aa, Homo sapiens
  CDR3 for beta chain variable domain of TCR clone 127491 (TRBV7-3, TRBJ2-5)
CASSIGCFETQYF

SEQ ID NO: 254983 - protein, 11 aa, Homo sapiens
  CDR3 for alpha chain variable domain of TCR clone 127492 (TRAV3, TRAJ21)
CSVGNFNKFYF

SEQ ID NO: 254984 - protein, 13 aa, Homo sapiens
  CDR3 for beta chain variable domain of TCR clone 127492 (TRBV7-9, TRBJ1-2)
CASSLKQNYGYTF

SEQ ID NO: 254985 - protein, 11 aa, Homo sapiens
  CDR3 for alpha chain variable domain of TCR clone 127493 (TRAV29/DV5, TRAJ37)
CATSNTGKLIF

SEQ ID NO: 254986 - protein, 13 aa, Homo sapiens
  CDR3 for beta chain variable domain of TCR clone 127493 (TRBV12-4, TRBJ2-3)
CASSAPLGGTQYF

SEQ ID NO: 254987 - protein, 11 aa, Homo sapiens
  CDR3 for alpha chain variable domain of TCR clone 127494 (TRAV9-2, TRAJ11)
RVPAGYSTLTF

SEQ ID NO: 254988 - protein, 15 aa, Homo sapiens
  CDR3 for beta chain variable domain of TCR clone 127494 (TRBV19, TRBJ1-2)
CASSTKTDTNYGYTF

SEQ ID NO: 254989 - protein, 13 aa, Homo sapiens
  CDR3 for alpha chain variable domain of TCR clone 127495 (TRAV12-1, TRAJ21)
CVVTLYNFNKFYF

SEQ ID NO: 254990 - protein, 20 aa, Homo sapiens
  CDR3 for beta chain variable domain of TCR clone 127495 (TRBV7-8, TRBJ2-1)
CASSLAHRLEGVRSYNEQFF

SEQ ID NO: 254991 - protein, 14 aa, Homo sapiens
  CDR3 for alpha chain variable domain of TCR clone 127496 (TRAV30, TRAJ33)
CGTVAPRSNYQLIW

SEQ ID NO: 254992 - protein, 15 aa, Homo sapiens
  CDR3 for beta chain variable domain of TCR clone 127496 (TRBV2, TRBJ2-3)
CASSDFEKATDTQYF

SEQ ID NO: 254993 - protein, 16 aa, Homo sapiens
  CDR3 for alpha chain variable domain of TCR clone 127497 (TRAV23/DV6, TRAJ52)
CAARPSVGTSYGKLTF

SEQ ID NO: 254994 - protein, 13 aa, Homo sapiens
  CDR3 for beta chain variable domain of TCR clone 127497 (TRBV7-9, TRBJ1-1)
CASSLSGETEAFF

SEQ ID NO: 254995 - protein, 13 aa, Homo sapiens
  CDR3 for alpha chain variable domain of TCR clone 127498 (TRAV13-1, TRAJ20)
CAARVSNDYKLSF

SEQ ID NO: 254996 - protein, 16 aa, Homo sapiens
  CDR3 for beta chain variable domain of TCR clone 127498 (TRBV11-1, TRBJ1-1)
CATNPRDRAFNTEAVF

SEQ ID NO: 254997 - protein, 13 aa, Homo sapiens
  CDR3 for alpha chain variable domain of TCR clone 127499 (TRAV12-1, TRAJ16)
CVVNGPDGQKLLF

SEQ ID NO: 254998 - protein, 13 aa, Homo sapiens
  CDR3 for beta chain variable domain of TCR clone 127499 (TRBV7-9, TRBJ1-2)
CASSLKQNYGYTF

SEQ ID NO: 254999 - protein, 13 aa, Homo sapiens
  CDR3 for alpha chain variable domain of TCR clone 127500 (TRAV3, TRAJ21)
CAVREPDFNKFYF

SEQ ID NO: 255000 - protein, 15 aa, Homo sapiens
  CDR3 for beta chain variable domain of TCR clone 127500 (TRBV20-1, TRBJ1-1)
CSARRGVTGNTEAFF

SEQ ID NO: 255001 - protein, 13 aa, Homo sapiens
  CDR3 for alpha chain variable domain of TCR clone 127501 (TRAV12-3, TRAJ7)
CAMTPYGKQQTRF

SEQ ID NO: 255002 - protein, 16 aa, Homo sapiens
  CDR3 for beta chain variable domain of TCR clone 127501 (TRBV20-1, TRBJ1-4)
CSARPYGGELNEKLFF

SEQ ID NO: 255003 - protein, 13 aa, Homo sapiens
  CDR3 for alpha chain variable domain of TCR clone 127502 (TRAV17, TRAJ7)
CATDNYGNNRLAF

SEQ ID NO: 255004 - protein, 16 aa, Homo sapiens
  CDR3 for beta chain variable domain of TCR clone 127502 (TRBV4-1, TRBJ2-5)
CASSHAIAASSATQYF

SEQ ID NO: 255005 - protein, 13 aa, Homo sapiens
  CDR3 for alpha chain variable domain of TCR clone 127503 (TRAV20, TRAJ40)
CAVPFSGTYKYIF

SEQ ID NO: 255006 - protein, 12 aa, Homo sapiens
  CDR3 for beta chain variable domain of TCR clone 127503 (TRBV11-2, TRBJ2-1)
CASSPGNNEQFF

SEQ ID NO: 255007 - protein, 14 aa, Homo sapiens
  CDR3 for alpha chain variable domain of TCR clone 127504 (TRAV8-4, TRAJ38)
CARLNAGNNRKLSW

SEQ ID NO: 255008 - protein, 12 aa, Homo sapiens
  CDR3 for beta chain variable domain of TCR clone 127504 (TRBV6-1, TRBJ2-7)
CASSEPLYEQYF

SEQ ID NO: 255009 - protein, 10 aa, Homo sapiens
  CDR3 for alpha chain variable domain of TCR clone 127505 (TRAV1-2, TRAJ23)
CAGQGGQLIF

SEQ ID NO: 255010 - protein, 12 aa, Homo sapiens
  CDR3 for beta chain variable domain of TCR clone 127505 (TRBV14, TRBJ2-5)
CASSQLKETQYF

SEQ ID NO: 255011 - protein, 13 aa, Homo sapiens
  CDR3 for alpha chain variable domain of TCR clone 127506 (TRAV1-1, TRAJ23)
CAVVANQGGKLIF

SEQ ID NO: 255012 - protein, 14 aa, Homo sapiens
  CDR3 for beta chain variable domain of TCR clone 127506 (TRBV4-1, TRBJ2-2)
CASSQAVNTGELFF

SEQ ID NO: 255013 - protein, 14 aa, Homo sapiens
  CDR3 for alpha chain variable domain of TCR clone 127507 (TRAV13-1, TRAJ44)
CAAKATGTASKLTF

SEQ ID NO: 255014 - protein, 13 aa, Homo sapiens
  CDR3 for beta chain variable domain of TCR clone 127507 (TRBV20-1, TRBJ2-5)
CSAREGGKETQYF

SEQ ID NO: 255015 - protein, 14 aa, Homo sapiens
  CDR3 for alpha chain variable domain of TCR clone 127508 (TRAV20, TRAJ29)
CAVQAWVGNTPLVF

SEQ ID NO: 255016 - protein, 15 aa, Homo sapiens
  CDR3 for beta chain variable domain of TCR clone 127508 (TRBV29-1, TRBJ2-7)
CIVEFFDRGSYEQYF

SEQ ID NO: 255017 - protein, 13 aa, Homo sapiens
  CDR3 for alpha chain variable domain of TCR clone 127509 (TRAV21, TRAJ27)
CAARPGNAGNSTL

SEQ ID NO: 255018 - protein, 14 aa, Homo sapiens
  CDR3 for beta chain variable domain of TCR clone 127509 (TRBV7-6, TRBJ2-3)
CASSLGTVTDTQYF

SEQ ID NO: 255019 - protein, 14 aa, Homo sapiens
  CDR3 for alpha chain variable domain of TCR clone 127510 (TRAV38-1, TRAJ45)
CAYYSGGGADGLTF

SEQ ID NO: 255020 - protein, 12 aa, Homo sapiens
  CDR3 for beta chain variable domain of TCR clone 127510 (TRBV6-3, TRBJ2-7)
CASSLTPYEQYF

SEQ ID NO: 255021 - protein, 14 aa, Homo sapiens
  CDR3 for alpha chain variable domain of TCR clone 127511 (TRAV12-2, TRAJ45)
CAVYSGGGADGLTF

SEQ ID NO: 255022 - protein, 15 aa, Homo sapiens
  CDR3 for beta chain variable domain of TCR clone 127511 (TRBV6-5, TRBJ2-1)
CASSYDAGAGNEQFF

SEQ ID NO: 255023 - protein, 10 aa, Homo sapiens
  CDR3 for alpha chain variable domain of TCR clone 127512 (TRAV20, TRAJ22)
CAAPARQLTF

SEQ ID NO: 255024 - protein, 14 aa, Homo sapiens
  CDR3 for beta chain variable domain of TCR clone 127512 (TRBV19, TRBJ2-1)
CASSMGSGATEHFF

SEQ ID NO: 255025 - protein, 16 aa, Homo sapiens
  CDR3 for alpha chain variable domain of TCR clone 127513 (TRAV20, TRAJ53)
CAVRRGSGGSNYKLTF

SEQ ID NO: 255026 - protein, 12 aa, Homo sapiens
  CDR3 for beta chain variable domain of TCR clone 127513 (TRBV29-1, TRBJ2-3)
CSVVLGADMQYF

SEQ ID NO: 255027 - protein, 13 aa, Homo sapiens
  CDR3 for alpha chain variable domain of TCR clone 127514 (TRAV12-3, TRAJ35)
CAMAIGFGNVLHC

SEQ ID NO: 255028 - protein, 15 aa, Homo sapiens
  CDR3 for beta chain variable domain of TCR clone 127514 (TRBV20-1, TRBJ2-1)
CSAGGSGTYYNEQFF

SEQ ID NO: 255029 - protein, 13 aa, Homo sapiens
  CDR3 for alpha chain variable domain of TCR clone 127515 (TRAV8-3, TRAJ43)
CAVGPDNNNDMRF

SEQ ID NO: 255030 - protein, 20 aa, Homo sapiens
  CDR3 for beta chain variable domain of TCR clone 127515 (TRBV7-8, TRBJ2-2)
CASSHLFPGPTIHITGELFF

SEQ ID NO: 255031 - protein, 13 aa, Homo sapiens
  CDR3 for alpha chain variable domain of TCR clone 127516 (TRAV2, TRAJ15)
CAVASQAGTALIF

SEQ ID NO: 255032 - protein, 14 aa, Homo sapiens
  CDR3 for beta chain variable domain of TCR clone 127516 (TRBV11-3, TRBJ2-7)
CASSPAGPPYEQYF

SEQ ID NO: 255033 - protein, 16 aa, Homo sapiens
  CDR3 for alpha chain variable domain of TCR clone 127517 (TRAV4, TRAJ40)
CLVGDMLASGTYKYIF

SEQ ID NO: 255034 - protein, 15 aa, Homo sapiens
  CDR3 for beta chain variable domain of TCR clone 127517 (TRBV7-2, TRBJ1-1)
CASSFEGRVNTEAFF

SEQ ID NO: 255035 - protein, 14 aa, Homo sapiens
  CDR3 for alpha chain variable domain of TCR clone 127518 (TRAV12-2, TRAJ13)
CAVKKTGGYQKVTF

SEQ ID NO: 255036 - protein, 13 aa, Homo sapiens
  CDR3 for beta chain variable domain of TCR clone 127518 (TRBV28, TRBJ2-3)
CARSLPQVDTQYF

SEQ ID NO: 255037 - protein, 14 aa, Homo sapiens
  CDR3 for alpha chain variable domain of TCR clone 127519 (TRAV12-1, TRAJ45)
CVVNENAGADGLTF

SEQ ID NO: 255038 - protein, 15 aa, Homo sapiens
  CDR3 for beta chain variable domain of TCR clone 127519 (TRBV5-7, TRBJ2-7)
CAGSLGPGRGHEQYF

SEQ ID NO: 255039 - protein, 11 aa, Homo sapiens
  CDR3 for alpha chain variable domain of TCR clone 127520 (TRAV20, TRAJ34)
CTRDNTDKLIF

SEQ ID NO: 255040 - protein, 15 aa, Homo sapiens
  CDR3 for beta chain variable domain of TCR clone 127520 (TRBV2, TRBJ2-1)
CASSVTSEGKDEQFF

SEQ ID NO: 255041 - protein, 13 aa, Homo sapiens
  CDR3 for alpha chain variable domain of TCR clone 127521 (TRAV21, TRAJ27)
CAARPGNAGKSTF

SEQ ID NO: 255042 - protein, 12 aa, Homo sapiens
  CDR3 for beta chain variable domain of TCR clone 127521 (TRBV19, TRBJ2-1)
CASSMQDTEQFF

SEQ ID NO: 255043 - protein, 16 aa, Homo sapiens
  CDR3 for alpha chain variable domain of TCR clone 127522 (TRAV26-1, TRAJ23)
CIVRVHPYNQGGKLIF

SEQ ID NO: 255044 - protein, 15 aa, Homo sapiens
  CDR3 for beta chain variable domain of TCR clone 127522 (TRBV5-7, TRBJ2-7)
CASSPYFEGSHEQYF

SEQ ID NO: 255045 - protein, 11 aa, Homo sapiens
  CDR3 for alpha chain variable domain of TCR clone 127523 (TRAV17, TRAJ9)
CATTGGFKTIF

SEQ ID NO: 255046 - protein, 15 aa, Homo sapiens
  CDR3 for beta chain variable domain of TCR clone 127523 (TRBV11-3, TRBJ2-3)
CASLKDGREGDTQYF

SEQ ID NO: 255047 - protein, 10 aa, Homo sapiens
  CDR3 for alpha chain variable domain of TCR clone 127524 (TRAV21, TRAJ43)
CAVRIGDMRF

SEQ ID NO: 255048 - protein, 15 aa, Homo sapiens
  CDR3 for beta chain variable domain of TCR clone 127524 (TRBV4-1, TRBJ1-4)
CASSDTGGTNEKLFF

SEQ ID NO: 255049 - protein, 16 aa, Homo sapiens
  CDR3 for alpha chain variable domain of TCR clone 127525 (TRAV12-2, TRAJ32)
CAVNLGQGGATNKLIF

SEQ ID NO: 255050 - protein, 15 aa, Homo sapiens
  CDR3 for beta chain variable domain of TCR clone 127525 (TRBV20-1, TRBJ2-7)
CSASGPLAGGREQYF

SEQ ID NO: 255051 - protein, 11 aa, Homo sapiens
  CDR3 for alpha chain variable domain of TCR clone 127526 (TRAV2, TRAJ13)
CASGGYQKVTF

SEQ ID NO: 255052 - protein, 16 aa, Homo sapiens
  CDR3 for beta chain variable domain of TCR clone 127526 (TRBV4-2, TRBJ1-1)
CASSPSPGRAAPEAFF

SEQ ID NO: 255053 - protein, 15 aa, Homo sapiens
  CDR3 for alpha chain variable domain of TCR clone 127527 (TRAV3, TRAJ7)
CAVRDKDNGNNRLAF

SEQ ID NO: 255054 - protein, 19 aa, Homo sapiens
  CDR3 for beta chain variable domain of TCR clone 127527 (TRBV5-8, TRBJ2-3)
CASSFLGTSGGHRTDTQYF

SEQ ID NO: 255055 - protein, 15 aa, Homo sapiens
  CDR3 for alpha chain variable domain of TCR clone 127528 (TRAV8-3, TRAJ45)
CASSYSGGGAAGLTF

SEQ ID NO: 255056 - protein, 13 aa, Homo sapiens
  CDR3 for beta chain variable domain of TCR clone 127528 (TRBV19, TRBJ1-2)
CASSVPGQDGYTF

SEQ ID NO: 255057 - protein, 12 aa, Homo sapiens
  CDR3 for alpha chain variable domain of TCR clone 127529 (TRAV13-1, TRAJ49)
CAASPMGNQVYF

SEQ ID NO: 255058 - protein, 17 aa, Homo sapiens
  CDR3 for beta chain variable domain of TCR clone 127529 (TRBV11-2, TRBJ2-1)
CASSLYPPGVEYNEQFF

SEQ ID NO: 255059 - protein, 16 aa, Homo sapiens
  CDR3 for alpha chain variable domain of TCR clone 127530 (TRAV4, TRAJ22)
CLVGDLYSGSARQLTF

SEQ ID NO: 255060 - protein, 14 aa, Homo sapiens
  CDR3 for beta chain variable domain of TCR clone 127530 (TRBV7-9, TRBJ2-3)
CASSLEDGTDTQYF

SEQ ID NO: 255061 - protein, 10 aa, Homo sapiens
  CDR3 for alpha chain variable domain of TCR clone 127531 (TRAV23/DV6, TRAJ57)
CAASSTLSQG

SEQ ID NO: 255062 - protein, 13 aa, Homo sapiens
  CDR3 for beta chain variable domain of TCR clone 127531 (TRBV9, TRBJ2-1)
CASSVGQGGEQFF

SEQ ID NO: 255063 - protein, 13 aa, Homo sapiens
  CDR3 for alpha chain variable domain of TCR clone 127532 (TRAV8-3, TRAJ43)
CAVGPVNNNDMRF

SEQ ID NO: 255064 - protein, 12 aa, Homo sapiens
  CDR3 for beta chain variable domain of TCR clone 127532 (TRBV7-2, TRBJ1-6)
CASSLSSSPLHF

SEQ ID NO: 255065 - protein, 21 aa, Homo sapiens
  CDR3 for alpha chain variable domain of TCR clone 127533 (TRAV12-1, TRAJ32)
SSVIQPPTSMNYGGATNKLIF

SEQ ID NO: 255066 - protein, 15 aa, Homo sapiens
  CDR3 for beta chain variable domain of TCR clone 127533 (TRBV7-9, TRBJ2-2)
CASGPLDTFPGELLF

SEQ ID NO: 255067 - protein, 12 aa, Homo sapiens
  CDR3 for alpha chain variable domain of TCR clone 127534 (TRAV36/DV7, TRAJ37)
CACYGNTGKLIF

SEQ ID NO: 255068 - protein, 13 aa, Homo sapiens
  CDR3 for beta chain variable domain of TCR clone 127534 (TRBV4-2, TRBJ1-1)
CASSQAGNTEAFF

SEQ ID NO: 255069 - protein, 12 aa, Homo sapiens
  CDR3 for alpha chain variable domain of TCR clone 127535 (TRAV12-3, TRAJ20)
CAMVRGDYKLGF

SEQ ID NO: 255070 - protein, 12 aa, Homo sapiens
  CDR3 for beta chain variable domain of TCR clone 127535 (TRBV29-1, TRBJ1-1)
CSESDGNTEAFF

SEQ ID NO: 255071 - protein, 11 aa, Homo sapiens
  CDR3 for alpha chain variable domain of TCR clone 127536 (TRAV30, TRAJ23)
CGTEIAGKLIF

SEQ ID NO: 255072 - protein, 14 aa, Homo sapiens
  CDR3 for beta chain variable domain of TCR clone 127536 (TRBV7-8, TRBJ2-3)
CASSLEAGTDTQYF

SEQ ID NO: 255073 - protein, 15 aa, Homo sapiens
  CDR3 for alpha chain variable domain of TCR clone 127537 (TRAV21, TRAJ10)
CAVPLLTGGGNKPTF

SEQ ID NO: 255074 - protein, 14 aa, Homo sapiens
  CDR3 for beta chain variable domain of TCR clone 127537 (TRBV12-4, TRBJ1-1)
CASSLGTGGTEAFF

SEQ ID NO: 255075 - protein, 16 aa, Homo sapiens
  CDR3 for alpha chain variable domain of TCR clone 127538 (TRAV16, TRAJ4)
CITVLPFSGGYNNLIF

SEQ ID NO: 255076 - protein, 14 aa, Homo sapiens
  CDR3 for beta chain variable domain of TCR clone 127538 (TRBV19, TRBJ2-7)
CASSMGQGAIEQYF

SEQ ID NO: 255077 - protein, 13 aa, Homo sapiens
  CDR3 for alpha chain variable domain of TCR clone 127539 (TRAV23/DV6, TRAJ47)
CAASMTRGKKLVF

SEQ ID NO: 255078 - protein, 14 aa, Homo sapiens
  CDR3 for beta chain variable domain of TCR clone 127539 (TRBV7-3, TRBJ1-1)
CASSLKGGNTEAFF

SEQ ID NO: 255079 - protein, 15 aa, Homo sapiens
  CDR3 for alpha chain variable domain of TCR clone 127540 (TRAV3, TRAJ3)
CAVRDRRSSASKIIF

SEQ ID NO: 255080 - protein, 17 aa, Homo sapiens
  CDR3 for beta chain variable domain of TCR clone 127540 (TRBV5-7, TRBJ2-5)
CQQHARFGQPYQETQYF

SEQ ID NO: 255081 - protein, 13 aa, Homo sapiens
  CDR3 for alpha chain variable domain of TCR clone 127541 (TRAV36/DV7, TRAJ34)
CAVGEVNTDKLIF

SEQ ID NO: 255082 - protein, 14 aa, Homo sapiens
  CDR3 for beta chain variable domain of TCR clone 127541 (TRBV25-1, TRBJ1-1)
CASTHLGGNTEAFF

SEQ ID NO: 255083 - protein, 13 aa, Homo sapiens
  CDR3 for alpha chain variable domain of TCR clone 127542 (TRAV26-1, TRAJ39)
CIVRVVAGNMLTF

SEQ ID NO: 255084 - protein, 13 aa, Homo sapiens
  CDR3 for beta chain variable domain of TCR clone 127542 (TRBV7-3, TRBJ1-1)
CASSQDWGAEAFF

SEQ ID NO: 255085 - protein, 11 aa, Homo sapiens
  CDR3 for alpha chain variable domain of TCR clone 127543 (TRAV1-2, TRAJ20)
CAVANDYKLSF

SEQ ID NO: 255086 - protein, 14 aa, Homo sapiens
  CDR3 for beta chain variable domain of TCR clone 127543 (TRBV7-7, TRBJ2-7)
CASSLGRGVGEQYF

SEQ ID NO: 255087 - protein, 15 aa, Homo sapiens
  CDR3 for alpha chain variable domain of TCR clone 127544 (TRAV8-3, TRAJ23)
CAVGDRYNQGGKLIS

SEQ ID NO: 255088 - protein, 22 aa, Homo sapiens
  CDR3 for beta chain variable domain of TCR clone 127544 (TRBV29-1, TRBJ2-5)
TVSNMSPEDSSIYLCSAGTQYF

SEQ ID NO: 255089 - protein, 11 aa, Homo sapiens
  CDR3 for alpha chain variable domain of TCR clone 127545 (TRAV2, TRAJ13)
CASGGYQKVTF

SEQ ID NO: 255090 - protein, 13 aa, Homo sapiens
  CDR3 for beta chain variable domain of TCR clone 127545 (TRBV12-4, TRBJ1-2)
CASSLRQGKGYSF

SEQ ID NO: 255091 - protein, 16 aa, Homo sapiens
  CDR3 for alpha chain variable domain of TCR clone 127546 (TRAV16, TRAJ52)
CALSAAGGTSYGKLTF

SEQ ID NO: 255092 - protein, 16 aa, Homo sapiens
  CDR3 for beta chain variable domain of TCR clone 127546 (TRBV12-4, TRBJ1-5)
CASSRPVGGSNRPQHF

SEQ ID NO: 255093 - protein, 13 aa, Homo sapiens
  CDR3 for alpha chain variable domain of TCR clone 127547 (TRAV26-2, TRAJ43)
CILRAVNNNDMRF

SEQ ID NO: 255094 - protein, 15 aa, Homo sapiens
  CDR3 for beta chain variable domain of TCR clone 127547 (TRBV5-8, TRBJ2-2)
CASSLDRGATGELFF

SEQ ID NO: 255095 - protein, 12 aa, Homo sapiens
  CDR3 for alpha chain variable domain of TCR clone 127548 (TRAV12-3, TRAJ17)
CAMTLTGNTLTF

SEQ ID NO: 255096 - protein, 15 aa, Homo sapiens
  CDR3 for beta chain variable domain of TCR clone 127548 (TRBV20-1, TRBJ2-7)
CSARDRVPGMDEHYF

SEQ ID NO: 255097 - protein, 12 aa, Homo sapiens
  CDR3 for alpha chain variable domain of TCR clone 127549 (TRAV13-2, TRAJ23)
CAERHRGGKLIF

SEQ ID NO: 255098 - protein, 16 aa, Homo sapiens
  CDR3 for beta chain variable domain of TCR clone 127549 (TRBV20-1, TRBJ1-4)
CSAPGQGLFTNEKLFF

SEQ ID NO: 255099 - protein, 11 aa, Homo sapiens
  CDR3 for alpha chain variable domain of TCR clone 127550 (TRAV1-2, TRAJ21)
CALYNFNKFYF

SEQ ID NO: 255100 - protein, 16 aa, Homo sapiens
  CDR3 for beta chain variable domain of TCR clone 127550 (TRBV7-3, TRBJ2-2)
CASSLKRGTLSGELFF

SEQ ID NO: 255101 - protein, 12 aa, Homo sapiens
  CDR3 for alpha chain variable domain of TCR clone 127551 (TRAV17, TRAJ28)
WDCGAGSYQLTF

SEQ ID NO: 255102 - protein, 13 aa, Homo sapiens
  CDR3 for beta chain variable domain of TCR clone 127551 (TRBV11-3, TRBJ1-1)
CASSRQPNTEAFF

SEQ ID NO: 255103 - protein, 14 aa, Homo sapiens
  CDR3 for alpha chain variable domain of TCR clone 127552 (TRAV13-1, TRAJ35)
CAASKGGFGNVLHC

SEQ ID NO: 255104 - protein, 13 aa, Homo sapiens
  CDR3 for beta chain variable domain of TCR clone 127552 (TRBV7-3, TRBJ1-1)
CASSQDWGAEAVC

SEQ ID NO: 255105 - protein, 12 aa, Homo sapiens
  CDR3 for alpha chain variable domain of TCR clone 127553 (TRAV16, TRAJ57)
CALEGGAEKLVF

SEQ ID NO: 255106 - protein, 12 aa, Homo sapiens
  CDR3 for beta chain variable domain of TCR clone 127553 (TRBV28, TRBJ2-7)
CASSGRPYEQYF

SEQ ID NO: 255107 - protein, 12 aa, Homo sapiens
  CDR3 for alpha chain variable domain of TCR clone 127554 (TRAV1-2, TRAJ29)
CAVPSGNTPLVF

SEQ ID NO: 255108 - protein, 15 aa, Homo sapiens
  CDR3 for beta chain variable domain of TCR clone 127554 (TRBV7-2, TRBJ1-2)
CASSPRAGWNYGYTF

SEQ ID NO: 255109 - protein, 13 aa, Homo sapiens
  CDR3 for alpha chain variable domain of TCR clone 127555 (TRAV12-1, TRAJ34)
CLVTGYNTDKLIF

SEQ ID NO: 255110 - protein, 13 aa, Homo sapiens
  CDR3 for beta chain variable domain of TCR clone 127555 (TRBV28, TRBJ2-7)
CASKAGGVYEQYF

SEQ ID NO: 255111 - protein, 13 aa, Homo sapiens
  CDR3 for alpha chain variable domain of TCR clone 127556 (TRAV20, TRAJ21)
CAVEGYNFNKFYF

SEQ ID NO: 255112 - protein, 11 aa, Homo sapiens
  CDR3 for beta chain variable domain of TCR clone 127556 (TRBV6-3, TRBJ2-3)
CATGQADTQYF

SEQ ID NO: 255113 - protein, 15 aa, Homo sapiens
  CDR3 for alpha chain variable domain of TCR clone 127557 (TRAV12-1, TRAJ44)
CVVFVNTGTASKLTF

SEQ ID NO: 255114 - protein, 14 aa, Homo sapiens
  CDR3 for beta chain variable domain of TCR clone 127557 (TRBV4-1, TRBJ2-2)
CASSQAVNTGELFF

SEQ ID NO: 255115 - protein, 13 aa, Homo sapiens
  CDR3 for alpha chain variable domain of TCR clone 127558 (TRAV1-1, TRAJ23)
CAVVANQGGKLIF

SEQ ID NO: 255116 - protein, 16 aa, Homo sapiens
  CDR3 for beta chain variable domain of TCR clone 127558 (TRBV5-5, TRBJ1-2)
CASSPTWGRGLYGYTV

SEQ ID NO: 255117 - protein, 16 aa, Homo sapiens
  CDR3 for alpha chain variable domain of TCR clone 127559 (TRAV12-3, TRAJ53)
CAMSPGSGGSNSKLTF

SEQ ID NO: 255118 - protein, 13 aa, Homo sapiens
  CDR3 for beta chain variable domain of TCR clone 127559 (TRBV7-2, TRBJ2-5)
CASSQTSVETQYF

SEQ ID NO: 255119 - protein, 15 aa, Homo sapiens
  CDR3 for alpha chain variable domain of TCR clone 127560 (TRAV34, TRAJ38)
CGADFTPGNNRKLIW

SEQ ID NO: 255120 - protein, 15 aa, Homo sapiens
  CDR3 for beta chain variable domain of TCR clone 127560 (TRBV7-2, TRBJ2-1)
CASSSGLAGGNEQFF

SEQ ID NO: 255121 - protein, 16 aa, Homo sapiens
  CDR3 for alpha chain variable domain of TCR clone 127561 (TRAV3, TRAJ37)
CAVRGKGSGNTGKQIF

SEQ ID NO: 255122 - protein, 16 aa, Homo sapiens
  CDR3 for beta chain variable domain of TCR clone 127561 (TRBV12-4, TRBJ1-5)
CASSRPVGGSNQPQHF

SEQ ID NO: 255123 - protein, 15 aa, Homo sapiens
  CDR3 for alpha chain variable domain of TCR clone 127562 (TRAV12-2, TRAJ53)
CAVNTGGGRNYKLTF

SEQ ID NO: 255124 - protein, 15 aa, Homo sapiens
  CDR3 for beta chain variable domain of TCR clone 127562 (TRBV5-1, TRBJ2-5)
CASSLGLGEIKTQYF

SEQ ID NO: 255125 - protein, 14 aa, Homo sapiens
  CDR3 for alpha chain variable domain of TCR clone 127563 (TRAV12-2, TRAJ17)
CAVNIKAAGNKLTF

SEQ ID NO: 255126 - protein, 16 aa, Homo sapiens
  CDR3 for beta chain variable domain of TCR clone 127563 (TRBV20-1, TRBJ2-6)
CSAGSQGYDGANVLTF

SEQ ID NO: 255127 - protein, 17 aa, Homo sapiens
  CDR3 for alpha chain variable domain of TCR clone 127564 (TRAV13-1, TRAJ52)
CAAGRNAGGTSYGKLTF

SEQ ID NO: 255128 - protein, 15 aa, Homo sapiens
  CDR3 for beta chain variable domain of TCR clone 127564 (TRBV6-5, TRBJ2-1)
CASSYDAGAGNEQFF

SEQ ID NO: 255129 - protein, 13 aa, Homo sapiens
  CDR3 for alpha chain variable domain of TCR clone 127565 (TRAV26-1, TRAJ30)
CIVNMTRDDKIIF

SEQ ID NO: 255130 - protein, 16 aa, Homo sapiens
  CDR3 for beta chain variable domain of TCR clone 127565 (TRBV16, TRBJ2-7)
CASSRPAGGSSYEQYF

SEQ ID NO: 255131 - protein, 14 aa, Homo sapiens
  CDR3 for alpha chain variable domain of TCR clone 127566 (TRAV1-2, TRAJ16)
CAVNRFSDGQKLLF

SEQ ID NO: 255132 - protein, 14 aa, Homo sapiens
  CDR3 for beta chain variable domain of TCR clone 127566 (TRBV7-9, TRBJ2-7)
CASSPRTGTYEQYF

SEQ ID NO: 255133 - protein, 15 aa, Homo sapiens
  CDR3 for alpha chain variable domain of TCR clone 127567 (TRAV3, TRAJ5)
CAVRDLDTGRRALTF

SEQ ID NO: 255134 - protein, 14 aa, Homo sapiens
  CDR3 for beta chain variable domain of TCR clone 127567 (TRBV19, TRBJ2-1)
CASPTFVLSGEQFF

SEQ ID NO: 255135 - protein, 13 aa, Homo sapiens
  CDR3 for alpha chain variable domain of TCR clone 127568 (TRAV38-1, TRAJ42)
CARWGGRQGNLIF

SEQ ID NO: 255136 - protein, 10 aa, Homo sapiens
  CDR3 for beta chain variable domain of TCR clone 127568 (TRBV2, TRBJ2-5)
CASSAATQYF

SEQ ID NO: 255137 - protein, 14 aa, Homo sapiens
  CDR3 for alpha chain variable domain of TCR clone 127569 (TRAV8-4, TRAJ4)
CAVSPSGGYNKLIF

SEQ ID NO: 255138 - protein, 15 aa, Homo sapiens
  CDR3 for beta chain variable domain of TCR clone 127569 (TRBV7-8, TRBJ2-3)
CASGLSADSGGAQYF

SEQ ID NO: 255139 - protein, 12 aa, Homo sapiens
  CDR3 for alpha chain variable domain of TCR clone 127570 (TRAV12-3, TRAJ17)
CATTLTGNKLTF

SEQ ID NO: 255140 - protein, 16 aa, Homo sapiens
  CDR3 for beta chain variable domain of TCR clone 127570 (TRBV12-4, TRBJ2-5)
CASSFFVRGRQETQYF

SEQ ID NO: 255141 - protein, 14 aa, Homo sapiens
  CDR3 for alpha chain variable domain of TCR clone 127571 (TRAV8-3, TRAJ39)
CAVGANNVGNMLTF

SEQ ID NO: 255142 - protein, 13 aa, Homo sapiens
  CDR3 for beta chain variable domain of TCR clone 127571 (TRBV3-1, TRBJ2-5)
CASSPVLSETQYF

SEQ ID NO: 255143 - protein, 11 aa, Homo sapiens
  CDR3 for alpha chain variable domain of TCR clone 127572 (TRAV17, TRAJ49)
CATDAGNQFYF

SEQ ID NO: 255144 - protein, 16 aa, Homo sapiens
  CDR3 for beta chain variable domain of TCR clone 127572 (TRBV7-2, TRBJ1-2)
CASSPTSGTSLGGYAF

SEQ ID NO: 255145 - protein, 13 aa, Homo sapiens
  CDR3 for alpha chain variable domain of TCR clone 127573 (TRAV1-1, TRAJ13)
CAVNSGGYQKVTF

SEQ ID NO: 255146 - protein, 12 aa, Homo sapiens
  CDR3 for beta chain variable domain of TCR clone 127573 (TRBV28, TRBJ2-1)
CASSVQINEQFL

SEQ ID NO: 255147 - protein, 11 aa, Homo sapiens
  CDR3 for alpha chain variable domain of TCR clone 127574 (TRAV35, TRAJ34)
CWARNTDKLIF

SEQ ID NO: 255148 - protein, 14 aa, Homo sapiens
  CDR3 for beta chain variable domain of TCR clone 127574 (TRBV5-1, TRBJ2-7)
CASSSGESLYEQYF

SEQ ID NO: 255149 - protein, 13 aa, Homo sapiens
  CDR3 for alpha chain variable domain of TCR clone 127575 (TRAV3, TRAJ30)
CAVRDRGEDKIIL

SEQ ID NO: 255150 - protein, 16 aa, Homo sapiens
  CDR3 for beta chain variable domain of TCR clone 127575 (TRBV7-3, TRBJ2-2)
CASSLKRGTLSGELFF

SEQ ID NO: 255151 - protein, 15 aa, Homo sapiens
  CDR3 for alpha chain variable domain of TCR clone 127576 (TRAV20, TRAJ41)
CAVQANSNSGHALNF

SEQ ID NO: 255152 - protein, 18 aa, Homo sapiens
  CDR3 for beta chain variable domain of TCR clone 127576 (TRBV7-9, TRBJ2-7)
CASSLTTSGSRTWYEQYF

SEQ ID NO: 255153 - protein, 14 aa, Homo sapiens
  CDR3 for alpha chain variable domain of TCR clone 127577 (TRAV1-2, TRAJ8)
CAVREDTGFQKLVF

SEQ ID NO: 255154 - protein, 15 aa, Homo sapiens
  CDR3 for beta chain variable domain of TCR clone 127577 (TRBV7-2, TRBJ2-1)
CASSLVGSSYNEQFF

SEQ ID NO: 255155 - protein, 17 aa, Homo sapiens
  CDR3 for alpha chain variable domain of TCR clone 127578 (TRAV13-1, TRAJ28)
CAASPHTLGLGVTNSLS

SEQ ID NO: 255156 - protein, 15 aa, Homo sapiens
  CDR3 for beta chain variable domain of TCR clone 127578 (TRBV6-3, TRBJ2-2)
CASSFLATLTGELFF

SEQ ID NO: 255157 - protein, 13 aa, Homo sapiens
  CDR3 for alpha chain variable domain of TCR clone 127579 (TRAV2, TRAJ15)
CAVASQAGTALIF

SEQ ID NO: 255158 - protein, 11 aa, Homo sapiens
  CDR3 for beta chain variable domain of TCR clone 127579 (TRBV11-2, TRBJ2-2)
CASSLPGELFF

SEQ ID NO: 255159 - protein, 11 aa, Homo sapiens
  CDR3 for alpha chain variable domain of TCR clone 127580 (TRAV21, TRAJ20)
CAAYNDYKLSF

SEQ ID NO: 255160 - protein, 15 aa, Homo sapiens
  CDR3 for beta chain variable domain of TCR clone 127580 (TRBV10-2, TRBJ2-6)
CASSEQGTGANVLTF

SEQ ID NO: 255161 - protein, 13 aa, Homo sapiens
  CDR3 for alpha chain variable domain of TCR clone 127581 (TRAV1-2, TRAJ9)
CAALNTGGFKTIF

SEQ ID NO: 255162 - protein, 12 aa, Homo sapiens
  CDR3 for beta chain variable domain of TCR clone 127581 (TRBV6-1, TRBJ2-1)
CATQKGGGHLFF

SEQ ID NO: 255163 - protein, 12 aa, Homo sapiens
  CDR3 for alpha chain variable domain of TCR clone 127582 (TRAV17, TRAJ57)
CATDGGSETLVF

SEQ ID NO: 255164 - protein, 13 aa, Homo sapiens
  CDR3 for beta chain variable domain of TCR clone 127582 (TRBV7-9, TRBJ2-7)
CASSFAGAYEQYF

SEQ ID NO: 255165 - protein, 16 aa, Homo sapiens
  CDR3 for alpha chain variable domain of TCR clone 127583 (TRAV17, TRAJ28)
CATASVSGAGSYQLTF

SEQ ID NO: 255166 - protein, 11 aa, Homo sapiens
  CDR3 for beta chain variable domain of TCR clone 127583 (TRBV7-9, TRBJ2-5)
CASSLGETRYF

SEQ ID NO: 255167 - protein, 13 aa, Homo sapiens
  CDR3 for alpha chain variable domain of TCR clone 127584 (TRAV21, TRAJ20)
CAVGLRVDYKLSF

SEQ ID NO: 255168 - protein, 15 aa, Homo sapiens
  CDR3 for beta chain variable domain of TCR clone 127584 (TRBV18, TRBJ1-1)
CASSGRTGEVTEAFF

SEQ ID NO: 255169 - protein, 14 aa, Homo sapiens
  CDR3 for alpha chain variable domain of TCR clone 127585 (TRAV9-2, TRAJ39)
CALYIYNAGNMLTF

SEQ ID NO: 255170 - protein, 16 aa, Homo sapiens
  CDR3 for beta chain variable domain of TCR clone 127585 (TRBV2, TRBJ1-1)
CASSQPNRGMNAEAFF

SEQ ID NO: 255171 - protein, 14 aa, Homo sapiens
  CDR3 for alpha chain variable domain of TCR clone 127586 (TRAV1-2, TRAJ16)
CAVNRFSDGQKLLF

SEQ ID NO: 255172 - protein, 16 aa, Homo sapiens
  CDR3 for beta chain variable domain of TCR clone 127586 (TRBV11-2, TRBJ1-2)
CASSLDKGGADYGYTF

SEQ ID NO: 255173 - protein, 13 aa, Homo sapiens
  CDR3 for alpha chain variable domain of TCR clone 127587 (TRAV29/DV5, TRAJ33)
CAASGESNYQLIW

SEQ ID NO: 255174 - protein, 14 aa, Homo sapiens
  CDR3 for beta chain variable domain of TCR clone 127587 (TRBV11-2, TRBJ2-5)
CASSRTGGIETQYF

SEQ ID NO: 255175 - protein, 15 aa, Homo sapiens
  CDR3 for alpha chain variable domain of TCR clone 127588 (TRAV4, TRAJ39)
CLVGPNNNAGNMLTF

SEQ ID NO: 255176 - protein, 19 aa, Homo sapiens
  CDR3 for beta chain variable domain of TCR clone 127588 (TRBV14, TRBJ2-1)
CASSQDKLWEAPEYNEQFF

SEQ ID NO: 255177 - protein, 14 aa, Homo sapiens
  CDR3 for alpha chain variable domain of TCR clone 127589 (TRAV27, TRAJ40)
CAGSLLRGTYKYIL

SEQ ID NO: 255178 - protein, 15 aa, Homo sapiens
  CDR3 for beta chain variable domain of TCR clone 127589 (TRBV6-3, TRBJ1-4)
CASSSPGQENEKLFF

SEQ ID NO: 255179 - protein, 14 aa, Homo sapiens
  CDR3 for alpha chain variable domain of TCR clone 127590 (TRAV23/DV6, TRAJ3)
CAASMASRASKIIF

SEQ ID NO: 255180 - protein, 13 aa, Homo sapiens
  CDR3 for beta chain variable domain of TCR clone 127590 (TRBV27, TRBJ2-5)
CASFSRGLETQYF

SEQ ID NO: 255181 - protein, 12 aa, Homo sapiens
  CDR3 for alpha chain variable domain of TCR clone 127591 (TRAV12-2, TRAJ10)
WGVTGGGNKLTF

SEQ ID NO: 255182 - protein, 16 aa, Homo sapiens
  CDR3 for beta chain variable domain of TCR clone 127591 (TRBV28, TRBJ2-7)
CASSLFFETGGPEQYF

SEQ ID NO: 255183 - protein, 18 aa, Homo sapiens
  CDR3 for alpha chain variable domain of TCR clone 127592 (TRAV26-1, TRAJ56)
CIVRVASRVTGANSKLTF

SEQ ID NO: 255184 - protein, 15 aa, Homo sapiens
  CDR3 for beta chain variable domain of TCR clone 127592 (TRBV7-9, TRBJ2-5)
CASGDTGRGRETQYF

SEQ ID NO: 255185 - protein, 23 aa, Homo sapiens
  CDR3 for alpha chain variable domain of TCR clone 127593 (TRAV13-2, TRAJ6)
CAEEVHQEGATYLHLEEEPALLF

SEQ ID NO: 255186 - protein, 13 aa, Homo sapiens
  CDR3 for beta chain variable domain of TCR clone 127593 (TRBV9, TRBJ2-7)
CASSVAEYYEQYF

SEQ ID NO: 255187 - protein, 17 aa, Homo sapiens
  CDR3 for alpha chain variable domain of TCR clone 127594 (TRAV29/DV5, TRAJ42)
CAASAGNYGGSQGNLIF

SEQ ID NO: 255188 - protein, 16 aa, Homo sapiens
  CDR3 for beta chain variable domain of TCR clone 127594 (TRBV27, TRBJ2-2)
FASSFRGLVRTGELFF

SEQ ID NO: 255189 - protein, 13 aa, Homo sapiens
  CDR3 for alpha chain variable domain of TCR clone 127595 (TRAV12-3, TRAJ54)
CAMSAQGAQKLVF

SEQ ID NO: 255190 - protein, 16 aa, Homo sapiens
  CDR3 for beta chain variable domain of TCR clone 127595 (TRBV7-6, TRBJ2-3)
CASSPRRGGLGDTQYF

SEQ ID NO: 255191 - protein, 15 aa, Homo sapiens
  CDR3 for alpha chain variable domain of TCR clone 127596 (TRAV13-1, TRAJ32)
CAASIYGGATNKLIF

SEQ ID NO: 255192 - protein, 10 aa, Homo sapiens
  CDR3 for beta chain variable domain of TCR clone 127596 (TRBV12-4, TRBJ2-2)
CASSLVAGTR

SEQ ID NO: 255193 - protein, 21 aa, Homo sapiens
  CDR3 for alpha chain variable domain of TCR clone 127597 (TRAV1-1, TRAJ6)
CLLLLRCERLERTGGSYIPTF

SEQ ID NO: 255194 - protein, 16 aa, Homo sapiens
  CDR3 for beta chain variable domain of TCR clone 127597 (TRBV7-9, TRBJ2-1)
CASSDVAGGSYNEQFF

SEQ ID NO: 255195 - protein, 13 aa, Homo sapiens
  CDR3 for alpha chain variable domain of TCR clone 127598 (TRAV27, TRAJ45)
CRSSGGGADGLTF

SEQ ID NO: 255196 - protein, 15 aa, Homo sapiens
  CDR3 for beta chain variable domain of TCR clone 127598 (TRBV4-1, TRBJ1-4)
CASSDTGGTNEKLFF

SEQ ID NO: 255197 - protein, 12 aa, Homo sapiens
  CDR3 for alpha chain variable domain of TCR clone 127599 (TRAV12-1, TRAJ40)
CVVYSGPYKYIF

SEQ ID NO: 255198 - protein, 18 aa, Homo sapiens
  CDR3 for beta chain variable domain of TCR clone 127599 (TRBV11-2, TRBJ2-3)
CASSLGGASRGAPNTQYF

SEQ ID NO: 255199 - protein, 14 aa, Homo sapiens
  CDR3 for alpha chain variable domain of TCR clone 127600 (TRAV8-3, TRAJ4)
CAVGAAGGYNKLIF

SEQ ID NO: 255200 - protein, 15 aa, Homo sapiens
  CDR3 for beta chain variable domain of TCR clone 127600 (TRBV6-5, TRBJ2-1)
CASSYDAGAGNEQVF

SEQ ID NO: 255201 - protein, 14 aa, Homo sapiens
  CDR3 for alpha chain variable domain of TCR clone 127601 (TRAV9-2, TRAJ39)
CALYIYNAGNMLTF

SEQ ID NO: 255202 - protein, 11 aa, Homo sapiens
  CDR3 for beta chain variable domain of TCR clone 127601 (TRBV7-8, TRBJ2-7)
CASSLSREQYF

SEQ ID NO: 255203 - protein, 14 aa, Homo sapiens
  CDR3 for alpha chain variable domain of TCR clone 127602 (TRAV12-3, TRAJ10)
SHLPLTGGGNKLTF

SEQ ID NO: 255204 - protein, 15 aa, Homo sapiens
  CDR3 for beta chain variable domain of TCR clone 127602 (TRBV7-2, TRBJ1-2)
CASSLVSGGDYGYTF

SEQ ID NO: 255205 - protein, 13 aa, Homo sapiens
  CDR3 for alpha chain variable domain of TCR clone 127603 (TRAV16, TRAJ34)
YALTGYNTDKLIF

SEQ ID NO: 255206 - protein, 13 aa, Homo sapiens
  CDR3 for beta chain variable domain of TCR clone 127603 (TRBV6-1, TRBJ2-1)
CASREDGGHEQFF

SEQ ID NO: 255207 - protein, 13 aa, Homo sapiens
  CDR3 for alpha chain variable domain of TCR clone 127604 (TRAV12-2, TRAJ54)
CAVRIQGAQKLVF

SEQ ID NO: 255208 - protein, 13 aa, Homo sapiens
  CDR3 for beta chain variable domain of TCR clone 127604 (TRBV4-1, TRBJ2-2)
CASSQENTGELFF

SEQ ID NO: 255209 - protein, 23 aa, Homo sapiens
  CDR3 for alpha chain variable domain of TCR clone 127605 (TRAV26-1, TRAJ38)
CIADNAGNNHIQNPDPAVYQLRD

SEQ ID NO: 255210 - protein, 13 aa, Homo sapiens
  CDR3 for beta chain variable domain of TCR clone 127605 (TRBV20-1, TRBJ1-1)
CSARGGGNSEAFF

SEQ ID NO: 255211 - protein, 12 aa, Homo sapiens
  CDR3 for alpha chain variable domain of TCR clone 127606 (TRAV13-1, TRAJ21)
CSAKEGLNKFYF

SEQ ID NO: 255212 - protein, 14 aa, Homo sapiens
  CDR3 for beta chain variable domain of TCR clone 127606 (TRBV5-4, TRBJ1-1)
CASSLDSRRDEAFF

SEQ ID NO: 255213 - protein, 14 aa, Homo sapiens
  CDR3 for alpha chain variable domain of TCR clone 127607 (TRAV8-4, TRAJ54)
CAVREVLGAQKLVF

SEQ ID NO: 255214 - protein, 17 aa, Homo sapiens
  CDR3 for beta chain variable domain of TCR clone 127607 (TRBV4-1, TRBJ1-4)
CASSQEGPRGVEEKLFF

SEQ ID NO: 255215 - protein, 13 aa, Homo sapiens
  CDR3 for alpha chain variable domain of TCR clone 127608 (TRAV35, TRAJ22)
CWAKAGFCKELTF

SEQ ID NO: 255216 - protein, 15 aa, Homo sapiens
  CDR3 for beta chain variable domain of TCR clone 127608 (TRBV12-4, TRBJ2-5)
CASSPPTGLQETQYF

SEQ ID NO: 255217 - protein, 14 aa, Homo sapiens
  CDR3 for alpha chain variable domain of TCR clone 127609 (TRAV8-3, TRAJ4)
CAVGASGGYTKLIF

SEQ ID NO: 255218 - protein, 13 aa, Homo sapiens
  CDR3 for beta chain variable domain of TCR clone 127609 (TRBV18, TRBJ2-5)
CASSLQGQETQYF

SEQ ID NO: 255219 - protein, 17 aa, Homo sapiens
  CDR3 for alpha chain variable domain of TCR clone 127610 (TRAV2, TRAJ36)
CAVEDSGNWGKQPLLWD

SEQ ID NO: 255220 - protein, 14 aa, Homo sapiens
  CDR3 for beta chain variable domain of TCR clone 127610 (TRBV7-9, TRBJ2-5)
CASSLDTAQETQYF

SEQ ID NO: 255221 - protein, 16 aa, Homo sapiens
  CDR3 for alpha chain variable domain of TCR clone 127611 (TRAV27, TRAJ53)
CAAPEGSGGSNYKMTF

SEQ ID NO: 255222 - protein, 15 aa, Homo sapiens
  CDR3 for beta chain variable domain of TCR clone 127611 (TRBV20-1, TRBJ1-1)
CSASRGVTGNTEAFF

SEQ ID NO: 255223 - protein, 11 aa, Homo sapiens
  CDR3 for alpha chain variable domain of TCR clone 127612 (TRAV12-3, TRAJ43)
CAMSVSNDMRF

SEQ ID NO: 255224 - protein, 17 aa, Homo sapiens
  CDR3 for beta chain variable domain of TCR clone 127612 (TRBV7-3, TRBJ2-3)
CASSLMKRMRGADTQYF

SEQ ID NO: 255225 - protein, 15 aa, Homo sapiens
  CDR3 for alpha chain variable domain of TCR clone 127613 (TRAV17, TRAJ57)
CATGPSQGGSEKLVF

SEQ ID NO: 255226 - protein, 12 aa, Homo sapiens
  CDR3 for beta chain variable domain of TCR clone 127613 (TRBV14, TRBJ1-1)
CASSQLKGLAFF

SEQ ID NO: 255227 - protein, 14 aa, Homo sapiens
  CDR3 for alpha chain variable domain of TCR clone 127614 (TRAV8-1, TRAJ49)
CASSIANTGNQFYF

SEQ ID NO: 255228 - protein, 14 aa, Homo sapiens
  CDR3 for beta chain variable domain of TCR clone 127614 (TRBV19, TRBJ2-1)
CASPTFVLSGEQFF

SEQ ID NO: 255229 - protein, 16 aa, Homo sapiens
  CDR3 for alpha chain variable domain of TCR clone 127615 (TRAV3, TRAJ37)
CAVRPHGSGNTGKLIF

SEQ ID NO: 255230 - protein, 15 aa, Homo sapiens
  CDR3 for beta chain variable domain of TCR clone 127615 (TRBV7-3, TRBJ2-1)
CASSSLAGVHNEQFF

SEQ ID NO: 255231 - protein, 15 aa, Homo sapiens
  CDR3 for alpha chain variable domain of TCR clone 127616 (TRAV21, TRAJ53)
CATLNRGGSNYKLTF

SEQ ID NO: 255232 - protein, 16 aa, Homo sapiens
  CDR3 for beta chain variable domain of TCR clone 127616 (TRBV12-4, TRBJ1-5)
CASSRPVGGSNQPQHF

SEQ ID NO: 255233 - protein, 12 aa, Homo sapiens
  CDR3 for alpha chain variable domain of TCR clone 127617 (TRAV12-3, TRAJ17)
CAMTLTGNKLTF

SEQ ID NO: 255234 - protein, 15 aa, Homo sapiens
  CDR3 for beta chain variable domain of TCR clone 127617 (TRBV20-1, TRBJ2-7)
GSARDRVSGMDEQYF

SEQ ID NO: 255235 - protein, 17 aa, Homo sapiens
  CDR3 for alpha chain variable domain of TCR clone 127618 (TRAV17, TRAJ52)
CATERPSGGTSYGKLTF

SEQ ID NO: 255236 - protein, 13 aa, Homo sapiens
  CDR3 for beta chain variable domain of TCR clone 127618 (TRBV7-9, TRBJ1-2)
CASSLEQNYGYTF

SEQ ID NO: 255237 - protein, 14 aa, Homo sapiens
  CDR3 for alpha chain variable domain of TCR clone 127619 (TRAV38-1, TRAJ45)
CAYYSGGGADGLTF

SEQ ID NO: 255238 - protein, 20 aa, Homo sapiens
  CDR3 for beta chain variable domain of TCR clone 127619 (TRBV28, TRBJ2-1)
CASTPIGRSPGLAGGNEQFF

SEQ ID NO: 255239 - protein, 16 aa, Homo sapiens
  CDR3 for alpha chain variable domain of TCR clone 127620 (TRAV16, TRAJ52)
CALSGVGGTSYGKMTF

SEQ ID NO: 255240 - protein, 14 aa, Homo sapiens
  CDR3 for beta chain variable domain of TCR clone 127620 (TRBV19, TRBJ1-2)
CASSLQGQAYGYTF

SEQ ID NO: 255241 - protein, 13 aa, Homo sapiens
  CDR3 for alpha chain variable domain of TCR clone 127621 (TRAV8-6, TRAJ13)
CAVSSGVYQKVTF

SEQ ID NO: 255242 - protein, 15 aa, Homo sapiens
  CDR3 for beta chain variable domain of TCR clone 127621 (TRBV7-9, TRBJ2-7)
CASSLPMGQANEQYF

SEQ ID NO: 255243 - protein, 14 aa, Homo sapiens
  CDR3 for alpha chain variable domain of TCR clone 127622 (TRAV8-1, TRAJ5)
CAVSMDTGRRALTF

SEQ ID NO: 255244 - protein, 12 aa, Homo sapiens
  CDR3 for beta chain variable domain of TCR clone 127622 (TRBV7-8, TRBJ2-7)
CASSLGDREQYF

SEQ ID NO: 255245 - protein, 15 aa, Homo sapiens
  CDR3 for alpha chain variable domain of TCR clone 127623 (TRAV21, TRAJ53)
CATLNSGGSNYKLTF

SEQ ID NO: 255246 - protein, 14 aa, Homo sapiens
  CDR3 for beta chain variable domain of TCR clone 127623 (TRBV15, TRBJ1-2)
RATSRASVNYGYTF

SEQ ID NO: 255247 - protein, 11 aa, Homo sapiens
  CDR3 for alpha chain variable domain of TCR clone 127624 (TRAV16, TRAJ33)
CALHSNYQLIW

SEQ ID NO: 255248 - protein, 15 aa, Homo sapiens
  CDR3 for beta chain variable domain of TCR clone 127624 (TRBV4-1, TRBJ2-7)
CASSQQGQGFDGQYF

SEQ ID NO: 255249 - protein, 11 aa, Homo sapiens
  CDR3 for alpha chain variable domain of TCR clone 127625 (TRAV17, TRAJ9)
CGFTGGFKTIF

SEQ ID NO: 255250 - protein, 14 aa, Homo sapiens
  CDR3 for beta chain variable domain of TCR clone 127625 (TRBV7-9, TRBJ2-2)
CSSSLVQDTGELFF

SEQ ID NO: 255251 - protein, 11 aa, Homo sapiens
  CDR3 for alpha chain variable domain of TCR clone 127626 (TRAV12-2, TRAJ29)
CAVTLRSPPVF

SEQ ID NO: 255252 - protein, 16 aa, Homo sapiens
  CDR3 for beta chain variable domain of TCR clone 127626 (TRBV19, TRBJ1-5)
CASSIDRGGPRQPQHF

SEQ ID NO: 255253 - protein, 16 aa, Homo sapiens
  CDR3 for alpha chain variable domain of TCR clone 127627 (TRAV17, TRAJ22)
CATDAISSGSARQLTF

SEQ ID NO: 255254 - protein, 15 aa, Homo sapiens
  CDR3 for beta chain variable domain of TCR clone 127627 (TRBV5-1, TRBJ2-1)
CASSPPRAAYNEQFF

SEQ ID NO: 255255 - protein, 13 aa, Homo sapiens
  CDR3 for alpha chain variable domain of TCR clone 127628 (TRAV16, TRAJ31)
CALSAHNNARLMF

SEQ ID NO: 255256 - protein, 17 aa, Homo sapiens
  CDR3 for beta chain variable domain of TCR clone 127628 (TRBV12-4, TRBJ2-1)
CASSPGLAGGRTNEQFF

SEQ ID NO: 255257 - protein, 15 aa, Homo sapiens
  CDR3 for alpha chain variable domain of TCR clone 127629 (TRAV13-1, TRAJ10)
CAATILTGGGNKLTC

SEQ ID NO: 255258 - protein, 15 aa, Homo sapiens
  CDR3 for beta chain variable domain of TCR clone 127629 (TRBV2, TRBJ2-7)
CASTLLGSGATEQYF

SEQ ID NO: 255259 - protein, 15 aa, Homo sapiens
  CDR3 for alpha chain variable domain of TCR clone 127630 (TRAV3, TRAJ4)
CAVRDGTGGYNMLIF

SEQ ID NO: 255260 - protein, 16 aa, Homo sapiens
  CDR3 for beta chain variable domain of TCR clone 127630 (TRBV27, TRBJ2-2)
CASSSSGVSNTGELFF

SEQ ID NO: 255261 - protein, 14 aa, Homo sapiens
  CDR3 for alpha chain variable domain of TCR clone 127631 (TRAV12-2, TRAJ29)
CAVRRNSGNTPLVL

SEQ ID NO: 255262 - protein, 13 aa, Homo sapiens
  CDR3 for beta chain variable domain of TCR clone 127631 (TRBV12-4, TRBJ2-1)
CASSHYTDNEQFF

SEQ ID NO: 255263 - protein, 13 aa, Homo sapiens
  CDR3 for alpha chain variable domain of TCR clone 127632 (TRAV1-1, TRAJ29)
CAVRDRGNTPLVF

SEQ ID NO: 255264 - protein, 12 aa, Homo sapiens
  CDR3 for beta chain variable domain of TCR clone 127632 (TRBV11-2, TRBJ2-1)
CASSPGNNEQFF

SEQ ID NO: 255265 - protein, 13 aa, Homo sapiens
  CDR3 for alpha chain variable domain of TCR clone 127633 (TRAV21, TRAJ27)
CAALNTNAGKSTF

SEQ ID NO: 255266 - protein, 14 aa, Homo sapiens
  CDR3 for beta chain variable domain of TCR clone 127633 (TRBV23-1, TRBJ2-5)
CASSFLRSQETQYF

SEQ ID NO: 255267 - protein, 14 aa, Homo sapiens
  CDR3 for alpha chain variable domain of TCR clone 127634 (TRAV12-3, TRAJ10)
SHLPLTGGGNKLTF

SEQ ID NO: 255268 - protein, 12 aa, Homo sapiens
  CDR3 for beta chain variable domain of TCR clone 127634 (TRBV11-2, TRBJ2-2)
CASSLGGGELFL

SEQ ID NO: 255269 - protein, 16 aa, Homo sapiens
  CDR3 for alpha chain variable domain of TCR clone 127635 (TRAV12-3, TRAJ53)
CAMSPGSGGSNYKLTF

SEQ ID NO: 255270 - protein, 11 aa, Homo sapiens
  CDR3 for beta chain variable domain of TCR clone 127635 (TRBV12-4, TRBJ2-3)
CASTATDTQYF

SEQ ID NO: 255271 - protein, 14 aa, Homo sapiens
  CDR3 for alpha chain variable domain of TCR clone 127636 (TRAV38-1, TRAJ39)
CAFAYNNAGNILTF

SEQ ID NO: 255272 - protein, 15 aa, Homo sapiens
  CDR3 for beta chain variable domain of TCR clone 127636 (TRBV19, TRBJ2-6)
CASSIGPSGANVLTF

SEQ ID NO: 255273 - protein, 13 aa, Homo sapiens
  CDR3 for alpha chain variable domain of TCR clone 127637 (TRAV12-2, TRAJ20)
CAVYPSNDYKLSF

SEQ ID NO: 255274 - protein, 18 aa, Homo sapiens
  CDR3 for beta chain variable domain of TCR clone 127637 (TRBV7-9, TRBJ1-1)
CASSKPWDTMGMNTEAFF

SEQ ID NO: 255275 - protein, 14 aa, Homo sapiens
  CDR3 for alpha chain variable domain of TCR clone 127638 (TRAV12-2, TRAJ40)
CAVKIPSGTYKYIF

SEQ ID NO: 255276 - protein, 11 aa, Homo sapiens
  CDR3 for beta chain variable domain of TCR clone 127638 (TRBV6-1, TRBJ2-1)
CASISSNEQFF

SEQ ID NO: 255277 - protein, 14 aa, Homo sapiens
  CDR3 for alpha chain variable domain of TCR clone 127639 (TRAV17, TRAJ34)
CATDSREGTDKLIF

SEQ ID NO: 255278 - protein, 13 aa, Homo sapiens
  CDR3 for beta chain variable domain of TCR clone 127639 (TRBV11-2, TRBJ2-7)
CASSGTRPYEQYF

SEQ ID NO: 255279 - protein, 16 aa, Homo sapiens
  CDR3 for alpha chain variable domain of TCR clone 127640 (TRAV16, TRAJ42)
CARLREIGGSQGNLIF

SEQ ID NO: 255280 - protein, 15 aa, Homo sapiens
  CDR3 for beta chain variable domain of TCR clone 127640 (TRBV12-4, TRBJ2-5)
CASSPPTGLQETQYF

SEQ ID NO: 255281 - protein, 15 aa, Homo sapiens
  CDR3 for alpha chain variable domain of TCR clone 127641 (TRAV21, TRAJ32)
CAVNSYGGATNKLLF

SEQ ID NO: 255282 - protein, 18 aa, Homo sapiens
  CDR3 for beta chain variable domain of TCR clone 127641 (TRBV7-9, TRBJ2-1)
CASSTGLAEGSSYNEQFF

SEQ ID NO: 255283 - protein, 12 aa, Homo sapiens
  CDR3 for alpha chain variable domain of TCR clone 127642 (TRAV8-6, TRAJ43)
CAVSNNNNDMRF

SEQ ID NO: 255284 - protein, 15 aa, Homo sapiens
  CDR3 for beta chain variable domain of TCR clone 127642 (TRBV7-3, TRBJ2-6)
CASSVGGSGANVLTF

SEQ ID NO: 255285 - protein, 13 aa, Homo sapiens
  CDR3 for alpha chain variable domain of TCR clone 127643 (TRAV2, TRAJ40)
CAVVTSGTYKYIF

SEQ ID NO: 255286 - protein, 16 aa, Homo sapiens
  CDR3 for beta chain variable domain of TCR clone 127643 (TRBV6-1, TRBJ2-5)
CASSETLDRGAETQYF

SEQ ID NO: 255287 - protein, 15 aa, Homo sapiens
  CDR3 for alpha chain variable domain of TCR clone 127644 (TRAV3, TRAJ5)
CAVRDLNTGRRALTF

SEQ ID NO: 255288 - protein, 15 aa, Homo sapiens
  CDR3 for beta chain variable domain of TCR clone 127644 (TRBV28, TRBJ2-5)
CASSPPWSYQETQYF

SEQ ID NO: 255289 - protein, 16 aa, Homo sapiens
  CDR3 for alpha chain variable domain of TCR clone 127645 (TRAV4, TRAJ22)
CLVGDLYSGSARQLTF

SEQ ID NO: 255290 - protein, 15 aa, Homo sapiens
  CDR3 for beta chain variable domain of TCR clone 127645 (TRBV2, TRBJ1-5)
CASSGTVAINQPQHF

SEQ ID NO: 255291 - protein, 14 aa, Homo sapiens
  CDR3 for alpha chain variable domain of TCR clone 127646 (TRAV1-2, TRAJ8)
CAVREDTGFQQLVF

SEQ ID NO: 255292 - protein, 13 aa, Homo sapiens
  CDR3 for beta chain variable domain of TCR clone 127646 (TRBV14, TRBJ2-7)
CASSQDRRYEQYF

SEQ ID NO: 255293 - protein, 14 aa, Homo sapiens
  CDR3 for alpha chain variable domain of TCR clone 127647 (TRAV12-1, TRAJ17)
CVVNYKAAGNKLTF

SEQ ID NO: 255294 - protein, 16 aa, Homo sapiens
  CDR3 for beta chain variable domain of TCR clone 127647 (TRBV24-1, TRBJ2-3)
CATSDPGTGATDTQYF

SEQ ID NO: 255295 - protein, 12 aa, Homo sapiens
  CDR3 for alpha chain variable domain of TCR clone 127648 (TRAV27, TRAJ41)
CAGRNSGHALNF

SEQ ID NO: 255296 - protein, 15 aa, Homo sapiens
  CDR3 for beta chain variable domain of TCR clone 127648 (TRBV20-1, TRBJ1-5)
CSATSDRGLGQPQHF

SEQ ID NO: 255297 - protein, 12 aa, Homo sapiens
  CDR3 for alpha chain variable domain of TCR clone 127649 (TRAV21, TRAJ13)
PGPSGGYQKVTF

SEQ ID NO: 255298 - protein, 14 aa, Homo sapiens
  CDR3 for beta chain variable domain of TCR clone 127649 (TRBV19, TRBJ1-5)
CASSKMTGPQPQHF

SEQ ID NO: 255299 - protein, 16 aa, Homo sapiens
  CDR3 for alpha chain variable domain of TCR clone 127650 (TRAV4, TRAJ18)
CCVLLLGGSTLGRLYF

SEQ ID NO: 255300 - protein, 14 aa, Homo sapiens
  CDR3 for beta chain variable domain of TCR clone 127650 (TRBV18, TRBJ1-2)
CASSPSGRDYGYTF

SEQ ID NO: 255301 - protein, 15 aa, Homo sapiens
  CDR3 for alpha chain variable domain of TCR clone 127651 (TRAV13-1, TRAJ49)
CAVSTEGNTGNQFYF

SEQ ID NO: 255302 - protein, 12 aa, Homo sapiens
  CDR3 for beta chain variable domain of TCR clone 127651 (TRBV11-2, TRBJ2-2)
CASSLGGGELFF

SEQ ID NO: 255303 - protein, 12 aa, Homo sapiens
  CDR3 for alpha chain variable domain of TCR clone 127652 (TRAV26-2, TRAJ21)
CILKGNFNKFYF

SEQ ID NO: 255304 - protein, 14 aa, Homo sapiens
  CDR3 for beta chain variable domain of TCR clone 127652 (TRBV12-4, TRBJ1-1)
CASSRGTGGTEAFF

SEQ ID NO: 255305 - protein, 14 aa, Homo sapiens
  CDR3 for alpha chain variable domain of TCR clone 127653 (TRAV1-1, TRAJ27)
CAVIYNTNAGKSTF

SEQ ID NO: 255306 - protein, 16 aa, Homo sapiens
  CDR3 for beta chain variable domain of TCR clone 127653 (TRBV2, TRBJ2-7)
CASSEPWTGPSYEQYF

SEQ ID NO: 255307 - protein, 16 aa, Homo sapiens
  CDR3 for alpha chain variable domain of TCR clone 127654 (TRAV30, TRAJ24)
CGTEIVDADSWGKFQF

SEQ ID NO: 255308 - protein, 15 aa, Homo sapiens
  CDR3 for beta chain variable domain of TCR clone 127654 (TRBV19, TRBJ2-1)
CASSTGTSSYNEQFF

SEQ ID NO: 255309 - protein, 14 aa, Homo sapiens
  CDR3 for alpha chain variable domain of TCR clone 127655 (TRAV12-3, TRAJ10)
SHLPLTGGGNKLTF

SEQ ID NO: 255310 - protein, 14 aa, Homo sapiens
  CDR3 for beta chain variable domain of TCR clone 127655 (TRBV25-1, TRBJ1-1)
CAGTHLGGNTEAFF

SEQ ID NO: 255311 - protein, 15 aa, Homo sapiens
  CDR3 for alpha chain variable domain of TCR clone 127656 (TRAV6, TRAJ4)
RALGGFSGGYNKLIF

SEQ ID NO: 255312 - protein, 13 aa, Homo sapiens
  CDR3 for beta chain variable domain of TCR clone 127656 (TRBV19, TRBJ1-2)
CASSVPGQDGYTF

SEQ ID NO: 255313 - protein, 14 aa, Homo sapiens
  CDR3 for alpha chain variable domain of TCR clone 127657 (TRAV8-3, TRAJ4)
CAVGAAGGYNKLIF

SEQ ID NO: 255314 - protein, 14 aa, Homo sapiens
  CDR3 for beta chain variable domain of TCR clone 127657 (TRBV6-5, TRBJ2-1)
CQQLRCGAGNEQFF

SEQ ID NO: 255315 - protein, 15 aa, Homo sapiens
  CDR3 for alpha chain variable domain of TCR clone 127658 (TRAV14/DV4, TRAJ12)
CAMREERDSSYKLIF

SEQ ID NO: 255316 - protein, 17 aa, Homo sapiens
  CDR3 for beta chain variable domain of TCR clone 127658 (TRBV11-2, TRBJ2-1)
CASSLYPPGVEYNEQFF

SEQ ID NO: 255317 - protein, 15 aa, Homo sapiens
  CDR3 for alpha chain variable domain of TCR clone 127659 (TRAV12-2, TRAJ43)
CAFDMRFGAGTRLTV

SEQ ID NO: 255318 - protein, 18 aa, Homo sapiens
  CDR3 for beta chain variable domain of TCR clone 127659 (TRBV20-1, TRBJ2-3)
SSASGLAGGPGTTDTQYF

SEQ ID NO: 255319 - protein, 16 aa, Homo sapiens
  CDR3 for alpha chain variable domain of TCR clone 127660 (TRAV26-2, TRAJ57)
CILRDVGSGGPEKLVF

SEQ ID NO: 255320 - protein, 13 aa, Homo sapiens
  CDR3 for beta chain variable domain of TCR clone 127660 (TRBV18, TRBJ2-3)
CASSPGVTDTQYF

SEQ ID NO: 255321 - protein, 12 aa, Homo sapiens
  CDR3 for alpha chain variable domain of TCR clone 127661 (TRAV12-1, TRAJ30)
CVVNPRDDKIIF

SEQ ID NO: 255322 - protein, 15 aa, Homo sapiens
  CDR3 for beta chain variable domain of TCR clone 127661 (TRBV11-3, TRBJ2-1)
CASSLAGQTYNEQFF

SEQ ID NO: 255323 - protein, 18 aa, Homo sapiens
  CDR3 for alpha chain variable domain of TCR clone 127662 (TRAV26-2, TRAJ45)
CILRVDKYSGGGADGLTL

SEQ ID NO: 255324 - protein, 17 aa, Homo sapiens
  CDR3 for beta chain variable domain of TCR clone 127662 (TRBV25-1, TRBJ2-1)
CASSAYGQGRGVYEQFF

SEQ ID NO: 255325 - protein, 12 aa, Homo sapiens
  CDR3 for alpha chain variable domain of TCR clone 127663 (TRAV9-2, TRAJ36)
CALKKGAKNLFF

SEQ ID NO: 255326 - protein, 13 aa, Homo sapiens
  CDR3 for beta chain variable domain of TCR clone 127663 (TRBV27, TRBJ1-1)
CASSLSIGAEAFF

SEQ ID NO: 255327 - protein, 14 aa, Homo sapiens
  CDR3 for alpha chain variable domain of TCR clone 127664 (TRAV35, TRAJ38)
CAGANAGNNRKLIW

SEQ ID NO: 255328 - protein, 12 aa, Homo sapiens
  CDR3 for beta chain variable domain of TCR clone 127664 (TRBV19, TRBJ2-7)
CASTDRGYEQYF

SEQ ID NO: 255329 - protein, 13 aa, Homo sapiens
  CDR3 for alpha chain variable domain of TCR clone 127665 (TRAV17, TRAJ5)
CAPMDTGRRALTF

SEQ ID NO: 255330 - protein, 15 aa, Homo sapiens
  CDR3 for beta chain variable domain of TCR clone 127665 (TRBV6-6, TRBJ2-5)
CASSSGGGLEETQYF

SEQ ID NO: 255331 - protein, 14 aa, Homo sapiens
  CDR3 for alpha chain variable domain of TCR clone 127666 (TRAV30, TRAJ26)
CGTEIVSYGQNFVF

SEQ ID NO: 255332 - protein, 19 aa, Homo sapiens
  CDR3 for beta chain variable domain of TCR clone 127666 (TRBV7-3, TRBJ2-7)
RASSLRGPDSQRSSYEQYF

SEQ ID NO: 255333 - protein, 17 aa, Homo sapiens
  CDR3 for alpha chain variable domain of TCR clone 127667 (TRAV3, TRAJ12)
CAVRDGGRMDSSYKLIF

SEQ ID NO: 255334 - protein, 15 aa, Homo sapiens
  CDR3 for beta chain variable domain of TCR clone 127667 (TRBV7-2, TRBJ1-1)
CASSFAGDRDTEAFF

SEQ ID NO: 255335 - protein, 13 aa, Homo sapiens
  CDR3 for alpha chain variable domain of TCR clone 127668 (TRAV1-2, TRAJ9)
CAALNTGGFKTIF

SEQ ID NO: 255336 - protein, 18 aa, Homo sapiens
  CDR3 for beta chain variable domain of TCR clone 127668 (TRBV4-1, TRBJ1-5)
CASSQDPRGQGLNQPQHF

SEQ ID NO: 255337 - protein, 18 aa, Homo sapiens
  CDR3 for alpha chain variable domain of TCR clone 127669 (TRAV13-1, TRAJ52)
CAASKRSAGGTSYGKLTF

SEQ ID NO: 255338 - protein, 14 aa, Homo sapiens
  CDR3 for beta chain variable domain of TCR clone 127669 (TRBV7-2, TRBJ1-1)
CASSFLTGTTEAFF

SEQ ID NO: 255339 - protein, 13 aa, Homo sapiens
  CDR3 for alpha chain variable domain of TCR clone 127670 (TRAV16, TRAJ11)
CALMNSGYSTLTF

SEQ ID NO: 255340 - protein, 13 aa, Homo sapiens
  CDR3 for beta chain variable domain of TCR clone 127670 (TRBV19, TRBJ1-2)
CASSVPGQDGYTF

SEQ ID NO: 255341 - protein, 12 aa, Homo sapiens
  CDR3 for alpha chain variable domain of TCR clone 127671 (TRAV3, TRAJ43)
CAVRDPNNDMRF

SEQ ID NO: 255342 - protein, 15 aa, Homo sapiens
  CDR3 for beta chain variable domain of TCR clone 127671 (TRBV11-3, TRBJ1-5)
CASSLGTGFDQPQHF

SEQ ID NO: 255343 - protein, 14 aa, Homo sapiens
  CDR3 for alpha chain variable domain of TCR clone 127672 (TRAV21, TRAJ35)
CAVMPIGFGNVLHC

SEQ ID NO: 255344 - protein, 17 aa, Homo sapiens
  CDR3 for beta chain variable domain of TCR clone 127672 (TRBV15, TRBJ1-5)
CATSRVKGIYSNQPQHF

SEQ ID NO: 255345 - protein, 19 aa, Homo sapiens
  CDR3 for alpha chain variable domain of TCR clone 127673 (TRAV21, TRAJ31)
AASQPGDSAPPRANARLMF

SEQ ID NO: 255346 - protein, 14 aa, Homo sapiens
  CDR3 for beta chain variable domain of TCR clone 127673 (TRBV27, TRBJ2-1)
CAGSIAETYNEQFF

SEQ ID NO: 255347 - protein, 12 aa, Homo sapiens
  CDR3 for alpha chain variable domain of TCR clone 127674 (TRAV26-2, TRAJ47)
CILVEYGKKLVF

SEQ ID NO: 255348 - protein, 16 aa, Homo sapiens
  CDR3 for beta chain variable domain of TCR clone 127674 (TRBV18, TRBJ1-4)
CASSPLVGDRAEKLFF

SEQ ID NO: 255349 - protein, 13 aa, Homo sapiens
  CDR3 for alpha chain variable domain of TCR clone 127675 (TRAV13-2, TRAJ53)
CAENMGSNYKLTF

SEQ ID NO: 255350 - protein, 16 aa, Homo sapiens
  CDR3 for beta chain variable domain of TCR clone 127675 (TRBV29-1, TRBJ1-2)
CSVEANRDIANYGYTF

SEQ ID NO: 255351 - protein, 20 aa, Homo sapiens
  CDR3 for alpha chain variable domain of TCR clone 127676 (TRAV1-1, TRAJ4)
CLLLLRCEGFLSGGYNKLIF

SEQ ID NO: 255352 - protein, 16 aa, Homo sapiens
  CDR3 for beta chain variable domain of TCR clone 127676 (TRBV28, TRBJ1-4)
CTSSPPYRGRSEKLFF

SEQ ID NO: 255353 - protein, 12 aa, Homo sapiens
  CDR3 for alpha chain variable domain of TCR clone 127677 (TRAV17, TRAJ30)
CATDARDDKIIF

SEQ ID NO: 255354 - protein, 14 aa, Homo sapiens
  CDR3 for beta chain variable domain of TCR clone 127677 (TRBV7-2, TRBJ2-7)
CASSPKTSFYEQYF

SEQ ID NO: 255355 - protein, 12 aa, Homo sapiens
  CDR3 for alpha chain variable domain of TCR clone 127678 (TRAV13-1, TRAJ53)
CAAGGSNYKLTS

SEQ ID NO: 255356 - protein, 11 aa, Homo sapiens
  CDR3 for beta chain variable domain of TCR clone 127678 (TRBV2, TRBJ1-1)
CASREGTEAFF

SEQ ID NO: 255357 - protein, 21 aa, Homo sapiens
  CDR3 for alpha chain variable domain of TCR clone 127679 (TRAV13-1, TRAJ37)
CAATPKEIKHRQTNLWARENF

SEQ ID NO: 255358 - protein, 13 aa, Homo sapiens
  CDR3 for beta chain variable domain of TCR clone 127679 (TRBV20-1, TRBJ2-7)
CSATSEDSYEQYF

SEQ ID NO: 255359 - protein, 15 aa, Homo sapiens
  CDR3 for alpha chain variable domain of TCR clone 127680 (TRAV27, TRAJ38)
CAGRFNAGNNRKLIW

SEQ ID NO: 255360 - protein, 14 aa, Homo sapiens
  CDR3 for beta chain variable domain of TCR clone 127680 (TRBV6-1, TRBJ1-3)
CASVQGGGGNTIYF

SEQ ID NO: 255361 - protein, 12 aa, Homo sapiens
  CDR3 for alpha chain variable domain of TCR clone 127681 (TRAV1-1, TRAJ9)
CAVATGGFKTIF

SEQ ID NO: 255362 - protein, 14 aa, Homo sapiens
  CDR3 for beta chain variable domain of TCR clone 127681 (TRBV7-8, TRBJ2-5)
CASSATGGQETQYF

SEQ ID NO: 255363 - protein, 15 aa, Homo sapiens
  CDR3 for alpha chain variable domain of TCR clone 127682 (TRAV13-1, TRAJ3)
CAASKLASGASKIIF

SEQ ID NO: 255364 - protein, 16 aa, Homo sapiens
  CDR3 for beta chain variable domain of TCR clone 127682 (TRBV25-1, TRBJ1-5)
CASGAPTVNSNQPQHF

SEQ ID NO: 255365 - protein, 16 aa, Homo sapiens
  CDR3 for alpha chain variable domain of TCR clone 127683 (TRAV30, TRAJ24)
CGTEIVDADSWGKFQF

SEQ ID NO: 255366 - protein, 14 aa, Homo sapiens
  CDR3 for beta chain variable domain of TCR clone 127683 (TRBV5-4, TRBJ2-1)
CASSLDQGLNEQFF

SEQ ID NO: 255367 - protein, 13 aa, Homo sapiens
  CDR3 for alpha chain variable domain of TCR clone 127684 (TRAV8-3, TRAJ48)
CAVVPFGNEKLTF

SEQ ID NO: 255368 - protein, 15 aa, Homo sapiens
  CDR3 for beta chain variable domain of TCR clone 127684 (TRBV11-2, TRBJ2-1)
CSSSSPSTRYNEQFF

SEQ ID NO: 255369 - protein, 18 aa, Homo sapiens
  CDR3 for alpha chain variable domain of TCR clone 127685 (TRAV13-1, TRAJ52)
CAASKRSAGGTSYGKLTF

SEQ ID NO: 255370 - protein, 13 aa, Homo sapiens
  CDR3 for beta chain variable domain of TCR clone 127685 (TRBV6-5, TRBJ2-5)
CASSPQGGETQYF

SEQ ID NO: 255371 - protein, 14 aa, Homo sapiens
  CDR3 for alpha chain variable domain of TCR clone 127686 (TRAV21, TRAJ32)
CCGDYGGATNKLIF

SEQ ID NO: 255372 - protein, 20 aa, Homo sapiens
  CDR3 for beta chain variable domain of TCR clone 127686 (TRBV7-8, TRBJ2-1)
CASSLAHRLAGVRSYNEQFF

SEQ ID NO: 255373 - protein, 12 aa, Homo sapiens
  CDR3 for alpha chain variable domain of TCR clone 127687 (TRAV3, TRAJ31)
CAVRPRGPRLMF

SEQ ID NO: 255374 - protein, 17 aa, Homo sapiens
  CDR3 for beta chain variable domain of TCR clone 127687 (TRBV7-9, TRBJ1-5)
CASGASQGGYSNQPQHF

SEQ ID NO: 255375 - protein, 15 aa, Homo sapiens
  CDR3 for alpha chain variable domain of TCR clone 127688 (TRAV26-1, TRAJ29)
CIVRVEGSGNTPLVF

SEQ ID NO: 255376 - protein, 15 aa, Homo sapiens
  CDR3 for beta chain variable domain of TCR clone 127688 (TRBV19, TRBJ2-4)
CASRGPRRGENIQYF

SEQ ID NO: 255377 - protein, 15 aa, Homo sapiens
  CDR3 for alpha chain variable domain of TCR clone 127689 (TRAV3, TRAJ20)
CTVRDIKLSDYKLSF

SEQ ID NO: 255378 - protein, 15 aa, Homo sapiens
  CDR3 for beta chain variable domain of TCR clone 127689 (TRBV7-9, TRBJ1-6)
CASSSPGRGNSPLHF

SEQ ID NO: 255379 - protein, 15 aa, Homo sapiens
  CDR3 for alpha chain variable domain of TCR clone 127690 (TRAV3, TRAJ3)
CAVRDMSSSASKIIL

SEQ ID NO: 255380 - protein, 14 aa, Homo sapiens
  CDR3 for beta chain variable domain of TCR clone 127690 (TRBV6-6, TRBJ2-7)
CASSIAGGVDEQYF

SEQ ID NO: 255381 - protein, 14 aa, Homo sapiens
  CDR3 for alpha chain variable domain of TCR clone 127691 (TRAV3, TRAJ17)
CAVRDAAAGNKLNF

SEQ ID NO: 255382 - protein, 16 aa, Homo sapiens
  CDR3 for beta chain variable domain of TCR clone 127691 (TRBV20-1, TRBJ1-2)
CSASMGQGVANYGYTF

SEQ ID NO: 255383 - protein, 14 aa, Homo sapiens
  CDR3 for alpha chain variable domain of TCR clone 127692 (TRAV12-2, TRAJ13)
CAVKKTGGYQKVTF

SEQ ID NO: 255384 - protein, 12 aa, Homo sapiens
  CDR3 for beta chain variable domain of TCR clone 127692 (TRBV13, TRBJ2-7)
CASSLQAYEQYF

SEQ ID NO: 255385 - protein, 14 aa, Homo sapiens
  CDR3 for alpha chain variable domain of TCR clone 127693 (TRAV8-4, TRAJ9)
CAVRINTGGFKTIF

SEQ ID NO: 255386 - protein, 14 aa, Homo sapiens
  CDR3 for beta chain variable domain of TCR clone 127693 (TRBV27, TRBJ2-1)
CASRHLGGGKEQFF

SEQ ID NO: 255387 - protein, 13 aa, Homo sapiens
  CDR3 for alpha chain variable domain of TCR clone 127694 (TRAV27, TRAJ45)
CRSSGGGADGLTF

SEQ ID NO: 255388 - protein, 16 aa, Homo sapiens
  CDR3 for beta chain variable domain of TCR clone 127694 (TRBV11-2, TRBJ2-1)
CQRLIPPGVEYNEQFF

SEQ ID NO: 255389 - protein, 13 aa, Homo sapiens
  CDR3 for alpha chain variable domain of TCR clone 127695 (TRAV12-3, TRAJ13)
CAMSSGGYQKVTF

SEQ ID NO: 255390 - protein, 16 aa, Homo sapiens
  CDR3 for beta chain variable domain of TCR clone 127695 (TRBV27, TRBJ2-2)
CASSFRGLVRTGELFF

SEQ ID NO: 255391 - protein, 15 aa, Homo sapiens
  CDR3 for alpha chain variable domain of TCR clone 127696 (TRAV13-1, TRAJ36)
CAASIRQTGANNLFF

SEQ ID NO: 255392 - protein, 14 aa, Homo sapiens
  CDR3 for beta chain variable domain of TCR clone 127696 (TRBV6-1, TRBJ1-3)
FASVQGGGGNTIYF

SEQ ID NO: 255393 - protein, 19 aa, Homo sapiens
  CDR3 for alpha chain variable domain of TCR clone 127697 (TRAV26-1, TRAJ52)
CIVRAHRNAGGTSYGTLTF

SEQ ID NO: 255394 - protein, 15 aa, Homo sapiens
  CDR3 for beta chain variable domain of TCR clone 127697 (TRBV12-4, TRBJ2-5)
CASSPPTGLQETQYF

SEQ ID NO: 255395 - protein, 11 aa, Homo sapiens
  CDR3 for alpha chain variable domain of TCR clone 127698 (TRAV1-2, TRAJ20)
CAVANDYKLSF

SEQ ID NO: 255396 - protein, 18 aa, Homo sapiens
  CDR3 for beta chain variable domain of TCR clone 127698 (TRBV20-1, TRBJ2-6)
CSAETTPTLGSGANVLTF

SEQ ID NO: 255397 - protein, 12 aa, Homo sapiens
  CDR3 for alpha chain variable domain of TCR clone 127699 (TRAV12-2, TRAJ47)
CAVAEYGNKLGF

SEQ ID NO: 255398 - protein, 15 aa, Homo sapiens
  CDR3 for beta chain variable domain of TCR clone 127699 (TRBV28, TRBJ2-1)
CASSIIAGGRSEQFF

SEQ ID NO: 255399 - protein, 15 aa, Homo sapiens
  CDR3 for alpha chain variable domain of TCR clone 127700 (TRAV8-3, TRAJ27)
CAVGPSKTNAGKSTF

SEQ ID NO: 255400 - protein, 15 aa, Homo sapiens
  CDR3 for beta chain variable domain of TCR clone 127700 (TRBV29-1, TRBJ1-2)
CSVVLEAGSNYGYTF

SEQ ID NO: 255401 - protein, 14 aa, Homo sapiens
  CDR3 for alpha chain variable domain of TCR clone 127701 (TRAV16, TRAJ33)
CALSAMDSNYQLIL

SEQ ID NO: 255402 - protein, 15 aa, Homo sapiens
  CDR3 for beta chain variable domain of TCR clone 127701 (TRBV28, TRBJ2-7)
CASSLEAYPIYEQYF

SEQ ID NO: 255403 - protein, 16 aa, Homo sapiens
  CDR3 for alpha chain variable domain of TCR clone 127702 (TRAV20, TRAJ26)
CAVQHRRDNYGQNFVF

SEQ ID NO: 255404 - protein, 16 aa, Homo sapiens
  CDR3 for beta chain variable domain of TCR clone 127702 (TRBV3-1, TRBJ2-7)
CASSQGATGVAYEQYF

SEQ ID NO: 255405 - protein, 16 aa, Homo sapiens
  CDR3 for alpha chain variable domain of TCR clone 127703 (TRAV8-1, TRAJ39)
CAVNVPSYIAGNMLTF

SEQ ID NO: 255406 - protein, 15 aa, Homo sapiens
  CDR3 for beta chain variable domain of TCR clone 127703 (TRBV4-1, TRBJ2-3)
CASRSTRAGTDTQYF

SEQ ID NO: 255407 - protein, 14 aa, Homo sapiens
  CDR3 for alpha chain variable domain of TCR clone 127704 (TRAV12-3, TRAJ10)
SHLPLAGGGNKLTF

SEQ ID NO: 255408 - protein, 14 aa, Homo sapiens
  CDR3 for beta chain variable domain of TCR clone 127704 (TRBV19, TRBJ2-1)
CASPTFVLSGEQFF

SEQ ID NO: 255409 - protein, 14 aa, Homo sapiens
  CDR3 for alpha chain variable domain of TCR clone 127705 (TRAV12-3, TRAJ42)
CAMNYGGSQGNLIF

SEQ ID NO: 255410 - protein, 15 aa, Homo sapiens
  CDR3 for beta chain variable domain of TCR clone 127705 (TRBV5-7, TRBJ1-5)
CASSYVKLWDQPQHF

SEQ ID NO: 255411 - protein, 16 aa, Homo sapiens
  CDR3 for alpha chain variable domain of TCR clone 127706 (TRAV12-1, TRAJ43)
CVVNPHRFGAGTRLTE

SEQ ID NO: 255412 - protein, 16 aa, Homo sapiens
  CDR3 for beta chain variable domain of TCR clone 127706 (TRBV27, TRBJ2-2)
CASSSTGGGDTGELFF

SEQ ID NO: 255413 - protein, 16 aa, Homo sapiens
  CDR3 for alpha chain variable domain of TCR clone 127707 (TRAV30, TRAJ44)
CGTEDKRTGTASKLTL

SEQ ID NO: 255414 - protein, 16 aa, Homo sapiens
  CDR3 for beta chain variable domain of TCR clone 127707 (TRBV10-2, TRBJ2-7)
CASSESPGSSGFEQYF

SEQ ID NO: 255415 - protein, 13 aa, Homo sapiens
  CDR3 for alpha chain variable domain of TCR clone 127708 (TRAV3, TRAJ15)
CAVRDQAGTALIF

SEQ ID NO: 255416 - protein, 15 aa, Homo sapiens
  CDR3 for beta chain variable domain of TCR clone 127708 (TRBV11-1, TRBJ2-7)
CASSVNYGASYEQYF

SEQ ID NO: 255417 - protein, 15 aa, Homo sapiens
  CDR3 for alpha chain variable domain of TCR clone 127709 (TRAV8-4, TRAJ9)
YAVSDLEGGGFKTIF

SEQ ID NO: 255418 - protein, 13 aa, Homo sapiens
  CDR3 for beta chain variable domain of TCR clone 127709 (TRBV10-3, TRBJ2-7)
CASKLAVNYEQYF

SEQ ID NO: 255419 - protein, 15 aa, Homo sapiens
  CDR3 for alpha chain variable domain of TCR clone 127710 (TRAV34, TRAJ38)
CGADFTPGNNRKLIW

SEQ ID NO: 255420 - protein, 16 aa, Homo sapiens
  CDR3 for beta chain variable domain of TCR clone 127710 (TRBV12-5, TRBJ2-5)
CASGPRTGGNQETQYF

SEQ ID NO: 255421 - protein, 13 aa, Homo sapiens
  CDR3 for alpha chain variable domain of TCR clone 127711 (TRAV8-6, TRAJ9)
CVVWDTGGFKTIF

SEQ ID NO: 255422 - protein, 13 aa, Homo sapiens
  CDR3 for beta chain variable domain of TCR clone 127711 (TRBV27, TRBJ1-1)
CASSLSIGAEAFF

SEQ ID NO: 255423 - protein, 15 aa, Homo sapiens
  CDR3 for alpha chain variable domain of TCR clone 127712 (TRAV17, TRAJ23)
CATDTEDNQGGKLIF

SEQ ID NO: 255424 - protein, 12 aa, Homo sapiens
  CDR3 for beta chain variable domain of TCR clone 127712 (TRBV2, TRBJ2-1)
CAKREGYNEQFF

SEQ ID NO: 255425 - protein, 14 aa, Homo sapiens
  CDR3 for alpha chain variable domain of TCR clone 127713 (TRAV1-1, TRAJ27)
CAVIYNTNAGKSTF

SEQ ID NO: 255426 - protein, 15 aa, Homo sapiens
  CDR3 for beta chain variable domain of TCR clone 127713 (TRBV7-2, TRBJ2-1)
CASISGLAGGNEQFF

SEQ ID NO: 255427 - protein, 14 aa, Homo sapiens
  CDR3 for alpha chain variable domain of TCR clone 127714 (TRAV8-2, TRAJ4)
WVVSPSGGYNKLLF

SEQ ID NO: 255428 - protein, 15 aa, Homo sapiens
  CDR3 for beta chain variable domain of TCR clone 127714 (TRBV4-1, TRBJ1-4)
CASSDTGGTNEKLFF

SEQ ID NO: 255429 - protein, 14 aa, Homo sapiens
  CDR3 for alpha chain variable domain of TCR clone 127715 (TRAV1-2, TRAJ8)
CAVREDTGFQKLVF

SEQ ID NO: 255430 - protein, 15 aa, Homo sapiens
  CDR3 for beta chain variable domain of TCR clone 127715 (TRBV19, TRBJ2-7)
CASSIGGGLVNEQYF

SEQ ID NO: 255431 - protein, 13 aa, Homo sapiens
  CDR3 for alpha chain variable domain of TCR clone 127716 (TRAV36/DV7, TRAJ49)
CAGDSNTGNQFSF

SEQ ID NO: 255432 - protein, 12 aa, Homo sapiens
  CDR3 for beta chain variable domain of TCR clone 127716 (TRBV11-2, TRBJ2-2)
CASSLGGGELFF

SEQ ID NO: 255433 - protein, 11 aa, Homo sapiens
  CDR3 for alpha chain variable domain of TCR clone 127717 (TRAV27, TRAJ47)
SIVEYGNKLVF

SEQ ID NO: 255434 - protein, 18 aa, Homo sapiens
  CDR3 for beta chain variable domain of TCR clone 127717 (TRBV2, TRBJ2-1)
CDSRGLAGGPRTYNEQFF

SEQ ID NO: 255435 - protein, 15 aa, Homo sapiens
  CDR3 for alpha chain variable domain of TCR clone 127718 (TRAV13-1, TRAJ44)
CAASRGGGTASKLTF

SEQ ID NO: 255436 - protein, 16 aa, Homo sapiens
  CDR3 for beta chain variable domain of TCR clone 127718 (TRBV29-1, TRBJ2-7)
CSVEVVGTSGSYEKYF

SEQ ID NO: 255437 - protein, 16 aa, Homo sapiens
  CDR3 for alpha chain variable domain of TCR clone 127719 (TRAV3, TRAJ10)
CAVRDMWAGGGNKLTF

SEQ ID NO: 255438 - protein, 14 aa, Homo sapiens
  CDR3 for beta chain variable domain of TCR clone 127719 (TRBV7-2, TRBJ1-1)
CASSFLTGTTEAFF

SEQ ID NO: 255439 - protein, 14 aa, Homo sapiens
  CDR3 for alpha chain variable domain of TCR clone 127720 (TRAV12-1, TRAJ23)
CVGIVYNQGGKLIF

SEQ ID NO: 255440 - protein, 15 aa, Homo sapiens
  CDR3 for beta chain variable domain of TCR clone 127720 (TRBV20-1, TRBJ1-5)
CSAKPPGQGPQPQHF

SEQ ID NO: 255441 - protein, 14 aa, Homo sapiens
  CDR3 for alpha chain variable domain of TCR clone 127721 (TRAV13-1, TRAJ15)
FAASTNQAGTALIF

SEQ ID NO: 255442 - protein, 11 aa, Homo sapiens
  CDR3 for beta chain variable domain of TCR clone 127721 (TRBV7-2, TRBJ2-1)
CASSLRDNEFF

SEQ ID NO: 255443 - protein, 10 aa, Homo sapiens
  CDR3 for alpha chain variable domain of TCR clone 127722 (TRAV38-2/DV8, TRAJ40)
FASGTYKYIF

SEQ ID NO: 255444 - protein, 14 aa, Homo sapiens
  CDR3 for beta chain variable domain of TCR clone 127722 (TRBV7-9, TRBJ2-1)
CASSPRDSLYEQFF

SEQ ID NO: 255445 - protein, 10 aa, Homo sapiens
  CDR3 for alpha chain variable domain of TCR clone 127723 (TRAV12-1, TRAJ21)
CGLQQTLLWI

SEQ ID NO: 255446 - protein, 11 aa, Homo sapiens
  CDR3 for beta chain variable domain of TCR clone 127723 (TRBV18, TRBJ1-2)
CASSPLNGYTF

SEQ ID NO: 255447 - protein, 10 aa, Homo sapiens
  CDR3 for alpha chain variable domain of TCR clone 127724 (TRAV25, TRAJ17)
CQAAGNTLTF

SEQ ID NO: 255448 - protein, 13 aa, Homo sapiens
  CDR3 for beta chain variable domain of TCR clone 127724 (TRBV6-5, TRBJ2-2)
CASSLPGVGELFF

SEQ ID NO: 255449 - protein, 13 aa, Homo sapiens
  CDR3 for alpha chain variable domain of TCR clone 127725 (TRAV8-4, TRAJ48)
CAVSLFGNVKLTF

SEQ ID NO: 255450 - protein, 15 aa, Homo sapiens
  CDR3 for beta chain variable domain of TCR clone 127725 (TRBV20-1, TRBJ2-7)
CSARKGLAESYEQYF

SEQ ID NO: 255451 - protein, 12 aa, Homo sapiens
  CDR3 for alpha chain variable domain of TCR clone 127726 (TRAV12-1, TRAJ40)
CVVYSGTYKYIF

SEQ ID NO: 255452 - protein, 18 aa, Homo sapiens
  CDR3 for beta chain variable domain of TCR clone 127726 (TRBV11-2, TRBJ2-3)
SASSLGGASRGAPNTQYF

SEQ ID NO: 255453 - protein, 14 aa, Homo sapiens
  CDR3 for alpha chain variable domain of TCR clone 127727 (TRAV35, TRAJ13)
CAGSPSGGYQKVTF

SEQ ID NO: 255454 - protein, 17 aa, Homo sapiens
  CDR3 for beta chain variable domain of TCR clone 127727 (TRBV7-6, TRBJ2-5)
CASSRGLADPWGETQYF

SEQ ID NO: 255455 - protein, 15 aa, Homo sapiens
  CDR3 for alpha chain variable domain of TCR clone 127728 (TRAV12-3, TRAJ52)
CDGGAGGTSYGKLTF

SEQ ID NO: 255456 - protein, 13 aa, Homo sapiens
  CDR3 for beta chain variable domain of TCR clone 127728 (TRBV20-1, TRBJ2-5)
CSARGDYQETQYF

SEQ ID NO: 255457 - protein, 15 aa, Homo sapiens
  CDR3 for alpha chain variable domain of TCR clone 127729 (TRAV12-2, TRAJ50)
CAVNGLETSYDKVIF

SEQ ID NO: 255458 - protein, 13 aa, Homo sapiens
  CDR3 for beta chain variable domain of TCR clone 127729 (TRBV4-2, TRBJ1-1)
CASSQAGNTEAFF

SEQ ID NO: 255459 - protein, 11 aa, Homo sapiens
  CDR3 for alpha chain variable domain of TCR clone 127730 (TRAV21, TRAJ11)
CAVNGYSTLTF

SEQ ID NO: 255460 - protein, 14 aa, Homo sapiens
  CDR3 for beta chain variable domain of TCR clone 127730 (TRBV19, TRBJ2-1)
CARGARSFQWEQFF

SEQ ID NO: 255461 - protein, 13 aa, Homo sapiens
  CDR3 for alpha chain variable domain of TCR clone 127731 (TRAV17, TRAJ9)
CATDYTGGFKTIF

SEQ ID NO: 255462 - protein, 12 aa, Homo sapiens
  CDR3 for beta chain variable domain of TCR clone 127731 (TRBV29-1, TRBJ2-3)
CSVTGGADTQYF

SEQ ID NO: 255463 - protein, 11 aa, Homo sapiens
  CDR3 for alpha chain variable domain of TCR clone 127732 (TRAV2, TRAJ13)
CASGGYQKGTF

SEQ ID NO: 255464 - protein, 13 aa, Homo sapiens
  CDR3 for beta chain variable domain of TCR clone 127732 (TRBV24-1, TRBJ2-3)
CATSTGGTDTQYF

SEQ ID NO: 255465 - protein, 13 aa, Homo sapiens
  CDR3 for alpha chain variable domain of TCR clone 127733 (TRAV36/DV7, TRAJ49)
CAVEANTGNQFYF

SEQ ID NO: 255466 - protein, 15 aa, Homo sapiens
  CDR3 for beta chain variable domain of TCR clone 127733 (TRBV19, TRBJ1-2)
CASSVGQVLNYGYTF

SEQ ID NO: 255467 - protein, 14 aa, Homo sapiens
  CDR3 for alpha chain variable domain of TCR clone 127734 (TRAV26-1, TRAJ34)
CIVRFAYNTDKLIF

SEQ ID NO: 255468 - protein, 15 aa, Homo sapiens
  CDR3 for beta chain variable domain of TCR clone 127734 (TRBV20-1, TRBJ2-7)
CSARVPAAYFYEQYF

SEQ ID NO: 255469 - protein, 18 aa, Homo sapiens
  CDR3 for alpha chain variable domain of TCR clone 127735 (TRAV29/DV5, TRAJ52)
CAAGFRGAGGTSYGKLTF

SEQ ID NO: 255470 - protein, 16 aa, Homo sapiens
  CDR3 for beta chain variable domain of TCR clone 127735 (TRBV13, TRBJ2-2)
CASSPRTGEHTGELFF

SEQ ID NO: 255471 - protein, 22 aa, Homo sapiens
  CDR3 for alpha chain variable domain of TCR clone 127736 (TRAV12-2, TRAJ32)
CSSETPSPVIQPPKSATNKLIF

SEQ ID NO: 255472 - protein, 17 aa, Homo sapiens
  CDR3 for beta chain variable domain of TCR clone 127736 (TRBV7-3, TRBJ2-2)
CASSLSGTSGGTGELFF

SEQ ID NO: 255473 - protein, 14 aa, Homo sapiens
  CDR3 for alpha chain variable domain of TCR clone 127737 (TRAV35, TRAJ42)
CAGRYGGSQGNLIF

SEQ ID NO: 255474 - protein, 15 aa, Homo sapiens
  CDR3 for beta chain variable domain of TCR clone 127737 (TRBV7-9, TRBJ2-1)
CASSLGRGRANEQFF

SEQ ID NO: 255475 - protein, 14 aa, Homo sapiens
  CDR3 for alpha chain variable domain of TCR clone 127738 (TRAV27, TRAJ23)
CAGLSYNQGGKLIF

SEQ ID NO: 255476 - protein, 15 aa, Homo sapiens
  CDR3 for beta chain variable domain of TCR clone 127738 (TRBV19, TRBJ2-2)
CASSLNRGVIGELFF

SEQ ID NO: 255477 - protein, 14 aa, Homo sapiens
  CDR3 for alpha chain variable domain of TCR clone 127739 (TRAV12-1, TRAJ17)
CVVNPNAAGNKLTF

SEQ ID NO: 255478 - protein, 16 aa, Homo sapiens
  CDR3 for beta chain variable domain of TCR clone 127739 (TRBV20-1, TRBJ2-1)
CSASASGYSSYNEQFF

SEQ ID NO: 255479 - protein, 15 aa, Homo sapiens
  CDR3 for alpha chain variable domain of TCR clone 127740 (TRAV3, TRAJ17)
CAVSPKEAAGNKLTF

SEQ ID NO: 255480 - protein, 12 aa, Homo sapiens
  CDR3 for beta chain variable domain of TCR clone 127740 (TRBV7-9, TRBJ1-6)
CASSLRTSPLHF

SEQ ID NO: 255481 - protein, 14 aa, Homo sapiens
  CDR3 for alpha chain variable domain of TCR clone 127741 (TRAV12-3, TRAJ10)
SHLPLTGGGNKLTF

SEQ ID NO: 255482 - protein, 13 aa, Homo sapiens
  CDR3 for beta chain variable domain of TCR clone 127741 (TRBV4-1, TRBJ2-1)
CASSQAGGDEQFF

SEQ ID NO: 255483 - protein, 14 aa, Homo sapiens
  CDR3 for alpha chain variable domain of TCR clone 127742 (TRAV29/DV5, TRAJ45)
CAASFRGGADGLTF

SEQ ID NO: 255484 - protein, 18 aa, Homo sapiens
  CDR3 for beta chain variable domain of TCR clone 127742 (TRBV7-3, TRBJ2-3)
CASSSTGTYPGSTDTQYF

SEQ ID NO: 255485 - protein, 13 aa, Homo sapiens
  CDR3 for alpha chain variable domain of TCR clone 127743 (TRAV2, TRAJ37)
CAPWLWQHRQTNL

SEQ ID NO: 255486 - protein, 19 aa, Homo sapiens
  CDR3 for beta chain variable domain of TCR clone 127743 (TRBV20-1, TRBJ2-7)
CSARGLVEGTSGRGNEQYF

SEQ ID NO: 255487 - protein, 18 aa, Homo sapiens
  CDR3 for alpha chain variable domain of TCR clone 127744 (TRAV21, TRAJ52)
CAVRPSPAGGTSYGKLTF

SEQ ID NO: 255488 - protein, 19 aa, Homo sapiens
  CDR3 for beta chain variable domain of TCR clone 127744 (TRBV12-3, TRBJ2-1)
CASTLAFDPRDKEANEQFF

SEQ ID NO: 255489 - protein, 14 aa, Homo sapiens
  CDR3 for alpha chain variable domain of TCR clone 127745 (TRAV1-2, TRAJ8)
CAVREDTGFQKLGF

SEQ ID NO: 255490 - protein, 15 aa, Homo sapiens
  CDR3 for beta chain variable domain of TCR clone 127745 (TRBV15, TRBJ1-1)
CATSLQGGRNTEAFF

SEQ ID NO: 255491 - protein, 12 aa, Homo sapiens
  CDR3 for alpha chain variable domain of TCR clone 127746 (TRAV16, TRAJ49)
CALNEGGNQFDF

SEQ ID NO: 255492 - protein, 14 aa, Homo sapiens
  CDR3 for beta chain variable domain of TCR clone 127746 (TRBV7-9, TRBJ2-1)
CASRPTGLRNEQFF

SEQ ID NO: 255493 - protein, 13 aa, Homo sapiens
  CDR3 for alpha chain variable domain of TCR clone 127747 (TRAV16, TRAJ37)
CSLRGSNTGKLIF

SEQ ID NO: 255494 - protein, 15 aa, Homo sapiens
  CDR3 for beta chain variable domain of TCR clone 127747 (TRBV20-1, TRBJ2-1)
CSARGRGLSYNEQFF

SEQ ID NO: 255495 - protein, 15 aa, Homo sapiens
  CDR3 for alpha chain variable domain of TCR clone 127748 (TRAV34, TRAJ38)
CGADFTPGNNRKLIW

SEQ ID NO: 255496 - protein, 15 aa, Homo sapiens
  CDR3 for beta chain variable domain of TCR clone 127748 (TRBV11-3, TRBJ2-3)
CASLKDGREGDTQYF

SEQ ID NO: 255497 - protein, 18 aa, Homo sapiens
  CDR3 for alpha chain variable domain of TCR clone 127749 (TRAV13-1, TRAJ52)
CAASKRSAGGTSYGKLTF

SEQ ID NO: 255498 - protein, 13 aa, Homo sapiens
  CDR3 for beta chain variable domain of TCR clone 127749 (TRBV12-4, TRBJ1-2)
CASSLRQGKGNTF

SEQ ID NO: 255499 - protein, 15 aa, Homo sapiens
  CDR3 for alpha chain variable domain of TCR clone 127750 (TRAV3, TRAJ23)
CAVRDRGNQGGKLIF

SEQ ID NO: 255500 - protein, 15 aa, Homo sapiens
  CDR3 for beta chain variable domain of TCR clone 127750 (TRBV7-3, TRBJ2-1)
CRQLAPSGSYNEQFF

SEQ ID NO: 255501 - protein, 11 aa, Homo sapiens
  CDR3 for alpha chain variable domain of TCR clone 127751 (TRAV2, TRAJ23)
CAVEPRGKLIF

SEQ ID NO: 255502 - protein, 17 aa, Homo sapiens
  CDR3 for beta chain variable domain of TCR clone 127751 (TRBV20-1, TRBJ2-1)
CSASSSGLAGSYNEQFF

SEQ ID NO: 255503 - protein, 15 aa, Homo sapiens
  CDR3 for alpha chain variable domain of TCR clone 127752 (TRAV26-1, TRAJ29)
CIVRVEGSGNTPLVF

SEQ ID NO: 255504 - protein, 17 aa, Homo sapiens
  CDR3 for beta chain variable domain of TCR clone 127752 (TRBV15, TRBJ1-4)
CATSRYGTGDPNEKLFF

SEQ ID NO: 255505 - protein, 16 aa, Homo sapiens
  CDR3 for alpha chain variable domain of TCR clone 127753 (TRAV3, TRAJ37)
CAVRVRGSGNPGKLIF

SEQ ID NO: 255506 - protein, 13 aa, Homo sapiens
  CDR3 for beta chain variable domain of TCR clone 127753 (TRBV7-9, TRBJ1-2)
CASSLKQNYGYTF

SEQ ID NO: 255507 - protein, 11 aa, Homo sapiens
  CDR3 for alpha chain variable domain of TCR clone 127754 (TRAV2, TRAJ21)
CAVFNFNKFYF

SEQ ID NO: 255508 - protein, 13 aa, Homo sapiens
  CDR3 for beta chain variable domain of TCR clone 127754 (TRBV7-9, TRBJ2-3)
CASSPGSTDTQYF

SEQ ID NO: 255509 - protein, 15 aa, Homo sapiens
  CDR3 for alpha chain variable domain of TCR clone 127755 (TRAV26-1, TRAJ3)
CIVRSGYSSASQIIF

SEQ ID NO: 255510 - protein, 14 aa, Homo sapiens
  CDR3 for beta chain variable domain of TCR clone 127755 (TRBV13, TRBJ2-5)
CASYRRLAEETQYF

SEQ ID NO: 255511 - protein, 10 aa, Homo sapiens
  CDR3 for alpha chain variable domain of TCR clone 127756 (TRAV1-2, TRAJ31)
CAFFDARLMF

SEQ ID NO: 255512 - protein, 16 aa, Homo sapiens
  CDR3 for beta chain variable domain of TCR clone 127756 (TRBV20-1, TRBJ1-4)
CSAPGQGLLTNEKLFF

SEQ ID NO: 255513 - protein, 14 aa, Homo sapiens
  CDR3 for alpha chain variable domain of TCR clone 127757 (TRAV12-1, TRAJ27)
CGEHIRTNAGKSTF

SEQ ID NO: 255514 - protein, 15 aa, Homo sapiens
  CDR3 for beta chain variable domain of TCR clone 127757 (TRBV19, TRBJ1-1)
CASTSGRIQDTEAFF

SEQ ID NO: 255515 - protein, 13 aa, Homo sapiens
  CDR3 for alpha chain variable domain of TCR clone 127758 (TRAV13-1, TRAJ6)
CAASSGGSYIPTF

SEQ ID NO: 255516 - protein, 15 aa, Homo sapiens
  CDR3 for beta chain variable domain of TCR clone 127758 (TRBV12-4, TRBJ2-5)
CASSPPTGLQETQYF

SEQ ID NO: 255517 - protein, 11 aa, Homo sapiens
  CDR3 for alpha chain variable domain of TCR clone 127759 (TRAV2, TRAJ13)
CASGGYQKVTF

SEQ ID NO: 255518 - protein, 12 aa, Homo sapiens
  CDR3 for beta chain variable domain of TCR clone 127759 (TRBV11-2, TRBJ2-2)
CASSLGGGGLFF

SEQ ID NO: 255519 - protein, 13 aa, Homo sapiens
  CDR3 for alpha chain variable domain of TCR clone 127760 (TRAV12-1, TRAJ29)
CVVNGPGNTPLVF

SEQ ID NO: 255520 - protein, 12 aa, Homo sapiens
  CDR3 for beta chain variable domain of TCR clone 127760 (TRBV11-2, TRBJ2-2)
CASSLGGGELFF

SEQ ID NO: 255521 - protein, 15 aa, Homo sapiens
  CDR3 for alpha chain variable domain of TCR clone 127761 (TRAV27, TRAJ45)
CRSPQSGGGADGLTF

SEQ ID NO: 255522 - protein, 14 aa, Homo sapiens
  CDR3 for beta chain variable domain of TCR clone 127761 (TRBV19, TRBJ2-1)
CASPTFVLSGEQFF

SEQ ID NO: 255523 - protein, 11 aa, Homo sapiens
  CDR3 for alpha chain variable domain of TCR clone 127762 (TRAV3, TRAJ21)
CAVGNFNKFYF

SEQ ID NO: 255524 - protein, 15 aa, Homo sapiens
  CDR3 for beta chain variable domain of TCR clone 127762 (TRBV19, TRBJ2-7)
CASSPAGSGEALRYF

SEQ ID NO: 255525 - protein, 14 aa, Homo sapiens
  CDR3 for alpha chain variable domain of TCR clone 127763 (TRAV12-3, TRAJ58)
CAMSTETSGSRLTF

SEQ ID NO: 255526 - protein, 11 aa, Homo sapiens
  CDR3 for beta chain variable domain of TCR clone 127763 (TRBV29-1, TRBJ2-5)
CSEDRAGTQYF

SEQ ID NO: 255527 - protein, 14 aa, Homo sapiens
  CDR3 for alpha chain variable domain of TCR clone 127764 (TRAV35, TRAJ13)
CAGSPSGGYQKVTF

SEQ ID NO: 255528 - protein, 17 aa, Homo sapiens
  CDR3 for beta chain variable domain of TCR clone 127764 (TRBV4-1, TRBJ2-3)
CASSQGYVSGGTDTQYF

SEQ ID NO: 255529 - protein, 13 aa, Homo sapiens
  CDR3 for alpha chain variable domain of TCR clone 127765 (TRAV2, TRAJ15)
CAVATQAGTALIF

SEQ ID NO: 255530 - protein, 16 aa, Homo sapiens
  CDR3 for beta chain variable domain of TCR clone 127765 (TRBV5-1, TRBJ1-1)
CASSSGGNSLNTEAFF

SEQ ID NO: 255531 - protein, 18 aa, Homo sapiens
  CDR3 for alpha chain variable domain of TCR clone 127766 (TRAV12-3, TRAJ52)
CAMSVGGAGGTSYGKLTF

SEQ ID NO: 255532 - protein, 14 aa, Homo sapiens
  CDR3 for beta chain variable domain of TCR clone 127766 (TRBV19, TRBJ2-7)
CASSMGQGAIEQYF

SEQ ID NO: 255533 - protein, 12 aa, Homo sapiens
  CDR3 for alpha chain variable domain of TCR clone 127767 (TRAV12-1, )
CVGNSWISRTLT

SEQ ID NO: 255534 - protein, 11 aa, Homo sapiens
  CDR3 for beta chain variable domain of TCR clone 127767 (TRBV6-3, TRBJ2-3)
CATGQADTQYF

SEQ ID NO: 255535 - protein, 17 aa, Homo sapiens
  CDR3 for alpha chain variable domain of TCR clone 127768 (TRAV3, TRAJ42)
CAVRDRDYGGSQGNLIF

SEQ ID NO: 255536 - protein, 15 aa, Homo sapiens
  CDR3 for beta chain variable domain of TCR clone 127768 (TRBV6-6, TRBJ2-7)
CASSYSYGGSYEQYV

SEQ ID NO: 255537 - protein, 13 aa, Homo sapiens
  CDR3 for alpha chain variable domain of TCR clone 127769 (TRAV36/DV7, TRAJ37)
CAVFSSNPGKLIF

SEQ ID NO: 255538 - protein, 15 aa, Homo sapiens
  CDR3 for beta chain variable domain of TCR clone 127769 (TRBV20-1, TRBJ1-1)
CSARDPRGEYTEAFF

SEQ ID NO: 255539 - protein, 13 aa, Homo sapiens
  CDR3 for alpha chain variable domain of TCR clone 127770 (TRAV2, TRAJ40)
CAVVTSGTYKYIF

SEQ ID NO: 255540 - protein, 15 aa, Homo sapiens
  CDR3 for beta chain variable domain of TCR clone 127770 (TRBV28, TRBJ1-5)
CASSDQVYSNQPQHF

SEQ ID NO: 255541 - protein, 16 aa, Homo sapiens
  CDR3 for alpha chain variable domain of TCR clone 127771 (TRAV16, TRAJ57)
CAPYLITQGGSEKLVF

SEQ ID NO: 255542 - protein, 17 aa, Homo sapiens
  CDR3 for beta chain variable domain of TCR clone 127771 (TRBV24-1, TRBJ2-4)
CATSDAEARGVRNIQYC

SEQ ID NO: 255543 - protein, 13 aa, Homo sapiens
  CDR3 for alpha chain variable domain of TCR clone 127772 (TRAV13-1, TRAJ27)
CAAIGPEQANQPL

SEQ ID NO: 255544 - protein, 13 aa, Homo sapiens
  CDR3 for beta chain variable domain of TCR clone 127772 (TRBV20-1, TRBJ1-5)
CSARTGVNQPQHF

SEQ ID NO: 255545 - protein, 11 aa, Homo sapiens
  CDR3 for alpha chain variable domain of TCR clone 127773 (TRAV27, TRAJ20)
CAGLNDYKLSF

SEQ ID NO: 255546 - protein, 17 aa, Homo sapiens
  CDR3 for beta chain variable domain of TCR clone 127773 (TRBV7-3, TRBJ2-3)
CASSLMKRMRGADTQYF

SEQ ID NO: 255547 - protein, 13 aa, Homo sapiens
  CDR3 for alpha chain variable domain of TCR clone 127774 (TRAV2, TRAJ15)
CAVASQAGTALIF

SEQ ID NO: 255548 - protein, 13 aa, Homo sapiens
  CDR3 for beta chain variable domain of TCR clone 127774 (TRBV4-1, TRBJ1-1)
CASSRKMNTEAFF

SEQ ID NO: 255549 - protein, 14 aa, Homo sapiens
  CDR3 for alpha chain variable domain of TCR clone 127775 (TRAV2, TRAJ9)
CAVEDRSGGFKTIF

SEQ ID NO: 255550 - protein, 16 aa, Homo sapiens
  CDR3 for beta chain variable domain of TCR clone 127775 (TRBV6-1, TRBJ2-2)
CASSFGQGANTGELFF

SEQ ID NO: 255551 - protein, 14 aa, Homo sapiens
  CDR3 for alpha chain variable domain of TCR clone 127776 (TRAV12-1, TRAJ9)
CVVNRRTGGFKTIF

SEQ ID NO: 255552 - protein, 13 aa, Homo sapiens
  CDR3 for beta chain variable domain of TCR clone 127776 (TRBV19, TRBJ1-2)
CASSISEDYGYTF

SEQ ID NO: 255553 - protein, 12 aa, Homo sapiens
  CDR3 for alpha chain variable domain of TCR clone 127777 (TRAV12-3, TRAJ39)
CAMTQAGNMLIF

SEQ ID NO: 255554 - protein, 13 aa, Homo sapiens
  CDR3 for beta chain variable domain of TCR clone 127777 (TRBV20-1, TRBJ1-1)
CSAPEGGNTEAFF

SEQ ID NO: 255555 - protein, 13 aa, Homo sapiens
  CDR3 for alpha chain variable domain of TCR clone 127778 (TRAV12-2, TRAJ42)
CAVKRGSQGNLIF

SEQ ID NO: 255556 - protein, 11 aa, Homo sapiens
  CDR3 for beta chain variable domain of TCR clone 127778 (TRBV11-2, TRBJ2-2)
CASSLPGELFF

SEQ ID NO: 255557 - protein, 13 aa, Homo sapiens
  CDR3 for alpha chain variable domain of TCR clone 127779 (TRAV12-2, TRAJ20)
CAVYPSNAYKLSF

SEQ ID NO: 255558 - protein, 15 aa, Homo sapiens
  CDR3 for beta chain variable domain of TCR clone 127779 (TRBV27, TRBJ2-5)
CASSLYPRGGETQYF

SEQ ID NO: 255559 - protein, 15 aa, Homo sapiens
  CDR3 for alpha chain variable domain of TCR clone 127780 (TRAV12-3, TRAJ11)
CAMSEENSGYSTLTF

SEQ ID NO: 255560 - protein, 12 aa, Homo sapiens
  CDR3 for beta chain variable domain of TCR clone 127780 (TRBV7-3, TRBJ2-1)
CASSFINNEQFF

SEQ ID NO: 255561 - protein, 14 aa, Homo sapiens
  CDR3 for alpha chain variable domain of TCR clone 127781 (TRAV12-2, TRAJ13)
CAVKKTGGYQKVTF

SEQ ID NO: 255562 - protein, 14 aa, Homo sapiens
  CDR3 for beta chain variable domain of TCR clone 127781 (TRBV7-2, TRBJ2-7)
CASSPKTSFYEQYS

SEQ ID NO: 255563 - protein, 12 aa, Homo sapiens
  CDR3 for alpha chain variable domain of TCR clone 127782 (TRAV1-1, TRAJ8)
CAGGTGFQKLVF

SEQ ID NO: 255564 - protein, 15 aa, Homo sapiens
  CDR3 for beta chain variable domain of TCR clone 127782 (TRBV2, TRBJ1-1)
CASSEAQTMNTEAFF

SEQ ID NO: 255565 - protein, 14 aa, Homo sapiens
  CDR3 for alpha chain variable domain of TCR clone 127783 (TRAV35, TRAJ28)
CAGRRGGWELPTNF

SEQ ID NO: 255566 - protein, 13 aa, Homo sapiens
  CDR3 for beta chain variable domain of TCR clone 127783 (TRBV9, TRBJ2-1)
CASSPSGGSEQFF

SEQ ID NO: 255567 - protein, 15 aa, Homo sapiens
  CDR3 for alpha chain variable domain of TCR clone 127784 (TRAV21, TRAJ10)
CAVPLPTGGGNKLTF

SEQ ID NO: 255568 - protein, 14 aa, Homo sapiens
  CDR3 for beta chain variable domain of TCR clone 127784 (TRBV12-4, TRBJ1-1)
CASSLGTGGTEAFF

SEQ ID NO: 255569 - protein, 12 aa, Homo sapiens
  CDR3 for alpha chain variable domain of TCR clone 127785 (TRAV3, TRAJ43)
CAVRDPNNDMRF

SEQ ID NO: 255570 - protein, 15 aa, Homo sapiens
  CDR3 for beta chain variable domain of TCR clone 127785 (TRBV28, TRBJ1-5)
CASSLGTGFDQPQHF

SEQ ID NO: 255571 - protein, 11 aa, Homo sapiens
  CDR3 for alpha chain variable domain of TCR clone 127786 (TRAV3, TRAJ21)
CAVGNFNKFYF

SEQ ID NO: 255572 - protein, 16 aa, Homo sapiens
  CDR3 for beta chain variable domain of TCR clone 127786 (TRBV19, TRBJ2-1)
CANSKAGPSAYNEQFF

SEQ ID NO: 255573 - protein, 15 aa, Homo sapiens
  CDR3 for alpha chain variable domain of TCR clone 127787 (TRAV3, TRAJ47)
CAVRDIGVYGNKLVF

SEQ ID NO: 255574 - protein, 14 aa, Homo sapiens
  CDR3 for beta chain variable domain of TCR clone 127787 (TRBV13, TRBJ2-5)
CASSLERVGETQYF

SEQ ID NO: 255575 - protein, 14 aa, Homo sapiens
  CDR3 for alpha chain variable domain of TCR clone 127788 (TRAV12-2, TRAJ44)
CAVNPAGTASKLTF

SEQ ID NO: 255576 - protein, 13 aa, Homo sapiens
  CDR3 for beta chain variable domain of TCR clone 127788 (TRBV20-1, TRBJ1-6)
CSAPLGVGSPLQF

SEQ ID NO: 255577 - protein, 13 aa, Homo sapiens
  CDR3 for alpha chain variable domain of TCR clone 127789 (TRAV21, TRAJ27)
CAARPGNAGKSTF

SEQ ID NO: 255578 - protein, 13 aa, Homo sapiens
  CDR3 for beta chain variable domain of TCR clone 127789 (TRBV10-1, TRBJ2-1)
CASSAGPDNEQFF

SEQ ID NO: 255579 - protein, 18 aa, Homo sapiens
  CDR3 for alpha chain variable domain of TCR clone 127790 (TRAV12-3, TRAJ52)
CAMSRTNAGGTSYGKLTF

SEQ ID NO: 255580 - protein, 14 aa, Homo sapiens
  CDR3 for beta chain variable domain of TCR clone 127790 (TRBV20-1, TRBJ2-3)
CSARDASSTDTQYF

SEQ ID NO: 255581 - protein, 12 aa, Homo sapiens
  CDR3 for alpha chain variable domain of TCR clone 127791 (TRAV8-6, TRAJ43)
CAVSHNNNDIRF

SEQ ID NO: 255582 - protein, 13 aa, Homo sapiens
  CDR3 for beta chain variable domain of TCR clone 127791 (TRBV7-3, TRBJ1-1)
CASSQDWGAEAFF

SEQ ID NO: 255583 - protein, 15 aa, Homo sapiens
  CDR3 for alpha chain variable domain of TCR clone 127792 (TRAV12-3, TRAJ5)
CAMSGLGTGRRALTF

SEQ ID NO: 255584 - protein, 16 aa, Homo sapiens
  CDR3 for beta chain variable domain of TCR clone 127792 (TRBV20-1, TRBJ2-3)
CSARLHSAGAIETQYF

SEQ ID NO: 255585 - protein, 14 aa, Homo sapiens
  CDR3 for alpha chain variable domain of TCR clone 127793 (TRAV17, TRAJ48)
CATEGNFGNEKLTF

SEQ ID NO: 255586 - protein, 14 aa, Homo sapiens
  CDR3 for beta chain variable domain of TCR clone 127793 (TRBV7-6, TRBJ2-3)
CASSLGTVTDTQYF

SEQ ID NO: 255587 - protein, 13 aa, Homo sapiens
  CDR3 for alpha chain variable domain of TCR clone 127794 (TRAV29/DV5, TRAJ31)
CAASRNNNARPMF

SEQ ID NO: 255588 - protein, 12 aa, Homo sapiens
  CDR3 for beta chain variable domain of TCR clone 127794 (TRBV11-2, TRBJ2-2)
CASSLGGGELFF

SEQ ID NO: 255589 - protein, 18 aa, Homo sapiens
  CDR3 for alpha chain variable domain of TCR clone 127795 (TRAV21, TRAJ52)
CAVRPSPAGGTSYGKLTF

SEQ ID NO: 255590 - protein, 13 aa, Homo sapiens
  CDR3 for beta chain variable domain of TCR clone 127795 (TRBV27, TRBJ1-1)
CASRLSIGAEAFF

SEQ ID NO: 255591 - protein, 14 aa, Homo sapiens
  CDR3 for alpha chain variable domain of TCR clone 127796 (TRAV1-2, TRAJ8)
CAVREDTGFQNLVF

SEQ ID NO: 255592 - protein, 12 aa, Homo sapiens
  CDR3 for beta chain variable domain of TCR clone 127796 (TRBV7-8, TRBJ2-7)
CASSLGDREQYF

SEQ ID NO: 255593 - protein, 13 aa, Homo sapiens
  CDR3 for alpha chain variable domain of TCR clone 127797 (TRAV12-3, TRAJ33)
CAMSVNSNYQLIW

SEQ ID NO: 255594 - protein, 16 aa, Homo sapiens
  CDR3 for beta chain variable domain of TCR clone 127797 (TRBV20-1, TRBJ1-4)
CSAPGQGLLTNEKLFF

SEQ ID NO: 255595 - protein, 14 aa, Homo sapiens
  CDR3 for alpha chain variable domain of TCR clone 127798 (TRAV17, TRAJ12)
CAILPMDSSYKFIF

SEQ ID NO: 255596 - protein, 15 aa, Homo sapiens
  CDR3 for beta chain variable domain of TCR clone 127798 (TRBV5-1, TRBJ1-1)
CASSLGEGENTEAFF

SEQ ID NO: 255597 - protein, 14 aa, Homo sapiens
  CDR3 for alpha chain variable domain of TCR clone 127799 (TRAV12-2, TRAJ11)
CAVEGGSGYSTLTF

SEQ ID NO: 255598 - protein, 16 aa, Homo sapiens
  CDR3 for beta chain variable domain of TCR clone 127799 (TRBV6-1, TRBJ1-2)
CASSGAWQGRSNGYTF

SEQ ID NO: 255599 - protein, 14 aa, Homo sapiens
  CDR3 for alpha chain variable domain of TCR clone 127800 (TRAV29/DV5, TRAJ36)
CAARRKTGANNLFF

SEQ ID NO: 255600 - protein, 16 aa, Homo sapiens
  CDR3 for beta chain variable domain of TCR clone 127800 (TRBV5-1, TRBJ2-3)
CASSLGLAVYTDTQYF

SEQ ID NO: 255601 - protein, 11 aa, Homo sapiens
  CDR3 for alpha chain variable domain of TCR clone 127801 (TRAV2, TRAJ13)
CASGCYQKVTF

SEQ ID NO: 255602 - protein, 17 aa, Homo sapiens
  CDR3 for beta chain variable domain of TCR clone 127801 (TRBV7-3, TRBJ2-3)
CASSLMKRMRGADTQYF

SEQ ID NO: 255603 - protein, 18 aa, Homo sapiens
  CDR3 for alpha chain variable domain of TCR clone 127802 (TRAV21, TRAJ52)
CAVRPSPAGGTSYGKLTF

SEQ ID NO: 255604 - protein, 15 aa, Homo sapiens
  CDR3 for beta chain variable domain of TCR clone 127802 (TRBV5-8, TRBJ2-2)
CASSLDRGATGELFF

SEQ ID NO: 255605 - protein, 13 aa, Homo sapiens
  CDR3 for alpha chain variable domain of TCR clone 127803 (TRAV8-3, TRAJ48)
GAVVPFGNEKLTF

SEQ ID NO: 255606 - protein, 15 aa, Homo sapiens
  CDR3 for beta chain variable domain of TCR clone 127803 (TRBV11-2, TRBJ2-1)
CASSSPSTRYNEQFF

SEQ ID NO: 255607 - protein, 12 aa, Homo sapiens
  CDR3 for alpha chain variable domain of TCR clone 127804 (TRAV12-1, TRAJ50)
CVGRTSYDKAIF

SEQ ID NO: 255608 - protein, 12 aa, Homo sapiens
  CDR3 for beta chain variable domain of TCR clone 127804 (TRBV5-7, TRBJ1-1)
CASSLVGTEAFF

SEQ ID NO: 255609 - protein, 16 aa, Homo sapiens
  CDR3 for alpha chain variable domain of TCR clone 127805 (TRAV1-2, TRAJ10)
CAVRGVLTGGGNKLTF

SEQ ID NO: 255610 - protein, 19 aa, Homo sapiens
  CDR3 for beta chain variable domain of TCR clone 127805 (TRBV7-9, TRBJ2-6)
CASSLESATVLPGANVLTF

SEQ ID NO: 255611 - protein, 16 aa, Homo sapiens
  CDR3 for alpha chain variable domain of TCR clone 127806 (TRAV12-3, TRAJ53)
WAMSPGSGGSNYKLTF

SEQ ID NO: 255612 - protein, 11 aa, Homo sapiens
  CDR3 for beta chain variable domain of TCR clone 127806 (TRBV29-1, TRBJ2-5)
CSEDRTGTQYF

SEQ ID NO: 255613 - protein, 18 aa, Homo sapiens
  CDR3 for alpha chain variable domain of TCR clone 127807 (TRAV21, TRAJ52)
CAVRPSPAGGTRYGKLTF

SEQ ID NO: 255614 - protein, 15 aa, Homo sapiens
  CDR3 for beta chain variable domain of TCR clone 127807 (TRBV5-1, TRBJ2-3)
CASSVTSGSTDTQYF

SEQ ID NO: 255615 - protein, 13 aa, Homo sapiens
  CDR3 for alpha chain variable domain of TCR clone 127808 (TRAV21, TRAJ27)
CAARPGNAGKSTF

SEQ ID NO: 255616 - protein, 14 aa, Homo sapiens
  CDR3 for beta chain variable domain of TCR clone 127808 (TRBV15, TRBJ2-5)
CATSIGGLGETQYF

SEQ ID NO: 255617 - protein, 13 aa, Homo sapiens
  CDR3 for alpha chain variable domain of TCR clone 127809 (TRAV21, TRAJ27)
CAARPGNAGKSTF

SEQ ID NO: 255618 - protein, 12 aa, Homo sapiens
  CDR3 for beta chain variable domain of TCR clone 127809 (TRBV20-1, TRBJ1-1)
QCSTWGGTEAFF

SEQ ID NO: 255619 - protein, 14 aa, Homo sapiens
  CDR3 for alpha chain variable domain of TCR clone 127810 (TRAV14/DV4, TRAJ7)
CAMGEAYGNNRLAF

SEQ ID NO: 255620 - protein, 15 aa, Homo sapiens
  CDR3 for beta chain variable domain of TCR clone 127810 (TRBV19, TRBJ2-1)
CASSINREPSHEQFF

SEQ ID NO: 255621 - protein, 13 aa, Homo sapiens
  CDR3 for alpha chain variable domain of TCR clone 127811 (TRAV16, TRAJ34)
CALISYNTDKLIF

SEQ ID NO: 255622 - protein, 15 aa, Homo sapiens
  CDR3 for beta chain variable domain of TCR clone 127811 (TRBV20-1, TRBJ2-7)
CSARDRVSGMDEQYF

SEQ ID NO: 255623 - protein, 16 aa, Homo sapiens
  CDR3 for alpha chain variable domain of TCR clone 127812 (TRAV17, TRAJ22)
CATDASSSGSARQLTF

SEQ ID NO: 255624 - protein, 15 aa, Homo sapiens
  CDR3 for beta chain variable domain of TCR clone 127812 (TRBV5-1, TRBJ2-1)
CASSPPRAPYNEQFF

SEQ ID NO: 255625 - protein, 14 aa, Homo sapiens
  CDR3 for alpha chain variable domain of TCR clone 127813 (TRAV20, TRAJ9)
CAVQAHTGGFKTIF

SEQ ID NO: 255626 - protein, 13 aa, Homo sapiens
  CDR3 for beta chain variable domain of TCR clone 127813 (TRBV19, TRBJ2-2)
CASSIWSTGELFF

SEQ ID NO: 255627 - protein, 12 aa, Homo sapiens
  CDR3 for alpha chain variable domain of TCR clone 127814 (TRAV12-1, TRAJ39)
CVVIDAGNMLTF

SEQ ID NO: 255628 - protein, 13 aa, Homo sapiens
  CDR3 for beta chain variable domain of TCR clone 127814 (TRBV4-2, TRBJ1-1)
CASSQAGNTEAFF

SEQ ID NO: 255629 - protein, 12 aa, Homo sapiens
  CDR3 for alpha chain variable domain of TCR clone 127815 (TRAV3, TRAJ31)
CAVRDGNARLMF

SEQ ID NO: 255630 - protein, 13 aa, Homo sapiens
  CDR3 for beta chain variable domain of TCR clone 127815 (TRBV19, TRBJ1-2)
CASSVPGQDGYTF

SEQ ID NO: 255631 - protein, 14 aa, Homo sapiens
  CDR3 for alpha chain variable domain of TCR clone 127816 (TRAV1-2, TRAJ8)
CAVREVTGFQKLVF

SEQ ID NO: 255632 - protein, 15 aa, Homo sapiens
  CDR3 for beta chain variable domain of TCR clone 127816 (TRBV20-1, TRBJ2-7)
CSARDRVSGMDEQYF

SEQ ID NO: 255633 - protein, 10 aa, Homo sapiens
  CDR3 for alpha chain variable domain of TCR clone 127817 (TRAV36/DV7, TRAJ38)
CAANNRKLIW

SEQ ID NO: 255634 - protein, 15 aa, Homo sapiens
  CDR3 for beta chain variable domain of TCR clone 127817 (TRBV20-1, TRBJ2-7)
CSARGRVSGMDEQYF

SEQ ID NO: 255635 - protein, 13 aa, Homo sapiens
  CDR3 for alpha chain variable domain of TCR clone 127818 (TRAV22, TRAJ26)
CAVEHNYGQNFVF

SEQ ID NO: 255636 - protein, 15 aa, Homo sapiens
  CDR3 for beta chain variable domain of TCR clone 127818 (TRBV7-2, TRBJ2-6)
CQQRATGLWANVLTF

SEQ ID NO: 255637 - protein, 14 aa, Homo sapiens
  CDR3 for alpha chain variable domain of TCR clone 127819 (TRAV12-3, TRAJ22)
CAMSLFGSARQLTF

SEQ ID NO: 255638 - protein, 11 aa, Homo sapiens
  CDR3 for beta chain variable domain of TCR clone 127819 (TRBV12-4, TRBJ2-2)
CASSSAGELFC

SEQ ID NO: 255639 - protein, 15 aa, Homo sapiens
  CDR3 for alpha chain variable domain of TCR clone 127820 (TRAV3, TRAJ29)
CAERDLYSGNTPLVF

SEQ ID NO: 255640 - protein, 15 aa, Homo sapiens
  CDR3 for beta chain variable domain of TCR clone 127820 (TRBV7-8, TRBJ2-1)
CASSLAGGLYNEQFF

SEQ ID NO: 255641 - protein, 15 aa, Homo sapiens
  CDR3 for alpha chain variable domain of TCR clone 127821 (TRAV2, TRAJ22)
CAVPSRGGSARQLTF

SEQ ID NO: 255642 - protein, 15 aa, Homo sapiens
  CDR3 for beta chain variable domain of TCR clone 127821 (TRBV9, TRBJ1-6)
CASSVAGTGDSPLHF

SEQ ID NO: 255643 - protein, 13 aa, Homo sapiens
  CDR3 for alpha chain variable domain of TCR clone 127822 (TRAV21, TRAJ57)
CAVTQGGSGKLVF

SEQ ID NO: 255644 - protein, 16 aa, Homo sapiens
  CDR3 for beta chain variable domain of TCR clone 127822 (TRBV12-4, TRBJ2-5)
CASSFFVRGRQETQYF

SEQ ID NO: 255645 - protein, 15 aa, Homo sapiens
  CDR3 for alpha chain variable domain of TCR clone 127823 (TRAV26-1, TRAJ29)
CIVRVEGSGNTPLVF

SEQ ID NO: 255646 - protein, 15 aa, Homo sapiens
  CDR3 for beta chain variable domain of TCR clone 127823 (TRBV28, TRBJ2-5)
CASSPGRGSIETQYF

SEQ ID NO: 255647 - protein, 14 aa, Homo sapiens
  CDR3 for alpha chain variable domain of TCR clone 127824 (TRAV13-1, TRAJ8)
CAASEDTGFQKLVF

SEQ ID NO: 255648 - protein, 13 aa, Homo sapiens
  CDR3 for beta chain variable domain of TCR clone 127824 (TRBV19, TRBJ1-5)
CASSTRRDQPQHL

SEQ ID NO: 255649 - protein, 13 aa, Homo sapiens
  CDR3 for alpha chain variable domain of TCR clone 127825 (TRAV3, TRAJ29)
CAVRDWGNTTLVF

SEQ ID NO: 255650 - protein, 15 aa, Homo sapiens
  CDR3 for beta chain variable domain of TCR clone 127825 (TRBV12-4, TRBJ2-5)
CASIGRTGEGETQYF

SEQ ID NO: 255651 - protein, 14 aa, Homo sapiens
  CDR3 for alpha chain variable domain of TCR clone 127826 (TRAV8-4, TRAJ48)
CAVSETFGNEKLTF

SEQ ID NO: 255652 - protein, 14 aa, Homo sapiens
  CDR3 for beta chain variable domain of TCR clone 127826 (TRBV13, TRBJ2-7)
CASSLKGASYEQCF

SEQ ID NO: 255653 - protein, 14 aa, Homo sapiens
  CDR3 for alpha chain variable domain of TCR clone 127827 (TRAV12-3, TRAJ33)
CAMSAGDSNYQLIW

SEQ ID NO: 255654 - protein, 12 aa, Homo sapiens
  CDR3 for beta chain variable domain of TCR clone 127827 (TRBV11-2, TRBJ2-4)
CASSSASGSEYF

SEQ ID NO: 255655 - protein, 14 aa, Homo sapiens
  CDR3 for alpha chain variable domain of TCR clone 127828 (TRAV29/DV5, TRAJ48)
CAAMALFGNEKLTF

SEQ ID NO: 255656 - protein, 12 aa, Homo sapiens
  CDR3 for beta chain variable domain of TCR clone 127828 (TRBV29-1, TRBJ2-3)
CSVTGGADTQYF

SEQ ID NO: 255657 - protein, 13 aa, Homo sapiens
  CDR3 for alpha chain variable domain of TCR clone 127829 (TRAV8-6, TRAJ7)
CAVSEYGNNRLAF

SEQ ID NO: 255658 - protein, 16 aa, Homo sapiens
  CDR3 for beta chain variable domain of TCR clone 127829 (TRBV3-1, TRBJ2-3)
CASSQGTGYGTDTQYF

SEQ ID NO: 255659 - protein, 14 aa, Homo sapiens
  CDR3 for alpha chain variable domain of TCR clone 127830 (TRAV4, TRAJ9)
CLVGSGTGGFKTIF

SEQ ID NO: 255660 - protein, 14 aa, Homo sapiens
  CDR3 for beta chain variable domain of TCR clone 127830 (TRBV7-2, TRBJ2-1)
CQQLASGRVNEQFF

SEQ ID NO: 255661 - protein, 14 aa, Homo sapiens
  CDR3 for alpha chain variable domain of TCR clone 127831 (TRAV1-2, TRAJ16)
CAVNRFSDGQKLIF

SEQ ID NO: 255662 - protein, 15 aa, Homo sapiens
  CDR3 for beta chain variable domain of TCR clone 127831 (TRBV20-1, TRBJ2-7)
CSARDRVSGMDEQYF

SEQ ID NO: 255663 - protein, 12 aa, Homo sapiens
  CDR3 for alpha chain variable domain of TCR clone 127832 (TRAV2, TRAJ31)
CAVEDNNARLMF

SEQ ID NO: 255664 - protein, 15 aa, Homo sapiens
  CDR3 for beta chain variable domain of TCR clone 127832 (TRBV27, TRBJ2-1)
CASSNGGGSSNEQFF

SEQ ID NO: 255665 - protein, 16 aa, Homo sapiens
  CDR3 for alpha chain variable domain of TCR clone 127833 (TRAV3, TRAJ3)
CAVRDRAKSSASKIIF

SEQ ID NO: 255666 - protein, 16 aa, Homo sapiens
  CDR3 for beta chain variable domain of TCR clone 127833 (TRBV20-1, TRBJ2-4)
CSAISLAELAKNIQYF

SEQ ID NO: 255667 - protein, 17 aa, Homo sapiens
  CDR3 for alpha chain variable domain of TCR clone 127834 (TRAV3, TRAJ42)
CAVRDRDYGGSQGNLIC

SEQ ID NO: 255668 - protein, 12 aa, Homo sapiens
  CDR3 for beta chain variable domain of TCR clone 127834 (TRBV11-2, TRBJ2-1)
CASSPGNNEQFF

SEQ ID NO: 255669 - protein, 12 aa, Homo sapiens
  CDR3 for alpha chain variable domain of TCR clone 127835 (TRAV13-1, TRAJ53)
AASGGSNYKLKF

SEQ ID NO: 255670 - protein, 12 aa, Homo sapiens
  CDR3 for beta chain variable domain of TCR clone 127835 (TRBV18, TRBJ1-4)
CASSPSREKLFF

SEQ ID NO: 255671 - protein, 16 aa, Homo sapiens
  CDR3 for alpha chain variable domain of TCR clone 127836 (TRAV16, TRAJ42)
CARKMNYGGSQGNLIF

SEQ ID NO: 255672 - protein, 13 aa, Homo sapiens
  CDR3 for beta chain variable domain of TCR clone 127836 (TRBV20-1, TRBJ2-7)
CSASPPSPYEQYF

SEQ ID NO: 255673 - protein, 15 aa, Homo sapiens
  CDR3 for alpha chain variable domain of TCR clone 127837 (TRAV2, TRAJ11)
CAVGGRNSGYSTLTF

SEQ ID NO: 255674 - protein, 16 aa, Homo sapiens
  CDR3 for beta chain variable domain of TCR clone 127837 (TRBV19, TRBJ2-1)
CASSKAGPSSYNEQFF

SEQ ID NO: 255675 - protein, 12 aa, Homo sapiens
  CDR3 for alpha chain variable domain of TCR clone 127838 (TRAV12-3, TRAJ20)
CAMVRGDYKLSF

SEQ ID NO: 255676 - protein, 14 aa, Homo sapiens
  CDR3 for beta chain variable domain of TCR clone 127838 (TRBV7-9, TRBJ2-1)
CASSPRDSLYEQFF

SEQ ID NO: 255677 - protein, 17 aa, Homo sapiens
  CDR3 for alpha chain variable domain of TCR clone 127839 (TRAV8-6, TRAJ58)
CAVSSWVGETSGSRLTF

SEQ ID NO: 255678 - protein, 14 aa, Homo sapiens
  CDR3 for beta chain variable domain of TCR clone 127839 (TRBV4-2, TRBJ2-1)
CASGLDRAFNEQFF

SEQ ID NO: 255679 - protein, 14 aa, Homo sapiens
  CDR3 for alpha chain variable domain of TCR clone 127840 (TRAV1-2, TRAJ16)
CAVNRFLDGQKLLF

SEQ ID NO: 255680 - protein, 13 aa, Homo sapiens
  CDR3 for beta chain variable domain of TCR clone 127840 (TRBV10-3, TRBJ2-7)
CASKLAVNYEQYF

SEQ ID NO: 255681 - protein, 11 aa, Homo sapiens
  CDR3 for alpha chain variable domain of TCR clone 127841 (TRAV12-3, TRAJ27)
CAMANAGKSTF

SEQ ID NO: 255682 - protein, 15 aa, Homo sapiens
  CDR3 for beta chain variable domain of TCR clone 127841 (TRBV11-3, TRBJ2-3)
CASLKDGREGDTQYF

SEQ ID NO: 255683 - protein, 21 aa, Homo sapiens
  CDR3 for alpha chain variable domain of TCR clone 127842 (TRAV1-2, TRAJ9)
CAALNTEASKLSLEQEQDYLL

SEQ ID NO: 255684 - protein, 13 aa, Homo sapiens
  CDR3 for beta chain variable domain of TCR clone 127842 (TRBV19, TRBJ1-2)
CASSVPGQDGYTF

SEQ ID NO: 255685 - protein, 14 aa, Homo sapiens
  CDR3 for alpha chain variable domain of TCR clone 127843 (TRAV26-1, TRAJ34)
CIVRVAYNTDKLIF

SEQ ID NO: 255686 - protein, 15 aa, Homo sapiens
  CDR3 for beta chain variable domain of TCR clone 127843 (TRBV29-1, TRBJ2-1)
CSGRDRKSSYNEQFF

SEQ ID NO: 255687 - protein, 12 aa, Homo sapiens
  CDR3 for alpha chain variable domain of TCR clone 127844 (TRAV26-2, TRAJ21)
CVLKGNFNKFYF

SEQ ID NO: 255688 - protein, 14 aa, Homo sapiens
  CDR3 for beta chain variable domain of TCR clone 127844 (TRBV7-9, TRBJ1-1)
CASTPLQSYTEAFF

SEQ ID NO: 255689 - protein, 10 aa, Homo sapiens
  CDR3 for alpha chain variable domain of TCR clone 127845 (TRAV23/DV6, TRAJ57)
CAASSTLSQG

SEQ ID NO: 255690 - protein, 14 aa, Homo sapiens
  CDR3 for beta chain variable domain of TCR clone 127845 (TRBV13, TRBJ2-7)
CASSLKGASYEQYF

SEQ ID NO: 255691 - protein, 20 aa, Homo sapiens
  CDR3 for alpha chain variable domain of TCR clone 127846 (TRAV25, TRAJ21)
TATQTTDVGTYPLSFNKFYF

SEQ ID NO: 255692 - protein, 16 aa, Homo sapiens
  CDR3 for beta chain variable domain of TCR clone 127846 (TRBV7-8, TRBJ2-1)
CASSRLPGILYNEQFF

SEQ ID NO: 255693 - protein, 15 aa, Homo sapiens
  CDR3 for alpha chain variable domain of TCR clone 127847 (TRAV3, TRAJ22)
CAVRDRGGSARQLTF

SEQ ID NO: 255694 - protein, 12 aa, Homo sapiens
  CDR3 for beta chain variable domain of TCR clone 127847 (TRBV6-3, TRBJ2-1)
CASSGSYNEQFF

SEQ ID NO: 255695 - protein, 16 aa, Homo sapiens
  CDR3 for alpha chain variable domain of TCR clone 127848 (TRAV12-3, TRAJ10)
CAMKKGITGGGNKPTF

SEQ ID NO: 255696 - protein, 12 aa, Homo sapiens
  CDR3 for beta chain variable domain of TCR clone 127848 (TRBV20-1, TRBJ2-7)
CSAITPTKEQYF

SEQ ID NO: 255697 - protein, 20 aa, Homo sapiens
  CDR3 for alpha chain variable domain of TCR clone 127849 (TRAV21, TRAJ4)
AASQPGDSATLAGGYNKLIF

SEQ ID NO: 255698 - protein, 19 aa, Homo sapiens
  CDR3 for beta chain variable domain of TCR clone 127849 (TRBV18, TRBJ1-3)
CASSPLSRTGMSSGNTIYF

SEQ ID NO: 255699 - protein, 13 aa, Homo sapiens
  CDR3 for alpha chain variable domain of TCR clone 127850 (TRAV12-1, TRAJ22)
CVVYSVSARQLTF

SEQ ID NO: 255700 - protein, 10 aa, Homo sapiens
  CDR3 for beta chain variable domain of TCR clone 127850 (TRBV6-3, TRBJ2-2)
CASRDGELFF

SEQ ID NO: 255701 - protein, 14 aa, Homo sapiens
  CDR3 for alpha chain variable domain of TCR clone 127851 (TRAV8-3, TRAJ4)
CAVGAAGGYNKLIF

SEQ ID NO: 255702 - protein, 15 aa, Homo sapiens
  CDR3 for beta chain variable domain of TCR clone 127851 (TRBV9, TRBJ1-6)
CASSVAGTGDSPPHF

SEQ ID NO: 255703 - protein, 14 aa, Homo sapiens
  CDR3 for alpha chain variable domain of TCR clone 127852 (TRAV12-1, TRAJ36)
CVVNYWGKQPLLWD

SEQ ID NO: 255704 - protein, 11 aa, Homo sapiens
  CDR3 for beta chain variable domain of TCR clone 127852 (TRBV12-4, TRBJ2-3)
CASTATDTQYF

SEQ ID NO: 255705 - protein, 14 aa, Homo sapiens
  CDR3 for alpha chain variable domain of TCR clone 127853 (TRAV12-2, TRAJ33)
CAVKRARSNYQLIW

SEQ ID NO: 255706 - protein, 14 aa, Homo sapiens
  CDR3 for beta chain variable domain of TCR clone 127853 (TRBV19, TRBJ2-1)
CASPTFVLSGEQFF

SEQ ID NO: 255707 - protein, 15 aa, Homo sapiens
  CDR3 for alpha chain variable domain of TCR clone 127854 (TRAV23/DV6, TRAJ38)
CAASGGAGNNRKLLW

SEQ ID NO: 255708 - protein, 13 aa, Homo sapiens
  CDR3 for beta chain variable domain of TCR clone 127854 (TRBV7-2, TRBJ1-2)
CASSLPGLYGYTF

SEQ ID NO: 255709 - protein, 13 aa, Homo sapiens
  CDR3 for alpha chain variable domain of TCR clone 127855 (TRAV26-1, TRAJ48)
CIVRVVGDEKLTF

SEQ ID NO: 255710 - protein, 15 aa, Homo sapiens
  CDR3 for beta chain variable domain of TCR clone 127855 (TRBV27, TRBJ1-1)
CASSPYADPYTEAFF

SEQ ID NO: 255711 - protein, 20 aa, Homo sapiens
  CDR3 for alpha chain variable domain of TCR clone 127856 (TRAV21, TRAJ4)
AASQPGDSATLAGGYNKLIF

SEQ ID NO: 255712 - protein, 19 aa, Homo sapiens
  CDR3 for beta chain variable domain of TCR clone 127856 (TRBV18, TRBJ1-3)
CASPPLSRTGMSSGNTIYF

SEQ ID NO: 255713 - protein, 15 aa, Homo sapiens
  CDR3 for alpha chain variable domain of TCR clone 127857 (TRAV21, TRAJ53)
CATLNSGGSNYKLTF

SEQ ID NO: 255714 - protein, 14 aa, Homo sapiens
  CDR3 for beta chain variable domain of TCR clone 127857 (TRBV11-2, TRBJ1-5)
CASSSRTGNQPQHF

SEQ ID NO: 255715 - protein, 13 aa, Homo sapiens
  CDR3 for alpha chain variable domain of TCR clone 127858 (TRAV26-1, TRAJ36)
CIAVRRGANNLFF

SEQ ID NO: 255716 - protein, 19 aa, Homo sapiens
  CDR3 for beta chain variable domain of TCR clone 127858 (TRBV27, TRBJ2-1)
CASSLEILFPGAAGNEQFF

SEQ ID NO: 255717 - protein, 20 aa, Homo sapiens
  CDR3 for alpha chain variable domain of TCR clone 127859 (TRAV14/DV4, TRAJ22)
CAMREGPLSISSGSARQLTF

SEQ ID NO: 255718 - protein, 13 aa, Homo sapiens
  CDR3 for beta chain variable domain of TCR clone 127859 (TRBV4-2, TRBJ2-3)
CASSQDWQHTQYF

SEQ ID NO: 255719 - protein, 17 aa, Homo sapiens
  CDR3 for alpha chain variable domain of TCR clone 127860 (TRAV4, TRAJ42)
CLVGVLNYGGSQGHLIF

SEQ ID NO: 255720 - protein, 12 aa, Homo sapiens
  CDR3 for beta chain variable domain of TCR clone 127860 (TRBV20-1, TRBJ2-1)
CSAQYTYNEQFF

SEQ ID NO: 255721 - protein, 11 aa, Homo sapiens
  CDR3 for alpha chain variable domain of TCR clone 127861 (TRAV12-2, TRAJ43)
CASPIGNDMRF

SEQ ID NO: 255722 - protein, 13 aa, Homo sapiens
  CDR3 for beta chain variable domain of TCR clone 127861 (TRBV7-3, TRBJ1-2)
CARSLKRGYGYTF

SEQ ID NO: 255723 - protein, 14 aa, Homo sapiens
  CDR3 for alpha chain variable domain of TCR clone 127862 (TRAV8-3, TRAJ9)
CAVVYNTGGFKTIF

SEQ ID NO: 255724 - protein, 17 aa, Homo sapiens
  CDR3 for beta chain variable domain of TCR clone 127862 (TRBV20-1, TRBJ2-2)
CSASGSGQGGLTGELFF

SEQ ID NO: 255725 - protein, 15 aa, Homo sapiens
  CDR3 for alpha chain variable domain of TCR clone 127863 (TRAV2, TRAJ13)
CATPSYSGGYQKVTF

SEQ ID NO: 255726 - protein, 15 aa, Homo sapiens
  CDR3 for beta chain variable domain of TCR clone 127863 (TRBV19, TRBJ2-2)
CASSLNRGVTGELFF

SEQ ID NO: 255727 - protein, 14 aa, Homo sapiens
  CDR3 for alpha chain variable domain of TCR clone 127864 (TRAV8-3, TRAJ36)
CAVGPITGASNLFF

SEQ ID NO: 255728 - protein, 15 aa, Homo sapiens
  CDR3 for beta chain variable domain of TCR clone 127864 (TRBV4-1, TRBJ2-1)
CASSQDPGNYNEQFF

SEQ ID NO: 255729 - protein, 14 aa, Homo sapiens
  CDR3 for alpha chain variable domain of TCR clone 127865 (TRAV38-1, TRAJ29)
CAFITPSGNTPLVF

SEQ ID NO: 255730 - protein, 14 aa, Homo sapiens
  CDR3 for beta chain variable domain of TCR clone 127865 (TRBV18, TRBJ2-7)
CASSPRGGAYEQYS

SEQ ID NO: 255731 - protein, 16 aa, Homo sapiens
  CDR3 for alpha chain variable domain of TCR clone 127866 (TRAV30, TRAJ24)
CGTEIVDADSWGKFQF

SEQ ID NO: 255732 - protein, 16 aa, Homo sapiens
  CDR3 for beta chain variable domain of TCR clone 127866 (TRBV28, TRBJ2-7)
CASSPWVATGDLSQYF

SEQ ID NO: 255733 - protein, 12 aa, Homo sapiens
  CDR3 for alpha chain variable domain of TCR clone 127867 (TRAV17, TRAJ20)
CATDSNDYKLSF

SEQ ID NO: 255734 - protein, 14 aa, Homo sapiens
  CDR3 for beta chain variable domain of TCR clone 127867 (TRBV19, TRBJ2-1)
CASSAGLSGNEQFF

SEQ ID NO: 255735 - protein, 12 aa, Homo sapiens
  CDR3 for alpha chain variable domain of TCR clone 127868 (TRAV12-3, TRAJ17)
CAMTLTGNKQTF

SEQ ID NO: 255736 - protein, 13 aa, Homo sapiens
  CDR3 for beta chain variable domain of TCR clone 127868 (TRBV7-9, TRBJ1-2)
CASSLKQNYGYTF

SEQ ID NO: 255737 - protein, 14 aa, Homo sapiens
  CDR3 for alpha chain variable domain of TCR clone 127869 (TRAV26-2, TRAJ32)
CCVGYGGATNKLIF

SEQ ID NO: 255738 - protein, 15 aa, Homo sapiens
  CDR3 for beta chain variable domain of TCR clone 127869 (TRBV27, TRBJ2-5)
CSSSLYPRGGETQYF

SEQ ID NO: 255739 - protein, 10 aa, Homo sapiens
  CDR3 for alpha chain variable domain of TCR clone 127870 (TRAV26-1, TRAJ40)
CIAGTYKYIF

SEQ ID NO: 255740 - protein, 15 aa, Homo sapiens
  CDR3 for beta chain variable domain of TCR clone 127870 (TRBV19, TRBJ2-1)
CASSSQGVPLDEQFF

SEQ ID NO: 255741 - protein, 17 aa, Homo sapiens
  CDR3 for alpha chain variable domain of TCR clone 127871 (TRAV3, TRAJ6)
CAVRDGPRAGGSDIPTF

SEQ ID NO: 255742 - protein, 16 aa, Homo sapiens
  CDR3 for beta chain variable domain of TCR clone 127871 (TRBV7-9, TRBJ1-3)
CASSQTSGLRMGTIYF

SEQ ID NO: 255743 - protein, 13 aa, Homo sapiens
  CDR3 for alpha chain variable domain of TCR clone 127872 (TRAV1-1, TRAJ33)
CAVRRDSNYQLIW

SEQ ID NO: 255744 - protein, 16 aa, Homo sapiens
  CDR3 for beta chain variable domain of TCR clone 127872 (TRBV15, TRBJ2-3)
CATSRDLGIVTDTQYF

SEQ ID NO: 255745 - protein, 17 aa, Homo sapiens
  CDR3 for alpha chain variable domain of TCR clone 127873 (TRAV3, TRAJ12)
CAVRDGGRMDSSYKLIF

SEQ ID NO: 255746 - protein, 16 aa, Homo sapiens
  CDR3 for beta chain variable domain of TCR clone 127873 (TRBV7-3, TRBJ2-1)
CASSLSGGVHYNEQFF

SEQ ID NO: 255747 - protein, 13 aa, Homo sapiens
  CDR3 for alpha chain variable domain of TCR clone 127874 (TRAV38-1, TRAJ42)
CARWGGSQGNLIF

SEQ ID NO: 255748 - protein, 16 aa, Homo sapiens
  CDR3 for beta chain variable domain of TCR clone 127874 (TRBV27, TRBJ2-2)
CASSFRGLVRTGELFF

SEQ ID NO: 255749 - protein, 15 aa, Homo sapiens
  CDR3 for alpha chain variable domain of TCR clone 127875 (TRAV21, TRAJ24)
CAARSSTDSWGKLQF

SEQ ID NO: 255750 - protein, 15 aa, Homo sapiens
  CDR3 for beta chain variable domain of TCR clone 127875 (TRBV5-1, TRBJ2-1)
GASSPPRAPYNEQFF

SEQ ID NO: 255751 - protein, 12 aa, Homo sapiens
  CDR3 for alpha chain variable domain of TCR clone 127876 (TRAV12-3, TRAJ17)
CAMTLTGNKLTF

SEQ ID NO: 255752 - protein, 13 aa, Homo sapiens
  CDR3 for beta chain variable domain of TCR clone 127876 (TRBV20-1, TRBJ1-1)
CSAGTVGNTEAFF

SEQ ID NO: 255753 - protein, 15 aa, Homo sapiens
  CDR3 for alpha chain variable domain of TCR clone 127877 (TRAV4, TRAJ26)
CLVGDMNNYDQNFVF

SEQ ID NO: 255754 - protein, 17 aa, Homo sapiens
  CDR3 for beta chain variable domain of TCR clone 127877 (TRBV7-3, TRBJ2-3)
CASSLMKRMRGADTQYF

SEQ ID NO: 255755 - protein, 14 aa, Homo sapiens
  CDR3 for alpha chain variable domain of TCR clone 127878 (TRAV8-3, TRAJ6)
CAVGASGGSYIPTL

SEQ ID NO: 255756 - protein, 17 aa, Homo sapiens
  CDR3 for beta chain variable domain of TCR clone 127878 (TRBV18, TRBJ2-2)
CASSPSDPWQNTGELFF

SEQ ID NO: 255757 - protein, 16 aa, Homo sapiens
  CDR3 for alpha chain variable domain of TCR clone 127879 (TRAV30, TRAJ24)
CGTEIVDADSWGKFKF

SEQ ID NO: 255758 - protein, 15 aa, Homo sapiens
  CDR3 for beta chain variable domain of TCR clone 127879 (TRBV27, TRBJ2-1)
CASSNGGGSSNEQFF

SEQ ID NO: 255759 - protein, 13 aa, Homo sapiens
  CDR3 for alpha chain variable domain of TCR clone 127880 (TRAV13-1, TRAJ11)
CAASIRGYSTPTF

SEQ ID NO: 255760 - protein, 17 aa, Homo sapiens
  CDR3 for beta chain variable domain of TCR clone 127880 (TRBV4-3, TRBJ1-2)
CASSSRLQAGGSVGYTF

SEQ ID NO: 255761 - protein, 14 aa, Homo sapiens
  CDR3 for alpha chain variable domain of TCR clone 127881 (TRAV12-3, TRAJ10)
SHLPLTGGGNKLTF

SEQ ID NO: 255762 - protein, 18 aa, Homo sapiens
  CDR3 for beta chain variable domain of TCR clone 127881 (TRBV7-9, TRBJ2-3)
CASSLPINGQISTDTQYF

SEQ ID NO: 255763 - protein, 13 aa, Homo sapiens
  CDR3 for alpha chain variable domain of TCR clone 127882 (TRAV30, TRAJ24)
CGTATDSWGKLQF

SEQ ID NO: 255764 - protein, 15 aa, Homo sapiens
  CDR3 for beta chain variable domain of TCR clone 127882 (TRBV25-1, TRBJ1-4)
CASSPGDSTNEKLFF

SEQ ID NO: 255765 - protein, 14 aa, Homo sapiens
  CDR3 for alpha chain variable domain of TCR clone 127883 (TRAV13-1, TRAJ35)
CAASKGGFGNVLHC

SEQ ID NO: 255766 - protein, 14 aa, Homo sapiens
  CDR3 for beta chain variable domain of TCR clone 127883 (TRBV12-4, TRBJ1-1)
CASSSARGYTEAFF

SEQ ID NO: 255767 - protein, 13 aa, Homo sapiens
  CDR3 for alpha chain variable domain of TCR clone 127884 (TRAV1-1, TRAJ9)
CAAKNTGGFKTIF

SEQ ID NO: 255768 - protein, 14 aa, Homo sapiens
  CDR3 for beta chain variable domain of TCR clone 127884 (TRBV4-1, TRBJ1-1)
CASSQEARGTEAFF

SEQ ID NO: 255769 - protein, 14 aa, Homo sapiens
  CDR3 for alpha chain variable domain of TCR clone 127885 (TRAV8-2, TRAJ45)
CVVSAGGGADGLTF

SEQ ID NO: 255770 - protein, 16 aa, Homo sapiens
  CDR3 for beta chain variable domain of TCR clone 127885 (TRBV12-5, TRBJ2-5)
CASGPRTSGNQETQYF

SEQ ID NO: 255771 - protein, 14 aa, Homo sapiens
  CDR3 for alpha chain variable domain of TCR clone 127886 (TRAV12-2, TRAJ5)
CAVNRSTGRRALTF

SEQ ID NO: 255772 - protein, 12 aa, Homo sapiens
  CDR3 for beta chain variable domain of TCR clone 127886 (TRBV19, TRBJ1-5)
CASSIAQQPQQF

SEQ ID NO: 255773 - protein, 11 aa, Homo sapiens
  CDR3 for alpha chain variable domain of TCR clone 127887 (TRAV26-1, TRAJ27)
CIDPNAGNSTF

SEQ ID NO: 255774 - protein, 18 aa, Homo sapiens
  CDR3 for beta chain variable domain of TCR clone 127887 (TRBV7-9, TRBJ2-6)
CASSFPGAGISGANVLTF

SEQ ID NO: 255775 - protein, 14 aa, Homo sapiens
  CDR3 for alpha chain variable domain of TCR clone 127888 (TRAV3, TRAJ7)
CAVREEEREQQTRF

SEQ ID NO: 255776 - protein, 18 aa, Homo sapiens
  CDR3 for beta chain variable domain of TCR clone 127888 (TRBV11-2, TRBJ2-3)
CASSLGGASRGAPNTQYF

SEQ ID NO: 255777 - protein, 16 aa, Homo sapiens
  CDR3 for alpha chain variable domain of TCR clone 127889 (TRAV12-3, TRAJ20)
CAMDKLSFGAGTTVTV

SEQ ID NO: 255778 - protein, 13 aa, Homo sapiens
  CDR3 for beta chain variable domain of TCR clone 127889 (TRBV19, TRBJ2-7)
CASSPRQSYEQYF

SEQ ID NO: 255779 - protein, 14 aa, Homo sapiens
  CDR3 for alpha chain variable domain of TCR clone 127890 (TRAV1-2, TRAJ24)
CAVLTTDSWGKFQF

SEQ ID NO: 255780 - protein, 16 aa, Homo sapiens
  CDR3 for beta chain variable domain of TCR clone 127890 (TRBV5-1, TRBJ1-1)
CASSSGGNSLNTEAFF

SEQ ID NO: 255781 - protein, 11 aa, Homo sapiens
  CDR3 for alpha chain variable domain of TCR clone 127891 (TRAV12-1, TRAJ30)
CVVNGQDKIIF

SEQ ID NO: 255782 - protein, 16 aa, Homo sapiens
  CDR3 for beta chain variable domain of TCR clone 127891 (TRBV11-2, TRBJ1-2)
CASSLDTGGADYGYTF

SEQ ID NO: 255783 - protein, 13 aa, Homo sapiens
  CDR3 for alpha chain variable domain of TCR clone 127892 (TRAV13-2, TRAJ13)
CAERPGGYQKVNF

SEQ ID NO: 255784 - protein, 15 aa, Homo sapiens
  CDR3 for beta chain variable domain of TCR clone 127892 (TRBV11-3, TRBJ2-7)
CASSPGPASSYEQYF

SEQ ID NO: 255785 - protein, 16 aa, Homo sapiens
  CDR3 for alpha chain variable domain of TCR clone 127893 (TRAV8-4, TRAJ28)
CAVESNSGAGSYQLTF

SEQ ID NO: 255786 - protein, 15 aa, Homo sapiens
  CDR3 for beta chain variable domain of TCR clone 127893 (TRBV11-3, TRBJ2-3)
CASLKDGREGDTQYF

SEQ ID NO: 255787 - protein, 10 aa, Homo sapiens
  CDR3 for alpha chain variable domain of TCR clone 127894 (TRAV12-3, TRAJ49)
CAMNDDEFYF

SEQ ID NO: 255788 - protein, 13 aa, Homo sapiens
  CDR3 for beta chain variable domain of TCR clone 127894 (TRBV12-4, TRBJ1-1)
CASSPGTGFEAFF

SEQ ID NO: 255789 - protein, 12 aa, Homo sapiens
  CDR3 for alpha chain variable domain of TCR clone 127895 (TRAV1-2, TRAJ26)
CAVRYYGQNFVF

SEQ ID NO: 255790 - protein, 14 aa, Homo sapiens
  CDR3 for beta chain variable domain of TCR clone 127895 (TRBV11-1, TRBJ2-7)
CASSFRQGSYEQYV

SEQ ID NO: 255791 - protein, 15 aa, Homo sapiens
  CDR3 for alpha chain variable domain of TCR clone 127896 (TRAV3, TRAJ17)
CAVSPKEAACNKLTF

SEQ ID NO: 255792 - protein, 12 aa, Homo sapiens
  CDR3 for beta chain variable domain of TCR clone 127896 (TRBV7-9, TRBJ1-6)
CASSLMTSPLHF

SEQ ID NO: 255793 - protein, 15 aa, Homo sapiens
  CDR3 for alpha chain variable domain of TCR clone 127897 (TRAV38-1, TRAJ37)
CAFIHGSGNTGKLIF

SEQ ID NO: 255794 - protein, 16 aa, Homo sapiens
  CDR3 for beta chain variable domain of TCR clone 127897 (TRBV4-1, TRBJ2-1)
CASSQEAGQGSDEQFF

SEQ ID NO: 255795 - protein, 10 aa, Homo sapiens
  CDR3 for alpha chain variable domain of TCR clone 127898 (TRAV17, TRAJ36)
CATVAGNLFF

SEQ ID NO: 255796 - protein, 15 aa, Homo sapiens
  CDR3 for beta chain variable domain of TCR clone 127898 (TRBV5-7, TRBJ1-5)
CASSYGKLWDQPQHF

SEQ ID NO: 255797 - protein, 15 aa, Homo sapiens
  CDR3 for alpha chain variable domain of TCR clone 127899 (TRAV12-1, TRAJ23)
CGERSRCNQGGKLIF

SEQ ID NO: 255798 - protein, 14 aa, Homo sapiens
  CDR3 for beta chain variable domain of TCR clone 127899 (TRBV2, TRBJ2-1)
CASSEARQGVSEFF

SEQ ID NO: 255799 - protein, 13 aa, Homo sapiens
  CDR3 for alpha chain variable domain of TCR clone 127900 (TRAV12-3, TRAJ29)
CAMTLSGNTPLVF

SEQ ID NO: 255800 - protein, 15 aa, Homo sapiens
  CDR3 for beta chain variable domain of TCR clone 127900 (TRBV5-1, TRBJ2-6)
CASSLDPSGANVLTL

SEQ ID NO: 255801 - protein, 16 aa, Homo sapiens
  CDR3 for alpha chain variable domain of TCR clone 127901 (TRAV16, TRAJ52)
CALSAAGGTSYGKLTF

SEQ ID NO: 255802 - protein, 12 aa, Homo sapiens
  CDR3 for beta chain variable domain of TCR clone 127901 (TRBV9, TRBJ2-1)
CASSVGGTDIFF

SEQ ID NO: 255803 - protein, 14 aa, Homo sapiens
  CDR3 for alpha chain variable domain of TCR clone 127902 (TRAV26-1, TRAJ21)
CIVRPPYNFNKFYF

SEQ ID NO: 255804 - protein, 14 aa, Homo sapiens
  CDR3 for beta chain variable domain of TCR clone 127902 (TRBV19, TRBJ2-1)
CASPTFVLGGEQFF

SEQ ID NO: 255805 - protein, 16 aa, Homo sapiens
  CDR3 for alpha chain variable domain of TCR clone 127903 (TRAV21, TRAJ52)
CAVTNAGGTSYGKLTF

SEQ ID NO: 255806 - protein, 13 aa, Homo sapiens
  CDR3 for beta chain variable domain of TCR clone 127903 (TRBV20-1, TRBJ2-3)
CSARLAGTDAQYF

SEQ ID NO: 255807 - protein, 14 aa, Homo sapiens
  CDR3 for alpha chain variable domain of TCR clone 127904 (TRAV12-2, TRAJ11)
CAVNRESGCSTLTF

SEQ ID NO: 255808 - protein, 10 aa, Homo sapiens
  CDR3 for beta chain variable domain of TCR clone 127904 (TRBV20-1, TRBJ2-5)
CSARFETQYF

SEQ ID NO: 255809 - protein, 15 aa, Homo sapiens
  CDR3 for alpha chain variable domain of TCR clone 127905 (TRAV38-2/DV8, TRAJ43)
CAYRSWGAMPNDMRF

SEQ ID NO: 255810 - protein, 12 aa, Homo sapiens
  CDR3 for beta chain variable domain of TCR clone 127905 (TRBV28, TRBJ1-1)
CASNSGDTEAFL

SEQ ID NO: 255811 - protein, 13 aa, Homo sapiens
  CDR3 for alpha chain variable domain of TCR clone 127906 (TRAV4, TRAJ42)
CLVGGGSQGNIIF

SEQ ID NO: 255812 - protein, 16 aa, Homo sapiens
  CDR3 for beta chain variable domain of TCR clone 127906 (TRBV5-1, TRBJ2-3)
CASSLQGRVGADTQYF

SEQ ID NO: 255813 - protein, 15 aa, Homo sapiens
  CDR3 for alpha chain variable domain of TCR clone 127907 (TRAV27, TRAJ33)
CAGADIMDSNYQLIW

SEQ ID NO: 255814 - protein, 13 aa, Homo sapiens
  CDR3 for beta chain variable domain of TCR clone 127907 (TRBV28, TRBJ1-2)
CASSLQGRGGYAF

SEQ ID NO: 255815 - protein, 21 aa, Homo sapiens
  CDR3 for alpha chain variable domain of TCR clone 127908 (TRAV24, TRAJ5)
KGSQPEDSATYLCVPRRALTF

SEQ ID NO: 255816 - protein, 12 aa, Homo sapiens
  CDR3 for beta chain variable domain of TCR clone 127908 (TRBV24-1, TRBJ1-2)
CATSDDGGRYTF

SEQ ID NO: 255817 - protein, 14 aa, Homo sapiens
  CDR3 for alpha chain variable domain of TCR clone 127909 (TRAV1-2, TRAJ16)
CAVNRFSDGQKLLF

SEQ ID NO: 255818 - protein, 14 aa, Homo sapiens
  CDR3 for beta chain variable domain of TCR clone 127909 (TRBV10-2, TRBJ2-1)
CASSEGTSEDEQFF

SEQ ID NO: 255819 - protein, 15 aa, Homo sapiens
  CDR3 for alpha chain variable domain of TCR clone 127910 (TRAV8-4, TRAJ3)
CAVTGENLVQQCFQD

SEQ ID NO: 255820 - protein, 17 aa, Homo sapiens
  CDR3 for beta chain variable domain of TCR clone 127910 (TRBV4-1, TRBJ2-3)
CASSQGYVSGGTDTQYF

SEQ ID NO: 255821 - protein, 13 aa, Homo sapiens
  CDR3 for alpha chain variable domain of TCR clone 127911 (TRAV35, TRAJ44)
CAVLSGTASKLTF

SEQ ID NO: 255822 - protein, 17 aa, Homo sapiens
  CDR3 for beta chain variable domain of TCR clone 127911 (TRBV7-8, TRBJ1-2)
CASSLRPLQGHLYGYTF

SEQ ID NO: 255823 - protein, 11 aa, Homo sapiens
  CDR3 for alpha chain variable domain of TCR clone 127912 (TRAV23/DV6, TRAJ48)
CAARWGEKLTF

SEQ ID NO: 255824 - protein, 13 aa, Homo sapiens
  CDR3 for beta chain variable domain of TCR clone 127912 (TRBV12-4, TRBJ2-5)
CASSPGTEETQYF

SEQ ID NO: 255825 - protein, 14 aa, Homo sapiens
  CDR3 for alpha chain variable domain of TCR clone 127913 (TRAV17, TRAJ22)
CATVLSGSARQLTF

SEQ ID NO: 255826 - protein, 13 aa, Homo sapiens
  CDR3 for beta chain variable domain of TCR clone 127913 (TRBV15, TRBJ1-6)
CATSGGLNSPLLF

SEQ ID NO: 255827 - protein, 16 aa, Homo sapiens
  CDR3 for alpha chain variable domain of TCR clone 127914 (TRAV22, TRAJ45)
CAVERGKRGGADGLTF

SEQ ID NO: 255828 - protein, 14 aa, Homo sapiens
  CDR3 for beta chain variable domain of TCR clone 127914 (TRBV27, TRBJ1-1)
CASSLGGAVTEAFF

SEQ ID NO: 255829 - protein, 11 aa, Homo sapiens
  CDR3 for alpha chain variable domain of TCR clone 127915 (TRAV2, TRAJ33)
CAVDSNYQLIC

SEQ ID NO: 255830 - protein, 12 aa, Homo sapiens
  CDR3 for beta chain variable domain of TCR clone 127915 (TRBV11-2, TRBJ2-2)
CASSLGGGELFF

SEQ ID NO: 255831 - protein, 13 aa, Homo sapiens
  CDR3 for alpha chain variable domain of TCR clone 127916 (TRAV21, TRAJ27)
CAALNTNAGKSTF

SEQ ID NO: 255832 - protein, 14 aa, Homo sapiens
  CDR3 for beta chain variable domain of TCR clone 127916 (TRBV19, TRBJ2-1)
CASPTFVLSGEQFF

SEQ ID NO: 255833 - protein, 11 aa, Homo sapiens
  CDR3 for alpha chain variable domain of TCR clone 127917 (TRAV12-2, TRAJ29)
CAVTLRSPLFF

SEQ ID NO: 255834 - protein, 14 aa, Homo sapiens
  CDR3 for beta chain variable domain of TCR clone 127917 (TRBV19, TRBJ2-1)
CASPTFVLSGEQFF

SEQ ID NO: 255835 - protein, 15 aa, Homo sapiens
  CDR3 for alpha chain variable domain of TCR clone 127918 (TRAV27, TRAJ50)
CAEVGRGTSYDKVIF

SEQ ID NO: 255836 - protein, 14 aa, Homo sapiens
  CDR3 for beta chain variable domain of TCR clone 127918 (TRBV7-2, TRBJ1-1)
CASSFYDLNTEAFF

SEQ ID NO: 255837 - protein, 15 aa, Homo sapiens
  CDR3 for alpha chain variable domain of TCR clone 127919 (TRAV3, TRAJ3)
CAVRDGHSSASKIIF

SEQ ID NO: 255838 - protein, 17 aa, Homo sapiens
  CDR3 for beta chain variable domain of TCR clone 127919 (TRBV25-1, TRBJ2-7)
CASSDARVVFPSYEQYF

SEQ ID NO: 255839 - protein, 13 aa, Homo sapiens
  CDR3 for alpha chain variable domain of TCR clone 127920 (TRAV27, TRAJ45)
CRSSGGGADGLTF

SEQ ID NO: 255840 - protein, 17 aa, Homo sapiens
  CDR3 for beta chain variable domain of TCR clone 127920 (TRBV11-2, TRBJ2-1)
SASSLYPPGVEYNEQFF

SEQ ID NO: 255841 - protein, 13 aa, Homo sapiens
  CDR3 for alpha chain variable domain of TCR clone 127921 (TRAV8-6, TRAJ40)
CAVSVTGTYKSIF

SEQ ID NO: 255842 - protein, 15 aa, Homo sapiens
  CDR3 for beta chain variable domain of TCR clone 127921 (TRBV4-1, TRBJ2-3)
CASGRGQGIPDTQYF

SEQ ID NO: 255843 - protein, 13 aa, Homo sapiens
  CDR3 for alpha chain variable domain of TCR clone 127922 (TRAV27, TRAJ8)
CAGGPTGFQKLVF

SEQ ID NO: 255844 - protein, 14 aa, Homo sapiens
  CDR3 for beta chain variable domain of TCR clone 127922 (TRBV9, TRBJ2-7)
CASSVGVGSYEQYF

SEQ ID NO: 255845 - protein, 14 aa, Homo sapiens
  CDR3 for alpha chain variable domain of TCR clone 127923 (TRAV1-2, TRAJ16)
CAVRGFSDGQKLLF

SEQ ID NO: 255846 - protein, 16 aa, Homo sapiens
  CDR3 for beta chain variable domain of TCR clone 127923 (TRBV12-5, TRBJ2-5)
CASGPRTSGNQETQYF

SEQ ID NO: 255847 - protein, 15 aa, Homo sapiens
  CDR3 for alpha chain variable domain of TCR clone 127924 (TRAV3, TRAJ4)
CALRDGTGGYNKLIF

SEQ ID NO: 255848 - protein, 16 aa, Homo sapiens
  CDR3 for beta chain variable domain of TCR clone 127924 (TRBV27, TRBJ2-2)
CASSSSGVSNTGELFF

SEQ ID NO: 255849 - protein, 16 aa, Homo sapiens
  CDR3 for alpha chain variable domain of TCR clone 127925 (TRAV3, TRAJ37)
CAVRVRGSGNTGKLIF

SEQ ID NO: 255850 - protein, 13 aa, Homo sapiens
  CDR3 for beta chain variable domain of TCR clone 127925 (TRBV12-4, TRBJ2-7)
CASSPTETYEQYF

SEQ ID NO: 255851 - protein, 12 aa, Homo sapiens
  CDR3 for alpha chain variable domain of TCR clone 127926 (TRAV20, TRAJ20)
CAVQFNDYKLSF

SEQ ID NO: 255852 - protein, 14 aa, Homo sapiens
  CDR3 for beta chain variable domain of TCR clone 127926 (TRBV20-1, TRBJ2-1)
CSAQIGGSANEQFF

SEQ ID NO: 255853 - protein, 14 aa, Homo sapiens
  CDR3 for alpha chain variable domain of TCR clone 127927 (TRAV8-4, TRAJ48)
CAVSETFGNEKLTF

SEQ ID NO: 255854 - protein, 16 aa, Homo sapiens
  CDR3 for beta chain variable domain of TCR clone 127927 (TRBV7-2, TRBJ2-7)
CASSLEAGGPWYEQYF

SEQ ID NO: 255855 - protein, 15 aa, Homo sapiens
  CDR3 for alpha chain variable domain of TCR clone 127928 (TRAV8-3, TRAJ45)
CASSYSGGGADGLTF

SEQ ID NO: 255856 - protein, 13 aa, Homo sapiens
  CDR3 for beta chain variable domain of TCR clone 127928 (TRBV2, TRBJ1-4)
CASSELGVEKLFF

SEQ ID NO: 255857 - protein, 12 aa, Homo sapiens
  CDR3 for alpha chain variable domain of TCR clone 127929 (TRAV36/DV7, TRAJ40)
CAVEAGLRNLQI

SEQ ID NO: 255858 - protein, 15 aa, Homo sapiens
  CDR3 for beta chain variable domain of TCR clone 127929 (TRBV20-1, TRBJ2-7)
CSARDRVSGMDEQYF

SEQ ID NO: 255859 - protein, 12 aa, Homo sapiens
  CDR3 for alpha chain variable domain of TCR clone 127930 (TRAV12-2, TRAJ43)
CAVNVNNNDVRF

SEQ ID NO: 255860 - protein, 14 aa, Homo sapiens
  CDR3 for beta chain variable domain of TCR clone 127930 (TRBV12-5, TRBJ2-5)
CASGSRTHQETQYF

SEQ ID NO: 255861 - protein, 14 aa, Homo sapiens
  CDR3 for alpha chain variable domain of TCR clone 127931 (TRAV35, TRAJ22)
WAGLRPGSARQLTF

SEQ ID NO: 255862 - protein, 15 aa, Homo sapiens
  CDR3 for beta chain variable domain of TCR clone 127931 (TRBV12-4, TRBJ2-5)
CASSPPTGLQETQYF

SEQ ID NO: 255863 - protein, 13 aa, Homo sapiens
  CDR3 for alpha chain variable domain of TCR clone 127932 (TRAV1-1, TRAJ9)
CAAKNTGGFKTIF

SEQ ID NO: 255864 - protein, 15 aa, Homo sapiens
  CDR3 for beta chain variable domain of TCR clone 127932 (TRBV7-3, TRBJ2-1)
CASSPTGGGEVEQFF

SEQ ID NO: 255865 - protein, 14 aa, Homo sapiens
  CDR3 for alpha chain variable domain of TCR clone 127933 (TRAV35, TRAJ13)
CAGRSPGGYQKVTF

SEQ ID NO: 255866 - protein, 14 aa, Homo sapiens
  CDR3 for beta chain variable domain of TCR clone 127933 (TRBV19, TRBJ2-2)
CASSKVGLSGELFF

SEQ ID NO: 255867 - protein, 12 aa, Homo sapiens
  CDR3 for alpha chain variable domain of TCR clone 127934 (TRAV13-1, TRAJ20)
CAASMRDYKLSF

SEQ ID NO: 255868 - protein, 15 aa, Homo sapiens
  CDR3 for beta chain variable domain of TCR clone 127934 (TRBV11-3, TRBJ2-3)
CASNGGLDSTDTQYF

SEQ ID NO: 255869 - protein, 16 aa, Homo sapiens
  CDR3 for alpha chain variable domain of TCR clone 127935 (TRAV22, TRAJ45)
CAVERGKRGGADGLTF

SEQ ID NO: 255870 - protein, 15 aa, Homo sapiens
  CDR3 for beta chain variable domain of TCR clone 127935 (TRBV28, TRBJ1-3)
CASSMGWASGNTIYF

SEQ ID NO: 255871 - protein, 12 aa, Homo sapiens
  CDR3 for alpha chain variable domain of TCR clone 127936 (TRAV12-1, TRAJ40)
CVVYSGTYKYIF

SEQ ID NO: 255872 - protein, 12 aa, Homo sapiens
  CDR3 for beta chain variable domain of TCR clone 127936 (TRBV28, TRBJ2-3)
CASSLYRDTQYF

SEQ ID NO: 255873 - protein, 15 aa, Homo sapiens
  CDR3 for alpha chain variable domain of TCR clone 127937 (TRAV13-1, TRAJ44)
CAASRGGGTASKLTF

SEQ ID NO: 255874 - protein, 14 aa, Homo sapiens
  CDR3 for beta chain variable domain of TCR clone 127937 (TRBV7-2, TRBJ2-5)
CASSPRGRSETQYF

SEQ ID NO: 255875 - protein, 10 aa, Homo sapiens
  CDR3 for alpha chain variable domain of TCR clone 127938 (TRAV23/DV6, TRAJ57)
CAASSTLSQG

SEQ ID NO: 255876 - protein, 13 aa, Homo sapiens
  CDR3 for beta chain variable domain of TCR clone 127938 (TRBV7-7, TRBJ2-5)
CASSRSGQETQYF

SEQ ID NO: 255877 - protein, 17 aa, Homo sapiens
  CDR3 for alpha chain variable domain of TCR clone 127939 (TRAV3, TRAJ6)
CAVRDDPRAGGSYIPTF

SEQ ID NO: 255878 - protein, 14 aa, Homo sapiens
  CDR3 for beta chain variable domain of TCR clone 127939 (TRBV19, TRBJ2-1)
CASPTFVLSGEQFF

SEQ ID NO: 255879 - protein, 13 aa, Homo sapiens
  CDR3 for alpha chain variable domain of TCR clone 127940 (TRAV8-1, TRAJ39)
CAVANNAGNILTF

SEQ ID NO: 255880 - protein, 15 aa, Homo sapiens
  CDR3 for beta chain variable domain of TCR clone 127940 (TRBV7-2, TRBJ2-1)
CASSLNRGAYNEQFF

SEQ ID NO: 255881 - protein, 12 aa, Homo sapiens
  CDR3 for alpha chain variable domain of TCR clone 127941 (TRAV1-1, TRAJ20)
CAVREDDYKLSF

SEQ ID NO: 255882 - protein, 14 aa, Homo sapiens
  CDR3 for beta chain variable domain of TCR clone 127941 (TRBV20-1, TRBJ2-3)
RTSGGPGTTDTQYF

SEQ ID NO: 255883 - protein, 14 aa, Homo sapiens
  CDR3 for alpha chain variable domain of TCR clone 127942 (TRAV26-1, TRAJ38)
CIADNAGNNRKLIW

SEQ ID NO: 255884 - protein, 13 aa, Homo sapiens
  CDR3 for beta chain variable domain of TCR clone 127942 (TRBV4-1, TRBJ2-7)
CSSSQGQAYEQYF

SEQ ID NO: 255885 - protein, 12 aa, Homo sapiens
  CDR3 for alpha chain variable domain of TCR clone 127943 (TRAV36/DV7, TRAJ54)
CAVVRGAQKLVF

SEQ ID NO: 255886 - protein, 13 aa, Homo sapiens
  CDR3 for beta chain variable domain of TCR clone 127943 (TRBV20-1, TRBJ1-1)
CSARGVGNTEAFF

SEQ ID NO: 255887 - protein, 14 aa, Homo sapiens
  CDR3 for alpha chain variable domain of TCR clone 127944 (TRAV3, TRAJ21)
CAVRDKYNFNKFYF

SEQ ID NO: 255888 - protein, 14 aa, Homo sapiens
  CDR3 for beta chain variable domain of TCR clone 127944 (TRBV27, TRBJ2-3)
CASRDSPSTDTQYF

SEQ ID NO: 255889 - protein, 14 aa, Homo sapiens
  CDR3 for alpha chain variable domain of TCR clone 127945 (TRAV12-2, TRAJ5)
CAVNRSTGRRALTF

SEQ ID NO: 255890 - protein, 20 aa, Homo sapiens
  CDR3 for beta chain variable domain of TCR clone 127945 (TRBV4-3, TRBJ2-3)
CASSPRVEMRASGRPDTQYF

SEQ ID NO: 255891 - protein, 15 aa, Homo sapiens
  CDR3 for alpha chain variable domain of TCR clone 127946 (TRAV13-2, TRAJ29)
GDSAARDGGNTPLVF

SEQ ID NO: 255892 - protein, 11 aa, Homo sapiens
  CDR3 for beta chain variable domain of TCR clone 127946 (TRBV19, TRBJ1-2)
CASSISSGYTF

SEQ ID NO: 255893 - protein, 14 aa, Homo sapiens
  CDR3 for alpha chain variable domain of TCR clone 127947 (TRAV13-2, TRAJ43)
CAEISTYNNNDMRF

SEQ ID NO: 255894 - protein, 15 aa, Homo sapiens
  CDR3 for beta chain variable domain of TCR clone 127947 (TRBV7-9, TRBJ2-2)
CASGPLDTFPGELFF

SEQ ID NO: 255895 - protein, 14 aa, Homo sapiens
  CDR3 for alpha chain variable domain of TCR clone 127948 (TRAV16, TRAJ26)
CALRSANYGQNFVF

SEQ ID NO: 255896 - protein, 16 aa, Homo sapiens
  CDR3 for beta chain variable domain of TCR clone 127948 (TRBV20-1, TRBJ1-4)
CSAPGQGLLTNEKLFF

SEQ ID NO: 255897 - protein, 15 aa, Homo sapiens
  CDR3 for alpha chain variable domain of TCR clone 127949 (TRAV8-3, TRAJ45)
CASSYSGGGADGFTF

SEQ ID NO: 255898 - protein, 15 aa, Homo sapiens
  CDR3 for beta chain variable domain of TCR clone 127949 (TRBV27, TRBJ2-1)
CASSNGGGSSNEQFF

SEQ ID NO: 255899 - protein, 11 aa, Homo sapiens
  CDR3 for alpha chain variable domain of TCR clone 127950 (TRAV12-2, TRAJ33)
CAVGSNYQLIW

SEQ ID NO: 255900 - protein, 14 aa, Homo sapiens
  CDR3 for beta chain variable domain of TCR clone 127950 (TRBV6-1, TRBJ2-2)
CASVEHIESGELFC

SEQ ID NO: 255901 - protein, 10 aa, Homo sapiens
  CDR3 for alpha chain variable domain of TCR clone 127951 (TRAV26-1, TRAJ40)
CIAGTYKYIF

SEQ ID NO: 255902 - protein, 15 aa, Homo sapiens
  CDR3 for beta chain variable domain of TCR clone 127951 (TRBV19, TRBJ2-1)
CASSSPGVPLDEQVF

SEQ ID NO: 255903 - protein, 15 aa, Homo sapiens
  CDR3 for alpha chain variable domain of TCR clone 127952 (TRAV17, TRAJ40)
CATVSSTSGTYKYIF

SEQ ID NO: 255904 - protein, 11 aa, Homo sapiens
  CDR3 for beta chain variable domain of TCR clone 127952 (TRBV19, TRBJ1-1)
CASSIGSEAFF

SEQ ID NO: 255905 - protein, 14 aa, Homo sapiens
  CDR3 for alpha chain variable domain of TCR clone 127953 (TRAV23/DV6, TRAJ13)
CAASETGGYQKVTF

SEQ ID NO: 255906 - protein, 13 aa, Homo sapiens
  CDR3 for beta chain variable domain of TCR clone 127953 (TRBV7-9, TRBJ1-2)
CASSLKQNYGYTF

SEQ ID NO: 255907 - protein, 12 aa, Homo sapiens
  CDR3 for alpha chain variable domain of TCR clone 127954 (TRAV26-1, TRAJ36)
CIVETGANNLFF

SEQ ID NO: 255908 - protein, 12 aa, Homo sapiens
  CDR3 for beta chain variable domain of TCR clone 127954 (TRBV7-3, TRBJ2-1)
CASSFINNEQFF

SEQ ID NO: 255909 - protein, 14 aa, Homo sapiens
  CDR3 for alpha chain variable domain of TCR clone 127955 (TRAV12-3, TRAJ10)
SHLHLTGGGNKLTF

SEQ ID NO: 255910 - protein, 15 aa, Homo sapiens
  CDR3 for beta chain variable domain of TCR clone 127955 (TRBV11-2, TRBJ1-3)
CASSLDGTVGNTIYF

SEQ ID NO: 255911 - protein, 14 aa, Homo sapiens
  CDR3 for alpha chain variable domain of TCR clone 127956 (TRAV12-3, TRAJ22)
CAMSLFGSARQLTF

SEQ ID NO: 255912 - protein, 10 aa, Homo sapiens
  CDR3 for beta chain variable domain of TCR clone 127956 (TRBV12-4, TRBJ2-2)
CQQLRRGAVF

SEQ ID NO: 255913 - protein, 13 aa, Homo sapiens
  CDR3 for alpha chain variable domain of TCR clone 127957 (TRAV9-2, TRAJ49)
CALIQIGGNKFYF

SEQ ID NO: 255914 - protein, 13 aa, Homo sapiens
  CDR3 for beta chain variable domain of TCR clone 127957 (TRBV20-1, TRBJ1-1)
CSARGGGNTEAFF

SEQ ID NO: 255915 - protein, 10 aa, Homo sapiens
  CDR3 for alpha chain variable domain of TCR clone 127958 (TRAV30, TRAJ48)
CGIGDEKLTF

SEQ ID NO: 255916 - protein, 15 aa, Homo sapiens
  CDR3 for beta chain variable domain of TCR clone 127958 (TRBV28, TRBJ2-5)
CASSPPRSYQETQYF

SEQ ID NO: 255917 - protein, 15 aa, Homo sapiens
  CDR3 for alpha chain variable domain of TCR clone 127959 (TRAV2, TRAJ24)
CAVEVLTDSWGKFQL

SEQ ID NO: 255918 - protein, 14 aa, Homo sapiens
  CDR3 for beta chain variable domain of TCR clone 127959 (TRBV19, TRBJ2-1)
CASSMGSGRRSSSS

SEQ ID NO: 255919 - protein, 16 aa, Homo sapiens
  CDR3 for alpha chain variable domain of TCR clone 127960 (TRAV12-1, TRAJ48)
CVVNMVSNFGNEKLTL

SEQ ID NO: 255920 - protein, 18 aa, Homo sapiens
  CDR3 for beta chain variable domain of TCR clone 127960 (TRBV11-2, TRBJ2-6)
CASSLNPFLGTGANVLTF

SEQ ID NO: 255921 - protein, 14 aa, Homo sapiens
  CDR3 for alpha chain variable domain of TCR clone 127961 (TRAV8-2, TRAJ11)
CVVSEKSGYSTLTF

SEQ ID NO: 255922 - protein, 16 aa, Homo sapiens
  CDR3 for beta chain variable domain of TCR clone 127961 (TRBV28, TRBJ2-1)
CASGSPEYPRDNEQFF

SEQ ID NO: 255923 - protein, 16 aa, Homo sapiens
  CDR3 for alpha chain variable domain of TCR clone 127962 (TRAV38-1, TRAJ32)
CAFMKGGGGSTNKLIF

SEQ ID NO: 255924 - protein, 13 aa, Homo sapiens
  CDR3 for beta chain variable domain of TCR clone 127962 (TRBV20-1, TRBJ2-5)
CSAREAFQETQYF

SEQ ID NO: 255925 - protein, 18 aa, Homo sapiens
  CDR3 for alpha chain variable domain of TCR clone 127963 (TRAV13-1, TRAJ52)
CAAKNPNAGGTSYGKLTF

SEQ ID NO: 255926 - protein, 14 aa, Homo sapiens
  CDR3 for beta chain variable domain of TCR clone 127963 (TRBV11-2, TRBJ2-5)
CASRPLAGRETQYF

SEQ ID NO: 255927 - protein, 15 aa, Homo sapiens
  CDR3 for alpha chain variable domain of TCR clone 127964 (TRAV21, TRAJ24)
CAARSSTDSWGKLQF

SEQ ID NO: 255928 - protein, 13 aa, Homo sapiens
  CDR3 for beta chain variable domain of TCR clone 127964 (TRBV11-2, TRBJ2-5)
CASSSTGEATQYF

SEQ ID NO: 255929 - protein, 14 aa, Homo sapiens
  CDR3 for alpha chain variable domain of TCR clone 127965 (TRAV13-1, TRAJ44)
YAAKATGTASKLTF

SEQ ID NO: 255930 - protein, 13 aa, Homo sapiens
  CDR3 for beta chain variable domain of TCR clone 127965 (TRBV5-5, TRBJ1-2)
CASSFWRGEDYTF

SEQ ID NO: 255931 - protein, 13 aa, Homo sapiens
  CDR3 for alpha chain variable domain of TCR clone 127966 (TRAV1-2, TRAJ12)
CAVSMDSSYQLIF

SEQ ID NO: 255932 - protein, 15 aa, Homo sapiens
  CDR3 for beta chain variable domain of TCR clone 127966 (TRBV27, TRBJ2-5)
CASSLIPSGGETQYF

SEQ ID NO: 255933 - protein, 18 aa, Homo sapiens
  CDR3 for alpha chain variable domain of TCR clone 127967 (TRAV1-1, TRAJ12)
CLLLLRCERGDSSYKLIF

SEQ ID NO: 255934 - protein, 17 aa, Homo sapiens
  CDR3 for beta chain variable domain of TCR clone 127967 (TRBV7-9, TRBJ2-7)
CASSFDGSRGGAYEQYF

SEQ ID NO: 255935 - protein, 14 aa, Homo sapiens
  CDR3 for alpha chain variable domain of TCR clone 127968 (TRAV1-2, TRAJ16)
CAVNRFSDGQKLLF

SEQ ID NO: 255936 - protein, 15 aa, Homo sapiens
  CDR3 for beta chain variable domain of TCR clone 127968 (TRBV20-1, TRBJ2-7)
CSARREAGAPREQYF

SEQ ID NO: 255937 - protein, 14 aa, Homo sapiens
  CDR3 for alpha chain variable domain of TCR clone 127969 (TRAV26-1, TRAJ45)
CIEVTGGGADGLTF

SEQ ID NO: 255938 - protein, 13 aa, Homo sapiens
  CDR3 for beta chain variable domain of TCR clone 127969 (TRBV7-6, TRBJ1-2)
CASSLVADYGYTF

SEQ ID NO: 255939 - protein, 14 aa, Homo sapiens
  CDR3 for alpha chain variable domain of TCR clone 127970 (TRAV38-1, TRAJ29)
CAFITPSGNTPLVF

SEQ ID NO: 255940 - protein, 14 aa, Homo sapiens
  CDR3 for beta chain variable domain of TCR clone 127970 (TRBV18, TRBJ2-7)
CASSPRGGAYEQNF

SEQ ID NO: 255941 - protein, 14 aa, Homo sapiens
  CDR3 for alpha chain variable domain of TCR clone 127971 (TRAV12-3, TRAJ10)
SHLPLTGGGNKLTF

SEQ ID NO: 255942 - protein, 16 aa, Homo sapiens
  CDR3 for beta chain variable domain of TCR clone 127971 (TRBV28, TRBJ1-4)
CASSPPYRGRSEKLFF

SEQ ID NO: 255943 - protein, 14 aa, Homo sapiens
  CDR3 for alpha chain variable domain of TCR clone 127972 (TRAV4, TRAJ9)
CLVGSGTGGFKTIF

SEQ ID NO: 255944 - protein, 14 aa, Homo sapiens
  CDR3 for beta chain variable domain of TCR clone 127972 (TRBV19, TRBJ2-7)
CASSMGQGAIEQYF

SEQ ID NO: 255945 - protein, 11 aa, Homo sapiens
  CDR3 for alpha chain variable domain of TCR clone 127973 (TRAV16, TRAJ49)
CSLRSGNQFYF

SEQ ID NO: 255946 - protein, 18 aa, Homo sapiens
  CDR3 for beta chain variable domain of TCR clone 127973 (TRBV28, TRBJ2-7)
CASSSGLAGVGTSSTSGR

SEQ ID NO: 255947 - protein, 14 aa, Homo sapiens
  CDR3 for alpha chain variable domain of TCR clone 127974 (TRAV13-1, TRAJ35)
CAASKGGFGNVLHC

SEQ ID NO: 255948 - protein, 12 aa, Homo sapiens
  CDR3 for beta chain variable domain of TCR clone 127974 (TRBV19, TRBJ1-4)
CASKDWPGGLFF

SEQ ID NO: 255949 - protein, 15 aa, Homo sapiens
  CDR3 for alpha chain variable domain of TCR clone 127975 (TRAV3, TRAJ3)
CAVRDRDSSASKLIF

SEQ ID NO: 255950 - protein, 12 aa, Homo sapiens
  CDR3 for beta chain variable domain of TCR clone 127975 (TRBV29-1, TRBJ2-3)
CSVTGGADTQYF

SEQ ID NO: 255951 - protein, 16 aa, Homo sapiens
  CDR3 for alpha chain variable domain of TCR clone 127976 (TRAV30, TRAJ24)
CGTEIVDADSWGKFRF

SEQ ID NO: 255952 - protein, 13 aa, Homo sapiens
  CDR3 for beta chain variable domain of TCR clone 127976 (TRBV9, TRBJ1-1)
CASSPTGSTEAFF

SEQ ID NO: 255953 - protein, 23 aa, Homo sapiens
  CDR3 for alpha chain variable domain of TCR clone 127977 (TRAV26-1, TRAJ38)
CIADNAGNNHIQNPDPAVYQLRD

SEQ ID NO: 255954 - protein, 13 aa, Homo sapiens
  CDR3 for beta chain variable domain of TCR clone 127977 (TRBV20-1, TRBJ1-1)
CSARGEGNTEAFF

SEQ ID NO: 255955 - protein, 12 aa, Homo sapiens
  CDR3 for alpha chain variable domain of TCR clone 127978 (TRAV12-3, TRAJ40)
CAMSSGTYKYIF

SEQ ID NO: 255956 - protein, 15 aa, Homo sapiens
  CDR3 for beta chain variable domain of TCR clone 127978 (TRBV7-3, TRBJ2-2)
CASNETGQGTGELFF

SEQ ID NO: 255957 - protein, 15 aa, Homo sapiens
  CDR3 for alpha chain variable domain of TCR clone 127979 (TRAV17, TRAJ57)
CATGPSQGGSEKLVF

SEQ ID NO: 255958 - protein, 18 aa, Homo sapiens
  CDR3 for beta chain variable domain of TCR clone 127979 (TRBV7-9, TRBJ2-7)
CASSLTTSGSRTRYEQYF

SEQ ID NO: 255959 - protein, 15 aa, Homo sapiens
  CDR3 for alpha chain variable domain of TCR clone 127980 (TRAV8-4, TRAJ37)
CAVTYGSSNKGKLIF

SEQ ID NO: 255960 - protein, 13 aa, Homo sapiens
  CDR3 for beta chain variable domain of TCR clone 127980 (TRBV12-4, TRBJ2-5)
CASSLGGSRTQYF

SEQ ID NO: 255961 - protein, 16 aa, Homo sapiens
  CDR3 for alpha chain variable domain of TCR clone 127981 (TRAV30, TRAJ24)
CGTEIVDADSWGKFQF

SEQ ID NO: 255962 - protein, 15 aa, Homo sapiens
  CDR3 for beta chain variable domain of TCR clone 127981 (TRBV7-9, TRBJ1-4)
CASSARAGGNEKLFF

SEQ ID NO: 255963 - protein, 22 aa, Homo sapiens
  CDR3 for alpha chain variable domain of TCR clone 127982 (TRAV8-3, TRAJ32)
CAVEVVLQTSSSLELALCLLSS

SEQ ID NO: 255964 - protein, 17 aa, Homo sapiens
  CDR3 for beta chain variable domain of TCR clone 127982 (TRBV7-3, TRBJ2-3)
CASSLMKRMRGADTQYF

SEQ ID NO: 255965 - protein, 14 aa, Homo sapiens
  CDR3 for alpha chain variable domain of TCR clone 127983 (TRAV30, TRAJ26)
CGTEIVSYGQNFVF

SEQ ID NO: 255966 - protein, 14 aa, Homo sapiens
  CDR3 for beta chain variable domain of TCR clone 127983 (TRBV4-1, TRBJ2-3)
CASSQDWSTDTQYF

SEQ ID NO: 255967 - protein, 16 aa, Homo sapiens
  CDR3 for alpha chain variable domain of TCR clone 127984 (TRAV30, TRAJ24)
CGTEIVDADSWGKLQF

SEQ ID NO: 255968 - protein, 16 aa, Homo sapiens
  CDR3 for beta chain variable domain of TCR clone 127984 (TRBV2, TRBJ1-3)
CASSGGAGRSGNTIYF

SEQ ID NO: 255969 - protein, 14 aa, Homo sapiens
  CDR3 for alpha chain variable domain of TCR clone 127985 (TRAV1-2, TRAJ37)
CAVRSKSNTGKLIF

SEQ ID NO: 255970 - protein, 14 aa, Homo sapiens
  CDR3 for beta chain variable domain of TCR clone 127985 (TRBV6-3, TRBJ1-2)
CASSEGGGSYGDTF

SEQ ID NO: 255971 - protein, 13 aa, Homo sapiens
  CDR3 for alpha chain variable domain of TCR clone 127986 (TRAV3, TRAJ20)
CCEAFCNDYKLSF

SEQ ID NO: 255972 - protein, 15 aa, Homo sapiens
  CDR3 for beta chain variable domain of TCR clone 127986 (TRBV6-5, TRBJ2-1)
RASSYDAGAGNEQFF

SEQ ID NO: 255973 - protein, 13 aa, Homo sapiens
  CDR3 for alpha chain variable domain of TCR clone 127987 (TRAV35, TRAJ42)
CAGFPGNQGNLIF

SEQ ID NO: 255974 - protein, 14 aa, Homo sapiens
  CDR3 for beta chain variable domain of TCR clone 127987 (TRBV4-1, TRBJ2-2)
CASSQAVNTGELFF

SEQ ID NO: 255975 - protein, 15 aa, Homo sapiens
  CDR3 for alpha chain variable domain of TCR clone 127988 (TRAV26-1, TRAJ40)
CIVRVTTSGTYKYIF

SEQ ID NO: 255976 - protein, 12 aa, Homo sapiens
  CDR3 for beta chain variable domain of TCR clone 127988 (TRBV7-9, TRBJ1-4)
CASSTDREKLIF

SEQ ID NO: 255977 - protein, 16 aa, Homo sapiens
  CDR3 for alpha chain variable domain of TCR clone 127989 (TRAV26-2, TRAJ48)
CILRPPFNFGNEKSTF

SEQ ID NO: 255978 - protein, 15 aa, Homo sapiens
  CDR3 for beta chain variable domain of TCR clone 127989 (TRBV20-1, TRBJ2-3)
CSARVEGTYTDTQYF

SEQ ID NO: 255979 - protein, 13 aa, Homo sapiens
  CDR3 for alpha chain variable domain of TCR clone 127990 (TRAV13-1, TRAJ21)
CAASIYNFNKIYF

SEQ ID NO: 255980 - protein, 13 aa, Homo sapiens
  CDR3 for beta chain variable domain of TCR clone 127990 (TRBV27, TRBJ1-4)
CASSLMGDEKLFF

SEQ ID NO: 255981 - protein, 14 aa, Homo sapiens
  CDR3 for alpha chain variable domain of TCR clone 127991 (TRAV12-3, TRAJ10)
SHLPLTGGGNKLTF

SEQ ID NO: 255982 - protein, 16 aa, Homo sapiens
  CDR3 for beta chain variable domain of TCR clone 127991 (TRBV4-3, TRBJ2-1)
CASSPAPDRGVNEQFF

SEQ ID NO: 255983 - protein, 16 aa, Homo sapiens
  CDR3 for alpha chain variable domain of TCR clone 127992 (TRAV2, TRAJ4)
CAVEDRFSGGYNKLIF

SEQ ID NO: 255984 - protein, 13 aa, Homo sapiens
  CDR3 for beta chain variable domain of TCR clone 127992 (TRBV12-4, TRBJ1-2)
CASSLRQGKGYTF

SEQ ID NO: 255985 - protein, 14 aa, Homo sapiens
  CDR3 for alpha chain variable domain of TCR clone 127993 (TRAV20, TRAJ42)
CAVQAGGSQGNLIF

SEQ ID NO: 255986 - protein, 14 aa, Homo sapiens
  CDR3 for beta chain variable domain of TCR clone 127993 (TRBV28, TRBJ1-2)
CASRTQGANYGYTF

SEQ ID NO: 255987 - protein, 13 aa, Homo sapiens
  CDR3 for alpha chain variable domain of TCR clone 127994 (TRAV12-3, TRAJ53)
CAMRGGSNYKLTF

SEQ ID NO: 255988 - protein, 14 aa, Homo sapiens
  CDR3 for beta chain variable domain of TCR clone 127994 (TRBV7-8, TRBJ2-3)
CASSLEAGTDTQYF

SEQ ID NO: 255989 - protein, 15 aa, Homo sapiens
  CDR3 for alpha chain variable domain of TCR clone 127995 (TRAV3, TRAJ3)
CAVRDRRSSASTIIF

SEQ ID NO: 255990 - protein, 13 aa, Homo sapiens
  CDR3 for beta chain variable domain of TCR clone 127995 (TRBV9, TRBJ2-5)
CASSPAGLGTQYF

SEQ ID NO: 255991 - protein, 16 aa, Homo sapiens
  CDR3 for alpha chain variable domain of TCR clone 127996 (TRAV35, TRAJ28)
CAGQKYSGAGSYQLTF

SEQ ID NO: 255992 - protein, 16 aa, Homo sapiens
  CDR3 for beta chain variable domain of TCR clone 127996 (TRBV11-3, TRBJ2-5)
CASSSVVAGSTETQYF

SEQ ID NO: 255993 - protein, 14 aa, Homo sapiens
  CDR3 for alpha chain variable domain of TCR clone 127997 (TRAV12-1, TRAJ17)
CVVNYKAAGNKLTF

SEQ ID NO: 255994 - protein, 12 aa, Homo sapiens
  CDR3 for beta chain variable domain of TCR clone 127997 (TRBV6-5, TRBJ2-3)
CASSDTTDTQYF

SEQ ID NO: 255995 - protein, 14 aa, Homo sapiens
  CDR3 for alpha chain variable domain of TCR clone 127998 (TRAV4, TRAJ30)
CLVGDMNRDDKIIF

SEQ ID NO: 255996 - protein, 14 aa, Homo sapiens
  CDR3 for beta chain variable domain of TCR clone 127998 (TRBV19, TRBJ2-7)
CASSIQDWSYEQYF

SEQ ID NO: 255997 - protein, 12 aa, Homo sapiens
  CDR3 for alpha chain variable domain of TCR clone 127999 (TRAV13-2, TRAJ23)
CAERHRGGKLIF

SEQ ID NO: 255998 - protein, 15 aa, Homo sapiens
  CDR3 for beta chain variable domain of TCR clone 127999 (TRBV19, TRBJ1-2)
CASSVGHVLNYGYTF

SEQ ID NO: 255999 - protein, 14 aa, Homo sapiens
  CDR3 for alpha chain variable domain of TCR clone 128000 (TRAV12-1, TRAJ13)
CVVIDSGGYQKVTF

SEQ ID NO: 256000 - protein, 15 aa, Homo sapiens
  CDR3 for beta chain variable domain of TCR clone 128000 (TRBV19, TRBJ2-1)
CASSSPGVPLDEQFF

SEQ ID NO: 256001 - protein, 13 aa, Homo sapiens
  CDR3 for alpha chain variable domain of TCR clone 128001 (TRAV8-3, TRAJ44)
CAVVPGTASKLTS

SEQ ID NO: 256002 - protein, 13 aa, Homo sapiens
  CDR3 for beta chain variable domain of TCR clone 128001 (TRBV10-3, TRBJ1-2)
CAISERDSYGYTF

SEQ ID NO: 256003 - protein, 14 aa, Homo sapiens
  CDR3 for alpha chain variable domain of TCR clone 128002 (TRAV1-1, TRAJ27)
CAVIYNANAGKSTF

SEQ ID NO: 256004 - protein, 13 aa, Homo sapiens
  CDR3 for beta chain variable domain of TCR clone 128002 (TRBV7-9, TRBJ1-2)
CASSLKQNYGYTF

SEQ ID NO: 256005 - protein, 16 aa, Homo sapiens
  CDR3 for alpha chain variable domain of TCR clone 128003 (TRAV23/DV6, TRAJ21)
CAASSGGGTTSTNFTF

SEQ ID NO: 256006 - protein, 11 aa, Homo sapiens
  CDR3 for beta chain variable domain of TCR clone 128003 (TRBV7-8, TRBJ2-7)
CASSLSLEQYF

SEQ ID NO: 256007 - protein, 17 aa, Homo sapiens
  CDR3 for alpha chain variable domain of TCR clone 128004 (TRAV8-6, TRAJ8)
CAVKEGIENTGFQKLVF

SEQ ID NO: 256008 - protein, 15 aa, Homo sapiens
  CDR3 for beta chain variable domain of TCR clone 128004 (TRBV5-1, TRBJ2-2)
CASSTFNINTGELFF

SEQ ID NO: 256009 - protein, 14 aa, Homo sapiens
  CDR3 for alpha chain variable domain of TCR clone 128005 (TRAV8-6, TRAJ5)
CAVSVDTGRRALTF

SEQ ID NO: 256010 - protein, 11 aa, Homo sapiens
  CDR3 for beta chain variable domain of TCR clone 128005 (TRBV7-3, TRBJ2-5)
CASSLSETQYV

SEQ ID NO: 256011 - protein, 13 aa, Homo sapiens
  CDR3 for alpha chain variable domain of TCR clone 128006 (TRAV12-2, TRAJ20)
CAVYPSNDYKLSF

SEQ ID NO: 256012 - protein, 16 aa, Homo sapiens
  CDR3 for beta chain variable domain of TCR clone 128006 (TRBV19, TRBJ2-2)
CASRSPGTGATGELFF

SEQ ID NO: 256013 - protein, 12 aa, Homo sapiens
  CDR3 for alpha chain variable domain of TCR clone 128007 (TRAV13-2, TRAJ23)
CAERHRGGKLIF

SEQ ID NO: 256014 - protein, 13 aa, Homo sapiens
  CDR3 for beta chain variable domain of TCR clone 128007 (TRBV7-9, TRBJ1-2)
CASSLKQNYGDTF

SEQ ID NO: 256015 - protein, 16 aa, Homo sapiens
  CDR3 for alpha chain variable domain of TCR clone 128008 (TRAV35, TRAJ28)
CAGQKYSGAGSYQLTF

SEQ ID NO: 256016 - protein, 17 aa, Homo sapiens
  CDR3 for beta chain variable domain of TCR clone 128008 (TRBV28, TRBJ2-5)
CASSTPEGDALQETQYF

SEQ ID NO: 256017 - protein, 13 aa, Homo sapiens
  CDR3 for alpha chain variable domain of TCR clone 128009 (TRAV22, TRAJ29)
CAVGGSGNTPLVF

SEQ ID NO: 256018 - protein, 13 aa, Homo sapiens
  CDR3 for beta chain variable domain of TCR clone 128009 (TRBV10-3, TRBJ1-2)
CATSERDSYGYTF

SEQ ID NO: 256019 - protein, 15 aa, Homo sapiens
  CDR3 for alpha chain variable domain of TCR clone 128010 (TRAV35, TRAJ53)
CAGLTQAGSDYKLTF

SEQ ID NO: 256020 - protein, 13 aa, Homo sapiens
  CDR3 for beta chain variable domain of TCR clone 128010 (TRBV20-1, TRBJ1-1)
CSAVDGTLNEAFF

SEQ ID NO: 256021 - protein, 12 aa, Homo sapiens
  CDR3 for alpha chain variable domain of TCR clone 128011 (TRAV8-3, TRAJ26)
CAGDNYGQNFVF

SEQ ID NO: 256022 - protein, 15 aa, Homo sapiens
  CDR3 for beta chain variable domain of TCR clone 128011 (TRBV7-6, TRBJ1-5)
CASSQSSGINQPQHF

SEQ ID NO: 256023 - protein, 14 aa, Homo sapiens
  CDR3 for alpha chain variable domain of TCR clone 128012 (TRAV12-3, TRAJ13)
CAMRNSGGYQKVTF

SEQ ID NO: 256024 - protein, 14 aa, Homo sapiens
  CDR3 for beta chain variable domain of TCR clone 128012 (TRBV12-4, TRBJ1-1)
CASSLGTGGTEAFF

SEQ ID NO: 256025 - protein, 18 aa, Homo sapiens
  CDR3 for alpha chain variable domain of TCR clone 128013 (TRAV13-1, TRAJ52)
CAAKDPNAGGTSYGKLTF

SEQ ID NO: 256026 - protein, 14 aa, Homo sapiens
  CDR3 for beta chain variable domain of TCR clone 128013 (TRBV7-3, TRBJ2-1)
CASSLAGGTNEQFF

SEQ ID NO: 256027 - protein, 13 aa, Homo sapiens
  CDR3 for alpha chain variable domain of TCR clone 128014 (TRAV3, TRAJ27)
CAVRPLGAGKSTF

SEQ ID NO: 256028 - protein, 16 aa, Homo sapiens
  CDR3 for beta chain variable domain of TCR clone 128014 (TRBV27, TRBJ2-2)
CASSFRGLVRTGELFF

SEQ ID NO: 256029 - protein, 20 aa, Homo sapiens
  CDR3 for alpha chain variable domain of TCR clone 128015 (TRAV12-1, TRAJ42)
SSVIQPPTSVKGGSQGNLIF

SEQ ID NO: 256030 - protein, 12 aa, Homo sapiens
  CDR3 for beta chain variable domain of TCR clone 128015 (TRBV11-2, TRBJ2-1)
CASSPGNNEQFF

SEQ ID NO: 256031 - protein, 11 aa, Homo sapiens
  CDR3 for alpha chain variable domain of TCR clone 128016 (TRAV2, TRAJ33)
CAVDSNYQLIW

SEQ ID NO: 256032 - protein, 13 aa, Homo sapiens
  CDR3 for beta chain variable domain of TCR clone 128016 (TRBV7-2, TRBJ2-4)
CASSREHANSQYF

SEQ ID NO: 256033 - protein, 14 aa, Homo sapiens
  CDR3 for alpha chain variable domain of TCR clone 128017 (TRAV12-1, TRAJ26)
CVVKGSNYGQNFVF

SEQ ID NO: 256034 - protein, 13 aa, Homo sapiens
  CDR3 for beta chain variable domain of TCR clone 128017 (TRBV27, TRBJ1-1)
CASSLSIGAEAFF

SEQ ID NO: 256035 - protein, 13 aa, Homo sapiens
  CDR3 for alpha chain variable domain of TCR clone 128018 (TRAV20, TRAJ37)
CAGCSSNTGKLIF

SEQ ID NO: 256036 - protein, 16 aa, Homo sapiens
  CDR3 for beta chain variable domain of TCR clone 128018 (TRBV12-4, TRBJ1-3)
CASSPRTGRSGNTIYF

SEQ ID NO: 256037 - protein, 15 aa, Homo sapiens
  CDR3 for alpha chain variable domain of TCR clone 128019 (TRAV26-2, TRAJ39)
CSLRGNNNAGNMLTF

SEQ ID NO: 256038 - protein, 15 aa, Homo sapiens
  CDR3 for beta chain variable domain of TCR clone 128019 (TRBV5-4, TRBJ1-1)
CASSSPGWANTEAFF

SEQ ID NO: 256039 - protein, 12 aa, Homo sapiens
  CDR3 for alpha chain variable domain of TCR clone 128020 (TRAV26-1, TRAJ31)
CIVRNNNARLMF

SEQ ID NO: 256040 - protein, 15 aa, Homo sapiens
  CDR3 for beta chain variable domain of TCR clone 128020 (TRBV20-1, TRBJ2-4)
CSARDLTGGPNSQYF

SEQ ID NO: 256041 - protein, 14 aa, Homo sapiens
  CDR3 for alpha chain variable domain of TCR clone 128021 (TRAV21, TRAJ35)
CAVMPIGFGNVLHS

SEQ ID NO: 256042 - protein, 12 aa, Homo sapiens
  CDR3 for beta chain variable domain of TCR clone 128021 (TRBV7-9, TRBJ2-7)
CASSIKREEQYF

SEQ ID NO: 256043 - protein, 13 aa, Homo sapiens
  CDR3 for alpha chain variable domain of TCR clone 128022 (TRAV29/DV5, TRAJ31)
CAASRNNNARLVF

SEQ ID NO: 256044 - protein, 15 aa, Homo sapiens
  CDR3 for beta chain variable domain of TCR clone 128022 (TRBV2, TRBJ2-1)
CASSELAGSYNEQFF

SEQ ID NO: 256045 - protein, 20 aa, Homo sapiens
  CDR3 for alpha chain variable domain of TCR clone 128023 (TRAV12-3, TRAJ41)
SLFIRDSQPSDSATPEALNF

SEQ ID NO: 256046 - protein, 15 aa, Homo sapiens
  CDR3 for beta chain variable domain of TCR clone 128023 (TRBV5-1, TRBJ2-7)
CASSVDLTSSYEQYF

SEQ ID NO: 256047 - protein, 13 aa, Homo sapiens
  CDR3 for alpha chain variable domain of TCR clone 128024 (TRAV12-2, TRAJ15)
CAVFNQAGTALIF

SEQ ID NO: 256048 - protein, 15 aa, Homo sapiens
  CDR3 for beta chain variable domain of TCR clone 128024 (TRBV7-8, TRBJ1-5)
CASSRGGGADQHQHF

SEQ ID NO: 256049 - protein, 18 aa, Homo sapiens
  CDR3 for alpha chain variable domain of TCR clone 128025 (TRAV12-3, TRAJ52)
CAMSVGGAGGTSYGKLTF

SEQ ID NO: 256050 - protein, 15 aa, Homo sapiens
  CDR3 for beta chain variable domain of TCR clone 128025 (TRBV19, TRBJ1-6)
CASSTQGAVGSPLHF

SEQ ID NO: 256051 - protein, 11 aa, Homo sapiens
  CDR3 for alpha chain variable domain of TCR clone 128026 (TRAV12-3, TRAJ43)
CAMSVSNDMRF

SEQ ID NO: 256052 - protein, 14 aa, Homo sapiens
  CDR3 for beta chain variable domain of TCR clone 128026 (TRBV20-1, TRBJ1-1)
SAVRHLGGGTEAFF

SEQ ID NO: 256053 - protein, 13 aa, Homo sapiens
  CDR3 for alpha chain variable domain of TCR clone 128027 (TRAV3, TRAJ9)
CCETNTGGFKTIF

SEQ ID NO: 256054 - protein, 15 aa, Homo sapiens
  CDR3 for beta chain variable domain of TCR clone 128027 (TRBV7-2, TRBJ2-1)
CASSLASGRVNEQLF

SEQ ID NO: 256055 - protein, 17 aa, Homo sapiens
  CDR3 for alpha chain variable domain of TCR clone 128028 (TRAV13-1, TRAJ28)
CAASPPYSGAGSYQLTF

SEQ ID NO: 256056 - protein, 15 aa, Homo sapiens
  CDR3 for beta chain variable domain of TCR clone 128028 (TRBV2, TRBJ2-1)
CASSELAGSYNEQFF

SEQ ID NO: 256057 - protein, 11 aa, Homo sapiens
  CDR3 for alpha chain variable domain of TCR clone 128029 (TRAV2, TRAJ23)
CAVETRGKLIC

SEQ ID NO: 256058 - protein, 14 aa, Homo sapiens
  CDR3 for beta chain variable domain of TCR clone 128029 (TRBV2, TRBJ2-3)
CASSEGQNTDTQYF

SEQ ID NO: 256059 - protein, 14 aa, Homo sapiens
  CDR3 for alpha chain variable domain of TCR clone 128030 (TRAV26-1, TRAJ34)
CIVRESYNTDKLIF

SEQ ID NO: 256060 - protein, 13 aa, Homo sapiens
  CDR3 for beta chain variable domain of TCR clone 128030 (TRBV19, TRBJ2-1)
CTTSRGVYNEQFF

SEQ ID NO: 256061 - protein, 13 aa, Homo sapiens
  CDR3 for alpha chain variable domain of TCR clone 128031 (TRAV14/DV4, TRAJ22)
CAMRDLSARHLTF

SEQ ID NO: 256062 - protein, 18 aa, Homo sapiens
  CDR3 for beta chain variable domain of TCR clone 128031 (TRBV19, TRBJ1-5)
CASSKGQVSIHSNQPQHF

SEQ ID NO: 256063 - protein, 14 aa, Homo sapiens
  CDR3 for alpha chain variable domain of TCR clone 128032 (TRAV1-2, TRAJ8)
CAVREDTGFQKLVF

SEQ ID NO: 256064 - protein, 12 aa, Homo sapiens
  CDR3 for beta chain variable domain of TCR clone 128032 (TRBV11-2, TRBJ2-2)
CASSLPAGELFF

SEQ ID NO: 256065 - protein, 10 aa, Homo sapiens
  CDR3 for alpha chain variable domain of TCR clone 128033 (TRAV8-4, TRAJ43)
CAVSADDMRF

SEQ ID NO: 256066 - protein, 11 aa, Homo sapiens
  CDR3 for beta chain variable domain of TCR clone 128033 (TRBV12-4, TRBJ2-3)
WASTATDTQYF

SEQ ID NO: 256067 - protein, 11 aa, Homo sapiens
  CDR3 for alpha chain variable domain of TCR clone 128034 (TRAV3, TRAJ21)
CAVGNFNKFYF

SEQ ID NO: 256068 - protein, 15 aa, Homo sapiens
  CDR3 for beta chain variable domain of TCR clone 128034 (TRBV12-4, TRBJ2-1)
CASSLLATGDNEQFF

SEQ ID NO: 256069 - protein, 13 aa, Homo sapiens
  CDR3 for alpha chain variable domain of TCR clone 128035 (TRAV25, TRAJ26)
CAGMDNYGQNFVF

SEQ ID NO: 256070 - protein, 11 aa, Homo sapiens
  CDR3 for beta chain variable domain of TCR clone 128035 (TRBV29-1, TRBJ2-5)
CSEDRTGTQYF

SEQ ID NO: 256071 - protein, 17 aa, Homo sapiens
  CDR3 for alpha chain variable domain of TCR clone 128036 (TRAV3, TRAJ6)
CAVRDGPRAGGSYIPTF

SEQ ID NO: 256072 - protein, 15 aa, Homo sapiens
  CDR3 for beta chain variable domain of TCR clone 128036 (TRBV10-1, TRBJ2-1)
CASSTGTELYNEQFF

SEQ ID NO: 256073 - protein, 13 aa, Homo sapiens
  CDR3 for alpha chain variable domain of TCR clone 128037 (TRAV36/DV7, TRAJ49)
CAGDSNTGNQSYF

SEQ ID NO: 256074 - protein, 12 aa, Homo sapiens
  CDR3 for beta chain variable domain of TCR clone 128037 (TRBV11-2, TRBJ2-2)
CASSLGGGELFF

SEQ ID NO: 256075 - protein, 17 aa, Homo sapiens
  CDR3 for alpha chain variable domain of TCR clone 128038 (TRAV13-1, TRAJ52)
CAASSGAGGTSYGKLTF

SEQ ID NO: 256076 - protein, 14 aa, Homo sapiens
  CDR3 for beta chain variable domain of TCR clone 128038 (TRBV7-2, TRBJ2-7)
CASSPKTSFYEQYF

SEQ ID NO: 256077 - protein, 13 aa, Homo sapiens
  CDR3 for alpha chain variable domain of TCR clone 128039 (TRAV29/DV5, TRAJ31)
CAASRNNNARLMF

SEQ ID NO: 256078 - protein, 13 aa, Homo sapiens
  CDR3 for beta chain variable domain of TCR clone 128039 (TRBV28, TRBJ2-5)
CASSFAGGETQYF

SEQ ID NO: 256079 - protein, 11 aa, Homo sapiens
  CDR3 for alpha chain variable domain of TCR clone 128040 (TRAV20, TRAJ40)
CAVGGTYKYIF

SEQ ID NO: 256080 - protein, 15 aa, Homo sapiens
  CDR3 for beta chain variable domain of TCR clone 128040 (TRBV6-3, TRBJ2-2)
CASSVLATLTGELFF

SEQ ID NO: 256081 - protein, 14 aa, Homo sapiens
  CDR3 for alpha chain variable domain of TCR clone 128041 (TRAV12-3, TRAJ9)
CAMSPNTGGFKTIF

SEQ ID NO: 256082 - protein, 12 aa, Homo sapiens
  CDR3 for beta chain variable domain of TCR clone 128041 (TRBV19, TRBJ1-5)
CASSIAQQPQNF

SEQ ID NO: 256083 - protein, 14 aa, Homo sapiens
  CDR3 for alpha chain variable domain of TCR clone 128042 (TRAV8-2, TRAJ37)
CVVSIPGNTGKLIF

SEQ ID NO: 256084 - protein, 15 aa, Homo sapiens
  CDR3 for beta chain variable domain of TCR clone 128042 (TRBV7-2, TRBJ2-1)
CASSSGLAGGNEQFF

SEQ ID NO: 256085 - protein, 16 aa, Homo sapiens
  CDR3 for alpha chain variable domain of TCR clone 128043 (TRAV30, TRAJ24)
CGTETVDADSWGKFQF

SEQ ID NO: 256086 - protein, 16 aa, Homo sapiens
  CDR3 for beta chain variable domain of TCR clone 128043 (TRBV2, TRBJ1-3)
CASSGGAGRSGNTIYF

SEQ ID NO: 256087 - protein, 12 aa, Homo sapiens
  CDR3 for alpha chain variable domain of TCR clone 128044 (TRAV23/DV6, TRAJ18)
CAAGMNHRGSTL

SEQ ID NO: 256088 - protein, 15 aa, Homo sapiens
  CDR3 for beta chain variable domain of TCR clone 128044 (TRBV27, TRBJ2-7)
CASSPDQGRLYEQYF

SEQ ID NO: 256089 - protein, 12 aa, Homo sapiens
  CDR3 for alpha chain variable domain of TCR clone 128045 (TRAV13-1, TRAJ21)
CAAKEGFDKFYF

SEQ ID NO: 256090 - protein, 20 aa, Homo sapiens
  CDR3 for beta chain variable domain of TCR clone 128045 (TRBV7-8, TRBJ2-2)
CASSHLFPGPTIHITGELFF

SEQ ID NO: 256091 - protein, 15 aa, Homo sapiens
  CDR3 for alpha chain variable domain of TCR clone 128046 (TRAV3, TRAJ9)
CAVRARNTGGFKTIF

SEQ ID NO: 256092 - protein, 15 aa, Homo sapiens
  CDR3 for beta chain variable domain of TCR clone 128046 (TRBV13, TRBJ1-1)
CASSPYADPYTEAFF

SEQ ID NO: 256093 - protein, 12 aa, Homo sapiens
  CDR3 for alpha chain variable domain of TCR clone 128047 (TRAV13-1, TRAJ21)
CAAKECFNKFYF

SEQ ID NO: 256094 - protein, 15 aa, Homo sapiens
  CDR3 for beta chain variable domain of TCR clone 128047 (TRBV25-1, TRBJ1-4)
CASSPGDSTNEKLFF

SEQ ID NO: 256095 - protein, 10 aa, Homo sapiens
  CDR3 for alpha chain variable domain of TCR clone 128048 (TRAV13-1, TRAJ52)
CAAKTPMLVV

SEQ ID NO: 256096 - protein, 14 aa, Homo sapiens
  CDR3 for beta chain variable domain of TCR clone 128048 (TRBV6-5, TRBJ1-1)
CASSFGQGITEAFF

SEQ ID NO: 256097 - protein, 18 aa, Homo sapiens
  CDR3 for alpha chain variable domain of TCR clone 128049 (TRAV8-3, TRAJ4)
WVRDPTSNDPGGYIKLIF

SEQ ID NO: 256098 - protein, 13 aa, Homo sapiens
  CDR3 for beta chain variable domain of TCR clone 128049 (TRBV20-1, TRBJ1-2)
CSATGIQGSGYTF

SEQ ID NO: 256099 - protein, 17 aa, Homo sapiens
  CDR3 for alpha chain variable domain of TCR clone 128050 (TRAV12-3, TRAJ6)
CAMGARGGAGGSYIPTF

SEQ ID NO: 256100 - protein, 12 aa, Homo sapiens
  CDR3 for beta chain variable domain of TCR clone 128050 (TRBV12-4, TRBJ2-3)
CASSTLPDTQYF

SEQ ID NO: 256101 - protein, 13 aa, Homo sapiens
  CDR3 for alpha chain variable domain of TCR clone 128051 (TRAV12-2, TRAJ4)
CAVFSGGYNKLTF

SEQ ID NO: 256102 - protein, 13 aa, Homo sapiens
  CDR3 for beta chain variable domain of TCR clone 128051 (TRBV19, TRBJ1-5)
CASSIDRDQPQHF

SEQ ID NO: 256103 - protein, 17 aa, Homo sapiens
  CDR3 for alpha chain variable domain of TCR clone 128052 (TRAV3, TRAJ12)
CAVRDGGRMASSYKLIF

SEQ ID NO: 256104 - protein, 12 aa, Homo sapiens
  CDR3 for beta chain variable domain of TCR clone 128052 (TRBV11-2, TRBJ2-2)
CASSLGGGELFF

SEQ ID NO: 256105 - protein, 11 aa, Homo sapiens
  CDR3 for alpha chain variable domain of TCR clone 128053 (TRAV13-2, TRAJ23)
CAESPRGKLIF

SEQ ID NO: 256106 - protein, 18 aa, Homo sapiens
  CDR3 for beta chain variable domain of TCR clone 128053 (TRBV6-5, TRBJ1-1)
CASSYSAPGGTGDTEAFF

SEQ ID NO: 256107 - protein, 11 aa, Homo sapiens
  CDR3 for alpha chain variable domain of TCR clone 128054 (TRAV1-2, TRAJ11)
CAVRGYSTLTF

SEQ ID NO: 256108 - protein, 16 aa, Homo sapiens
  CDR3 for beta chain variable domain of TCR clone 128054 (TRBV13, TRBJ2-2)
CASSPRTGEHTGELFF

SEQ ID NO: 256109 - protein, 13 aa, Homo sapiens
  CDR3 for alpha chain variable domain of TCR clone 128055 (TRAV22, TRAJ29)
CAVGGSGNTPLVF

SEQ ID NO: 256110 - protein, 15 aa, Homo sapiens
  CDR3 for beta chain variable domain of TCR clone 128055 (TRBV28, TRBJ2-1)
CASSIIAGGRSEQFL

SEQ ID NO: 256111 - protein, 13 aa, Homo sapiens
  CDR3 for alpha chain variable domain of TCR clone 128056 (TRAV2, TRAJ40)
CAVVTSGTYKYIF

SEQ ID NO: 256112 - protein, 15 aa, Homo sapiens
  CDR3 for beta chain variable domain of TCR clone 128056 (TRBV11-3, TRBJ2-7)
CASSPGPASSYEQYF

SEQ ID NO: 256113 - protein, 12 aa, Homo sapiens
  CDR3 for alpha chain variable domain of TCR clone 128057 (TRAV13-1, TRAJ27)
CAAHTNEGKSTF

SEQ ID NO: 256114 - protein, 14 aa, Homo sapiens
  CDR3 for beta chain variable domain of TCR clone 128057 (TRBV19, TRBJ2-2)
CASSGQGIAGELFF

SEQ ID NO: 256115 - protein, 14 aa, Homo sapiens
  CDR3 for alpha chain variable domain of TCR clone 128058 (TRAV30, TRAJ33)
CGTVAPRSNYQLIW

SEQ ID NO: 256116 - protein, 16 aa, Homo sapiens
  CDR3 for beta chain variable domain of TCR clone 128058 (TRBV3-1, TRBJ2-5)
GASSPGQFNGFGTQYF

SEQ ID NO: 256117 - protein, 14 aa, Homo sapiens
  CDR3 for alpha chain variable domain of TCR clone 128059 (TRAV8-3, TRAJ4)
CAVGAAGGYNKLIF

SEQ ID NO: 256118 - protein, 13 aa, Homo sapiens
  CDR3 for beta chain variable domain of TCR clone 128059 (TRBV20-1, TRBJ2-2)
CSASAAGTGELFF

SEQ ID NO: 256119 - protein, 11 aa, Homo sapiens
  CDR3 for alpha chain variable domain of TCR clone 128060 (TRAV8-4, TRAJ20)
CAVTNVLTTTS

SEQ ID NO: 256120 - protein, 16 aa, Homo sapiens
  CDR3 for beta chain variable domain of TCR clone 128060 (TRBV6-1, TRBJ1-2)
CASSGAWQGRSHGYIF

SEQ ID NO: 256121 - protein, 16 aa, Homo sapiens
  CDR3 for alpha chain variable domain of TCR clone 128061 (TRAV4, TRAJ8)
CLVGDSGNTGFQKLVF

SEQ ID NO: 256122 - protein, 15 aa, Homo sapiens
  CDR3 for beta chain variable domain of TCR clone 128061 (TRBV15, TRBJ1-2)
CATSRVRASGYGYTF

SEQ ID NO: 256123 - protein, 11 aa, Homo sapiens
  CDR3 for alpha chain variable domain of TCR clone 128062 (TRAV3, TRAJ21)
CAVGNFNKFYF

SEQ ID NO: 256124 - protein, 15 aa, Homo sapiens
  CDR3 for beta chain variable domain of TCR clone 128062 (TRBV12-4, TRBJ2-1)
CASSLLATGNNEQFF

SEQ ID NO: 256125 - protein, 13 aa, Homo sapiens
  CDR3 for alpha chain variable domain of TCR clone 128063 (TRAV27, TRAJ42)
CAGARGSQGNLIF

SEQ ID NO: 256126 - protein, 12 aa, Homo sapiens
  CDR3 for beta chain variable domain of TCR clone 128063 (TRBV11-2, TRBJ2-2)
CASSLGGGELFF

SEQ ID NO: 256127 - protein, 17 aa, Homo sapiens
  CDR3 for alpha chain variable domain of TCR clone 128064 (TRAV38-2/DV8, TRAJ54)
CAYRRGWGSQGAQKLAF

SEQ ID NO: 256128 - protein, 14 aa, Homo sapiens
  CDR3 for beta chain variable domain of TCR clone 128064 (TRBV20-1, TRBJ2-3)
CSARDGVGTDTQYF

SEQ ID NO: 256129 - protein, 14 aa, Homo sapiens
  CDR3 for alpha chain variable domain of TCR clone 128065 (TRAV14/DV4, TRAJ11)
CAMSSNSGYSTLTF

SEQ ID NO: 256130 - protein, 13 aa, Homo sapiens
  CDR3 for beta chain variable domain of TCR clone 128065 (TRBV12-5, TRBJ2-3)
CASGDRQSDTQYF

SEQ ID NO: 256131 - protein, 15 aa, Homo sapiens
  CDR3 for alpha chain variable domain of TCR clone 128066 (TRAV3, TRAJ40)
CAVRDGPGGTYKYIF

SEQ ID NO: 256132 - protein, 16 aa, Homo sapiens
  CDR3 for beta chain variable domain of TCR clone 128066 (TRBV5-1, TRBJ1-1)
CASSSGGNSLNTEAFS

SEQ ID NO: 256133 - protein, 14 aa, Homo sapiens
  CDR3 for alpha chain variable domain of TCR clone 128067 (TRAV26-1, TRAJ39)
CIVRDSRAGNMLTF

SEQ ID NO: 256134 - protein, 15 aa, Homo sapiens
  CDR3 for beta chain variable domain of TCR clone 128067 (TRBV7-9, TRBJ1-5)
CSSSQGHQPNQPQHF

SEQ ID NO: 256135 - protein, 14 aa, Homo sapiens
  CDR3 for alpha chain variable domain of TCR clone 128068 (TRAV17, TRAJ56)
CATVPAGANSKLTF

SEQ ID NO: 256136 - protein, 13 aa, Homo sapiens
  CDR3 for beta chain variable domain of TCR clone 128068 (TRBV12-4, TRBJ2-2)
CASSITVSGELFF

SEQ ID NO: 256137 - protein, 14 aa, Homo sapiens
  CDR3 for alpha chain variable domain of TCR clone 128069 (TRAV3, TRAJ28)
CAVRRGAGSYQLTF

SEQ ID NO: 256138 - protein, 16 aa, Homo sapiens
  CDR3 for beta chain variable domain of TCR clone 128069 (TRBV24-1, TRBJ2-3)
CATSDPGTGATDTQYF

SEQ ID NO: 256139 - protein, 12 aa, Homo sapiens
  CDR3 for alpha chain variable domain of TCR clone 128070 (TRAV2, TRAJ32)
CAVGGATNKLIF

SEQ ID NO: 256140 - protein, 12 aa, Homo sapiens
  CDR3 for beta chain variable domain of TCR clone 128070 (TRBV11-2, TRBJ2-2)
CASSLGGGELFF

SEQ ID NO: 256141 - protein, 13 aa, Homo sapiens
  CDR3 for alpha chain variable domain of TCR clone 128071 (TRAV22, TRAJ29)
FAVGGSGNTPLVF

SEQ ID NO: 256142 - protein, 13 aa, Homo sapiens
  CDR3 for beta chain variable domain of TCR clone 128071 (TRBV19, TRBJ2-7)
CASRKAGGSEQYF

SEQ ID NO: 256143 - protein, 13 aa, Homo sapiens
  CDR3 for alpha chain variable domain of TCR clone 128072 (TRAV8-6, TRAJ16)
CAVSSPDGQKLLF

SEQ ID NO: 256144 - protein, 13 aa, Homo sapiens
  CDR3 for beta chain variable domain of TCR clone 128072 (TRBV15, TRBJ2-5)
CATSQIGEETQYF

SEQ ID NO: 256145 - protein, 15 aa, Homo sapiens
  CDR3 for alpha chain variable domain of TCR clone 128073 (TRAV17, TRAJ56)
CATDANTGANSKLTF

SEQ ID NO: 256146 - protein, 14 aa, Homo sapiens
  CDR3 for beta chain variable domain of TCR clone 128073 (TRBV19, TRBJ2-1)
CASPTFVLSGEQFF

SEQ ID NO: 256147 - protein, 13 aa, Homo sapiens
  CDR3 for alpha chain variable domain of TCR clone 128074 (TRAV12-1, TRAJ7)
CVVKMRGNNRLAF

SEQ ID NO: 256148 - protein, 15 aa, Homo sapiens
  CDR3 for beta chain variable domain of TCR clone 128074 (TRBV27, TRBJ2-3)
CASSLGLAATDTQYF

SEQ ID NO: 256149 - protein, 16 aa, Homo sapiens
  CDR3 for alpha chain variable domain of TCR clone 128075 (TRAV12-2, TRAJ28)
CAVITDSGAGSYQLTF

SEQ ID NO: 256150 - protein, 17 aa, Homo sapiens
  CDR3 for beta chain variable domain of TCR clone 128075 (TRBV13, TRBJ2-3)
CASSLSRVAGGRNTQYF

SEQ ID NO: 256151 - protein, 17 aa, Homo sapiens
  CDR3 for alpha chain variable domain of TCR clone 128076 (TRAV23/DV6, TRAJ57)
CAASSTLSQGESEKLVF

SEQ ID NO: 256152 - protein, 14 aa, Homo sapiens
  CDR3 for beta chain variable domain of TCR clone 128076 (TRBV25-1, TRBJ1-1)
CASTHLGGNTEAFF

SEQ ID NO: 256153 - protein, 13 aa, Homo sapiens
  CDR3 for alpha chain variable domain of TCR clone 128077 (TRAV3, TRAJ21)
RAVREPDFNKFYF

SEQ ID NO: 256154 - protein, 12 aa, Homo sapiens
  CDR3 for beta chain variable domain of TCR clone 128077 (TRBV5-1, TRBJ2-4)
LAGEWTKNIQYF

SEQ ID NO: 256155 - protein, 18 aa, Homo sapiens
  CDR3 for alpha chain variable domain of TCR clone 128078 (TRAV12-3, TRAJ52)
CAMSVGGAGGTSYGELTF

SEQ ID NO: 256156 - protein, 14 aa, Homo sapiens
  CDR3 for beta chain variable domain of TCR clone 128078 (TRBV7-2, TRBJ2-7)
CASRSQGAAYEQYF

SEQ ID NO: 256157 - protein, 16 aa, Homo sapiens
  CDR3 for alpha chain variable domain of TCR clone 128079 (TRAV30, TRAJ24)
CGTEIVDADSWGKFQF

SEQ ID NO: 256158 - protein, 12 aa, Homo sapiens
  CDR3 for beta chain variable domain of TCR clone 128079 (TRBV7-8, TRBJ2-7)
CASSRGDREQYF

SEQ ID NO: 256159 - protein, 13 aa, Homo sapiens
  CDR3 for alpha chain variable domain of TCR clone 128080 (TRAV2, TRAJ40)
CAVVTSGTYKYIF

SEQ ID NO: 256160 - protein, 16 aa, Homo sapiens
  CDR3 for beta chain variable domain of TCR clone 128080 (TRBV20-1, TRBJ2-6)
CSASSQGYDGANVLTF

SEQ ID NO: 256161 - protein, 12 aa, Homo sapiens
  CDR3 for alpha chain variable domain of TCR clone 128081 (TRAV13-1, TRAJ53)
AASGGSNYKLTF

SEQ ID NO: 256162 - protein, 15 aa, Homo sapiens
  CDR3 for beta chain variable domain of TCR clone 128081 (TRBV5-1, TRBJ2-1)
CSSSPPRAPYNEQFF

SEQ ID NO: 256163 - protein, 12 aa, Homo sapiens
  CDR3 for alpha chain variable domain of TCR clone 128082 (TRAV21, TRAJ13)
PGPSGGYQKVTF

SEQ ID NO: 256164 - protein, 12 aa, Homo sapiens
  CDR3 for beta chain variable domain of TCR clone 128082 (TRBV2, TRBJ2-1)
CAYGPPGNEQFF

SEQ ID NO: 256165 - protein, 12 aa, Homo sapiens
  CDR3 for alpha chain variable domain of TCR clone 128083 (TRAV29/DV5, TRAJ49)
CAATDTGSQFYF

SEQ ID NO: 256166 - protein, 12 aa, Homo sapiens
  CDR3 for beta chain variable domain of TCR clone 128083 (TRBV12-4, TRBJ2-7)
CASSLGGYEQYF

SEQ ID NO: 256167 - protein, 12 aa, Homo sapiens
  CDR3 for alpha chain variable domain of TCR clone 128084 (TRAV29/DV5, TRAJ34)
CAASDNTDKLIF

SEQ ID NO: 256168 - protein, 15 aa, Homo sapiens
  CDR3 for beta chain variable domain of TCR clone 128084 (TRBV5-1, TRBJ2-1)
CASSLGDRGYNEQFF

SEQ ID NO: 256169 - protein, 15 aa, Homo sapiens
  CDR3 for alpha chain variable domain of TCR clone 128085 (TRAV26-2, TRAJ13)
CILRDLSGCYQKVTF

SEQ ID NO: 256170 - protein, 11 aa, Homo sapiens
  CDR3 for beta chain variable domain of TCR clone 128085 (TRBV7-9, TRBJ2-5)
CASSLSATQYF

SEQ ID NO: 256171 - protein, 16 aa, Homo sapiens
  CDR3 for alpha chain variable domain of TCR clone 128086 (TRAV30, TRAJ24)
CGTEIVDADSWGKFQF

SEQ ID NO: 256172 - protein, 22 aa, Homo sapiens
  CDR3 for beta chain variable domain of TCR clone 128086 (TRBV11-2, TRBJ1-4)
CASSLDITRRGIPRKDNEKLFF

SEQ ID NO: 256173 - protein, 14 aa, Homo sapiens
  CDR3 for alpha chain variable domain of TCR clone 128087 (TRAV12-3, TRAJ9)
CAMRPNTGGFKTIF

SEQ ID NO: 256174 - protein, 12 aa, Homo sapiens
  CDR3 for beta chain variable domain of TCR clone 128087 (TRBV19, TRBJ1-5)
CASSIAQQPQHF

SEQ ID NO: 256175 - protein, 13 aa, Homo sapiens
  CDR3 for alpha chain variable domain of TCR clone 128088 (TRAV22, TRAJ29)
CAVGGSGNTPLVF

SEQ ID NO: 256176 - protein, 15 aa, Homo sapiens
  CDR3 for beta chain variable domain of TCR clone 128088 (TRBV11-3, TRBJ2-7)
CASSPGPASSYEQYF

SEQ ID NO: 256177 - protein, 14 aa, Homo sapiens
  CDR3 for alpha chain variable domain of TCR clone 128089 (TRAV2, TRAJ3)
CAVRPYSSASKIVF

SEQ ID NO: 256178 - protein, 17 aa, Homo sapiens
  CDR3 for beta chain variable domain of TCR clone 128089 (TRBV7-6, TRBJ2-5)
CASSSPQAGDPSETQYF

SEQ ID NO: 256179 - protein, 12 aa, Homo sapiens
  CDR3 for alpha chain variable domain of TCR clone 128090 (TRAV3, TRAJ20)
CAVRDGDYKLSF

SEQ ID NO: 256180 - protein, 20 aa, Homo sapiens
  CDR3 for beta chain variable domain of TCR clone 128090 (TRBV7-8, TRBJ2-2)
CASSHLFPGPTIHITGELFF

SEQ ID NO: 256181 - protein, 12 aa, Homo sapiens
  CDR3 for alpha chain variable domain of TCR clone 128091 (TRAV3, TRAJ43)
CAVRDPNNDMRF

SEQ ID NO: 256182 - protein, 16 aa, Homo sapiens
  CDR3 for beta chain variable domain of TCR clone 128091 (TRBV2, TRBJ2-3)
CASSTSVEGVTDTQYF

SEQ ID NO: 256183 - protein, 18 aa, Homo sapiens
  CDR3 for alpha chain variable domain of TCR clone 128092 (TRAV21, TRAJ53)
CAVKGGENSGGSNYKLTF

SEQ ID NO: 256184 - protein, 15 aa, Homo sapiens
  CDR3 for beta chain variable domain of TCR clone 128092 (TRBV6-3, TRBJ2-7)
CASSSPGTVFYEQYF

SEQ ID NO: 256185 - protein, 14 aa, Homo sapiens
  CDR3 for alpha chain variable domain of TCR clone 128093 (TRAV2, TRAJ9)
CAVEDRSGGFKTIF

SEQ ID NO: 256186 - protein, 15 aa, Homo sapiens
  CDR3 for beta chain variable domain of TCR clone 128093 (TRBV11-2, TRBJ2-1)
CASSLGTSGLNEQFF

SEQ ID NO: 256187 - protein, 14 aa, Homo sapiens
  CDR3 for alpha chain variable domain of TCR clone 128094 (TRAV1-2, TRAJ16)
CAVNRFSDGQKRLF

SEQ ID NO: 256188 - protein, 13 aa, Homo sapiens
  CDR3 for beta chain variable domain of TCR clone 128094 (TRBV7-9, TRBJ1-2)
CASSLKQNYGYTF

SEQ ID NO: 256189 - protein, 15 aa, Homo sapiens
  CDR3 for alpha chain variable domain of TCR clone 128095 (TRAV26-1, TRAJ22)
CIVRVSFWFCKATDL

SEQ ID NO: 256190 - protein, 16 aa, Homo sapiens
  CDR3 for beta chain variable domain of TCR clone 128095 (TRBV12-4, TRBJ1-5)
CASRQPVEGSNQPQHF

SEQ ID NO: 256191 - protein, 22 aa, Homo sapiens
  CDR3 for alpha chain variable domain of TCR clone 128096 (TRAV8-2, TRAJ45)
HLTKPSAHMSDAAEYSADGLTF

SEQ ID NO: 256192 - protein, 11 aa, Homo sapiens
  CDR3 for beta chain variable domain of TCR clone 128096 (TRBV29-1, TRBJ2-5)
CSEDRTGTQYF

SEQ ID NO: 256193 - protein, 15 aa, Homo sapiens
  CDR3 for alpha chain variable domain of TCR clone 128097 (TRAV3, TRAJ15)
CAVRPANQAGTALFF

SEQ ID NO: 256194 - protein, 14 aa, Homo sapiens
  CDR3 for beta chain variable domain of TCR clone 128097 (TRBV4-1, TRBJ2-2)
CASSQAVNTGELFF

SEQ ID NO: 256195 - protein, 11 aa, Homo sapiens
  CDR3 for alpha chain variable domain of TCR clone 128098 (TRAV8-3, TRAJ49)
CAVNTGNQFYF

SEQ ID NO: 256196 - protein, 15 aa, Homo sapiens
  CDR3 for beta chain variable domain of TCR clone 128098 (TRBV5-5, TRBJ1-5)
CASSSTPGSNQPQHF

SEQ ID NO: 256197 - protein, 14 aa, Homo sapiens
  CDR3 for alpha chain variable domain of TCR clone 128099 (TRAV12-2, TRAJ40)
CAVNIPSGTYKYIF

SEQ ID NO: 256198 - protein, 20 aa, Homo sapiens
  CDR3 for beta chain variable domain of TCR clone 128099 (TRBV28, TRBJ2-1)
CASTPIGRSPGLAGGNEQFF

SEQ ID NO: 256199 - protein, 10 aa, Homo sapiens
  CDR3 for alpha chain variable domain of TCR clone 128100 (TRAV1-2, TRAJ31)
CAFFDARLMF

SEQ ID NO: 256200 - protein, 13 aa, Homo sapiens
  CDR3 for beta chain variable domain of TCR clone 128100 (TRBV13, TRBJ2-1)
CASILGGRGEQFF

SEQ ID NO: 256201 - protein, 20 aa, Homo sapiens
  CDR3 for alpha chain variable domain of TCR clone 128101 (TRAV8-3, TRAJ44)
LSTSVLWVRLYTGTASKLTF

SEQ ID NO: 256202 - protein, 12 aa, Homo sapiens
  CDR3 for beta chain variable domain of TCR clone 128101 (TRBV28, TRBJ2-6)
CAIQAGANVLTF

SEQ ID NO: 256203 - protein, 12 aa, Homo sapiens
  CDR3 for alpha chain variable domain of TCR clone 128102 (TRAV4, TRAJ26)
CLVGDYGQNLVF

SEQ ID NO: 256204 - protein, 16 aa, Homo sapiens
  CDR3 for beta chain variable domain of TCR clone 128102 (TRBV7-2, TRBJ1-2)
CASSSNQDRRGHGYTF

SEQ ID NO: 256205 - protein, 14 aa, Homo sapiens
  CDR3 for alpha chain variable domain of TCR clone 128103 (TRAV17, TRAJ57)
CATDPQGGSEKLVF

SEQ ID NO: 256206 - protein, 17 aa, Homo sapiens
  CDR3 for beta chain variable domain of TCR clone 128103 (TRBV7-2, TRBJ2-2)
CASSPRGAGEGTGELFF

SEQ ID NO: 256207 - protein, 15 aa, Homo sapiens
  CDR3 for alpha chain variable domain of TCR clone 128104 (TRAV27, TRAJ38)
CAARRNAGNNRKLIW

SEQ ID NO: 256208 - protein, 16 aa, Homo sapiens
  CDR3 for beta chain variable domain of TCR clone 128104 (TRBV11-2, TRBJ2-2)
CASSLRTGNLIGELFF

SEQ ID NO: 256209 - protein, 15 aa, Homo sapiens
  CDR3 for alpha chain variable domain of TCR clone 128105 (TRAV36/DV7, TRAJ53)
RAVEGSGGSNYKLTF

SEQ ID NO: 256210 - protein, 16 aa, Homo sapiens
  CDR3 for beta chain variable domain of TCR clone 128105 (TRBV27, TRBJ2-2)
CASSLSGFWVTGELFF

SEQ ID NO: 256211 - protein, 14 aa, Homo sapiens
  CDR3 for alpha chain variable domain of TCR clone 128106 (TRAV17, TRAJ23)
CATALGGQGGKLIF

SEQ ID NO: 256212 - protein, 22 aa, Homo sapiens
  CDR3 for beta chain variable domain of TCR clone 128106 (TRBV7-8, TRBJ2-7)
CASSRVPLRGPSSGLFSYEQYF

SEQ ID NO: 256213 - protein, 16 aa, Homo sapiens
  CDR3 for alpha chain variable domain of TCR clone 128107 (TRAV2, TRAJ10)
CCLLLCFHGRRNKLTF

SEQ ID NO: 256214 - protein, 20 aa, Homo sapiens
  CDR3 for beta chain variable domain of TCR clone 128107 (TRBV7-8, TRBJ2-2)
CASSHLFPGPTIHITGELFF

SEQ ID NO: 256215 - protein, 15 aa, Homo sapiens
  CDR3 for alpha chain variable domain of TCR clone 128108 (TRAV26-2, TRAJ57)
CILRDIRGGSEKLAF

SEQ ID NO: 256216 - protein, 15 aa, Homo sapiens
  CDR3 for beta chain variable domain of TCR clone 128108 (TRBV2, TRBJ2-1)
CASDIGLAGEGEQFF

SEQ ID NO: 256217 - protein, 12 aa, Homo sapiens
  CDR3 for alpha chain variable domain of TCR clone 128109 (TRAV12-3, TRAJ17)
CAMTLTGNKLTF

SEQ ID NO: 256218 - protein, 14 aa, Homo sapiens
  CDR3 for beta chain variable domain of TCR clone 128109 (TRBV7-2, TRBJ1-3)
CASSRLRSGNTIYF

SEQ ID NO: 256219 - protein, 14 aa, Homo sapiens
  CDR3 for alpha chain variable domain of TCR clone 128110 (TRAV17, TRAJ57)
CATDPQGGSEKLVF

SEQ ID NO: 256220 - protein, 17 aa, Homo sapiens
  CDR3 for beta chain variable domain of TCR clone 128110 (TRBV20-1, TRBJ2-2)
CSASGSGQGGLTGELFF

SEQ ID NO: 256221 - protein, 16 aa, Homo sapiens
  CDR3 for alpha chain variable domain of TCR clone 128111 (TRAV13-1, TRAJ48)
CAASIFGNFGNEKLTF

SEQ ID NO: 256222 - protein, 14 aa, Homo sapiens
  CDR3 for beta chain variable domain of TCR clone 128111 (TRBV19, TRBJ2-2)
CASSGQGIAGELFF

SEQ ID NO: 256223 - protein, 14 aa, Homo sapiens
  CDR3 for alpha chain variable domain of TCR clone 128112 (TRAV12-3, TRAJ41)
CAMSTGNSGYALNF

SEQ ID NO: 256224 - protein, 11 aa, Homo sapiens
  CDR3 for beta chain variable domain of TCR clone 128112 (TRBV7-2, TRBJ2-3)
CASSSSDTQYF

SEQ ID NO: 256225 - protein, 14 aa, Homo sapiens
  CDR3 for alpha chain variable domain of TCR clone 128113 (TRAV8-3, TRAJ4)
CAVGAAGGYNKLIF

SEQ ID NO: 256226 - protein, 15 aa, Homo sapiens
  CDR3 for beta chain variable domain of TCR clone 128113 (TRBV6-5, TRBJ2-1)
CASSYDAGEGNEQFF

SEQ ID NO: 256227 - protein, 19 aa, Homo sapiens
  CDR3 for alpha chain variable domain of TCR clone 128114 (TRAV26-1, TRAJ44)
CCVLLHRQSPLGTASKLTF

SEQ ID NO: 256228 - protein, 17 aa, Homo sapiens
  CDR3 for beta chain variable domain of TCR clone 128114 (TRBV24-1, TRBJ2-4)
CATSDAEARGVRNIQYF

SEQ ID NO: 256229 - protein, 15 aa, Homo sapiens
  CDR3 for alpha chain variable domain of TCR clone 128115 (TRAV26-1, TRAJ44)
CIVRIGTGTASKLTF

SEQ ID NO: 256230 - protein, 13 aa, Homo sapiens
  CDR3 for beta chain variable domain of TCR clone 128115 (TRBV4-2, TRBJ1-1)
CASSQAGNTEAFF

SEQ ID NO: 256231 - protein, 12 aa, Homo sapiens
  CDR3 for alpha chain variable domain of TCR clone 128116 (TRAV16, TRAJ10)
CSRTGGGNKLTF

SEQ ID NO: 256232 - protein, 15 aa, Homo sapiens
  CDR3 for beta chain variable domain of TCR clone 128116 (TRBV2, TRBJ2-7)
CASSEGLARSYEQYF

SEQ ID NO: 256233 - protein, 12 aa, Homo sapiens
  CDR3 for alpha chain variable domain of TCR clone 128117 (TRAV12-3, TRAJ17)
CAMTLTGNKLTF

SEQ ID NO: 256234 - protein, 15 aa, Homo sapiens
  CDR3 for beta chain variable domain of TCR clone 128117 (TRBV2, TRBJ2-1)
CASSELAGSYNGQFS

SEQ ID NO: 256235 - protein, 16 aa, Homo sapiens
  CDR3 for alpha chain variable domain of TCR clone 128118 (TRAV12-3, TRAJ58)
CAMTDTEETSGSRLTF

SEQ ID NO: 256236 - protein, 22 aa, Homo sapiens
  CDR3 for beta chain variable domain of TCR clone 128118 (TRBV23-1, TRBJ2-7)
CASSRRLDSGKGYVGGGYEQYF

SEQ ID NO: 256237 - protein, 14 aa, Homo sapiens
  CDR3 for alpha chain variable domain of TCR clone 128119 (TRAV27, TRAJ37)
CAGERSSNPGKLIF

SEQ ID NO: 256238 - protein, 15 aa, Homo sapiens
  CDR3 for beta chain variable domain of TCR clone 128119 (TRBV11-3, TRBJ1-6)
CASSLDWGANSPLHF

SEQ ID NO: 256239 - protein, 15 aa, Homo sapiens
  CDR3 for alpha chain variable domain of TCR clone 128120 (TRAV17, TRAJ57)
CATGPSQGGSEKLVF

SEQ ID NO: 256240 - protein, 16 aa, Homo sapiens
  CDR3 for beta chain variable domain of TCR clone 128120 (TRBV12-4, TRBJ1-5)
CASSRSVGGSNQPQHF

SEQ ID NO: 256241 - protein, 16 aa, Homo sapiens
  CDR3 for alpha chain variable domain of TCR clone 128121 (TRAV8-4, TRAJ5)
CAVSPLTDTGRRARTF

SEQ ID NO: 256242 - protein, 14 aa, Homo sapiens
  CDR3 for beta chain variable domain of TCR clone 128121 (TRBV19, TRBJ1-6)
CASSTDGWNSPLHF

SEQ ID NO: 256243 - protein, 15 aa, Homo sapiens
  CDR3 for alpha chain variable domain of TCR clone 128122 (TRAV21, TRAJ53)
CATLNSGGSNYKLTF

SEQ ID NO: 256244 - protein, 16 aa, Homo sapiens
  CDR3 for beta chain variable domain of TCR clone 128122 (TRBV20-1, TRBJ1-4)
CSAPGQGLVTNEKLFF

SEQ ID NO: 256245 - protein, 14 aa, Homo sapiens
  CDR3 for alpha chain variable domain of TCR clone 128123 (TRAV5, TRAJ40)
CAESSGSGTYKYIF

SEQ ID NO: 256246 - protein, 20 aa, Homo sapiens
  CDR3 for beta chain variable domain of TCR clone 128123 (TRBV7-8, TRBJ2-2)
CASSHLFPEPTIHITGELFF

SEQ ID NO: 256247 - protein, 10 aa, Homo sapiens
  CDR3 for alpha chain variable domain of TCR clone 128124 (TRAV8-1, TRAJ43)
CAVNADDMRF

SEQ ID NO: 256248 - protein, 14 aa, Homo sapiens
  CDR3 for beta chain variable domain of TCR clone 128124 (TRBV19, TRBJ2-1)
CASPTFVLSGEQFF

SEQ ID NO: 256249 - protein, 11 aa, Homo sapiens
  CDR3 for alpha chain variable domain of TCR clone 128125 (TRAV35, TRAJ30)
CAGERDDKIIF

SEQ ID NO: 256250 - protein, 14 aa, Homo sapiens
  CDR3 for beta chain variable domain of TCR clone 128125 (TRBV15, TRBJ2-5)
CATSGDRGQENQYF

SEQ ID NO: 256251 - protein, 16 aa, Homo sapiens
  CDR3 for alpha chain variable domain of TCR clone 128126 (TRAV3, TRAJ18)
CAVIDGRGSTLGRLYF

SEQ ID NO: 256252 - protein, 15 aa, Homo sapiens
  CDR3 for beta chain variable domain of TCR clone 128126 (TRBV7-9, TRBJ1-6)
CASSSPGRGNSPLHF

SEQ ID NO: 256253 - protein, 16 aa, Homo sapiens
  CDR3 for alpha chain variable domain of TCR clone 128127 (TRAV8-4, TRAJ17)
CAVSDQDKAAGNKLTF

SEQ ID NO: 256254 - protein, 12 aa, Homo sapiens
  CDR3 for beta chain variable domain of TCR clone 128127 (TRBV11-2, TRBJ2-2)
CASSLGGGELFF

SEQ ID NO: 256255 - protein, 14 aa, Homo sapiens
  CDR3 for alpha chain variable domain of TCR clone 128128 (TRAV1-2, TRAJ8)
CAVREDTGFQKLVF

SEQ ID NO: 256256 - protein, 12 aa, Homo sapiens
  CDR3 for beta chain variable domain of TCR clone 128128 (TRBV24-1, TRBJ1-1)
CATLHPDTEAFF

SEQ ID NO: 256257 - protein, 12 aa, Homo sapiens
  CDR3 for alpha chain variable domain of TCR clone 128129 (TRAV12-1, TRAJ40)
CVFYSGTYKYIF

SEQ ID NO: 256258 - protein, 14 aa, Homo sapiens
  CDR3 for beta chain variable domain of TCR clone 128129 (TRBV12-4, TRBJ1-1)
CASSFSQMNTEAFF

SEQ ID NO: 256259 - protein, 11 aa, Homo sapiens
  CDR3 for alpha chain variable domain of TCR clone 128130 (TRAV21, TRAJ33)
CAVLSSYQLIW

SEQ ID NO: 256260 - protein, 15 aa, Homo sapiens
  CDR3 for beta chain variable domain of TCR clone 128130 (TRBV11-2, TRBJ2-7)
CASSLMVGGSYEQYF

SEQ ID NO: 256261 - protein, 13 aa, Homo sapiens
  CDR3 for alpha chain variable domain of TCR clone 128131 (TRAV27, TRAJ3)
ASLRGSSASKIIF

SEQ ID NO: 256262 - protein, 13 aa, Homo sapiens
  CDR3 for beta chain variable domain of TCR clone 128131 (TRBV7-3, TRBJ1-1)
CASSQDWGAEAFF

SEQ ID NO: 256263 - protein, 15 aa, Homo sapiens
  CDR3 for alpha chain variable domain of TCR clone 128132 (TRAV12-2, TRAJ43)
CAFDMRFGAGTGLTV

SEQ ID NO: 256264 - protein, 18 aa, Homo sapiens
  CDR3 for beta chain variable domain of TCR clone 128132 (TRBV20-1, TRBJ2-3)
CSASGLAGGPGTTDTQYL

SEQ ID NO: 256265 - protein, 14 aa, Homo sapiens
  CDR3 for alpha chain variable domain of TCR clone 128133 (TRAV1-2, TRAJ16)
CAVNRFSDGQTLLF

SEQ ID NO: 256266 - protein, 14 aa, Homo sapiens
  CDR3 for beta chain variable domain of TCR clone 128133 (TRBV19, TRBJ2-1)
CASPTFVLSGEQFF

SEQ ID NO: 256267 - protein, 11 aa, Homo sapiens
  CDR3 for alpha chain variable domain of TCR clone 128134 (TRAV1-2, TRAJ34)
CAGYNIDKLIF

SEQ ID NO: 256268 - protein, 16 aa, Homo sapiens
  CDR3 for beta chain variable domain of TCR clone 128134 (TRBV10-3, TRBJ2-1)
CAISGVGDGGGGEQSF

SEQ ID NO: 256269 - protein, 11 aa, Homo sapiens
  CDR3 for alpha chain variable domain of TCR clone 128135 (TRAV2, TRAJ21)
CAVFNFNKFYF

SEQ ID NO: 256270 - protein, 14 aa, Homo sapiens
  CDR3 for beta chain variable domain of TCR clone 128135 (TRBV15, TRBJ2-3)
CATRSGTNTDTQYF

SEQ ID NO: 256271 - protein, 15 aa, Homo sapiens
  CDR3 for alpha chain variable domain of TCR clone 128136 (TRAV25, TRAJ53)
CPTSNSGGSNYKLTF

SEQ ID NO: 256272 - protein, 14 aa, Homo sapiens
  CDR3 for beta chain variable domain of TCR clone 128136 (TRBV11-2, TRBJ2-3)
CAGSRLARTDTQYF

SEQ ID NO: 256273 - protein, 13 aa, Homo sapiens
  CDR3 for alpha chain variable domain of TCR clone 128137 (TRAV2, TRAJ40)
CAVVTSGTYKYIF

SEQ ID NO: 256274 - protein, 13 aa, Homo sapiens
  CDR3 for beta chain variable domain of TCR clone 128137 (TRBV27, TRBJ1-1)
CASSLSISAEAFF

SEQ ID NO: 256275 - protein, 13 aa, Homo sapiens
  CDR3 for alpha chain variable domain of TCR clone 128138 (TRAV2, TRAJ40)
CAVVTSGTYKYIF

SEQ ID NO: 256276 - protein, 14 aa, Homo sapiens
  CDR3 for beta chain variable domain of TCR clone 128138 (TRBV19, TRBJ2-1)
GASPTVVLSGEQFF

SEQ ID NO: 256277 - protein, 20 aa, Homo sapiens
  CDR3 for alpha chain variable domain of TCR clone 128139 (TRAV26-1, TRAJ42)
CCVLLHRQTYYGGSQGNLIF

SEQ ID NO: 256278 - protein, 16 aa, Homo sapiens
  CDR3 for beta chain variable domain of TCR clone 128139 (TRBV7-3, TRBJ2-2)
CASSLKPGTLSGELFF

SEQ ID NO: 256279 - protein, 14 aa, Homo sapiens
  CDR3 for alpha chain variable domain of TCR clone 128140 (TRAV1-2, TRAJ16)
CAVNRYSNGQKLLF

SEQ ID NO: 256280 - protein, 15 aa, Homo sapiens
  CDR3 for beta chain variable domain of TCR clone 128140 (TRBV7-9, TRBJ1-6)
CASSSPGRGNSPLHF

SEQ ID NO: 256281 - protein, 12 aa, Homo sapiens
  CDR3 for alpha chain variable domain of TCR clone 128141 (TRAV12-3, TRAJ40)
CAMSSGTYKYIF

SEQ ID NO: 256282 - protein, 15 aa, Homo sapiens
  CDR3 for beta chain variable domain of TCR clone 128141 (TRBV7-3, TRBJ2-2)
CASSETGQGTGELFF

SEQ ID NO: 256283 - protein, 11 aa, Homo sapiens
  CDR3 for alpha chain variable domain of TCR clone 128142 (TRAV21, TRAJ20)
CAVRDDYKLGF

SEQ ID NO: 256284 - protein, 14 aa, Homo sapiens
  CDR3 for beta chain variable domain of TCR clone 128142 (TRBV12-4, TRBJ1-1)
CASSFSQMNTEAFF

SEQ ID NO: 256285 - protein, 15 aa, Homo sapiens
  CDR3 for alpha chain variable domain of TCR clone 128143 (TRAV12-3, TRAJ27)
CAMRAYNTNAGKSTF

SEQ ID NO: 256286 - protein, 13 aa, Homo sapiens
  CDR3 for beta chain variable domain of TCR clone 128143 (TRBV12-4, TRBJ1-2)
CASSLRQGKGYTF

SEQ ID NO: 256287 - protein, 13 aa, Homo sapiens
  CDR3 for alpha chain variable domain of TCR clone 128144 (TRAV1-1, TRAJ13)
CAVNSGGYQRVTF

SEQ ID NO: 256288 - protein, 12 aa, Homo sapiens
  CDR3 for beta chain variable domain of TCR clone 128144 (TRBV28, TRBJ2-1)
CASSVQINEQFF

SEQ ID NO: 256289 - protein, 14 aa, Homo sapiens
  CDR3 for alpha chain variable domain of TCR clone 128145 (TRAV23/DV6, TRAJ4)
CAAPSSGGDNKLIF

SEQ ID NO: 256290 - protein, 16 aa, Homo sapiens
  CDR3 for beta chain variable domain of TCR clone 128145 (TRBV19, TRBJ1-1)
CASRFGGPVTGTEAFF

SEQ ID NO: 256291 - protein, 17 aa, Homo sapiens
  CDR3 for alpha chain variable domain of TCR clone 128146 (TRAV3, TRAJ6)
CAVRDGPRAGGSYIPTF

SEQ ID NO: 256292 - protein, 13 aa, Homo sapiens
  CDR3 for beta chain variable domain of TCR clone 128146 (TRBV24-1, TRBJ2-2)
CAASDWSTGELFF

SEQ ID NO: 256293 - protein, 15 aa, Homo sapiens
  CDR3 for alpha chain variable domain of TCR clone 128147 (TRAV20, TRAJ4)
CAVQVFSGGYNKLIF

SEQ ID NO: 256294 - protein, 12 aa, Homo sapiens
  CDR3 for beta chain variable domain of TCR clone 128147 (TRBV11-3, TRBJ1-4)
CASSSGSPGLFF

SEQ ID NO: 256295 - protein, 15 aa, Homo sapiens
  CDR3 for alpha chain variable domain of TCR clone 128148 (TRAV41, TRAJ45)
CAASYSGGGDDGLTF

SEQ ID NO: 256296 - protein, 14 aa, Homo sapiens
  CDR3 for beta chain variable domain of TCR clone 128148 (TRBV27, TRBJ2-2)
CASRPGVNTGELFF

SEQ ID NO: 256297 - protein, 12 aa, Homo sapiens
  CDR3 for alpha chain variable domain of TCR clone 128149 (TRAV21, TRAJ49)
CAVTNTGNQFYF

SEQ ID NO: 256298 - protein, 17 aa, Homo sapiens
  CDR3 for beta chain variable domain of TCR clone 128149 (TRBV13, TRBJ2-3)
CASSLCRVAGGRNTQYF

SEQ ID NO: 256299 - protein, 16 aa, Homo sapiens
  CDR3 for alpha chain variable domain of TCR clone 128150 (TRAV3, TRAJ10)
CAVRDMRAGGGNKLTF

SEQ ID NO: 256300 - protein, 16 aa, Homo sapiens
  CDR3 for beta chain variable domain of TCR clone 128150 (TRBV20-1, TRBJ1-4)
GSAPGQGLLTNEKLFF

SEQ ID NO: 256301 - protein, 23 aa, Homo sapiens
  CDR3 for alpha chain variable domain of TCR clone 128151 (TRAV8-6, TRAJ36)
CAVSDWLGQTTSSLGLERDSPLF

SEQ ID NO: 256302 - protein, 15 aa, Homo sapiens
  CDR3 for beta chain variable domain of TCR clone 128151 (TRBV9, TRBJ1-6)
CASSVAGTGDSPLHF

SEQ ID NO: 256303 - protein, 19 aa, Homo sapiens
  CDR3 for alpha chain variable domain of TCR clone 128152 (TRAV26-1, TRAJ52)
CIVRAHRNAGGTSYRKLTF

SEQ ID NO: 256304 - protein, 13 aa, Homo sapiens
  CDR3 for beta chain variable domain of TCR clone 128152 (TRBV19, TRBJ2-7)
CASRKAGGSEQYF

SEQ ID NO: 256305 - protein, 14 aa, Homo sapiens
  CDR3 for alpha chain variable domain of TCR clone 128153 (TRAV35, TRAJ40)
CAGSTTSGTYTYIF

SEQ ID NO: 256306 - protein, 13 aa, Homo sapiens
  CDR3 for beta chain variable domain of TCR clone 128153 (TRBV20-1, TRBJ1-6)
CSAPLGVGSPLHF

SEQ ID NO: 256307 - protein, 15 aa, Homo sapiens
  CDR3 for alpha chain variable domain of TCR clone 128154 (TRAV8-6, TRAJ11)
CAVNFMNSGYSTLTF

SEQ ID NO: 256308 - protein, 17 aa, Homo sapiens
  CDR3 for beta chain variable domain of TCR clone 128154 (TRBV7-3, TRBJ2-3)
CASSLMKRMRGADTQYF

SEQ ID NO: 256309 - protein, 13 aa, Homo sapiens
  CDR3 for alpha chain variable domain of TCR clone 128155 (TRAV20, TRAJ48)
CAVHLFGNEKLTF

SEQ ID NO: 256310 - protein, 15 aa, Homo sapiens
  CDR3 for beta chain variable domain of TCR clone 128155 (TRBV6-5, TRBJ2-6)
CASSQWEAGANVLSF

SEQ ID NO: 256311 - protein, 12 aa, Homo sapiens
  CDR3 for alpha chain variable domain of TCR clone 128156 (TRAV1-1, TRAJ39)
CAVPVVGNMLTF

SEQ ID NO: 256312 - protein, 14 aa, Homo sapiens
  CDR3 for beta chain variable domain of TCR clone 128156 (TRBV7-3, TRBJ2-1)
CASSLAGGTNEQFF

SEQ ID NO: 256313 - protein, 16 aa, Homo sapiens
  CDR3 for alpha chain variable domain of TCR clone 128157 (TRAV12-2, TRAJ43)
CAGDDMRFGAGTRLTV

SEQ ID NO: 256314 - protein, 16 aa, Homo sapiens
  CDR3 for beta chain variable domain of TCR clone 128157 (TRBV2, TRBJ2-4)
CASGEAPGGEQNIQYF

SEQ ID NO: 256315 - protein, 16 aa, Homo sapiens
  CDR3 for alpha chain variable domain of TCR clone 128158 (TRAV1-2, TRAJ10)
CAVRGVLTGGGNKLTF

SEQ ID NO: 256316 - protein, 14 aa, Homo sapiens
  CDR3 for beta chain variable domain of TCR clone 128158 (TRBV11-2, TRBJ1-2)
CASSLYRGNYGYTF

SEQ ID NO: 256317 - protein, 13 aa, Homo sapiens
  CDR3 for alpha chain variable domain of TCR clone 128159 (TRAV27, TRAJ41)
CAGEGNSGYALNF

SEQ ID NO: 256318 - protein, 16 aa, Homo sapiens
  CDR3 for beta chain variable domain of TCR clone 128159 (TRBV2, TRBJ2-1)
CASSVGGSLSYNEQFF

SEQ ID NO: 256319 - protein, 12 aa, Homo sapiens
  CDR3 for alpha chain variable domain of TCR clone 128160 (TRAV16, TRAJ10)
CPRTGGGSKLTF

SEQ ID NO: 256320 - protein, 15 aa, Homo sapiens
  CDR3 for beta chain variable domain of TCR clone 128160 (TRBV6-3, TRBJ2-7)
CASSSPGTVFYEQYF

SEQ ID NO: 256321 - protein, 17 aa, Homo sapiens
  CDR3 for alpha chain variable domain of TCR clone 128161 (TRAV3, TRAJ42)
CAVRDRDYGGRQGNLIF

SEQ ID NO: 256322 - protein, 14 aa, Homo sapiens
  CDR3 for beta chain variable domain of TCR clone 128161 (TRBV18, TRBJ2-7)
CASSPRGGAYEQYF

SEQ ID NO: 256323 - protein, 16 aa, Homo sapiens
  CDR3 for alpha chain variable domain of TCR clone 128162 (TRAV30, TRAJ24)
CGTEIVDADSWGKFQF

SEQ ID NO: 256324 - protein, 16 aa, Homo sapiens
  CDR3 for beta chain variable domain of TCR clone 128162 (TRBV28, TRBJ2-2)
CASSLEGGSNTGELFF

SEQ ID NO: 256325 - protein, 12 aa, Homo sapiens
  CDR3 for alpha chain variable domain of TCR clone 128163 (TRAV25, TRAJ31)
CAGHLNNARLMF

SEQ ID NO: 256326 - protein, 16 aa, Homo sapiens
  CDR3 for beta chain variable domain of TCR clone 128163 (TRBV12-4, TRBJ2-5)
CASSFFVRGRQETQYF

SEQ ID NO: 256327 - protein, 17 aa, Homo sapiens
  CDR3 for alpha chain variable domain of TCR clone 128164 (TRAV3, TRAJ38)
CAVRDCLNAGNNRKLIW

SEQ ID NO: 256328 - protein, 15 aa, Homo sapiens
  CDR3 for beta chain variable domain of TCR clone 128164 (TRBV2, TRBJ2-1)
CASSELAGSYNEQFF

SEQ ID NO: 256329 - protein, 17 aa, Homo sapiens
  CDR3 for alpha chain variable domain of TCR clone 128165 (TRAV4, )
CLVDIQNPDPAVYQLRD

SEQ ID NO: 256330 - protein, 20 aa, Homo sapiens
  CDR3 for beta chain variable domain of TCR clone 128165 (TRBV7-8, TRBJ2-2)
CASSHLFPGPTIHITGELFF

SEQ ID NO: 256331 - protein, 15 aa, Homo sapiens
  CDR3 for alpha chain variable domain of TCR clone 128166 (TRAV13-1, TRAJ17)
CAASIERAAGNKLTF

SEQ ID NO: 256332 - protein, 12 aa, Homo sapiens
  CDR3 for beta chain variable domain of TCR clone 128166 (TRBV5-7, TRBJ1-1)
CVSSLGRGKAFF

SEQ ID NO: 256333 - protein, 17 aa, Homo sapiens
  CDR3 for alpha chain variable domain of TCR clone 128167 (TRAV8-6, TRAJ58)
CAVSSWVGETSGSRLTF

SEQ ID NO: 256334 - protein, 13 aa, Homo sapiens
  CDR3 for beta chain variable domain of TCR clone 128167 (TRBV7-9, TRBJ1-2)
FASSLKQNYGYTF

SEQ ID NO: 256335 - protein, 15 aa, Homo sapiens
  CDR3 for alpha chain variable domain of TCR clone 128168 (TRAV12-1, TRAJ9)
CVVSFGDTGGFKTIF

SEQ ID NO: 256336 - protein, 14 aa, Homo sapiens
  CDR3 for beta chain variable domain of TCR clone 128168 (TRBV4-2, TRBJ2-7)
CASSQGQTAYEQYF

SEQ ID NO: 256337 - protein, 15 aa, Homo sapiens
  CDR3 for alpha chain variable domain of TCR clone 128169 (TRAV2, TRAJ37)
CAVGDGSSTTGKLIF

SEQ ID NO: 256338 - protein, 13 aa, Homo sapiens
  CDR3 for beta chain variable domain of TCR clone 128169 (TRBV20-1, TRBJ2-7)
CSAQTGLSYEQYF

SEQ ID NO: 256339 - protein, 15 aa, Homo sapiens
  CDR3 for alpha chain variable domain of TCR clone 128170 (TRAV8-4, TRAJ3)
CAVTGENLVQQCFQV

SEQ ID NO: 256340 - protein, 16 aa, Homo sapiens
  CDR3 for beta chain variable domain of TCR clone 128170 (TRBV4-2, TRBJ1-1)
CASSQAGFGMNTEAFF

SEQ ID NO: 256341 - protein, 15 aa, Homo sapiens
  CDR3 for alpha chain variable domain of TCR clone 128171 (TRAV3, TRAJ4)
CAVRDGTGGYNKLIF

SEQ ID NO: 256342 - protein, 16 aa, Homo sapiens
  CDR3 for beta chain variable domain of TCR clone 128171 (TRBV27, TRBJ2-2)
CASSSSGVSNTVELFF

SEQ ID NO: 256343 - protein, 15 aa, Homo sapiens
  CDR3 for alpha chain variable domain of TCR clone 128172 (TRAV26-1, TRAJ22)
CIVRVSFWFCKATDL

SEQ ID NO: 256344 - protein, 12 aa, Homo sapiens
  CDR3 for beta chain variable domain of TCR clone 128172 (TRBV19, TRBJ1-1)
CASSLSDTEAFF

SEQ ID NO: 256345 - protein, 14 aa, Homo sapiens
  CDR3 for alpha chain variable domain of TCR clone 128173 (TRAV35, TRAJ29)
CAGQLTSGNTPLVF

SEQ ID NO: 256346 - protein, 15 aa, Homo sapiens
  CDR3 for beta chain variable domain of TCR clone 128173 (TRBV5-1, TRBJ2-1)
CASSPPRAPYNEQFF

SEQ ID NO: 256347 - protein, 13 aa, Homo sapiens
  CDR3 for alpha chain variable domain of TCR clone 128174 (TRAV12-2, TRAJ24)
CAVSTESWGKLQF

SEQ ID NO: 256348 - protein, 12 aa, Homo sapiens
  CDR3 for beta chain variable domain of TCR clone 128174 (TRBV7-6, TRBJ2-7)
CASSLADSEQYF

SEQ ID NO: 256349 - protein, 11 aa, Homo sapiens
  CDR3 for alpha chain variable domain of TCR clone 128175 (TRAV12-3, TRAJ43)
CAMSGSNDMRF

SEQ ID NO: 256350 - protein, 13 aa, Homo sapiens
  CDR3 for beta chain variable domain of TCR clone 128175 (TRBV20-1, TRBJ1-1)
CSAPLGGGTEAFF

SEQ ID NO: 256351 - protein, 14 aa, Homo sapiens
  CDR3 for alpha chain variable domain of TCR clone 128176 (TRAV26-1, TRAJ38)
CIADNAGNNRKLIW

SEQ ID NO: 256352 - protein, 17 aa, Homo sapiens
  CDR3 for beta chain variable domain of TCR clone 128176 (TRBV7-9, TRBJ2-3)
CASSPTVAVDLTDTQYF

SEQ ID NO: 256353 - protein, 14 aa, Homo sapiens
  CDR3 for alpha chain variable domain of TCR clone 128177 (TRAV26-1, TRAJ34)
CIVRVAYNSDKLIF

SEQ ID NO: 256354 - protein, 15 aa, Homo sapiens
  CDR3 for beta chain variable domain of TCR clone 128177 (TRBV20-1, TRBJ2-7)
CSARVPAAYFYEQYF

SEQ ID NO: 256355 - protein, 15 aa, Homo sapiens
  CDR3 for alpha chain variable domain of TCR clone 128178 (TRAV12-3, TRAJ11)
CAMSEENSGYSALTF

SEQ ID NO: 256356 - protein, 16 aa, Homo sapiens
  CDR3 for beta chain variable domain of TCR clone 128178 (TRBV5-1, TRBJ2-7)
CASSLEGLAGLYEQYF

SEQ ID NO: 256357 - protein, 15 aa, Homo sapiens
  CDR3 for alpha chain variable domain of TCR clone 128179 (TRAV8-4, TRAJ48)
CAVSAAYFGNEKLTF

SEQ ID NO: 256358 - protein, 13 aa, Homo sapiens
  CDR3 for beta chain variable domain of TCR clone 128179 (TRBV7-9, TRBJ2-7)
CASSFAGAYEQYF

SEQ ID NO: 256359 - protein, 11 aa, Homo sapiens
  CDR3 for alpha chain variable domain of TCR clone 128180 (TRAV1-2, TRAJ34)
CAGHNTDKLIF

SEQ ID NO: 256360 - protein, 13 aa, Homo sapiens
  CDR3 for beta chain variable domain of TCR clone 128180 (TRBV11-2, TRBJ1-1)
CASSLGNGAEALF

SEQ ID NO: 256361 - protein, 14 aa, Homo sapiens
  CDR3 for alpha chain variable domain of TCR clone 128181 (TRAV12-2, TRAJ3)
CAGKGYSSASKIIF

SEQ ID NO: 256362 - protein, 14 aa, Homo sapiens
  CDR3 for beta chain variable domain of TCR clone 128181 (TRBV6-3, TRBJ1-2)
CASSEGGGSYGYTF

SEQ ID NO: 256363 - protein, 13 aa, Homo sapiens
  CDR3 for alpha chain variable domain of TCR clone 128182 (TRAV9-2, TRAJ39)
CALQNNAGNMLTF

SEQ ID NO: 256364 - protein, 15 aa, Homo sapiens
  CDR3 for beta chain variable domain of TCR clone 128182 (TRBV7-9, TRBJ1-6)
CASSSPGRGNSPLHF

SEQ ID NO: 256365 - protein, 14 aa, Homo sapiens
  CDR3 for alpha chain variable domain of TCR clone 128183 (TRAV13-1, TRAJ10)
CAAKEPGGGKKLTF

SEQ ID NO: 256366 - protein, 15 aa, Homo sapiens
  CDR3 for beta chain variable domain of TCR clone 128183 (TRBV27, TRBJ2-1)
CASSNGGGSSNEQFF

SEQ ID NO: 256367 - protein, 14 aa, Homo sapiens
  CDR3 for alpha chain variable domain of TCR clone 128184 (TRAV30, TRAJ33)
CGTERRFSNYQLIW

SEQ ID NO: 256368 - protein, 16 aa, Homo sapiens
  CDR3 for beta chain variable domain of TCR clone 128184 (TRBV12-5, TRBJ2-5)
CASGPRTSGNQETQYF

SEQ ID NO: 256369 - protein, 13 aa, Homo sapiens
  CDR3 for alpha chain variable domain of TCR clone 128185 (TRAV1-2, TRAJ9)
CAALNTGGFKTIF

SEQ ID NO: 256370 - protein, 13 aa, Homo sapiens
  CDR3 for beta chain variable domain of TCR clone 128185 (TRBV13, TRBJ2-3)
CQQLWSPTDTQYF

SEQ ID NO: 256371 - protein, 12 aa, Homo sapiens
  CDR3 for alpha chain variable domain of TCR clone 128186 (TRAV16, TRAJ22)
CALEGSARQLTF

SEQ ID NO: 256372 - protein, 14 aa, Homo sapiens
  CDR3 for beta chain variable domain of TCR clone 128186 (TRBV11-2, TRBJ2-3)
CASSSIASTDTQYF

SEQ ID NO: 256373 - protein, 12 aa, Homo sapiens
  CDR3 for alpha chain variable domain of TCR clone 128187 (TRAV21, TRAJ11)
CAATSRYSTLTF

SEQ ID NO: 256374 - protein, 14 aa, Homo sapiens
  CDR3 for beta chain variable domain of TCR clone 128187 (TRBV20-1, TRBJ2-7)
CSAPELAGVGEQYF

SEQ ID NO: 256375 - protein, 18 aa, Homo sapiens
  CDR3 for alpha chain variable domain of TCR clone 128188 (TRAV26-2, TRAJ54)
CILRDVEVGIKGAQKLVF

SEQ ID NO: 256376 - protein, 17 aa, Homo sapiens
  CDR3 for beta chain variable domain of TCR clone 128188 (TRBV20-1, TRBJ1-5)
CSASLSPGQGGNQPQHF

SEQ ID NO: 256377 - protein, 14 aa, Homo sapiens
  CDR3 for alpha chain variable domain of TCR clone 128189 (TRAV12-1, TRAJ17)
CVVNPKAAGNKLTF

SEQ ID NO: 256378 - protein, 13 aa, Homo sapiens
  CDR3 for beta chain variable domain of TCR clone 128189 (TRBV13, TRBJ2-5)
CASSPEVGETQYF

SEQ ID NO: 256379 - protein, 11 aa, Homo sapiens
  CDR3 for alpha chain variable domain of TCR clone 128190 (TRAV12-3, TRAJ27)
CAMANAGKSTF

SEQ ID NO: 256380 - protein, 14 aa, Homo sapiens
  CDR3 for beta chain variable domain of TCR clone 128190 (TRBV9, TRBJ2-7)
CASSVGVGSYEQYF

SEQ ID NO: 256381 - protein, 14 aa, Homo sapiens
  CDR3 for alpha chain variable domain of TCR clone 128191 (TRAV3, TRAJ48)
CAVKSNFGNEKLTF

SEQ ID NO: 256382 - protein, 15 aa, Homo sapiens
  CDR3 for beta chain variable domain of TCR clone 128191 (TRBV9, TRBJ1-6)
CASSVAGTGDSPLHF

SEQ ID NO: 256383 - protein, 19 aa, Homo sapiens
  CDR3 for alpha chain variable domain of TCR clone 128192 (TRAV1-2, TRAJ26)
CLLPLCCEGPDNYGQNFVF

SEQ ID NO: 256384 - protein, 15 aa, Homo sapiens
  CDR3 for beta chain variable domain of TCR clone 128192 (TRBV9, TRBJ1-6)
CASSVAGTGDSPLHF

SEQ ID NO: 256385 - protein, 14 aa, Homo sapiens
  CDR3 for alpha chain variable domain of TCR clone 128193 (TRAV38-1, TRAJ40)
CALRPTSGTCKYIF

SEQ ID NO: 256386 - protein, 14 aa, Homo sapiens
  CDR3 for beta chain variable domain of TCR clone 128193 (TRBV25-1, TRBJ1-1)
CASTHLGGNTEAFF

SEQ ID NO: 256387 - protein, 14 aa, Homo sapiens
  CDR3 for alpha chain variable domain of TCR clone 128194 (TRAV26-1, TRAJ45)
CIEVTGGGADGLTF

SEQ ID NO: 256388 - protein, 19 aa, Homo sapiens
  CDR3 for beta chain variable domain of TCR clone 128194 (TRBV19, TRBJ2-2)
CASTRPGLAGGRVTGGLFF

SEQ ID NO: 256389 - protein, 19 aa, Homo sapiens
  CDR3 for alpha chain variable domain of TCR clone 128195 (TRAV21, TRAJ20)
SLVTQPPTSVLPNDYNLSF

SEQ ID NO: 256390 - protein, 14 aa, Homo sapiens
  CDR3 for beta chain variable domain of TCR clone 128195 (TRBV7-2, TRBJ1-3)
CASSRLRSGNTIYF

SEQ ID NO: 256391 - protein, 10 aa, Homo sapiens
  CDR3 for alpha chain variable domain of TCR clone 128196 (TRAV23/DV6, TRAJ57)
CAASSTLSQG

SEQ ID NO: 256392 - protein, 14 aa, Homo sapiens
  CDR3 for beta chain variable domain of TCR clone 128196 (TRBV20-1, TRBJ2-7)
CSVKRGRSSYEQYF

SEQ ID NO: 256393 - protein, 15 aa, Homo sapiens
  CDR3 for alpha chain variable domain of TCR clone 128197 (TRAV35, TRAJ41)
CAGQLFSNSGYALNF

SEQ ID NO: 256394 - protein, 15 aa, Homo sapiens
  CDR3 for beta chain variable domain of TCR clone 128197 (TRBV20-1, TRBJ2-5)
CSATRTSGSLETQYF

SEQ ID NO: 256395 - protein, 12 aa, Homo sapiens
  CDR3 for alpha chain variable domain of TCR clone 128198 (TRAV2, TRAJ9)
CAVGAGGFKTIL

SEQ ID NO: 256396 - protein, 15 aa, Homo sapiens
  CDR3 for beta chain variable domain of TCR clone 128198 (TRBV10-3, TRBJ2-3)
CAISLTSGGTDTQYF

SEQ ID NO: 256397 - protein, 14 aa, Homo sapiens
  CDR3 for alpha chain variable domain of TCR clone 128199 (TRAV12-2, TRAJ17)
CAVLFKAAGNKQTF

SEQ ID NO: 256398 - protein, 14 aa, Homo sapiens
  CDR3 for beta chain variable domain of TCR clone 128199 (TRBV4-1, TRBJ2-2)
CASSQAVNTGELFF

SEQ ID NO: 256399 - protein, 11 aa, Homo sapiens
  CDR3 for alpha chain variable domain of TCR clone 128200 (TRAV12-3, TRAJ16)
LTGGDGQKLLF

SEQ ID NO: 256400 - protein, 13 aa, Homo sapiens
  CDR3 for beta chain variable domain of TCR clone 128200 (TRBV12-4, TRBJ1-4)
CASAMGHNDKLFF

SEQ ID NO: 256401 - protein, 15 aa, Homo sapiens
  CDR3 for alpha chain variable domain of TCR clone 128201 (TRAV13-1, TRAJ44)
CAASRNTGTASKLTF

SEQ ID NO: 256402 - protein, 16 aa, Homo sapiens
  CDR3 for beta chain variable domain of TCR clone 128201 (TRBV7-3, TRBJ2-2)
CASSLKRGTLSGELFF

SEQ ID NO: 256403 - protein, 12 aa, Homo sapiens
  CDR3 for alpha chain variable domain of TCR clone 128202 (TRAV16, TRAJ9)
CALSSGGSKTIF

SEQ ID NO: 256404 - protein, 14 aa, Homo sapiens
  CDR3 for beta chain variable domain of TCR clone 128202 (TRBV7-9, TRBJ2-1)
CASSLAGPYNEQFF

SEQ ID NO: 256405 - protein, 15 aa, Homo sapiens
  CDR3 for alpha chain variable domain of TCR clone 128203 (TRAV17, TRAJ13)
RATDAGSGGYQKVTF

SEQ ID NO: 256406 - protein, 17 aa, Homo sapiens
  CDR3 for beta chain variable domain of TCR clone 128203 (TRBV11-2, TRBJ2-1)
CASSLYPPGVEYNEQFF

SEQ ID NO: 256407 - protein, 14 aa, Homo sapiens
  CDR3 for alpha chain variable domain of TCR clone 128204 (TRAV2, TRAJ37)
CAVDFTSNTGKLIF

SEQ ID NO: 256408 - protein, 14 aa, Homo sapiens
  CDR3 for beta chain variable domain of TCR clone 128204 (TRBV12-4, TRBJ1-1)
CASSLGTGGTEAFF

SEQ ID NO: 256409 - protein, 13 aa, Homo sapiens
  CDR3 for alpha chain variable domain of TCR clone 128205 (TRAV2, TRAJ40)
CAVVTSGTYNYHF

SEQ ID NO: 256410 - protein, 14 aa, Homo sapiens
  CDR3 for beta chain variable domain of TCR clone 128205 (TRBV19, TRBJ2-1)
CASPTFVLSGEQFF

SEQ ID NO: 256411 - protein, 15 aa, Homo sapiens
  CDR3 for alpha chain variable domain of TCR clone 128206 (TRAV12-3, TRAJ8)
CAMSLLNTGFQKLVF

SEQ ID NO: 256412 - protein, 14 aa, Homo sapiens
  CDR3 for beta chain variable domain of TCR clone 128206 (TRBV18, TRBJ2-7)
CASSPRGGAYEQYF

SEQ ID NO: 256413 - protein, 17 aa, Homo sapiens
  CDR3 for alpha chain variable domain of TCR clone 128207 (TRAV3, TRAJ13)
CAVRDGPRAGGSYIPTF

SEQ ID NO: 256414 - protein, 14 aa, Homo sapiens
  CDR3 for beta chain variable domain of TCR clone 128207 (TRBV5-5, TRBJ2-7)
CASSLGQGTYEQYF

SEQ ID NO: 256415 - protein, 13 aa, Homo sapiens
  CDR3 for alpha chain variable domain of TCR clone 128208 (TRAV36/DV7, TRAJ54)
CAVDIQGAQKLVF

SEQ ID NO: 256416 - protein, 14 aa, Homo sapiens
  CDR3 for beta chain variable domain of TCR clone 128208 (TRBV19, TRBJ2-7)
CDSNFRDTFTGMYF

SEQ ID NO: 256417 - protein, 14 aa, Homo sapiens
  CDR3 for alpha chain variable domain of TCR clone 128209 (TRAV12-2, TRAJ13)
CAVKKTGGNQKVTF

SEQ ID NO: 256418 - protein, 14 aa, Homo sapiens
  CDR3 for beta chain variable domain of TCR clone 128209 (TRBV12-5, TRBJ2-5)
CASGSRTHQETQYF

SEQ ID NO: 256419 - protein, 14 aa, Homo sapiens
  CDR3 for alpha chain variable domain of TCR clone 128210 (TRAV8-4, TRAJ54)
CAVSEVLGAQKLVF

SEQ ID NO: 256420 - protein, 15 aa, Homo sapiens
  CDR3 for beta chain variable domain of TCR clone 128210 (TRBV6-1, TRBJ2-6)
CASSSRHSGANVLTF

SEQ ID NO: 256421 - protein, 14 aa, Homo sapiens
  CDR3 for alpha chain variable domain of TCR clone 128211 (TRAV38-1, TRAJ45)
CAYYSGGGADGLTF

SEQ ID NO: 256422 - protein, 15 aa, Homo sapiens
  CDR3 for beta chain variable domain of TCR clone 128211 (TRBV28, TRBJ2-5)
CASSSGRTIQETQYF

SEQ ID NO: 256423 - protein, 14 aa, Homo sapiens
  CDR3 for alpha chain variable domain of TCR clone 128212 (TRAV13-1, TRAJ44)
CAAKTTGTASKLTF

SEQ ID NO: 256424 - protein, 17 aa, Homo sapiens
  CDR3 for beta chain variable domain of TCR clone 128212 (TRBV7-3, TRBJ2-3)
RASSLMKRMRGADTQYF

SEQ ID NO: 256425 - protein, 13 aa, Homo sapiens
  CDR3 for alpha chain variable domain of TCR clone 128213 (TRAV12-3, TRAJ33)
CAMSVDSNYQLIW

SEQ ID NO: 256426 - protein, 16 aa, Homo sapiens
  CDR3 for beta chain variable domain of TCR clone 128213 (TRBV12-4, TRBJ1-5)
CASSRPVGGSNQPQHF

SEQ ID NO: 256427 - protein, 13 aa, Homo sapiens
  CDR3 for alpha chain variable domain of TCR clone 128214 (TRAV2, TRAJ40)
CAVVTSGTYKYIF

SEQ ID NO: 256428 - protein, 14 aa, Homo sapiens
  CDR3 for beta chain variable domain of TCR clone 128214 (TRBV7-2, TRBJ2-7)
CASSSISGFSEQYF

SEQ ID NO: 256429 - protein, 12 aa, Homo sapiens
  CDR3 for alpha chain variable domain of TCR clone 128215 (TRAV12-3, TRAJ17)
CAMTLTGNKLTF

SEQ ID NO: 256430 - protein, 17 aa, Homo sapiens
  CDR3 for beta chain variable domain of TCR clone 128215 (TRBV7-3, TRBJ2-3)
CASSLMKGMRGADKQYF

SEQ ID NO: 256431 - protein, 14 aa, Homo sapiens
  CDR3 for alpha chain variable domain of TCR clone 128216 (TRAV38-1, TRAJ35)
CAFLTIGFGNVPHC

SEQ ID NO: 256432 - protein, 17 aa, Homo sapiens
  CDR3 for beta chain variable domain of TCR clone 128216 (TRBV28, TRBJ1-1)
CASSGDLRTESNTEAFF

SEQ ID NO: 256433 - protein, 14 aa, Homo sapiens
  CDR3 for alpha chain variable domain of TCR clone 128217 (TRAV2, TRAJ20)
CAVEDGTNDYKLSF

SEQ ID NO: 256434 - protein, 16 aa, Homo sapiens
  CDR3 for beta chain variable domain of TCR clone 128217 (TRBV7-3, TRBJ2-1)
CASSLVSGSSNNEQFF

SEQ ID NO: 256435 - protein, 13 aa, Homo sapiens
  CDR3 for alpha chain variable domain of TCR clone 128218 (TRAV35, TRAJ42)
CAGFPGSQGNLIF

SEQ ID NO: 256436 - protein, 13 aa, Homo sapiens
  CDR3 for beta chain variable domain of TCR clone 128218 (TRBV19, TRBJ1-2)
CASSVPGQDGYTF

SEQ ID NO: 256437 - protein, 14 aa, Homo sapiens
  CDR3 for alpha chain variable domain of TCR clone 128219 (TRAV20, TRAJ10)
CAVRVEGGGNKLTF

SEQ ID NO: 256438 - protein, 13 aa, Homo sapiens
  CDR3 for beta chain variable domain of TCR clone 128219 (TRBV13, TRBJ2-2)
CASSPGLTGELFC

SEQ ID NO: 256439 - protein, 17 aa, Homo sapiens
  CDR3 for alpha chain variable domain of TCR clone 128220 (TRAV3, TRAJ6)
CAVRDGPRAGGSYIPPF

SEQ ID NO: 256440 - protein, 13 aa, Homo sapiens
  CDR3 for beta chain variable domain of TCR clone 128220 (TRBV15, TRBJ2-7)
CATSTTGHYEQYF

SEQ ID NO: 256441 - protein, 13 aa, Homo sapiens
  CDR3 for alpha chain variable domain of TCR clone 128221 (TRAV35, TRAJ33)
CAGQLYGVYQLIW

SEQ ID NO: 256442 - protein, 14 aa, Homo sapiens
  CDR3 for beta chain variable domain of TCR clone 128221 (TRBV7-2, TRBJ1-1)
CASSLGGAGTVAFF

SEQ ID NO: 256443 - protein, 13 aa, Homo sapiens
  CDR3 for alpha chain variable domain of TCR clone 128222 (TRAV21, TRAJ57)
CAVTQGGSEKLVF

SEQ ID NO: 256444 - protein, 13 aa, Homo sapiens
  CDR3 for beta chain variable domain of TCR clone 128222 (TRBV6-1, TRBJ1-1)
CASSWTVDTEAFF

SEQ ID NO: 256445 - protein, 14 aa, Homo sapiens
  CDR3 for alpha chain variable domain of TCR clone 128223 (TRAV4, TRAJ17)
CLVGDMAAGNKLTF

SEQ ID NO: 256446 - protein, 15 aa, Homo sapiens
  CDR3 for beta chain variable domain of TCR clone 128223 (TRBV20-1, TRBJ2-7)
CSARDRVSGMDEQYF

SEQ ID NO: 256447 - protein, 14 aa, Homo sapiens
  CDR3 for alpha chain variable domain of TCR clone 128224 (TRAV1-1, TRAJ27)
CAVLYNTNAGKSTF

SEQ ID NO: 256448 - protein, 13 aa, Homo sapiens
  CDR3 for beta chain variable domain of TCR clone 128224 (TRBV12-5, TRBJ1-2)
CASGVRTGNGYTF

SEQ ID NO: 256449 - protein, 16 aa, Homo sapiens
  CDR3 for alpha chain variable domain of TCR clone 128225 (TRAV30, TRAJ42)
CGTSKNYGGSQGNLIF

SEQ ID NO: 256450 - protein, 14 aa, Homo sapiens
  CDR3 for beta chain variable domain of TCR clone 128225 (TRBV19, TRBJ1-5)
CASNSYGTHQTQHF

SEQ ID NO: 256451 - protein, 14 aa, Homo sapiens
  CDR3 for alpha chain variable domain of TCR clone 128226 (TRAV8-3, TRAJ39)
CAVGAWGGGNMLTF

SEQ ID NO: 256452 - protein, 16 aa, Homo sapiens
  CDR3 for beta chain variable domain of TCR clone 128226 (TRBV7-2, TRBJ1-3)
CASSSGRVLSGNTIYF

SEQ ID NO: 256453 - protein, 17 aa, Homo sapiens
  CDR3 for alpha chain variable domain of TCR clone 128227 (TRAV3, TRAJ6)
CAVRDGPRAGGSYIPTF

SEQ ID NO: 256454 - protein, 16 aa, Homo sapiens
  CDR3 for beta chain variable domain of TCR clone 128227 (TRBV4-2, TRBJ2-1)
CASSHDDNPEGAQEFF

SEQ ID NO: 256455 - protein, 12 aa, Homo sapiens
  CDR3 for alpha chain variable domain of TCR clone 128228 (TRAV21, TRAJ23)
CAVMLQGGKLIF

SEQ ID NO: 256456 - protein, 19 aa, Homo sapiens
  CDR3 for beta chain variable domain of TCR clone 128228 (TRBV25-1, TRBJ2-2)
CAILVYRVDRGRKTGELFF

SEQ ID NO: 256457 - protein, 12 aa, Homo sapiens
  CDR3 for alpha chain variable domain of TCR clone 128229 (TRAV3, TRAJ43)
CAVRDPNNDMRF

SEQ ID NO: 256458 - protein, 15 aa, Homo sapiens
  CDR3 for beta chain variable domain of TCR clone 128229 (TRBV5-1, TRBJ2-1)
CASSPPRAPYNEQFF

SEQ ID NO: 256459 - protein, 14 aa, Homo sapiens
  CDR3 for alpha chain variable domain of TCR clone 128230 (TRAV2, TRAJ9)
CAVEDRSGGFKTIF

SEQ ID NO: 256460 - protein, 14 aa, Homo sapiens
  CDR3 for beta chain variable domain of TCR clone 128230 (TRBV6-1, TRBJ1-3)
CASVQGGGGNTMYF

SEQ ID NO: 256461 - protein, 12 aa, Homo sapiens
  CDR3 for alpha chain variable domain of TCR clone 128231 (TRAV16, TRAJ10)
CSRTGGGNKITF

SEQ ID NO: 256462 - protein, 19 aa, Homo sapiens
  CDR3 for beta chain variable domain of TCR clone 128231 (TRBV25-1, TRBJ2-2)
CAILVYRVDRGRKTGELFF

SEQ ID NO: 256463 - protein, 13 aa, Homo sapiens
  CDR3 for alpha chain variable domain of TCR clone 128232 (TRAV8-3, TRAJ42)
CAVDGGSQGNLIF

SEQ ID NO: 256464 - protein, 14 aa, Homo sapiens
  CDR3 for beta chain variable domain of TCR clone 128232 (TRBV19, TRBJ2-1)
CASPTFVLSGEQFF

SEQ ID NO: 256465 - protein, 13 aa, Homo sapiens
  CDR3 for alpha chain variable domain of TCR clone 128233 (TRAV16, TRAJ29)
CALSRRGNTPLVF

SEQ ID NO: 256466 - protein, 15 aa, Homo sapiens
  CDR3 for beta chain variable domain of TCR clone 128233 (TRBV4-1, TRBJ2-3)
CASSRGQGITDTQYF

SEQ ID NO: 256467 - protein, 15 aa, Homo sapiens
  CDR3 for alpha chain variable domain of TCR clone 128234 (TRAV12-2, TRAJ53)
CAVNGGGGSNYKMTF

SEQ ID NO: 256468 - protein, 14 aa, Homo sapiens
  CDR3 for beta chain variable domain of TCR clone 128234 (TRBV19, TRBJ2-2)
CASSTLHRSGELFF

SEQ ID NO: 256469 - protein, 14 aa, Homo sapiens
  CDR3 for alpha chain variable domain of TCR clone 128235 (TRAV1-2, TRAJ16)
CSVNRFSDGQKLLF

SEQ ID NO: 256470 - protein, 16 aa, Homo sapiens
  CDR3 for beta chain variable domain of TCR clone 128235 (TRBV20-1, TRBJ1-4)
CSAPGQGLLTNEKLFF

SEQ ID NO: 256471 - protein, 18 aa, Homo sapiens
  CDR3 for alpha chain variable domain of TCR clone 128236 (TRAV26-2, TRAJ45)
CILRVDKYSGGGADGLTF

SEQ ID NO: 256472 - protein, 13 aa, Homo sapiens
  CDR3 for beta chain variable domain of TCR clone 128236 (TRBV7-9, TRBJ2-3)
CASSPGSTDTQYF

SEQ ID NO: 256473 - protein, 22 aa, Homo sapiens
  CDR3 for alpha chain variable domain of TCR clone 128237 (TRAV21, TRAJ20)
AAAQSVTQPPTSVLPNDYKLSF

SEQ ID NO: 256474 - protein, 14 aa, Homo sapiens
  CDR3 for beta chain variable domain of TCR clone 128237 (TRBV7-2, TRBJ1-3)
CASSRLRSGNTIYF

SEQ ID NO: 256475 - protein, 14 aa, Homo sapiens
  CDR3 for alpha chain variable domain of TCR clone 128238 (TRAV1-1, TRAJ27)
CAFSETPMQANPPL

SEQ ID NO: 256476 - protein, 17 aa, Homo sapiens
  CDR3 for beta chain variable domain of TCR clone 128238 (TRBV20-1, TRBJ2-3)
CSARDPKGVSATDTQYF

SEQ ID NO: 256477 - protein, 17 aa, Homo sapiens
  CDR3 for alpha chain variable domain of TCR clone 128239 (TRAV27, TRAJ42)
CAERVIYYGGSQGNLIF

SEQ ID NO: 256478 - protein, 13 aa, Homo sapiens
  CDR3 for beta chain variable domain of TCR clone 128239 (TRBV11-2, TRBJ2-5)
CASSRGPSETQYF

SEQ ID NO: 256479 - protein, 14 aa, Homo sapiens
  CDR3 for alpha chain variable domain of TCR clone 128240 (TRAV12-2, TRAJ13)
CAVKKHGGYQKVTF

SEQ ID NO: 256480 - protein, 15 aa, Homo sapiens
  CDR3 for beta chain variable domain of TCR clone 128240 (TRBV27, TRBJ2-1)
CASSNGGGSSNEQFF

SEQ ID NO: 256481 - protein, 14 aa, Homo sapiens
  CDR3 for alpha chain variable domain of TCR clone 128241 (TRAV12-2, TRAJ53)
CVVKGGGSNYKLTF

SEQ ID NO: 256482 - protein, 14 aa, Homo sapiens
  CDR3 for beta chain variable domain of TCR clone 128241 (TRBV7-7, TRBJ2-2)
CATRQDSDTGELFF

SEQ ID NO: 256483 - protein, 13 aa, Homo sapiens
  CDR3 for alpha chain variable domain of TCR clone 128242 (TRAV13-2, TRAJ48)
CEEMDFGNEKLTF

SEQ ID NO: 256484 - protein, 13 aa, Homo sapiens
  CDR3 for beta chain variable domain of TCR clone 128242 (TRBV13, TRBJ2-5)
CASSPEVGETQYF

SEQ ID NO: 256485 - protein, 14 aa, Homo sapiens
  CDR3 for alpha chain variable domain of TCR clone 128243 (TRAV9-2, TRAJ39)
CALYIYNAGNMLTF

SEQ ID NO: 256486 - protein, 17 aa, Homo sapiens
  CDR3 for beta chain variable domain of TCR clone 128243 (TRBV7-9, TRBJ2-1)
CASSLVASYPSYNEQFF

SEQ ID NO: 256487 - protein, 18 aa, Homo sapiens
  CDR3 for alpha chain variable domain of TCR clone 128244 (TRAV21, TRAJ52)
CAVRPSPAGGTSYGKLTF

SEQ ID NO: 256488 - protein, 16 aa, Homo sapiens
  CDR3 for beta chain variable domain of TCR clone 128244 (TRBV6-1, TRBJ2-1)
CASSDLPGQLNNEQFF

SEQ ID NO: 256489 - protein, 13 aa, Homo sapiens
  CDR3 for alpha chain variable domain of TCR clone 128245 (TRAV21, TRAJ27)
CAARPSNAGKSTL

SEQ ID NO: 256490 - protein, 14 aa, Homo sapiens
  CDR3 for beta chain variable domain of TCR clone 128245 (TRBV7-6, TRBJ2-3)
CASSLGTVTDTQYF

SEQ ID NO: 256491 - protein, 15 aa, Homo sapiens
  CDR3 for alpha chain variable domain of TCR clone 128246 (TRAV12-3, TRAJ6)
CAMSPASGGSYIPTC

SEQ ID NO: 256492 - protein, 15 aa, Homo sapiens
  CDR3 for beta chain variable domain of TCR clone 128246 (TRBV2, TRBJ1-2)
CASSESRTVNYGYTF

SEQ ID NO: 256493 - protein, 18 aa, Homo sapiens
  CDR3 for alpha chain variable domain of TCR clone 128247 (TRAV26-1, TRAJ22)
CIVRVALISSGSARQLTF

SEQ ID NO: 256494 - protein, 13 aa, Homo sapiens
  CDR3 for beta chain variable domain of TCR clone 128247 (TRBV13, TRBJ2-5)
CASSPELGETQYF

SEQ ID NO: 256495 - protein, 12 aa, Homo sapiens
  CDR3 for alpha chain variable domain of TCR clone 128248 (TRAV3, TRAJ20)
CAVRDPDYKLSF

SEQ ID NO: 256496 - protein, 15 aa, Homo sapiens
  CDR3 for beta chain variable domain of TCR clone 128248 (TRBV6-3, TRBJ2-1)
CASIGAGGSYNEQFF

SEQ ID NO: 256497 - protein, 12 aa, Homo sapiens
  CDR3 for alpha chain variable domain of TCR clone 128249 (TRAV21, TRAJ3)
CCIYSSASKIIF

SEQ ID NO: 256498 - protein, 16 aa, Homo sapiens
  CDR3 for beta chain variable domain of TCR clone 128249 (TRBV19, TRBJ2-1)
CASSKAGPSSYNEQFF

SEQ ID NO: 256499 - protein, 11 aa, Homo sapiens
  CDR3 for alpha chain variable domain of TCR clone 128250 (TRAV12-1, TRAJ21)
CVVYNFNKFYF

SEQ ID NO: 256500 - protein, 14 aa, Homo sapiens
  CDR3 for beta chain variable domain of TCR clone 128250 (TRBV19, TRBJ2-7)
CASSMGKGAIEQYF

SEQ ID NO: 256501 - protein, 16 aa, Homo sapiens
  CDR3 for alpha chain variable domain of TCR clone 128251 (TRAV12-2, TRAJ18)
CAVTTDRGSTLGRLYF

SEQ ID NO: 256502 - protein, 14 aa, Homo sapiens
  CDR3 for beta chain variable domain of TCR clone 128251 (TRBV4-2, TRBJ1-5)
CASSQDSIKQPQHF

SEQ ID NO: 256503 - protein, 13 aa, Homo sapiens
  CDR3 for alpha chain variable domain of TCR clone 128252 (TRAV17, TRAJ39)
CATEDNAGNMLTF

SEQ ID NO: 256504 - protein, 15 aa, Homo sapiens
  CDR3 for beta chain variable domain of TCR clone 128252 (TRBV5-5, TRBJ1-5)
CASSSTPGSNQPQHF

SEQ ID NO: 256505 - protein, 15 aa, Homo sapiens
  CDR3 for alpha chain variable domain of TCR clone 128253 (TRAV21, TRAJ37)
CAVRPTLSNTGKLIF

SEQ ID NO: 256506 - protein, 16 aa, Homo sapiens
  CDR3 for beta chain variable domain of TCR clone 128253 (TRBV24-1, TRBJ2-3)
CDTSDRRQDLTDTQYF

SEQ ID NO: 256507 - protein, 12 aa, Homo sapiens
  CDR3 for alpha chain variable domain of TCR clone 128254 (TRAV39, TRAJ49)
CAVDIDGNQFYF

SEQ ID NO: 256508 - protein, 13 aa, Homo sapiens
  CDR3 for beta chain variable domain of TCR clone 128254 (TRBV7-9, TRBJ1-2)
CASSLKQNYGYTF

SEQ ID NO: 256509 - protein, 17 aa, Homo sapiens
  CDR3 for alpha chain variable domain of TCR clone 128255 (TRAV12-2, TRAJ36)
CAVKDNLFFETGTRLTV

SEQ ID NO: 256510 - protein, 15 aa, Homo sapiens
  CDR3 for beta chain variable domain of TCR clone 128255 (TRBV28, TRBJ2-2)
CASTVAGANTGELFF

SEQ ID NO: 256511 - protein, 13 aa, Homo sapiens
  CDR3 for alpha chain variable domain of TCR clone 128256 (TRAV8-3, TRAJ36)
CAVGATGANNLFF

SEQ ID NO: 256512 - protein, 17 aa, Homo sapiens
  CDR3 for beta chain variable domain of TCR clone 128256 (TRBV4-2, TRBJ1-1)
CASTKFGGGSGNTEAFF

SEQ ID NO: 256513 - protein, 15 aa, Homo sapiens
  CDR3 for alpha chain variable domain of TCR clone 128257 (TRAV4, TRAJ36)
CLVGDRQTGANNLFF

SEQ ID NO: 256514 - protein, 15 aa, Homo sapiens
  CDR3 for beta chain variable domain of TCR clone 128257 (TRBV7-6, TRBJ2-1)
CAGSSLAGEGNEQFF

SEQ ID NO: 256515 - protein, 12 aa, Homo sapiens
  CDR3 for alpha chain variable domain of TCR clone 128258 (TRAV36/DV7, TRAJ54)
CAVVRGAQKLVF

SEQ ID NO: 256516 - protein, 14 aa, Homo sapiens
  CDR3 for beta chain variable domain of TCR clone 128258 (TRBV7-3, TRBJ1-1)
CASSLKGGITEAFF

SEQ ID NO: 256517 - protein, 12 aa, Homo sapiens
  CDR3 for alpha chain variable domain of TCR clone 128259 (TRAV13-1, TRAJ53)
CAAGGSNYKLTF

SEQ ID NO: 256518 - protein, 14 aa, Homo sapiens
  CDR3 for beta chain variable domain of TCR clone 128259 (TRBV12-5, TRBJ2-5)
CASGSRTHQETQYF

SEQ ID NO: 256519 - protein, 14 aa, Homo sapiens
  CDR3 for alpha chain variable domain of TCR clone 128260 (TRAV14/DV4, TRAJ20)
CAMRESLNDYKLSF

SEQ ID NO: 256520 - protein, 14 aa, Homo sapiens
  CDR3 for beta chain variable domain of TCR clone 128260 (TRBV7-9, TRBJ2-7)
CASSLGTDPNEQYF

SEQ ID NO: 256521 - protein, 14 aa, Homo sapiens
  CDR3 for alpha chain variable domain of TCR clone 128261 (TRAV13-1, TRAJ53)
CAASISGSNYKLTF

SEQ ID NO: 256522 - protein, 15 aa, Homo sapiens
  CDR3 for beta chain variable domain of TCR clone 128261 (TRBV4-1, TRBJ1-4)
CASSDTGGTNENLFF

SEQ ID NO: 256523 - protein, 12 aa, Homo sapiens
  CDR3 for alpha chain variable domain of TCR clone 128262 (TRAV16, TRAJ26)
SALRSYGQNFVF

SEQ ID NO: 256524 - protein, 14 aa, Homo sapiens
  CDR3 for beta chain variable domain of TCR clone 128262 (TRBV10-3, TRBJ2-1)
CAISSDLAYNEQFF

SEQ ID NO: 256525 - protein, 15 aa, Homo sapiens
  CDR3 for alpha chain variable domain of TCR clone 128263 (TRAV8-4, TRAJ8)
CAVSDLNTGFQKLVL

SEQ ID NO: 256526 - protein, 14 aa, Homo sapiens
  CDR3 for beta chain variable domain of TCR clone 128263 (TRBV7-2, TRBJ2-3)
CASSQTGSSYTQYF

SEQ ID NO: 256527 - protein, 19 aa, Homo sapiens
  CDR3 for alpha chain variable domain of TCR clone 128264 (TRAV26-1, TRAJ52)
CIVRAHRNAGGTSYGKLTF

SEQ ID NO: 256528 - protein, 13 aa, Homo sapiens
  CDR3 for beta chain variable domain of TCR clone 128264 (TRBV12-5, TRBJ2-3)
CASGDRQSDTQYF

SEQ ID NO: 256529 - protein, 15 aa, Homo sapiens
  CDR3 for alpha chain variable domain of TCR clone 128265 (TRAV2, TRAJ24)
CAVVRLKNSWGKLQF

SEQ ID NO: 256530 - protein, 15 aa, Homo sapiens
  CDR3 for beta chain variable domain of TCR clone 128265 (TRBV9, TRBJ1-6)
CASSVAGTGDSPLHF

SEQ ID NO: 256531 - protein, 12 aa, Homo sapiens
  CDR3 for alpha chain variable domain of TCR clone 128266 (TRAV4, TRAJ26)
CLVGDYGQNFVF

SEQ ID NO: 256532 - protein, 14 aa, Homo sapiens
  CDR3 for beta chain variable domain of TCR clone 128266 (TRBV7-9, TRBJ2-3)
CASSLEDGTDTQYF

SEQ ID NO: 256533 - protein, 16 aa, Homo sapiens
  CDR3 for alpha chain variable domain of TCR clone 128267 (TRAV23/DV6, TRAJ9)
CAAGIGGNTGGFKTIF

SEQ ID NO: 256534 - protein, 15 aa, Homo sapiens
  CDR3 for beta chain variable domain of TCR clone 128267 (TRBV6-3, TRBJ2-7)
CASSSPGTVLYEQYF

SEQ ID NO: 256535 - protein, 12 aa, Homo sapiens
  CDR3 for alpha chain variable domain of TCR clone 128268 (TRAV25, TRAJ11)
CAGASGYSTLTF

SEQ ID NO: 256536 - protein, 13 aa, Homo sapiens
  CDR3 for beta chain variable domain of TCR clone 128268 (TRBV5-8, TRBJ2-3)
CQQLGQGTDTQYF

SEQ ID NO: 256537 - protein, 11 aa, Homo sapiens
  CDR3 for alpha chain variable domain of TCR clone 128269 (TRAV3, TRAJ21)
CAAGNFNKFCF

SEQ ID NO: 256538 - protein, 16 aa, Homo sapiens
  CDR3 for beta chain variable domain of TCR clone 128269 (TRBV19, TRBJ2-1)
CASSKAGPSSYNEQFF

SEQ ID NO: 256539 - protein, 13 aa, Homo sapiens
  CDR3 for alpha chain variable domain of TCR clone 128270 (TRAV12-1, TRAJ22)
CVVYSGSARQLTF

SEQ ID NO: 256540 - protein, 13 aa, Homo sapiens
  CDR3 for beta chain variable domain of TCR clone 128270 (TRBV7-3, TRBJ1-1)
CASSQDWGAEAFF

SEQ ID NO: 256541 - protein, 15 aa, Homo sapiens
  CDR3 for alpha chain variable domain of TCR clone 128271 (TRAV21, TRAJ52)
CAVRGGGTSYGKLTL

SEQ ID NO: 256542 - protein, 15 aa, Homo sapiens
  CDR3 for beta chain variable domain of TCR clone 128271 (TRBV18, TRBJ1-5)
CASSPSDRSNQPQHF

SEQ ID NO: 256543 - protein, 11 aa, Homo sapiens
  CDR3 for alpha chain variable domain of TCR clone 128272 (TRAV8-2, TRAJ26)
CVVTLLPGSEF

SEQ ID NO: 256544 - protein, 15 aa, Homo sapiens
  CDR3 for beta chain variable domain of TCR clone 128272 (TRBV11-2, TRBJ2-2)
CASSSDRVNAGELFF

SEQ ID NO: 256545 - protein, 15 aa, Homo sapiens
  CDR3 for alpha chain variable domain of TCR clone 128273 (TRAV2, TRAJ24)
CAVVRLKNSWGKLQF

SEQ ID NO: 256546 - protein, 13 aa, Homo sapiens
  CDR3 for beta chain variable domain of TCR clone 128273 (TRBV3-1, TRBJ1-1)
CASSLGVITEAFF

SEQ ID NO: 256547 - protein, 14 aa, Homo sapiens
  CDR3 for alpha chain variable domain of TCR clone 128274 (TRAV36/DV7, TRAJ40)
CAVETTSGNYKYIF

SEQ ID NO: 256548 - protein, 13 aa, Homo sapiens
  CDR3 for beta chain variable domain of TCR clone 128274 (TRBV10-3, TRBJ2-5)
CAMTSGAGETQYF

SEQ ID NO: 256549 - protein, 14 aa, Homo sapiens
  CDR3 for alpha chain variable domain of TCR clone 128275 (TRAV9-2, TRAJ39)
CALYIYNAGNMLTF

SEQ ID NO: 256550 - protein, 13 aa, Homo sapiens
  CDR3 for beta chain variable domain of TCR clone 128275 (TRBV4-1, TRBJ2-1)
CASSQEVQYEQFF

SEQ ID NO: 256551 - protein, 13 aa, Homo sapiens
  CDR3 for alpha chain variable domain of TCR clone 128276 (TRAV2, TRAJ15)
GAVASQAGTALIF

SEQ ID NO: 256552 - protein, 16 aa, Homo sapiens
  CDR3 for beta chain variable domain of TCR clone 128276 (TRBV5-1, TRBJ1-1)
CASSSGGNSLNTEAFF

SEQ ID NO: 256553 - protein, 14 aa, Homo sapiens
  CDR3 for alpha chain variable domain of TCR clone 128277 (TRAV8-3, TRAJ4)
CAVGAAGGYNKLIF

SEQ ID NO: 256554 - protein, 13 aa, Homo sapiens
  CDR3 for beta chain variable domain of TCR clone 128277 (TRBV19, TRBJ2-7)
CASRKAGGSEQYF

SEQ ID NO: 256555 - protein, 10 aa, Homo sapiens
  CDR3 for alpha chain variable domain of TCR clone 128278 (TRAV23/DV6, TRAJ31)
CARGGARLMF

SEQ ID NO: 256556 - protein, 15 aa, Homo sapiens
  CDR3 for beta chain variable domain of TCR clone 128278 (TRBV11-2, TRBJ2-1)
CASSLGPDSYNEQFF

SEQ ID NO: 256557 - protein, 13 aa, Homo sapiens
  CDR3 for alpha chain variable domain of TCR clone 128279 (TRAV12-1, TRAJ21)
CVVIGGNFNKFYF

SEQ ID NO: 256558 - protein, 14 aa, Homo sapiens
  CDR3 for beta chain variable domain of TCR clone 128279 (TRBV7-3, TRBJ2-2)
CASSLYPLTGELFF

SEQ ID NO: 256559 - protein, 16 aa, Homo sapiens
  CDR3 for alpha chain variable domain of TCR clone 128280 (TRAV21, TRAJ45)
CAVSWGSGGGADGLTF

SEQ ID NO: 256560 - protein, 14 aa, Homo sapiens
  CDR3 for beta chain variable domain of TCR clone 128280 (TRBV18, TRBJ2-7)
CASSSRTLAYEQYF

SEQ ID NO: 256561 - protein, 15 aa, Homo sapiens
  CDR3 for alpha chain variable domain of TCR clone 128281 (TRAV3, TRAJ36)
CAVRASQTGANNPFF

SEQ ID NO: 256562 - protein, 15 aa, Homo sapiens
  CDR3 for beta chain variable domain of TCR clone 128281 (TRBV3-1, TRBJ2-1)
CASSQDYTPRGEQFF

SEQ ID NO: 256563 - protein, 15 aa, Homo sapiens
  CDR3 for alpha chain variable domain of TCR clone 128282 (TRAV8-3, TRAJ45)
CASSYSGGGADGLTF

SEQ ID NO: 256564 - protein, 15 aa, Homo sapiens
  CDR3 for beta chain variable domain of TCR clone 128282 (TRBV19, TRBJ1-6)
CASSTQGAVGSPLHF

SEQ ID NO: 256565 - protein, 16 aa, Homo sapiens
  CDR3 for alpha chain variable domain of TCR clone 128283 (TRAV20, TRAJ22)
CAVQASSSGSARQLTF

SEQ ID NO: 256566 - protein, 13 aa, Homo sapiens
  CDR3 for beta chain variable domain of TCR clone 128283 (TRBV7-2, TRBJ2-5)
CASSQASVETQYF

SEQ ID NO: 256567 - protein, 12 aa, Homo sapiens
  CDR3 for alpha chain variable domain of TCR clone 128284 (TRAV21, TRAJ8)
CAVNTGFQKLVF

SEQ ID NO: 256568 - protein, 14 aa, Homo sapiens
  CDR3 for beta chain variable domain of TCR clone 128284 (TRBV7-2, TRBJ2-7)
CASSPKTSFYEQYF

SEQ ID NO: 256569 - protein, 14 aa, Homo sapiens
  CDR3 for alpha chain variable domain of TCR clone 128285 (TRAV16, TRAJ57)
FALPTQGGSEKLVF

SEQ ID NO: 256570 - protein, 15 aa, Homo sapiens
  CDR3 for beta chain variable domain of TCR clone 128285 (TRBV28, TRBJ1-3)
CASWGGHLSGNTIYF

SEQ ID NO: 256571 - protein, 17 aa, Homo sapiens
  CDR3 for alpha chain variable domain of TCR clone 128286 (TRAV8-6, TRAJ8)
CAVKEGIENTVFQKLVF

SEQ ID NO: 256572 - protein, 12 aa, Homo sapiens
  CDR3 for beta chain variable domain of TCR clone 128286 (TRBV19, TRBJ1-4)
CASKDWPGGLFF

SEQ ID NO: 256573 - protein, 14 aa, Homo sapiens
  CDR3 for alpha chain variable domain of TCR clone 128287 (TRAV17, TRAJ57)
CATDPQGGSEKLVF

SEQ ID NO: 256574 - protein, 11 aa, Homo sapiens
  CDR3 for beta chain variable domain of TCR clone 128287 (TRBV7-8, TRBJ2-7)
CASSLSLEQYF

SEQ ID NO: 256575 - protein, 13 aa, Homo sapiens
  CDR3 for alpha chain variable domain of TCR clone 128288 (TRAV8-3, TRAJ43)
CAVVPYNNNDVRF

SEQ ID NO: 256576 - protein, 16 aa, Homo sapiens
  CDR3 for beta chain variable domain of TCR clone 128288 (TRBV7-2, TRBJ2-5)
CASSPFPTGGEETQYF

SEQ ID NO: 256577 - protein, 15 aa, Homo sapiens
  CDR3 for alpha chain variable domain of TCR clone 128289 (TRAV12-3, TRAJ4)
CAMTRGSGGYNKLIF

SEQ ID NO: 256578 - protein, 14 aa, Homo sapiens
  CDR3 for beta chain variable domain of TCR clone 128289 (TRBV4-3, TRBJ2-3)
CVSSQAETVDTQYF

SEQ ID NO: 256579 - protein, 13 aa, Homo sapiens
  CDR3 for alpha chain variable domain of TCR clone 128290 (TRAV8-3, TRAJ28)
CAVGAVGSYQLTF

SEQ ID NO: 256580 - protein, 14 aa, Homo sapiens
  CDR3 for beta chain variable domain of TCR clone 128290 (TRBV7-2, TRBJ2-1)
CASSLSRVDNEQFF

SEQ ID NO: 256581 - protein, 12 aa, Homo sapiens
  CDR3 for alpha chain variable domain of TCR clone 128291 (TRAV27, TRAJ35)
CAGADVGNVLHC

SEQ ID NO: 256582 - protein, 16 aa, Homo sapiens
  CDR3 for beta chain variable domain of TCR clone 128291 (TRBV6-1, TRBJ2-1)
CASILRQGSSYNEQFF

SEQ ID NO: 256583 - protein, 14 aa, Homo sapiens
  CDR3 for alpha chain variable domain of TCR clone 128292 (TRAV38-1, TRAJ29)
CAFITPSGNTPLVF

SEQ ID NO: 256584 - protein, 14 aa, Homo sapiens
  CDR3 for beta chain variable domain of TCR clone 128292 (TRBV18, TRBJ2-7)
CASSPRGGAYEQDF

SEQ ID NO: 256585 - protein, 12 aa, Homo sapiens
  CDR3 for alpha chain variable domain of TCR clone 128293 (TRAV8-4, TRAJ37)
CAVRSNTGKLIF

SEQ ID NO: 256586 - protein, 16 aa, Homo sapiens
  CDR3 for beta chain variable domain of TCR clone 128293 (TRBV7-2, TRBJ2-3)
CASSLVGEASTDTQYF

SEQ ID NO: 256587 - protein, 14 aa, Homo sapiens
  CDR3 for alpha chain variable domain of TCR clone 128294 (TRAV1-2, TRAJ16)
CAVNRFSDGQKLLF

SEQ ID NO: 256588 - protein, 13 aa, Homo sapiens
  CDR3 for beta chain variable domain of TCR clone 128294 (TRBV20-1, TRBJ1-1)
CSAGGGGNTEAFF

SEQ ID NO: 256589 - protein, 14 aa, Homo sapiens
  CDR3 for alpha chain variable domain of TCR clone 128295 (TRAV17, TRAJ6)
CATDASGGNYIPTF

SEQ ID NO: 256590 - protein, 19 aa, Homo sapiens
  CDR3 for beta chain variable domain of TCR clone 128295 (TRBV4-3, TRBJ2-7)
CASSQEFIGWQVTPYEQYF

SEQ ID NO: 256591 - protein, 11 aa, Homo sapiens
  CDR3 for alpha chain variable domain of TCR clone 128296 (TRAV2, TRAJ33)
CAVESNYQLIW

SEQ ID NO: 256592 - protein, 15 aa, Homo sapiens
  CDR3 for beta chain variable domain of TCR clone 128296 (TRBV19, TRBJ1-1)
CASTSGQIPNTEAFF

SEQ ID NO: 256593 - protein, 18 aa, Homo sapiens
  CDR3 for alpha chain variable domain of TCR clone 128297 (TRAV13-1, TRAJ52)
CAASKRSAGGTSYGKLTF

SEQ ID NO: 256594 - protein, 15 aa, Homo sapiens
  CDR3 for beta chain variable domain of TCR clone 128297 (TRBV7-9, TRBJ1-4)
CASSRTGGFNEKLFF

SEQ ID NO: 256595 - protein, 13 aa, Homo sapiens
  CDR3 for alpha chain variable domain of TCR clone 128298 (TRAV26-1, TRAJ33)
CIVRVEGNYQLIW

SEQ ID NO: 256596 - protein, 15 aa, Homo sapiens
  CDR3 for beta chain variable domain of TCR clone 128298 (TRBV5-1, TRBJ2-1)
CASSPPRAPYNEQFF

SEQ ID NO: 256597 - protein, 15 aa, Homo sapiens
  CDR3 for alpha chain variable domain of TCR clone 128299 (TRAV3, TRAJ3)
CAVRDRDSSASKIIF

SEQ ID NO: 256598 - protein, 14 aa, Homo sapiens
  CDR3 for beta chain variable domain of TCR clone 128299 (TRBV5-1, TRBJ2-3)
CASSPTGRIDTQYF

SEQ ID NO: 256599 - protein, 13 aa, Homo sapiens
  CDR3 for alpha chain variable domain of TCR clone 128300 (TRAV3, TRAJ27)
CAVRPLGAGKSTF

SEQ ID NO: 256600 - protein, 12 aa, Homo sapiens
  CDR3 for beta chain variable domain of TCR clone 128300 (TRBV28, TRBJ2-6)
CAIQAGANVLTF

SEQ ID NO: 256601 - protein, 14 aa, Homo sapiens
  CDR3 for alpha chain variable domain of TCR clone 128301 (TRAV12-2, TRAJ13)
CAVKKTGGYQKVTF

SEQ ID NO: 256602 - protein, 15 aa, Homo sapiens
  CDR3 for beta chain variable domain of TCR clone 128301 (TRBV7-9, TRBJ1-2)
CASSLDREPNYGYTF

SEQ ID NO: 256603 - protein, 14 aa, Homo sapiens
  CDR3 for alpha chain variable domain of TCR clone 128302 (TRAV8-3, TRAJ36)
CAAVGNNGANNLFF

SEQ ID NO: 256604 - protein, 12 aa, Homo sapiens
  CDR3 for beta chain variable domain of TCR clone 128302 (TRBV12-5, TRBJ2-5)
CASGQGVETQYF

SEQ ID NO: 256605 - protein, 15 aa, Homo sapiens
  CDR3 for alpha chain variable domain of TCR clone 128303 (TRAV27, TRAJ38)
CAGRFNAGNNRKLIW

SEQ ID NO: 256606 - protein, 15 aa, Homo sapiens
  CDR3 for beta chain variable domain of TCR clone 128303 (TRBV29-1, TRBJ2-1)
CSGRDRKSSYNEQFF

SEQ ID NO: 256607 - protein, 13 aa, Homo sapiens
  CDR3 for alpha chain variable domain of TCR clone 128304 (TRAV27, TRAJ49)
CAPRPYTGKQFYF

SEQ ID NO: 256608 - protein, 16 aa, Homo sapiens
  CDR3 for beta chain variable domain of TCR clone 128304 (TRBV4-1, TRBJ1-2)
CASSQDAGQVLYGYTF

SEQ ID NO: 256609 - protein, 15 aa, Homo sapiens
  CDR3 for alpha chain variable domain of TCR clone 128305 (TRAV12-1, TRAJ44)
CVVDEYTGTASKLTF

SEQ ID NO: 256610 - protein, 14 aa, Homo sapiens
  CDR3 for beta chain variable domain of TCR clone 128305 (TRBV5-1, TRBJ1-2)
CTSSLEPVNYGYTF

SEQ ID NO: 256611 - protein, 12 aa, Homo sapiens
  CDR3 for alpha chain variable domain of TCR clone 128306 (TRAV17, TRAJ12)
CAGGDSSYRLIF

SEQ ID NO: 256612 - protein, 12 aa, Homo sapiens
  CDR3 for beta chain variable domain of TCR clone 128306 (TRBV29-1, TRBJ1-1)
CSESDGNTEAFF

SEQ ID NO: 256613 - protein, 14 aa, Homo sapiens
  CDR3 for alpha chain variable domain of TCR clone 128307 (TRAV29/DV5, TRAJ45)
CAASFRGGADGLTF

SEQ ID NO: 256614 - protein, 11 aa, Homo sapiens
  CDR3 for beta chain variable domain of TCR clone 128307 (TRBV11-2, TRBJ2-2)
CASSLPGELFV

SEQ ID NO: 256615 - protein, 17 aa, Homo sapiens
  CDR3 for alpha chain variable domain of TCR clone 128308 (TRAV3, TRAJ6)
CAVSDGPRAGGSYIPTF

SEQ ID NO: 256616 - protein, 13 aa, Homo sapiens
  CDR3 for beta chain variable domain of TCR clone 128308 (TRBV27, TRBJ2-1)
CASRTLGVGEQFF

SEQ ID NO: 256617 - protein, 12 aa, Homo sapiens
  CDR3 for alpha chain variable domain of TCR clone 128309 (TRAV12-3, TRAJ17)
CAMTLTGNKLTF

SEQ ID NO: 256618 - protein, 16 aa, Homo sapiens
  CDR3 for beta chain variable domain of TCR clone 128309 (TRBV7-2, TRBJ2-1)
CASSLVGGPELNEQFF

SEQ ID NO: 256619 - protein, 16 aa, Homo sapiens
  CDR3 for alpha chain variable domain of TCR clone 128310 (TRAV12-1, TRAJ45)
CVVIRYSGGGADGLTF

SEQ ID NO: 256620 - protein, 12 aa, Homo sapiens
  CDR3 for beta chain variable domain of TCR clone 128310 (TRBV6-5, TRBJ2-2)
CASRQITGELFC

SEQ ID NO: 256621 - protein, 12 aa, Homo sapiens
  CDR3 for alpha chain variable domain of TCR clone 128311 (TRAV30, TRAJ43)
CGTEERGNDMRF

SEQ ID NO: 256622 - protein, 13 aa, Homo sapiens
  CDR3 for beta chain variable domain of TCR clone 128311 (TRBV19, TRBJ2-7)
CASSPRQSYEQYF

SEQ ID NO: 256623 - protein, 14 aa, Homo sapiens
  CDR3 for alpha chain variable domain of TCR clone 128312 (TRAV23/DV6, TRAJ42)
CAASYGGSQGNLIF

SEQ ID NO: 256624 - protein, 11 aa, Homo sapiens
  CDR3 for beta chain variable domain of TCR clone 128312 (TRBV24-1, TRBJ2-5)
CATSIGETQYF

SEQ ID NO: 256625 - protein, 14 aa, Homo sapiens
  CDR3 for alpha chain variable domain of TCR clone 128313 (TRAV35, TRAJ24)
CAGPRRDSWGNCSL

SEQ ID NO: 256626 - protein, 12 aa, Homo sapiens
  CDR3 for beta chain variable domain of TCR clone 128313 (TRBV12-4, TRBJ2-3)
CASSLGQDTQYF

SEQ ID NO: 256627 - protein, 16 aa, Homo sapiens
  CDR3 for alpha chain variable domain of TCR clone 128314 (TRAV30, TRAJ24)
CGTEIVDADSWGKFQF

SEQ ID NO: 256628 - protein, 13 aa, Homo sapiens
  CDR3 for beta chain variable domain of TCR clone 128314 (TRBV11-3, TRBJ2-5)
CASSSTGEETQYF

SEQ ID NO: 256629 - protein, 15 aa, Homo sapiens
  CDR3 for alpha chain variable domain of TCR clone 128315 (TRAV27, TRAJ38)
GAARRNAGNNRKLMW

SEQ ID NO: 256630 - protein, 13 aa, Homo sapiens
  CDR3 for beta chain variable domain of TCR clone 128315 (TRBV12-5, TRBJ2-3)
CASGDRQSDTQYF

SEQ ID NO: 256631 - protein, 14 aa, Homo sapiens
  CDR3 for alpha chain variable domain of TCR clone 128316 (TRAV13-1, TRAJ35)
CAASKGGFGNVLHC

SEQ ID NO: 256632 - protein, 14 aa, Homo sapiens
  CDR3 for beta chain variable domain of TCR clone 128316 (TRBV7-2, TRBJ1-2)
CASSQTGSTYGYTF

SEQ ID NO: 256633 - protein, 13 aa, Homo sapiens
  CDR3 for alpha chain variable domain of TCR clone 128317 (TRAV13-1, TRAJ5)
CAAEHTGRRALTF

SEQ ID NO: 256634 - protein, 13 aa, Homo sapiens
  CDR3 for beta chain variable domain of TCR clone 128317 (TRBV2, TRBJ1-4)
CASNRGTNENLFF

SEQ ID NO: 256635 - protein, 14 aa, Homo sapiens
  CDR3 for alpha chain variable domain of TCR clone 128318 (TRAV12-2, TRAJ4)
CAEDLSGGYNKLIF

SEQ ID NO: 256636 - protein, 13 aa, Homo sapiens
  CDR3 for beta chain variable domain of TCR clone 128318 (TRBV7-9, TRBJ1-2)
CASSLKQNYGCTF

SEQ ID NO: 256637 - protein, 16 aa, Homo sapiens
  CDR3 for alpha chain variable domain of TCR clone 128319 (TRAV23/DV6, TRAJ9)
CAASIGGNTGGFKTIS

SEQ ID NO: 256638 - protein, 14 aa, Homo sapiens
  CDR3 for beta chain variable domain of TCR clone 128319 (TRBV9, TRBJ2-7)
CASSVGVGSYEQYF

SEQ ID NO: 256639 - protein, 14 aa, Homo sapiens
  CDR3 for alpha chain variable domain of TCR clone 128320 (TRAV8-4, TRAJ13)
CAVTLSGGYQKVTF

SEQ ID NO: 256640 - protein, 20 aa, Homo sapiens
  CDR3 for beta chain variable domain of TCR clone 128320 (TRBV7-8, TRBJ2-2)
CASSHLFPGPTIHITGELFF

SEQ ID NO: 256641 - protein, 13 aa, Homo sapiens
  CDR3 for alpha chain variable domain of TCR clone 128321 (TRAV8-4, TRAJ48)
CAVSLFGNEKLTF

SEQ ID NO: 256642 - protein, 13 aa, Homo sapiens
  CDR3 for beta chain variable domain of TCR clone 128321 (TRBV7-9, TRBJ1-2)
CASSLKQNYGYTF

SEQ ID NO: 256643 - protein, 13 aa, Homo sapiens
  CDR3 for alpha chain variable domain of TCR clone 128322 (TRAV1-1, TRAJ31)
CASCLNNNARLMF

SEQ ID NO: 256644 - protein, 14 aa, Homo sapiens
  CDR3 for beta chain variable domain of TCR clone 128322 (TRBV4-1, TRBJ2-5)
CASSRSGSGETQYF

SEQ ID NO: 256645 - protein, 17 aa, Homo sapiens
  CDR3 for alpha chain variable domain of TCR clone 128323 (TRAV23/DV6, TRAJ58)
CAARLLRGETSGSRLTF

SEQ ID NO: 256646 - protein, 14 aa, Homo sapiens
  CDR3 for beta chain variable domain of TCR clone 128323 (TRBV6-1, TRBJ1-3)
CASVQGGGGNTIYF

SEQ ID NO: 256647 - protein, 18 aa, Homo sapiens
  CDR3 for alpha chain variable domain of TCR clone 128324 (TRAV21, TRAJ52)
CAVRPSPAGGTSYGKLTF

SEQ ID NO: 256648 - protein, 15 aa, Homo sapiens
  CDR3 for beta chain variable domain of TCR clone 128324 (TRBV11-2, TRBJ2-2)
CASSSDRVNAGELFF

SEQ ID NO: 256649 - protein, 11 aa, Homo sapiens
  CDR3 for alpha chain variable domain of TCR clone 128325 (TRAV21, TRAJ34)
CAVTNTDKLIF

SEQ ID NO: 256650 - protein, 16 aa, Homo sapiens
  CDR3 for beta chain variable domain of TCR clone 128325 (TRBV20-1, TRBJ1-4)
CSAPGQGLLTNERLFF

SEQ ID NO: 256651 - protein, 15 aa, Homo sapiens
  CDR3 for alpha chain variable domain of TCR clone 128326 (TRAV3, TRAJ5)
CAVRDRKTGRRALTF

SEQ ID NO: 256652 - protein, 15 aa, Homo sapiens
  CDR3 for beta chain variable domain of TCR clone 128326 (TRBV7-8, TRBJ2-1)
CASSLADSLYNEQCF

SEQ ID NO: 256653 - protein, 15 aa, Homo sapiens
  CDR3 for alpha chain variable domain of TCR clone 128327 (TRAV2, TRAJ15)
CAVEDRGQVGTALIF

SEQ ID NO: 256654 - protein, 13 aa, Homo sapiens
  CDR3 for beta chain variable domain of TCR clone 128327 (TRBV10-2, TRBJ2-7)
CASGASGGYEQYF

SEQ ID NO: 256655 - protein, 15 aa, Homo sapiens
  CDR3 for alpha chain variable domain of TCR clone 128328 (TRAV21, TRAJ40)
CAVRPQTSGTYKYIF

SEQ ID NO: 256656 - protein, 15 aa, Homo sapiens
  CDR3 for beta chain variable domain of TCR clone 128328 (TRBV7-9, TRBJ2-7)
CASSSGSPQPYEQYF

SEQ ID NO: 256657 - protein, 12 aa, Homo sapiens
  CDR3 for alpha chain variable domain of TCR clone 128329 (TRAV21, TRAJ8)
CALNTGFQKLVF

SEQ ID NO: 256658 - protein, 12 aa, Homo sapiens
  CDR3 for beta chain variable domain of TCR clone 128329 (TRBV12-4, TRBJ2-5)
CASSSAQETQYF

SEQ ID NO: 256659 - protein, 14 aa, Homo sapiens
  CDR3 for alpha chain variable domain of TCR clone 128330 (TRAV16, TRAJ31)
CALSGRNNNDRLMF

SEQ ID NO: 256660 - protein, 12 aa, Homo sapiens
  CDR3 for beta chain variable domain of TCR clone 128330 (TRBV11-2, TRBJ1-2)
CASSREGDGYTF

SEQ ID NO: 256661 - protein, 11 aa, Homo sapiens
  CDR3 for alpha chain variable domain of TCR clone 128331 (TRAV13-1, TRAJ39)
CASHAGNMLTF

SEQ ID NO: 256662 - protein, 14 aa, Homo sapiens
  CDR3 for beta chain variable domain of TCR clone 128331 (TRBV11-2, TRBJ1-5)
CASSLDRGRQPQNF

SEQ ID NO: 256663 - protein, 14 aa, Homo sapiens
  CDR3 for alpha chain variable domain of TCR clone 128332 (TRAV26-1, TRAJ34)
CIVIVAYNTDKPIF

SEQ ID NO: 256664 - protein, 15 aa, Homo sapiens
  CDR3 for beta chain variable domain of TCR clone 128332 (TRBV20-1, TRBJ2-7)
CSARVPAAYFYEQYF

SEQ ID NO: 256665 - protein, 14 aa, Homo sapiens
  CDR3 for alpha chain variable domain of TCR clone 128333 (TRAV12-3, TRAJ54)
CAMRVIQGAQKLVF

SEQ ID NO: 256666 - protein, 13 aa, Homo sapiens
  CDR3 for beta chain variable domain of TCR clone 128333 (TRBV19, TRBJ1-1)
CASSPSNGGEAFF

SEQ ID NO: 256667 - protein, 18 aa, Homo sapiens
  CDR3 for alpha chain variable domain of TCR clone 128334 (TRAV26-1, TRAJ23)
CIVRVGLEVWNQGGKLIF

SEQ ID NO: 256668 - protein, 19 aa, Homo sapiens
  CDR3 for beta chain variable domain of TCR clone 128334 (TRBV7-2, TRBJ1-5)
CASSLGHGTRSYSNQPQHF

SEQ ID NO: 256669 - protein, 13 aa, Homo sapiens
  CDR3 for alpha chain variable domain of TCR clone 128335 (TRAV8-3, TRAJ44)
CVVVPGTASKLTF

SEQ ID NO: 256670 - protein, 14 aa, Homo sapiens
  CDR3 for beta chain variable domain of TCR clone 128335 (TRBV11-2, TRBJ2-3)
CASSRLARTDTQYF

SEQ ID NO: 256671 - protein, 17 aa, Homo sapiens
  CDR3 for alpha chain variable domain of TCR clone 128336 (TRAV13-1, TRAJ28)
CAASPPYSGAGSYLLTF

SEQ ID NO: 256672 - protein, 12 aa, Homo sapiens
  CDR3 for beta chain variable domain of TCR clone 128336 (TRBV11-2, TRBJ2-2)
CASSLPTGELFF

SEQ ID NO: 256673 - protein, 12 aa, Homo sapiens
  CDR3 for alpha chain variable domain of TCR clone 128337 (TRAV4, TRAJ26)
CLVGDYGQNFVF

SEQ ID NO: 256674 - protein, 15 aa, Homo sapiens
  CDR3 for beta chain variable domain of TCR clone 128337 (TRBV7-2, TRBJ2-1)
CASSSGLAGGNEQFF

SEQ ID NO: 256675 - protein, 17 aa, Homo sapiens
  CDR3 for alpha chain variable domain of TCR clone 128338 (TRAV13-1, TRAJ52)
CAAGRNAGGTSYGKLTF

SEQ ID NO: 256676 - protein, 13 aa, Homo sapiens
  CDR3 for beta chain variable domain of TCR clone 128338 (TRBV7-2, TRBJ1-1)
CASNLRGAKVAFF

SEQ ID NO: 256677 - protein, 15 aa, Homo sapiens
  CDR3 for alpha chain variable domain of TCR clone 128339 (TRAV25, TRAJ10)
CAGPLLTGGGNKLTF

SEQ ID NO: 256678 - protein, 15 aa, Homo sapiens
  CDR3 for beta chain variable domain of TCR clone 128339 (TRBV20-1, TRBJ2-7)
CSAESGTSGAYEQYF

SEQ ID NO: 256679 - protein, 12 aa, Homo sapiens
  CDR3 for alpha chain variable domain of TCR clone 128340 (TRAV23/DV6, TRAJ57)
CAASSTLSQVVS

SEQ ID NO: 256680 - protein, 14 aa, Homo sapiens
  CDR3 for beta chain variable domain of TCR clone 128340 (TRBV25-1, TRBJ1-1)
CASTHLGGNTEAFF

SEQ ID NO: 256681 - protein, 13 aa, Homo sapiens
  CDR3 for alpha chain variable domain of TCR clone 128341 (TRAV13-2, TRAJ49)
CAETLHGGNQFYF

SEQ ID NO: 256682 - protein, 14 aa, Homo sapiens
  CDR3 for beta chain variable domain of TCR clone 128341 (TRBV4-2, TRBJ2-1)
CASGLDRAYNEQFF

SEQ ID NO: 256683 - protein, 12 aa, Homo sapiens
  CDR3 for alpha chain variable domain of TCR clone 128342 (TRAV13-1, TRAJ21)
CATTTNFNKFYF

SEQ ID NO: 256684 - protein, 14 aa, Homo sapiens
  CDR3 for beta chain variable domain of TCR clone 128342 (TRBV7-2, TRBJ2-7)
CASSPKTSFYEQYF

SEQ ID NO: 256685 - protein, 15 aa, Homo sapiens
  CDR3 for alpha chain variable domain of TCR clone 128343 (TRAV12-3, TRAJ6)
CAMSARTGGSYIPTF

SEQ ID NO: 256686 - protein, 16 aa, Homo sapiens
  CDR3 for beta chain variable domain of TCR clone 128343 (TRBV20-1, TRBJ1-2)
CSASMGQGVANYGYTF

SEQ ID NO: 256687 - protein, 15 aa, Homo sapiens
  CDR3 for alpha chain variable domain of TCR clone 128344 (TRAV4, TRAJ39)
CLVGPNNNAGNMLTF

SEQ ID NO: 256688 - protein, 15 aa, Homo sapiens
  CDR3 for beta chain variable domain of TCR clone 128344 (TRBV5-1, TRBJ2-1)
GASSPPRAPYNEQFF

SEQ ID NO: 256689 - protein, 14 aa, Homo sapiens
  CDR3 for alpha chain variable domain of TCR clone 128345 (TRAV12-3, TRAJ10)
SHLPMTGGGNKLTF

SEQ ID NO: 256690 - protein, 13 aa, Homo sapiens
  CDR3 for beta chain variable domain of TCR clone 128345 (TRBV7-6, TRBJ2-3)
CASSLAVGDTQYF

SEQ ID NO: 256691 - protein, 11 aa, Homo sapiens
  CDR3 for alpha chain variable domain of TCR clone 128346 (TRAV12-3, TRAJ16)
LTGGDGQKLLF

SEQ ID NO: 256692 - protein, 13 aa, Homo sapiens
  CDR3 for beta chain variable domain of TCR clone 128346 (TRBV12-4, TRBJ1-4)
CASATGHNEKLFF

SEQ ID NO: 256693 - protein, 14 aa, Homo sapiens
  CDR3 for alpha chain variable domain of TCR clone 128347 (TRAV12-1, TRAJ22)
CVAFSSGSARQLTF

SEQ ID NO: 256694 - protein, 12 aa, Homo sapiens
  CDR3 for beta chain variable domain of TCR clone 128347 (TRBV2, TRBJ2-7)
CASTYKTDEQYF

SEQ ID NO: 256695 - protein, 13 aa, Homo sapiens
  CDR3 for alpha chain variable domain of TCR clone 128348 (TRAV13-2, TRAJ48)
CAEIDFGNEKLTF

SEQ ID NO: 256696 - protein, 13 aa, Homo sapiens
  CDR3 for beta chain variable domain of TCR clone 128348 (TRBV7-9, TRBJ1-2)
CASSLKQNYGYTF

SEQ ID NO: 256697 - protein, 18 aa, Homo sapiens
  CDR3 for alpha chain variable domain of TCR clone 128349 (TRAV21, TRAJ52)
CAVRPSTAGGTSYGKLTF

SEQ ID NO: 256698 - protein, 13 aa, Homo sapiens
  CDR3 for beta chain variable domain of TCR clone 128349 (TRBV7-3, TRBJ1-1)
CASSQDWGAEAFF

SEQ ID NO: 256699 - protein, 13 aa, Homo sapiens
  CDR3 for alpha chain variable domain of TCR clone 128350 (TRAV17, TRAJ39)
CATVSNAGNMLTF

SEQ ID NO: 256700 - protein, 13 aa, Homo sapiens
  CDR3 for beta chain variable domain of TCR clone 128350 (TRBV7-3, TRBJ1-1)
CASSQDWGAEAFF

SEQ ID NO: 256701 - protein, 18 aa, Homo sapiens
  CDR3 for alpha chain variable domain of TCR clone 128351 (TRAV21, TRAJ52)
YAVRPSPAGGTSYGKLTF

SEQ ID NO: 256702 - protein, 14 aa, Homo sapiens
  CDR3 for beta chain variable domain of TCR clone 128351 (TRBV7-9, TRBJ2-1)
CASSSMVGFGEQFF

SEQ ID NO: 256703 - protein, 23 aa, Homo sapiens
  CDR3 for alpha chain variable domain of TCR clone 128352 (TRAV21, TRAJ13)
CAVPRSFWGLPESYLWNWTKLQV

SEQ ID NO: 256704 - protein, 14 aa, Homo sapiens
  CDR3 for beta chain variable domain of TCR clone 128352 (TRBV20-1, TRBJ2-7)
CSAKDRKGAYEQYF

SEQ ID NO: 256705 - protein, 21 aa, Homo sapiens
  CDR3 for alpha chain variable domain of TCR clone 128353 (TRAV3, TRAJ17)
CAVRARRGGRSCRQQADFWRR

SEQ ID NO: 256706 - protein, 11 aa, Homo sapiens
  CDR3 for beta chain variable domain of TCR clone 128353 (TRBV5-6, TRBJ2-5)
CASSLMGTQYF

SEQ ID NO: 256707 - protein, 13 aa, Homo sapiens
  CDR3 for alpha chain variable domain of TCR clone 128354 (TRAV27, TRAJ45)
CRSSGGGADGLTF

SEQ ID NO: 256708 - protein, 14 aa, Homo sapiens
  CDR3 for beta chain variable domain of TCR clone 128354 (TRBV4-1, TRBJ2-2)
CASSQAVNTGELFF

SEQ ID NO: 256709 - protein, 14 aa, Homo sapiens
  CDR3 for alpha chain variable domain of TCR clone 128355 (TRAV12-3, TRAJ42)
CAMNYGGSQGNLIF

SEQ ID NO: 256710 - protein, 15 aa, Homo sapiens
  CDR3 for beta chain variable domain of TCR clone 128355 (TRBV5-7, TRBJ1-5)
CASSYGKLWDQPQHL

SEQ ID NO: 256711 - protein, 15 aa, Homo sapiens
  CDR3 for alpha chain variable domain of TCR clone 128356 (TRAV26-1, TRAJ23)
CIVRVAGYPGGKLIF

SEQ ID NO: 256712 - protein, 18 aa, Homo sapiens
  CDR3 for beta chain variable domain of TCR clone 128356 (TRBV28, TRBJ2-1)
CASSSTSGRANSYNEQFF

SEQ ID NO: 256713 - protein, 15 aa, Homo sapiens
  CDR3 for alpha chain variable domain of TCR clone 128357 (TRAV8-3, TRAJ11)
CAVGLLNSGYSTLTF

SEQ ID NO: 256714 - protein, 16 aa, Homo sapiens
  CDR3 for beta chain variable domain of TCR clone 128357 (TRBV7-9, TRBJ1-2)
CASSLGSSSGEDGYTF

SEQ ID NO: 256715 - protein, 13 aa, Homo sapiens
  CDR3 for alpha chain variable domain of TCR clone 128358 (TRAV1-2, TRAJ20)
CAVVDRGDYKLSF

SEQ ID NO: 256716 - protein, 15 aa, Homo sapiens
  CDR3 for beta chain variable domain of TCR clone 128358 (TRBV7-9, TRBJ2-1)
CASSSVGGGRNEQFF

SEQ ID NO: 256717 - protein, 14 aa, Homo sapiens
  CDR3 for alpha chain variable domain of TCR clone 128359 (TRAV23/DV6, TRAJ22)
CAASVSGSARQLTF

SEQ ID NO: 256718 - protein, 16 aa, Homo sapiens
  CDR3 for beta chain variable domain of TCR clone 128359 (TRBV19, TRBJ2-2)
CASSFPGQVLAGELFF

SEQ ID NO: 256719 - protein, 13 aa, Homo sapiens
  CDR3 for alpha chain variable domain of TCR clone 128360 (TRAV2, TRAJ40)
CAVVTSGTYKYIL

SEQ ID NO: 256720 - protein, 14 aa, Homo sapiens
  CDR3 for beta chain variable domain of TCR clone 128360 (TRBV19, TRBJ2-1)
CASPTFVLSGEQSF

SEQ ID NO: 256721 - protein, 14 aa, Homo sapiens
  CDR3 for alpha chain variable domain of TCR clone 128361 (TRAV9-2, TRAJ39)
CALYIYNAGNMLTF

SEQ ID NO: 256722 - protein, 16 aa, Homo sapiens
  CDR3 for beta chain variable domain of TCR clone 128361 (TRBV28, TRBJ1-4)
CASSPPYRGRSEKLFF

SEQ ID NO: 256723 - protein, 14 aa, Homo sapiens
  CDR3 for alpha chain variable domain of TCR clone 128362 (TRAV2, TRAJ9)
CAVEDRSGGFKTIF

SEQ ID NO: 256724 - protein, 17 aa, Homo sapiens
  CDR3 for beta chain variable domain of TCR clone 128362 (TRBV7-7, TRBJ1-1)
CASIGDRPNLGVTEAFF

SEQ ID NO: 256725 - protein, 17 aa, Homo sapiens
  CDR3 for alpha chain variable domain of TCR clone 128363 (TRAV3, TRAJ42)
CAVRDRDYGGSQGNLIF

SEQ ID NO: 256726 - protein, 14 aa, Homo sapiens
  CDR3 for beta chain variable domain of TCR clone 128363 (TRBV10-2, TRBJ2-2)
CASSERSNTGELFF

SEQ ID NO: 256727 - protein, 13 aa, Homo sapiens
  CDR3 for alpha chain variable domain of TCR clone 128364 (TRAV3, TRAJ8)
CAVSFTGFQKLVF

SEQ ID NO: 256728 - protein, 15 aa, Homo sapiens
  CDR3 for beta chain variable domain of TCR clone 128364 (TRBV20-1, TRBJ2-7)
CSARDRVSGMDEQYF

SEQ ID NO: 256729 - protein, 13 aa, Homo sapiens
  CDR3 for alpha chain variable domain of TCR clone 128365 (TRAV29/DV5, TRAJ31)
CAASRNNNARPMF

SEQ ID NO: 256730 - protein, 12 aa, Homo sapiens
  CDR3 for beta chain variable domain of TCR clone 128365 (TRBV14, TRBJ2-5)
CASSHLKETQYF

SEQ ID NO: 256731 - protein, 13 aa, Homo sapiens
  CDR3 for alpha chain variable domain of TCR clone 128366 (TRAV3, TRAJ20)
CAVRDNPRYKLSF

SEQ ID NO: 256732 - protein, 16 aa, Homo sapiens
  CDR3 for beta chain variable domain of TCR clone 128366 (TRBV20-1, TRBJ2-7)
CSARAPGLALSYEQYF

SEQ ID NO: 256733 - protein, 16 aa, Homo sapiens
  CDR3 for alpha chain variable domain of TCR clone 128367 (TRAV3, TRAJ37)
CAVRVRSSGNTGKLIF

SEQ ID NO: 256734 - protein, 11 aa, Homo sapiens
  CDR3 for beta chain variable domain of TCR clone 128367 (TRBV11-2, TRBJ2-2)
CASSLPGELFF

SEQ ID NO: 256735 - protein, 13 aa, Homo sapiens
  CDR3 for alpha chain variable domain of TCR clone 128368 (TRAV9-2, TRAJ53)
GALSGGSNYKLTF

SEQ ID NO: 256736 - protein, 17 aa, Homo sapiens
  CDR3 for beta chain variable domain of TCR clone 128368 (TRBV11-2, TRBJ2-1)
CASSLYPPGVEYNEQFF

SEQ ID NO: 256737 - protein, 14 aa, Homo sapiens
  CDR3 for alpha chain variable domain of TCR clone 128369 (TRAV1-2, TRAJ8)
CAVREDTGFQQLVF

SEQ ID NO: 256738 - protein, 14 aa, Homo sapiens
  CDR3 for beta chain variable domain of TCR clone 128369 (TRBV15, TRBJ2-3)
CATRSGTSTDTQYF

SEQ ID NO: 256739 - protein, 14 aa, Homo sapiens
  CDR3 for alpha chain variable domain of TCR clone 128370 (TRAV26-1, TRAJ22)
CIVRVYGSARQLTI

SEQ ID NO: 256740 - protein, 17 aa, Homo sapiens
  CDR3 for beta chain variable domain of TCR clone 128370 (TRBV7-3, TRBJ2-3)
CASSPGGLAGFGDTQYF

SEQ ID NO: 256741 - protein, 12 aa, Homo sapiens
  CDR3 for alpha chain variable domain of TCR clone 128371 (TRAV16, TRAJ49)
CALNEGGNQFYF

SEQ ID NO: 256742 - protein, 16 aa, Homo sapiens
  CDR3 for beta chain variable domain of TCR clone 128371 (TRBV7-3, TRBJ2-2)
CASSLKRGTLTGELFF

SEQ ID NO: 256743 - protein, 13 aa, Homo sapiens
  CDR3 for alpha chain variable domain of TCR clone 128372 (TRAV12-3, TRAJ33)
CAMSVNSNYQLIW

SEQ ID NO: 256744 - protein, 12 aa, Homo sapiens
  CDR3 for beta chain variable domain of TCR clone 128372 (TRBV12-4, TRBJ1-2)
CASSFIWLNLRF

SEQ ID NO: 256745 - protein, 11 aa, Homo sapiens
  CDR3 for alpha chain variable domain of TCR clone 128373 (TRAV12-1, TRAJ21)
CVVNNFNKFYF

SEQ ID NO: 256746 - protein, 17 aa, Homo sapiens
  CDR3 for beta chain variable domain of TCR clone 128373 (TRBV7-8, TRBJ2-1)
CARSPPTGTLAYNEQFF

SEQ ID NO: 256747 - protein, 13 aa, Homo sapiens
  CDR3 for alpha chain variable domain of TCR clone 128374 (TRAV12-3, TRAJ13)
CAMTSGGYQKVTF

SEQ ID NO: 256748 - protein, 20 aa, Homo sapiens
  CDR3 for beta chain variable domain of TCR clone 128374 (TRBV28, TRBJ2-1)
CASTPIGRSPGLAGGNEQFF

SEQ ID NO: 256749 - protein, 11 aa, Homo sapiens
  CDR3 for alpha chain variable domain of TCR clone 128375 (TRAV12-3, TRAJ27)
CAMASTGKSTF

SEQ ID NO: 256750 - protein, 13 aa, Homo sapiens
  CDR3 for beta chain variable domain of TCR clone 128375 (TRBV20-1, TRBJ1-1)
CSARVGGNTEAFF

SEQ ID NO: 256751 - protein, 14 aa, Homo sapiens
  CDR3 for alpha chain variable domain of TCR clone 128376 (TRAV1-2, TRAJ16)
CAVNRFSDGQKLLF

SEQ ID NO: 256752 - protein, 14 aa, Homo sapiens
  CDR3 for beta chain variable domain of TCR clone 128376 (TRBV4-1, TRBJ2-2)
CASSQAVNTGDLFF

SEQ ID NO: 256753 - protein, 15 aa, Homo sapiens
  CDR3 for alpha chain variable domain of TCR clone 128377 (TRAV12-2, TRAJ53)
CAVNGGGGSNYKRTF

SEQ ID NO: 256754 - protein, 17 aa, Homo sapiens
  CDR3 for beta chain variable domain of TCR clone 128377 (TRBV7-3, TRBJ2-3)
RASSLMKRMRGADTQYF

SEQ ID NO: 256755 - protein, 13 aa, Homo sapiens
  CDR3 for alpha chain variable domain of TCR clone 128378 (TRAV21, TRAJ27)
CAALNTNAGKSTF

SEQ ID NO: 256756 - protein, 15 aa, Homo sapiens
  CDR3 for beta chain variable domain of TCR clone 128378 (TRBV5-8, TRBJ1-5)
CASSPRGHGNQPQHF

SEQ ID NO: 256757 - protein, 15 aa, Homo sapiens
  CDR3 for alpha chain variable domain of TCR clone 128379 (TRAV13-1, TRAJ17)
CAANIERAAGNKLTF

SEQ ID NO: 256758 - protein, 12 aa, Homo sapiens
  CDR3 for beta chain variable domain of TCR clone 128379 (TRBV5-7, TRBJ1-1)
CASSLGRGKAFF

SEQ ID NO: 256759 - protein, 19 aa, Homo sapiens
  CDR3 for alpha chain variable domain of TCR clone 128380 (TRAV13-1, TRAJ52)
CAASPYQNAGGTSYGKLTF

SEQ ID NO: 256760 - protein, 13 aa, Homo sapiens
  CDR3 for beta chain variable domain of TCR clone 128380 (TRBV12-4, TRBJ1-2)
CASSLRQGKGYTF

SEQ ID NO: 256761 - protein, 11 aa, Homo sapiens
  CDR3 for alpha chain variable domain of TCR clone 128381 (TRAV1-1, TRAJ23)
CAVRQGGKLIF

SEQ ID NO: 256762 - protein, 15 aa, Homo sapiens
  CDR3 for beta chain variable domain of TCR clone 128381 (TRBV18, TRBJ1-1)
CASSPRQGENTEAFF

SEQ ID NO: 256763 - protein, 16 aa, Homo sapiens
  CDR3 for alpha chain variable domain of TCR clone 128382 (TRAV30, TRAJ24)
CGTEIVDADSWGKFQF

SEQ ID NO: 256764 - protein, 12 aa, Homo sapiens
  CDR3 for beta chain variable domain of TCR clone 128382 (TRBV11-2, TRBJ2-2)
CASSLPAGELFF

SEQ ID NO: 256765 - protein, 14 aa, Homo sapiens
  CDR3 for alpha chain variable domain of TCR clone 128383 (TRAV4, TRAJ9)
CLVGSGTGGFKTIF

SEQ ID NO: 256766 - protein, 17 aa, Homo sapiens
  CDR3 for beta chain variable domain of TCR clone 128383 (TRBV7-7, TRBJ2-2)
CASSLPPRTPNTGELFF

SEQ ID NO: 256767 - protein, 15 aa, Homo sapiens
  CDR3 for alpha chain variable domain of TCR clone 128384 (TRAV3, TRAJ5)
CAVRDLDTGRRALTF

SEQ ID NO: 256768 - protein, 16 aa, Homo sapiens
  CDR3 for beta chain variable domain of TCR clone 128384 (TRBV4-2, TRBJ2-1)
CASSQDGTGGYNEQFF

SEQ ID NO: 256769 - protein, 11 aa, Homo sapiens
  CDR3 for alpha chain variable domain of TCR clone 128385 (TRAV12-2, TRAJ43)
CASPIGNDMRF

SEQ ID NO: 256770 - protein, 18 aa, Homo sapiens
  CDR3 for beta chain variable domain of TCR clone 128385 (TRBV4-1, TRBJ1-5)
CASSQDPRGQGLNQPQHF

SEQ ID NO: 256771 - protein, 15 aa, Homo sapiens
  CDR3 for alpha chain variable domain of TCR clone 128386 (TRAV23/DV6, TRAJ18)
CAARYRGPTLGRLYF

SEQ ID NO: 256772 - protein, 10 aa, Homo sapiens
  CDR3 for beta chain variable domain of TCR clone 128386 (TRBV24-1, TRBJ2-2)
CATSDDGDTP

SEQ ID NO: 256773 - protein, 14 aa, Homo sapiens
  CDR3 for alpha chain variable domain of TCR clone 128387 (TRAV2, TRAJ9)
CAVEDRSGGFKTIF

SEQ ID NO: 256774 - protein, 16 aa, Homo sapiens
  CDR3 for beta chain variable domain of TCR clone 128387 (TRBV7-3, TRBJ2-1)
CASSLEGYRSYKEQFF

SEQ ID NO: 256775 - protein, 13 aa, Homo sapiens
  CDR3 for alpha chain variable domain of TCR clone 128388 (TRAV21, TRAJ57)
CAVTQGGSEKLVF

SEQ ID NO: 256776 - protein, 15 aa, Homo sapiens
  CDR3 for beta chain variable domain of TCR clone 128388 (TRBV27, TRBJ2-1)
CASSNGGGSSNEQFF

SEQ ID NO: 256777 - protein, 13 aa, Homo sapiens
  CDR3 for alpha chain variable domain of TCR clone 128389 (TRAV35, TRAJ22)
CAGLSGSARQLTF

SEQ ID NO: 256778 - protein, 16 aa, Homo sapiens
  CDR3 for beta chain variable domain of TCR clone 128389 (TRBV7-9, TRBJ2-1)
CASSLFLTGQGNEQFF

SEQ ID NO: 256779 - protein, 15 aa, Homo sapiens
  CDR3 for alpha chain variable domain of TCR clone 128390 (TRAV17, TRAJ4)
CATGTWSGGYNKLIF

SEQ ID NO: 256780 - protein, 13 aa, Homo sapiens
  CDR3 for beta chain variable domain of TCR clone 128390 (TRBV6-6, TRBJ2-7)
CASSPEHLAEQYF

SEQ ID NO: 256781 - protein, 15 aa, Homo sapiens
  CDR3 for alpha chain variable domain of TCR clone 128391 (TRAV26-1, TRAJ44)
CIVRIGTGTAGKLTF

SEQ ID NO: 256782 - protein, 15 aa, Homo sapiens
  CDR3 for beta chain variable domain of TCR clone 128391 (TRBV7-6, TRBJ2-1)
CASSSLAGEGNEQFF

SEQ ID NO: 256783 - protein, 15 aa, Homo sapiens
  CDR3 for alpha chain variable domain of TCR clone 128392 (TRAV38-2/DV8, TRAJ47)
CAYRSAKGYGNKLVF

SEQ ID NO: 256784 - protein, 13 aa, Homo sapiens
  CDR3 for beta chain variable domain of TCR clone 128392 (TRBV12-4, TRBJ1-2)
CASSLRQGKGYTF

SEQ ID NO: 256785 - protein, 12 aa, Homo sapiens
  CDR3 for alpha chain variable domain of TCR clone 128393 (TRAV20, TRAJ34)
CAVKDNTDKLIF

SEQ ID NO: 256786 - protein, 14 aa, Homo sapiens
  CDR3 for beta chain variable domain of TCR clone 128393 (TRBV7-9, TRBJ2-7)
CACSRPGGPYGQYF

SEQ ID NO: 256787 - protein, 14 aa, Homo sapiens
  CDR3 for alpha chain variable domain of TCR clone 128394 (TRAV29/DV5, TRAJ36)
CAARRKTGANNLFF

SEQ ID NO: 256788 - protein, 16 aa, Homo sapiens
  CDR3 for beta chain variable domain of TCR clone 128394 (TRBV10-3, TRBJ2-1)
CAISGVGDGGGGEQFF

SEQ ID NO: 256789 - protein, 14 aa, Homo sapiens
  CDR3 for alpha chain variable domain of TCR clone 128395 (TRAV26-1, TRAJ39)
CIVRGSRAGNMLTF

SEQ ID NO: 256790 - protein, 15 aa, Homo sapiens
  CDR3 for beta chain variable domain of TCR clone 128395 (TRBV7-9, TRBJ1-5)
CGSSQGHQPNQPQHF

SEQ ID NO: 256791 - protein, 12 aa, Homo sapiens
  CDR3 for alpha chain variable domain of TCR clone 128396 (TRAV35, TRAJ53)
CAGLGSNYKLTF

SEQ ID NO: 256792 - protein, 12 aa, Homo sapiens
  CDR3 for beta chain variable domain of TCR clone 128396 (TRBV7-8, TRBJ2-7)
CASSLGDREQYF

SEQ ID NO: 256793 - protein, 13 aa, Homo sapiens
  CDR3 for alpha chain variable domain of TCR clone 128397 (TRAV21, TRAJ20)
CAVGVFADYKLSF

SEQ ID NO: 256794 - protein, 15 aa, Homo sapiens
  CDR3 for beta chain variable domain of TCR clone 128397 (TRBV11-3, TRBJ2-3)
CASLKDGREGDTQYF

SEQ ID NO: 256795 - protein, 12 aa, Homo sapiens
  CDR3 for alpha chain variable domain of TCR clone 128398 (TRAV27, TRAJ36)
ASTPAGANNLFF

SEQ ID NO: 256796 - protein, 13 aa, Homo sapiens
  CDR3 for beta chain variable domain of TCR clone 128398 (TRBV7-9, TRBJ2-3)
CASSPGSTDTQYV

SEQ ID NO: 256797 - protein, 14 aa, Homo sapiens
  CDR3 for alpha chain variable domain of TCR clone 128399 (TRAV8-4, TRAJ8)
CAVSLTTGFQKLVF

SEQ ID NO: 256798 - protein, 13 aa, Homo sapiens
  CDR3 for beta chain variable domain of TCR clone 128399 (TRBV7-9, TRBJ2-3)
CASSPGSTDTQYF

SEQ ID NO: 256799 - protein, 11 aa, Homo sapiens
  CDR3 for alpha chain variable domain of TCR clone 128400 (TRAV3, TRAJ21)
RAVGNFNKFYF

SEQ ID NO: 256800 - protein, 14 aa, Homo sapiens
  CDR3 for beta chain variable domain of TCR clone 128400 (TRBV12-5, TRBJ2-5)
CASGSRTHQETQYF

SEQ ID NO: 256801 - protein, 14 aa, Homo sapiens
  CDR3 for alpha chain variable domain of TCR clone 128401 (TRAV12-2, TRAJ13)
CAVKKTGGYQKVTF

SEQ ID NO: 256802 - protein, 15 aa, Homo sapiens
  CDR3 for beta chain variable domain of TCR clone 128401 (TRBV7-8, TRBJ2-1)
CASSLADSLYNEQFF

SEQ ID NO: 256803 - protein, 11 aa, Homo sapiens
  CDR3 for alpha chain variable domain of TCR clone 128402 (TRAV1-2, TRAJ31)
CAVNNNARLMF

SEQ ID NO: 256804 - protein, 15 aa, Homo sapiens
  CDR3 for beta chain variable domain of TCR clone 128402 (TRBV28, TRBJ2-1)
CGSSIIAGGRSEQFF

SEQ ID NO: 256805 - protein, 13 aa, Homo sapiens
  CDR3 for alpha chain variable domain of TCR clone 128403 (TRAV21, TRAJ27)
CAARPGNAGKSTF

SEQ ID NO: 256806 - protein, 16 aa, Homo sapiens
  CDR3 for beta chain variable domain of TCR clone 128403 (TRBV5-4, TRBJ2-3)
CASQQPGAGGADTQYF

SEQ ID NO: 256807 - protein, 11 aa, Homo sapiens
  CDR3 for alpha chain variable domain of TCR clone 128404 (TRAV12-3, TRAJ43)
CAMSVSNDMRF

SEQ ID NO: 256808 - protein, 16 aa, Homo sapiens
  CDR3 for beta chain variable domain of TCR clone 128404 (TRBV10-3, TRBJ2-1)
CAISLTSGNSYNEQFF

SEQ ID NO: 256809 - protein, 14 aa, Homo sapiens
  CDR3 for alpha chain variable domain of TCR clone 128405 (TRAV8-4, TRAJ13)
CAVTLSGGYQKVTF

SEQ ID NO: 256810 - protein, 14 aa, Homo sapiens
  CDR3 for beta chain variable domain of TCR clone 128405 (TRBV7-9, TRBJ2-1)
CASSPRDSLYEQFF

SEQ ID NO: 256811 - protein, 16 aa, Homo sapiens
  CDR3 for alpha chain variable domain of TCR clone 128406 (TRAV30, TRAJ24)
CGTEIVDAYSWGKFQF

SEQ ID NO: 256812 - protein, 15 aa, Homo sapiens
  CDR3 for beta chain variable domain of TCR clone 128406 (TRBV7-9, TRBJ1-4)
CASSARTGGNEKLFF

SEQ ID NO: 256813 - protein, 14 aa, Homo sapiens
  CDR3 for alpha chain variable domain of TCR clone 128407 (TRAV17, TRAJ39)
CATDPVRAGNMITF

SEQ ID NO: 256814 - protein, 15 aa, Homo sapiens
  CDR3 for beta chain variable domain of TCR clone 128407 (TRBV13, TRBJ1-5)
CASSFGQGGVQPQHF

SEQ ID NO: 256815 - protein, 23 aa, Homo sapiens
  CDR3 for alpha chain variable domain of TCR clone 128408 (TRAV30, TRAJ29)
PAQLLRNLLLWHRAFSGNTPIVF

SEQ ID NO: 256816 - protein, 15 aa, Homo sapiens
  CDR3 for beta chain variable domain of TCR clone 128408 (TRBV5-1, TRBJ2-2)
CASSLFGQNTGELFF

SEQ ID NO: 256817 - protein, 17 aa, Homo sapiens
  CDR3 for alpha chain variable domain of TCR clone 128409 (TRAV26-1, TRAJ37)
CIVRVITVSSNTGKLIF

SEQ ID NO: 256818 - protein, 14 aa, Homo sapiens
  CDR3 for beta chain variable domain of TCR clone 128409 (TRBV7-7, TRBJ2-2)
CATRQDSDAGELFF

SEQ ID NO: 256819 - protein, 16 aa, Homo sapiens
  CDR3 for alpha chain variable domain of TCR clone 128410 (TRAV12-3, TRAJ53)
CAMSPGSGGSNYKLTF

SEQ ID NO: 256820 - protein, 17 aa, Homo sapiens
  CDR3 for beta chain variable domain of TCR clone 128410 (TRBV11-2, TRBJ2-1)
CASSLYHPGVEYNEQFF

SEQ ID NO: 256821 - protein, 16 aa, Homo sapiens
  CDR3 for alpha chain variable domain of TCR clone 128411 (TRAV30, TRAJ24)
CGTEMVDADSWGKFQV

SEQ ID NO: 256822 - protein, 14 aa, Homo sapiens
  CDR3 for beta chain variable domain of TCR clone 128411 (TRBV12-5, TRBJ2-5)
CASGSRTHQETQYF

SEQ ID NO: 256823 - protein, 15 aa, Homo sapiens
  CDR3 for alpha chain variable domain of TCR clone 128412 (TRAV26-2, TRAJ50)
CILRDEETSYDKVIF

SEQ ID NO: 256824 - protein, 15 aa, Homo sapiens
  CDR3 for beta chain variable domain of TCR clone 128412 (TRBV28, TRBJ2-4)
CAAGSGTLLMGIQYF

SEQ ID NO: 256825 - protein, 15 aa, Homo sapiens
  CDR3 for alpha chain variable domain of TCR clone 128413 (TRAV12-2, TRAJ48)
CAAQLSNFGNEKLTF

SEQ ID NO: 256826 - protein, 12 aa, Homo sapiens
  CDR3 for beta chain variable domain of TCR clone 128413 (TRBV11-2, TRBJ2-2)
CASSLGGGELFF

SEQ ID NO: 256827 - protein, 14 aa, Homo sapiens
  CDR3 for alpha chain variable domain of TCR clone 128414 (TRAV21, TRAJ21)
CAVGVEDNFNKFYF

SEQ ID NO: 256828 - protein, 11 aa, Homo sapiens
  CDR3 for beta chain variable domain of TCR clone 128414 (TRBV23-1, TRBJ2-7)
SSSGTGLEQYF

SEQ ID NO: 256829 - protein, 13 aa, Homo sapiens
  CDR3 for alpha chain variable domain of TCR clone 128415 (TRAV2, TRAJ15)
CAVASQAGTALIF

SEQ ID NO: 256830 - protein, 17 aa, Homo sapiens
  CDR3 for beta chain variable domain of TCR clone 128415 (TRBV7-3, TRBJ2-3)
CASSPGGLAGFGDTQYF

SEQ ID NO: 256831 - protein, 13 aa, Homo sapiens
  CDR3 for alpha chain variable domain of TCR clone 128416 (TRAV5, TRAJ30)
CAEIANRNDKIIF

SEQ ID NO: 256832 - protein, 14 aa, Homo sapiens
  CDR3 for beta chain variable domain of TCR clone 128416 (TRBV4-1, TRBJ2-2)
CASSQAVNTGELFF

SEQ ID NO: 256833 - protein, 17 aa, Homo sapiens
  CDR3 for alpha chain variable domain of TCR clone 128417 (TRAV13-1, TRAJ31)
CAPRDRLMFGDGTQPVV

SEQ ID NO: 256834 - protein, 12 aa, Homo sapiens
  CDR3 for beta chain variable domain of TCR clone 128417 (TRBV7-9, TRBJ2-7)
CASSLEGYEQYF

SEQ ID NO: 256835 - protein, 13 aa, Homo sapiens
  CDR3 for alpha chain variable domain of TCR clone 128418 (TRAV13-1, TRAJ39)
CASSIWAGNMLTF

SEQ ID NO: 256836 - protein, 15 aa, Homo sapiens
  CDR3 for beta chain variable domain of TCR clone 128418 (TRBV7-9, TRBJ1-1)
CASSLLEQGGTEAFF

SEQ ID NO: 256837 - protein, 11 aa, Homo sapiens
  CDR3 for alpha chain variable domain of TCR clone 128419 (TRAV1-2, TRAJ40)
CAVPGTYKYIF

SEQ ID NO: 256838 - protein, 14 aa, Homo sapiens
  CDR3 for beta chain variable domain of TCR clone 128419 (TRBV12-5, TRBJ2-5)
CASGSRTHQETQYF

SEQ ID NO: 256839 - protein, 12 aa, Homo sapiens
  CDR3 for alpha chain variable domain of TCR clone 128420 (TRAV3, TRAJ34)
CAVLGNTDKLIF

SEQ ID NO: 256840 - protein, 15 aa, Homo sapiens
  CDR3 for beta chain variable domain of TCR clone 128420 (TRBV19, TRBJ1-2)
CASSVGQVLNYGYTF

SEQ ID NO: 256841 - protein, 14 aa, Homo sapiens
  CDR3 for alpha chain variable domain of TCR clone 128421 (TRAV17, TRAJ39)
CATDPVRAGNMLTF

SEQ ID NO: 256842 - protein, 15 aa, Homo sapiens
  CDR3 for beta chain variable domain of TCR clone 128421 (TRBV13, TRBJ1-5)
CASSFGQGGVQPQQF

SEQ ID NO: 256843 - protein, 15 aa, Homo sapiens
  CDR3 for alpha chain variable domain of TCR clone 128422 (TRAV8-3, TRAJ23)
CAVGDRNNQGGKLIF

SEQ ID NO: 256844 - protein, 22 aa, Homo sapiens
  CDR3 for beta chain variable domain of TCR clone 128422 (TRBV29-1, TRBJ2-5)
TVSNMSPEDSSIYLCSAGTQYF

SEQ ID NO: 256845 - protein, 11 aa, Homo sapiens
  CDR3 for alpha chain variable domain of TCR clone 128423 (TRAV1-2, TRAJ20)
CAVSNDYKLSF

SEQ ID NO: 256846 - protein, 13 aa, Homo sapiens
  CDR3 for beta chain variable domain of TCR clone 128423 (TRBV7-9, TRBJ1-2)
CASSVKQNYGYTF

SEQ ID NO: 256847 - protein, 11 aa, Homo sapiens
  CDR3 for alpha chain variable domain of TCR clone 128424 (TRAV3, TRAJ21)
CAVGNFNKLYF

SEQ ID NO: 256848 - protein, 15 aa, Homo sapiens
  CDR3 for beta chain variable domain of TCR clone 128424 (TRBV5-1, TRBJ2-1)
CASSLVANSYNEQFF

SEQ ID NO: 256849 - protein, 16 aa, Homo sapiens
  CDR3 for alpha chain variable domain of TCR clone 128425 (TRAV16, TRAJ4)
CALSRMFSGGYNKLIF

SEQ ID NO: 256850 - protein, 14 aa, Homo sapiens
  CDR3 for beta chain variable domain of TCR clone 128425 (TRBV7-2, TRBJ2-7)
CASRSQGAAYEQYF

SEQ ID NO: 256851 - protein, 12 aa, Homo sapiens
  CDR3 for alpha chain variable domain of TCR clone 128426 (TRAV21, TRAJ13)
PGPSGGYQKVTF

SEQ ID NO: 256852 - protein, 13 aa, Homo sapiens
  CDR3 for beta chain variable domain of TCR clone 128426 (TRBV20-1, TRBJ2-7)
QCQRQKGAYEQYF

SEQ ID NO: 256853 - protein, 16 aa, Homo sapiens
  CDR3 for alpha chain variable domain of TCR clone 128427 (TRAV38-1, TRAJ32)
CAFMPFLGGSTNKLIF

SEQ ID NO: 256854 - protein, 13 aa, Homo sapiens
  CDR3 for beta chain variable domain of TCR clone 128427 (TRBV7-9, TRBJ2-7)
CASSFAGAYEQYF

SEQ ID NO: 256855 - protein, 14 aa, Homo sapiens
  CDR3 for alpha chain variable domain of TCR clone 128428 (TRAV12-3, TRAJ42)
CAMNYGGSQGNLIF

SEQ ID NO: 256856 - protein, 15 aa, Homo sapiens
  CDR3 for beta chain variable domain of TCR clone 128428 (TRBV5-7, TRBJ1-5)
CASSYGKLWDQPQHC

SEQ ID NO: 256857 - protein, 11 aa, Homo sapiens
  CDR3 for alpha chain variable domain of TCR clone 128429 (TRAV3, TRAJ21)
CAVGNFNKFYF

SEQ ID NO: 256858 - protein, 16 aa, Homo sapiens
  CDR3 for beta chain variable domain of TCR clone 128429 (TRBV6-1, TRBJ2-1)
CASILRQGSSYNEQFF

SEQ ID NO: 256859 - protein, 11 aa, Homo sapiens
  CDR3 for alpha chain variable domain of TCR clone 128430 (TRAV1-1, TRAJ23)
CAVRQGGKLIF

SEQ ID NO: 256860 - protein, 17 aa, Homo sapiens
  CDR3 for beta chain variable domain of TCR clone 128430 (TRBV25-1, TRBJ2-5)
CASSRRGGRGGQETQYF

SEQ ID NO: 256861 - protein, 19 aa, Homo sapiens
  CDR3 for alpha chain variable domain of TCR clone 128431 (TRAV26-1, TRAJ42)
CVLLRRQTYYGGSQGNLIF

SEQ ID NO: 256862 - protein, 16 aa, Homo sapiens
  CDR3 for beta chain variable domain of TCR clone 128431 (TRBV7-3, TRBJ2-2)
CASSLKRGTLPGELFF

SEQ ID NO: 256863 - protein, 13 aa, Homo sapiens
  CDR3 for alpha chain variable domain of TCR clone 128432 (TRAV2, TRAJ40)
CAVVTSGTYKYIF

SEQ ID NO: 256864 - protein, 14 aa, Homo sapiens
  CDR3 for beta chain variable domain of TCR clone 128432 (TRBV20-1, TRBJ2-7)
CSAKRGRSSYEQYF

SEQ ID NO: 256865 - protein, 10 aa, Homo sapiens
  CDR3 for alpha chain variable domain of TCR clone 128433 (TRAV1-2, TRAJ23)
CAGQGGELIF

SEQ ID NO: 256866 - protein, 16 aa, Homo sapiens
  CDR3 for beta chain variable domain of TCR clone 128433 (TRBV11-2, TRBJ1-1)
CASSLRQGGEHSKAFF

SEQ ID NO: 256867 - protein, 12 aa, Homo sapiens
  CDR3 for alpha chain variable domain of TCR clone 128434 (TRAV25, TRAJ11)
CAGALGYSTLTF

SEQ ID NO: 256868 - protein, 14 aa, Homo sapiens
  CDR3 for beta chain variable domain of TCR clone 128434 (TRBV5-8, TRBJ2-3)
CASSLGQGTDTQYF

SEQ ID NO: 256869 - protein, 14 aa, Homo sapiens
  CDR3 for alpha chain variable domain of TCR clone 128435 (TRAV8-4, TRAJ13)
CAVTLSGGYQKVTF

SEQ ID NO: 256870 - protein, 15 aa, Homo sapiens
  CDR3 for beta chain variable domain of TCR clone 128435 (TRBV7-9, TRBJ2-2)
CASGPLDTFPGELFF

SEQ ID NO: 256871 - protein, 16 aa, Homo sapiens
  CDR3 for alpha chain variable domain of TCR clone 128436 (TRAV30, TRAJ24)
CGTEIVDADSWGKFQF

SEQ ID NO: 256872 - protein, 16 aa, Homo sapiens
  CDR3 for beta chain variable domain of TCR clone 128436 (TRBV7-2, TRBJ2-6)
CASSERRASGANVLTF

SEQ ID NO: 256873 - protein, 12 aa, Homo sapiens
  CDR3 for alpha chain variable domain of TCR clone 128437 (TRAV17, TRAJ20)
CATDRYDYKLSF

SEQ ID NO: 256874 - protein, 14 aa, Homo sapiens
  CDR3 for beta chain variable domain of TCR clone 128437 (TRBV19, TRBJ2-1)
CASPTVVLSGEQFF

SEQ ID NO: 256875 - protein, 10 aa, Homo sapiens
  CDR3 for alpha chain variable domain of TCR clone 128438 (TRAV23/DV6, TRAJ43)
CAAAVAALEK

SEQ ID NO: 256876 - protein, 13 aa, Homo sapiens
  CDR3 for beta chain variable domain of TCR clone 128438 (TRBV12-4, TRBJ1-2)
CASSLRQGKGYTF

SEQ ID NO: 256877 - protein, 15 aa, Homo sapiens
  CDR3 for alpha chain variable domain of TCR clone 128439 (TRAV26-1, TRAJ29)
CIVRVEGSGNTPLVF

SEQ ID NO: 256878 - protein, 17 aa, Homo sapiens
  CDR3 for beta chain variable domain of TCR clone 128439 (TRBV7-3, TRBJ2-3)
CASSLMKRMRGADTQYF

SEQ ID NO: 256879 - protein, 19 aa, Homo sapiens
  CDR3 for alpha chain variable domain of TCR clone 128440 (TRAV26-1, TRAJ28)
CIVRVAHAYSGAGSYQLPF

SEQ ID NO: 256880 - protein, 17 aa, Homo sapiens
  CDR3 for beta chain variable domain of TCR clone 128440 (TRBV4-1, TRBJ1-4)
CASSQEGPRGVEEKLFF

SEQ ID NO: 256881 - protein, 10 aa, Homo sapiens
  CDR3 for alpha chain variable domain of TCR clone 128441 (TRAV23/DV6, TRAJ57)
CAASSTLSQG

SEQ ID NO: 256882 - protein, 14 aa, Homo sapiens
  CDR3 for beta chain variable domain of TCR clone 128441 (TRBV25-1, TRBJ1-1)
CASTHLGGDTEAFL

SEQ ID NO: 256883 - protein, 16 aa, Homo sapiens
  CDR3 for alpha chain variable domain of TCR clone 128442 (TRAV30, TRAJ24)
CGTEIVDADSWGKFQF

SEQ ID NO: 256884 - protein, 17 aa, Homo sapiens
  CDR3 for beta chain variable domain of TCR clone 128442 (TRBV20-1, TRBJ2-1)
CGAPPRLAGTRYNEQFF

SEQ ID NO: 256885 - protein, 18 aa, Homo sapiens
  CDR3 for alpha chain variable domain of TCR clone 128443 (TRAV16, TRAJ10)
CAPAREEETNSPLDRHSA

SEQ ID NO: 256886 - protein, 19 aa, Homo sapiens
  CDR3 for beta chain variable domain of TCR clone 128443 (TRBV25-1, TRBJ2-2)
CAILVYRVDRGRKTGELFF

SEQ ID NO: 256887 - protein, 15 aa, Homo sapiens
  CDR3 for alpha chain variable domain of TCR clone 128444 (TRAV3, TRAJ22)
CAVRDRGGSARQLTF

SEQ ID NO: 256888 - protein, 12 aa, Homo sapiens
  CDR3 for beta chain variable domain of TCR clone 128444 (TRBV5-1, TRBJ1-2)
CASSQDTYGYTF

SEQ ID NO: 256889 - protein, 13 aa, Homo sapiens
  CDR3 for alpha chain variable domain of TCR clone 128445 (TRAV13-2, TRAJ48)
CAEMDFGNEKLTF

SEQ ID NO: 256890 - protein, 15 aa, Homo sapiens
  CDR3 for beta chain variable domain of TCR clone 128445 (TRBV11-2, TRBJ2-1)
CASSSPSTRYNEQFF

SEQ ID NO: 256891 - protein, 13 aa, Homo sapiens
  CDR3 for alpha chain variable domain of TCR clone 128446 (TRAV5, TRAJ30)
CAEIANRDDKIIF

SEQ ID NO: 256892 - protein, 15 aa, Homo sapiens
  CDR3 for beta chain variable domain of TCR clone 128446 (TRBV9, TRBJ1-6)
CASSVAGTGDSPLHF

SEQ ID NO: 256893 - protein, 10 aa, Homo sapiens
  CDR3 for alpha chain variable domain of TCR clone 128447 (TRAV27, TRAJ43)
CAGANNDMRF

SEQ ID NO: 256894 - protein, 12 aa, Homo sapiens
  CDR3 for beta chain variable domain of TCR clone 128447 (TRBV12-5, TRBJ2-5)
CASGQGVETQYF

SEQ ID NO: 256895 - protein, 16 aa, Homo sapiens
  CDR3 for alpha chain variable domain of TCR clone 128448 (TRAV30, TRAJ24)
CGTEIVDADSWGKFQF

SEQ ID NO: 256896 - protein, 17 aa, Homo sapiens
  CDR3 for beta chain variable domain of TCR clone 128448 (TRBV7-9, TRBJ2-3)
CASSPTVAGDLTDTQYF

SEQ ID NO: 256897 - protein, 14 aa, Homo sapiens
  CDR3 for alpha chain variable domain of TCR clone 128449 (TRAV26-1, TRAJ38)
CIADNAGNNRKLIL

SEQ ID NO: 256898 - protein, 13 aa, Homo sapiens
  CDR3 for beta chain variable domain of TCR clone 128449 (TRBV7-9, TRBJ1-2)
CASSLKQNYGYTF

SEQ ID NO: 256899 - protein, 10 aa, Homo sapiens
  CDR3 for alpha chain variable domain of TCR clone 128450 (TRAV2, TRAJ34)
CAVVNDKLIF

SEQ ID NO: 256900 - protein, 16 aa, Homo sapiens
  CDR3 for beta chain variable domain of TCR clone 128450 (TRBV6-6, TRBJ1-5)
CASSYSTLVGNQPQHF

SEQ ID NO: 256901 - protein, 16 aa, Homo sapiens
  CDR3 for alpha chain variable domain of TCR clone 128451 (TRAV3, TRAJ37)
CAVRVRGSGNTGKIIF

SEQ ID NO: 256902 - protein, 16 aa, Homo sapiens
  CDR3 for beta chain variable domain of TCR clone 128451 (TRBV19, TRBJ2-1)
CASSKAGPSSYNEQFF

SEQ ID NO: 256903 - protein, 12 aa, Homo sapiens
  CDR3 for alpha chain variable domain of TCR clone 128452 (TRAV3, TRAJ39)
CAVLEWSNMLTF

SEQ ID NO: 256904 - protein, 14 aa, Homo sapiens
  CDR3 for beta chain variable domain of TCR clone 128452 (TRBV7-8, TRBJ2-3)
CASSFPDGQDTQYF

SEQ ID NO: 256905 - protein, 10 aa, Homo sapiens
  CDR3 for alpha chain variable domain of TCR clone 128453 (TRAV2, TRAJ26)
CAVVGLWSEF

SEQ ID NO: 256906 - protein, 15 aa, Homo sapiens
  CDR3 for beta chain variable domain of TCR clone 128453 (TRBV10-1, TRBJ2-3)
CASSATSGGFDTQYF

SEQ ID NO: 256907 - protein, 14 aa, Homo sapiens
  CDR3 for alpha chain variable domain of TCR clone 128454 (TRAV8-3, TRAJ13)
CAVGAQEGYQKVTF

SEQ ID NO: 256908 - protein, 14 aa, Homo sapiens
  CDR3 for beta chain variable domain of TCR clone 128454 (TRBV28, TRBJ1-2)
CASRIQGANYGYTF

SEQ ID NO: 256909 - protein, 18 aa, Homo sapiens
  CDR3 for alpha chain variable domain of TCR clone 128455 (TRAV9-2, TRAJ52)
CALSRHNAGGTSYGKLTF

SEQ ID NO: 256910 - protein, 11 aa, Homo sapiens
  CDR3 for beta chain variable domain of TCR clone 128455 (TRBV29-1, TRBJ2-5)
CSEDRTGTQYF

SEQ ID NO: 256911 - protein, 12 aa, Homo sapiens
  CDR3 for alpha chain variable domain of TCR clone 128456 (TRAV12-2, TRAJ7)
CAVMRGNNRLAF

SEQ ID NO: 256912 - protein, 15 aa, Homo sapiens
  CDR3 for beta chain variable domain of TCR clone 128456 (TRBV2, TRBJ2-1)
CAGSELAGGYNEQFF

SEQ ID NO: 256913 - protein, 11 aa, Homo sapiens
  CDR3 for alpha chain variable domain of TCR clone 128457 (TRAV13-1, TRAJ39)
CASHAGNMLTF

SEQ ID NO: 256914 - protein, 14 aa, Homo sapiens
  CDR3 for beta chain variable domain of TCR clone 128457 (TRBV20-1, TRBJ1-1)
CSAQTRIGGTEAFF

SEQ ID NO: 256915 - protein, 17 aa, Homo sapiens
  CDR3 for alpha chain variable domain of TCR clone 128458 (TRAV12-2, TRAJ42)
CAVNILNYGGSQGNLIF

SEQ ID NO: 256916 - protein, 15 aa, Homo sapiens
  CDR3 for beta chain variable domain of TCR clone 128458 (TRBV19, TRBJ1-1)
CASTSGQIQNTEAFF

SEQ ID NO: 256917 - protein, 13 aa, Homo sapiens
  CDR3 for alpha chain variable domain of TCR clone 128459 (TRAV12-3, TRAJ7)
CAMTPYGNNSLAF

SEQ ID NO: 256918 - protein, 16 aa, Homo sapiens
  CDR3 for beta chain variable domain of TCR clone 128459 (TRBV20-1, TRBJ1-4)
CSARPYGGELNEKLFF

SEQ ID NO: 256919 - protein, 14 aa, Homo sapiens
  CDR3 for alpha chain variable domain of TCR clone 128460 (TRAV29/DV5, TRAJ36)
CAARRKTGANNLFF

SEQ ID NO: 256920 - protein, 17 aa, Homo sapiens
  CDR3 for beta chain variable domain of TCR clone 128460 (TRBV7-8, TRBJ2-6)
CASSAGTGGAGANVLTF

SEQ ID NO: 256921 - protein, 12 aa, Homo sapiens
  CDR3 for alpha chain variable domain of TCR clone 128461 (TRAV12-1, TRAJ50)
CVGRTSYDKVIF

SEQ ID NO: 256922 - protein, 17 aa, Homo sapiens
  CDR3 for beta chain variable domain of TCR clone 128461 (TRBV5-1, TRBJ2-5)
CASSPVALGQNQETQYF

SEQ ID NO: 256923 - protein, 15 aa, Homo sapiens
  CDR3 for alpha chain variable domain of TCR clone 128462 (TRAV17, TRAJ57)
CATGPSQGGSEKLVF

SEQ ID NO: 256924 - protein, 16 aa, Homo sapiens
  CDR3 for beta chain variable domain of TCR clone 128462 (TRBV11-2, TRBJ2-7)
CASSPTTGGVSYEQYF

SEQ ID NO: 256925 - protein, 15 aa, Homo sapiens
  CDR3 for alpha chain variable domain of TCR clone 128463 (TRAV2, TRAJ21)
CAVEDLNFNKFYLDL

SEQ ID NO: 256926 - protein, 15 aa, Homo sapiens
  CDR3 for beta chain variable domain of TCR clone 128463 (TRBV28, TRBJ2-5)
CASSPGQGSIETQYF

SEQ ID NO: 256927 - protein, 17 aa, Homo sapiens
  CDR3 for alpha chain variable domain of TCR clone 128464 (TRAV8-6, TRAJ58)
CAVSSWVGDTSGSRLTF

SEQ ID NO: 256928 - protein, 14 aa, Homo sapiens
  CDR3 for beta chain variable domain of TCR clone 128464 (TRBV4-2, TRBJ2-1)
CASGLDRAYNEQFF

SEQ ID NO: 256929 - protein, 16 aa, Homo sapiens
  CDR3 for alpha chain variable domain of TCR clone 128465 (TRAV30, TRAJ24)
CGTEIVDADSWGKFQF

SEQ ID NO: 256930 - protein, 14 aa, Homo sapiens
  CDR3 for beta chain variable domain of TCR clone 128465 (TRBV7-9, TRBJ2-7)
CASSPRTGTYEQYF

SEQ ID NO: 256931 - protein, 14 aa, Homo sapiens
  CDR3 for alpha chain variable domain of TCR clone 128466 (TRAV38-1, TRAJ29)
CAFITPSGNTPLVF

SEQ ID NO: 256932 - protein, 15 aa, Homo sapiens
  CDR3 for beta chain variable domain of TCR clone 128466 (TRBV5-1, TRBJ2-1)
CASSPPRATYNEQFF

SEQ ID NO: 256933 - protein, 13 aa, Homo sapiens
  CDR3 for alpha chain variable domain of TCR clone 128467 (TRAV26-1, TRAJ30)
CTVNMNRDDKIIF

SEQ ID NO: 256934 - protein, 16 aa, Homo sapiens
  CDR3 for beta chain variable domain of TCR clone 128467 (TRBV16, TRBJ2-7)
CASSRPAGGSSYEQYF

SEQ ID NO: 256935 - protein, 17 aa, Homo sapiens
  CDR3 for alpha chain variable domain of TCR clone 128468 (TRAV3, TRAJ12)
CAVRDGGRMDSSYKLIF

SEQ ID NO: 256936 - protein, 12 aa, Homo sapiens
  CDR3 for beta chain variable domain of TCR clone 128468 (TRBV14, TRBJ2-5)
CASSQLKETQYF

SEQ ID NO: 256937 - protein, 14 aa, Homo sapiens
  CDR3 for alpha chain variable domain of TCR clone 128469 (TRAV12-3, TRAJ6)
CAMSATGGSNIPTF

SEQ ID NO: 256938 - protein, 16 aa, Homo sapiens
  CDR3 for beta chain variable domain of TCR clone 128469 (TRBV4-2, TRBJ2-1)
CASSPRAGQGANEQFF

SEQ ID NO: 256939 - protein, 14 aa, Homo sapiens
  CDR3 for alpha chain variable domain of TCR clone 128470 (TRAV13-1, TRAJ44)
CAAKATGTASKLTF

SEQ ID NO: 256940 - protein, 13 aa, Homo sapiens
  CDR3 for beta chain variable domain of TCR clone 128470 (TRBV7-9, TRBJ2-5)
CASLPSGRETQYF

SEQ ID NO: 256941 - protein, 14 aa, Homo sapiens
  CDR3 for alpha chain variable domain of TCR clone 128471 (TRAV26-1, TRAJ21)
CIVRVVYNFNKFYF

SEQ ID NO: 256942 - protein, 15 aa, Homo sapiens
  CDR3 for beta chain variable domain of TCR clone 128471 (TRBV20-1, TRBJ2-7)
CSARVPAAYFYEQYF

SEQ ID NO: 256943 - protein, 14 aa, Homo sapiens
  CDR3 for alpha chain variable domain of TCR clone 128472 (TRAV27, TRAJ22)
CAGVVPGSARQLTF

SEQ ID NO: 256944 - protein, 14 aa, Homo sapiens
  CDR3 for beta chain variable domain of TCR clone 128472 (TRBV7-6, TRBJ2-3)
CASSLGTVTDTQYF

SEQ ID NO: 256945 - protein, 15 aa, Homo sapiens
  CDR3 for alpha chain variable domain of TCR clone 128473 (TRAV17, TRAJ57)
CATGPSQGGSEKLVF

SEQ ID NO: 256946 - protein, 12 aa, Homo sapiens
  CDR3 for beta chain variable domain of TCR clone 128473 (TRBV7-9, TRBJ2-7)
CASSIKREEQYF

SEQ ID NO: 256947 - protein, 18 aa, Homo sapiens
  CDR3 for alpha chain variable domain of TCR clone 128474 (TRAV26-2, TRAJ45)
CILRVWGDSGGGADGLTF

SEQ ID NO: 256948 - protein, 17 aa, Homo sapiens
  CDR3 for beta chain variable domain of TCR clone 128474 (TRBV28, TRBJ2-3)
CASSPTPAGGRVDTQYF

SEQ ID NO: 256949 - protein, 18 aa, Homo sapiens
  CDR3 for alpha chain variable domain of TCR clone 128475 (TRAV21, TRAJ52)
CAVRPSPAGGTSYGRLTF

SEQ ID NO: 256950 - protein, 15 aa, Homo sapiens
  CDR3 for beta chain variable domain of TCR clone 128475 (TRBV7-9, TRBJ2-7)
CASSSSGLAVYEQYF

SEQ ID NO: 256951 - protein, 14 aa, Homo sapiens
  CDR3 for alpha chain variable domain of TCR clone 128476 (TRAV21, TRAJ15)
CAVSLNQAGTALTF

SEQ ID NO: 256952 - protein, 11 aa, Homo sapiens
  CDR3 for beta chain variable domain of TCR clone 128476 (TRBV20-1, TRBJ2-7)
CSARTSYEQYS

SEQ ID NO: 256953 - protein, 15 aa, Homo sapiens
  CDR3 for alpha chain variable domain of TCR clone 128477 (TRAV25, TRAJ53)
CPTSNSGGSNYKLTF

SEQ ID NO: 256954 - protein, 14 aa, Homo sapiens
  CDR3 for beta chain variable domain of TCR clone 128477 (TRBV11-2, TRBJ2-3)
CASSGLARTDTQYF

SEQ ID NO: 256955 - protein, 14 aa, Homo sapiens
  CDR3 for alpha chain variable domain of TCR clone 128478 (TRAV1-2, TRAJ16)
CAVNRFSDGQKLLF

SEQ ID NO: 256956 - protein, 12 aa, Homo sapiens
  CDR3 for beta chain variable domain of TCR clone 128478 (TRBV24-1, TRBJ1-1)
CATSDSDRGAFF

SEQ ID NO: 256957 - protein, 11 aa, Homo sapiens
  CDR3 for alpha chain variable domain of TCR clone 128479 (TRAV2, TRAJ13)
CASGGYQKVTF

SEQ ID NO: 256958 - protein, 17 aa, Homo sapiens
  CDR3 for beta chain variable domain of TCR clone 128479 (TRBV7-3, TRBJ2-3)
CASSLRKRMRGADTQYF

SEQ ID NO: 256959 - protein, 16 aa, Homo sapiens
  CDR3 for alpha chain variable domain of TCR clone 128480 (TRAV26-2, TRAJ37)
CILRDFGSSNTDKLIF

SEQ ID NO: 256960 - protein, 15 aa, Homo sapiens
  CDR3 for beta chain variable domain of TCR clone 128480 (TRBV6-5, TRBJ2-7)
CASRSLAVSSYEQYF

SEQ ID NO: 256961 - protein, 11 aa, Homo sapiens
  CDR3 for alpha chain variable domain of TCR clone 128481 (TRAV20, TRAJ27)
CAVTNAGKSTF

SEQ ID NO: 256962 - protein, 13 aa, Homo sapiens
  CDR3 for beta chain variable domain of TCR clone 128481 (TRBV15, TRBJ1-6)
CATSGGLNSPLHF

SEQ ID NO: 256963 - protein, 14 aa, Homo sapiens
  CDR3 for alpha chain variable domain of TCR clone 128482 (TRAV12-2, TRAJ11)
CAVEGGSGYSTLTF

SEQ ID NO: 256964 - protein, 15 aa, Homo sapiens
  CDR3 for beta chain variable domain of TCR clone 128482 (TRBV19, TRBJ1-2)
CASSVGQVLNYGYTF

SEQ ID NO: 256965 - protein, 18 aa, Homo sapiens
  CDR3 for alpha chain variable domain of TCR clone 128483 (TRAV21, TRAJ52)
CAVRPSPAGGTSYGKLTF

SEQ ID NO: 256966 - protein, 16 aa, Homo sapiens
  CDR3 for beta chain variable domain of TCR clone 128483 (TRBV5-4, TRBJ2-3)
CASQQPGAGGADTQYF

SEQ ID NO: 256967 - protein, 13 aa, Homo sapiens
  CDR3 for alpha chain variable domain of TCR clone 128484 (TRAV2, TRAJ40)
CAVVTSGTYEYIF

SEQ ID NO: 256968 - protein, 14 aa, Homo sapiens
  CDR3 for beta chain variable domain of TCR clone 128484 (TRBV19, TRBJ2-1)
CASPAFVLSGEQFF

SEQ ID NO: 256969 - protein, 14 aa, Homo sapiens
  CDR3 for alpha chain variable domain of TCR clone 128485 (TRAV2, TRAJ9)
CAVEDRSGGFKTIF

SEQ ID NO: 256970 - protein, 12 aa, Homo sapiens
  CDR3 for beta chain variable domain of TCR clone 128485 (TRBV11-2, TRBJ2-1)
CASSPGNNEQSF

SEQ ID NO: 256971 - protein, 12 aa, Homo sapiens
  CDR3 for alpha chain variable domain of TCR clone 128486 (TRAV13-2, TRAJ8)
CAPWLGFQRLVF

SEQ ID NO: 256972 - protein, 12 aa, Homo sapiens
  CDR3 for beta chain variable domain of TCR clone 128486 (TRBV28, TRBJ2-3)
CASSLYRDTQYF

SEQ ID NO: 256973 - protein, 15 aa, Homo sapiens
  CDR3 for alpha chain variable domain of TCR clone 128487 (TRAV4, TRAJ10)
CLVGDEEGGGNKLTF

SEQ ID NO: 256974 - protein, 14 aa, Homo sapiens
  CDR3 for beta chain variable domain of TCR clone 128487 (TRBV12-4, TRBJ2-3)
CASTIAGWGDTQYF

SEQ ID NO: 256975 - protein, 15 aa, Homo sapiens
  CDR3 for alpha chain variable domain of TCR clone 128488 (TRAV4, TRAJ39)
CLVGPNNNAGNMLTF

SEQ ID NO: 256976 - protein, 12 aa, Homo sapiens
  CDR3 for beta chain variable domain of TCR clone 128488 (TRBV12-4, TRBJ2-7)
CASSLGGYEQYF

SEQ ID NO: 256977 - protein, 17 aa, Homo sapiens
  CDR3 for alpha chain variable domain of TCR clone 128489 (TRAV16, TRAJ6)
CAVRDGPRAGGSYIPTF

SEQ ID NO: 256978 - protein, 14 aa, Homo sapiens
  CDR3 for beta chain variable domain of TCR clone 128489 (TRBV7-2, TRBJ2-7)
CASSPKTSFYEQYF

SEQ ID NO: 256979 - protein, 12 aa, Homo sapiens
  CDR3 for alpha chain variable domain of TCR clone 128490 (TRAV12-1, TRAJ40)
CGVYSGTYKYIF

SEQ ID NO: 256980 - protein, 18 aa, Homo sapiens
  CDR3 for beta chain variable domain of TCR clone 128490 (TRBV11-2, TRBJ2-3)
CASSLGGASRGAPNTQYF

SEQ ID NO: 256981 - protein, 12 aa, Homo sapiens
  CDR3 for alpha chain variable domain of TCR clone 128491 (TRAV13-2, TRAJ23)
CAERHRGGKLIF

SEQ ID NO: 256982 - protein, 14 aa, Homo sapiens
  CDR3 for beta chain variable domain of TCR clone 128491 (TRBV12-4, TRBJ2-5)
CASSLWQKQETQYF

SEQ ID NO: 256983 - protein, 12 aa, Homo sapiens
  CDR3 for alpha chain variable domain of TCR clone 128492 (TRAV3, TRAJ20)
CAVRDGDYKLSF

SEQ ID NO: 256984 - protein, 13 aa, Homo sapiens
  CDR3 for beta chain variable domain of TCR clone 128492 (TRBV9, TRBJ2-1)
CASSGGQGGEQFF

SEQ ID NO: 256985 - protein, 15 aa, Homo sapiens
  CDR3 for alpha chain variable domain of TCR clone 128493 (TRAV38-2/DV8, TRAJ57)
CAYGRVFGKGTKLTV

SEQ ID NO: 256986 - protein, 15 aa, Homo sapiens
  CDR3 for beta chain variable domain of TCR clone 128493 (TRBV18, TRBJ1-1)
LSPAPPQGAGTEAFF

SEQ ID NO: 256987 - protein, 13 aa, Homo sapiens
  CDR3 for alpha chain variable domain of TCR clone 128494 (TRAV13-1, TRAJ41)
CADAPNSGYSLNF

SEQ ID NO: 256988 - protein, 13 aa, Homo sapiens
  CDR3 for beta chain variable domain of TCR clone 128494 (TRBV19, TRBJ2-7)
CASEGTTTYEQYF

SEQ ID NO: 256989 - protein, 17 aa, Homo sapiens
  CDR3 for alpha chain variable domain of TCR clone 128495 (TRAV14/DV4, TRAJ4)
CAMREASGRGGYNKLIF

SEQ ID NO: 256990 - protein, 14 aa, Homo sapiens
  CDR3 for beta chain variable domain of TCR clone 128495 (TRBV19, TRBJ2-7)
CASSMGQGAIEQFF

SEQ ID NO: 256991 - protein, 11 aa, Homo sapiens
  CDR3 for alpha chain variable domain of TCR clone 128496 (TRAV3, TRAJ21)
CAVGNFNKLYF

SEQ ID NO: 256992 - protein, 17 aa, Homo sapiens
  CDR3 for beta chain variable domain of TCR clone 128496 (TRBV24-1, TRBJ2-1)
CATSDVSTSGTYNEQFF

SEQ ID NO: 256993 - protein, 13 aa, Homo sapiens
  CDR3 for alpha chain variable domain of TCR clone 128497 (TRAV23/DV6, TRAJ12)
CAPRLDSSYKLIF

SEQ ID NO: 256994 - protein, 12 aa, Homo sapiens
  CDR3 for beta chain variable domain of TCR clone 128497 (TRBV7-6, TRBJ2-5)
CASSLSQETQYF

SEQ ID NO: 256995 - protein, 13 aa, Homo sapiens
  CDR3 for alpha chain variable domain of TCR clone 128498 (TRAV13-1, TRAJ5)
CAAEHTGRRALTF

SEQ ID NO: 256996 - protein, 13 aa, Homo sapiens
  CDR3 for beta chain variable domain of TCR clone 128498 (TRBV19, TRBJ1-2)
CASSVPGQDGYTF

SEQ ID NO: 256997 - protein, 18 aa, Homo sapiens
  CDR3 for alpha chain variable domain of TCR clone 128499 (TRAV26-1, TRAJ56)
CIVRVAARVTGANSKLTF

SEQ ID NO: 256998 - protein, 15 aa, Homo sapiens
  CDR3 for beta chain variable domain of TCR clone 128499 (TRBV7-9, TRBJ2-5)
CASSDTGRGRETQYF

SEQ ID NO: 256999 - protein, 12 aa, Homo sapiens
  CDR3 for alpha chain variable domain of TCR clone 128500 (TRAV12-3, TRAJ17)
CAMTLTGNKLTF

SEQ ID NO: 257000 - protein, 14 aa, Homo sapiens
  CDR3 for beta chain variable domain of TCR clone 128500 (TRBV11-2, TRBJ1-2)
CASSSGQAGDGYTF

SEQ ID NO: 257001 - protein, 16 aa, Homo sapiens
  CDR3 for alpha chain variable domain of TCR clone 128501 (TRAV21, TRAJ37)
CAVRTAGSSNTGKLIF

SEQ ID NO: 257002 - protein, 15 aa, Homo sapiens
  CDR3 for beta chain variable domain of TCR clone 128501 (TRBV10-3, TRBJ1-3)
CAISDSQGAGNTIYF

SEQ ID NO: 257003 - protein, 11 aa, Homo sapiens
  CDR3 for alpha chain variable domain of TCR clone 128502 (TRAV21, TRAJ34)
CAHYNTDKLIF

SEQ ID NO: 257004 - protein, 17 aa, Homo sapiens
  CDR3 for beta chain variable domain of TCR clone 128502 (TRBV4-1, TRBJ1-4)
CASSQEGPRGVEEKLFF

SEQ ID NO: 257005 - protein, 18 aa, Homo sapiens
  CDR3 for alpha chain variable domain of TCR clone 128503 (TRAV29/DV5, TRAJ26)
CSVLLCSKRKPEGQTFVF

SEQ ID NO: 257006 - protein, 17 aa, Homo sapiens
  CDR3 for beta chain variable domain of TCR clone 128503 (TRBV20-1, TRBJ2-2)
CSASGSGQGGLTGELFF

SEQ ID NO: 257007 - protein, 14 aa, Homo sapiens
  CDR3 for alpha chain variable domain of TCR clone 128504 (TRAV29/DV5, TRAJ36)
CAARRKTGANNLFF

SEQ ID NO: 257008 - protein, 14 aa, Homo sapiens
  CDR3 for beta chain variable domain of TCR clone 128504 (TRBV20-1, TRBJ2-5)
CSAHRQGLWETQYF

SEQ ID NO: 257009 - protein, 15 aa, Homo sapiens
  CDR3 for alpha chain variable domain of TCR clone 128505 (TRAV2, TRAJ15)
CAVEDRGQAGTALIF

SEQ ID NO: 257010 - protein, 18 aa, Homo sapiens
  CDR3 for beta chain variable domain of TCR clone 128505 (TRBV11-2, TRBJ2-6)
CASSLNPFLGTGANVLTF

SEQ ID NO: 257011 - protein, 14 aa, Homo sapiens
  CDR3 for alpha chain variable domain of TCR clone 128506 (TRAV8-2, TRAJ4)
CVVSPSGGYNKLIF

SEQ ID NO: 257012 - protein, 14 aa, Homo sapiens
  CDR3 for beta chain variable domain of TCR clone 128506 (TRBV9, TRBJ2-7)
CASSVGVGSYEQYF

SEQ ID NO: 257013 - protein, 11 aa, Homo sapiens
  CDR3 for alpha chain variable domain of TCR clone 128507 (TRAV4, TRAJ23)
CLLDQGGKLIF

SEQ ID NO: 257014 - protein, 16 aa, Homo sapiens
  CDR3 for beta chain variable domain of TCR clone 128507 (TRBV7-3, TRBJ2-2)
CASSLKRGTLSGELFF

SEQ ID NO: 257015 - protein, 15 aa, Homo sapiens
  CDR3 for alpha chain variable domain of TCR clone 128508 (TRAV12-2, TRAJ23)
CAVKPIYNQGGKLIF

SEQ ID NO: 257016 - protein, 13 aa, Homo sapiens
  CDR3 for beta chain variable domain of TCR clone 128508 (TRBV12-4, TRBJ2-7)
CASSPTETYEQYF

SEQ ID NO: 257017 - protein, 13 aa, Homo sapiens
  CDR3 for alpha chain variable domain of TCR clone 128509 (TRAV20, TRAJ21)
CAVEGYNFNKFYF

SEQ ID NO: 257018 - protein, 14 aa, Homo sapiens
  CDR3 for beta chain variable domain of TCR clone 128509 (TRBV18, TRBJ2-7)
CASSPRGGAYEQYF

SEQ ID NO: 257019 - protein, 13 aa, Homo sapiens
  CDR3 for alpha chain variable domain of TCR clone 128510 (TRAV2, TRAJ40)
CAVVSSGTYKYIF

SEQ ID NO: 257020 - protein, 16 aa, Homo sapiens
  CDR3 for beta chain variable domain of TCR clone 128510 (TRBV19, TRBJ2-2)
CASRSPGTGATGELFF

SEQ ID NO: 257021 - protein, 14 aa, Homo sapiens
  CDR3 for alpha chain variable domain of TCR clone 128511 (TRAV9-2, TRAJ39)
CALYIYNAGNMLTF

SEQ ID NO: 257022 - protein, 13 aa, Homo sapiens
  CDR3 for beta chain variable domain of TCR clone 128511 (TRBV13, TRBJ2-5)
CASSPEVGETQYF

SEQ ID NO: 257023 - protein, 15 aa, Homo sapiens
  CDR3 for alpha chain variable domain of TCR clone 128512 (TRAV34, TRAJ36)
CGAPSRLGGANNLFF

SEQ ID NO: 257024 - protein, 16 aa, Homo sapiens
  CDR3 for beta chain variable domain of TCR clone 128512 (TRBV4-3, TRBJ2-1)
CASSYRGLGSWDEQFF

SEQ ID NO: 257025 - protein, 11 aa, Homo sapiens
  CDR3 for alpha chain variable domain of TCR clone 128513 (TRAV17, TRAJ31)
CATSNNASLMF

SEQ ID NO: 257026 - protein, 16 aa, Homo sapiens
  CDR3 for beta chain variable domain of TCR clone 128513 (TRBV7-8, TRBJ2-4)
CASSAERTLAKNIQYF

SEQ ID NO: 257027 - protein, 14 aa, Homo sapiens
  CDR3 for alpha chain variable domain of TCR clone 128514 (TRAV1-2, TRAJ16)
CAVNRFSDGQKLLF

SEQ ID NO: 257028 - protein, 13 aa, Homo sapiens
  CDR3 for beta chain variable domain of TCR clone 128514 (TRBV19, TRBJ1-5)
CASSLRQNQPQHF

SEQ ID NO: 257029 - protein, 13 aa, Homo sapiens
  CDR3 for alpha chain variable domain of TCR clone 128515 (TRAV3, TRAJ20)
CAVRLSNDYKLSF

SEQ ID NO: 257030 - protein, 12 aa, Homo sapiens
  CDR3 for beta chain variable domain of TCR clone 128515 (TRBV11-2, TRBJ2-2)
CASSLGGGELFF

SEQ ID NO: 257031 - protein, 11 aa, Homo sapiens
  CDR3 for alpha chain variable domain of TCR clone 128516 (TRAV12-1, TRAJ21)
CVVNNFNKFYF

SEQ ID NO: 257032 - protein, 15 aa, Homo sapiens
  CDR3 for beta chain variable domain of TCR clone 128516 (TRBV7-2, TRBJ2-2)
CASRRPGQNTGELFF

SEQ ID NO: 257033 - protein, 13 aa, Homo sapiens
  CDR3 for alpha chain variable domain of TCR clone 128517 (TRAV21, TRAJ57)
CSVTQGGSEKLVF

SEQ ID NO: 257034 - protein, 15 aa, Homo sapiens
  CDR3 for beta chain variable domain of TCR clone 128517 (TRBV5-1, TRBJ1-1)
CASSSTTGTNTEAFF

SEQ ID NO: 257035 - protein, 16 aa, Homo sapiens
  CDR3 for alpha chain variable domain of TCR clone 128518 (TRAV3, TRAJ10)
CAVRDMRAGGGNKLTF

SEQ ID NO: 257036 - protein, 14 aa, Homo sapiens
  CDR3 for beta chain variable domain of TCR clone 128518 (TRBV7-2, TRBJ1-4)
CASSVVEGGAKLFF

SEQ ID NO: 257037 - protein, 14 aa, Homo sapiens
  CDR3 for alpha chain variable domain of TCR clone 128519 (TRAV35, TRAJ22)
CAGLRPGSARQLTF

SEQ ID NO: 257038 - protein, 15 aa, Homo sapiens
  CDR3 for beta chain variable domain of TCR clone 128519 (TRBV6-1, TRBJ2-3)
CASSERGGITDTQYF

SEQ ID NO: 257039 - protein, 15 aa, Homo sapiens
  CDR3 for alpha chain variable domain of TCR clone 128520 (TRAV4, TRAJ39)
CLVGPNNNAGNMLTF

SEQ ID NO: 257040 - protein, 13 aa, Homo sapiens
  CDR3 for beta chain variable domain of TCR clone 128520 (TRBV11-2, TRBJ2-5)
CSSSSTGEETQYF

SEQ ID NO: 257041 - protein, 14 aa, Homo sapiens
  CDR3 for alpha chain variable domain of TCR clone 128521 (TRAV12-2, TRAJ13)
CAVKKTGGHQKVTF

SEQ ID NO: 257042 - protein, 13 aa, Homo sapiens
  CDR3 for beta chain variable domain of TCR clone 128521 (TRBV10-3, TRBJ2-7)
CASKLAVNYEQYF

SEQ ID NO: 257043 - protein, 15 aa, Homo sapiens
  CDR3 for alpha chain variable domain of TCR clone 128522 (TRAV8-2, TRAJ16)
CVVSDGFSDGQKLLF

SEQ ID NO: 257044 - protein, 15 aa, Homo sapiens
  CDR3 for beta chain variable domain of TCR clone 128522 (TRBV20-1, TRBJ2-3)
CSASPPQVSTDTQYF

SEQ ID NO: 257045 - protein, 15 aa, Homo sapiens
  CDR3 for alpha chain variable domain of TCR clone 128523 (TRAV17, TRAJ16)
CATALRFSDGQKLLF

SEQ ID NO: 257046 - protein, 14 aa, Homo sapiens
  CDR3 for beta chain variable domain of TCR clone 128523 (TRBV19, TRBJ2-1)
CASSSGRDYNEQFF

SEQ ID NO: 257047 - protein, 13 aa, Homo sapiens
  CDR3 for alpha chain variable domain of TCR clone 128524 (TRAV26-2, TRAJ57)
CILSRGGSEKLVF

SEQ ID NO: 257048 - protein, 14 aa, Homo sapiens
  CDR3 for beta chain variable domain of TCR clone 128524 (TRBV19, TRBJ2-1)
CASGKSTQYNEQFF

SEQ ID NO: 257049 - protein, 14 aa, Homo sapiens
  CDR3 for alpha chain variable domain of TCR clone 128525 (TRAV12-3, TRAJ10)
SHLPLTGGGNKLTF

SEQ ID NO: 257050 - protein, 14 aa, Homo sapiens
  CDR3 for beta chain variable domain of TCR clone 128525 (TRBV6-3, TRBJ2-5)
CASRRDGGEETQYF

SEQ ID NO: 257051 - protein, 12 aa, Homo sapiens
  CDR3 for alpha chain variable domain of TCR clone 128526 (TRAV17, TRAJ30)
CATDARDDKIIF

SEQ ID NO: 257052 - protein, 18 aa, Homo sapiens
  CDR3 for beta chain variable domain of TCR clone 128526 (TRBV6-6, TRBJ2-7)
CASSYARGIRDNAYEQYF

SEQ ID NO: 257053 - protein, 13 aa, Homo sapiens
  CDR3 for alpha chain variable domain of TCR clone 128527 (TRAV9-2, TRAJ9)
CALSDRGGFKTIF

SEQ ID NO: 257054 - protein, 14 aa, Homo sapiens
  CDR3 for beta chain variable domain of TCR clone 128527 (TRBV20-1, TRBJ2-2)
CSDPDTANTGELFF

SEQ ID NO: 257055 - protein, 12 aa, Homo sapiens
  CDR3 for alpha chain variable domain of TCR clone 128528 (TRAV2, TRAJ9)
CAVGAGGFKTIF

SEQ ID NO: 257056 - protein, 13 aa, Homo sapiens
  CDR3 for beta chain variable domain of TCR clone 128528 (TRBV11-2, TRBJ2-5)
CASSSTGEETQYF

SEQ ID NO: 257057 - protein, 16 aa, Homo sapiens
  CDR3 for alpha chain variable domain of TCR clone 128529 (TRAV30, TRAJ24)
CGTEIVDADSWGKSSL

SEQ ID NO: 257058 - protein, 14 aa, Homo sapiens
  CDR3 for beta chain variable domain of TCR clone 128529 (TRBV12-5, TRBJ2-5)
CASGSRTHQETQYF

SEQ ID NO: 257059 - protein, 16 aa, Homo sapiens
  CDR3 for alpha chain variable domain of TCR clone 128530 (TRAV20, TRAJ22)
CAVQASSSSSARQLTF

SEQ ID NO: 257060 - protein, 13 aa, Homo sapiens
  CDR3 for beta chain variable domain of TCR clone 128530 (TRBV7-2, TRBJ2-5)
CASSQTSVETQYF

SEQ ID NO: 257061 - protein, 21 aa, Homo sapiens
  CDR3 for alpha chain variable domain of TCR clone 128531 (TRAV12-1, TRAJ32)
SSVIQPPTSMNYGGATNKLIF

SEQ ID NO: 257062 - protein, 15 aa, Homo sapiens
  CDR3 for beta chain variable domain of TCR clone 128531 (TRBV7-9, TRBJ2-2)
CASGPLDTFPGELFV

SEQ ID NO: 257063 - protein, 17 aa, Homo sapiens
  CDR3 for alpha chain variable domain of TCR clone 128532 (TRAV3, TRAJ6)
CAVRDGPRAGGSYIPTF

SEQ ID NO: 257064 - protein, 14 aa, Homo sapiens
  CDR3 for beta chain variable domain of TCR clone 128532 (TRBV20-1, TRBJ1-5)
CSARDDRGNQPQHF

SEQ ID NO: 257065 - protein, 12 aa, Homo sapiens
  CDR3 for alpha chain variable domain of TCR clone 128533 (TRAV6, TRAJ27)
CSRIRGAGKSTF

SEQ ID NO: 257066 - protein, 15 aa, Homo sapiens
  CDR3 for beta chain variable domain of TCR clone 128533 (TRBV4-2, TRBJ1-1)
CASSQEDLPRTEAFF

SEQ ID NO: 257067 - protein, 14 aa, Homo sapiens
  CDR3 for alpha chain variable domain of TCR clone 128534 (TRAV12-3, TRAJ10)
SHLPLTGGGNKLTF

SEQ ID NO: 257068 - protein, 14 aa, Homo sapiens
  CDR3 for beta chain variable domain of TCR clone 128534 (TRBV19, TRBJ1-5)
CASRAPDSFLSQHF

SEQ ID NO: 257069 - protein, 11 aa, Homo sapiens
  CDR3 for alpha chain variable domain of TCR clone 128535 (TRAV3, TRAJ21)
CAVGNFNKFYF

SEQ ID NO: 257070 - protein, 14 aa, Homo sapiens
  CDR3 for beta chain variable domain of TCR clone 128535 (TRBV29-1, TRBJ2-2)
CSVRGSGNTGELFF

SEQ ID NO: 257071 - protein, 11 aa, Homo sapiens
  CDR3 for alpha chain variable domain of TCR clone 128536 (TRAV12-2, TRAJ31)
CAVTRWARLMF

SEQ ID NO: 257072 - protein, 14 aa, Homo sapiens
  CDR3 for beta chain variable domain of TCR clone 128536 (TRBV25-1, TRBJ1-1)
CASTHLGGNTEAFF

SEQ ID NO: 257073 - protein, 13 aa, Homo sapiens
  CDR3 for alpha chain variable domain of TCR clone 128537 (TRAV8-2, TRAJ36)
CVVSHLPTNNLFF

SEQ ID NO: 257074 - protein, 12 aa, Homo sapiens
  CDR3 for beta chain variable domain of TCR clone 128537 (TRBV11-2, TRBJ2-2)
CASSLGGGELFF

SEQ ID NO: 257075 - protein, 20 aa, Homo sapiens
  CDR3 for alpha chain variable domain of TCR clone 128538 (TRAV26-1, TRAJ42)
CCVLLHRQTYYGGSQGILIF

SEQ ID NO: 257076 - protein, 16 aa, Homo sapiens
  CDR3 for beta chain variable domain of TCR clone 128538 (TRBV7-3, TRBJ2-2)
CASSLKRGTLSGELFF

SEQ ID NO: 257077 - protein, 11 aa, Homo sapiens
  CDR3 for alpha chain variable domain of TCR clone 128539 (TRAV8-3, TRAJ15)
CAVGPGTALFF

SEQ ID NO: 257078 - protein, 18 aa, Homo sapiens
  CDR3 for beta chain variable domain of TCR clone 128539 (TRBV18, TRBJ2-3)
CASSYTSGAAGGTDTQYF

SEQ ID NO: 257079 - protein, 15 aa, Homo sapiens
  CDR3 for alpha chain variable domain of TCR clone 128540 (TRAV14/DV4, TRAJ26)
CAMREGQNYGQDFVF

SEQ ID NO: 257080 - protein, 13 aa, Homo sapiens
  CDR3 for beta chain variable domain of TCR clone 128540 (TRBV24-1, TRBJ2-2)
CATSDWSTGELFF

SEQ ID NO: 257081 - protein, 16 aa, Homo sapiens
  CDR3 for alpha chain variable domain of TCR clone 128541 (TRAV14/DV4, TRAJ54)
CAMREGRIQGAQKLVF

SEQ ID NO: 257082 - protein, 11 aa, Homo sapiens
  CDR3 for beta chain variable domain of TCR clone 128541 (TRBV11-2, TRBJ2-2)
CASSLPGELFF

SEQ ID NO: 257083 - protein, 15 aa, Homo sapiens
  CDR3 for alpha chain variable domain of TCR clone 128542 (TRAV21, TRAJ53)
CATLNSGGINYKLTF

SEQ ID NO: 257084 - protein, 15 aa, Homo sapiens
  CDR3 for beta chain variable domain of TCR clone 128542 (TRBV18, TRBJ2-1)
CASSPPSASYNEQFF

SEQ ID NO: 257085 - protein, 15 aa, Homo sapiens
  CDR3 for alpha chain variable domain of TCR clone 128543 (TRAV13-1, TRAJ32)
CAASNGWWCYKQAHL

SEQ ID NO: 257086 - protein, 17 aa, Homo sapiens
  CDR3 for beta chain variable domain of TCR clone 128543 (TRBV15, TRBJ1-2)
CATSGREIDVVNCGYTF

SEQ ID NO: 257087 - protein, 12 aa, Homo sapiens
  CDR3 for alpha chain variable domain of TCR clone 128544 (TRAV8-3, TRAJ26)
CAGDNYGQNFVF

SEQ ID NO: 257088 - protein, 15 aa, Homo sapiens
  CDR3 for beta chain variable domain of TCR clone 128544 (TRBV5-1, TRBJ2-2)
CASSTFNINTGELFF

SEQ ID NO: 257089 - protein, 18 aa, Homo sapiens
  CDR3 for alpha chain variable domain of TCR clone 128545 (TRAV13-1, TRAJ52)
CAASKRSAGGTSYGKLTF

SEQ ID NO: 257090 - protein, 14 aa, Homo sapiens
  CDR3 for beta chain variable domain of TCR clone 128545 (TRBV7-2, TRBJ2-5)
CSSSTGGELKTQYF

SEQ ID NO: 257091 - protein, 17 aa, Homo sapiens
  CDR3 for alpha chain variable domain of TCR clone 128546 (TRAV3, TRAJ6)
CAVVDGPRAGGSYIPTF

SEQ ID NO: 257092 - protein, 14 aa, Homo sapiens
  CDR3 for beta chain variable domain of TCR clone 128546 (TRBV7-2, TRBJ2-7)
CASSPKTSFYEQYF

SEQ ID NO: 257093 - protein, 13 aa, Homo sapiens
  CDR3 for alpha chain variable domain of TCR clone 128547 (TRAV16, TRAJ52)
CALRGTSYGKLTF

SEQ ID NO: 257094 - protein, 15 aa, Homo sapiens
  CDR3 for beta chain variable domain of TCR clone 128547 (TRBV20-1, TRBJ2-7)
CSARDRVSGMDEQYF

SEQ ID NO: 257095 - protein, 14 aa, Homo sapiens
  CDR3 for alpha chain variable domain of TCR clone 128548 (TRAV1-2, TRAJ8)
CAVREDTGFQKLVF

SEQ ID NO: 257096 - protein, 11 aa, Homo sapiens
  CDR3 for beta chain variable domain of TCR clone 128548 (TRBV19, TRBJ1-2)
CASRSGLRYTF

SEQ ID NO: 257097 - protein, 15 aa, Homo sapiens
  CDR3 for alpha chain variable domain of TCR clone 128549 (TRAV23/DV6, TRAJ18)
CAARYRVSTLGRLYF

SEQ ID NO: 257098 - protein, 13 aa, Homo sapiens
  CDR3 for beta chain variable domain of TCR clone 128549 (TRBV7-2, TRBJ2-7)
CASSSPSGSEQYF

SEQ ID NO: 257099 - protein, 14 aa, Homo sapiens
  CDR3 for alpha chain variable domain of TCR clone 128550 (TRAV12-2, TRAJ11)
CAVEGGSGYSTLTF

SEQ ID NO: 257100 - protein, 16 aa, Homo sapiens
  CDR3 for beta chain variable domain of TCR clone 128550 (TRBV4-1, TRBJ2-7)
CASSRGDILNSYEQYF

SEQ ID NO: 257101 - protein, 12 aa, Homo sapiens
  CDR3 for alpha chain variable domain of TCR clone 128551 (TRAV21, TRAJ39)
YAADNAGNMLTF

SEQ ID NO: 257102 - protein, 13 aa, Homo sapiens
  CDR3 for beta chain variable domain of TCR clone 128551 (TRBV6-1, TRBJ1-1)
CASSRQGNTEAFF

SEQ ID NO: 257103 - protein, 13 aa, Homo sapiens
  CDR3 for alpha chain variable domain of TCR clone 128552 (TRAV23/DV6, TRAJ16)
CAASISDGQKMLF

SEQ ID NO: 257104 - protein, 15 aa, Homo sapiens
  CDR3 for beta chain variable domain of TCR clone 128552 (TRBV2, TRBJ2-2)
CASSRETVGTGELFF

SEQ ID NO: 257105 - protein, 14 aa, Homo sapiens
  CDR3 for alpha chain variable domain of TCR clone 128553 (TRAV26-1, TRAJ26)
CTVRVASYGQNFVF

SEQ ID NO: 257106 - protein, 13 aa, Homo sapiens
  CDR3 for beta chain variable domain of TCR clone 128553 (TRBV4-1, TRBJ2-2)
CASSQENTGELFF

SEQ ID NO: 257107 - protein, 16 aa, Homo sapiens
  CDR3 for alpha chain variable domain of TCR clone 128554 (TRAV26-1, TRAJ33)
CIVPFWGEDSNYQLIW

SEQ ID NO: 257108 - protein, 12 aa, Homo sapiens
  CDR3 for beta chain variable domain of TCR clone 128554 (TRBV7-9, TRBJ1-4)
CASSTDREKLFF

SEQ ID NO: 257109 - protein, 13 aa, Homo sapiens
  CDR3 for alpha chain variable domain of TCR clone 128555 (TRAV12-3, TRAJ7)
CAMSASGNNRLAF

SEQ ID NO: 257110 - protein, 14 aa, Homo sapiens
  CDR3 for beta chain variable domain of TCR clone 128555 (TRBV13, TRBJ2-5)
CASSLSPRGETQYF

SEQ ID NO: 257111 - protein, 14 aa, Homo sapiens
  CDR3 for alpha chain variable domain of TCR clone 128556 (TRAV27, TRAJ42)
CAGGDGGSQGNLIF

SEQ ID NO: 257112 - protein, 20 aa, Homo sapiens
  CDR3 for beta chain variable domain of TCR clone 128556 (TRBV28, TRBJ2-1)
CASTPIGRSPGLAGGNEQFF

SEQ ID NO: 257113 - protein, 16 aa, Homo sapiens
  CDR3 for alpha chain variable domain of TCR clone 128557 (TRAV3, TRAJ37)
CAVGPHGSGNTGKLIF

SEQ ID NO: 257114 - protein, 15 aa, Homo sapiens
  CDR3 for beta chain variable domain of TCR clone 128557 (TRBV6-3, TRBJ2-7)
CASSSPGTVFYEQYF

SEQ ID NO: 257115 - protein, 17 aa, Homo sapiens
  CDR3 for alpha chain variable domain of TCR clone 128558 (TRAV8-1, TRAJ43)
CAVTNDMRFGAGTRLPV

SEQ ID NO: 257116 - protein, 17 aa, Homo sapiens
  CDR3 for beta chain variable domain of TCR clone 128558 (TRBV5-4, TRBJ2-1)
CASSSAGGRGPYNEQFF

SEQ ID NO: 257117 - protein, 15 aa, Homo sapiens
  CDR3 for alpha chain variable domain of TCR clone 128559 (TRAV8-1, TRAJ34)
CAVNSRTYNTDKLIF

SEQ ID NO: 257118 - protein, 15 aa, Homo sapiens
  CDR3 for beta chain variable domain of TCR clone 128559 (TRBV6-4, TRBJ2-1)
CASSSGTSGYNEQFF

SEQ ID NO: 257119 - protein, 12 aa, Homo sapiens
  CDR3 for alpha chain variable domain of TCR clone 128560 (TRAV3, TRAJ26)
CAVRDYGQNFVF

SEQ ID NO: 257120 - protein, 15 aa, Homo sapiens
  CDR3 for beta chain variable domain of TCR clone 128560 (TRBV6-3, TRBJ2-7)
CASSSPGTVFYEQYF

SEQ ID NO: 257121 - protein, 14 aa, Homo sapiens
  CDR3 for alpha chain variable domain of TCR clone 128561 (TRAV8-4, TRAJ8)
CAVSEDTGFQKLVF

SEQ ID NO: 257122 - protein, 14 aa, Homo sapiens
  CDR3 for beta chain variable domain of TCR clone 128561 (TRBV6-1, TRBJ1-3)
CASVQGGGGNTIYF

SEQ ID NO: 257123 - protein, 13 aa, Homo sapiens
  CDR3 for alpha chain variable domain of TCR clone 128562 (TRAV12-2, TRAJ24)
CAVSTDSWGKLQF

SEQ ID NO: 257124 - protein, 14 aa, Homo sapiens
  CDR3 for beta chain variable domain of TCR clone 128562 (TRBV25-1, TRBJ1-1)
CASTHLGGNTEAVF

SEQ ID NO: 257125 - protein, 12 aa, Homo sapiens
  CDR3 for alpha chain variable domain of TCR clone 128563 (TRAV13-1, TRAJ21)
CAAFFNFNKFYF

SEQ ID NO: 257126 - protein, 14 aa, Homo sapiens
  CDR3 for beta chain variable domain of TCR clone 128563 (TRBV25-1, TRBJ1-1)
CASTHLGGNTEAFF

SEQ ID NO: 257127 - protein, 15 aa, Homo sapiens
  CDR3 for alpha chain variable domain of TCR clone 128564 (TRAV29/DV5, TRAJ24)
CAASGATDSWGKFQF

SEQ ID NO: 257128 - protein, 16 aa, Homo sapiens
  CDR3 for beta chain variable domain of TCR clone 128564 (TRBV13, TRBJ2-2)
CASSPRTGEHTGELFF

SEQ ID NO: 257129 - protein, 14 aa, Homo sapiens
  CDR3 for alpha chain variable domain of TCR clone 128565 (TRAV20, TRAJ56)
CAVQFGGANSKLTF

SEQ ID NO: 257130 - protein, 14 aa, Homo sapiens
  CDR3 for beta chain variable domain of TCR clone 128565 (TRBV20-1, TRBJ2-7)
CSAKRGRSSYEQNF

SEQ ID NO: 257131 - protein, 13 aa, Homo sapiens
  CDR3 for alpha chain variable domain of TCR clone 128566 (TRAV4, TRAJ20)
CLVGSSNDYKLSF

SEQ ID NO: 257132 - protein, 14 aa, Homo sapiens
  CDR3 for beta chain variable domain of TCR clone 128566 (TRBV4-2, TRBJ2-1)
CASGLDRAYNEQFF

SEQ ID NO: 257133 - protein, 13 aa, Homo sapiens
  CDR3 for alpha chain variable domain of TCR clone 128567 (TRAV27, TRAJ39)
CAGVNNAGNMPTF

SEQ ID NO: 257134 - protein, 19 aa, Homo sapiens
  CDR3 for beta chain variable domain of TCR clone 128567 (TRBV5-1, TRBJ2-3)
CASSLWLAGGITTTDTQYF

SEQ ID NO: 257135 - protein, 14 aa, Homo sapiens
  CDR3 for alpha chain variable domain of TCR clone 128568 (TRAV16, TRAJ17)
CAPRIKAAGNKLTF

SEQ ID NO: 257136 - protein, 12 aa, Homo sapiens
  CDR3 for beta chain variable domain of TCR clone 128568 (TRBV11-2, TRBJ2-2)
CASSLGGGELFF

SEQ ID NO: 257137 - protein, 14 aa, Homo sapiens
  CDR3 for alpha chain variable domain of TCR clone 128569 (TRAV13-1, TRAJ44)
CAAKATGTASKLTF

SEQ ID NO: 257138 - protein, 17 aa, Homo sapiens
  CDR3 for beta chain variable domain of TCR clone 128569 (TRBV7-3, TRBJ2-3)
RSSSLMKRMRGADTQYF

SEQ ID NO: 257139 - protein, 11 aa, Homo sapiens
  CDR3 for alpha chain variable domain of TCR clone 128570 (TRAV12-2, TRAJ31)
CAILNNARVMF

SEQ ID NO: 257140 - protein, 13 aa, Homo sapiens
  CDR3 for beta chain variable domain of TCR clone 128570 (TRBV20-1, TRBJ1-1)
CSARLGQGTEAFF

SEQ ID NO: 257141 - protein, 11 aa, Homo sapiens
  CDR3 for alpha chain variable domain of TCR clone 128571 (TRAV13-1, TRAJ39)
CASHAGNMLTF

SEQ ID NO: 257142 - protein, 15 aa, Homo sapiens
  CDR3 for beta chain variable domain of TCR clone 128571 (TRBV11-2, TRBJ1-1)
CASSFSTRMNTEAFF

SEQ ID NO: 257143 - protein, 13 aa, Homo sapiens
  CDR3 for alpha chain variable domain of TCR clone 128572 (TRAV2, TRAJ15)
CAVASQAGTALIF

SEQ ID NO: 257144 - protein, 15 aa, Homo sapiens
  CDR3 for beta chain variable domain of TCR clone 128572 (TRBV28, TRBJ1-3)
CASSMGWASGNTIYF

SEQ ID NO: 257145 - protein, 14 aa, Homo sapiens
  CDR3 for alpha chain variable domain of TCR clone 128573 (TRAV8-3, TRAJ23)
CAVGLYNQGGKLIF

SEQ ID NO: 257146 - protein, 15 aa, Homo sapiens
  CDR3 for beta chain variable domain of TCR clone 128573 (TRBV11-3, TRBJ2-3)
CASLKDGREGDTQYF

SEQ ID NO: 257147 - protein, 16 aa, Homo sapiens
  CDR3 for alpha chain variable domain of TCR clone 128574 (TRAV3, TRAJ37)
CAVRGKGSGNTGKLIF

SEQ ID NO: 257148 - protein, 15 aa, Homo sapiens
  CDR3 for beta chain variable domain of TCR clone 128574 (TRBV7-9, TRBJ1-6)
CAISSPGRGNSPLHF

SEQ ID NO: 257149 - protein, 13 aa, Homo sapiens
  CDR3 for alpha chain variable domain of TCR clone 128575 (TRAV2, TRAJ21)
CAVEDLNFNQFYF

SEQ ID NO: 257150 - protein, 15 aa, Homo sapiens
  CDR3 for beta chain variable domain of TCR clone 128575 (TRBV28, TRBJ2-5)
CASSPGQGSIETQYF

SEQ ID NO: 257151 - protein, 12 aa, Homo sapiens
  CDR3 for alpha chain variable domain of TCR clone 128576 (TRAV13-1, TRAJ21)
CAAKEGFNKFYF

SEQ ID NO: 257152 - protein, 19 aa, Homo sapiens
  CDR3 for beta chain variable domain of TCR clone 128576 (TRBV7-9, TRBJ2-1)
CASSHNRGALLRSYNEQFF

SEQ ID NO: 257153 - protein, 12 aa, Homo sapiens
  CDR3 for alpha chain variable domain of TCR clone 128577 (TRAV17, TRAJ4)
CATDGGYNKLIF

SEQ ID NO: 257154 - protein, 13 aa, Homo sapiens
  CDR3 for beta chain variable domain of TCR clone 128577 (TRBV29-1, TRBJ2-2)
CSTTGVNTWELFF

SEQ ID NO: 257155 - protein, 14 aa, Homo sapiens
  CDR3 for alpha chain variable domain of TCR clone 128578 (TRAV3, TRAJ9)
CAVRLNTGGFKTIF

SEQ ID NO: 257156 - protein, 15 aa, Homo sapiens
  CDR3 for beta chain variable domain of TCR clone 128578 (TRBV7-2, TRBJ2-1)
CASSLASGRVNEQFV

SEQ ID NO: 257157 - protein, 12 aa, Homo sapiens
  CDR3 for alpha chain variable domain of TCR clone 128579 (TRAV17, TRAJ39)
CATGAAGNMLTS

SEQ ID NO: 257158 - protein, 14 aa, Homo sapiens
  CDR3 for beta chain variable domain of TCR clone 128579 (TRBV7-9, TRBJ1-2)
CASSRQGANYGYTF

SEQ ID NO: 257159 - protein, 14 aa, Homo sapiens
  CDR3 for alpha chain variable domain of TCR clone 128580 (TRAV17, TRAJ16)
CATADFSDGQKLLF

SEQ ID NO: 257160 - protein, 15 aa, Homo sapiens
  CDR3 for beta chain variable domain of TCR clone 128580 (TRBV18, TRBJ2-1)
CASSPPSTSYNEQFF

SEQ ID NO: 257161 - protein, 14 aa, Homo sapiens
  CDR3 for alpha chain variable domain of TCR clone 128581 (TRAV17, TRAJ53)
CATDAGGSSYKLTF

SEQ ID NO: 257162 - protein, 16 aa, Homo sapiens
  CDR3 for beta chain variable domain of TCR clone 128581 (TRBV4-1, TRBJ1-1)
CASSQDAGMGNTEAFF

SEQ ID NO: 257163 - protein, 12 aa, Homo sapiens
  CDR3 for alpha chain variable domain of TCR clone 128582 (TRAV12-3, TRAJ17)
CTMTLTGNKLTF

SEQ ID NO: 257164 - protein, 13 aa, Homo sapiens
  CDR3 for beta chain variable domain of TCR clone 128582 (TRBV5-1, TRBJ1-2)
CASSSTGVYGYTF

SEQ ID NO: 257165 - protein, 16 aa, Homo sapiens
  CDR3 for alpha chain variable domain of TCR clone 128583 (TRAV13-1, TRAJ48)
CAASIFGNFGNEKLTF

SEQ ID NO: 257166 - protein, 13 aa, Homo sapiens
  CDR3 for beta chain variable domain of TCR clone 128583 (TRBV7-2, TRBJ2-2)
CASSLAVTGELFF

SEQ ID NO: 257167 - protein, 12 aa, Homo sapiens
  CDR3 for alpha chain variable domain of TCR clone 128584 (TRAV12-1, TRAJ40)
CVVYSGTYKYIF

SEQ ID NO: 257168 - protein, 20 aa, Homo sapiens
  CDR3 for beta chain variable domain of TCR clone 128584 (TRBV28, TRBJ2-1)
CASTPIGRSPGLAGGNEQFF

SEQ ID NO: 257169 - protein, 15 aa, Homo sapiens
  CDR3 for alpha chain variable domain of TCR clone 128585 (TRAV3, TRAJ22)
CAVRDRGGSARKLTF

SEQ ID NO: 257170 - protein, 17 aa, Homo sapiens
  CDR3 for beta chain variable domain of TCR clone 128585 (TRBV13, TRBJ2-3)
CASSLSRVAGGRNTQYF

SEQ ID NO: 257171 - protein, 17 aa, Homo sapiens
  CDR3 for alpha chain variable domain of TCR clone 128586 (TRAV27, TRAJ26)
CAGARAPFDNYGQNFVF

SEQ ID NO: 257172 - protein, 15 aa, Homo sapiens
  CDR3 for beta chain variable domain of TCR clone 128586 (TRBV11-2, TRBJ2-5)
CASSPRSGGLETQYF

SEQ ID NO: 257173 - protein, 14 aa, Homo sapiens
  CDR3 for alpha chain variable domain of TCR clone 128587 (TRAV1-2, TRAJ8)
CAVREDTGFQKLVF

SEQ ID NO: 257174 - protein, 13 aa, Homo sapiens
  CDR3 for beta chain variable domain of TCR clone 128587 (TRBV28, TRBJ2-7)
CASSVTWDREMYF

SEQ ID NO: 257175 - protein, 13 aa, Homo sapiens
  CDR3 for alpha chain variable domain of TCR clone 128588 (TRAV8-3, TRAJ28)
CAVGAVGSYQLIF

SEQ ID NO: 257176 - protein, 15 aa, Homo sapiens
  CDR3 for beta chain variable domain of TCR clone 128588 (TRBV7-9, TRBJ1-5)
CASSQGHQPNQPQHF

SEQ ID NO: 257177 - protein, 12 aa, Homo sapiens
  CDR3 for alpha chain variable domain of TCR clone 128589 (TRAV29/DV5, TRAJ49)
CAALNTGNQFYF

SEQ ID NO: 257178 - protein, 15 aa, Homo sapiens
  CDR3 for beta chain variable domain of TCR clone 128589 (TRBV10-3, TRBJ2-3)
CAISLTSGGTDTQYF

SEQ ID NO: 257179 - protein, 14 aa, Homo sapiens
  CDR3 for alpha chain variable domain of TCR clone 128590 (TRAV17, TRAJ16)
CATAAFSDGQKLLF

SEQ ID NO: 257180 - protein, 12 aa, Homo sapiens
  CDR3 for beta chain variable domain of TCR clone 128590 (TRBV24-1, TRBJ1-1)
CATLYPDTEAFF

SEQ ID NO: 257181 - protein, 14 aa, Homo sapiens
  CDR3 for alpha chain variable domain of TCR clone 128591 (TRAV2, TRAJ3)
CAVPPYSSASKIIF

SEQ ID NO: 257182 - protein, 14 aa, Homo sapiens
  CDR3 for beta chain variable domain of TCR clone 128591 (TRBV6-1, TRBJ1-3)
CASVQGGGGNTIYF

SEQ ID NO: 257183 - protein, 14 aa, Homo sapiens
  CDR3 for alpha chain variable domain of TCR clone 128592 (TRAV26-1, TRAJ21)
FIVRPPYNFNKFYF

SEQ ID NO: 257184 - protein, 14 aa, Homo sapiens
  CDR3 for beta chain variable domain of TCR clone 128592 (TRBV11-3, TRBJ2-1)
CASSATTSGSIQFF

SEQ ID NO: 257185 - protein, 13 aa, Homo sapiens
  CDR3 for alpha chain variable domain of TCR clone 128593 (TRAV2, TRAJ15)
CAVASQAGTALIF

SEQ ID NO: 257186 - protein, 15 aa, Homo sapiens
  CDR3 for beta chain variable domain of TCR clone 128593 (TRBV2, TRBJ2-1)
CASSELAGSYNEQFF

SEQ ID NO: 257187 - protein, 14 aa, Homo sapiens
  CDR3 for alpha chain variable domain of TCR clone 128594 (TRAV26-1, TRAJ21)
CIAHTTSTNVTLDL

SEQ ID NO: 257188 - protein, 15 aa, Homo sapiens
  CDR3 for beta chain variable domain of TCR clone 128594 (TRBV20-1, TRBJ2-7)
CSARDRVSGMDEQYF

SEQ ID NO: 257189 - protein, 16 aa, Homo sapiens
  CDR3 for alpha chain variable domain of TCR clone 128595 (TRAV8-3, TRAJ13)
CAVGAYPSGGYQKVTF

SEQ ID NO: 257190 - protein, 15 aa, Homo sapiens
  CDR3 for beta chain variable domain of TCR clone 128595 (TRBV19, TRBJ1-5)
CASSIVWADNQPQHF

SEQ ID NO: 257191 - protein, 13 aa, Homo sapiens
  CDR3 for alpha chain variable domain of TCR clone 128596 (TRAV23/DV6, TRAJ47)
CAASKTRGNKLVF

SEQ ID NO: 257192 - protein, 14 aa, Homo sapiens
  CDR3 for beta chain variable domain of TCR clone 128596 (TRBV7-3, TRBJ1-1)
CASSLKGGNTEAFF

SEQ ID NO: 257193 - protein, 13 aa, Homo sapiens
  CDR3 for alpha chain variable domain of TCR clone 128597 (TRAV12-1, TRAJ17)
CVVNKAAGNKLTF

SEQ ID NO: 257194 - protein, 16 aa, Homo sapiens
  CDR3 for beta chain variable domain of TCR clone 128597 (TRBV27, TRBJ2-2)
CASSFRGLVRTGELFF

SEQ ID NO: 257195 - protein, 14 aa, Homo sapiens
  CDR3 for alpha chain variable domain of TCR clone 128598 (TRAV1-1, TRAJ30)
CAVRSLNGDDKIIF

SEQ ID NO: 257196 - protein, 14 aa, Homo sapiens
  CDR3 for beta chain variable domain of TCR clone 128598 (TRBV7-8, TRBJ2-3)
CASSLEAGTDTQYF

SEQ ID NO: 257197 - protein, 22 aa, Homo sapiens
  CDR3 for alpha chain variable domain of TCR clone 128599 (TRAV4, )
CLVGPHNYDIQNPDPAVYQLRD

SEQ ID NO: 257198 - protein, 14 aa, Homo sapiens
  CDR3 for beta chain variable domain of TCR clone 128599 (TRBV7-3, TRBJ2-2)
CASSSGGYTGELFF

SEQ ID NO: 257199 - protein, 12 aa, Homo sapiens
  CDR3 for alpha chain variable domain of TCR clone 128600 (TRAV21, TRAJ49)
CAVRNTGKQFYF

SEQ ID NO: 257200 - protein, 12 aa, Homo sapiens
  CDR3 for beta chain variable domain of TCR clone 128600 (TRBV7-9, TRBJ2-7)
CATRTDAYEQYF

SEQ ID NO: 257201 - protein, 15 aa, Homo sapiens
  CDR3 for alpha chain variable domain of TCR clone 128601 (TRAV8-3, TRAJ6)
CAVGPLGGGSYIPTF

SEQ ID NO: 257202 - protein, 14 aa, Homo sapiens
  CDR3 for beta chain variable domain of TCR clone 128601 (TRBV19, TRBJ2-1)
CASPTFVLSGEQFF

SEQ ID NO: 257203 - protein, 14 aa, Homo sapiens
  CDR3 for alpha chain variable domain of TCR clone 128602 (TRAV12-2, TRAJ36)
CAVNPPTGANNLFF

SEQ ID NO: 257204 - protein, 13 aa, Homo sapiens
  CDR3 for beta chain variable domain of TCR clone 128602 (TRBV20-1, TRBJ1-6)
CSAPTGLGSPLHV

SEQ ID NO: 257205 - protein, 18 aa, Homo sapiens
  CDR3 for alpha chain variable domain of TCR clone 128603 (TRAV21, TRAJ52)
CAVRPSPAGGTSYGKLTF

SEQ ID NO: 257206 - protein, 13 aa, Homo sapiens
  CDR3 for beta chain variable domain of TCR clone 128603 (TRBV7-3, TRBJ1-1)
CASSQDWGAEAFC

SEQ ID NO: 257207 - protein, 13 aa, Homo sapiens
  CDR3 for alpha chain variable domain of TCR clone 128604 (TRAV20, TRAJ31)
FAVQAWNNARLMF

SEQ ID NO: 257208 - protein, 12 aa, Homo sapiens
  CDR3 for beta chain variable domain of TCR clone 128604 (TRBV11-2, TRBJ2-2)
CASSLGGGELFF

SEQ ID NO: 257209 - protein, 14 aa, Homo sapiens
  CDR3 for alpha chain variable domain of TCR clone 128605 (TRAV5, TRAJ4)
CAASFFGGYNKLIF

SEQ ID NO: 257210 - protein, 19 aa, Homo sapiens
  CDR3 for beta chain variable domain of TCR clone 128605 (TRBV2, TRBJ2-7)
CASSDDETSGRANDYEQYF

SEQ ID NO: 257211 - protein, 16 aa, Homo sapiens
  CDR3 for alpha chain variable domain of TCR clone 128606 (TRAV27, TRAJ13)
CAGAKSDSGGYQKVTF

SEQ ID NO: 257212 - protein, 15 aa, Homo sapiens
  CDR3 for beta chain variable domain of TCR clone 128606 (TRBV29-1, TRBJ2-1)
CSVGRHALFYNELFF

SEQ ID NO: 257213 - protein, 12 aa, Homo sapiens
  CDR3 for alpha chain variable domain of TCR clone 128607 (TRAV17, TRAJ20)
CATQANDYKLSF

SEQ ID NO: 257214 - protein, 18 aa, Homo sapiens
  CDR3 for beta chain variable domain of TCR clone 128607 (TRBV6-5, TRBJ2-1)
CASSYSSRRAGVYNEQFF

SEQ ID NO: 257215 - protein, 15 aa, Homo sapiens
  CDR3 for alpha chain variable domain of TCR clone 128608 (TRAV27, TRAJ38)
CAARRNAGNNSKLIL

SEQ ID NO: 257216 - protein, 13 aa, Homo sapiens
  CDR3 for beta chain variable domain of TCR clone 128608 (TRBV12-5, TRBJ2-3)
CASGDRQSDTQYF

SEQ ID NO: 257217 - protein, 16 aa, Homo sapiens
  CDR3 for alpha chain variable domain of TCR clone 128609 (TRAV14/DV4, TRAJ54)
CAMREGRIQGAQKLVF

SEQ ID NO: 257218 - protein, 15 aa, Homo sapiens
  CDR3 for beta chain variable domain of TCR clone 128609 (TRBV19, TRBJ2-1)
CASSGGGTLYNEQFF

SEQ ID NO: 257219 - protein, 15 aa, Homo sapiens
  CDR3 for alpha chain variable domain of TCR clone 128610 (TRAV12-1, TRAJ10)
CVVNKLTGGGNKLTF

SEQ ID NO: 257220 - protein, 17 aa, Homo sapiens
  CDR3 for beta chain variable domain of TCR clone 128610 (TRBV5-1, TRBJ1-6)
CASSPSRQGSDNSPLHF

SEQ ID NO: 257221 - protein, 14 aa, Homo sapiens
  CDR3 for alpha chain variable domain of TCR clone 128611 (TRAV1-2, TRAJ16)
CAVNRFSDGQKPLL

SEQ ID NO: 257222 - protein, 11 aa, Homo sapiens
  CDR3 for beta chain variable domain of TCR clone 128611 (TRBV29-1, TRBJ2-5)
CSEDRTGTQYF

SEQ ID NO: 257223 - protein, 11 aa, Homo sapiens
  CDR3 for alpha chain variable domain of TCR clone 128612 (TRAV2, TRAJ13)
CASGGYQKVTF

SEQ ID NO: 257224 - protein, 13 aa, Homo sapiens
  CDR3 for beta chain variable domain of TCR clone 128612 (TRBV2, TRBJ1-5)
CATAGPGNQPQHF

SEQ ID NO: 257225 - protein, 16 aa, Homo sapiens
  CDR3 for alpha chain variable domain of TCR clone 128613 (TRAV3, TRAJ10)
CAVRDMRAGGGNKLTF

SEQ ID NO: 257226 - protein, 14 aa, Homo sapiens
  CDR3 for beta chain variable domain of TCR clone 128613 (TRBV7-3, TRBJ2-1)
CASSLSGSYNEQFF

SEQ ID NO: 257227 - protein, 14 aa, Homo sapiens
  CDR3 for alpha chain variable domain of TCR clone 128614 (TRAV12-2, TRAJ13)
CAVKQTGGYQKVTF

SEQ ID NO: 257228 - protein, 13 aa, Homo sapiens
  CDR3 for beta chain variable domain of TCR clone 128614 (TRBV20-1, TRBJ1-1)
CSARGGGNTEAFF

SEQ ID NO: 257229 - protein, 15 aa, Homo sapiens
  CDR3 for alpha chain variable domain of TCR clone 128615 (TRAV8-4, TRAJ3)
CAVTGENLVQQCFQD

SEQ ID NO: 257230 - protein, 16 aa, Homo sapiens
  CDR3 for beta chain variable domain of TCR clone 128615 (TRBV7-3, TRBJ2-2)
CASSLKRGTLSGELFF

SEQ ID NO: 257231 - protein, 14 aa, Homo sapiens
  CDR3 for alpha chain variable domain of TCR clone 128616 (TRAV12-2, TRAJ45)
CAVNIGGGSDGLTF

SEQ ID NO: 257232 - protein, 13 aa, Homo sapiens
  CDR3 for beta chain variable domain of TCR clone 128616 (TRBV19, TRBJ2-2)
CASSIWSTGELFF

SEQ ID NO: 257233 - protein, 16 aa, Homo sapiens
  CDR3 for alpha chain variable domain of TCR clone 128617 (TRAV30, TRAJ49)
SAAQRVGPNTGNQFYF

SEQ ID NO: 257234 - protein, 15 aa, Homo sapiens
  CDR3 for beta chain variable domain of TCR clone 128617 (TRBV2, TRBJ2-1)
CASSELAGSDNEQFF

SEQ ID NO: 257235 - protein, 15 aa, Homo sapiens
  CDR3 for alpha chain variable domain of TCR clone 128618 (TRAV8-4, TRAJ3)
CAVTGENLVQQCFQD

SEQ ID NO: 257236 - protein, 16 aa, Homo sapiens
  CDR3 for beta chain variable domain of TCR clone 128618 (TRBV4-2, TRBJ1-1)
CAGSQAGFGMNTEAFF

SEQ ID NO: 257237 - protein, 11 aa, Homo sapiens
  CDR3 for alpha chain variable domain of TCR clone 128619 (TRAV13-1, TRAJ49)
CACVGGNQFYF

SEQ ID NO: 257238 - protein, 16 aa, Homo sapiens
  CDR3 for beta chain variable domain of TCR clone 128619 (TRBV11-2, TRBJ2-2)
CASSLRTENLIGELFF

SEQ ID NO: 257239 - protein, 23 aa, Homo sapiens
  CDR3 for alpha chain variable domain of TCR clone 128620 (TRAV26-1, )
CIADNAGNDHIQNPDPAVYQLRD

SEQ ID NO: 257240 - protein, 13 aa, Homo sapiens
  CDR3 for beta chain variable domain of TCR clone 128620 (TRBV20-1, TRBJ1-1)
CSARGGGNTEAFI

SEQ ID NO: 257241 - protein, 11 aa, Homo sapiens
  CDR3 for alpha chain variable domain of TCR clone 128621 (TRAV16, TRAJ33)
CALHSNYQLIW

SEQ ID NO: 257242 - protein, 15 aa, Homo sapiens
  CDR3 for beta chain variable domain of TCR clone 128621 (TRBV4-1, TRBJ2-7)
CASSQPGQGFDEQYF

SEQ ID NO: 257243 - protein, 16 aa, Homo sapiens
  CDR3 for alpha chain variable domain of TCR clone 128622 (TRAV30, TRAJ24)
CGTEIVDADSWGKFQF

SEQ ID NO: 257244 - protein, 12 aa, Homo sapiens
  CDR3 for beta chain variable domain of TCR clone 128622 (TRBV12-4, TRBJ2-3)
CASSSTTDTKYF

SEQ ID NO: 257245 - protein, 17 aa, Homo sapiens
  CDR3 for alpha chain variable domain of TCR clone 128623 (TRAV3, TRAJ38)
CAVRDCLNAGNNRKLIW

SEQ ID NO: 257246 - protein, 11 aa, Homo sapiens
  CDR3 for beta chain variable domain of TCR clone 128623 (TRBV11-2, TRBJ2-2)
CASSLPGELFF

SEQ ID NO: 257247 - protein, 15 aa, Homo sapiens
  CDR3 for alpha chain variable domain of TCR clone 128624 (TRAV8-6, TRAJ23)
CAVRLIYNQGGKLIF

SEQ ID NO: 257248 - protein, 14 aa, Homo sapiens
  CDR3 for beta chain variable domain of TCR clone 128624 (TRBV2, TRBJ2-3)
CASSEGQNTDTQYF

SEQ ID NO: 257249 - protein, 12 aa, Homo sapiens
  CDR3 for alpha chain variable domain of TCR clone 128625 (TRAV8-6, TRAJ27)
CAVSEEEGKSTF

SEQ ID NO: 257250 - protein, 13 aa, Homo sapiens
  CDR3 for beta chain variable domain of TCR clone 128625 (TRBV29-1, TRBJ2-1)
CSVEGGRVNEQFF

SEQ ID NO: 257251 - protein, 15 aa, Homo sapiens
  CDR3 for alpha chain variable domain of TCR clone 128626 (TRAV3, TRAJ3)
CAVRDRDSSSSKLIF

SEQ ID NO: 257252 - protein, 18 aa, Homo sapiens
  CDR3 for beta chain variable domain of TCR clone 128626 (TRBV25-1, TRBJ1-2)
CASSGLQNGQGLIFGYTF

SEQ ID NO: 257253 - protein, 13 aa, Homo sapiens
  CDR3 for alpha chain variable domain of TCR clone 128627 (TRAV35, TRAJ43)
CAGYPYNNNDMRF

SEQ ID NO: 257254 - protein, 15 aa, Homo sapiens
  CDR3 for beta chain variable domain of TCR clone 128627 (TRBV25-1, TRBJ1-4)
CASSKRIATNEKLFL

SEQ ID NO: 257255 - protein, 12 aa, Homo sapiens
  CDR3 for alpha chain variable domain of TCR clone 128628 (TRAV12-3, TRAJ17)
CAMTLTGNKPTF

SEQ ID NO: 257256 - protein, 15 aa, Homo sapiens
  CDR3 for beta chain variable domain of TCR clone 128628 (TRBV20-1, TRBJ2-7)
CSARDQVSGMDEQYF

SEQ ID NO: 257257 - protein, 10 aa, Homo sapiens
  CDR3 for alpha chain variable domain of TCR clone 128629 (TRAV36/DV7, TRAJ49)
CALTGNQFYF

SEQ ID NO: 257258 - protein, 15 aa, Homo sapiens
  CDR3 for beta chain variable domain of TCR clone 128629 (TRBV7-9, TRBJ1-6)
CASSSPGRGNSPLHF

SEQ ID NO: 257259 - protein, 11 aa, Homo sapiens
  CDR3 for alpha chain variable domain of TCR clone 128630 (TRAV4, TRAJ23)
CLVAPGGKLIF

SEQ ID NO: 257260 - protein, 15 aa, Homo sapiens
  CDR3 for beta chain variable domain of TCR clone 128630 (TRBV7-2, TRBJ2-1)
CASSFQADEYNEQVF

SEQ ID NO: 257261 - protein, 13 aa, Homo sapiens
  CDR3 for alpha chain variable domain of TCR clone 128631 (TRAV8-6, TRAJ34)
CAVSDQGTDKLIF

SEQ ID NO: 257262 - protein, 16 aa, Homo sapiens
  CDR3 for beta chain variable domain of TCR clone 128631 (TRBV28, TRBJ1-2)
CASSHGQGVYKDGYTF

SEQ ID NO: 257263 - protein, 17 aa, Homo sapiens
  CDR3 for alpha chain variable domain of TCR clone 128632 (TRAV3, TRAJ12)
CAVRDGGRLDSSYKLIF

SEQ ID NO: 257264 - protein, 12 aa, Homo sapiens
  CDR3 for beta chain variable domain of TCR clone 128632 (TRBV11-2, TRBJ2-2)
CASSLGGGELFF

SEQ ID NO: 257265 - protein, 13 aa, Homo sapiens
  CDR3 for alpha chain variable domain of TCR clone 128633 (TRAV8-3, TRAJ28)
CAVGAVGSYQLTF

SEQ ID NO: 257266 - protein, 15 aa, Homo sapiens
  CDR3 for beta chain variable domain of TCR clone 128633 (TRBV11-2, TRBJ2-2)
CASSSDRVNAGELFF

SEQ ID NO: 257267 - protein, 12 aa, Homo sapiens
  CDR3 for alpha chain variable domain of TCR clone 128634 (TRAV13-2, TRAJ23)
CAERHRGGKLIF

SEQ ID NO: 257268 - protein, 16 aa, Homo sapiens
  CDR3 for beta chain variable domain of TCR clone 128634 (TRBV5-4, TRBJ2-7)
CASSSKMTSGTYEQYF

SEQ ID NO: 257269 - protein, 13 aa, Homo sapiens
  CDR3 for alpha chain variable domain of TCR clone 128635 (TRAV13-1, TRAJ39)
CAASIVMQATCSP

SEQ ID NO: 257270 - protein, 15 aa, Homo sapiens
  CDR3 for beta chain variable domain of TCR clone 128635 (TRBV11-2, TRBJ2-2)
CASSSDRVNAGELFF

SEQ ID NO: 257271 - protein, 11 aa, Homo sapiens
  CDR3 for alpha chain variable domain of TCR clone 128636 (TRAV13-1, TRAJ23)
CAASSRGKLIF

SEQ ID NO: 257272 - protein, 13 aa, Homo sapiens
  CDR3 for beta chain variable domain of TCR clone 128636 (TRBV12-4, TRBJ2-7)
CASSLERVREQYF

SEQ ID NO: 257273 - protein, 15 aa, Homo sapiens
  CDR3 for alpha chain variable domain of TCR clone 128637 (TRAV27, TRAJ38)
CAARRNAGNNRKLIW

SEQ ID NO: 257274 - protein, 14 aa, Homo sapiens
  CDR3 for beta chain variable domain of TCR clone 128637 (TRBV7-2, TRBJ2-5)
CASSPRGSSETQYF

SEQ ID NO: 257275 - protein, 12 aa, Homo sapiens
  CDR3 for alpha chain variable domain of TCR clone 128638 (TRAV13-1, TRAJ49)
CAAPNTGNQFYF

SEQ ID NO: 257276 - protein, 15 aa, Homo sapiens
  CDR3 for beta chain variable domain of TCR clone 128638 (TRBV7-9, TRBJ1-5)
CASSQGHQPNQPQHF

SEQ ID NO: 257277 - protein, 16 aa, Homo sapiens
  CDR3 for alpha chain variable domain of TCR clone 128639 (TRAV3, TRAJ37)
CAVRGKGSGNTGKLIF

SEQ ID NO: 257278 - protein, 13 aa, Homo sapiens
  CDR3 for beta chain variable domain of TCR clone 128639 (TRBV7-9, TRBJ2-5)
CASGKVGIETQYF

SEQ ID NO: 257279 - protein, 16 aa, Homo sapiens
  CDR3 for alpha chain variable domain of TCR clone 128640 (TRAV13-1, TRAJ48)
CAVSIFGNFGNEKLTF

SEQ ID NO: 257280 - protein, 16 aa, Homo sapiens
  CDR3 for beta chain variable domain of TCR clone 128640 (TRBV7-2, TRBJ2-6)
CASSERRASGANVLTF

SEQ ID NO: 257281 - protein, 13 aa, Homo sapiens
  CDR3 for alpha chain variable domain of TCR clone 128641 (TRAV3, TRAJ3)
CAVADSSASKIIF

SEQ ID NO: 257282 - protein, 15 aa, Homo sapiens
  CDR3 for beta chain variable domain of TCR clone 128641 (TRBV7-9, TRBJ1-5)
CASSQGHQPNQPQHF

SEQ ID NO: 257283 - protein, 14 aa, Homo sapiens
  CDR3 for alpha chain variable domain of TCR clone 128642 (TRAV23/DV6, TRAJ28)
CAASSGAGSYQLTF

SEQ ID NO: 257284 - protein, 13 aa, Homo sapiens
  CDR3 for beta chain variable domain of TCR clone 128642 (TRBV7-6, TRBJ2-1)
CASSKTVYNEQFF

SEQ ID NO: 257285 - protein, 13 aa, Homo sapiens
  CDR3 for alpha chain variable domain of TCR clone 128643 (TRAV30, TRAJ24)
CGTVTDSWGKLQF

SEQ ID NO: 257286 - protein, 15 aa, Homo sapiens
  CDR3 for beta chain variable domain of TCR clone 128643 (TRBV25-1, TRBJ1-4)
CASSPGDITNEKLFF

SEQ ID NO: 257287 - protein, 16 aa, Homo sapiens
  CDR3 for alpha chain variable domain of TCR clone 128644 (TRAV23/DV6, TRAJ9)
CAASIGGNTGGFKTIF

SEQ ID NO: 257288 - protein, 12 aa, Homo sapiens
  CDR3 for beta chain variable domain of TCR clone 128644 (TRBV11-2, TRBJ2-1)
CASGVQREGQFF

SEQ ID NO: 257289 - protein, 16 aa, Homo sapiens
  CDR3 for alpha chain variable domain of TCR clone 128645 (TRAV30, TRAJ24)
CGTEIVDADSWGKFQF

SEQ ID NO: 257290 - protein, 13 aa, Homo sapiens
  CDR3 for beta chain variable domain of TCR clone 128645 (TRBV10-2, TRBJ2-3)
CASSESGDHTQYF

SEQ ID NO: 257291 - protein, 16 aa, Homo sapiens
  CDR3 for alpha chain variable domain of TCR clone 128646 (TRAV30, TRAJ24)
CGTEIVDADSWGKFQF

SEQ ID NO: 257292 - protein, 12 aa, Homo sapiens
  CDR3 for beta chain variable domain of TCR clone 128646 (TRBV7-8, TRBJ1-1)
CASGTATTEAFF

SEQ ID NO: 257293 - protein, 15 aa, Homo sapiens
  CDR3 for alpha chain variable domain of TCR clone 128647 (TRAV26-1, TRAJ40)
CIVRVTTSGTYKYIF

SEQ ID NO: 257294 - protein, 14 aa, Homo sapiens
  CDR3 for beta chain variable domain of TCR clone 128647 (TRBV19, TRBJ2-1)
CASEVTGARNEQFF

SEQ ID NO: 257295 - protein, 14 aa, Homo sapiens
  CDR3 for alpha chain variable domain of TCR clone 128648 (TRAV23/DV6, TRAJ4)
CAAPSSGGYNKLIF

SEQ ID NO: 257296 - protein, 12 aa, Homo sapiens
  CDR3 for beta chain variable domain of TCR clone 128648 (TRBV14, TRBJ1-1)
CASSQLKGLAFF

SEQ ID NO: 257297 - protein, 16 aa, Homo sapiens
  CDR3 for alpha chain variable domain of TCR clone 128649 (TRAV12-2, TRAJ32)
CAVNLGQGGATNKLIF

SEQ ID NO: 257298 - protein, 12 aa, Homo sapiens
  CDR3 for beta chain variable domain of TCR clone 128649 (TRBV3-1, TRBJ2-1)
CASGGLGNEQFF

SEQ ID NO: 257299 - protein, 14 aa, Homo sapiens
  CDR3 for alpha chain variable domain of TCR clone 128650 (TRAV1-2, TRAJ16)
CAVNRFSDGQKLLF

SEQ ID NO: 257300 - protein, 17 aa, Homo sapiens
  CDR3 for beta chain variable domain of TCR clone 128650 (TRBV15, TRBJ1-2)
CTTSGREIDVVNYGYTF

SEQ ID NO: 257301 - protein, 17 aa, Homo sapiens
  CDR3 for alpha chain variable domain of TCR clone 128651 (TRAV3, TRAJ42)
CAVRDRDYGGSQGNLIF

SEQ ID NO: 257302 - protein, 13 aa, Homo sapiens
  CDR3 for beta chain variable domain of TCR clone 128651 (TRBV7-9, TRBJ2-5)
CASLPSGRETQYF

SEQ ID NO: 257303 - protein, 15 aa, Homo sapiens
  CDR3 for alpha chain variable domain of TCR clone 128652 (TRAV3, TRAJ22)
CAVRDRGGSARQLTF

SEQ ID NO: 257304 - protein, 15 aa, Homo sapiens
  CDR3 for beta chain variable domain of TCR clone 128652 (TRBV9, TRBJ2-1)
CASSLAGSSYNEQFF

SEQ ID NO: 257305 - protein, 14 aa, Homo sapiens
  CDR3 for alpha chain variable domain of TCR clone 128653 (TRAV25, TRAJ35)
CARRLEGFGNVLHC

SEQ ID NO: 257306 - protein, 13 aa, Homo sapiens
  CDR3 for beta chain variable domain of TCR clone 128653 (TRBV7-2, TRBJ1-4)
CASSLAGLEKLFF

SEQ ID NO: 257307 - protein, 12 aa, Homo sapiens
  CDR3 for alpha chain variable domain of TCR clone 128654 (TRAV2, TRAJ29)
CAVDSGNTPLVF

SEQ ID NO: 257308 - protein, 14 aa, Homo sapiens
  CDR3 for beta chain variable domain of TCR clone 128654 (TRBV7-8, TRBJ2-7)
CASSLRGSPYEQYF

SEQ ID NO: 257309 - protein, 17 aa, Homo sapiens
  CDR3 for alpha chain variable domain of TCR clone 128655 (TRAV26-1, TRAJ37)
CIVRVITVSSNTGKLIF

SEQ ID NO: 257310 - protein, 17 aa, Homo sapiens
  CDR3 for beta chain variable domain of TCR clone 128655 (TRBV20-1, TRBJ2-1)
CSASSSGLAGSYNEQFF

SEQ ID NO: 257311 - protein, 16 aa, Homo sapiens
  CDR3 for alpha chain variable domain of TCR clone 128656 (TRAV3, TRAJ37)
CAVRGKGSGSTGKLIF

SEQ ID NO: 257312 - protein, 20 aa, Homo sapiens
  CDR3 for beta chain variable domain of TCR clone 128656 (TRBV7-8, TRBJ2-2)
CASSHLFPGPTIHITGELFF

SEQ ID NO: 257313 - protein, 15 aa, Homo sapiens
  CDR3 for alpha chain variable domain of TCR clone 128657 (TRAV3, TRAJ27)
CAVRDPLTTAGKSTF

SEQ ID NO: 257314 - protein, 15 aa, Homo sapiens
  CDR3 for beta chain variable domain of TCR clone 128657 (TRBV28, TRBJ2-1)
CASSIIAGGRSEQFF

SEQ ID NO: 257315 - protein, 14 aa, Homo sapiens
  CDR3 for alpha chain variable domain of TCR clone 128658 (TRAV12-2, TRAJ17)
CAVLFKAAGNKLTF

SEQ ID NO: 257316 - protein, 16 aa, Homo sapiens
  CDR3 for beta chain variable domain of TCR clone 128658 (TRBV7-3, TRBJ2-1)
CASSLEGYRSYNEQFF

SEQ ID NO: 257317 - protein, 16 aa, Homo sapiens
  CDR3 for alpha chain variable domain of TCR clone 128659 (TRAV27, TRAJ13)
CAGAKSDSGGSQKVTF

SEQ ID NO: 257318 - protein, 15 aa, Homo sapiens
  CDR3 for beta chain variable domain of TCR clone 128659 (TRBV29-1, TRBJ2-1)
CSVGRHALFYNEQFF

SEQ ID NO: 257319 - protein, 14 aa, Homo sapiens
  CDR3 for alpha chain variable domain of TCR clone 128660 (TRAV21, TRAJ52)
CGRAGGTSHGKLTF

SEQ ID NO: 257320 - protein, 15 aa, Homo sapiens
  CDR3 for beta chain variable domain of TCR clone 128660 (TRBV6-3, TRBJ2-2)
CASSFLATLTGELFF

SEQ ID NO: 257321 - protein, 13 aa, Homo sapiens
  CDR3 for alpha chain variable domain of TCR clone 128661 (TRAV16, TRAJ48)
CSPLNFGNEKLTF

SEQ ID NO: 257322 - protein, 11 aa, Homo sapiens
  CDR3 for beta chain variable domain of TCR clone 128661 (TRBV7-9, TRBJ2-3)
RASSPTDTQYF

SEQ ID NO: 257323 - protein, 13 aa, Homo sapiens
  CDR3 for alpha chain variable domain of TCR clone 128662 (TRAV20, TRAJ35)
CAVQEGFGSVLHC

SEQ ID NO: 257324 - protein, 14 aa, Homo sapiens
  CDR3 for beta chain variable domain of TCR clone 128662 (TRBV5-1, TRBJ1-1)
CASSSATGGTEAFF

SEQ ID NO: 257325 - protein, 14 aa, Homo sapiens
  CDR3 for alpha chain variable domain of TCR clone 128663 (TRAV12-1, TRAJ23)
CVVMIYNQGGKLIF

SEQ ID NO: 257326 - protein, 23 aa, Homo sapiens
  CDR3 for beta chain variable domain of TCR clone 128663 (TRBV7-3, TRBJ1-6)
CSSSLTSRDEASDPSSYNSPLHF

SEQ ID NO: 257327 - protein, 12 aa, Homo sapiens
  CDR3 for alpha chain variable domain of TCR clone 128664 (TRAV12-2, TRAJ52)
IGGGTSYGKLTF

SEQ ID NO: 257328 - protein, 13 aa, Homo sapiens
  CDR3 for beta chain variable domain of TCR clone 128664 (TRBV20-1, TRBJ2-1)
CSARDLVSNEQFF

SEQ ID NO: 257329 - protein, 15 aa, Homo sapiens
  CDR3 for alpha chain variable domain of TCR clone 128665 (TRAV13-1, TRAJ3)
CAASKLASSASKIIF

SEQ ID NO: 257330 - protein, 16 aa, Homo sapiens
  CDR3 for beta chain variable domain of TCR clone 128665 (TRBV25-1, TRBJ1-5)
CTSGAPTVNSNQPQHF

SEQ ID NO: 257331 - protein, 18 aa, Homo sapiens
  CDR3 for alpha chain variable domain of TCR clone 128666 (TRAV12-3, TRAJ52)
CAMSVGGAGGTSYGKLTF

SEQ ID NO: 257332 - protein, 14 aa, Homo sapiens
  CDR3 for beta chain variable domain of TCR clone 128666 (TRBV20-1, TRBJ2-5)
CSAHRQGLWETQYF

SEQ ID NO: 257333 - protein, 11 aa, Homo sapiens
  CDR3 for alpha chain variable domain of TCR clone 128667 (TRAV17, TRAJ43)
CATPRSNDKRF

SEQ ID NO: 257334 - protein, 15 aa, Homo sapiens
  CDR3 for beta chain variable domain of TCR clone 128667 (TRBV11-2, TRBJ2-1)
CASSLGTSGLNEQFF

SEQ ID NO: 257335 - protein, 12 aa, Homo sapiens
  CDR3 for alpha chain variable domain of TCR clone 128668 (TRAV17, TRAJ20)
CATDRYDYKLSF

SEQ ID NO: 257336 - protein, 14 aa, Homo sapiens
  CDR3 for beta chain variable domain of TCR clone 128668 (TRBV19, TRBJ2-1)
CASPTFVLSGEQFL

SEQ ID NO: 257337 - protein, 13 aa, Homo sapiens
  CDR3 for alpha chain variable domain of TCR clone 128669 (TRAV8-1, TRAJ30)
CAVIMNRDDKIIF

SEQ ID NO: 257338 - protein, 14 aa, Homo sapiens
  CDR3 for beta chain variable domain of TCR clone 128669 (TRBV7-2, TRBJ1-6)
CAISLQGANSPLHF

SEQ ID NO: 257339 - protein, 15 aa, Homo sapiens
  CDR3 for alpha chain variable domain of TCR clone 128670 (TRAV12-2, TRAJ24)
CAVRMTTDSWGKFQF

SEQ ID NO: 257340 - protein, 15 aa, Homo sapiens
  CDR3 for beta chain variable domain of TCR clone 128670 (TRBV11-2, TRBJ1-3)
CASSIWGSYGNTIYF

SEQ ID NO: 257341 - protein, 13 aa, Homo sapiens
  CDR3 for alpha chain variable domain of TCR clone 128671 (TRAV2, TRAJ23)
CAVMGNQGGKLIF

SEQ ID NO: 257342 - protein, 17 aa, Homo sapiens
  CDR3 for beta chain variable domain of TCR clone 128671 (TRBV11-2, TRBJ2-1)
CASSLYPPGVEYNEQFF

SEQ ID NO: 257343 - protein, 14 aa, Homo sapiens
  CDR3 for alpha chain variable domain of TCR clone 128672 (TRAV13-1, TRAJ40)
FAASMTSGTYKYIF

SEQ ID NO: 257344 - protein, 15 aa, Homo sapiens
  CDR3 for beta chain variable domain of TCR clone 128672 (TRBV7-3, TRBJ2-1)
CASSPTGGGEVEQFF

SEQ ID NO: 257345 - protein, 12 aa, Homo sapiens
  CDR3 for alpha chain variable domain of TCR clone 128673 (TRAV13-2, TRAJ39)
CAENNAGHMLTF

SEQ ID NO: 257346 - protein, 12 aa, Homo sapiens
  CDR3 for beta chain variable domain of TCR clone 128673 (TRBV11-2, TRBJ2-2)
CASSLGGGELFF

SEQ ID NO: 257347 - protein, 16 aa, Homo sapiens
  CDR3 for alpha chain variable domain of TCR clone 128674 (TRAV3, TRAJ10)
CAVRDMRAGGGNKLTF

SEQ ID NO: 257348 - protein, 11 aa, Homo sapiens
  CDR3 for beta chain variable domain of TCR clone 128674 (TRBV27, TRBJ2-5)
CATLAGETQYF

SEQ ID NO: 257349 - protein, 14 aa, Homo sapiens
  CDR3 for alpha chain variable domain of TCR clone 128675 (TRAV12-3, TRAJ10)
SHLPLTGGGNKLTF

SEQ ID NO: 257350 - protein, 13 aa, Homo sapiens
  CDR3 for beta chain variable domain of TCR clone 128675 (TRBV7-2, TRBJ2-4)
CASSREHANIQYF

SEQ ID NO: 257351 - protein, 13 aa, Homo sapiens
  CDR3 for alpha chain variable domain of TCR clone 128676 (TRAV8-6, TRAJ49)
CAVITNTGNQVYF

SEQ ID NO: 257352 - protein, 12 aa, Homo sapiens
  CDR3 for beta chain variable domain of TCR clone 128676 (TRBV11-2, TRBJ2-2)
CASSLGGGELFF

SEQ ID NO: 257353 - protein, 14 aa, Homo sapiens
  CDR3 for alpha chain variable domain of TCR clone 128677 (TRAV23/DV6, TRAJ8)
CAASKATGFQKLVF

SEQ ID NO: 257354 - protein, 15 aa, Homo sapiens
  CDR3 for beta chain variable domain of TCR clone 128677 (TRBV28, TRBJ2-3)
CASRPDRQGANTQYF

SEQ ID NO: 257355 - protein, 16 aa, Homo sapiens
  CDR3 for alpha chain variable domain of TCR clone 128678 (TRAV30, TRAJ24)
CGTEIVDADSWGKFQF

SEQ ID NO: 257356 - protein, 15 aa, Homo sapiens
  CDR3 for beta chain variable domain of TCR clone 128678 (TRBV5-1, TRBJ2-6)
CASSLEGSGANVLTF

SEQ ID NO: 257357 - protein, 14 aa, Homo sapiens
  CDR3 for alpha chain variable domain of TCR clone 128679 (TRAV21, TRAJ28)
CAVGSGAGSYQLTF

SEQ ID NO: 257358 - protein, 14 aa, Homo sapiens
  CDR3 for beta chain variable domain of TCR clone 128679 (TRBV18, TRBJ1-4)
CASSPGTNGEKLFF

SEQ ID NO: 257359 - protein, 12 aa, Homo sapiens
  CDR3 for alpha chain variable domain of TCR clone 128680 (TRAV12-1, TRAJ40)
CVFYSATYKYIF

SEQ ID NO: 257360 - protein, 18 aa, Homo sapiens
  CDR3 for beta chain variable domain of TCR clone 128680 (TRBV12-4, TRBJ2-2)
CASSLVAGTRGRTGELFF

SEQ ID NO: 257361 - protein, 11 aa, Homo sapiens
  CDR3 for alpha chain variable domain of TCR clone 128681 (TRAV2, TRAJ33)
CAVESNYQLIW

SEQ ID NO: 257362 - protein, 13 aa, Homo sapiens
  CDR3 for beta chain variable domain of TCR clone 128681 (TRBV7-6, TRBJ1-2)
CASSLVADYGYTF

SEQ ID NO: 257363 - protein, 16 aa, Homo sapiens
  CDR3 for alpha chain variable domain of TCR clone 128682 (TRAV27, TRAJ52)
CVGAPAGGTSYGKLTF

SEQ ID NO: 257364 - protein, 12 aa, Homo sapiens
  CDR3 for beta chain variable domain of TCR clone 128682 (TRBV27, TRBJ2-1)
CASRGFYNEQFF

SEQ ID NO: 257365 - protein, 15 aa, Homo sapiens
  CDR3 for alpha chain variable domain of TCR clone 128683 (TRAV38-1, TRAJ37)
CAFIFGSGNSGKLIF

SEQ ID NO: 257366 - protein, 12 aa, Homo sapiens
  CDR3 for beta chain variable domain of TCR clone 128683 (TRBV7-9, TRBJ2-7)
CASSLEGYEQYF

SEQ ID NO: 257367 - protein, 13 aa, Homo sapiens
  CDR3 for alpha chain variable domain of TCR clone 128684 (TRAV2, TRAJ40)
CAVVTSGTYKYIF

SEQ ID NO: 257368 - protein, 15 aa, Homo sapiens
  CDR3 for beta chain variable domain of TCR clone 128684 (TRBV11-3, TRBJ2-3)
CPSLKDGREGDTQYF

SEQ ID NO: 257369 - protein, 22 aa, Homo sapiens
  CDR3 for alpha chain variable domain of TCR clone 128685 (TRAV12-1, )
CVVPAGNNHIQNPDPAVYQLRD

SEQ ID NO: 257370 - protein, 13 aa, Homo sapiens
  CDR3 for beta chain variable domain of TCR clone 128685 (TRBV7-9, TRBJ1-2)
CASSLKQNYGYTF

SEQ ID NO: 257371 - protein, 14 aa, Homo sapiens
  CDR3 for alpha chain variable domain of TCR clone 128686 (TRAV8-4, TRAJ13)
CAVTLSRGYQKVTF

SEQ ID NO: 257372 - protein, 16 aa, Homo sapiens
  CDR3 for beta chain variable domain of TCR clone 128686 (TRBV19, TRBJ2-2)
CASRSPGTGATGELFF

SEQ ID NO: 257373 - protein, 11 aa, Homo sapiens
  CDR3 for alpha chain variable domain of TCR clone 128687 (TRAV1-1, TRAJ23)
CAVRQGGKLIF

SEQ ID NO: 257374 - protein, 15 aa, Homo sapiens
  CDR3 for beta chain variable domain of TCR clone 128687 (TRBV5-1, TRBJ2-7)
CASSLYPDGGYEQYF

SEQ ID NO: 257375 - protein, 14 aa, Homo sapiens
  CDR3 for alpha chain variable domain of TCR clone 128688 (TRAV1-1, TRAJ27)
CAVIYNTNAGKSTF

SEQ ID NO: 257376 - protein, 15 aa, Homo sapiens
  CDR3 for beta chain variable domain of TCR clone 128688 (TRBV6-3, TRBJ2-7)
CASSSPGTVVYEQYF

SEQ ID NO: 257377 - protein, 14 aa, Homo sapiens
  CDR3 for alpha chain variable domain of TCR clone 128689 (TRAV2, TRAJ37)
CAVDFTSNTGKLIF

SEQ ID NO: 257378 - protein, 12 aa, Homo sapiens
  CDR3 for beta chain variable domain of TCR clone 128689 (TRBV12-4, TRBJ2-7)
CASNPGGGEQYF

SEQ ID NO: 257379 - protein, 14 aa, Homo sapiens
  CDR3 for alpha chain variable domain of TCR clone 128690 (TRAV21, TRAJ35)
CAVMPIGFGNVLHC

SEQ ID NO: 257380 - protein, 19 aa, Homo sapiens
  CDR3 for beta chain variable domain of TCR clone 128690 (TRBV28, TRBJ2-7)
CASSYSGTSRLGWVYEQYF

SEQ ID NO: 257381 - protein, 13 aa, Homo sapiens
  CDR3 for alpha chain variable domain of TCR clone 128691 (TRAV2, TRAJ29)
CAVYSSGNTPLVF

SEQ ID NO: 257382 - protein, 14 aa, Homo sapiens
  CDR3 for beta chain variable domain of TCR clone 128691 (TRBV7-9, TRBJ1-1)
CASSLGGLKTEAFL

SEQ ID NO: 257383 - protein, 12 aa, Homo sapiens
  CDR3 for alpha chain variable domain of TCR clone 128692 (TRAV38-1, TRAJ30)
CASMNRDDKIIF

SEQ ID NO: 257384 - protein, 13 aa, Homo sapiens
  CDR3 for beta chain variable domain of TCR clone 128692 (TRBV7-2, TRBJ2-7)
CASSSPSGSEQYF

SEQ ID NO: 257385 - protein, 11 aa, Homo sapiens
  CDR3 for alpha chain variable domain of TCR clone 128693 (TRAV21, TRAJ34)
CAHYNTDKLIF

SEQ ID NO: 257386 - protein, 15 aa, Homo sapiens
  CDR3 for beta chain variable domain of TCR clone 128693 (TRBV7-2, TRBJ2-1)
CASSSGLAGGNEQFF

SEQ ID NO: 257387 - protein, 14 aa, Homo sapiens
  CDR3 for alpha chain variable domain of TCR clone 128694 (TRAV12-2, TRAJ40)
CAVKIPSGTYKYIF

SEQ ID NO: 257388 - protein, 12 aa, Homo sapiens
  CDR3 for beta chain variable domain of TCR clone 128694 (TRBV28, TRBJ2-6)
CAIQAGANVLTF

SEQ ID NO: 257389 - protein, 14 aa, Homo sapiens
  CDR3 for alpha chain variable domain of TCR clone 128695 (TRAV1-2, TRAJ8)
CAVREDTGFQKLVF

SEQ ID NO: 257390 - protein, 12 aa, Homo sapiens
  CDR3 for beta chain variable domain of TCR clone 128695 (TRBV11-2, TRBJ2-2)
CASSLGGGGLFF

SEQ ID NO: 257391 - protein, 14 aa, Homo sapiens
  CDR3 for alpha chain variable domain of TCR clone 128696 (TRAV12-2, TRAJ11)
CAVEGGSGYSTLTF

SEQ ID NO: 257392 - protein, 14 aa, Homo sapiens
  CDR3 for beta chain variable domain of TCR clone 128696 (TRBV19, TRBJ1-5)
CASSLGTGGQPQHF

SEQ ID NO: 257393 - protein, 13 aa, Homo sapiens
  CDR3 for alpha chain variable domain of TCR clone 128697 (TRAV17, TRAJ39)
CATDYGAGNMLTF

SEQ ID NO: 257394 - protein, 15 aa, Homo sapiens
  CDR3 for beta chain variable domain of TCR clone 128697 (TRBV19, TRBJ2-3)
CAAGDTNAPNDTQYF

SEQ ID NO: 257395 - protein, 14 aa, Homo sapiens
  CDR3 for alpha chain variable domain of TCR clone 128698 (TRAV1-2, TRAJ8)
CAVREDTGFQKLVF

SEQ ID NO: 257396 - protein, 20 aa, Homo sapiens
  CDR3 for beta chain variable domain of TCR clone 128698 (TRBV19, TRBJ2-1)
CASSISRTVTSTRLNNEQFF

SEQ ID NO: 257397 - protein, 12 aa, Homo sapiens
  CDR3 for alpha chain variable domain of TCR clone 128699 (TRAV12-3, TRAJ17)
CAMTLTGNKLTF

SEQ ID NO: 257398 - protein, 15 aa, Homo sapiens
  CDR3 for beta chain variable domain of TCR clone 128699 (TRBV5-7, TRBJ2-7)
CASSLGPGRGHEQYF

SEQ ID NO: 257399 - protein, 12 aa, Homo sapiens
  CDR3 for alpha chain variable domain of TCR clone 128700 (TRAV13-1, TRAJ27)
CAAHTNAGKSTF

SEQ ID NO: 257400 - protein, 14 aa, Homo sapiens
  CDR3 for beta chain variable domain of TCR clone 128700 (TRBV19, TRBJ2-2)
CASSGLGIAGELFF

SEQ ID NO: 257401 - protein, 14 aa, Homo sapiens
  CDR3 for alpha chain variable domain of TCR clone 128701 (TRAV8-6, TRAJ12)
CAVKAAASSYKLIF

SEQ ID NO: 257402 - protein, 15 aa, Homo sapiens
  CDR3 for beta chain variable domain of TCR clone 128701 (TRBV5-1, TRBJ2-5)
CASSLGLAEQETQYF

SEQ ID NO: 257403 - protein, 11 aa, Homo sapiens
  CDR3 for alpha chain variable domain of TCR clone 128702 (TRAV21, TRAJ20)
CAVRDDYKLSF

SEQ ID NO: 257404 - protein, 14 aa, Homo sapiens
  CDR3 for beta chain variable domain of TCR clone 128702 (TRBV7-2, TRBJ2-7)
CASSPKTSVYEQYF

SEQ ID NO: 257405 - protein, 15 aa, Homo sapiens
  CDR3 for alpha chain variable domain of TCR clone 128703 (TRAV26-2, TRAJ57)
CILRDIRGGSEKLVF

SEQ ID NO: 257406 - protein, 15 aa, Homo sapiens
  CDR3 for beta chain variable domain of TCR clone 128703 (TRBV2, TRBJ2-1)
CASDMGLAGEGEQFF

SEQ ID NO: 257407 - protein, 16 aa, Homo sapiens
  CDR3 for alpha chain variable domain of TCR clone 128704 (TRAV30, TRAJ24)
CGTEIVDADSRGKFQF

SEQ ID NO: 257408 - protein, 15 aa, Homo sapiens
  CDR3 for beta chain variable domain of TCR clone 128704 (TRBV27, TRBJ2-1)
CASSNGGGSSNEQFF

SEQ ID NO: 257409 - protein, 15 aa, Homo sapiens
  CDR3 for alpha chain variable domain of TCR clone 128705 (TRAV3, TRAJ20)
CAVRDIKLSDYKFSF

SEQ ID NO: 257410 - protein, 15 aa, Homo sapiens
  CDR3 for beta chain variable domain of TCR clone 128705 (TRBV7-9, TRBJ1-6)
CASSSPGRGNSPLHF

SEQ ID NO: 257411 - protein, 13 aa, Homo sapiens
  CDR3 for alpha chain variable domain of TCR clone 128706 (TRAV8-3, TRAJ48)
CAVVPFGNEQLTF

SEQ ID NO: 257412 - protein, 14 aa, Homo sapiens
  CDR3 for beta chain variable domain of TCR clone 128706 (TRBV18, TRBJ2-7)
CASSPRGGAYEQYF

SEQ ID NO: 257413 - protein, 13 aa, Homo sapiens
  CDR3 for alpha chain variable domain of TCR clone 128707 (TRAV38-1, TRAJ42)
CARWGGSQGNLIF

SEQ ID NO: 257414 - protein, 17 aa, Homo sapiens
  CDR3 for beta chain variable domain of TCR clone 128707 (TRBV20-1, TRBJ2-1)
CRARDPLAGVWDNEQFF

SEQ ID NO: 257415 - protein, 12 aa, Homo sapiens
  CDR3 for alpha chain variable domain of TCR clone 128708 (TRAV3, TRAJ20)
CAVRDPDYKLSF

SEQ ID NO: 257416 - protein, 15 aa, Homo sapiens
  CDR3 for beta chain variable domain of TCR clone 128708 (TRBV5-1, TRBJ2-3)
CASSVTSGSTDTQYF

SEQ ID NO: 257417 - protein, 14 aa, Homo sapiens
  CDR3 for alpha chain variable domain of TCR clone 128709 (TRAV12-3, TRAJ57)
CAMSAWGGSEKLVF

SEQ ID NO: 257418 - protein, 14 aa, Homo sapiens
  CDR3 for beta chain variable domain of TCR clone 128709 (TRBV18, TRBJ2-5)
CASSPGVSQEAQYF

SEQ ID NO: 257419 - protein, 13 aa, Homo sapiens
  CDR3 for alpha chain variable domain of TCR clone 128710 (TRAV4, TRAJ20)
CLVCSSNDYKLSF

SEQ ID NO: 257420 - protein, 15 aa, Homo sapiens
  CDR3 for beta chain variable domain of TCR clone 128710 (TRBV6-5, TRBJ2-3)
CASSYSGSSTDTQYF

SEQ ID NO: 257421 - protein, 17 aa, Homo sapiens
  CDR3 for alpha chain variable domain of TCR clone 128711 (TRAV13-1, TRAJ52)
CAASSGAGGTSYGKLTF

SEQ ID NO: 257422 - protein, 14 aa, Homo sapiens
  CDR3 for beta chain variable domain of TCR clone 128711 (TRBV27, TRBJ2-2)
CASRPGVNTGELFF

SEQ ID NO: 257423 - protein, 13 aa, Homo sapiens
  CDR3 for alpha chain variable domain of TCR clone 128712 (TRAV21, TRAJ47)
CAVSGLYGHKLVF

SEQ ID NO: 257424 - protein, 17 aa, Homo sapiens
  CDR3 for beta chain variable domain of TCR clone 128712 (TRBV15, TRBJ2-3)
CATSGTTSEEGTDTQYF

SEQ ID NO: 257425 - protein, 13 aa, Homo sapiens
  CDR3 for alpha chain variable domain of TCR clone 128713 (TRAV20, TRAJ49)
CAVQARTGNQFYF

SEQ ID NO: 257426 - protein, 15 aa, Homo sapiens
  CDR3 for beta chain variable domain of TCR clone 128713 (TRBV6-3, TRBJ2-7)
CASSSPGTVFYEQYF

SEQ ID NO: 257427 - protein, 15 aa, Homo sapiens
  CDR3 for alpha chain variable domain of TCR clone 128714 (TRAV8-6, TRAJ21)
CAVSEGGDNFNKFYF

SEQ ID NO: 257428 - protein, 12 aa, Homo sapiens
  CDR3 for beta chain variable domain of TCR clone 128714 (TRBV5-1, TRBJ2-7)
CASGANSYEQYF

SEQ ID NO: 257429 - protein, 13 aa, Homo sapiens
  CDR3 for alpha chain variable domain of TCR clone 128715 (TRAV13-1, TRAJ5)
CAASDTGRRALTF

SEQ ID NO: 257430 - protein, 13 aa, Homo sapiens
  CDR3 for beta chain variable domain of TCR clone 128715 (TRBV7-9, TRBJ2-7)
CASSSDRIYEQYF

SEQ ID NO: 257431 - protein, 14 aa, Homo sapiens
  CDR3 for alpha chain variable domain of TCR clone 128716 (TRAV12-1, TRAJ12)
CVVNGMDSSYKLIF

SEQ ID NO: 257432 - protein, 13 aa, Homo sapiens
  CDR3 for beta chain variable domain of TCR clone 128716 (TRBV28, TRBJ2-2)
CASIRESTGELFF

SEQ ID NO: 257433 - protein, 14 aa, Homo sapiens
  CDR3 for alpha chain variable domain of TCR clone 128717 (TRAV12-1, TRAJ3)
CVVGGYSSASKIIF

SEQ ID NO: 257434 - protein, 14 aa, Homo sapiens
  CDR3 for beta chain variable domain of TCR clone 128717 (TRBV6-6, TRBJ1-3)
CASSRQGSGNTIYF

SEQ ID NO: 257435 - protein, 18 aa, Homo sapiens
  CDR3 for alpha chain variable domain of TCR clone 128718 (TRAV21, TRAJ52)
CAVRPSPAGGTSYGKLTF

SEQ ID NO: 257436 - protein, 17 aa, Homo sapiens
  CDR3 for beta chain variable domain of TCR clone 128718 (TRBV4-1, TRBJ2-7)
CASSRDPLGARGGEQYF

SEQ ID NO: 257437 - protein, 14 aa, Homo sapiens
  CDR3 for alpha chain variable domain of TCR clone 128719 (TRAV40, TRAJ41)
CLLGPPNSGYALNF

SEQ ID NO: 257438 - protein, 11 aa, Homo sapiens
  CDR3 for beta chain variable domain of TCR clone 128719 (TRBV19, TRBJ2-7)
CASSVLGEQYF

SEQ ID NO: 257439 - protein, 11 aa, Homo sapiens
  CDR3 for alpha chain variable domain of TCR clone 128720 (TRAV20, TRAJ34)
CTRDNTDKLIF

SEQ ID NO: 257440 - protein, 15 aa, Homo sapiens
  CDR3 for beta chain variable domain of TCR clone 128720 (TRBV2, TRBJ2-1)
CASSVTSEVTDEQFF

SEQ ID NO: 257441 - protein, 14 aa, Homo sapiens
  CDR3 for alpha chain variable domain of TCR clone 128721 (TRAV1-2, TRAJ8)
CAVREDTGFQKLVF

SEQ ID NO: 257442 - protein, 17 aa, Homo sapiens
  CDR3 for beta chain variable domain of TCR clone 128721 (TRBV6-5, TRBJ2-7)
CASRPSVGGVQHYEQYF

SEQ ID NO: 257443 - protein, 14 aa, Homo sapiens
  CDR3 for alpha chain variable domain of TCR clone 128722 (TRAV8-3, TRAJ39)
CAAGANNAGNMLTF

SEQ ID NO: 257444 - protein, 15 aa, Homo sapiens
  CDR3 for beta chain variable domain of TCR clone 128722 (TRBV4-3, TRBJ1-1)
CASSQELGRGTEAFF

SEQ ID NO: 257445 - protein, 14 aa, Homo sapiens
  CDR3 for alpha chain variable domain of TCR clone 128723 (TRAV2, TRAJ9)
CAVEDRSGGFKTIF

SEQ ID NO: 257446 - protein, 14 aa, Homo sapiens
  CDR3 for beta chain variable domain of TCR clone 128723 (TRBV2, TRBJ2-1)
CASRLIVGHDEQFF

SEQ ID NO: 257447 - protein, 15 aa, Homo sapiens
  CDR3 for alpha chain variable domain of TCR clone 128724 (TRAV8-2, TRAJ40)
CVVSDRGSGTYKYIF

SEQ ID NO: 257448 - protein, 14 aa, Homo sapiens
  CDR3 for beta chain variable domain of TCR clone 128724 (TRBV7-3, TRBJ2-2)
CASSSGGYTGELFF

SEQ ID NO: 257449 - protein, 13 aa, Homo sapiens
  CDR3 for alpha chain variable domain of TCR clone 128725 (TRAV12-2, TRAJ4)
CAGFSGGYNKLIF

SEQ ID NO: 257450 - protein, 14 aa, Homo sapiens
  CDR3 for beta chain variable domain of TCR clone 128725 (TRBV24-1, TRBJ1-1)
CATSIPRGDTKAFF

SEQ ID NO: 257451 - protein, 13 aa, Homo sapiens
  CDR3 for alpha chain variable domain of TCR clone 128726 (TRAV17, TRAJ5)
CAPMDTGRRALTF

SEQ ID NO: 257452 - protein, 14 aa, Homo sapiens
  CDR3 for beta chain variable domain of TCR clone 128726 (TRBV7-9, TRBJ2-1)
CASSPRDSLYEQFF

SEQ ID NO: 257453 - protein, 13 aa, Homo sapiens
  CDR3 for alpha chain variable domain of TCR clone 128727 (TRAV30, TRAJ24)
CGTVTDSWGKLQI

SEQ ID NO: 257454 - protein, 15 aa, Homo sapiens
  CDR3 for beta chain variable domain of TCR clone 128727 (TRBV25-1, TRBJ1-4)
CASSPGDSTNEKLFF

SEQ ID NO: 257455 - protein, 13 aa, Homo sapiens
  CDR3 for alpha chain variable domain of TCR clone 128728 (TRAV1-2, TRAJ11)
CAVRDSGYSTLTF

SEQ ID NO: 257456 - protein, 13 aa, Homo sapiens
  CDR3 for beta chain variable domain of TCR clone 128728 (TRBV20-1, TRBJ1-5)
CSASGRGNQPQHF

SEQ ID NO: 257457 - protein, 13 aa, Homo sapiens
  CDR3 for alpha chain variable domain of TCR clone 128729 (TRAV8-6, TRAJ49)
CAIITNTGNQFYF

SEQ ID NO: 257458 - protein, 14 aa, Homo sapiens
  CDR3 for beta chain variable domain of TCR clone 128729 (TRBV19, TRBJ2-1)
CASPTFVLSGEQFF

SEQ ID NO: 257459 - protein, 14 aa, Homo sapiens
  CDR3 for alpha chain variable domain of TCR clone 128730 (TRAV4, TRAJ17)
CLVGDMAAGNKLTL

SEQ ID NO: 257460 - protein, 14 aa, Homo sapiens
  CDR3 for beta chain variable domain of TCR clone 128730 (TRBV4-1, TRBJ2-7)
CASSPVAGGDEQYF

SEQ ID NO: 257461 - protein, 13 aa, Homo sapiens
  CDR3 for alpha chain variable domain of TCR clone 128731 (TRAV30, TRAJ49)
CGTESQPVTSSIL

SEQ ID NO: 257462 - protein, 15 aa, Homo sapiens
  CDR3 for beta chain variable domain of TCR clone 128731 (TRBV7-9, TRBJ2-7)
CASSLALAEAYEQYF

SEQ ID NO: 257463 - protein, 10 aa, Homo sapiens
  CDR3 for alpha chain variable domain of TCR clone 128732 (TRAV30, TRAJ48)
CGIGNEKLTY

SEQ ID NO: 257464 - protein, 14 aa, Homo sapiens
  CDR3 for beta chain variable domain of TCR clone 128732 (TRBV7-6, TRBJ2-3)
CASSVAGGTDTQYF

SEQ ID NO: 257465 - protein, 13 aa, Homo sapiens
  CDR3 for alpha chain variable domain of TCR clone 128733 (TRAV21, TRAJ27)
CSARPGNAGKSTF

SEQ ID NO: 257466 - protein, 13 aa, Homo sapiens
  CDR3 for beta chain variable domain of TCR clone 128733 (TRBV18, TRBJ2-7)
CASQSGGGYEQYF

SEQ ID NO: 257467 - protein, 13 aa, Homo sapiens
  CDR3 for alpha chain variable domain of TCR clone 128734 (TRAV26-1, TRAJ29)
CIVRRSGNTPLVF

SEQ ID NO: 257468 - protein, 15 aa, Homo sapiens
  CDR3 for beta chain variable domain of TCR clone 128734 (TRBV20-1, TRBJ2-7)
CSAESGTSGAYEQYF

SEQ ID NO: 257469 - protein, 13 aa, Homo sapiens
  CDR3 for alpha chain variable domain of TCR clone 128735 (TRAV2, TRAJ15)
CAVASQAGTVLIF

SEQ ID NO: 257470 - protein, 15 aa, Homo sapiens
  CDR3 for beta chain variable domain of TCR clone 128735 (TRBV7-3, TRBJ2-2)
CASSETGQGTGELFF

SEQ ID NO: 257471 - protein, 14 aa, Homo sapiens
  CDR3 for alpha chain variable domain of TCR clone 128736 (TRAV2, TRAJ9)
CAVEDRSGGFKTIF

SEQ ID NO: 257472 - protein, 18 aa, Homo sapiens
  CDR3 for beta chain variable domain of TCR clone 128736 (TRBV25-1, TRBJ1-2)
CASSGLQNGQGLIFGYTF

SEQ ID NO: 257473 - protein, 16 aa, Homo sapiens
  CDR3 for alpha chain variable domain of TCR clone 128737 (TRAV22, TRAJ18)
CAVEKSRGSTLGRLYF

SEQ ID NO: 257474 - protein, 15 aa, Homo sapiens
  CDR3 for beta chain variable domain of TCR clone 128737 (TRBV9, TRBJ1-6)
CASSVAGTGDSPLHF

SEQ ID NO: 257475 - protein, 12 aa, Homo sapiens
  CDR3 for alpha chain variable domain of TCR clone 128738 (TRAV13-1, TRAJ27)
CAAHTNACKSTF

SEQ ID NO: 257476 - protein, 14 aa, Homo sapiens
  CDR3 for beta chain variable domain of TCR clone 128738 (TRBV19, TRBJ2-2)
CASSGQGIAGELFF

SEQ ID NO: 257477 - protein, 16 aa, Homo sapiens
  CDR3 for alpha chain variable domain of TCR clone 128739 (TRAV27, TRAJ48)
TAAQPGDTGLYLPLTF

SEQ ID NO: 257478 - protein, 13 aa, Homo sapiens
  CDR3 for beta chain variable domain of TCR clone 128739 (TRBV4-2, TRBJ1-1)
CASSQAGNTEAFF

SEQ ID NO: 257479 - protein, 12 aa, Homo sapiens
  CDR3 for alpha chain variable domain of TCR clone 128740 (TRAV21, TRAJ43)
CAVSWNNNDMCF

SEQ ID NO: 257480 - protein, 15 aa, Homo sapiens
  CDR3 for beta chain variable domain of TCR clone 128740 (TRBV20-1, TRBJ2-1)
CSASPPSGGYNEQFF

SEQ ID NO: 257481 - protein, 13 aa, Homo sapiens
  CDR3 for alpha chain variable domain of TCR clone 128741 (TRAV13-1, TRAJ5)
CAARVTGRRELTF

SEQ ID NO: 257482 - protein, 15 aa, Homo sapiens
  CDR3 for beta chain variable domain of TCR clone 128741 (TRBV7-9, TRBJ2-7)
CASSPGGGLTYEQYF

SEQ ID NO: 257483 - protein, 15 aa, Homo sapiens
  CDR3 for alpha chain variable domain of TCR clone 128742 (TRAV3, TRAJ47)
CAVRDVGEYGNKLVF

SEQ ID NO: 257484 - protein, 14 aa, Homo sapiens
  CDR3 for beta chain variable domain of TCR clone 128742 (TRBV13, TRBJ2-5)
CASSLERVGETQYF

SEQ ID NO: 257485 - protein, 12 aa, Homo sapiens
  CDR3 for alpha chain variable domain of TCR clone 128743 (TRAV13-1, TRAJ53)
AASGGSNYKLTF

SEQ ID NO: 257486 - protein, 15 aa, Homo sapiens
  CDR3 for beta chain variable domain of TCR clone 128743 (TRBV5-1, TRBJ2-1)
CASSPPRAPHNEQFF

SEQ ID NO: 257487 - protein, 14 aa, Homo sapiens
  CDR3 for alpha chain variable domain of TCR clone 128744 (TRAV9-2, TRAJ39)
CALYIYNAGNMLTF

SEQ ID NO: 257488 - protein, 15 aa, Homo sapiens
  CDR3 for beta chain variable domain of TCR clone 128744 (TRBV20-1, TRBJ2-7)
CSARVPAAYFYEQYF

SEQ ID NO: 257489 - protein, 17 aa, Homo sapiens
  CDR3 for alpha chain variable domain of TCR clone 128745 (TRAV26-2, TRAJ42)
CILRDVGYGGSQGNLIF

SEQ ID NO: 257490 - protein, 18 aa, Homo sapiens
  CDR3 for beta chain variable domain of TCR clone 128745 (TRBV11-2, TRBJ2-3)
CASSLGGASRGAPNTQYF

SEQ ID NO: 257491 - protein, 13 aa, Homo sapiens
  CDR3 for alpha chain variable domain of TCR clone 128746 (TRAV2, TRAJ40)
CAVVTSGTYKYIF

SEQ ID NO: 257492 - protein, 15 aa, Homo sapiens
  CDR3 for beta chain variable domain of TCR clone 128746 (TRBV7-3, TRBJ2-3)
CASSLKSGRADTQYF

SEQ ID NO: 257493 - protein, 13 aa, Homo sapiens
  CDR3 for alpha chain variable domain of TCR clone 128747 (TRAV2, TRAJ40)
CAVVTSGTYKYIF

SEQ ID NO: 257494 - protein, 17 aa, Homo sapiens
  CDR3 for beta chain variable domain of TCR clone 128747 (TRBV20-1, TRBJ2-2)
CSASGSGQGGLTGELFF

SEQ ID NO: 257495 - protein, 11 aa, Homo sapiens
  CDR3 for alpha chain variable domain of TCR clone 128748 (TRAV21, TRAJ11)
CAVNGYSTLTF

SEQ ID NO: 257496 - protein, 11 aa, Homo sapiens
  CDR3 for beta chain variable domain of TCR clone 128748 (TRBV19, TRBJ1-1)
CASSIGCEAFS

SEQ ID NO: 257497 - protein, 11 aa, Homo sapiens
  CDR3 for alpha chain variable domain of TCR clone 128749 (TRAV27, TRAJ47)
CRSNQGNKLVF

SEQ ID NO: 257498 - protein, 16 aa, Homo sapiens
  CDR3 for beta chain variable domain of TCR clone 128749 (TRBV7-9, TRBJ2-1)
CASSDVAGGSHNEQFF

SEQ ID NO: 257499 - protein, 11 aa, Homo sapiens
  CDR3 for alpha chain variable domain of TCR clone 128750 (TRAV36/DV7, TRAJ45)
SGGGGADGLTF

SEQ ID NO: 257500 - protein, 12 aa, Homo sapiens
  CDR3 for beta chain variable domain of TCR clone 128750 (TRBV11-2, TRBJ2-2)
CASSLGGGELFF

SEQ ID NO: 257501 - protein, 15 aa, Homo sapiens
  CDR3 for alpha chain variable domain of TCR clone 128751 (TRAV3, TRAJ40)
CAVRDVTSGTYTYIF

SEQ ID NO: 257502 - protein, 13 aa, Homo sapiens
  CDR3 for beta chain variable domain of TCR clone 128751 (TRBV7-9, TRBJ1-2)
CASSLKQNYGYTF

SEQ ID NO: 257503 - protein, 14 aa, Homo sapiens
  CDR3 for alpha chain variable domain of TCR clone 128752 (TRAV27, TRAJ23)
CAGAFDNKGGKLIF

SEQ ID NO: 257504 - protein, 15 aa, Homo sapiens
  CDR3 for beta chain variable domain of TCR clone 128752 (TRBV7-3, TRBJ2-7)
CASSLTGQGKYEQYF

SEQ ID NO: 257505 - protein, 14 aa, Homo sapiens
  CDR3 for alpha chain variable domain of TCR clone 128753 (TRAV8-3, TRAJ11)
CAVGSNSGYSTLTF

SEQ ID NO: 257506 - protein, 14 aa, Homo sapiens
  CDR3 for beta chain variable domain of TCR clone 128753 (TRBV5-1, TRBJ2-7)
CASGLTSGGYEQYF

SEQ ID NO: 257507 - protein, 15 aa, Homo sapiens
  CDR3 for alpha chain variable domain of TCR clone 128754 (TRAV8-4, TRAJ6)
CAVSAPSGGSYIPTF

SEQ ID NO: 257508 - protein, 15 aa, Homo sapiens
  CDR3 for beta chain variable domain of TCR clone 128754 (TRBV6-6, TRBJ2-5)
CASSYGKIIQETQYF

SEQ ID NO: 257509 - protein, 13 aa, Homo sapiens
  CDR3 for alpha chain variable domain of TCR clone 128755 (TRAV2, TRAJ15)
CAVASQAGAALIF

SEQ ID NO: 257510 - protein, 16 aa, Homo sapiens
  CDR3 for beta chain variable domain of TCR clone 128755 (TRBV20-1, TRBJ1-4)
CSAPGQGLLTNEKLFF

SEQ ID NO: 257511 - protein, 14 aa, Homo sapiens
  CDR3 for alpha chain variable domain of TCR clone 128756 (TRAV13-2, TRAJ17)
CAENSKAAGNKLPF

SEQ ID NO: 257512 - protein, 11 aa, Homo sapiens
  CDR3 for beta chain variable domain of TCR clone 128756 (TRBV6-3, TRBJ2-3)
CATGQADTQYF

SEQ ID NO: 257513 - protein, 14 aa, Homo sapiens
  CDR3 for alpha chain variable domain of TCR clone 128757 (TRAV12-3, TRAJ58)
CAMSTETSGSRLTF

SEQ ID NO: 257514 - protein, 12 aa, Homo sapiens
  CDR3 for beta chain variable domain of TCR clone 128757 (TRBV2, TRBJ2-7)
CASSDPDYEQYF

SEQ ID NO: 257515 - protein, 12 aa, Homo sapiens
  CDR3 for alpha chain variable domain of TCR clone 128758 (TRAV16, TRAJ13)
CITLRGYRKVTF

SEQ ID NO: 257516 - protein, 17 aa, Homo sapiens
  CDR3 for beta chain variable domain of TCR clone 128758 (TRBV28, TRBJ2-5)
CASSRQGGLAGAETQYF

SEQ ID NO: 257517 - protein, 14 aa, Homo sapiens
  CDR3 for alpha chain variable domain of TCR clone 128759 (TRAV13-1, TRAJ23)
CAASRLGRGGKLIF

SEQ ID NO: 257518 - protein, 15 aa, Homo sapiens
  CDR3 for beta chain variable domain of TCR clone 128759 (TRBV7-2, TRBJ2-1)
CASSLVAGRYSEQFF

SEQ ID NO: 257519 - protein, 15 aa, Homo sapiens
  CDR3 for alpha chain variable domain of TCR clone 128760 (TRAV8-6, TRAJ10)
CAVSDQAGGGNKLTF

SEQ ID NO: 257520 - protein, 16 aa, Homo sapiens
  CDR3 for beta chain variable domain of TCR clone 128760 (TRBV2, TRBJ2-7)
CASSEPWTGPSYEQYF

SEQ ID NO: 257521 - protein, 14 aa, Homo sapiens
  CDR3 for alpha chain variable domain of TCR clone 128761 (TRAV13-2, TRAJ42)
CGEWVGGSQGNLIF

SEQ ID NO: 257522 - protein, 13 aa, Homo sapiens
  CDR3 for beta chain variable domain of TCR clone 128761 (TRBV11-3, TRBJ2-1)
CASSPPAGNEQFF

SEQ ID NO: 257523 - protein, 13 aa, Homo sapiens
  CDR3 for alpha chain variable domain of TCR clone 128762 (TRAV12-2, TRAJ24)
CAVSTDSWGKLQF

SEQ ID NO: 257524 - protein, 11 aa, Homo sapiens
  CDR3 for beta chain variable domain of TCR clone 128762 (TRBV7-8, TRBJ2-7)
CASSLSLEQYF

SEQ ID NO: 257525 - protein, 14 aa, Homo sapiens
  CDR3 for alpha chain variable domain of TCR clone 128763 (TRAV26-1, TRAJ38)
CIADNAGNNRKLIW

SEQ ID NO: 257526 - protein, 13 aa, Homo sapiens
  CDR3 for beta chain variable domain of TCR clone 128763 (TRBV20-1, TRBJ1-1)
SAVLGVGNTEAFF

SEQ ID NO: 257527 - protein, 13 aa, Homo sapiens
  CDR3 for alpha chain variable domain of TCR clone 128764 (TRAV13-2, TRAJ48)
CAEMDFGSEKLTF

SEQ ID NO: 257528 - protein, 15 aa, Homo sapiens
  CDR3 for beta chain variable domain of TCR clone 128764 (TRBV7-9, TRBJ1-6)
CASSSPGRVNSPLHF

SEQ ID NO: 257529 - protein, 12 aa, Homo sapiens
  CDR3 for alpha chain variable domain of TCR clone 128765 (TRAV21, TRAJ8)
CAVNTGFQKLGF

SEQ ID NO: 257530 - protein, 13 aa, Homo sapiens
  CDR3 for beta chain variable domain of TCR clone 128765 (TRBV6-3, TRBJ2-1)
CASSYDNYNEQFF

SEQ ID NO: 257531 - protein, 11 aa, Homo sapiens
  CDR3 for alpha chain variable domain of TCR clone 128766 (TRAV2, TRAJ13)
CASGGYQKVTF

SEQ ID NO: 257532 - protein, 16 aa, Homo sapiens
  CDR3 for beta chain variable domain of TCR clone 128766 (TRBV19, TRBJ2-1)
CASSKAGTSSYNEQFF

SEQ ID NO: 257533 - protein, 15 aa, Homo sapiens
  CDR3 for alpha chain variable domain of TCR clone 128767 (TRAV12-3, TRAJ42)
CAMSGHGGSQGNLIF

SEQ ID NO: 257534 - protein, 14 aa, Homo sapiens
  CDR3 for beta chain variable domain of TCR clone 128767 (TRBV7-7, TRBJ2-2)
CATRQDSDTGELFF

SEQ ID NO: 257535 - protein, 11 aa, Homo sapiens
  CDR3 for alpha chain variable domain of TCR clone 128768 (TRAV2, TRAJ13)
CASGGYQKVTF

SEQ ID NO: 257536 - protein, 16 aa, Homo sapiens
  CDR3 for beta chain variable domain of TCR clone 128768 (TRBV7-3, TRBJ2-1)
CASSLSSGGGAKEQFF

SEQ ID NO: 257537 - protein, 13 aa, Homo sapiens
  CDR3 for alpha chain variable domain of TCR clone 128769 (TRAV8-3, TRAJ4)
WVFYSGGYNKLIF

SEQ ID NO: 257538 - protein, 14 aa, Homo sapiens
  CDR3 for beta chain variable domain of TCR clone 128769 (TRBV7-9, TRBJ2-3)
CASSLEDGTDTKYF

SEQ ID NO: 257539 - protein, 14 aa, Homo sapiens
  CDR3 for alpha chain variable domain of TCR clone 128770 (TRAV17, TRAJ31)
CATVLRNNNARLIF

SEQ ID NO: 257540 - protein, 14 aa, Homo sapiens
  CDR3 for beta chain variable domain of TCR clone 128770 (TRBV12-4, TRBJ2-5)
CASSLWQKQETQYF

SEQ ID NO: 257541 - protein, 13 aa, Homo sapiens
  CDR3 for alpha chain variable domain of TCR clone 128771 (TRAV20, TRAJ3)
CARQYSSASKIIF

SEQ ID NO: 257542 - protein, 12 aa, Homo sapiens
  CDR3 for beta chain variable domain of TCR clone 128771 (TRBV28, TRBJ2-1)
CASSFRGNEQFF

SEQ ID NO: 257543 - protein, 12 aa, Homo sapiens
  CDR3 for alpha chain variable domain of TCR clone 128772 (TRAV13-2, TRAJ8)
CAPWLGFQKLVF

SEQ ID NO: 257544 - protein, 17 aa, Homo sapiens
  CDR3 for beta chain variable domain of TCR clone 128772 (TRBV19, TRBJ2-6)
CASSTGQVFSGANVLTF

SEQ ID NO: 257545 - protein, 14 aa, Homo sapiens
  CDR3 for alpha chain variable domain of TCR clone 128773 (TRAV35, TRAJ13)
CAGRSPGGYEKVTF

SEQ ID NO: 257546 - protein, 14 aa, Homo sapiens
  CDR3 for beta chain variable domain of TCR clone 128773 (TRBV19, TRBJ2-2)
CASSMVGLSGELFF

SEQ ID NO: 257547 - protein, 17 aa, Homo sapiens
  CDR3 for alpha chain variable domain of TCR clone 128774 (TRAV13-1, TRAJ52)
CAAGRNAGGTSYGKLTF

SEQ ID NO: 257548 - protein, 15 aa, Homo sapiens
  CDR3 for beta chain variable domain of TCR clone 128774 (TRBV7-2, TRBJ1-2)
CASSPRAGWNYGYTF

SEQ ID NO: 257549 - protein, 14 aa, Homo sapiens
  CDR3 for alpha chain variable domain of TCR clone 128775 (TRAV21, TRAJ15)
CAVSLNQSGTALIF

SEQ ID NO: 257550 - protein, 11 aa, Homo sapiens
  CDR3 for beta chain variable domain of TCR clone 128775 (TRBV20-1, TRBJ2-7)
CSARTSYEQYF

SEQ ID NO: 257551 - protein, 12 aa, Homo sapiens
  CDR3 for alpha chain variable domain of TCR clone 128776 (TRAV3, TRAJ20)
CAVIDPDYKLSF

SEQ ID NO: 257552 - protein, 13 aa, Homo sapiens
  CDR3 for beta chain variable domain of TCR clone 128776 (TRBV9, TRBJ2-1)
CASSVGQGGEQFF

SEQ ID NO: 257553 - protein, 13 aa, Homo sapiens
  CDR3 for alpha chain variable domain of TCR clone 128777 (TRAV12-1, TRAJ26)
CVVRRNYGQNFVL

SEQ ID NO: 257554 - protein, 14 aa, Homo sapiens
  CDR3 for beta chain variable domain of TCR clone 128777 (TRBV6-3, TRBJ1-1)
CASRYTGESTEAFF

SEQ ID NO: 257555 - protein, 14 aa, Homo sapiens
  CDR3 for alpha chain variable domain of TCR clone 128778 (TRAV17, TRAJ22)
CATSPSGSARQLTF

SEQ ID NO: 257556 - protein, 14 aa, Homo sapiens
  CDR3 for beta chain variable domain of TCR clone 128778 (TRBV7-9, TRBJ2-1)
CASSPRDSLYEQFF

SEQ ID NO: 257557 - protein, 16 aa, Homo sapiens
  CDR3 for alpha chain variable domain of TCR clone 128779 (TRAV8-3, TRAJ10)
CAVGPGVTGGGNKLTF

SEQ ID NO: 257558 - protein, 13 aa, Homo sapiens
  CDR3 for beta chain variable domain of TCR clone 128779 (TRBV18, TRBJ1-1)
CASSPRPSGEAFF

SEQ ID NO: 257559 - protein, 15 aa, Homo sapiens
  CDR3 for alpha chain variable domain of TCR clone 128780 (TRAV25, TRAJ52)
CAGRPGGTSYGKLTF

SEQ ID NO: 257560 - protein, 14 aa, Homo sapiens
  CDR3 for beta chain variable domain of TCR clone 128780 (TRBV12-4, TRBJ1-4)
RASRITGRSEKLFF

SEQ ID NO: 257561 - protein, 12 aa, Homo sapiens
  CDR3 for alpha chain variable domain of TCR clone 128781 (TRAV21, TRAJ11)
CAATSGYSTLTF

SEQ ID NO: 257562 - protein, 16 aa, Homo sapiens
  CDR3 for beta chain variable domain of TCR clone 128781 (TRBV28, TRBJ2-2)
CANSLEGGSNTGELFF

SEQ ID NO: 257563 - protein, 15 aa, Homo sapiens
  CDR3 for alpha chain variable domain of TCR clone 128782 (TRAV3, TRAJ13)
CAVRVYSGGYPKVTF

SEQ ID NO: 257564 - protein, 15 aa, Homo sapiens
  CDR3 for beta chain variable domain of TCR clone 128782 (TRBV5-7, TRBJ1-2)
CASSLGVAANYGYTF

SEQ ID NO: 257565 - protein, 11 aa, Homo sapiens
  CDR3 for alpha chain variable domain of TCR clone 128783 (TRAV21, TRAJ34)
CAVSNTDKLIF

SEQ ID NO: 257566 - protein, 16 aa, Homo sapiens
  CDR3 for beta chain variable domain of TCR clone 128783 (TRBV18, TRBJ1-1)
CASSPGVGGRGGEAFF

SEQ ID NO: 257567 - protein, 18 aa, Homo sapiens
  CDR3 for alpha chain variable domain of TCR clone 128784 (TRAV12-3, TRAJ52)
CAMSVGGAGGTSYGKLTF

SEQ ID NO: 257568 - protein, 15 aa, Homo sapiens
  CDR3 for beta chain variable domain of TCR clone 128784 (TRBV27, TRBJ1-6)
CASSFDRGLGSPLYL

SEQ ID NO: 257569 - protein, 14 aa, Homo sapiens
  CDR3 for alpha chain variable domain of TCR clone 128785 (TRAV12-2, TRAJ40)
CAVKIPSGTYKYIF

SEQ ID NO: 257570 - protein, 14 aa, Homo sapiens
  CDR3 for beta chain variable domain of TCR clone 128785 (TRBV20-1, TRBJ1-1)
CSAQTRTGGIEAFF

SEQ ID NO: 257571 - protein, 17 aa, Homo sapiens
  CDR3 for alpha chain variable domain of TCR clone 128786 (TRAV2, TRAJ36)
CAVADRGNWGKQPLLWD

SEQ ID NO: 257572 - protein, 14 aa, Homo sapiens
  CDR3 for beta chain variable domain of TCR clone 128786 (TRBV7-9, TRBJ2-5)
CASSLDTAQETQYF

SEQ ID NO: 257573 - protein, 11 aa, Homo sapiens
  CDR3 for alpha chain variable domain of TCR clone 128787 (TRAV23/DV6, TRAJ43)
CAASSGNDIRF

SEQ ID NO: 257574 - protein, 14 aa, Homo sapiens
  CDR3 for beta chain variable domain of TCR clone 128787 (TRBV4-1, TRBJ1-2)
CASSQDPLPYGYTF

SEQ ID NO: 257575 - protein, 12 aa, Homo sapiens
  CDR3 for alpha chain variable domain of TCR clone 128788 (TRAV17, TRAJ4)
CATDGGYNKLIF

SEQ ID NO: 257576 - protein, 13 aa, Homo sapiens
  CDR3 for beta chain variable domain of TCR clone 128788 (TRBV5-5, TRBJ1-2)
CASSFWRGEDYTF

SEQ ID NO: 257577 - protein, 16 aa, Homo sapiens
  CDR3 for alpha chain variable domain of TCR clone 128789 (TRAV3, TRAJ37)
CAVRGKGAGNTGKLIF

SEQ ID NO: 257578 - protein, 15 aa, Homo sapiens
  CDR3 for beta chain variable domain of TCR clone 128789 (TRBV7-3, TRBJ2-2)
CASSETGQGTGELFF

SEQ ID NO: 257579 - protein, 16 aa, Homo sapiens
  CDR3 for alpha chain variable domain of TCR clone 128790 (TRAV3, TRAJ4)
CAVRLSPSGGYNKLIF

SEQ ID NO: 257580 - protein, 12 aa, Homo sapiens
  CDR3 for beta chain variable domain of TCR clone 128790 (TRBV7-9, TRBJ2-7)
CASSQGVYEQYF

SEQ ID NO: 257581 - protein, 13 aa, Homo sapiens
  CDR3 for alpha chain variable domain of TCR clone 128791 (TRAV13-1, TRAJ6)
CAASSGGSYIPTF

SEQ ID NO: 257582 - protein, 15 aa, Homo sapiens
  CDR3 for beta chain variable domain of TCR clone 128791 (TRBV12-4, TRBJ2-5)
CASSPPTGRQETQYF

SEQ ID NO: 257583 - protein, 13 aa, Homo sapiens
  CDR3 for alpha chain variable domain of TCR clone 128792 (TRAV17, TRAJ39)
CAISTNAGNMLTF

SEQ ID NO: 257584 - protein, 14 aa, Homo sapiens
  CDR3 for beta chain variable domain of TCR clone 128792 (TRBV10-3, TRBJ2-3)
CAISVTRSRDTQYF

SEQ ID NO: 257585 - protein, 14 aa, Homo sapiens
  CDR3 for alpha chain variable domain of TCR clone 128793 (TRAV26-1, TRAJ48)
CIVRVGFGNEKLTF

SEQ ID NO: 257586 - protein, 17 aa, Homo sapiens
  CDR3 for beta chain variable domain of TCR clone 128793 (TRBV13, TRBJ2-3)
CASSLSRVAGGRNTQYF

SEQ ID NO: 257587 - protein, 11 aa, Homo sapiens
  CDR3 for alpha chain variable domain of TCR clone 128794 (TRAV12-3, TRAJ27)
CAMANAGKSTF

SEQ ID NO: 257588 - protein, 15 aa, Homo sapiens
  CDR3 for beta chain variable domain of TCR clone 128794 (TRBV10-2, TRBJ2-6)
CASSEQGTGANVLTF

SEQ ID NO: 257589 - protein, 14 aa, Homo sapiens
  CDR3 for alpha chain variable domain of TCR clone 128795 (TRAV12-1, TRAJ30)
CVVNIGNRDDKIIF

SEQ ID NO: 257590 - protein, 14 aa, Homo sapiens
  CDR3 for beta chain variable domain of TCR clone 128795 (TRBV7-9, TRBJ2-5)
RASSPRPSGETQYF

SEQ ID NO: 257591 - protein, 11 aa, Homo sapiens
  CDR3 for alpha chain variable domain of TCR clone 128796 (TRAV3, TRAJ21)
CAVGNFNKFYF

SEQ ID NO: 257592 - protein, 13 aa, Homo sapiens
  CDR3 for beta chain variable domain of TCR clone 128796 (TRBV7-2, TRBJ2-2)
CASSSVRAGELFF

SEQ ID NO: 257593 - protein, 14 aa, Homo sapiens
  CDR3 for alpha chain variable domain of TCR clone 128797 (TRAV38-1, TRAJ45)
CASPSGGGADGLTF

SEQ ID NO: 257594 - protein, 16 aa, Homo sapiens
  CDR3 for beta chain variable domain of TCR clone 128797 (TRBV27, TRBJ2-2)
CASSFRGLVRTGELFF

SEQ ID NO: 257595 - protein, 13 aa, Homo sapiens
  CDR3 for alpha chain variable domain of TCR clone 128798 (TRAV12-1, TRAJ29)
CVVNGPGNTPLVF

SEQ ID NO: 257596 - protein, 14 aa, Homo sapiens
  CDR3 for beta chain variable domain of TCR clone 128798 (TRBV19, TRBJ2-1)
CASPTFVLSGEQFF

SEQ ID NO: 257597 - protein, 12 aa, Homo sapiens
  CDR3 for alpha chain variable domain of TCR clone 128799 (TRAV12-3, TRAJ17)
CAMTLTGNKLTF

SEQ ID NO: 257598 - protein, 15 aa, Homo sapiens
  CDR3 for beta chain variable domain of TCR clone 128799 (TRBV11-2, TRBJ2-1)
CASSLGPDSYNEQFF

SEQ ID NO: 257599 - protein, 10 aa, Homo sapiens
  CDR3 for alpha chain variable domain of TCR clone 128800 (TRAV27, TRAJ43)
CAGANNDMRF

SEQ ID NO: 257600 - protein, 20 aa, Homo sapiens
  CDR3 for beta chain variable domain of TCR clone 128800 (TRBV7-8, TRBJ2-2)
CASSHLFPGPTIHITGELFF

SEQ ID NO: 257601 - protein, 12 aa, Homo sapiens
  CDR3 for alpha chain variable domain of TCR clone 128801 (TRAV13-2, TRAJ23)
CAERHRGGKLTF

SEQ ID NO: 257602 - protein, 18 aa, Homo sapiens
  CDR3 for beta chain variable domain of TCR clone 128801 (TRBV11-2, TRBJ2-3)
CASSLGGASRGAPNTQYF

SEQ ID NO: 257603 - protein, 12 aa, Homo sapiens
  CDR3 for alpha chain variable domain of TCR clone 128802 (TRAV3, TRAJ43)
CCERGRNNDMRF

SEQ ID NO: 257604 - protein, 15 aa, Homo sapiens
  CDR3 for beta chain variable domain of TCR clone 128802 (TRBV19, TRBJ1-5)
CASSIVWADNQPQHF

SEQ ID NO: 257605 - protein, 11 aa, Homo sapiens
  CDR3 for alpha chain variable domain of TCR clone 128803 (TRAV21, TRAJ34)
CAVTNTDKLIF

SEQ ID NO: 257606 - protein, 15 aa, Homo sapiens
  CDR3 for beta chain variable domain of TCR clone 128803 (TRBV12-4, TRBJ2-5)
CASSPPTGLQETQYF

SEQ ID NO: 257607 - protein, 11 aa, Homo sapiens
  CDR3 for alpha chain variable domain of TCR clone 128804 (TRAV39, TRAJ49)
YAVDISTQFYF

SEQ ID NO: 257608 - protein, 11 aa, Homo sapiens
  CDR3 for beta chain variable domain of TCR clone 128804 (TRBV7-8, TRBJ2-7)
CASSLSLEQYF

SEQ ID NO: 257609 - protein, 10 aa, Homo sapiens
  CDR3 for alpha chain variable domain of TCR clone 128805 (TRAV17, TRAJ45)
TGGGADGLTF

SEQ ID NO: 257610 - protein, 15 aa, Homo sapiens
  CDR3 for beta chain variable domain of TCR clone 128805 (TRBV5-7, TRBJ1-5)
CASSYGKLWDQPQHF

SEQ ID NO: 257611 - protein, 13 aa, Homo sapiens
  CDR3 for alpha chain variable domain of TCR clone 128806 (TRAV8-3, TRAJ43)
CAVVPYNNNDMPF

SEQ ID NO: 257612 - protein, 16 aa, Homo sapiens
  CDR3 for beta chain variable domain of TCR clone 128806 (TRBV7-2, TRBJ2-5)
CASSPFPTGGEETQYF

SEQ ID NO: 257613 - protein, 13 aa, Homo sapiens
  CDR3 for alpha chain variable domain of TCR clone 128807 (TRAV3, TRAJ20)
CAVRSLNDYKLSF

SEQ ID NO: 257614 - protein, 13 aa, Homo sapiens
  CDR3 for beta chain variable domain of TCR clone 128807 (TRBV7-3, TRBJ1-1)
CASSQYWGAEAFF

SEQ ID NO: 257615 - protein, 12 aa, Homo sapiens
  CDR3 for alpha chain variable domain of TCR clone 128808 (TRAV21, TRAJ29)
CAVTSGNTPLVF

SEQ ID NO: 257616 - protein, 15 aa, Homo sapiens
  CDR3 for beta chain variable domain of TCR clone 128808 (TRBV19, TRBJ2-1)
CASSSPGVPLDEQFF

SEQ ID NO: 257617 - protein, 19 aa, Homo sapiens
  CDR3 for alpha chain variable domain of TCR clone 128809 (TRAV16, )
CALSGDIQNPDPAGYQLRD

SEQ ID NO: 257618 - protein, 16 aa, Homo sapiens
  CDR3 for beta chain variable domain of TCR clone 128809 (TRBV12-5, TRBJ2-5)
CASGPRTSGNQETQYF

SEQ ID NO: 257619 - protein, 12 aa, Homo sapiens
  CDR3 for alpha chain variable domain of TCR clone 128810 (TRAV10, TRAJ43)
CVVVRVGNDMRF

SEQ ID NO: 257620 - protein, 14 aa, Homo sapiens
  CDR3 for beta chain variable domain of TCR clone 128810 (TRBV19, TRBJ2-1)
CASPTFVLSGEQFF

SEQ ID NO: 257621 - protein, 16 aa, Homo sapiens
  CDR3 for alpha chain variable domain of TCR clone 128811 (TRAV4, TRAJ22)
CLVGDLYSGSARQLTF

SEQ ID NO: 257622 - protein, 16 aa, Homo sapiens
  CDR3 for beta chain variable domain of TCR clone 128811 (TRBV7-9, TRBJ2-1)
CASSDVAGGSYYEQFF

SEQ ID NO: 257623 - protein, 13 aa, Homo sapiens
  CDR3 for alpha chain variable domain of TCR clone 128812 (TRAV12-1, TRAJ33)
CGDAPDSHYQLIW

SEQ ID NO: 257624 - protein, 15 aa, Homo sapiens
  CDR3 for beta chain variable domain of TCR clone 128812 (TRBV27, TRBJ2-1)
CASSNGGGSSNEQFF

SEQ ID NO: 257625 - protein, 13 aa, Homo sapiens
  CDR3 for alpha chain variable domain of TCR clone 128813 (TRAV1-1, TRAJ7)
CAVRDQGNNRLAF

SEQ ID NO: 257626 - protein, 20 aa, Homo sapiens
  CDR3 for beta chain variable domain of TCR clone 128813 (TRBV28, TRBJ2-3)
CASSLGVRSTSGRSTDTQYF

SEQ ID NO: 257627 - protein, 17 aa, Homo sapiens
  CDR3 for alpha chain variable domain of TCR clone 128814 (TRAV8-6, TRAJ58)
CAVSSWVGETSGSRLTF

SEQ ID NO: 257628 - protein, 13 aa, Homo sapiens
  CDR3 for beta chain variable domain of TCR clone 128814 (TRBV11-2, TRBJ2-5)
CASSSTGEETQYF

SEQ ID NO: 257629 - protein, 17 aa, Homo sapiens
  CDR3 for alpha chain variable domain of TCR clone 128815 (TRAV3, TRAJ6)
CAVRDGPRAGGKYIPTF

SEQ ID NO: 257630 - protein, 14 aa, Homo sapiens
  CDR3 for beta chain variable domain of TCR clone 128815 (TRBV7-2, TRBJ2-7)
CASSPKTSFYEQYF

SEQ ID NO: 257631 - protein, 14 aa, Homo sapiens
  CDR3 for alpha chain variable domain of TCR clone 128816 (TRAV1-2, TRAJ16)
CAVNRFSDGQKLLF

SEQ ID NO: 257632 - protein, 17 aa, Homo sapiens
  CDR3 for beta chain variable domain of TCR clone 128816 (TRBV20-1, TRBJ2-2)
CSASGSGQGGLAGELFF

SEQ ID NO: 257633 - protein, 14 aa, Homo sapiens
  CDR3 for alpha chain variable domain of TCR clone 128817 (TRAV1-2, TRAJ16)
CAVNRFSDGHKLLF

SEQ ID NO: 257634 - protein, 16 aa, Homo sapiens
  CDR3 for beta chain variable domain of TCR clone 128817 (TRBV20-1, TRBJ1-4)
CSAPGQGLLTNEKLFF

SEQ ID NO: 257635 - protein, 13 aa, Homo sapiens
  CDR3 for alpha chain variable domain of TCR clone 128818 (TRAV2, TRAJ15)
CAVEAQAGTALIF

SEQ ID NO: 257636 - protein, 13 aa, Homo sapiens
  CDR3 for beta chain variable domain of TCR clone 128818 (TRBV12-5, TRBJ2-3)
CASGDRQSDTQYF

SEQ ID NO: 257637 - protein, 15 aa, Homo sapiens
  CDR3 for alpha chain variable domain of TCR clone 128819 (TRAV3, TRAJ22)
CAVRDRGGSARQLTF

SEQ ID NO: 257638 - protein, 15 aa, Homo sapiens
  CDR3 for beta chain variable domain of TCR clone 128819 (TRBV19, TRBJ1-6)
CASSTQGAVGSPLHF

SEQ ID NO: 257639 - protein, 23 aa, Homo sapiens
  CDR3 for alpha chain variable domain of TCR clone 128820 (TRAV26-1, )
CIADNAGNNHIQNPDPAVYQLRD

SEQ ID NO: 257640 - protein, 15 aa, Homo sapiens
  CDR3 for beta chain variable domain of TCR clone 128820 (TRBV27, TRBJ2-1)
CASSNGGGSSNEQFF

SEQ ID NO: 257641 - protein, 16 aa, Homo sapiens
  CDR3 for alpha chain variable domain of TCR clone 128821 (TRAV8-1, TRAJ39)
CAVNVPSYNAGNMLTF

SEQ ID NO: 257642 - protein, 14 aa, Homo sapiens
  CDR3 for beta chain variable domain of TCR clone 128821 (TRBV7-2, TRBJ2-7)
CASSLYPGRYEQYF

SEQ ID NO: 257643 - protein, 10 aa, Homo sapiens
  CDR3 for alpha chain variable domain of TCR clone 128822 (TRAV13-1, TRAJ30)
CAARDDKIIF

SEQ ID NO: 257644 - protein, 15 aa, Homo sapiens
  CDR3 for beta chain variable domain of TCR clone 128822 (TRBV19, TRBJ1-2)
CASSVGQVLNYGYTF

SEQ ID NO: 257645 - protein, 16 aa, Homo sapiens
  CDR3 for alpha chain variable domain of TCR clone 128823 (TRAV14/DV4, TRAJ45)
CAMREGERGGADGLTF

SEQ ID NO: 257646 - protein, 16 aa, Homo sapiens
  CDR3 for beta chain variable domain of TCR clone 128823 (TRBV6-6, TRBJ2-4)
CASSNAGQGAKNMQYF

SEQ ID NO: 257647 - protein, 16 aa, Homo sapiens
  CDR3 for alpha chain variable domain of TCR clone 128824 (TRAV16, TRAJ52)
CALSAAGGTSYGKLTF

SEQ ID NO: 257648 - protein, 15 aa, Homo sapiens
  CDR3 for beta chain variable domain of TCR clone 128824 (TRBV12-4, TRBJ2-5)
CASSPPTGLQETQYF

SEQ ID NO: 257649 - protein, 10 aa, Homo sapiens
  CDR3 for alpha chain variable domain of TCR clone 128825 (TRAV36/DV7, TRAJ48)
CAVGNEKLTF

SEQ ID NO: 257650 - protein, 16 aa, Homo sapiens
  CDR3 for beta chain variable domain of TCR clone 128825 (TRBV15, TRBJ2-3)
CATRLSGGRAPDTQYL

SEQ ID NO: 257651 - protein, 14 aa, Homo sapiens
  CDR3 for alpha chain variable domain of TCR clone 128826 (TRAV12-3, TRAJ10)
SHLPLTGGGNKLTF

SEQ ID NO: 257652 - protein, 15 aa, Homo sapiens
  CDR3 for beta chain variable domain of TCR clone 128826 (TRBV11-2, TRBJ1-3)
CASSLDGTVGNTIYL

SEQ ID NO: 257653 - protein, 17 aa, Homo sapiens
  CDR3 for alpha chain variable domain of TCR clone 128827 (TRAV16, TRAJ58)
CITVLSNGETSGSRLTL

SEQ ID NO: 257654 - protein, 17 aa, Homo sapiens
  CDR3 for beta chain variable domain of TCR clone 128827 (TRBV18, TRBJ2-1)
CASSKGLSGGADNEQFF

SEQ ID NO: 257655 - protein, 14 aa, Homo sapiens
  CDR3 for alpha chain variable domain of TCR clone 128828 (TRAV2, TRAJ9)
CAVEDRSGGFKTIF

SEQ ID NO: 257656 - protein, 14 aa, Homo sapiens
  CDR3 for beta chain variable domain of TCR clone 128828 (TRBV18, TRBJ1-5)
CASSRQQRNRPQHF

SEQ ID NO: 257657 - protein, 16 aa, Homo sapiens
  CDR3 for alpha chain variable domain of TCR clone 128829 (TRAV30, TRAJ24)
FGTEIVDADSWGKFQF

SEQ ID NO: 257658 - protein, 15 aa, Homo sapiens
  CDR3 for beta chain variable domain of TCR clone 128829 (TRBV7-3, TRBJ2-2)
CASSETGQGTGELFF

SEQ ID NO: 257659 - protein, 14 aa, Homo sapiens
  CDR3 for alpha chain variable domain of TCR clone 128830 (TRAV2, TRAJ37)
CAVEEQGNTGKLIF

SEQ ID NO: 257660 - protein, 14 aa, Homo sapiens
  CDR3 for beta chain variable domain of TCR clone 128830 (TRBV18, TRBJ2-1)
CASSPQGRFNEQFF

SEQ ID NO: 257661 - protein, 15 aa, Homo sapiens
  CDR3 for alpha chain variable domain of TCR clone 128831 (TRAV27, TRAJ38)
CAGRFNAGNNRKLIW

SEQ ID NO: 257662 - protein, 15 aa, Homo sapiens
  CDR3 for beta chain variable domain of TCR clone 128831 (TRBV19, TRBJ1-2)
CASSVGQVLNYGYTF

SEQ ID NO: 257663 - protein, 14 aa, Homo sapiens
  CDR3 for alpha chain variable domain of TCR clone 128832 (TRAV38-1, TRAJ45)
CASHSGGGADGLTF

SEQ ID NO: 257664 - protein, 13 aa, Homo sapiens
  CDR3 for beta chain variable domain of TCR clone 128832 (TRBV10-3, TRBJ1-2)
CAIGERDSYGYTF

SEQ ID NO: 257665 - protein, 16 aa, Homo sapiens
  CDR3 for alpha chain variable domain of TCR clone 128833 (TRAV3, TRAJ10)
CAVRDMRAGGGNKLTF

SEQ ID NO: 257666 - protein, 14 aa, Homo sapiens
  CDR3 for beta chain variable domain of TCR clone 128833 (TRBV25-1, TRBJ1-1)
CASTRLGGNTEAFF

SEQ ID NO: 257667 - protein, 16 aa, Homo sapiens
  CDR3 for alpha chain variable domain of TCR clone 128834 (TRAV30, TRAJ24)
CGTEIVDADSWGKFQF

SEQ ID NO: 257668 - protein, 13 aa, Homo sapiens
  CDR3 for beta chain variable domain of TCR clone 128834 (TRBV20-1, TRBJ1-1)
CSAWGGGNTEAFF

SEQ ID NO: 257669 - protein, 13 aa, Homo sapiens
  CDR3 for alpha chain variable domain of TCR clone 128835 (TRAV26-1, TRAJ33)
FIVRVDSNYQLIW

SEQ ID NO: 257670 - protein, 15 aa, Homo sapiens
  CDR3 for beta chain variable domain of TCR clone 128835 (TRBV7-2, TRBJ1-5)
CASSFSAGINQPQHF

SEQ ID NO: 257671 - protein, 14 aa, Homo sapiens
  CDR3 for alpha chain variable domain of TCR clone 128836 (TRAV38-2/DV8, TRAJ23)
CAYRKPNQGGKLIF

SEQ ID NO: 257672 - protein, 11 aa, Homo sapiens
  CDR3 for beta chain variable domain of TCR clone 128836 (TRBV12-4, TRBJ2-2)
CASSSAGELFF

SEQ ID NO: 257673 - protein, 14 aa, Homo sapiens
  CDR3 for alpha chain variable domain of TCR clone 128837 (TRAV1-2, TRAJ16)
CAVNRFSDGQKLLF

SEQ ID NO: 257674 - protein, 16 aa, Homo sapiens
  CDR3 for beta chain variable domain of TCR clone 128837 (TRBV24-1, TRBJ2-1)
CATSGVTGANYNEQFF

SEQ ID NO: 257675 - protein, 15 aa, Homo sapiens
  CDR3 for alpha chain variable domain of TCR clone 128838 (TRAV20, TRAJ6)
CCAGTPSGGSYIPTF

SEQ ID NO: 257676 - protein, 13 aa, Homo sapiens
  CDR3 for beta chain variable domain of TCR clone 128838 (TRBV19, TRBJ1-2)
CASSVPGQDGYTF

SEQ ID NO: 257677 - protein, 14 aa, Homo sapiens
  CDR3 for alpha chain variable domain of TCR clone 128839 (TRAV34, TRAJ44)
CGADGTGTASKLTF

SEQ ID NO: 257678 - protein, 14 aa, Homo sapiens
  CDR3 for beta chain variable domain of TCR clone 128839 (TRBV7-9, TRBJ2-1)
CASSPRDSLYEQFF

SEQ ID NO: 257679 - protein, 14 aa, Homo sapiens
  CDR3 for alpha chain variable domain of TCR clone 128840 (TRAV38-1, TRAJ27)
CSFIHNTNAGKSTF

SEQ ID NO: 257680 - protein, 12 aa, Homo sapiens
  CDR3 for beta chain variable domain of TCR clone 128840 (TRBV7-8, TRBJ2-7)
CASSLGDREQYF

SEQ ID NO: 257681 - protein, 16 aa, Homo sapiens
  CDR3 for alpha chain variable domain of TCR clone 128841 (TRAV30, TRAJ24)
CGTEIVDADNWGKFQF

SEQ ID NO: 257682 - protein, 16 aa, Homo sapiens
  CDR3 for beta chain variable domain of TCR clone 128841 (TRBV28, TRBJ2-7)
CASSLFFETGGPEQYF

SEQ ID NO: 257683 - protein, 11 aa, Homo sapiens
  CDR3 for alpha chain variable domain of TCR clone 128842 (TRAV12-3, TRAJ43)
CAMSVSNEMRF

SEQ ID NO: 257684 - protein, 14 aa, Homo sapiens
  CDR3 for beta chain variable domain of TCR clone 128842 (TRBV12-5, TRBJ2-5)
CASGSRTHQETQYF

SEQ ID NO: 257685 - protein, 15 aa, Homo sapiens
  CDR3 for alpha chain variable domain of TCR clone 128843 (TRAV13-1, TRAJ9)
CAASTLNTGGFKTIF

SEQ ID NO: 257686 - protein, 13 aa, Homo sapiens
  CDR3 for beta chain variable domain of TCR clone 128843 (TRBV7-9, TRBJ2-7)
CASSFAGAYEQYF

SEQ ID NO: 257687 - protein, 19 aa, Homo sapiens
  CDR3 for alpha chain variable domain of TCR clone 128844 (TRAV1-2, TRAJ26)
CLLPLCCERPDNCGQNFVF

SEQ ID NO: 257688 - protein, 12 aa, Homo sapiens
  CDR3 for beta chain variable domain of TCR clone 128844 (TRBV20-1, TRBJ2-1)
CSAQYTYNEQFF

SEQ ID NO: 257689 - protein, 13 aa, Homo sapiens
  CDR3 for alpha chain variable domain of TCR clone 128845 (TRAV1-1, TRAJ9)
CAAKNTGGFKTIF

SEQ ID NO: 257690 - protein, 12 aa, Homo sapiens
  CDR3 for beta chain variable domain of TCR clone 128845 (TRBV7-9, TRBJ2-7)
CASSFGSYEQYF

SEQ ID NO: 257691 - protein, 13 aa, Homo sapiens
  CDR3 for alpha chain variable domain of TCR clone 128846 (TRAV21, TRAJ20)
CAVGLRVDYKLSF

SEQ ID NO: 257692 - protein, 12 aa, Homo sapiens
  CDR3 for beta chain variable domain of TCR clone 128846 (TRBV19, TRBJ1-5)
CASRASNQPQHF

SEQ ID NO: 257693 - protein, 14 aa, Homo sapiens
  CDR3 for alpha chain variable domain of TCR clone 128847 (TRAV16, TRAJ48)
CALTPGFGNEKLTF

SEQ ID NO: 257694 - protein, 14 aa, Homo sapiens
  CDR3 for beta chain variable domain of TCR clone 128847 (TRBV7-2, TRBJ2-7)
CASSSISGFSEQYV

SEQ ID NO: 257695 - protein, 15 aa, Homo sapiens
  CDR3 for alpha chain variable domain of TCR clone 128848 (TRAV10, TRAJ10)
CVVSADTGGGDKLTF

SEQ ID NO: 257696 - protein, 15 aa, Homo sapiens
  CDR3 for beta chain variable domain of TCR clone 128848 (TRBV11-3, TRBJ2-7)
CASSLLSGSSYEQYF

SEQ ID NO: 257697 - protein, 12 aa, Homo sapiens
  CDR3 for alpha chain variable domain of TCR clone 128849 (TRAV1-2, TRAJ33)
CAALDSNYQLIW

SEQ ID NO: 257698 - protein, 14 aa, Homo sapiens
  CDR3 for beta chain variable domain of TCR clone 128849 (TRBV20-1, TRBJ2-1)
CSAQIGGSANEQLF

SEQ ID NO: 257699 - protein, 20 aa, Homo sapiens
  CDR3 for alpha chain variable domain of TCR clone 128850 (TRAV25, TRAJ21)
TATQTTDVGTYPLSFNKFYF

SEQ ID NO: 257700 - protein, 14 aa, Homo sapiens
  CDR3 for beta chain variable domain of TCR clone 128850 (TRBV6-1, TRBJ2-1)
CSSAKDGFYNEQFF

SEQ ID NO: 257701 - protein, 14 aa, Homo sapiens
  CDR3 for alpha chain variable domain of TCR clone 128851 (TRAV12-2, TRAJ17)
CAVLFKAAGNKLTF

SEQ ID NO: 257702 - protein, 13 aa, Homo sapiens
  CDR3 for beta chain variable domain of TCR clone 128851 (TRBV12-4, TRBJ1-2)
CASSLRQGKGYTF

SEQ ID NO: 257703 - protein, 14 aa, Homo sapiens
  CDR3 for alpha chain variable domain of TCR clone 128852 (TRAV13-1, TRAJ13)
CAASRVGGYQKVTF

SEQ ID NO: 257704 - protein, 17 aa, Homo sapiens
  CDR3 for beta chain variable domain of TCR clone 128852 (TRBV15, TRBJ1-5)
CVTSRAPPGTRNQPQHF

SEQ ID NO: 257705 - protein, 12 aa, Homo sapiens
  CDR3 for alpha chain variable domain of TCR clone 128853 (TRAV12-3, TRAJ17)
CAMTLTGNKLTF

SEQ ID NO: 257706 - protein, 14 aa, Homo sapiens
  CDR3 for beta chain variable domain of TCR clone 128853 (TRBV6-3, TRBJ2-2)
CASTYTPDTGELFF

SEQ ID NO: 257707 - protein, 19 aa, Homo sapiens
  CDR3 for alpha chain variable domain of TCR clone 128854 (TRAV25, TRAJ43)
TATQTTDVGTYFCAVFMRF

SEQ ID NO: 257708 - protein, 13 aa, Homo sapiens
  CDR3 for beta chain variable domain of TCR clone 128854 (TRBV7-9, TRBJ1-2)
CASSLKQYYGYTF

SEQ ID NO: 257709 - protein, 17 aa, Homo sapiens
  CDR3 for alpha chain variable domain of TCR clone 128855 (TRAV3, TRAJ12)
CAVSDGGRMDSSYKLIF

SEQ ID NO: 257710 - protein, 14 aa, Homo sapiens
  CDR3 for beta chain variable domain of TCR clone 128855 (TRBV7-9, TRBJ1-2)
CASSRQGANYGYTF

SEQ ID NO: 257711 - protein, 13 aa, Homo sapiens
  CDR3 for alpha chain variable domain of TCR clone 128856 (TRAV1-1, TRAJ11)
CAVLNSGYSTLTF

SEQ ID NO: 257712 - protein, 14 aa, Homo sapiens
  CDR3 for beta chain variable domain of TCR clone 128856 (TRBV11-2, TRBJ2-5)
CASRPLAGRETQYF

SEQ ID NO: 257713 - protein, 14 aa, Homo sapiens
  CDR3 for alpha chain variable domain of TCR clone 128857 (TRAV1-2, TRAJ16)
CAVNRFSDGQKLLF

SEQ ID NO: 257714 - protein, 13 aa, Homo sapiens
  CDR3 for beta chain variable domain of TCR clone 128857 (TRBV7-3, TRBJ1-2)
CASSLNAGGFHTF

SEQ ID NO: 257715 - protein, 14 aa, Homo sapiens
  CDR3 for alpha chain variable domain of TCR clone 128858 (TRAV17, TRAJ54)
CATDANQGAQKLVF

SEQ ID NO: 257716 - protein, 14 aa, Homo sapiens
  CDR3 for beta chain variable domain of TCR clone 128858 (TRBV19, TRBJ2-1)
CASPTFVLSGEQFF

SEQ ID NO: 257717 - protein, 15 aa, Homo sapiens
  CDR3 for alpha chain variable domain of TCR clone 128859 (TRAV3, TRAJ20)
CAVRDIKLSDYKLSF

SEQ ID NO: 257718 - protein, 14 aa, Homo sapiens
  CDR3 for beta chain variable domain of TCR clone 128859 (TRBV7-2, TRBJ2-7)
CASRSQGAAYEQYF

SEQ ID NO: 257719 - protein, 15 aa, Homo sapiens
  CDR3 for alpha chain variable domain of TCR clone 128860 (TRAV3, TRAJ3)
CCERPRYSSASKIIF

SEQ ID NO: 257720 - protein, 16 aa, Homo sapiens
  CDR3 for beta chain variable domain of TCR clone 128860 (TRBV19, TRBJ1-5)
CASSTDRGGPRQPQHF

SEQ ID NO: 257721 - protein, 13 aa, Homo sapiens
  CDR3 for alpha chain variable domain of TCR clone 128861 (TRAV2, TRAJ40)
CAVVTSGTYKYIF

SEQ ID NO: 257722 - protein, 16 aa, Homo sapiens
  CDR3 for beta chain variable domain of TCR clone 128861 (TRBV11-1, TRBJ2-2)
CASSAEGLKNTGELFF

SEQ ID NO: 257723 - protein, 13 aa, Homo sapiens
  CDR3 for alpha chain variable domain of TCR clone 128862 (TRAV17, TRAJ9)
CATDYTGGFKTIF

SEQ ID NO: 257724 - protein, 14 aa, Homo sapiens
  CDR3 for beta chain variable domain of TCR clone 128862 (TRBV19, TRBJ2-5)
CASNMTGQQEAQYF

SEQ ID NO: 257725 - protein, 10 aa, Homo sapiens
  CDR3 for alpha chain variable domain of TCR clone 128863 (TRAV13-2, TRAJ49)
CADTGNQFYS

SEQ ID NO: 257726 - protein, 13 aa, Homo sapiens
  CDR3 for beta chain variable domain of TCR clone 128863 (TRBV10-3, TRBJ1-2)
CAISERDSYGYTF

SEQ ID NO: 257727 - protein, 17 aa, Homo sapiens
  CDR3 for alpha chain variable domain of TCR clone 128864 (TRAV3, TRAJ6)
CAVIYGPRAGGSYIPTF

SEQ ID NO: 257728 - protein, 14 aa, Homo sapiens
  CDR3 for beta chain variable domain of TCR clone 128864 (TRBV7-2, TRBJ2-7)
CASSPKTSFYEQYF

SEQ ID NO: 257729 - protein, 12 aa, Homo sapiens
  CDR3 for alpha chain variable domain of TCR clone 128865 (TRAV17, TRAJ4)
CATDGGYNKLIF

SEQ ID NO: 257730 - protein, 18 aa, Homo sapiens
  CDR3 for beta chain variable domain of TCR clone 128865 (TRBV11-2, TRBJ2-3)
CASSLGGASRGAPNTQYF

SEQ ID NO: 257731 - protein, 14 aa, Homo sapiens
  CDR3 for alpha chain variable domain of TCR clone 128866 (TRAV8-1, TRAJ39)
CAVNASNAGNMLTF

SEQ ID NO: 257732 - protein, 14 aa, Homo sapiens
  CDR3 for beta chain variable domain of TCR clone 128866 (TRBV25-1, TRBJ1-1)
CASTHLGGNTEAFF

SEQ ID NO: 257733 - protein, 12 aa, Homo sapiens
  CDR3 for alpha chain variable domain of TCR clone 128867 (TRAV8-2, TRAJ45)
CVQGGGADGLPF

SEQ ID NO: 257734 - protein, 15 aa, Homo sapiens
  CDR3 for beta chain variable domain of TCR clone 128867 (TRBV19, TRBJ1-1)
CASSIRRQMNTEAFF

SEQ ID NO: 257735 - protein, 15 aa, Homo sapiens
  CDR3 for alpha chain variable domain of TCR clone 128868 (TRAV17, TRAJ57)
CATGPSQGGSEKLVF

SEQ ID NO: 257736 - protein, 16 aa, Homo sapiens
  CDR3 for beta chain variable domain of TCR clone 128868 (TRBV12-4, TRBJ1-5)
CASSRPVGGSNQPHHF

SEQ ID NO: 257737 - protein, 12 aa, Homo sapiens
  CDR3 for alpha chain variable domain of TCR clone 128869 (TRAV12-3, TRAJ17)
CAMTLTGNKLTL

SEQ ID NO: 257738 - protein, 13 aa, Homo sapiens
  CDR3 for beta chain variable domain of TCR clone 128869 (TRBV10-3, TRBJ2-7)
CASKLAVNYEQYF

SEQ ID NO: 257739 - protein, 14 aa, Homo sapiens
  CDR3 for alpha chain variable domain of TCR clone 128870 (TRAV8-4, TRAJ13)
CAVTLSGGYQKVTF

SEQ ID NO: 257740 - protein, 16 aa, Homo sapiens
  CDR3 for beta chain variable domain of TCR clone 128870 (TRBV13, TRBJ2-2)
CASSPRTGEHTGELFF

SEQ ID NO: 257741 - protein, 12 aa, Homo sapiens
  CDR3 for alpha chain variable domain of TCR clone 128871 (TRAV12-3, TRAJ17)
CAMTLTGNKLTF

SEQ ID NO: 257742 - protein, 15 aa, Homo sapiens
  CDR3 for beta chain variable domain of TCR clone 128871 (TRBV7-8, TRBJ2-7)
CASSLRHFEAYEQYF

SEQ ID NO: 257743 - protein, 16 aa, Homo sapiens
  CDR3 for alpha chain variable domain of TCR clone 128872 (TRAV5, TRAJ23)
CAGDRLIFGQGTELSV

SEQ ID NO: 257744 - protein, 14 aa, Homo sapiens
  CDR3 for beta chain variable domain of TCR clone 128872 (TRBV18, TRBJ2-7)
CASSPRGGAYEQYF

SEQ ID NO: 257745 - protein, 12 aa, Homo sapiens
  CDR3 for alpha chain variable domain of TCR clone 128873 (TRAV17, TRAJ20)
CATQSNDYKLSF

SEQ ID NO: 257746 - protein, 12 aa, Homo sapiens
  CDR3 for beta chain variable domain of TCR clone 128873 (TRBV11-2, TRBJ2-2)
CASSLGGGELFF

SEQ ID NO: 257747 - protein, 15 aa, Homo sapiens
  CDR3 for alpha chain variable domain of TCR clone 128874 (TRAV26-1, TRAJ29)
CIVRVEGSGNTPLVF

SEQ ID NO: 257748 - protein, 15 aa, Homo sapiens
  CDR3 for beta chain variable domain of TCR clone 128874 (TRBV28, TRBJ2-5)
CASSPPWSYQETQYF

SEQ ID NO: 257749 - protein, 12 aa, Homo sapiens
  CDR3 for alpha chain variable domain of TCR clone 128875 (TRAV35, TRAJ12)
CAGMDSSYKLNF

SEQ ID NO: 257750 - protein, 14 aa, Homo sapiens
  CDR3 for beta chain variable domain of TCR clone 128875 (TRBV28, TRBJ2-5)
CASSLYRGTETQYF

SEQ ID NO: 257751 - protein, 14 aa, Homo sapiens
  CDR3 for alpha chain variable domain of TCR clone 128876 (TRAV35, TRAJ22)
CAGLRPGSARQLTF

SEQ ID NO: 257752 - protein, 14 aa, Homo sapiens
  CDR3 for beta chain variable domain of TCR clone 128876 (TRBV7-3, TRBJ2-1)
CASSLAGGTNEQFF

SEQ ID NO: 257753 - protein, 16 aa, Homo sapiens
  CDR3 for alpha chain variable domain of TCR clone 128877 (TRAV12-2, TRAJ10)
CAVNMVLTGGGNKLTF

SEQ ID NO: 257754 - protein, 12 aa, Homo sapiens
  CDR3 for beta chain variable domain of TCR clone 128877 (TRBV28, TRBJ2-7)
CASSFSSYEQYF

SEQ ID NO: 257755 - protein, 12 aa, Homo sapiens
  CDR3 for alpha chain variable domain of TCR clone 128878 (TRAV17, TRAJ12)
WATLRSSYKLIF

SEQ ID NO: 257756 - protein, 16 aa, Homo sapiens
  CDR3 for beta chain variable domain of TCR clone 128878 (TRBV28, TRBJ2-7)
CASSLFFETGGPEQYF

SEQ ID NO: 257757 - protein, 16 aa, Homo sapiens
  CDR3 for alpha chain variable domain of TCR clone 128879 (TRAV8-3, TRAJ44)
CAVGASNTCTASKLTS

SEQ ID NO: 257758 - protein, 15 aa, Homo sapiens
  CDR3 for beta chain variable domain of TCR clone 128879 (TRBV27, TRBJ1-5)
CASTFNRGSNQPQHF

SEQ ID NO: 257759 - protein, 15 aa, Homo sapiens
  CDR3 for alpha chain variable domain of TCR clone 128880 (TRAV17, TRAJ56)
CATDAIPGANSKLTF

SEQ ID NO: 257760 - protein, 18 aa, Homo sapiens
  CDR3 for beta chain variable domain of TCR clone 128880 (TRBV11-2, TRBJ2-3)
CASSLGGASRGAPNTQYF

SEQ ID NO: 257761 - protein, 14 aa, Homo sapiens
  CDR3 for alpha chain variable domain of TCR clone 128881 (TRAV8-3, TRAJ44)
CAVGLTGTASKLTF

SEQ ID NO: 257762 - protein, 16 aa, Homo sapiens
  CDR3 for beta chain variable domain of TCR clone 128881 (TRBV11-2, TRBJ2-7)
CASSPTTGGVSYEQYF

SEQ ID NO: 257763 - protein, 18 aa, Homo sapiens
  CDR3 for alpha chain variable domain of TCR clone 128882 (TRAV29/DV5, TRAJ52)
CAAGFRGAGGTSYGKLPF

SEQ ID NO: 257764 - protein, 15 aa, Homo sapiens
  CDR3 for beta chain variable domain of TCR clone 128882 (TRBV20-1, TRBJ1-5)
CSATSDRGLGQPQHF

SEQ ID NO: 257765 - protein, 14 aa, Homo sapiens
  CDR3 for alpha chain variable domain of TCR clone 128883 (TRAV17, TRAJ34)
CATDSLEGTDKLIF

SEQ ID NO: 257766 - protein, 15 aa, Homo sapiens
  CDR3 for beta chain variable domain of TCR clone 128883 (TRBV20-1, TRBJ2-7)
CSARDRVSGMDEQYF

SEQ ID NO: 257767 - protein, 12 aa, Homo sapiens
  CDR3 for alpha chain variable domain of TCR clone 128884 (TRAV2, TRAJ31)
CAAEEGNARLMF

SEQ ID NO: 257768 - protein, 18 aa, Homo sapiens
  CDR3 for beta chain variable domain of TCR clone 128884 (TRBV7-9, TRBJ2-3)
CASSLDLAGLATPDTQYF

SEQ ID NO: 257769 - protein, 12 aa, Homo sapiens
  CDR3 for alpha chain variable domain of TCR clone 128885 (TRAV12-2, TRAJ8)
CAVNTGFQKLVS

SEQ ID NO: 257770 - protein, 15 aa, Homo sapiens
  CDR3 for beta chain variable domain of TCR clone 128885 (TRBV7-8, TRBJ1-5)
CASSLERRGLEPQHF

SEQ ID NO: 257771 - protein, 13 aa, Homo sapiens
  CDR3 for alpha chain variable domain of TCR clone 128886 (TRAV35, TRAJ42)
CAGFPGSHGNLIF

SEQ ID NO: 257772 - protein, 14 aa, Homo sapiens
  CDR3 for beta chain variable domain of TCR clone 128886 (TRBV19, TRBJ2-1)
CASPTFVLSGEQFF

SEQ ID NO: 257773 - protein, 16 aa, Homo sapiens
  CDR3 for alpha chain variable domain of TCR clone 128887 (TRAV26-1, TRAJ37)
CIVRGDGSGNTGKLIF

SEQ ID NO: 257774 - protein, 16 aa, Homo sapiens
  CDR3 for beta chain variable domain of TCR clone 128887 (TRBV2, TRBJ2-1)
CASSVGGSLSYNEQFF

SEQ ID NO: 257775 - protein, 16 aa, Homo sapiens
  CDR3 for alpha chain variable domain of TCR clone 128888 (TRAV30, TRAJ24)
CGTEIVDADSWGKFQF

SEQ ID NO: 257776 - protein, 16 aa, Homo sapiens
  CDR3 for beta chain variable domain of TCR clone 128888 (TRBV5-4, TRBJ2-1)
CASSLVGSGQDNEQFF

SEQ ID NO: 257777 - protein, 14 aa, Homo sapiens
  CDR3 for alpha chain variable domain of TCR clone 128889 (TRAV12-3, TRAJ42)
CAMNYGGSQGNLIF

SEQ ID NO: 257778 - protein, 16 aa, Homo sapiens
  CDR3 for beta chain variable domain of TCR clone 128889 (TRBV7-9, TRBJ1-2)
CASSLGFSSGEDGYTF

SEQ ID NO: 257779 - protein, 14 aa, Homo sapiens
  CDR3 for alpha chain variable domain of TCR clone 128890 (TRAV3, TRAJ6)
CAVRDWGGSYIPTF

SEQ ID NO: 257780 - protein, 17 aa, Homo sapiens
  CDR3 for beta chain variable domain of TCR clone 128890 (TRBV6-5, TRBJ2-1)
CASRLSGRFESYNEQFF

SEQ ID NO: 257781 - protein, 13 aa, Homo sapiens
  CDR3 for alpha chain variable domain of TCR clone 128891 (TRAV17, TRAJ40)
CAGALGETYKYIF

SEQ ID NO: 257782 - protein, 16 aa, Homo sapiens
  CDR3 for beta chain variable domain of TCR clone 128891 (TRBV11-2, TRBJ1-2)
CASSLDTGGADYGYTF

SEQ ID NO: 257783 - protein, 14 aa, Homo sapiens
  CDR3 for alpha chain variable domain of TCR clone 128892 (TRAV8-6, TRAJ45)
CAALLEIQEEVLTD

SEQ ID NO: 257784 - protein, 14 aa, Homo sapiens
  CDR3 for beta chain variable domain of TCR clone 128892 (TRBV25-1, TRBJ1-1)
CASTHLGGNTEAFF

SEQ ID NO: 257785 - protein, 14 aa, Homo sapiens
  CDR3 for alpha chain variable domain of TCR clone 128893 (TRAV12-3, TRAJ10)
SHLPLTGGGNKLTF

SEQ ID NO: 257786 - protein, 13 aa, Homo sapiens
  CDR3 for beta chain variable domain of TCR clone 128893 (TRBV7-7, TRBJ2-5)
SASSRSGQETQYF

SEQ ID NO: 257787 - protein, 14 aa, Homo sapiens
  CDR3 for alpha chain variable domain of TCR clone 128894 (TRAV13-1, TRAJ23)
CAASRLGRGGELIF

SEQ ID NO: 257788 - protein, 13 aa, Homo sapiens
  CDR3 for beta chain variable domain of TCR clone 128894 (TRBV7-7, TRBJ2-5)
CASSRSGQETQYF

SEQ ID NO: 257789 - protein, 14 aa, Homo sapiens
  CDR3 for alpha chain variable domain of TCR clone 128895 (TRAV12-2, TRAJ24)
CAVTPADSWGKSQF

SEQ ID NO: 257790 - protein, 12 aa, Homo sapiens
  CDR3 for beta chain variable domain of TCR clone 128895 (TRBV3-1, TRBJ2-1)
CASSQGSSGKFF

SEQ ID NO: 257791 - protein, 13 aa, Homo sapiens
  CDR3 for alpha chain variable domain of TCR clone 128896 (TRAV36/DV7, TRAJ54)
CAVDIQGAQKLVF

SEQ ID NO: 257792 - protein, 14 aa, Homo sapiens
  CDR3 for beta chain variable domain of TCR clone 128896 (TRBV19, TRBJ2-7)
CASNFRDTFTGIYF

SEQ ID NO: 257793 - protein, 12 aa, Homo sapiens
  CDR3 for alpha chain variable domain of TCR clone 128897 (TRAV1-2, TRAJ42)
CVAWGSQGNLIF

SEQ ID NO: 257794 - protein, 14 aa, Homo sapiens
  CDR3 for beta chain variable domain of TCR clone 128897 (TRBV5-4, TRBJ2-5)
CASSLVRGQETQYF

SEQ ID NO: 257795 - protein, 15 aa, Homo sapiens
  CDR3 for alpha chain variable domain of TCR clone 128898 (TRAV2, TRAJ28)
CAVPYSWAGSYQLTF

SEQ ID NO: 257796 - protein, 17 aa, Homo sapiens
  CDR3 for beta chain variable domain of TCR clone 128898 (TRBV20-1, TRBJ2-4)
CSARDWASGGRENIQYF

SEQ ID NO: 257797 - protein, 12 aa, Homo sapiens
  CDR3 for alpha chain variable domain of TCR clone 128899 (TRAV21, TRAJ33)
CAKMDSNYQLIW

SEQ ID NO: 257798 - protein, 14 aa, Homo sapiens
  CDR3 for beta chain variable domain of TCR clone 128899 (TRBV2, TRBJ2-7)
WASSLTSGGYEQYF

SEQ ID NO: 257799 - protein, 16 aa, Homo sapiens
  CDR3 for alpha chain variable domain of TCR clone 128900 (TRAV4, TRAJ18)
CCVLLIGGSTLGRLYF

SEQ ID NO: 257800 - protein, 13 aa, Homo sapiens
  CDR3 for beta chain variable domain of TCR clone 128900 (TRBV19, TRBJ2-7)
CASSPRQSYEQYF

SEQ ID NO: 257801 - protein, 14 aa, Homo sapiens
  CDR3 for alpha chain variable domain of TCR clone 128901 (TRAV16, TRAJ26)
CALSSANYGQNFVF

SEQ ID NO: 257802 - protein, 13 aa, Homo sapiens
  CDR3 for beta chain variable domain of TCR clone 128901 (TRBV19, TRBJ1-2)
CASSIGQVYGYTF

SEQ ID NO: 257803 - protein, 13 aa, Homo sapiens
  CDR3 for alpha chain variable domain of TCR clone 128902 (TRAV17, TRAJ6)
CATGFGGSYVPTF

SEQ ID NO: 257804 - protein, 14 aa, Homo sapiens
  CDR3 for beta chain variable domain of TCR clone 128902 (TRBV5-1, TRBJ2-5)
CASSFGGSQETQYF

SEQ ID NO: 257805 - protein, 11 aa, Homo sapiens
  CDR3 for alpha chain variable domain of TCR clone 128903 (TRAV12-3, TRAJ16)
CAIRDGQKLLF

SEQ ID NO: 257806 - protein, 15 aa, Homo sapiens
  CDR3 for beta chain variable domain of TCR clone 128903 (TRBV9, TRBJ2-1)
CASSLAGSSYNEQFF

SEQ ID NO: 257807 - protein, 14 aa, Homo sapiens
  CDR3 for alpha chain variable domain of TCR clone 128904 (TRAV8-2, TRAJ11)
CVVGEKSGYSTLTF

SEQ ID NO: 257808 - protein, 16 aa, Homo sapiens
  CDR3 for beta chain variable domain of TCR clone 128904 (TRBV28, TRBJ2-1)
CASSSPEYPRDNEQFF

SEQ ID NO: 257809 - protein, 16 aa, Homo sapiens
  CDR3 for alpha chain variable domain of TCR clone 128905 (TRAV2, TRAJ4)
CAVEDRFSGGYTKLIF

SEQ ID NO: 257810 - protein, 13 aa, Homo sapiens
  CDR3 for beta chain variable domain of TCR clone 128905 (TRBV7-7, TRBJ2-5)
CASSRSGQETQYF

SEQ ID NO: 257811 - protein, 12 aa, Homo sapiens
  CDR3 for alpha chain variable domain of TCR clone 128906 (TRAV29/DV5, TRAJ34)
CAARHDTDKLIF

SEQ ID NO: 257812 - protein, 13 aa, Homo sapiens
  CDR3 for beta chain variable domain of TCR clone 128906 (TRBV5-5, TRBJ1-5)
CASSLGIGGDQHF

SEQ ID NO: 257813 - protein, 14 aa, Homo sapiens
  CDR3 for alpha chain variable domain of TCR clone 128907 (TRAV13-1, TRAJ20)
CAARPGSNDCKLSF

SEQ ID NO: 257814 - protein, 15 aa, Homo sapiens
  CDR3 for beta chain variable domain of TCR clone 128907 (TRBV4-1, TRBJ2-7)
CASSQQGQGFDEQYF

SEQ ID NO: 257815 - protein, 13 aa, Homo sapiens
  CDR3 for alpha chain variable domain of TCR clone 128908 (TRAV13-1, TRAJ5)
CAASDTGRRALTF

SEQ ID NO: 257816 - protein, 14 aa, Homo sapiens
  CDR3 for beta chain variable domain of TCR clone 128908 (TRBV12-5, TRBJ2-5)
CASGSRTHQETQYF

SEQ ID NO: 257817 - protein, 14 aa, Homo sapiens
  CDR3 for alpha chain variable domain of TCR clone 128909 (TRAV8-3, TRAJ4)
CAVGAAGGYNKLIF

SEQ ID NO: 257818 - protein, 15 aa, Homo sapiens
  CDR3 for beta chain variable domain of TCR clone 128909 (TRBV6-5, TRBJ2-1)
CASSYDAGGGNEQFF

SEQ ID NO: 257819 - protein, 14 aa, Homo sapiens
  CDR3 for alpha chain variable domain of TCR clone 128910 (TRAV26-1, TRAJ38)
CIADNAGNNRKLTW

SEQ ID NO: 257820 - protein, 17 aa, Homo sapiens
  CDR3 for beta chain variable domain of TCR clone 128910 (TRBV20-1, TRBJ2-3)
CSAEVGGYGSSTDTQYF

SEQ ID NO: 257821 - protein, 14 aa, Homo sapiens
  CDR3 for alpha chain variable domain of TCR clone 128911 (TRAV1-2, TRAJ8)
CAVREDTGFQKLVF

SEQ ID NO: 257822 - protein, 14 aa, Homo sapiens
  CDR3 for beta chain variable domain of TCR clone 128911 (TRBV11-2, TRBJ2-3)
CASSRLARTDTQCF

SEQ ID NO: 257823 - protein, 14 aa, Homo sapiens
  CDR3 for alpha chain variable domain of TCR clone 128912 (TRAV12-3, TRAJ23)
CAMKMSNQGGKLIF

SEQ ID NO: 257824 - protein, 15 aa, Homo sapiens
  CDR3 for beta chain variable domain of TCR clone 128912 (TRBV7-9, TRBJ1-4)
CASSARTGGNEKLFF

SEQ ID NO: 257825 - protein, 13 aa, Homo sapiens
  CDR3 for alpha chain variable domain of TCR clone 128913 (TRAV12-3, TRAJ9)
CAMRNTGGFKTIF

SEQ ID NO: 257826 - protein, 14 aa, Homo sapiens
  CDR3 for beta chain variable domain of TCR clone 128913 (TRBV11-2, TRBJ2-7)
CASSSTGEGYEQHF

SEQ ID NO: 257827 - protein, 14 aa, Homo sapiens
  CDR3 for alpha chain variable domain of TCR clone 128914 (TRAV12-2, TRAJ13)
CAVKKTGGYQKVTF

SEQ ID NO: 257828 - protein, 14 aa, Homo sapiens
  CDR3 for beta chain variable domain of TCR clone 128914 (TRBV7-9, TRBJ2-2)
CASSGLADTGELFF

SEQ ID NO: 257829 - protein, 17 aa, Homo sapiens
  CDR3 for alpha chain variable domain of TCR clone 128915 (TRAV3, TRAJ42)
CAVRDRDYGGSQGNLIF

SEQ ID NO: 257830 - protein, 15 aa, Homo sapiens
  CDR3 for beta chain variable domain of TCR clone 128915 (TRBV11-3, TRBJ2-7)
CASSPGPASSYEQYF

SEQ ID NO: 257831 - protein, 12 aa, Homo sapiens
  CDR3 for alpha chain variable domain of TCR clone 128916 (TRAV17, TRAJ12)
CATLRSSYKLIF

SEQ ID NO: 257832 - protein, 12 aa, Homo sapiens
  CDR3 for beta chain variable domain of TCR clone 128916 (TRBV5-1, TRBJ1-2)
CASSQDTYGYTF

SEQ ID NO: 257833 - protein, 16 aa, Homo sapiens
  CDR3 for alpha chain variable domain of TCR clone 128917 (TRAV3, TRAJ21)
CAVRDIERGNLNKFYF

SEQ ID NO: 257834 - protein, 13 aa, Homo sapiens
  CDR3 for beta chain variable domain of TCR clone 128917 (TRBV27, TRBJ2-7)
CASSLTTGYEQYS

SEQ ID NO: 257835 - protein, 14 aa, Homo sapiens
  CDR3 for alpha chain variable domain of TCR clone 128918 (TRAV12-2, TRAJ45)
CALPERGGADGLTF

SEQ ID NO: 257836 - protein, 14 aa, Homo sapiens
  CDR3 for beta chain variable domain of TCR clone 128918 (TRBV18, TRBJ1-5)
CASSPGNSNQPQHC

SEQ ID NO: 257837 - protein, 12 aa, Homo sapiens
  CDR3 for alpha chain variable domain of TCR clone 128919 (TRAV8-3, TRAJ20)
CAVGANDYKLSY

SEQ ID NO: 257838 - protein, 16 aa, Homo sapiens
  CDR3 for beta chain variable domain of TCR clone 128919 (TRBV19, TRBJ2-2)
CASRSPGTGATGELFF

SEQ ID NO: 257839 - protein, 15 aa, Homo sapiens
  CDR3 for alpha chain variable domain of TCR clone 128920 (TRAV12-2, TRAJ10)
GRGWRLTGGGNKLTF

SEQ ID NO: 257840 - protein, 17 aa, Homo sapiens
  CDR3 for beta chain variable domain of TCR clone 128920 (TRBV13, TRBJ2-3)
CASSLSRVAGGRNTQYF

SEQ ID NO: 257841 - protein, 12 aa, Homo sapiens
  CDR3 for alpha chain variable domain of TCR clone 128921 (TRAV12-3, TRAJ20)
CAMVRGDYKLSF

SEQ ID NO: 257842 - protein, 14 aa, Homo sapiens
  CDR3 for beta chain variable domain of TCR clone 128921 (TRBV7-9, TRBJ1-1)
CASTPLQSYTEAFF

SEQ ID NO: 257843 - protein, 12 aa, Homo sapiens
  CDR3 for alpha chain variable domain of TCR clone 128922 (TRAV12-3, TRAJ17)
CAMTLTGNKPTF

SEQ ID NO: 257844 - protein, 15 aa, Homo sapiens
  CDR3 for beta chain variable domain of TCR clone 128922 (TRBV20-1, TRBJ2-7)
CSARDRVYGMDEQYF

SEQ ID NO: 257845 - protein, 16 aa, Homo sapiens
  CDR3 for alpha chain variable domain of TCR clone 128923 (TRAV12-2, TRAJ39)
CAVNRGPNNAGNMLTF

SEQ ID NO: 257846 - protein, 10 aa, Homo sapiens
  CDR3 for beta chain variable domain of TCR clone 128923 (TRBV2, TRBJ2-4)
CASRGSSQYF

SEQ ID NO: 257847 - protein, 16 aa, Homo sapiens
  CDR3 for alpha chain variable domain of TCR clone 128924 (TRAV16, TRAJ4)
CITVLPFSGGYNKLIF

SEQ ID NO: 257848 - protein, 12 aa, Homo sapiens
  CDR3 for beta chain variable domain of TCR clone 128924 (TRBV11-2, TRBJ2-2)
CASSLGGGELFF

SEQ ID NO: 257849 - protein, 13 aa, Homo sapiens
  CDR3 for alpha chain variable domain of TCR clone 128925 (TRAV8-4, TRAJ30)
CAVSVNRDDKIIF

SEQ ID NO: 257850 - protein, 14 aa, Homo sapiens
  CDR3 for beta chain variable domain of TCR clone 128925 (TRBV7-2, TRBJ2-7)
CASRSQGAAYEQYF

SEQ ID NO: 257851 - protein, 15 aa, Homo sapiens
  CDR3 for alpha chain variable domain of TCR clone 128926 (TRAV13-1, TRAJ17)
FAASIERAAGNKLTF

SEQ ID NO: 257852 - protein, 13 aa, Homo sapiens
  CDR3 for beta chain variable domain of TCR clone 128926 (TRBV7-7, TRBJ2-3)
CASSLSRADTQYF

SEQ ID NO: 257853 - protein, 11 aa, Homo sapiens
  CDR3 for alpha chain variable domain of TCR clone 128927 (TRAV21, TRAJ48)
CALDGNEKLTF

SEQ ID NO: 257854 - protein, 16 aa, Homo sapiens
  CDR3 for beta chain variable domain of TCR clone 128927 (TRBV12-4, TRBJ1-5)
CASSSGPRGSNQPQHF

SEQ ID NO: 257855 - protein, 14 aa, Homo sapiens
  CDR3 for alpha chain variable domain of TCR clone 128928 (TRAV35, TRAJ13)
CAGRSPGGYQKVAF

SEQ ID NO: 257856 - protein, 14 aa, Homo sapiens
  CDR3 for beta chain variable domain of TCR clone 128928 (TRBV19, TRBJ2-2)
CASSMVGLSGELFF

SEQ ID NO: 257857 - protein, 15 aa, Homo sapiens
  CDR3 for alpha chain variable domain of TCR clone 128929 (TRAV21, TRAJ40)
CAVRPQTSGTYKYIF

SEQ ID NO: 257858 - protein, 13 aa, Homo sapiens
  CDR3 for beta chain variable domain of TCR clone 128929 (TRBV7-2, TRBJ2-2)
CASISVRAGELFF

SEQ ID NO: 257859 - protein, 15 aa, Homo sapiens
  CDR3 for alpha chain variable domain of TCR clone 128930 (TRAV17, TRAJ16)
CAMALRFSDGQKLLF

SEQ ID NO: 257860 - protein, 15 aa, Homo sapiens
  CDR3 for beta chain variable domain of TCR clone 128930 (TRBV20-1, TRBJ1-1)
CSASRGVTGNTEAFF

SEQ ID NO: 257861 - protein, 15 aa, Homo sapiens
  CDR3 for alpha chain variable domain of TCR clone 128931 (TRAV12-1, TRAJ44)
CVVDEYTGTASKLTF

SEQ ID NO: 257862 - protein, 13 aa, Homo sapiens
  CDR3 for beta chain variable domain of TCR clone 128931 (TRBV7-3, TRBJ1-1)
CASSQDWGAEAFF

SEQ ID NO: 257863 - protein, 10 aa, Homo sapiens
  CDR3 for alpha chain variable domain of TCR clone 128932 (TRAV12-2, TRAJ27)
CGANAGKSTF

SEQ ID NO: 257864 - protein, 14 aa, Homo sapiens
  CDR3 for beta chain variable domain of TCR clone 128932 (TRBV7-9, TRBJ2-1)
CASSPRDSLYEQFF

SEQ ID NO: 257865 - protein, 14 aa, Homo sapiens
  CDR3 for alpha chain variable domain of TCR clone 128933 (TRAV12-3, TRAJ10)
SHLPLTGGGNKLTF

SEQ ID NO: 257866 - protein, 13 aa, Homo sapiens
  CDR3 for beta chain variable domain of TCR clone 128933 (TRBV12-4, TRBJ2-7)
CASSLSGVYEQYF

SEQ ID NO: 257867 - protein, 16 aa, Homo sapiens
  CDR3 for alpha chain variable domain of TCR clone 128934 (TRAV8-3, TRAJ18)
CAVGARRGSTLGRLYF

SEQ ID NO: 257868 - protein, 14 aa, Homo sapiens
  CDR3 for beta chain variable domain of TCR clone 128934 (TRBV7-2, TRBJ2-7)
CASRSQGAAYEQYF

SEQ ID NO: 257869 - protein, 12 aa, Homo sapiens
  CDR3 for alpha chain variable domain of TCR clone 128935 (TRAV12-1, TRAJ20)
CVVNPDDYKLSF

SEQ ID NO: 257870 - protein, 12 aa, Homo sapiens
  CDR3 for beta chain variable domain of TCR clone 128935 (TRBV19, TRBJ2-7)
CASTDRGYEQYF

SEQ ID NO: 257871 - protein, 14 aa, Homo sapiens
  CDR3 for alpha chain variable domain of TCR clone 128936 (TRAV3, TRAJ6)
CAVRDWGGSYIPPF

SEQ ID NO: 257872 - protein, 17 aa, Homo sapiens
  CDR3 for beta chain variable domain of TCR clone 128936 (TRBV6-5, TRBJ2-1)
CASRLSGRFESYNEQFF

SEQ ID NO: 257873 - protein, 16 aa, Homo sapiens
  CDR3 for alpha chain variable domain of TCR clone 128937 (TRAV12-3, TRAJ53)
CAMSPGSGGSNYKLTF

SEQ ID NO: 257874 - protein, 15 aa, Homo sapiens
  CDR3 for beta chain variable domain of TCR clone 128937 (TRBV20-1, TRBJ2-5)
CSATRTSGSLETQYF

SEQ ID NO: 257875 - protein, 14 aa, Homo sapiens
  CDR3 for alpha chain variable domain of TCR clone 128938 (TRAV26-1, TRAJ38)
CIADNAGNNRKPIW

SEQ ID NO: 257876 - protein, 13 aa, Homo sapiens
  CDR3 for beta chain variable domain of TCR clone 128938 (TRBV20-1, TRBJ1-1)
CSARGGGNTEAFF

SEQ ID NO: 257877 - protein, 13 aa, Homo sapiens
  CDR3 for alpha chain variable domain of TCR clone 128939 (TRAV13-2, TRAJ48)
CAEMDFGNEKLTF

SEQ ID NO: 257878 - protein, 16 aa, Homo sapiens
  CDR3 for beta chain variable domain of TCR clone 128939 (TRBV29-1, TRBJ2-7)
CSVEDAEDGTAYEQYF

SEQ ID NO: 257879 - protein, 14 aa, Homo sapiens
  CDR3 for alpha chain variable domain of TCR clone 128940 (TRAV8-3, TRAJ4)
CAVGASGGYDKLIF

SEQ ID NO: 257880 - protein, 16 aa, Homo sapiens
  CDR3 for beta chain variable domain of TCR clone 128940 (TRBV4-3, TRBJ2-2)
CASSHLQGSGTGELFF

SEQ ID NO: 257881 - protein, 18 aa, Homo sapiens
  CDR3 for alpha chain variable domain of TCR clone 128941 (TRAV21, TRAJ53)
CAVKGGENSGGSNYKLKF

SEQ ID NO: 257882 - protein, 13 aa, Homo sapiens
  CDR3 for beta chain variable domain of TCR clone 128941 (TRBV9, TRBJ2-1)
CASSPSGGSEQFF

SEQ ID NO: 257883 - protein, 13 aa, Homo sapiens
  CDR3 for alpha chain variable domain of TCR clone 128942 (TRAV1-1, TRAJ9)
CAAKNTGGFKTIF

SEQ ID NO: 257884 - protein, 14 aa, Homo sapiens
  CDR3 for beta chain variable domain of TCR clone 128942 (TRBV20-1, TRBJ2-1)
CSDQIGGSANEQFF

SEQ ID NO: 257885 - protein, 16 aa, Homo sapiens
  CDR3 for alpha chain variable domain of TCR clone 128943 (TRAV2, TRAJ4)
CAVEDRFSGGYNKLIF

SEQ ID NO: 257886 - protein, 12 aa, Homo sapiens
  CDR3 for beta chain variable domain of TCR clone 128943 (TRBV5-5, TRBJ2-5)
CASSYFGETQYF

SEQ ID NO: 257887 - protein, 16 aa, Homo sapiens
  CDR3 for alpha chain variable domain of TCR clone 128944 (TRAV3, TRAJ37)
CAVRVRGSGNTGKLIF

SEQ ID NO: 257888 - protein, 13 aa, Homo sapiens
  CDR3 for beta chain variable domain of TCR clone 128944 (TRBV14, TRBJ2-1)
CASSEDRRNEQFF

SEQ ID NO: 257889 - protein, 18 aa, Homo sapiens
  CDR3 for alpha chain variable domain of TCR clone 128945 (TRAV13-1, TRAJ52)
CAAENPNAGGTSYGKLTF

SEQ ID NO: 257890 - protein, 15 aa, Homo sapiens
  CDR3 for beta chain variable domain of TCR clone 128945 (TRBV6-1, TRBJ2-3)
CASSERGGITDTQYF

SEQ ID NO: 257891 - protein, 13 aa, Homo sapiens
  CDR3 for alpha chain variable domain of TCR clone 128946 (TRAV35, TRAJ42)
CAGFPGSQGHLIF

SEQ ID NO: 257892 - protein, 14 aa, Homo sapiens
  CDR3 for beta chain variable domain of TCR clone 128946 (TRBV4-1, TRBJ2-2)
CASSQAVNTGELFF

SEQ ID NO: 257893 - protein, 10 aa, Homo sapiens
  CDR3 for alpha chain variable domain of TCR clone 128947 (TRAV39, TRAJ49)
CAVAGNQFYF

SEQ ID NO: 257894 - protein, 14 aa, Homo sapiens
  CDR3 for beta chain variable domain of TCR clone 128947 (TRBV24-1, TRBJ1-1)
CATSIPRGDTEAFF

SEQ ID NO: 257895 - protein, 11 aa, Homo sapiens
  CDR3 for alpha chain variable domain of TCR clone 128948 (TRAV36/DV7, TRAJ33)
CAVDSNYQLIW

SEQ ID NO: 257896 - protein, 13 aa, Homo sapiens
  CDR3 for beta chain variable domain of TCR clone 128948 (TRBV12-4, TRBJ1-2)
CASSLRQGKGYTF

SEQ ID NO: 257897 - protein, 14 aa, Homo sapiens
  CDR3 for alpha chain variable domain of TCR clone 128949 (TRAV8-2, TRAJ4)
CVVSPSGGYDKLIF

SEQ ID NO: 257898 - protein, 15 aa, Homo sapiens
  CDR3 for beta chain variable domain of TCR clone 128949 (TRBV2, TRBJ2-1)
CASSELAGSYNEQFF

SEQ ID NO: 257899 - protein, 14 aa, Homo sapiens
  CDR3 for alpha chain variable domain of TCR clone 128950 (TRAV30, TRAJ33)
CGTVAPRSNYQLIW

SEQ ID NO: 257900 - protein, 13 aa, Homo sapiens
  CDR3 for beta chain variable domain of TCR clone 128950 (TRBV12-4, TRBJ1-1)
CASSPGTGFEAFF

SEQ ID NO: 257901 - protein, 15 aa, Homo sapiens
  CDR3 for alpha chain variable domain of TCR clone 128951 (TRAV8-3, TRAJ41)
CAVGSNSNSGYALNF

SEQ ID NO: 257902 - protein, 17 aa, Homo sapiens
  CDR3 for beta chain variable domain of TCR clone 128951 (TRBV25-1, TRBJ2-1)
CASSEYGQGRGVYEQFF

SEQ ID NO: 257903 - protein, 13 aa, Homo sapiens
  CDR3 for alpha chain variable domain of TCR clone 128952 (TRAV22, TRAJ26)
CAVEHNYGQNFVF

SEQ ID NO: 257904 - protein, 16 aa, Homo sapiens
  CDR3 for beta chain variable domain of TCR clone 128952 (TRBV7-2, TRBJ2-6)
CASSARRASGANVLTF

SEQ ID NO: 257905 - protein, 15 aa, Homo sapiens
  CDR3 for alpha chain variable domain of TCR clone 128953 (TRAV26-1, TRAJ40)
CIVRVTTSGTYKYII

SEQ ID NO: 257906 - protein, 12 aa, Homo sapiens
  CDR3 for beta chain variable domain of TCR clone 128953 (TRBV7-9, TRBJ1-4)
CASSTDREKLFF

SEQ ID NO: 257907 - protein, 12 aa, Homo sapiens
  CDR3 for alpha chain variable domain of TCR clone 128954 (TRAV21, TRAJ49)
CAVTHTGNQFYF

SEQ ID NO: 257908 - protein, 17 aa, Homo sapiens
  CDR3 for beta chain variable domain of TCR clone 128954 (TRBV13, TRBJ2-3)
CASSLSRVAGGRNTQYF

SEQ ID NO: 257909 - protein, 12 aa, Homo sapiens
  CDR3 for alpha chain variable domain of TCR clone 128955 (TRAV12-3, TRAJ17)
CAMTLTGNKLTF

SEQ ID NO: 257910 - protein, 14 aa, Homo sapiens
  CDR3 for beta chain variable domain of TCR clone 128955 (TRBV15, TRBJ2-1)
CATSGVEDYNEQFF

SEQ ID NO: 257911 - protein, 14 aa, Homo sapiens
  CDR3 for alpha chain variable domain of TCR clone 128956 (TRAV3, TRAJ9)
CAVRLNTGGFKTIF

SEQ ID NO: 257912 - protein, 15 aa, Homo sapiens
  CDR3 for beta chain variable domain of TCR clone 128956 (TRBV7-2, TRBJ2-1)
CASSLASCRVNEQFF

SEQ ID NO: 257913 - protein, 11 aa, Homo sapiens
  CDR3 for alpha chain variable domain of TCR clone 128957 (TRAV35, TRAJ30)
CAGPGGDKIIF

SEQ ID NO: 257914 - protein, 14 aa, Homo sapiens
  CDR3 for beta chain variable domain of TCR clone 128957 (TRBV7-6, TRBJ1-6)
CASSQAGGGSTLHF

SEQ ID NO: 257915 - protein, 12 aa, Homo sapiens
  CDR3 for alpha chain variable domain of TCR clone 128958 (TRAV1-1, TRAJ39)
CAVPVVGNMLTF

SEQ ID NO: 257916 - protein, 20 aa, Homo sapiens
  CDR3 for beta chain variable domain of TCR clone 128958 (TRBV7-9, TRBJ2-1)
CASSSPRAPRTRSSYNEQFF

SEQ ID NO: 257917 - protein, 12 aa, Homo sapiens
  CDR3 for alpha chain variable domain of TCR clone 128959 (TRAV12-2, TRAJ52)
IDGGTSYGKLTF

SEQ ID NO: 257918 - protein, 13 aa, Homo sapiens
  CDR3 for beta chain variable domain of TCR clone 128959 (TRBV12-4, TRBJ1-1)
CASSPGTGFEAFF

SEQ ID NO: 257919 - protein, 14 aa, Homo sapiens
  CDR3 for alpha chain variable domain of TCR clone 128960 (TRAV26-1, TRAJ45)
CIEVTGGGAEGLTF

SEQ ID NO: 257920 - protein, 19 aa, Homo sapiens
  CDR3 for beta chain variable domain of TCR clone 128960 (TRBV19, TRBJ2-2)
CASTRPGLAGGRVTGELFF

SEQ ID NO: 257921 - protein, 14 aa, Homo sapiens
  CDR3 for alpha chain variable domain of TCR clone 128961 (TRAV20, TRAJ58)
CAVWMETSGSRLTF

SEQ ID NO: 257922 - protein, 15 aa, Homo sapiens
  CDR3 for beta chain variable domain of TCR clone 128961 (TRBV10-3, TRBJ2-3)
CAISLTSGGTDTQYF

SEQ ID NO: 257923 - protein, 16 aa, Homo sapiens
  CDR3 for alpha chain variable domain of TCR clone 128962 (TRAV12-2, TRAJ32)
CAVNLGQGGATNKLIF

SEQ ID NO: 257924 - protein, 14 aa, Homo sapiens
  CDR3 for beta chain variable domain of TCR clone 128962 (TRBV6-1, TRBJ1-3)
CASVQGGGGNTIYF

SEQ ID NO: 257925 - protein, 17 aa, Homo sapiens
  CDR3 for alpha chain variable domain of TCR clone 128963 (TRAV16, TRAJ58)
CITVLSNGETSGSRLTF

SEQ ID NO: 257926 - protein, 17 aa, Homo sapiens
  CDR3 for beta chain variable domain of TCR clone 128963 (TRBV18, TRBJ2-1)
CASSKWLSGGADNEQFF

SEQ ID NO: 257927 - protein, 13 aa, Homo sapiens
  CDR3 for alpha chain variable domain of TCR clone 128964 (TRAV9-2, TRAJ53)
CALSGGSNYKLTF

SEQ ID NO: 257928 - protein, 17 aa, Homo sapiens
  CDR3 for beta chain variable domain of TCR clone 128964 (TRBV11-2, TRBJ2-1)
CASSVYPPGVEYNEQFF

SEQ ID NO: 257929 - protein, 21 aa, Homo sapiens
  CDR3 for alpha chain variable domain of TCR clone 128965 (TRAV1-2, TRAJ42)
CLLPLCCERRRYGGSQGNLIF

SEQ ID NO: 257930 - protein, 15 aa, Homo sapiens
  CDR3 for beta chain variable domain of TCR clone 128965 (TRBV28, TRBJ2-1)
CASSIIAGGRSEQFF

SEQ ID NO: 257931 - protein, 10 aa, Homo sapiens
  CDR3 for alpha chain variable domain of TCR clone 128966 (TRAV38-2/DV8, TRAJ40)
CASGTDKYIF

SEQ ID NO: 257932 - protein, 14 aa, Homo sapiens
  CDR3 for beta chain variable domain of TCR clone 128966 (TRBV7-9, TRBJ2-1)
CASSPRDSLYEQFF

SEQ ID NO: 257933 - protein, 12 aa, Homo sapiens
  CDR3 for alpha chain variable domain of TCR clone 128967 (TRAV12-2, TRAJ21)
CAVNRNFNKFYF

SEQ ID NO: 257934 - protein, 14 aa, Homo sapiens
  CDR3 for beta chain variable domain of TCR clone 128967 (TRBV12-4, TRBJ2-3)
CASSLSGAKDTQYF

SEQ ID NO: 257935 - protein, 15 aa, Homo sapiens
  CDR3 for alpha chain variable domain of TCR clone 128968 (TRAV3, TRAJ29)
CAVGDLYSGNTPLVF

SEQ ID NO: 257936 - protein, 17 aa, Homo sapiens
  CDR3 for beta chain variable domain of TCR clone 128968 (TRBV20-1, TRBJ2-1)
CSARDPLAGVWDNEQFF

SEQ ID NO: 257937 - protein, 13 aa, Homo sapiens
  CDR3 for alpha chain variable domain of TCR clone 128969 (TRAV3, TRAJ21)
CAAREPDFNKFYF

SEQ ID NO: 257938 - protein, 17 aa, Homo sapiens
  CDR3 for beta chain variable domain of TCR clone 128969 (TRBV7-8, TRBJ2-6)
CASSAGTGGAGANVLTL

SEQ ID NO: 257939 - protein, 12 aa, Homo sapiens
  CDR3 for alpha chain variable domain of TCR clone 128970 (TRAV2, TRAJ26)
CAVGDYGQNFVF

SEQ ID NO: 257940 - protein, 14 aa, Homo sapiens
  CDR3 for beta chain variable domain of TCR clone 128970 (TRBV7-2, TRBJ2-2)
CASSPSGGTGELFF

SEQ ID NO: 257941 - protein, 23 aa, Homo sapiens
  CDR3 for alpha chain variable domain of TCR clone 128971 (TRAV26-1, TRAJ38)
CIADNAGNNHIQNPDPAVYQLRD

SEQ ID NO: 257942 - protein, 14 aa, Homo sapiens
  CDR3 for beta chain variable domain of TCR clone 128971 (TRBV4-2, TRBJ2-1)
CASGLDRAYNEQFF

SEQ ID NO: 257943 - protein, 14 aa, Homo sapiens
  CDR3 for alpha chain variable domain of TCR clone 128972 (TRAV8-4, TRAJ17)
CAVSDQAAGNKLTF

SEQ ID NO: 257944 - protein, 15 aa, Homo sapiens
  CDR3 for beta chain variable domain of TCR clone 128972 (TRBV7-2, TRBJ1-2)
CASSLAPDRGRGYTF

SEQ ID NO: 257945 - protein, 17 aa, Homo sapiens
  CDR3 for alpha chain variable domain of TCR clone 128973 (TRAV17, TRAJ52)
CATAPRAGGTSYGKLTF

SEQ ID NO: 257946 - protein, 16 aa, Homo sapiens
  CDR3 for beta chain variable domain of TCR clone 128973 (TRBV19, TRBJ2-1)
CASSKAGPSSYNEQFF

SEQ ID NO: 257947 - protein, 15 aa, Homo sapiens
  CDR3 for alpha chain variable domain of TCR clone 128974 (TRAV8-1, TRAJ6)
CAVNTPPGGSYIPTF

SEQ ID NO: 257948 - protein, 15 aa, Homo sapiens
  CDR3 for beta chain variable domain of TCR clone 128974 (TRBV11-2, TRBJ2-2)
CASSSDRVNAGELFL

SEQ ID NO: 257949 - protein, 10 aa, Homo sapiens
  CDR3 for alpha chain variable domain of TCR clone 128975 (TRAV12-1, TRAJ33)
CVASNYQLIW

SEQ ID NO: 257950 - protein, 15 aa, Homo sapiens
  CDR3 for beta chain variable domain of TCR clone 128975 (TRBV5-4, TRBJ1-4)
CASSHGDGENEKLFF

SEQ ID NO: 257951 - protein, 16 aa, Homo sapiens
  CDR3 for alpha chain variable domain of TCR clone 128976 (TRAV2, TRAJ13)
CAARILGVTRKLPLEL

SEQ ID NO: 257952 - protein, 14 aa, Homo sapiens
  CDR3 for beta chain variable domain of TCR clone 128976 (TRBV19, TRBJ2-1)
CASEATGARNEQFF

SEQ ID NO: 257953 - protein, 12 aa, Homo sapiens
  CDR3 for alpha chain variable domain of TCR clone 128977 (TRAV12-2, TRAJ9)
CAVNTGGFKTIF

SEQ ID NO: 257954 - protein, 13 aa, Homo sapiens
  CDR3 for beta chain variable domain of TCR clone 128977 (TRBV10-3, TRBJ2-7)
CASKPAVNYEQYF

SEQ ID NO: 257955 - protein, 12 aa, Homo sapiens
  CDR3 for alpha chain variable domain of TCR clone 128978 (TRAV1-1, TRAJ23)
CAVTNQGGKLIF

SEQ ID NO: 257956 - protein, 14 aa, Homo sapiens
  CDR3 for beta chain variable domain of TCR clone 128978 (TRBV19, TRBJ2-1)
CASGKSTQYNEQFF

SEQ ID NO: 257957 - protein, 13 aa, Homo sapiens
  CDR3 for alpha chain variable domain of TCR clone 128979 (TRAV21, TRAJ20)
CAVGLRVDHKLSF

SEQ ID NO: 257958 - protein, 13 aa, Homo sapiens
  CDR3 for beta chain variable domain of TCR clone 128979 (TRBV6-3, TRBJ2-5)
CASRGPAEETQYF

SEQ ID NO: 257959 - protein, 14 aa, Homo sapiens
  CDR3 for alpha chain variable domain of TCR clone 128980 (TRAV2, TRAJ37)
CAVDFTSNTGKLIF

SEQ ID NO: 257960 - protein, 15 aa, Homo sapiens
  CDR3 for beta chain variable domain of TCR clone 128980 (TRBV7-9, TRBJ1-5)
CASSQGHQPNQPQHF

SEQ ID NO: 257961 - protein, 13 aa, Homo sapiens
  CDR3 for alpha chain variable domain of TCR clone 128981 (TRAV36/DV7, TRAJ54)
CAVDIQGAQKLVF

SEQ ID NO: 257962 - protein, 15 aa, Homo sapiens
  CDR3 for beta chain variable domain of TCR clone 128981 (TRBV27, TRBJ2-1)
CASSNGGGSSNEQFF

SEQ ID NO: 257963 - protein, 15 aa, Homo sapiens
  CDR3 for alpha chain variable domain of TCR clone 128982 (TRAV35, TRAJ58)
CAGRRQETSGSRLTF

SEQ ID NO: 257964 - protein, 16 aa, Homo sapiens
  CDR3 for beta chain variable domain of TCR clone 128982 (TRBV20-1, TRBJ1-4)
CSAPGQGLLTNEKLFF

SEQ ID NO: 257965 - protein, 14 aa, Homo sapiens
  CDR3 for alpha chain variable domain of TCR clone 128983 (TRAV12-2, TRAJ45)
CAVYSGGGADGLTF

SEQ ID NO: 257966 - protein, 15 aa, Homo sapiens
  CDR3 for beta chain variable domain of TCR clone 128983 (TRBV9, TRBJ1-6)
CASSVAGTGDSPLHF

SEQ ID NO: 257967 - protein, 16 aa, Homo sapiens
  CDR3 for alpha chain variable domain of TCR clone 128984 (TRAV14/DV4, TRAJ15)
CAMREGPAQAGTALLF

SEQ ID NO: 257968 - protein, 12 aa, Homo sapiens
  CDR3 for beta chain variable domain of TCR clone 128984 (TRBV28, TRBJ2-6)
CAIQAGANVLTF

SEQ ID NO: 257969 - protein, 14 aa, Homo sapiens
  CDR3 for alpha chain variable domain of TCR clone 128985 (TRAV8-6, TRAJ53)
CAALVLGSNYKLTF

SEQ ID NO: 257970 - protein, 15 aa, Homo sapiens
  CDR3 for beta chain variable domain of TCR clone 128985 (TRBV20-1, TRBJ2-3)
CSAEPLAGDGDTQYF

SEQ ID NO: 257971 - protein, 13 aa, Homo sapiens
  CDR3 for alpha chain variable domain of TCR clone 128986 (TRAV20, TRAJ21)
CAVEGYNFNKFYF

SEQ ID NO: 257972 - protein, 16 aa, Homo sapiens
  CDR3 for beta chain variable domain of TCR clone 128986 (TRBV7-2, TRBJ2-5)
CASSPRGRGGGETQYF

SEQ ID NO: 257973 - protein, 15 aa, Homo sapiens
  CDR3 for alpha chain variable domain of TCR clone 128987 (TRAV8-1, TRAJ6)
CAVNTPPGGSYIPTF

SEQ ID NO: 257974 - protein, 14 aa, Homo sapiens
  CDR3 for beta chain variable domain of TCR clone 128987 (TRBV12-4, TRBJ2-1)
CARSLGQGASEQFF

SEQ ID NO: 257975 - protein, 13 aa, Homo sapiens
  CDR3 for alpha chain variable domain of TCR clone 128988 (TRAV27, TRAJ17)
CAGAATAGDKLTF

SEQ ID NO: 257976 - protein, 15 aa, Homo sapiens
  CDR3 for beta chain variable domain of TCR clone 128988 (TRBV5-1, TRBJ2-3)
CASRNQAGSTDTQYF

SEQ ID NO: 257977 - protein, 16 aa, Homo sapiens
  CDR3 for alpha chain variable domain of TCR clone 128989 (TRAV17, TRAJ53)
CATDALSGGSNYKLTF

SEQ ID NO: 257978 - protein, 15 aa, Homo sapiens
  CDR3 for beta chain variable domain of TCR clone 128989 (TRBV20-1, TRBJ2-7)
CSARDRVSGMDKQYF

SEQ ID NO: 257979 - protein, 13 aa, Homo sapiens
  CDR3 for alpha chain variable domain of TCR clone 128990 (TRAV16, TRAJ31)
CALSAPNNARLMF

SEQ ID NO: 257980 - protein, 14 aa, Homo sapiens
  CDR3 for beta chain variable domain of TCR clone 128990 (TRBV7-2, TRBJ2-5)
CASSFTQGQETQYF

SEQ ID NO: 257981 - protein, 12 aa, Homo sapiens
  CDR3 for alpha chain variable domain of TCR clone 128991 (TRAV21, TRAJ29)
CAVTSGNTPLVF

SEQ ID NO: 257982 - protein, 15 aa, Homo sapiens
  CDR3 for beta chain variable domain of TCR clone 128991 (TRBV12-4, TRBJ1-2)
CASRLGVAGNYGDTF

SEQ ID NO: 257983 - protein, 14 aa, Homo sapiens
  CDR3 for alpha chain variable domain of TCR clone 128992 (TRAV1-2, TRAJ16)
CAVNRFSDGQKLLF

SEQ ID NO: 257984 - protein, 16 aa, Homo sapiens
  CDR3 for beta chain variable domain of TCR clone 128992 (TRBV12-4, TRBJ1-5)
CASSRPGGGSNQPQHF

SEQ ID NO: 257985 - protein, 11 aa, Homo sapiens
  CDR3 for alpha chain variable domain of TCR clone 128993 (TRAV13-2, TRAJ31)
CAENMDARPMF

SEQ ID NO: 257986 - protein, 15 aa, Homo sapiens
  CDR3 for beta chain variable domain of TCR clone 128993 (TRBV7-8, TRBJ1-2)
CASSLVRDGGLGYTF

SEQ ID NO: 257987 - protein, 15 aa, Homo sapiens
  CDR3 for alpha chain variable domain of TCR clone 128994 (TRAV12-3, TRAJ27)
CAMRAYNTNACKSTF

SEQ ID NO: 257988 - protein, 13 aa, Homo sapiens
  CDR3 for beta chain variable domain of TCR clone 128994 (TRBV11-2, TRBJ2-5)
CASSRGPSETQYF

SEQ ID NO: 257989 - protein, 16 aa, Homo sapiens
  CDR3 for alpha chain variable domain of TCR clone 128995 (TRAV3, TRAJ10)
CAVRDMRAGGGNKLTF

SEQ ID NO: 257990 - protein, 13 aa, Homo sapiens
  CDR3 for beta chain variable domain of TCR clone 128995 (TRBV7-9, TRBJ1-2)
CASSLKQNYGYAF

SEQ ID NO: 257991 - protein, 13 aa, Homo sapiens
  CDR3 for alpha chain variable domain of TCR clone 128996 (TRAV29/DV5, TRAJ47)
CAASAECGNKLVF

SEQ ID NO: 257992 - protein, 15 aa, Homo sapiens
  CDR3 for beta chain variable domain of TCR clone 128996 (TRBV7-9, TRBJ1-4)
CASSARTGGNEKLFF

SEQ ID NO: 257993 - protein, 13 aa, Homo sapiens
  CDR3 for alpha chain variable domain of TCR clone 128997 (TRAV3, TRAJ21)
CAVREPDFNKFYF

SEQ ID NO: 257994 - protein, 14 aa, Homo sapiens
  CDR3 for beta chain variable domain of TCR clone 128997 (TRBV20-1, TRBJ2-1)
CSAQIGGSANEQFF

SEQ ID NO: 257995 - protein, 15 aa, Homo sapiens
  CDR3 for alpha chain variable domain of TCR clone 128998 (TRAV29/DV5, TRAJ44)
CAASAGTGTASKLTL

SEQ ID NO: 257996 - protein, 12 aa, Homo sapiens
  CDR3 for beta chain variable domain of TCR clone 128998 (TRBV11-2, TRBJ2-2)
CASSLGGGELFF

SEQ ID NO: 257997 - protein, 14 aa, Homo sapiens
  CDR3 for alpha chain variable domain of TCR clone 128999 (TRAV20, TRAJ20)
CAVRRGYNDYKLSC

SEQ ID NO: 257998 - protein, 13 aa, Homo sapiens
  CDR3 for beta chain variable domain of TCR clone 128999 (TRBV19, TRBJ2-5)
CASSETAPETQYF

SEQ ID NO: 257999 - protein, 11 aa, Homo sapiens
  CDR3 for alpha chain variable domain of TCR clone 129000 (TRAV17, TRAJ9)
CGFTGGFKTIF

SEQ ID NO: 258000 - protein, 18 aa, Homo sapiens
  CDR3 for beta chain variable domain of TCR clone 129000 (TRBV12-4, TRBJ2-2)
CASSLVAGTRGQTGELFF

SEQ ID NO: 258001 - protein, 14 aa, Homo sapiens
  CDR3 for alpha chain variable domain of TCR clone 129001 (TRAV38-1, TRAJ39)
CAFAYNNAGNMLTF

SEQ ID NO: 258002 - protein, 15 aa, Homo sapiens
  CDR3 for beta chain variable domain of TCR clone 129001 (TRBV19, TRBJ2-6)
CASSIGPAGANVLTF

SEQ ID NO: 258003 - protein, 12 aa, Homo sapiens
  CDR3 for alpha chain variable domain of TCR clone 129002 (TRAV13-2, TRAJ23)
CAERDRGGKLIF

SEQ ID NO: 258004 - protein, 16 aa, Homo sapiens
  CDR3 for beta chain variable domain of TCR clone 129002 (TRBV20-1, TRBJ1-4)
CSAPGQGLLTNEKLFF

SEQ ID NO: 258005 - protein, 11 aa, Homo sapiens
  CDR3 for alpha chain variable domain of TCR clone 129003 (TRAV21, TRAJ48)
CAVDGNEKLTF

SEQ ID NO: 258006 - protein, 16 aa, Homo sapiens
  CDR3 for beta chain variable domain of TCR clone 129003 (TRBV12-4, TRBJ1-5)
CSSSSGPRGSNQPQHF

SEQ ID NO: 258007 - protein, 15 aa, Homo sapiens
  CDR3 for alpha chain variable domain of TCR clone 129004 (TRAV35, TRAJ33)
CAGQPPRYSNYQLIW

SEQ ID NO: 258008 - protein, 13 aa, Homo sapiens
  CDR3 for beta chain variable domain of TCR clone 129004 (TRBV4-1, TRBJ1-1)
CASSRKMNTEAFF

SEQ ID NO: 258009 - protein, 13 aa, Homo sapiens
  CDR3 for alpha chain variable domain of TCR clone 129005 (TRAV12-2, TRAJ24)
CAVSTDSWGKLQF

SEQ ID NO: 258010 - protein, 12 aa, Homo sapiens
  CDR3 for beta chain variable domain of TCR clone 129005 (TRBV7-6, TRBJ2-7)
CASSLAESEQYF

SEQ ID NO: 258011 - protein, 13 aa, Homo sapiens
  CDR3 for alpha chain variable domain of TCR clone 129006 (TRAV26-2, TRAJ43)
CILRAANNNDMRF

SEQ ID NO: 258012 - protein, 16 aa, Homo sapiens
  CDR3 for beta chain variable domain of TCR clone 129006 (TRBV12-5, TRBJ2-5)
CASGPRTSGNQETQYF

SEQ ID NO: 258013 - protein, 13 aa, Homo sapiens
  CDR3 for alpha chain variable domain of TCR clone 129007 (TRAV26-2, TRAJ41)
CILRDASGYALNF

SEQ ID NO: 258014 - protein, 16 aa, Homo sapiens
  CDR3 for beta chain variable domain of TCR clone 129007 (TRBV12-4, TRBJ2-7)
CASSLIGGTGTYEQYF

SEQ ID NO: 258015 - protein, 13 aa, Homo sapiens
  CDR3 for alpha chain variable domain of TCR clone 129008 (TRAV12-2, TRAJ13)
CREEDWGYQKVTF

SEQ ID NO: 258016 - protein, 17 aa, Homo sapiens
  CDR3 for beta chain variable domain of TCR clone 129008 (TRBV20-1, TRBJ2-2)
CSASGSGQGGLTGELFF

SEQ ID NO: 258017 - protein, 16 aa, Homo sapiens
  CDR3 for alpha chain variable domain of TCR clone 129009 (TRAV21, TRAJ52)
CAVTNAGGTSYGELTF

SEQ ID NO: 258018 - protein, 17 aa, Homo sapiens
  CDR3 for beta chain variable domain of TCR clone 129009 (TRBV28, TRBJ2-5)
CASSRQGGLAGAETQYF

SEQ ID NO: 258019 - protein, 16 aa, Homo sapiens
  CDR3 for alpha chain variable domain of TCR clone 129010 (TRAV12-2, TRAJ18)
CAVTTDRGSTLGRLYF

SEQ ID NO: 258020 - protein, 13 aa, Homo sapiens
  CDR3 for beta chain variable domain of TCR clone 129010 (TRBV7-3, TRBJ1-1)
CASSQDWGAEAFF

SEQ ID NO: 258021 - protein, 14 aa, Homo sapiens
  CDR3 for alpha chain variable domain of TCR clone 129011 (TRAV23/DV6, TRAJ53)
CAARSGGSNYKLTF

SEQ ID NO: 258022 - protein, 14 aa, Homo sapiens
  CDR3 for beta chain variable domain of TCR clone 129011 (TRBV27, TRBJ1-1)
CASSPQGKRAEALF

SEQ ID NO: 258023 - protein, 15 aa, Homo sapiens
  CDR3 for alpha chain variable domain of TCR clone 129012 (TRAV23/DV6, TRAJ30)
CAASSRESRDDKIIF

SEQ ID NO: 258024 - protein, 20 aa, Homo sapiens
  CDR3 for beta chain variable domain of TCR clone 129012 (TRBV7-8, TRBJ2-2)
CASRHLFPGPTIHITGELFF

SEQ ID NO: 258025 - protein, 14 aa, Homo sapiens
  CDR3 for alpha chain variable domain of TCR clone 129013 (TRAV12-3, TRAJ12)
CAMSEVDSSYKLIF

SEQ ID NO: 258026 - protein, 12 aa, Homo sapiens
  CDR3 for beta chain variable domain of TCR clone 129013 (TRBV18, TRBJ1-4)
CASSPSRENLFF

SEQ ID NO: 258027 - protein, 14 aa, Homo sapiens
  CDR3 for alpha chain variable domain of TCR clone 129014 (TRAV1-2, TRAJ16)
CAVNRFSDGQKLLF

SEQ ID NO: 258028 - protein, 18 aa, Homo sapiens
  CDR3 for beta chain variable domain of TCR clone 129014 (TRBV20-1, TRBJ2-3)
CRASGLAGGPGTTDTQYF

SEQ ID NO: 258029 - protein, 18 aa, Homo sapiens
  CDR3 for alpha chain variable domain of TCR clone 129015 (TRAV21, TRAJ52)
CAVRPSPAGGTSYGKLTF

SEQ ID NO: 258030 - protein, 12 aa, Homo sapiens
  CDR3 for beta chain variable domain of TCR clone 129015 (TRBV5-1, TRBJ1-1)
CASSFGNTEAFF

SEQ ID NO: 258031 - protein, 15 aa, Homo sapiens
  CDR3 for alpha chain variable domain of TCR clone 129016 (TRAV26-2, TRAJ13)
CILRDLSGGYQKVTF

SEQ ID NO: 258032 - protein, 11 aa, Homo sapiens
  CDR3 for beta chain variable domain of TCR clone 129016 (TRBV7-9, TRBJ2-5)
CASSLVDTQYF

SEQ ID NO: 258033 - protein, 16 aa, Homo sapiens
  CDR3 for alpha chain variable domain of TCR clone 129017 (TRAV17, TRAJ52)
CATSNAGGTSYGKLTF

SEQ ID NO: 258034 - protein, 13 aa, Homo sapiens
  CDR3 for beta chain variable domain of TCR clone 129017 (TRBV27, TRBJ1-6)
CASSLVVVSPLHF

SEQ ID NO: 258035 - protein, 12 aa, Homo sapiens
  CDR3 for alpha chain variable domain of TCR clone 129018 (TRAV13-1, TRAJ9)
CASHTGGFKTIF

SEQ ID NO: 258036 - protein, 12 aa, Homo sapiens
  CDR3 for beta chain variable domain of TCR clone 129018 (TRBV11-2, TRBJ2-3)
GASRGAPNTQYF

SEQ ID NO: 258037 - protein, 16 aa, Homo sapiens
  CDR3 for alpha chain variable domain of TCR clone 129019 (TRAV26-1, TRAJ58)
IASSESGETSGSRLTF

SEQ ID NO: 258038 - protein, 14 aa, Homo sapiens
  CDR3 for beta chain variable domain of TCR clone 129019 (TRBV9, TRBJ2-1)
CASSVEPRGKEQFF

SEQ ID NO: 258039 - protein, 12 aa, Homo sapiens
  CDR3 for alpha chain variable domain of TCR clone 129020 (TRAV27, TRAJ36)
YAGMTGANNLFF

SEQ ID NO: 258040 - protein, 14 aa, Homo sapiens
  CDR3 for beta chain variable domain of TCR clone 129020 (TRBV12-4, TRBJ2-3)
CASSLVPSTDTQYF

SEQ ID NO: 258041 - protein, 13 aa, Homo sapiens
  CDR3 for alpha chain variable domain of TCR clone 129021 (TRAV2, TRAJ23)
CAVMGNHGGKLIF

SEQ ID NO: 258042 - protein, 15 aa, Homo sapiens
  CDR3 for beta chain variable domain of TCR clone 129021 (TRBV11-2, TRBJ2-1)
CASSSSTISYNEQFF

SEQ ID NO: 258043 - protein, 11 aa, Homo sapiens
  CDR3 for alpha chain variable domain of TCR clone 129022 (TRAV12-3, TRAJ43)
CAMSVSNDMRF

SEQ ID NO: 258044 - protein, 14 aa, Homo sapiens
  CDR3 for beta chain variable domain of TCR clone 129022 (TRBV7-2, TRBJ1-6)
CASSLQGANSPLHF

SEQ ID NO: 258045 - protein, 12 aa, Homo sapiens
  CDR3 for alpha chain variable domain of TCR clone 129023 (TRAV29/DV5, TRAJ49)
CAATDTGNQFYF

SEQ ID NO: 258046 - protein, 15 aa, Homo sapiens
  CDR3 for beta chain variable domain of TCR clone 129023 (TRBV7-9, TRBJ1-5)
CASSQGHQPNQPQHF

SEQ ID NO: 258047 - protein, 12 aa, Homo sapiens
  CDR3 for alpha chain variable domain of TCR clone 129024 (TRAV13-1, TRAJ21)
CSAKEGFNKFYF

SEQ ID NO: 258048 - protein, 12 aa, Homo sapiens
  CDR3 for beta chain variable domain of TCR clone 129024 (TRBV11-2, TRBJ2-2)
CASSLGGGELFF

SEQ ID NO: 258049 - protein, 16 aa, Homo sapiens
  CDR3 for alpha chain variable domain of TCR clone 129025 (TRAV12-2, TRAJ45)
CAVNMYSGGGADGLTF

SEQ ID NO: 258050 - protein, 17 aa, Homo sapiens
  CDR3 for beta chain variable domain of TCR clone 129025 (TRBV6-3, TRBJ2-2)
RASSYRGRDFYTGELFF

SEQ ID NO: 258051 - protein, 12 aa, Homo sapiens
  CDR3 for alpha chain variable domain of TCR clone 129026 (TRAV2, TRAJ9)
CAVGAGGFKTIF

SEQ ID NO: 258052 - protein, 12 aa, Homo sapiens
  CDR3 for beta chain variable domain of TCR clone 129026 (TRBV19, TRBJ2-7)
CASTDRGYEQYF

SEQ ID NO: 258053 - protein, 17 aa, Homo sapiens
  CDR3 for alpha chain variable domain of TCR clone 129027 (TRAV3, TRAJ42)
CALRDRDYGGSQGNLIF

SEQ ID NO: 258054 - protein, 20 aa, Homo sapiens
  CDR3 for beta chain variable domain of TCR clone 129027 (TRBV28, TRBJ2-1)
CASTPIGRSPGLAGGNEQFF

SEQ ID NO: 258055 - protein, 12 aa, Homo sapiens
  CDR3 for alpha chain variable domain of TCR clone 129028 (TRAV36/DV7, TRAJ54)
CAVVRGVQKLVF

SEQ ID NO: 258056 - protein, 13 aa, Homo sapiens
  CDR3 for beta chain variable domain of TCR clone 129028 (TRBV7-9, TRBJ1-2)
CASRLKQNYGYTF

SEQ ID NO: 258057 - protein, 14 aa, Homo sapiens
  CDR3 for alpha chain variable domain of TCR clone 129029 (TRAV9-2, TRAJ39)
CALYIYNAGNMLTF

SEQ ID NO: 258058 - protein, 13 aa, Homo sapiens
  CDR3 for beta chain variable domain of TCR clone 129029 (TRBV7-3, TRBJ1-1)
CASSQDWGAEASF

SEQ ID NO: 258059 - protein, 14 aa, Homo sapiens
  CDR3 for alpha chain variable domain of TCR clone 129030 (TRAV29/DV5, TRAJ36)
CAARRKTGANNLFS

SEQ ID NO: 258060 - protein, 14 aa, Homo sapiens
  CDR3 for beta chain variable domain of TCR clone 129030 (TRBV12-5, TRBJ2-5)
CASGSRTHQETQYF

SEQ ID NO: 258061 - protein, 11 aa, Homo sapiens
  CDR3 for alpha chain variable domain of TCR clone 129031 (TRAV12-1, TRAJ26)
CVVACGQNFVF

SEQ ID NO: 258062 - protein, 15 aa, Homo sapiens
  CDR3 for beta chain variable domain of TCR clone 129031 (TRBV12-4, TRBJ2-5)
CASSGTGQAQETQYF

SEQ ID NO: 258063 - protein, 15 aa, Homo sapiens
  CDR3 for alpha chain variable domain of TCR clone 129032 (TRAV14/DV4, TRAJ10)
CAMRELTGGGNKLAF

SEQ ID NO: 258064 - protein, 18 aa, Homo sapiens
  CDR3 for beta chain variable domain of TCR clone 129032 (TRBV7-9, TRBJ2-7)
CASSLTTSGSRAWYEQYF

SEQ ID NO: 258065 - protein, 13 aa, Homo sapiens
  CDR3 for alpha chain variable domain of TCR clone 129033 (TRAV12-3, TRAJ33)
CAMSVNSNYQLIW

SEQ ID NO: 258066 - protein, 11 aa, Homo sapiens
  CDR3 for beta chain variable domain of TCR clone 129033 (TRBV7-3, TRBJ2-5)
CASSLSETQFF

SEQ ID NO: 258067 - protein, 15 aa, Homo sapiens
  CDR3 for alpha chain variable domain of TCR clone 129034 (TRAV4, TRAJ39)
CLVGPNNNAGNMLTF

SEQ ID NO: 258068 - protein, 13 aa, Homo sapiens
  CDR3 for beta chain variable domain of TCR clone 129034 (TRBV11-2, TRBJ2-5)
CASSSTGEETQDF

SEQ ID NO: 258069 - protein, 15 aa, Homo sapiens
  CDR3 for alpha chain variable domain of TCR clone 129035 (TRAV21, TRAJ53)
CATLNSGGSNYKLTF

SEQ ID NO: 258070 - protein, 16 aa, Homo sapiens
  CDR3 for beta chain variable domain of TCR clone 129035 (TRBV12-4, TRBJ1-5)
CASSRPVGGSNQPPHF

SEQ ID NO: 258071 - protein, 15 aa, Homo sapiens
  CDR3 for alpha chain variable domain of TCR clone 129036 (TRAV1-2, TRAJ30)
CAVRPHGNRDDKIIF

SEQ ID NO: 258072 - protein, 13 aa, Homo sapiens
  CDR3 for beta chain variable domain of TCR clone 129036 (TRBV4-1, TRBJ2-7)
CASSQGQAYEQYC

SEQ ID NO: 258073 - protein, 11 aa, Homo sapiens
  CDR3 for alpha chain variable domain of TCR clone 129037 (TRAV27, TRAJ47)
CRSNQGNKLVF

SEQ ID NO: 258074 - protein, 12 aa, Homo sapiens
  CDR3 for beta chain variable domain of TCR clone 129037 (TRBV7-8, TRBJ2-7)
CASSLGDREQYF

SEQ ID NO: 258075 - protein, 14 aa, Homo sapiens
  CDR3 for alpha chain variable domain of TCR clone 129038 (TRAV8-3, TRAJ36)
CAVGPITGANNLFF

SEQ ID NO: 258076 - protein, 15 aa, Homo sapiens
  CDR3 for beta chain variable domain of TCR clone 129038 (TRBV4-1, TRBJ2-1)
CASSQDPGNYNEKFF

SEQ ID NO: 258077 - protein, 12 aa, Homo sapiens
  CDR3 for alpha chain variable domain of TCR clone 129039 (TRAV21, TRAJ23)
CSVGPQGGKLIF

SEQ ID NO: 258078 - protein, 13 aa, Homo sapiens
  CDR3 for beta chain variable domain of TCR clone 129039 (TRBV20-1, TRBJ2-7)
CSARTGAGYEQYF

SEQ ID NO: 258079 - protein, 12 aa, Homo sapiens
  CDR3 for alpha chain variable domain of TCR clone 129040 (TRAV25, TRAJ11)
CAGASGYSTLTF

SEQ ID NO: 258080 - protein, 13 aa, Homo sapiens
  CDR3 for beta chain variable domain of TCR clone 129040 (TRBV7-3, TRBJ1-1)
CASSQDWGAEAFF

SEQ ID NO: 258081 - protein, 12 aa, Homo sapiens
  CDR3 for alpha chain variable domain of TCR clone 129041 (TRAV6, TRAJ20)
CALDRGDYKLSF

SEQ ID NO: 258082 - protein, 13 aa, Homo sapiens
  CDR3 for beta chain variable domain of TCR clone 129041 (TRBV5-1, TRBJ1-2)
CASSVQDGYGYTF

SEQ ID NO: 258083 - protein, 12 aa, Homo sapiens
  CDR3 for alpha chain variable domain of TCR clone 129042 (TRAV8-3, TRAJ26)
CAGANYGQNFVF

SEQ ID NO: 258084 - protein, 13 aa, Homo sapiens
  CDR3 for beta chain variable domain of TCR clone 129042 (TRBV20-1, TRBJ1-1)
CSAPLGGGTEAFF

SEQ ID NO: 258085 - protein, 12 aa, Homo sapiens
  CDR3 for alpha chain variable domain of TCR clone 129043 (TRAV9-2, TRAJ26)
CALRGYGQNFVF

SEQ ID NO: 258086 - protein, 16 aa, Homo sapiens
  CDR3 for beta chain variable domain of TCR clone 129043 (TRBV13, TRBJ2-2)
CASSLGRGYGTGELFF

SEQ ID NO: 258087 - protein, 12 aa, Homo sapiens
  CDR3 for alpha chain variable domain of TCR clone 129044 (TRAV12-3, TRAJ17)
CAMTLTGNKLTF

SEQ ID NO: 258088 - protein, 13 aa, Homo sapiens
  CDR3 for beta chain variable domain of TCR clone 129044 (TRBV7-2, TRBJ1-4)
CASSLAGLEKLFF

SEQ ID NO: 258089 - protein, 15 aa, Homo sapiens
  CDR3 for alpha chain variable domain of TCR clone 129045 (TRAV34, TRAJ37)
CGAAYGSSNTGKLIF

SEQ ID NO: 258090 - protein, 15 aa, Homo sapiens
  CDR3 for beta chain variable domain of TCR clone 129045 (TRBV7-9, TRBJ1-5)
CASSQGHQPNQPQHF

SEQ ID NO: 258091 - protein, 10 aa, Homo sapiens
  CDR3 for alpha chain variable domain of TCR clone 129046 (TRAV13-1, TRAJ8)
CAAPFQKLVF

SEQ ID NO: 258092 - protein, 16 aa, Homo sapiens
  CDR3 for beta chain variable domain of TCR clone 129046 (TRBV29-1, TRBJ2-2)
CSVEKTSEGNTGELFF

SEQ ID NO: 258093 - protein, 12 aa, Homo sapiens
  CDR3 for alpha chain variable domain of TCR clone 129047 (TRAV13-1, TRAJ21)
CAAKEGCNKFYF

SEQ ID NO: 258094 - protein, 18 aa, Homo sapiens
  CDR3 for beta chain variable domain of TCR clone 129047 (TRBV20-1, TRBJ2-6)
CSAETTPTHGSGANVLTF

SEQ ID NO: 258095 - protein, 17 aa, Homo sapiens
  CDR3 for alpha chain variable domain of TCR clone 129048 (TRAV3, TRAJ6)
YAVRDGPRVGGSYIPTF

SEQ ID NO: 258096 - protein, 12 aa, Homo sapiens
  CDR3 for beta chain variable domain of TCR clone 129048 (TRBV11-2, TRBJ2-2)
CASSLGGGELFF

SEQ ID NO: 258097 - protein, 16 aa, Homo sapiens
  CDR3 for alpha chain variable domain of TCR clone 129049 (TRAV27, TRAJ52)
CAGAGAGGTSYGKLTF

SEQ ID NO: 258098 - protein, 17 aa, Homo sapiens
  CDR3 for beta chain variable domain of TCR clone 129049 (TRBV24-1, TRBJ2-3)
CATSDLPSGGDTDTQYF

SEQ ID NO: 258099 - protein, 13 aa, Homo sapiens
  CDR3 for alpha chain variable domain of TCR clone 129050 (TRAV12-2, TRAJ42)
CAVKRGSQGNLIF

SEQ ID NO: 258100 - protein, 11 aa, Homo sapiens
  CDR3 for beta chain variable domain of TCR clone 129050 (TRBV12-4, TRBJ2-3)
CASTATDTQYF

SEQ ID NO: 258101 - protein, 15 aa, Homo sapiens
  CDR3 for alpha chain variable domain of TCR clone 129051 (TRAV17, TRAJ28)
CATVDSGAGSYQLTF

SEQ ID NO: 258102 - protein, 15 aa, Homo sapiens
  CDR3 for beta chain variable domain of TCR clone 129051 (TRBV5-1, TRBJ2-2)
CASSWTSPNTGELFF

SEQ ID NO: 258103 - protein, 12 aa, Homo sapiens
  CDR3 for alpha chain variable domain of TCR clone 129052 (TRAV12-3, TRAJ49)
CAMSGTGNQFYF

SEQ ID NO: 258104 - protein, 14 aa, Homo sapiens
  CDR3 for beta chain variable domain of TCR clone 129052 (TRBV28, TRBJ1-2)
CASRIQGANYGYTF

SEQ ID NO: 258105 - protein, 12 aa, Homo sapiens
  CDR3 for alpha chain variable domain of TCR clone 129053 (TRAV23/DV6, TRAJ16)
CAARGRGQKLLF

SEQ ID NO: 258106 - protein, 16 aa, Homo sapiens
  CDR3 for beta chain variable domain of TCR clone 129053 (TRBV20-1, TRBJ1-4)
CSAPGQGLLTNEKLFF

SEQ ID NO: 258107 - protein, 11 aa, Homo sapiens
  CDR3 for alpha chain variable domain of TCR clone 129054 (TRAV2, TRAJ13)
CASGGYQKVTF

SEQ ID NO: 258108 - protein, 15 aa, Homo sapiens
  CDR3 for beta chain variable domain of TCR clone 129054 (TRBV18, TRBJ2-6)
CASSPSYAGANVLTF

SEQ ID NO: 258109 - protein, 14 aa, Homo sapiens
  CDR3 for alpha chain variable domain of TCR clone 129055 (TRAV12-1, TRAJ17)
CVVNYKAAGNKLTF

SEQ ID NO: 258110 - protein, 14 aa, Homo sapiens
  CDR3 for beta chain variable domain of TCR clone 129055 (TRBV7-3, TRBJ1-1)
CASSLGTGYTEAFF

SEQ ID NO: 258111 - protein, 20 aa, Homo sapiens
  CDR3 for alpha chain variable domain of TCR clone 129056 (TRAV21, TRAJ4)
AASQPGDSATLAGGYNKLIF

SEQ ID NO: 258112 - protein, 13 aa, Homo sapiens
  CDR3 for beta chain variable domain of TCR clone 129056 (TRBV3-1, TRBJ1-1)
CASSPGVITEAFF

SEQ ID NO: 258113 - protein, 13 aa, Homo sapiens
  CDR3 for alpha chain variable domain of TCR clone 129057 (TRAV13-1, TRAJ20)
CAARVSNDYKISF

SEQ ID NO: 258114 - protein, 12 aa, Homo sapiens
  CDR3 for beta chain variable domain of TCR clone 129057 (TRBV20-1, TRBJ2-1)
CSARLGTDEQFF

SEQ ID NO: 258115 - protein, 15 aa, Homo sapiens
  CDR3 for alpha chain variable domain of TCR clone 129058 (TRAV26-1, TRAJ15)
CIVRAANQAGTALIF

SEQ ID NO: 258116 - protein, 15 aa, Homo sapiens
  CDR3 for beta chain variable domain of TCR clone 129058 (TRBV20-1, TRBJ1-1)
CSARSAASSNTEAFF

SEQ ID NO: 258117 - protein, 14 aa, Homo sapiens
  CDR3 for alpha chain variable domain of TCR clone 129059 (TRAV1-2, TRAJ33)
CAVRAPDSNYQLIW

SEQ ID NO: 258118 - protein, 14 aa, Homo sapiens
  CDR3 for beta chain variable domain of TCR clone 129059 (TRBV11-3, TRBJ1-6)
CASSFSGGDSTLHF

SEQ ID NO: 258119 - protein, 13 aa, Homo sapiens
  CDR3 for alpha chain variable domain of TCR clone 129060 (TRAV2, TRAJ15)
CAVASQAGTALIF

SEQ ID NO: 258120 - protein, 13 aa, Homo sapiens
  CDR3 for beta chain variable domain of TCR clone 129060 (TRBV20-1, TRBJ2-5)
CSARGDYQETQYF

SEQ ID NO: 258121 - protein, 15 aa, Homo sapiens
  CDR3 for alpha chain variable domain of TCR clone 129061 (TRAV2, TRAJ45)
CAVDGTGGGAGGLTF

SEQ ID NO: 258122 - protein, 15 aa, Homo sapiens
  CDR3 for beta chain variable domain of TCR clone 129061 (TRBV7-9, TRBJ1-6)
CASSSPGRGNSPLHF

SEQ ID NO: 258123 - protein, 12 aa, Homo sapiens
  CDR3 for alpha chain variable domain of TCR clone 129062 (TRAV8-3, TRAJ20)
CAVDFNDYKLSF

SEQ ID NO: 258124 - protein, 15 aa, Homo sapiens
  CDR3 for beta chain variable domain of TCR clone 129062 (TRBV27, TRBJ2-1)
CASSLARGAYNEQFF

SEQ ID NO: 258125 - protein, 13 aa, Homo sapiens
  CDR3 for alpha chain variable domain of TCR clone 129063 (TRAV2, TRAJ24)
TTVPLVSWGELQF

SEQ ID NO: 258126 - protein, 17 aa, Homo sapiens
  CDR3 for beta chain variable domain of TCR clone 129063 (TRBV5-1, TRBJ2-1)
CASSTGTSGYSYNEQFF

SEQ ID NO: 258127 - protein, 15 aa, Homo sapiens
  CDR3 for alpha chain variable domain of TCR clone 129064 (TRAV26-2, TRAJ13)
CILRDLSGGYQKVTF

SEQ ID NO: 258128 - protein, 13 aa, Homo sapiens
  CDR3 for beta chain variable domain of TCR clone 129064 (TRBV19, TRBJ1-2)
CASSQGQVYGYTF

SEQ ID NO: 258129 - protein, 15 aa, Homo sapiens
  CDR3 for alpha chain variable domain of TCR clone 129065 (TRAV3, TRAJ5)
CAVRDLYTGRRALTF

SEQ ID NO: 258130 - protein, 16 aa, Homo sapiens
  CDR3 for beta chain variable domain of TCR clone 129065 (TRBV20-1, TRBJ1-4)
CSAPGQGVLTNEKLFF

SEQ ID NO: 258131 - protein, 15 aa, Homo sapiens
  CDR3 for alpha chain variable domain of TCR clone 129066 (TRAV2, TRAJ15)
CAVEDREQAGTPLIF

SEQ ID NO: 258132 - protein, 14 aa, Homo sapiens
  CDR3 for beta chain variable domain of TCR clone 129066 (TRBV11-2, TRBJ2-7)
CASSLGAGAYEQYF

SEQ ID NO: 258133 - protein, 14 aa, Homo sapiens
  CDR3 for alpha chain variable domain of TCR clone 129067 (TRAV38-1, TRAJ45)
CASHSGGGADGLTF

SEQ ID NO: 258134 - protein, 14 aa, Homo sapiens
  CDR3 for beta chain variable domain of TCR clone 129067 (TRBV20-1, TRBJ1-1)
CSAQTQIGGTEAFF

SEQ ID NO: 258135 - protein, 15 aa, Homo sapiens
  CDR3 for alpha chain variable domain of TCR clone 129068 (TRAV2, TRAJ9)
CAVEVRGTGGFKPIF

SEQ ID NO: 258136 - protein, 16 aa, Homo sapiens
  CDR3 for beta chain variable domain of TCR clone 129068 (TRBV24-1, TRBJ2-3)
CATSDPGTGATDTQYF

SEQ ID NO: 258137 - protein, 16 aa, Homo sapiens
  CDR3 for alpha chain variable domain of TCR clone 129069 (TRAV3, TRAJ8)
CAVRDYPNTGFQKLVF

SEQ ID NO: 258138 - protein, 14 aa, Homo sapiens
  CDR3 for beta chain variable domain of TCR clone 129069 (TRBV7-2, TRBJ1-1)
CASSFLTGTTEAFF

SEQ ID NO: 258139 - protein, 14 aa, Homo sapiens
  CDR3 for alpha chain variable domain of TCR clone 129070 (TRAV17, TRAJ53)
CATDAGGSNYKLTF

SEQ ID NO: 258140 - protein, 14 aa, Homo sapiens
  CDR3 for beta chain variable domain of TCR clone 129070 (TRBV7-8, TRBJ1-2)
CASSPDSLSYGYTF

SEQ ID NO: 258141 - protein, 14 aa, Homo sapiens
  CDR3 for alpha chain variable domain of TCR clone 129071 (TRAV29/DV5, TRAJ48)
CAAMALFGNEKVTF

SEQ ID NO: 258142 - protein, 15 aa, Homo sapiens
  CDR3 for beta chain variable domain of TCR clone 129071 (TRBV7-2, TRBJ2-1)
CASTHGTGIYNEQFF

SEQ ID NO: 258143 - protein, 14 aa, Homo sapiens
  CDR3 for alpha chain variable domain of TCR clone 129072 (TRAV3, TRAJ17)
CAVRDAAAGNKLTF

SEQ ID NO: 258144 - protein, 17 aa, Homo sapiens
  CDR3 for beta chain variable domain of TCR clone 129072 (TRBV7-8, TRBJ1-2)
CASSLRPLQGHLYGYTF

SEQ ID NO: 258145 - protein, 15 aa, Homo sapiens
  CDR3 for alpha chain variable domain of TCR clone 129073 (TRAV3, TRAJ3)
CAVRDTDSSASKIIF

SEQ ID NO: 258146 - protein, 18 aa, Homo sapiens
  CDR3 for beta chain variable domain of TCR clone 129073 (TRBV25-1, TRBJ1-2)
CASSGLQNGQGLIFGYTF

SEQ ID NO: 258147 - protein, 16 aa, Homo sapiens
  CDR3 for alpha chain variable domain of TCR clone 129074 (TRAV30, TRAJ24)
CGTEIGDADSWGKFQF

SEQ ID NO: 258148 - protein, 15 aa, Homo sapiens
  CDR3 for beta chain variable domain of TCR clone 129074 (TRBV20-1, TRBJ2-7)
CSARDRVSGMDEQYF

SEQ ID NO: 258149 - protein, 10 aa, Homo sapiens
  CDR3 for alpha chain variable domain of TCR clone 129075 (TRAV12-1, TRAJ37)
GSSNTGKLIF

SEQ ID NO: 258150 - protein, 15 aa, Homo sapiens
  CDR3 for beta chain variable domain of TCR clone 129075 (TRBV19, TRBJ1-6)
CASSTQGAVDSPLHF

SEQ ID NO: 258151 - protein, 14 aa, Homo sapiens
  CDR3 for alpha chain variable domain of TCR clone 129076 (TRAV17, TRAJ31)
CATVLRNNNARRMF

SEQ ID NO: 258152 - protein, 14 aa, Homo sapiens
  CDR3 for beta chain variable domain of TCR clone 129076 (TRBV12-4, TRBJ2-5)
CASSLWQKQETQYF

SEQ ID NO: 258153 - protein, 14 aa, Homo sapiens
  CDR3 for alpha chain variable domain of TCR clone 129077 (TRAV23/DV6, TRAJ4)
CAANLSGGYNELIF

SEQ ID NO: 258154 - protein, 11 aa, Homo sapiens
  CDR3 for beta chain variable domain of TCR clone 129077 (TRBV7-9, TRBJ2-3)
CASSPTDTQYF

SEQ ID NO: 258155 - protein, 13 aa, Homo sapiens
  CDR3 for alpha chain variable domain of TCR clone 129078 (TRAV30, TRAJ48)
CGTFLKRNEKLTF

SEQ ID NO: 258156 - protein, 15 aa, Homo sapiens
  CDR3 for beta chain variable domain of TCR clone 129078 (TRBV20-1, TRBJ2-7)
CSARDRVSGMDEQYF

SEQ ID NO: 258157 - protein, 16 aa, Homo sapiens
  CDR3 for alpha chain variable domain of TCR clone 129079 (TRAV2, TRAJ23)
CVGGKLIFGQGTELSV

SEQ ID NO: 258158 - protein, 20 aa, Homo sapiens
  CDR3 for beta chain variable domain of TCR clone 129079 (TRBV20-1, TRBJ2-5)
CSARAGLAGRLAGHSETQYF

SEQ ID NO: 258159 - protein, 13 aa, Homo sapiens
  CDR3 for alpha chain variable domain of TCR clone 129080 (TRAV3, TRAJ20)
CAVRSLNDYKLSF

SEQ ID NO: 258160 - protein, 13 aa, Homo sapiens
  CDR3 for beta chain variable domain of TCR clone 129080 (TRBV6-1, TRBJ2-1)
CAGMDPANNEQFF

SEQ ID NO: 258161 - protein, 15 aa, Homo sapiens
  CDR3 for alpha chain variable domain of TCR clone 129081 (TRAV26-1, TRAJ29)
CIVRVEGSGNTPLVF

SEQ ID NO: 258162 - protein, 14 aa, Homo sapiens
  CDR3 for beta chain variable domain of TCR clone 129081 (TRBV18, TRBJ2-5)
CASSPGVSQETQSF

SEQ ID NO: 258163 - protein, 15 aa, Homo sapiens
  CDR3 for alpha chain variable domain of TCR clone 129082 (TRAV12-2, TRAJ43)
CAFDMRFGAGTRLTV

SEQ ID NO: 258164 - protein, 17 aa, Homo sapiens
  CDR3 for beta chain variable domain of TCR clone 129082 (TRBV24-1, TRBJ2-4)
CATSDAEARGVRNIQYF

SEQ ID NO: 258165 - protein, 15 aa, Homo sapiens
  CDR3 for alpha chain variable domain of TCR clone 129083 (TRAV12-3, TRAJ42)
CAMSGHGGSQGNLIF

SEQ ID NO: 258166 - protein, 15 aa, Homo sapiens
  CDR3 for beta chain variable domain of TCR clone 129083 (TRBV7-6, TRBJ2-5)
CASSSGLAGVETQYF

SEQ ID NO: 258167 - protein, 15 aa, Homo sapiens
  CDR3 for alpha chain variable domain of TCR clone 129084 (TRAV26-1, TRAJ29)
CIVRVEGSGNTPLVF

SEQ ID NO: 258168 - protein, 17 aa, Homo sapiens
  CDR3 for beta chain variable domain of TCR clone 129084 (TRBV28, TRBJ2-5)
CASSTPEGDALQETQYF

SEQ ID NO: 258169 - protein, 13 aa, Homo sapiens
  CDR3 for alpha chain variable domain of TCR clone 129085 (TRAV3, TRAJ43)
CAVKARNNNDVRF

SEQ ID NO: 258170 - protein, 16 aa, Homo sapiens
  CDR3 for beta chain variable domain of TCR clone 129085 (TRBV7-9, TRBJ2-3)
CASSFSVAGGTDTQYF

SEQ ID NO: 258171 - protein, 10 aa, Homo sapiens
  CDR3 for alpha chain variable domain of TCR clone 129086 (TRAV23/DV6, TRAJ57)
CAASSTLSQG

SEQ ID NO: 258172 - protein, 16 aa, Homo sapiens
  CDR3 for beta chain variable domain of TCR clone 129086 (TRBV19, TRBJ2-1)
CASSKAGPSSYNEQLF

SEQ ID NO: 258173 - protein, 13 aa, Homo sapiens
  CDR3 for alpha chain variable domain of TCR clone 129087 (TRAV35, TRAJ42)
CAGFPGSQGNLIF

SEQ ID NO: 258174 - protein, 14 aa, Homo sapiens
  CDR3 for beta chain variable domain of TCR clone 129087 (TRBV4-2, TRBJ2-7)
CASSQGQTAYEQYF

SEQ ID NO: 258175 - protein, 14 aa, Homo sapiens
  CDR3 for alpha chain variable domain of TCR clone 129088 (TRAV23/DV6, TRAJ45)
CEASWGGGADGLTF

SEQ ID NO: 258176 - protein, 15 aa, Homo sapiens
  CDR3 for beta chain variable domain of TCR clone 129088 (TRBV4-2, TRBJ1-2)
CASSRNTGAGYGYTF

SEQ ID NO: 258177 - protein, 22 aa, Homo sapiens
  CDR3 for alpha chain variable domain of TCR clone 129089 (TRAV3, TRAJ38)
CAVRDCLNAGNNHIQNPDPAVY

SEQ ID NO: 258178 - protein, 13 aa, Homo sapiens
  CDR3 for beta chain variable domain of TCR clone 129089 (TRBV20-1, TRBJ1-5)
CSASWGRSQPQHF

SEQ ID NO: 258179 - protein, 12 aa, Homo sapiens
  CDR3 for alpha chain variable domain of TCR clone 129090 (TRAV1-1, TRAJ8)
CAWGTGFQKLVF

SEQ ID NO: 258180 - protein, 15 aa, Homo sapiens
  CDR3 for beta chain variable domain of TCR clone 129090 (TRBV20-1, TRBJ2-7)
CSARDRVSGMDEQYF

SEQ ID NO: 258181 - protein, 15 aa, Homo sapiens
  CDR3 for alpha chain variable domain of TCR clone 129091 (TRAV8-3, TRAJ11)
CAVGLLNSGYSTLTF

SEQ ID NO: 258182 - protein, 16 aa, Homo sapiens
  CDR3 for beta chain variable domain of TCR clone 129091 (TRBV7-9, TRBJ1-2)
CAGSLGFSSGEDGYTF

SEQ ID NO: 258183 - protein, 14 aa, Homo sapiens
  CDR3 for alpha chain variable domain of TCR clone 129092 (TRAV26-1, TRAJ38)
CIADNAGNNRKLIW

SEQ ID NO: 258184 - protein, 14 aa, Homo sapiens
  CDR3 for beta chain variable domain of TCR clone 129092 (TRBV5-1, TRBJ2-7)
CASSRGESLYEQYF

SEQ ID NO: 258185 - protein, 15 aa, Homo sapiens
  CDR3 for alpha chain variable domain of TCR clone 129093 (TRAV8-3, TRAJ27)
CAVGPSKTNAGKSTF

SEQ ID NO: 258186 - protein, 15 aa, Homo sapiens
  CDR3 for beta chain variable domain of TCR clone 129093 (TRBV7-9, TRBJ1-6)
CASSSPGRGNSPLHF

SEQ ID NO: 258187 - protein, 20 aa, Homo sapiens
  CDR3 for alpha chain variable domain of TCR clone 129094 (TRAV12-1, TRAJ42)
SSVIQPPTSVKGGSQGNLIF

SEQ ID NO: 258188 - protein, 14 aa, Homo sapiens
  CDR3 for beta chain variable domain of TCR clone 129094 (TRBV6-1, TRBJ1-3)
CASVQGGGGNTIYF

SEQ ID NO: 258189 - protein, 14 aa, Homo sapiens
  CDR3 for alpha chain variable domain of TCR clone 129095 (TRAV12-3, TRAJ57)
CARALEGGSEKLVL

SEQ ID NO: 258190 - protein, 17 aa, Homo sapiens
  CDR3 for beta chain variable domain of TCR clone 129095 (TRBV11-3, TRBJ2-3)
CASSLGLTGGGTDTQYF

SEQ ID NO: 258191 - protein, 15 aa, Homo sapiens
  CDR3 for alpha chain variable domain of TCR clone 129096 (TRAV3, TRAJ4)
CAVRDGTGGYNKLIF

SEQ ID NO: 258192 - protein, 13 aa, Homo sapiens
  CDR3 for beta chain variable domain of TCR clone 129096 (TRBV12-5, TRBJ1-2)
CASGVRTGNGDTF

SEQ ID NO: 258193 - protein, 14 aa, Homo sapiens
  CDR3 for alpha chain variable domain of TCR clone 129097 (TRAV12-3, TRAJ54)
CAMRITQGAQKLVF

SEQ ID NO: 258194 - protein, 16 aa, Homo sapiens
  CDR3 for beta chain variable domain of TCR clone 129097 (TRBV28, TRBJ2-1)
CASRVPASGRIGEQFF

SEQ ID NO: 258195 - protein, 13 aa, Homo sapiens
  CDR3 for alpha chain variable domain of TCR clone 129098 (TRAV35, TRAJ42)
CAGFPGSQGNLIF

SEQ ID NO: 258196 - protein, 18 aa, Homo sapiens
  CDR3 for beta chain variable domain of TCR clone 129098 (TRBV11-2, TRBJ2-7)
CASSWRTVQTGQSYEQYL

SEQ ID NO: 258197 - protein, 14 aa, Homo sapiens
  CDR3 for alpha chain variable domain of TCR clone 129099 (TRAV35, TRAJ13)
CAGSPSGGYQKVTF

SEQ ID NO: 258198 - protein, 17 aa, Homo sapiens
  CDR3 for beta chain variable domain of TCR clone 129099 (TRBV7-6, TRBJ2-5)
CDSSPGLADPWGETQYF

SEQ ID NO: 258199 - protein, 14 aa, Homo sapiens
  CDR3 for alpha chain variable domain of TCR clone 129100 (TRAV3, TRAJ6)
CAVRDPWGSYIPTF

SEQ ID NO: 258200 - protein, 16 aa, Homo sapiens
  CDR3 for beta chain variable domain of TCR clone 129100 (TRBV27, TRBJ2-5)
CASSLSRAAGGETQYF

SEQ ID NO: 258201 - protein, 18 aa, Homo sapiens
  CDR3 for alpha chain variable domain of TCR clone 129101 (TRAV26-1, TRAJ52)
CIIRVAGAGGTSYGKLTF

SEQ ID NO: 258202 - protein, 13 aa, Homo sapiens
  CDR3 for beta chain variable domain of TCR clone 129101 (TRBV7-8, TRBJ1-2)
CASSAQSYYGYTL

SEQ ID NO: 258203 - protein, 14 aa, Homo sapiens
  CDR3 for alpha chain variable domain of TCR clone 129102 (TRAV1-1, TRAJ28)
CAAPSGAGSYQFTF

SEQ ID NO: 258204 - protein, 15 aa, Homo sapiens
  CDR3 for beta chain variable domain of TCR clone 129102 (TRBV7-2, TRBJ1-2)
CASSLVSGGDYGYTF

SEQ ID NO: 258205 - protein, 14 aa, Homo sapiens
  CDR3 for alpha chain variable domain of TCR clone 129103 (TRAV12-2, TRAJ17)
CAVLFKAAGNKLTF

SEQ ID NO: 258206 - protein, 12 aa, Homo sapiens
  CDR3 for beta chain variable domain of TCR clone 129103 (TRBV29-1, TRBJ2-3)
CSVTGGADTQYL

SEQ ID NO: 258207 - protein, 14 aa, Homo sapiens
  CDR3 for alpha chain variable domain of TCR clone 129104 (TRAV12-2, TRAJ17)
CAVNIKAAGNKLTF

SEQ ID NO: 258208 - protein, 15 aa, Homo sapiens
  CDR3 for beta chain variable domain of TCR clone 129104 (TRBV7-9, TRBJ1-4)
RASSRTGGFNEKLFF

SEQ ID NO: 258209 - protein, 12 aa, Homo sapiens
  CDR3 for alpha chain variable domain of TCR clone 129105 (TRAV8-3, TRAJ20)
CAVGANDYKLSF

SEQ ID NO: 258210 - protein, 14 aa, Homo sapiens
  CDR3 for beta chain variable domain of TCR clone 129105 (TRBV19, TRBJ2-1)
CASSMGSGATEQFF

SEQ ID NO: 258211 - protein, 14 aa, Homo sapiens
  CDR3 for alpha chain variable domain of TCR clone 129106 (TRAV12-2, TRAJ5)
CAVNRSTGRRAHTF

SEQ ID NO: 258212 - protein, 12 aa, Homo sapiens
  CDR3 for beta chain variable domain of TCR clone 129106 (TRBV19, TRBJ1-5)
CASSIAQQPQHF

SEQ ID NO: 258213 - protein, 18 aa, Homo sapiens
  CDR3 for alpha chain variable domain of TCR clone 129107 (TRAV9-2, TRAJ52)
CALSRHNAGGTSYGKLTF

SEQ ID NO: 258214 - protein, 16 aa, Homo sapiens
  CDR3 for beta chain variable domain of TCR clone 129107 (TRBV5-4, TRBJ2-3)
CASQQPGAGGADTQYF

SEQ ID NO: 258215 - protein, 11 aa, Homo sapiens
  CDR3 for alpha chain variable domain of TCR clone 129108 (TRAV1-2, TRAJ31)
RAVNNNARLMF

SEQ ID NO: 258216 - protein, 18 aa, Homo sapiens
  CDR3 for beta chain variable domain of TCR clone 129108 (TRBV25-1, TRBJ1-2)
CASSGLQNGQGLIFGYTF

SEQ ID NO: 258217 - protein, 18 aa, Homo sapiens
  CDR3 for alpha chain variable domain of TCR clone 129109 (TRAV13-1, TRAJ52)
CAASKRSAGGTSYGKLTF

SEQ ID NO: 258218 - protein, 13 aa, Homo sapiens
  CDR3 for beta chain variable domain of TCR clone 129109 (TRBV12-4, TRBJ1-2)
CASSLGQGKGYTF

SEQ ID NO: 258219 - protein, 11 aa, Homo sapiens
  CDR3 for alpha chain variable domain of TCR clone 129110 (TRAV1-1, TRAJ4)
CALYNKLIFGA

SEQ ID NO: 258220 - protein, 16 aa, Homo sapiens
  CDR3 for beta chain variable domain of TCR clone 129110 (TRBV7-3, TRBJ2-2)
CASSLKRGTLSGELFF

SEQ ID NO: 258221 - protein, 12 aa, Homo sapiens
  CDR3 for alpha chain variable domain of TCR clone 129111 (TRAV30, TRAJ43)
CGTEERGNDMRF

SEQ ID NO: 258222 - protein, 11 aa, Homo sapiens
  CDR3 for beta chain variable domain of TCR clone 129111 (TRBV29-1, TRBJ2-5)
CSEDRTGTQYL

SEQ ID NO: 258223 - protein, 11 aa, Homo sapiens
  CDR3 for alpha chain variable domain of TCR clone 129112 (TRAV21, TRAJ34)
CAHYNTDKLIF

SEQ ID NO: 258224 - protein, 13 aa, Homo sapiens
  CDR3 for beta chain variable domain of TCR clone 129112 (TRBV4-2, TRBJ1-1)
CASSQAGNTEAFF

SEQ ID NO: 258225 - protein, 16 aa, Homo sapiens
  CDR3 for alpha chain variable domain of TCR clone 129113 (TRAV12-2, TRAJ40)
CAVIRGGTSGTYKYIF

SEQ ID NO: 258226 - protein, 17 aa, Homo sapiens
  CDR3 for beta chain variable domain of TCR clone 129113 (TRBV7-8, TRBJ2-6)
CASSAGTGGAGANVLTF

SEQ ID NO: 258227 - protein, 12 aa, Homo sapiens
  CDR3 for alpha chain variable domain of TCR clone 129114 (TRAV3, TRAJ43)
CSVRDPNNDMRF

SEQ ID NO: 258228 - protein, 15 aa, Homo sapiens
  CDR3 for beta chain variable domain of TCR clone 129114 (TRBV4-3, TRBJ2-7)
CASSQGDWGDYEQYF

SEQ ID NO: 258229 - protein, 14 aa, Homo sapiens
  CDR3 for alpha chain variable domain of TCR clone 129115 (TRAV8-3, TRAJ39)
CAVGANNAGNMLTF

SEQ ID NO: 258230 - protein, 15 aa, Homo sapiens
  CDR3 for beta chain variable domain of TCR clone 129115 (TRBV28, TRBJ2-1)
CASSIIAGGRSEQFF

SEQ ID NO: 258231 - protein, 15 aa, Homo sapiens
  CDR3 for alpha chain variable domain of TCR clone 129116 (TRAV12-1, TRAJ8)
CVVNVENTGFQKLVF

SEQ ID NO: 258232 - protein, 15 aa, Homo sapiens
  CDR3 for beta chain variable domain of TCR clone 129116 (TRBV7-3, TRBJ2-1)
CASSPTGGSRNEQFF

SEQ ID NO: 258233 - protein, 15 aa, Homo sapiens
  CDR3 for alpha chain variable domain of TCR clone 129117 (TRAV38-1, TRAJ45)
CAFMKGGGGADGLIF

SEQ ID NO: 258234 - protein, 13 aa, Homo sapiens
  CDR3 for beta chain variable domain of TCR clone 129117 (TRBV7-9, TRBJ1-2)
CASSLKQNYGYTF

SEQ ID NO: 258235 - protein, 14 aa, Homo sapiens
  CDR3 for alpha chain variable domain of TCR clone 129118 (TRAV30, TRAJ33)
CGTVAPRSNYQLIW

SEQ ID NO: 258236 - protein, 13 aa, Homo sapiens
  CDR3 for beta chain variable domain of TCR clone 129118 (TRBV12-4, TRBJ1-1)
CASSFGEDTEAFF

SEQ ID NO: 258237 - protein, 13 aa, Homo sapiens
  CDR3 for alpha chain variable domain of TCR clone 129119 (TRAV16, TRAJ58)
RALSIPSGSRLTF

SEQ ID NO: 258238 - protein, 14 aa, Homo sapiens
  CDR3 for beta chain variable domain of TCR clone 129119 (TRBV6-5, TRBJ2-7)
CASSPHRGLREQYF

SEQ ID NO: 258239 - protein, 14 aa, Homo sapiens
  CDR3 for alpha chain variable domain of TCR clone 129120 (TRAV35, TRAJ33)
CAGSSQDSNYQLIW

SEQ ID NO: 258240 - protein, 15 aa, Homo sapiens
  CDR3 for beta chain variable domain of TCR clone 129120 (TRBV20-1, TRBJ2-7)
CSAESGTSRAYEQYF

SEQ ID NO: 258241 - protein, 13 aa, Homo sapiens
  CDR3 for alpha chain variable domain of TCR clone 129121 (TRAV12-3, TRAJ33)
CAMSVDSNHQLIW

SEQ ID NO: 258242 - protein, 14 aa, Homo sapiens
  CDR3 for beta chain variable domain of TCR clone 129121 (TRBV27, TRBJ2-5)
CASSSLKGWETQYF

SEQ ID NO: 258243 - protein, 12 aa, Homo sapiens
  CDR3 for alpha chain variable domain of TCR clone 129122 (TRAV21, TRAJ6)
CAVKGGSYIPTF

SEQ ID NO: 258244 - protein, 13 aa, Homo sapiens
  CDR3 for beta chain variable domain of TCR clone 129122 (TRBV11-2, TRBJ1-1)
CASSFTENTEASF

SEQ ID NO: 258245 - protein, 11 aa, Homo sapiens
  CDR3 for alpha chain variable domain of TCR clone 129123 (TRAV3, TRAJ21)
CAVGNSNKFYF

SEQ ID NO: 258246 - protein, 15 aa, Homo sapiens
  CDR3 for beta chain variable domain of TCR clone 129123 (TRBV5-1, TRBJ2-1)
CASSLVANSYNEQFF

SEQ ID NO: 258247 - protein, 13 aa, Homo sapiens
  CDR3 for alpha chain variable domain of TCR clone 129124 (TRAV2, TRAJ40)
CAVVTSGTYKYIF

SEQ ID NO: 258248 - protein, 20 aa, Homo sapiens
  CDR3 for beta chain variable domain of TCR clone 129124 (TRBV19, TRBJ2-1)
CASSISRTVTSTRLNNEQFF

SEQ ID NO: 258249 - protein, 15 aa, Homo sapiens
  CDR3 for alpha chain variable domain of TCR clone 129125 (TRAV12-3, TRAJ6)
CAMSPASGGSYIPTF

SEQ ID NO: 258250 - protein, 15 aa, Homo sapiens
  CDR3 for beta chain variable domain of TCR clone 129125 (TRBV2, TRBJ1-2)
CASSESRTVNYGYAF

SEQ ID NO: 258251 - protein, 13 aa, Homo sapiens
  CDR3 for alpha chain variable domain of TCR clone 129126 (TRAV2, TRAJ40)
CAVVTSGTYKYIF

SEQ ID NO: 258252 - protein, 14 aa, Homo sapiens
  CDR3 for beta chain variable domain of TCR clone 129126 (TRBV28, TRBJ2-7)
CASKPGPDLYEQYF

SEQ ID NO: 258253 - protein, 16 aa, Homo sapiens
  CDR3 for alpha chain variable domain of TCR clone 129127 (TRAV27, TRAJ13)
CAGAKSDSGGYQKVTF

SEQ ID NO: 258254 - protein, 14 aa, Homo sapiens
  CDR3 for beta chain variable domain of TCR clone 129127 (TRBV4-2, TRBJ2-1)
CASGLDRAYNEQFF

SEQ ID NO: 258255 - protein, 18 aa, Homo sapiens
  CDR3 for alpha chain variable domain of TCR clone 129128 (TRAV21, TRAJ53)
CAVKGGENSGGSNYKLTF

SEQ ID NO: 258256 - protein, 16 aa, Homo sapiens
  CDR3 for beta chain variable domain of TCR clone 129128 (TRBV24-1, TRBJ2-3)
CATSDPGTGATDTQYF

SEQ ID NO: 258257 - protein, 14 aa, Homo sapiens
  CDR3 for alpha chain variable domain of TCR clone 129129 (TRAV2, TRAJ37)
CAVEDQGTTGKLIF

SEQ ID NO: 258258 - protein, 14 aa, Homo sapiens
  CDR3 for beta chain variable domain of TCR clone 129129 (TRBV18, TRBJ2-1)
CASSPQGRFNEQFF

SEQ ID NO: 258259 - protein, 12 aa, Homo sapiens
  CDR3 for alpha chain variable domain of TCR clone 129130 (TRAV13-1, TRAJ40)
CAASWATYKYIF

SEQ ID NO: 258260 - protein, 15 aa, Homo sapiens
  CDR3 for beta chain variable domain of TCR clone 129130 (TRBV7-8, TRBJ2-1)
CASSPRLAAYNEQFF

SEQ ID NO: 258261 - protein, 13 aa, Homo sapiens
  CDR3 for alpha chain variable domain of TCR clone 129131 (TRAV8-6, TRAJ42)
CAVRGGSQGNLIF

SEQ ID NO: 258262 - protein, 13 aa, Homo sapiens
  CDR3 for beta chain variable domain of TCR clone 129131 (TRBV7-3, TRBJ1-1)
CASSQDWGAEAFF

SEQ ID NO: 258263 - protein, 13 aa, Homo sapiens
  CDR3 for alpha chain variable domain of TCR clone 129132 (TRAV20, TRAJ48)
CAVQGVGNEKLTF

SEQ ID NO: 258264 - protein, 12 aa, Homo sapiens
  CDR3 for beta chain variable domain of TCR clone 129132 (TRBV2, TRBJ2-2)
CASSQPGLAGGG

SEQ ID NO: 258265 - protein, 14 aa, Homo sapiens
  CDR3 for alpha chain variable domain of TCR clone 129133 (TRAV16, TRAJ17)
CALSGRAAGNKLTF

SEQ ID NO: 258266 - protein, 16 aa, Homo sapiens
  CDR3 for beta chain variable domain of TCR clone 129133 (TRBV20-1, TRBJ1-1)
CSARALTQGMNTEAFF

SEQ ID NO: 258267 - protein, 16 aa, Homo sapiens
  CDR3 for alpha chain variable domain of TCR clone 129134 (TRAV12-3, TRAJ53)
CTMSPGSGGSNYKLTF

SEQ ID NO: 258268 - protein, 20 aa, Homo sapiens
  CDR3 for beta chain variable domain of TCR clone 129134 (TRBV7-8, TRBJ2-2)
CASSHLFPGPTIHITGELFF

SEQ ID NO: 258269 - protein, 11 aa, Homo sapiens
  CDR3 for alpha chain variable domain of TCR clone 129135 (TRAV3, TRAJ21)
CAVGNFNKFYF

SEQ ID NO: 258270 - protein, 16 aa, Homo sapiens
  CDR3 for beta chain variable domain of TCR clone 129135 (TRBV2, TRBJ1-3)
CASSRTGGSTGNTIYF

SEQ ID NO: 258271 - protein, 14 aa, Homo sapiens
  CDR3 for alpha chain variable domain of TCR clone 129136 (TRAV12-3, TRAJ42)
CAMNYGGSQGNLIF

SEQ ID NO: 258272 - protein, 13 aa, Homo sapiens
  CDR3 for beta chain variable domain of TCR clone 129136 (TRBV4-1, TRBJ1-1)
CASSRKMNTEAFF

SEQ ID NO: 258273 - protein, 10 aa, Homo sapiens
  CDR3 for alpha chain variable domain of TCR clone 129137 (TRAV3, TRAJ30)
CAVREIEIIF

SEQ ID NO: 258274 - protein, 14 aa, Homo sapiens
  CDR3 for beta chain variable domain of TCR clone 129137 (TRBV15, TRBJ2-3)
WATRSGTSTDTQYF

SEQ ID NO: 258275 - protein, 12 aa, Homo sapiens
  CDR3 for alpha chain variable domain of TCR clone 129138 (TRAV13-2, TRAJ23)
CAERHRGGKLIF

SEQ ID NO: 258276 - protein, 20 aa, Homo sapiens
  CDR3 for beta chain variable domain of TCR clone 129138 (TRBV28, TRBJ2-1)
CASTPIGRSPGLAGGNEQFF

SEQ ID NO: 258277 - protein, 11 aa, Homo sapiens
  CDR3 for alpha chain variable domain of TCR clone 129139 (TRAV8-6, TRAJ34)
CAVSDTDKLIF

SEQ ID NO: 258278 - protein, 16 aa, Homo sapiens
  CDR3 for beta chain variable domain of TCR clone 129139 (TRBV13, TRBJ2-2)
CASSPRTGEHTGGLFF

SEQ ID NO: 258279 - protein, 13 aa, Homo sapiens
  CDR3 for alpha chain variable domain of TCR clone 129140 (TRAV35, TRAJ42)
CAGFPGSQGNLIF

SEQ ID NO: 258280 - protein, 12 aa, Homo sapiens
  CDR3 for beta chain variable domain of TCR clone 129140 (TRBV7-9, TRBJ1-5)
CASSSDNQPQHF

SEQ ID NO: 258281 - protein, 14 aa, Homo sapiens
  CDR3 for alpha chain variable domain of TCR clone 129141 (TRAV12-2, TRAJ40)
CAVKIPSGTYKYIF

SEQ ID NO: 258282 - protein, 14 aa, Homo sapiens
  CDR3 for beta chain variable domain of TCR clone 129141 (TRBV20-1, TRBJ1-1)
CSAQTRMGGTEAFF

SEQ ID NO: 258283 - protein, 15 aa, Homo sapiens
  CDR3 for alpha chain variable domain of TCR clone 129142 (TRAV21, TRAJ32)
CSVNSYGGATNKLIF

SEQ ID NO: 258284 - protein, 18 aa, Homo sapiens
  CDR3 for beta chain variable domain of TCR clone 129142 (TRBV7-9, TRBJ2-1)
CASSTGLAEGSSYNEQFF

SEQ ID NO: 258285 - protein, 18 aa, Homo sapiens
  CDR3 for alpha chain variable domain of TCR clone 129143 (TRAV21, TRAJ52)
CAVRPSPAGGTSYGKLTF

SEQ ID NO: 258286 - protein, 11 aa, Homo sapiens
  CDR3 for beta chain variable domain of TCR clone 129143 (TRBV11-2, TRBJ1-1)
CASSINTEAFF

SEQ ID NO: 258287 - protein, 14 aa, Homo sapiens
  CDR3 for alpha chain variable domain of TCR clone 129144 (TRAV1-2, TRAJ16)
CAVNRFSDGQKLLF

SEQ ID NO: 258288 - protein, 16 aa, Homo sapiens
  CDR3 for beta chain variable domain of TCR clone 129144 (TRBV28, TRBJ2-1)
CASSTRTSGRRNEQFF

SEQ ID NO: 258289 - protein, 15 aa, Homo sapiens
  CDR3 for alpha chain variable domain of TCR clone 129145 (TRAV8-3, TRAJ27)
CAAGPSKTNAGKSTF

SEQ ID NO: 258290 - protein, 15 aa, Homo sapiens
  CDR3 for beta chain variable domain of TCR clone 129145 (TRBV7-2, TRBJ2-1)
CASSSGLAGGNEQLF

SEQ ID NO: 258291 - protein, 14 aa, Homo sapiens
  CDR3 for alpha chain variable domain of TCR clone 129146 (TRAV26-1, TRAJ38)
CIADNAGNNRKLIW

SEQ ID NO: 258292 - protein, 15 aa, Homo sapiens
  CDR3 for beta chain variable domain of TCR clone 129146 (TRBV4-1, TRBJ2-7)
CASSQNTGRLYEQYF

SEQ ID NO: 258293 - protein, 13 aa, Homo sapiens
  CDR3 for alpha chain variable domain of TCR clone 129147 (TRAV27, TRAJ8)
CAGGPTGFQNLVF

SEQ ID NO: 258294 - protein, 15 aa, Homo sapiens
  CDR3 for beta chain variable domain of TCR clone 129147 (TRBV6-1, TRBJ2-7)
CASSESMGDFYEQYF

SEQ ID NO: 258295 - protein, 18 aa, Homo sapiens
  CDR3 for alpha chain variable domain of TCR clone 129148 (TRAV26-1, TRAJ52)
CIVRVEGAGGTSYGKLTF

SEQ ID NO: 258296 - protein, 16 aa, Homo sapiens
  CDR3 for beta chain variable domain of TCR clone 129148 (TRBV5-7, TRBJ2-7)
CASSSPGGRTPYEQYF

SEQ ID NO: 258297 - protein, 16 aa, Homo sapiens
  CDR3 for alpha chain variable domain of TCR clone 129149 (TRAV3, TRAJ37)
CAVRGKGSGNTGKLIF

SEQ ID NO: 258298 - protein, 13 aa, Homo sapiens
  CDR3 for beta chain variable domain of TCR clone 129149 (TRBV2, TRBJ2-7)
CASSVGGSGEQYF

SEQ ID NO: 258299 - protein, 14 aa, Homo sapiens
  CDR3 for alpha chain variable domain of TCR clone 129150 (TRAV8-6, TRAJ54)
CAVTKGRGAQKLVF

SEQ ID NO: 258300 - protein, 14 aa, Homo sapiens
  CDR3 for beta chain variable domain of TCR clone 129150 (TRBV27, TRBJ2-7)
CASSIGQGAQKQYF

SEQ ID NO: 258301 - protein, 12 aa, Homo sapiens
  CDR3 for alpha chain variable domain of TCR clone 129151 (TRAV16, TRAJ49)
CALNEGGNQFYV

SEQ ID NO: 258302 - protein, 14 aa, Homo sapiens
  CDR3 for beta chain variable domain of TCR clone 129151 (TRBV7-9, TRBJ2-1)
CASRPTGLRNEQFF

SEQ ID NO: 258303 - protein, 18 aa, Homo sapiens
  CDR3 for alpha chain variable domain of TCR clone 129152 (TRAV26-1, TRAJ22)
CIVRVALSSSGSARQLTF

SEQ ID NO: 258304 - protein, 13 aa, Homo sapiens
  CDR3 for beta chain variable domain of TCR clone 129152 (TRBV13, TRBJ2-5)
CASSPEVGETQYF

SEQ ID NO: 258305 - protein, 15 aa, Homo sapiens
  CDR3 for alpha chain variable domain of TCR clone 129153 (TRAV13-1, TRAJ42)
CAASIAGGSQGNIIF

SEQ ID NO: 258306 - protein, 15 aa, Homo sapiens
  CDR3 for beta chain variable domain of TCR clone 129153 (TRBV19, TRBJ2-1)
CASSIVRGEGREQFF

SEQ ID NO: 258307 - protein, 16 aa, Homo sapiens
  CDR3 for alpha chain variable domain of TCR clone 129154 (TRAV27, TRAJ13)
CAGAKSDSGGYQKVTF

SEQ ID NO: 258308 - protein, 16 aa, Homo sapiens
  CDR3 for beta chain variable domain of TCR clone 129154 (TRBV7-9, TRBJ1-2)
CASSLGFSSGEDGYTF

SEQ ID NO: 258309 - protein, 15 aa, Homo sapiens
  CDR3 for alpha chain variable domain of TCR clone 129155 (TRAV12-3, TRAJ6)
CAMSATTGGSYIPTF

SEQ ID NO: 258310 - protein, 15 aa, Homo sapiens
  CDR3 for beta chain variable domain of TCR clone 129155 (TRBV7-3, TRBJ2-1)
CASSLTSGSYNEQFF

SEQ ID NO: 258311 - protein, 18 aa, Homo sapiens
  CDR3 for alpha chain variable domain of TCR clone 129156 (TRAV21, TRAJ52)
CAVRPSPAGGTSYGKLTF

SEQ ID NO: 258312 - protein, 15 aa, Homo sapiens
  CDR3 for beta chain variable domain of TCR clone 129156 (TRBV19, TRBJ1-5)
CASSDSGPRNQPQHF

SEQ ID NO: 258313 - protein, 14 aa, Homo sapiens
  CDR3 for alpha chain variable domain of TCR clone 129157 (TRAV12-3, TRAJ57)
CAMSAWGGSENLVF

SEQ ID NO: 258314 - protein, 14 aa, Homo sapiens
  CDR3 for beta chain variable domain of TCR clone 129157 (TRBV18, TRBJ2-5)
CASSPGVSQETQYF

SEQ ID NO: 258315 - protein, 16 aa, Homo sapiens
  CDR3 for alpha chain variable domain of TCR clone 129158 (TRAV12-2, TRAJ28)
CAVTPSSGAGSYQLTF

SEQ ID NO: 258316 - protein, 14 aa, Homo sapiens
  CDR3 for beta chain variable domain of TCR clone 129158 (TRBV13, TRBJ2-5)
CASSLERVGETQYF

SEQ ID NO: 258317 - protein, 12 aa, Homo sapiens
  CDR3 for alpha chain variable domain of TCR clone 129159 (TRAV8-3, TRAJ26)
CAGDNYGQNFVF

SEQ ID NO: 258318 - protein, 16 aa, Homo sapiens
  CDR3 for beta chain variable domain of TCR clone 129159 (TRBV20-1, TRBJ1-4)
CSAPGQGLLTNEELFF

SEQ ID NO: 258319 - protein, 16 aa, Homo sapiens
  CDR3 for alpha chain variable domain of TCR clone 129160 (TRAV8-3, TRAJ44)
CALGASNTGTASKLTF

SEQ ID NO: 258320 - protein, 15 aa, Homo sapiens
  CDR3 for beta chain variable domain of TCR clone 129160 (TRBV27, TRBJ1-5)
CASTFNRGSNQPQHF

SEQ ID NO: 258321 - protein, 14 aa, Homo sapiens
  CDR3 for alpha chain variable domain of TCR clone 129161 (TRAV2, TRAJ9)
CAVEDRSGGFKTIF

SEQ ID NO: 258322 - protein, 16 aa, Homo sapiens
  CDR3 for beta chain variable domain of TCR clone 129161 (TRBV4-2, TRBJ2-3)
CASSQELAGDTDTQYF

SEQ ID NO: 258323 - protein, 12 aa, Homo sapiens
  CDR3 for alpha chain variable domain of TCR clone 129162 (TRAV12-3, TRAJ17)
CAMTLTGNKLTF

SEQ ID NO: 258324 - protein, 14 aa, Homo sapiens
  CDR3 for beta chain variable domain of TCR clone 129162 (TRBV7-6, TRBJ2-7)
CASSFRQGADEQYF

SEQ ID NO: 258325 - protein, 15 aa, Homo sapiens
  CDR3 for alpha chain variable domain of TCR clone 129163 (TRAV3, TRAJ5)
CAVRDLDTSRRALTF

SEQ ID NO: 258326 - protein, 14 aa, Homo sapiens
  CDR3 for beta chain variable domain of TCR clone 129163 (TRBV25-1, TRBJ1-4)
CASSGGGQPEKLFF

SEQ ID NO: 258327 - protein, 12 aa, Homo sapiens
  CDR3 for alpha chain variable domain of TCR clone 129164 (TRAV25, TRAJ5)
CAGGGGRRALTF

SEQ ID NO: 258328 - protein, 15 aa, Homo sapiens
  CDR3 for beta chain variable domain of TCR clone 129164 (TRBV19, TRBJ2-4)
CASRGPRRGGNIQYF

SEQ ID NO: 258329 - protein, 15 aa, Homo sapiens
  CDR3 for alpha chain variable domain of TCR clone 129165 (TRAV26-2, TRAJ54)
CILRDVGQGAQKLVF

SEQ ID NO: 258330 - protein, 13 aa, Homo sapiens
  CDR3 for beta chain variable domain of TCR clone 129165 (TRBV7-9, TRBJ1-1)
CASGLAGVTEAFF

SEQ ID NO: 258331 - protein, 13 aa, Homo sapiens
  CDR3 for alpha chain variable domain of TCR clone 129166 (TRAV20, TRAJ49)
CAVQARTGNQFYF

SEQ ID NO: 258332 - protein, 20 aa, Homo sapiens
  CDR3 for beta chain variable domain of TCR clone 129166 (TRBV7-8, TRBJ2-2)
CASSHLFPGPTIHITGELFF

SEQ ID NO: 258333 - protein, 11 aa, Homo sapiens
  CDR3 for alpha chain variable domain of TCR clone 129167 (TRAV8-6, TRAJ42)
CAVRGRKPRKF

SEQ ID NO: 258334 - protein, 13 aa, Homo sapiens
  CDR3 for beta chain variable domain of TCR clone 129167 (TRBV7-3, TRBJ1-1)
CASSQDWGAEAFF

SEQ ID NO: 258335 - protein, 15 aa, Homo sapiens
  CDR3 for alpha chain variable domain of TCR clone 129168 (TRAV8-3, TRAJ27)
CAVGPSKTNAGKSTF

SEQ ID NO: 258336 - protein, 14 aa, Homo sapiens
  CDR3 for beta chain variable domain of TCR clone 129168 (TRBV7-2, TRBJ2-1)
CSSSGLAGGNEQFF

SEQ ID NO: 258337 - protein, 13 aa, Homo sapiens
  CDR3 for alpha chain variable domain of TCR clone 129169 (TRAV8-3, TRAJ43)
CAVVPYNNNDMRF

SEQ ID NO: 258338 - protein, 15 aa, Homo sapiens
  CDR3 for beta chain variable domain of TCR clone 129169 (TRBV12-4, TRBJ2-5)
CASSPPTGLQETQYF

SEQ ID NO: 258339 - protein, 17 aa, Homo sapiens
  CDR3 for alpha chain variable domain of TCR clone 129170 (TRAV3, TRAJ6)
CAVRDGPRAGGSYRPTF

SEQ ID NO: 258340 - protein, 15 aa, Homo sapiens
  CDR3 for beta chain variable domain of TCR clone 129170 (TRBV20-1, TRBJ1-1)
CSASWDRFLNTEAFF

SEQ ID NO: 258341 - protein, 15 aa, Homo sapiens
  CDR3 for alpha chain variable domain of TCR clone 129171 (TRAV3, TRAJ22)
CAVRDRGGSARQLTF

SEQ ID NO: 258342 - protein, 12 aa, Homo sapiens
  CDR3 for beta chain variable domain of TCR clone 129171 (TRBV3-1, TRBJ2-1)
CASSQGSSGQFF

SEQ ID NO: 258343 - protein, 13 aa, Homo sapiens
  CDR3 for alpha chain variable domain of TCR clone 129172 (TRAV12-2, TRAJ20)
CAVYHSNDYKLSF

SEQ ID NO: 258344 - protein, 15 aa, Homo sapiens
  CDR3 for beta chain variable domain of TCR clone 129172 (TRBV27, TRBJ2-5)
CASSLYPRGGETQYF

SEQ ID NO: 258345 - protein, 13 aa, Homo sapiens
  CDR3 for alpha chain variable domain of TCR clone 129173 (TRAV3, TRAJ27)
CAVRPLGAGKSTF

SEQ ID NO: 258346 - protein, 15 aa, Homo sapiens
  CDR3 for beta chain variable domain of TCR clone 129173 (TRBV20-1, TRBJ2-7)
CSARDRVSGMEEQYF

SEQ ID NO: 258347 - protein, 14 aa, Homo sapiens
  CDR3 for alpha chain variable domain of TCR clone 129174 (TRAV20, TRAJ9)
CAVQAHTGGFKTIF

SEQ ID NO: 258348 - protein, 16 aa, Homo sapiens
  CDR3 for beta chain variable domain of TCR clone 129174 (TRBV12-5, TRBJ2-5)
CASGPRTSGNQETQYF

SEQ ID NO: 258349 - protein, 15 aa, Homo sapiens
  CDR3 for alpha chain variable domain of TCR clone 129175 (TRAV8-2, TRAJ40)
CVVLGTTSGTYKYIF

SEQ ID NO: 258350 - protein, 14 aa, Homo sapiens
  CDR3 for beta chain variable domain of TCR clone 129175 (TRBV7-3, TRBJ2-3)
CASSLTGSTDTQYF

SEQ ID NO: 258351 - protein, 14 aa, Homo sapiens
  CDR3 for alpha chain variable domain of TCR clone 129176 (TRAV8-4, TRAJ8)
CAVSVGTGFQKLVF

SEQ ID NO: 258352 - protein, 15 aa, Homo sapiens
  CDR3 for beta chain variable domain of TCR clone 129176 (TRBV2, TRBJ2-3)
CASSGEGTGTETQYF

SEQ ID NO: 258353 - protein, 13 aa, Homo sapiens
  CDR3 for alpha chain variable domain of TCR clone 129177 (TRAV23/DV6, TRAJ16)
CAASISDGQKLLF

SEQ ID NO: 258354 - protein, 15 aa, Homo sapiens
  CDR3 for beta chain variable domain of TCR clone 129177 (TRBV5-1, TRBJ2-5)
CASSFKGGDQETQYF

SEQ ID NO: 258355 - protein, 11 aa, Homo sapiens
  CDR3 for alpha chain variable domain of TCR clone 129178 (TRAV35, TRAJ30)
CAGPGDDKIIF

SEQ ID NO: 258356 - protein, 14 aa, Homo sapiens
  CDR3 for beta chain variable domain of TCR clone 129178 (TRBV7-6, TRBJ1-6)
CASSQAGGGSPLYF

SEQ ID NO: 258357 - protein, 16 aa, Homo sapiens
  CDR3 for alpha chain variable domain of TCR clone 129179 (TRAV35, TRAJ28)
CAVQKYSGAGSYQLTF

SEQ ID NO: 258358 - protein, 13 aa, Homo sapiens
  CDR3 for beta chain variable domain of TCR clone 129179 (TRBV19, TRBJ1-2)
CASSQGQVYGYTF

SEQ ID NO: 258359 - protein, 14 aa, Homo sapiens
  CDR3 for alpha chain variable domain of TCR clone 129180 (TRAV26-1, TRAJ38)
CIADNAGNNRKLIW

SEQ ID NO: 258360 - protein, 13 aa, Homo sapiens
  CDR3 for beta chain variable domain of TCR clone 129180 (TRBV20-1, TRBJ1-1)
CSARGRGNTEAFS

SEQ ID NO: 258361 - protein, 12 aa, Homo sapiens
  CDR3 for alpha chain variable domain of TCR clone 129181 (TRAV1-1, TRAJ20)
CAVREDDYKLSF

SEQ ID NO: 258362 - protein, 15 aa, Homo sapiens
  CDR3 for beta chain variable domain of TCR clone 129181 (TRBV5-7, TRBJ2-7)
CASSLPGQVFYERYF

SEQ ID NO: 258363 - protein, 18 aa, Homo sapiens
  CDR3 for alpha chain variable domain of TCR clone 129182 (TRAV26-2, )
CILLDIQNPDPAVYQLRD

SEQ ID NO: 258364 - protein, 15 aa, Homo sapiens
  CDR3 for beta chain variable domain of TCR clone 129182 (TRBV6-3, TRBJ2-7)
CASSSPGTVSYEQYF

SEQ ID NO: 258365 - protein, 14 aa, Homo sapiens
  CDR3 for alpha chain variable domain of TCR clone 129183 (TRAV12-2, TRAJ44)
CAVNPAGTASKLTF

SEQ ID NO: 258366 - protein, 12 aa, Homo sapiens
  CDR3 for beta chain variable domain of TCR clone 129183 (TRBV11-2, TRBJ2-1)
CASSPGNNEQFF

SEQ ID NO: 258367 - protein, 11 aa, Homo sapiens
  CDR3 for alpha chain variable domain of TCR clone 129184 (TRAV39, TRAJ49)
CAVDISTQFYF

SEQ ID NO: 258368 - protein, 14 aa, Homo sapiens
  CDR3 for beta chain variable domain of TCR clone 129184 (TRBV25-1, TRBJ1-1)
CASTHLGGNTEAFF

SEQ ID NO: 258369 - protein, 15 aa, Homo sapiens
  CDR3 for alpha chain variable domain of TCR clone 129185 (TRAV16, TRAJ16)
CALQGGGSDGQKLLF

SEQ ID NO: 258370 - protein, 12 aa, Homo sapiens
  CDR3 for beta chain variable domain of TCR clone 129185 (TRBV28, TRBJ2-3)
CASSLYRDTQYF

SEQ ID NO: 258371 - protein, 14 aa, Homo sapiens
  CDR3 for alpha chain variable domain of TCR clone 129186 (TRAV17, TRAJ57)
CATDPQGGAEKLVF

SEQ ID NO: 258372 - protein, 14 aa, Homo sapiens
  CDR3 for beta chain variable domain of TCR clone 129186 (TRBV5-8, TRBJ2-3)
CASSLGQGTDTQYF

SEQ ID NO: 258373 - protein, 13 aa, Homo sapiens
  CDR3 for alpha chain variable domain of TCR clone 129187 (TRAV36/DV7, TRAJ49)
CAGDSNTGNQFYF

SEQ ID NO: 258374 - protein, 14 aa, Homo sapiens
  CDR3 for beta chain variable domain of TCR clone 129187 (TRBV18, TRBJ2-7)
CASSPRGGAYEQYF

SEQ ID NO: 258375 - protein, 10 aa, Homo sapiens
  CDR3 for alpha chain variable domain of TCR clone 129188 (TRAV1-2, TRAJ23)
YAGQGGKLIF

SEQ ID NO: 258376 - protein, 16 aa, Homo sapiens
  CDR3 for beta chain variable domain of TCR clone 129188 (TRBV11-2, TRBJ1-1)
CASSLRQGGEHSKAFF

SEQ ID NO: 258377 - protein, 18 aa, Homo sapiens
  CDR3 for alpha chain variable domain of TCR clone 129189 (TRAV21, TRAJ52)
CAVRPSPAGGTSYGKLTF

SEQ ID NO: 258378 - protein, 13 aa, Homo sapiens
  CDR3 for beta chain variable domain of TCR clone 129189 (TRBV29-1, TRBJ2-1)
CSVEGGGVNEQFF

SEQ ID NO: 258379 - protein, 14 aa, Homo sapiens
  CDR3 for alpha chain variable domain of TCR clone 129190 (TRAV17, TRAJ37)
CATDGSSNTGKLIF

SEQ ID NO: 258380 - protein, 15 aa, Homo sapiens
  CDR3 for beta chain variable domain of TCR clone 129190 (TRBV7-2, TRBJ2-1)
CASSLASGRVNEQFF

SEQ ID NO: 258381 - protein, 13 aa, Homo sapiens
  CDR3 for alpha chain variable domain of TCR clone 129191 (TRAV30, TRAJ20)
CGTVVSNDYKLSF

SEQ ID NO: 258382 - protein, 17 aa, Homo sapiens
  CDR3 for beta chain variable domain of TCR clone 129191 (TRBV11-2, TRBJ2-1)
CASSLYPPGVEYNEQFF

SEQ ID NO: 258383 - protein, 13 aa, Homo sapiens
  CDR3 for alpha chain variable domain of TCR clone 129192 (TRAV12-1, TRAJ6)
CVVFPGGSYIPTF

SEQ ID NO: 258384 - protein, 14 aa, Homo sapiens
  CDR3 for beta chain variable domain of TCR clone 129192 (TRBV7-6, TRBJ2-3)
CASSLGTVTDTQYF

SEQ ID NO: 258385 - protein, 16 aa, Homo sapiens
  CDR3 for alpha chain variable domain of TCR clone 129193 (TRAV3, TRAJ10)
CAVRDMRAGGGNKLTF

SEQ ID NO: 258386 - protein, 13 aa, Homo sapiens
  CDR3 for beta chain variable domain of TCR clone 129193 (TRBV2, TRBJ2-7)
CASTGGSSYEQYF

SEQ ID NO: 258387 - protein, 11 aa, Homo sapiens
  CDR3 for alpha chain variable domain of TCR clone 129194 (TRAV2, TRAJ13)
CSSGGYQKVTF

SEQ ID NO: 258388 - protein, 14 aa, Homo sapiens
  CDR3 for beta chain variable domain of TCR clone 129194 (TRBV19, TRBJ2-1)
CASSKDRGQDEQFF

SEQ ID NO: 258389 - protein, 13 aa, Homo sapiens
  CDR3 for alpha chain variable domain of TCR clone 129195 (TRAV9-2, TRAJ53)
CALSGGSNYKMTF

SEQ ID NO: 258390 - protein, 17 aa, Homo sapiens
  CDR3 for beta chain variable domain of TCR clone 129195 (TRBV11-2, TRBJ2-1)
CASSLYPPGVEYNEQFF

SEQ ID NO: 258391 - protein, 13 aa, Homo sapiens
  CDR3 for alpha chain variable domain of TCR clone 129196 (TRAV3, TRAJ29)
CAVRDIIDTPRVL

SEQ ID NO: 258392 - protein, 14 aa, Homo sapiens
  CDR3 for beta chain variable domain of TCR clone 129196 (TRBV27, TRBJ2-1)
CASSATGGYNEQFF

SEQ ID NO: 258393 - protein, 18 aa, Homo sapiens
  CDR3 for alpha chain variable domain of TCR clone 129197 (TRAV26-2, TRAJ45)
CILRLWGYSGGGADGLTF

SEQ ID NO: 258394 - protein, 17 aa, Homo sapiens
  CDR3 for beta chain variable domain of TCR clone 129197 (TRBV11-2, TRBJ2-1)
CASSLYPPGVEYNEQFF

SEQ ID NO: 258395 - protein, 11 aa, Homo sapiens
  CDR3 for alpha chain variable domain of TCR clone 129198 (TRAV12-3, TRAJ43)
CAMSVSNDMRF

SEQ ID NO: 258396 - protein, 15 aa, Homo sapiens
  CDR3 for beta chain variable domain of TCR clone 129198 (TRBV7-2, TRBJ2-1)
CASTHGTGIYNEQFF

SEQ ID NO: 258397 - protein, 12 aa, Homo sapiens
  CDR3 for alpha chain variable domain of TCR clone 129199 (TRAV36/DV7, TRAJ54)
CAVVRGAQKLVF

SEQ ID NO: 258398 - protein, 14 aa, Homo sapiens
  CDR3 for beta chain variable domain of TCR clone 129199 (TRBV7-3, TRBJ1-1)
CASSLKGGNTEAYF

SEQ ID NO: 258399 - protein, 17 aa, Homo sapiens
  CDR3 for alpha chain variable domain of TCR clone 129200 (TRAV27, TRAJ52)
CAGAGWAGGTSHGKLTF

SEQ ID NO: 258400 - protein, 16 aa, Homo sapiens
  CDR3 for beta chain variable domain of TCR clone 129200 (TRBV19, TRBJ2-1)
CASSKAGPSSYNEQFF

SEQ ID NO: 258401 - protein, 15 aa, Homo sapiens
  CDR3 for alpha chain variable domain of TCR clone 129201 (TRAV3, TRAJ22)
CAVRDRGGSARQLTF

SEQ ID NO: 258402 - protein, 16 aa, Homo sapiens
  CDR3 for beta chain variable domain of TCR clone 129201 (TRBV25-1, TRBJ2-3)
CASSGDRDRGRIEAFF

SEQ ID NO: 258403 - protein, 14 aa, Homo sapiens
  CDR3 for alpha chain variable domain of TCR clone 129202 (TRAV38-1, TRAJ11)
CAFMKHEGYSTLTF

SEQ ID NO: 258404 - protein, 16 aa, Homo sapiens
  CDR3 for beta chain variable domain of TCR clone 129202 (TRBV4-3, TRBJ2-1)
CASSPALDRGVNEQFF

SEQ ID NO: 258405 - protein, 15 aa, Homo sapiens
  CDR3 for alpha chain variable domain of TCR clone 129203 (TRAV26-1, TRAJ29)
CIVRVEGSGNTPLVF

SEQ ID NO: 258406 - protein, 13 aa, Homo sapiens
  CDR3 for beta chain variable domain of TCR clone 129203 (TRBV11-2, TRBJ2-7)
CASSGTRPYEQYF

SEQ ID NO: 258407 - protein, 14 aa, Homo sapiens
  CDR3 for alpha chain variable domain of TCR clone 129204 (TRAV12-2, TRAJ45)
CAVNSGGGADGLTF

SEQ ID NO: 258408 - protein, 14 aa, Homo sapiens
  CDR3 for beta chain variable domain of TCR clone 129204 (TRBV11-2, TRBJ2-3)
CASSRLARTDTQYF

SEQ ID NO: 258409 - protein, 11 aa, Homo sapiens
  CDR3 for alpha chain variable domain of TCR clone 129205 (TRAV12-1, TRAJ21)
CVVNNFNKFYF

SEQ ID NO: 258410 - protein, 13 aa, Homo sapiens
  CDR3 for beta chain variable domain of TCR clone 129205 (TRBV6-5, TRBJ2-5)
CASSPQGGETQYF

SEQ ID NO: 258411 - protein, 11 aa, Homo sapiens
  CDR3 for alpha chain variable domain of TCR clone 129206 (TRAV3, TRAJ21)
CAVGNFNKFYF

SEQ ID NO: 258412 - protein, 13 aa, Homo sapiens
  CDR3 for beta chain variable domain of TCR clone 129206 (TRBV20-1, TRBJ2-5)
CSARRGTGATQYF

SEQ ID NO: 258413 - protein, 12 aa, Homo sapiens
  CDR3 for alpha chain variable domain of TCR clone 129207 (TRAV12-2, TRAJ26)
CAVSNYGQNFVF

SEQ ID NO: 258414 - protein, 14 aa, Homo sapiens
  CDR3 for beta chain variable domain of TCR clone 129207 (TRBV14, TRBJ1-5)
CASSQTGVGQPQHF

SEQ ID NO: 258415 - protein, 12 aa, Homo sapiens
  CDR3 for alpha chain variable domain of TCR clone 129208 (TRAV3, TRAJ20)
CAVRDGDYKLSF

SEQ ID NO: 258416 - protein, 16 aa, Homo sapiens
  CDR3 for beta chain variable domain of TCR clone 129208 (TRBV7-3, TRBJ2-1)
CASSLEGYRSYNEQFF

SEQ ID NO: 258417 - protein, 15 aa, Homo sapiens
  CDR3 for alpha chain variable domain of TCR clone 129209 (TRAV23/DV6, TRAJ15)
CAALPAGRNCSDLWD

SEQ ID NO: 258418 - protein, 14 aa, Homo sapiens
  CDR3 for beta chain variable domain of TCR clone 129209 (TRBV7-9, TRBJ1-2)
CASSRQGANYGYTF

SEQ ID NO: 258419 - protein, 13 aa, Homo sapiens
  CDR3 for alpha chain variable domain of TCR clone 129210 (TRAV36/DV7, TRAJ38)
CVANAGNNRKLIW

SEQ ID NO: 258420 - protein, 14 aa, Homo sapiens
  CDR3 for beta chain variable domain of TCR clone 129210 (TRBV7-2, TRBJ2-7)
CASSIRWEVNEQYF

SEQ ID NO: 258421 - protein, 12 aa, Homo sapiens
  CDR3 for alpha chain variable domain of TCR clone 129211 (TRAV1-2, TRAJ26)
CAVRYYGQNFVF

SEQ ID NO: 258422 - protein, 14 aa, Homo sapiens
  CDR3 for beta chain variable domain of TCR clone 129211 (TRBV11-1, TRBJ2-7)
CASSFRQGSYEQFF

SEQ ID NO: 258423 - protein, 13 aa, Homo sapiens
  CDR3 for alpha chain variable domain of TCR clone 129212 (TRAV16, TRAJ58)
CALSIPSGSRLTF

SEQ ID NO: 258424 - protein, 14 aa, Homo sapiens
  CDR3 for beta chain variable domain of TCR clone 129212 (TRBV19, TRBJ2-3)
CASSAPRGTDTQYF

SEQ ID NO: 258425 - protein, 14 aa, Homo sapiens
  CDR3 for alpha chain variable domain of TCR clone 129213 (TRAV2, TRAJ9)
CAVEDRRGGFKTIF

SEQ ID NO: 258426 - protein, 11 aa, Homo sapiens
  CDR3 for beta chain variable domain of TCR clone 129213 (TRBV12-4, TRBJ2-3)
CASTATDTQYF

SEQ ID NO: 258427 - protein, 15 aa, Homo sapiens
  CDR3 for alpha chain variable domain of TCR clone 129214 (TRAV8-2, TRAJ44)
DAAEYFDGTASKLTF

SEQ ID NO: 258428 - protein, 14 aa, Homo sapiens
  CDR3 for beta chain variable domain of TCR clone 129214 (TRBV7-8, TRBJ2-3)
CANSLDRGTDTQYF

SEQ ID NO: 258429 - protein, 16 aa, Homo sapiens
  CDR3 for alpha chain variable domain of TCR clone 129215 (TRAV30, TRAJ24)
CGTEIVDADSWGKFQF

SEQ ID NO: 258430 - protein, 16 aa, Homo sapiens
  CDR3 for beta chain variable domain of TCR clone 129215 (TRBV20-1, TRBJ2-1)
CSARDHLAGGRGEQFF

SEQ ID NO: 258431 - protein, 13 aa, Homo sapiens
  CDR3 for alpha chain variable domain of TCR clone 129216 (TRAV21, TRAJ27)
GAARPGNAGKSTF

SEQ ID NO: 258432 - protein, 14 aa, Homo sapiens
  CDR3 for beta chain variable domain of TCR clone 129216 (TRBV11-2, TRBJ2-7)
CASSLGAGAYEQYF

SEQ ID NO: 258433 - protein, 12 aa, Homo sapiens
  CDR3 for alpha chain variable domain of TCR clone 129217 (TRAV23/DV6, TRAJ30)
CAASKGDDKIIF

SEQ ID NO: 258434 - protein, 12 aa, Homo sapiens
  CDR3 for beta chain variable domain of TCR clone 129217 (TRBV7-8, TRBJ2-7)
CASSLGDREQYF

SEQ ID NO: 258435 - protein, 14 aa, Homo sapiens
  CDR3 for alpha chain variable domain of TCR clone 129218 (TRAV23/DV6, TRAJ24)
CAASLSDSWGKLQF

SEQ ID NO: 258436 - protein, 16 aa, Homo sapiens
  CDR3 for beta chain variable domain of TCR clone 129218 (TRBV7-9, TRBJ2-6)
CAGSLKGPLRANVLTF

SEQ ID NO: 258437 - protein, 14 aa, Homo sapiens
  CDR3 for alpha chain variable domain of TCR clone 129219 (TRAV12-3, TRAJ54)
CAMRGIQGAKKLVF

SEQ ID NO: 258438 - protein, 13 aa, Homo sapiens
  CDR3 for beta chain variable domain of TCR clone 129219 (TRBV19, TRBJ1-1)
CASSPSNGGEAFF

SEQ ID NO: 258439 - protein, 16 aa, Homo sapiens
  CDR3 for alpha chain variable domain of TCR clone 129220 (TRAV20, TRAJ45)
CAVKKRRCRRTHLLQR

SEQ ID NO: 258440 - protein, 14 aa, Homo sapiens
  CDR3 for beta chain variable domain of TCR clone 129220 (TRBV15, TRBJ2-5)
CATSIGGLGETQYF

SEQ ID NO: 258441 - protein, 13 aa, Homo sapiens
  CDR3 for alpha chain variable domain of TCR clone 129221 (TRAV3, TRAJ20)
CAVRDGGDYKLSL

SEQ ID NO: 258442 - protein, 16 aa, Homo sapiens
  CDR3 for beta chain variable domain of TCR clone 129221 (TRBV4-1, TRBJ2-5)
CASSQTSGGPLETQYF

SEQ ID NO: 258443 - protein, 14 aa, Homo sapiens
  CDR3 for alpha chain variable domain of TCR clone 129222 (TRAV26-1, TRAJ34)
CIVRVACNTDKLIF

SEQ ID NO: 258444 - protein, 15 aa, Homo sapiens
  CDR3 for beta chain variable domain of TCR clone 129222 (TRBV20-1, TRBJ2-7)
CSARVPAAYFYEQYF

SEQ ID NO: 258445 - protein, 13 aa, Homo sapiens
  CDR3 for alpha chain variable domain of TCR clone 129223 (TRAV21, TRAJ13)
CAVNSGGYQKVTF

SEQ ID NO: 258446 - protein, 12 aa, Homo sapiens
  CDR3 for beta chain variable domain of TCR clone 129223 (TRBV7-8, TRBJ2-7)
CASSLGDREQYF

SEQ ID NO: 258447 - protein, 11 aa, Homo sapiens
  CDR3 for alpha chain variable domain of TCR clone 129224 (TRAV21, TRAJ34)
CAVTNTDKLIF

SEQ ID NO: 258448 - protein, 13 aa, Homo sapiens
  CDR3 for beta chain variable domain of TCR clone 129224 (TRBV7-2, TRBJ2-2)
CASSSVRAGELFF

SEQ ID NO: 258449 - protein, 14 aa, Homo sapiens
  CDR3 for alpha chain variable domain of TCR clone 129225 (TRAV12-2, TRAJ40)
CAVKIPSGAYKYIF

SEQ ID NO: 258450 - protein, 14 aa, Homo sapiens
  CDR3 for beta chain variable domain of TCR clone 129225 (TRBV20-1, TRBJ1-1)
CSAQTRIGGTEALF

SEQ ID NO: 258451 - protein, 14 aa, Homo sapiens
  CDR3 for alpha chain variable domain of TCR clone 129226 (TRAV1-2, TRAJ16)
CSVNRFSDGQKLLF

SEQ ID NO: 258452 - protein, 14 aa, Homo sapiens
  CDR3 for beta chain variable domain of TCR clone 129226 (TRBV13, TRBJ2-5)
CASSLGRGQETQYF

SEQ ID NO: 258453 - protein, 14 aa, Homo sapiens
  CDR3 for alpha chain variable domain of TCR clone 129227 (TRAV12-2, TRAJ9)
CAVNALEGGFQTIF

SEQ ID NO: 258454 - protein, 16 aa, Homo sapiens
  CDR3 for beta chain variable domain of TCR clone 129227 (TRBV19, TRBJ1-6)
CASSVAPVAGNSPLHF

SEQ ID NO: 258455 - protein, 16 aa, Homo sapiens
  CDR3 for alpha chain variable domain of TCR clone 129228 (TRAV16, TRAJ4)
CALSRMFSGGYNKLIF

SEQ ID NO: 258456 - protein, 18 aa, Homo sapiens
  CDR3 for beta chain variable domain of TCR clone 129228 (TRBV28, TRBJ2-1)
CASSSTSGRANSYNEQFF

SEQ ID NO: 258457 - protein, 15 aa, Homo sapiens
  CDR3 for alpha chain variable domain of TCR clone 129229 (TRAV3, TRAJ22)
CAVRDLGGSARQLTF

SEQ ID NO: 258458 - protein, 13 aa, Homo sapiens
  CDR3 for beta chain variable domain of TCR clone 129229 (TRBV20-1, TRBJ1-1)
CSARVGGNTEAFF

SEQ ID NO: 258459 - protein, 17 aa, Homo sapiens
  CDR3 for alpha chain variable domain of TCR clone 129230 (TRAV13-1, TRAJ52)
CAASSGAGGTSYGKLTF

SEQ ID NO: 258460 - protein, 14 aa, Homo sapiens
  CDR3 for beta chain variable domain of TCR clone 129230 (TRBV7-2, TRBJ1-3)
CASSRGGTGNTIYF

SEQ ID NO: 258461 - protein, 16 aa, Homo sapiens
  CDR3 for alpha chain variable domain of TCR clone 129231 (TRAV30, TRAJ24)
CGTEVVDADSWGKFQF

SEQ ID NO: 258462 - protein, 20 aa, Homo sapiens
  CDR3 for beta chain variable domain of TCR clone 129231 (TRBV19, TRBJ2-1)
CASSISRTVTSTRLNNEQFF

SEQ ID NO: 258463 - protein, 10 aa, Homo sapiens
  CDR3 for alpha chain variable domain of TCR clone 129232 (TRAV30, TRAJ48)
CGIGNEKLTF

SEQ ID NO: 258464 - protein, 16 aa, Homo sapiens
  CDR3 for beta chain variable domain of TCR clone 129232 (TRBV6-5, TRBJ2-1)
CASSYSLSGGYNEQFF

SEQ ID NO: 258465 - protein, 16 aa, Homo sapiens
  CDR3 for alpha chain variable domain of TCR clone 129233 (TRAV30, TRAJ24)
CGTEIVDADSWGKSQF

SEQ ID NO: 258466 - protein, 14 aa, Homo sapiens
  CDR3 for beta chain variable domain of TCR clone 129233 (TRBV7-9, TRBJ2-5)
CASSLDTAQETQYF

SEQ ID NO: 258467 - protein, 12 aa, Homo sapiens
  CDR3 for alpha chain variable domain of TCR clone 129234 (TRAV12-3, TRAJ20)
CAMVRGDYKLSF

SEQ ID NO: 258468 - protein, 14 aa, Homo sapiens
  CDR3 for beta chain variable domain of TCR clone 129234 (TRBV6-1, TRBJ1-3)
CASVQGGGGNTTYF

SEQ ID NO: 258469 - protein, 16 aa, Homo sapiens
  CDR3 for alpha chain variable domain of TCR clone 129235 (TRAV12-2, TRAJ48)
CAVNPTSNLGNEKLTF

SEQ ID NO: 258470 - protein, 12 aa, Homo sapiens
  CDR3 for beta chain variable domain of TCR clone 129235 (TRBV9, TRBJ2-3)
CASSLRAGTQYF

SEQ ID NO: 258471 - protein, 15 aa, Homo sapiens
  CDR3 for alpha chain variable domain of TCR clone 129236 (TRAV27, TRAJ38)
CAARRNAGNNRKLIW

SEQ ID NO: 258472 - protein, 15 aa, Homo sapiens
  CDR3 for beta chain variable domain of TCR clone 129236 (TRBV5-1, TRBJ2-1)
CSSSPPRAPYNEQFF

SEQ ID NO: 258473 - protein, 12 aa, Homo sapiens
  CDR3 for alpha chain variable domain of TCR clone 129237 (TRAV36/DV7, TRAJ37)
CACYGNTGKLIF

SEQ ID NO: 258474 - protein, 15 aa, Homo sapiens
  CDR3 for beta chain variable domain of TCR clone 129237 (TRBV6-3, TRBJ2-7)
CASSSPGTVFYEQYF

SEQ ID NO: 258475 - protein, 13 aa, Homo sapiens
  CDR3 for alpha chain variable domain of TCR clone 129238 (TRAV27, TRAJ45)
CRSSGGGADGLTF

SEQ ID NO: 258476 - protein, 12 aa, Homo sapiens
  CDR3 for beta chain variable domain of TCR clone 129238 (TRBV16, TRBJ2-2)
CASSQSVGELFF

SEQ ID NO: 258477 - protein, 13 aa, Homo sapiens
  CDR3 for alpha chain variable domain of TCR clone 129239 (TRAV12-2, TRAJ10)
CAVPTGGGNKLTF

SEQ ID NO: 258478 - protein, 11 aa, Homo sapiens
  CDR3 for beta chain variable domain of TCR clone 129239 (TRBV6-1, TRBJ2-1)
CASISSNEQFV

SEQ ID NO: 258479 - protein, 14 aa, Homo sapiens
  CDR3 for alpha chain variable domain of TCR clone 129240 (TRAV1-2, TRAJ16)
CAVNRFSDGQKLLF

SEQ ID NO: 258480 - protein, 14 aa, Homo sapiens
  CDR3 for beta chain variable domain of TCR clone 129240 (TRBV15, TRBJ2-5)
CATSIGGLGETQYF

SEQ ID NO: 258481 - protein, 14 aa, Homo sapiens
  CDR3 for alpha chain variable domain of TCR clone 129241 (TRAV23/DV6, TRAJ6)
CAASKSGGSYIPTF

SEQ ID NO: 258482 - protein, 17 aa, Homo sapiens
  CDR3 for beta chain variable domain of TCR clone 129241 (TRBV20-1, TRBJ2-1)
CSASASGLAGSYNEQFF

SEQ ID NO: 258483 - protein, 14 aa, Homo sapiens
  CDR3 for alpha chain variable domain of TCR clone 129242 (TRAV8-4, TRAJ9)
CAVRINTGGFKTIF

SEQ ID NO: 258484 - protein, 14 aa, Homo sapiens
  CDR3 for beta chain variable domain of TCR clone 129242 (TRBV4-2, TRBJ2-1)
CASGLDRAYNEQFF

SEQ ID NO: 258485 - protein, 10 aa, Homo sapiens
  CDR3 for alpha chain variable domain of TCR clone 129243 (TRAV12-1, TRAJ33)
CVASNYQLIW

SEQ ID NO: 258486 - protein, 13 aa, Homo sapiens
  CDR3 for beta chain variable domain of TCR clone 129243 (TRBV12-4, TRBJ1-1)
CASRRTENTEAFF

SEQ ID NO: 258487 - protein, 17 aa, Homo sapiens
  CDR3 for alpha chain variable domain of TCR clone 129244 (TRAV3, TRAJ6)
CAVRDGPRAGGSYIPKF

SEQ ID NO: 258488 - protein, 14 aa, Homo sapiens
  CDR3 for beta chain variable domain of TCR clone 129244 (TRBV6-1, TRBJ1-3)
CASVQGGGGNTIYF

SEQ ID NO: 258489 - protein, 15 aa, Homo sapiens
  CDR3 for alpha chain variable domain of TCR clone 129245 (TRAV25, TRAJ53)
CPTSNSGGSNYKLTF

SEQ ID NO: 258490 - protein, 15 aa, Homo sapiens
  CDR3 for beta chain variable domain of TCR clone 129245 (TRBV7-9, TRBJ1-6)
CASSSPGRGNSPLHF

SEQ ID NO: 258491 - protein, 15 aa, Homo sapiens
  CDR3 for alpha chain variable domain of TCR clone 129246 (TRAV12-3, TRAJ10)
CASYILTGGGNKLTF

SEQ ID NO: 258492 - protein, 14 aa, Homo sapiens
  CDR3 for beta chain variable domain of TCR clone 129246 (TRBV20-1, TRBJ1-1)
CSARAVNGYTEAFF

SEQ ID NO: 258493 - protein, 15 aa, Homo sapiens
  CDR3 for alpha chain variable domain of TCR clone 129247 (TRAV26-2, TRAJ39)
FSLRGNNNAGNMLTF

SEQ ID NO: 258494 - protein, 15 aa, Homo sapiens
  CDR3 for beta chain variable domain of TCR clone 129247 (TRBV5-4, TRBJ1-1)
CASSSLGWANTEAFF

SEQ ID NO: 258495 - protein, 14 aa, Homo sapiens
  CDR3 for alpha chain variable domain of TCR clone 129248 (TRAV13-1, TRAJ44)
CAAKATGTASKLTF

SEQ ID NO: 258496 - protein, 17 aa, Homo sapiens
  CDR3 for beta chain variable domain of TCR clone 129248 (TRBV7-3, TRBJ2-3)
RASSLMKSMRGADTQYF

SEQ ID NO: 258497 - protein, 13 aa, Homo sapiens
  CDR3 for alpha chain variable domain of TCR clone 129249 (TRAV30, TRAJ49)
CGTESQPVTSSIL

SEQ ID NO: 258498 - protein, 13 aa, Homo sapiens
  CDR3 for beta chain variable domain of TCR clone 129249 (TRBV10-3, TRBJ2-7)
CASKLAVNYEQYF

SEQ ID NO: 258499 - protein, 11 aa, Homo sapiens
  CDR3 for alpha chain variable domain of TCR clone 129250 (TRAV35, TRAJ30)
CAGERDDKIIF

SEQ ID NO: 258500 - protein, 14 aa, Homo sapiens
  CDR3 for beta chain variable domain of TCR clone 129250 (TRBV15, TRBJ2-5)
CATGGDRGQETQYF

SEQ ID NO: 258501 - protein, 14 aa, Homo sapiens
  CDR3 for alpha chain variable domain of TCR clone 129251 (TRAV12-2, TRAJ13)
CAVKKTGGYQKVTL

SEQ ID NO: 258502 - protein, 15 aa, Homo sapiens
  CDR3 for beta chain variable domain of TCR clone 129251 (TRBV9, TRBJ1-6)
CASSVAGTGDSPLHF

SEQ ID NO: 258503 - protein, 12 aa, Homo sapiens
  CDR3 for alpha chain variable domain of TCR clone 129252 (TRAV16, TRAJ10)
CSRTGGGNKLTF

SEQ ID NO: 258504 - protein, 11 aa, Homo sapiens
  CDR3 for beta chain variable domain of TCR clone 129252 (TRBV29-1, TRBJ2-5)
CSEGRTGTQYF

SEQ ID NO: 258505 - protein, 13 aa, Homo sapiens
  CDR3 for alpha chain variable domain of TCR clone 129253 (TRAV12-2, TRAJ20)
CAVYPSNDYKLSF

SEQ ID NO: 258506 - protein, 13 aa, Homo sapiens
  CDR3 for beta chain variable domain of TCR clone 129253 (TRBV4-2, TRBJ1-1)
CASSQAGNTEAFF

SEQ ID NO: 258507 - protein, 15 aa, Homo sapiens
  CDR3 for alpha chain variable domain of TCR clone 129254 (TRAV17, TRAJ56)
CATDANTGANSKLTF

SEQ ID NO: 258508 - protein, 14 aa, Homo sapiens
  CDR3 for beta chain variable domain of TCR clone 129254 (TRBV19, TRBJ1-5)
CASSLGTVGQPQHF

SEQ ID NO: 258509 - protein, 15 aa, Homo sapiens
  CDR3 for alpha chain variable domain of TCR clone 129255 (TRAV8-2, TRAJ40)
CVVLGTTSGTYKYIF

SEQ ID NO: 258510 - protein, 16 aa, Homo sapiens
  CDR3 for beta chain variable domain of TCR clone 129255 (TRBV7-3, TRBJ2-1)
CASSLEGYRSYNELFF

SEQ ID NO: 258511 - protein, 13 aa, Homo sapiens
  CDR3 for alpha chain variable domain of TCR clone 129256 (TRAV12-2, TRAJ10)
CAVPTGGGNKLTF

SEQ ID NO: 258512 - protein, 11 aa, Homo sapiens
  CDR3 for beta chain variable domain of TCR clone 129256 (TRBV6-1, TRBJ2-1)
CASIISNEQFF

SEQ ID NO: 258513 - protein, 13 aa, Homo sapiens
  CDR3 for alpha chain variable domain of TCR clone 129257 (TRAV26-2, TRAJ57)
CILSRGGSEKLVF

SEQ ID NO: 258514 - protein, 15 aa, Homo sapiens
  CDR3 for beta chain variable domain of TCR clone 129257 (TRBV7-9, TRBJ1-5)
CASSQGHQPNQPQHF

SEQ ID NO: 258515 - protein, 14 aa, Homo sapiens
  CDR3 for alpha chain variable domain of TCR clone 129258 (TRAV12-3, TRAJ10)
SHLPLTGGGNKLTF

SEQ ID NO: 258516 - protein, 12 aa, Homo sapiens
  CDR3 for beta chain variable domain of TCR clone 129258 (TRBV11-2, TRBJ2-5)
CASSLGQETQYF

SEQ ID NO: 258517 - protein, 14 aa, Homo sapiens
  CDR3 for alpha chain variable domain of TCR clone 129259 (TRAV1-2, TRAJ8)
CAVREETGFQKLVF

SEQ ID NO: 258518 - protein, 12 aa, Homo sapiens
  CDR3 for beta chain variable domain of TCR clone 129259 (TRBV11-2, TRBJ2-2)
CASSLGGGELFF

SEQ ID NO: 258519 - protein, 14 aa, Homo sapiens
  CDR3 for alpha chain variable domain of TCR clone 129260 (TRAV12-3, TRAJ10)
SHLPLTGGGSKLTF

SEQ ID NO: 258520 - protein, 16 aa, Homo sapiens
  CDR3 for beta chain variable domain of TCR clone 129260 (TRBV19, TRBJ2-1)
CASSKAGPSSYNEQFF

SEQ ID NO: 258521 - protein, 12 aa, Homo sapiens
  CDR3 for alpha chain variable domain of TCR clone 129261 (TRAV12-1, TRAJ23)
CVMNIPGGKLIF

SEQ ID NO: 258522 - protein, 15 aa, Homo sapiens
  CDR3 for beta chain variable domain of TCR clone 129261 (TRBV7-2, TRBJ2-7)
CASSLVSSGSYEQYF

SEQ ID NO: 258523 - protein, 14 aa, Homo sapiens
  CDR3 for alpha chain variable domain of TCR clone 129262 (TRAV16, TRAJ15)
CALRPNQAGTALIF

SEQ ID NO: 258524 - protein, 14 aa, Homo sapiens
  CDR3 for beta chain variable domain of TCR clone 129262 (TRBV13, TRBJ2-5)
CASSLGPRGETQYF

SEQ ID NO: 258525 - protein, 12 aa, Homo sapiens
  CDR3 for alpha chain variable domain of TCR clone 129263 (TRAV8-3, TRAJ20)
CPVGANDYKLSF

SEQ ID NO: 258526 - protein, 16 aa, Homo sapiens
  CDR3 for beta chain variable domain of TCR clone 129263 (TRBV19, TRBJ2-2)
CASRSPGTGATGELFF

SEQ ID NO: 258527 - protein, 14 aa, Homo sapiens
  CDR3 for alpha chain variable domain of TCR clone 129264 (TRAV12-3, TRAJ10)
SHLPLTGGGNKLTF

SEQ ID NO: 258528 - protein, 13 aa, Homo sapiens
  CDR3 for beta chain variable domain of TCR clone 129264 (TRBV7-2, TRBJ2-5)
CASSQTSVETQYF

SEQ ID NO: 258529 - protein, 15 aa, Homo sapiens
  CDR3 for alpha chain variable domain of TCR clone 129265 (TRAV3, TRAJ22)
CAVRDRGGSARQLTF

SEQ ID NO: 258530 - protein, 16 aa, Homo sapiens
  CDR3 for beta chain variable domain of TCR clone 129265 (TRBV5-4, TRBJ2-3)
CATQQPGAGGADTQYF

SEQ ID NO: 258531 - protein, 11 aa, Homo sapiens
  CDR3 for alpha chain variable domain of TCR clone 129266 (TRAV12-2, TRAJ39)
CAVNNMLTFGG

SEQ ID NO: 258532 - protein, 16 aa, Homo sapiens
  CDR3 for beta chain variable domain of TCR clone 129266 (TRBV5-3, TRBJ2-2)
CARSFGTGTSTGELFF

SEQ ID NO: 258533 - protein, 13 aa, Homo sapiens
  CDR3 for alpha chain variable domain of TCR clone 129267 (TRAV13-1, TRAJ27)
CAVSTHQCRQINL

SEQ ID NO: 258534 - protein, 16 aa, Homo sapiens
  CDR3 for beta chain variable domain of TCR clone 129267 (TRBV27, TRBJ2-2)
CASSFRGLVRTGELFF

SEQ ID NO: 258535 - protein, 13 aa, Homo sapiens
  CDR3 for alpha chain variable domain of TCR clone 129268 (TRAV36/DV7, TRAJ7)
CAGTRYGNNRLAF

SEQ ID NO: 258536 - protein, 15 aa, Homo sapiens
  CDR3 for beta chain variable domain of TCR clone 129268 (TRBV11-3, TRBJ2-7)
CASSPGPASSYKQYF

SEQ ID NO: 258537 - protein, 17 aa, Homo sapiens
  CDR3 for alpha chain variable domain of TCR clone 129269 (TRAV13-1, TRAJ52)
CAASSGAGGTSYVKLTF

SEQ ID NO: 258538 - protein, 12 aa, Homo sapiens
  CDR3 for beta chain variable domain of TCR clone 129269 (TRBV11-2, TRBJ2-2)
CASSLGGGELFF

SEQ ID NO: 258539 - protein, 12 aa, Homo sapiens
  CDR3 for alpha chain variable domain of TCR clone 129270 (TRAV2, TRAJ5)
CALDTGRRALTF

SEQ ID NO: 258540 - protein, 21 aa, Homo sapiens
  CDR3 for beta chain variable domain of TCR clone 129270 (TRBV19, TRBJ2-6)
CASTELGVWELPLSGANVLTF

SEQ ID NO: 258541 - protein, 12 aa, Homo sapiens
  CDR3 for alpha chain variable domain of TCR clone 129271 (TRAV29/DV5, TRAJ49)
CAATATGNQFYF

SEQ ID NO: 258542 - protein, 12 aa, Homo sapiens
  CDR3 for beta chain variable domain of TCR clone 129271 (TRBV12-4, TRBJ2-7)
CASSLGGYEQYF

SEQ ID NO: 258543 - protein, 16 aa, Homo sapiens
  CDR3 for alpha chain variable domain of TCR clone 129272 (TRAV30, TRAJ57)
CGTGWAPQGGSEKLVL

SEQ ID NO: 258544 - protein, 14 aa, Homo sapiens
  CDR3 for beta chain variable domain of TCR clone 129272 (TRBV18, TRBJ1-1)
CASSPGFQGVEAFF

SEQ ID NO: 258545 - protein, 12 aa, Homo sapiens
  CDR3 for alpha chain variable domain of TCR clone 129273 (TRAV3, TRAJ43)
CAVRDPNNEMRF

SEQ ID NO: 258546 - protein, 17 aa, Homo sapiens
  CDR3 for beta chain variable domain of TCR clone 129273 (TRBV7-8, TRBJ2-6)
CASSAGTGGAGANVLTF

SEQ ID NO: 258547 - protein, 21 aa, Homo sapiens
  CDR3 for alpha chain variable domain of TCR clone 129274 (TRAV1-2, TRAJ9)
CAVLNTGGFKTILEQEQDYLL

SEQ ID NO: 258548 - protein, 14 aa, Homo sapiens
  CDR3 for beta chain variable domain of TCR clone 129274 (TRBV20-1, TRBJ2-3)
CSARGGTSTDTQYF

SEQ ID NO: 258549 - protein, 15 aa, Homo sapiens
  CDR3 for alpha chain variable domain of TCR clone 129275 (TRAV12-1, TRAJ44)
CVVDEYTGTASKLTF

SEQ ID NO: 258550 - protein, 15 aa, Homo sapiens
  CDR3 for beta chain variable domain of TCR clone 129275 (TRBV20-1, TRBJ2-7)
CSARDRVSGMDEQYF

SEQ ID NO: 258551 - protein, 14 aa, Homo sapiens
  CDR3 for alpha chain variable domain of TCR clone 129276 (TRAV23/DV6, TRAJ22)
CAASVSGSARQLTL

SEQ ID NO: 258552 - protein, 16 aa, Homo sapiens
  CDR3 for beta chain variable domain of TCR clone 129276 (TRBV19, TRBJ2-2)
CASSFPGQGLAGELFF

SEQ ID NO: 258553 - protein, 18 aa, Homo sapiens
  CDR3 for alpha chain variable domain of TCR clone 129277 (TRAV21, TRAJ53)
CAVKGGENSGGSNYKLTF

SEQ ID NO: 258554 - protein, 16 aa, Homo sapiens
  CDR3 for beta chain variable domain of TCR clone 129277 (TRBV4-1, TRBJ2-7)
CASSPADRLSTTEQYF

SEQ ID NO: 258555 - protein, 14 aa, Homo sapiens
  CDR3 for alpha chain variable domain of TCR clone 129278 (TRAV12-3, TRAJ15)
CAMIPPLAGTALIF

SEQ ID NO: 258556 - protein, 14 aa, Homo sapiens
  CDR3 for beta chain variable domain of TCR clone 129278 (TRBV20-1, TRBJ2-2)
CSARKRLATGELFF

SEQ ID NO: 258557 - protein, 14 aa, Homo sapiens
  CDR3 for alpha chain variable domain of TCR clone 129279 (TRAV2, TRAJ9)
CAVEDRSGGFKTIF

SEQ ID NO: 258558 - protein, 14 aa, Homo sapiens
  CDR3 for beta chain variable domain of TCR clone 129279 (TRBV5-5, TRBJ1-2)
CASSLDPYNYGYTF

SEQ ID NO: 258559 - protein, 12 aa, Homo sapiens
  CDR3 for alpha chain variable domain of TCR clone 129280 (TRAV23/DV6, TRAJ20)
CAADSRDYKLSF

SEQ ID NO: 258560 - protein, 15 aa, Homo sapiens
  CDR3 for beta chain variable domain of TCR clone 129280 (TRBV7-9, TRBJ1-4)
CASSARTGGNEKLFF

SEQ ID NO: 258561 - protein, 15 aa, Homo sapiens
  CDR3 for alpha chain variable domain of TCR clone 129281 (TRAV26-1, TRAJ56)
CIVRVDNGANSKLAF

SEQ ID NO: 258562 - protein, 15 aa, Homo sapiens
  CDR3 for beta chain variable domain of TCR clone 129281 (TRBV20-1, TRBJ2-7)
CSARDPTEVGHEQYF

SEQ ID NO: 258563 - protein, 11 aa, Homo sapiens
  CDR3 for alpha chain variable domain of TCR clone 129282 (TRAV1-2, TRAJ20)
CAVANDYKLSF

SEQ ID NO: 258564 - protein, 14 aa, Homo sapiens
  CDR3 for beta chain variable domain of TCR clone 129282 (TRBV28, TRBJ2-5)
CASSLYRGTETQYF

SEQ ID NO: 258565 - protein, 21 aa, Homo sapiens
  CDR3 for alpha chain variable domain of TCR clone 129283 (TRAV8-3, TRAJ38)
CAVGASNAGNNHIQNPDPAVF

SEQ ID NO: 258566 - protein, 15 aa, Homo sapiens
  CDR3 for beta chain variable domain of TCR clone 129283 (TRBV11-3, TRBJ1-3)
CASSLFGPSGNTIYF

SEQ ID NO: 258567 - protein, 14 aa, Homo sapiens
  CDR3 for alpha chain variable domain of TCR clone 129284 (TRAV26-1, TRAJ45)
CIEVTGGGADGLTF

SEQ ID NO: 258568 - protein, 13 aa, Homo sapiens
  CDR3 for beta chain variable domain of TCR clone 129284 (TRBV19, TRBJ2-7)
CASSAGHGYEQYF

SEQ ID NO: 258569 - protein, 15 aa, Homo sapiens
  CDR3 for alpha chain variable domain of TCR clone 129285 (TRAV8-3, TRAJ45)
CASSYSGGGADGLTF

SEQ ID NO: 258570 - protein, 16 aa, Homo sapiens
  CDR3 for beta chain variable domain of TCR clone 129285 (TRBV11-3, TRBJ2-3)
CASSPGGLLGTDTQYF

SEQ ID NO: 258571 - protein, 13 aa, Homo sapiens
  CDR3 for alpha chain variable domain of TCR clone 129286 (TRAV6, TRAJ5)
CAPKATGRRALTF

SEQ ID NO: 258572 - protein, 14 aa, Homo sapiens
  CDR3 for beta chain variable domain of TCR clone 129286 (TRBV7-8, TRBJ2-3)
CASSLEAGTDTQYF

SEQ ID NO: 258573 - protein, 14 aa, Homo sapiens
  CDR3 for alpha chain variable domain of TCR clone 129287 (TRAV1-2, TRAJ16)
CAVNRFLDGQKLLF

SEQ ID NO: 258574 - protein, 16 aa, Homo sapiens
  CDR3 for beta chain variable domain of TCR clone 129287 (TRBV12-5, TRBJ2-5)
CASGPRTSGNQETQYF

SEQ ID NO: 258575 - protein, 14 aa, Homo sapiens
  CDR3 for alpha chain variable domain of TCR clone 129288 (TRAV12-2, TRAJ13)
CAVKKTGGYQKVTF

SEQ ID NO: 258576 - protein, 14 aa, Homo sapiens
  CDR3 for beta chain variable domain of TCR clone 129288 (TRBV20-1, TRBJ2-3)
CSARDGGSTDTQYF

SEQ ID NO: 258577 - protein, 15 aa, Homo sapiens
  CDR3 for alpha chain variable domain of TCR clone 129289 (TRAV34, TRAJ38)
CGADFTPGNNRTLIW

SEQ ID NO: 258578 - protein, 14 aa, Homo sapiens
  CDR3 for beta chain variable domain of TCR clone 129289 (TRBV12-5, TRBJ2-5)
CASGSRTHQETQYF

SEQ ID NO: 258579 - protein, 13 aa, Homo sapiens
  CDR3 for alpha chain variable domain of TCR clone 129290 (TRAV8-6, TRAJ49)
CAVITNTGNQFYF

SEQ ID NO: 258580 - protein, 14 aa, Homo sapiens
  CDR3 for beta chain variable domain of TCR clone 129290 (TRBV5-1, TRBJ2-7)
CDSSRGESLYEQYF

SEQ ID NO: 258581 - protein, 12 aa, Homo sapiens
  CDR3 for alpha chain variable domain of TCR clone 129291 (TRAV8-3, TRAJ20)
CAMGANDYKLSF

SEQ ID NO: 258582 - protein, 17 aa, Homo sapiens
  CDR3 for beta chain variable domain of TCR clone 129291 (TRBV13, TRBJ2-3)
CASSLSRVAGGRNTQYF

SEQ ID NO: 258583 - protein, 17 aa, Homo sapiens
  CDR3 for alpha chain variable domain of TCR clone 129292 (TRAV38-2/DV8, TRAJ38)
CAYRSARGAGNNRELIW

SEQ ID NO: 258584 - protein, 13 aa, Homo sapiens
  CDR3 for beta chain variable domain of TCR clone 129292 (TRBV6-5, TRBJ2-1)
CASRGRVGNEQFF

SEQ ID NO: 258585 - protein, 15 aa, Homo sapiens
  CDR3 for alpha chain variable domain of TCR clone 129293 (TRAV17, TRAJ45)
CATAELGGGADGLTF

SEQ ID NO: 258586 - protein, 15 aa, Homo sapiens
  CDR3 for beta chain variable domain of TCR clone 129293 (TRBV7-3, TRBJ2-7)
CASSLNAQGAYEQYF

SEQ ID NO: 258587 - protein, 10 aa, Homo sapiens
  CDR3 for alpha chain variable domain of TCR clone 129294 (TRAV12-1, TRAJ43)
CVVHNNDMRF

SEQ ID NO: 258588 - protein, 13 aa, Homo sapiens
  CDR3 for beta chain variable domain of TCR clone 129294 (TRBV12-4, TRBJ1-2)
CASSAGLTVISTF

SEQ ID NO: 258589 - protein, 13 aa, Homo sapiens
  CDR3 for alpha chain variable domain of TCR clone 129295 (TRAV30, TRAJ39)
FGTEKNAGNMLTF

SEQ ID NO: 258590 - protein, 12 aa, Homo sapiens
  CDR3 for beta chain variable domain of TCR clone 129295 (TRBV12-4, TRBJ2-5)
CASSSAQETQYF

SEQ ID NO: 258591 - protein, 14 aa, Homo sapiens
  CDR3 for alpha chain variable domain of TCR clone 129296 (TRAV8-3, TRAJ3)
CAVVPRSSASKIIF

SEQ ID NO: 258592 - protein, 16 aa, Homo sapiens
  CDR3 for beta chain variable domain of TCR clone 129296 (TRBV12-4, TRBJ1-5)
CASSRPVGGSNQPQHF

SEQ ID NO: 258593 - protein, 15 aa, Homo sapiens
  CDR3 for alpha chain variable domain of TCR clone 129297 (TRAV12-1, TRAJ9)
CAVSFGDTGGFKTIF

SEQ ID NO: 258594 - protein, 19 aa, Homo sapiens
  CDR3 for beta chain variable domain of TCR clone 129297 (TRBV25-1, TRBJ2-2)
CAILVYRVDRGRKTGELFF

SEQ ID NO: 258595 - protein, 12 aa, Homo sapiens
  CDR3 for alpha chain variable domain of TCR clone 129298 (TRAV35, TRAJ30)
CAGLNREDKIIF

SEQ ID NO: 258596 - protein, 15 aa, Homo sapiens
  CDR3 for beta chain variable domain of TCR clone 129298 (TRBV18, TRBJ2-3)
CASSPLAGETDTQYF

SEQ ID NO: 258597 - protein, 12 aa, Homo sapiens
  CDR3 for alpha chain variable domain of TCR clone 129299 (TRAV12-2, TRAJ8)
CAVNTCFQKLVF

SEQ ID NO: 258598 - protein, 15 aa, Homo sapiens
  CDR3 for beta chain variable domain of TCR clone 129299 (TRBV7-8, TRBJ1-5)
CASSLERRGLEPQHF

SEQ ID NO: 258599 - protein, 18 aa, Homo sapiens
  CDR3 for alpha chain variable domain of TCR clone 129300 (TRAV13-1, TRAJ52)
CAGSKRSAGGTSYGKLTF

SEQ ID NO: 258600 - protein, 13 aa, Homo sapiens
  CDR3 for beta chain variable domain of TCR clone 129300 (TRBV12-4, TRBJ1-2)
CASSLRQGKGYTF

SEQ ID NO: 258601 - protein, 13 aa, Homo sapiens
  CDR3 for alpha chain variable domain of TCR clone 129301 (TRAV27, TRAJ39)
CAGVNNADNMLTF

SEQ ID NO: 258602 - protein, 19 aa, Homo sapiens
  CDR3 for beta chain variable domain of TCR clone 129301 (TRBV5-1, TRBJ2-3)
CASSLWLAGGITTTDTQYF

SEQ ID NO: 258603 - protein, 14 aa, Homo sapiens
  CDR3 for alpha chain variable domain of TCR clone 129302 (TRAV12-1, TRAJ12)
CVVTRLDSSYKLIF

SEQ ID NO: 258604 - protein, 15 aa, Homo sapiens
  CDR3 for beta chain variable domain of TCR clone 129302 (TRBV20-1, TRBJ2-7)
CSARDRVSGMDEQYF

SEQ ID NO: 258605 - protein, 14 aa, Homo sapiens
  CDR3 for alpha chain variable domain of TCR clone 129303 (TRAV3, TRAJ36)
CAVRDGTGANNLFF

SEQ ID NO: 258606 - protein, 15 aa, Homo sapiens
  CDR3 for beta chain variable domain of TCR clone 129303 (TRBV7-3, TRBJ2-5)
CQHPAGGSVQETQYF

SEQ ID NO: 258607 - protein, 14 aa, Homo sapiens
  CDR3 for alpha chain variable domain of TCR clone 129304 (TRAV4, TRAJ41)
CLVGDGDSGYALNF

SEQ ID NO: 258608 - protein, 13 aa, Homo sapiens
  CDR3 for beta chain variable domain of TCR clone 129304 (TRBV7-3, TRBJ1-1)
CASSQDWGAEAFF

SEQ ID NO: 258609 - protein, 12 aa, Homo sapiens
  CDR3 for alpha chain variable domain of TCR clone 129305 (TRAV35, TRAJ12)
CAGIDSSYKFIF

SEQ ID NO: 258610 - protein, 14 aa, Homo sapiens
  CDR3 for beta chain variable domain of TCR clone 129305 (TRBV28, TRBJ2-5)
CASSLYRGTETQYF

SEQ ID NO: 258611 - protein, 12 aa, Homo sapiens
  CDR3 for alpha chain variable domain of TCR clone 129306 (TRAV36/DV7, TRAJ37)
CACYGNTGNLIF

SEQ ID NO: 258612 - protein, 13 aa, Homo sapiens
  CDR3 for beta chain variable domain of TCR clone 129306 (TRBV10-3, TRBJ2-7)
CASKLAVNYEQYF

SEQ ID NO: 258613 - protein, 15 aa, Homo sapiens
  CDR3 for alpha chain variable domain of TCR clone 129307 (TRAV3, TRAJ22)
CAVRDRGGSARQLTL

SEQ ID NO: 258614 - protein, 15 aa, Homo sapiens
  CDR3 for beta chain variable domain of TCR clone 129307 (TRBV27, TRBJ2-1)
CASSNGGGSSNEQFF

SEQ ID NO: 258615 - protein, 15 aa, Homo sapiens
  CDR3 for alpha chain variable domain of TCR clone 129308 (TRAV21, TRAJ53)
CATLNSGGSNYKLTF

SEQ ID NO: 258616 - protein, 15 aa, Homo sapiens
  CDR3 for beta chain variable domain of TCR clone 129308 (TRBV6-1, TRBJ2-3)
CASSERGGITDTQYF

SEQ ID NO: 258617 - protein, 15 aa, Homo sapiens
  CDR3 for alpha chain variable domain of TCR clone 129309 (TRAV27, TRAJ50)
CAGRERGTSYAKVIF

SEQ ID NO: 258618 - protein, 16 aa, Homo sapiens
  CDR3 for beta chain variable domain of TCR clone 129309 (TRBV10-3, TRBJ1-5)
CAISDQVGAPNQPQHF

SEQ ID NO: 258619 - protein, 14 aa, Homo sapiens
  CDR3 for alpha chain variable domain of TCR clone 129310 (TRAV1-2, TRAJ16)
CAVNRFSDGQKLLF

SEQ ID NO: 258620 - protein, 17 aa, Homo sapiens
  CDR3 for beta chain variable domain of TCR clone 129310 (TRBV24-1, TRBJ2-2)
CATSDLLRTGGSGELFF

SEQ ID NO: 258621 - protein, 14 aa, Homo sapiens
  CDR3 for alpha chain variable domain of TCR clone 129311 (TRAV29/DV5, TRAJ36)
CSARRKTGANNPFF

SEQ ID NO: 258622 - protein, 14 aa, Homo sapiens
  CDR3 for beta chain variable domain of TCR clone 129311 (TRBV12-5, TRBJ2-5)
CASGSRTHQETQYF

SEQ ID NO: 258623 - protein, 15 aa, Homo sapiens
  CDR3 for alpha chain variable domain of TCR clone 129312 (TRAV29/DV5, TRAJ29)
CAASERSSGNTPLVF

SEQ ID NO: 258624 - protein, 15 aa, Homo sapiens
  CDR3 for beta chain variable domain of TCR clone 129312 (TRBV18, TRBJ1-5)
CASSPSDRSNQPQHF

SEQ ID NO: 258625 - protein, 12 aa, Homo sapiens
  CDR3 for alpha chain variable domain of TCR clone 129313 (TRAV1-2, TRAJ29)
CAVPSGNTPLVF

SEQ ID NO: 258626 - protein, 12 aa, Homo sapiens
  CDR3 for beta chain variable domain of TCR clone 129313 (TRBV7-8, TRBJ2-7)
CASSLGDREQYF

SEQ ID NO: 258627 - protein, 14 aa, Homo sapiens
  CDR3 for alpha chain variable domain of TCR clone 129314 (TRAV2, TRAJ9)
CAVEDRSGGCKTIF

SEQ ID NO: 258628 - protein, 14 aa, Homo sapiens
  CDR3 for beta chain variable domain of TCR clone 129314 (TRBV18, TRBJ1-5)
CASSRQQRNQPQHF

SEQ ID NO: 258629 - protein, 12 aa, Homo sapiens
  CDR3 for alpha chain variable domain of TCR clone 129315 (TRAV21, TRAJ37)
CAVRGNTGKLIF

SEQ ID NO: 258630 - protein, 12 aa, Homo sapiens
  CDR3 for beta chain variable domain of TCR clone 129315 (TRBV19, TRBJ2-2)
CASSITPWELFF

SEQ ID NO: 258631 - protein, 13 aa, Homo sapiens
  CDR3 for alpha chain variable domain of TCR clone 129316 (TRAV13-2, TRAJ13)
CAERPGGYQKVTF

SEQ ID NO: 258632 - protein, 15 aa, Homo sapiens
  CDR3 for beta chain variable domain of TCR clone 129316 (TRBV11-3, TRBJ2-7)
CASSTGPASSYEQYF

SEQ ID NO: 258633 - protein, 12 aa, Homo sapiens
  CDR3 for alpha chain variable domain of TCR clone 129317 (TRAV8-4, TRAJ37)
CAKSSNTGKLIF

SEQ ID NO: 258634 - protein, 13 aa, Homo sapiens
  CDR3 for beta chain variable domain of TCR clone 129317 (TRBV7-9, TRBJ2-1)
CASSWESYNEQFF

SEQ ID NO: 258635 - protein, 13 aa, Homo sapiens
  CDR3 for alpha chain variable domain of TCR clone 129318 (TRAV29/DV5, TRAJ33)
CAASVESNYQLIG

SEQ ID NO: 258636 - protein, 14 aa, Homo sapiens
  CDR3 for beta chain variable domain of TCR clone 129318 (TRBV11-2, TRBJ2-5)
CASSRTGGIETQYF

SEQ ID NO: 258637 - protein, 12 aa, Homo sapiens
  CDR3 for alpha chain variable domain of TCR clone 129319 (TRAV12-1, TRAJ40)
CVFYSGTYKYIF

SEQ ID NO: 258638 - protein, 18 aa, Homo sapiens
  CDR3 for beta chain variable domain of TCR clone 129319 (TRBV12-4, TRBJ2-2)
CAGSLVAGTRGRTGELFF

SEQ ID NO: 258639 - protein, 12 aa, Homo sapiens
  CDR3 for alpha chain variable domain of TCR clone 129320 (TRAV13-1, TRAJ21)
CAAKEGFNKFYF

SEQ ID NO: 258640 - protein, 16 aa, Homo sapiens
  CDR3 for beta chain variable domain of TCR clone 129320 (TRBV27, TRBJ2-2)
CASSSSGVSNTGELFF

SEQ ID NO: 258641 - protein, 12 aa, Homo sapiens
  CDR3 for alpha chain variable domain of TCR clone 129321 (TRAV27, TRAJ9)
CAGESGGFKTIF

SEQ ID NO: 258642 - protein, 16 aa, Homo sapiens
  CDR3 for beta chain variable domain of TCR clone 129321 (TRBV20-1, TRBJ1-2)
CSASMGQGVANYGYTF

SEQ ID NO: 258643 - protein, 17 aa, Homo sapiens
  CDR3 for alpha chain variable domain of TCR clone 129322 (TRAV3, TRAJ42)
CAVRDRDYGGSQGNRIF

SEQ ID NO: 258644 - protein, 14 aa, Homo sapiens
  CDR3 for beta chain variable domain of TCR clone 129322 (TRBV19, TRBJ2-2)
CASSGQGIAGELFF

SEQ ID NO: 258645 - protein, 15 aa, Homo sapiens
  CDR3 for alpha chain variable domain of TCR clone 129323 (TRAV2, TRAJ9)
CDVEDRGTGGFKTIF

SEQ ID NO: 258646 - protein, 16 aa, Homo sapiens
  CDR3 for beta chain variable domain of TCR clone 129323 (TRBV24-1, TRBJ2-3)
CATSDPGTGATDTQYF

SEQ ID NO: 258647 - protein, 13 aa, Homo sapiens
  CDR3 for alpha chain variable domain of TCR clone 129324 (TRAV8-6, TRAJ21)
CAVSPSSINKFYF

SEQ ID NO: 258648 - protein, 14 aa, Homo sapiens
  CDR3 for beta chain variable domain of TCR clone 129324 (TRBV7-9, TRBJ2-5)
CASSLDTAQETQYF

SEQ ID NO: 258649 - protein, 14 aa, Homo sapiens
  CDR3 for alpha chain variable domain of TCR clone 129325 (TRAV35, TRAJ33)
CAGSSQDSNYQLIW

SEQ ID NO: 258650 - protein, 14 aa, Homo sapiens
  CDR3 for beta chain variable domain of TCR clone 129325 (TRBV7-9, TRBJ2-3)
CASSLEDGTDTQYF

SEQ ID NO: 258651 - protein, 15 aa, Homo sapiens
  CDR3 for alpha chain variable domain of TCR clone 129326 (TRAV3, TRAJ13)
CAVRVYSGGYQKVTF

SEQ ID NO: 258652 - protein, 15 aa, Homo sapiens
  CDR3 for beta chain variable domain of TCR clone 129326 (TRBV7-2, TRBJ2-1)
CASSSGLAGGNEQSF

SEQ ID NO: 258653 - protein, 14 aa, Homo sapiens
  CDR3 for alpha chain variable domain of TCR clone 129327 (TRAV8-3, TRAJ36)
CAVGPITGANNLFF

SEQ ID NO: 258654 - protein, 15 aa, Homo sapiens
  CDR3 for beta chain variable domain of TCR clone 129327 (TRBV4-1, TRBJ2-1)
CASSQAPGNYNEQFF

SEQ ID NO: 258655 - protein, 16 aa, Homo sapiens
  CDR3 for alpha chain variable domain of TCR clone 129328 (TRAV23/DV6, TRAJ9)
CAASIGGNTGGFKTIF

SEQ ID NO: 258656 - protein, 15 aa, Homo sapiens
  CDR3 for beta chain variable domain of TCR clone 129328 (TRBV9, TRBJ2-1)
CASSLAGSSYNEQFF

SEQ ID NO: 258657 - protein, 13 aa, Homo sapiens
  CDR3 for alpha chain variable domain of TCR clone 129329 (TRAV8-2, TRAJ43)
CVASDQGDNDMRF

SEQ ID NO: 258658 - protein, 12 aa, Homo sapiens
  CDR3 for beta chain variable domain of TCR clone 129329 (TRBV7-8, TRBJ2-7)
CASSPGDREQYF

SEQ ID NO: 258659 - protein, 14 aa, Homo sapiens
  CDR3 for alpha chain variable domain of TCR clone 129330 (TRAV8-3, TRAJ4)
CAVGASGGYNKLIF

SEQ ID NO: 258660 - protein, 13 aa, Homo sapiens
  CDR3 for beta chain variable domain of TCR clone 129330 (TRBV4-2, TRBJ1-1)
CASSQAGNTEAFF

SEQ ID NO: 258661 - protein, 11 aa, Homo sapiens
  CDR3 for alpha chain variable domain of TCR clone 129331 (TRAV17, TRAJ45)
RAGGGADGLTF

SEQ ID NO: 258662 - protein, 15 aa, Homo sapiens
  CDR3 for beta chain variable domain of TCR clone 129331 (TRBV5-7, TRBJ1-5)
CASSYGKLWDQPQHF

SEQ ID NO: 258663 - protein, 15 aa, Homo sapiens
  CDR3 for alpha chain variable domain of TCR clone 129332 (TRAV17, TRAJ57)
CATGPFQGGSEKLVF

SEQ ID NO: 258664 - protein, 18 aa, Homo sapiens
  CDR3 for beta chain variable domain of TCR clone 129332 (TRBV7-9, TRBJ2-7)
CASSLTTSGSRTWYEQYF

SEQ ID NO: 258665 - protein, 15 aa, Homo sapiens
  CDR3 for alpha chain variable domain of TCR clone 129333 (TRAV13-1, TRAJ44)
CAASRNTCTASKLTF

SEQ ID NO: 258666 - protein, 14 aa, Homo sapiens
  CDR3 for beta chain variable domain of TCR clone 129333 (TRBV2, TRBJ2-7)
CASSLTSGGYEQYF

SEQ ID NO: 258667 - protein, 14 aa, Homo sapiens
  CDR3 for alpha chain variable domain of TCR clone 129334 (TRAV12-2, TRAJ45)
CAVYSGGGADGLTF

SEQ ID NO: 258668 - protein, 12 aa, Homo sapiens
  CDR3 for beta chain variable domain of TCR clone 129334 (TRBV11-2, TRBJ2-2)
CASSLGGGELFF

SEQ ID NO: 258669 - protein, 15 aa, Homo sapiens
  CDR3 for alpha chain variable domain of TCR clone 129335 (TRAV21, TRAJ10)
CAVPLLTGGGNKLTF

SEQ ID NO: 258670 - protein, 14 aa, Homo sapiens
  CDR3 for beta chain variable domain of TCR clone 129335 (TRBV12-4, TRBJ1-1)
CASSLGKGGTEAFF

SEQ ID NO: 258671 - protein, 15 aa, Homo sapiens
  CDR3 for alpha chain variable domain of TCR clone 129336 (TRAV8-2, TRAJ40)
CVVLGTTSGTYKYIF

SEQ ID NO: 258672 - protein, 16 aa, Homo sapiens
  CDR3 for beta chain variable domain of TCR clone 129336 (TRBV7-3, TRBJ2-1)
CASSLEGYRSYNEQFI

SEQ ID NO: 258673 - protein, 13 aa, Homo sapiens
  CDR3 for alpha chain variable domain of TCR clone 129337 (TRAV8-4, TRAJ3)
CAVSDSGSSKIIF

SEQ ID NO: 258674 - protein, 16 aa, Homo sapiens
  CDR3 for beta chain variable domain of TCR clone 129337 (TRBV7-9, TRBJ2-7)
CASSNHGGQEKYEQYF

SEQ ID NO: 258675 - protein, 14 aa, Homo sapiens
  CDR3 for alpha chain variable domain of TCR clone 129338 (TRAV23/DV6, TRAJ6)
CAAIPSGGSYIPTF

SEQ ID NO: 258676 - protein, 17 aa, Homo sapiens
  CDR3 for beta chain variable domain of TCR clone 129338 (TRBV7-2, TRBJ2-3)
CASSLGGRAAWRDTQCF

SEQ ID NO: 258677 - protein, 14 aa, Homo sapiens
  CDR3 for alpha chain variable domain of TCR clone 129339 (TRAV12-2, TRAJ17)
CAVLFKAAGNKLTF

SEQ ID NO: 258678 - protein, 12 aa, Homo sapiens
  CDR3 for beta chain variable domain of TCR clone 129339 (TRBV11-2, TRBJ2-2)
CASSLPTGGLFF

SEQ ID NO: 258679 - protein, 13 aa, Homo sapiens
  CDR3 for alpha chain variable domain of TCR clone 129340 (TRAV30, TRAJ24)
CGTVTDSWGKLQF

SEQ ID NO: 258680 - protein, 15 aa, Homo sapiens
  CDR3 for beta chain variable domain of TCR clone 129340 (TRBV18, TRBJ2-1)
CASSPPSASYNEQFF

SEQ ID NO: 258681 - protein, 15 aa, Homo sapiens
  CDR3 for alpha chain variable domain of TCR clone 129341 (TRAV12-1, TRAJ9)
CVVSLGDTGGFKTIF

SEQ ID NO: 258682 - protein, 13 aa, Homo sapiens
  CDR3 for beta chain variable domain of TCR clone 129341 (TRBV2, TRBJ1-4)
CASSERAGEKLFF

SEQ ID NO: 258683 - protein, 12 aa, Homo sapiens
  CDR3 for alpha chain variable domain of TCR clone 129342 (TRAV13-2, TRAJ23)
CAERNRGGKLIF

SEQ ID NO: 258684 - protein, 15 aa, Homo sapiens
  CDR3 for beta chain variable domain of TCR clone 129342 (TRBV20-1, TRBJ2-7)
CSARDRVSGMDEQYF

SEQ ID NO: 258685 - protein, 14 aa, Homo sapiens
  CDR3 for alpha chain variable domain of TCR clone 129343 (TRAV12-3, TRAJ10)
SHLPLTGGGNKLTF

SEQ ID NO: 258686 - protein, 13 aa, Homo sapiens
  CDR3 for beta chain variable domain of TCR clone 129343 (TRBV7-9, TRBJ2-1)
CASSLDVGNEQFF

SEQ ID NO: 258687 - protein, 15 aa, Homo sapiens
  CDR3 for alpha chain variable domain of TCR clone 129344 (TRAV3, TRAJ22)
CAGRDRGGSARQLTF

SEQ ID NO: 258688 - protein, 16 aa, Homo sapiens
  CDR3 for beta chain variable domain of TCR clone 129344 (TRBV5-4, TRBJ2-3)
CASQQPGAGGADTQYF

SEQ ID NO: 258689 - protein, 14 aa, Homo sapiens
  CDR3 for alpha chain variable domain of TCR clone 129345 (TRAV1-2, TRAJ16)
CAVNRFSDGQKLLF

SEQ ID NO: 258690 - protein, 15 aa, Homo sapiens
  CDR3 for beta chain variable domain of TCR clone 129345 (TRBV27, TRBJ2-3)
CASSLGLAATDTQYF

SEQ ID NO: 258691 - protein, 14 aa, Homo sapiens
  CDR3 for alpha chain variable domain of TCR clone 129346 (TRAV12-3, TRAJ10)
SHLPLTGGGNKLTF

SEQ ID NO: 258692 - protein, 11 aa, Homo sapiens
  CDR3 for beta chain variable domain of TCR clone 129346 (TRBV12-4, TRBJ2-2)
CASSSAGELFF

SEQ ID NO: 258693 - protein, 14 aa, Homo sapiens
  CDR3 for alpha chain variable domain of TCR clone 129347 (TRAV13-1, TRAJ40)
CAASMTSGTYKYIF

SEQ ID NO: 258694 - protein, 13 aa, Homo sapiens
  CDR3 for beta chain variable domain of TCR clone 129347 (TRBV4-1, TRBJ2-5)
YASSQEVQETQYF

SEQ ID NO: 258695 - protein, 14 aa, Homo sapiens
  CDR3 for alpha chain variable domain of TCR clone 129348 (TRAV8-4, TRAJ13)
CAVTLSGGYQKVTF

SEQ ID NO: 258696 - protein, 14 aa, Homo sapiens
  CDR3 for beta chain variable domain of TCR clone 129348 (TRBV7-2, TRBJ1-2)
CASSQTGSTYVYTF

SEQ ID NO: 258697 - protein, 14 aa, Homo sapiens
  CDR3 for alpha chain variable domain of TCR clone 129349 (TRAV8-3, TRAJ4)
CAVGAAGGYNKLIF

SEQ ID NO: 258698 - protein, 13 aa, Homo sapiens
  CDR3 for beta chain variable domain of TCR clone 129349 (TRBV11-2, TRBJ2-2)
CASGRDREEELFF

SEQ ID NO: 258699 - protein, 11 aa, Homo sapiens
  CDR3 for alpha chain variable domain of TCR clone 129350 (TRAV21, TRAJ13)
CAHYNTDKLIF

SEQ ID NO: 258700 - protein, 15 aa, Homo sapiens
  CDR3 for beta chain variable domain of TCR clone 129350 (TRBV12-4, TRBJ2-5)
CASSPPTGLQETQYF

SEQ ID NO: 258701 - protein, 18 aa, Homo sapiens
  CDR3 for alpha chain variable domain of TCR clone 129351 (TRAV12-3, TRAJ52)
CAMSVGGAGGTSYGKLTF

SEQ ID NO: 258702 - protein, 15 aa, Homo sapiens
  CDR3 for beta chain variable domain of TCR clone 129351 (TRBV27, TRBJ1-6)
CASSYDRGLGSPLHF

SEQ ID NO: 258703 - protein, 14 aa, Homo sapiens
  CDR3 for alpha chain variable domain of TCR clone 129352 (TRAV12-2, TRAJ13)
CAVNETGGYQKVTF

SEQ ID NO: 258704 - protein, 15 aa, Homo sapiens
  CDR3 for beta chain variable domain of TCR clone 129352 (TRBV27, TRBJ2-1)
CASSNGGGSSNEQFF

SEQ ID NO: 258705 - protein, 13 aa, Homo sapiens
  CDR3 for alpha chain variable domain of TCR clone 129353 (TRAV8-3, TRAJ4)
WVFYSGGYNKLFF

SEQ ID NO: 258706 - protein, 16 aa, Homo sapiens
  CDR3 for beta chain variable domain of TCR clone 129353 (TRBV7-8, TRBJ2-3)
CASSTEGQRETDTQYF

SEQ ID NO: 258707 - protein, 15 aa, Homo sapiens
  CDR3 for alpha chain variable domain of TCR clone 129354 (TRAV21, TRAJ45)
CAVSYSGGGADGLTF

SEQ ID NO: 258708 - protein, 15 aa, Homo sapiens
  CDR3 for beta chain variable domain of TCR clone 129354 (TRBV4-1, TRBJ1-4)
CASSDTGGTNEKLFF

SEQ ID NO: 258709 - protein, 16 aa, Homo sapiens
  CDR3 for alpha chain variable domain of TCR clone 129355 (TRAV12-3, TRAJ53)
CAMSPGSGGSNYKLTF

SEQ ID NO: 258710 - protein, 16 aa, Homo sapiens
  CDR3 for beta chain variable domain of TCR clone 129355 (TRBV4-2, TRBJ2-3)
CASSQDGARGGVKQYF

SEQ ID NO: 258711 - protein, 14 aa, Homo sapiens
  CDR3 for alpha chain variable domain of TCR clone 129356 (TRAV12-2, TRAJ13)
CAVKKTGGYQKVTF

SEQ ID NO: 258712 - protein, 14 aa, Homo sapiens
  CDR3 for beta chain variable domain of TCR clone 129356 (TRBV25-1, TRBJ1-1)
CASPHLGGNTEAFF

SEQ ID NO: 258713 - protein, 14 aa, Homo sapiens
  CDR3 for alpha chain variable domain of TCR clone 129357 (TRAV12-1, TRAJ17)
CVVNPKAAGNKLTF

SEQ ID NO: 258714 - protein, 13 aa, Homo sapiens
  CDR3 for beta chain variable domain of TCR clone 129357 (TRBV7-3, TRBJ1-1)
CASSQDWGAEAFF

SEQ ID NO: 258715 - protein, 13 aa, Homo sapiens
  CDR3 for alpha chain variable domain of TCR clone 129358 (TRAV25, TRAJ23)
CAGVNNQGGKLIF

SEQ ID NO: 258716 - protein, 16 aa, Homo sapiens
  CDR3 for beta chain variable domain of TCR clone 129358 (TRBV7-3, TRBJ2-2)
CASSLKRGTLSGELFF

SEQ ID NO: 258717 - protein, 11 aa, Homo sapiens
  CDR3 for alpha chain variable domain of TCR clone 129359 (TRAV12-3, TRAJ43)
CAMSVSNDMRF

SEQ ID NO: 258718 - protein, 15 aa, Homo sapiens
  CDR3 for beta chain variable domain of TCR clone 129359 (TRBV5-5, TRBJ1-5)
CASSSTPGSNQPQHF

SEQ ID NO: 258719 - protein, 16 aa, Homo sapiens
  CDR3 for alpha chain variable domain of TCR clone 129360 (TRAV27, TRAJ34)
CAGGGLGDYNTDKLSF

SEQ ID NO: 258720 - protein, 15 aa, Homo sapiens
  CDR3 for beta chain variable domain of TCR clone 129360 (TRBV9, TRBJ1-4)
CASSVGGSTNEKLFF

SEQ ID NO: 258721 - protein, 14 aa, Homo sapiens
  CDR3 for alpha chain variable domain of TCR clone 129361 (TRAV8-3, TRAJ36)
CAVGPRTGANNLFF

SEQ ID NO: 258722 - protein, 15 aa, Homo sapiens
  CDR3 for beta chain variable domain of TCR clone 129361 (TRBV4-1, TRBJ2-1)
CASSQDPGNYNEQFF

SEQ ID NO: 258723 - protein, 14 aa, Homo sapiens
  CDR3 for alpha chain variable domain of TCR clone 129362 (TRAV12-1, TRAJ6)
CVVPTSGGSYIPTF

SEQ ID NO: 258724 - protein, 15 aa, Homo sapiens
  CDR3 for beta chain variable domain of TCR clone 129362 (TRBV4-1, TRBJ1-4)
CASSDTGGTNEKLFF

SEQ ID NO: 258725 - protein, 11 aa, Homo sapiens
  CDR3 for alpha chain variable domain of TCR clone 129363 (TRAV8-3, TRAJ49)
CAANTGNQFYF

SEQ ID NO: 258726 - protein, 12 aa, Homo sapiens
  CDR3 for beta chain variable domain of TCR clone 129363 (TRBV11-2, TRBJ2-7)
CASSPPADEQYF

SEQ ID NO: 258727 - protein, 15 aa, Homo sapiens
  CDR3 for alpha chain variable domain of TCR clone 129364 (TRAV20, TRAJ53)
CAVQERGGSNYKLTF

SEQ ID NO: 258728 - protein, 14 aa, Homo sapiens
  CDR3 for beta chain variable domain of TCR clone 129364 (TRBV15, TRBJ2-7)
CATSRVARGYEQYF

SEQ ID NO: 258729 - protein, 14 aa, Homo sapiens
  CDR3 for alpha chain variable domain of TCR clone 129365 (TRAV1-2, TRAJ16)
CAVNRFSAGQKLLF

SEQ ID NO: 258730 - protein, 17 aa, Homo sapiens
  CDR3 for beta chain variable domain of TCR clone 129365 (TRBV13, TRBJ2-3)
CASSLSRVAGGRNTQYF

SEQ ID NO: 258731 - protein, 14 aa, Homo sapiens
  CDR3 for alpha chain variable domain of TCR clone 129366 (TRAV12-2, TRAJ45)
CAVHIGGGADGLTF

SEQ ID NO: 258732 - protein, 13 aa, Homo sapiens
  CDR3 for beta chain variable domain of TCR clone 129366 (TRBV19, TRBJ2-2)
CASSIWSTGELFF

SEQ ID NO: 258733 - protein, 12 aa, Homo sapiens
  CDR3 for alpha chain variable domain of TCR clone 129367 (TRAV17, TRAJ53)
CAFGGSNYKLTF

SEQ ID NO: 258734 - protein, 16 aa, Homo sapiens
  CDR3 for beta chain variable domain of TCR clone 129367 (TRBV11-2, TRBJ2-4)
CASSQEGRGGLEIQYF

SEQ ID NO: 258735 - protein, 12 aa, Homo sapiens
  CDR3 for alpha chain variable domain of TCR clone 129368 (TRAV13-1, TRAJ49)
CAAPNNGNQFYF

SEQ ID NO: 258736 - protein, 17 aa, Homo sapiens
  CDR3 for beta chain variable domain of TCR clone 129368 (TRBV25-1, TRBJ2-7)
CASSDARVVFSSYEQYF

SEQ ID NO: 258737 - protein, 14 aa, Homo sapiens
  CDR3 for alpha chain variable domain of TCR clone 129369 (TRAV3, TRAJ9)
CVVRLNTGGFKTIF

SEQ ID NO: 258738 - protein, 16 aa, Homo sapiens
  CDR3 for beta chain variable domain of TCR clone 129369 (TRBV12-5, TRBJ2-5)
CASGPRTSGNQETQYF

SEQ ID NO: 258739 - protein, 16 aa, Homo sapiens
  CDR3 for alpha chain variable domain of TCR clone 129370 (TRAV16, TRAJ52)
CALSAAGGTSYGKLTF

SEQ ID NO: 258740 - protein, 13 aa, Homo sapiens
  CDR3 for beta chain variable domain of TCR clone 129370 (TRBV15, TRBJ1-6)
CATSGGLNSPLHF

SEQ ID NO: 258741 - protein, 13 aa, Homo sapiens
  CDR3 for alpha chain variable domain of TCR clone 129371 (TRAV26-1, TRAJ33)
CIVRVEGNYQLIW

SEQ ID NO: 258742 - protein, 14 aa, Homo sapiens
  CDR3 for beta chain variable domain of TCR clone 129371 (TRBV10-3, TRBJ2-1)
CAISSDLAYNEQFF

SEQ ID NO: 258743 - protein, 13 aa, Homo sapiens
  CDR3 for alpha chain variable domain of TCR clone 129372 (TRAV23/DV6, TRAJ9)
CAASTTGGFKTIF

SEQ ID NO: 258744 - protein, 12 aa, Homo sapiens
  CDR3 for beta chain variable domain of TCR clone 129372 (TRBV11-2, TRBJ2-2)
CASSLGGGELFF

SEQ ID NO: 258745 - protein, 16 aa, Homo sapiens
  CDR3 for alpha chain variable domain of TCR clone 129373 (TRAV12-1, TRAJ45)
CVVIRYSGGGSDGLTF

SEQ ID NO: 258746 - protein, 12 aa, Homo sapiens
  CDR3 for beta chain variable domain of TCR clone 129373 (TRBV6-5, TRBJ2-2)
CASRQITGELFF

SEQ ID NO: 258747 - protein, 13 aa, Homo sapiens
  CDR3 for alpha chain variable domain of TCR clone 129374 (TRAV12-1, TRAJ16)
CVVNGPDGEKLLF

SEQ ID NO: 258748 - protein, 13 aa, Homo sapiens
  CDR3 for beta chain variable domain of TCR clone 129374 (TRBV2, TRBJ1-1)
CARNPTGGFHAFF

SEQ ID NO: 258749 - protein, 13 aa, Homo sapiens
  CDR3 for alpha chain variable domain of TCR clone 129375 (TRAV20, TRAJ37)
CAGCSSNTGNPIF

SEQ ID NO: 258750 - protein, 11 aa, Homo sapiens
  CDR3 for beta chain variable domain of TCR clone 129375 (TRBV12-4, TRBJ2-3)
CASTATDTQYF

SEQ ID NO: 258751 - protein, 13 aa, Homo sapiens
  CDR3 for alpha chain variable domain of TCR clone 129376 (TRAV12-3, TRAJ13)
CAMTSGGYQKVTF

SEQ ID NO: 258752 - protein, 13 aa, Homo sapiens
  CDR3 for beta chain variable domain of TCR clone 129376 (TRBV20-1, TRBJ2-2)
CSALSGGAGEPFF

SEQ ID NO: 258753 - protein, 14 aa, Homo sapiens
  CDR3 for alpha chain variable domain of TCR clone 129377 (TRAV8-4, TRAJ9)
CAVRINTGGFRTIF

SEQ ID NO: 258754 - protein, 15 aa, Homo sapiens
  CDR3 for beta chain variable domain of TCR clone 129377 (TRBV10-2, TRBJ2-6)
CASSEQGTGANVLTF

SEQ ID NO: 258755 - protein, 12 aa, Homo sapiens
  CDR3 for alpha chain variable domain of TCR clone 129378 (TRAV36/DV7, TRAJ30)
CAASNRDDKIIF

SEQ ID NO: 258756 - protein, 14 aa, Homo sapiens
  CDR3 for beta chain variable domain of TCR clone 129378 (TRBV19, TRBJ2-1)
CASPTFVLSGEQFF

SEQ ID NO: 258757 - protein, 15 aa, Homo sapiens
  CDR3 for alpha chain variable domain of TCR clone 129379 (TRAV8-3, TRAJ27)
CAVGPSKTNAGKSTF

SEQ ID NO: 258758 - protein, 17 aa, Homo sapiens
  CDR3 for beta chain variable domain of TCR clone 129379 (TRBV4-1, TRBJ1-4)
CASSQEGPRGVEEKLFF

SEQ ID NO: 258759 - protein, 12 aa, Homo sapiens
  CDR3 for alpha chain variable domain of TCR clone 129380 (TRAV17, TRAJ20)
CATDSNDYKLSF

SEQ ID NO: 258760 - protein, 14 aa, Homo sapiens
  CDR3 for beta chain variable domain of TCR clone 129380 (TRBV19, TRBJ2-1)
CASPTFVLSGEQFF

SEQ ID NO: 258761 - protein, 15 aa, Homo sapiens
  CDR3 for alpha chain variable domain of TCR clone 129381 (TRAV13-1, TRAJ44)
CAARASTGTASKLTF

SEQ ID NO: 258762 - protein, 16 aa, Homo sapiens
  CDR3 for beta chain variable domain of TCR clone 129381 (TRBV19, TRBJ2-3)
CASSPGAASRTDTQCF

SEQ ID NO: 258763 - protein, 14 aa, Homo sapiens
  CDR3 for alpha chain variable domain of TCR clone 129382 (TRAV1-2, TRAJ8)
CAVREDTGFQKLVF

SEQ ID NO: 258764 - protein, 15 aa, Homo sapiens
  CDR3 for beta chain variable domain of TCR clone 129382 (TRBV5-4, TRBJ2-3)
CASSLDQRATDTQYF

SEQ ID NO: 258765 - protein, 12 aa, Homo sapiens
  CDR3 for alpha chain variable domain of TCR clone 129383 (TRAV12-3, TRAJ17)
CAMTLTGNKLTF

SEQ ID NO: 258766 - protein, 13 aa, Homo sapiens
  CDR3 for beta chain variable domain of TCR clone 129383 (TRBV20-1, TRBJ2-5)
CSARGDYQEAQYF

SEQ ID NO: 258767 - protein, 13 aa, Homo sapiens
  CDR3 for alpha chain variable domain of TCR clone 129384 (TRAV12-3, TRAJ33)
CAMSVNSNYQLIW

SEQ ID NO: 258768 - protein, 16 aa, Homo sapiens
  CDR3 for beta chain variable domain of TCR clone 129384 (TRBV9, TRBJ2-1)
CASSAYFLGGPSEQFF

SEQ ID NO: 258769 - protein, 14 aa, Homo sapiens
  CDR3 for alpha chain variable domain of TCR clone 129385 (TRAV12-2, TRAJ44)
CAVNPAGTASKLTF

SEQ ID NO: 258770 - protein, 15 aa, Homo sapiens
  CDR3 for beta chain variable domain of TCR clone 129385 (TRBV7-9, TRBJ1-1)
CASSLLEQGGTEAFF

SEQ ID NO: 258771 - protein, 16 aa, Homo sapiens
  CDR3 for alpha chain variable domain of TCR clone 129386 (TRAV1-2, TRAJ10)
CAVRGVLTGGGNILTF

SEQ ID NO: 258772 - protein, 12 aa, Homo sapiens
  CDR3 for beta chain variable domain of TCR clone 129386 (TRBV7-8, TRBJ2-7)
CASSLGDREQYF

SEQ ID NO: 258773 - protein, 14 aa, Homo sapiens
  CDR3 for alpha chain variable domain of TCR clone 129387 (TRAV13-1, TRAJ44)
CAAKATPTASKLTF

SEQ ID NO: 258774 - protein, 15 aa, Homo sapiens
  CDR3 for beta chain variable domain of TCR clone 129387 (TRBV6-5, TRBJ1-2)
CASSYSQAFNYGYTF

SEQ ID NO: 258775 - protein, 10 aa, Homo sapiens
  CDR3 for alpha chain variable domain of TCR clone 129388 (TRAV1-2, TRAJ20)
CAVADYKLSF

SEQ ID NO: 258776 - protein, 15 aa, Homo sapiens
  CDR3 for beta chain variable domain of TCR clone 129388 (TRBV6-3, TRBJ2-7)
CASSSPGTVFYEQYF

SEQ ID NO: 258777 - protein, 14 aa, Homo sapiens
  CDR3 for alpha chain variable domain of TCR clone 129389 (TRAV12-2, TRAJ13)
CAVKKTGGYQKVTF

SEQ ID NO: 258778 - protein, 12 aa, Homo sapiens
  CDR3 for beta chain variable domain of TCR clone 129389 (TRBV12-5, TRBJ2-5)
CASGQGVETQYF

SEQ ID NO: 258779 - protein, 16 aa, Homo sapiens
  CDR3 for alpha chain variable domain of TCR clone 129390 (TRAV1-2, TRAJ10)
CAVRGVLTGGGSKLTF

SEQ ID NO: 258780 - protein, 14 aa, Homo sapiens
  CDR3 for beta chain variable domain of TCR clone 129390 (TRBV19, TRBJ2-1)
CARGARSFQWEQFF

SEQ ID NO: 258781 - protein, 17 aa, Homo sapiens
  CDR3 for alpha chain variable domain of TCR clone 129391 (TRAV38-2/DV8, TRAJ56)
CAYRSEVGTGANSKRTF

SEQ ID NO: 258782 - protein, 14 aa, Homo sapiens
  CDR3 for beta chain variable domain of TCR clone 129391 (TRBV11-1, TRBJ1-1)
CASSLEHPNTEAFF

SEQ ID NO: 258783 - protein, 16 aa, Homo sapiens
  CDR3 for alpha chain variable domain of TCR clone 129392 (TRAV36/DV7, TRAJ33)
WRPGNKVQDSNYQLIW

SEQ ID NO: 258784 - protein, 15 aa, Homo sapiens
  CDR3 for beta chain variable domain of TCR clone 129392 (TRBV29-1, TRBJ2-1)
CSVGRHALFYNEQFF

SEQ ID NO: 258785 - protein, 17 aa, Homo sapiens
  CDR3 for alpha chain variable domain of TCR clone 129393 (TRAV3, TRAJ6)
CAVRDGPRAGGSYIPTF

SEQ ID NO: 258786 - protein, 13 aa, Homo sapiens
  CDR3 for beta chain variable domain of TCR clone 129393 (TRBV11-2, TRBJ2-7)
CASSGTRPYEQYF

SEQ ID NO: 258787 - protein, 12 aa, Homo sapiens
  CDR3 for alpha chain variable domain of TCR clone 129394 (TRAV36/DV7, TRAJ26)
CAVDNYGQNFFF

SEQ ID NO: 258788 - protein, 16 aa, Homo sapiens
  CDR3 for beta chain variable domain of TCR clone 129394 (TRBV7-3, TRBJ2-2)
CASSLTGTGTTGELFF

SEQ ID NO: 258789 - protein, 18 aa, Homo sapiens
  CDR3 for alpha chain variable domain of TCR clone 129395 (TRAV8-4, TRAJ52)
CAVTRANAGGTSYVKLTF

SEQ ID NO: 258790 - protein, 14 aa, Homo sapiens
  CDR3 for beta chain variable domain of TCR clone 129395 (TRBV19, TRBJ2-7)
CASTVQGRPYEQYF

SEQ ID NO: 258791 - protein, 14 aa, Homo sapiens
  CDR3 for alpha chain variable domain of TCR clone 129396 (TRAV1-2, TRAJ16)
CAVNRFSDGQKLLF

SEQ ID NO: 258792 - protein, 16 aa, Homo sapiens
  CDR3 for beta chain variable domain of TCR clone 129396 (TRBV4-1, TRBJ1-5)
CASSQGGHTTNQPQHF

SEQ ID NO: 258793 - protein, 15 aa, Homo sapiens
  CDR3 for alpha chain variable domain of TCR clone 129397 (TRAV26-1, TRAJ40)
CIDRYATSGTYRYIF

SEQ ID NO: 258794 - protein, 11 aa, Homo sapiens
  CDR3 for beta chain variable domain of TCR clone 129397 (TRBV7-9, TRBJ2-1)
CASSSQNEQFF

SEQ ID NO: 258795 - protein, 13 aa, Homo sapiens
  CDR3 for alpha chain variable domain of TCR clone 129398 (TRAV36/DV7, TRAJ54)
CAVDIQGAQKLVF

SEQ ID NO: 258796 - protein, 14 aa, Homo sapiens
  CDR3 for beta chain variable domain of TCR clone 129398 (TRBV4-1, TRBJ2-2)
CASSQAVNTGELFF

SEQ ID NO: 258797 - protein, 16 aa, Homo sapiens
  CDR3 for alpha chain variable domain of TCR clone 129399 (TRAV3, TRAJ5)
CAVRNLTDTGRRALTF

SEQ ID NO: 258798 - protein, 16 aa, Homo sapiens
  CDR3 for beta chain variable domain of TCR clone 129399 (TRBV4-2, TRBJ2-7)
CASSQEGLANSYEQYF

SEQ ID NO: 258799 - protein, 14 aa, Homo sapiens
  CDR3 for alpha chain variable domain of TCR clone 129400 (TRAV12-2, TRAJ44)
CAVNPAGTASKLTF

SEQ ID NO: 258800 - protein, 13 aa, Homo sapiens
  CDR3 for beta chain variable domain of TCR clone 129400 (TRBV20-1, TRBJ1-6)
CSAPLVVGSPLHF

SEQ ID NO: 258801 - protein, 16 aa, Homo sapiens
  CDR3 for alpha chain variable domain of TCR clone 129401 (TRAV30, TRAJ24)
CGTEIVDADSWGKFQF

SEQ ID NO: 258802 - protein, 15 aa, Homo sapiens
  CDR3 for beta chain variable domain of TCR clone 129401 (TRBV12-4, TRBJ2-2)
CASSPNDSGTRELFF

SEQ ID NO: 258803 - protein, 14 aa, Homo sapiens
  CDR3 for alpha chain variable domain of TCR clone 129402 (TRAV1-2, TRAJ16)
CAVNRFSGGQKLLF

SEQ ID NO: 258804 - protein, 13 aa, Homo sapiens
  CDR3 for beta chain variable domain of TCR clone 129402 (TRBV20-1, TRBJ1-6)
CSAPTGLGSPLHF

SEQ ID NO: 258805 - protein, 11 aa, Homo sapiens
  CDR3 for alpha chain variable domain of TCR clone 129403 (TRAV26-1, TRAJ37)
CLVRVGRKLIF

SEQ ID NO: 258806 - protein, 13 aa, Homo sapiens
  CDR3 for beta chain variable domain of TCR clone 129403 (TRBV14, TRBJ1-2)
CASSEDRRYGYTF

SEQ ID NO: 258807 - protein, 15 aa, Homo sapiens
  CDR3 for alpha chain variable domain of TCR clone 129404 (TRAV1-2, TRAJ28)
CAVRNSGAGSYQLTF

SEQ ID NO: 258808 - protein, 16 aa, Homo sapiens
  CDR3 for beta chain variable domain of TCR clone 129404 (TRBV20-1, TRBJ1-4)
CSAPGQGLLTNEKLFF

SEQ ID NO: 258809 - protein, 15 aa, Homo sapiens
  CDR3 for alpha chain variable domain of TCR clone 129405 (TRAV8-3, TRAJ45)
CASSYSGGGADGLTF

SEQ ID NO: 258810 - protein, 18 aa, Homo sapiens
  CDR3 for beta chain variable domain of TCR clone 129405 (TRBV18, TRBJ1-3)
CASSPRGGAGPSGNTTYF

SEQ ID NO: 258811 - protein, 16 aa, Homo sapiens
  CDR3 for alpha chain variable domain of TCR clone 129406 (TRAV14/DV4, TRAJ53)
CAMREGGGGSNYKLTF

SEQ ID NO: 258812 - protein, 18 aa, Homo sapiens
  CDR3 for beta chain variable domain of TCR clone 129406 (TRBV18, TRBJ1-3)
CASSPRGGAGPSENTIYF

SEQ ID NO: 258813 - protein, 11 aa, Homo sapiens
  CDR3 for alpha chain variable domain of TCR clone 129407 (TRAV12-3, TRAJ43)
CAMSVSNDMRF

SEQ ID NO: 258814 - protein, 13 aa, Homo sapiens
  CDR3 for beta chain variable domain of TCR clone 129407 (TRBV7-8, TRBJ2-7)
CASSLTGGREQYF

SEQ ID NO: 258815 - protein, 14 aa, Homo sapiens
  CDR3 for alpha chain variable domain of TCR clone 129408 (TRAV1-2, TRAJ8)
CAVREDTGFQKLVF

SEQ ID NO: 258816 - protein, 11 aa, Homo sapiens
  CDR3 for beta chain variable domain of TCR clone 129408 (TRBV6-1, TRBJ1-3)
CKGGGGNTIYF

SEQ ID NO: 258817 - protein, 10 aa, Homo sapiens
  CDR3 for alpha chain variable domain of TCR clone 129409 (TRAV23/DV6, TRAJ57)
CAASSTLSQG

SEQ ID NO: 258818 - protein, 15 aa, Homo sapiens
  CDR3 for beta chain variable domain of TCR clone 129409 (TRBV9, TRBJ1-6)
CASSVAGTGDSPLHF

SEQ ID NO: 258819 - protein, 15 aa, Homo sapiens
  CDR3 for alpha chain variable domain of TCR clone 129410 (TRAV35, TRAJ40)
CAGQLGTSGTYKNIF

SEQ ID NO: 258820 - protein, 14 aa, Homo sapiens
  CDR3 for beta chain variable domain of TCR clone 129410 (TRBV7-3, TRBJ2-1)
CASSLAGGTNEQFF

SEQ ID NO: 258821 - protein, 12 aa, Homo sapiens
  CDR3 for alpha chain variable domain of TCR clone 129411 (TRAV8-2, TRAJ30)
CVVSDRDDKIIF

SEQ ID NO: 258822 - protein, 13 aa, Homo sapiens
  CDR3 for beta chain variable domain of TCR clone 129411 (TRBV7-3, TRBJ1-1)
CASSQDWGAEAFF

SEQ ID NO: 258823 - protein, 15 aa, Homo sapiens
  CDR3 for alpha chain variable domain of TCR clone 129412 (TRAV12-2, TRAJ53)
CAVNGGGGSNYKLTF

SEQ ID NO: 258824 - protein, 16 aa, Homo sapiens
  CDR3 for beta chain variable domain of TCR clone 129412 (TRBV20-1, TRBJ1-4)
CSAPGQGLLTNEKLFF

SEQ ID NO: 258825 - protein, 17 aa, Homo sapiens
  CDR3 for alpha chain variable domain of TCR clone 129413 (TRAV3, TRAJ6)
CAVRDGPRAGGSYIPTF

SEQ ID NO: 258826 - protein, 17 aa, Homo sapiens
  CDR3 for beta chain variable domain of TCR clone 129413 (TRBV28, TRBJ2-5)
CDSSTPEGDALQETQYF

SEQ ID NO: 258827 - protein, 15 aa, Homo sapiens
  CDR3 for alpha chain variable domain of TCR clone 129414 (TRAV3, TRAJ5)
CAVRDRKTGRRALTF

SEQ ID NO: 258828 - protein, 15 aa, Homo sapiens
  CDR3 for beta chain variable domain of TCR clone 129414 (TRBV7-8, TRBJ2-1)
CASSLVDSLYNEQFF

SEQ ID NO: 258829 - protein, 16 aa, Homo sapiens
  CDR3 for alpha chain variable domain of TCR clone 129415 (TRAV1-2, TRAJ10)
CAVRGVLPGGGNKLTF

SEQ ID NO: 258830 - protein, 15 aa, Homo sapiens
  CDR3 for beta chain variable domain of TCR clone 129415 (TRBV7-9, TRBJ1-6)
CASSSPGRGNSPLHF

SEQ ID NO: 258831 - protein, 15 aa, Homo sapiens
  CDR3 for alpha chain variable domain of TCR clone 129416 (TRAV3, TRAJ5)
CAVRDLNTGRRALTF

SEQ ID NO: 258832 - protein, 15 aa, Homo sapiens
  CDR3 for beta chain variable domain of TCR clone 129416 (TRBV20-1, TRBJ2-1)
CSARSPGGPGNEQFF

SEQ ID NO: 258833 - protein, 13 aa, Homo sapiens
  CDR3 for alpha chain variable domain of TCR clone 129417 (TRAV3, TRAJ16)
CAVRDRNGQKLLF

SEQ ID NO: 258834 - protein, 15 aa, Homo sapiens
  CDR3 for beta chain variable domain of TCR clone 129417 (TRBV5-1, TRBJ2-1)
CASRPPRAPYNEQFF

SEQ ID NO: 258835 - protein, 13 aa, Homo sapiens
  CDR3 for alpha chain variable domain of TCR clone 129418 (TRAV12-2, TRAJ6)
CAVNVSRKLHTYI

SEQ ID NO: 258836 - protein, 20 aa, Homo sapiens
  CDR3 for beta chain variable domain of TCR clone 129418 (TRBV7-8, TRBJ2-2)
CASSHLFPGPTIHITGELFF

SEQ ID NO: 258837 - protein, 14 aa, Homo sapiens
  CDR3 for alpha chain variable domain of TCR clone 129419 (TRAV16, TRAJ32)
CALKSGGATNKLIF

SEQ ID NO: 258838 - protein, 15 aa, Homo sapiens
  CDR3 for beta chain variable domain of TCR clone 129419 (TRBV15, TRBJ1-6)
CATSGALIHPSTLGT

SEQ ID NO: 258839 - protein, 11 aa, Homo sapiens
  CDR3 for alpha chain variable domain of TCR clone 129420 (TRAV21, TRAJ34)
CALYNTDKLIF

SEQ ID NO: 258840 - protein, 13 aa, Homo sapiens
  CDR3 for beta chain variable domain of TCR clone 129420 (TRBV7-6, TRBJ1-2)
CASSLVADYGYTF

SEQ ID NO: 258841 - protein, 18 aa, Homo sapiens
  CDR3 for alpha chain variable domain of TCR clone 129421 (TRAV26-1, TRAJ22)
CIVRVALISSGSARQLPF

SEQ ID NO: 258842 - protein, 13 aa, Homo sapiens
  CDR3 for beta chain variable domain of TCR clone 129421 (TRBV13, TRBJ2-5)
CASSPEVGETQYF

SEQ ID NO: 258843 - protein, 16 aa, Homo sapiens
  CDR3 for alpha chain variable domain of TCR clone 129422 (TRAV1-2, TRAJ40)
CAVRGSRTSGTSKYIF

SEQ ID NO: 258844 - protein, 14 aa, Homo sapiens
  CDR3 for beta chain variable domain of TCR clone 129422 (TRBV4-1, TRBJ2-3)
CASSQDSGTDTQYF

SEQ ID NO: 258845 - protein, 14 aa, Homo sapiens
  CDR3 for alpha chain variable domain of TCR clone 129423 (TRAV17, TRAJ12)
CATDEKDSSYKLIF

SEQ ID NO: 258846 - protein, 15 aa, Homo sapiens
  CDR3 for beta chain variable domain of TCR clone 129423 (TRBV9, TRBJ1-6)
CASSVAGTGDSPLHF

SEQ ID NO: 258847 - protein, 15 aa, Homo sapiens
  CDR3 for alpha chain variable domain of TCR clone 129424 (TRAV12-3, TRAJ27)
CAMRAYNTNAGKSTF

SEQ ID NO: 258848 - protein, 14 aa, Homo sapiens
  CDR3 for beta chain variable domain of TCR clone 129424 (TRBV4-1, TRBJ2-2)
CASSQAVNTGELFF

SEQ ID NO: 258849 - protein, 16 aa, Homo sapiens
  CDR3 for alpha chain variable domain of TCR clone 129425 (TRAV30, TRAJ24)
CGTEIVDADSWGKFQF

SEQ ID NO: 258850 - protein, 14 aa, Homo sapiens
  CDR3 for beta chain variable domain of TCR clone 129425 (TRBV12-5, TRBJ2-5)
CASGSRTHQGNQYF

SEQ ID NO: 258851 - protein, 10 aa, Homo sapiens
  CDR3 for alpha chain variable domain of TCR clone 129426 (TRAV2, TRAJ34)
CAVVNDKLIF

SEQ ID NO: 258852 - protein, 15 aa, Homo sapiens
  CDR3 for beta chain variable domain of TCR clone 129426 (TRBV3-1, TRBJ2-2)
CASSRDWTRAGELFF

SEQ ID NO: 258853 - protein, 13 aa, Homo sapiens
  CDR3 for alpha chain variable domain of TCR clone 129427 (TRAV3, TRAJ27)
CAVRPLGAGKSTF

SEQ ID NO: 258854 - protein, 13 aa, Homo sapiens
  CDR3 for beta chain variable domain of TCR clone 129427 (TRBV7-9, TRBJ2-3)
CASNPGSTDTRYF

SEQ ID NO: 258855 - protein, 20 aa, Homo sapiens
  CDR3 for alpha chain variable domain of TCR clone 129428 (TRAV30, TRAJ54)
SAAQSRSETQVVQGAQKLVF

SEQ ID NO: 258856 - protein, 11 aa, Homo sapiens
  CDR3 for beta chain variable domain of TCR clone 129428 (TRBV25-1, TRBJ2-4)
CQSRDQNSQYF

SEQ ID NO: 258857 - protein, 12 aa, Homo sapiens
  CDR3 for alpha chain variable domain of TCR clone 129429 (TRAV13-2, TRAJ5)
CAENTGRRALTF

SEQ ID NO: 258858 - protein, 13 aa, Homo sapiens
  CDR3 for beta chain variable domain of TCR clone 129429 (TRBV7-9, TRBJ1-2)
CASSLKQNYGYTF

SEQ ID NO: 258859 - protein, 10 aa, Homo sapiens
  CDR3 for alpha chain variable domain of TCR clone 129430 (TRAV21, TRAJ31)
CAVDNARLMF

SEQ ID NO: 258860 - protein, 13 aa, Homo sapiens
  CDR3 for beta chain variable domain of TCR clone 129430 (TRBV12-4, TRBJ1-2)
CASSLRQGKGYTF

SEQ ID NO: 258861 - protein, 13 aa, Homo sapiens
  CDR3 for alpha chain variable domain of TCR clone 129431 (TRAV21, TRAJ10)
RAVPTGGGNKLTF

SEQ ID NO: 258862 - protein, 22 aa, Homo sapiens
  CDR3 for beta chain variable domain of TCR clone 129431 (TRBV19, TRBJ2-1)
CASSVRDRVTGTSGRIYNEQFF

SEQ ID NO: 258863 - protein, 13 aa, Homo sapiens
  CDR3 for alpha chain variable domain of TCR clone 129432 (TRAV21, TRAJ27)
CAALNPNAGKSTF

SEQ ID NO: 258864 - protein, 14 aa, Homo sapiens
  CDR3 for beta chain variable domain of TCR clone 129432 (TRBV27, TRBJ1-1)
CASSLLSGLSEAFF

SEQ ID NO: 258865 - protein, 15 aa, Homo sapiens
  CDR3 for alpha chain variable domain of TCR clone 129433 (TRAV2, TRAJ24)
CAVVRLRNSWGKLQF

SEQ ID NO: 258866 - protein, 16 aa, Homo sapiens
  CDR3 for beta chain variable domain of TCR clone 129433 (TRBV7-7, TRBJ2-3)
CASSPGTSGSTDTQYF

SEQ ID NO: 258867 - protein, 11 aa, Homo sapiens
  CDR3 for alpha chain variable domain of TCR clone 129434 (TRAV35, TRAJ30)
CAGLRDDKIIF

SEQ ID NO: 258868 - protein, 13 aa, Homo sapiens
  CDR3 for beta chain variable domain of TCR clone 129434 (TRBV12-4, TRBJ1-1)
CASSPGTGFEAFF

SEQ ID NO: 258869 - protein, 13 aa, Homo sapiens
  CDR3 for alpha chain variable domain of TCR clone 129435 (TRAV21, TRAJ27)
CAARPGTAGKSPF

SEQ ID NO: 258870 - protein, 14 aa, Homo sapiens
  CDR3 for beta chain variable domain of TCR clone 129435 (TRBV7-6, TRBJ2-3)
CASSLGTVTDTQYF

SEQ ID NO: 258871 - protein, 13 aa, Homo sapiens
  CDR3 for alpha chain variable domain of TCR clone 129436 (TRAV21, TRAJ27)
CAARPGNAGKSTF

SEQ ID NO: 258872 - protein, 14 aa, Homo sapiens
  CDR3 for beta chain variable domain of TCR clone 129436 (TRBV19, TRBJ2-1)
CASEVTGARNEQFF

SEQ ID NO: 258873 - protein, 14 aa, Homo sapiens
  CDR3 for alpha chain variable domain of TCR clone 129437 (TRAV26-1, TRAJ57)
CIRAGQGGSEKLVI

SEQ ID NO: 258874 - protein, 13 aa, Homo sapiens
  CDR3 for beta chain variable domain of TCR clone 129437 (TRBV19, TRBJ2-7)
CASSLTTSYEQYF

SEQ ID NO: 258875 - protein, 17 aa, Homo sapiens
  CDR3 for alpha chain variable domain of TCR clone 129438 (TRAV3, TRAJ42)
CAVRDRDYGGRQGNLIF

SEQ ID NO: 258876 - protein, 14 aa, Homo sapiens
  CDR3 for beta chain variable domain of TCR clone 129438 (TRBV7-2, TRBJ2-5)
CASSPRGSSETQYF

SEQ ID NO: 258877 - protein, 16 aa, Homo sapiens
  CDR3 for alpha chain variable domain of TCR clone 129439 (TRAV30, TRAJ24)
RGTEIVDADSWGKFQF

SEQ ID NO: 258878 - protein, 16 aa, Homo sapiens
  CDR3 for beta chain variable domain of TCR clone 129439 (TRBV2, TRBJ1-3)
CASSGGAGRSGNTIYF

SEQ ID NO: 258879 - protein, 13 aa, Homo sapiens
  CDR3 for alpha chain variable domain of TCR clone 129440 (TRAV8-6, TRAJ8)
CAVSNTGFQKLVF

SEQ ID NO: 258880 - protein, 14 aa, Homo sapiens
  CDR3 for beta chain variable domain of TCR clone 129440 (TRBV19, TRBJ2-1)
CASPTFVLSGEQFF

SEQ ID NO: 258881 - protein, 12 aa, Homo sapiens
  CDR3 for alpha chain variable domain of TCR clone 129441 (TRAV12-3, TRAJ17)
CAMTLTGNKLTF

SEQ ID NO: 258882 - protein, 17 aa, Homo sapiens
  CDR3 for beta chain variable domain of TCR clone 129441 (TRBV15, TRBJ1-1)
CATSLQGGRNTEASLDK

SEQ ID NO: 258883 - protein, 12 aa, Homo sapiens
  CDR3 for alpha chain variable domain of TCR clone 129442 (TRAV26-1, TRAJ43)
CIVRPRGDEMRF

SEQ ID NO: 258884 - protein, 16 aa, Homo sapiens
  CDR3 for beta chain variable domain of TCR clone 129442 (TRBV3-1, TRBJ2-1)
CASSQGGRRSFDEQFF

SEQ ID NO: 258885 - protein, 22 aa, Homo sapiens
  CDR3 for alpha chain variable domain of TCR clone 129443 (TRAV21, )
CAVRQDAGNNHIKNPDPAVYQL

SEQ ID NO: 258886 - protein, 16 aa, Homo sapiens
  CDR3 for beta chain variable domain of TCR clone 129443 (TRBV4-2, TRBJ1-1)
CASRPLDGGGDTEAFF

SEQ ID NO: 258887 - protein, 16 aa, Homo sapiens
  CDR3 for alpha chain variable domain of TCR clone 129444 (TRAV12-2, TRAJ45)
CAVKRNPGGGADGLTF

SEQ ID NO: 258888 - protein, 12 aa, Homo sapiens
  CDR3 for beta chain variable domain of TCR clone 129444 (TRBV6-1, TRBJ2-5)
CASSEGRETQYL

SEQ ID NO: 258889 - protein, 13 aa, Homo sapiens
  CDR3 for alpha chain variable domain of TCR clone 129445 (TRAV8-3, TRAJ44)
CAVVPGTASKLTF

SEQ ID NO: 258890 - protein, 14 aa, Homo sapiens
  CDR3 for beta chain variable domain of TCR clone 129445 (TRBV11-2, TRBJ2-3)
CASSRLARTDTQYV

SEQ ID NO: 258891 - protein, 15 aa, Homo sapiens
  CDR3 for alpha chain variable domain of TCR clone 129446 (TRAV27, TRAJ38)
CAARRNAGNNRKLIW

SEQ ID NO: 258892 - protein, 17 aa, Homo sapiens
  CDR3 for beta chain variable domain of TCR clone 129446 (TRBV19, TRBJ2-7)
CASSISFYDSYPYEQYF

SEQ ID NO: 258893 - protein, 14 aa, Homo sapiens
  CDR3 for alpha chain variable domain of TCR clone 129447 (TRAV16, TRAJ39)
CALSKNNAGNMLTF

SEQ ID NO: 258894 - protein, 17 aa, Homo sapiens
  CDR3 for beta chain variable domain of TCR clone 129447 (TRBV23-1, TRBJ1-2)
RASSNTGGGLLWLHLRF

SEQ ID NO: 258895 - protein, 11 aa, Homo sapiens
  CDR3 for alpha chain variable domain of TCR clone 129448 (TRAV3, TRAJ21)
CAVGNFNKFYF

SEQ ID NO: 258896 - protein, 18 aa, Homo sapiens
  CDR3 for beta chain variable domain of TCR clone 129448 (TRBV28, TRBJ2-1)
CASSSTSGRANSYNEQFF

SEQ ID NO: 258897 - protein, 14 aa, Homo sapiens
  CDR3 for alpha chain variable domain of TCR clone 129449 (TRAV1-2, TRAJ16)
CAVNRFSDGQKLLF

SEQ ID NO: 258898 - protein, 13 aa, Homo sapiens
  CDR3 for beta chain variable domain of TCR clone 129449 (TRBV7-8, TRBJ2-7)
RRVRLTEMGEQYF

SEQ ID NO: 258899 - protein, 15 aa, Homo sapiens
  CDR3 for alpha chain variable domain of TCR clone 129450 (TRAV25, TRAJ53)
CPTSNSGGSNYKLTF

SEQ ID NO: 258900 - protein, 14 aa, Homo sapiens
  CDR3 for beta chain variable domain of TCR clone 129450 (TRBV11-2, TRBJ2-3)
CARSRLARTDTQYF

SEQ ID NO: 258901 - protein, 14 aa, Homo sapiens
  CDR3 for alpha chain variable domain of TCR clone 129451 (TRAV29/DV5, TRAJ32)
CAAAYGGATNKLIF

SEQ ID NO: 258902 - protein, 16 aa, Homo sapiens
  CDR3 for beta chain variable domain of TCR clone 129451 (TRBV15, TRBJ1-2)
CATSRGPRTGGGGYTF

SEQ ID NO: 258903 - protein, 14 aa, Homo sapiens
  CDR3 for alpha chain variable domain of TCR clone 129452 (TRAV8-4, TRAJ15)
CAVTIREAGTALIF

SEQ ID NO: 258904 - protein, 13 aa, Homo sapiens
  CDR3 for beta chain variable domain of TCR clone 129452 (TRBV19, TRBJ2-7)
CASSPRQSYEQYF

SEQ ID NO: 258905 - protein, 14 aa, Homo sapiens
  CDR3 for alpha chain variable domain of TCR clone 129453 (TRAV1-2, TRAJ16)
CSVNRFSDGQKLLF

SEQ ID NO: 258906 - protein, 12 aa, Homo sapiens
  CDR3 for beta chain variable domain of TCR clone 129453 (TRBV11-2, TRBJ2-2)
CASSLGGGELFF

SEQ ID NO: 258907 - protein, 14 aa, Homo sapiens
  CDR3 for alpha chain variable domain of TCR clone 129454 (TRAV6, TRAJ37)
CALGSQGNTGKLIF

SEQ ID NO: 258908 - protein, 14 aa, Homo sapiens
  CDR3 for beta chain variable domain of TCR clone 129454 (TRBV14, TRBJ2-5)
CASSPQRHYETQYF

SEQ ID NO: 258909 - protein, 15 aa, Homo sapiens
  CDR3 for alpha chain variable domain of TCR clone 129455 (TRAV3, TRAJ5)
CAVRDRKTGRRALTF

SEQ ID NO: 258910 - protein, 20 aa, Homo sapiens
  CDR3 for beta chain variable domain of TCR clone 129455 (TRBV7-8, TRBJ2-2)
CASSHLFPGPTIHITGELFF

SEQ ID NO: 258911 - protein, 12 aa, Homo sapiens
  CDR3 for alpha chain variable domain of TCR clone 129456 (TRAV9-2, TRAJ26)
CALRGYGQTFVF

SEQ ID NO: 258912 - protein, 12 aa, Homo sapiens
  CDR3 for beta chain variable domain of TCR clone 129456 (TRBV29-1, TRBJ2-3)
CSVTGGADTQYF

SEQ ID NO: 258913 - protein, 13 aa, Homo sapiens
  CDR3 for alpha chain variable domain of TCR clone 129457 (TRAV9-2, TRAJ20)
CALSVPNDYKLSF

SEQ ID NO: 258914 - protein, 14 aa, Homo sapiens
  CDR3 for beta chain variable domain of TCR clone 129457 (TRBV20-1, TRBJ1-2)
CSASQVGQGYGYTF

SEQ ID NO: 258915 - protein, 10 aa, Homo sapiens
  CDR3 for alpha chain variable domain of TCR clone 129458 (TRAV12-1, TRAJ43)
CVVHNNDMRL

SEQ ID NO: 258916 - protein, 13 aa, Homo sapiens
  CDR3 for beta chain variable domain of TCR clone 129458 (TRBV12-4, TRBJ1-2)
CASSSGLTVISTF

SEQ ID NO: 258917 - protein, 13 aa, Homo sapiens
  CDR3 for alpha chain variable domain of TCR clone 129459 (TRAV17, TRAJ7)
CATDNYGNNKLAF

SEQ ID NO: 258918 - protein, 16 aa, Homo sapiens
  CDR3 for beta chain variable domain of TCR clone 129459 (TRBV4-1, TRBJ2-5)
CASSQAIAASSATQYF

SEQ ID NO: 258919 - protein, 13 aa, Homo sapiens
  CDR3 for alpha chain variable domain of TCR clone 129460 (TRAV8-3, TRAJ44)
CAVVPGTASKLTF

SEQ ID NO: 258920 - protein, 14 aa, Homo sapiens
  CDR3 for beta chain variable domain of TCR clone 129460 (TRBV11-2, TRBJ2-3)
CASSRLARTDTQYL

SEQ ID NO: 258921 - protein, 12 aa, Homo sapiens
  CDR3 for alpha chain variable domain of TCR clone 129461 (TRAV1-1, TRAJ9)
CAVDTGGFKTIF

SEQ ID NO: 258922 - protein, 14 aa, Homo sapiens
  CDR3 for beta chain variable domain of TCR clone 129461 (TRBV7-8, TRBJ2-5)
CASSATGGQETKYF

SEQ ID NO: 258923 - protein, 13 aa, Homo sapiens
  CDR3 for alpha chain variable domain of TCR clone 129462 (TRAV1-1, TRAJ33)
CAVRRDSNYQLIW

SEQ ID NO: 258924 - protein, 16 aa, Homo sapiens
  CDR3 for beta chain variable domain of TCR clone 129462 (TRBV6-1, TRBJ2-2)
CASSAFRGGDTGEMFF

SEQ ID NO: 258925 - protein, 10 aa, Homo sapiens
  CDR3 for alpha chain variable domain of TCR clone 129463 (TRAV16, TRAJ22)
SAMYLRQLTF

SEQ ID NO: 258926 - protein, 15 aa, Homo sapiens
  CDR3 for beta chain variable domain of TCR clone 129463 (TRBV7-9, TRBJ1-6)
RASSSPGRGNSPLHF

SEQ ID NO: 258927 - protein, 16 aa, Homo sapiens
  CDR3 for alpha chain variable domain of TCR clone 129464 (TRAV16, TRAJ4)
CITVLPFSGGYNKLIF

SEQ ID NO: 258928 - protein, 14 aa, Homo sapiens
  CDR3 for beta chain variable domain of TCR clone 129464 (TRBV7-3, TRBJ2-7)
CASSLKADSYEQYF

SEQ ID NO: 258929 - protein, 13 aa, Homo sapiens
  CDR3 for alpha chain variable domain of TCR clone 129465 (TRAV21, TRAJ20)
CAVGLRVDDKLSF

SEQ ID NO: 258930 - protein, 13 aa, Homo sapiens
  CDR3 for beta chain variable domain of TCR clone 129465 (TRBV6-1, TRBJ1-1)
CASSRQGNTEAFF

SEQ ID NO: 258931 - protein, 13 aa, Homo sapiens
  CDR3 for alpha chain variable domain of TCR clone 129466 (TRAV25, TRAJ30)
CAGRVDRDYKIIF

SEQ ID NO: 258932 - protein, 17 aa, Homo sapiens
  CDR3 for beta chain variable domain of TCR clone 129466 (TRBV7-9, TRBJ2-6)
CASSFGAGYSGANVLTF

SEQ ID NO: 258933 - protein, 15 aa, Homo sapiens
  CDR3 for alpha chain variable domain of TCR clone 129467 (TRAV21, TRAJ38)
CAVRQDAGNNRKLIW

SEQ ID NO: 258934 - protein, 14 aa, Homo sapiens
  CDR3 for beta chain variable domain of TCR clone 129467 (TRBV11-2, TRBJ2-1)
CASTTGQGNNEQFF

SEQ ID NO: 258935 - protein, 15 aa, Homo sapiens
  CDR3 for alpha chain variable domain of TCR clone 129468 (TRAV35, TRAJ52)
CAGPRGGTSYGKLTS

SEQ ID NO: 258936 - protein, 14 aa, Homo sapiens
  CDR3 for beta chain variable domain of TCR clone 129468 (TRBV20-1, TRBJ2-7)
CSAWTALSSYEQYF

SEQ ID NO: 258937 - protein, 13 aa, Homo sapiens
  CDR3 for alpha chain variable domain of TCR clone 129469 (TRAV3, TRAJ36)
CAVRDNGANNLFF

SEQ ID NO: 258938 - protein, 15 aa, Homo sapiens
  CDR3 for beta chain variable domain of TCR clone 129469 (TRBV24-1, TRBJ2-1)
CATSGSGGFYNEQFF

SEQ ID NO: 258939 - protein, 15 aa, Homo sapiens
  CDR3 for alpha chain variable domain of TCR clone 129470 (TRAV21, TRAJ13)
CAVRPTSGGYQKVTF

SEQ ID NO: 258940 - protein, 18 aa, Homo sapiens
  CDR3 for beta chain variable domain of TCR clone 129470 (TRBV11-3, TRBJ2-1)
CASSSYSGGRDSYNEQFF

SEQ ID NO: 258941 - protein, 14 aa, Homo sapiens
  CDR3 for alpha chain variable domain of TCR clone 129471 (TRAV12-2, TRAJ17)
CAVLFKAAGNKLTF

SEQ ID NO: 258942 - protein, 16 aa, Homo sapiens
  CDR3 for beta chain variable domain of TCR clone 129471 (TRBV4-1, TRBJ1-4)
CASSQDLRRGGEKLFF

SEQ ID NO: 258943 - protein, 17 aa, Homo sapiens
  CDR3 for alpha chain variable domain of TCR clone 129472 (TRAV3, TRAJ42)
CAVSDRDYGGSQGNLIF

SEQ ID NO: 258944 - protein, 12 aa, Homo sapiens
  CDR3 for beta chain variable domain of TCR clone 129472 (TRBV11-2, TRBJ2-1)
CASSPGNNEQFF

SEQ ID NO: 258945 - protein, 12 aa, Homo sapiens
  CDR3 for alpha chain variable domain of TCR clone 129473 (TRAV12-2, TRAJ20)
CAVRPSDYKLSF

SEQ ID NO: 258946 - protein, 15 aa, Homo sapiens
  CDR3 for beta chain variable domain of TCR clone 129473 (TRBV6-1, TRBJ2-3)
CASSERGGITDTQYF

SEQ ID NO: 258947 - protein, 15 aa, Homo sapiens
  CDR3 for alpha chain variable domain of TCR clone 129474 (TRAV3, TRAJ3)
CAVRDGHSSASKIIF

SEQ ID NO: 258948 - protein, 14 aa, Homo sapiens
  CDR3 for beta chain variable domain of TCR clone 129474 (TRBV28, TRBJ1-4)
CASSFGTFDEKLFS

SEQ ID NO: 258949 - protein, 13 aa, Homo sapiens
  CDR3 for alpha chain variable domain of TCR clone 129475 (TRAV8-6, TRAJ49)
CAVITNTGNQFYF

SEQ ID NO: 258950 - protein, 15 aa, Homo sapiens
  CDR3 for beta chain variable domain of TCR clone 129475 (TRBV11-2, TRBJ1-2)
CASSLEGVQRNGYTF

SEQ ID NO: 258951 - protein, 10 aa, Homo sapiens
  CDR3 for alpha chain variable domain of TCR clone 129476 (TRAV21, TRAJ48)
CCGRNEKLTF

SEQ ID NO: 258952 - protein, 16 aa, Homo sapiens
  CDR3 for beta chain variable domain of TCR clone 129476 (TRBV12-4, TRBJ1-5)
CASSSGPRGSNQPQHF

SEQ ID NO: 258953 - protein, 15 aa, Homo sapiens
  CDR3 for alpha chain variable domain of TCR clone 129477 (TRAV2, TRAJ9)
CAVAALYTGGFKTIF

SEQ ID NO: 258954 - protein, 14 aa, Homo sapiens
  CDR3 for beta chain variable domain of TCR clone 129477 (TRBV7-8, TRBJ2-5)
CASSATGGQETQYF

SEQ ID NO: 258955 - protein, 13 aa, Homo sapiens
  CDR3 for alpha chain variable domain of TCR clone 129478 (TRAV2, TRAJ40)
CAVVTSGTYKYIF

SEQ ID NO: 258956 - protein, 15 aa, Homo sapiens
  CDR3 for beta chain variable domain of TCR clone 129478 (TRBV28, TRBJ2-3)
CASSPDRQGANTQYF

SEQ ID NO: 258957 - protein, 12 aa, Homo sapiens
  CDR3 for alpha chain variable domain of TCR clone 129479 (TRAV3, TRAJ43)
CAVRDPNNDMRF

SEQ ID NO: 258958 - protein, 13 aa, Homo sapiens
  CDR3 for beta chain variable domain of TCR clone 129479 (TRBV10-3, TRBJ1-2)
CAISERDSYGYTF

SEQ ID NO: 258959 - protein, 12 aa, Homo sapiens
  CDR3 for alpha chain variable domain of TCR clone 129480 (TRAV17, TRAJ12)
CATLRSSYKLIF

SEQ ID NO: 258960 - protein, 16 aa, Homo sapiens
  CDR3 for beta chain variable domain of TCR clone 129480 (TRBV28, TRBJ2-7)
YASSLFFETGGPEQYF

SEQ ID NO: 258961 - protein, 15 aa, Homo sapiens
  CDR3 for alpha chain variable domain of TCR clone 129481 (TRAV26-1, TRAJ15)
CIVRSANQAGTALIF

SEQ ID NO: 258962 - protein, 15 aa, Homo sapiens
  CDR3 for beta chain variable domain of TCR clone 129481 (TRBV20-1, TRBJ1-1)
CSARSAATSNTEAFF

SEQ ID NO: 258963 - protein, 15 aa, Homo sapiens
  CDR3 for alpha chain variable domain of TCR clone 129482 (TRAV34, TRAJ38)
CGADFTPGNNRKLIW

SEQ ID NO: 258964 - protein, 19 aa, Homo sapiens
  CDR3 for beta chain variable domain of TCR clone 129482 (TRBV4-2, TRBJ2-6)
CASSQIRDRYISGANVLTF

SEQ ID NO: 258965 - protein, 16 aa, Homo sapiens
  CDR3 for alpha chain variable domain of TCR clone 129483 (TRAV30, TRAJ24)
CGTEIVDADSWGKFKF

SEQ ID NO: 258966 - protein, 16 aa, Homo sapiens
  CDR3 for beta chain variable domain of TCR clone 129483 (TRBV2, TRBJ1-3)
CASSGGAGRSGNTIYF

SEQ ID NO: 258967 - protein, 14 aa, Homo sapiens
  CDR3 for alpha chain variable domain of TCR clone 129484 (TRAV4, TRAJ6)
CLVGEAGGSYIPTF

SEQ ID NO: 258968 - protein, 16 aa, Homo sapiens
  CDR3 for beta chain variable domain of TCR clone 129484 (TRBV7-6, TRBJ2-1)
CASSLNEGPSYNEQFF

SEQ ID NO: 258969 - protein, 14 aa, Homo sapiens
  CDR3 for alpha chain variable domain of TCR clone 129485 (TRAV12-2, TRAJ13)
CAVNKTGGYQKVTF

SEQ ID NO: 258970 - protein, 15 aa, Homo sapiens
  CDR3 for beta chain variable domain of TCR clone 129485 (TRBV6-3, TRBJ2-7)
CASSSPGTVFYEQYF

SEQ ID NO: 258971 - protein, 12 aa, Homo sapiens
  CDR3 for alpha chain variable domain of TCR clone 129486 (TRAV12-3, TRAJ17)
CAMTLTGNKLTF

SEQ ID NO: 258972 - protein, 16 aa, Homo sapiens
  CDR3 for beta chain variable domain of TCR clone 129486 (TRBV5-1, TRBJ2-2)
CASSSRTGGRTGELFF

SEQ ID NO: 258973 - protein, 12 aa, Homo sapiens
  CDR3 for alpha chain variable domain of TCR clone 129487 (TRAV27, TRAJ35)
CAGADFGNVLHC

SEQ ID NO: 258974 - protein, 15 aa, Homo sapiens
  CDR3 for beta chain variable domain of TCR clone 129487 (TRBV20-1, TRBJ2-7)
CSARDRVYGMDEQYF

SEQ ID NO: 258975 - protein, 13 aa, Homo sapiens
  CDR3 for alpha chain variable domain of TCR clone 129488 (TRAV2, TRAJ20)
CAVEDPSEYKLSF

SEQ ID NO: 258976 - protein, 16 aa, Homo sapiens
  CDR3 for beta chain variable domain of TCR clone 129488 (TRBV25-1, TRBJ2-7)
CASSELNGGGIYEQYF

SEQ ID NO: 258977 - protein, 13 aa, Homo sapiens
  CDR3 for alpha chain variable domain of TCR clone 129489 (TRAV2, TRAJ15)
CAVASQAGTALIF

SEQ ID NO: 258978 - protein, 16 aa, Homo sapiens
  CDR3 for beta chain variable domain of TCR clone 129489 (TRBV5-1, TRBJ1-1)
CASSSGGNSLHTEAFF

SEQ ID NO: 258979 - protein, 14 aa, Homo sapiens
  CDR3 for alpha chain variable domain of TCR clone 129490 (TRAV20, TRAJ29)
CAVQAWVGNTPLVF

SEQ ID NO: 258980 - protein, 12 aa, Homo sapiens
  CDR3 for beta chain variable domain of TCR clone 129490 (TRBV20-1, TRBJ2-7)
CSAGRRQSEQYF

SEQ ID NO: 258981 - protein, 13 aa, Homo sapiens
  CDR3 for alpha chain variable domain of TCR clone 129491 (TRAV12-1, TRAJ40)
CVVPTSGTYKYIF

SEQ ID NO: 258982 - protein, 18 aa, Homo sapiens
  CDR3 for beta chain variable domain of TCR clone 129491 (TRBV7-6, TRBJ2-1)
CASGPRTSGMSSYNEQFF

SEQ ID NO: 258983 - protein, 13 aa, Homo sapiens
  CDR3 for alpha chain variable domain of TCR clone 129492 (TRAV13-1, TRAJ49)
CAASIGTGNQFYF

SEQ ID NO: 258984 - protein, 12 aa, Homo sapiens
  CDR3 for beta chain variable domain of TCR clone 129492 (TRBV11-2, TRBJ2-2)
CASSLGGGELFF

SEQ ID NO: 258985 - protein, 11 aa, Homo sapiens
  CDR3 for alpha chain variable domain of TCR clone 129493 (TRAV12-3, TRAJ43)
CAMSVSNDMRF

SEQ ID NO: 258986 - protein, 16 aa, Homo sapiens
  CDR3 for beta chain variable domain of TCR clone 129493 (TRBV19, TRBJ1-1)
CASSPTRFWPGTEAFF

SEQ ID NO: 258987 - protein, 14 aa, Homo sapiens
  CDR3 for alpha chain variable domain of TCR clone 129494 (TRAV13-2, TRAJ43)
CAEIPTDNNNDMRF

SEQ ID NO: 258988 - protein, 15 aa, Homo sapiens
  CDR3 for beta chain variable domain of TCR clone 129494 (TRBV7-9, TRBJ2-2)
CASGPLDTFPGELFF

SEQ ID NO: 258989 - protein, 14 aa, Homo sapiens
  CDR3 for alpha chain variable domain of TCR clone 129495 (TRAV8-2, TRAJ45)
CVVRAGGGADGLTF

SEQ ID NO: 258990 - protein, 12 aa, Homo sapiens
  CDR3 for beta chain variable domain of TCR clone 129495 (TRBV12-4, TRBJ2-1)
CASSLVRVEQFF

SEQ ID NO: 258991 - protein, 11 aa, Homo sapiens
  CDR3 for alpha chain variable domain of TCR clone 129496 (TRAV35, TRAJ30)
CAPGGDDKIIF

SEQ ID NO: 258992 - protein, 14 aa, Homo sapiens
  CDR3 for beta chain variable domain of TCR clone 129496 (TRBV7-6, TRBJ2-1)
CASSLGGGADERFF

SEQ ID NO: 258993 - protein, 16 aa, Homo sapiens
  CDR3 for alpha chain variable domain of TCR clone 129497 (TRAV30, TRAJ24)
CGTEIVDADSWGKFQF

SEQ ID NO: 258994 - protein, 13 aa, Homo sapiens
  CDR3 for beta chain variable domain of TCR clone 129497 (TRBV18, TRBJ1-1)
CASSGGRKTEAFF

SEQ ID NO: 258995 - protein, 14 aa, Homo sapiens
  CDR3 for alpha chain variable domain of TCR clone 129498 (TRAV1-1, TRAJ27)
CAVIYNTNTGKSTF

SEQ ID NO: 258996 - protein, 13 aa, Homo sapiens
  CDR3 for beta chain variable domain of TCR clone 129498 (TRBV12-5, TRBJ1-2)
CASGVRTGNGYTF

SEQ ID NO: 258997 - protein, 12 aa, Homo sapiens
  CDR3 for alpha chain variable domain of TCR clone 129499 (TRAV12-1, TRAJ40)
CVVYSGTYKYIF

SEQ ID NO: 258998 - protein, 12 aa, Homo sapiens
  CDR3 for beta chain variable domain of TCR clone 129499 (TRBV7-9, TRBJ2-7)
CASSLEGYEQYF

SEQ ID NO: 258999 - protein, 15 aa, Homo sapiens
  CDR3 for alpha chain variable domain of TCR clone 129500 (TRAV27, TRAJ38)
CAGRFNAGNNRKLIW

SEQ ID NO: 259000 - protein, 14 aa, Homo sapiens
  CDR3 for beta chain variable domain of TCR clone 129500 (TRBV7-2, TRBJ1-5)
CASSTQGAGQPQHF

SEQ ID NO: 259001 - protein, 13 aa, Homo sapiens
  CDR3 for alpha chain variable domain of TCR clone 129501 (TRAV12-1, TRAJ16)
CVVNGPDGQKLLF

SEQ ID NO: 259002 - protein, 13 aa, Homo sapiens
  CDR3 for beta chain variable domain of TCR clone 129501 (TRBV2, TRBJ1-1)
CARNPTGGFLAFF

SEQ ID NO: 259003 - protein, 21 aa, Homo sapiens
  CDR3 for alpha chain variable domain of TCR clone 129502 (TRAV1-1, TRAJ30)
CLLLLRCEREGGENRDDKIIF

SEQ ID NO: 259004 - protein, 13 aa, Homo sapiens
  CDR3 for beta chain variable domain of TCR clone 129502 (TRBV2, TRBJ1-6)
CADSGSYNSPLHF

SEQ ID NO: 259005 - protein, 13 aa, Homo sapiens
  CDR3 for alpha chain variable domain of TCR clone 129503 (TRAV26-1, TRAJ40)
CIVRVEGTYKYIF

SEQ ID NO: 259006 - protein, 13 aa, Homo sapiens
  CDR3 for beta chain variable domain of TCR clone 129503 (TRBV7-3, TRBJ1-1)
CASSQDWGAEAFF

SEQ ID NO: 259007 - protein, 17 aa, Homo sapiens
  CDR3 for alpha chain variable domain of TCR clone 129504 (TRAV8-1, TRAJ42)
CAVKWGNYGGSKGNLIF

SEQ ID NO: 259008 - protein, 15 aa, Homo sapiens
  CDR3 for beta chain variable domain of TCR clone 129504 (TRBV9, TRBJ1-6)
CASSVAGTGDSPLHF

SEQ ID NO: 259009 - protein, 17 aa, Homo sapiens
  CDR3 for alpha chain variable domain of TCR clone 129505 (TRAV26-1, TRAJ28)
FIVRVPDSGAGSYQLTF

SEQ ID NO: 259010 - protein, 17 aa, Homo sapiens
  CDR3 for beta chain variable domain of TCR clone 129505 (TRBV28, TRBJ2-7)
CASSPLPAGGKSYEQYF

SEQ ID NO: 259011 - protein, 14 aa, Homo sapiens
  CDR3 for alpha chain variable domain of TCR clone 129506 (TRAV14/DV4, TRAJ54)
CAMREAPGAQKLVF

SEQ ID NO: 259012 - protein, 15 aa, Homo sapiens
  CDR3 for beta chain variable domain of TCR clone 129506 (TRBV5-1, TRBJ2-7)
CARSLNGGPAREQYF

SEQ ID NO: 259013 - protein, 11 aa, Homo sapiens
  CDR3 for alpha chain variable domain of TCR clone 129507 (TRAV17, TRAJ9)
CATTGGFKTIF

SEQ ID NO: 259014 - protein, 12 aa, Homo sapiens
  CDR3 for beta chain variable domain of TCR clone 129507 (TRBV12-4, TRBJ2-7)
CASSLGGYEQYF

SEQ ID NO: 259015 - protein, 15 aa, Homo sapiens
  CDR3 for alpha chain variable domain of TCR clone 129508 (TRAV29/DV5, TRAJ29)
CAASERSSGKTPLVF

SEQ ID NO: 259016 - protein, 17 aa, Homo sapiens
  CDR3 for beta chain variable domain of TCR clone 129508 (TRBV4-1, TRBJ1-4)
CASSQEGPRGVEEKLFF

SEQ ID NO: 259017 - protein, 15 aa, Homo sapiens
  CDR3 for alpha chain variable domain of TCR clone 129509 (TRAV8-3, TRAJ45)
CASSYSGGGADGLTF

SEQ ID NO: 259018 - protein, 13 aa, Homo sapiens
  CDR3 for beta chain variable domain of TCR clone 129509 (TRBV10-3, TRBJ2-7)
CASKLTANYEQYF

SEQ ID NO: 259019 - protein, 14 aa, Homo sapiens
  CDR3 for alpha chain variable domain of TCR clone 129510 (TRAV13-1, TRAJ35)
CAASKGGFGNVLHC

SEQ ID NO: 259020 - protein, 13 aa, Homo sapiens
  CDR3 for beta chain variable domain of TCR clone 129510 (TRBV18, TRBJ1-1)
CASSPETKPEAFF

SEQ ID NO: 259021 - protein, 16 aa, Homo sapiens
  CDR3 for alpha chain variable domain of TCR clone 129511 (TRAV8-6, TRAJ22)
CAVSPISSDSARQLTF

SEQ ID NO: 259022 - protein, 14 aa, Homo sapiens
  CDR3 for beta chain variable domain of TCR clone 129511 (TRBV2, TRBJ2-1)
CASSARAAYNEQFF

SEQ ID NO: 259023 - protein, 15 aa, Homo sapiens
  CDR3 for alpha chain variable domain of TCR clone 129512 (TRAV14/DV4, TRAJ10)
CAMRELTGGGNKLTF

SEQ ID NO: 259024 - protein, 14 aa, Homo sapiens
  CDR3 for beta chain variable domain of TCR clone 129512 (TRBV11-2, TRBJ2-5)
CASSRTGGIETQYF

SEQ ID NO: 259025 - protein, 14 aa, Homo sapiens
  CDR3 for alpha chain variable domain of TCR clone 129513 (TRAV13-1, TRAJ35)
CAASKGGFGNVLHC

SEQ ID NO: 259026 - protein, 15 aa, Homo sapiens
  CDR3 for beta chain variable domain of TCR clone 129513 (TRBV6-5, TRBJ2-1)
CASSYDAGAGNEQFF

SEQ ID NO: 259027 - protein, 16 aa, Homo sapiens
  CDR3 for alpha chain variable domain of TCR clone 129514 (TRAV16, TRAJ52)
CALSAAGGTSYGKLTF

SEQ ID NO: 259028 - protein, 16 aa, Homo sapiens
  CDR3 for beta chain variable domain of TCR clone 129514 (TRBV12-4, TRBJ2-7)
CASGLIGGTGTYEQYF

SEQ ID NO: 259029 - protein, 14 aa, Homo sapiens
  CDR3 for alpha chain variable domain of TCR clone 129515 (TRAV38-1, TRAJ29)
CAFITPSGNTPLVF

SEQ ID NO: 259030 - protein, 14 aa, Homo sapiens
  CDR3 for beta chain variable domain of TCR clone 129515 (TRBV5-7, TRBJ1-1)
CASSLAGDWTEAFF

SEQ ID NO: 259031 - protein, 14 aa, Homo sapiens
  CDR3 for alpha chain variable domain of TCR clone 129516 (TRAV12-2, TRAJ13)
CAVKKTGGYQTVTF

SEQ ID NO: 259032 - protein, 14 aa, Homo sapiens
  CDR3 for beta chain variable domain of TCR clone 129516 (TRBV19, TRBJ2-1)
CASPTFVLSGEQFF

SEQ ID NO: 259033 - protein, 14 aa, Homo sapiens
  CDR3 for alpha chain variable domain of TCR clone 129517 (TRAV12-1, TRAJ17)
CVVNYKAAGNKLTF

SEQ ID NO: 259034 - protein, 15 aa, Homo sapiens
  CDR3 for beta chain variable domain of TCR clone 129517 (TRBV28, TRBJ2-5)
CASSPPWSYQETQYF

SEQ ID NO: 259035 - protein, 15 aa, Homo sapiens
  CDR3 for alpha chain variable domain of TCR clone 129518 (TRAV13-1, TRAJ17)
CAASIERAAGNKLTF

SEQ ID NO: 259036 - protein, 14 aa, Homo sapiens
  CDR3 for beta chain variable domain of TCR clone 129518 (TRBV5-6, TRBJ1-1)
CASSLGRGKLSLDK

SEQ ID NO: 259037 - protein, 12 aa, Homo sapiens
  CDR3 for alpha chain variable domain of TCR clone 129519 (TRAV16, TRAJ22)
CALEVSASQLTF

SEQ ID NO: 259038 - protein, 14 aa, Homo sapiens
  CDR3 for beta chain variable domain of TCR clone 129519 (TRBV11-2, TRBJ2-3)
CASSSIASTDTQYF

SEQ ID NO: 259039 - protein, 15 aa, Homo sapiens
  CDR3 for alpha chain variable domain of TCR clone 129520 (TRAV12-3, TRAJ6)
CAMSATTGGSYIPTF

SEQ ID NO: 259040 - protein, 13 aa, Homo sapiens
  CDR3 for beta chain variable domain of TCR clone 129520 (TRBV2, TRBJ1-6)
CADSGSYNSPLHF

SEQ ID NO: 259041 - protein, 17 aa, Homo sapiens
  CDR3 for alpha chain variable domain of TCR clone 129521 (TRAV26-1, TRAJ53)
CIVRVDDSGGSNYKLTF

SEQ ID NO: 259042 - protein, 14 aa, Homo sapiens
  CDR3 for beta chain variable domain of TCR clone 129521 (TRBV25-1, TRBJ1-1)
CASTHLGGNTEAFF

SEQ ID NO: 259043 - protein, 10 aa, Homo sapiens
  CDR3 for alpha chain variable domain of TCR clone 129522 (TRAV12-3, TRAJ49)
CAMNDDQFYF

SEQ ID NO: 259044 - protein, 13 aa, Homo sapiens
  CDR3 for beta chain variable domain of TCR clone 129522 (TRBV12-4, TRBJ1-1)
CASRPGTGFEAFF

SEQ ID NO: 259045 - protein, 14 aa, Homo sapiens
  CDR3 for alpha chain variable domain of TCR clone 129523 (TRAV1-2, TRAJ16)
CAVNRFSDGQKLLF

SEQ ID NO: 259046 - protein, 16 aa, Homo sapiens
  CDR3 for beta chain variable domain of TCR clone 129523 (TRBV6-1, TRBJ2-1)
CASSARLAGSYNEQFF

SEQ ID NO: 259047 - protein, 13 aa, Homo sapiens
  CDR3 for alpha chain variable domain of TCR clone 129524 (TRAV21, TRAJ20)
CAVGLRVDYKLSF

SEQ ID NO: 259048 - protein, 13 aa, Homo sapiens
  CDR3 for beta chain variable domain of TCR clone 129524 (TRBV6-1, TRBJ1-1)
RASSRQGNTGAFF

SEQ ID NO: 259049 - protein, 13 aa, Homo sapiens
  CDR3 for alpha chain variable domain of TCR clone 129525 (TRAV9-2, TRAJ49)
CALTSNTGNQFYF

SEQ ID NO: 259050 - protein, 15 aa, Homo sapiens
  CDR3 for beta chain variable domain of TCR clone 129525 (TRBV5-7, TRBJ2-7)
CASSLGPGRGHEQYF

SEQ ID NO: 259051 - protein, 15 aa, Homo sapiens
  CDR3 for alpha chain variable domain of TCR clone 129526 (TRAV3, TRAJ9)
CAVRARNTGGFKTIF

SEQ ID NO: 259052 - protein, 12 aa, Homo sapiens
  CDR3 for beta chain variable domain of TCR clone 129526 (TRBV11-2, TRBJ2-7)
CASSLSTYEQYF

SEQ ID NO: 259053 - protein, 13 aa, Homo sapiens
  CDR3 for alpha chain variable domain of TCR clone 129527 (TRAV30, TRAJ24)
CGTVTDSWGKLQS

SEQ ID NO: 259054 - protein, 16 aa, Homo sapiens
  CDR3 for beta chain variable domain of TCR clone 129527 (TRBV7-3, TRBJ2-2)
CASSLKRGTLSGELFF

SEQ ID NO: 259055 - protein, 14 aa, Homo sapiens
  CDR3 for alpha chain variable domain of TCR clone 129528 (TRAV12-2, TRAJ40)
CAVKIPSVTYKYIF

SEQ ID NO: 259056 - protein, 17 aa, Homo sapiens
  CDR3 for beta chain variable domain of TCR clone 129528 (TRBV13, TRBJ2-3)
CASSLSRVAGGRNTQYF

SEQ ID NO: 259057 - protein, 10 aa, Homo sapiens
  CDR3 for alpha chain variable domain of TCR clone 129529 (TRAV30, TRAJ24)
CAQRLWMLTA

SEQ ID NO: 259058 - protein, 14 aa, Homo sapiens
  CDR3 for beta chain variable domain of TCR clone 129529 (TRBV7-9, TRBJ2-4)
CASSLAMGGNIQYF

SEQ ID NO: 259059 - protein, 12 aa, Homo sapiens
  CDR3 for alpha chain variable domain of TCR clone 129530 (TRAV35, TRAJ30)
CAGLNRDDKIIF

SEQ ID NO: 259060 - protein, 13 aa, Homo sapiens
  CDR3 for beta chain variable domain of TCR clone 129530 (TRBV7-2, TRBJ2-1)
CAGSSQTSGEQFF

SEQ ID NO: 259061 - protein, 10 aa, Homo sapiens
  CDR3 for alpha chain variable domain of TCR clone 129531 (TRAV26-1, TRAJ22)
RSGSARQLTF

SEQ ID NO: 259062 - protein, 13 aa, Homo sapiens
  CDR3 for beta chain variable domain of TCR clone 129531 (TRBV7-9, TRBJ1-2)
CASSLKQNYGDTF

SEQ ID NO: 259063 - protein, 13 aa, Homo sapiens
  CDR3 for alpha chain variable domain of TCR clone 129532 (TRAV1-1, TRAJ9)
CAAKNTGGFKTIF

SEQ ID NO: 259064 - protein, 14 aa, Homo sapiens
  CDR3 for beta chain variable domain of TCR clone 129532 (TRBV25-1, TRBJ1-1)
CASTHLGGNTEAFF

SEQ ID NO: 259065 - protein, 13 aa, Homo sapiens
  CDR3 for alpha chain variable domain of TCR clone 129533 (TRAV23/DV6, TRAJ27)
CVASKPMQANQPL

SEQ ID NO: 259066 - protein, 14 aa, Homo sapiens
  CDR3 for beta chain variable domain of TCR clone 129533 (TRBV5-4, TRBJ1-1)
CASSLDSRRDEAFF

SEQ ID NO: 259067 - protein, 13 aa, Homo sapiens
  CDR3 for alpha chain variable domain of TCR clone 129534 (TRAV3, TRAJ21)
CAVREPDFNKFYF

SEQ ID NO: 259068 - protein, 13 aa, Homo sapiens
  CDR3 for beta chain variable domain of TCR clone 129534 (TRBV9, TRBJ2-1)
CASTPSGGNEQFF

SEQ ID NO: 259069 - protein, 14 aa, Homo sapiens
  CDR3 for alpha chain variable domain of TCR clone 129535 (TRAV8-4, TRAJ9)
CAVRINTGGFKTIF

SEQ ID NO: 259070 - protein, 15 aa, Homo sapiens
  CDR3 for beta chain variable domain of TCR clone 129535 (TRBV10-2, TRBJ2-6)
CASSEQGTEANVLTF

SEQ ID NO: 259071 - protein, 13 aa, Homo sapiens
  CDR3 for alpha chain variable domain of TCR clone 129536 (TRAV35, TRAJ36)
CAGPRIGANNLFF

SEQ ID NO: 259072 - protein, 15 aa, Homo sapiens
  CDR3 for beta chain variable domain of TCR clone 129536 (TRBV28, TRBJ2-5)
CASSPPWSYQEAQYF

SEQ ID NO: 259073 - protein, 14 aa, Homo sapiens
  CDR3 for alpha chain variable domain of TCR clone 129537 (TRAV4, TRAJ9)
CLVGSGTGGFKTIF

SEQ ID NO: 259074 - protein, 17 aa, Homo sapiens
  CDR3 for beta chain variable domain of TCR clone 129537 (TRBV7-8, TRBJ2-6)
CASSAGTGGAGANVLTF

SEQ ID NO: 259075 - protein, 14 aa, Homo sapiens
  CDR3 for alpha chain variable domain of TCR clone 129538 (TRAV29/DV5, TRAJ45)
CAVYSGGGADGLTF

SEQ ID NO: 259076 - protein, 15 aa, Homo sapiens
  CDR3 for beta chain variable domain of TCR clone 129538 (TRBV2, TRBJ1-3)
CASSISPRSGNTIYF

SEQ ID NO: 259077 - protein, 14 aa, Homo sapiens
  CDR3 for alpha chain variable domain of TCR clone 129539 (TRAV2, TRAJ37)
CAVDFTSNTSKLIF

SEQ ID NO: 259078 - protein, 13 aa, Homo sapiens
  CDR3 for beta chain variable domain of TCR clone 129539 (TRBV20-1, TRBJ1-1)
CSAPLGGGTEAFF

SEQ ID NO: 259079 - protein, 15 aa, Homo sapiens
  CDR3 for alpha chain variable domain of TCR clone 129540 (TRAV13-1, TRAJ9)
CAASTLNTGGFKTIF

SEQ ID NO: 259080 - protein, 13 aa, Homo sapiens
  CDR3 for beta chain variable domain of TCR clone 129540 (TRBV4-1, TRBJ2-1)
CASSQEVQYEQFF

SEQ ID NO: 259081 - protein, 15 aa, Homo sapiens
  CDR3 for alpha chain variable domain of TCR clone 129541 (TRAV26-1, TRAJ29)
CIVRVEGSGNTLLAF

SEQ ID NO: 259082 - protein, 15 aa, Homo sapiens
  CDR3 for beta chain variable domain of TCR clone 129541 (TRBV7-9, TRBJ1-5)
CASSQGHQPNQPQHF

SEQ ID NO: 259083 - protein, 15 aa, Homo sapiens
  CDR3 for alpha chain variable domain of TCR clone 129542 (TRAV26-1, TRAJ39)
CIVRVARNAGNMRTF

SEQ ID NO: 259084 - protein, 16 aa, Homo sapiens
  CDR3 for beta chain variable domain of TCR clone 129542 (TRBV5-1, TRBJ2-1)
CASSLTLAGGRNEQFF

SEQ ID NO: 259085 - protein, 14 aa, Homo sapiens
  CDR3 for alpha chain variable domain of TCR clone 129543 (TRAV1-2, TRAJ16)
CAVNRFSDGQKLLF

SEQ ID NO: 259086 - protein, 13 aa, Homo sapiens
  CDR3 for beta chain variable domain of TCR clone 129543 (TRBV10-3, TRBJ1-2)
CAISGRDSYGYTF

SEQ ID NO: 259087 - protein, 10 aa, Homo sapiens
  CDR3 for alpha chain variable domain of TCR clone 129544 (TRAV4, TRAJ31)
CLAPRDRLMF

SEQ ID NO: 259088 - protein, 16 aa, Homo sapiens
  CDR3 for beta chain variable domain of TCR clone 129544 (TRBV20-1, TRBJ1-4)
CSAPGQGLLTNEKLFF

SEQ ID NO: 259089 - protein, 14 aa, Homo sapiens
  CDR3 for alpha chain variable domain of TCR clone 129545 (TRAV5, TRAJ21)
CAESILDNFNKFYF

SEQ ID NO: 259090 - protein, 17 aa, Homo sapiens
  CDR3 for beta chain variable domain of TCR clone 129545 (TRBV4-1, TRBJ2-7)
CASSRDPLGVRGGEQYF

SEQ ID NO: 259091 - protein, 13 aa, Homo sapiens
  CDR3 for alpha chain variable domain of TCR clone 129546 (TRAV38-1, TRAJ29)
CAFMGSGNTPLVF

SEQ ID NO: 259092 - protein, 13 aa, Homo sapiens
  CDR3 for beta chain variable domain of TCR clone 129546 (TRBV10-3, TRBJ2-7)
CASKLAVNYEQYF

SEQ ID NO: 259093 - protein, 13 aa, Homo sapiens
  CDR3 for alpha chain variable domain of TCR clone 129547 (TRAV27, TRAJ42)
CAGARGSQGNLIF

SEQ ID NO: 259094 - protein, 15 aa, Homo sapiens
  CDR3 for beta chain variable domain of TCR clone 129547 (TRBV10-3, TRBJ2-2)
CAIRTDREDTGEPFF

SEQ ID NO: 259095 - protein, 13 aa, Homo sapiens
  CDR3 for alpha chain variable domain of TCR clone 129548 (TRAV21, TRAJ20)
CAVGLRVDYKPSF

SEQ ID NO: 259096 - protein, 18 aa, Homo sapiens
  CDR3 for beta chain variable domain of TCR clone 129548 (TRBV28, TRBJ2-1)
CASSSGLAGGGSYNEQFF

SEQ ID NO: 259097 - protein, 14 aa, Homo sapiens
  CDR3 for alpha chain variable domain of TCR clone 129549 (TRAV13-1, TRAJ35)
CAASKGGSGNVLHC

SEQ ID NO: 259098 - protein, 13 aa, Homo sapiens
  CDR3 for beta chain variable domain of TCR clone 129549 (TRBV7-3, TRBJ1-1)
CASSQDWGAEAFF

SEQ ID NO: 259099 - protein, 12 aa, Homo sapiens
  CDR3 for alpha chain variable domain of TCR clone 129550 (TRAV13-1, TRAJ21)
CAAKEGFNKFYF

SEQ ID NO: 259100 - protein, 13 aa, Homo sapiens
  CDR3 for beta chain variable domain of TCR clone 129550 (TRBV19, TRBJ1-2)
CASSVPGQDGYTF

SEQ ID NO: 259101 - protein, 13 aa, Homo sapiens
  CDR3 for alpha chain variable domain of TCR clone 129551 (TRAV27, TRAJ23)
CAGVLPKGGKLIF

SEQ ID NO: 259102 - protein, 13 aa, Homo sapiens
  CDR3 for beta chain variable domain of TCR clone 129551 (TRBV7-2, TRBJ2-2)
CASSLAVTGELFF

SEQ ID NO: 259103 - protein, 12 aa, Homo sapiens
  CDR3 for alpha chain variable domain of TCR clone 129552 (TRAV12-2, TRAJ3)
CAVWSSASKITF

SEQ ID NO: 259104 - protein, 12 aa, Homo sapiens
  CDR3 for beta chain variable domain of TCR clone 129552 (TRBV11-2, TRBJ2-1)
CASSPGNNEQFF

SEQ ID NO: 259105 - protein, 15 aa, Homo sapiens
  CDR3 for alpha chain variable domain of TCR clone 129553 (TRAV12-2, TRAJ57)
CAVSRGQGGSEKLVF

SEQ ID NO: 259106 - protein, 14 aa, Homo sapiens
  CDR3 for beta chain variable domain of TCR clone 129553 (TRBV4-1, TRBJ2-2)
CASSQAVNTGELFF

SEQ ID NO: 259107 - protein, 17 aa, Homo sapiens
  CDR3 for alpha chain variable domain of TCR clone 129554 (TRAV13-1, TRAJ52)
CAAGRNAGGTSYGKLTF

SEQ ID NO: 259108 - protein, 13 aa, Homo sapiens
  CDR3 for beta chain variable domain of TCR clone 129554 (TRBV7-2, TRBJ1-1)
CASNLKGAKEAFF

SEQ ID NO: 259109 - protein, 18 aa, Homo sapiens
  CDR3 for alpha chain variable domain of TCR clone 129555 (TRAV26-1, TRAJ52)
CIVRVEGAGGTSYGKLTF

SEQ ID NO: 259110 - protein, 13 aa, Homo sapiens
  CDR3 for beta chain variable domain of TCR clone 129555 (TRBV7-3, TRBJ1-2)
CASSLNRGYGYTF

SEQ ID NO: 259111 - protein, 11 aa, Homo sapiens
  CDR3 for alpha chain variable domain of TCR clone 129556 (TRAV2, TRAJ21)
CAVFNFNKFYF

SEQ ID NO: 259112 - protein, 14 aa, Homo sapiens
  CDR3 for beta chain variable domain of TCR clone 129556 (TRBV15, TRBJ2-3)
CATRSWTSTDTQYF

SEQ ID NO: 259113 - protein, 15 aa, Homo sapiens
  CDR3 for alpha chain variable domain of TCR clone 129557 (TRAV26-1, TRAJ27)
CIVRVSTPMQANQPL

SEQ ID NO: 259114 - protein, 13 aa, Homo sapiens
  CDR3 for beta chain variable domain of TCR clone 129557 (TRBV20-1, TRBJ2-7)
CSATHTSGYEQYF

SEQ ID NO: 259115 - protein, 11 aa, Homo sapiens
  CDR3 for alpha chain variable domain of TCR clone 129558 (TRAV21, TRAJ11)
CAVNGYSTHTF

SEQ ID NO: 259116 - protein, 11 aa, Homo sapiens
  CDR3 for beta chain variable domain of TCR clone 129558 (TRBV19, TRBJ1-1)
CASSIGSEAFF

SEQ ID NO: 259117 - protein, 18 aa, Homo sapiens
  CDR3 for alpha chain variable domain of TCR clone 129559 (TRAV13-2, TRAJ10)
CAASLPPTLTGGGNKLTF

SEQ ID NO: 259118 - protein, 15 aa, Homo sapiens
  CDR3 for beta chain variable domain of TCR clone 129559 (TRBV7-9, TRBJ2-7)
CASSLALAGAYEQYF

SEQ ID NO: 259119 - protein, 18 aa, Homo sapiens
  CDR3 for alpha chain variable domain of TCR clone 129560 (TRAV3, TRAJ17)
CAVRARRGWRSCRQQANF

SEQ ID NO: 259120 - protein, 14 aa, Homo sapiens
  CDR3 for beta chain variable domain of TCR clone 129560 (TRBV4-1, TRBJ2-2)
CASSQAVNTGELFF

SEQ ID NO: 259121 - protein, 15 aa, Homo sapiens
  CDR3 for alpha chain variable domain of TCR clone 129561 (TRAV8-3, TRAJ11)
CAVGLLNSGYSTLTF

SEQ ID NO: 259122 - protein, 16 aa, Homo sapiens
  CDR3 for beta chain variable domain of TCR clone 129561 (TRBV7-9, TRBJ1-2)
CGSSLGFSSGEDGYTF

SEQ ID NO: 259123 - protein, 16 aa, Homo sapiens
  CDR3 for alpha chain variable domain of TCR clone 129562 (TRAV8-3, TRAJ13)
CAVGAEVSGGYQKVTF

SEQ ID NO: 259124 - protein, 16 aa, Homo sapiens
  CDR3 for beta chain variable domain of TCR clone 129562 (TRBV7-2, TRBJ2-1)
CASSLVGGPELNEQFF

SEQ ID NO: 259125 - protein, 18 aa, Homo sapiens
  CDR3 for alpha chain variable domain of TCR clone 129563 (TRAV12-3, TRAJ52)
CTMSVGGAGGTSYGKLTF

SEQ ID NO: 259126 - protein, 14 aa, Homo sapiens
  CDR3 for beta chain variable domain of TCR clone 129563 (TRBV7-2, TRBJ2-7)
CASRSQGAAYEQYF

SEQ ID NO: 259127 - protein, 16 aa, Homo sapiens
  CDR3 for alpha chain variable domain of TCR clone 129564 (TRAV3, TRAJ18)
CAVRDGRGSTLGGLYF

SEQ ID NO: 259128 - protein, 17 aa, Homo sapiens
  CDR3 for beta chain variable domain of TCR clone 129564 (TRBV5-1, TRBJ2-3)
CASSKIGLADRTDTQYF

SEQ ID NO: 259129 - protein, 14 aa, Homo sapiens
  CDR3 for alpha chain variable domain of TCR clone 129565 (TRAV17, TRAJ15)
CATMGTQAGTALIF

SEQ ID NO: 259130 - protein, 16 aa, Homo sapiens
  CDR3 for beta chain variable domain of TCR clone 129565 (TRBV19, TRBJ2-2)
CASRSPGTGATGELFF

SEQ ID NO: 259131 - protein, 11 aa, Homo sapiens
  CDR3 for alpha chain variable domain of TCR clone 129566 (TRAV4, TRAJ31)
CLVGDNARLMF

SEQ ID NO: 259132 - protein, 15 aa, Homo sapiens
  CDR3 for beta chain variable domain of TCR clone 129566 (TRBV27, TRBJ2-1)
CASSNGGGSSNEQFF

SEQ ID NO: 259133 - protein, 15 aa, Homo sapiens
  CDR3 for alpha chain variable domain of TCR clone 129567 (TRAV26-1, TRAJ3)
CIVRSGYSSASKIIF

SEQ ID NO: 259134 - protein, 14 aa, Homo sapiens
  CDR3 for beta chain variable domain of TCR clone 129567 (TRBV13, TRBJ2-5)
CASYRRLAEEAQYF

SEQ ID NO: 259135 - protein, 13 aa, Homo sapiens
  CDR3 for alpha chain variable domain of TCR clone 129568 (TRAV26-1, TRAJ48)
CIVRVVGDEKLTF

SEQ ID NO: 259136 - protein, 17 aa, Homo sapiens
  CDR3 for beta chain variable domain of TCR clone 129568 (TRBV28, TRBJ2-7)
CASSPLHRASGVYEQYF

SEQ ID NO: 259137 - protein, 15 aa, Homo sapiens
  CDR3 for alpha chain variable domain of TCR clone 129569 (TRAV17, TRAJ22)
CATVAPSGSARQLTF

SEQ ID NO: 259138 - protein, 16 aa, Homo sapiens
  CDR3 for beta chain variable domain of TCR clone 129569 (TRBV10-3, TRBJ2-7)
CAISAEFADRPYEQYF

SEQ ID NO: 259139 - protein, 14 aa, Homo sapiens
  CDR3 for alpha chain variable domain of TCR clone 129570 (TRAV12-2, TRAJ13)
CAVKKTGGYQKVTF

SEQ ID NO: 259140 - protein, 12 aa, Homo sapiens
  CDR3 for beta chain variable domain of TCR clone 129570 (TRBV12-4, TRBJ1-2)
CASSFILLHLRF

SEQ ID NO: 259141 - protein, 11 aa, Homo sapiens
  CDR3 for alpha chain variable domain of TCR clone 129571 (TRAV12-3, TRAJ43)
CAMSVSNDMRF

SEQ ID NO: 259142 - protein, 12 aa, Homo sapiens
  CDR3 for beta chain variable domain of TCR clone 129571 (TRBV11-2, TRBJ2-2)
CASSLPTGELFF

SEQ ID NO: 259143 - protein, 12 aa, Homo sapiens
  CDR3 for alpha chain variable domain of TCR clone 129572 (TRAV27, TRAJ13)
CAGVRGYQKVTF

SEQ ID NO: 259144 - protein, 14 aa, Homo sapiens
  CDR3 for beta chain variable domain of TCR clone 129572 (TRBV11-2, TRBJ2-3)
CASSRLARTDTQYF

SEQ ID NO: 259145 - protein, 15 aa, Homo sapiens
  CDR3 for alpha chain variable domain of TCR clone 129573 (TRAV35, TRAJ43)
CAGQLQIHNNNDMRF

SEQ ID NO: 259146 - protein, 14 aa, Homo sapiens
  CDR3 for beta chain variable domain of TCR clone 129573 (TRBV19, TRBJ2-2)
CASSTLHRSGELFF

SEQ ID NO: 259147 - protein, 11 aa, Homo sapiens
  CDR3 for alpha chain variable domain of TCR clone 129574 (TRAV12-3, TRAJ43)
CAMSVSNDMRF

SEQ ID NO: 259148 - protein, 15 aa, Homo sapiens
  CDR3 for beta chain variable domain of TCR clone 129574 (TRBV6-1, TRBJ2-4)
CASSEAVWTINIQYF

SEQ ID NO: 259149 - protein, 14 aa, Homo sapiens
  CDR3 for alpha chain variable domain of TCR clone 129575 (TRAV3, TRAJ22)
CCERPGGSARQLTF

SEQ ID NO: 259150 - protein, 14 aa, Homo sapiens
  CDR3 for beta chain variable domain of TCR clone 129575 (TRBV20-1, TRBJ1-1)
CSAQTRIGGTEAFF

SEQ ID NO: 259151 - protein, 11 aa, Homo sapiens
  CDR3 for alpha chain variable domain of TCR clone 129576 (TRAV1-2, TRAJ31)
CAVNNNARLML

SEQ ID NO: 259152 - protein, 12 aa, Homo sapiens
  CDR3 for beta chain variable domain of TCR clone 129576 (TRBV11-2, TRBJ2-2)
CASSLGGGELFF

SEQ ID NO: 259153 - protein, 13 aa, Homo sapiens
  CDR3 for alpha chain variable domain of TCR clone 129577 (TRAV1-2, TRAJ9)
CAALNTGGFKTIF

SEQ ID NO: 259154 - protein, 13 aa, Homo sapiens
  CDR3 for beta chain variable domain of TCR clone 129577 (TRBV19, TRBJ1-2)
CASSVPGEDGYTF

SEQ ID NO: 259155 - protein, 14 aa, Homo sapiens
  CDR3 for alpha chain variable domain of TCR clone 129578 (TRAV13-1, TRAJ44)
CVAKATGTASKLTF

SEQ ID NO: 259156 - protein, 13 aa, Homo sapiens
  CDR3 for beta chain variable domain of TCR clone 129578 (TRBV5-5, TRBJ1-2)
CASSFWRGEDYTF

SEQ ID NO: 259157 - protein, 15 aa, Homo sapiens
  CDR3 for alpha chain variable domain of TCR clone 129579 (TRAV26-1, TRAJ27)
CIVSVLTPMQANQPL

SEQ ID NO: 259158 - protein, 13 aa, Homo sapiens
  CDR3 for beta chain variable domain of TCR clone 129579 (TRBV20-1, TRBJ2-7)
CSATHTSGYEQYF

SEQ ID NO: 259159 - protein, 21 aa, Homo sapiens
  CDR3 for alpha chain variable domain of TCR clone 129580 (TRAV1-2, TRAJ26)
CAVRDLITMVRILSWSRNQIF

SEQ ID NO: 259160 - protein, 15 aa, Homo sapiens
  CDR3 for beta chain variable domain of TCR clone 129580 (TRBV27, TRBJ2-1)
CASSNGGGSSNEQFF

SEQ ID NO: 259161 - protein, 15 aa, Homo sapiens
  CDR3 for alpha chain variable domain of TCR clone 129581 (TRAV13-1, TRAJ5)
CAASPRGHGQESTYF

SEQ ID NO: 259162 - protein, 14 aa, Homo sapiens
  CDR3 for beta chain variable domain of TCR clone 129581 (TRBV7-3, TRBJ2-2)
CASSSGGYTGELFF

SEQ ID NO: 259163 - protein, 11 aa, Homo sapiens
  CDR3 for alpha chain variable domain of TCR clone 129582 (TRAV21, TRAJ39)
LLVNAGNMLTF

SEQ ID NO: 259164 - protein, 15 aa, Homo sapiens
  CDR3 for beta chain variable domain of TCR clone 129582 (TRBV29-1, TRBJ2-1)
CSGRDRKSAYNEQFF

SEQ ID NO: 259165 - protein, 12 aa, Homo sapiens
  CDR3 for alpha chain variable domain of TCR clone 129583 (TRAV21, TRAJ11)
CAATSGYSTLTF

SEQ ID NO: 259166 - protein, 15 aa, Homo sapiens
  CDR3 for beta chain variable domain of TCR clone 129583 (TRBV7-9, TRBJ2-1)
CASSLGWGRANEQFF

SEQ ID NO: 259167 - protein, 12 aa, Homo sapiens
  CDR3 for alpha chain variable domain of TCR clone 129584 (TRAV3, TRAJ43)
CAVRDPNNDMRF

SEQ ID NO: 259168 - protein, 15 aa, Homo sapiens
  CDR3 for beta chain variable domain of TCR clone 129584 (TRBV4-3, TRBJ2-7)
CASSQGVWGDYEQYF

SEQ ID NO: 259169 - protein, 13 aa, Homo sapiens
  CDR3 for alpha chain variable domain of TCR clone 129585 (TRAV27, TRAJ49)
CAPRPYTGNQFYF

SEQ ID NO: 259170 - protein, 15 aa, Homo sapiens
  CDR3 for beta chain variable domain of TCR clone 129585 (TRBV6-3, TRBJ2-7)
CASSSPGTVFYEQYF

SEQ ID NO: 259171 - protein, 13 aa, Homo sapiens
  CDR3 for alpha chain variable domain of TCR clone 129586 (TRAV22, TRAJ48)
CAVERFGNEKLTF

SEQ ID NO: 259172 - protein, 16 aa, Homo sapiens
  CDR3 for beta chain variable domain of TCR clone 129586 (TRBV7-3, TRBJ2-1)
CASSSIRRAPTMSSSS

SEQ ID NO: 259173 - protein, 10 aa, Homo sapiens
  CDR3 for alpha chain variable domain of TCR clone 129587 (TRAV8-3, TRAJ43)
CAVALADVRF

SEQ ID NO: 259174 - protein, 14 aa, Homo sapiens
  CDR3 for beta chain variable domain of TCR clone 129587 (TRBV4-2, TRBJ2-1)
CASGLDRAYNEQFF

SEQ ID NO: 259175 - protein, 14 aa, Homo sapiens
  CDR3 for alpha chain variable domain of TCR clone 129588 (TRAV21, TRAJ38)
CAVMGAYNNRKLIW

SEQ ID NO: 259176 - protein, 13 aa, Homo sapiens
  CDR3 for beta chain variable domain of TCR clone 129588 (TRBV7-3, TRBJ2-5)
CASSIGFFETQYF

SEQ ID NO: 259177 - protein, 18 aa, Homo sapiens
  CDR3 for alpha chain variable domain of TCR clone 129589 (TRAV29/DV5, TRAJ52)
CAAGFRGAGGTSYGKLTF

SEQ ID NO: 259178 - protein, 15 aa, Homo sapiens
  CDR3 for beta chain variable domain of TCR clone 129589 (TRBV11-2, TRBJ2-2)
CASSSDRVNAGELFF

SEQ ID NO: 259179 - protein, 13 aa, Homo sapiens
  CDR3 for alpha chain variable domain of TCR clone 129590 (TRAV13-2, TRAJ48)
CAEMDFGNEKLTF

SEQ ID NO: 259180 - protein, 14 aa, Homo sapiens
  CDR3 for beta chain variable domain of TCR clone 129590 (TRBV7-6, TRBJ2-3)
CASSLGTVTDTQYF

SEQ ID NO: 259181 - protein, 14 aa, Homo sapiens
  CDR3 for alpha chain variable domain of TCR clone 129591 (TRAV12-2, TRAJ13)
CAVKKTGGYQKVTF

SEQ ID NO: 259182 - protein, 19 aa, Homo sapiens
  CDR3 for beta chain variable domain of TCR clone 129591 (TRBV5-1, TRBJ2-2)
CASSLAPGLAGVRTGELFF

SEQ ID NO: 259183 - protein, 12 aa, Homo sapiens
  CDR3 for alpha chain variable domain of TCR clone 129592 (TRAV12-1, TRAJ34)
CVVAGATDKLIF

SEQ ID NO: 259184 - protein, 12 aa, Homo sapiens
  CDR3 for beta chain variable domain of TCR clone 129592 (TRBV7-9, TRBJ1-1)
CASSLVRGDAFF

SEQ ID NO: 259185 - protein, 14 aa, Homo sapiens
  CDR3 for alpha chain variable domain of TCR clone 129593 (TRAV13-1, TRAJ26)
CAASSAHSGQNFVF

SEQ ID NO: 259186 - protein, 17 aa, Homo sapiens
  CDR3 for beta chain variable domain of TCR clone 129593 (TRBV25-1, TRBJ2-5)
CASSRRGGRGGQETQYF

SEQ ID NO: 259187 - protein, 12 aa, Homo sapiens
  CDR3 for alpha chain variable domain of TCR clone 129594 (TRAV4, TRAJ26)
CLVGDYGQNFVF

SEQ ID NO: 259188 - protein, 14 aa, Homo sapiens
  CDR3 for beta chain variable domain of TCR clone 129594 (TRBV18, TRBJ2-7)
CASSPRGGAYEQYF

SEQ ID NO: 259189 - protein, 15 aa, Homo sapiens
  CDR3 for alpha chain variable domain of TCR clone 129595 (TRAV17, TRAJ56)
CATEPFTGANSKLTF

SEQ ID NO: 259190 - protein, 14 aa, Homo sapiens
  CDR3 for beta chain variable domain of TCR clone 129595 (TRBV7-2, TRBJ2-7)
CASSPKTSFYEQYF

SEQ ID NO: 259191 - protein, 13 aa, Homo sapiens
  CDR3 for alpha chain variable domain of TCR clone 129596 (TRAV12-1, TRAJ38)
CVVPAGNNRKLIW

SEQ ID NO: 259192 - protein, 17 aa, Homo sapiens
  CDR3 for beta chain variable domain of TCR clone 129596 (TRBV4-1, TRBJ2-3)
CASSQSATGGPVDTQYF

SEQ ID NO: 259193 - protein, 11 aa, Homo sapiens
  CDR3 for alpha chain variable domain of TCR clone 129597 (TRAV21, TRAJ11)
CAVNGYSTLTF

SEQ ID NO: 259194 - protein, 14 aa, Homo sapiens
  CDR3 for beta chain variable domain of TCR clone 129597 (TRBV7-8, TRBJ2-3)
CASSLEAGTDTQYF

SEQ ID NO: 259195 - protein, 16 aa, Homo sapiens
  CDR3 for alpha chain variable domain of TCR clone 129598 (TRAV12-2, TRAJ45)
CAVNMYSGGGADGLTF

SEQ ID NO: 259196 - protein, 12 aa, Homo sapiens
  CDR3 for beta chain variable domain of TCR clone 129598 (TRBV29-1, TRBJ2-3)
CSVTGGADTQYF

SEQ ID NO: 259197 - protein, 12 aa, Homo sapiens
  CDR3 for alpha chain variable domain of TCR clone 129599 (TRAV12-1, TRAJ40)
CVFYSGTYKYIF

SEQ ID NO: 259198 - protein, 18 aa, Homo sapiens
  CDR3 for beta chain variable domain of TCR clone 129599 (TRBV12-4, TRBJ2-2)
CASSLVAGTRGRIGELFF

SEQ ID NO: 259199 - protein, 14 aa, Homo sapiens
  CDR3 for alpha chain variable domain of TCR clone 129600 (TRAV1-2, TRAJ8)
CAVREDTGFQKLVF

SEQ ID NO: 259200 - protein, 15 aa, Homo sapiens
  CDR3 for beta chain variable domain of TCR clone 129600 (TRBV5-6, TRBJ2-3)
CASSPGLATTDTQYF

SEQ ID NO: 259201 - protein, 13 aa, Homo sapiens
  CDR3 for alpha chain variable domain of TCR clone 129601 (TRAV2, TRAJ40)
CAVVTSGTYKYIF

SEQ ID NO: 259202 - protein, 16 aa, Homo sapiens
  CDR3 for beta chain variable domain of TCR clone 129601 (TRBV12-4, TRBJ1-5)
CASRQPVEGSNQPQHF

SEQ ID NO: 259203 - protein, 14 aa, Homo sapiens
  CDR3 for alpha chain variable domain of TCR clone 129602 (TRAV12-1, TRAJ12)
CVVTRMDSSYKLIF

SEQ ID NO: 259204 - protein, 12 aa, Homo sapiens
  CDR3 for beta chain variable domain of TCR clone 129602 (TRBV3-1, TRBJ2-1)
CASSQGSSGQFF

SEQ ID NO: 259205 - protein, 17 aa, Homo sapiens
  CDR3 for alpha chain variable domain of TCR clone 129603 (TRAV8-3, TRAJ34)
CAIPGKLIFGTGTRLQV

SEQ ID NO: 259206 - protein, 15 aa, Homo sapiens
  CDR3 for beta chain variable domain of TCR clone 129603 (TRBV5-7, TRBJ2-1)
CASSRRLVGDNEQFF

SEQ ID NO: 259207 - protein, 16 aa, Homo sapiens
  CDR3 for alpha chain variable domain of TCR clone 129604 (TRAV20, TRAJ22)
CAVQASSSGSARQLTF

SEQ ID NO: 259208 - protein, 13 aa, Homo sapiens
  CDR3 for beta chain variable domain of TCR clone 129604 (TRBV3-1, TRBJ1-1)
CASSPGVITEAFF

SEQ ID NO: 259209 - protein, 13 aa, Homo sapiens
  CDR3 for alpha chain variable domain of TCR clone 129605 (TRAV13-1, TRAJ39)
CAAPFECRQHAHL

SEQ ID NO: 259210 - protein, 16 aa, Homo sapiens
  CDR3 for beta chain variable domain of TCR clone 129605 (TRBV18, TRBJ1-5)
CASSPYRVEGNQPQHF

SEQ ID NO: 259211 - protein, 15 aa, Homo sapiens
  CDR3 for alpha chain variable domain of TCR clone 129606 (TRAV12-2, TRAJ45)
CAVKRTGGGADGLTF

SEQ ID NO: 259212 - protein, 14 aa, Homo sapiens
  CDR3 for beta chain variable domain of TCR clone 129606 (TRBV7-2, TRBJ2-7)
CASSPKTSFYEQYF

SEQ ID NO: 259213 - protein, 14 aa, Homo sapiens
  CDR3 for alpha chain variable domain of TCR clone 129607 (TRAV17, TRAJ45)
CATASGGGADGLTF

SEQ ID NO: 259214 - protein, 14 aa, Homo sapiens
  CDR3 for beta chain variable domain of TCR clone 129607 (TRBV5-4, TRBJ1-1)
CASSLDSRRDEAFF

SEQ ID NO: 259215 - protein, 15 aa, Homo sapiens
  CDR3 for alpha chain variable domain of TCR clone 129608 (TRAV3, TRAJ3)
CAVRDMSSSSSKIIF

SEQ ID NO: 259216 - protein, 17 aa, Homo sapiens
  CDR3 for beta chain variable domain of TCR clone 129608 (TRBV24-1, TRBJ2-1)
CATSDVSTSGTYNEQFF

SEQ ID NO: 259217 - protein, 15 aa, Homo sapiens
  CDR3 for alpha chain variable domain of TCR clone 129609 (TRAV3, TRAJ5)
CAVRDRKTGRRALIF

SEQ ID NO: 259218 - protein, 15 aa, Homo sapiens
  CDR3 for beta chain variable domain of TCR clone 129609 (TRBV7-9, TRBJ2-2)
CASGPLDTFPGELFF

SEQ ID NO: 259219 - protein, 11 aa, Homo sapiens
  CDR3 for alpha chain variable domain of TCR clone 129610 (TRAV16, TRAJ33)
CALHSNYQLIW

SEQ ID NO: 259220 - protein, 15 aa, Homo sapiens
  CDR3 for beta chain variable domain of TCR clone 129610 (TRBV4-1, TRBJ2-7)
CASRQQGQGFDEQYF

SEQ ID NO: 259221 - protein, 10 aa, Homo sapiens
  CDR3 for alpha chain variable domain of TCR clone 129611 (TRAV12-3, TRAJ49)
CAMNDDQFYF

SEQ ID NO: 259222 - protein, 14 aa, Homo sapiens
  CDR3 for beta chain variable domain of TCR clone 129611 (TRBV12-4, TRBJ1-1)
CASSLGTGGTEAFF

SEQ ID NO: 259223 - protein, 17 aa, Homo sapiens
  CDR3 for alpha chain variable domain of TCR clone 129612 (TRAV35, TRAJ28)
CAGLQVYSGAVSYQLTF

SEQ ID NO: 259224 - protein, 15 aa, Homo sapiens
  CDR3 for beta chain variable domain of TCR clone 129612 (TRBV2, TRBJ1-2)
CASSEIGGANYGYTF

SEQ ID NO: 259225 - protein, 11 aa, Homo sapiens
  CDR3 for alpha chain variable domain of TCR clone 129613 (TRAV12-1, TRAJ40)
CVVPGTYKYIF

SEQ ID NO: 259226 - protein, 12 aa, Homo sapiens
  CDR3 for beta chain variable domain of TCR clone 129613 (TRBV7-8, TRBJ2-7)
CASSLGDREQYF

SEQ ID NO: 259227 - protein, 11 aa, Homo sapiens
  CDR3 for alpha chain variable domain of TCR clone 129614 (TRAV13-1, TRAJ39)
CASHAGNMLTF

SEQ ID NO: 259228 - protein, 14 aa, Homo sapiens
  CDR3 for beta chain variable domain of TCR clone 129614 (TRBV7-3, TRBJ1-1)
CASSLKGGNTEAFF

SEQ ID NO: 259229 - protein, 14 aa, Homo sapiens
  CDR3 for alpha chain variable domain of TCR clone 129615 (TRAV3, TRAJ21)
CAVESQANFNKFYF

SEQ ID NO: 259230 - protein, 18 aa, Homo sapiens
  CDR3 for beta chain variable domain of TCR clone 129615 (TRBV7-9, TRBJ2-1)
CASGLAVSGTSGRNEQFF

SEQ ID NO: 259231 - protein, 12 aa, Homo sapiens
  CDR3 for alpha chain variable domain of TCR clone 129616 (TRAV21, TRAJ31)
CVLAGNNARLTF

SEQ ID NO: 259232 - protein, 16 aa, Homo sapiens
  CDR3 for beta chain variable domain of TCR clone 129616 (TRBV27, TRBJ2-5)
CASSFGPGGTKETQYF

SEQ ID NO: 259233 - protein, 14 aa, Homo sapiens
  CDR3 for alpha chain variable domain of TCR clone 129617 (TRAV4, TRAJ17)
CLVGDPLVGNKLTF

SEQ ID NO: 259234 - protein, 15 aa, Homo sapiens
  CDR3 for beta chain variable domain of TCR clone 129617 (TRBV27, TRBJ1-1)
FASSPYADPYTEAFF

SEQ ID NO: 259235 - protein, 13 aa, Homo sapiens
  CDR3 for alpha chain variable domain of TCR clone 129618 (TRAV13-1, TRAJ5)
CAARVTGRRALTF

SEQ ID NO: 259236 - protein, 15 aa, Homo sapiens
  CDR3 for beta chain variable domain of TCR clone 129618 (TRBV7-9, TRBJ2-7)
CASSHGGGLTYEQYF

SEQ ID NO: 259237 - protein, 13 aa, Homo sapiens
  CDR3 for alpha chain variable domain of TCR clone 129619 (TRAV8-3, TRAJ36)
CAVGATGANNLFF

SEQ ID NO: 259238 - protein, 11 aa, Homo sapiens
  CDR3 for beta chain variable domain of TCR clone 129619 (TRBV29-1, TRBJ2-5)
CSEDRTGTQYF

SEQ ID NO: 259239 - protein, 14 aa, Homo sapiens
  CDR3 for alpha chain variable domain of TCR clone 129620 (TRAV1-2, TRAJ8)
CAVREDTGFQKLVF

SEQ ID NO: 259240 - protein, 15 aa, Homo sapiens
  CDR3 for beta chain variable domain of TCR clone 129620 (TRBV5-7, TRBJ2-7)
CASSLGPGRGHEQYF

SEQ ID NO: 259241 - protein, 14 aa, Homo sapiens
  CDR3 for alpha chain variable domain of TCR clone 129621 (TRAV26-1, TRAJ38)
CIADNAGNNRKLIW

SEQ ID NO: 259242 - protein, 20 aa, Homo sapiens
  CDR3 for beta chain variable domain of TCR clone 129621 (TRBV7-8, TRBJ2-2)
CASSHLSPGPTIHITGELFF

SEQ ID NO: 259243 - protein, 16 aa, Homo sapiens
  CDR3 for alpha chain variable domain of TCR clone 129622 (TRAV12-2, TRAJ32)
CAVNMNDGGATNKLIF

SEQ ID NO: 259244 - protein, 16 aa, Homo sapiens
  CDR3 for beta chain variable domain of TCR clone 129622 (TRBV7-8, TRBJ2-3)
CASSTEGQRETDTQYF

SEQ ID NO: 259245 - protein, 13 aa, Homo sapiens
  CDR3 for alpha chain variable domain of TCR clone 129623 (TRAV22, TRAJ29)
CAVGGSGNTPLVF

SEQ ID NO: 259246 - protein, 13 aa, Homo sapiens
  CDR3 for beta chain variable domain of TCR clone 129623 (TRBV4-2, TRBJ1-1)
CASSHAGNTEAFF

SEQ ID NO: 259247 - protein, 14 aa, Homo sapiens
  CDR3 for alpha chain variable domain of TCR clone 129624 (TRAV17, TRAJ39)
CATDPVRAGNMLTF

SEQ ID NO: 259248 - protein, 15 aa, Homo sapiens
  CDR3 for beta chain variable domain of TCR clone 129624 (TRBV13, TRBJ1-5)
CARSFGQGGVQPQHF

SEQ ID NO: 259249 - protein, 14 aa, Homo sapiens
  CDR3 for alpha chain variable domain of TCR clone 129625 (TRAV1-1, TRAJ23)
CAVSIYNQGGKLIF

SEQ ID NO: 259250 - protein, 13 aa, Homo sapiens
  CDR3 for beta chain variable domain of TCR clone 129625 (TRBV27, TRBJ2-7)
CASSLTTGYEQYF

SEQ ID NO: 259251 - protein, 10 aa, Homo sapiens
  CDR3 for alpha chain variable domain of TCR clone 129626 (TRAV8-4, TRAJ30)
VFYRDDKIIF

SEQ ID NO: 259252 - protein, 16 aa, Homo sapiens
  CDR3 for beta chain variable domain of TCR clone 129626 (TRBV20-1, TRBJ1-5)
CSAELQGQQTNQPQHF

SEQ ID NO: 259253 - protein, 13 aa, Homo sapiens
  CDR3 for alpha chain variable domain of TCR clone 129627 (TRAV12-1, TRAJ16)
CVVNGPDGQKLLF

SEQ ID NO: 259254 - protein, 15 aa, Homo sapiens
  CDR3 for beta chain variable domain of TCR clone 129627 (TRBV6-5, TRBJ2-1)
CASSYDAGAGNEQFF

SEQ ID NO: 259255 - protein, 10 aa, Homo sapiens
  CDR3 for alpha chain variable domain of TCR clone 129628 (TRAV12-3, TRAJ18)
CAMSAEAQPW

SEQ ID NO: 259256 - protein, 13 aa, Homo sapiens
  CDR3 for beta chain variable domain of TCR clone 129628 (TRBV15, TRBJ1-6)
CATSGVLNSPLHF

SEQ ID NO: 259257 - protein, 11 aa, Homo sapiens
  CDR3 for alpha chain variable domain of TCR clone 129629 (TRAV1-2, TRAJ20)
CAVANDYKLSF

SEQ ID NO: 259258 - protein, 18 aa, Homo sapiens
  CDR3 for beta chain variable domain of TCR clone 129629 (TRBV20-1, TRBJ2-6)
CSAETTPTNGSGANVLTF

SEQ ID NO: 259259 - protein, 14 aa, Homo sapiens
  CDR3 for alpha chain variable domain of TCR clone 129630 (TRAV12-2, TRAJ13)
CAVKKTGGYQKVTF

SEQ ID NO: 259260 - protein, 15 aa, Homo sapiens
  CDR3 for beta chain variable domain of TCR clone 129630 (TRBV7-2, TRBJ2-3)
CASSLAGAFIDTQYF

SEQ ID NO: 259261 - protein, 13 aa, Homo sapiens
  CDR3 for alpha chain variable domain of TCR clone 129631 (TRAV21, TRAJ27)
SAALNTNAGKSTF

SEQ ID NO: 259262 - protein, 14 aa, Homo sapiens
  CDR3 for beta chain variable domain of TCR clone 129631 (TRBV27, TRBJ1-1)
CASSLLSGLSEAFF

SEQ ID NO: 259263 - protein, 14 aa, Homo sapiens
  CDR3 for alpha chain variable domain of TCR clone 129632 (TRAV12-3, TRAJ57)
CAMSAWGGSEKLVF

SEQ ID NO: 259264 - protein, 14 aa, Homo sapiens
  CDR3 for beta chain variable domain of TCR clone 129632 (TRBV7-8, TRBJ2-7)
CASSPRGRVYEQYF

SEQ ID NO: 259265 - protein, 13 aa, Homo sapiens
  CDR3 for alpha chain variable domain of TCR clone 129633 (TRAV13-1, TRAJ39)
CAASIWAGNTLTF

SEQ ID NO: 259266 - protein, 15 aa, Homo sapiens
  CDR3 for beta chain variable domain of TCR clone 129633 (TRBV7-9, TRBJ1-1)
CASSLLEQGGTEAFF

SEQ ID NO: 259267 - protein, 16 aa, Homo sapiens
  CDR3 for alpha chain variable domain of TCR clone 129634 (TRAV3, TRAJ37)
CAVRGKGSGNTGKLIF

SEQ ID NO: 259268 - protein, 14 aa, Homo sapiens
  CDR3 for beta chain variable domain of TCR clone 129634 (TRBV2, TRBJ2-3)
CASTAQTSTDTQYF

SEQ ID NO: 259269 - protein, 12 aa, Homo sapiens
  CDR3 for alpha chain variable domain of TCR clone 129635 (TRAV12-1, TRAJ40)
CVVNGETYKYIF

SEQ ID NO: 259270 - protein, 14 aa, Homo sapiens
  CDR3 for beta chain variable domain of TCR clone 129635 (TRBV7-9, TRBJ1-1)
CASSSTKGNTEASF

SEQ ID NO: 259271 - protein, 12 aa, Homo sapiens
  CDR3 for alpha chain variable domain of TCR clone 129636 (TRAV29/DV5, TRAJ34)
CAARHNTDKLIF

SEQ ID NO: 259272 - protein, 15 aa, Homo sapiens
  CDR3 for beta chain variable domain of TCR clone 129636 (TRBV19, TRBJ2-7)
CASSPAGSGESLRYF

SEQ ID NO: 259273 - protein, 12 aa, Homo sapiens
  CDR3 for alpha chain variable domain of TCR clone 129637 (TRAV12-3, TRAJ17)
CAMTLTGNKLTF

SEQ ID NO: 259274 - protein, 12 aa, Homo sapiens
  CDR3 for beta chain variable domain of TCR clone 129637 (TRBV19, TRBJ2-1)
CASSMQDTEQFF

SEQ ID NO: 259275 - protein, 14 aa, Homo sapiens
  CDR3 for alpha chain variable domain of TCR clone 129638 (TRAV17, TRAJ42)
CATAGGGSQGDLIF

SEQ ID NO: 259276 - protein, 14 aa, Homo sapiens
  CDR3 for beta chain variable domain of TCR clone 129638 (TRBV7-2, TRBJ2-3)
CASRFSRPSDTQYF

SEQ ID NO: 259277 - protein, 14 aa, Homo sapiens
  CDR3 for alpha chain variable domain of TCR clone 129639 (TRAV26-1, TRAJ39)
CIVRGSRAGNMLTF

SEQ ID NO: 259278 - protein, 15 aa, Homo sapiens
  CDR3 for beta chain variable domain of TCR clone 129639 (TRBV7-9, TRBJ1-5)
CASSQGHQPTQPQHF

SEQ ID NO: 259279 - protein, 14 aa, Homo sapiens
  CDR3 for alpha chain variable domain of TCR clone 129640 (TRAV1-2, TRAJ8)
CAVREDTGFQKLVF

SEQ ID NO: 259280 - protein, 15 aa, Homo sapiens
  CDR3 for beta chain variable domain of TCR clone 129640 (TRBV20-1, TRBJ2-7)
CSARDRASGMDEQYF

SEQ ID NO: 259281 - protein, 11 aa, Homo sapiens
  CDR3 for alpha chain variable domain of TCR clone 129641 (TRAV2, TRAJ13)
CASVGYQKVTF

SEQ ID NO: 259282 - protein, 15 aa, Homo sapiens
  CDR3 for beta chain variable domain of TCR clone 129641 (TRBV6-3, TRBJ2-3)
RLIHYSVGQADTQYF

SEQ ID NO: 259283 - protein, 14 aa, Homo sapiens
  CDR3 for alpha chain variable domain of TCR clone 129642 (TRAV39, TRAJ54)
CAVVLIQGAQKLVF

SEQ ID NO: 259284 - protein, 14 aa, Homo sapiens
  CDR3 for beta chain variable domain of TCR clone 129642 (TRBV18, TRBJ2-5)
CASSPGVSQETQYF

SEQ ID NO: 259285 - protein, 15 aa, Homo sapiens
  CDR3 for alpha chain variable domain of TCR clone 129643 (TRAV23/DV6, TRAJ42)
CAARGYGGSQGNLIF

SEQ ID NO: 259286 - protein, 14 aa, Homo sapiens
  CDR3 for beta chain variable domain of TCR clone 129643 (TRBV7-2, TRBJ1-1)
CASSFLTGTTEAFF

SEQ ID NO: 259287 - protein, 13 aa, Homo sapiens
  CDR3 for alpha chain variable domain of TCR clone 129644 (TRAV36/DV7, TRAJ57)
CAVVLGGSEKLVF

SEQ ID NO: 259288 - protein, 14 aa, Homo sapiens
  CDR3 for beta chain variable domain of TCR clone 129644 (TRBV4-1, TRBJ1-2)
CASSQDGQVRGYTI

SEQ ID NO: 259289 - protein, 12 aa, Homo sapiens
  CDR3 for alpha chain variable domain of TCR clone 129645 (TRAV30, TRAJ43)
CGTEDRGNDMRF

SEQ ID NO: 259290 - protein, 13 aa, Homo sapiens
  CDR3 for beta chain variable domain of TCR clone 129645 (TRBV7-9, TRBJ2-3)
CASSPGSTDTQYF

SEQ ID NO: 259291 - protein, 16 aa, Homo sapiens
  CDR3 for alpha chain variable domain of TCR clone 129646 (TRAV13-1, TRAJ48)
CAASIFGNFGNEKLTF

SEQ ID NO: 259292 - protein, 12 aa, Homo sapiens
  CDR3 for beta chain variable domain of TCR clone 129646 (TRBV7-8, TRBJ2-1)
CASSALAGRVFF

SEQ ID NO: 259293 - protein, 21 aa, Homo sapiens
  CDR3 for alpha chain variable domain of TCR clone 129647 (TRAV8-3, TRAJ6)
CAVGGEEATYLHLEEEPALLF

SEQ ID NO: 259294 - protein, 14 aa, Homo sapiens
  CDR3 for beta chain variable domain of TCR clone 129647 (TRBV5-1, TRBJ2-7)
CASSGGESLYEQYF

SEQ ID NO: 259295 - protein, 16 aa, Homo sapiens
  CDR3 for alpha chain variable domain of TCR clone 129648 (TRAV22, TRAJ45)
CAVERGKRGGADGLTF

SEQ ID NO: 259296 - protein, 13 aa, Homo sapiens
  CDR3 for beta chain variable domain of TCR clone 129648 (TRBV27, TRBJ1-1)
RASSLSIGAEAFF

SEQ ID NO: 259297 - protein, 11 aa, Homo sapiens
  CDR3 for alpha chain variable domain of TCR clone 129649 (TRAV12-1, TRAJ8)
CVGTGFQKLVF

SEQ ID NO: 259298 - protein, 14 aa, Homo sapiens
  CDR3 for beta chain variable domain of TCR clone 129649 (TRBV19, TRBJ2-1)
CASGKSTQYNEQFF

SEQ ID NO: 259299 - protein, 11 aa, Homo sapiens
  CDR3 for alpha chain variable domain of TCR clone 129650 (TRAV2, TRAJ13)
CASGGYQKVTF

SEQ ID NO: 259300 - protein, 15 aa, Homo sapiens
  CDR3 for beta chain variable domain of TCR clone 129650 (TRBV11-2, TRBJ1-2)
CASSLEGVQRNGYTF

SEQ ID NO: 259301 - protein, 14 aa, Homo sapiens
  CDR3 for alpha chain variable domain of TCR clone 129651 (TRAV6, TRAJ17)
CALDIEAAGNKLTF

SEQ ID NO: 259302 - protein, 15 aa, Homo sapiens
  CDR3 for beta chain variable domain of TCR clone 129651 (TRBV7-9, TRBJ2-3)
CASNQGGRVTDTQYF

SEQ ID NO: 259303 - protein, 12 aa, Homo sapiens
  CDR3 for alpha chain variable domain of TCR clone 129652 (TRAV17, TRAJ57)
CATDGGSEQLVF

SEQ ID NO: 259304 - protein, 12 aa, Homo sapiens
  CDR3 for beta chain variable domain of TCR clone 129652 (TRBV29-1, TRBJ2-2)
CSVDKYTGELFF

SEQ ID NO: 259305 - protein, 15 aa, Homo sapiens
  CDR3 for alpha chain variable domain of TCR clone 129653 (TRAV25, TRAJ52)
CAGTSGGTSYGKLTF

SEQ ID NO: 259306 - protein, 17 aa, Homo sapiens
  CDR3 for beta chain variable domain of TCR clone 129653 (TRBV6-5, TRBJ2-5)
CASSLGSGRSGSETQYF

SEQ ID NO: 259307 - protein, 14 aa, Homo sapiens
  CDR3 for alpha chain variable domain of TCR clone 129654 (TRAV38-1, TRAJ29)
CAFITPSGNAPLVF

SEQ ID NO: 259308 - protein, 14 aa, Homo sapiens
  CDR3 for beta chain variable domain of TCR clone 129654 (TRBV18, TRBJ2-7)
CASSPRGGAYEQYF

SEQ ID NO: 259309 - protein, 13 aa, Homo sapiens
  CDR3 for alpha chain variable domain of TCR clone 129655 (TRAV12-2, TRAJ10)
CAVPTGGGNKLTF

SEQ ID NO: 259310 - protein, 14 aa, Homo sapiens
  CDR3 for beta chain variable domain of TCR clone 129655 (TRBV19, TRBJ2-7)
CASSIFAGTYEQYF

SEQ ID NO: 259311 - protein, 14 aa, Homo sapiens
  CDR3 for alpha chain variable domain of TCR clone 129656 (TRAV16, TRAJ33)
CALLAMDSNYQLIW

SEQ ID NO: 259312 - protein, 17 aa, Homo sapiens
  CDR3 for beta chain variable domain of TCR clone 129656 (TRBV25-1, TRBJ2-7)
CASSDARVVFSSYEQYF

SEQ ID NO: 259313 - protein, 18 aa, Homo sapiens
  CDR3 for alpha chain variable domain of TCR clone 129657 (TRAV26-2, TRAJ54)
CILRDVEVGIQGAQKMVF

SEQ ID NO: 259314 - protein, 17 aa, Homo sapiens
  CDR3 for beta chain variable domain of TCR clone 129657 (TRBV20-1, TRBJ1-5)
CSASLSPGQGGNQPQHF

SEQ ID NO: 259315 - protein, 14 aa, Homo sapiens
  CDR3 for alpha chain variable domain of TCR clone 129658 (TRAV12-1, TRAJ23)
CVVMVYNQGGKLIF

SEQ ID NO: 259316 - protein, 23 aa, Homo sapiens
  CDR3 for beta chain variable domain of TCR clone 129658 (TRBV7-3, TRBJ1-6)
CASSLTSRDEASDPSSYNSPLHF

SEQ ID NO: 259317 - protein, 14 aa, Homo sapiens
  CDR3 for alpha chain variable domain of TCR clone 129659 (TRAV2, TRAJ9)
CAVEDRSGGFKTIF

SEQ ID NO: 259318 - protein, 16 aa, Homo sapiens
  CDR3 for beta chain variable domain of TCR clone 129659 (TRBV28, TRBJ2-1)
CASSTRTSGRRNEQFF

SEQ ID NO: 259319 - protein, 21 aa, Homo sapiens
  CDR3 for alpha chain variable domain of TCR clone 129660 (TRAV1-2, TRAJ37)
CLLPLCCERSHGSGNTGKLIF

SEQ ID NO: 259320 - protein, 14 aa, Homo sapiens
  CDR3 for beta chain variable domain of TCR clone 129660 (TRBV2, TRBJ2-5)
CASSEVLAQETQYF

SEQ ID NO: 259321 - protein, 15 aa, Homo sapiens
  CDR3 for alpha chain variable domain of TCR clone 129661 (TRAV3, TRAJ5)
CAVRDLDTGRRALTF

SEQ ID NO: 259322 - protein, 16 aa, Homo sapiens
  CDR3 for beta chain variable domain of TCR clone 129661 (TRBV24-1, TRBJ2-3)
CATSDPGTGATDTQYF

SEQ ID NO: 259323 - protein, 14 aa, Homo sapiens
  CDR3 for alpha chain variable domain of TCR clone 129662 (TRAV20, TRAJ56)
CAVQFGGANSKLTF

SEQ ID NO: 259324 - protein, 14 aa, Homo sapiens
  CDR3 for beta chain variable domain of TCR clone 129662 (TRBV6-3, TRBJ1-1)
CASSYQRRDTEAFF

SEQ ID NO: 259325 - protein, 14 aa, Homo sapiens
  CDR3 for alpha chain variable domain of TCR clone 129663 (TRAV29/DV5, TRAJ39)
CAASGGNAGNMLTF

SEQ ID NO: 259326 - protein, 13 aa, Homo sapiens
  CDR3 for beta chain variable domain of TCR clone 129663 (TRBV19, TRBJ1-2)
CASSVPGQDGYTF

SEQ ID NO: 259327 - protein, 10 aa, Homo sapiens
  CDR3 for alpha chain variable domain of TCR clone 129664 (TRAV23/DV6, TRAJ57)
CAASSTLSQG

SEQ ID NO: 259328 - protein, 14 aa, Homo sapiens
  CDR3 for beta chain variable domain of TCR clone 129664 (TRBV25-1, TRBJ1-1)
SASTHLGGNTEAFF

SEQ ID NO: 259329 - protein, 13 aa, Homo sapiens
  CDR3 for alpha chain variable domain of TCR clone 129665 (TRAV10, TRAJ40)
CVVSALGTYKYIF

SEQ ID NO: 259330 - protein, 13 aa, Homo sapiens
  CDR3 for beta chain variable domain of TCR clone 129665 (TRBV20-1, TRBJ2-3)
CSARLACTDTQYF

SEQ ID NO: 259331 - protein, 14 aa, Homo sapiens
  CDR3 for alpha chain variable domain of TCR clone 129666 (TRAV35, TRAJ42)
CAGRDGGSQGNLIF

SEQ ID NO: 259332 - protein, 15 aa, Homo sapiens
  CDR3 for beta chain variable domain of TCR clone 129666 (TRBV7-9, TRBJ2-1)
CASSLGWGRANEQFF

SEQ ID NO: 259333 - protein, 17 aa, Homo sapiens
  CDR3 for alpha chain variable domain of TCR clone 129667 (TRAV3, TRAJ6)
CAVRDGPRAGGSYIPTF

SEQ ID NO: 259334 - protein, 15 aa, Homo sapiens
  CDR3 for beta chain variable domain of TCR clone 129667 (TRBV11-2, TRBJ2-1)
CASSLGPDSYNEQFF

SEQ ID NO: 259335 - protein, 10 aa, Homo sapiens
  CDR3 for alpha chain variable domain of TCR clone 129668 (TRAV12-1, TRAJ22)
HSGSARQLTF

SEQ ID NO: 259336 - protein, 16 aa, Homo sapiens
  CDR3 for beta chain variable domain of TCR clone 129668 (TRBV13, TRBJ2-2)
CASSPRTGEHTGELFF

SEQ ID NO: 259337 - protein, 15 aa, Homo sapiens
  CDR3 for alpha chain variable domain of TCR clone 129669 (TRAV25, TRAJ52)
CAGTSGGTRYGKLTF

SEQ ID NO: 259338 - protein, 16 aa, Homo sapiens
  CDR3 for beta chain variable domain of TCR clone 129669 (TRBV15, TRBJ1-2)
CATSRGPRTGGGGYTF

SEQ ID NO: 259339 - protein, 17 aa, Homo sapiens
  CDR3 for alpha chain variable domain of TCR clone 129670 (TRAV13-1, TRAJ31)
CAPRDRLMFGDGTQLVV

SEQ ID NO: 259340 - protein, 12 aa, Homo sapiens
  CDR3 for beta chain variable domain of TCR clone 129670 (TRBV7-9, TRBJ2-7)
CANSLEGYEQYF

SEQ ID NO: 259341 - protein, 11 aa, Homo sapiens
  CDR3 for alpha chain variable domain of TCR clone 129671 (TRAV8-3, TRAJ4)
VAAGGYNKLIF

SEQ ID NO: 259342 - protein, 14 aa, Homo sapiens
  CDR3 for beta chain variable domain of TCR clone 129671 (TRBV12-5, TRBJ2-5)
CASGSRTHQETQYF

SEQ ID NO: 259343 - protein, 11 aa, Homo sapiens
  CDR3 for alpha chain variable domain of TCR clone 129672 (TRAV1-1, TRAJ23)
CAVRQGGKLIF

SEQ ID NO: 259344 - protein, 13 aa, Homo sapiens
  CDR3 for beta chain variable domain of TCR clone 129672 (TRBV7-3, TRBJ1-1)
CASSQDWGAEDFF

SEQ ID NO: 259345 - protein, 14 aa, Homo sapiens
  CDR3 for alpha chain variable domain of TCR clone 129673 (TRAV12-2, TRAJ5)
CAVKGDTGRRALTF

SEQ ID NO: 259346 - protein, 15 aa, Homo sapiens
  CDR3 for beta chain variable domain of TCR clone 129673 (TRBV7-2, TRBJ2-1)
CASSLASGRVNEQFF

SEQ ID NO: 259347 - protein, 13 aa, Homo sapiens
  CDR3 for alpha chain variable domain of TCR clone 129674 (TRAV8-6, TRAJ48)
CAGGNFGNEKLTF

SEQ ID NO: 259348 - protein, 16 aa, Homo sapiens
  CDR3 for beta chain variable domain of TCR clone 129674 (TRBV4-2, TRBJ2-6)
CASSQARSSGANVLTF

SEQ ID NO: 259349 - protein, 15 aa, Homo sapiens
  CDR3 for alpha chain variable domain of TCR clone 129675 (TRAV3, TRAJ20)
CAVRDIKLSDYKLSF

SEQ ID NO: 259350 - protein, 15 aa, Homo sapiens
  CDR3 for beta chain variable domain of TCR clone 129675 (TRBV11-3, TRBJ2-3)
CASLKDGREGDTQYF

SEQ ID NO: 259351 - protein, 14 aa, Homo sapiens
  CDR3 for alpha chain variable domain of TCR clone 129676 (TRAV1-2, TRAJ16)
CTVNRFSDGQKLLF

SEQ ID NO: 259352 - protein, 11 aa, Homo sapiens
  CDR3 for beta chain variable domain of TCR clone 129676 (TRBV29-1, TRBJ2-5)
CSEDRTGTQYF

SEQ ID NO: 259353 - protein, 14 aa, Homo sapiens
  CDR3 for alpha chain variable domain of TCR clone 129677 (TRAV1-1, TRAJ27)
CAVIYNTNAGKSTF

SEQ ID NO: 259354 - protein, 12 aa, Homo sapiens
  CDR3 for beta chain variable domain of TCR clone 129677 (TRBV7-8, TRBJ2-7)
CASSLGDREQYF

SEQ ID NO: 259355 - protein, 15 aa, Homo sapiens
  CDR3 for alpha chain variable domain of TCR clone 129678 (TRAV3, TRAJ4)
CDVRDGTGGYNKLIF

SEQ ID NO: 259356 - protein, 16 aa, Homo sapiens
  CDR3 for beta chain variable domain of TCR clone 129678 (TRBV27, TRBJ2-2)
CASSSSGVSNTGELFF

SEQ ID NO: 259357 - protein, 14 aa, Homo sapiens
  CDR3 for alpha chain variable domain of TCR clone 129679 (TRAV8-2, TRAJ4)
CVVSPSGGYNKLIF

SEQ ID NO: 259358 - protein, 13 aa, Homo sapiens
  CDR3 for beta chain variable domain of TCR clone 129679 (TRBV7-7, TRBJ2-2)
CASSLTSAGELFF

SEQ ID NO: 259359 - protein, 16 aa, Homo sapiens
  CDR3 for alpha chain variable domain of TCR clone 129680 (TRAV2, TRAJ26)
TTVLGPPGDYGQNFVF

SEQ ID NO: 259360 - protein, 12 aa, Homo sapiens
  CDR3 for beta chain variable domain of TCR clone 129680 (TRBV11-2, TRBJ2-2)
CASSLGGGELFF

SEQ ID NO: 259361 - protein, 18 aa, Homo sapiens
  CDR3 for alpha chain variable domain of TCR clone 129681 (TRAV38-1, TRAJ8)
CDVFLCFSMNTGFQKLVF

SEQ ID NO: 259362 - protein, 14 aa, Homo sapiens
  CDR3 for beta chain variable domain of TCR clone 129681 (TRBV4-1, TRBJ2-3)
CASSQEGSTDKQYF

SEQ ID NO: 259363 - protein, 14 aa, Homo sapiens
  CDR3 for alpha chain variable domain of TCR clone 129682 (TRAV1-2, TRAJ16)
CAVNRFSDGQKLLF

SEQ ID NO: 259364 - protein, 15 aa, Homo sapiens
  CDR3 for beta chain variable domain of TCR clone 129682 (TRBV20-1, TRBJ2-7)
CSARERVSGMDEQYF

SEQ ID NO: 259365 - protein, 14 aa, Homo sapiens
  CDR3 for alpha chain variable domain of TCR clone 129683 (TRAV16, TRAJ33)
CALSAMDSNYQLIW

SEQ ID NO: 259366 - protein, 15 aa, Homo sapiens
  CDR3 for beta chain variable domain of TCR clone 129683 (TRBV6-6, TRBJ2-7)
CASSYSYGGSYEQYF

SEQ ID NO: 259367 - protein, 15 aa, Homo sapiens
  CDR3 for alpha chain variable domain of TCR clone 129684 (TRAV27, TRAJ38)
CAARRNAGNNRKLLW

SEQ ID NO: 259368 - protein, 15 aa, Homo sapiens
  CDR3 for beta chain variable domain of TCR clone 129684 (TRBV5-1, TRBJ2-1)
CASSPPRAPYNEQFF

SEQ ID NO: 259369 - protein, 14 aa, Homo sapiens
  CDR3 for alpha chain variable domain of TCR clone 129685 (TRAV1-2, TRAJ8)
CAVREDTGFQKLVF

SEQ ID NO: 259370 - protein, 14 aa, Homo sapiens
  CDR3 for beta chain variable domain of TCR clone 129685 (TRBV15, TRBJ2-3)
CATRSGTSTDKQYF

SEQ ID NO: 259371 - protein, 14 aa, Homo sapiens
  CDR3 for alpha chain variable domain of TCR clone 129686 (TRAV12-1, TRAJ30)
CVVNIGNRDDKIIF

SEQ ID NO: 259372 - protein, 12 aa, Homo sapiens
  CDR3 for beta chain variable domain of TCR clone 129686 (TRBV11-2, TRBJ2-7)
CASSLPTYEQYF

SEQ ID NO: 259373 - protein, 13 aa, Homo sapiens
  CDR3 for alpha chain variable domain of TCR clone 129687 (TRAV23/DV6, TRAJ34)
CAAIENNTDKLIF

SEQ ID NO: 259374 - protein, 13 aa, Homo sapiens
  CDR3 for beta chain variable domain of TCR clone 129687 (TRBV29-1, TRBJ2-7)
CSVGPSGSYEQYF

SEQ ID NO: 259375 - protein, 14 aa, Homo sapiens
  CDR3 for alpha chain variable domain of TCR clone 129688 (TRAV1-1, TRAJ27)
CAVIYNTNAGKSTF

SEQ ID NO: 259376 - protein, 16 aa, Homo sapiens
  CDR3 for beta chain variable domain of TCR clone 129688 (TRBV10-3, TRBJ2-1)
CAISGVGDGGGGEQFF

SEQ ID NO: 259377 - protein, 11 aa, Homo sapiens
  CDR3 for alpha chain variable domain of TCR clone 129689 (TRAV1-1, TRAJ9)
CAAKKYWRLQN

SEQ ID NO: 259378 - protein, 14 aa, Homo sapiens
  CDR3 for beta chain variable domain of TCR clone 129689 (TRBV20-1, TRBJ2-1)
CSAQIGGSANEQFF

SEQ ID NO: 259379 - protein, 16 aa, Homo sapiens
  CDR3 for alpha chain variable domain of TCR clone 129690 (TRAV26-1, TRAJ23)
CIVRVHPYNQGGKLIF

SEQ ID NO: 259380 - protein, 15 aa, Homo sapiens
  CDR3 for beta chain variable domain of TCR clone 129690 (TRBV5-7, TRBJ2-7)
CASSPYFEGSYEQCF

SEQ ID NO: 259381 - protein, 15 aa, Homo sapiens
  CDR3 for alpha chain variable domain of TCR clone 129691 (TRAV3, TRAJ22)
CAVRDRGGSARQLTF

SEQ ID NO: 259382 - protein, 16 aa, Homo sapiens
  CDR3 for beta chain variable domain of TCR clone 129691 (TRBV28, TRBJ1-3)
CASSSPPWTLGNTIYF

SEQ ID NO: 259383 - protein, 15 aa, Homo sapiens
  CDR3 for alpha chain variable domain of TCR clone 129692 (TRAV3, TRAJ3)
CAVRDMCSSASKIIF

SEQ ID NO: 259384 - protein, 14 aa, Homo sapiens
  CDR3 for beta chain variable domain of TCR clone 129692 (TRBV19, TRBJ2-1)
CASPTFVLSGEQFF

SEQ ID NO: 259385 - protein, 16 aa, Homo sapiens
  CDR3 for alpha chain variable domain of TCR clone 129693 (TRAV3, TRAJ37)
CAVRGKGSGNTGQLIF

SEQ ID NO: 259386 - protein, 15 aa, Homo sapiens
  CDR3 for beta chain variable domain of TCR clone 129693 (TRBV7-3, TRBJ2-2)
CASSETGQGTGELFF

SEQ ID NO: 259387 - protein, 14 aa, Homo sapiens
  CDR3 for alpha chain variable domain of TCR clone 129694 (TRAV12-3, TRAJ10)
SHLPLTGGGNKLTF

SEQ ID NO: 259388 - protein, 14 aa, Homo sapiens
  CDR3 for beta chain variable domain of TCR clone 129694 (TRBV5-4, TRBJ1-4)
CASSLNLGREKLFF

SEQ ID NO: 259389 - protein, 17 aa, Homo sapiens
  CDR3 for alpha chain variable domain of TCR clone 129695 (TRAV3, TRAJ6)
CAVRDGPRAGGSYIPTF

SEQ ID NO: 259390 - protein, 12 aa, Homo sapiens
  CDR3 for beta chain variable domain of TCR clone 129695 (TRBV5-4, TRBJ2-7)
CASSWAGQGENF

SEQ ID NO: 259391 - protein, 12 aa, Homo sapiens
  CDR3 for alpha chain variable domain of TCR clone 129696 (TRAV17, TRAJ4)
CATDGGYNKLIF

SEQ ID NO: 259392 - protein, 17 aa, Homo sapiens
  CDR3 for beta chain variable domain of TCR clone 129696 (TRBV7-3, TRBJ2-3)
CASSLMKRMRGADTQYF

SEQ ID NO: 259393 - protein, 10 aa, Homo sapiens
  CDR3 for alpha chain variable domain of TCR clone 129697 (TRAV23/DV6, TRAJ57)
CAASSTLSQG

SEQ ID NO: 259394 - protein, 18 aa, Homo sapiens
  CDR3 for beta chain variable domain of TCR clone 129697 (TRBV11-2, TRBJ2-3)
CASSLGGASRGAPNTQYF

SEQ ID NO: 259395 - protein, 14 aa, Homo sapiens
  CDR3 for alpha chain variable domain of TCR clone 129698 (TRAV38-1, TRAJ29)
CAFITPSGNTPLVF

SEQ ID NO: 259396 - protein, 14 aa, Homo sapiens
  CDR3 for beta chain variable domain of TCR clone 129698 (TRBV4-1, TRBJ2-2)
CASSQAVNTGELFF

SEQ ID NO: 259397 - protein, 22 aa, Homo sapiens
  CDR3 for alpha chain variable domain of TCR clone 129699 (TRAV25, TRAJ13)
TATQTTDVGTFLDSGGYQKVTF

SEQ ID NO: 259398 - protein, 13 aa, Homo sapiens
  CDR3 for beta chain variable domain of TCR clone 129699 (TRBV7-3, TRBJ1-1)
CASSQDWGAEAFF

SEQ ID NO: 259399 - protein, 15 aa, Homo sapiens
  CDR3 for alpha chain variable domain of TCR clone 129700 (TRAV8-1, TRAJ6)
CAVNNPPGGSYIPTF

SEQ ID NO: 259400 - protein, 15 aa, Homo sapiens
  CDR3 for beta chain variable domain of TCR clone 129700 (TRBV11-2, TRBJ2-2)
CASSSDRVNAGELFF

SEQ ID NO: 259401 - protein, 15 aa, Homo sapiens
  CDR3 for alpha chain variable domain of TCR clone 129701 (TRAV8-3, TRAJ23)
CAVGDRYNQGGKLIF

SEQ ID NO: 259402 - protein, 15 aa, Homo sapiens
  CDR3 for beta chain variable domain of TCR clone 129701 (TRBV29-1, TRBJ2-5)
EDSSTYLCSARTQYF

SEQ ID NO: 259403 - protein, 10 aa, Homo sapiens
  CDR3 for alpha chain variable domain of TCR clone 129702 (TRAV26-1, TRAJ22)
CIVSLNFFWF

SEQ ID NO: 259404 - protein, 15 aa, Homo sapiens
  CDR3 for beta chain variable domain of TCR clone 129702 (TRBV7-8, TRBJ1-2)
CASSLVRDGGLGYTF

SEQ ID NO: 259405 - protein, 11 aa, Homo sapiens
  CDR3 for alpha chain variable domain of TCR clone 129703 (TRAV4, TRAJ31)
CLVGDNARLMF

SEQ ID NO: 259406 - protein, 13 aa, Homo sapiens
  CDR3 for beta chain variable domain of TCR clone 129703 (TRBV7-9, TRBJ1-2)
CASSLKQNYGYTF

SEQ ID NO: 259407 - protein, 14 aa, Homo sapiens
  CDR3 for alpha chain variable domain of TCR clone 129704 (TRAV13-1, TRAJ9)
CAASALTGGFKTSF

SEQ ID NO: 259408 - protein, 13 aa, Homo sapiens
  CDR3 for beta chain variable domain of TCR clone 129704 (TRBV20-1, TRBJ1-1)
CSAGTVGNTEAFF

SEQ ID NO: 259409 - protein, 23 aa, Homo sapiens
  CDR3 for alpha chain variable domain of TCR clone 129705 (TRAV8-3, TRAJ38)
CAVGASNAGNNHIRNPDPAVYQL

SEQ ID NO: 259410 - protein, 15 aa, Homo sapiens
  CDR3 for beta chain variable domain of TCR clone 129705 (TRBV11-3, TRBJ1-3)
CASSLFGPSGNTIYF

SEQ ID NO: 259411 - protein, 11 aa, Homo sapiens
  CDR3 for alpha chain variable domain of TCR clone 129706 (TRAV12-1, TRAJ43)
CVEYDNNDMRF

SEQ ID NO: 259412 - protein, 16 aa, Homo sapiens
  CDR3 for beta chain variable domain of TCR clone 129706 (TRBV5-4, TRBJ2-1)
FASSLVGSGQDNEQFF

SEQ ID NO: 259413 - protein, 14 aa, Homo sapiens
  CDR3 for alpha chain variable domain of TCR clone 129707 (TRAV12-3, TRAJ9)
CAMSPNTGGFKTIF

SEQ ID NO: 259414 - protein, 12 aa, Homo sapiens
  CDR3 for beta chain variable domain of TCR clone 129707 (TRBV5-5, TRBJ2-5)
CASSYFGETQYF

SEQ ID NO: 259415 - protein, 23 aa, Homo sapiens
  CDR3 for alpha chain variable domain of TCR clone 129708 (TRAV8-4, TRAJ38)
CARLNAGNNHIQNPDPAVYQLRD

SEQ ID NO: 259416 - protein, 14 aa, Homo sapiens
  CDR3 for beta chain variable domain of TCR clone 129708 (TRBV7-8, TRBJ2-3)
CASSVEAGTDTQYF

SEQ ID NO: 259417 - protein, 14 aa, Homo sapiens
  CDR3 for alpha chain variable domain of TCR clone 129709 (TRAV26-1, TRAJ5)
CIVRVRFNMRALTF

SEQ ID NO: 259418 - protein, 17 aa, Homo sapiens
  CDR3 for beta chain variable domain of TCR clone 129709 (TRBV29-1, TRBJ2-3)
CSVEVLAGETSTDTQYF

SEQ ID NO: 259419 - protein, 13 aa, Homo sapiens
  CDR3 for alpha chain variable domain of TCR clone 129710 (TRAV29/DV5, TRAJ29)
CAASAAGNTPLVF

SEQ ID NO: 259420 - protein, 17 aa, Homo sapiens
  CDR3 for beta chain variable domain of TCR clone 129710 (TRBV7-8, TRBJ2-6)
CASSAGTGGAGANVLTF

SEQ ID NO: 259421 - protein, 14 aa, Homo sapiens
  CDR3 for alpha chain variable domain of TCR clone 129711 (TRAV23/DV6, TRAJ22)
CADISSGSARQLTF

SEQ ID NO: 259422 - protein, 14 aa, Homo sapiens
  CDR3 for beta chain variable domain of TCR clone 129711 (TRBV19, TRBJ2-7)
CASTVQGRPYEQYF

SEQ ID NO: 259423 - protein, 16 aa, Homo sapiens
  CDR3 for alpha chain variable domain of TCR clone 129712 (TRAV23/DV6, TRAJ13)
CAASFSFSGGYQKVTF

SEQ ID NO: 259424 - protein, 12 aa, Homo sapiens
  CDR3 for beta chain variable domain of TCR clone 129712 (TRBV7-8, TRBJ2-7)
CASSLGDREQYF

SEQ ID NO: 259425 - protein, 13 aa, Homo sapiens
  CDR3 for alpha chain variable domain of TCR clone 129713 (TRAV21, TRAJ20)
CAVGLRVDYKLSF

SEQ ID NO: 259426 - protein, 14 aa, Homo sapiens
  CDR3 for beta chain variable domain of TCR clone 129713 (TRBV19, TRBJ1-2)
CASNAWAPASGYTF

SEQ ID NO: 259427 - protein, 12 aa, Homo sapiens
  CDR3 for alpha chain variable domain of TCR clone 129714 (TRAV21, TRAJ33)
CAKMDSNYQLIW

SEQ ID NO: 259428 - protein, 13 aa, Homo sapiens
  CDR3 for beta chain variable domain of TCR clone 129714 (TRBV4-2, TRBJ1-1)
CASSQAGNTEAFF

SEQ ID NO: 259429 - protein, 15 aa, Homo sapiens
  CDR3 for alpha chain variable domain of TCR clone 129715 (TRAV3, TRAJ47)
CAVRDIGEYGNKLVF

SEQ ID NO: 259430 - protein, 14 aa, Homo sapiens
  CDR3 for beta chain variable domain of TCR clone 129715 (TRBV13, TRBJ2-5)
CASILERVGETQYF

SEQ ID NO: 259431 - protein, 11 aa, Homo sapiens
  CDR3 for alpha chain variable domain of TCR clone 129716 (TRAV12-3, TRAJ27)
CAMANAGKSTF

SEQ ID NO: 259432 - protein, 12 aa, Homo sapiens
  CDR3 for beta chain variable domain of TCR clone 129716 (TRBV7-9, TRBJ2-7)
CASSIKREEQYF

SEQ ID NO: 259433 - protein, 15 aa, Homo sapiens
  CDR3 for alpha chain variable domain of TCR clone 129717 (TRAV2, TRAJ11)
CAVEDPNSGYSTLTF

SEQ ID NO: 259434 - protein, 15 aa, Homo sapiens
  CDR3 for beta chain variable domain of TCR clone 129717 (TRBV20-1, TRBJ2-7)
CSARDRASGMDEQYF

SEQ ID NO: 259435 - protein, 10 aa, Homo sapiens
  CDR3 for alpha chain variable domain of TCR clone 129718 (TRAV8-4, TRAJ43)
CAVSADDMRF

SEQ ID NO: 259436 - protein, 14 aa, Homo sapiens
  CDR3 for beta chain variable domain of TCR clone 129718 (TRBV25-1, TRBJ1-1)
CASTHLGGNTEAFF

SEQ ID NO: 259437 - protein, 12 aa, Homo sapiens
  CDR3 for alpha chain variable domain of TCR clone 129719 (TRAV13-1, TRAJ27)
FAAHTNAGKSTF

SEQ ID NO: 259438 - protein, 14 aa, Homo sapiens
  CDR3 for beta chain variable domain of TCR clone 129719 (TRBV19, TRBJ2-2)
CASSGQGIAGELFF

SEQ ID NO: 259439 - protein, 12 aa, Homo sapiens
  CDR3 for alpha chain variable domain of TCR clone 129720 (TRAV3, TRAJ27)
CAVRDGAGKSTF

SEQ ID NO: 259440 - protein, 13 aa, Homo sapiens
  CDR3 for beta chain variable domain of TCR clone 129720 (TRBV10-3, TRBJ1-2)
CAINADLNYGYTY

SEQ ID NO: 259441 - protein, 16 aa, Homo sapiens
  CDR3 for alpha chain variable domain of TCR clone 129721 (TRAV8-3, TRAJ13)
CAVGAYPSGGYQKVTF

SEQ ID NO: 259442 - protein, 15 aa, Homo sapiens
  CDR3 for beta chain variable domain of TCR clone 129721 (TRBV18, TRBJ1-2)
CASSPGNGLGYGYTF

SEQ ID NO: 259443 - protein, 23 aa, Homo sapiens
  CDR3 for alpha chain variable domain of TCR clone 129722 (TRAV26-1, TRAJ38)
CIADNAGNNHIQNPDPAVYQLTD

SEQ ID NO: 259444 - protein, 12 aa, Homo sapiens
  CDR3 for beta chain variable domain of TCR clone 129722 (TRBV11-2, TRBJ2-2)
CASSLGGGELFF

SEQ ID NO: 259445 - protein, 13 aa, Homo sapiens
  CDR3 for alpha chain variable domain of TCR clone 129723 (TRAV12-3, TRAJ13)
CARSSGGYQEVTF

SEQ ID NO: 259446 - protein, 13 aa, Homo sapiens
  CDR3 for beta chain variable domain of TCR clone 129723 (TRBV20-1, TRBJ1-1)
CSAPPGGHTEAFF

SEQ ID NO: 259447 - protein, 14 aa, Homo sapiens
  CDR3 for alpha chain variable domain of TCR clone 129724 (TRAV8-3, TRAJ10)
CAVGNAGGGNKLTF

SEQ ID NO: 259448 - protein, 15 aa, Homo sapiens
  CDR3 for beta chain variable domain of TCR clone 129724 (TRBV7-2, TRBJ2-1)
CASSLASGRVNEQFF

SEQ ID NO: 259449 - protein, 15 aa, Homo sapiens
  CDR3 for alpha chain variable domain of TCR clone 129725 (TRAV4, TRAJ5)
CLVGAMDTGRRALTF

SEQ ID NO: 259450 - protein, 17 aa, Homo sapiens
  CDR3 for beta chain variable domain of TCR clone 129725 (TRBV12-4, TRBJ2-1)
CASSPGLAGGRINEQFF

SEQ ID NO: 259451 - protein, 13 aa, Homo sapiens
  CDR3 for alpha chain variable domain of TCR clone 129726 (TRAV12-3, TRAJ56)
CALATGANSKLTF

SEQ ID NO: 259452 - protein, 14 aa, Homo sapiens
  CDR3 for beta chain variable domain of TCR clone 129726 (TRBV5-1, TRBJ2-3)
CASSLFGPTDTQYF

SEQ ID NO: 259453 - protein, 15 aa, Homo sapiens
  CDR3 for alpha chain variable domain of TCR clone 129727 (TRAV12-3, TRAJ48)
CATNAKNFGNEKLTF

SEQ ID NO: 259454 - protein, 14 aa, Homo sapiens
  CDR3 for beta chain variable domain of TCR clone 129727 (TRBV2, TRBJ1-6)
CASSESRNNSPLHF

SEQ ID NO: 259455 - protein, 13 aa, Homo sapiens
  CDR3 for alpha chain variable domain of TCR clone 129728 (TRAV1-1, TRAJ7)
CAVRDHGNNRLAF

SEQ ID NO: 259456 - protein, 18 aa, Homo sapiens
  CDR3 for beta chain variable domain of TCR clone 129728 (TRBV12-4, TRBJ2-2)
CASSLVAGTRGRTGELFF

SEQ ID NO: 259457 - protein, 13 aa, Homo sapiens
  CDR3 for alpha chain variable domain of TCR clone 129729 (TRAV21, TRAJ37)
CAVSSGNTGKLIF

SEQ ID NO: 259458 - protein, 14 aa, Homo sapiens
  CDR3 for beta chain variable domain of TCR clone 129729 (TRBV28, TRBJ1-1)
CASSESGRGTEAFF

SEQ ID NO: 259459 - protein, 15 aa, Homo sapiens
  CDR3 for alpha chain variable domain of TCR clone 129730 (TRAV8-3, TRAJ21)
CAVGALPPRGYKFYF

SEQ ID NO: 259460 - protein, 18 aa, Homo sapiens
  CDR3 for beta chain variable domain of TCR clone 129730 (TRBV25-1, TRBJ1-2)
CASSGLQNGQGLIFGYTF

SEQ ID NO: 259461 - protein, 11 aa, Homo sapiens
  CDR3 for alpha chain variable domain of TCR clone 129731 (TRAV12-2, TRAJ39)
CAVNNMLTFGG

SEQ ID NO: 259462 - protein, 16 aa, Homo sapiens
  CDR3 for beta chain variable domain of TCR clone 129731 (TRBV9, TRBJ2-7)
CASSVVPDRSPYEQYF

SEQ ID NO: 259463 - protein, 22 aa, Homo sapiens
  CDR3 for alpha chain variable domain of TCR clone 129732 (TRAV27, TRAJ38)
CAARRNAGNNHIQNPDPAVYQL

SEQ ID NO: 259464 - protein, 16 aa, Homo sapiens
  CDR3 for beta chain variable domain of TCR clone 129732 (TRBV7-2, TRBJ1-2)
CASSFGTGYEGYGYTF

SEQ ID NO: 259465 - protein, 14 aa, Homo sapiens
  CDR3 for alpha chain variable domain of TCR clone 129733 (TRAV21, TRAJ35)
CAVMPIGFGNVLHC

SEQ ID NO: 259466 - protein, 14 aa, Homo sapiens
  CDR3 for beta chain variable domain of TCR clone 129733 (TRBV7-2, TRBJ2-7)
CASSPKTSFYEQYF

SEQ ID NO: 259467 - protein, 13 aa, Homo sapiens
  CDR3 for alpha chain variable domain of TCR clone 129734 (TRAV17, TRAJ9)
CATDYTGGFKTIL

SEQ ID NO: 259468 - protein, 16 aa, Homo sapiens
  CDR3 for beta chain variable domain of TCR clone 129734 (TRBV7-7, TRBJ2-1)
CASSLASGTSYNGQFF

SEQ ID NO: 259469 - protein, 10 aa, Homo sapiens
  CDR3 for alpha chain variable domain of TCR clone 129735 (TRAV1-2, TRAJ31)
CVSEDARLMF

SEQ ID NO: 259470 - protein, 11 aa, Homo sapiens
  CDR3 for beta chain variable domain of TCR clone 129735 (TRBV29-1, TRBJ2-5)
CSEDRTGTQYF

SEQ ID NO: 259471 - protein, 14 aa, Homo sapiens
  CDR3 for alpha chain variable domain of TCR clone 129736 (TRAV8-4, TRAJ54)
CAVSDVLGAQKLVF

SEQ ID NO: 259472 - protein, 13 aa, Homo sapiens
  CDR3 for beta chain variable domain of TCR clone 129736 (TRBV27, TRBJ2-7)
CASSFVSSYEQYF

SEQ ID NO: 259473 - protein, 16 aa, Homo sapiens
  CDR3 for alpha chain variable domain of TCR clone 129737 (TRAV30, TRAJ24)
CGTEIVDADSWGKFQF

SEQ ID NO: 259474 - protein, 15 aa, Homo sapiens
  CDR3 for beta chain variable domain of TCR clone 129737 (TRBV3-1, TRBJ2-2)
CASSQAVRETGELFF

SEQ ID NO: 259475 - protein, 14 aa, Homo sapiens
  CDR3 for alpha chain variable domain of TCR clone 129738 (TRAV1-2, TRAJ16)
CDVNRFSDGQKLLF

SEQ ID NO: 259476 - protein, 13 aa, Homo sapiens
  CDR3 for beta chain variable domain of TCR clone 129738 (TRBV7-9, TRBJ1-2)
CASSLKQNYGYTF

SEQ ID NO: 259477 - protein, 19 aa, Homo sapiens
  CDR3 for alpha chain variable domain of TCR clone 129739 (TRAV13-1, TRAJ52)
CAASPYQNAGGTSYGKLTF

SEQ ID NO: 259478 - protein, 13 aa, Homo sapiens
  CDR3 for beta chain variable domain of TCR clone 129739 (TRBV11-2, TRBJ1-6)
CASSLAGTSPLHF

SEQ ID NO: 259479 - protein, 14 aa, Homo sapiens
  CDR3 for alpha chain variable domain of TCR clone 129740 (TRAV8-4, TRAJ13)
CAVTLSGGYQKVTF

SEQ ID NO: 259480 - protein, 16 aa, Homo sapiens
  CDR3 for beta chain variable domain of TCR clone 129740 (TRBV19, TRBJ2-2)
CASRSPGTGATGGLFF

SEQ ID NO: 259481 - protein, 12 aa, Homo sapiens
  CDR3 for alpha chain variable domain of TCR clone 129741 (TRAV12-3, TRAJ17)
CAMTLTGHKLTF

SEQ ID NO: 259482 - protein, 20 aa, Homo sapiens
  CDR3 for beta chain variable domain of TCR clone 129741 (TRBV7-8, TRBJ2-2)
CASSHLFPGPTIHITGELFF

SEQ ID NO: 259483 - protein, 16 aa, Homo sapiens
  CDR3 for alpha chain variable domain of TCR clone 129742 (TRAV12-2, TRAJ10)
CAVNGIITGGGNKLTF

SEQ ID NO: 259484 - protein, 12 aa, Homo sapiens
  CDR3 for beta chain variable domain of TCR clone 129742 (TRBV5-7, TRBJ1-1)
CASSLGRGKAFF

SEQ ID NO: 259485 - protein, 12 aa, Homo sapiens
  CDR3 for alpha chain variable domain of TCR clone 129743 (TRAV3, TRAJ31)
CAAQRANASLMF

SEQ ID NO: 259486 - protein, 14 aa, Homo sapiens
  CDR3 for beta chain variable domain of TCR clone 129743 (TRBV5-5, TRBJ1-5)
CASSGQGVDQPQHF

SEQ ID NO: 259487 - protein, 20 aa, Homo sapiens
  CDR3 for alpha chain variable domain of TCR clone 129744 (TRAV12-1, TRAJ42)
SSVIQPPTSEKGGSQGNLIF

SEQ ID NO: 259488 - protein, 18 aa, Homo sapiens
  CDR3 for beta chain variable domain of TCR clone 129744 (TRBV11-2, TRBJ2-3)
CASSLGGASRGAPNTQYF

SEQ ID NO: 259489 - protein, 10 aa, Homo sapiens
  CDR3 for alpha chain variable domain of TCR clone 129745 (TRAV21, TRAJ43)
CAVRIGDMRF

SEQ ID NO: 259490 - protein, 13 aa, Homo sapiens
  CDR3 for beta chain variable domain of TCR clone 129745 (TRBV20-1, TRBJ2-7)
CGAPGLADYEQYF

SEQ ID NO: 259491 - protein, 16 aa, Homo sapiens
  CDR3 for alpha chain variable domain of TCR clone 129746 (TRAV3, TRAJ18)
CAVRDGRGSTLGRRYF

SEQ ID NO: 259492 - protein, 17 aa, Homo sapiens
  CDR3 for beta chain variable domain of TCR clone 129746 (TRBV5-1, TRBJ2-3)
CASSKIGLVDRTDTQYF

SEQ ID NO: 259493 - protein, 16 aa, Homo sapiens
  CDR3 for alpha chain variable domain of TCR clone 129747 (TRAV8-4, TRAJ28)
CAVESNSGAGSYQLTF

SEQ ID NO: 259494 - protein, 14 aa, Homo sapiens
  CDR3 for beta chain variable domain of TCR clone 129747 (TRBV12-5, TRBJ2-5)
CASGSRTHQETQYF

SEQ ID NO: 259495 - protein, 13 aa, Homo sapiens
  CDR3 for alpha chain variable domain of TCR clone 129748 (TRAV5, TRAJ7)
CAESVYGNNRLAF

SEQ ID NO: 259496 - protein, 17 aa, Homo sapiens
  CDR3 for beta chain variable domain of TCR clone 129748 (TRBV7-8, TRBJ2-6)
CASSAGTGGAGANVLTF

SEQ ID NO: 259497 - protein, 13 aa, Homo sapiens
  CDR3 for alpha chain variable domain of TCR clone 129749 (TRAV3, TRAJ21)
CAVREPDFNKFYF

SEQ ID NO: 259498 - protein, 13 aa, Homo sapiens
  CDR3 for beta chain variable domain of TCR clone 129749 (TRBV15, TRBJ1-2)
CATSREEGGGYTF

SEQ ID NO: 259499 - protein, 15 aa, Homo sapiens
  CDR3 for alpha chain variable domain of TCR clone 129750 (TRAV26-2, TRAJ28)
CILVESGAGSYQLTF

SEQ ID NO: 259500 - protein, 16 aa, Homo sapiens
  CDR3 for beta chain variable domain of TCR clone 129750 (TRBV4-2, TRBJ1-2)
CASSQEIGGAGYGYTF

SEQ ID NO: 259501 - protein, 15 aa, Homo sapiens
  CDR3 for alpha chain variable domain of TCR clone 129751 (TRAV13-2, TRAJ16)
CAENDRFSDGQKLLF

SEQ ID NO: 259502 - protein, 14 aa, Homo sapiens
  CDR3 for beta chain variable domain of TCR clone 129751 (TRBV7-3, TRBJ2-2)
CASSSGGYTGELFF

SEQ ID NO: 259503 - protein, 14 aa, Homo sapiens
  CDR3 for alpha chain variable domain of TCR clone 129752 (TRAV1-2, TRAJ16)
CAVNRFSDGQKLLF

SEQ ID NO: 259504 - protein, 14 aa, Homo sapiens
  CDR3 for beta chain variable domain of TCR clone 129752 (TRBV5-1, TRBJ1-1)
CASSLTRRSTEAFF

SEQ ID NO: 259505 - protein, 13 aa, Homo sapiens
  CDR3 for alpha chain variable domain of TCR clone 129753 (TRAV1-2, TRAJ9)
CAALNTGDFKTIF

SEQ ID NO: 259506 - protein, 13 aa, Homo sapiens
  CDR3 for beta chain variable domain of TCR clone 129753 (TRBV7-9, TRBJ1-2)
CASSLKQNYGYTF

SEQ ID NO: 259507 - protein, 14 aa, Homo sapiens
  CDR3 for alpha chain variable domain of TCR clone 129754 (TRAV3, TRAJ22)
CAVRDYGSARQLTF

SEQ ID NO: 259508 - protein, 13 aa, Homo sapiens
  CDR3 for beta chain variable domain of TCR clone 129754 (TRBV11-2, TRBJ2-5)
CASGHGAKETHYF

SEQ ID NO: 259509 - protein, 17 aa, Homo sapiens
  CDR3 for alpha chain variable domain of TCR clone 129755 (TRAV1-2, TRAJ57)
CAASSTLSQGGSEKLVF

SEQ ID NO: 259510 - protein, 14 aa, Homo sapiens
  CDR3 for beta chain variable domain of TCR clone 129755 (TRBV25-1, TRBJ1-1)
CASTHLGGNTEAFF

SEQ ID NO: 259511 - protein, 18 aa, Homo sapiens
  CDR3 for alpha chain variable domain of TCR clone 129756 (TRAV21, TRAJ52)
CAVRPSPAGGTSYGKLTF

SEQ ID NO: 259512 - protein, 14 aa, Homo sapiens
  CDR3 for beta chain variable domain of TCR clone 129756 (TRBV9, TRBJ1-1)
CASSVEGGGTEAFF

SEQ ID NO: 259513 - protein, 14 aa, Homo sapiens
  CDR3 for alpha chain variable domain of TCR clone 129757 (TRAV12-3, TRAJ22)
CAMSLFGSARQLTF

SEQ ID NO: 259514 - protein, 11 aa, Homo sapiens
  CDR3 for beta chain variable domain of TCR clone 129757 (TRBV12-4, TRBJ2-2)
CAISSAGELFF

SEQ ID NO: 259515 - protein, 17 aa, Homo sapiens
  CDR3 for alpha chain variable domain of TCR clone 129758 (TRAV3, TRAJ42)
CAVRDRDYGGSQGNIIF

SEQ ID NO: 259516 - protein, 12 aa, Homo sapiens
  CDR3 for beta chain variable domain of TCR clone 129758 (TRBV11-2, TRBJ2-1)
CASSPGNNEQFF

SEQ ID NO: 259517 - protein, 16 aa, Homo sapiens
  CDR3 for alpha chain variable domain of TCR clone 129759 (TRAV30, TRAJ24)
CGTEIVDADSWGNFQF

SEQ ID NO: 259518 - protein, 13 aa, Homo sapiens
  CDR3 for beta chain variable domain of TCR clone 129759 (TRBV4-1, TRBJ2-2)
CASSQENTGELFF

SEQ ID NO: 259519 - protein, 21 aa, Homo sapiens
  CDR3 for alpha chain variable domain of TCR clone 129760 (TRAV29/DV5, TRAJ52)
CSVLLCSTREAGGTSYGKLTF

SEQ ID NO: 259520 - protein, 13 aa, Homo sapiens
  CDR3 for beta chain variable domain of TCR clone 129760 (TRBV27, TRBJ1-4)
CASSLMGDEKLFF

SEQ ID NO: 259521 - protein, 17 aa, Homo sapiens
  CDR3 for alpha chain variable domain of TCR clone 129761 (TRAV26-2, TRAJ42)
CILRDVGYGGSQGNLIF

SEQ ID NO: 259522 - protein, 16 aa, Homo sapiens
  CDR3 for beta chain variable domain of TCR clone 129761 (TRBV12-4, TRBJ2-7)
CASILIGGTGTYEQYF

SEQ ID NO: 259523 - protein, 16 aa, Homo sapiens
  CDR3 for alpha chain variable domain of TCR clone 129762 (TRAV26-1, TRAJ38)
CIVRVELGGNNRKLLW

SEQ ID NO: 259524 - protein, 14 aa, Homo sapiens
  CDR3 for beta chain variable domain of TCR clone 129762 (TRBV5-1, TRBJ2-3)
CASSPGLAADTQYF

SEQ ID NO: 259525 - protein, 16 aa, Homo sapiens
  CDR3 for alpha chain variable domain of TCR clone 129763 (TRAV3, TRAJ10)
CAVRDMRAGGGNKLTF

SEQ ID NO: 259526 - protein, 12 aa, Homo sapiens
  CDR3 for beta chain variable domain of TCR clone 129763 (TRBV7-6, TRBJ2-7)
CASSLDPVEQYF

SEQ ID NO: 259527 - protein, 14 aa, Homo sapiens
  CDR3 for alpha chain variable domain of TCR clone 129764 (TRAV17, TRAJ57)
CATDPQGGSEKLVF

SEQ ID NO: 259528 - protein, 13 aa, Homo sapiens
  CDR3 for beta chain variable domain of TCR clone 129764 (TRBV19, TRBJ2-7)
CASSIRSSYEQYF

SEQ ID NO: 259529 - protein, 14 aa, Homo sapiens
  CDR3 for alpha chain variable domain of TCR clone 129765 (TRAV12-2, TRAJ13)
CAVKKTGGYQKVTF

SEQ ID NO: 259530 - protein, 12 aa, Homo sapiens
  CDR3 for beta chain variable domain of TCR clone 129765 (TRBV7-8, TRBJ2-7)
CASEGGPHGQYF

SEQ ID NO: 259531 - protein, 13 aa, Homo sapiens
  CDR3 for alpha chain variable domain of TCR clone 129766 (TRAV35, TRAJ48)
CAGHEFGNEKLTF

SEQ ID NO: 259532 - protein, 13 aa, Homo sapiens
  CDR3 for beta chain variable domain of TCR clone 129766 (TRBV7-2, TRBJ1-6)
CASSLVGSSTLHF

SEQ ID NO: 259533 - protein, 14 aa, Homo sapiens
  CDR3 for alpha chain variable domain of TCR clone 129767 (TRAV2, TRAJ9)
CAVEDRSGGFKTIF

SEQ ID NO: 259534 - protein, 17 aa, Homo sapiens
  CDR3 for beta chain variable domain of TCR clone 129767 (TRBV23-1, TRBJ2-1)
CISAPAVNRDQGGEQFF

SEQ ID NO: 259535 - protein, 17 aa, Homo sapiens
  CDR3 for alpha chain variable domain of TCR clone 129768 (TRAV3, TRAJ13)
CAVRDMRRTGGYQTVTF

SEQ ID NO: 259536 - protein, 14 aa, Homo sapiens
  CDR3 for beta chain variable domain of TCR clone 129768 (TRBV5-1, TRBJ2-7)
CASSLTGSGYEQYF

SEQ ID NO: 259537 - protein, 14 aa, Homo sapiens
  CDR3 for alpha chain variable domain of TCR clone 129769 (TRAV12-1, TRAJ17)
CVVNYKAAGNKLTF

SEQ ID NO: 259538 - protein, 15 aa, Homo sapiens
  CDR3 for beta chain variable domain of TCR clone 129769 (TRBV20-1, TRBJ2-7)
CSARDRVSGMGEQYF

SEQ ID NO: 259539 - protein, 14 aa, Homo sapiens
  CDR3 for alpha chain variable domain of TCR clone 129770 (TRAV8-2, TRAJ4)
CVLSPSGGYNKLIF

SEQ ID NO: 259540 - protein, 15 aa, Homo sapiens
  CDR3 for beta chain variable domain of TCR clone 129770 (TRBV4-1, TRBJ1-4)
CASSDTGGTDEKLFF

SEQ ID NO: 259541 - protein, 12 aa, Homo sapiens
  CDR3 for alpha chain variable domain of TCR clone 129771 (TRAV13-2, TRAJ23)
CAERHRGGKLIF

SEQ ID NO: 259542 - protein, 19 aa, Homo sapiens
  CDR3 for beta chain variable domain of TCR clone 129771 (TRBV5-1, TRBJ2-3)
CASSLTRIAADWSTDTQYF

SEQ ID NO: 259543 - protein, 14 aa, Homo sapiens
  CDR3 for alpha chain variable domain of TCR clone 129772 (TRAV13-1, TRAJ9)
CAASGLTGGFKTIF

SEQ ID NO: 259544 - protein, 13 aa, Homo sapiens
  CDR3 for beta chain variable domain of TCR clone 129772 (TRBV20-1, TRBJ1-1)
CSAGTVGNAEAFF

SEQ ID NO: 259545 - protein, 14 aa, Homo sapiens
  CDR3 for alpha chain variable domain of TCR clone 129773 (TRAV16, TRAJ54)
CALSLIQGAQKLVS

SEQ ID NO: 259546 - protein, 15 aa, Homo sapiens
  CDR3 for beta chain variable domain of TCR clone 129773 (TRBV20-1, TRBJ2-7)
CSARDRVSGMDEQYF

SEQ ID NO: 259547 - protein, 12 aa, Homo sapiens
  CDR3 for alpha chain variable domain of TCR clone 129774 (TRAV8-3, TRAJ26)
CAGGNYGQNFVF

SEQ ID NO: 259548 - protein, 13 aa, Homo sapiens
  CDR3 for beta chain variable domain of TCR clone 129774 (TRBV4-2, TRBJ1-1)
CASSQAGNTEAFF

SEQ ID NO: 259549 - protein, 13 aa, Homo sapiens
  CDR3 for alpha chain variable domain of TCR clone 129775 (TRAV13-2, TRAJ13)
CAERPGGYQKVTF

SEQ ID NO: 259550 - protein, 14 aa, Homo sapiens
  CDR3 for beta chain variable domain of TCR clone 129775 (TRBV23-1, TRBJ2-5)
CASSFIRSQETQYF

SEQ ID NO: 259551 - protein, 16 aa, Homo sapiens
  CDR3 for alpha chain variable domain of TCR clone 129776 (TRAV35, TRAJ28)
CAGQRYTGAGSYQLTF

SEQ ID NO: 259552 - protein, 13 aa, Homo sapiens
  CDR3 for beta chain variable domain of TCR clone 129776 (TRBV19, TRBJ1-2)
CASSQGQVYGYTF

SEQ ID NO: 259553 - protein, 14 aa, Homo sapiens
  CDR3 for alpha chain variable domain of TCR clone 129777 (TRAV12-2, TRAJ53)
CAGKGGGSNYKLTF

SEQ ID NO: 259554 - protein, 15 aa, Homo sapiens
  CDR3 for beta chain variable domain of TCR clone 129777 (TRBV11-2, TRBJ2-2)
CASSSDRVNAGELFF

SEQ ID NO: 259555 - protein, 15 aa, Homo sapiens
  CDR3 for alpha chain variable domain of TCR clone 129778 (TRAV35, TRAJ23)
CAGQRGYNQGGKLIF

SEQ ID NO: 259556 - protein, 16 aa, Homo sapiens
  CDR3 for beta chain variable domain of TCR clone 129778 (TRBV27, TRBJ2-1)
CASSSRLAGNYNEQFL

SEQ ID NO: 259557 - protein, 17 aa, Homo sapiens
  CDR3 for alpha chain variable domain of TCR clone 129779 (TRAV8-6, TRAJ58)
CAVSSRVGETSGSRLTF

SEQ ID NO: 259558 - protein, 17 aa, Homo sapiens
  CDR3 for beta chain variable domain of TCR clone 129779 (TRBV4-3, TRBJ1-2)
CASSSRLQAGGSVGYTF

SEQ ID NO: 259559 - protein, 12 aa, Homo sapiens
  CDR3 for alpha chain variable domain of TCR clone 129780 (TRAV8-3, TRAJ20)
CAVGGGDYKLSF

SEQ ID NO: 259560 - protein, 14 aa, Homo sapiens
  CDR3 for beta chain variable domain of TCR clone 129780 (TRBV18, TRBJ2-7)
CASSPTSGGYEQYF

SEQ ID NO: 259561 - protein, 11 aa, Homo sapiens
  CDR3 for alpha chain variable domain of TCR clone 129781 (TRAV2, TRAJ13)
CASGGYQKVTL

SEQ ID NO: 259562 - protein, 15 aa, Homo sapiens
  CDR3 for beta chain variable domain of TCR clone 129781 (TRBV7-9, TRBJ1-5)
CASSQGHQPNQPQHF

SEQ ID NO: 259563 - protein, 13 aa, Homo sapiens
  CDR3 for alpha chain variable domain of TCR clone 129782 (TRAV8-3, TRAJ36)
CAVGATGANNLFF

SEQ ID NO: 259564 - protein, 15 aa, Homo sapiens
  CDR3 for beta chain variable domain of TCR clone 129782 (TRBV9, TRBJ1-6)
CASSVAGTGDSPLHV

SEQ ID NO: 259565 - protein, 13 aa, Homo sapiens
  CDR3 for alpha chain variable domain of TCR clone 129783 (TRAV2, TRAJ40)
CAVVTSGTYKYIF

SEQ ID NO: 259566 - protein, 16 aa, Homo sapiens
  CDR3 for beta chain variable domain of TCR clone 129783 (TRBV29-1, TRBJ2-6)
CSVEDITYSVANVLTF

SEQ ID NO: 259567 - protein, 15 aa, Homo sapiens
  CDR3 for alpha chain variable domain of TCR clone 129784 (TRAV21, TRAJ24)
CAARSSTDSWGKLQF

SEQ ID NO: 259568 - protein, 14 aa, Homo sapiens
  CDR3 for beta chain variable domain of TCR clone 129784 (TRBV7-3, TRBJ2-1)
CASSLAGGTNEQFF

SEQ ID NO: 259569 - protein, 14 aa, Homo sapiens
  CDR3 for alpha chain variable domain of TCR clone 129785 (TRAV16, TRAJ16)
CALSVLSDGQKLLF

SEQ ID NO: 259570 - protein, 14 aa, Homo sapiens
  CDR3 for beta chain variable domain of TCR clone 129785 (TRBV20-1, TRBJ2-7)
CSAPELAGVGEQYF

SEQ ID NO: 259571 - protein, 15 aa, Homo sapiens
  CDR3 for alpha chain variable domain of TCR clone 129786 (TRAV25, TRAJ52)
CAGTSGGTSYGKLTF

SEQ ID NO: 259572 - protein, 13 aa, Homo sapiens
  CDR3 for beta chain variable domain of TCR clone 129786 (TRBV6-5, TRBJ2-5)
CASRPQGGETQYF

SEQ ID NO: 259573 - protein, 14 aa, Homo sapiens
  CDR3 for alpha chain variable domain of TCR clone 129787 (TRAV17, TRAJ35)
CATDRPGFGNVLHC

SEQ ID NO: 259574 - protein, 14 aa, Homo sapiens
  CDR3 for beta chain variable domain of TCR clone 129787 (TRBV13, TRBJ2-7)
CASSLKGASYEQYF

SEQ ID NO: 259575 - protein, 16 aa, Homo sapiens
  CDR3 for alpha chain variable domain of TCR clone 129788 (TRAV21, TRAJ37)
CAVRPRGSSNTGKLIF

SEQ ID NO: 259576 - protein, 13 aa, Homo sapiens
  CDR3 for beta chain variable domain of TCR clone 129788 (TRBV7-9, TRBJ2-5)
GASLSPGQETQYF

SEQ ID NO: 259577 - protein, 15 aa, Homo sapiens
  CDR3 for alpha chain variable domain of TCR clone 129789 (TRAV30, TRAJ32)
CGTEILGGATNKLIF

SEQ ID NO: 259578 - protein, 13 aa, Homo sapiens
  CDR3 for beta chain variable domain of TCR clone 129789 (TRBV6-3, TRBJ2-7)
CASSFSGGYEQCF

SEQ ID NO: 259579 - protein, 12 aa, Homo sapiens
  CDR3 for alpha chain variable domain of TCR clone 129790 (TRAV16, TRAJ10)
CSRTGGGNKLTF

SEQ ID NO: 259580 - protein, 15 aa, Homo sapiens
  CDR3 for beta chain variable domain of TCR clone 129790 (TRBV6-3, TRBJ2-7)
CASSSPGTVFYERYF

SEQ ID NO: 259581 - protein, 13 aa, Homo sapiens
  CDR3 for alpha chain variable domain of TCR clone 129791 (TRAV1-2, TRAJ26)
CSVRPNYGQNFVF

SEQ ID NO: 259582 - protein, 14 aa, Homo sapiens
  CDR3 for beta chain variable domain of TCR clone 129791 (TRBV4-1, TRBJ2-5)
CASSQDLALETQYF

SEQ ID NO: 259583 - protein, 13 aa, Homo sapiens
  CDR3 for alpha chain variable domain of TCR clone 129792 (TRAV20, TRAJ54)
CAVQAGGAQKLVF

SEQ ID NO: 259584 - protein, 14 aa, Homo sapiens
  CDR3 for beta chain variable domain of TCR clone 129792 (TRBV20-1, TRBJ2-7)
CSAKTGTGGYEQYF

SEQ ID NO: 259585 - protein, 14 aa, Homo sapiens
  CDR3 for alpha chain variable domain of TCR clone 129793 (TRAV38-1, TRAJ54)
CAFMSPSGAKKLVF

SEQ ID NO: 259586 - protein, 16 aa, Homo sapiens
  CDR3 for beta chain variable domain of TCR clone 129793 (TRBV28, TRBJ2-1)
CASSLGGSGSYNEQFF

SEQ ID NO: 259587 - protein, 13 aa, Homo sapiens
  CDR3 for alpha chain variable domain of TCR clone 129794 (TRAV8-3, TRAJ28)
CAVAAVGSYQLTF

SEQ ID NO: 259588 - protein, 15 aa, Homo sapiens
  CDR3 for beta chain variable domain of TCR clone 129794 (TRBV7-9, TRBJ1-5)
CASSQGHQPNQPQHF

SEQ ID NO: 259589 - protein, 18 aa, Homo sapiens
  CDR3 for alpha chain variable domain of TCR clone 129795 (TRAV26-1, TRAJ22)
CIVRVVLISSGSARQLTF

SEQ ID NO: 259590 - protein, 13 aa, Homo sapiens
  CDR3 for beta chain variable domain of TCR clone 129795 (TRBV13, TRBJ2-5)
CASSPEVGETQYF

SEQ ID NO: 259591 - protein, 14 aa, Homo sapiens
  CDR3 for alpha chain variable domain of TCR clone 129796 (TRAV12-3, TRAJ10)
SHLPLTGGGNKLTF

SEQ ID NO: 259592 - protein, 15 aa, Homo sapiens
  CDR3 for beta chain variable domain of TCR clone 129796 (TRBV7-8, TRBJ2-1)
CASSLAGGLYNEQFF

SEQ ID NO: 259593 - protein, 11 aa, Homo sapiens
  CDR3 for alpha chain variable domain of TCR clone 129797 (TRAV17, TRAJ9)
CGFTGGFKTIF

SEQ ID NO: 259594 - protein, 16 aa, Homo sapiens
  CDR3 for beta chain variable domain of TCR clone 129797 (TRBV7-9, TRBJ1-2)
CASSLGFSSGEDGYTF

SEQ ID NO: 259595 - protein, 23 aa, Homo sapiens
  CDR3 for alpha chain variable domain of TCR clone 129798 (TRAV26-1, )
CIADNAGNNHIQNPDPAVYQLRD

SEQ ID NO: 259596 - protein, 13 aa, Homo sapiens
  CDR3 for beta chain variable domain of TCR clone 129798 (TRBV20-1, TRBJ1-1)
CSARGGGSTEAFF

SEQ ID NO: 259597 - protein, 13 aa, Homo sapiens
  CDR3 for alpha chain variable domain of TCR clone 129799 (TRAV8-3, TRAJ28)
CAVGAVGSYQLTF

SEQ ID NO: 259598 - protein, 15 aa, Homo sapiens
  CDR3 for beta chain variable domain of TCR clone 129799 (TRBV7-9, TRBJ1-5)
CASSQGHQPNQPRHF

SEQ ID NO: 259599 - protein, 15 aa, Homo sapiens
  CDR3 for alpha chain variable domain of TCR clone 129800 (TRAV40, TRAJ39)
CLLPPRGNAGNMLTF

SEQ ID NO: 259600 - protein, 17 aa, Homo sapiens
  CDR3 for beta chain variable domain of TCR clone 129800 (TRBV4-1, TRBJ1-3)
CASSPQRGIRFGNTIYF

SEQ ID NO: 259601 - protein, 16 aa, Homo sapiens
  CDR3 for alpha chain variable domain of TCR clone 129801 (TRAV20, TRAJ22)
CAVQASSSGSARQLTF

SEQ ID NO: 259602 - protein, 16 aa, Homo sapiens
  CDR3 for beta chain variable domain of TCR clone 129801 (TRBV20-1, TRBJ1-5)
CSAGRGTGYSNQPQHF

SEQ ID NO: 259603 - protein, 14 aa, Homo sapiens
  CDR3 for alpha chain variable domain of TCR clone 129802 (TRAV12-3, TRAJ29)
CAMSPYSGNTPLVF

SEQ ID NO: 259604 - protein, 12 aa, Homo sapiens
  CDR3 for beta chain variable domain of TCR clone 129802 (TRBV7-3, TRBJ1-2)
CASSKKGVPVTF

SEQ ID NO: 259605 - protein, 14 aa, Homo sapiens
  CDR3 for alpha chain variable domain of TCR clone 129803 (TRAV12-1, TRAJ23)
CVVIAYNQGGKLIF

SEQ ID NO: 259606 - protein, 15 aa, Homo sapiens
  CDR3 for beta chain variable domain of TCR clone 129803 (TRBV20-1, TRBJ1-5)
CSAKPPGQGPQPQHF

SEQ ID NO: 259607 - protein, 14 aa, Homo sapiens
  CDR3 for alpha chain variable domain of TCR clone 129804 (TRAV12-1, TRAJ12)
CVVTRMDSSSKLIF

SEQ ID NO: 259608 - protein, 13 aa, Homo sapiens
  CDR3 for beta chain variable domain of TCR clone 129804 (TRBV20-1, TRBJ1-1)
CSARGGGNTEAFF

SEQ ID NO: 259609 - protein, 14 aa, Homo sapiens
  CDR3 for alpha chain variable domain of TCR clone 129805 (TRAV3, TRAJ21)
CALGRGATNFTLDL

SEQ ID NO: 259610 - protein, 14 aa, Homo sapiens
  CDR3 for beta chain variable domain of TCR clone 129805 (TRBV7-9, TRBJ2-4)
CASSLAMGGNIQYF

SEQ ID NO: 259611 - protein, 14 aa, Homo sapiens
  CDR3 for alpha chain variable domain of TCR clone 129806 (TRAV12-3, TRAJ12)
CAMSEVDSSYKWIF

SEQ ID NO: 259612 - protein, 12 aa, Homo sapiens
  CDR3 for beta chain variable domain of TCR clone 129806 (TRBV18, TRBJ1-4)
CASSPSREKLFF

SEQ ID NO: 259613 - protein, 16 aa, Homo sapiens
  CDR3 for alpha chain variable domain of TCR clone 129807 (TRAV30, TRAJ24)
CGTEIVDADSWGKFQF

SEQ ID NO: 259614 - protein, 13 aa, Homo sapiens
  CDR3 for beta chain variable domain of TCR clone 129807 (TRBV7-3, TRBJ2-1)
CASSPGSYNEQFF

SEQ ID NO: 259615 - protein, 17 aa, Homo sapiens
  CDR3 for alpha chain variable domain of TCR clone 129808 (TRAV3, TRAJ6)
CAVRDGPRAGGSYIPTF

SEQ ID NO: 259616 - protein, 13 aa, Homo sapiens
  CDR3 for beta chain variable domain of TCR clone 129808 (TRBV3-1, TRBJ2-7)
CASSLRDGYEQYF

SEQ ID NO: 259617 - protein, 16 aa, Homo sapiens
  CDR3 for alpha chain variable domain of TCR clone 129809 (TRAV38-1, TRAJ32)
CAFMKGGGGATNKLIF

SEQ ID NO: 259618 - protein, 13 aa, Homo sapiens
  CDR3 for beta chain variable domain of TCR clone 129809 (TRBV20-1, TRBJ2-5)
CSAREAFQETQYS

SEQ ID NO: 259619 - protein, 15 aa, Homo sapiens
  CDR3 for alpha chain variable domain of TCR clone 129810 (TRAV20, TRAJ58)
CAVQDLETSGSRLTF

SEQ ID NO: 259620 - protein, 15 aa, Homo sapiens
  CDR3 for beta chain variable domain of TCR clone 129810 (TRBV25-1, TRBJ2-5)
CASTLMGQNQETQYF

SEQ ID NO: 259621 - protein, 13 aa, Homo sapiens
  CDR3 for alpha chain variable domain of TCR clone 129811 (TRAV12-3, TRAJ33)
CALSVNSNYQLIW

SEQ ID NO: 259622 - protein, 13 aa, Homo sapiens
  CDR3 for beta chain variable domain of TCR clone 129811 (TRBV4-1, TRBJ2-2)
CASSQENTGELFF

SEQ ID NO: 259623 - protein, 16 aa, Homo sapiens
  CDR3 for alpha chain variable domain of TCR clone 129812 (TRAV4, TRAJ22)
CLVGDLYSGSARQLTF

SEQ ID NO: 259624 - protein, 12 aa, Homo sapiens
  CDR3 for beta chain variable domain of TCR clone 129812 (TRBV12-4, TRBJ2-7)
CASSLGGYEQYF

SEQ ID NO: 259625 - protein, 14 aa, Homo sapiens
  CDR3 for alpha chain variable domain of TCR clone 129813 (TRAV29/DV5, TRAJ13)
CAASLSGGYQKVTF

SEQ ID NO: 259626 - protein, 16 aa, Homo sapiens
  CDR3 for beta chain variable domain of TCR clone 129813 (TRBV7-9, TRBJ2-7)
CASSYPDREGGYEQYF

SEQ ID NO: 259627 - protein, 10 aa, Homo sapiens
  CDR3 for alpha chain variable domain of TCR clone 129814 (TRAV1-2, TRAJ31)
CVSEDARLMF

SEQ ID NO: 259628 - protein, 14 aa, Homo sapiens
  CDR3 for beta chain variable domain of TCR clone 129814 (TRBV19, TRBJ2-1)
CASPTFFLSGEQFF

SEQ ID NO: 259629 - protein, 23 aa, Homo sapiens
  CDR3 for alpha chain variable domain of TCR clone 129815 (TRAV1-1, TRAJ29)
LLQELQMKDSASYFLGGNTPLVF

SEQ ID NO: 259630 - protein, 14 aa, Homo sapiens
  CDR3 for beta chain variable domain of TCR clone 129815 (TRBV2, TRBJ2-5)
CASTWGRAQETQYF

SEQ ID NO: 259631 - protein, 15 aa, Homo sapiens
  CDR3 for alpha chain variable domain of TCR clone 129816 (TRAV12-2, TRAJ43)
CAFDMRFGAGTRLTV

SEQ ID NO: 259632 - protein, 18 aa, Homo sapiens
  CDR3 for beta chain variable domain of TCR clone 129816 (TRBV20-1, TRBJ2-3)
CSASGLAGGPGTTDKQYF

SEQ ID NO: 259633 - protein, 16 aa, Homo sapiens
  CDR3 for alpha chain variable domain of TCR clone 129817 (TRAV35, TRAJ28)
CDGQKYSGAGSYQLTF

SEQ ID NO: 259634 - protein, 13 aa, Homo sapiens
  CDR3 for beta chain variable domain of TCR clone 129817 (TRBV19, TRBJ1-2)
CASSQGQVYGYTF

SEQ ID NO: 259635 - protein, 16 aa, Homo sapiens
  CDR3 for alpha chain variable domain of TCR clone 129818 (TRAV27, TRAJ48)
TAAQPGDTGLYLPLTF

SEQ ID NO: 259636 - protein, 15 aa, Homo sapiens
  CDR3 for beta chain variable domain of TCR clone 129818 (TRBV7-9, TRBJ2-7)
CASSLALAEAYEQYF

SEQ ID NO: 259637 - protein, 14 aa, Homo sapiens
  CDR3 for alpha chain variable domain of TCR clone 129819 (TRAV12-2, TRAJ9)
CAVNMEGGGFKTIF

SEQ ID NO: 259638 - protein, 13 aa, Homo sapiens
  CDR3 for beta chain variable domain of TCR clone 129819 (TRBV7-3, TRBJ1-1)
CASSQDWGAEAFF

SEQ ID NO: 259639 - protein, 14 aa, Homo sapiens
  CDR3 for alpha chain variable domain of TCR clone 129820 (TRAV8-4, TRAJ5)
CALSTDTGRRALTF

SEQ ID NO: 259640 - protein, 14 aa, Homo sapiens
  CDR3 for beta chain variable domain of TCR clone 129820 (TRBV5-1, TRBJ2-2)
CASSLGGGSGELFF

SEQ ID NO: 259641 - protein, 13 aa, Homo sapiens
  CDR3 for alpha chain variable domain of TCR clone 129821 (TRAV14/DV4, TRAJ23)
CAMREVKGGKLIF

SEQ ID NO: 259642 - protein, 15 aa, Homo sapiens
  CDR3 for beta chain variable domain of TCR clone 129821 (TRBV5-1, TRBJ2-1)
CASSPPRAPYNEQFF

SEQ ID NO: 259643 - protein, 12 aa, Homo sapiens
  CDR3 for alpha chain variable domain of TCR clone 129822 (TRAV12-3, TRAJ4)
FAMTGAGTRLAV

SEQ ID NO: 259644 - protein, 14 aa, Homo sapiens
  CDR3 for beta chain variable domain of TCR clone 129822 (TRBV10-3, TRBJ1-1)
CAISDTDRGVEAFF

SEQ ID NO: 259645 - protein, 17 aa, Homo sapiens
  CDR3 for alpha chain variable domain of TCR clone 129823 (TRAV26-1, TRAJ27)
CIVSTPWINTNAGNSTF

SEQ ID NO: 259646 - protein, 16 aa, Homo sapiens
  CDR3 for beta chain variable domain of TCR clone 129823 (TRBV7-9, TRBJ2-1)
CASSLDPGLAIDEQFF

SEQ ID NO: 259647 - protein, 12 aa, Homo sapiens
  CDR3 for alpha chain variable domain of TCR clone 129824 (TRAV36/DV7, TRAJ26)
CAADNYGQNFVF

SEQ ID NO: 259648 - protein, 16 aa, Homo sapiens
  CDR3 for beta chain variable domain of TCR clone 129824 (TRBV7-3, TRBJ2-1)
CASSLEGYRSYNEQFF

SEQ ID NO: 259649 - protein, 16 aa, Homo sapiens
  CDR3 for alpha chain variable domain of TCR clone 129825 (TRAV3, TRAJ37)
CAVRPHGSGNTGKLIF

SEQ ID NO: 259650 - protein, 13 aa, Homo sapiens
  CDR3 for beta chain variable domain of TCR clone 129825 (TRBV6-4, TRBJ1-5)
CASSADLNQPQHF

SEQ ID NO: 259651 - protein, 14 aa, Homo sapiens
  CDR3 for alpha chain variable domain of TCR clone 129826 (TRAV17, TRAJ22)
CATSPSGSERQLTF

SEQ ID NO: 259652 - protein, 15 aa, Homo sapiens
  CDR3 for beta chain variable domain of TCR clone 129826 (TRBV4-1, TRBJ2-5)
CASSQWDLYQETQYF

SEQ ID NO: 259653 - protein, 14 aa, Homo sapiens
  CDR3 for alpha chain variable domain of TCR clone 129827 (TRAV12-1, TRAJ30)
CVVNIGGRDDTIIF

SEQ ID NO: 259654 - protein, 13 aa, Homo sapiens
  CDR3 for beta chain variable domain of TCR clone 129827 (TRBV12-5, TRBJ2-1)
CASGLGRGNEQFF

SEQ ID NO: 259655 - protein, 12 aa, Homo sapiens
  CDR3 for alpha chain variable domain of TCR clone 129828 (TRAV2, TRAJ31)
CAVEEGNARLMF

SEQ ID NO: 259656 - protein, 18 aa, Homo sapiens
  CDR3 for beta chain variable domain of TCR clone 129828 (TRBV7-9, TRBJ2-3)
CASSLDHAGLATPDTQYF

SEQ ID NO: 259657 - protein, 14 aa, Homo sapiens
  CDR3 for alpha chain variable domain of TCR clone 129829 (TRAV4, TRAJ23)
CLVGAGNQGGKLIF

SEQ ID NO: 259658 - protein, 12 aa, Homo sapiens
  CDR3 for beta chain variable domain of TCR clone 129829 (TRBV29-1, TRBJ2-3)
CSVTRGADTQYF

SEQ ID NO: 259659 - protein, 11 aa, Homo sapiens
  CDR3 for alpha chain variable domain of TCR clone 129830 (TRAV2, TRAJ13)
CASGGYQKVTF

SEQ ID NO: 259660 - protein, 14 aa, Homo sapiens
  CDR3 for beta chain variable domain of TCR clone 129830 (TRBV23-1, TRBJ2-5)
CASSFLRSQETQYF

SEQ ID NO: 259661 - protein, 14 aa, Homo sapiens
  CDR3 for alpha chain variable domain of TCR clone 129831 (TRAV17, TRAJ39)
CATDPVRAGNMLTF

SEQ ID NO: 259662 - protein, 16 aa, Homo sapiens
  CDR3 for beta chain variable domain of TCR clone 129831 (TRBV12-5, TRBJ2-5)
CASGPRTSGNQETQYF

SEQ ID NO: 259663 - protein, 14 aa, Homo sapiens
  CDR3 for alpha chain variable domain of TCR clone 129832 (TRAV26-1, TRAJ39)
CIVGGSRAGNMLTF

SEQ ID NO: 259664 - protein, 14 aa, Homo sapiens
  CDR3 for beta chain variable domain of TCR clone 129832 (TRBV25-1, TRBJ1-1)
CASTHLGGNTEAFF

SEQ ID NO: 259665 - protein, 13 aa, Homo sapiens
  CDR3 for alpha chain variable domain of TCR clone 129833 (TRAV12-1, TRAJ6)
CVVYPGGSYIPTL

SEQ ID NO: 259666 - protein, 13 aa, Homo sapiens
  CDR3 for beta chain variable domain of TCR clone 129833 (TRBV4-2, TRBJ1-1)
CASSQAGNTEAFF

SEQ ID NO: 259667 - protein, 15 aa, Homo sapiens
  CDR3 for alpha chain variable domain of TCR clone 129834 (TRAV38-2/DV8, TRAJ45)
CAYWDSGGDADGLTF

SEQ ID NO: 259668 - protein, 16 aa, Homo sapiens
  CDR3 for beta chain variable domain of TCR clone 129834 (TRBV27, TRBJ2-2)
CASSFRGLVRTGELFF

SEQ ID NO: 259669 - protein, 11 aa, Homo sapiens
  CDR3 for alpha chain variable domain of TCR clone 129835 (TRAV1-2, TRAJ31)
CAVNNNARLMF

SEQ ID NO: 259670 - protein, 15 aa, Homo sapiens
  CDR3 for beta chain variable domain of TCR clone 129835 (TRBV28, TRBJ2-1)
CASSIIAGGRCEQFF

SEQ ID NO: 259671 - protein, 14 aa, Homo sapiens
  CDR3 for alpha chain variable domain of TCR clone 129836 (TRAV12-2, TRAJ24)
CAVTPADSWGKFQF

SEQ ID NO: 259672 - protein, 12 aa, Homo sapiens
  CDR3 for beta chain variable domain of TCR clone 129836 (TRBV3-1, TRBJ2-1)
CASSQGSSGQFF

SEQ ID NO: 259673 - protein, 14 aa, Homo sapiens
  CDR3 for alpha chain variable domain of TCR clone 129837 (TRAV12-1, TRAJ17)
CVVNPKAAGNKLTF

SEQ ID NO: 259674 - protein, 13 aa, Homo sapiens
  CDR3 for beta chain variable domain of TCR clone 129837 (TRBV11-2, TRBJ1-5)
CASSLDLHQPQHF

SEQ ID NO: 259675 - protein, 15 aa, Homo sapiens
  CDR3 for alpha chain variable domain of TCR clone 129838 (TRAV29/DV5, TRAJ57)
CAASLLRGGSEKLVF

SEQ ID NO: 259676 - protein, 15 aa, Homo sapiens
  CDR3 for beta chain variable domain of TCR clone 129838 (TRBV5-1, TRBJ1-3)
CASSLEGGSGNTTYF

SEQ ID NO: 259677 - protein, 12 aa, Homo sapiens
  CDR3 for alpha chain variable domain of TCR clone 129839 (TRAV35, TRAJ12)
GGRMDSSYKLIF

SEQ ID NO: 259678 - protein, 14 aa, Homo sapiens
  CDR3 for beta chain variable domain of TCR clone 129839 (TRBV19, TRBJ1-1)
CASSPNRGDTEAFF

SEQ ID NO: 259679 - protein, 14 aa, Homo sapiens
  CDR3 for alpha chain variable domain of TCR clone 129840 (TRAV9-2, TRAJ39)
CALYIYNAGNMLTF

SEQ ID NO: 259680 - protein, 16 aa, Homo sapiens
  CDR3 for beta chain variable domain of TCR clone 129840 (TRBV4-2, TRBJ2-3)
CASSQELAGDTDTQYF

SEQ ID NO: 259681 - protein, 16 aa, Homo sapiens
  CDR3 for alpha chain variable domain of TCR clone 129841 (TRAV3, TRAJ37)
CAVRGKGSGNTGKLIF

SEQ ID NO: 259682 - protein, 13 aa, Homo sapiens
  CDR3 for beta chain variable domain of TCR clone 129841 (TRBV9, TRBJ2-1)
CASSVGQGGEQFF

SEQ ID NO: 259683 - protein, 15 aa, Homo sapiens
  CDR3 for alpha chain variable domain of TCR clone 129842 (TRAV23/DV6, TRAJ18)
CAARYRGSTLGRLYF

SEQ ID NO: 259684 - protein, 13 aa, Homo sapiens
  CDR3 for beta chain variable domain of TCR clone 129842 (TRBV7-2, TRBJ2-7)
CASSTPSGSEQYF

SEQ ID NO: 259685 - protein, 12 aa, Homo sapiens
  CDR3 for alpha chain variable domain of TCR clone 129843 (TRAV16, TRAJ26)
CSLRSYGQNFVF

SEQ ID NO: 259686 - protein, 14 aa, Homo sapiens
  CDR3 for beta chain variable domain of TCR clone 129843 (TRBV10-3, TRBJ2-1)
CAISSDLAYNEQFS

SEQ ID NO: 259687 - protein, 15 aa, Homo sapiens
  CDR3 for alpha chain variable domain of TCR clone 129844 (TRAV17, TRAJ35)
CATAFVIGFGNVLHC

SEQ ID NO: 259688 - protein, 16 aa, Homo sapiens
  CDR3 for beta chain variable domain of TCR clone 129844 (TRBV7-3, TRBJ2-1)
CASSLEGYRSYNEQFF

SEQ ID NO: 259689 - protein, 15 aa, Homo sapiens
  CDR3 for alpha chain variable domain of TCR clone 129845 (TRAV12-3, TRAJ6)
CAMSPASGGSYIPTF

SEQ ID NO: 259690 - protein, 15 aa, Homo sapiens
  CDR3 for beta chain variable domain of TCR clone 129845 (TRBV19, TRBJ2-1)
CASSLETSGYNEQFF

SEQ ID NO: 259691 - protein, 14 aa, Homo sapiens
  CDR3 for alpha chain variable domain of TCR clone 129846 (TRAV36/DV7, TRAJ44)
CCGANTGTASKLTF

SEQ ID NO: 259692 - protein, 15 aa, Homo sapiens
  CDR3 for beta chain variable domain of TCR clone 129846 (TRBV20-1, TRBJ2-7)
CSARDRVSGMDEQYF

SEQ ID NO: 259693 - protein, 14 aa, Homo sapiens
  CDR3 for alpha chain variable domain of TCR clone 129847 (TRAV17, TRAJ6)
CATPAMGGSYIPTF

SEQ ID NO: 259694 - protein, 14 aa, Homo sapiens
  CDR3 for beta chain variable domain of TCR clone 129847 (TRBV5-1, TRBJ2-7)
CASSRGESLYEQYF

SEQ ID NO: 259695 - protein, 14 aa, Homo sapiens
  CDR3 for alpha chain variable domain of TCR clone 129848 (TRAV1-2, TRAJ8)
CAVREDTGFQKIVF

SEQ ID NO: 259696 - protein, 15 aa, Homo sapiens
  CDR3 for beta chain variable domain of TCR clone 129848 (TRBV4-1, TRBJ2-7)
CASSQNTGRLYEQYF

SEQ ID NO: 259697 - protein, 17 aa, Homo sapiens
  CDR3 for alpha chain variable domain of TCR clone 129849 (TRAV36/DV7, TRAJ52)
CAVAQRAGGTSYGKLTF

SEQ ID NO: 259698 - protein, 15 aa, Homo sapiens
  CDR3 for beta chain variable domain of TCR clone 129849 (TRBV10-2, TRBJ2-6)
CASSEQGTGANVLTF

SEQ ID NO: 259699 - protein, 12 aa, Homo sapiens
  CDR3 for alpha chain variable domain of TCR clone 129850 (TRAV12-3, TRAJ17)
CAMTLTGNKLTF

SEQ ID NO: 259700 - protein, 14 aa, Homo sapiens
  CDR3 for beta chain variable domain of TCR clone 129850 (TRBV7-2, TRBJ2-7)
CASRSQGAAYEQHF

SEQ ID NO: 259701 - protein, 14 aa, Homo sapiens
  CDR3 for alpha chain variable domain of TCR clone 129851 (TRAV1-2, TRAJ8)
CAVREDTGFQKLVF

SEQ ID NO: 259702 - protein, 10 aa, Homo sapiens
  CDR3 for beta chain variable domain of TCR clone 129851 (TRBV2, TRBJ2-5)
CASSAATQYF

SEQ ID NO: 259703 - protein, 12 aa, Homo sapiens
  CDR3 for alpha chain variable domain of TCR clone 129852 (TRAV1-1, TRAJ20)
CAVREDDYKPSF

SEQ ID NO: 259704 - protein, 18 aa, Homo sapiens
  CDR3 for beta chain variable domain of TCR clone 129852 (TRBV20-1, TRBJ2-3)
CSASGLAGGPGTTDTQYF

SEQ ID NO: 259705 - protein, 12 aa, Homo sapiens
  CDR3 for alpha chain variable domain of TCR clone 129853 (TRAV12-3, TRAJ17)
CAMTLTGNKPTF

SEQ ID NO: 259706 - protein, 15 aa, Homo sapiens
  CDR3 for beta chain variable domain of TCR clone 129853 (TRBV19, TRBJ2-1)
CASSILGEGRNEQFF

SEQ ID NO: 259707 - protein, 14 aa, Homo sapiens
  CDR3 for alpha chain variable domain of TCR clone 129854 (TRAV13-1, TRAJ44)
CAARATGTASKLTF

SEQ ID NO: 259708 - protein, 16 aa, Homo sapiens
  CDR3 for beta chain variable domain of TCR clone 129854 (TRBV7-9, TRBJ2-6)
CASSLKGPLRANVLTF

SEQ ID NO: 259709 - protein, 13 aa, Homo sapiens
  CDR3 for alpha chain variable domain of TCR clone 129855 (TRAV17, TRAJ5)
CALRGTGRRALTF

SEQ ID NO: 259710 - protein, 15 aa, Homo sapiens
  CDR3 for beta chain variable domain of TCR clone 129855 (TRBV5-1, TRBJ2-7)
CASSLNGGPAREQYF

SEQ ID NO: 259711 - protein, 13 aa, Homo sapiens
  CDR3 for alpha chain variable domain of TCR clone 129856 (TRAV22, TRAJ29)
CAVGGSGHTPLVF

SEQ ID NO: 259712 - protein, 13 aa, Homo sapiens
  CDR3 for beta chain variable domain of TCR clone 129856 (TRBV4-2, TRBJ1-1)
CASSQAGNTEAFF

SEQ ID NO: 259713 - protein, 15 aa, Homo sapiens
  CDR3 for alpha chain variable domain of TCR clone 129857 (TRAV12-1, TRAJ9)
CVVSFGDTGGFKTIF

SEQ ID NO: 259714 - protein, 13 aa, Homo sapiens
  CDR3 for beta chain variable domain of TCR clone 129857 (TRBV7-3, TRBJ1-1)
CASSQDWGAEAFF

SEQ ID NO: 259715 - protein, 15 aa, Homo sapiens
  CDR3 for alpha chain variable domain of TCR clone 129858 (TRAV26-2, TRAJ13)
CILRDLSGGYQKVTF

SEQ ID NO: 259716 - protein, 11 aa, Homo sapiens
  CDR3 for beta chain variable domain of TCR clone 129858 (TRBV29-1, TRBJ2-5)
CSEDRTGTQYF

SEQ ID NO: 259717 - protein, 10 aa, Homo sapiens
  CDR3 for alpha chain variable domain of TCR clone 129859 (TRAV8-2, TRAJ29)
CTGGNTPLVF

SEQ ID NO: 259718 - protein, 17 aa, Homo sapiens
  CDR3 for beta chain variable domain of TCR clone 129859 (TRBV28, TRBJ2-5)
CASSTPEGDALQETQYF

SEQ ID NO: 259719 - protein, 14 aa, Homo sapiens
  CDR3 for alpha chain variable domain of TCR clone 129860 (TRAV12-2, TRAJ3)
CAVKGYSSASKIIF

SEQ ID NO: 259720 - protein, 14 aa, Homo sapiens
  CDR3 for beta chain variable domain of TCR clone 129860 (TRBV6-3, TRBJ1-2)
CASSEGGGSYGDTF

SEQ ID NO: 259721 - protein, 12 aa, Homo sapiens
  CDR3 for alpha chain variable domain of TCR clone 129861 (TRAV13-1, TRAJ21)
CAAKEGFNKYYF

SEQ ID NO: 259722 - protein, 14 aa, Homo sapiens
  CDR3 for beta chain variable domain of TCR clone 129861 (TRBV5-4, TRBJ1-1)
CASSLDSRRDEAFF

SEQ ID NO: 259723 - protein, 14 aa, Homo sapiens
  CDR3 for alpha chain variable domain of TCR clone 129862 (TRAV12-2, TRAJ17)
CAVLFKAAGNKLTF

SEQ ID NO: 259724 - protein, 16 aa, Homo sapiens
  CDR3 for beta chain variable domain of TCR clone 129862 (TRBV12-4, TRBJ1-5)
CASSRPVGGSNQPQHF

SEQ ID NO: 259725 - protein, 10 aa, Homo sapiens
  CDR3 for alpha chain variable domain of TCR clone 129863 (TRAV23/DV6, TRAJ43)
CAAAVAALEQ

SEQ ID NO: 259726 - protein, 13 aa, Homo sapiens
  CDR3 for beta chain variable domain of TCR clone 129863 (TRBV12-4, TRBJ1-2)
CASSLQQGKGYTF

SEQ ID NO: 259727 - protein, 15 aa, Homo sapiens
  CDR3 for alpha chain variable domain of TCR clone 129864 (TRAV25, TRAJ52)
CAGRPGGTSYGKLTF

SEQ ID NO: 259728 - protein, 14 aa, Homo sapiens
  CDR3 for beta chain variable domain of TCR clone 129864 (TRBV24-1, TRBJ1-1)
CATSIPRGDTEAFF

SEQ ID NO: 259729 - protein, 12 aa, Homo sapiens
  CDR3 for alpha chain variable domain of TCR clone 129865 (TRAV12-3, TRAJ17)
CAMTLTGNKLTF

SEQ ID NO: 259730 - protein, 15 aa, Homo sapiens
  CDR3 for beta chain variable domain of TCR clone 129865 (TRBV4-1, TRBJ2-7)
CASSQEWGPSYEQYF

SEQ ID NO: 259731 - protein, 14 aa, Homo sapiens
  CDR3 for alpha chain variable domain of TCR clone 129866 (TRAV12-2, TRAJ44)
CAVNPAGTASKLTF

SEQ ID NO: 259732 - protein, 16 aa, Homo sapiens
  CDR3 for beta chain variable domain of TCR clone 129866 (TRBV2, TRBJ2-6)
CAISEVGGAGANVLTF

SEQ ID NO: 259733 - protein, 16 aa, Homo sapiens
  CDR3 for alpha chain variable domain of TCR clone 129867 (TRAV3, TRAJ10)
CAVRDMRAGGGNKLTF

SEQ ID NO: 259734 - protein, 14 aa, Homo sapiens
  CDR3 for beta chain variable domain of TCR clone 129867 (TRBV11-2, TRBJ2-3)
CASSRLARTDTQYF

SEQ ID NO: 259735 - protein, 15 aa, Homo sapiens
  CDR3 for alpha chain variable domain of TCR clone 129868 (TRAV21, TRAJ40)
CAVRPQTSGTDKYIF

SEQ ID NO: 259736 - protein, 13 aa, Homo sapiens
  CDR3 for beta chain variable domain of TCR clone 129868 (TRBV7-2, TRBJ2-2)
CASSSVRAGELFF

SEQ ID NO: 259737 - protein, 15 aa, Homo sapiens
  CDR3 for alpha chain variable domain of TCR clone 129869 (TRAV26-1, TRAJ28)
CIVRVAGAGSYQLTF

SEQ ID NO: 259738 - protein, 19 aa, Homo sapiens
  CDR3 for beta chain variable domain of TCR clone 129869 (TRBV7-3, TRBJ2-7)
WASSLTGVAGGWPSYEQYF

SEQ ID NO: 259739 - protein, 13 aa, Homo sapiens
  CDR3 for alpha chain variable domain of TCR clone 129870 (TRAV8-6, TRAJ54)
CAGGIQGAQKLVL

SEQ ID NO: 259740 - protein, 14 aa, Homo sapiens
  CDR3 for beta chain variable domain of TCR clone 129870 (TRBV7-2, TRBJ1-2)
CASSQTGSTYGYTF

SEQ ID NO: 259741 - protein, 13 aa, Homo sapiens
  CDR3 for alpha chain variable domain of TCR clone 129871 (TRAV30, TRAJ44)
CGSNTGTASKLTF

SEQ ID NO: 259742 - protein, 15 aa, Homo sapiens
  CDR3 for beta chain variable domain of TCR clone 129871 (TRBV5-1, TRBJ1-1)
RASSLDTVRDTEAFF

SEQ ID NO: 259743 - protein, 11 aa, Homo sapiens
  CDR3 for alpha chain variable domain of TCR clone 129872 (TRAV3, TRAJ21)
CAVGNFNKFYF

SEQ ID NO: 259744 - protein, 13 aa, Homo sapiens
  CDR3 for beta chain variable domain of TCR clone 129872 (TRBV7-9, TRBJ1-2)
CASGLKQNYGYTF

SEQ ID NO: 259745 - protein, 12 aa, Homo sapiens
  CDR3 for alpha chain variable domain of TCR clone 129873 (TRAV16, TRAJ10)
CSRPGGGNKLTF

SEQ ID NO: 259746 - protein, 14 aa, Homo sapiens
  CDR3 for beta chain variable domain of TCR clone 129873 (TRBV7-2, TRBJ1-2)
CASSQTGSTYGYTF

SEQ ID NO: 259747 - protein, 14 aa, Homo sapiens
  CDR3 for alpha chain variable domain of TCR clone 129874 (TRAV16, TRAJ8)
CALLLNTGFQKLVF

SEQ ID NO: 259748 - protein, 15 aa, Homo sapiens
  CDR3 for beta chain variable domain of TCR clone 129874 (TRBV7-7, TRBJ2-2)
CATSKLAKNTGGLFF

SEQ ID NO: 259749 - protein, 13 aa, Homo sapiens
  CDR3 for alpha chain variable domain of TCR clone 129875 (TRAV2, TRAJ29)
CAAGGPGNTPLVF

SEQ ID NO: 259750 - protein, 19 aa, Homo sapiens
  CDR3 for beta chain variable domain of TCR clone 129875 (TRBV19, TRBJ2-5)
CASSIGQVTDFFLGETQYF

SEQ ID NO: 259751 - protein, 11 aa, Homo sapiens
  CDR3 for alpha chain variable domain of TCR clone 129876 (TRAV21, TRAJ11)
CAVNGYSTLTF

SEQ ID NO: 259752 - protein, 15 aa, Homo sapiens
  CDR3 for beta chain variable domain of TCR clone 129876 (TRBV20-1, TRBJ2-1)
CSARGIGGTYNEQFF

SEQ ID NO: 259753 - protein, 15 aa, Homo sapiens
  CDR3 for alpha chain variable domain of TCR clone 129877 (TRAV8-3, TRAJ45)
CASSYSGGGADGLTS

SEQ ID NO: 259754 - protein, 17 aa, Homo sapiens
  CDR3 for beta chain variable domain of TCR clone 129877 (TRBV7-8, TRBJ1-2)
CASSLRPLQGHLYGYTF

SEQ ID NO: 259755 - protein, 17 aa, Homo sapiens
  CDR3 for alpha chain variable domain of TCR clone 129878 (TRAV3, TRAJ6)
CAVRDVPRAGGSSIPTF

SEQ ID NO: 259756 - protein, 14 aa, Homo sapiens
  CDR3 for beta chain variable domain of TCR clone 129878 (TRBV7-2, TRBJ2-7)
CASSPKTSFYEQYF

SEQ ID NO: 259757 - protein, 12 aa, Homo sapiens
  CDR3 for alpha chain variable domain of TCR clone 129879 (TRAV17, TRAJ54)
CAILQGAQKLVF

SEQ ID NO: 259758 - protein, 17 aa, Homo sapiens
  CDR3 for beta chain variable domain of TCR clone 129879 (TRBV20-1, TRBJ2-2)
CSASGSGQGGLTGELFF

SEQ ID NO: 259759 - protein, 16 aa, Homo sapiens
  CDR3 for alpha chain variable domain of TCR clone 129880 (TRAV23/DV6, TRAJ9)
YAASIGGNTGGFKTIF

SEQ ID NO: 259760 - protein, 14 aa, Homo sapiens
  CDR3 for beta chain variable domain of TCR clone 129880 (TRBV9, TRBJ2-7)
CASSVGVGSYEQYF

SEQ ID NO: 259761 - protein, 13 aa, Homo sapiens
  CDR3 for alpha chain variable domain of TCR clone 129881 (TRAV27, TRAJ6)
CAGGTRGSYIPTF

SEQ ID NO: 259762 - protein, 15 aa, Homo sapiens
  CDR3 for beta chain variable domain of TCR clone 129881 (TRBV25-1, TRBJ1-4)
CASSKRIATNEKLFF

SEQ ID NO: 259763 - protein, 15 aa, Homo sapiens
  CDR3 for alpha chain variable domain of TCR clone 129882 (TRAV25, TRAJ21)
TDVGTYPLSFNKFYF

SEQ ID NO: 259764 - protein, 14 aa, Homo sapiens
  CDR3 for beta chain variable domain of TCR clone 129882 (TRBV6-1, TRBJ2-1)
CASAKDGFYNEQFF

SEQ ID NO: 259765 - protein, 14 aa, Homo sapiens
  CDR3 for alpha chain variable domain of TCR clone 129883 (TRAV36/DV7, TRAJ40)
CAVETTSGTYEHIF

SEQ ID NO: 259766 - protein, 13 aa, Homo sapiens
  CDR3 for beta chain variable domain of TCR clone 129883 (TRBV29-1, TRBJ2-1)
CSVEGGRVNEQFF

SEQ ID NO: 259767 - protein, 14 aa, Homo sapiens
  CDR3 for alpha chain variable domain of TCR clone 129884 (TRAV26-1, TRAJ49)
CIVRLTNTGNQFYF

SEQ ID NO: 259768 - protein, 13 aa, Homo sapiens
  CDR3 for beta chain variable domain of TCR clone 129884 (TRBV4-1, TRBJ2-7)
FASSQGQAYEQYF

SEQ ID NO: 259769 - protein, 14 aa, Homo sapiens
  CDR3 for alpha chain variable domain of TCR clone 129885 (TRAV27, TRAJ12)
CAGARMDGSYKLIF

SEQ ID NO: 259770 - protein, 18 aa, Homo sapiens
  CDR3 for beta chain variable domain of TCR clone 129885 (TRBV10-3, TRBJ2-7)
CAISESGRPSGGRVEQYF

SEQ ID NO: 259771 - protein, 19 aa, Homo sapiens
  CDR3 for alpha chain variable domain of TCR clone 129886 (TRAV2, TRAJ20)
ILQVREADAAVYRDCKLSF

SEQ ID NO: 259772 - protein, 16 aa, Homo sapiens
  CDR3 for beta chain variable domain of TCR clone 129886 (TRBV5-1, TRBJ2-5)
CASSLALMRAGETQYF

SEQ ID NO: 259773 - protein, 14 aa, Homo sapiens
  CDR3 for alpha chain variable domain of TCR clone 129887 (TRAV13-1, TRAJ44)
CAAKATGTASKLTF

SEQ ID NO: 259774 - protein, 15 aa, Homo sapiens
  CDR3 for beta chain variable domain of TCR clone 129887 (TRBV7-8, TRBJ2-7)
CASSLERAGSYEQYF

SEQ ID NO: 259775 - protein, 11 aa, Homo sapiens
  CDR3 for alpha chain variable domain of TCR clone 129888 (TRAV3, TRAJ21)
CAVGNFNKFYF

SEQ ID NO: 259776 - protein, 16 aa, Homo sapiens
  CDR3 for beta chain variable domain of TCR clone 129888 (TRBV19, TRBJ2-1)
CASSKAGPRSYHEQFF

SEQ ID NO: 259777 - protein, 13 aa, Homo sapiens
  CDR3 for alpha chain variable domain of TCR clone 129889 (TRAV12-1, TRAJ26)
CVVRRNYGQNFVF

SEQ ID NO: 259778 - protein, 14 aa, Homo sapiens
  CDR3 for beta chain variable domain of TCR clone 129889 (TRBV20-1, TRBJ1-1)
CSAQTRIGGTEAFF

SEQ ID NO: 259779 - protein, 15 aa, Homo sapiens
  CDR3 for alpha chain variable domain of TCR clone 129890 (TRAV36/DV7, TRAJ44)
CAACRNTGTASKLTF

SEQ ID NO: 259780 - protein, 13 aa, Homo sapiens
  CDR3 for beta chain variable domain of TCR clone 129890 (TRBV18, TRBJ2-3)
CASSTGRTDTQYF

SEQ ID NO: 259781 - protein, 14 aa, Homo sapiens
  CDR3 for alpha chain variable domain of TCR clone 129891 (TRAV8-4, TRAJ48)
CAVSLNFGNEKLTF

SEQ ID NO: 259782 - protein, 11 aa, Homo sapiens
  CDR3 for beta chain variable domain of TCR clone 129891 (TRBV12-4, TRBJ2-3)
CASTATDTQYF

SEQ ID NO: 259783 - protein, 14 aa, Homo sapiens
  CDR3 for alpha chain variable domain of TCR clone 129892 (TRAV35, TRAJ33)
CWPRGRDSNYQLIW

SEQ ID NO: 259784 - protein, 11 aa, Homo sapiens
  CDR3 for beta chain variable domain of TCR clone 129892 (TRBV10-3, TRBJ2-7)
CAISEGLEQCF

SEQ ID NO: 259785 - protein, 15 aa, Homo sapiens
  CDR3 for alpha chain variable domain of TCR clone 129893 (TRAV13-1, TRAJ10)
CAATILTGGGNKLPF

SEQ ID NO: 259786 - protein, 15 aa, Homo sapiens
  CDR3 for beta chain variable domain of TCR clone 129893 (TRBV2, TRBJ2-7)
CASTLLGSGATEQYF

SEQ ID NO: 259787 - protein, 16 aa, Homo sapiens
  CDR3 for alpha chain variable domain of TCR clone 129894 (TRAV21, TRAJ37)
CAVRTAGSSDTGQLIF

SEQ ID NO: 259788 - protein, 13 aa, Homo sapiens
  CDR3 for beta chain variable domain of TCR clone 129894 (TRBV7-9, TRBJ2-5)
CASLPSGRETQYF

SEQ ID NO: 259789 - protein, 13 aa, Homo sapiens
  CDR3 for alpha chain variable domain of TCR clone 129895 (TRAV26-2, TRAJ43)
CILRAVNNNDMRF

SEQ ID NO: 259790 - protein, 15 aa, Homo sapiens
  CDR3 for beta chain variable domain of TCR clone 129895 (TRBV7-2, TRBJ2-1)
YASTHGTGIYNEQFF

SEQ ID NO: 259791 - protein, 15 aa, Homo sapiens
  CDR3 for alpha chain variable domain of TCR clone 129896 (TRAV17, TRAJ42)
CATDHYGGSQGNLIF

SEQ ID NO: 259792 - protein, 14 aa, Homo sapiens
  CDR3 for beta chain variable domain of TCR clone 129896 (TRBV19, TRBJ2-5)
CASSSEHSQETQYF

SEQ ID NO: 259793 - protein, 12 aa, Homo sapiens
  CDR3 for alpha chain variable domain of TCR clone 129897 (TRAV12-2, TRAJ16)
CAVAPDGQKLLF

SEQ ID NO: 259794 - protein, 13 aa, Homo sapiens
  CDR3 for beta chain variable domain of TCR clone 129897 (TRBV6-1, TRBJ1-1)
CASSVTGRREAFF

SEQ ID NO: 259795 - protein, 12 aa, Homo sapiens
  CDR3 for alpha chain variable domain of TCR clone 129898 (TRAV12-1, TRAJ34)
CVVTFNTDKLIF

SEQ ID NO: 259796 - protein, 14 aa, Homo sapiens
  CDR3 for beta chain variable domain of TCR clone 129898 (TRBV19, TRBJ1-1)
CASLQTGLNTEAFF

SEQ ID NO: 259797 - protein, 11 aa, Homo sapiens
  CDR3 for alpha chain variable domain of TCR clone 129899 (TRAV13-1, TRAJ39)
CASHAGNMLTF

SEQ ID NO: 259798 - protein, 15 aa, Homo sapiens
  CDR3 for beta chain variable domain of TCR clone 129899 (TRBV9, TRBJ1-6)
CASSVAGTGDSPLHF

SEQ ID NO: 259799 - protein, 13 aa, Homo sapiens
  CDR3 for alpha chain variable domain of TCR clone 129900 (TRAV12-1, TRAJ21)
CVVTLYNFNKFYF

SEQ ID NO: 259800 - protein, 20 aa, Homo sapiens
  CDR3 for beta chain variable domain of TCR clone 129900 (TRBV7-8, TRBJ2-1)
WASSLAHRLAGVRSYNEQFF

SEQ ID NO: 259801 - protein, 12 aa, Homo sapiens
  CDR3 for alpha chain variable domain of TCR clone 129901 (TRAV17, TRAJ39)
CATGAAGNMLTF

SEQ ID NO: 259802 - protein, 14 aa, Homo sapiens
  CDR3 for beta chain variable domain of TCR clone 129901 (TRBV7-9, TRBJ1-2)
CASRRQGANYGYTF

SEQ ID NO: 259803 - protein, 14 aa, Homo sapiens
  CDR3 for alpha chain variable domain of TCR clone 129902 (TRAV1-1, TRAJ27)
CAVIYNTNAGKSTF

SEQ ID NO: 259804 - protein, 11 aa, Homo sapiens
  CDR3 for beta chain variable domain of TCR clone 129902 (TRBV11-2, TRBJ2-2)
CASSLPGELFF

SEQ ID NO: 259805 - protein, 13 aa, Homo sapiens
  CDR3 for alpha chain variable domain of TCR clone 129903 (TRAV38-1, TRAJ42)
CARWGGSQGNLIF

SEQ ID NO: 259806 - protein, 15 aa, Homo sapiens
  CDR3 for beta chain variable domain of TCR clone 129903 (TRBV19, TRBJ1-1)
CASTSGQIQNTEAFF

SEQ ID NO: 259807 - protein, 17 aa, Homo sapiens
  CDR3 for alpha chain variable domain of TCR clone 129904 (TRAV26-1, TRAJ37)
CIVRVVTVSSNTGKLIF

SEQ ID NO: 259808 - protein, 13 aa, Homo sapiens
  CDR3 for beta chain variable domain of TCR clone 129904 (TRBV2, TRBJ2-7)
CASSVGGSGEQYF

SEQ ID NO: 259809 - protein, 16 aa, Homo sapiens
  CDR3 for alpha chain variable domain of TCR clone 129905 (TRAV3, TRAJ37)
CAVRPHGSGNTGKLIF

SEQ ID NO: 259810 - protein, 16 aa, Homo sapiens
  CDR3 for beta chain variable domain of TCR clone 129905 (TRBV5-4, TRBJ2-3)
CASQQPGAGGADTQYF

SEQ ID NO: 259811 - protein, 13 aa, Homo sapiens
  CDR3 for alpha chain variable domain of TCR clone 129906 (TRAV21, TRAJ57)
CAVTQGGSEKLVF

SEQ ID NO: 259812 - protein, 14 aa, Homo sapiens
  CDR3 for beta chain variable domain of TCR clone 129906 (TRBV2, TRBJ2-5)
CASTWGRAQETQYF

SEQ ID NO: 259813 - protein, 14 aa, Homo sapiens
  CDR3 for alpha chain variable domain of TCR clone 129907 (TRAV26-1, TRAJ6)
CIVSPVGGSYIPTF

SEQ ID NO: 259814 - protein, 11 aa, Homo sapiens
  CDR3 for beta chain variable domain of TCR clone 129907 (TRBV4-1, TRBJ2-5)
CASSSGLAGVL

SEQ ID NO: 259815 - protein, 15 aa, Homo sapiens
  CDR3 for alpha chain variable domain of TCR clone 129908 (TRAV8-3, TRAJ27)
CAVGPSKTNAGKSTS

SEQ ID NO: 259816 - protein, 15 aa, Homo sapiens
  CDR3 for beta chain variable domain of TCR clone 129908 (TRBV7-2, TRBJ2-1)
CASNSGLAGGNEQFF

SEQ ID NO: 259817 - protein, 11 aa, Homo sapiens
  CDR3 for alpha chain variable domain of TCR clone 129909 (TRAV25, TRAJ49)
CAGGTGNQFYF

SEQ ID NO: 259818 - protein, 12 aa, Homo sapiens
  CDR3 for beta chain variable domain of TCR clone 129909 (TRBV6-5, TRBJ2-1)
CASRNDRGQQFL

SEQ ID NO: 259819 - protein, 12 aa, Homo sapiens
  CDR3 for alpha chain variable domain of TCR clone 129910 (TRAV2, TRAJ31)
CAVEDNNARLMF

SEQ ID NO: 259820 - protein, 16 aa, Homo sapiens
  CDR3 for beta chain variable domain of TCR clone 129910 (TRBV10-3, TRBJ2-1)
CAISGVGDGGGGEHFF

SEQ ID NO: 259821 - protein, 15 aa, Homo sapiens
  CDR3 for alpha chain variable domain of TCR clone 129911 (TRAV20, TRAJ43)
CAVQAGKSSNNDMRS

SEQ ID NO: 259822 - protein, 14 aa, Homo sapiens
  CDR3 for beta chain variable domain of TCR clone 129911 (TRBV27, TRBJ2-1)
CASRHLGGGKEQFF

SEQ ID NO: 259823 - protein, 14 aa, Homo sapiens
  CDR3 for alpha chain variable domain of TCR clone 129912 (TRAV27, TRAJ36)
CAGPPKRGANNHFF

SEQ ID NO: 259824 - protein, 15 aa, Homo sapiens
  CDR3 for beta chain variable domain of TCR clone 129912 (TRBV18, TRBJ2-7)
CASSPASTPNYEQYF

SEQ ID NO: 259825 - protein, 16 aa, Homo sapiens
  CDR3 for alpha chain variable domain of TCR clone 129913 (TRAV21, TRAJ33)
CAVSPASMDSNYQLIW

SEQ ID NO: 259826 - protein, 17 aa, Homo sapiens
  CDR3 for beta chain variable domain of TCR clone 129913 (TRBV2, TRBJ1-4)
CASSKRELTQGEDKLFF

SEQ ID NO: 259827 - protein, 14 aa, Homo sapiens
  CDR3 for alpha chain variable domain of TCR clone 129914 (TRAV1-2, TRAJ8)
CAVREDTGFQKLVF

SEQ ID NO: 259828 - protein, 16 aa, Homo sapiens
  CDR3 for beta chain variable domain of TCR clone 129914 (TRBV7-2, TRBJ2-5)
CASSLAVSGRGETQYL

SEQ ID NO: 259829 - protein, 16 aa, Homo sapiens
  CDR3 for alpha chain variable domain of TCR clone 129915 (TRAV3, TRAJ37)
CAVRGKGSGNTGKLIF

SEQ ID NO: 259830 - protein, 16 aa, Homo sapiens
  CDR3 for beta chain variable domain of TCR clone 129915 (TRBV12-4, TRBJ2-5)
CASSFFVRGRQETQYF

SEQ ID NO: 259831 - protein, 15 aa, Homo sapiens
  CDR3 for alpha chain variable domain of TCR clone 129916 (TRAV35, TRAJ53)
CAGLTQAGSNYKLTF

SEQ ID NO: 259832 - protein, 11 aa, Homo sapiens
  CDR3 for beta chain variable domain of TCR clone 129916 (TRBV20-1, TRBJ1-2)
CSIWSSYGYTF

SEQ ID NO: 259833 - protein, 14 aa, Homo sapiens
  CDR3 for alpha chain variable domain of TCR clone 129917 (TRAV12-3, TRAJ13)
CAMRTSGGYQKVTF

SEQ ID NO: 259834 - protein, 14 aa, Homo sapiens
  CDR3 for beta chain variable domain of TCR clone 129917 (TRBV4-1, TRBJ1-6)
CASSPGSDSSPLHF

SEQ ID NO: 259835 - protein, 16 aa, Homo sapiens
  CDR3 for alpha chain variable domain of TCR clone 129918 (TRAV12-3, TRAJ53)
CAMSPGSGGSNYKLTF

SEQ ID NO: 259836 - protein, 14 aa, Homo sapiens
  CDR3 for beta chain variable domain of TCR clone 129918 (TRBV12-4, TRBJ1-6)
CQQLGGQGTSPLHF

SEQ ID NO: 259837 - protein, 18 aa, Homo sapiens
  CDR3 for alpha chain variable domain of TCR clone 129919 (TRAV26-2, TRAJ33)
CCVLLHPEEPASNYQLIW

SEQ ID NO: 259838 - protein, 12 aa, Homo sapiens
  CDR3 for beta chain variable domain of TCR clone 129919 (TRBV11-2, TRBJ2-2)
CASSLPTGELFF

SEQ ID NO: 259839 - protein, 14 aa, Homo sapiens
  CDR3 for alpha chain variable domain of TCR clone 129920 (TRAV1-1, TRAJ33)
CAVRPEDSNYQLIW

SEQ ID NO: 259840 - protein, 15 aa, Homo sapiens
  CDR3 for beta chain variable domain of TCR clone 129920 (TRBV13, TRBJ1-2)
CASSLGRQPGYGYTF

SEQ ID NO: 259841 - protein, 14 aa, Homo sapiens
  CDR3 for alpha chain variable domain of TCR clone 129921 (TRAV12-3, TRAJ57)
CAMSAWGGSEKLVF

SEQ ID NO: 259842 - protein, 16 aa, Homo sapiens
  CDR3 for beta chain variable domain of TCR clone 129921 (TRBV4-2, TRBJ2-7)
CASSQEGLANSYEQYF

SEQ ID NO: 259843 - protein, 13 aa, Homo sapiens
  CDR3 for alpha chain variable domain of TCR clone 129922 (TRAV13-1, TRAJ39)
RAASIWAGNMPTF

SEQ ID NO: 259844 - protein, 15 aa, Homo sapiens
  CDR3 for beta chain variable domain of TCR clone 129922 (TRBV7-9, TRBJ1-1)
CASSLLEQGGTEAFF

SEQ ID NO: 259845 - protein, 13 aa, Homo sapiens
  CDR3 for alpha chain variable domain of TCR clone 129923 (TRAV21, TRAJ27)
CAALNTNAGKSTF

SEQ ID NO: 259846 - protein, 14 aa, Homo sapiens
  CDR3 for beta chain variable domain of TCR clone 129923 (TRBV27, TRBJ1-1)
CASSLLIGLSEAFF

SEQ ID NO: 259847 - protein, 15 aa, Homo sapiens
  CDR3 for alpha chain variable domain of TCR clone 129924 (TRAV12-3, TRAJ6)
CAMSATTGGSYIPTF

SEQ ID NO: 259848 - protein, 15 aa, Homo sapiens
  CDR3 for beta chain variable domain of TCR clone 129924 (TRBV7-9, TRBJ2-7)
CASSLRTSGSYEQYF

SEQ ID NO: 259849 - protein, 14 aa, Homo sapiens
  CDR3 for alpha chain variable domain of TCR clone 129925 (TRAV1-2, TRAJ8)
CAVREDTGFQKLVF

SEQ ID NO: 259850 - protein, 16 aa, Homo sapiens
  CDR3 for beta chain variable domain of TCR clone 129925 (TRBV7-9, TRBJ2-1)
CASSDVAGGSYSEQFF

SEQ ID NO: 259851 - protein, 13 aa, Homo sapiens
  CDR3 for alpha chain variable domain of TCR clone 129926 (TRAV35, TRAJ36)
CAGPRIGANKLFF

SEQ ID NO: 259852 - protein, 15 aa, Homo sapiens
  CDR3 for beta chain variable domain of TCR clone 129926 (TRBV28, TRBJ2-5)
CASSPPWSYQETQYF

SEQ ID NO: 259853 - protein, 23 aa, Homo sapiens
  CDR3 for alpha chain variable domain of TCR clone 129927 (TRAV13-2, TRAJ6)
CAEEVHQEEATYLHLEEEPALLF

SEQ ID NO: 259854 - protein, 16 aa, Homo sapiens
  CDR3 for beta chain variable domain of TCR clone 129927 (TRBV28, TRBJ2-7)
CASSPWVATGDLSQYF

SEQ ID NO: 259855 - protein, 17 aa, Homo sapiens
  CDR3 for alpha chain variable domain of TCR clone 129928 (TRAV13-1, TRAJ31)
CAPRDRLMFGDGTQLVV

SEQ ID NO: 259856 - protein, 12 aa, Homo sapiens
  CDR3 for beta chain variable domain of TCR clone 129928 (TRBV7-9, TRBJ1-1)
CASSLEGTEAFF

SEQ ID NO: 259857 - protein, 16 aa, Homo sapiens
  CDR3 for alpha chain variable domain of TCR clone 129929 (TRAV26-2, TRAJ48)
CTLRPPFNFGNEKLTF

SEQ ID NO: 259858 - protein, 15 aa, Homo sapiens
  CDR3 for beta chain variable domain of TCR clone 129929 (TRBV20-1, TRBJ2-3)
CSARVEGTYTDTQYF

SEQ ID NO: 259859 - protein, 16 aa, Homo sapiens
  CDR3 for alpha chain variable domain of TCR clone 129930 (TRAV12-3, TRAJ53)
CAMSPGSGGSNYKLTF

SEQ ID NO: 259860 - protein, 14 aa, Homo sapiens
  CDR3 for beta chain variable domain of TCR clone 129930 (TRBV11-2, TRBJ2-7)
CASSLGAGAYEQYF

SEQ ID NO: 259861 - protein, 14 aa, Homo sapiens
  CDR3 for alpha chain variable domain of TCR clone 129931 (TRAV35, TRAJ53)
CAGNSGGSNYKLTF

SEQ ID NO: 259862 - protein, 11 aa, Homo sapiens
  CDR3 for beta chain variable domain of TCR clone 129931 (TRBV4-1, TRBJ1-4)
CASKENENLFF

SEQ ID NO: 259863 - protein, 14 aa, Homo sapiens
  CDR3 for alpha chain variable domain of TCR clone 129932 (TRAV17, TRAJ39)
CATDPVRAGNMLTF

SEQ ID NO: 259864 - protein, 15 aa, Homo sapiens
  CDR3 for beta chain variable domain of TCR clone 129932 (TRBV11-2, TRBJ2-1)
CASSKNRGLIYEQFF

SEQ ID NO: 259865 - protein, 13 aa, Homo sapiens
  CDR3 for alpha chain variable domain of TCR clone 129933 (TRAV8-3, TRAJ48)
CAAVPFGNEKLTF

SEQ ID NO: 259866 - protein, 12 aa, Homo sapiens
  CDR3 for beta chain variable domain of TCR clone 129933 (TRBV11-2, TRBJ2-2)
CASSLGGGELFF

SEQ ID NO: 259867 - protein, 14 aa, Homo sapiens
  CDR3 for alpha chain variable domain of TCR clone 129934 (TRAV16, TRAJ33)
CALSAMDSNYQLIW

SEQ ID NO: 259868 - protein, 14 aa, Homo sapiens
  CDR3 for beta chain variable domain of TCR clone 129934 (TRBV10-3, TRBJ1-2)
CAISAGGRVDGYTF

SEQ ID NO: 259869 - protein, 13 aa, Homo sapiens
  CDR3 for alpha chain variable domain of TCR clone 129935 (TRAV21, TRAJ27)
CAALNTNAGKSTF

SEQ ID NO: 259870 - protein, 16 aa, Homo sapiens
  CDR3 for beta chain variable domain of TCR clone 129935 (TRBV5-5, TRBJ1-2)
CASSPTWGRGLYGYTF

SEQ ID NO: 259871 - protein, 13 aa, Homo sapiens
  CDR3 for alpha chain variable domain of TCR clone 129936 (TRAV27, TRAJ6)
CAGGTRGSYIPTF

SEQ ID NO: 259872 - protein, 14 aa, Homo sapiens
  CDR3 for beta chain variable domain of TCR clone 129936 (TRBV4-2, TRBJ2-1)
CASGLDRAYNEQFF

SEQ ID NO: 259873 - protein, 15 aa, Homo sapiens
  CDR3 for alpha chain variable domain of TCR clone 129937 (TRAV17, TRAJ57)
CATGPSQGGSEKLVF

SEQ ID NO: 259874 - protein, 14 aa, Homo sapiens
  CDR3 for beta chain variable domain of TCR clone 129937 (TRBV12-5, TRBJ2-5)
CASGSRTHQENQYF

SEQ ID NO: 259875 - protein, 12 aa, Homo sapiens
  CDR3 for alpha chain variable domain of TCR clone 129938 (TRAV21, TRAJ13)
PGPSGGYQKVTF

SEQ ID NO: 259876 - protein, 14 aa, Homo sapiens
  CDR3 for beta chain variable domain of TCR clone 129938 (TRBV19, TRBJ2-2)
CASSGQGIAGELFF

SEQ ID NO: 259877 - protein, 14 aa, Homo sapiens
  CDR3 for alpha chain variable domain of TCR clone 129939 (TRAV13-1, TRAJ9)
CAASALTGGFKTIF

SEQ ID NO: 259878 - protein, 16 aa, Homo sapiens
  CDR3 for beta chain variable domain of TCR clone 129939 (TRBV12-4, TRBJ2-3)
CASSVGTGGISDTQYF

SEQ ID NO: 259879 - protein, 13 aa, Homo sapiens
  CDR3 for alpha chain variable domain of TCR clone 129940 (TRAV17, TRAJ8)
CATPPRGFQKLVF

SEQ ID NO: 259880 - protein, 13 aa, Homo sapiens
  CDR3 for beta chain variable domain of TCR clone 129940 (TRBV3-1, TRBJ1-2)
CASSHSLNYGYTF

SEQ ID NO: 259881 - protein, 15 aa, Homo sapiens
  CDR3 for alpha chain variable domain of TCR clone 129941 (TRAV2, TRAJ24)
CAVEVLPDSWGKFQF

SEQ ID NO: 259882 - protein, 14 aa, Homo sapiens
  CDR3 for beta chain variable domain of TCR clone 129941 (TRBV19, TRBJ2-1)
CASSMGSGRRSSSS

SEQ ID NO: 259883 - protein, 17 aa, Homo sapiens
  CDR3 for alpha chain variable domain of TCR clone 129942 (TRAV27, TRAJ13)
CAGARILGVTRKLPLEL

SEQ ID NO: 259884 - protein, 12 aa, Homo sapiens
  CDR3 for beta chain variable domain of TCR clone 129942 (TRBV14, TRBJ2-5)
CASSQLKETQYF

SEQ ID NO: 259885 - protein, 14 aa, Homo sapiens
  CDR3 for alpha chain variable domain of TCR clone 129943 (TRAV12-3, TRAJ54)
CAMSALQGAQKLVF

SEQ ID NO: 259886 - protein, 15 aa, Homo sapiens
  CDR3 for beta chain variable domain of TCR clone 129943 (TRBV19, TRBJ2-4)
CASSTPGIAKNRQYF

SEQ ID NO: 259887 - protein, 17 aa, Homo sapiens
  CDR3 for alpha chain variable domain of TCR clone 129944 (TRAV3, TRAJ42)
CAVRDRDYGGSQGNRIF

SEQ ID NO: 259888 - protein, 14 aa, Homo sapiens
  CDR3 for beta chain variable domain of TCR clone 129944 (TRBV7-2, TRBJ2-5)
CASSPRGSSETQYF

SEQ ID NO: 259889 - protein, 14 aa, Homo sapiens
  CDR3 for alpha chain variable domain of TCR clone 129945 (TRAV12-3, TRAJ33)
CAMSVPGSNYQLIW

SEQ ID NO: 259890 - protein, 16 aa, Homo sapiens
  CDR3 for beta chain variable domain of TCR clone 129945 (TRBV5-1, TRBJ2-3)
CASSLGLAVYTDTQYF

SEQ ID NO: 259891 - protein, 14 aa, Homo sapiens
  CDR3 for alpha chain variable domain of TCR clone 129946 (TRAV2, TRAJ22)
CAVGRGGSARQLTI

SEQ ID NO: 259892 - protein, 12 aa, Homo sapiens
  CDR3 for beta chain variable domain of TCR clone 129946 (TRBV19, TRBJ2-1)
CASSMQDTEQFF

SEQ ID NO: 259893 - protein, 18 aa, Homo sapiens
  CDR3 for alpha chain variable domain of TCR clone 129947 (TRAV8-3, TRAJ4)
WVRDPTSNDPGGYNKLIF

SEQ ID NO: 259894 - protein, 13 aa, Homo sapiens
  CDR3 for beta chain variable domain of TCR clone 129947 (TRBV20-1, TRBJ1-2)
CGATGIQGSGYTF

SEQ ID NO: 259895 - protein, 16 aa, Homo sapiens
  CDR3 for alpha chain variable domain of TCR clone 129948 (TRAV30, TRAJ24)
CGTEIVDADSWGKFQF

SEQ ID NO: 259896 - protein, 13 aa, Homo sapiens
  CDR3 for beta chain variable domain of TCR clone 129948 (TRBV12-4, TRBJ2-7)
CASSFVRGYEQYF

SEQ ID NO: 259897 - protein, 14 aa, Homo sapiens
  CDR3 for alpha chain variable domain of TCR clone 129949 (TRAV40, TRAJ41)
CLLGPPNSGYALNL

SEQ ID NO: 259898 - protein, 11 aa, Homo sapiens
  CDR3 for beta chain variable domain of TCR clone 129949 (TRBV19, TRBJ2-7)
CASSILGEQYF

SEQ ID NO: 259899 - protein, 14 aa, Homo sapiens
  CDR3 for alpha chain variable domain of TCR clone 129950 (TRAV1-2, TRAJ16)
CAVNLFSDGQKLLF

SEQ ID NO: 259900 - protein, 14 aa, Homo sapiens
  CDR3 for beta chain variable domain of TCR clone 129950 (TRBV20-1, TRBJ2-1)
CSAQIGGSANEQFF

SEQ ID NO: 259901 - protein, 14 aa, Homo sapiens
  CDR3 for alpha chain variable domain of TCR clone 129951 (TRAV1-2, TRAJ8)
CAVREDTGFQKLVF

SEQ ID NO: 259902 - protein, 14 aa, Homo sapiens
  CDR3 for beta chain variable domain of TCR clone 129951 (TRBV28, TRBJ1-2)
CASRIQGANYGYTF

SEQ ID NO: 259903 - protein, 13 aa, Homo sapiens
  CDR3 for alpha chain variable domain of TCR clone 129952 (TRAV2, TRAJ40)
CAVVTSGTYKYIF

SEQ ID NO: 259904 - protein, 13 aa, Homo sapiens
  CDR3 for beta chain variable domain of TCR clone 129952 (TRBV9, TRBJ2-1)
CASSPSGGNEQFF

SEQ ID NO: 259905 - protein, 15 aa, Homo sapiens
  CDR3 for alpha chain variable domain of TCR clone 129953 (TRAV21, TRAJ45)
CAVSYSGGGADGLTF

SEQ ID NO: 259906 - protein, 13 aa, Homo sapiens
  CDR3 for beta chain variable domain of TCR clone 129953 (TRBV20-1, TRBJ2-5)
CSAATELQENQYF

SEQ ID NO: 259907 - protein, 16 aa, Homo sapiens
  CDR3 for alpha chain variable domain of TCR clone 129954 (TRAV17, TRAJ52)
CATDPMGGTSYGKLTF

SEQ ID NO: 259908 - protein, 16 aa, Homo sapiens
  CDR3 for beta chain variable domain of TCR clone 129954 (TRBV6-6, TRBJ2-3)
CASSYLRATSTDTQYF

SEQ ID NO: 259909 - protein, 15 aa, Homo sapiens
  CDR3 for alpha chain variable domain of TCR clone 129955 (TRAV4, TRAJ10)
CLGGDGSGGGNKLTF

SEQ ID NO: 259910 - protein, 15 aa, Homo sapiens
  CDR3 for beta chain variable domain of TCR clone 129955 (TRBV27, TRBJ2-3)
CASSSLAGVIDTQYF

SEQ ID NO: 259911 - protein, 15 aa, Homo sapiens
  CDR3 for alpha chain variable domain of TCR clone 129956 (TRAV3, TRAJ22)
CAVRDRGGSARQLTF

SEQ ID NO: 259912 - protein, 14 aa, Homo sapiens
  CDR3 for beta chain variable domain of TCR clone 129956 (TRBV7-3, TRBJ1-1)
CASSLKGGNTEAFF

SEQ ID NO: 259913 - protein, 15 aa, Homo sapiens
  CDR3 for alpha chain variable domain of TCR clone 129957 (TRAV16, TRAJ4)
CALPSLSGGYNKLIF

SEQ ID NO: 259914 - protein, 15 aa, Homo sapiens
  CDR3 for beta chain variable domain of TCR clone 129957 (TRBV13, TRBJ2-5)
CASSLPGGIQETQYF

SEQ ID NO: 259915 - protein, 15 aa, Homo sapiens
  CDR3 for alpha chain variable domain of TCR clone 129958 (TRAV21, TRAJ18)
CAVRDRGSTLGRLYF

SEQ ID NO: 259916 - protein, 15 aa, Homo sapiens
  CDR3 for beta chain variable domain of TCR clone 129958 (TRBV25-1, TRBJ1-4)
CASSPGDSTNEKLFF

SEQ ID NO: 259917 - protein, 13 aa, Homo sapiens
  CDR3 for alpha chain variable domain of TCR clone 129959 (TRAV2, TRAJ15)
CAVASQAGTALIF

SEQ ID NO: 259918 - protein, 13 aa, Homo sapiens
  CDR3 for beta chain variable domain of TCR clone 129959 (TRBV20-1, TRBJ1-1)
CSAPLGGGTEASF

SEQ ID NO: 259919 - protein, 12 aa, Homo sapiens
  CDR3 for alpha chain variable domain of TCR clone 129960 (TRAV12-1, TRAJ40)
CVVYSGTYKYIF

SEQ ID NO: 259920 - protein, 18 aa, Homo sapiens
  CDR3 for beta chain variable domain of TCR clone 129960 (TRBV11-2, TRBJ2-3)
CASSLAGASRGAPNTQYF

SEQ ID NO: 259921 - protein, 10 aa, Homo sapiens
  CDR3 for alpha chain variable domain of TCR clone 129961 (TRAV25, TRAJ17)
CQAAGNKLTF

SEQ ID NO: 259922 - protein, 15 aa, Homo sapiens
  CDR3 for beta chain variable domain of TCR clone 129961 (TRBV27, TRBJ1-6)
CASSFDRGLGSPLHF

SEQ ID NO: 259923 - protein, 14 aa, Homo sapiens
  CDR3 for alpha chain variable domain of TCR clone 129962 (TRAV8-3, TRAJ39)
CAVGSNNAGNMLTF

SEQ ID NO: 259924 - protein, 15 aa, Homo sapiens
  CDR3 for beta chain variable domain of TCR clone 129962 (TRBV4-3, TRBJ1-1)
CASSQELGRGTEAFF

SEQ ID NO: 259925 - protein, 15 aa, Homo sapiens
  CDR3 for alpha chain variable domain of TCR clone 129963 (TRAV17, TRAJ37)
CATDHGSTNTGKLIF

SEQ ID NO: 259926 - protein, 14 aa, Homo sapiens
  CDR3 for beta chain variable domain of TCR clone 129963 (TRBV7-2, TRBJ2-3)
CASSRTSGADTQYF

SEQ ID NO: 259927 - protein, 11 aa, Homo sapiens
  CDR3 for alpha chain variable domain of TCR clone 129964 (TRAV2, TRAJ33)
CAVDSNYQLIW

SEQ ID NO: 259928 - protein, 15 aa, Homo sapiens
  CDR3 for beta chain variable domain of TCR clone 129964 (TRBV19, TRBJ1-2)
CACSVGQVLNYGYTF

SEQ ID NO: 259929 - protein, 11 aa, Homo sapiens
  CDR3 for alpha chain variable domain of TCR clone 129965 (TRAV16, TRAJ31)
CALFNNARLMF

SEQ ID NO: 259930 - protein, 15 aa, Homo sapiens
  CDR3 for beta chain variable domain of TCR clone 129965 (TRBV20-1, TRBJ2-7)
CSARDRVSGMDEQYF

SEQ ID NO: 259931 - protein, 14 aa, Homo sapiens
  CDR3 for alpha chain variable domain of TCR clone 129966 (TRAV12-2, TRAJ13)
CAVKKTGGYQQVTF

SEQ ID NO: 259932 - protein, 14 aa, Homo sapiens
  CDR3 for beta chain variable domain of TCR clone 129966 (TRBV7-6, TRBJ2-3)
CASSLGTVTDTQYF

SEQ ID NO: 259933 - protein, 11 aa, Homo sapiens
  CDR3 for alpha chain variable domain of TCR clone 129967 (TRAV26-2, TRAJ8)
RILTGFRKLVF

SEQ ID NO: 259934 - protein, 19 aa, Homo sapiens
  CDR3 for beta chain variable domain of TCR clone 129967 (TRBV20-1, TRBJ2-1)
CSARGETSGNSPQIDEQFF

SEQ ID NO: 259935 - protein, 14 aa, Homo sapiens
  CDR3 for alpha chain variable domain of TCR clone 129968 (TRAV4, TRAJ10)
CLVGYTGGGNKLTF

SEQ ID NO: 259936 - protein, 13 aa, Homo sapiens
  CDR3 for beta chain variable domain of TCR clone 129968 (TRBV10-2, TRBJ2-5)
CASSVGPQETQYF

SEQ ID NO: 259937 - protein, 12 aa, Homo sapiens
  CDR3 for alpha chain variable domain of TCR clone 129969 (TRAV16, TRAJ10)
CSRTGGGNKLTF

SEQ ID NO: 259938 - protein, 15 aa, Homo sapiens
  CDR3 for beta chain variable domain of TCR clone 129969 (TRBV6-3, TRBJ2-7)
CASSSPGTVFYEQNF

SEQ ID NO: 259939 - protein, 10 aa, Homo sapiens
  CDR3 for alpha chain variable domain of TCR clone 129970 (TRAV26-1, TRAJ11)
CIPGYSTLTF

SEQ ID NO: 259940 - protein, 19 aa, Homo sapiens
  CDR3 for beta chain variable domain of TCR clone 129970 (TRBV18, TRBJ2-1)
CASSPTGGLLAGVYNEQFF

SEQ ID NO: 259941 - protein, 16 aa, Homo sapiens
  CDR3 for alpha chain variable domain of TCR clone 129971 (TRAV12-1, TRAJ53)
CVVTSVAGGSNYKLTF

SEQ ID NO: 259942 - protein, 16 aa, Homo sapiens
  CDR3 for beta chain variable domain of TCR clone 129971 (TRBV6-6, TRBJ2-3)
CASSYAHAGSTDTQYF

SEQ ID NO: 259943 - protein, 13 aa, Homo sapiens
  CDR3 for alpha chain variable domain of TCR clone 129972 (TRAV17, TRAJ9)
CATAITGGFKTIF

SEQ ID NO: 259944 - protein, 16 aa, Homo sapiens
  CDR3 for beta chain variable domain of TCR clone 129972 (TRBV15, TRBJ2-1)
CATSINLAGGYNEQFF

SEQ ID NO: 259945 - protein, 13 aa, Homo sapiens
  CDR3 for alpha chain variable domain of TCR clone 129973 (TRAV8-6, TRAJ8)
CAVSNTGFQILVF

SEQ ID NO: 259946 - protein, 15 aa, Homo sapiens
  CDR3 for beta chain variable domain of TCR clone 129973 (TRBV28, TRBJ2-5)
CASSSGRTIQETQYF

SEQ ID NO: 259947 - protein, 17 aa, Homo sapiens
  CDR3 for alpha chain variable domain of TCR clone 129974 (TRAV26-1, TRAJ28)
CIVRARYSGAGSYQLTF

SEQ ID NO: 259948 - protein, 15 aa, Homo sapiens
  CDR3 for beta chain variable domain of TCR clone 129974 (TRBV7-9, TRBJ2-7)
CASSLPMGQANEQYF

SEQ ID NO: 259949 - protein, 14 aa, Homo sapiens
  CDR3 for alpha chain variable domain of TCR clone 129975 (TRAV1-2, TRAJ16)
CAVNRFSDGQKLLF

SEQ ID NO: 259950 - protein, 13 aa, Homo sapiens
  CDR3 for beta chain variable domain of TCR clone 129975 (TRBV4-2, TRBJ2-7)
CASSRDPHDEQYF

SEQ ID NO: 259951 - protein, 18 aa, Homo sapiens
  CDR3 for alpha chain variable domain of TCR clone 129976 (TRAV13-1, TRAJ52)
CAASKRSAGGTSYGKLTF

SEQ ID NO: 259952 - protein, 17 aa, Homo sapiens
  CDR3 for beta chain variable domain of TCR clone 129976 (TRBV7-9, TRBJ2-3)
CASSLEEAGAYPDTQYF

SEQ ID NO: 259953 - protein, 16 aa, Homo sapiens
  CDR3 for alpha chain variable domain of TCR clone 129977 (TRAV4, TRAJ22)
CLVGDLYSGSARQLTF

SEQ ID NO: 259954 - protein, 15 aa, Homo sapiens
  CDR3 for beta chain variable domain of TCR clone 129977 (TRBV12-4, TRBJ2-5)
CASSPPTGLQETQYF

SEQ ID NO: 259955 - protein, 17 aa, Homo sapiens
  CDR3 for alpha chain variable domain of TCR clone 129978 (TRAV27, TRAJ42)
CAERVIYYGGSQGNLIF

SEQ ID NO: 259956 - protein, 15 aa, Homo sapiens
  CDR3 for beta chain variable domain of TCR clone 129978 (TRBV19, TRBJ1-6)
CASSTQGAVGSPLHF

SEQ ID NO: 259957 - protein, 13 aa, Homo sapiens
  CDR3 for alpha chain variable domain of TCR clone 129979 (TRAV27, TRAJ45)
CRSSGGGADGLTF

SEQ ID NO: 259958 - protein, 11 aa, Homo sapiens
  CDR3 for beta chain variable domain of TCR clone 129979 (TRBV12-4, TRBJ2-3)
CASTATDTQYF

SEQ ID NO: 259959 - protein, 18 aa, Homo sapiens
  CDR3 for alpha chain variable domain of TCR clone 129980 (TRAV21, TRAJ52)
CAVRPSPAGGPSYGKLTF

SEQ ID NO: 259960 - protein, 14 aa, Homo sapiens
  CDR3 for beta chain variable domain of TCR clone 129980 (TRBV4-1, TRBJ2-2)
CASSQAVNTGELFF

SEQ ID NO: 259961 - protein, 10 aa, Homo sapiens
  CDR3 for alpha chain variable domain of TCR clone 129981 (TRAV23/DV6, TRAJ57)
CAASSTLSQV

SEQ ID NO: 259962 - protein, 17 aa, Homo sapiens
  CDR3 for beta chain variable domain of TCR clone 129981 (TRBV10-3, TRBJ2-6)
CAISESTAPSGANVLTF

SEQ ID NO: 259963 - protein, 17 aa, Homo sapiens
  CDR3 for alpha chain variable domain of TCR clone 129982 (TRAV3, TRAJ42)
CAVRDRDYGGSQGNLIF

SEQ ID NO: 259964 - protein, 18 aa, Homo sapiens
  CDR3 for beta chain variable domain of TCR clone 129982 (TRBV20-1, TRBJ2-3)
GSASGLAGGPGTTDTQYF

SEQ ID NO: 259965 - protein, 14 aa, Homo sapiens
  CDR3 for alpha chain variable domain of TCR clone 129983 (TRAV12-1, TRAJ17)
CVVNYKAAGNKLTF

SEQ ID NO: 259966 - protein, 16 aa, Homo sapiens
  CDR3 for beta chain variable domain of TCR clone 129983 (TRBV29-1, TRBJ2-2)
CSVEKTSEGNTGELFF

SEQ ID NO: 259967 - protein, 13 aa, Homo sapiens
  CDR3 for alpha chain variable domain of TCR clone 129984 (TRAV13-1, TRAJ39)
CSKYSNAGNMLTF

SEQ ID NO: 259968 - protein, 15 aa, Homo sapiens
  CDR3 for beta chain variable domain of TCR clone 129984 (TRBV7-9, TRBJ1-6)
CASSSPGRGNSPLHF

SEQ ID NO: 259969 - protein, 14 aa, Homo sapiens
  CDR3 for alpha chain variable domain of TCR clone 129985 (TRAV13-1, TRAJ10)
CAALFTGGGNKLNF

SEQ ID NO: 259970 - protein, 15 aa, Homo sapiens
  CDR3 for beta chain variable domain of TCR clone 129985 (TRBV10-3, TRBJ2-2)
CAISEGDRAAGELFF

SEQ ID NO: 259971 - protein, 11 aa, Homo sapiens
  CDR3 for alpha chain variable domain of TCR clone 129986 (TRAV1-1, TRAJ23)
CAVRQGGKHIF

SEQ ID NO: 259972 - protein, 20 aa, Homo sapiens
  CDR3 for beta chain variable domain of TCR clone 129986 (TRBV7-8, TRBJ2-2)
CASSHLFPGPTIHITGELFF

SEQ ID NO: 259973 - protein, 12 aa, Homo sapiens
  CDR3 for alpha chain variable domain of TCR clone 129987 (TRAV12-3, TRAJ17)
CAMTLTGNKLTF

SEQ ID NO: 259974 - protein, 14 aa, Homo sapiens
  CDR3 for beta chain variable domain of TCR clone 129987 (TRBV4-2, TRBJ2-7)
CASSPNRAPYEQYF

SEQ ID NO: 259975 - protein, 13 aa, Homo sapiens
  CDR3 for alpha chain variable domain of TCR clone 129988 (TRAV1-2, TRAJ9)
CAALNTGGFKTIF

SEQ ID NO: 259976 - protein, 15 aa, Homo sapiens
  CDR3 for beta chain variable domain of TCR clone 129988 (TRBV6-3, TRBJ2-7)
CASSSPGTVFCEQYF

SEQ ID NO: 259977 - protein, 14 aa, Homo sapiens
  CDR3 for alpha chain variable domain of TCR clone 129989 (TRAV1-2, TRAJ17)
CALRRGAAGNKLTF

SEQ ID NO: 259978 - protein, 13 aa, Homo sapiens
  CDR3 for beta chain variable domain of TCR clone 129989 (TRBV9, TRBJ2-1)
CASSVGQGGEQFS

SEQ ID NO: 259979 - protein, 13 aa, Homo sapiens
  CDR3 for alpha chain variable domain of TCR clone 129990 (TRAV17, TRAJ15)
CATDARAGTALIF

SEQ ID NO: 259980 - protein, 15 aa, Homo sapiens
  CDR3 for beta chain variable domain of TCR clone 129990 (TRBV20-1, TRBJ2-7)
CNARDRVSGMDEQYF

SEQ ID NO: 259981 - protein, 13 aa, Homo sapiens
  CDR3 for alpha chain variable domain of TCR clone 129991 (TRAV12-2, TRAJ7)
CAGLIYGNNRLAF

SEQ ID NO: 259982 - protein, 16 aa, Homo sapiens
  CDR3 for beta chain variable domain of TCR clone 129991 (TRBV19, TRBJ2-7)
CASSISAGGALYEQYF

SEQ ID NO: 259983 - protein, 13 aa, Homo sapiens
  CDR3 for alpha chain variable domain of TCR clone 129992 (TRAV17, TRAJ21)
CATDGGNFNKFYF

SEQ ID NO: 259984 - protein, 14 aa, Homo sapiens
  CDR3 for beta chain variable domain of TCR clone 129992 (TRBV19, TRBJ2-1)
CASPTFVLSGEQFF

SEQ ID NO: 259985 - protein, 14 aa, Homo sapiens
  CDR3 for alpha chain variable domain of TCR clone 129993 (TRAV1-2, TRAJ8)
CAVREDTGFQRLVF

SEQ ID NO: 259986 - protein, 16 aa, Homo sapiens
  CDR3 for beta chain variable domain of TCR clone 129993 (TRBV7-9, TRBJ1-2)
CASSLGFSSGEDGYTF

SEQ ID NO: 259987 - protein, 14 aa, Homo sapiens
  CDR3 for alpha chain variable domain of TCR clone 129994 (TRAV26-1, TRAJ45)
CIEVTGGGADGLTF

SEQ ID NO: 259988 - protein, 12 aa, Homo sapiens
  CDR3 for beta chain variable domain of TCR clone 129994 (TRBV12-4, TRBJ1-1)
CASSLVDTEAFF

SEQ ID NO: 259989 - protein, 16 aa, Homo sapiens
  CDR3 for alpha chain variable domain of TCR clone 129995 (TRAV26-1, TRAJ53)
CTVRVAMGGSNYKLTF

SEQ ID NO: 259990 - protein, 12 aa, Homo sapiens
  CDR3 for beta chain variable domain of TCR clone 129995 (TRBV7-9, TRBJ1-5)
CASSPQGQPQHS

SEQ ID NO: 259991 - protein, 15 aa, Homo sapiens
  CDR3 for alpha chain variable domain of TCR clone 129996 (TRAV3, TRAJ3)
CAVRDMSSSASKIIF

SEQ ID NO: 259992 - protein, 15 aa, Homo sapiens
  CDR3 for beta chain variable domain of TCR clone 129996 (TRBV20-1, TRBJ1-1)
CSASRGVTGNTEAFF

SEQ ID NO: 259993 - protein, 14 aa, Homo sapiens
  CDR3 for alpha chain variable domain of TCR clone 129997 (TRAV12-3, TRAJ10)
SHLPLTGGGNKLTF

SEQ ID NO: 259994 - protein, 13 aa, Homo sapiens
  CDR3 for beta chain variable domain of TCR clone 129997 (TRBV25-1, TRBJ1-1)
CASSGQVRAEAFF

SEQ ID NO: 259995 - protein, 14 aa, Homo sapiens
  CDR3 for alpha chain variable domain of TCR clone 129998 (TRAV35, TRAJ22)
CAGLRPGSARQLTF

SEQ ID NO: 259996 - protein, 14 aa, Homo sapiens
  CDR3 for beta chain variable domain of TCR clone 129998 (TRBV11-2, TRBJ2-3)
CASSRLARTDTQYF

SEQ ID NO: 259997 - protein, 13 aa, Homo sapiens
  CDR3 for alpha chain variable domain of TCR clone 129999 (TRAV16, TRAJ54)
CALMVQGAQKLLF

SEQ ID NO: 259998 - protein, 12 aa, Homo sapiens
  CDR3 for beta chain variable domain of TCR clone 129999 (TRBV18, TRBJ2-7)
CASSTAMGEQYF

SEQ ID NO: 259999 - protein, 16 aa, Homo sapiens
  CDR3 for alpha chain variable domain of TCR clone 130000 (TRAV30, TRAJ24)
FGTEIVDADSWGKFHF

SEQ ID NO: 260000 - protein, 14 aa, Homo sapiens
  CDR3 for beta chain variable domain of TCR clone 130000 (TRBV12-5, TRBJ2-5)
CASGSRTHQETQYF

SEQ ID NO: 260001 - protein, 22 aa, Homo sapiens
  CDR3 for alpha chain variable domain of TCR clone 130001 (TRAV26-2, TRAJ45)
CCVLLHPERQGRLGGGADGLTF

SEQ ID NO: 260002 - protein, 15 aa, Homo sapiens
  CDR3 for beta chain variable domain of TCR clone 130001 (TRBV7-6, TRBJ2-5)
CASSKPTGPQETQYF

SEQ ID NO: 260003 - protein, 12 aa, Homo sapiens
  CDR3 for alpha chain variable domain of TCR clone 130002 (TRAV1-1, TRAJ8)
CAGGTGLQKLVF

SEQ ID NO: 260004 - protein, 13 aa, Homo sapiens
  CDR3 for beta chain variable domain of TCR clone 130002 (TRBV7-9, TRBJ1-2)
CASSLKQNYGYTF

SEQ ID NO: 260005 - protein, 14 aa, Homo sapiens
  CDR3 for alpha chain variable domain of TCR clone 130003 (TRAV1-2, TRAJ16)
FAVNRFSDGQKLLF

SEQ ID NO: 260006 - protein, 15 aa, Homo sapiens
  CDR3 for beta chain variable domain of TCR clone 130003 (TRBV7-9, TRBJ2-2)
CASGPLDTFPGELFF

SEQ ID NO: 260007 - protein, 15 aa, Homo sapiens
  CDR3 for alpha chain variable domain of TCR clone 130004 (TRAV13-2, TRAJ45)
CAEHHSGGGAAGLTF

SEQ ID NO: 260008 - protein, 15 aa, Homo sapiens
  CDR3 for beta chain variable domain of TCR clone 130004 (TRBV7-2, TRBJ2-7)
CASSLALGSAYEQYF

SEQ ID NO: 260009 - protein, 14 aa, Homo sapiens
  CDR3 for alpha chain variable domain of TCR clone 130005 (TRAV8-4, TRAJ13)
CAVTLSGGYQKVTF

SEQ ID NO: 260010 - protein, 14 aa, Homo sapiens
  CDR3 for beta chain variable domain of TCR clone 130005 (TRBV7-2, TRBJ1-2)
CASSQRGSTYGYTF

SEQ ID NO: 260011 - protein, 16 aa, Homo sapiens
  CDR3 for alpha chain variable domain of TCR clone 130006 (TRAV26-1, TRAJ32)
CIVRTHYGGATNKLIF

SEQ ID NO: 260012 - protein, 14 aa, Homo sapiens
  CDR3 for beta chain variable domain of TCR clone 130006 (TRBV6-1, TRBJ1-3)
CASVQGGGGNTIYF

SEQ ID NO: 260013 - protein, 19 aa, Homo sapiens
  CDR3 for alpha chain variable domain of TCR clone 130007 (TRAV16, TRAJ26)
CAPEELWSEFCLWSRNQIF

SEQ ID NO: 260014 - protein, 15 aa, Homo sapiens
  CDR3 for beta chain variable domain of TCR clone 130007 (TRBV7-2, TRBJ2-3)
CASSLTGTSTDTQYF

SEQ ID NO: 260015 - protein, 13 aa, Homo sapiens
  CDR3 for alpha chain variable domain of TCR clone 130008 (TRAV16, TRAJ10)
CAPAQEEETNSPL

SEQ ID NO: 260016 - protein, 15 aa, Homo sapiens
  CDR3 for beta chain variable domain of TCR clone 130008 (TRBV6-3, TRBJ2-7)
CASSSPGTVFYEQYF

SEQ ID NO: 260017 - protein, 12 aa, Homo sapiens
  CDR3 for alpha chain variable domain of TCR clone 130009 (TRAV1-1, TRAJ39)
CAVPVVGNMLTF

SEQ ID NO: 260018 - protein, 17 aa, Homo sapiens
  CDR3 for beta chain variable domain of TCR clone 130009 (TRBV28, TRBJ2-5)
FASSTPEGDALQETQYF

SEQ ID NO: 260019 - protein, 18 aa, Homo sapiens
  CDR3 for alpha chain variable domain of TCR clone 130010 (TRAV26-1, TRAJ52)
CIVRVAGAGGTSYGKLTF

SEQ ID NO: 260020 - protein, 14 aa, Homo sapiens
  CDR3 for beta chain variable domain of TCR clone 130010 (TRBV4-2, TRBJ2-1)
CASGLDRAYNEQFF

SEQ ID NO: 260021 - protein, 14 aa, Homo sapiens
  CDR3 for alpha chain variable domain of TCR clone 130011 (TRAV1-2, TRAJ16)
CAVNRFSDGQNLLF

SEQ ID NO: 260022 - protein, 14 aa, Homo sapiens
  CDR3 for beta chain variable domain of TCR clone 130011 (TRBV12-5, TRBJ2-5)
CASGSRTHQETQYF

SEQ ID NO: 260023 - protein, 18 aa, Homo sapiens
  CDR3 for alpha chain variable domain of TCR clone 130012 (TRAV29/DV5, TRAJ52)
CAAGFRGADGTSYGKLTF

SEQ ID NO: 260024 - protein, 16 aa, Homo sapiens
  CDR3 for beta chain variable domain of TCR clone 130012 (TRBV7-3, TRBJ2-2)
CASSLKRGTLSGELFF

SEQ ID NO: 260025 - protein, 14 aa, Homo sapiens
  CDR3 for alpha chain variable domain of TCR clone 130013 (TRAV3, TRAJ8)
CAVSLNTGFQNLVF

SEQ ID NO: 260026 - protein, 14 aa, Homo sapiens
  CDR3 for beta chain variable domain of TCR clone 130013 (TRBV6-6, TRBJ1-5)
CASVDSGFNQPQHF

SEQ ID NO: 260027 - protein, 14 aa, Homo sapiens
  CDR3 for alpha chain variable domain of TCR clone 130014 (TRAV12-3, TRAJ22)
CAMSLFGSARQLTF

SEQ ID NO: 260028 - protein, 16 aa, Homo sapiens
  CDR3 for beta chain variable domain of TCR clone 130014 (TRBV28, TRBJ2-7)
CASSLFFETGGPEQYF

SEQ ID NO: 260029 - protein, 14 aa, Homo sapiens
  CDR3 for alpha chain variable domain of TCR clone 130015 (TRAV1-2, TRAJ16)
CAVNRFSDGQKLLF

SEQ ID NO: 260030 - protein, 14 aa, Homo sapiens
  CDR3 for beta chain variable domain of TCR clone 130015 (TRBV11-2, TRBJ1-1)
CASSSLGGRTEAFF

SEQ ID NO: 260031 - protein, 15 aa, Homo sapiens
  CDR3 for alpha chain variable domain of TCR clone 130016 (TRAV21, TRAJ40)
CAVRPQTSGTCKYIF

SEQ ID NO: 260032 - protein, 13 aa, Homo sapiens
  CDR3 for beta chain variable domain of TCR clone 130016 (TRBV7-2, TRBJ2-2)
CASSSVRAGELFF

SEQ ID NO: 260033 - protein, 13 aa, Homo sapiens
  CDR3 for alpha chain variable domain of TCR clone 130017 (TRAV12-3, TRAJ33)
CAMSVNSNYQLIW

SEQ ID NO: 260034 - protein, 13 aa, Homo sapiens
  CDR3 for beta chain variable domain of TCR clone 130017 (TRBV7-2, TRBJ2-2)
YASSLAVTGELFF

SEQ ID NO: 260035 - protein, 14 aa, Homo sapiens
  CDR3 for alpha chain variable domain of TCR clone 130018 (TRAV14/DV4, TRAJ15)
CAMRRDQSGTALIF

SEQ ID NO: 260036 - protein, 16 aa, Homo sapiens
  CDR3 for beta chain variable domain of TCR clone 130018 (TRBV15, TRBJ2-3)
CATSRDLGIVTDTQYF

SEQ ID NO: 260037 - protein, 18 aa, Homo sapiens
  CDR3 for alpha chain variable domain of TCR clone 130019 (TRAV21, TRAJ52)
CAVRPSPAGGTSYGKLTF

SEQ ID NO: 260038 - protein, 16 aa, Homo sapiens
  CDR3 for beta chain variable domain of TCR clone 130019 (TRBV19, TRBJ2-1)
CASSKAGPSSYNEQLF

SEQ ID NO: 260039 - protein, 22 aa, Homo sapiens
  CDR3 for alpha chain variable domain of TCR clone 130020 (TRAV8-3, TRAJ8)
CAVGPNEHRLSETCIWNWHPTS

SEQ ID NO: 260040 - protein, 12 aa, Homo sapiens
  CDR3 for beta chain variable domain of TCR clone 130020 (TRBV6-3, TRBJ2-7)
CASSEPGFEQYF

SEQ ID NO: 260041 - protein, 15 aa, Homo sapiens
  CDR3 for alpha chain variable domain of TCR clone 130021 (TRAV38-2/DV8, TRAJ57)
CASARAQGGPEKLVF

SEQ ID NO: 260042 - protein, 17 aa, Homo sapiens
  CDR3 for beta chain variable domain of TCR clone 130021 (TRBV18, TRBJ1-5)
CASSPTMGQGTNQPQHF

SEQ ID NO: 260043 - protein, 16 aa, Homo sapiens
  CDR3 for alpha chain variable domain of TCR clone 130022 (TRAV26-1, )
CIDIQNPDPAVYQLRD

SEQ ID NO: 260044 - protein, 12 aa, Homo sapiens
  CDR3 for beta chain variable domain of TCR clone 130022 (TRBV19, TRBJ2-5)
CASSIGQVTDFF

SEQ ID NO: 260045 - protein, 17 aa, Homo sapiens
  CDR3 for alpha chain variable domain of TCR clone 130023 (TRAV4, TRAJ13)
CLVGVQGSPGGYQKVTF

SEQ ID NO: 260046 - protein, 11 aa, Homo sapiens
  CDR3 for beta chain variable domain of TCR clone 130023 (TRBV7-8, TRBJ2-7)
CASSLSLEQYF

SEQ ID NO: 260047 - protein, 12 aa, Homo sapiens
  CDR3 for alpha chain variable domain of TCR clone 130024 (TRAV13-2, TRAJ8)
CAPWLGLQKLVF

SEQ ID NO: 260048 - protein, 14 aa, Homo sapiens
  CDR3 for beta chain variable domain of TCR clone 130024 (TRBV18, TRBJ1-5)
CASSRQQRNQPQHF

SEQ ID NO: 260049 - protein, 17 aa, Homo sapiens
  CDR3 for alpha chain variable domain of TCR clone 130025 (TRAV3, TRAJ6)
CAVRDGPRAGGSYIPTF

SEQ ID NO: 260050 - protein, 16 aa, Homo sapiens
  CDR3 for beta chain variable domain of TCR clone 130025 (TRBV7-3, TRBJ2-1)
CASSSIRRAPTMSSSS

SEQ ID NO: 260051 - protein, 17 aa, Homo sapiens
  CDR3 for alpha chain variable domain of TCR clone 130026 (TRAV12-3, TRAJ6)
CAMSARGGGGGSYIPTF

SEQ ID NO: 260052 - protein, 12 aa, Homo sapiens
  CDR3 for beta chain variable domain of TCR clone 130026 (TRBV12-4, TRBJ2-3)
CASSTLPDTQYF

SEQ ID NO: 260053 - protein, 18 aa, Homo sapiens
  CDR3 for alpha chain variable domain of TCR clone 130027 (TRAV17, TRAJ28)
CATDQPRGSGAGSYQLTF

SEQ ID NO: 260054 - protein, 14 aa, Homo sapiens
  CDR3 for beta chain variable domain of TCR clone 130027 (TRBV13, TRBJ2-5)
CASSLDYPQETQYF

SEQ ID NO: 260055 - protein, 15 aa, Homo sapiens
  CDR3 for alpha chain variable domain of TCR clone 130028 (TRAV3, TRAJ20)
CAVRDIKLSDYKLSF

SEQ ID NO: 260056 - protein, 14 aa, Homo sapiens
  CDR3 for beta chain variable domain of TCR clone 130028 (TRBV6-5, TRBJ2-7)
CASSLFPGGYEQYF

SEQ ID NO: 260057 - protein, 15 aa, Homo sapiens
  CDR3 for alpha chain variable domain of TCR clone 130029 (TRAV3, TRAJ17)
CAVSPKEAAGNKLTF

SEQ ID NO: 260058 - protein, 12 aa, Homo sapiens
  CDR3 for beta chain variable domain of TCR clone 130029 (TRBV7-9, TRBJ1-6)
CAISLMTSPLHF

SEQ ID NO: 260059 - protein, 14 aa, Homo sapiens
  CDR3 for alpha chain variable domain of TCR clone 130030 (TRAV23/DV6, TRAJ39)
CAASIGNAGNMLTF

SEQ ID NO: 260060 - protein, 12 aa, Homo sapiens
  CDR3 for beta chain variable domain of TCR clone 130030 (TRBV20-1, TRBJ2-5)
CSVGTGSEAQYF

SEQ ID NO: 260061 - protein, 13 aa, Homo sapiens
  CDR3 for alpha chain variable domain of TCR clone 130031 (TRAV13-2, TRAJ13)
CAASSGGYQKVTF

SEQ ID NO: 260062 - protein, 15 aa, Homo sapiens
  CDR3 for beta chain variable domain of TCR clone 130031 (TRBV6-5, TRBJ1-1)
CASTLRLGSGTEAFF

SEQ ID NO: 260063 - protein, 15 aa, Homo sapiens
  CDR3 for alpha chain variable domain of TCR clone 130032 (TRAV4, TRAJ39)
CLVGPNNNAGNMLTF

SEQ ID NO: 260064 - protein, 18 aa, Homo sapiens
  CDR3 for beta chain variable domain of TCR clone 130032 (TRBV11-2, TRBJ2-3)
CASSLGGASRGAPNTQYF

SEQ ID NO: 260065 - protein, 13 aa, Homo sapiens
  CDR3 for alpha chain variable domain of TCR clone 130033 (TRAV8-3, TRAJ28)
CAVGAVGCYQLTF

SEQ ID NO: 260066 - protein, 15 aa, Homo sapiens
  CDR3 for beta chain variable domain of TCR clone 130033 (TRBV28, TRBJ2-5)
CASSPGQGSIETQYF

SEQ ID NO: 260067 - protein, 14 aa, Homo sapiens
  CDR3 for alpha chain variable domain of TCR clone 130034 (TRAV2, TRAJ37)
CAVDFTSNTGKLIF

SEQ ID NO: 260068 - protein, 17 aa, Homo sapiens
  CDR3 for beta chain variable domain of TCR clone 130034 (TRBV25-1, TRBJ2-1)
CASSAYGQGRGVYEQFF

SEQ ID NO: 260069 - protein, 12 aa, Homo sapiens
  CDR3 for alpha chain variable domain of TCR clone 130035 (TRAV17, TRAJ21)
CALRYNFSKFYF

SEQ ID NO: 260070 - protein, 13 aa, Homo sapiens
  CDR3 for beta chain variable domain of TCR clone 130035 (TRBV24-1, TRBJ2-5)
CATSTGGTETQYF

SEQ ID NO: 260071 - protein, 11 aa, Homo sapiens
  CDR3 for alpha chain variable domain of TCR clone 130036 (TRAV2, TRAJ33)
CAVESNYQLIW

SEQ ID NO: 260072 - protein, 16 aa, Homo sapiens
  CDR3 for beta chain variable domain of TCR clone 130036 (TRBV18, TRBJ2-2)
CASSPPRTANTGELFF

SEQ ID NO: 260073 - protein, 15 aa, Homo sapiens
  CDR3 for alpha chain variable domain of TCR clone 130037 (TRAV8-3, TRAJ23)
CAVGDRYNQGGKLIF

SEQ ID NO: 260074 - protein, 15 aa, Homo sapiens
  CDR3 for beta chain variable domain of TCR clone 130037 (TRBV7-9, TRBJ1-6)
CASSSPGRGNSPLHF

SEQ ID NO: 260075 - protein, 11 aa, Homo sapiens
  CDR3 for alpha chain variable domain of TCR clone 130038 (TRAV2, TRAJ13)
CASGGYQKVTF

SEQ ID NO: 260076 - protein, 13 aa, Homo sapiens
  CDR3 for beta chain variable domain of TCR clone 130038 (TRBV12-4, TRBJ2-5)
CASSLGGSRTQYF

SEQ ID NO: 260077 - protein, 13 aa, Homo sapiens
  CDR3 for alpha chain variable domain of TCR clone 130039 (TRAV20, TRAJ40)
CSVPFSGTYKYIF

SEQ ID NO: 260078 - protein, 13 aa, Homo sapiens
  CDR3 for beta chain variable domain of TCR clone 130039 (TRBV15, TRBJ2-5)
CATSQIGEETQYF

SEQ ID NO: 260079 - protein, 13 aa, Homo sapiens
  CDR3 for alpha chain variable domain of TCR clone 130040 (TRAV22, TRAJ26)
CAVVHNYGQNFVF

SEQ ID NO: 260080 - protein, 16 aa, Homo sapiens
  CDR3 for beta chain variable domain of TCR clone 130040 (TRBV7-2, TRBJ2-6)
CASSERRASGANVLTF

SEQ ID NO: 260081 - protein, 14 aa, Homo sapiens
  CDR3 for alpha chain variable domain of TCR clone 130041 (TRAV12-2, TRAJ13)
CAVKKTGGYQKVTF

SEQ ID NO: 260082 - protein, 14 aa, Homo sapiens
  CDR3 for beta chain variable domain of TCR clone 130041 (TRBV2, TRBJ2-1)
CASSEALIYNEQFF

SEQ ID NO: 260083 - protein, 15 aa, Homo sapiens
  CDR3 for alpha chain variable domain of TCR clone 130042 (TRAV12-2, TRAJ53)
CRERGGGGSNYKLTF

SEQ ID NO: 260084 - protein, 14 aa, Homo sapiens
  CDR3 for beta chain variable domain of TCR clone 130042 (TRBV19, TRBJ2-2)
CASSTLHRSGELFF

SEQ ID NO: 260085 - protein, 14 aa, Homo sapiens
  CDR3 for alpha chain variable domain of TCR clone 130043 (TRAV12-2, TRAJ13)
CAVKKTGGYQKVTF

SEQ ID NO: 260086 - protein, 16 aa, Homo sapiens
  CDR3 for beta chain variable domain of TCR clone 130043 (TRBV28, TRBJ2-7)
CASSSSGTSGSYEQYF

SEQ ID NO: 260087 - protein, 16 aa, Homo sapiens
  CDR3 for alpha chain variable domain of TCR clone 130044 (TRAV27, TRAJ52)
CAGAPAGGTSYGKLTF

SEQ ID NO: 260088 - protein, 18 aa, Homo sapiens
  CDR3 for beta chain variable domain of TCR clone 130044 (TRBV11-2, TRBJ2-3)
CASSLGGASRGAPNTQYF

SEQ ID NO: 260089 - protein, 15 aa, Homo sapiens
  CDR3 for alpha chain variable domain of TCR clone 130045 (TRAV2, TRAJ9)
CAVEDRGTGGFKTIF

SEQ ID NO: 260090 - protein, 16 aa, Homo sapiens
  CDR3 for beta chain variable domain of TCR clone 130045 (TRBV24-1, TRBJ2-3)
CATSDPWTGATDTQYF

SEQ ID NO: 260091 - protein, 19 aa, Homo sapiens
  CDR3 for alpha chain variable domain of TCR clone 130046 (TRAV40, )
CLPIPDIQNPDPAAYQLRD

SEQ ID NO: 260092 - protein, 15 aa, Homo sapiens
  CDR3 for beta chain variable domain of TCR clone 130046 (TRBV2, TRBJ1-2)
CASSEIGGANYGYTF

SEQ ID NO: 260093 - protein, 15 aa, Homo sapiens
  CDR3 for alpha chain variable domain of TCR clone 130047 (TRAV23/DV6, TRAJ57)
CAASSTLSQGVSEKL

SEQ ID NO: 260094 - protein, 14 aa, Homo sapiens
  CDR3 for beta chain variable domain of TCR clone 130047 (TRBV25-1, TRBJ1-1)
CASTHLGGNTEAFF

SEQ ID NO: 260095 - protein, 16 aa, Homo sapiens
  CDR3 for alpha chain variable domain of TCR clone 130048 (TRAV30, TRAJ24)
CGTEIVDADSWGKFQF

SEQ ID NO: 260096 - protein, 15 aa, Homo sapiens
  CDR3 for beta chain variable domain of TCR clone 130048 (TRBV27, TRBJ2-2)
CASSLSSGATGELFF

SEQ ID NO: 260097 - protein, 14 aa, Homo sapiens
  CDR3 for alpha chain variable domain of TCR clone 130049 (TRAV1-2, TRAJ8)
CAVREDTGFQKLVF

SEQ ID NO: 260098 - protein, 15 aa, Homo sapiens
  CDR3 for beta chain variable domain of TCR clone 130049 (TRBV9, TRBJ1-6)
CASSVAGTGDSTLHF

SEQ ID NO: 260099 - protein, 14 aa, Homo sapiens
  CDR3 for alpha chain variable domain of TCR clone 130050 (TRAV2, TRAJ37)
CAVEGQGNTGKLIF

SEQ ID NO: 260100 - protein, 14 aa, Homo sapiens
  CDR3 for beta chain variable domain of TCR clone 130050 (TRBV18, TRBJ2-1)
CASSPQGRFNEQFF

SEQ ID NO: 260101 - protein, 12 aa, Homo sapiens
  CDR3 for alpha chain variable domain of TCR clone 130051 (TRAV12-3, TRAJ17)
CAMTLTGNKLTF

SEQ ID NO: 260102 - protein, 13 aa, Homo sapiens
  CDR3 for beta chain variable domain of TCR clone 130051 (TRBV29-1, TRBJ2-2)
CSTTGVNTGELFF

SEQ ID NO: 260103 - protein, 12 aa, Homo sapiens
  CDR3 for alpha chain variable domain of TCR clone 130052 (TRAV3, TRAJ43)
CAVRDPNNDMRF

SEQ ID NO: 260104 - protein, 13 aa, Homo sapiens
  CDR3 for beta chain variable domain of TCR clone 130052 (TRBV19, TRBJ1-2)
CASSVPGQDGCTF

SEQ ID NO: 260105 - protein, 14 aa, Homo sapiens
  CDR3 for alpha chain variable domain of TCR clone 130053 (TRAV1-2, TRAJ16)
CAVNRFSDGQKLLF

SEQ ID NO: 260106 - protein, 13 aa, Homo sapiens
  CDR3 for beta chain variable domain of TCR clone 130053 (TRBV27, TRBJ1-1)
CASSVSIGAEAFF

SEQ ID NO: 260107 - protein, 14 aa, Homo sapiens
  CDR3 for alpha chain variable domain of TCR clone 130054 (TRAV1-2, TRAJ16)
CAVNRFSDGQKLLF

SEQ ID NO: 260108 - protein, 16 aa, Homo sapiens
  CDR3 for beta chain variable domain of TCR clone 130054 (TRBV4-1, TRBJ2-3)
CASSRSTSGAEDTQYF

SEQ ID NO: 260109 - protein, 16 aa, Homo sapiens
  CDR3 for alpha chain variable domain of TCR clone 130055 (TRAV13-1, TRAJ52)
CAAIMRGGTSYGKLTF

SEQ ID NO: 260110 - protein, 16 aa, Homo sapiens
  CDR3 for beta chain variable domain of TCR clone 130055 (TRBV7-8, TRBJ2-4)
CASSAERTLAKNIQYF

SEQ ID NO: 260111 - protein, 15 aa, Homo sapiens
  CDR3 for alpha chain variable domain of TCR clone 130056 (TRAV14/DV4, TRAJ12)
CAMREERDSSYKLIF

SEQ ID NO: 260112 - protein, 16 aa, Homo sapiens
  CDR3 for beta chain variable domain of TCR clone 130056 (TRBV11-2, TRBJ1-2)
CASSPSGREANYGYTF

SEQ ID NO: 260113 - protein, 13 aa, Homo sapiens
  CDR3 for alpha chain variable domain of TCR clone 130057 (TRAV12-1, TRAJ6)
CVVFPGGSYIPTF

SEQ ID NO: 260114 - protein, 14 aa, Homo sapiens
  CDR3 for beta chain variable domain of TCR clone 130057 (TRBV20-1, TRBJ1-3)
CSASPTGVGNTIYF

SEQ ID NO: 260115 - protein, 14 aa, Homo sapiens
  CDR3 for alpha chain variable domain of TCR clone 130058 (TRAV12-3, TRAJ10)
SHLPLTGGGNKLTF

SEQ ID NO: 260116 - protein, 12 aa, Homo sapiens
  CDR3 for beta chain variable domain of TCR clone 130058 (TRBV4-1, TRBJ2-3)
CASSQGTDTQYF

SEQ ID NO: 260117 - protein, 13 aa, Homo sapiens
  CDR3 for alpha chain variable domain of TCR clone 130059 (TRAV35, TRAJ42)
CAGFPGSQGNLIF

SEQ ID NO: 260118 - protein, 14 aa, Homo sapiens
  CDR3 for beta chain variable domain of TCR clone 130059 (TRBV19, TRBJ2-1)
CASPTFVLSGEQFF

SEQ ID NO: 260119 - protein, 12 aa, Homo sapiens
  CDR3 for alpha chain variable domain of TCR clone 130060 (TRAV12-3, TRAJ17)
CAMTLTGNKLTF

SEQ ID NO: 260120 - protein, 15 aa, Homo sapiens
  CDR3 for beta chain variable domain of TCR clone 130060 (TRBV10-2, TRBJ2-6)
GASSEQGTGANVLTF

SEQ ID NO: 260121 - protein, 14 aa, Homo sapiens
  CDR3 for alpha chain variable domain of TCR clone 130061 (TRAV16, TRAJ17)
CALSGRAAGNKLTF

SEQ ID NO: 260122 - protein, 17 aa, Homo sapiens
  CDR3 for beta chain variable domain of TCR clone 130061 (TRBV18, TRBJ2-6)
CASSPRQGAVGANVLSF

SEQ ID NO: 260123 - protein, 12 aa, Homo sapiens
  CDR3 for alpha chain variable domain of TCR clone 130062 (TRAV23/DV6, TRAJ20)
CAADSRDYKLSF

SEQ ID NO: 260124 - protein, 16 aa, Homo sapiens
  CDR3 for beta chain variable domain of TCR clone 130062 (TRBV11-2, TRBJ2-5)
CASSLDGGNHQETQYF

SEQ ID NO: 260125 - protein, 14 aa, Homo sapiens
  CDR3 for alpha chain variable domain of TCR clone 130063 (TRAV12-1, TRAJ9)
CVVNRGTGGFKTIF

SEQ ID NO: 260126 - protein, 13 aa, Homo sapiens
  CDR3 for beta chain variable domain of TCR clone 130063 (TRBV7-9, TRBJ1-2)
CASSLKQNYGYTF

SEQ ID NO: 260127 - protein, 15 aa, Homo sapiens
  CDR3 for alpha chain variable domain of TCR clone 130064 (TRAV8-2, TRAJ40)
CVVLGTTSGTYKYIF

SEQ ID NO: 260128 - protein, 12 aa, Homo sapiens
  CDR3 for beta chain variable domain of TCR clone 130064 (TRBV14, TRBJ2-7)
CASSSLKGEQYF

SEQ ID NO: 260129 - protein, 14 aa, Homo sapiens
  CDR3 for alpha chain variable domain of TCR clone 130065 (TRAV2, TRAJ12)
CAVAAMDSSYKLIF

SEQ ID NO: 260130 - protein, 13 aa, Homo sapiens
  CDR3 for beta chain variable domain of TCR clone 130065 (TRBV19, TRBJ2-1)
CASKVGAGGEQFF

SEQ ID NO: 260131 - protein, 16 aa, Homo sapiens
  CDR3 for alpha chain variable domain of TCR clone 130066 (TRAV3, TRAJ18)
CAVRDGRGSTLGRLYF

SEQ ID NO: 260132 - protein, 15 aa, Homo sapiens
  CDR3 for beta chain variable domain of TCR clone 130066 (TRBV7-9, TRBJ1-6)
CASSSPGRGNSPLHC

SEQ ID NO: 260133 - protein, 14 aa, Homo sapiens
  CDR3 for alpha chain variable domain of TCR clone 130067 (TRAV12-3, TRAJ22)
CAMSLFGSARQLNF

SEQ ID NO: 260134 - protein, 11 aa, Homo sapiens
  CDR3 for beta chain variable domain of TCR clone 130067 (TRBV12-4, TRBJ2-2)
CASSSAGELFF

SEQ ID NO: 260135 - protein, 11 aa, Homo sapiens
  CDR3 for alpha chain variable domain of TCR clone 130068 (TRAV13-2, TRAJ20)
CAENMSHKLSF

SEQ ID NO: 260136 - protein, 15 aa, Homo sapiens
  CDR3 for beta chain variable domain of TCR clone 130068 (TRBV28, TRBJ2-3)
CAPTFRDWSTDTQYF

SEQ ID NO: 260137 - protein, 16 aa, Homo sapiens
  CDR3 for alpha chain variable domain of TCR clone 130069 (TRAV12-3, TRAJ53)
CAMSPGSGGSNYKLIF

SEQ ID NO: 260138 - protein, 14 aa, Homo sapiens
  CDR3 for beta chain variable domain of TCR clone 130069 (TRBV7-2, TRBJ1-1)
CASSFLTGTTEAFF

SEQ ID NO: 260139 - protein, 15 aa, Homo sapiens
  CDR3 for alpha chain variable domain of TCR clone 130070 (TRAV1-2, TRAJ9)
CAVRDDGTGGCKTIF

SEQ ID NO: 260140 - protein, 16 aa, Homo sapiens
  CDR3 for beta chain variable domain of TCR clone 130070 (TRBV7-2, TRBJ1-6)
CASSSFESSYNSPLHF

SEQ ID NO: 260141 - protein, 11 aa, Homo sapiens
  CDR3 for alpha chain variable domain of TCR clone 130071 (TRAV2, TRAJ13)
CASGGYQKVTF

SEQ ID NO: 260142 - protein, 15 aa, Homo sapiens
  CDR3 for beta chain variable domain of TCR clone 130071 (TRBV4-3, TRBJ2-3)
CASSPSLLSTDTQYF

SEQ ID NO: 260143 - protein, 12 aa, Homo sapiens
  CDR3 for alpha chain variable domain of TCR clone 130072 (TRAV36/DV7, TRAJ41)
CAVPWDGYALNF

SEQ ID NO: 260144 - protein, 15 aa, Homo sapiens
  CDR3 for beta chain variable domain of TCR clone 130072 (TRBV4-2, TRBJ1-6)
CASSLKEGQESPLHF

SEQ ID NO: 260145 - protein, 13 aa, Homo sapiens
  CDR3 for alpha chain variable domain of TCR clone 130073 (TRAV35, TRAJ43)
CAGYPYNNYDMRF

SEQ ID NO: 260146 - protein, 15 aa, Homo sapiens
  CDR3 for beta chain variable domain of TCR clone 130073 (TRBV25-1, TRBJ1-4)
CASSKRIATNEKLFF

SEQ ID NO: 260147 - protein, 11 aa, Homo sapiens
  CDR3 for alpha chain variable domain of TCR clone 130074 (TRAV12-2, TRAJ39)
CAVNNMLTFGG

SEQ ID NO: 260148 - protein, 14 aa, Homo sapiens
  CDR3 for beta chain variable domain of TCR clone 130074 (TRBV12-5, TRBJ2-5)
CASGSRTHQETQYF

SEQ ID NO: 260149 - protein, 16 aa, Homo sapiens
  CDR3 for alpha chain variable domain of TCR clone 130075 (TRAV20, TRAJ52)
CAVLPDGGTSYGKLTF

SEQ ID NO: 260150 - protein, 12 aa, Homo sapiens
  CDR3 for beta chain variable domain of TCR clone 130075 (TRBV19, TRBJ2-1)
CASSQISDEQFF

SEQ ID NO: 260151 - protein, 14 aa, Homo sapiens
  CDR3 for alpha chain variable domain of TCR clone 130076 (TRAV16, TRAJ42)
RALLAGGSQGNLIF

SEQ ID NO: 260152 - protein, 16 aa, Homo sapiens
  CDR3 for beta chain variable domain of TCR clone 130076 (TRBV7-3, TRBJ2-2)
CASSLKRGTLSGELFF

SEQ ID NO: 260153 - protein, 17 aa, Homo sapiens
  CDR3 for alpha chain variable domain of TCR clone 130077 (TRAV9-2, TRAJ10)
CALTVTILTGGGNKLNF

SEQ ID NO: 260154 - protein, 17 aa, Homo sapiens
  CDR3 for beta chain variable domain of TCR clone 130077 (TRBV6-3, TRBJ1-1)
CASSYSGRGRRNTEAFF

SEQ ID NO: 260155 - protein, 15 aa, Homo sapiens
  CDR3 for alpha chain variable domain of TCR clone 130078 (TRAV8-3, TRAJ37)
CAVGARASNTGKLIF

SEQ ID NO: 260156 - protein, 15 aa, Homo sapiens
  CDR3 for beta chain variable domain of TCR clone 130078 (TRBV5-4, TRBJ2-3)
CASSLVGRVTDTQYF

SEQ ID NO: 260157 - protein, 15 aa, Homo sapiens
  CDR3 for alpha chain variable domain of TCR clone 130079 (TRAV3, TRAJ4)
CAVRDGTGGYNKLIF

SEQ ID NO: 260158 - protein, 14 aa, Homo sapiens
  CDR3 for beta chain variable domain of TCR clone 130079 (TRBV18, TRBJ2-7)
CASSPRGGAYEQYF

SEQ ID NO: 260159 - protein, 12 aa, Homo sapiens
  CDR3 for alpha chain variable domain of TCR clone 130080 (TRAV1-2, TRAJ33)
CAALDSNYQLIW

SEQ ID NO: 260160 - protein, 16 aa, Homo sapiens
  CDR3 for beta chain variable domain of TCR clone 130080 (TRBV6-4, TRBJ1-2)
CASSEAVGDANYGYTF

SEQ ID NO: 260161 - protein, 14 aa, Homo sapiens
  CDR3 for alpha chain variable domain of TCR clone 130081 (TRAV35, TRAJ22)
CAGLRPGSARQLTF

SEQ ID NO: 260162 - protein, 15 aa, Homo sapiens
  CDR3 for beta chain variable domain of TCR clone 130081 (TRBV20-1, TRBJ2-7)
CSAESGTSGAYEQYF

SEQ ID NO: 260163 - protein, 18 aa, Homo sapiens
  CDR3 for alpha chain variable domain of TCR clone 130082 (TRAV13-2, TRAJ52)
CAETPLNAGVTSYGKLTF

SEQ ID NO: 260164 - protein, 15 aa, Homo sapiens
  CDR3 for beta chain variable domain of TCR clone 130082 (TRBV7-2, TRBJ2-7)
CASSLKGALTYEQYF

SEQ ID NO: 260165 - protein, 12 aa, Homo sapiens
  CDR3 for alpha chain variable domain of TCR clone 130083 (TRAV6, TRAJ9)
CALNTGGFKTIF

SEQ ID NO: 260166 - protein, 16 aa, Homo sapiens
  CDR3 for beta chain variable domain of TCR clone 130083 (TRBV15, TRBJ1-2)
CATSRGPRTGGGGYTF

SEQ ID NO: 260167 - protein, 18 aa, Homo sapiens
  CDR3 for alpha chain variable domain of TCR clone 130084 (TRAV26-1, TRAJ23)
CIVRVGLEVWNQGGKLIF

SEQ ID NO: 260168 - protein, 13 aa, Homo sapiens
  CDR3 for beta chain variable domain of TCR clone 130084 (TRBV2, TRBJ1-5)
CATAGPGNQPQHF

SEQ ID NO: 260169 - protein, 13 aa, Homo sapiens
  CDR3 for alpha chain variable domain of TCR clone 130085 (TRAV20, TRAJ37)
CAGCSSSTGKLIF

SEQ ID NO: 260170 - protein, 15 aa, Homo sapiens
  CDR3 for beta chain variable domain of TCR clone 130085 (TRBV7-2, TRBJ2-1)
CASSFQADEYNEQFF

SEQ ID NO: 260171 - protein, 13 aa, Homo sapiens
  CDR3 for alpha chain variable domain of TCR clone 130086 (TRAV12-1, TRAJ40)
CVVNSSGTYKYIF

SEQ ID NO: 260172 - protein, 14 aa, Homo sapiens
  CDR3 for beta chain variable domain of TCR clone 130086 (TRBV2, TRBJ1-6)
CASEVSSYNSPLHV

SEQ ID NO: 260173 - protein, 16 aa, Homo sapiens
  CDR3 for alpha chain variable domain of TCR clone 130087 (TRAV16, TRAJ4)
CALSRMFSDGYNKLIF

SEQ ID NO: 260174 - protein, 15 aa, Homo sapiens
  CDR3 for beta chain variable domain of TCR clone 130087 (TRBV4-1, TRBJ1-4)
CASSDTGGTNEKLFF

SEQ ID NO: 260175 - protein, 15 aa, Homo sapiens
  CDR3 for alpha chain variable domain of TCR clone 130088 (TRAV8-6, TRAJ10)
CAVSDQAGGGNKLTF

SEQ ID NO: 260176 - protein, 15 aa, Homo sapiens
  CDR3 for beta chain variable domain of TCR clone 130088 (TRBV3-1, TRBJ2-5)
CASSADLGGPETQYF

SEQ ID NO: 260177 - protein, 16 aa, Homo sapiens
  CDR3 for alpha chain variable domain of TCR clone 130089 (TRAV8-3, TRAJ22)
CAVDLLGPGSARQLTF

SEQ ID NO: 260178 - protein, 14 aa, Homo sapiens
  CDR3 for beta chain variable domain of TCR clone 130089 (TRBV11-2, TRBJ2-7)
CASSLEVEGYEQYF

SEQ ID NO: 260179 - protein, 11 aa, Homo sapiens
  CDR3 for alpha chain variable domain of TCR clone 130090 (TRAV2, TRAJ13)
CASVGYQKVTF

SEQ ID NO: 260180 - protein, 17 aa, Homo sapiens
  CDR3 for beta chain variable domain of TCR clone 130090 (TRBV7-3, TRBJ2-3)
CASSLMKRMRGADTQYF

SEQ ID NO: 260181 - protein, 12 aa, Homo sapiens
  CDR3 for alpha chain variable domain of TCR clone 130091 (TRAV13-2, TRAJ23)
CAERHRGGKLIF

SEQ ID NO: 260182 - protein, 13 aa, Homo sapiens
  CDR3 for beta chain variable domain of TCR clone 130091 (TRBV7-3, TRBJ1-2)
CASSLKRGYGYTF

SEQ ID NO: 260183 - protein, 14 aa, Homo sapiens
  CDR3 for alpha chain variable domain of TCR clone 130092 (TRAV12-2, TRAJ17)
CAVNIKAAGNKLTF

SEQ ID NO: 260184 - protein, 12 aa, Homo sapiens
  CDR3 for beta chain variable domain of TCR clone 130092 (TRBV12-4, TRBJ2-7)
CASSLGGYEQYF

SEQ ID NO: 260185 - protein, 16 aa, Homo sapiens
  CDR3 for alpha chain variable domain of TCR clone 130093 (TRAV26-1, TRAJ53)
CIVRVAMGGSNYKLTF

SEQ ID NO: 260186 - protein, 12 aa, Homo sapiens
  CDR3 for beta chain variable domain of TCR clone 130093 (TRBV7-9, TRBJ1-5)
CASSPQGQPQRF

SEQ ID NO: 260187 - protein, 15 aa, Homo sapiens
  CDR3 for alpha chain variable domain of TCR clone 130094 (TRAV38-2/DV8, TRAJ57)
CAYGIVFGKGTKLTV

SEQ ID NO: 260188 - protein, 18 aa, Homo sapiens
  CDR3 for beta chain variable domain of TCR clone 130094 (TRBV18, TRBJ1-1)
CASSLPGAPQGAGTEAFF

SEQ ID NO: 260189 - protein, 14 aa, Homo sapiens
  CDR3 for alpha chain variable domain of TCR clone 130095 (TRAV8-2, TRAJ37)
CVVSISGNTGKLIF

SEQ ID NO: 260190 - protein, 11 aa, Homo sapiens
  CDR3 for beta chain variable domain of TCR clone 130095 (TRBV18, TRBJ2-5)
CASPPRETQYF

SEQ ID NO: 260191 - protein, 13 aa, Homo sapiens
  CDR3 for alpha chain variable domain of TCR clone 130096 (TRAV20, TRAJ34)
CAVSSYNTEKLIF

SEQ ID NO: 260192 - protein, 13 aa, Homo sapiens
  CDR3 for beta chain variable domain of TCR clone 130096 (TRBV7-9, TRBJ1-2)
CASSLKQNYGYTF

SEQ ID NO: 260193 - protein, 16 aa, Homo sapiens
  CDR3 for alpha chain variable domain of TCR clone 130097 (TRAV30, TRAJ24)
CGTEIVDADSWGKFQF

SEQ ID NO: 260194 - protein, 14 aa, Homo sapiens
  CDR3 for beta chain variable domain of TCR clone 130097 (TRBV11-2, TRBJ2-5)
CASSLDLGRETQYF

SEQ ID NO: 260195 - protein, 14 aa, Homo sapiens
  CDR3 for alpha chain variable domain of TCR clone 130098 (TRAV26-1, TRAJ38)
CIADNAGNNRKLIW

SEQ ID NO: 260196 - protein, 13 aa, Homo sapiens
  CDR3 for beta chain variable domain of TCR clone 130098 (TRBV6-6, TRBJ1-2)
CASSPGANYGYTF

SEQ ID NO: 260197 - protein, 15 aa, Homo sapiens
  CDR3 for alpha chain variable domain of TCR clone 130099 (TRAV12-3, TRAJ27)
CAMRAYNTNAGKSTF

SEQ ID NO: 260198 - protein, 17 aa, Homo sapiens
  CDR3 for beta chain variable domain of TCR clone 130099 (TRBV13, TRBJ2-3)
CASSLSRVAGGRNTQYF

SEQ ID NO: 260199 - protein, 11 aa, Homo sapiens
  CDR3 for alpha chain variable domain of TCR clone 130100 (TRAV3, TRAJ21)
CAVGNFNKFYF

SEQ ID NO: 260200 - protein, 16 aa, Homo sapiens
  CDR3 for beta chain variable domain of TCR clone 130100 (TRBV19, TRBJ2-1)
CANSKAGPSSYNEQFF

SEQ ID NO: 260201 - protein, 13 aa, Homo sapiens
  CDR3 for alpha chain variable domain of TCR clone 130101 (TRAV1-1, TRAJ13)
CAVNSGGYQKVPF

SEQ ID NO: 260202 - protein, 12 aa, Homo sapiens
  CDR3 for beta chain variable domain of TCR clone 130101 (TRBV28, TRBJ2-1)
CASSVQINEQFF

SEQ ID NO: 260203 - protein, 15 aa, Homo sapiens
  CDR3 for alpha chain variable domain of TCR clone 130102 (TRAV12-1, TRAJ44)
CVADLPTGTASKLTF

SEQ ID NO: 260204 - protein, 15 aa, Homo sapiens
  CDR3 for beta chain variable domain of TCR clone 130102 (TRBV6-3, TRBJ2-7)
CASSSPGTVFYEQYF

SEQ ID NO: 260205 - protein, 18 aa, Homo sapiens
  CDR3 for alpha chain variable domain of TCR clone 130103 (TRAV13-1, TRAJ52)
CAASKRRAGGTSYGKLTF

SEQ ID NO: 260206 - protein, 14 aa, Homo sapiens
  CDR3 for beta chain variable domain of TCR clone 130103 (TRBV7-2, TRBJ2-5)
CASSTGGELKTQYF

SEQ ID NO: 260207 - protein, 14 aa, Homo sapiens
  CDR3 for alpha chain variable domain of TCR clone 130104 (TRAV13-2, TRAJ43)
CAEIPTYNNNDKRF

SEQ ID NO: 260208 - protein, 15 aa, Homo sapiens
  CDR3 for beta chain variable domain of TCR clone 130104 (TRBV7-9, TRBJ2-2)
CASGPLDTFPGELFF

SEQ ID NO: 260209 - protein, 14 aa, Homo sapiens
  CDR3 for alpha chain variable domain of TCR clone 130105 (TRAV16, TRAJ17)
CAPRIKAAGNKLTF

SEQ ID NO: 260210 - protein, 17 aa, Homo sapiens
  CDR3 for beta chain variable domain of TCR clone 130105 (TRBV7-2, TRBJ2-3)
CASSSYAGTRRADTQYF

SEQ ID NO: 260211 - protein, 13 aa, Homo sapiens
  CDR3 for alpha chain variable domain of TCR clone 130106 (TRAV3, TRAJ43)
CAVKARNNNAMRF

SEQ ID NO: 260212 - protein, 16 aa, Homo sapiens
  CDR3 for beta chain variable domain of TCR clone 130106 (TRBV7-9, TRBJ2-3)
CASSFSVAGGTDTQYF

SEQ ID NO: 260213 - protein, 15 aa, Homo sapiens
  CDR3 for alpha chain variable domain of TCR clone 130107 (TRAV38-1, TRAJ37)
CAFIHGSGNTGKLIF

SEQ ID NO: 260214 - protein, 12 aa, Homo sapiens
  CDR3 for beta chain variable domain of TCR clone 130107 (TRBV7-9, TRBJ2-7)
CASIFGSYEQYF

SEQ ID NO: 260215 - protein, 14 aa, Homo sapiens
  CDR3 for alpha chain variable domain of TCR clone 130108 (TRAV12-2, TRAJ17)
CAVLFKAAGNKLTF

SEQ ID NO: 260216 - protein, 12 aa, Homo sapiens
  CDR3 for beta chain variable domain of TCR clone 130108 (TRBV11-2, TRBJ2-2)
CGSSLGGGELFF

SEQ ID NO: 260217 - protein, 14 aa, Homo sapiens
  CDR3 for alpha chain variable domain of TCR clone 130109 (TRAV1-2, TRAJ16)
CAVNRFSDGQKLLF

SEQ ID NO: 260218 - protein, 14 aa, Homo sapiens
  CDR3 for beta chain variable domain of TCR clone 130109 (TRBV10-3, TRBJ1-1)
CAISDTDRGVEAFF

SEQ ID NO: 260219 - protein, 13 aa, Homo sapiens
  CDR3 for alpha chain variable domain of TCR clone 130110 (TRAV3, TRAJ21)
CAVREPDFNKFYF

SEQ ID NO: 260220 - protein, 19 aa, Homo sapiens
  CDR3 for beta chain variable domain of TCR clone 130110 (TRBV5-1, TRBJ2-4)
FAPAASRRAGEWTKNIQYF

SEQ ID NO: 260221 - protein, 12 aa, Homo sapiens
  CDR3 for alpha chain variable domain of TCR clone 130111 (TRAV12-3, TRAJ17)
CAMTLTGNKLTF

SEQ ID NO: 260222 - protein, 17 aa, Homo sapiens
  CDR3 for beta chain variable domain of TCR clone 130111 (TRBV3-1, TRBJ2-6)
CASSPNTGPAGANVLTF

SEQ ID NO: 260223 - protein, 13 aa, Homo sapiens
  CDR3 for alpha chain variable domain of TCR clone 130112 (TRAV2, TRAJ29)
CAAQNSGNTPLVF

SEQ ID NO: 260224 - protein, 14 aa, Homo sapiens
  CDR3 for beta chain variable domain of TCR clone 130112 (TRBV7-9, TRBJ2-4)
YASSLAMGGNIQYF

SEQ ID NO: 260225 - protein, 17 aa, Homo sapiens
  CDR3 for alpha chain variable domain of TCR clone 130113 (TRAV17, TRAJ52)
CATDLVGGGTSYGKLTF

SEQ ID NO: 260226 - protein, 13 aa, Homo sapiens
  CDR3 for beta chain variable domain of TCR clone 130113 (TRBV10-3, TRBJ2-7)
CASKLAVNYEQYF

SEQ ID NO: 260227 - protein, 15 aa, Homo sapiens
  CDR3 for alpha chain variable domain of TCR clone 130114 (TRAV1-2, TRAJ15)
CAVDVMGSAGTALSF

SEQ ID NO: 260228 - protein, 13 aa, Homo sapiens
  CDR3 for beta chain variable domain of TCR clone 130114 (TRBV20-1, TRBJ1-1)
CSAFDRENTEAFF

SEQ ID NO: 260229 - protein, 14 aa, Homo sapiens
  CDR3 for alpha chain variable domain of TCR clone 130115 (TRAV2, TRAJ9)
CAVEDLSGGFKTIF

SEQ ID NO: 260230 - protein, 18 aa, Homo sapiens
  CDR3 for beta chain variable domain of TCR clone 130115 (TRBV20-1, TRBJ2-5)
CSQTGDSGRLGGKETQYF

SEQ ID NO: 260231 - protein, 11 aa, Homo sapiens
  CDR3 for alpha chain variable domain of TCR clone 130116 (TRAV3, TRAJ21)
CAVGNFNKFYF

SEQ ID NO: 260232 - protein, 15 aa, Homo sapiens
  CDR3 for beta chain variable domain of TCR clone 130116 (TRBV20-1, TRBJ1-1)
CSASWDRFLNTEAFF

SEQ ID NO: 260233 - protein, 13 aa, Homo sapiens
  CDR3 for alpha chain variable domain of TCR clone 130117 (TRAV30, TRAJ16)
CGTFGGDGQKLLF

SEQ ID NO: 260234 - protein, 13 aa, Homo sapiens
  CDR3 for beta chain variable domain of TCR clone 130117 (TRBV7-3, TRBJ2-1)
CASSVDSYNEQFF

SEQ ID NO: 260235 - protein, 16 aa, Homo sapiens
  CDR3 for alpha chain variable domain of TCR clone 130118 (TRAV12-3, TRAJ53)
CAMSPGSGGSNYKRTF

SEQ ID NO: 260236 - protein, 14 aa, Homo sapiens
  CDR3 for beta chain variable domain of TCR clone 130118 (TRBV4-2, TRBJ2-1)
CASGLDRAYNEQFF

SEQ ID NO: 260237 - protein, 14 aa, Homo sapiens
  CDR3 for alpha chain variable domain of TCR clone 130119 (TRAV12-3, TRAJ10)
SHLPLTGGGNKLTF

SEQ ID NO: 260238 - protein, 14 aa, Homo sapiens
  CDR3 for beta chain variable domain of TCR clone 130119 (TRBV4-3, TRBJ1-5)
CASSQGGQGWPQHF

SEQ ID NO: 260239 - protein, 12 aa, Homo sapiens
  CDR3 for alpha chain variable domain of TCR clone 130120 (TRAV12-3, TRAJ17)
CAMTLTGNKITF

SEQ ID NO: 260240 - protein, 17 aa, Homo sapiens
  CDR3 for beta chain variable domain of TCR clone 130120 (TRBV7-3, TRBJ2-3)
CASSLMKRMRGADTQYF

SEQ ID NO: 260241 - protein, 12 aa, Homo sapiens
  CDR3 for alpha chain variable domain of TCR clone 130121 (TRAV13-2, TRAJ39)
CAENNAGNMLTF

SEQ ID NO: 260242 - protein, 13 aa, Homo sapiens
  CDR3 for beta chain variable domain of TCR clone 130121 (TRBV7-9, TRBJ1-2)
CASSLKQNYGYTF

SEQ ID NO: 260243 - protein, 18 aa, Homo sapiens
  CDR3 for alpha chain variable domain of TCR clone 130122 (TRAV29/DV5, TRAJ52)
QCTSVQQADGTSYGKLTF

SEQ ID NO: 260244 - protein, 13 aa, Homo sapiens
  CDR3 for beta chain variable domain of TCR clone 130122 (TRBV7-2, TRBJ1-1)
CASNLKRAKVAFF

SEQ ID NO: 260245 - protein, 13 aa, Homo sapiens
  CDR3 for alpha chain variable domain of TCR clone 130123 (TRAV27, TRAJ42)
CAGARGSQGNLIF

SEQ ID NO: 260246 - protein, 17 aa, Homo sapiens
  CDR3 for beta chain variable domain of TCR clone 130123 (TRBV13, TRBJ2-3)
CASSLPRVAGGRNTQYF

SEQ ID NO: 260247 - protein, 15 aa, Homo sapiens
  CDR3 for alpha chain variable domain of TCR clone 130124 (TRAV27, TRAJ38)
CAARRNAGNNRKLIW

SEQ ID NO: 260248 - protein, 12 aa, Homo sapiens
  CDR3 for beta chain variable domain of TCR clone 130124 (TRBV7-9, TRBJ2-7)
CASSIKREEQYF

SEQ ID NO: 260249 - protein, 11 aa, Homo sapiens
  CDR3 for alpha chain variable domain of TCR clone 130125 (TRAV2, TRAJ13)
CASGGYQKVTF

SEQ ID NO: 260250 - protein, 16 aa, Homo sapiens
  CDR3 for beta chain variable domain of TCR clone 130125 (TRBV27, TRBJ2-2)
CASSLRPGGAPGELFF

SEQ ID NO: 260251 - protein, 12 aa, Homo sapiens
  CDR3 for alpha chain variable domain of TCR clone 130126 (TRAV3, TRAJ20)
CAVRDPDYKLSF

SEQ ID NO: 260252 - protein, 13 aa, Homo sapiens
  CDR3 for beta chain variable domain of TCR clone 130126 (TRBV9, TRBJ2-1)
CASSVVQGGEQFF

SEQ ID NO: 260253 - protein, 16 aa, Homo sapiens
  CDR3 for alpha chain variable domain of TCR clone 130127 (TRAV38-1, TRAJ56)
CAFMKRQTGANSKLTF

SEQ ID NO: 260254 - protein, 17 aa, Homo sapiens
  CDR3 for beta chain variable domain of TCR clone 130127 (TRBV10-3, TRBJ2-2)
CAISESGAGGLVGELFF

SEQ ID NO: 260255 - protein, 15 aa, Homo sapiens
  CDR3 for alpha chain variable domain of TCR clone 130128 (TRAV3, TRAJ22)
CAVRDRGGSARPLTF

SEQ ID NO: 260256 - protein, 15 aa, Homo sapiens
  CDR3 for beta chain variable domain of TCR clone 130128 (TRBV7-3, TRBJ2-1)
CASSPTGGGEVEQFF

SEQ ID NO: 260257 - protein, 14 aa, Homo sapiens
  CDR3 for alpha chain variable domain of TCR clone 130129 (TRAV1-2, TRAJ8)
CAVREDTGFQKLVF

SEQ ID NO: 260258 - protein, 16 aa, Homo sapiens
  CDR3 for beta chain variable domain of TCR clone 130129 (TRBV18, TRBJ1-1)
CASSPGVGGRGGEAFF

SEQ ID NO: 260259 - protein, 16 aa, Homo sapiens
  CDR3 for alpha chain variable domain of TCR clone 130130 (TRAV13-1, TRAJ45)
CAARGPRKGGADGLTF

SEQ ID NO: 260260 - protein, 13 aa, Homo sapiens
  CDR3 for beta chain variable domain of TCR clone 130130 (TRBV12-4, TRBJ2-5)
CASRKRGKETQYF

SEQ ID NO: 260261 - protein, 13 aa, Homo sapiens
  CDR3 for alpha chain variable domain of TCR clone 130131 (TRAV26-1, TRAJ33)
CIVRVEGNYQLIW

SEQ ID NO: 260262 - protein, 16 aa, Homo sapiens
  CDR3 for beta chain variable domain of TCR clone 130131 (TRBV15, TRBJ2-7)
WATSRDRGRRRGEQYF

SEQ ID NO: 260263 - protein, 17 aa, Homo sapiens
  CDR3 for alpha chain variable domain of TCR clone 130132 (TRAV12-3, TRAJ6)
CAMSARGGAGGSYIPTF

SEQ ID NO: 260264 - protein, 12 aa, Homo sapiens
  CDR3 for beta chain variable domain of TCR clone 130132 (TRBV12-4, TRBJ2-3)
CARSTLPDTQYF

SEQ ID NO: 260265 - protein, 11 aa, Homo sapiens
  CDR3 for alpha chain variable domain of TCR clone 130133 (TRAV26-1, TRAJ27)
CIDPNAGKPTF

SEQ ID NO: 260266 - protein, 18 aa, Homo sapiens
  CDR3 for beta chain variable domain of TCR clone 130133 (TRBV7-9, TRBJ2-6)
CASSFPGAGISGANVLTF

SEQ ID NO: 260267 - protein, 14 aa, Homo sapiens
  CDR3 for alpha chain variable domain of TCR clone 130134 (TRAV4, TRAJ23)
CLVGSYNQGGQLIF

SEQ ID NO: 260268 - protein, 18 aa, Homo sapiens
  CDR3 for beta chain variable domain of TCR clone 130134 (TRBV6-5, TRBJ2-6)
CASRTPGQGKTGANVLTF

SEQ ID NO: 260269 - protein, 13 aa, Homo sapiens
  CDR3 for alpha chain variable domain of TCR clone 130135 (TRAV12-2, TRAJ20)
CAVYPSNDYKLSF

SEQ ID NO: 260270 - protein, 14 aa, Homo sapiens
  CDR3 for beta chain variable domain of TCR clone 130135 (TRBV2, TRBJ2-1)
CASSEALIYNEQFF

SEQ ID NO: 260271 - protein, 12 aa, Homo sapiens
  CDR3 for alpha chain variable domain of TCR clone 130136 (TRAV13-2, TRAJ23)
CAERHRGGNLIF

SEQ ID NO: 260272 - protein, 15 aa, Homo sapiens
  CDR3 for beta chain variable domain of TCR clone 130136 (TRBV9, TRBJ1-6)
CASSVAGTGDSPLHF

SEQ ID NO: 260273 - protein, 17 aa, Homo sapiens
  CDR3 for alpha chain variable domain of TCR clone 130137 (TRAV12-2, TRAJ53)
PPTSVPPILSSNYKLTF

SEQ ID NO: 260274 - protein, 13 aa, Homo sapiens
  CDR3 for beta chain variable domain of TCR clone 130137 (TRBV7-7, TRBJ2-3)
CASSLSRADTQYF

SEQ ID NO: 260275 - protein, 14 aa, Homo sapiens
  CDR3 for alpha chain variable domain of TCR clone 130138 (TRAV36/DV7, TRAJ35)
CAGMPIGFGNVLHC

SEQ ID NO: 260276 - protein, 13 aa, Homo sapiens
  CDR3 for beta chain variable domain of TCR clone 130138 (TRBV7-9, TRBJ1-2)
CASSLKQNYGYTF

SEQ ID NO: 260277 - protein, 16 aa, Homo sapiens
  CDR3 for alpha chain variable domain of TCR clone 130139 (TRAV30, TRAJ24)
CGTEIVDADSWGKFQF

SEQ ID NO: 260278 - protein, 16 aa, Homo sapiens
  CDR3 for beta chain variable domain of TCR clone 130139 (TRBV5-1, TRBJ2-3)
CASSSIGAGSTDTQYF

SEQ ID NO: 260279 - protein, 13 aa, Homo sapiens
  CDR3 for alpha chain variable domain of TCR clone 130140 (TRAV16, TRAJ11)
CALTQSGYSTLTF

SEQ ID NO: 260280 - protein, 17 aa, Homo sapiens
  CDR3 for beta chain variable domain of TCR clone 130140 (TRBV5-1, TRBJ1-5)
CASSLAFRTRGNQPQHF

SEQ ID NO: 260281 - protein, 18 aa, Homo sapiens
  CDR3 for alpha chain variable domain of TCR clone 130141 (TRAV26-1, TRAJ23)
CIVRVGLEMWNQGGKLIF

SEQ ID NO: 260282 - protein, 16 aa, Homo sapiens
  CDR3 for beta chain variable domain of TCR clone 130141 (TRBV12-4, TRBJ2-5)
CASSFFVRGRQETQYF

SEQ ID NO: 260283 - protein, 15 aa, Homo sapiens
  CDR3 for alpha chain variable domain of TCR clone 130142 (TRAV38-1, TRAJ57)
CAFMDSQGGSEKLVF

SEQ ID NO: 260284 - protein, 14 aa, Homo sapiens
  CDR3 for beta chain variable domain of TCR clone 130142 (TRBV7-2, TRBJ1-2)
CASSSQGAHYGYTF

SEQ ID NO: 260285 - protein, 15 aa, Homo sapiens
  CDR3 for alpha chain variable domain of TCR clone 130143 (TRAV17, TRAJ56)
CATEPFTGANSKLTF

SEQ ID NO: 260286 - protein, 15 aa, Homo sapiens
  CDR3 for beta chain variable domain of TCR clone 130143 (TRBV28, TRBJ1-5)
RASSRTGGYVQPQHF

SEQ ID NO: 260287 - protein, 18 aa, Homo sapiens
  CDR3 for alpha chain variable domain of TCR clone 130144 (TRAV21, TRAJ52)
CAVRPSPAGGTSYGKLTF

SEQ ID NO: 260288 - protein, 17 aa, Homo sapiens
  CDR3 for beta chain variable domain of TCR clone 130144 (TRBV13, TRBJ2-3)
CASSLPRVAGGGNTQYF

SEQ ID NO: 260289 - protein, 13 aa, Homo sapiens
  CDR3 for alpha chain variable domain of TCR clone 130145 (TRAV26-2, TRAJ54)
CIPRVGGAQKLVF

SEQ ID NO: 260290 - protein, 16 aa, Homo sapiens
  CDR3 for beta chain variable domain of TCR clone 130145 (TRBV4-1, TRBJ1-1)
CASSSMSERPNNEAFF

SEQ ID NO: 260291 - protein, 12 aa, Homo sapiens
  CDR3 for alpha chain variable domain of TCR clone 130146 (TRAV13-1, TRAJ23)
CAASKKGGKLIF

SEQ ID NO: 260292 - protein, 14 aa, Homo sapiens
  CDR3 for beta chain variable domain of TCR clone 130146 (TRBV2, TRBJ2-3)
CASSEGQNTDTQYF

SEQ ID NO: 260293 - protein, 16 aa, Homo sapiens
  CDR3 for alpha chain variable domain of TCR clone 130147 (TRAV20, TRAJ22)
CAVQASSSGSARQLSF

SEQ ID NO: 260294 - protein, 13 aa, Homo sapiens
  CDR3 for beta chain variable domain of TCR clone 130147 (TRBV7-2, TRBJ2-5)
CASSQTSVETQYF

SEQ ID NO: 260295 - protein, 12 aa, Homo sapiens
  CDR3 for alpha chain variable domain of TCR clone 130148 (TRAV12-3, TRAJ20)
CAMVGGDYKLSF

SEQ ID NO: 260296 - protein, 13 aa, Homo sapiens
  CDR3 for beta chain variable domain of TCR clone 130148 (TRBV23-1, TRBJ1-4)
CASRGKLNEKLFF

SEQ ID NO: 260297 - protein, 14 aa, Homo sapiens
  CDR3 for alpha chain variable domain of TCR clone 130149 (TRAV2, TRAJ37)
CAVDFTSNTGKLIF

SEQ ID NO: 260298 - protein, 15 aa, Homo sapiens
  CDR3 for beta chain variable domain of TCR clone 130149 (TRBV4-1, TRBJ2-5)
CASSQWDLYQETQYF

SEQ ID NO: 260299 - protein, 14 aa, Homo sapiens
  CDR3 for alpha chain variable domain of TCR clone 130150 (TRAV12-1, TRAJ17)
CVVNYKAAGNKLTF

SEQ ID NO: 260300 - protein, 13 aa, Homo sapiens
  CDR3 for beta chain variable domain of TCR clone 130150 (TRBV7-9, TRBJ2-3)
CASSPGSTDTQYF

SEQ ID NO: 260301 - protein, 14 aa, Homo sapiens
  CDR3 for alpha chain variable domain of TCR clone 130151 (TRAV1-1, TRAJ28)
CAAPSGAGSYQLTF

SEQ ID NO: 260302 - protein, 15 aa, Homo sapiens
  CDR3 for beta chain variable domain of TCR clone 130151 (TRBV7-2, TRBJ1-2)
CASSLVSGGDHGYTF

SEQ ID NO: 260303 - protein, 13 aa, Homo sapiens
  CDR3 for alpha chain variable domain of TCR clone 130152 (TRAV3, TRAJ20)
CAVRDIGDYKLSF

SEQ ID NO: 260304 - protein, 12 aa, Homo sapiens
  CDR3 for beta chain variable domain of TCR clone 130152 (TRBV3-1, TRBJ1-2)
CASTSGLYGYTC

SEQ ID NO: 260305 - protein, 16 aa, Homo sapiens
  CDR3 for alpha chain variable domain of TCR clone 130153 (TRAV12-2, TRAJ32)
CAVNLGQGGATNKLIF

SEQ ID NO: 260306 - protein, 17 aa, Homo sapiens
  CDR3 for beta chain variable domain of TCR clone 130153 (TRBV11-2, TRBJ2-1)
CASSLYPPGVEYNEQFF

SEQ ID NO: 260307 - protein, 14 aa, Homo sapiens
  CDR3 for alpha chain variable domain of TCR clone 130154 (TRAV3, TRAJ21)
CALGRGSTNFTLDL

SEQ ID NO: 260308 - protein, 14 aa, Homo sapiens
  CDR3 for beta chain variable domain of TCR clone 130154 (TRBV7-9, TRBJ2-4)
CASSLAMGGNIQYS

SEQ ID NO: 260309 - protein, 13 aa, Homo sapiens
  CDR3 for alpha chain variable domain of TCR clone 130155 (TRAV3, TRAJ21)
CAVREPDFNKFYF

SEQ ID NO: 260310 - protein, 13 aa, Homo sapiens
  CDR3 for beta chain variable domain of TCR clone 130155 (TRBV25-1, TRBJ1-6)
CASHPRGDSPLHF

SEQ ID NO: 260311 - protein, 12 aa, Homo sapiens
  CDR3 for alpha chain variable domain of TCR clone 130156 (TRAV12-1, TRAJ29)
CVVYSGTYKYIF

SEQ ID NO: 260312 - protein, 15 aa, Homo sapiens
  CDR3 for beta chain variable domain of TCR clone 130156 (TRBV7-9, TRBJ1-5)
CASSQGHQPNQPQHF

SEQ ID NO: 260313 - protein, 16 aa, Homo sapiens
  CDR3 for alpha chain variable domain of TCR clone 130157 (TRAV3, TRAJ21)
CAVRDIERGNFNKFYF

SEQ ID NO: 260314 - protein, 13 aa, Homo sapiens
  CDR3 for beta chain variable domain of TCR clone 130157 (TRBV27, TRBJ2-7)
CASSLTTGYVQYF

SEQ ID NO: 260315 - protein, 13 aa, Homo sapiens
  CDR3 for alpha chain variable domain of TCR clone 130158 (TRAV21, TRAJ20)
CAVGLRVDYKLSF

SEQ ID NO: 260316 - protein, 13 aa, Homo sapiens
  CDR3 for beta chain variable domain of TCR clone 130158 (TRBV2, TRBJ1-1)
CASRWTVNTEAFF

SEQ ID NO: 260317 - protein, 15 aa, Homo sapiens
  CDR3 for alpha chain variable domain of TCR clone 130159 (TRAV3, TRAJ22)
CAVRDRGGSARQLTF

SEQ ID NO: 260318 - protein, 15 aa, Homo sapiens
  CDR3 for beta chain variable domain of TCR clone 130159 (TRBV7-8, TRBJ2-7)
CASSLERAGSYEQYF

SEQ ID NO: 260319 - protein, 15 aa, Homo sapiens
  CDR3 for alpha chain variable domain of TCR clone 130160 (TRAV27, TRAJ38)
CAARRNAGNNRKLIW

SEQ ID NO: 260320 - protein, 15 aa, Homo sapiens
  CDR3 for beta chain variable domain of TCR clone 130160 (TRBV20-1, TRBJ1-1)
CSASRGVTGNTEAFF

SEQ ID NO: 260321 - protein, 15 aa, Homo sapiens
  CDR3 for alpha chain variable domain of TCR clone 130161 (TRAV13-1, TRAJ44)
CAASRGGGTASKLTF

SEQ ID NO: 260322 - protein, 14 aa, Homo sapiens
  CDR3 for beta chain variable domain of TCR clone 130161 (TRBV7-2, TRBJ2-5)
CASSPRGSSETQFF

SEQ ID NO: 260323 - protein, 11 aa, Homo sapiens
  CDR3 for alpha chain variable domain of TCR clone 130162 (TRAV21, TRAJ11)
CAVNGYSTLPF

SEQ ID NO: 260324 - protein, 15 aa, Homo sapiens
  CDR3 for beta chain variable domain of TCR clone 130162 (TRBV6-3, TRBJ2-7)
CASSSPGTVFYEQYF

SEQ ID NO: 260325 - protein, 15 aa, Homo sapiens
  CDR3 for alpha chain variable domain of TCR clone 130163 (TRAV21, TRAJ52)
CAVRGGGTSYGKLTF

SEQ ID NO: 260326 - protein, 13 aa, Homo sapiens
  CDR3 for beta chain variable domain of TCR clone 130163 (TRBV7-9, TRBJ1-2)
CASSLKQNYGYTF

SEQ ID NO: 260327 - protein, 14 aa, Homo sapiens
  CDR3 for alpha chain variable domain of TCR clone 130164 (TRAV8-6, TRAJ54)
CAVSDFQGAQKLVF

SEQ ID NO: 260328 - protein, 14 aa, Homo sapiens
  CDR3 for beta chain variable domain of TCR clone 130164 (TRBV18, TRBJ2-7)
CASSPRGGVYEQYF

SEQ ID NO: 260329 - protein, 14 aa, Homo sapiens
  CDR3 for alpha chain variable domain of TCR clone 130165 (TRAV8-4, TRAJ9)
CAVRINTGGFKTIF

SEQ ID NO: 260330 - protein, 15 aa, Homo sapiens
  CDR3 for beta chain variable domain of TCR clone 130165 (TRBV11-3, TRBJ2-3)
CASLKDGREGDTQYF

SEQ ID NO: 260331 - protein, 14 aa, Homo sapiens
  CDR3 for alpha chain variable domain of TCR clone 130166 (TRAV12-1, TRAJ30)
CVVNIGGSDDKIIF

SEQ ID NO: 260332 - protein, 15 aa, Homo sapiens
  CDR3 for beta chain variable domain of TCR clone 130166 (TRBV18, TRBJ1-2)
CASSPSNTPNYGYTF

SEQ ID NO: 260333 - protein, 18 aa, Homo sapiens
  CDR3 for alpha chain variable domain of TCR clone 130167 (TRAV9-2, TRAJ52)
CALSRHNAGGTSYGKLTF

SEQ ID NO: 260334 - protein, 16 aa, Homo sapiens
  CDR3 for beta chain variable domain of TCR clone 130167 (TRBV12-5, TRBJ2-5)
CASGPRTSGNQETQYF

SEQ ID NO: 260335 - protein, 12 aa, Homo sapiens
  CDR3 for alpha chain variable domain of TCR clone 130168 (TRAV12-3, TRAJ17)
CAMTLTGNKLTF

SEQ ID NO: 260336 - protein, 13 aa, Homo sapiens
  CDR3 for beta chain variable domain of TCR clone 130168 (TRBV29-1, TRBJ2-1)
CSVEGGRVNEQFF

SEQ ID NO: 260337 - protein, 11 aa, Homo sapiens
  CDR3 for alpha chain variable domain of TCR clone 130169 (TRAV4, TRAJ23)
CLVAPGGKLIF

SEQ ID NO: 260338 - protein, 14 aa, Homo sapiens
  CDR3 for beta chain variable domain of TCR clone 130169 (TRBV7-6, TRBJ2-1)
CASSLGGGADEQFF

SEQ ID NO: 260339 - protein, 17 aa, Homo sapiens
  CDR3 for alpha chain variable domain of TCR clone 130170 (TRAV3, TRAJ6)
CAVRDGPSVGGSYIPTF

SEQ ID NO: 260340 - protein, 12 aa, Homo sapiens
  CDR3 for beta chain variable domain of TCR clone 130170 (TRBV11-2, TRBJ2-2)
CASSLGGGELFF

SEQ ID NO: 260341 - protein, 16 aa, Homo sapiens
  CDR3 for alpha chain variable domain of TCR clone 130171 (TRAV12-2, TRAJ18)
CAVTTDRGSTLGGLYF

SEQ ID NO: 260342 - protein, 14 aa, Homo sapiens
  CDR3 for beta chain variable domain of TCR clone 130171 (TRBV4-2, TRBJ1-5)
CASSQDSINQPQHF

SEQ ID NO: 260343 - protein, 14 aa, Homo sapiens
  CDR3 for alpha chain variable domain of TCR clone 130172 (TRAV12-2, TRAJ40)
CAVKIPSGTYKSIF

SEQ ID NO: 260344 - protein, 20 aa, Homo sapiens
  CDR3 for beta chain variable domain of TCR clone 130172 (TRBV28, TRBJ2-1)
CASTPIGRSPGLAGGNEQFF

SEQ ID NO: 260345 - protein, 18 aa, Homo sapiens
  CDR3 for alpha chain variable domain of TCR clone 130173 (TRAV12-2, TRAJ27)
CAVKMTRSSLEKGHDFIF

SEQ ID NO: 260346 - protein, 13 aa, Homo sapiens
  CDR3 for beta chain variable domain of TCR clone 130173 (TRBV6-6, TRBJ2-7)
CASSPKHLAEQYF

SEQ ID NO: 260347 - protein, 15 aa, Homo sapiens
  CDR3 for alpha chain variable domain of TCR clone 130174 (TRAV2, TRAJ24)
CAVVCLKNSWGKLQF

SEQ ID NO: 260348 - protein, 16 aa, Homo sapiens
  CDR3 for beta chain variable domain of TCR clone 130174 (TRBV7-7, TRBJ2-3)
CASSPGTSGSTDTQYF

SEQ ID NO: 260349 - protein, 11 aa, Homo sapiens
  CDR3 for alpha chain variable domain of TCR clone 130175 (TRAV12-1, TRAJ21)
CVVNNFNKFYF

SEQ ID NO: 260350 - protein, 14 aa, Homo sapiens
  CDR3 for beta chain variable domain of TCR clone 130175 (TRBV18, TRBJ2-7)
CASSPRGGAYEQYF

SEQ ID NO: 260351 - protein, 12 aa, Homo sapiens
  CDR3 for alpha chain variable domain of TCR clone 130176 (TRAV1-1, TRAJ33)
CAASNSNYQLIW

SEQ ID NO: 260352 - protein, 18 aa, Homo sapiens
  CDR3 for beta chain variable domain of TCR clone 130176 (TRBV20-1, TRBJ2-2)
CSARVQTARPSGTGELFF

SEQ ID NO: 260353 - protein, 13 aa, Homo sapiens
  CDR3 for alpha chain variable domain of TCR clone 130177 (TRAV8-2, TRAJ49)
CVVSPSTGNQFYF

SEQ ID NO: 260354 - protein, 14 aa, Homo sapiens
  CDR3 for beta chain variable domain of TCR clone 130177 (TRBV11-2, TRBJ2-7)
CAISRSGGAGEQYF

SEQ ID NO: 260355 - protein, 18 aa, Homo sapiens
  CDR3 for alpha chain variable domain of TCR clone 130178 (TRAV17, TRAJ45)
CATSLDLYSGGGADGLTF

SEQ ID NO: 260356 - protein, 16 aa, Homo sapiens
  CDR3 for beta chain variable domain of TCR clone 130178 (TRBV12-5, TRBJ2-5)
CASGPRTSGNQETQYF

SEQ ID NO: 260357 - protein, 14 aa, Homo sapiens
  CDR3 for alpha chain variable domain of TCR clone 130179 (TRAV17, TRAJ5)
CATVALTGRGALTF

SEQ ID NO: 260358 - protein, 14 aa, Homo sapiens
  CDR3 for beta chain variable domain of TCR clone 130179 (TRBV28, TRBJ2-7)
CASSPYGMAYEQYF

SEQ ID NO: 260359 - protein, 13 aa, Homo sapiens
  CDR3 for alpha chain variable domain of TCR clone 130180 (TRAV29/DV5, TRAJ31)
CAASRNNNARLMF

SEQ ID NO: 260360 - protein, 15 aa, Homo sapiens
  CDR3 for beta chain variable domain of TCR clone 130180 (TRBV19, TRBJ2-7)
CASSPAGSGEALRYF

SEQ ID NO: 260361 - protein, 14 aa, Homo sapiens
  CDR3 for alpha chain variable domain of TCR clone 130181 (TRAV12-2, TRAJ29)
CAVRRNSGNTPLVF

SEQ ID NO: 260362 - protein, 13 aa, Homo sapiens
  CDR3 for beta chain variable domain of TCR clone 130181 (TRBV12-4, TRBJ2-1)
CASSHDTDNEQFF

SEQ ID NO: 260363 - protein, 17 aa, Homo sapiens
  CDR3 for alpha chain variable domain of TCR clone 130182 (TRAV17, TRAJ7)
CATLGRLAFGKGNQVVA

SEQ ID NO: 260364 - protein, 13 aa, Homo sapiens
  CDR3 for beta chain variable domain of TCR clone 130182 (TRBV12-4, TRBJ2-7)
CASSLERVREQYF

SEQ ID NO: 260365 - protein, 14 aa, Homo sapiens
  CDR3 for alpha chain variable domain of TCR clone 130183 (TRAV1-2, TRAJ17)
CALRRGAAGNKLTF

SEQ ID NO: 260366 - protein, 15 aa, Homo sapiens
  CDR3 for beta chain variable domain of TCR clone 130183 (TRBV3-1, TRBJ2-5)
CASSANLGGPETQYF

SEQ ID NO: 260367 - protein, 13 aa, Homo sapiens
  CDR3 for alpha chain variable domain of TCR clone 130184 (TRAV3, TRAJ21)
CAVREPDFNKFYF

SEQ ID NO: 260368 - protein, 17 aa, Homo sapiens
  CDR3 for beta chain variable domain of TCR clone 130184 (TRBV11-2, TRBJ2-3)
CQQLRGGLAGAPNTQYF

SEQ ID NO: 260369 - protein, 15 aa, Homo sapiens
  CDR3 for alpha chain variable domain of TCR clone 130185 (TRAV14/DV4, TRAJ20)
CAMRESSSNDYKLSF

SEQ ID NO: 260370 - protein, 15 aa, Homo sapiens
  CDR3 for beta chain variable domain of TCR clone 130185 (TRBV28, TRBJ2-1)
CASSPPGLADHEQFF

SEQ ID NO: 260371 - protein, 16 aa, Homo sapiens
  CDR3 for alpha chain variable domain of TCR clone 130186 (TRAV30, TRAJ24)
CGTEIVDADSWGKFQF

SEQ ID NO: 260372 - protein, 13 aa, Homo sapiens
  CDR3 for beta chain variable domain of TCR clone 130186 (TRBV14, TRBJ2-7)
CASSQDRRYEQYF

SEQ ID NO: 260373 - protein, 18 aa, Homo sapiens
  CDR3 for alpha chain variable domain of TCR clone 130187 (TRAV9-2, TRAJ52)
CALSRHNAGGTSYGKLTF

SEQ ID NO: 260374 - protein, 13 aa, Homo sapiens
  CDR3 for beta chain variable domain of TCR clone 130187 (TRBV7-9, TRBJ1-2)
RASSLKQNYGYTF

SEQ ID NO: 260375 - protein, 12 aa, Homo sapiens
  CDR3 for alpha chain variable domain of TCR clone 130188 (TRAV16, TRAJ10)
CSRTGGGNKLTF

SEQ ID NO: 260376 - protein, 15 aa, Homo sapiens
  CDR3 for beta chain variable domain of TCR clone 130188 (TRBV19, TRBJ2-5)
CASHGLAGAQETQYF

SEQ ID NO: 260377 - protein, 14 aa, Homo sapiens
  CDR3 for alpha chain variable domain of TCR clone 130189 (TRAV1-2, TRAJ8)
CAVGEDTGFQKLVF

SEQ ID NO: 260378 - protein, 17 aa, Homo sapiens
  CDR3 for beta chain variable domain of TCR clone 130189 (TRBV28, TRBJ2-5)
CASSRQGGLAGAETQYF

SEQ ID NO: 260379 - protein, 15 aa, Homo sapiens
  CDR3 for alpha chain variable domain of TCR clone 130190 (TRAV20, TRAJ6)
CAVRLQSGGSYIPTF

SEQ ID NO: 260380 - protein, 14 aa, Homo sapiens
  CDR3 for beta chain variable domain of TCR clone 130190 (TRBV12-4, TRBJ2-7)
CASNASGGWYEQYF

SEQ ID NO: 260381 - protein, 13 aa, Homo sapiens
  CDR3 for alpha chain variable domain of TCR clone 130191 (TRAV1-2, TRAJ9)
CAALNTGGFKAIF

SEQ ID NO: 260382 - protein, 13 aa, Homo sapiens
  CDR3 for beta chain variable domain of TCR clone 130191 (TRBV7-9, TRBJ1-2)
CASSLKQNYGYTF

SEQ ID NO: 260383 - protein, 14 aa, Homo sapiens
  CDR3 for alpha chain variable domain of TCR clone 130192 (TRAV8-3, TRAJ39)
CAVGANNAGNMLTF

SEQ ID NO: 260384 - protein, 12 aa, Homo sapiens
  CDR3 for beta chain variable domain of TCR clone 130192 (TRBV5-1, TRBJ2-7)
CASSLDSYEQYF

SEQ ID NO: 260385 - protein, 14 aa, Homo sapiens
  CDR3 for alpha chain variable domain of TCR clone 130193 (TRAV16, TRAJ33)
CALSAMDSNYQLIW

SEQ ID NO: 260386 - protein, 15 aa, Homo sapiens
  CDR3 for beta chain variable domain of TCR clone 130193 (TRBV7-9, TRBJ1-4)
CASSARTGGNEKLFF

SEQ ID NO: 260387 - protein, 12 aa, Homo sapiens
  CDR3 for alpha chain variable domain of TCR clone 130194 (TRAV13-1, TRAJ21)
CAAKEGFNKLYF

SEQ ID NO: 260388 - protein, 17 aa, Homo sapiens
  CDR3 for beta chain variable domain of TCR clone 130194 (TRBV19, TRBJ2-7)
CASSISFYDSYPYEQYF

SEQ ID NO: 260389 - protein, 14 aa, Homo sapiens
  CDR3 for alpha chain variable domain of TCR clone 130195 (TRAV8-4, TRAJ13)
CAVTLSGGYQKVTF

SEQ ID NO: 260390 - protein, 15 aa, Homo sapiens
  CDR3 for beta chain variable domain of TCR clone 130195 (TRBV19, TRBJ1-1)
CASTSGQIQDTEAFF

SEQ ID NO: 260391 - protein, 14 aa, Homo sapiens
  CDR3 for alpha chain variable domain of TCR clone 130196 (TRAV13-1, TRAJ13)
CAASRVGGYQNVTF

SEQ ID NO: 260392 - protein, 17 aa, Homo sapiens
  CDR3 for beta chain variable domain of TCR clone 130196 (TRBV15, TRBJ1-5)
CATSRAPPGTRNQPQHF

SEQ ID NO: 260393 - protein, 13 aa, Homo sapiens
  CDR3 for alpha chain variable domain of TCR clone 130197 (TRAV1-2, TRAJ9)
CAALNTGGFKTSF

SEQ ID NO: 260394 - protein, 13 aa, Homo sapiens
  CDR3 for beta chain variable domain of TCR clone 130197 (TRBV4-1, TRBJ2-1)
CASSQAGGDEQFF

SEQ ID NO: 260395 - protein, 14 aa, Homo sapiens
  CDR3 for alpha chain variable domain of TCR clone 130198 (TRAV1-1, TRAJ28)
CAVQLWGWELPTHF

SEQ ID NO: 260396 - protein, 13 aa, Homo sapiens
  CDR3 for beta chain variable domain of TCR clone 130198 (TRBV11-2, TRBJ2-5)
CASSRGPSETQYF

SEQ ID NO: 260397 - protein, 13 aa, Homo sapiens
  CDR3 for alpha chain variable domain of TCR clone 130199 (TRAV3, TRAJ27)
CAVRPLGAGKSTF

SEQ ID NO: 260398 - protein, 13 aa, Homo sapiens
  CDR3 for beta chain variable domain of TCR clone 130199 (TRBV4-1, TRBJ2-2)
CASSQENTGELFF

SEQ ID NO: 260399 - protein, 13 aa, Homo sapiens
  CDR3 for alpha chain variable domain of TCR clone 130200 (TRAV2, TRAJ13)
CAVESGGYQKVTF

SEQ ID NO: 260400 - protein, 14 aa, Homo sapiens
  CDR3 for beta chain variable domain of TCR clone 130200 (TRBV7-9, TRBJ2-7)
CASSPSGGQNEQYF

SEQ ID NO: 260401 - protein, 11 aa, Homo sapiens
  CDR3 for alpha chain variable domain of TCR clone 130201 (TRAV12-3, TRAJ17)
CAMTLTGKLTF

SEQ ID NO: 260402 - protein, 15 aa, Homo sapiens
  CDR3 for beta chain variable domain of TCR clone 130201 (TRBV20-1, TRBJ2-7)
CSARDRASGMDEQYF

SEQ ID NO: 260403 - protein, 16 aa, Homo sapiens
  CDR3 for alpha chain variable domain of TCR clone 130202 (TRAV12-2, TRAJ28)
CAVITDSGAGSYKLTF

SEQ ID NO: 260404 - protein, 14 aa, Homo sapiens
  CDR3 for beta chain variable domain of TCR clone 130202 (TRBV25-1, TRBJ1-1)
CASTHLGGNTEAFF

SEQ ID NO: 260405 - protein, 17 aa, Homo sapiens
  CDR3 for alpha chain variable domain of TCR clone 130203 (TRAV21, TRAJ52)
CCEAFTAGGTSYGKLTF

SEQ ID NO: 260406 - protein, 17 aa, Homo sapiens
  CDR3 for beta chain variable domain of TCR clone 130203 (TRBV13, TRBJ2-3)
CASSLSRVAGGRNTQYF

SEQ ID NO: 260407 - protein, 13 aa, Homo sapiens
  CDR3 for alpha chain variable domain of TCR clone 130204 (TRAV17, TRAJ9)
CATDYTGGFKTIF

SEQ ID NO: 260408 - protein, 17 aa, Homo sapiens
  CDR3 for beta chain variable domain of TCR clone 130204 (TRBV4-1, TRBJ2-5)
CASSQDLTGGPIETQYF

SEQ ID NO: 260409 - protein, 14 aa, Homo sapiens
  CDR3 for alpha chain variable domain of TCR clone 130205 (TRAV8-3, TRAJ4)
CAVGAAGGYNKLIF

SEQ ID NO: 260410 - protein, 16 aa, Homo sapiens
  CDR3 for beta chain variable domain of TCR clone 130205 (TRBV7-9, TRBJ1-2)
CASSLGFSSGEDGYTF

SEQ ID NO: 260411 - protein, 14 aa, Homo sapiens
  CDR3 for alpha chain variable domain of TCR clone 130206 (TRAV12-2, TRAJ17)
CAVLFKAAGNKLTF

SEQ ID NO: 260412 - protein, 17 aa, Homo sapiens
  CDR3 for beta chain variable domain of TCR clone 130206 (TRBV20-1, TRBJ2-2)
CSASGSGQSGLTGELFF

SEQ ID NO: 260413 - protein, 15 aa, Homo sapiens
  CDR3 for alpha chain variable domain of TCR clone 130207 (TRAV8-4, TRAJ29)
CAVSEDFRGNTPLVF

SEQ ID NO: 260414 - protein, 14 aa, Homo sapiens
  CDR3 for beta chain variable domain of TCR clone 130207 (TRBV19, TRBJ2-1)
CASPTFVLSGEQFF

SEQ ID NO: 260415 - protein, 15 aa, Homo sapiens
  CDR3 for alpha chain variable domain of TCR clone 130208 (TRAV35, TRAJ50)
CAGQLRKTSYDKVIF

SEQ ID NO: 260416 - protein, 12 aa, Homo sapiens
  CDR3 for beta chain variable domain of TCR clone 130208 (TRBV5-1, TRBJ2-5)
CASSFGLETQYF

SEQ ID NO: 260417 - protein, 15 aa, Homo sapiens
  CDR3 for alpha chain variable domain of TCR clone 130209 (TRAV26-1, TRAJ29)
CIVRVEGSGNTPPVF

SEQ ID NO: 260418 - protein, 16 aa, Homo sapiens
  CDR3 for beta chain variable domain of TCR clone 130209 (TRBV4-2, TRBJ1-1)
CASSQAGFGMNTEAFF

SEQ ID NO: 260419 - protein, 14 aa, Homo sapiens
  CDR3 for alpha chain variable domain of TCR clone 130210 (TRAV8-4, TRAJ54)
CALSEVLGAQKLVF

SEQ ID NO: 260420 - protein, 13 aa, Homo sapiens
  CDR3 for beta chain variable domain of TCR clone 130210 (TRBV27, TRBJ2-7)
CASSFVSSYEQYF

SEQ ID NO: 260421 - protein, 14 aa, Homo sapiens
  CDR3 for alpha chain variable domain of TCR clone 130211 (TRAV1-2, TRAJ8)
CAVREDTSFQKLVF

SEQ ID NO: 260422 - protein, 15 aa, Homo sapiens
  CDR3 for beta chain variable domain of TCR clone 130211 (TRBV29-1, TRBJ2-1)
CSVPTGLALYNEQFF

SEQ ID NO: 260423 - protein, 11 aa, Homo sapiens
  CDR3 for alpha chain variable domain of TCR clone 130212 (TRAV12-3, TRAJ43)
CAMSVSNDMRF

SEQ ID NO: 260424 - protein, 15 aa, Homo sapiens
  CDR3 for beta chain variable domain of TCR clone 130212 (TRBV19, TRBJ1-1)
CASTSGQIQNTEAFF

SEQ ID NO: 260425 - protein, 14 aa, Homo sapiens
  CDR3 for alpha chain variable domain of TCR clone 130213 (TRAV26-1, TRAJ38)
CIADNAGNNRKLIW

SEQ ID NO: 260426 - protein, 15 aa, Homo sapiens
  CDR3 for beta chain variable domain of TCR clone 130213 (TRBV20-1, TRBJ2-7)
GSARDRVSGMDEQYF

SEQ ID NO: 260427 - protein, 14 aa, Homo sapiens
  CDR3 for alpha chain variable domain of TCR clone 130214 (TRAV12-2, TRAJ45)
CAVNIQGKADGLTF

SEQ ID NO: 260428 - protein, 16 aa, Homo sapiens
  CDR3 for beta chain variable domain of TCR clone 130214 (TRBV28, TRBJ1-5)
CASSFRGGYSNQPQHF

SEQ ID NO: 260429 - protein, 15 aa, Homo sapiens
  CDR3 for alpha chain variable domain of TCR clone 130215 (TRAV2, TRAJ15)
CAVEDRGQAGTALIF

SEQ ID NO: 260430 - protein, 11 aa, Homo sapiens
  CDR3 for beta chain variable domain of TCR clone 130215 (TRBV12-4, TRBJ2-3)
CASTATDTQYF

SEQ ID NO: 260431 - protein, 12 aa, Homo sapiens
  CDR3 for alpha chain variable domain of TCR clone 130216 (TRAV3, TRAJ27)
CAVRDKAGKSTF

SEQ ID NO: 260432 - protein, 14 aa, Homo sapiens
  CDR3 for beta chain variable domain of TCR clone 130216 (TRBV5-1, TRBJ1-2)
CASSVDNTNYGYTF

SEQ ID NO: 260433 - protein, 17 aa, Homo sapiens
  CDR3 for alpha chain variable domain of TCR clone 130217 (TRAV3, TRAJ42)
CAVRDRDYGGSHGNLIF

SEQ ID NO: 260434 - protein, 15 aa, Homo sapiens
  CDR3 for beta chain variable domain of TCR clone 130217 (TRBV2, TRBJ2-7)
CASSEGLARSYEQYF

SEQ ID NO: 260435 - protein, 14 aa, Homo sapiens
  CDR3 for alpha chain variable domain of TCR clone 130218 (TRAV12-1, TRAJ12)
CVVTRMDSSYKLIF

SEQ ID NO: 260436 - protein, 12 aa, Homo sapiens
  CDR3 for beta chain variable domain of TCR clone 130218 (TRBV7-8, TRBJ2-7)
CASSLGDREQYF

SEQ ID NO: 260437 - protein, 15 aa, Homo sapiens
  CDR3 for alpha chain variable domain of TCR clone 130219 (TRAV8-6, TRAJ10)
CAVSDQAGGGNKLTF

SEQ ID NO: 260438 - protein, 15 aa, Homo sapiens
  CDR3 for beta chain variable domain of TCR clone 130219 (TRBV12-4, TRBJ1-1)
CASSLAVSRGAEAFF

SEQ ID NO: 260439 - protein, 12 aa, Homo sapiens
  CDR3 for alpha chain variable domain of TCR clone 130220 (TRAV12-3, TRAJ41)
CAMSYSGYALNF

SEQ ID NO: 260440 - protein, 15 aa, Homo sapiens
  CDR3 for beta chain variable domain of TCR clone 130220 (TRBV5-1, TRBJ2-1)
GASSPPRAPYNEQFF

SEQ ID NO: 260441 - protein, 17 aa, Homo sapiens
  CDR3 for alpha chain variable domain of TCR clone 130221 (TRAV3, TRAJ42)
CAVRDRDYGGSQGNLIF

SEQ ID NO: 260442 - protein, 15 aa, Homo sapiens
  CDR3 for beta chain variable domain of TCR clone 130221 (TRBV6-6, TRBJ2-7)
CASSYSYGCSYEQYF

SEQ ID NO: 260443 - protein, 11 aa, Homo sapiens
  CDR3 for alpha chain variable domain of TCR clone 130222 (TRAV2, TRAJ13)
CASGGHQKVTF

SEQ ID NO: 260444 - protein, 11 aa, Homo sapiens
  CDR3 for beta chain variable domain of TCR clone 130222 (TRBV6-3, TRBJ2-3)
CATGQADTQYF

SEQ ID NO: 260445 - protein, 11 aa, Homo sapiens
  CDR3 for alpha chain variable domain of TCR clone 130223 (TRAV1-2, TRAJ40)
CAVPGTYKYIF

SEQ ID NO: 260446 - protein, 13 aa, Homo sapiens
  CDR3 for beta chain variable domain of TCR clone 130223 (TRBV27, TRBJ1-1)
CASSLSIGAEAFF

SEQ ID NO: 260447 - protein, 14 aa, Homo sapiens
  CDR3 for alpha chain variable domain of TCR clone 130224 (TRAV27, TRAJ22)
CAGLPSGSARQLTF

SEQ ID NO: 260448 - protein, 14 aa, Homo sapiens
  CDR3 for beta chain variable domain of TCR clone 130224 (TRBV4-3, TRBJ1-4)
CASSPLQRNEKLFF

SEQ ID NO: 260449 - protein, 15 aa, Homo sapiens
  CDR3 for alpha chain variable domain of TCR clone 130225 (TRAV29/DV5, TRAJ24)
CAACGATDSWGKFQF

SEQ ID NO: 260450 - protein, 12 aa, Homo sapiens
  CDR3 for beta chain variable domain of TCR clone 130225 (TRBV11-2, TRBJ2-2)
CASSLPTGELFF

SEQ ID NO: 260451 - protein, 11 aa, Homo sapiens
  CDR3 for alpha chain variable domain of TCR clone 130226 (TRAV23/DV6, TRAJ58)
CAARLLRGETS

SEQ ID NO: 260452 - protein, 16 aa, Homo sapiens
  CDR3 for beta chain variable domain of TCR clone 130226 (TRBV7-3, TRBJ2-1)
CASSLEGYRSYNEQFF

SEQ ID NO: 260453 - protein, 13 aa, Homo sapiens
  CDR3 for alpha chain variable domain of TCR clone 130227 (TRAV39, TRAJ48)
CAAVNFGNEKLTF

SEQ ID NO: 260454 - protein, 12 aa, Homo sapiens
  CDR3 for beta chain variable domain of TCR clone 130227 (TRBV11-2, TRBJ2-1)
CASSPGNNEQFF

SEQ ID NO: 260455 - protein, 13 aa, Homo sapiens
  CDR3 for alpha chain variable domain of TCR clone 130228 (TRAV12-1, TRAJ13)
CVVNLGGYQKVTF

SEQ ID NO: 260456 - protein, 13 aa, Homo sapiens
  CDR3 for beta chain variable domain of TCR clone 130228 (TRBV19, TRBJ1-2)
CASSVPGQDGYTF

SEQ ID NO: 260457 - protein, 14 aa, Homo sapiens
  CDR3 for alpha chain variable domain of TCR clone 130229 (TRAV27, TRAJ22)
CAGVAVLGKRQLTF

SEQ ID NO: 260458 - protein, 17 aa, Homo sapiens
  CDR3 for beta chain variable domain of TCR clone 130229 (TRBV14, TRBJ2-1)
CASSQDRRVTSYNEQFF

SEQ ID NO: 260459 - protein, 16 aa, Homo sapiens
  CDR3 for alpha chain variable domain of TCR clone 130230 (TRAV1-2, TRAJ10)
CAVRGVLTGGGNKLTF

SEQ ID NO: 260460 - protein, 15 aa, Homo sapiens
  CDR3 for beta chain variable domain of TCR clone 130230 (TRBV19, TRBJ2-4)
CASRGPRRGENIQYF

SEQ ID NO: 260461 - protein, 15 aa, Homo sapiens
  CDR3 for alpha chain variable domain of TCR clone 130231 (TRAV13-1, TRAJ50)
CAAKGSETSYDKVIF

SEQ ID NO: 260462 - protein, 18 aa, Homo sapiens
  CDR3 for beta chain variable domain of TCR clone 130231 (TRBV10-3, TRBJ2-1)
CTSVPSVSLRGGVDEQSF

SEQ ID NO: 260463 - protein, 14 aa, Homo sapiens
  CDR3 for alpha chain variable domain of TCR clone 130232 (TRAV23/DV6, TRAJ45)
CAASWGGGADGLTF

SEQ ID NO: 260464 - protein, 15 aa, Homo sapiens
  CDR3 for beta chain variable domain of TCR clone 130232 (TRBV4-2, TRBJ1-2)
CASSRNTGAGYGYAF

SEQ ID NO: 260465 - protein, 14 aa, Homo sapiens
  CDR3 for alpha chain variable domain of TCR clone 130233 (TRAV35, TRAJ41)
CAGQARVRRNALNF

SEQ ID NO: 260466 - protein, 14 aa, Homo sapiens
  CDR3 for beta chain variable domain of TCR clone 130233 (TRBV20-1, TRBJ1-2)
CSASEQGAVYGYTF

SEQ ID NO: 260467 - protein, 11 aa, Homo sapiens
  CDR3 for alpha chain variable domain of TCR clone 130234 (TRAV2, TRAJ33)
CAVDSNYQLIW

SEQ ID NO: 260468 - protein, 16 aa, Homo sapiens
  CDR3 for beta chain variable domain of TCR clone 130234 (TRBV10-3, TRBJ2-1)
CAISGVGDGGGGEQFF

SEQ ID NO: 260469 - protein, 14 aa, Homo sapiens
  CDR3 for alpha chain variable domain of TCR clone 130235 (TRAV3, TRAJ7)
CAVREEKREQQTRF

SEQ ID NO: 260470 - protein, 12 aa, Homo sapiens
  CDR3 for beta chain variable domain of TCR clone 130235 (TRBV7-8, TRBJ2-7)
CASSLGDREQYF

SEQ ID NO: 260471 - protein, 15 aa, Homo sapiens
  CDR3 for alpha chain variable domain of TCR clone 130236 (TRAV3, TRAJ5)
CAVRDLDTGRRALTF

SEQ ID NO: 260472 - protein, 12 aa, Homo sapiens
  CDR3 for beta chain variable domain of TCR clone 130236 (TRBV12-4, TRBJ1-2)
CQQSGLTVISTF

SEQ ID NO: 260473 - protein, 11 aa, Homo sapiens
  CDR3 for alpha chain variable domain of TCR clone 130237 (TRAV1-2, TRAJ20)
CAVSNDYKLSF

SEQ ID NO: 260474 - protein, 14 aa, Homo sapiens
  CDR3 for beta chain variable domain of TCR clone 130237 (TRBV7-2, TRBJ2-7)
CASSPKTSFYEQYF

SEQ ID NO: 260475 - protein, 15 aa, Homo sapiens
  CDR3 for alpha chain variable domain of TCR clone 130238 (TRAV8-6, TRAJ6)
CAVSGESGGSYIPTF

SEQ ID NO: 260476 - protein, 14 aa, Homo sapiens
  CDR3 for beta chain variable domain of TCR clone 130238 (TRBV9, TRBJ2-4)
CASSPSGTSGVQYF

SEQ ID NO: 260477 - protein, 18 aa, Homo sapiens
  CDR3 for alpha chain variable domain of TCR clone 130239 (TRAV12-3, TRAJ52)
CAMSVGGAGGTSYGKLTF

SEQ ID NO: 260478 - protein, 15 aa, Homo sapiens
  CDR3 for beta chain variable domain of TCR clone 130239 (TRBV27, TRBJ1-6)
CASSFDRGLGSRLHF

SEQ ID NO: 260479 - protein, 12 aa, Homo sapiens
  CDR3 for alpha chain variable domain of TCR clone 130240 (TRAV12-3, TRAJ41)
CARSYSGYALNF

SEQ ID NO: 260480 - protein, 13 aa, Homo sapiens
  CDR3 for beta chain variable domain of TCR clone 130240 (TRBV7-3, TRBJ2-1)
CASSLDSYNEQFF

SEQ ID NO: 260481 - protein, 14 aa, Homo sapiens
  CDR3 for alpha chain variable domain of TCR clone 130241 (TRAV14/DV4, TRAJ23)
CAMRYYNQGGKLIF

SEQ ID NO: 260482 - protein, 13 aa, Homo sapiens
  CDR3 for beta chain variable domain of TCR clone 130241 (TRBV15, TRBJ1-6)
CATSGGLNSPLHF

SEQ ID NO: 260483 - protein, 12 aa, Homo sapiens
  CDR3 for alpha chain variable domain of TCR clone 130242 (TRAV24, TRAJ37)
CASSSNTGKLIF

SEQ ID NO: 260484 - protein, 11 aa, Homo sapiens
  CDR3 for beta chain variable domain of TCR clone 130242 (TRBV29-1, TRBJ2-5)
CSKDRTGTQYF

SEQ ID NO: 260485 - protein, 14 aa, Homo sapiens
  CDR3 for alpha chain variable domain of TCR clone 130243 (TRAV21, TRAJ15)
CAVSLNQARTALIF

SEQ ID NO: 260486 - protein, 11 aa, Homo sapiens
  CDR3 for beta chain variable domain of TCR clone 130243 (TRBV20-1, TRBJ2-7)
CSARTSYEQYF

SEQ ID NO: 260487 - protein, 14 aa, Homo sapiens
  CDR3 for alpha chain variable domain of TCR clone 130244 (TRAV3, TRAJ21)
CAVESQANFNKFYF

SEQ ID NO: 260488 - protein, 12 aa, Homo sapiens
  CDR3 for beta chain variable domain of TCR clone 130244 (TRBV3-1, TRBJ2-1)
CASSQGSSGQFF

SEQ ID NO: 260489 - protein, 16 aa, Homo sapiens
  CDR3 for alpha chain variable domain of TCR clone 130245 (TRAV14/DV4, TRAJ54)
CAMREGRIQGAQKLVF

SEQ ID NO: 260490 - protein, 17 aa, Homo sapiens
  CDR3 for beta chain variable domain of TCR clone 130245 (TRBV28, TRBJ2-7)
CASSLGLAGGPTYEQYF

SEQ ID NO: 260491 - protein, 13 aa, Homo sapiens
  CDR3 for alpha chain variable domain of TCR clone 130246 (TRAV17, TRAJ9)
CATGSTGGFKTIF

SEQ ID NO: 260492 - protein, 14 aa, Homo sapiens
  CDR3 for beta chain variable domain of TCR clone 130246 (TRBV7-8, TRBJ2-7)
CASTFRGGPNEQCF

SEQ ID NO: 260493 - protein, 14 aa, Homo sapiens
  CDR3 for alpha chain variable domain of TCR clone 130247 (TRAV1-1, TRAJ35)
CAVRSIGFGNVLHC

SEQ ID NO: 260494 - protein, 14 aa, Homo sapiens
  CDR3 for beta chain variable domain of TCR clone 130247 (TRBV5-7, TRBJ1-2)
CASSLVRGDYGYTF

SEQ ID NO: 260495 - protein, 18 aa, Homo sapiens
  CDR3 for alpha chain variable domain of TCR clone 130248 (TRAV12-3, TRAJ52)
CAMSVGGAGGSSYGKLTF

SEQ ID NO: 260496 - protein, 17 aa, Homo sapiens
  CDR3 for beta chain variable domain of TCR clone 130248 (TRBV13, TRBJ2-3)
CASSLSRVAGGRNTQYF

SEQ ID NO: 260497 - protein, 13 aa, Homo sapiens
  CDR3 for alpha chain variable domain of TCR clone 130249 (TRAV8-3, TRAJ21)
CAVAPVDFNKFYF

SEQ ID NO: 260498 - protein, 14 aa, Homo sapiens
  CDR3 for beta chain variable domain of TCR clone 130249 (TRBV7-6, TRBJ2-3)
CASGLGTVTDTQYF

SEQ ID NO: 260499 - protein, 11 aa, Homo sapiens
  CDR3 for alpha chain variable domain of TCR clone 130250 (TRAV39, TRAJ49)
CSVDISTQFYF

SEQ ID NO: 260500 - protein, 11 aa, Homo sapiens
  CDR3 for beta chain variable domain of TCR clone 130250 (TRBV7-8, TRBJ2-7)
CASSLSLEQYF

SEQ ID NO: 260501 - protein, 12 aa, Homo sapiens
  CDR3 for alpha chain variable domain of TCR clone 130251 (TRAV21, TRAJ35)
CAVVGFGNVLHF

SEQ ID NO: 260502 - protein, 16 aa, Homo sapiens
  CDR3 for beta chain variable domain of TCR clone 130251 (TRBV6-1, TRBJ2-5)
CASSETLDRGAETQYF

SEQ ID NO: 260503 - protein, 14 aa, Homo sapiens
  CDR3 for alpha chain variable domain of TCR clone 130252 (TRAV17, TRAJ50)
CATMMKTSYDKVIF

SEQ ID NO: 260504 - protein, 13 aa, Homo sapiens
  CDR3 for beta chain variable domain of TCR clone 130252 (TRBV4-2, TRBJ1-1)
CASSQAGNTEAFF

SEQ ID NO: 260505 - protein, 13 aa, Homo sapiens
  CDR3 for alpha chain variable domain of TCR clone 130253 (TRAV21, TRAJ27)
CAARPGNAGKSTF

SEQ ID NO: 260506 - protein, 20 aa, Homo sapiens
  CDR3 for beta chain variable domain of TCR clone 130253 (TRBV4-2, TRBJ2-7)
CASSQASGGSLRAVLRAGHQ

SEQ ID NO: 260507 - protein, 15 aa, Homo sapiens
  CDR3 for alpha chain variable domain of TCR clone 130254 (TRAV3, TRAJ29)
CAVRDLYSGNTPLVF

SEQ ID NO: 260508 - protein, 15 aa, Homo sapiens
  CDR3 for beta chain variable domain of TCR clone 130254 (TRBV7-2, TRBJ2-1)
CASSLASGRVNEQFF

SEQ ID NO: 260509 - protein, 14 aa, Homo sapiens
  CDR3 for alpha chain variable domain of TCR clone 130255 (TRAV13-1, TRAJ35)
CAASKGGFGNVLHF

SEQ ID NO: 260510 - protein, 13 aa, Homo sapiens
  CDR3 for beta chain variable domain of TCR clone 130255 (TRBV7-3, TRBJ1-1)
CASSQDWGSEAFF

SEQ ID NO: 260511 - protein, 15 aa, Homo sapiens
  CDR3 for alpha chain variable domain of TCR clone 130256 (TRAV35, TRAJ40)
CAGQLWYSGTYKYIF

SEQ ID NO: 260512 - protein, 12 aa, Homo sapiens
  CDR3 for beta chain variable domain of TCR clone 130256 (TRBV7-8, TRBJ2-7)
CASSLAGYEQYF

SEQ ID NO: 260513 - protein, 12 aa, Homo sapiens
  CDR3 for alpha chain variable domain of TCR clone 130257 (TRAV12-1, TRAJ40)
CVFYSGTYKYIF

SEQ ID NO: 260514 - protein, 18 aa, Homo sapiens
  CDR3 for beta chain variable domain of TCR clone 130257 (TRBV12-4, TRBJ2-2)
CASSLVAVTRGRTGELFF

SEQ ID NO: 260515 - protein, 16 aa, Homo sapiens
  CDR3 for alpha chain variable domain of TCR clone 130258 (TRAV1-2, TRAJ10)
CAERGVLTGGGNKLTF

SEQ ID NO: 260516 - protein, 12 aa, Homo sapiens
  CDR3 for beta chain variable domain of TCR clone 130258 (TRBV7-8, TRBJ2-7)
CASSLGDREQYF

SEQ ID NO: 260517 - protein, 12 aa, Homo sapiens
  CDR3 for alpha chain variable domain of TCR clone 130259 (TRAV13-1, TRAJ15)
CAASQVGTALIF

SEQ ID NO: 260518 - protein, 14 aa, Homo sapiens
  CDR3 for beta chain variable domain of TCR clone 130259 (TRBV19, TRBJ2-2)
CASSTLHRSGELFF

SEQ ID NO: 260519 - protein, 13 aa, Homo sapiens
  CDR3 for alpha chain variable domain of TCR clone 130260 (TRAV13-1, TRAJ5)
CAARVTGRRALIF

SEQ ID NO: 260520 - protein, 15 aa, Homo sapiens
  CDR3 for beta chain variable domain of TCR clone 130260 (TRBV28, TRBJ2-7)
CASSPGGRGFYEQYF

SEQ ID NO: 260521 - protein, 13 aa, Homo sapiens
  CDR3 for alpha chain variable domain of TCR clone 130261 (TRAV12-3, TRAJ9)
CAVSGGGGFKTIF

SEQ ID NO: 260522 - protein, 15 aa, Homo sapiens
  CDR3 for beta chain variable domain of TCR clone 130261 (TRBV20-1, TRBJ2-1)
CSARVGGVGVLEQFF

SEQ ID NO: 260523 - protein, 11 aa, Homo sapiens
  CDR3 for alpha chain variable domain of TCR clone 130262 (TRAV17, TRAJ9)
CATTGGFKTIF

SEQ ID NO: 260524 - protein, 15 aa, Homo sapiens
  CDR3 for beta chain variable domain of TCR clone 130262 (TRBV10-2, TRBJ2-6)
CASSEQGTGANVLTF

SEQ ID NO: 260525 - protein, 14 aa, Homo sapiens
  CDR3 for alpha chain variable domain of TCR clone 130263 (TRAV17, TRAJ40)
CATALTSGTYKYIF

SEQ ID NO: 260526 - protein, 11 aa, Homo sapiens
  CDR3 for beta chain variable domain of TCR clone 130263 (TRBV19, TRBJ1-1)
CASSIGSEAFF

SEQ ID NO: 260527 - protein, 13 aa, Homo sapiens
  CDR3 for alpha chain variable domain of TCR clone 130264 (TRAV12-1, TRAJ39)
CVALNNAGNMLTF

SEQ ID NO: 260528 - protein, 14 aa, Homo sapiens
  CDR3 for beta chain variable domain of TCR clone 130264 (TRBV19, TRBJ2-1)
CASPTFVLSGEQFF

SEQ ID NO: 260529 - protein, 15 aa, Homo sapiens
  CDR3 for alpha chain variable domain of TCR clone 130265 (TRAV8-3, TRAJ45)
CASSYSGGGVDGPTF

SEQ ID NO: 260530 - protein, 13 aa, Homo sapiens
  CDR3 for beta chain variable domain of TCR clone 130265 (TRBV10-3, TRBJ2-7)
CASKLAVNYEQYF

SEQ ID NO: 260531 - protein, 13 aa, Homo sapiens
  CDR3 for alpha chain variable domain of TCR clone 130266 (TRAV8-3, TRAJ28)
CAVVAVGSYQLTF

SEQ ID NO: 260532 - protein, 17 aa, Homo sapiens
  CDR3 for beta chain variable domain of TCR clone 130266 (TRBV11-2, TRBJ2-1)
CASSLYPPGVEYNEQFF

SEQ ID NO: 260533 - protein, 18 aa, Homo sapiens
  CDR3 for alpha chain variable domain of TCR clone 130267 (TRAV21, TRAJ52)
CAVRPSPAGGTSYGKLAF

SEQ ID NO: 260534 - protein, 17 aa, Homo sapiens
  CDR3 for beta chain variable domain of TCR clone 130267 (TRBV13, TRBJ2-3)
CASSLSRVSGGRNTQYF

SEQ ID NO: 260535 - protein, 12 aa, Homo sapiens
  CDR3 for alpha chain variable domain of TCR clone 130268 (TRAV10, TRAJ43)
CVVVRVGNDMRF

SEQ ID NO: 260536 - protein, 18 aa, Homo sapiens
  CDR3 for beta chain variable domain of TCR clone 130268 (TRBV7-9, TRBJ2-7)
CASSLTTSGSRTWYEQYF

SEQ ID NO: 260537 - protein, 18 aa, Homo sapiens
  CDR3 for alpha chain variable domain of TCR clone 130269 (TRAV1-2, TRAJ18)
CAVRDMGDRGSTLGRLYF

SEQ ID NO: 260538 - protein, 16 aa, Homo sapiens
  CDR3 for beta chain variable domain of TCR clone 130269 (TRBV29-1, TRBJ1-2)
CSVDANRDIANYGYTF

SEQ ID NO: 260539 - protein, 13 aa, Homo sapiens
  CDR3 for alpha chain variable domain of TCR clone 130270 (TRAV21, TRAJ20)
CAVGLRVDYKLSF

SEQ ID NO: 260540 - protein, 12 aa, Homo sapiens
  CDR3 for beta chain variable domain of TCR clone 130270 (TRBV19, TRBJ1-5)
CASSIAQQPQHF

SEQ ID NO: 260541 - protein, 10 aa, Homo sapiens
  CDR3 for alpha chain variable domain of TCR clone 130271 (TRAV23/DV6, TRAJ57)
CAASSTLSQG

SEQ ID NO: 260542 - protein, 13 aa, Homo sapiens
  CDR3 for beta chain variable domain of TCR clone 130271 (TRBV19, TRBJ2-7)
CASSPRQSYEQYF

SEQ ID NO: 260543 - protein, 18 aa, Homo sapiens
  CDR3 for alpha chain variable domain of TCR clone 130272 (TRAV13-1, TRAJ52)
CAAKNPNAGSTSYGKLTF

SEQ ID NO: 260544 - protein, 15 aa, Homo sapiens
  CDR3 for beta chain variable domain of TCR clone 130272 (TRBV6-1, TRBJ2-3)
CASSERGGITDTQYF

SEQ ID NO: 260545 - protein, 14 aa, Homo sapiens
  CDR3 for alpha chain variable domain of TCR clone 130273 (TRAV4, TRAJ9)
CLVGSGTGGFKTIF

SEQ ID NO: 260546 - protein, 16 aa, Homo sapiens
  CDR3 for beta chain variable domain of TCR clone 130273 (TRBV7-9, TRBJ2-1)
CASSDVAGGSYNEQFF

SEQ ID NO: 260547 - protein, 14 aa, Homo sapiens
  CDR3 for alpha chain variable domain of TCR clone 130274 (TRAV21, TRAJ52)
CGRAGGTSYRKLTF

SEQ ID NO: 260548 - protein, 14 aa, Homo sapiens
  CDR3 for beta chain variable domain of TCR clone 130274 (TRBV19, TRBJ1-2)
CASSVLGYNYGYTF

SEQ ID NO: 260549 - protein, 15 aa, Homo sapiens
  CDR3 for alpha chain variable domain of TCR clone 130275 (TRAV26-1, TRAJ48)
CIVSPTNFRNEKLTF

SEQ ID NO: 260550 - protein, 16 aa, Homo sapiens
  CDR3 for beta chain variable domain of TCR clone 130275 (TRBV25-1, TRBJ1-1)
CASSGDRDRGRIEAFF

SEQ ID NO: 260551 - protein, 12 aa, Homo sapiens
  CDR3 for alpha chain variable domain of TCR clone 130276 (TRAV21, TRAJ20)
CAVRRNDYKLSF

SEQ ID NO: 260552 - protein, 12 aa, Homo sapiens
  CDR3 for beta chain variable domain of TCR clone 130276 (TRBV11-2, TRBJ2-2)
CASSLGGGELFF

SEQ ID NO: 260553 - protein, 12 aa, Homo sapiens
  CDR3 for alpha chain variable domain of TCR clone 130277 (TRAV13-1, TRAJ21)
CAAKEGFNKFYF

SEQ ID NO: 260554 - protein, 15 aa, Homo sapiens
  CDR3 for beta chain variable domain of TCR clone 130277 (TRBV7-9, TRBJ1-4)
CASSARTGGNEKLFF

SEQ ID NO: 260555 - protein, 13 aa, Homo sapiens
  CDR3 for alpha chain variable domain of TCR clone 130278 (TRAV8-6, TRAJ9)
CAVWDTGGVKTIF

SEQ ID NO: 260556 - protein, 14 aa, Homo sapiens
  CDR3 for beta chain variable domain of TCR clone 130278 (TRBV2, TRBJ2-1)
CASSEALIYNEQFF

SEQ ID NO: 260557 - protein, 13 aa, Homo sapiens
  CDR3 for alpha chain variable domain of TCR clone 130279 (TRAV1-2, TRAJ12)
CALSMDSSYKLIF

SEQ ID NO: 260558 - protein, 15 aa, Homo sapiens
  CDR3 for beta chain variable domain of TCR clone 130279 (TRBV27, TRBJ2-5)
CASSLIPSGGETQYF

SEQ ID NO: 260559 - protein, 15 aa, Homo sapiens
  CDR3 for alpha chain variable domain of TCR clone 130280 (TRAV29/DV5, TRAJ29)
CAASERSSGNTPLVF

SEQ ID NO: 260560 - protein, 13 aa, Homo sapiens
  CDR3 for beta chain variable domain of TCR clone 130280 (TRBV10-3, TRBJ2-7)
CASKLAVNYEQYF

SEQ ID NO: 260561 - protein, 17 aa, Homo sapiens
  CDR3 for alpha chain variable domain of TCR clone 130281 (TRAV3, TRAJ6)
CAVRDGPRSGGSYIPTF

SEQ ID NO: 260562 - protein, 15 aa, Homo sapiens
  CDR3 for beta chain variable domain of TCR clone 130281 (TRBV20-1, TRBJ1-1)
CSASWDRFLNTEAFF

SEQ ID NO: 260563 - protein, 16 aa, Homo sapiens
  CDR3 for alpha chain variable domain of TCR clone 130282 (TRAV26-2, TRAJ45)
CTTASPIGGGAGGLTF

SEQ ID NO: 260564 - protein, 20 aa, Homo sapiens
  CDR3 for beta chain variable domain of TCR clone 130282 (TRBV28, TRBJ2-1)
CASTPIGRSPGLAGGNEQFF

SEQ ID NO: 260565 - protein, 14 aa, Homo sapiens
  CDR3 for alpha chain variable domain of TCR clone 130283 (TRAV12-1, TRAJ4)
CVVPLKNGYNKLIF

SEQ ID NO: 260566 - protein, 13 aa, Homo sapiens
  CDR3 for beta chain variable domain of TCR clone 130283 (TRBV27, TRBJ2-7)
CASGRGGAYEQYF

SEQ ID NO: 260567 - protein, 13 aa, Homo sapiens
  CDR3 for alpha chain variable domain of TCR clone 130284 (TRAV13-1, TRAJ6)
CAARRGGSYIPTF

SEQ ID NO: 260568 - protein, 13 aa, Homo sapiens
  CDR3 for beta chain variable domain of TCR clone 130284 (TRBV7-3, TRBJ1-1)
CASSQDWGAEAFF

SEQ ID NO: 260569 - protein, 14 aa, Homo sapiens
  CDR3 for alpha chain variable domain of TCR clone 130285 (TRAV2, TRAJ9)
CAVEDRCGGFKTIF

SEQ ID NO: 260570 - protein, 13 aa, Homo sapiens
  CDR3 for beta chain variable domain of TCR clone 130285 (TRBV7-9, TRBJ1-2)
CASSLKQNYGYTF

SEQ ID NO: 260571 - protein, 15 aa, Homo sapiens
  CDR3 for alpha chain variable domain of TCR clone 130286 (TRAV3, TRAJ3)
CAVSDRRSSASKIIF

SEQ ID NO: 260572 - protein, 13 aa, Homo sapiens
  CDR3 for beta chain variable domain of TCR clone 130286 (TRBV9, TRBJ2-5)
CASSPAGLGTQYF

SEQ ID NO: 260573 - protein, 14 aa, Homo sapiens
  CDR3 for alpha chain variable domain of TCR clone 130287 (TRAV38-1, TRAJ45)
CAYYSGGGADGLTF

SEQ ID NO: 260574 - protein, 16 aa, Homo sapiens
  CDR3 for beta chain variable domain of TCR clone 130287 (TRBV20-1, TRBJ1-4)
CSAPGQGLLTNEKLFF

SEQ ID NO: 260575 - protein, 13 aa, Homo sapiens
  CDR3 for alpha chain variable domain of TCR clone 130288 (TRAV21, TRAJ27)
CAARPGNAGKSPF

SEQ ID NO: 260576 - protein, 15 aa, Homo sapiens
  CDR3 for beta chain variable domain of TCR clone 130288 (TRBV11-3, TRBJ2-7)
CASSPGPASSYEQYF

SEQ ID NO: 260577 - protein, 14 aa, Homo sapiens
  CDR3 for alpha chain variable domain of TCR clone 130289 (TRAV26-1, TRAJ38)
CIADNAGNNRKLIW

SEQ ID NO: 260578 - protein, 15 aa, Homo sapiens
  CDR3 for beta chain variable domain of TCR clone 130289 (TRBV5-7, TRBJ1-2)
CASSLGVAANYGYTF

SEQ ID NO: 260579 - protein, 14 aa, Homo sapiens
  CDR3 for alpha chain variable domain of TCR clone 130290 (TRAV13-1, TRAJ20)
CAARPGSNDYKLSF

SEQ ID NO: 260580 - protein, 12 aa, Homo sapiens
  CDR3 for beta chain variable domain of TCR clone 130290 (TRBV20-1, TRBJ1-1)
QCSSRGHTEAFF

SEQ ID NO: 260581 - protein, 13 aa, Homo sapiens
  CDR3 for alpha chain variable domain of TCR clone 130291 (TRAV13-1, TRAJ11)
CAAVLAGYSTLTF

SEQ ID NO: 260582 - protein, 14 aa, Homo sapiens
  CDR3 for beta chain variable domain of TCR clone 130291 (TRBV19, TRBJ2-1)
CASPTFVLSGEQFF

SEQ ID NO: 260583 - protein, 12 aa, Homo sapiens
  CDR3 for alpha chain variable domain of TCR clone 130292 (TRAV1-2, TRAJ24)
CAVGGSWGKFQF

SEQ ID NO: 260584 - protein, 14 aa, Homo sapiens
  CDR3 for beta chain variable domain of TCR clone 130292 (TRBV6-1, TRBJ1-3)
CASVQGGGGNTIYF

SEQ ID NO: 260585 - protein, 13 aa, Homo sapiens
  CDR3 for alpha chain variable domain of TCR clone 130293 (TRAV36/DV7, TRAJ54)
CAADIQGAQKLVF

SEQ ID NO: 260586 - protein, 14 aa, Homo sapiens
  CDR3 for beta chain variable domain of TCR clone 130293 (TRBV19, TRBJ2-7)
CASNFRDTFTGMYF

SEQ ID NO: 260587 - protein, 11 aa, Homo sapiens
  CDR3 for alpha chain variable domain of TCR clone 130294 (TRAV12-3, TRAJ27)
CAMANAGKSTF

SEQ ID NO: 260588 - protein, 13 aa, Homo sapiens
  CDR3 for beta chain variable domain of TCR clone 130294 (TRBV20-1, TRBJ1-1)
CSARVDGNTEAFF

SEQ ID NO: 260589 - protein, 13 aa, Homo sapiens
  CDR3 for alpha chain variable domain of TCR clone 130295 (TRAV21, TRAJ20)
CAVGVFADYKLSF

SEQ ID NO: 260590 - protein, 17 aa, Homo sapiens
  CDR3 for beta chain variable domain of TCR clone 130295 (TRBV11-2, TRBJ2-1)
CASSLYPPGVEYNEQFF

SEQ ID NO: 260591 - protein, 14 aa, Homo sapiens
  CDR3 for alpha chain variable domain of TCR clone 130296 (TRAV1-2, TRAJ16)
CAVNRFSDGQKLLF

SEQ ID NO: 260592 - protein, 16 aa, Homo sapiens
  CDR3 for beta chain variable domain of TCR clone 130296 (TRBV7-2, TRBJ2-7)
CASSLDLSSGAYEQYF

SEQ ID NO: 260593 - protein, 15 aa, Homo sapiens
  CDR3 for alpha chain variable domain of TCR clone 130297 (TRAV25, TRAJ52)
CAGTSGGTSYGKLTF

SEQ ID NO: 260594 - protein, 13 aa, Homo sapiens
  CDR3 for beta chain variable domain of TCR clone 130297 (TRBV6-5, TRBJ2-5)
CTSSPQGGETQYF

SEQ ID NO: 260595 - protein, 13 aa, Homo sapiens
  CDR3 for alpha chain variable domain of TCR clone 130298 (TRAV8-3, TRAJ43)
CAVVPYNNNDMRF

SEQ ID NO: 260596 - protein, 14 aa, Homo sapiens
  CDR3 for beta chain variable domain of TCR clone 130298 (TRBV7-2, TRBJ2-7)
CASSPKTSFYEQYF

SEQ ID NO: 260597 - protein, 15 aa, Homo sapiens
  CDR3 for alpha chain variable domain of TCR clone 130299 (TRAV3, TRAJ34)
CAVRALSYNTDKLIF

SEQ ID NO: 260598 - protein, 13 aa, Homo sapiens
  CDR3 for beta chain variable domain of TCR clone 130299 (TRBV10-3, TRBJ2-7)
CASKLAVNYEQYF

SEQ ID NO: 260599 - protein, 17 aa, Homo sapiens
  CDR3 for alpha chain variable domain of TCR clone 130300 (TRAV3, TRAJ42)
CAARDRDYGGSQGNLIF

SEQ ID NO: 260600 - protein, 15 aa, Homo sapiens
  CDR3 for beta chain variable domain of TCR clone 130300 (TRBV29-1, TRBJ1-2)
CSVVLEAGSNYGYTF

SEQ ID NO: 260601 - protein, 12 aa, Homo sapiens
  CDR3 for alpha chain variable domain of TCR clone 130301 (TRAV16, TRAJ26)
CALRSYGQNFVF

SEQ ID NO: 260602 - protein, 14 aa, Homo sapiens
  CDR3 for beta chain variable domain of TCR clone 130301 (TRBV10-3, TRBJ2-1)
CAISADLAYNEQFF

SEQ ID NO: 260603 - protein, 18 aa, Homo sapiens
  CDR3 for alpha chain variable domain of TCR clone 130302 (TRAV13-1, TRAJ52)
CAAGKRSAGGTSYGKLTF

SEQ ID NO: 260604 - protein, 15 aa, Homo sapiens
  CDR3 for beta chain variable domain of TCR clone 130302 (TRBV20-1, TRBJ2-7)
CSARTPGTITYEQYF

SEQ ID NO: 260605 - protein, 10 aa, Homo sapiens
  CDR3 for alpha chain variable domain of TCR clone 130303 (TRAV23/DV6, TRAJ9)
CASKYWRLRN

SEQ ID NO: 260606 - protein, 14 aa, Homo sapiens
  CDR3 for beta chain variable domain of TCR clone 130303 (TRBV6-1, TRBJ2-7)
CASTRTGDYYEQYF

SEQ ID NO: 260607 - protein, 16 aa, Homo sapiens
  CDR3 for alpha chain variable domain of TCR clone 130304 (TRAV16, TRAJ42)
CALSGLLGGGQGNLIF

SEQ ID NO: 260608 - protein, 15 aa, Homo sapiens
  CDR3 for beta chain variable domain of TCR clone 130304 (TRBV5-1, TRBJ2-1)
CASSPGGLAGNEQFF

SEQ ID NO: 260609 - protein, 11 aa, Homo sapiens
  CDR3 for alpha chain variable domain of TCR clone 130305 (TRAV12-1, TRAJ30)
CVVNGQDKVIF

SEQ ID NO: 260610 - protein, 15 aa, Homo sapiens
  CDR3 for beta chain variable domain of TCR clone 130305 (TRBV9, TRBJ1-6)
CASSVAGTGDSPLHF

SEQ ID NO: 260611 - protein, 14 aa, Homo sapiens
  CDR3 for alpha chain variable domain of TCR clone 130306 (TRAV17, TRAJ34)
CATDSLEGTDRLIF

SEQ ID NO: 260612 - protein, 13 aa, Homo sapiens
  CDR3 for beta chain variable domain of TCR clone 130306 (TRBV11-2, TRBJ2-7)
CASSGTRPYEQYF

SEQ ID NO: 260613 - protein, 11 aa, Homo sapiens
  CDR3 for alpha chain variable domain of TCR clone 130307 (TRAV1-2, TRAJ40)
CAVPGTYKNIF

SEQ ID NO: 260614 - protein, 16 aa, Homo sapiens
  CDR3 for beta chain variable domain of TCR clone 130307 (TRBV29-1, TRBJ2-7)
CSVEVVGTSGSYEQYF

SEQ ID NO: 260615 - protein, 12 aa, Homo sapiens
  CDR3 for alpha chain variable domain of TCR clone 130308 (TRAV13-1, TRAJ49)
CAASPMGNQFYF

SEQ ID NO: 260616 - protein, 13 aa, Homo sapiens
  CDR3 for beta chain variable domain of TCR clone 130308 (TRBV20-1, TRBJ2-2)
CSVSAAGTGELFF

SEQ ID NO: 260617 - protein, 14 aa, Homo sapiens
  CDR3 for alpha chain variable domain of TCR clone 130309 (TRAV2, TRAJ39)
CAVEGDNAGNMLTF

SEQ ID NO: 260618 - protein, 14 aa, Homo sapiens
  CDR3 for beta chain variable domain of TCR clone 130309 (TRBV28, TRBJ2-7)
CASSLRARGNEQYF

SEQ ID NO: 260619 - protein, 13 aa, Homo sapiens
  CDR3 for alpha chain variable domain of TCR clone 130310 (TRAV12-3, TRAJ35)
CAMAIGFGNVPHC

SEQ ID NO: 260620 - protein, 15 aa, Homo sapiens
  CDR3 for beta chain variable domain of TCR clone 130310 (TRBV20-1, TRBJ2-1)
CSARGSGTYYNEQFF

SEQ ID NO: 260621 - protein, 11 aa, Homo sapiens
  CDR3 for alpha chain variable domain of TCR clone 130311 (TRAV2, TRAJ21)
CAVFNFNKFYF

SEQ ID NO: 260622 - protein, 14 aa, Homo sapiens
  CDR3 for beta chain variable domain of TCR clone 130311 (TRBV7-3, TRBJ2-1)
CASSLGTSANEQFF

SEQ ID NO: 260623 - protein, 10 aa, Homo sapiens
  CDR3 for alpha chain variable domain of TCR clone 130312 (TRAV2, TRAJ34)
CAVLNDKLIF

SEQ ID NO: 260624 - protein, 15 aa, Homo sapiens
  CDR3 for beta chain variable domain of TCR clone 130312 (TRBV3-1, TRBJ2-2)
CASSQDWTRAGELFF

SEQ ID NO: 260625 - protein, 14 aa, Homo sapiens
  CDR3 for alpha chain variable domain of TCR clone 130313 (TRAV27, TRAJ22)
CAGLPSGSASQLTF

SEQ ID NO: 260626 - protein, 16 aa, Homo sapiens
  CDR3 for beta chain variable domain of TCR clone 130313 (TRBV7-3, TRBJ2-2)
CASSLKRGTLSGELFF

SEQ ID NO: 260627 - protein, 18 aa, Homo sapiens
  CDR3 for alpha chain variable domain of TCR clone 130314 (TRAV21, TRAJ52)
CAVRPSPAGGTSYGKLTF

SEQ ID NO: 260628 - protein, 14 aa, Homo sapiens
  CDR3 for beta chain variable domain of TCR clone 130314 (TRBV2, TRBJ2-5)
CASTWGRAQETQYF

SEQ ID NO: 260629 - protein, 15 aa, Homo sapiens
  CDR3 for alpha chain variable domain of TCR clone 130315 (TRAV3, TRAJ20)
CAVRDIKLSDYKLSF

SEQ ID NO: 260630 - protein, 14 aa, Homo sapiens
  CDR3 for beta chain variable domain of TCR clone 130315 (TRBV18, TRBJ2-5)
CASSPGVSQETQYF

SEQ ID NO: 260631 - protein, 14 aa, Homo sapiens
  CDR3 for alpha chain variable domain of TCR clone 130316 (TRAV1-2, TRAJ8)
CAVREDTGFQKLVF

SEQ ID NO: 260632 - protein, 15 aa, Homo sapiens
  CDR3 for beta chain variable domain of TCR clone 130316 (TRBV6-1, TRBJ1-5)
CASSVWVADGQPQHF

SEQ ID NO: 260633 - protein, 15 aa, Homo sapiens
  CDR3 for alpha chain variable domain of TCR clone 130317 (TRAV17, TRAJ57)
CATGPSPGGSEKLVF

SEQ ID NO: 260634 - protein, 16 aa, Homo sapiens
  CDR3 for beta chain variable domain of TCR clone 130317 (TRBV12-4, TRBJ1-5)
CARSRPVGGSNQPQHF

SEQ ID NO: 260635 - protein, 13 aa, Homo sapiens
  CDR3 for alpha chain variable domain of TCR clone 130318 (TRAV16, TRAJ27)
CALRRTNAGKSTF

SEQ ID NO: 260636 - protein, 15 aa, Homo sapiens
  CDR3 for beta chain variable domain of TCR clone 130318 (TRBV18, TRBJ2-1)
CASSPPSASYNEQLF

SEQ ID NO: 260637 - protein, 14 aa, Homo sapiens
  CDR3 for alpha chain variable domain of TCR clone 130319 (TRAV13-1, TRAJ40)
CAARSTSETYKYIF

SEQ ID NO: 260638 - protein, 13 aa, Homo sapiens
  CDR3 for beta chain variable domain of TCR clone 130319 (TRBV20-1, TRBJ2-2)
CSASAAGTGELFF

SEQ ID NO: 260639 - protein, 12 aa, Homo sapiens
  CDR3 for alpha chain variable domain of TCR clone 130320 (TRAV12-3, TRAJ17)
CAMTLTGNKLTF

SEQ ID NO: 260640 - protein, 16 aa, Homo sapiens
  CDR3 for beta chain variable domain of TCR clone 130320 (TRBV7-2, TRBJ1-6)
CASSSFESSYNSPLHF

SEQ ID NO: 260641 - protein, 16 aa, Homo sapiens
  CDR3 for alpha chain variable domain of TCR clone 130321 (TRAV1-2, TRAJ10)
CAVRGVLTGGGNKLTF

SEQ ID NO: 260642 - protein, 20 aa, Homo sapiens
  CDR3 for beta chain variable domain of TCR clone 130321 (TRBV7-8, TRBJ2-2)
CASSHLFPGPTIRITGELFF

SEQ ID NO: 260643 - protein, 15 aa, Homo sapiens
  CDR3 for alpha chain variable domain of TCR clone 130322 (TRAV3, TRAJ22)
CAVRDRGGSARQLTF

SEQ ID NO: 260644 - protein, 15 aa, Homo sapiens
  CDR3 for beta chain variable domain of TCR clone 130322 (TRBV12-4, TRBJ2-5)
CASSPPTGLQETQYF

SEQ ID NO: 260645 - protein, 13 aa, Homo sapiens
  CDR3 for alpha chain variable domain of TCR clone 130323 (TRAV29/DV5, TRAJ31)
CAASRTNNARLMF

SEQ ID NO: 260646 - protein, 13 aa, Homo sapiens
  CDR3 for beta chain variable domain of TCR clone 130323 (TRBV7-2, TRBJ2-4)
CASSREHANIQYF

SEQ ID NO: 260647 - protein, 13 aa, Homo sapiens
  CDR3 for alpha chain variable domain of TCR clone 130324 (TRAV3, TRAJ29)
CAVRDIIDTTLVF

SEQ ID NO: 260648 - protein, 14 aa, Homo sapiens
  CDR3 for beta chain variable domain of TCR clone 130324 (TRBV27, TRBJ2-1)
CASSATGGYNEQFF

SEQ ID NO: 260649 - protein, 13 aa, Homo sapiens
  CDR3 for alpha chain variable domain of TCR clone 130325 (TRAV2, TRAJ40)
CAVVTSGTYKYIF

SEQ ID NO: 260650 - protein, 17 aa, Homo sapiens
  CDR3 for beta chain variable domain of TCR clone 130325 (TRBV7-3, TRBJ2-2)
CASSLSGTSGGTGELFF

SEQ ID NO: 260651 - protein, 11 aa, Homo sapiens
  CDR3 for alpha chain variable domain of TCR clone 130326 (TRAV12-3, TRAJ43)
CAMSVSNDMRF

SEQ ID NO: 260652 - protein, 16 aa, Homo sapiens
  CDR3 for beta chain variable domain of TCR clone 130326 (TRBV4-3, TRBJ2-1)
CASSPALDRGVNEQFF

SEQ ID NO: 260653 - protein, 15 aa, Homo sapiens
  CDR3 for alpha chain variable domain of TCR clone 130327 (TRAV21, TRAJ53)
CAPLNSGGSNYKLTF

SEQ ID NO: 260654 - protein, 16 aa, Homo sapiens
  CDR3 for beta chain variable domain of TCR clone 130327 (TRBV9, TRBJ2-1)
CASSVGGGGNYNEQFF

SEQ ID NO: 260655 - protein, 14 aa, Homo sapiens
  CDR3 for alpha chain variable domain of TCR clone 130328 (TRAV3, TRAJ8)
CAVSLNTGFQKLVF

SEQ ID NO: 260656 - protein, 14 aa, Homo sapiens
  CDR3 for beta chain variable domain of TCR clone 130328 (TRBV6-6, TRBJ1-5)
RASVDSGFNQPQHF

SEQ ID NO: 260657 - protein, 13 aa, Homo sapiens
  CDR3 for alpha chain variable domain of TCR clone 130329 (TRAV8-6, TRAJ49)
CAVTTNTGNQFYF

SEQ ID NO: 260658 - protein, 12 aa, Homo sapiens
  CDR3 for beta chain variable domain of TCR clone 130329 (TRBV11-2, TRBJ2-2)
CASSLGGGELFF

SEQ ID NO: 260659 - protein, 10 aa, Homo sapiens
  CDR3 for alpha chain variable domain of TCR clone 130330 (TRAV12-3, TRAJ49)
CAMHDDQFYF

SEQ ID NO: 260660 - protein, 13 aa, Homo sapiens
  CDR3 for beta chain variable domain of TCR clone 130330 (TRBV12-4, TRBJ1-1)
CASSPGTGFEAFF

SEQ ID NO: 260661 - protein, 15 aa, Homo sapiens
  CDR3 for alpha chain variable domain of TCR clone 130331 (TRAV35, TRAJ40)
CAGQLGTSGTYKYIF

SEQ ID NO: 260662 - protein, 15 aa, Homo sapiens
  CDR3 for beta chain variable domain of TCR clone 130331 (TRBV4-3, TRBJ1-1)
CASSQELGRGTEAFF

SEQ ID NO: 260663 - protein, 18 aa, Homo sapiens
  CDR3 for alpha chain variable domain of TCR clone 130332 (TRAV26-2, TRAJ45)
CILRSWGYSGGGADGLTF

SEQ ID NO: 260664 - protein, 17 aa, Homo sapiens
  CDR3 for beta chain variable domain of TCR clone 130332 (TRBV28, TRBJ2-3)
CASSPTPAGGRVDTQYF

SEQ ID NO: 260665 - protein, 15 aa, Homo sapiens
  CDR3 for alpha chain variable domain of TCR clone 130333 (TRAV17, TRAJ57)
CATGPSQGGSEKLVF

SEQ ID NO: 260666 - protein, 16 aa, Homo sapiens
  CDR3 for beta chain variable domain of TCR clone 130333 (TRBV12-4, TRBJ1-5)
CASSRPVGGSEQPQHF

SEQ ID NO: 260667 - protein, 14 aa, Homo sapiens
  CDR3 for alpha chain variable domain of TCR clone 130334 (TRAV26-1, TRAJ34)
CIVRVAYNTAKPIF

SEQ ID NO: 260668 - protein, 15 aa, Homo sapiens
  CDR3 for beta chain variable domain of TCR clone 130334 (TRBV20-1, TRBJ2-7)
CSARVPAAYFYEQYF

SEQ ID NO: 260669 - protein, 16 aa, Homo sapiens
  CDR3 for alpha chain variable domain of TCR clone 130335 (TRAV30, TRAJ24)
CGTEIVDADSWGKFQF

SEQ ID NO: 260670 - protein, 15 aa, Homo sapiens
  CDR3 for beta chain variable domain of TCR clone 130335 (TRBV7-2, TRBJ2-3)
CASSLVVRGPDTQYF

SEQ ID NO: 260671 - protein, 14 aa, Homo sapiens
  CDR3 for alpha chain variable domain of TCR clone 130336 (TRAV17, TRAJ57)
CSTDPQGGSEKLVF

SEQ ID NO: 260672 - protein, 20 aa, Homo sapiens
  CDR3 for beta chain variable domain of TCR clone 130336 (TRBV28, TRBJ2-1)
CASTPIGRSPGLAGGNEQFF

SEQ ID NO: 260673 - protein, 18 aa, Homo sapiens
  CDR3 for alpha chain variable domain of TCR clone 130337 (TRAV21, TRAJ52)
CAVRPSPAGGTSYGNLTF

SEQ ID NO: 260674 - protein, 17 aa, Homo sapiens
  CDR3 for beta chain variable domain of TCR clone 130337 (TRBV25-1, TRBJ2-1)
CASSAYGQGRGVYEQFF

SEQ ID NO: 260675 - protein, 13 aa, Homo sapiens
  CDR3 for alpha chain variable domain of TCR clone 130338 (TRAV12-3, TRAJ33)
CAMSVNSNYQLIW

SEQ ID NO: 260676 - protein, 13 aa, Homo sapiens
  CDR3 for beta chain variable domain of TCR clone 130338 (TRBV7-3, TRBJ2-5)
CASSFRGGETQYF

SEQ ID NO: 260677 - protein, 15 aa, Homo sapiens
  CDR3 for alpha chain variable domain of TCR clone 130339 (TRAV23/DV6, TRAJ33)
CAASNSGGGNYQLIW

SEQ ID NO: 260678 - protein, 14 aa, Homo sapiens
  CDR3 for beta chain variable domain of TCR clone 130339 (TRBV7-2, TRBJ2-7)
CASSLYPGRCEQYF

SEQ ID NO: 260679 - protein, 16 aa, Homo sapiens
  CDR3 for alpha chain variable domain of TCR clone 130340 (TRAV26-1, TRAJ23)
CIVRVHPYNQEGKLIF

SEQ ID NO: 260680 - protein, 15 aa, Homo sapiens
  CDR3 for beta chain variable domain of TCR clone 130340 (TRBV5-7, TRBJ2-7)
CASSPYFEGSYEQYF

SEQ ID NO: 260681 - protein, 13 aa, Homo sapiens
  CDR3 for alpha chain variable domain of TCR clone 130341 (TRAV27, TRAJ8)
CAGGPTGFQKLVF

SEQ ID NO: 260682 - protein, 14 aa, Homo sapiens
  CDR3 for beta chain variable domain of TCR clone 130341 (TRBV12-4, TRBJ1-6)
CASNLQGKGSPLHF

SEQ ID NO: 260683 - protein, 15 aa, Homo sapiens
  CDR3 for alpha chain variable domain of TCR clone 130342 (TRAV8-3, TRAJ11)
CAVGLLNSGYSTLIF

SEQ ID NO: 260684 - protein, 16 aa, Homo sapiens
  CDR3 for beta chain variable domain of TCR clone 130342 (TRBV7-9, TRBJ1-2)
CASSLGFSSGEDGYTF

SEQ ID NO: 260685 - protein, 15 aa, Homo sapiens
  CDR3 for alpha chain variable domain of TCR clone 130343 (TRAV26-1, TRAJ39)
CIVRVARNAGNILTF

SEQ ID NO: 260686 - protein, 16 aa, Homo sapiens
  CDR3 for beta chain variable domain of TCR clone 130343 (TRBV5-1, TRBJ2-1)
CASSLTLAGGRNEQFF

SEQ ID NO: 260687 - protein, 15 aa, Homo sapiens
  CDR3 for alpha chain variable domain of TCR clone 130344 (TRAV3, TRAJ3)
CAVRDGHSSASKIIF

SEQ ID NO: 260688 - protein, 14 aa, Homo sapiens
  CDR3 for beta chain variable domain of TCR clone 130344 (TRBV28, TRBJ1-4)
CASSFGTFDEKMFF

SEQ ID NO: 260689 - protein, 16 aa, Homo sapiens
  CDR3 for alpha chain variable domain of TCR clone 130345 (TRAV26-1, TRAJ40)
CIVRGYPTSGTYKHIF

SEQ ID NO: 260690 - protein, 16 aa, Homo sapiens
  CDR3 for beta chain variable domain of TCR clone 130345 (TRBV5-1, TRBJ1-4)
CASSSGQGGEKLFLAV

SEQ ID NO: 260691 - protein, 15 aa, Homo sapiens
  CDR3 for alpha chain variable domain of TCR clone 130346 (TRAV12-2, TRAJ43)
CAFDMRFGAGTRLTV

SEQ ID NO: 260692 - protein, 18 aa, Homo sapiens
  CDR3 for beta chain variable domain of TCR clone 130346 (TRBV20-1, TRBJ2-3)
CSASGLAGGPGTTDTHYF

SEQ ID NO: 260693 - protein, 14 aa, Homo sapiens
  CDR3 for alpha chain variable domain of TCR clone 130347 (TRAV20, TRAJ29)
CAVQAWVGNTPLVF

SEQ ID NO: 260694 - protein, 16 aa, Homo sapiens
  CDR3 for beta chain variable domain of TCR clone 130347 (TRBV7-3, TRBJ2-2)
CASSLKRGTLSGELFF

SEQ ID NO: 260695 - protein, 12 aa, Homo sapiens
  CDR3 for alpha chain variable domain of TCR clone 130348 (TRAV13-2, TRAJ23)
CAERHRGGKLIF

SEQ ID NO: 260696 - protein, 13 aa, Homo sapiens
  CDR3 for beta chain variable domain of TCR clone 130348 (TRBV5-1, TRBJ1-5)
CASSLAQDQPQHF

SEQ ID NO: 260697 - protein, 15 aa, Homo sapiens
  CDR3 for alpha chain variable domain of TCR clone 130349 (TRAV12-1, TRAJ42)
CVVTRDGGSQENLIF

SEQ ID NO: 260698 - protein, 14 aa, Homo sapiens
  CDR3 for beta chain variable domain of TCR clone 130349 (TRBV11-2, TRBJ2-3)
CASSLGGGANTQYF

SEQ ID NO: 260699 - protein, 11 aa, Homo sapiens
  CDR3 for alpha chain variable domain of TCR clone 130350 (TRAV35, TRAJ30)
CAGERDDKIIF

SEQ ID NO: 260700 - protein, 14 aa, Homo sapiens
  CDR3 for beta chain variable domain of TCR clone 130350 (TRBV15, TRBJ2-5)
CATSGDRVQETQYF

SEQ ID NO: 260701 - protein, 14 aa, Homo sapiens
  CDR3 for alpha chain variable domain of TCR clone 130351 (TRAV12-3, TRAJ15)
CAIIPPQAGTALIF

SEQ ID NO: 260702 - protein, 12 aa, Homo sapiens
  CDR3 for beta chain variable domain of TCR clone 130351 (TRBV11-2, TRBJ2-2)
CASSLGGGELFF

SEQ ID NO: 260703 - protein, 14 aa, Homo sapiens
  CDR3 for alpha chain variable domain of TCR clone 130352 (TRAV8-4, TRAJ48)
CAVSETFGNEKLTF

SEQ ID NO: 260704 - protein, 14 aa, Homo sapiens
  CDR3 for beta chain variable domain of TCR clone 130352 (TRBV13, TRBJ2-7)
CASSLRGASYEQYF

SEQ ID NO: 260705 - protein, 14 aa, Homo sapiens
  CDR3 for alpha chain variable domain of TCR clone 130353 (TRAV34, TRAJ44)
CGADGTGTASKITF

SEQ ID NO: 260706 - protein, 12 aa, Homo sapiens
  CDR3 for beta chain variable domain of TCR clone 130353 (TRBV11-2, TRBJ2-2)
CASSLGGGELFF

SEQ ID NO: 260707 - protein, 15 aa, Homo sapiens
  CDR3 for alpha chain variable domain of TCR clone 130354 (TRAV2, TRAJ28)
CAVPYSGAGSYQLTF

SEQ ID NO: 260708 - protein, 17 aa, Homo sapiens
  CDR3 for beta chain variable domain of TCR clone 130354 (TRBV20-1, TRBJ2-4)
CSARDWASGGQENIQYF

SEQ ID NO: 260709 - protein, 16 aa, Homo sapiens
  CDR3 for alpha chain variable domain of TCR clone 130355 (TRAV3, TRAJ37)
CAVRPHGSGNTGKLIF

SEQ ID NO: 260710 - protein, 14 aa, Homo sapiens
  CDR3 for beta chain variable domain of TCR clone 130355 (TRBV5-1, TRBJ2-7)
CASSLQGAVDEQYF

SEQ ID NO: 260711 - protein, 15 aa, Homo sapiens
  CDR3 for alpha chain variable domain of TCR clone 130356 (TRAV12-3, TRAJ27)
CAMRAYNTNAGKSTF

SEQ ID NO: 260712 - protein, 13 aa, Homo sapiens
  CDR3 for beta chain variable domain of TCR clone 130356 (TRBV11-2, TRBJ2-5)
CASSRGTSETQYF

SEQ ID NO: 260713 - protein, 14 aa, Homo sapiens
  CDR3 for alpha chain variable domain of TCR clone 130357 (TRAV1-2, TRAJ16)
CAVNRFSDGQKLLF

SEQ ID NO: 260714 - protein, 13 aa, Homo sapiens
  CDR3 for beta chain variable domain of TCR clone 130357 (TRBV19, TRBJ2-7)
CASSTSGSYGQYF

SEQ ID NO: 260715 - protein, 12 aa, Homo sapiens
  CDR3 for alpha chain variable domain of TCR clone 130358 (TRAV21, TRAJ20)
CAVRGNDYKLSF

SEQ ID NO: 260716 - protein, 17 aa, Homo sapiens
  CDR3 for beta chain variable domain of TCR clone 130358 (TRBV11-2, TRBJ2-1)
CASSLYPPGVEYNEQFF

SEQ ID NO: 260717 - protein, 16 aa, Homo sapiens
  CDR3 for alpha chain variable domain of TCR clone 130359 (TRAV26-2, TRAJ45)
CTTASPIGGGADGLTF

SEQ ID NO: 260718 - protein, 20 aa, Homo sapiens
  CDR3 for beta chain variable domain of TCR clone 130359 (TRBV28, TRBJ2-1)
CASPPIGRSPGLAGGNEQFF

SEQ ID NO: 260719 - protein, 14 aa, Homo sapiens
  CDR3 for alpha chain variable domain of TCR clone 130360 (TRAV1-2, TRAJ16)
CAVNRFADGQKLLF

SEQ ID NO: 260720 - protein, 12 aa, Homo sapiens
  CDR3 for beta chain variable domain of TCR clone 130360 (TRBV11-2, TRBJ2-2)
CASSLGGGELFF

SEQ ID NO: 260721 - protein, 16 aa, Homo sapiens
  CDR3 for alpha chain variable domain of TCR clone 130361 (TRAV12-3, TRAJ53)
CAMSPGSGCSNYKLTF

SEQ ID NO: 260722 - protein, 13 aa, Homo sapiens
  CDR3 for beta chain variable domain of TCR clone 130361 (TRBV7-3, TRBJ1-1)
CASSQDWGAEAFF

SEQ ID NO: 260723 - protein, 14 aa, Homo sapiens
  CDR3 for alpha chain variable domain of TCR clone 130362 (TRAV2, TRAJ37)
TTVPGSSNTGRLIF

SEQ ID NO: 260724 - protein, 14 aa, Homo sapiens
  CDR3 for beta chain variable domain of TCR clone 130362 (TRBV7-8, TRBJ2-7)
CASSLWQSSYEQYF

SEQ ID NO: 260725 - protein, 14 aa, Homo sapiens
  CDR3 for alpha chain variable domain of TCR clone 130363 (TRAV13-2, TRAJ17)
CAENSKAAGNKQTF

SEQ ID NO: 260726 - protein, 11 aa, Homo sapiens
  CDR3 for beta chain variable domain of TCR clone 130363 (TRBV6-3, TRBJ2-3)
CATGQADTQYF

SEQ ID NO: 260727 - protein, 16 aa, Homo sapiens
  CDR3 for alpha chain variable domain of TCR clone 130364 (TRAV3, TRAJ37)
CAVRGKGSGNTGKLIV

SEQ ID NO: 260728 - protein, 13 aa, Homo sapiens
  CDR3 for beta chain variable domain of TCR clone 130364 (TRBV7-3, TRBJ1-1)
CASSQDWGAEAFF

SEQ ID NO: 260729 - protein, 11 aa, Homo sapiens
  CDR3 for alpha chain variable domain of TCR clone 130365 (TRAV23/DV6, TRAJ49)
CAVAPVTSSIL

SEQ ID NO: 260730 - protein, 14 aa, Homo sapiens
  CDR3 for beta chain variable domain of TCR clone 130365 (TRBV6-1, TRBJ1-3)
CASVQGGGGNTIYF

SEQ ID NO: 260731 - protein, 11 aa, Homo sapiens
  CDR3 for alpha chain variable domain of TCR clone 130366 (TRAV12-2, TRAJ33)
CAVGSNYQLIC

SEQ ID NO: 260732 - protein, 14 aa, Homo sapiens
  CDR3 for beta chain variable domain of TCR clone 130366 (TRBV6-1, TRBJ2-2)
CASVEHIESGELFF

SEQ ID NO: 260733 - protein, 15 aa, Homo sapiens
  CDR3 for alpha chain variable domain of TCR clone 130367 (TRAV27, TRAJ28)
CAGAYSGAGSYQLTF

SEQ ID NO: 260734 - protein, 16 aa, Homo sapiens
  CDR3 for beta chain variable domain of TCR clone 130367 (TRBV6-1, TRBJ2-5)
CASSETLDRGAETQYF

SEQ ID NO: 260735 - protein, 14 aa, Homo sapiens
  CDR3 for alpha chain variable domain of TCR clone 130368 (TRAV17, TRAJ57)
CATDPQGGSEKLVF

SEQ ID NO: 260736 - protein, 13 aa, Homo sapiens
  CDR3 for beta chain variable domain of TCR clone 130368 (TRBV19, TRBJ2-7)
CASSPRRSYEQYF

SEQ ID NO: 260737 - protein, 13 aa, Homo sapiens
  CDR3 for alpha chain variable domain of TCR clone 130369 (TRAV8-1, TRAJ30)
CAVIMNRDDKSIF

SEQ ID NO: 260738 - protein, 14 aa, Homo sapiens
  CDR3 for beta chain variable domain of TCR clone 130369 (TRBV7-2, TRBJ1-6)
CASSLQGANSPLHF

SEQ ID NO: 260739 - protein, 14 aa, Homo sapiens
  CDR3 for alpha chain variable domain of TCR clone 130370 (TRAV12-2, TRAJ24)
CAVTPADSWGKLQF

SEQ ID NO: 260740 - protein, 15 aa, Homo sapiens
  CDR3 for beta chain variable domain of TCR clone 130370 (TRBV2, TRBJ2-1)
CASSDRSSGAREQFF

SEQ ID NO: 260741 - protein, 19 aa, Homo sapiens
  CDR3 for alpha chain variable domain of TCR clone 130371 (TRAV13-1, TRAJ52)
CAASPYQNAGGTSYGKLTF

SEQ ID NO: 260742 - protein, 14 aa, Homo sapiens
  CDR3 for beta chain variable domain of TCR clone 130371 (TRBV12-4, TRBJ1-5)
CASSPTGPRGGTYF

SEQ ID NO: 260743 - protein, 14 aa, Homo sapiens
  CDR3 for alpha chain variable domain of TCR clone 130372 (TRAV12-3, TRAJ33)
CAMSVPGSNYQLIW

SEQ ID NO: 260744 - protein, 15 aa, Homo sapiens
  CDR3 for beta chain variable domain of TCR clone 130372 (TRBV20-1, TRBJ2-7)
CSARDRVSGMDEQYF

SEQ ID NO: 260745 - protein, 13 aa, Homo sapiens
  CDR3 for alpha chain variable domain of TCR clone 130373 (TRAV21, TRAJ32)
CAVSGGATNKLIF

SEQ ID NO: 260746 - protein, 18 aa, Homo sapiens
  CDR3 for beta chain variable domain of TCR clone 130373 (TRBV23-1, TRBJ2-1)
TVSLRRQSMAPAHNEQFF

SEQ ID NO: 260747 - protein, 14 aa, Homo sapiens
  CDR3 for alpha chain variable domain of TCR clone 130374 (TRAV26-1, TRAJ49)
CIVRLTNTGNQFYF

SEQ ID NO: 260748 - protein, 13 aa, Homo sapiens
  CDR3 for beta chain variable domain of TCR clone 130374 (TRBV4-1, TRBJ2-7)
CASSQGQAYEQYV

SEQ ID NO: 260749 - protein, 14 aa, Homo sapiens
  CDR3 for alpha chain variable domain of TCR clone 130375 (TRAV9-2, TRAJ39)
CALYIYNAGNMLPF

SEQ ID NO: 260750 - protein, 16 aa, Homo sapiens
  CDR3 for beta chain variable domain of TCR clone 130375 (TRBV29-1, TRBJ2-6)
CSVEDITYSGANVLTF

SEQ ID NO: 260751 - protein, 15 aa, Homo sapiens
  CDR3 for alpha chain variable domain of TCR clone 130376 (TRAV4, TRAJ36)
CIVGDRQTGANNLFF

SEQ ID NO: 260752 - protein, 15 aa, Homo sapiens
  CDR3 for beta chain variable domain of TCR clone 130376 (TRBV7-6, TRBJ2-1)
CASSSLAGEGNEQFF

SEQ ID NO: 260753 - protein, 11 aa, Homo sapiens
  CDR3 for alpha chain variable domain of TCR clone 130377 (TRAV13-1, TRAJ30)
CAASRDDKVIF

SEQ ID NO: 260754 - protein, 15 aa, Homo sapiens
  CDR3 for beta chain variable domain of TCR clone 130377 (TRBV18, TRBJ1-1)
CASSPSSWVNTEAFF

SEQ ID NO: 260755 - protein, 13 aa, Homo sapiens
  CDR3 for alpha chain variable domain of TCR clone 130378 (TRAV27, TRAJ6)
CAVASGGSYIPTF

SEQ ID NO: 260756 - protein, 16 aa, Homo sapiens
  CDR3 for beta chain variable domain of TCR clone 130378 (TRBV19, TRBJ1-2)
CASSIGSNRDGYGYTF

SEQ ID NO: 260757 - protein, 11 aa, Homo sapiens
  CDR3 for alpha chain variable domain of TCR clone 130379 (TRAV26-1, TRAJ37)
CIVRVGRKLIF

SEQ ID NO: 260758 - protein, 16 aa, Homo sapiens
  CDR3 for beta chain variable domain of TCR clone 130379 (TRBV11-2, TRBJ1-2)
CASSLDTGGADYGYTF

SEQ ID NO: 260759 - protein, 13 aa, Homo sapiens
  CDR3 for alpha chain variable domain of TCR clone 130380 (TRAV21, TRAJ11)
CAVPNSGYSTLTF

SEQ ID NO: 260760 - protein, 13 aa, Homo sapiens
  CDR3 for beta chain variable domain of TCR clone 130380 (TRBV3-1, TRBJ2-7)
CASSLRDGYEHYF

SEQ ID NO: 260761 - protein, 13 aa, Homo sapiens
  CDR3 for alpha chain variable domain of TCR clone 130381 (TRAV21, TRAJ36)
CAVIKTGANNLFF

SEQ ID NO: 260762 - protein, 14 aa, Homo sapiens
  CDR3 for beta chain variable domain of TCR clone 130381 (TRBV7-2, TRBJ2-7)
CASSPKTSFYEQYF

SEQ ID NO: 260763 - protein, 17 aa, Homo sapiens
  CDR3 for alpha chain variable domain of TCR clone 130382 (TRAV13-1, TRAJ5)
CSNPSLSRDTGMRALTF

SEQ ID NO: 260764 - protein, 17 aa, Homo sapiens
  CDR3 for beta chain variable domain of TCR clone 130382 (TRBV24-1, TRBJ2-1)
CATSDVSTSGTYNEQFF

SEQ ID NO: 260765 - protein, 18 aa, Homo sapiens
  CDR3 for alpha chain variable domain of TCR clone 130383 (TRAV13-1, TRAJ52)
CAAKNSNAGGTSYGKLTF

SEQ ID NO: 260766 - protein, 15 aa, Homo sapiens
  CDR3 for beta chain variable domain of TCR clone 130383 (TRBV6-1, TRBJ2-3)
CASSERGGITDTQYF

SEQ ID NO: 260767 - protein, 14 aa, Homo sapiens
  CDR3 for alpha chain variable domain of TCR clone 130384 (TRAV13-2, TRAJ11)
CAETGNSGYSTPTF

SEQ ID NO: 260768 - protein, 11 aa, Homo sapiens
  CDR3 for beta chain variable domain of TCR clone 130384 (TRBV10-3, TRBJ2-7)
CAISEGLEQYF

SEQ ID NO: 260769 - protein, 11 aa, Homo sapiens
  CDR3 for alpha chain variable domain of TCR clone 130385 (TRAV8-4, TRAJ34)
CAVSWTDKLIF

SEQ ID NO: 260770 - protein, 12 aa, Homo sapiens
  CDR3 for beta chain variable domain of TCR clone 130385 (TRBV11-2, TRBJ2-2)
CASSLGGGELFF

SEQ ID NO: 260771 - protein, 15 aa, Homo sapiens
  CDR3 for alpha chain variable domain of TCR clone 130386 (TRAV22, TRAJ44)
CAVGLHTGTASKLTF

SEQ ID NO: 260772 - protein, 19 aa, Homo sapiens
  CDR3 for beta chain variable domain of TCR clone 130386 (TRBV25-1, TRBJ2-2)
CAILVYRVDRGRKTGELFF

SEQ ID NO: 260773 - protein, 15 aa, Homo sapiens
  CDR3 for alpha chain variable domain of TCR clone 130387 (TRAV12-1, TRAJ44)
CVVDTPQGTASKLTF

SEQ ID NO: 260774 - protein, 12 aa, Homo sapiens
  CDR3 for beta chain variable domain of TCR clone 130387 (TRBV11-2, TRBJ2-2)
CASSLPTGELFF

SEQ ID NO: 260775 - protein, 14 aa, Homo sapiens
  CDR3 for alpha chain variable domain of TCR clone 130388 (TRAV26-1, TRAJ40)
CIVRFLSGTYKYIF

SEQ ID NO: 260776 - protein, 10 aa, Homo sapiens
  CDR3 for beta chain variable domain of TCR clone 130388 (TRBV15, TRBJ2-7)
AETGGYEQYF

SEQ ID NO: 260777 - protein, 14 aa, Homo sapiens
  CDR3 for alpha chain variable domain of TCR clone 130389 (TRAV8-2, TRAJ45)
CVVSARGGADGLTF

SEQ ID NO: 260778 - protein, 12 aa, Homo sapiens
  CDR3 for beta chain variable domain of TCR clone 130389 (TRBV12-4, TRBJ2-1)
CASSLVRVEQFF

SEQ ID NO: 260779 - protein, 13 aa, Homo sapiens
  CDR3 for alpha chain variable domain of TCR clone 130390 (TRAV29/DV5, TRAJ47)
CAASEEYGNKLVF

SEQ ID NO: 260780 - protein, 11 aa, Homo sapiens
  CDR3 for beta chain variable domain of TCR clone 130390 (TRBV29-1, TRBJ2-5)
CSEDRTGTQYF

SEQ ID NO: 260781 - protein, 14 aa, Homo sapiens
  CDR3 for alpha chain variable domain of TCR clone 130391 (TRAV17, TRAJ49)
CATDARDTGNPFYF

SEQ ID NO: 260782 - protein, 14 aa, Homo sapiens
  CDR3 for beta chain variable domain of TCR clone 130391 (TRBV5-5, TRBJ1-2)
CASSFGQINYGYTF

SEQ ID NO: 260783 - protein, 15 aa, Homo sapiens
  CDR3 for alpha chain variable domain of TCR clone 130392 (TRAV8-4, TRAJ3)
CAVSEPYSSASKIIF

SEQ ID NO: 260784 - protein, 13 aa, Homo sapiens
  CDR3 for beta chain variable domain of TCR clone 130392 (TRBV12-4, TRBJ1-2)
CASSSGLTVISTF

SEQ ID NO: 260785 - protein, 14 aa, Homo sapiens
  CDR3 for alpha chain variable domain of TCR clone 130393 (TRAV13-1, TRAJ9)
CAASALTGGFKTIF

SEQ ID NO: 260786 - protein, 15 aa, Homo sapiens
  CDR3 for beta chain variable domain of TCR clone 130393 (TRBV7-2, TRBJ2-1)
CASSFRESSYNEQLF

SEQ ID NO: 260787 - protein, 14 aa, Homo sapiens
  CDR3 for alpha chain variable domain of TCR clone 130394 (TRAV2, TRAJ9)
CAVEDRSRGFKTIF

SEQ ID NO: 260788 - protein, 14 aa, Homo sapiens
  CDR3 for beta chain variable domain of TCR clone 130394 (TRBV7-3, TRBJ2-1)
CASSLAGGTNEQFF

SEQ ID NO: 260789 - protein, 14 aa, Homo sapiens
  CDR3 for alpha chain variable domain of TCR clone 130395 (TRAV26-1, TRAJ39)
CIVRGSRAGNMLTF

SEQ ID NO: 260790 - protein, 15 aa, Homo sapiens
  CDR3 for beta chain variable domain of TCR clone 130395 (TRBV7-9, TRBJ1-5)
CASSQGLQPNQPQHF

SEQ ID NO: 260791 - protein, 12 aa, Homo sapiens
  CDR3 for alpha chain variable domain of TCR clone 130396 (TRAV16, TRAJ10)
CSRTGGGNKLTF

SEQ ID NO: 260792 - protein, 11 aa, Homo sapiens
  CDR3 for beta chain variable domain of TCR clone 130396 (TRBV5-6, TRBJ2-5)
CASSLERTQYF

SEQ ID NO: 260793 - protein, 13 aa, Homo sapiens
  CDR3 for alpha chain variable domain of TCR clone 130397 (TRAV29/DV5, TRAJ47)
CAASAEYGNTLVF

SEQ ID NO: 260794 - protein, 15 aa, Homo sapiens
  CDR3 for beta chain variable domain of TCR clone 130397 (TRBV7-9, TRBJ1-4)
CASSARTGGNEKLFF

SEQ ID NO: 260795 - protein, 14 aa, Homo sapiens
  CDR3 for alpha chain variable domain of TCR clone 130398 (TRAV20, TRAJ42)
CAVQAGGNQGNLLF

SEQ ID NO: 260796 - protein, 14 aa, Homo sapiens
  CDR3 for beta chain variable domain of TCR clone 130398 (TRBV28, TRBJ1-2)
CASRIQGANYGYTF

SEQ ID NO: 260797 - protein, 11 aa, Homo sapiens
  CDR3 for alpha chain variable domain of TCR clone 130399 (TRAV2, TRAJ13)
CASVGYQKVTF

SEQ ID NO: 260798 - protein, 17 aa, Homo sapiens
  CDR3 for beta chain variable domain of TCR clone 130399 (TRBV11-2, TRBJ2-1)
CASSLYPPGVEYNEQFF

SEQ ID NO: 260799 - protein, 15 aa, Homo sapiens
  CDR3 for alpha chain variable domain of TCR clone 130400 (TRAV26-1, TRAJ52)
CIVSDLGTSYGKLTF

SEQ ID NO: 260800 - protein, 13 aa, Homo sapiens
  CDR3 for beta chain variable domain of TCR clone 130400 (TRBV10-3, TRBJ2-7)
CASKLAVNYEQYF

SEQ ID NO: 260801 - protein, 14 aa, Homo sapiens
  CDR3 for alpha chain variable domain of TCR clone 130401 (TRAV29/DV5, TRAJ42)
CAAKGGGSQGNLIF

SEQ ID NO: 260802 - protein, 15 aa, Homo sapiens
  CDR3 for beta chain variable domain of TCR clone 130401 (TRBV7-6, TRBJ2-1)
CASSSLAGEGNEQFF

SEQ ID NO: 260803 - protein, 13 aa, Homo sapiens
  CDR3 for alpha chain variable domain of TCR clone 130402 (TRAV17, TRAJ21)
CATDGGNFNKFYF

SEQ ID NO: 260804 - protein, 17 aa, Homo sapiens
  CDR3 for beta chain variable domain of TCR clone 130402 (TRBV7-8, TRBJ2-1)
CASSPPTGTLAYNEQSF

SEQ ID NO: 260805 - protein, 13 aa, Homo sapiens
  CDR3 for alpha chain variable domain of TCR clone 130403 (TRAV3, TRAJ27)
CAVRPLGAGKSTF

SEQ ID NO: 260806 - protein, 13 aa, Homo sapiens
  CDR3 for beta chain variable domain of TCR clone 130403 (TRBV4-2, TRBJ1-1)
CASSQAGNTEAFF

SEQ ID NO: 260807 - protein, 13 aa, Homo sapiens
  CDR3 for alpha chain variable domain of TCR clone 130404 (TRAV8-3, TRAJ28)
CAVGAVGSYQLTF

SEQ ID NO: 260808 - protein, 15 aa, Homo sapiens
  CDR3 for beta chain variable domain of TCR clone 130404 (TRBV7-9, TRBJ1-5)
CASSQGHQPNQPQNF

SEQ ID NO: 260809 - protein, 13 aa, Homo sapiens
  CDR3 for alpha chain variable domain of TCR clone 130405 (TRAV3, TRAJ21)
CAVREPDFNKFYF

SEQ ID NO: 260810 - protein, 14 aa, Homo sapiens
  CDR3 for beta chain variable domain of TCR clone 130405 (TRBV7-9, TRBJ1-2)
CASSRQGANYGYTF

SEQ ID NO: 260811 - protein, 14 aa, Homo sapiens
  CDR3 for alpha chain variable domain of TCR clone 130406 (TRAV26-1, TRAJ39)
CIVRGSRAGNMLTL

SEQ ID NO: 260812 - protein, 14 aa, Homo sapiens
  CDR3 for beta chain variable domain of TCR clone 130406 (TRBV25-1, TRBJ1-1)
CASTHLGGNTEAFF

SEQ ID NO: 260813 - protein, 12 aa, Homo sapiens
  CDR3 for alpha chain variable domain of TCR clone 130407 (TRAV17, TRAJ30)
CVPERRDDKFIF

SEQ ID NO: 260814 - protein, 14 aa, Homo sapiens
  CDR3 for beta chain variable domain of TCR clone 130407 (TRBV7-7, TRBJ2-2)
CASSRDRSTGELFF

SEQ ID NO: 260815 - protein, 15 aa, Homo sapiens
  CDR3 for alpha chain variable domain of TCR clone 130408 (TRAV8-3, TRAJ15)
CAVGARNQAGTALIF

SEQ ID NO: 260816 - protein, 14 aa, Homo sapiens
  CDR3 for beta chain variable domain of TCR clone 130408 (TRBV20-1, TRBJ2-1)
CSPNDEASYNEQFF

SEQ ID NO: 260817 - protein, 11 aa, Homo sapiens
  CDR3 for alpha chain variable domain of TCR clone 130409 (TRAV8-6, TRAJ20)
CDVSYDYKLSF

SEQ ID NO: 260818 - protein, 14 aa, Homo sapiens
  CDR3 for beta chain variable domain of TCR clone 130409 (TRBV10-2, TRBJ2-2)
CASSERSNTGELFF

SEQ ID NO: 260819 - protein, 13 aa, Homo sapiens
  CDR3 for alpha chain variable domain of TCR clone 130410 (TRAV13-2, TRAJ40)
CAEFTSGTYKYIF

SEQ ID NO: 260820 - protein, 14 aa, Homo sapiens
  CDR3 for beta chain variable domain of TCR clone 130410 (TRBV10-2, TRBJ1-5)
CASSSTGRNQAQHF

SEQ ID NO: 260821 - protein, 13 aa, Homo sapiens
  CDR3 for alpha chain variable domain of TCR clone 130411 (TRAV17, TRAJ5)
CATGDTGRGALTF

SEQ ID NO: 260822 - protein, 13 aa, Homo sapiens
  CDR3 for beta chain variable domain of TCR clone 130411 (TRBV19, TRBJ1-5)
CASSIEPVQPQHF

SEQ ID NO: 260823 - protein, 15 aa, Homo sapiens
  CDR3 for alpha chain variable domain of TCR clone 130412 (TRAV21, TRAJ24)
CAARSSTDSWGKLQF

SEQ ID NO: 260824 - protein, 15 aa, Homo sapiens
  CDR3 for beta chain variable domain of TCR clone 130412 (TRBV5-1, TRBJ2-7)
CASSLYPDGGYEQYF

SEQ ID NO: 260825 - protein, 14 aa, Homo sapiens
  CDR3 for alpha chain variable domain of TCR clone 130413 (TRAV1-1, TRAJ27)
CAVIYNINAGKSTF

SEQ ID NO: 260826 - protein, 15 aa, Homo sapiens
  CDR3 for beta chain variable domain of TCR clone 130413 (TRBV7-2, TRBJ2-1)
CASSSGLAGGNEQFF

SEQ ID NO: 260827 - protein, 12 aa, Homo sapiens
  CDR3 for alpha chain variable domain of TCR clone 130414 (TRAV12-2, TRAJ44)
CADTGTASKLTF

SEQ ID NO: 260828 - protein, 19 aa, Homo sapiens
  CDR3 for beta chain variable domain of TCR clone 130414 (TRBV20-1, TRBJ1-1)
CSARGQGALTGTLELSLDK

SEQ ID NO: 260829 - protein, 12 aa, Homo sapiens
  CDR3 for alpha chain variable domain of TCR clone 130415 (TRAV16, TRAJ10)
CSRTGGGNKLTF

SEQ ID NO: 260830 - protein, 12 aa, Homo sapiens
  CDR3 for beta chain variable domain of TCR clone 130415 (TRBV11-3, TRBJ1-1)
CASSHRQGGAFF

SEQ ID NO: 260831 - protein, 12 aa, Homo sapiens
  CDR3 for alpha chain variable domain of TCR clone 130416 (TRAV26-2, TRAJ21)
CILKGNFNKFYF

SEQ ID NO: 260832 - protein, 14 aa, Homo sapiens
  CDR3 for beta chain variable domain of TCR clone 130416 (TRBV7-9, TRBJ1-1)
CASTPLQSYPEAFF

SEQ ID NO: 260833 - protein, 13 aa, Homo sapiens
  CDR3 for alpha chain variable domain of TCR clone 130417 (TRAV12-2, TRAJ20)
CAVYPSNDYKLSF

SEQ ID NO: 260834 - protein, 13 aa, Homo sapiens
  CDR3 for beta chain variable domain of TCR clone 130417 (TRBV10-3, TRBJ2-5)
CAMTSGAGETQYF

SEQ ID NO: 260835 - protein, 16 aa, Homo sapiens
  CDR3 for alpha chain variable domain of TCR clone 130418 (TRAV17, TRAJ35)
CATAEGGIGFGNVLHC

SEQ ID NO: 260836 - protein, 16 aa, Homo sapiens
  CDR3 for beta chain variable domain of TCR clone 130418 (TRBV6-5, TRBJ2-7)
CASSSDPTSGFYERYF

SEQ ID NO: 260837 - protein, 11 aa, Homo sapiens
  CDR3 for alpha chain variable domain of TCR clone 130419 (TRAV21, TRAJ4)
HVSGGYHKLIF

SEQ ID NO: 260838 - protein, 13 aa, Homo sapiens
  CDR3 for beta chain variable domain of TCR clone 130419 (TRBV7-3, TRBJ2-5)
CASSLTAGETQYF

SEQ ID NO: 260839 - protein, 15 aa, Homo sapiens
  CDR3 for alpha chain variable domain of TCR clone 130420 (TRAV8-3, TRAJ27)
CAVGPSKTNAGKSTF

SEQ ID NO: 260840 - protein, 16 aa, Homo sapiens
  CDR3 for beta chain variable domain of TCR clone 130420 (TRBV7-2, TRBJ2-7)
CASSLDLSGGAYEQYF

SEQ ID NO: 260841 - protein, 12 aa, Homo sapiens
  CDR3 for alpha chain variable domain of TCR clone 130421 (TRAV8-3, TRAJ20)
CAVGANDYKLSF

SEQ ID NO: 260842 - protein, 15 aa, Homo sapiens
  CDR3 for beta chain variable domain of TCR clone 130421 (TRBV11-2, TRBJ2-1)
CASSLGTSGLNEQCF

SEQ ID NO: 260843 - protein, 13 aa, Homo sapiens
  CDR3 for alpha chain variable domain of TCR clone 130422 (TRAV13-1, TRAJ40)
CAAISPGTYKYIF

SEQ ID NO: 260844 - protein, 15 aa, Homo sapiens
  CDR3 for beta chain variable domain of TCR clone 130422 (TRBV27, TRBJ2-1)
CASSNGGGSSNEQFF

SEQ ID NO: 260845 - protein, 14 aa, Homo sapiens
  CDR3 for alpha chain variable domain of TCR clone 130423 (TRAV29/DV5, TRAJ45)
CAASFRGGPDGLTF

SEQ ID NO: 260846 - protein, 11 aa, Homo sapiens
  CDR3 for beta chain variable domain of TCR clone 130423 (TRBV11-2, TRBJ2-2)
CASSLPGELFF

SEQ ID NO: 260847 - protein, 12 aa, Homo sapiens
  CDR3 for alpha chain variable domain of TCR clone 130424 (TRAV2, TRAJ10)
CASTGGGNKLTF

SEQ ID NO: 260848 - protein, 15 aa, Homo sapiens
  CDR3 for beta chain variable domain of TCR clone 130424 (TRBV4-1, TRBJ1-2)
CASSQGQGAAYGYTF

SEQ ID NO: 260849 - protein, 13 aa, Homo sapiens
  CDR3 for alpha chain variable domain of TCR clone 130425 (TRAV2, TRAJ40)
CAVVTSGTYKYIF

SEQ ID NO: 260850 - protein, 14 aa, Homo sapiens
  CDR3 for beta chain variable domain of TCR clone 130425 (TRBV4-3, TRBJ2-2)
CASSQGHVTGELFF

SEQ ID NO: 260851 - protein, 14 aa, Homo sapiens
  CDR3 for alpha chain variable domain of TCR clone 130426 (TRAV2, TRAJ9)
CAVEDQSGGFKTIF

SEQ ID NO: 260852 - protein, 17 aa, Homo sapiens
  CDR3 for beta chain variable domain of TCR clone 130426 (TRBV7-8, TRBJ2-6)
CASSAGTGGAGANVLTF

SEQ ID NO: 260853 - protein, 13 aa, Homo sapiens
  CDR3 for alpha chain variable domain of TCR clone 130427 (TRAV35, TRAJ42)
CAGFPGSQGTLIF

SEQ ID NO: 260854 - protein, 14 aa, Homo sapiens
  CDR3 for beta chain variable domain of TCR clone 130427 (TRBV4-1, TRBJ2-2)
CASSQAVNTGELFF

SEQ ID NO: 260855 - protein, 14 aa, Homo sapiens
  CDR3 for alpha chain variable domain of TCR clone 130428 (TRAV26-1, TRAJ38)
CIADNAGNNRKLIW

SEQ ID NO: 260856 - protein, 13 aa, Homo sapiens
  CDR3 for beta chain variable domain of TCR clone 130428 (TRBV20-1, TRBJ1-1)
CSPRGGGNTEAFF

SEQ ID NO: 260857 - protein, 13 aa, Homo sapiens
  CDR3 for alpha chain variable domain of TCR clone 130429 (TRAV13-2, TRAJ13)
CAKRPGGYQKVTF

SEQ ID NO: 260858 - protein, 14 aa, Homo sapiens
  CDR3 for beta chain variable domain of TCR clone 130429 (TRBV23-1, TRBJ2-5)
CASSFLRSQETQYF

SEQ ID NO: 260859 - protein, 11 aa, Homo sapiens
  CDR3 for alpha chain variable domain of TCR clone 130430 (TRAV1-1, TRAJ23)
CAVRPGGKLIF

SEQ ID NO: 260860 - protein, 13 aa, Homo sapiens
  CDR3 for beta chain variable domain of TCR clone 130430 (TRBV7-3, TRBJ1-1)
CASSQDWGAEAFF

SEQ ID NO: 260861 - protein, 14 aa, Homo sapiens
  CDR3 for alpha chain variable domain of TCR clone 130431 (TRAV12-2, TRAJ13)
CAANPSGGYQKVTF

SEQ ID NO: 260862 - protein, 13 aa, Homo sapiens
  CDR3 for beta chain variable domain of TCR clone 130431 (TRBV20-1, TRBJ1-6)
CSAKLGGTSPLHF

SEQ ID NO: 260863 - protein, 16 aa, Homo sapiens
  CDR3 for alpha chain variable domain of TCR clone 130432 (TRAV30, TRAJ24)
CGTEIVDADSWGKFKF

SEQ ID NO: 260864 - protein, 14 aa, Homo sapiens
  CDR3 for beta chain variable domain of TCR clone 130432 (TRBV12-5, TRBJ2-5)
RASGSRTHQETQYF

SEQ ID NO: 260865 - protein, 15 aa, Homo sapiens
  CDR3 for alpha chain variable domain of TCR clone 130433 (TRAV3, TRAJ3)
CAVRDGHSSASKIIF

SEQ ID NO: 260866 - protein, 14 aa, Homo sapiens
  CDR3 for beta chain variable domain of TCR clone 130433 (TRBV28, TRBJ1-4)
CASSFGTFDGKLFF

SEQ ID NO: 260867 - protein, 13 aa, Homo sapiens
  CDR3 for alpha chain variable domain of TCR clone 130434 (TRAV12-3, TRAJ36)
CAGPRIGANNLFF

SEQ ID NO: 260868 - protein, 15 aa, Homo sapiens
  CDR3 for beta chain variable domain of TCR clone 130434 (TRBV28, TRBJ2-5)
CASSPPWSYQETQYF

SEQ ID NO: 260869 - protein, 16 aa, Homo sapiens
  CDR3 for alpha chain variable domain of TCR clone 130435 (TRAV30, TRAJ24)
CGTEIVDADSWGKFQY

SEQ ID NO: 260870 - protein, 12 aa, Homo sapiens
  CDR3 for beta chain variable domain of TCR clone 130435 (TRBV11-2, TRBJ2-2)
CASSLGGGELFF

SEQ ID NO: 260871 - protein, 16 aa, Homo sapiens
  CDR3 for alpha chain variable domain of TCR clone 130436 (TRAV3, TRAJ5)
CAVRNLMNTGRRALTF

SEQ ID NO: 260872 - protein, 16 aa, Homo sapiens
  CDR3 for beta chain variable domain of TCR clone 130436 (TRBV12-5, TRBJ2-5)
CASGPRTSGNQETQYF

SEQ ID NO: 260873 - protein, 16 aa, Homo sapiens
  CDR3 for alpha chain variable domain of TCR clone 130437 (TRAV12-3, TRAJ53)
CAMSPGSGGSNYKLTF

SEQ ID NO: 260874 - protein, 16 aa, Homo sapiens
  CDR3 for beta chain variable domain of TCR clone 130437 (TRBV19, TRBJ2-2)
CASRSPGTGATGELFF

SEQ ID NO: 260875 - protein, 16 aa, Homo sapiens
  CDR3 for alpha chain variable domain of TCR clone 130438 (TRAV20, TRAJ10)
CAVLRGLTGGGKKLTF

SEQ ID NO: 260876 - protein, 14 aa, Homo sapiens
  CDR3 for beta chain variable domain of TCR clone 130438 (TRBV19, TRBJ1-5)
CASRAPDSFLSQHF

SEQ ID NO: 260877 - protein, 15 aa, Homo sapiens
  CDR3 for alpha chain variable domain of TCR clone 130439 (TRAV12-1, TRAJ44)
CVVFVNTGTASKLTF

SEQ ID NO: 260878 - protein, 14 aa, Homo sapiens
  CDR3 for beta chain variable domain of TCR clone 130439 (TRBV18, TRBJ2-5)
CASSPPGHQETQYF

SEQ ID NO: 260879 - protein, 12 aa, Homo sapiens
  CDR3 for alpha chain variable domain of TCR clone 130440 (TRAV12-3, TRAJ17)
CAMTLTGNKLTF

SEQ ID NO: 260880 - protein, 16 aa, Homo sapiens
  CDR3 for beta chain variable domain of TCR clone 130440 (TRBV11-2, TRBJ2-2)
CASSLRTGNLIGELFF

SEQ ID NO: 260881 - protein, 12 aa, Homo sapiens
  CDR3 for alpha chain variable domain of TCR clone 130441 (TRAV1-1, TRAJ8)
CAGGTGFQQLVF

SEQ ID NO: 260882 - protein, 16 aa, Homo sapiens
  CDR3 for beta chain variable domain of TCR clone 130441 (TRBV12-5, TRBJ2-5)
CASGPRTSGNQETQYF

SEQ ID NO: 260883 - protein, 14 aa, Homo sapiens
  CDR3 for alpha chain variable domain of TCR clone 130442 (TRAV26-1, TRAJ29)
CIVRVEPGNTPLFF

SEQ ID NO: 260884 - protein, 14 aa, Homo sapiens
  CDR3 for beta chain variable domain of TCR clone 130442 (TRBV25-1, TRBJ1-1)
CASTHLGGNTEAFF

SEQ ID NO: 260885 - protein, 16 aa, Homo sapiens
  CDR3 for alpha chain variable domain of TCR clone 130443 (TRAV12-3, TRAJ53)
CAMSPGSGGSNYKLTF

SEQ ID NO: 260886 - protein, 11 aa, Homo sapiens
  CDR3 for beta chain variable domain of TCR clone 130443 (TRBV29-1, TRBJ2-5)
CSEDRTETQHF

SEQ ID NO: 260887 - protein, 17 aa, Homo sapiens
  CDR3 for alpha chain variable domain of TCR clone 130444 (TRAV3, TRAJ6)
CAVREGPRAGGSYIPTF

SEQ ID NO: 260888 - protein, 20 aa, Homo sapiens
  CDR3 for beta chain variable domain of TCR clone 130444 (TRBV28, TRBJ2-1)
CASTPIGRSPGLAGGNEQFF

SEQ ID NO: 260889 - protein, 16 aa, Homo sapiens
  CDR3 for alpha chain variable domain of TCR clone 130445 (TRAV12-2, TRAJ52)
CRLANAGGTGYGKLTF

SEQ ID NO: 260890 - protein, 13 aa, Homo sapiens
  CDR3 for beta chain variable domain of TCR clone 130445 (TRBV10-3, TRBJ2-7)
CASKLAVNYEQYF

SEQ ID NO: 260891 - protein, 17 aa, Homo sapiens
  CDR3 for alpha chain variable domain of TCR clone 130446 (TRAV8-6, TRAJ58)
CAVSSWVGETSGSRWTF

SEQ ID NO: 260892 - protein, 15 aa, Homo sapiens
  CDR3 for beta chain variable domain of TCR clone 130446 (TRBV20-1, TRBJ2-7)
CSARDRVSGMDEQYF

SEQ ID NO: 260893 - protein, 16 aa, Homo sapiens
  CDR3 for alpha chain variable domain of TCR clone 130447 (TRAV3, TRAJ21)
CVVRDIERGNFNKFYF

SEQ ID NO: 260894 - protein, 16 aa, Homo sapiens
  CDR3 for beta chain variable domain of TCR clone 130447 (TRBV12-4, TRBJ1-5)
CASSRPVGGSNQPQHF

SEQ ID NO: 260895 - protein, 16 aa, Homo sapiens
  CDR3 for alpha chain variable domain of TCR clone 130448 (TRAV12-2, TRAJ10)
CAVNRVLTGGGNKLTF

SEQ ID NO: 260896 - protein, 12 aa, Homo sapiens
  CDR3 for beta chain variable domain of TCR clone 130448 (TRBV28, TRBJ2-7)
CASSFSTYEQYF

SEQ ID NO: 260897 - protein, 13 aa, Homo sapiens
  CDR3 for alpha chain variable domain of TCR clone 130449 (TRAV3, TRAJ20)
CAVRDTPRYKLSF

SEQ ID NO: 260898 - protein, 15 aa, Homo sapiens
  CDR3 for beta chain variable domain of TCR clone 130449 (TRBV5-4, TRBJ2-1)
CASSREGLPYNEQFF

SEQ ID NO: 260899 - protein, 14 aa, Homo sapiens
  CDR3 for alpha chain variable domain of TCR clone 130450 (TRAV13-2, TRAJ41)
CAEYLSNSGYALNF

SEQ ID NO: 260900 - protein, 17 aa, Homo sapiens
  CDR3 for beta chain variable domain of TCR clone 130450 (TRBV4-3, TRBJ1-2)
CASSSRLQAGGSVGYTF

SEQ ID NO: 260901 - protein, 15 aa, Homo sapiens
  CDR3 for alpha chain variable domain of TCR clone 130451 (TRAV2, TRAJ9)
CAVEDRGTGGFKTIF

SEQ ID NO: 260902 - protein, 16 aa, Homo sapiens
  CDR3 for beta chain variable domain of TCR clone 130451 (TRBV24-1, TRBJ2-3)
YATSDPGTGATDTQYF

SEQ ID NO: 260903 - protein, 20 aa, Homo sapiens
  CDR3 for alpha chain variable domain of TCR clone 130452 (TRAV12-1, TRAJ42)
SSVIQPPTSVKGGSQGNLIF

SEQ ID NO: 260904 - protein, 15 aa, Homo sapiens
  CDR3 for beta chain variable domain of TCR clone 130452 (TRBV27, TRBJ2-1)
CASSNGGGSSNEQFF

SEQ ID NO: 260905 - protein, 15 aa, Homo sapiens
  CDR3 for alpha chain variable domain of TCR clone 130453 (TRAV13-1, TRAJ57)
CSASNTQGGSEKLVF

SEQ ID NO: 260906 - protein, 16 aa, Homo sapiens
  CDR3 for beta chain variable domain of TCR clone 130453 (TRBV19, TRBJ2-1)
CASSKAGPSSYNEQFF

SEQ ID NO: 260907 - protein, 14 aa, Homo sapiens
  CDR3 for alpha chain variable domain of TCR clone 130454 (TRAV4, TRAJ20)
CPVGDFINDYKLSF

SEQ ID NO: 260908 - protein, 15 aa, Homo sapiens
  CDR3 for beta chain variable domain of TCR clone 130454 (TRBV9, TRBJ1-6)
CASSVAGTGDSPLHF

SEQ ID NO: 260909 - protein, 12 aa, Homo sapiens
  CDR3 for alpha chain variable domain of TCR clone 130455 (TRAV2, TRAJ31)
CAVEDNNARLMF

SEQ ID NO: 260910 - protein, 19 aa, Homo sapiens
  CDR3 for beta chain variable domain of TCR clone 130455 (TRBV25-1, TRBJ2-2)
CAILVYRVDRGRKTGELFF

SEQ ID NO: 260911 - protein, 16 aa, Homo sapiens
  CDR3 for alpha chain variable domain of TCR clone 130456 (TRAV8-1, TRAJ42)
CAVTSRYGGSQGTLIF

SEQ ID NO: 260912 - protein, 12 aa, Homo sapiens
  CDR3 for beta chain variable domain of TCR clone 130456 (TRBV6-3, TRBJ2-7)
CASSLGRRGLYF

SEQ ID NO: 260913 - protein, 14 aa, Homo sapiens
  CDR3 for alpha chain variable domain of TCR clone 130457 (TRAV38-1, TRAJ29)
CAFITPSGNTPLVF

SEQ ID NO: 260914 - protein, 19 aa, Homo sapiens
  CDR3 for beta chain variable domain of TCR clone 130457 (TRBV25-1, TRBJ2-2)
CAILVYRVDRGRKTGELFF

SEQ ID NO: 260915 - protein, 10 aa, Homo sapiens
  CDR3 for alpha chain variable domain of TCR clone 130458 (TRAV16, TRAJ37)
CALRPGKLIF

SEQ ID NO: 260916 - protein, 15 aa, Homo sapiens
  CDR3 for beta chain variable domain of TCR clone 130458 (TRBV27, TRBJ1-1)
CASRIEYGGDTEAFF

SEQ ID NO: 260917 - protein, 14 aa, Homo sapiens
  CDR3 for alpha chain variable domain of TCR clone 130459 (TRAV38-1, TRAJ40)
CALRPTSGTYKYIF

SEQ ID NO: 260918 - protein, 17 aa, Homo sapiens
  CDR3 for beta chain variable domain of TCR clone 130459 (TRBV11-2, TRBJ2-3)
CQQLRGGLAGAPNTQYF

SEQ ID NO: 260919 - protein, 14 aa, Homo sapiens
  CDR3 for alpha chain variable domain of TCR clone 130460 (TRAV2, TRAJ3)
CAVDRYSSASKIIF

SEQ ID NO: 260920 - protein, 14 aa, Homo sapiens
  CDR3 for beta chain variable domain of TCR clone 130460 (TRBV11-2, TRBJ2-7)
CASSSTGEGYEQYF

SEQ ID NO: 260921 - protein, 19 aa, Homo sapiens
  CDR3 for alpha chain variable domain of TCR clone 130461 (TRAV26-1, TRAJ52)
CIVRAHRNASGTSYGKLTF

SEQ ID NO: 260922 - protein, 15 aa, Homo sapiens
  CDR3 for beta chain variable domain of TCR clone 130461 (TRBV29-1, TRBJ2-1)
CSGRDRKSSYNEQFF

SEQ ID NO: 260923 - protein, 16 aa, Homo sapiens
  CDR3 for alpha chain variable domain of TCR clone 130462 (TRAV17, TRAJ52)
CATSNAGGSSYGKLTF

SEQ ID NO: 260924 - protein, 13 aa, Homo sapiens
  CDR3 for beta chain variable domain of TCR clone 130462 (TRBV27, TRBJ1-6)
CASSLVLVSPLHF

SEQ ID NO: 260925 - protein, 15 aa, Homo sapiens
  CDR3 for alpha chain variable domain of TCR clone 130463 (TRAV12-1, TRAJ44)
CVADLPTGTASELTF

SEQ ID NO: 260926 - protein, 13 aa, Homo sapiens
  CDR3 for beta chain variable domain of TCR clone 130463 (TRBV6-5, TRBJ2-5)
CASSPQGGETQYF

SEQ ID NO: 260927 - protein, 18 aa, Homo sapiens
  CDR3 for alpha chain variable domain of TCR clone 130464 (TRAV21, TRAJ52)
CAVRPSPAGGTSYGKLTF

SEQ ID NO: 260928 - protein, 19 aa, Homo sapiens
  CDR3 for beta chain variable domain of TCR clone 130464 (TRBV4-3, TRBJ2-7)
CASSQEFIGWQVTPYEQYF

SEQ ID NO: 260929 - protein, 14 aa, Homo sapiens
  CDR3 for alpha chain variable domain of TCR clone 130465 (TRAV1-2, TRAJ16)
CAVNRFSDGQKLLF

SEQ ID NO: 260930 - protein, 13 aa, Homo sapiens
  CDR3 for beta chain variable domain of TCR clone 130465 (TRBV7-9, TRBJ1-2)
CANSLKQNYGYTF

SEQ ID NO: 260931 - protein, 15 aa, Homo sapiens
  CDR3 for alpha chain variable domain of TCR clone 130466 (TRAV26-1, TRAJ15)
CIVRAANQAGTALIF

SEQ ID NO: 260932 - protein, 15 aa, Homo sapiens
  CDR3 for beta chain variable domain of TCR clone 130466 (TRBV20-1, TRBJ1-1)
CSARSAATSNTEAVF

SEQ ID NO: 260933 - protein, 17 aa, Homo sapiens
  CDR3 for alpha chain variable domain of TCR clone 130467 (TRAV3, TRAJ6)
CAVRDGPRAGGSYIPTF

SEQ ID NO: 260934 - protein, 18 aa, Homo sapiens
  CDR3 for beta chain variable domain of TCR clone 130467 (TRBV7-2, TRBJ2-7)
CASSLAQGLRGSSYEQYF

SEQ ID NO: 260935 - protein, 15 aa, Homo sapiens
  CDR3 for alpha chain variable domain of TCR clone 130468 (TRAV12-3, TRAJ6)
CAMGATTGGSYIPTF

SEQ ID NO: 260936 - protein, 17 aa, Homo sapiens
  CDR3 for beta chain variable domain of TCR clone 130468 (TRBV13, TRBJ2-3)
CASSLSRVAGGRNTQYF

SEQ ID NO: 260937 - protein, 14 aa, Homo sapiens
  CDR3 for alpha chain variable domain of TCR clone 130469 (TRAV8-6, TRAJ40)
CAVSVSSGTYKYIF

SEQ ID NO: 260938 - protein, 15 aa, Homo sapiens
  CDR3 for beta chain variable domain of TCR clone 130469 (TRBV28, TRBJ2-7)
CASSPGGRGFYEQYF

SEQ ID NO: 260939 - protein, 16 aa, Homo sapiens
  CDR3 for alpha chain variable domain of TCR clone 130470 (TRAV29/DV5, TRAJ30)
QCTSVQQANRDDKIIF

SEQ ID NO: 260940 - protein, 13 aa, Homo sapiens
  CDR3 for beta chain variable domain of TCR clone 130470 (TRBV12-5, TRBJ2-3)
CASQNRGTDTQYC

SEQ ID NO: 260941 - protein, 14 aa, Homo sapiens
  CDR3 for alpha chain variable domain of TCR clone 130471 (TRAV8-4, TRAJ9)
CAVRINTGGFKTIF

SEQ ID NO: 260942 - protein, 15 aa, Homo sapiens
  CDR3 for beta chain variable domain of TCR clone 130471 (TRBV10-2, TRBJ2-6)
CASSEEGTGANVLTF

SEQ ID NO: 260943 - protein, 11 aa, Homo sapiens
  CDR3 for alpha chain variable domain of TCR clone 130472 (TRAV2, TRAJ33)
CAVDSNYQLIW

SEQ ID NO: 260944 - protein, 15 aa, Homo sapiens
  CDR3 for beta chain variable domain of TCR clone 130472 (TRBV28, TRBJ2-5)
CASSPGQGSIETQYF

SEQ ID NO: 260945 - protein, 12 aa, Homo sapiens
  CDR3 for alpha chain variable domain of TCR clone 130473 (TRAV36/DV7, TRAJ54)
CAVVRGAQKLVF

SEQ ID NO: 260946 - protein, 14 aa, Homo sapiens
  CDR3 for beta chain variable domain of TCR clone 130473 (TRBV7-6, TRBJ2-1)
CASSLGGGADEQFF

SEQ ID NO: 260947 - protein, 11 aa, Homo sapiens
  CDR3 for alpha chain variable domain of TCR clone 130474 (TRAV21, TRAJ11)
CAVNGYSTLTF

SEQ ID NO: 260948 - protein, 15 aa, Homo sapiens
  CDR3 for beta chain variable domain of TCR clone 130474 (TRBV6-3, TRBJ2-7)
CASSSPGTVFYEQYS

SEQ ID NO: 260949 - protein, 14 aa, Homo sapiens
  CDR3 for alpha chain variable domain of TCR clone 130475 (TRAV1-2, TRAJ16)
CAVNRFSDGQKLLF

SEQ ID NO: 260950 - protein, 15 aa, Homo sapiens
  CDR3 for beta chain variable domain of TCR clone 130475 (TRBV15, TRBJ1-4)
CATSRDMGSYEKLFF

SEQ ID NO: 260951 - protein, 14 aa, Homo sapiens
  CDR3 for alpha chain variable domain of TCR clone 130476 (TRAV23/DV6, TRAJ22)
CAASVSGSARQLTF

SEQ ID NO: 260952 - protein, 16 aa, Homo sapiens
  CDR3 for beta chain variable domain of TCR clone 130476 (TRBV19, TRBJ2-2)
CASSIPGQGLAGELFF

SEQ ID NO: 260953 - protein, 11 aa, Homo sapiens
  CDR3 for alpha chain variable domain of TCR clone 130477 (TRAV12-3, TRAJ49)
CAMSSGNQFHF

SEQ ID NO: 260954 - protein, 17 aa, Homo sapiens
  CDR3 for beta chain variable domain of TCR clone 130477 (TRBV5-7, TRBJ2-7)
CASSLWRVLAGSYEQYF

SEQ ID NO: 260955 - protein, 12 aa, Homo sapiens
  CDR3 for alpha chain variable domain of TCR clone 130478 (TRAV3, TRAJ20)
CAVRDPDYKLSF

SEQ ID NO: 260956 - protein, 14 aa, Homo sapiens
  CDR3 for beta chain variable domain of TCR clone 130478 (TRBV4-3, TRBJ2-1)
CASGLDRAYNEQFF

SEQ ID NO: 260957 - protein, 13 aa, Homo sapiens
  CDR3 for alpha chain variable domain of TCR clone 130479 (TRAV27, TRAJ49)
CAPRPYTGNQFYF

SEQ ID NO: 260958 - protein, 13 aa, Homo sapiens
  CDR3 for beta chain variable domain of TCR clone 130479 (TRBV28, TRBJ2-5)
CASSFAGGETQYF

SEQ ID NO: 260959 - protein, 12 aa, Homo sapiens
  CDR3 for alpha chain variable domain of TCR clone 130480 (TRAV13-1, TRAJ21)
CAAKEGFNKFYF

SEQ ID NO: 260960 - protein, 16 aa, Homo sapiens
  CDR3 for beta chain variable domain of TCR clone 130480 (TRBV11-2, TRBJ2-1)
CASSPRLAGVYNEQFF

SEQ ID NO: 260961 - protein, 13 aa, Homo sapiens
  CDR3 for alpha chain variable domain of TCR clone 130481 (TRAV21, TRAJ15)
CAVANQAGTALIF

SEQ ID NO: 260962 - protein, 14 aa, Homo sapiens
  CDR3 for beta chain variable domain of TCR clone 130481 (TRBV27, TRBJ2-2)
CASSLGAATVELFF

SEQ ID NO: 260963 - protein, 17 aa, Homo sapiens
  CDR3 for alpha chain variable domain of TCR clone 130482 (TRAV38-2/DV8, TRAJ23)
CALSRKLIFGQGAELSV

SEQ ID NO: 260964 - protein, 17 aa, Homo sapiens
  CDR3 for beta chain variable domain of TCR clone 130482 (TRBV5-4, TRBJ2-1)
CASSSAGGRGPYNEQFF

SEQ ID NO: 260965 - protein, 14 aa, Homo sapiens
  CDR3 for alpha chain variable domain of TCR clone 130483 (TRAV12-3, TRAJ58)
CAMSTETSCSRLTF

SEQ ID NO: 260966 - protein, 11 aa, Homo sapiens
  CDR3 for beta chain variable domain of TCR clone 130483 (TRBV29-1, TRBJ2-5)
CSEDRTGTQYF

SEQ ID NO: 260967 - protein, 13 aa, Homo sapiens
  CDR3 for alpha chain variable domain of TCR clone 130484 (TRAV6, TRAJ33)
CALPMDSNYQLIW

SEQ ID NO: 260968 - protein, 15 aa, Homo sapiens
  CDR3 for beta chain variable domain of TCR clone 130484 (TRBV11-2, TRBJ2-2)
YASRGLAANTGELFF

SEQ ID NO: 260969 - protein, 13 aa, Homo sapiens
  CDR3 for alpha chain variable domain of TCR clone 130485 (TRAV3, TRAJ3)
CAVRALGASKIIF

SEQ ID NO: 260970 - protein, 13 aa, Homo sapiens
  CDR3 for beta chain variable domain of TCR clone 130485 (TRBV12-4, TRBJ2-5)
CQQSFGGGETQYF

SEQ ID NO: 260971 - protein, 13 aa, Homo sapiens
  CDR3 for alpha chain variable domain of TCR clone 130486 (TRAV8-4, TRAJ10)
CAASTGGGNKLTF

SEQ ID NO: 260972 - protein, 15 aa, Homo sapiens
  CDR3 for beta chain variable domain of TCR clone 130486 (TRBV2, TRBJ2-3)
CASSDFEKATDTQYF

SEQ ID NO: 260973 - protein, 12 aa, Homo sapiens
  CDR3 for alpha chain variable domain of TCR clone 130487 (TRAV13-2, TRAJ23)
CAERHRGGKLIF

SEQ ID NO: 260974 - protein, 15 aa, Homo sapiens
  CDR3 for beta chain variable domain of TCR clone 130487 (TRBV5-1, TRBJ2-2)
CASSSQGGNTGELFF

SEQ ID NO: 260975 - protein, 12 aa, Homo sapiens
  CDR3 for alpha chain variable domain of TCR clone 130488 (TRAV12-3, TRAJ17)
CATTLTGNKLTF

SEQ ID NO: 260976 - protein, 14 aa, Homo sapiens
  CDR3 for beta chain variable domain of TCR clone 130488 (TRBV11-2, TRBJ2-5)
CASRPLAGRETQYF

SEQ ID NO: 260977 - protein, 16 aa, Homo sapiens
  CDR3 for alpha chain variable domain of TCR clone 130489 (TRAV30, TRAJ24)
CGTEIVDADSWGKFQF

SEQ ID NO: 260978 - protein, 15 aa, Homo sapiens
  CDR3 for beta chain variable domain of TCR clone 130489 (TRBV28, TRBJ2-4)
CAAGSGTLLMGIQYF

SEQ ID NO: 260979 - protein, 15 aa, Homo sapiens
  CDR3 for alpha chain variable domain of TCR clone 130490 (TRAV2, TRAJ22)
CAVPSRGGFCKATDL

SEQ ID NO: 260980 - protein, 14 aa, Homo sapiens
  CDR3 for beta chain variable domain of TCR clone 130490 (TRBV7-6, TRBJ2-3)
CASSLGTVTDTQYF

SEQ ID NO: 260981 - protein, 13 aa, Homo sapiens
  CDR3 for alpha chain variable domain of TCR clone 130491 (TRAV12-2, TRAJ34)
FAVRGYNTDKLIF

SEQ ID NO: 260982 - protein, 15 aa, Homo sapiens
  CDR3 for beta chain variable domain of TCR clone 130491 (TRBV28, TRBJ2-1)
CASRTGAGVIARQFF

SEQ ID NO: 260983 - protein, 14 aa, Homo sapiens
  CDR3 for alpha chain variable domain of TCR clone 130492 (TRAV1-2, TRAJ16)
CAVNRFSDGQKLLF

SEQ ID NO: 260984 - protein, 15 aa, Homo sapiens
  CDR3 for beta chain variable domain of TCR clone 130492 (TRBV9, TRBJ1-6)
RASNVAGTGDSPLHF

SEQ ID NO: 260985 - protein, 18 aa, Homo sapiens
  CDR3 for alpha chain variable domain of TCR clone 130493 (TRAV3, TRAJ42)
CAVRDPENYGGSQGNLIF

SEQ ID NO: 260986 - protein, 15 aa, Homo sapiens
  CDR3 for beta chain variable domain of TCR clone 130493 (TRBV6-3, TRBJ2-7)
CASSSPGTVFYEQYF

SEQ ID NO: 260987 - protein, 15 aa, Homo sapiens
  CDR3 for alpha chain variable domain of TCR clone 130494 (TRAV12-3, TRAJ13)
CAMSARSGGYQKVTF

SEQ ID NO: 260988 - protein, 15 aa, Homo sapiens
  CDR3 for beta chain variable domain of TCR clone 130494 (TRBV7-9, TRBJ1-6)
CASSSPGRGNSPLHF

SEQ ID NO: 260989 - protein, 15 aa, Homo sapiens
  CDR3 for alpha chain variable domain of TCR clone 130495 (TRAV26-1, TRAJ22)
CIVRVSFWFCKATDL

SEQ ID NO: 260990 - protein, 15 aa, Homo sapiens
  CDR3 for beta chain variable domain of TCR clone 130495 (TRBV7-2, TRBJ2-1)
CASTHGTGIYNEQFF

SEQ ID NO: 260991 - protein, 15 aa, Homo sapiens
  CDR3 for alpha chain variable domain of TCR clone 130496 (TRAV17, TRAJ57)
CATGPSQGGSEKLVF

SEQ ID NO: 260992 - protein, 15 aa, Homo sapiens
  CDR3 for beta chain variable domain of TCR clone 130496 (TRBV25-1, TRBJ1-4)
CASSKRIATNEKLFF

SEQ ID NO: 260993 - protein, 13 aa, Homo sapiens
  CDR3 for alpha chain variable domain of TCR clone 130497 (TRAV2, TRAJ15)
CAVASQAGTALLF

SEQ ID NO: 260994 - protein, 16 aa, Homo sapiens
  CDR3 for beta chain variable domain of TCR clone 130497 (TRBV20-1, TRBJ1-4)
CSAPGQGLLTNEKLFF

SEQ ID NO: 260995 - protein, 10 aa, Homo sapiens
  CDR3 for alpha chain variable domain of TCR clone 130498 (TRAV12-3, TRAJ18)
CAMSAEAQPW

SEQ ID NO: 260996 - protein, 13 aa, Homo sapiens
  CDR3 for beta chain variable domain of TCR clone 130498 (TRBV15, TRBJ1-6)
CATSGGLNAPLHF

SEQ ID NO: 260997 - protein, 14 aa, Homo sapiens
  CDR3 for alpha chain variable domain of TCR clone 130499 (TRAV12-1, TRAJ12)
CVVTRMDSSYKLIF

SEQ ID NO: 260998 - protein, 13 aa, Homo sapiens
  CDR3 for beta chain variable domain of TCR clone 130499 (TRBV20-1, TRBJ1-1)
CGARGGGNTEAFF

SEQ ID NO: 260999 - protein, 12 aa, Homo sapiens
  CDR3 for alpha chain variable domain of TCR clone 130500 (TRAV25, TRAJ11)
CAGYLGYSTLTF

SEQ ID NO: 261000 - protein, 13 aa, Homo sapiens
  CDR3 for beta chain variable domain of TCR clone 130500 (TRBV7-9, TRBJ1-2)
CASSLKQNYGYTF

SEQ ID NO: 261001 - protein, 10 aa, Homo sapiens
  CDR3 for alpha chain variable domain of TCR clone 130501 (TRAV23/DV6, TRAJ57)
CAASPTLSQG

SEQ ID NO: 261002 - protein, 17 aa, Homo sapiens
  CDR3 for beta chain variable domain of TCR clone 130501 (TRBV4-2, TRBJ1-1)
CASTQFGGGSGNTEAFF

SEQ ID NO: 261003 - protein, 15 aa, Homo sapiens
  CDR3 for alpha chain variable domain of TCR clone 130502 (TRAV20, TRAJ53)
CAVQAGGGSNYKLTF

SEQ ID NO: 261004 - protein, 12 aa, Homo sapiens
  CDR3 for beta chain variable domain of TCR clone 130502 (TRBV7-2, TRBJ2-1)
CASSPQDIEQFF

SEQ ID NO: 261005 - protein, 15 aa, Homo sapiens
  CDR3 for alpha chain variable domain of TCR clone 130503 (TRAV38-2/DV8, TRAJ31)
CAYRRALNNNARLMF

SEQ ID NO: 261006 - protein, 20 aa, Homo sapiens
  CDR3 for beta chain variable domain of TCR clone 130503 (TRBV19, TRBJ2-1)
CASSISRTVTSTRLNNEQFF

SEQ ID NO: 261007 - protein, 13 aa, Homo sapiens
  CDR3 for alpha chain variable domain of TCR clone 130504 (TRAV26-1, TRAJ29)
CIVRISGNTPLVF

SEQ ID NO: 261008 - protein, 16 aa, Homo sapiens
  CDR3 for beta chain variable domain of TCR clone 130504 (TRBV11-2, TRBJ2-7)
CASSLAPTGVNYEQYF

SEQ ID NO: 261009 - protein, 13 aa, Homo sapiens
  CDR3 for alpha chain variable domain of TCR clone 130505 (TRAV16, TRAJ26)
CALLDNYGQNFVF

SEQ ID NO: 261010 - protein, 17 aa, Homo sapiens
  CDR3 for beta chain variable domain of TCR clone 130505 (TRBV7-9, TRBJ2-2)
CASSLGVAGMNTGELFF

SEQ ID NO: 261011 - protein, 15 aa, Homo sapiens
  CDR3 for alpha chain variable domain of TCR clone 130506 (TRAV2, TRAJ22)
CAVPSRGGSARQLTF

SEQ ID NO: 261012 - protein, 14 aa, Homo sapiens
  CDR3 for beta chain variable domain of TCR clone 130506 (TRBV6-1, TRBJ2-2)
CASVEHIESGELFF

SEQ ID NO: 261013 - protein, 12 aa, Homo sapiens
  CDR3 for alpha chain variable domain of TCR clone 130507 (TRAV13-1, TRAJ49)
CAASMRSNQFYF

SEQ ID NO: 261014 - protein, 14 aa, Homo sapiens
  CDR3 for beta chain variable domain of TCR clone 130507 (TRBV7-2, TRBJ2-1)
CASSPGLAGNEQFF

SEQ ID NO: 261015 - protein, 16 aa, Homo sapiens
  CDR3 for alpha chain variable domain of TCR clone 130508 (TRAV12-2, TRAJ28)
CAVITDSGAGSYQLTL

SEQ ID NO: 261016 - protein, 14 aa, Homo sapiens
  CDR3 for beta chain variable domain of TCR clone 130508 (TRBV25-1, TRBJ1-1)
CASTHLGGNTEAFF

SEQ ID NO: 261017 - protein, 13 aa, Homo sapiens
  CDR3 for alpha chain variable domain of TCR clone 130509 (TRAV35, TRAJ36)
CAGPRIGANNLFF

SEQ ID NO: 261018 - protein, 15 aa, Homo sapiens
  CDR3 for beta chain variable domain of TCR clone 130509 (TRBV28, TRBJ2-5)
FASSPPWSYQETQYF

SEQ ID NO: 261019 - protein, 11 aa, Homo sapiens
  CDR3 for alpha chain variable domain of TCR clone 130510 (TRAV2, TRAJ13)
CASGGYQKVTF

SEQ ID NO: 261020 - protein, 16 aa, Homo sapiens
  CDR3 for beta chain variable domain of TCR clone 130510 (TRBV19, TRBJ2-1)
CVSSKAGPSSYNEQFF

SEQ ID NO: 261021 - protein, 13 aa, Homo sapiens
  CDR3 for alpha chain variable domain of TCR clone 130511 (TRAV3, TRAJ27)
CAVRPLGAGKSTF

SEQ ID NO: 261022 - protein, 15 aa, Homo sapiens
  CDR3 for beta chain variable domain of TCR clone 130511 (TRBV5-1, TRBJ1-1)
CASSLSDLGGTEASF

SEQ ID NO: 261023 - protein, 14 aa, Homo sapiens
  CDR3 for alpha chain variable domain of TCR clone 130512 (TRAV17, TRAJ31)
CATVLRNNSARLMF

SEQ ID NO: 261024 - protein, 14 aa, Homo sapiens
  CDR3 for beta chain variable domain of TCR clone 130512 (TRBV12-4, TRBJ2-5)
CASSLWQKQETQYF

SEQ ID NO: 261025 - protein, 23 aa, Homo sapiens
  CDR3 for alpha chain variable domain of TCR clone 130513 (TRAV26-1, )
CIADNAGNNNIQNPDPAVYHLRD

SEQ ID NO: 261026 - protein, 13 aa, Homo sapiens
  CDR3 for beta chain variable domain of TCR clone 130513 (TRBV20-1, TRBJ1-1)
CSARGGGNTEAFF

SEQ ID NO: 261027 - protein, 15 aa, Homo sapiens
  CDR3 for alpha chain variable domain of TCR clone 130514 (TRAV1-2, TRAJ30)
CAVRPHGNRDDKIIF

SEQ ID NO: 261028 - protein, 13 aa, Homo sapiens
  CDR3 for beta chain variable domain of TCR clone 130514 (TRBV4-1, TRBJ2-7)
CASSQGQACEQYF

SEQ ID NO: 261029 - protein, 17 aa, Homo sapiens
  CDR3 for alpha chain variable domain of TCR clone 130515 (TRAV2, TRAJ22)
ILQVREADAAEQRQLTF

SEQ ID NO: 261030 - protein, 16 aa, Homo sapiens
  CDR3 for beta chain variable domain of TCR clone 130515 (TRBV2, TRBJ2-5)
CAGSETQGVGEETQYF

SEQ ID NO: 261031 - protein, 14 aa, Homo sapiens
  CDR3 for alpha chain variable domain of TCR clone 130516 (TRAV8-3, TRAJ4)
CAVGAAGGYNKLIF

SEQ ID NO: 261032 - protein, 11 aa, Homo sapiens
  CDR3 for beta chain variable domain of TCR clone 130516 (TRBV12-4, TRBJ2-3)
CASTATDTQYF

SEQ ID NO: 261033 - protein, 16 aa, Homo sapiens
  CDR3 for alpha chain variable domain of TCR clone 130517 (TRAV12-3, TRAJ53)
CAMIPGSGGSNYKLTF

SEQ ID NO: 261034 - protein, 16 aa, Homo sapiens
  CDR3 for beta chain variable domain of TCR clone 130517 (TRBV4-2, TRBJ1-1)
CASSQAGFGMNTEAFF

SEQ ID NO: 261035 - protein, 14 aa, Homo sapiens
  CDR3 for alpha chain variable domain of TCR clone 130518 (TRAV23/DV6, TRAJ40)
CAASLTSGTYKYIF

SEQ ID NO: 261036 - protein, 14 aa, Homo sapiens
  CDR3 for beta chain variable domain of TCR clone 130518 (TRBV5-1, TRBJ2-3)
CASSRGQGGGTQYC

SEQ ID NO: 261037 - protein, 11 aa, Homo sapiens
  CDR3 for alpha chain variable domain of TCR clone 130519 (TRAV2, TRAJ13)
CASGGYQKVTF

SEQ ID NO: 261038 - protein, 18 aa, Homo sapiens
  CDR3 for beta chain variable domain of TCR clone 130519 (TRBV19, TRBJ2-6)
CASIGPTSGGSGANVLTV

SEQ ID NO: 261039 - protein, 11 aa, Homo sapiens
  CDR3 for alpha chain variable domain of TCR clone 130520 (TRAV12-3, TRAJ27)
CATANAGKSTF

SEQ ID NO: 261040 - protein, 14 aa, Homo sapiens
  CDR3 for beta chain variable domain of TCR clone 130520 (TRBV12-5, TRBJ2-5)
CASGSRTHQETQYF

SEQ ID NO: 261041 - protein, 15 aa, Homo sapiens
  CDR3 for alpha chain variable domain of TCR clone 130521 (TRAV13-2, TRAJ32)
CAENKDGGATNKLIF

SEQ ID NO: 261042 - protein, 14 aa, Homo sapiens
  CDR3 for beta chain variable domain of TCR clone 130521 (TRBV13, TRBJ2-5)
CASSLGRGQETQYF

SEQ ID NO: 261043 - protein, 16 aa, Homo sapiens
  CDR3 for alpha chain variable domain of TCR clone 130522 (TRAV13-2, TRAJ53)
CAENANSGGSNYKLPF

SEQ ID NO: 261044 - protein, 19 aa, Homo sapiens
  CDR3 for beta chain variable domain of TCR clone 130522 (TRBV28, TRBJ2-7)
CASSYSGTSRLGWVYEQYF

SEQ ID NO: 261045 - protein, 18 aa, Homo sapiens
  CDR3 for alpha chain variable domain of TCR clone 130523 (TRAV21, TRAJ52)
CAVRPSPAGGTSYGKLTF

SEQ ID NO: 261046 - protein, 14 aa, Homo sapiens
  CDR3 for beta chain variable domain of TCR clone 130523 (TRBV4-2, TRBJ2-3)
CASRETRAPGMQYF

SEQ ID NO: 261047 - protein, 16 aa, Homo sapiens
  CDR3 for alpha chain variable domain of TCR clone 130524 (TRAV30, TRAJ24)
CGTEIVDADSWGKFQF

SEQ ID NO: 261048 - protein, 15 aa, Homo sapiens
  CDR3 for beta chain variable domain of TCR clone 130524 (TRBV20-1, TRBJ2-4)
CGARDLTGGPNIQYF

SEQ ID NO: 261049 - protein, 14 aa, Homo sapiens
  CDR3 for alpha chain variable domain of TCR clone 130525 (TRAV13-1, TRAJ53)
CAANSGGSNYKLTF

SEQ ID NO: 261050 - protein, 13 aa, Homo sapiens
  CDR3 for beta chain variable domain of TCR clone 130525 (TRBV7-9, TRBJ2-3)
CASSPGSTDTQYF

SEQ ID NO: 261051 - protein, 14 aa, Homo sapiens
  CDR3 for alpha chain variable domain of TCR clone 130526 (TRAV12-3, TRAJ10)
SHLPLTGGGNKLIF

SEQ ID NO: 261052 - protein, 14 aa, Homo sapiens
  CDR3 for beta chain variable domain of TCR clone 130526 (TRBV7-2, TRBJ2-2)
CASSLNSNTGELFF

SEQ ID NO: 261053 - protein, 15 aa, Homo sapiens
  CDR3 for alpha chain variable domain of TCR clone 130527 (TRAV21, TRAJ52)
CAVRGGGTSYGKLTF

SEQ ID NO: 261054 - protein, 13 aa, Homo sapiens
  CDR3 for beta chain variable domain of TCR clone 130527 (TRBV6-5, TRBJ2-5)
CATAPSHQETQYF

SEQ ID NO: 261055 - protein, 11 aa, Homo sapiens
  CDR3 for alpha chain variable domain of TCR clone 130528 (TRAV12-3, TRAJ43)
CAMSVSNDMRF

SEQ ID NO: 261056 - protein, 11 aa, Homo sapiens
  CDR3 for beta chain variable domain of TCR clone 130528 (TRBV12-4, TRBJ2-3)
YASTATDTQYF

SEQ ID NO: 261057 - protein, 14 aa, Homo sapiens
  CDR3 for alpha chain variable domain of TCR clone 130529 (TRAV20, TRAJ42)
YAVQAGGSQGNLIF

SEQ ID NO: 261058 - protein, 14 aa, Homo sapiens
  CDR3 for beta chain variable domain of TCR clone 130529 (TRBV28, TRBJ1-2)
CASRIQGANYGYTF

SEQ ID NO: 261059 - protein, 15 aa, Homo sapiens
  CDR3 for alpha chain variable domain of TCR clone 130530 (TRAV25, TRAJ53)
CPTSNSGGSNYKLTF

SEQ ID NO: 261060 - protein, 17 aa, Homo sapiens
  CDR3 for beta chain variable domain of TCR clone 130530 (TRBV7-8, TRBJ2-6)
CASSAGTGGAGANVLTF

SEQ ID NO: 261061 - protein, 16 aa, Homo sapiens
  CDR3 for alpha chain variable domain of TCR clone 130531 (TRAV30, TRAJ24)
CGTEIVDADSWGKFQL

SEQ ID NO: 261062 - protein, 14 aa, Homo sapiens
  CDR3 for beta chain variable domain of TCR clone 130531 (TRBV12-5, TRBJ2-5)
CASGSRTHQENQYF

SEQ ID NO: 261063 - protein, 22 aa, Homo sapiens
  CDR3 for alpha chain variable domain of TCR clone 130532 (TRAV21, )
CAVRQDAGNNHIQNPDPSVYQL

SEQ ID NO: 261064 - protein, 16 aa, Homo sapiens
  CDR3 for beta chain variable domain of TCR clone 130532 (TRBV4-2, TRBJ1-1)
CASRPLDGGGDTEAFF

SEQ ID NO: 261065 - protein, 15 aa, Homo sapiens
  CDR3 for alpha chain variable domain of TCR clone 130533 (TRAV14/DV4, TRAJ12)
CAMREERDSSYKLIF

SEQ ID NO: 261066 - protein, 14 aa, Homo sapiens
  CDR3 for beta chain variable domain of TCR clone 130533 (TRBV19, TRBJ2-1)
CASSMGSGATEQFF

SEQ ID NO: 261067 - protein, 15 aa, Homo sapiens
  CDR3 for alpha chain variable domain of TCR clone 130534 (TRAV4, TRAJ17)
CLVGDIGAAGNKLTF

SEQ ID NO: 261068 - protein, 14 aa, Homo sapiens
  CDR3 for beta chain variable domain of TCR clone 130534 (TRBV6-3, TRBJ2-7)
CASSYSVRVYERYF

SEQ ID NO: 261069 - protein, 12 aa, Homo sapiens
  CDR3 for alpha chain variable domain of TCR clone 130535 (TRAV13-2, TRAJ23)
CAEPHRGGKLIF

SEQ ID NO: 261070 - protein, 16 aa, Homo sapiens
  CDR3 for beta chain variable domain of TCR clone 130535 (TRBV20-1, TRBJ1-4)
CSAPGQGLLTNEKLFF

SEQ ID NO: 261071 - protein, 16 aa, Homo sapiens
  CDR3 for alpha chain variable domain of TCR clone 130536 (TRAV13-1, TRAJ18)
CAASRMRGSTLGRLYF

SEQ ID NO: 261072 - protein, 13 aa, Homo sapiens
  CDR3 for beta chain variable domain of TCR clone 130536 (TRBV4-2, TRBJ1-1)
CASSQAGNTEAFF

SEQ ID NO: 261073 - protein, 17 aa, Homo sapiens
  CDR3 for alpha chain variable domain of TCR clone 130537 (TRAV8-2, )
CVISRTLTLPCTSRETL

SEQ ID NO: 261074 - protein, 15 aa, Homo sapiens
  CDR3 for beta chain variable domain of TCR clone 130537 (TRBV27, TRBJ2-3)
CASSLGLAATDTQYF

SEQ ID NO: 261075 - protein, 10 aa, Homo sapiens
  CDR3 for alpha chain variable domain of TCR clone 130538 (TRAV9-2, TRAJ49)
CALTGNQFYF

SEQ ID NO: 261076 - protein, 16 aa, Homo sapiens
  CDR3 for beta chain variable domain of TCR clone 130538 (TRBV19, TRBJ2-3)
CASSPGAASRTDAQYF

SEQ ID NO: 261077 - protein, 13 aa, Homo sapiens
  CDR3 for alpha chain variable domain of TCR clone 130539 (TRAV23/DV6, TRAJ34)
CAASIEGTDKLIF

SEQ ID NO: 261078 - protein, 15 aa, Homo sapiens
  CDR3 for beta chain variable domain of TCR clone 130539 (TRBV5-1, TRBJ2-1)
CASSLVANSYNEQFF

SEQ ID NO: 261079 - protein, 15 aa, Homo sapiens
  CDR3 for alpha chain variable domain of TCR clone 130540 (TRAV35, TRAJ58)
CDGRRQETSGSRLTF

SEQ ID NO: 261080 - protein, 11 aa, Homo sapiens
  CDR3 for beta chain variable domain of TCR clone 130540 (TRBV11-2, TRBJ1-1)
CASSINTEAFF

SEQ ID NO: 261081 - protein, 13 aa, Homo sapiens
  CDR3 for alpha chain variable domain of TCR clone 130541 (TRAV27, TRAJ41)
CAGEGNSGYAPNF

SEQ ID NO: 261082 - protein, 14 aa, Homo sapiens
  CDR3 for beta chain variable domain of TCR clone 130541 (TRBV25-1, TRBJ1-1)
CASTHLGGNTEAFF

SEQ ID NO: 261083 - protein, 11 aa, Homo sapiens
  CDR3 for alpha chain variable domain of TCR clone 130542 (TRAV3, TRAJ21)
CAVGNFNKSYF

SEQ ID NO: 261084 - protein, 16 aa, Homo sapiens
  CDR3 for beta chain variable domain of TCR clone 130542 (TRBV19, TRBJ2-1)
CASSKAGPSSYNEQFF

SEQ ID NO: 261085 - protein, 13 aa, Homo sapiens
  CDR3 for alpha chain variable domain of TCR clone 130543 (TRAV2, TRAJ40)
CAVVTSGTYKYIF

SEQ ID NO: 261086 - protein, 16 aa, Homo sapiens
  CDR3 for beta chain variable domain of TCR clone 130543 (TRBV5-1, TRBJ2-2)
CASSSRTGGRTGELFF

SEQ ID NO: 261087 - protein, 15 aa, Homo sapiens
  CDR3 for alpha chain variable domain of TCR clone 130544 (TRAV17, TRAJ4)
CATGTWSGGYNKLIF

SEQ ID NO: 261088 - protein, 15 aa, Homo sapiens
  CDR3 for beta chain variable domain of TCR clone 130544 (TRBV7-9, TRBJ1-4)
CASSRTGGFNEKLFF

SEQ ID NO: 261089 - protein, 17 aa, Homo sapiens
  CDR3 for alpha chain variable domain of TCR clone 130545 (TRAV3, TRAJ6)
CAVSRRTDTGGSYMPTF

SEQ ID NO: 261090 - protein, 18 aa, Homo sapiens
  CDR3 for beta chain variable domain of TCR clone 130545 (TRBV7-2, TRBJ2-3)
CASSLETSRGRKADTQYF

SEQ ID NO: 261091 - protein, 15 aa, Homo sapiens
  CDR3 for alpha chain variable domain of TCR clone 130546 (TRAV26-1, TRAJ56)
CIVRVATGANSKLTF

SEQ ID NO: 261092 - protein, 15 aa, Homo sapiens
  CDR3 for beta chain variable domain of TCR clone 130546 (TRBV27, TRBJ2-7)
CASIPQREGQREQYF

SEQ ID NO: 261093 - protein, 11 aa, Homo sapiens
  CDR3 for alpha chain variable domain of TCR clone 130547 (TRAV3, TRAJ21)
CAVGNFDKFYF

SEQ ID NO: 261094 - protein, 14 aa, Homo sapiens
  CDR3 for beta chain variable domain of TCR clone 130547 (TRBV12-5, TRBJ2-5)
CASGSRTHQETQYF

SEQ ID NO: 261095 - protein, 18 aa, Homo sapiens
  CDR3 for alpha chain variable domain of TCR clone 130548 (TRAV21, TRAJ52)
CAVRPSPAGGTSYGRLTF

SEQ ID NO: 261096 - protein, 13 aa, Homo sapiens
  CDR3 for beta chain variable domain of TCR clone 130548 (TRBV20-1, TRBJ2-5)
CSAREAFQETQYF

SEQ ID NO: 261097 - protein, 15 aa, Homo sapiens
  CDR3 for alpha chain variable domain of TCR clone 130549 (TRAV1-2, TRAJ16)
CAVRARFSDGQKLLF

SEQ ID NO: 261098 - protein, 19 aa, Homo sapiens
  CDR3 for beta chain variable domain of TCR clone 130549 (TRBV11-3, TRBJ2-3)
CASGFGTSGGPRGGGYAVF

SEQ ID NO: 261099 - protein, 10 aa, Homo sapiens
  CDR3 for alpha chain variable domain of TCR clone 130550 (TRAV23/DV6, TRAJ57)
CAASSTLSQG

SEQ ID NO: 261100 - protein, 14 aa, Homo sapiens
  CDR3 for beta chain variable domain of TCR clone 130550 (TRBV11-2, TRBJ2-1)
CTSSLSGPYNEQFF

SEQ ID NO: 261101 - protein, 14 aa, Homo sapiens
  CDR3 for alpha chain variable domain of TCR clone 130551 (TRAV26-1, TRAJ39)
CIVRGSRAGNMLTF

SEQ ID NO: 261102 - protein, 13 aa, Homo sapiens
  CDR3 for beta chain variable domain of TCR clone 130551 (TRBV15, TRBJ1-6)
CATSGGLNSPLHF

SEQ ID NO: 261103 - protein, 13 aa, Homo sapiens
  CDR3 for alpha chain variable domain of TCR clone 130552 (TRAV16, TRAJ26)
CITVLCLGQNFVF

SEQ ID NO: 261104 - protein, 12 aa, Homo sapiens
  CDR3 for beta chain variable domain of TCR clone 130552 (TRBV11-2, TRBJ2-1)
CASSPVNNEQFF

SEQ ID NO: 261105 - protein, 10 aa, Homo sapiens
  CDR3 for alpha chain variable domain of TCR clone 130553 (TRAV5, TRAJ34)
CAEDTDKLIF

SEQ ID NO: 261106 - protein, 16 aa, Homo sapiens
  CDR3 for beta chain variable domain of TCR clone 130553 (TRBV5-1, TRBJ1-1)
CASSSGGNSLNTEAFF

SEQ ID NO: 261107 - protein, 13 aa, Homo sapiens
  CDR3 for alpha chain variable domain of TCR clone 130554 (TRAV13-1, TRAJ11)
CTASIRGYSTLTF

SEQ ID NO: 261108 - protein, 14 aa, Homo sapiens
  CDR3 for beta chain variable domain of TCR clone 130554 (TRBV4-2, TRBJ2-1)
CASGLDRAYNEQFF

SEQ ID NO: 261109 - protein, 12 aa, Homo sapiens
  CDR3 for alpha chain variable domain of TCR clone 130555 (TRAV22, TRAJ29)
FAPPSGNTPLVF

SEQ ID NO: 261110 - protein, 14 aa, Homo sapiens
  CDR3 for beta chain variable domain of TCR clone 130555 (TRBV11-2, TRBJ2-7)
CANSLGAGAYEQYF

SEQ ID NO: 261111 - protein, 16 aa, Homo sapiens
  CDR3 for alpha chain variable domain of TCR clone 130556 (TRAV30, TRAJ24)
CGTEIVDADSWGKFQF

SEQ ID NO: 261112 - protein, 16 aa, Homo sapiens
  CDR3 for beta chain variable domain of TCR clone 130556 (TRBV6-1, TRBJ1-2)
CASSGAWQGRSHGYTF

SEQ ID NO: 261113 - protein, 13 aa, Homo sapiens
  CDR3 for alpha chain variable domain of TCR clone 130557 (TRAV2, TRAJ10)
CAVETGGGNKLTF

SEQ ID NO: 261114 - protein, 14 aa, Homo sapiens
  CDR3 for beta chain variable domain of TCR clone 130557 (TRBV20-1, TRBJ2-3)
CSAGGRRGTDTQYY

SEQ ID NO: 261115 - protein, 14 aa, Homo sapiens
  CDR3 for alpha chain variable domain of TCR clone 130558 (TRAV1-2, TRAJ16)
CAVNRFSDGQKLLF

SEQ ID NO: 261116 - protein, 13 aa, Homo sapiens
  CDR3 for beta chain variable domain of TCR clone 130558 (TRBV19, TRBJ1-5)
CASSIGGNQPQHF

SEQ ID NO: 261117 - protein, 12 aa, Homo sapiens
  CDR3 for alpha chain variable domain of TCR clone 130559 (TRAV1-1, TRAJ23)
CAVTNQGGKLIF

SEQ ID NO: 261118 - protein, 13 aa, Homo sapiens
  CDR3 for beta chain variable domain of TCR clone 130559 (TRBV7-9, TRBJ2-7)
CASSLGLVGEQYF

SEQ ID NO: 261119 - protein, 16 aa, Homo sapiens
  CDR3 for alpha chain variable domain of TCR clone 130560 (TRAV12-1, TRAJ8)
CVVNGRGNTGFQKHVF

SEQ ID NO: 261120 - protein, 15 aa, Homo sapiens
  CDR3 for beta chain variable domain of TCR clone 130560 (TRBV6-1, TRBJ1-2)
CASNPGRGGSYGYTF

SEQ ID NO: 261121 - protein, 22 aa, Homo sapiens
  CDR3 for alpha chain variable domain of TCR clone 130561 (TRAV8-2, TRAJ45)
HLTKPLAHMSDAAEYSADGLTF

SEQ ID NO: 261122 - protein, 13 aa, Homo sapiens
  CDR3 for beta chain variable domain of TCR clone 130561 (TRBV7-3, TRBJ2-1)
CASSPVAYNEQFF

SEQ ID NO: 261123 - protein, 11 aa, Homo sapiens
  CDR3 for alpha chain variable domain of TCR clone 130562 (TRAV1-1, TRAJ23)
CAVLQGGKLIF

SEQ ID NO: 261124 - protein, 20 aa, Homo sapiens
  CDR3 for beta chain variable domain of TCR clone 130562 (TRBV7-8, TRBJ2-2)
CASSHLFPGPTVHITGELFF

SEQ ID NO: 261125 - protein, 16 aa, Homo sapiens
  CDR3 for alpha chain variable domain of TCR clone 130563 (TRAV30, TRAJ24)
CGTEIVDADSWGKFQF

SEQ ID NO: 261126 - protein, 14 aa, Homo sapiens
  CDR3 for beta chain variable domain of TCR clone 130563 (TRBV7-9, TRBJ2-2)
CASSLGHRTGELFF

SEQ ID NO: 261127 - protein, 11 aa, Homo sapiens
  CDR3 for alpha chain variable domain of TCR clone 130564 (TRAV12-3, TRAJ27)
CAMANAGKSTY

SEQ ID NO: 261128 - protein, 13 aa, Homo sapiens
  CDR3 for beta chain variable domain of TCR clone 130564 (TRBV20-1, TRBJ1-1)
CSARVGGNTEAFF

SEQ ID NO: 261129 - protein, 13 aa, Homo sapiens
  CDR3 for alpha chain variable domain of TCR clone 130565 (TRAV3, TRAJ30)
CAVRDRGDDKIIL

SEQ ID NO: 261130 - protein, 14 aa, Homo sapiens
  CDR3 for beta chain variable domain of TCR clone 130565 (TRBV5-1, TRBJ1-1)
CASSRTTGDTEAFF

SEQ ID NO: 261131 - protein, 16 aa, Homo sapiens
  CDR3 for alpha chain variable domain of TCR clone 130566 (TRAV30, TRAJ24)
CGTEIVDADSWGKFQF

SEQ ID NO: 261132 - protein, 15 aa, Homo sapiens
  CDR3 for beta chain variable domain of TCR clone 130566 (TRBV7-3, TRBJ1-1)
CASSQDWGAEAFLDK

SEQ ID NO: 261133 - protein, 23 aa, Homo sapiens
  CDR3 for alpha chain variable domain of TCR clone 130567 (TRAV1-1, TRAJ29)
LQQELQMKDSASYFLGGNTPLVF

SEQ ID NO: 261134 - protein, 13 aa, Homo sapiens
  CDR3 for beta chain variable domain of TCR clone 130567 (TRBV25-1, TRBJ2-7)
CASSEDGDYEQYF

SEQ ID NO: 261135 - protein, 17 aa, Homo sapiens
  CDR3 for alpha chain variable domain of TCR clone 130568 (TRAV26-2, TRAJ42)
CILRDVGDGGSQGSLIF

SEQ ID NO: 261136 - protein, 16 aa, Homo sapiens
  CDR3 for beta chain variable domain of TCR clone 130568 (TRBV12-4, TRBJ2-7)
CASSLIGGTGTYEQYF

SEQ ID NO: 261137 - protein, 16 aa, Homo sapiens
  CDR3 for alpha chain variable domain of TCR clone 130569 (TRAV3, TRAJ37)
CAVRGKGSGNTGKLTF

SEQ ID NO: 261138 - protein, 16 aa, Homo sapiens
  CDR3 for beta chain variable domain of TCR clone 130569 (TRBV12-5, TRBJ2-5)
CASGPRTSGSQETQYF

SEQ ID NO: 261139 - protein, 13 aa, Homo sapiens
  CDR3 for alpha chain variable domain of TCR clone 130570 (TRAV21, TRAJ27)
CAALNTNAGKSTF

SEQ ID NO: 261140 - protein, 13 aa, Homo sapiens
  CDR3 for beta chain variable domain of TCR clone 130570 (TRBV7-3, TRBJ1-1)
CASSQDWGAEAFF

SEQ ID NO: 261141 - protein, 11 aa, Homo sapiens
  CDR3 for alpha chain variable domain of TCR clone 130571 (TRAV2, TRAJ33)
CAVDSNCQLIW

SEQ ID NO: 261142 - protein, 14 aa, Homo sapiens
  CDR3 for beta chain variable domain of TCR clone 130571 (TRBV11-2, TRBJ2-3)
CASSRLARTDTQYF

SEQ ID NO: 261143 - protein, 15 aa, Homo sapiens
  CDR3 for alpha chain variable domain of TCR clone 130572 (TRAV21, TRAJ38)
CAVRQDAGNKRKLIW

SEQ ID NO: 261144 - protein, 16 aa, Homo sapiens
  CDR3 for beta chain variable domain of TCR clone 130572 (TRBV4-2, TRBJ1-1)
CASRPLDGGGDTEAFF

SEQ ID NO: 261145 - protein, 17 aa, Homo sapiens
  CDR3 for alpha chain variable domain of TCR clone 130573 (TRAV3, TRAJ7)
CAVRDMSPLVGTTDSLL

SEQ ID NO: 261146 - protein, 17 aa, Homo sapiens
  CDR3 for beta chain variable domain of TCR clone 130573 (TRBV15, TRBJ1-2)
CATSGREIDVVNYGYTF

SEQ ID NO: 261147 - protein, 14 aa, Homo sapiens
  CDR3 for alpha chain variable domain of TCR clone 130574 (TRAV12-2, TRAJ11)
CAVEGGSGYSTLTF

SEQ ID NO: 261148 - protein, 16 aa, Homo sapiens
  CDR3 for beta chain variable domain of TCR clone 130574 (TRBV6-1, TRBJ1-2)
CASSGAWQGRSRGYTF

SEQ ID NO: 261149 - protein, 11 aa, Homo sapiens
  CDR3 for alpha chain variable domain of TCR clone 130575 (TRAV17, TRAJ36)
CAPTGANNPFF

SEQ ID NO: 261150 - protein, 13 aa, Homo sapiens
  CDR3 for beta chain variable domain of TCR clone 130575 (TRBV12-4, TRBJ2-7)
CASSPTETYEQYF

SEQ ID NO: 261151 - protein, 13 aa, Homo sapiens
  CDR3 for alpha chain variable domain of TCR clone 130576 (TRAV13-1, TRAJ5)
CAASDTGRRALTF

SEQ ID NO: 261152 - protein, 16 aa, Homo sapiens
  CDR3 for beta chain variable domain of TCR clone 130576 (TRBV4-3, TRBJ2-1)
CASSPALDRGVNEQFF

SEQ ID NO: 261153 - protein, 15 aa, Homo sapiens
  CDR3 for alpha chain variable domain of TCR clone 130577 (TRAV3, TRAJ5)
CAVRDLDTGRRALTF

SEQ ID NO: 261154 - protein, 13 aa, Homo sapiens
  CDR3 for beta chain variable domain of TCR clone 130577 (TRBV12-4, TRBJ2-7)
CANSPTETYEQYF

SEQ ID NO: 261155 - protein, 13 aa, Homo sapiens
  CDR3 for alpha chain variable domain of TCR clone 130578 (TRAV21, TRAJ58)
CAVKKSSGSRLTF

SEQ ID NO: 261156 - protein, 17 aa, Homo sapiens
  CDR3 for beta chain variable domain of TCR clone 130578 (TRBV5-1, TRBJ2-3)
CASSLAGWGSVVDTQYF

SEQ ID NO: 261157 - protein, 14 aa, Homo sapiens
  CDR3 for alpha chain variable domain of TCR clone 130579 (TRAV16, TRAJ33)
CALSAMDSNYQLIW

SEQ ID NO: 261158 - protein, 17 aa, Homo sapiens
  CDR3 for beta chain variable domain of TCR clone 130579 (TRBV25-1, TRBJ2-7)
CASSDARVVFSSYEQYS

SEQ ID NO: 261159 - protein, 13 aa, Homo sapiens
  CDR3 for alpha chain variable domain of TCR clone 130580 (TRAV38-2/DV8, TRAJ34)
CAYRNYNTDKLIF

SEQ ID NO: 261160 - protein, 15 aa, Homo sapiens
  CDR3 for beta chain variable domain of TCR clone 130580 (TRBV20-1, TRBJ2-5)
CSAEVTGGLQETQYF

SEQ ID NO: 261161 - protein, 17 aa, Homo sapiens
  CDR3 for alpha chain variable domain of TCR clone 130581 (TRAV3, TRAJ6)
CAVRDGPRAGGSYIPTF

SEQ ID NO: 261162 - protein, 11 aa, Homo sapiens
  CDR3 for beta chain variable domain of TCR clone 130581 (TRBV20-1, TRBJ1-5)
CSAQGDQPQHF

SEQ ID NO: 261163 - protein, 11 aa, Homo sapiens
  CDR3 for alpha chain variable domain of TCR clone 130582 (TRAV1-2, TRAJ20)
CAVANDYKLSF

SEQ ID NO: 261164 - protein, 17 aa, Homo sapiens
  CDR3 for beta chain variable domain of TCR clone 130582 (TRBV7-8, TRBJ2-6)
CASSAGTGGAGANVLTF

SEQ ID NO: 261165 - protein, 11 aa, Homo sapiens
  CDR3 for alpha chain variable domain of TCR clone 130583 (TRAV3, TRAJ21)
CAVGNFNKFYF

SEQ ID NO: 261166 - protein, 16 aa, Homo sapiens
  CDR3 for beta chain variable domain of TCR clone 130583 (TRBV29-1, TRBJ2-7)
CSVEDAGDGTAYEQYF

SEQ ID NO: 261167 - protein, 14 aa, Homo sapiens
  CDR3 for alpha chain variable domain of TCR clone 130584 (TRAV9-2, TRAJ39)
CALYIYNAGNMLTF

SEQ ID NO: 261168 - protein, 15 aa, Homo sapiens
  CDR3 for beta chain variable domain of TCR clone 130584 (TRBV12-4, TRBJ2-5)
CASSGTGQAQETQYF

SEQ ID NO: 261169 - protein, 13 aa, Homo sapiens
  CDR3 for alpha chain variable domain of TCR clone 130585 (TRAV13-1, TRAJ41)
CADAPNSGYARNF

SEQ ID NO: 261170 - protein, 13 aa, Homo sapiens
  CDR3 for beta chain variable domain of TCR clone 130585 (TRBV19, TRBJ2-7)
CASEGTTTYEQYF

SEQ ID NO: 261171 - protein, 15 aa, Homo sapiens
  CDR3 for alpha chain variable domain of TCR clone 130586 (TRAV3, TRAJ3)
CAVRDGHSSASKIIF

SEQ ID NO: 261172 - protein, 14 aa, Homo sapiens
  CDR3 for beta chain variable domain of TCR clone 130586 (TRBV18, TRBJ2-7)
CASSPRGGAYEQYF

SEQ ID NO: 261173 - protein, 14 aa, Homo sapiens
  CDR3 for alpha chain variable domain of TCR clone 130587 (TRAV1-2, TRAJ16)
CAVNRFSDGPKLLF

SEQ ID NO: 261174 - protein, 16 aa, Homo sapiens
  CDR3 for beta chain variable domain of TCR clone 130587 (TRBV12-5, TRBJ2-5)
CASGPRTSGNQETQYF

SEQ ID NO: 261175 - protein, 17 aa, Homo sapiens
  CDR3 for alpha chain variable domain of TCR clone 130588 (TRAV26-1, TRAJ53)
CIIRVDDSGGSNYKLTF

SEQ ID NO: 261176 - protein, 15 aa, Homo sapiens
  CDR3 for beta chain variable domain of TCR clone 130588 (TRBV20-1, TRBJ2-7)
CSARVPAAYFYEQYF

SEQ ID NO: 261177 - protein, 15 aa, Homo sapiens
  CDR3 for alpha chain variable domain of TCR clone 130589 (TRAV3, TRAJ40)
CAVRDVTSGTYKYIF

SEQ ID NO: 261178 - protein, 14 aa, Homo sapiens
  CDR3 for beta chain variable domain of TCR clone 130589 (TRBV28, TRBJ2-5)
CAISLGDRAETQYF

SEQ ID NO: 261179 - protein, 13 aa, Homo sapiens
  CDR3 for alpha chain variable domain of TCR clone 130590 (TRAV12-1, TRAJ11)
CVVNRAGYSTLTF

SEQ ID NO: 261180 - protein, 16 aa, Homo sapiens
  CDR3 for beta chain variable domain of TCR clone 130590 (TRBV7-3, TRBJ2-1)
CASSLEGYRSYNEQFF

SEQ ID NO: 261181 - protein, 16 aa, Homo sapiens
  CDR3 for alpha chain variable domain of TCR clone 130591 (TRAV3, TRAJ37)
CAVRGKGSGNTGKLIF

SEQ ID NO: 261182 - protein, 13 aa, Homo sapiens
  CDR3 for beta chain variable domain of TCR clone 130591 (TRBV7-8, TRBJ2-1)
CASSLMAYNEQFF

SEQ ID NO: 261183 - protein, 13 aa, Homo sapiens
  CDR3 for alpha chain variable domain of TCR clone 130592 (TRAV20, TRAJ20)
CAVQAGSGYKLSF

SEQ ID NO: 261184 - protein, 11 aa, Homo sapiens
  CDR3 for beta chain variable domain of TCR clone 130592 (TRBV29-1, TRBJ2-5)
CSEDRTGTQYF

SEQ ID NO: 261185 - protein, 15 aa, Homo sapiens
  CDR3 for alpha chain variable domain of TCR clone 130593 (TRAV4, TRAJ39)
CLVGPNNNAGNMLTF

SEQ ID NO: 261186 - protein, 13 aa, Homo sapiens
  CDR3 for beta chain variable domain of TCR clone 130593 (TRBV15, TRBJ1-6)
CATSGGLNSPLHF

SEQ ID NO: 261187 - protein, 13 aa, Homo sapiens
  CDR3 for alpha chain variable domain of TCR clone 130594 (TRAV8-4, TRAJ48)
CAVSLFGNENLTF

SEQ ID NO: 261188 - protein, 15 aa, Homo sapiens
  CDR3 for beta chain variable domain of TCR clone 130594 (TRBV20-1, TRBJ2-7)
CSARKGLAESYEQYF

SEQ ID NO: 261189 - protein, 15 aa, Homo sapiens
  CDR3 for alpha chain variable domain of TCR clone 130595 (TRAV8-3, TRAJ40)
CAAPSLGPGTYRYIF

SEQ ID NO: 261190 - protein, 16 aa, Homo sapiens
  CDR3 for beta chain variable domain of TCR clone 130595 (TRBV7-3, TRBJ2-3)
CASSLSGYRPEDTQYF

SEQ ID NO: 261191 - protein, 16 aa, Homo sapiens
  CDR3 for alpha chain variable domain of TCR clone 130596 (TRAV23/DV6, TRAJ52)
CSARPSGGTSYGKLTF

SEQ ID NO: 261192 - protein, 13 aa, Homo sapiens
  CDR3 for beta chain variable domain of TCR clone 130596 (TRBV7-9, TRBJ1-1)
CASSLSGETEAFF

SEQ ID NO: 261193 - protein, 14 aa, Homo sapiens
  CDR3 for alpha chain variable domain of TCR clone 130597 (TRAV20, TRAJ22)
CAVQVSGSARQLTF

SEQ ID NO: 261194 - protein, 13 aa, Homo sapiens
  CDR3 for beta chain variable domain of TCR clone 130597 (TRBV20-1, TRBJ2-5)
SSAREGGKETQYF

SEQ ID NO: 261195 - protein, 14 aa, Homo sapiens
  CDR3 for alpha chain variable domain of TCR clone 130598 (TRAV3, TRAJ27)
CAVRDDTNAGKSTF

SEQ ID NO: 261196 - protein, 15 aa, Homo sapiens
  CDR3 for beta chain variable domain of TCR clone 130598 (TRBV7-7, TRBJ2-2)
RATSKLAKNTGELFF

SEQ ID NO: 261197 - protein, 17 aa, Homo sapiens
  CDR3 for alpha chain variable domain of TCR clone 130599 (TRAV35, TRAJ28)
CAGLQVYSGAGSYQLTF

SEQ ID NO: 261198 - protein, 13 aa, Homo sapiens
  CDR3 for beta chain variable domain of TCR clone 130599 (TRBV10-3, TRBJ2-7)
CASKLAVNYEQYF

SEQ ID NO: 261199 - protein, 15 aa, Homo sapiens
  CDR3 for alpha chain variable domain of TCR clone 130600 (TRAV23/DV6, TRAJ18)
CAARYRGSTLGRLYF

SEQ ID NO: 261200 - protein, 11 aa, Homo sapiens
  CDR3 for beta chain variable domain of TCR clone 130600 (TRBV7-8, TRBJ2-7)
CASSLSLEQYF

SEQ ID NO: 261201 - protein, 15 aa, Homo sapiens
  CDR3 for alpha chain variable domain of TCR clone 130601 (TRAV26-2, TRAJ13)
CILRDLSGGYQQVTF

SEQ ID NO: 261202 - protein, 11 aa, Homo sapiens
  CDR3 for beta chain variable domain of TCR clone 130601 (TRBV7-9, TRBJ2-5)
CASSLSATQYF

SEQ ID NO: 261203 - protein, 12 aa, Homo sapiens
  CDR3 for alpha chain variable domain of TCR clone 130602 (TRAV13-1, TRAJ49)
CAAPNTGNQFNF

SEQ ID NO: 261204 - protein, 17 aa, Homo sapiens
  CDR3 for beta chain variable domain of TCR clone 130602 (TRBV25-1, TRBJ2-7)
CASSDARVVFSSYEQYF

SEQ ID NO: 261205 - protein, 14 aa, Homo sapiens
  CDR3 for alpha chain variable domain of TCR clone 130603 (TRAV12-2, TRAJ17)
CAALFKATGNKLTF

SEQ ID NO: 261206 - protein, 16 aa, Homo sapiens
  CDR3 for beta chain variable domain of TCR clone 130603 (TRBV20-1, TRBJ2-2)
CSASASGIPGAGELFF

SEQ ID NO: 261207 - protein, 19 aa, Homo sapiens
  CDR3 for alpha chain variable domain of TCR clone 130604 (TRAV13-1, TRAJ52)
CAASPYQNAGGTSYGKMTF

SEQ ID NO: 261208 - protein, 14 aa, Homo sapiens
  CDR3 for beta chain variable domain of TCR clone 130604 (TRBV19, TRBJ2-7)
CASTVQGRPYEQYF

SEQ ID NO: 261209 - protein, 11 aa, Homo sapiens
  CDR3 for alpha chain variable domain of TCR clone 130605 (TRAV4, TRAJ31)
CLVGLNARLLF

SEQ ID NO: 261210 - protein, 16 aa, Homo sapiens
  CDR3 for beta chain variable domain of TCR clone 130605 (TRBV15, TRBJ2-6)
CATSVNGGFLANVLTF

SEQ ID NO: 261211 - protein, 15 aa, Homo sapiens
  CDR3 for alpha chain variable domain of TCR clone 130606 (TRAV17, TRAJ4)
CATGTWSGVYNKLIF

SEQ ID NO: 261212 - protein, 16 aa, Homo sapiens
  CDR3 for beta chain variable domain of TCR clone 130606 (TRBV20-1, TRBJ1-4)
CSAPGQGLLTNEKLFF

SEQ ID NO: 261213 - protein, 12 aa, Homo sapiens
  CDR3 for alpha chain variable domain of TCR clone 130607 (TRAV12-3, TRAJ17)
CAMTLTGNKLTF

SEQ ID NO: 261214 - protein, 13 aa, Homo sapiens
  CDR3 for beta chain variable domain of TCR clone 130607 (TRBV11-3, TRBJ1-1)
CASSSNRDTEAFF

SEQ ID NO: 261215 - protein, 11 aa, Homo sapiens
  CDR3 for alpha chain variable domain of TCR clone 130608 (TRAV1-1, TRAJ23)
CAVRQGGKLIF

SEQ ID NO: 261216 - protein, 13 aa, Homo sapiens
  CDR3 for beta chain variable domain of TCR clone 130608 (TRBV27, TRBJ1-4)
CASSVMGDEKLFF

SEQ ID NO: 261217 - protein, 11 aa, Homo sapiens
  CDR3 for alpha chain variable domain of TCR clone 130609 (TRAV2, TRAJ13)
CASGGYQKVTF

SEQ ID NO: 261218 - protein, 12 aa, Homo sapiens
  CDR3 for beta chain variable domain of TCR clone 130609 (TRBV5-1, TRBJ1-2)
CASSQDTYGYTF

SEQ ID NO: 261219 - protein, 17 aa, Homo sapiens
  CDR3 for alpha chain variable domain of TCR clone 130610 (TRAV8-3, TRAJ32)
CAVGPLDYGGATNKLIF

SEQ ID NO: 261220 - protein, 15 aa, Homo sapiens
  CDR3 for beta chain variable domain of TCR clone 130610 (TRBV18, TRBJ1-2)
CASSPGNGLGYGDTF

SEQ ID NO: 261221 - protein, 16 aa, Homo sapiens
  CDR3 for alpha chain variable domain of TCR clone 130611 (TRAV27, TRAJ13)
CAGAKSDSGGYQKVTF

SEQ ID NO: 261222 - protein, 15 aa, Homo sapiens
  CDR3 for beta chain variable domain of TCR clone 130611 (TRBV29-1, TRBJ2-1)
CSVGKHALFYNEQLF

SEQ ID NO: 261223 - protein, 13 aa, Homo sapiens
  CDR3 for alpha chain variable domain of TCR clone 130612 (TRAV2, TRAJ15)
CAVASQAGTALIF

SEQ ID NO: 261224 - protein, 15 aa, Homo sapiens
  CDR3 for beta chain variable domain of TCR clone 130612 (TRBV11-2, TRBJ2-1)
CASSKNRGLIYEQFF

SEQ ID NO: 261225 - protein, 14 aa, Homo sapiens
  CDR3 for alpha chain variable domain of TCR clone 130613 (TRAV8-2, TRAJ4)
CVVSPSGGYNKLIF

SEQ ID NO: 261226 - protein, 15 aa, Homo sapiens
  CDR3 for beta chain variable domain of TCR clone 130613 (TRBV12-4, TRBJ2-1)
CASSNGGGSSNEQFF

SEQ ID NO: 261227 - protein, 14 aa, Homo sapiens
  CDR3 for alpha chain variable domain of TCR clone 130614 (TRAV3, TRAJ9)
CAVRLTTGGFKTIF

SEQ ID NO: 261228 - protein, 16 aa, Homo sapiens
  CDR3 for beta chain variable domain of TCR clone 130614 (TRBV12-5, TRBJ2-5)
CASGPRTSGNQETQYF

SEQ ID NO: 261229 - protein, 14 aa, Homo sapiens
  CDR3 for alpha chain variable domain of TCR clone 130615 (TRAV13-1, TRAJ26)
CAAPKGPDGQNFIF

SEQ ID NO: 261230 - protein, 15 aa, Homo sapiens
  CDR3 for beta chain variable domain of TCR clone 130615 (TRBV28, TRBJ2-5)
CASSFRQGALETQYF

SEQ ID NO: 261231 - protein, 13 aa, Homo sapiens
  CDR3 for alpha chain variable domain of TCR clone 130616 (TRAV21, TRAJ27)
CATRPGNAGKSTL

SEQ ID NO: 261232 - protein, 14 aa, Homo sapiens
  CDR3 for beta chain variable domain of TCR clone 130616 (TRBV7-6, TRBJ2-3)
CASSLGTVTDTQYF

SEQ ID NO: 261233 - protein, 11 aa, Homo sapiens
  CDR3 for alpha chain variable domain of TCR clone 130617 (TRAV2, TRAJ13)
CASGGYQKVTI

SEQ ID NO: 261234 - protein, 12 aa, Homo sapiens
  CDR3 for beta chain variable domain of TCR clone 130617 (TRBV11-2, TRBJ2-2)
CASSLGGGELFF

SEQ ID NO: 261235 - protein, 13 aa, Homo sapiens
  CDR3 for alpha chain variable domain of TCR clone 130618 (TRAV12-1, TRAJ33)
CGDAPDSNYQLIW

SEQ ID NO: 261236 - protein, 15 aa, Homo sapiens
  CDR3 for beta chain variable domain of TCR clone 130618 (TRBV27, TRBJ2-1)
CASSNGGGSSNEKFF

SEQ ID NO: 261237 - protein, 10 aa, Homo sapiens
  CDR3 for alpha chain variable domain of TCR clone 130619 (TRAV12-3, TRAJ49)
CAMNDDQFYF

SEQ ID NO: 261238 - protein, 18 aa, Homo sapiens
  CDR3 for beta chain variable domain of TCR clone 130619 (TRBV7-9, TRBJ2-7)
CASSLTTSGSRTWYEQYF

SEQ ID NO: 261239 - protein, 15 aa, Homo sapiens
  CDR3 for alpha chain variable domain of TCR clone 130620 (TRAV21, TRAJ24)
CAARSSTDSWGKLQF

SEQ ID NO: 261240 - protein, 12 aa, Homo sapiens
  CDR3 for beta chain variable domain of TCR clone 130620 (TRBV7-8, TRBJ2-7)
CASSLGDREQYF

SEQ ID NO: 261241 - protein, 14 aa, Homo sapiens
  CDR3 for alpha chain variable domain of TCR clone 130621 (TRAV17, TRAJ16)
CATADFSDGQKLLF

SEQ ID NO: 261242 - protein, 15 aa, Homo sapiens
  CDR3 for beta chain variable domain of TCR clone 130621 (TRBV6-5, TRBJ2-1)
CASSYDAGAANEQFF

SEQ ID NO: 261243 - protein, 15 aa, Homo sapiens
  CDR3 for alpha chain variable domain of TCR clone 130622 (TRAV38-1, TRAJ58)
CAFMKQETSGSRLTF

SEQ ID NO: 261244 - protein, 21 aa, Homo sapiens
  CDR3 for beta chain variable domain of TCR clone 130622 (TRBV6-3, TRBJ1-5)
CASSYELGQGVNYPLNQPQHF

SEQ ID NO: 261245 - protein, 12 aa, Homo sapiens
  CDR3 for alpha chain variable domain of TCR clone 130623 (TRAV12-3, TRAJ17)
CAMTLTGNKLTF

SEQ ID NO: 261246 - protein, 15 aa, Homo sapiens
  CDR3 for beta chain variable domain of TCR clone 130623 (TRBV20-1, TRBJ2-7)
CSARGRVSGIDEQYF

SEQ ID NO: 261247 - protein, 16 aa, Homo sapiens
  CDR3 for alpha chain variable domain of TCR clone 130624 (TRAV3, TRAJ37)
CAVRVRGSGITGKLIF

SEQ ID NO: 261248 - protein, 11 aa, Homo sapiens
  CDR3 for beta chain variable domain of TCR clone 130624 (TRBV11-2, TRBJ2-2)
CASSLPGELFF

SEQ ID NO: 261249 - protein, 16 aa, Homo sapiens
  CDR3 for alpha chain variable domain of TCR clone 130625 (TRAV30, TRAJ49)
SAAQRVGPNTGNQFYF

SEQ ID NO: 261250 - protein, 15 aa, Homo sapiens
  CDR3 for beta chain variable domain of TCR clone 130625 (TRBV4-1, TRBJ1-4)
CASSDTGGTNEKLFF

SEQ ID NO: 261251 - protein, 14 aa, Homo sapiens
  CDR3 for alpha chain variable domain of TCR clone 130626 (TRAV12-2, TRAJ17)
CAVLFKAAGNKLTF

SEQ ID NO: 261252 - protein, 17 aa, Homo sapiens
  CDR3 for beta chain variable domain of TCR clone 130626 (TRBV20-1, TRBJ2-2)
SSASGSGQGGLTGELFF

SEQ ID NO: 261253 - protein, 13 aa, Homo sapiens
  CDR3 for alpha chain variable domain of TCR clone 130627 (TRAV13-2, TRAJ53)
CAENMGSNYKLTF

SEQ ID NO: 261254 - protein, 12 aa, Homo sapiens
  CDR3 for beta chain variable domain of TCR clone 130627 (TRBV7-9, TRBJ2-7)
CATRTDAYEQYF

SEQ ID NO: 261255 - protein, 15 aa, Homo sapiens
  CDR3 for alpha chain variable domain of TCR clone 130628 (TRAV3, TRAJ22)
CAVRDRGGSASQLTF

SEQ ID NO: 261256 - protein, 17 aa, Homo sapiens
  CDR3 for beta chain variable domain of TCR clone 130628 (TRBV13, TRBJ2-3)
CASSLSRVAGGRNTQYF

SEQ ID NO: 261257 - protein, 14 aa, Homo sapiens
  CDR3 for alpha chain variable domain of TCR clone 130629 (TRAV25, TRAJ35)
CARRMEGFGNVLHC

SEQ ID NO: 261258 - protein, 13 aa, Homo sapiens
  CDR3 for beta chain variable domain of TCR clone 130629 (TRBV7-2, TRBJ1-4)
SASSLAGLEKLFF

SEQ ID NO: 261259 - protein, 14 aa, Homo sapiens
  CDR3 for alpha chain variable domain of TCR clone 130630 (TRAV21, TRAJ52)
CGRAGGTSYGKLTF

SEQ ID NO: 261260 - protein, 14 aa, Homo sapiens
  CDR3 for beta chain variable domain of TCR clone 130630 (TRBV19, TRBJ1-2)
CASSVLGYNYGYTS

SEQ ID NO: 261261 - protein, 13 aa, Homo sapiens
  CDR3 for alpha chain variable domain of TCR clone 130631 (TRAV26-1, TRAJ34)
CIVGPWITDKLIF

SEQ ID NO: 261262 - protein, 13 aa, Homo sapiens
  CDR3 for beta chain variable domain of TCR clone 130631 (TRBV5-1, TRBJ2-1)
CASSLGSYNEQFF

SEQ ID NO: 261263 - protein, 11 aa, Homo sapiens
  CDR3 for alpha chain variable domain of TCR clone 130632 (TRAV21, TRAJ34)
CAHYNTDKLIF

SEQ ID NO: 261264 - protein, 14 aa, Homo sapiens
  CDR3 for beta chain variable domain of TCR clone 130632 (TRBV7-2, TRBJ1-1)
CASSFLTGTTEAFF

SEQ ID NO: 261265 - protein, 13 aa, Homo sapiens
  CDR3 for alpha chain variable domain of TCR clone 130633 (TRAV13-1, TRAJ6)
CAASKGGSYIPTF

SEQ ID NO: 261266 - protein, 14 aa, Homo sapiens
  CDR3 for beta chain variable domain of TCR clone 130633 (TRBV25-1, TRBJ1-1)
CASTHLVGNTEAFF

SEQ ID NO: 261267 - protein, 15 aa, Homo sapiens
  CDR3 for alpha chain variable domain of TCR clone 130634 (TRAV8-3, TRAJ27)
CAVGPSKTNAGKSTF

SEQ ID NO: 261268 - protein, 11 aa, Homo sapiens
  CDR3 for beta chain variable domain of TCR clone 130634 (TRBV4-1, TRBJ2-2)
CASEHTGELFF

SEQ ID NO: 261269 - protein, 16 aa, Homo sapiens
  CDR3 for alpha chain variable domain of TCR clone 130635 (TRAV30, TRAJ24)
CGTEIVDADSWGKFQF

SEQ ID NO: 261270 - protein, 13 aa, Homo sapiens
  CDR3 for beta chain variable domain of TCR clone 130635 (TRBV19, TRBJ1-2)
CASSVPGQDGDTF

SEQ ID NO: 261271 - protein, 17 aa, Homo sapiens
  CDR3 for alpha chain variable domain of TCR clone 130636 (TRAV3, TRAJ6)
CAARDGPRAGGSYIPTF

SEQ ID NO: 261272 - protein, 18 aa, Homo sapiens
  CDR3 for beta chain variable domain of TCR clone 130636 (TRBV11-2, TRBJ2-3)
CASSLGGASRGAPNTQYF

SEQ ID NO: 261273 - protein, 13 aa, Homo sapiens
  CDR3 for alpha chain variable domain of TCR clone 130637 (TRAV12-2, TRAJ20)
CAVYPSNDYKLSF

SEQ ID NO: 261274 - protein, 15 aa, Homo sapiens
  CDR3 for beta chain variable domain of TCR clone 130637 (TRBV7-9, TRBJ1-2)
CASSLDREPNYGYTF

SEQ ID NO: 261275 - protein, 14 aa, Homo sapiens
  CDR3 for alpha chain variable domain of TCR clone 130638 (TRAV29/DV5, TRAJ20)
CAASAPIEYYKLSF

SEQ ID NO: 261276 - protein, 15 aa, Homo sapiens
  CDR3 for beta chain variable domain of TCR clone 130638 (TRBV6-1, TRBJ2-1)
CASSEAAYSYNEQFF

SEQ ID NO: 261277 - protein, 14 aa, Homo sapiens
  CDR3 for alpha chain variable domain of TCR clone 130639 (TRAV13-2, TRAJ17)
CAENSKAAGNKLTF

SEQ ID NO: 261278 - protein, 13 aa, Homo sapiens
  CDR3 for beta chain variable domain of TCR clone 130639 (TRBV12-4, TRBJ1-2)
CASSLRQGKGYTF

SEQ ID NO: 261279 - protein, 11 aa, Homo sapiens
  CDR3 for alpha chain variable domain of TCR clone 130640 (TRAV21, TRAJ31)
CAVRNNARLMF

SEQ ID NO: 261280 - protein, 14 aa, Homo sapiens
  CDR3 for beta chain variable domain of TCR clone 130640 (TRBV19, TRBJ2-1)
CASPTFVLSGEQFF

SEQ ID NO: 261281 - protein, 15 aa, Homo sapiens
  CDR3 for alpha chain variable domain of TCR clone 130641 (TRAV29/DV5, TRAJ28)
CAAGYSGAGSYQLTF

SEQ ID NO: 261282 - protein, 18 aa, Homo sapiens
  CDR3 for beta chain variable domain of TCR clone 130641 (TRBV3-1, TRBJ1-2)
CASSQDVIGWNGDCGYTF

SEQ ID NO: 261283 - protein, 11 aa, Homo sapiens
  CDR3 for alpha chain variable domain of TCR clone 130642 (TRAV2, TRAJ13)
RASGGYQKVTF

SEQ ID NO: 261284 - protein, 16 aa, Homo sapiens
  CDR3 for beta chain variable domain of TCR clone 130642 (TRBV19, TRBJ2-1)
CASSKAGPSSYNEQFF

SEQ ID NO: 261285 - protein, 15 aa, Homo sapiens
  CDR3 for alpha chain variable domain of TCR clone 130643 (TRAV3, TRAJ5)
CAVRDRKTGRRAFTF

SEQ ID NO: 261286 - protein, 15 aa, Homo sapiens
  CDR3 for beta chain variable domain of TCR clone 130643 (TRBV7-9, TRBJ2-2)
CASGPLDTFPGELFF

SEQ ID NO: 261287 - protein, 15 aa, Homo sapiens
  CDR3 for alpha chain variable domain of TCR clone 130644 (TRAV17, TRAJ23)
CATDAEDNQGGKLIF

SEQ ID NO: 261288 - protein, 15 aa, Homo sapiens
  CDR3 for beta chain variable domain of TCR clone 130644 (TRBV4-1, TRBJ2-5)
CASSQWDLYQETQYF

SEQ ID NO: 261289 - protein, 14 aa, Homo sapiens
  CDR3 for alpha chain variable domain of TCR clone 130645 (TRAV8-4, TRAJ48)
CAVSETFGNEKLTL

SEQ ID NO: 261290 - protein, 14 aa, Homo sapiens
  CDR3 for beta chain variable domain of TCR clone 130645 (TRBV13, TRBJ2-7)
CASSLKGASYEQYF

SEQ ID NO: 261291 - protein, 14 aa, Homo sapiens
  CDR3 for alpha chain variable domain of TCR clone 130646 (TRAV35, TRAJ33)
CAGSSQDSNYQLIW

SEQ ID NO: 261292 - protein, 16 aa, Homo sapiens
  CDR3 for beta chain variable domain of TCR clone 130646 (TRBV19, TRBJ2-2)
CASRSPGTGATGELFF

SEQ ID NO: 261293 - protein, 13 aa, Homo sapiens
  CDR3 for alpha chain variable domain of TCR clone 130647 (TRAV2, TRAJ40)
CAVVTSGTYKYIF

SEQ ID NO: 261294 - protein, 16 aa, Homo sapiens
  CDR3 for beta chain variable domain of TCR clone 130647 (TRBV20-1, TRBJ1-2)
CSASMGQGVANYGYTF

SEQ ID NO: 261295 - protein, 14 aa, Homo sapiens
  CDR3 for alpha chain variable domain of TCR clone 130648 (TRAV2, TRAJ33)
CAVEDQGSNYQLIW

SEQ ID NO: 261296 - protein, 14 aa, Homo sapiens
  CDR3 for beta chain variable domain of TCR clone 130648 (TRBV19, TRBJ2-1)
CASPTFVLSGEQFF

SEQ ID NO: 261297 - protein, 16 aa, Homo sapiens
  CDR3 for alpha chain variable domain of TCR clone 130649 (TRAV21, TRAJ37)
CAVRTAGSGNTGELIF

SEQ ID NO: 261298 - protein, 13 aa, Homo sapiens
  CDR3 for beta chain variable domain of TCR clone 130649 (TRBV7-9, TRBJ2-5)
CASLPSGRETQYF

SEQ ID NO: 261299 - protein, 16 aa, Homo sapiens
  CDR3 for alpha chain variable domain of TCR clone 130650 (TRAV13-1, TRAJ37)
CAASSLGSSNPGKLIF

SEQ ID NO: 261300 - protein, 12 aa, Homo sapiens
  CDR3 for beta chain variable domain of TCR clone 130650 (TRBV6-1, TRBJ2-5)
CASSEGRETQYF

SEQ ID NO: 261301 - protein, 14 aa, Homo sapiens
  CDR3 for alpha chain variable domain of TCR clone 130651 (TRAV29/DV5, TRAJ36)
CAARRKTAANNLFF

SEQ ID NO: 261302 - protein, 14 aa, Homo sapiens
  CDR3 for beta chain variable domain of TCR clone 130651 (TRBV12-5, TRBJ2-5)
CASGSRTHQETQYF

SEQ ID NO: 261303 - protein, 14 aa, Homo sapiens
  CDR3 for alpha chain variable domain of TCR clone 130652 (TRAV35, TRAJ38)
CAGSNAGNNRKLLW

SEQ ID NO: 261304 - protein, 12 aa, Homo sapiens
  CDR3 for beta chain variable domain of TCR clone 130652 (TRBV19, TRBJ2-7)
CASTDRGYEQYF

SEQ ID NO: 261305 - protein, 14 aa, Homo sapiens
  CDR3 for alpha chain variable domain of TCR clone 130653 (TRAV3, TRAJ22)
CAVRDYGSARQLTF

SEQ ID NO: 261306 - protein, 13 aa, Homo sapiens
  CDR3 for beta chain variable domain of TCR clone 130653 (TRBV11-2, TRBJ2-5)
CASGHGAKEAQYF

SEQ ID NO: 261307 - protein, 21 aa, Homo sapiens
  CDR3 for alpha chain variable domain of TCR clone 130654 (TRAV27, TRAJ38)
CAARRNAGNNHIQNPDPAVYH

SEQ ID NO: 261308 - protein, 13 aa, Homo sapiens
  CDR3 for beta chain variable domain of TCR clone 130654 (TRBV12-5, TRBJ2-3)
CASGDRQSDTQYF

SEQ ID NO: 261309 - protein, 12 aa, Homo sapiens
  CDR3 for alpha chain variable domain of TCR clone 130655 (TRAV1-1, TRAJ39)
CAVPVVGNMLTF

SEQ ID NO: 261310 - protein, 17 aa, Homo sapiens
  CDR3 for beta chain variable domain of TCR clone 130655 (TRBV28, TRBJ2-5)
CAGSTPEGDALQETQYF

SEQ ID NO: 261311 - protein, 15 aa, Homo sapiens
  CDR3 for alpha chain variable domain of TCR clone 130656 (TRAV21, TRAJ40)
CAVRPQTSETYKYIF

SEQ ID NO: 261312 - protein, 13 aa, Homo sapiens
  CDR3 for beta chain variable domain of TCR clone 130656 (TRBV7-2, TRBJ2-2)
CASSSVRAGELFF

SEQ ID NO: 261313 - protein, 14 aa, Homo sapiens
  CDR3 for alpha chain variable domain of TCR clone 130657 (TRAV13-2, TRAJ43)
CAEIPTYNNNDMRS

SEQ ID NO: 261314 - protein, 10 aa, Homo sapiens
  CDR3 for beta chain variable domain of TCR clone 130657 (TRBV7-9, TRBJ2-2)
CASGPLDTFP

SEQ ID NO: 261315 - protein, 19 aa, Homo sapiens
  CDR3 for alpha chain variable domain of TCR clone 130658 (TRAV8-4, TRAJ3)
CAVTGENLVQQCFQDNLWL

SEQ ID NO: 261316 - protein, 15 aa, Homo sapiens
  CDR3 for beta chain variable domain of TCR clone 130658 (TRBV6-3, TRBJ2-7)
CASSSPGTVFYEQYF

SEQ ID NO: 261317 - protein, 11 aa, Homo sapiens
  CDR3 for alpha chain variable domain of TCR clone 130659 (TRAV2, TRAJ13)
CASGGYQEVTF

SEQ ID NO: 261318 - protein, 18 aa, Homo sapiens
  CDR3 for beta chain variable domain of TCR clone 130659 (TRBV11-2, TRBJ2-3)
CASSLGGASRGAPNTQYF

SEQ ID NO: 261319 - protein, 15 aa, Homo sapiens
  CDR3 for alpha chain variable domain of TCR clone 130660 (TRAV17, TRAJ57)
CATGPSQGGSEKLVF

SEQ ID NO: 261320 - protein, 14 aa, Homo sapiens
  CDR3 for beta chain variable domain of TCR clone 130660 (TRBV11-1, TRBJ2-7)
CASSFRQGSYEQYF

SEQ ID NO: 261321 - protein, 13 aa, Homo sapiens
  CDR3 for alpha chain variable domain of TCR clone 130661 (TRAV21, TRAJ58)
CAVKESSGSRLTF

SEQ ID NO: 261322 - protein, 12 aa, Homo sapiens
  CDR3 for beta chain variable domain of TCR clone 130661 (TRBV7-3, TRBJ2-1)
CASSFINNEQFF

SEQ ID NO: 261323 - protein, 16 aa, Homo sapiens
  CDR3 for alpha chain variable domain of TCR clone 130662 (TRAV30, TRAJ57)
CGTGWAPQGGSEQLVF

SEQ ID NO: 261324 - protein, 14 aa, Homo sapiens
  CDR3 for beta chain variable domain of TCR clone 130662 (TRBV18, TRBJ1-1)
CASSPGFQGVEAFF

SEQ ID NO: 261325 - protein, 12 aa, Homo sapiens
  CDR3 for alpha chain variable domain of TCR clone 130663 (TRAV8-4, TRAJ43)
CAVSVNNNDMRF

SEQ ID NO: 261326 - protein, 16 aa, Homo sapiens
  CDR3 for beta chain variable domain of TCR clone 130663 (TRBV19, TRBJ2-1)
CASSKAGPSSYNEQFF

SEQ ID NO: 261327 - protein, 18 aa, Homo sapiens
  CDR3 for alpha chain variable domain of TCR clone 130664 (TRAV21, TRAJ52)
CAVRPSPAGGTSYGKLTF

SEQ ID NO: 261328 - protein, 13 aa, Homo sapiens
  CDR3 for beta chain variable domain of TCR clone 130664 (TRBV19, TRBJ1-2)
CASSVPEQDGYTF

SEQ ID NO: 261329 - protein, 15 aa, Homo sapiens
  CDR3 for alpha chain variable domain of TCR clone 130665 (TRAV8-3, TRAJ11)
CAVGLLNSGYSTFTL

SEQ ID NO: 261330 - protein, 16 aa, Homo sapiens
  CDR3 for beta chain variable domain of TCR clone 130665 (TRBV7-9, TRBJ1-2)
CASSLGFSSGEDGYTF

SEQ ID NO: 261331 - protein, 14 aa, Homo sapiens
  CDR3 for alpha chain variable domain of TCR clone 130666 (TRAV1-1, TRAJ21)
CAVRTSRNFNKFYF

SEQ ID NO: 261332 - protein, 14 aa, Homo sapiens
  CDR3 for beta chain variable domain of TCR clone 130666 (TRBV18, TRBJ1-2)
CASSPEGDLYGYTF

SEQ ID NO: 261333 - protein, 15 aa, Homo sapiens
  CDR3 for alpha chain variable domain of TCR clone 130667 (TRAV26-1, TRAJ39)
CIVRVASNAGNMPTF

SEQ ID NO: 261334 - protein, 14 aa, Homo sapiens
  CDR3 for beta chain variable domain of TCR clone 130667 (TRBV7-6, TRBJ2-3)
CASSVAGGTDTQYF

SEQ ID NO: 261335 - protein, 13 aa, Homo sapiens
  CDR3 for alpha chain variable domain of TCR clone 130668 (TRAV2, TRAJ40)
CAVVTSGTYTYIF

SEQ ID NO: 261336 - protein, 16 aa, Homo sapiens
  CDR3 for beta chain variable domain of TCR clone 130668 (TRBV7-9, TRBJ1-3)
CASSLGAGSSGNTIYF

SEQ ID NO: 261337 - protein, 15 aa, Homo sapiens
  CDR3 for alpha chain variable domain of TCR clone 130669 (TRAV8-2, TRAJ40)
CVVLGTNSGTYKYIF

SEQ ID NO: 261338 - protein, 16 aa, Homo sapiens
  CDR3 for beta chain variable domain of TCR clone 130669 (TRBV7-3, TRBJ2-1)
CASSLEGYRSYNEQFF

SEQ ID NO: 261339 - protein, 16 aa, Homo sapiens
  CDR3 for alpha chain variable domain of TCR clone 130670 (TRAV3, TRAJ10)
CAVRDMRAGGGNKLTF

SEQ ID NO: 261340 - protein, 16 aa, Homo sapiens
  CDR3 for beta chain variable domain of TCR clone 130670 (TRBV20-1, TRBJ1-2)
CSASMGQGVANYGYTF

SEQ ID NO: 261341 - protein, 16 aa, Homo sapiens
  CDR3 for alpha chain variable domain of TCR clone 130671 (TRAV3, TRAJ37)
CAVRGKGSGNTGKLIF

SEQ ID NO: 261342 - protein, 13 aa, Homo sapiens
  CDR3 for beta chain variable domain of TCR clone 130671 (TRBV4-1, TRBJ2-1)
CASSQAGGDEQFF

SEQ ID NO: 261343 - protein, 20 aa, Homo sapiens
  CDR3 for alpha chain variable domain of TCR clone 130672 (TRAV1-1, TRAJ4)
CLLLLRCEGFLSGGYNKLIF

SEQ ID NO: 261344 - protein, 15 aa, Homo sapiens
  CDR3 for beta chain variable domain of TCR clone 130672 (TRBV10-3, TRBJ2-1)
CAISDVQDRAYEQFF

SEQ ID NO: 261345 - protein, 17 aa, Homo sapiens
  CDR3 for alpha chain variable domain of TCR clone 130673 (TRAV3, TRAJ12)
CAVRDGGRVDSSYKLIF

SEQ ID NO: 261346 - protein, 17 aa, Homo sapiens
  CDR3 for beta chain variable domain of TCR clone 130673 (TRBV11-2, TRBJ2-1)
CASSLYPPGVEYNEQFF

SEQ ID NO: 261347 - protein, 14 aa, Homo sapiens
  CDR3 for alpha chain variable domain of TCR clone 130674 (TRAV29/DV5, TRAJ36)
CAARRKTGANNLFF

SEQ ID NO: 261348 - protein, 15 aa, Homo sapiens
  CDR3 for beta chain variable domain of TCR clone 130674 (TRBV11-2, TRBJ2-2)
CASSSDRVNAGELFF

SEQ ID NO: 261349 - protein, 11 aa, Homo sapiens
  CDR3 for alpha chain variable domain of TCR clone 130675 (TRAV29/DV5, TRAJ49)
CAAVPGNQFYF

SEQ ID NO: 261350 - protein, 16 aa, Homo sapiens
  CDR3 for beta chain variable domain of TCR clone 130675 (TRBV19, TRBJ2-1)
CASSKAGPSSYNEQFF

SEQ ID NO: 261351 - protein, 17 aa, Homo sapiens
  CDR3 for alpha chain variable domain of TCR clone 130676 (TRAV8-6, TRAJ58)
CAVSSWVGETSGSRLTF

SEQ ID NO: 261352 - protein, 14 aa, Homo sapiens
  CDR3 for beta chain variable domain of TCR clone 130676 (TRBV4-2, TRBJ2-1)
CASGLVRAYNEQFF

SEQ ID NO: 261353 - protein, 11 aa, Homo sapiens
  CDR3 for alpha chain variable domain of TCR clone 130677 (TRAV21, TRAJ31)
CAVRNNARLMF

SEQ ID NO: 261354 - protein, 15 aa, Homo sapiens
  CDR3 for beta chain variable domain of TCR clone 130677 (TRBV7-9, TRBJ1-4)
CASSRTGGFNEKLFF

SEQ ID NO: 261355 - protein, 14 aa, Homo sapiens
  CDR3 for alpha chain variable domain of TCR clone 130678 (TRAV2, TRAJ9)
CAVEDRSGGFETIF

SEQ ID NO: 261356 - protein, 18 aa, Homo sapiens
  CDR3 for beta chain variable domain of TCR clone 130678 (TRBV20-1, TRBJ2-5)
CSQTGDSGRLGGKETQYF

SEQ ID NO: 261357 - protein, 13 aa, Homo sapiens
  CDR3 for alpha chain variable domain of TCR clone 130679 (TRAV2, TRAJ40)
CTVVTSGTYKYIF

SEQ ID NO: 261358 - protein, 12 aa, Homo sapiens
  CDR3 for beta chain variable domain of TCR clone 130679 (TRBV11-2, TRBJ2-7)
CASSLPTYEQYF

SEQ ID NO: 261359 - protein, 14 aa, Homo sapiens
  CDR3 for alpha chain variable domain of TCR clone 130680 (TRAV1-2, TRAJ16)
CAVNRFSDGQKLLF

SEQ ID NO: 261360 - protein, 15 aa, Homo sapiens
  CDR3 for beta chain variable domain of TCR clone 130680 (TRBV20-1, TRBJ1-5)
CSAREGGYSNQPQHF

SEQ ID NO: 261361 - protein, 13 aa, Homo sapiens
  CDR3 for alpha chain variable domain of TCR clone 130681 (TRAV22, TRAJ26)
CAVEHNYGKNFVF

SEQ ID NO: 261362 - protein, 16 aa, Homo sapiens
  CDR3 for beta chain variable domain of TCR clone 130681 (TRBV7-2, TRBJ2-6)
CASSERRASGANVLTF

SEQ ID NO: 261363 - protein, 13 aa, Homo sapiens
  CDR3 for alpha chain variable domain of TCR clone 130682 (TRAV21, TRAJ27)
CAALNTNAGKSNF

SEQ ID NO: 261364 - protein, 14 aa, Homo sapiens
  CDR3 for beta chain variable domain of TCR clone 130682 (TRBV27, TRBJ1-1)
CASSLLSGLSEAFF

SEQ ID NO: 261365 - protein, 13 aa, Homo sapiens
  CDR3 for alpha chain variable domain of TCR clone 130683 (TRAV21, TRAJ27)
YAALNTNAGKSTF

SEQ ID NO: 261366 - protein, 14 aa, Homo sapiens
  CDR3 for beta chain variable domain of TCR clone 130683 (TRBV27, TRBJ1-1)
CASSLLSGLSEAFF

SEQ ID NO: 261367 - protein, 11 aa, Homo sapiens
  CDR3 for alpha chain variable domain of TCR clone 130684 (TRAV3, TRAJ21)
CAVGNFNKFYF

SEQ ID NO: 261368 - protein, 16 aa, Homo sapiens
  CDR3 for beta chain variable domain of TCR clone 130684 (TRBV7-2, TRBJ2-6)
CASSLAGRSGANVLTF

SEQ ID NO: 261369 - protein, 13 aa, Homo sapiens
  CDR3 for alpha chain variable domain of TCR clone 130685 (TRAV17, TRAJ4)
CATKSGGYNKLIF

SEQ ID NO: 261370 - protein, 14 aa, Homo sapiens
  CDR3 for beta chain variable domain of TCR clone 130685 (TRBV20-1, TRBJ1-5)
CSARDHRGNQPQHF

SEQ ID NO: 261371 - protein, 10 aa, Homo sapiens
  CDR3 for alpha chain variable domain of TCR clone 130686 (TRAV5, TRAJ34)
CAEDTDKLIF

SEQ ID NO: 261372 - protein, 17 aa, Homo sapiens
  CDR3 for beta chain variable domain of TCR clone 130686 (TRBV7-8, TRBJ1-2)
CASSLRPLQGHLYGYTF

SEQ ID NO: 261373 - protein, 12 aa, Homo sapiens
  CDR3 for alpha chain variable domain of TCR clone 130687 (TRAV21, TRAJ31)
CVLAGNNARLMF

SEQ ID NO: 261374 - protein, 16 aa, Homo sapiens
  CDR3 for beta chain variable domain of TCR clone 130687 (TRBV27, TRBJ2-5)
CASSFGPGGAKETQYF

SEQ ID NO: 261375 - protein, 14 aa, Homo sapiens
  CDR3 for alpha chain variable domain of TCR clone 130688 (TRAV1-2, TRAJ16)
GAVNRFSDGQKLLF

SEQ ID NO: 261376 - protein, 15 aa, Homo sapiens
  CDR3 for beta chain variable domain of TCR clone 130688 (TRBV7-9, TRBJ1-6)
CASSSPGRGNSPLHF

SEQ ID NO: 261377 - protein, 18 aa, Homo sapiens
  CDR3 for alpha chain variable domain of TCR clone 130689 (TRAV21, TRAJ52)
CAVRPSPAGGTSYGKLTF

SEQ ID NO: 261378 - protein, 17 aa, Homo sapiens
  CDR3 for beta chain variable domain of TCR clone 130689 (TRBV13, TRBJ2-3)
CASSLSRVAGGENTQYF

SEQ ID NO: 261379 - protein, 12 aa, Homo sapiens
  CDR3 for alpha chain variable domain of TCR clone 130690 (TRAV38-2/DV8, TRAJ47)
CVIMEYGNKLVF

SEQ ID NO: 261380 - protein, 14 aa, Homo sapiens
  CDR3 for beta chain variable domain of TCR clone 130690 (TRBV20-1, TRBJ1-5)
CSATDRGSNQLQHF

SEQ ID NO: 261381 - protein, 13 aa, Homo sapiens
  CDR3 for alpha chain variable domain of TCR clone 130691 (TRAV3, TRAJ21)
CAVREPAFNKFYF

SEQ ID NO: 261382 - protein, 15 aa, Homo sapiens
  CDR3 for beta chain variable domain of TCR clone 130691 (TRBV3-1, TRBJ2-7)
CASSQAPSGSYEQYF

SEQ ID NO: 261383 - protein, 16 aa, Homo sapiens
  CDR3 for alpha chain variable domain of TCR clone 130692 (TRAV3, TRAJ3)
CAVRDRAKSSASKIIF

SEQ ID NO: 261384 - protein, 15 aa, Homo sapiens
  CDR3 for beta chain variable domain of TCR clone 130692 (TRBV7-9, TRBJ1-6)
CASSSPGRGNSPLHF

SEQ ID NO: 261385 - protein, 13 aa, Homo sapiens
  CDR3 for alpha chain variable domain of TCR clone 130693 (TRAV21, TRAJ15)
CAVANQAGTALIF

SEQ ID NO: 261386 - protein, 13 aa, Homo sapiens
  CDR3 for beta chain variable domain of TCR clone 130693 (TRBV27, TRBJ2-2)
CQQFRGSNRGAVF

SEQ ID NO: 261387 - protein, 11 aa, Homo sapiens
  CDR3 for alpha chain variable domain of TCR clone 130694 (TRAV29/DV5, TRAJ31)
CEASYRDRLMF

SEQ ID NO: 261388 - protein, 19 aa, Homo sapiens
  CDR3 for beta chain variable domain of TCR clone 130694 (TRBV19, TRBJ2-5)
CASSIGQVTDFFLGETQYF

SEQ ID NO: 261389 - protein, 15 aa, Homo sapiens
  CDR3 for alpha chain variable domain of TCR clone 130695 (TRAV3, TRAJ22)
CAVRDRGGSARQLTF

SEQ ID NO: 261390 - protein, 15 aa, Homo sapiens
  CDR3 for beta chain variable domain of TCR clone 130695 (TRBV5-4, TRBJ2-3)
CQPAAGGGRADTQYF

SEQ ID NO: 261391 - protein, 23 aa, Homo sapiens
  CDR3 for alpha chain variable domain of TCR clone 130696 (TRAV26-1, TRAJ38)
CIADNAGNNHIQNPDPAVYQLRD

SEQ ID NO: 261392 - protein, 13 aa, Homo sapiens
  CDR3 for beta chain variable domain of TCR clone 130696 (TRBV10-3, TRBJ2-7)
CASKRAVNYEQYF

SEQ ID NO: 261393 - protein, 14 aa, Homo sapiens
  CDR3 for alpha chain variable domain of TCR clone 130697 (TRAV16, TRAJ15)
CALSGPQAGPALIF

SEQ ID NO: 261394 - protein, 12 aa, Homo sapiens
  CDR3 for beta chain variable domain of TCR clone 130697 (TRBV18, TRBJ2-5)
CASSPSKETQYF

SEQ ID NO: 261395 - protein, 18 aa, Homo sapiens
  CDR3 for alpha chain variable domain of TCR clone 130698 (TRAV3, TRAJ17)
CAVRARRGGRSCRQQANF

SEQ ID NO: 261396 - protein, 16 aa, Homo sapiens
  CDR3 for beta chain variable domain of TCR clone 130698 (TRBV19, TRBJ2-1)
CASSKAGPSSYNEQFF

SEQ ID NO: 261397 - protein, 13 aa, Homo sapiens
  CDR3 for alpha chain variable domain of TCR clone 130699 (TRAV35, TRAJ36)
CAGPRIGANNLFF

SEQ ID NO: 261398 - protein, 15 aa, Homo sapiens
  CDR3 for beta chain variable domain of TCR clone 130699 (TRBV4-3, TRBJ1-2)
CASSRGQGRNYGYTF

SEQ ID NO: 261399 - protein, 13 aa, Homo sapiens
  CDR3 for alpha chain variable domain of TCR clone 130700 (TRAV26-2, TRAJ43)
CILRAVNNNDMRF

SEQ ID NO: 261400 - protein, 12 aa, Homo sapiens
  CDR3 for beta chain variable domain of TCR clone 130700 (TRBV7-8, TRBJ2-7)
CASRLGDREQYF

SEQ ID NO: 261401 - protein, 13 aa, Homo sapiens
  CDR3 for alpha chain variable domain of TCR clone 130701 (TRAV8-6, TRAJ49)
CAVITNTGNQFYF

SEQ ID NO: 261402 - protein, 12 aa, Homo sapiens
  CDR3 for beta chain variable domain of TCR clone 130701 (TRBV19, TRBJ1-5)
CASSIAQQPQHF

SEQ ID NO: 261403 - protein, 13 aa, Homo sapiens
  CDR3 for alpha chain variable domain of TCR clone 130702 (TRAV12-3, TRAJ13)
CAMGPGGYQKVTF

SEQ ID NO: 261404 - protein, 14 aa, Homo sapiens
  CDR3 for beta chain variable domain of TCR clone 130702 (TRBV7-2, TRBJ2-5)
CASSTGGELKTQYF

SEQ ID NO: 261405 - protein, 23 aa, Homo sapiens
  CDR3 for alpha chain variable domain of TCR clone 130703 (TRAV13-1, TRAJ13)
CAASNLLTCALELEQSSKSSQIS

SEQ ID NO: 261406 - protein, 14 aa, Homo sapiens
  CDR3 for beta chain variable domain of TCR clone 130703 (TRBV12-5, TRBJ2-5)
CASGSRTHQETQYF

SEQ ID NO: 261407 - protein, 23 aa, Homo sapiens
  CDR3 for alpha chain variable domain of TCR clone 130704 (TRAV26-1, TRAJ38)
CIADNAGNNHIQNPDPAVYQLRD

SEQ ID NO: 261408 - protein, 14 aa, Homo sapiens
  CDR3 for beta chain variable domain of TCR clone 130704 (TRBV25-1, TRBJ1-1)
CASTHLGGNTEAFF

SEQ ID NO: 261409 - protein, 15 aa, Homo sapiens
  CDR3 for alpha chain variable domain of TCR clone 130705 (TRAV12-3, TRAJ27)
CAMRAYNTNAGKSTF

SEQ ID NO: 261410 - protein, 13 aa, Homo sapiens
  CDR3 for beta chain variable domain of TCR clone 130705 (TRBV11-3, TRBJ2-5)
CASGRGPSETQYF

SEQ ID NO: 261411 - protein, 13 aa, Homo sapiens
  CDR3 for alpha chain variable domain of TCR clone 130706 (TRAV27, TRAJ17)
CAGAATEGNKLTF

SEQ ID NO: 261412 - protein, 15 aa, Homo sapiens
  CDR3 for beta chain variable domain of TCR clone 130706 (TRBV5-1, TRBJ2-3)
CASRNQAGSTDTQYF

SEQ ID NO: 261413 - protein, 16 aa, Homo sapiens
  CDR3 for alpha chain variable domain of TCR clone 130707 (TRAV4, TRAJ22)
CLVGDLYSGSARQLTF

SEQ ID NO: 261414 - protein, 16 aa, Homo sapiens
  CDR3 for beta chain variable domain of TCR clone 130707 (TRBV7-9, TRBJ2-1)
CASSDVAGRSYNEQFF

SEQ ID NO: 261415 - protein, 14 aa, Homo sapiens
  CDR3 for alpha chain variable domain of TCR clone 130708 (TRAV1-2, TRAJ16)
CAVNRFSDGQKLLF

SEQ ID NO: 261416 - protein, 15 aa, Homo sapiens
  CDR3 for beta chain variable domain of TCR clone 130708 (TRBV7-9, TRBJ1-6)
CASSSPGRGNSHLLF

SEQ ID NO: 261417 - protein, 18 aa, Homo sapiens
  CDR3 for alpha chain variable domain of TCR clone 130709 (TRAV26-1, TRAJ23)
CIVRVGLEVGNQGGKLIF

SEQ ID NO: 261418 - protein, 13 aa, Homo sapiens
  CDR3 for beta chain variable domain of TCR clone 130709 (TRBV7-2, TRBJ2-7)
CASILSGRSGLAG

SEQ ID NO: 261419 - protein, 20 aa, Homo sapiens
  CDR3 for alpha chain variable domain of TCR clone 130710 (TRAV12-1, TRAJ42)
SSVIQPPTSVKGGSQGNLIF

SEQ ID NO: 261420 - protein, 12 aa, Homo sapiens
  CDR3 for beta chain variable domain of TCR clone 130710 (TRBV19, TRBJ1-1)
CASSTTGIEAFF

SEQ ID NO: 261421 - protein, 14 aa, Homo sapiens
  CDR3 for alpha chain variable domain of TCR clone 130711 (TRAV8-3, TRAJ31)
CAVGRRLNNARLMF

SEQ ID NO: 261422 - protein, 15 aa, Homo sapiens
  CDR3 for beta chain variable domain of TCR clone 130711 (TRBV7-2, TRBJ2-2)
CASSLAGGLTGELFF

SEQ ID NO: 261423 - protein, 15 aa, Homo sapiens
  CDR3 for alpha chain variable domain of TCR clone 130712 (TRAV17, TRAJ37)
CATGHGSSNTGKLIF

SEQ ID NO: 261424 - protein, 14 aa, Homo sapiens
  CDR3 for beta chain variable domain of TCR clone 130712 (TRBV7-2, TRBJ2-3)
CASSRTSGADTQYF

SEQ ID NO: 261425 - protein, 17 aa, Homo sapiens
  CDR3 for alpha chain variable domain of TCR clone 130713 (TRAV3, TRAJ6)
CAVRDGPRAGGSYILTF

SEQ ID NO: 261426 - protein, 20 aa, Homo sapiens
  CDR3 for beta chain variable domain of TCR clone 130713 (TRBV28, TRBJ2-1)
CASTAIGRSPGLAGGNEQFF

SEQ ID NO: 261427 - protein, 16 aa, Homo sapiens
  CDR3 for alpha chain variable domain of TCR clone 130714 (TRAV8-3, TRAJ10)
CAVGPGVTGGGNKLTL

SEQ ID NO: 261428 - protein, 13 aa, Homo sapiens
  CDR3 for beta chain variable domain of TCR clone 130714 (TRBV18, TRBJ1-1)
CASSPGPSGEAFF

SEQ ID NO: 261429 - protein, 13 aa, Homo sapiens
  CDR3 for alpha chain variable domain of TCR clone 130715 (TRAV20, TRAJ21)
CAVEGYNFNKFYF

SEQ ID NO: 261430 - protein, 13 aa, Homo sapiens
  CDR3 for beta chain variable domain of TCR clone 130715 (TRBV3-1, TRBJ2-5)
CQQSRPGSRDQYF

SEQ ID NO: 261431 - protein, 17 aa, Homo sapiens
  CDR3 for alpha chain variable domain of TCR clone 130716 (TRAV8-6, TRAJ58)
CAVSSWVGETSGSRLTF

SEQ ID NO: 261432 - protein, 17 aa, Homo sapiens
  CDR3 for beta chain variable domain of TCR clone 130716 (TRBV13, TRBJ2-3)
CASSLSRVAGGRNTQYF

SEQ ID NO: 261433 - protein, 16 aa, Homo sapiens
  CDR3 for alpha chain variable domain of TCR clone 130717 (TRAV3, TRAJ10)
CAVRDMRAGGGNKLTL

SEQ ID NO: 261434 - protein, 17 aa, Homo sapiens
  CDR3 for beta chain variable domain of TCR clone 130717 (TRBV28, TRBJ2-5)
CASSTPEGDALQETQYF

SEQ ID NO: 261435 - protein, 16 aa, Homo sapiens
  CDR3 for alpha chain variable domain of TCR clone 130718 (TRAV17, TRAJ35)
CATAEGGIGFGNVLHC

SEQ ID NO: 261436 - protein, 16 aa, Homo sapiens
  CDR3 for beta chain variable domain of TCR clone 130718 (TRBV6-5, TRBJ2-7)
CASSSAPTSGFYEQYF

SEQ ID NO: 261437 - protein, 13 aa, Homo sapiens
  CDR3 for alpha chain variable domain of TCR clone 130719 (TRAV21, TRAJ20)
CAVGLRVDYKLSF

SEQ ID NO: 261438 - protein, 17 aa, Homo sapiens
  CDR3 for beta chain variable domain of TCR clone 130719 (TRBV20-1, TRBJ2-2)
CSASGSGQGGLTGELFF

SEQ ID NO: 261439 - protein, 12 aa, Homo sapiens
  CDR3 for alpha chain variable domain of TCR clone 130720 (TRAV8-3, TRAJ20)
CAVGANDYKLSF

SEQ ID NO: 261440 - protein, 15 aa, Homo sapiens
  CDR3 for beta chain variable domain of TCR clone 130720 (TRBV11-2, TRBJ2-1)
CAGSLGTSGLNEQFF

SEQ ID NO: 261441 - protein, 16 aa, Homo sapiens
  CDR3 for alpha chain variable domain of TCR clone 130721 (TRAV8-3, TRAJ13)
CTVGAYPSGGYQKVTF

SEQ ID NO: 261442 - protein, 13 aa, Homo sapiens
  CDR3 for beta chain variable domain of TCR clone 130721 (TRBV7-9, TRBJ1-2)
CASSLKQNYGYTF

SEQ ID NO: 261443 - protein, 23 aa, Homo sapiens
  CDR3 for alpha chain variable domain of TCR clone 130722 (TRAV21, TRAJ32)
CAVEIMVVLQTGSSLELALCLLS

SEQ ID NO: 261444 - protein, 13 aa, Homo sapiens
  CDR3 for beta chain variable domain of TCR clone 130722 (TRBV2, TRBJ1-6)
CASGRGGISPLHF

SEQ ID NO: 261445 - protein, 14 aa, Homo sapiens
  CDR3 for alpha chain variable domain of TCR clone 130723 (TRAV26-1, TRAJ38)
CIADNAGNSRKLIW

SEQ ID NO: 261446 - protein, 15 aa, Homo sapiens
  CDR3 for beta chain variable domain of TCR clone 130723 (TRBV27, TRBJ2-1)
CASSNGGGSSNEQFF

SEQ ID NO: 261447 - protein, 15 aa, Homo sapiens
  CDR3 for alpha chain variable domain of TCR clone 130724 (TRAV17, TRAJ57)
CATGPSQGGSEKLVF

SEQ ID NO: 261448 - protein, 16 aa, Homo sapiens
  CDR3 for beta chain variable domain of TCR clone 130724 (TRBV12-4, TRBJ1-5)
CASSRPVGGSNKPQHL

SEQ ID NO: 261449 - protein, 13 aa, Homo sapiens
  CDR3 for alpha chain variable domain of TCR clone 130725 (TRAV8-3, TRAJ36)
CAVGATGANNLFF

SEQ ID NO: 261450 - protein, 16 aa, Homo sapiens
  CDR3 for beta chain variable domain of TCR clone 130725 (TRBV12-5, TRBJ2-5)
CASGPRTSGNQETQYF

SEQ ID NO: 261451 - protein, 10 aa, Homo sapiens
  CDR3 for alpha chain variable domain of TCR clone 130726 (TRAV16, TRAJ22)
SAMYLRQLTF

SEQ ID NO: 261452 - protein, 15 aa, Homo sapiens
  CDR3 for beta chain variable domain of TCR clone 130726 (TRBV7-9, TRBJ1-6)
CASSSPGRGNTPLHF

SEQ ID NO: 261453 - protein, 12 aa, Homo sapiens
  CDR3 for alpha chain variable domain of TCR clone 130727 (TRAV13-1, TRAJ49)
CAASPMVTSSIL

SEQ ID NO: 261454 - protein, 13 aa, Homo sapiens
  CDR3 for beta chain variable domain of TCR clone 130727 (TRBV20-1, TRBJ2-2)
CSASAAGTGELFF

SEQ ID NO: 261455 - protein, 14 aa, Homo sapiens
  CDR3 for alpha chain variable domain of TCR clone 130728 (TRAV1-2, TRAJ16)
CAVNRFSDGQKLLF

SEQ ID NO: 261456 - protein, 14 aa, Homo sapiens
  CDR3 for beta chain variable domain of TCR clone 130728 (TRBV13, TRBJ2-3)
CASSLGARTDTQYF

SEQ ID NO: 261457 - protein, 11 aa, Homo sapiens
  CDR3 for alpha chain variable domain of TCR clone 130729 (TRAV3, TRAJ21)
CAVGNFNNFYF

SEQ ID NO: 261458 - protein, 13 aa, Homo sapiens
  CDR3 for beta chain variable domain of TCR clone 130729 (TRBV4-1, TRBJ2-2)
CASSQENTGELFF

SEQ ID NO: 261459 - protein, 17 aa, Homo sapiens
  CDR3 for alpha chain variable domain of TCR clone 130730 (TRAV8-6, TRAJ8)
CAVKEGIENTGLQKLVF

SEQ ID NO: 261460 - protein, 13 aa, Homo sapiens
  CDR3 for beta chain variable domain of TCR clone 130730 (TRBV15, TRBJ1-6)
CATSGGLNSPLHF

SEQ ID NO: 261461 - protein, 14 aa, Homo sapiens
  CDR3 for alpha chain variable domain of TCR clone 130731 (TRAV17, TRAJ57)
CATDPQGGSENLVF

SEQ ID NO: 261462 - protein, 14 aa, Homo sapiens
  CDR3 for beta chain variable domain of TCR clone 130731 (TRBV7-8, TRBJ2-7)
CASSPRDRVYEQYF

SEQ ID NO: 261463 - protein, 14 aa, Homo sapiens
  CDR3 for alpha chain variable domain of TCR clone 130732 (TRAV1-2, TRAJ8)
CAVREDTGFQKLVF

SEQ ID NO: 261464 - protein, 15 aa, Homo sapiens
  CDR3 for beta chain variable domain of TCR clone 130732 (TRBV7-8, TRBJ2-1)
CASSLAGGLYNEQFF

SEQ ID NO: 261465 - protein, 19 aa, Homo sapiens
  CDR3 for alpha chain variable domain of TCR clone 130733 (TRAV1-2, TRAJ26)
CLLPLCCEGPDNYGQNFVF

SEQ ID NO: 261466 - protein, 17 aa, Homo sapiens
  CDR3 for beta chain variable domain of TCR clone 130733 (TRBV28, TRBJ2-5)
CASSRQGGLAGAETQYF

SEQ ID NO: 261467 - protein, 13 aa, Homo sapiens
  CDR3 for alpha chain variable domain of TCR clone 130734 (TRAV30, TRAJ39)
CGTEKNAGNMLTF

SEQ ID NO: 261468 - protein, 12 aa, Homo sapiens
  CDR3 for beta chain variable domain of TCR clone 130734 (TRBV12-4, TRBJ2-5)
CASSSAQETQYV

SEQ ID NO: 261469 - protein, 13 aa, Homo sapiens
  CDR3 for alpha chain variable domain of TCR clone 130735 (TRAV2, TRAJ40)
CAVVTPGTYKYIF

SEQ ID NO: 261470 - protein, 16 aa, Homo sapiens
  CDR3 for beta chain variable domain of TCR clone 130735 (TRBV7-2, TRBJ1-2)
CASSSNQDRRGHGYTF

SEQ ID NO: 261471 - protein, 13 aa, Homo sapiens
  CDR3 for alpha chain variable domain of TCR clone 130736 (TRAV13-1, TRAJ21)
CAASIYNFNKFYF

SEQ ID NO: 261472 - protein, 13 aa, Homo sapiens
  CDR3 for beta chain variable domain of TCR clone 130736 (TRBV27, TRBJ1-4)
CARSLMGDEKLFF

SEQ ID NO: 261473 - protein, 14 aa, Homo sapiens
  CDR3 for alpha chain variable domain of TCR clone 130737 (TRAV8-2, TRAJ4)
CVVSPSGGYNKLIF

SEQ ID NO: 261474 - protein, 15 aa, Homo sapiens
  CDR3 for beta chain variable domain of TCR clone 130737 (TRBV11-1, TRBJ2-1)
CASSNGGGSSNEQFF

SEQ ID NO: 261475 - protein, 16 aa, Homo sapiens
  CDR3 for alpha chain variable domain of TCR clone 130738 (TRAV3, TRAJ28)
CAVLPRSGAGSYQLTF

SEQ ID NO: 261476 - protein, 16 aa, Homo sapiens
  CDR3 for beta chain variable domain of TCR clone 130738 (TRBV2, TRBJ1-1)
CASSPPNRGMNTEAFF

SEQ ID NO: 261477 - protein, 15 aa, Homo sapiens
  CDR3 for alpha chain variable domain of TCR clone 130739 (TRAV10, TRAJ6)
CVVSGGSGGSYIPTF

SEQ ID NO: 261478 - protein, 15 aa, Homo sapiens
  CDR3 for beta chain variable domain of TCR clone 130739 (TRBV6-5, TRBJ2-1)
CASRGDFDAYNEQFF

SEQ ID NO: 261479 - protein, 12 aa, Homo sapiens
  CDR3 for alpha chain variable domain of TCR clone 130740 (TRAV13-2, TRAJ23)
CAERHRGGKLIF

SEQ ID NO: 261480 - protein, 13 aa, Homo sapiens
  CDR3 for beta chain variable domain of TCR clone 130740 (TRBV7-9, TRBJ1-2)
CASSVKQNYGYTF

SEQ ID NO: 261481 - protein, 15 aa, Homo sapiens
  CDR3 for alpha chain variable domain of TCR clone 130741 (TRAV17, TRAJ57)
CATGPSQGGSEKLVF

SEQ ID NO: 261482 - protein, 14 aa, Homo sapiens
  CDR3 for beta chain variable domain of TCR clone 130741 (TRBV12-5, TRBJ2-5)
CASGSRTHQETQDF

SEQ ID NO: 261483 - protein, 14 aa, Homo sapiens
  CDR3 for alpha chain variable domain of TCR clone 130742 (TRAV13-1, TRAJ45)
CAAIGGGGADGLTF

SEQ ID NO: 261484 - protein, 12 aa, Homo sapiens
  CDR3 for beta chain variable domain of TCR clone 130742 (TRBV11-2, TRBJ2-4)
CASSSASGSEYF

SEQ ID NO: 261485 - protein, 13 aa, Homo sapiens
  CDR3 for alpha chain variable domain of TCR clone 130743 (TRAV2, TRAJ40)
CAVVTSGTYKYIF

SEQ ID NO: 261486 - protein, 15 aa, Homo sapiens
  CDR3 for beta chain variable domain of TCR clone 130743 (TRBV7-2, TRBJ2-3)
CASSLRGGSTDTQYF

SEQ ID NO: 261487 - protein, 12 aa, Homo sapiens
  CDR3 for alpha chain variable domain of TCR clone 130744 (TRAV26-2, TRAJ21)
CILKGNFNKFYF

SEQ ID NO: 261488 - protein, 14 aa, Homo sapiens
  CDR3 for beta chain variable domain of TCR clone 130744 (TRBV7-9, TRBJ2-1)
CASSPRDSLYEQFF

SEQ ID NO: 261489 - protein, 14 aa, Homo sapiens
  CDR3 for alpha chain variable domain of TCR clone 130745 (TRAV13-1, TRAJ40)
CAASMTSGTYKYIF

SEQ ID NO: 261490 - protein, 14 aa, Homo sapiens
  CDR3 for beta chain variable domain of TCR clone 130745 (TRBV11-3, TRBJ2-7)
CASSPDRNTYEQYF

SEQ ID NO: 261491 - protein, 12 aa, Homo sapiens
  CDR3 for alpha chain variable domain of TCR clone 130746 (TRAV29/DV5, TRAJ15)
CASNQAGTALIF

SEQ ID NO: 261492 - protein, 10 aa, Homo sapiens
  CDR3 for beta chain variable domain of TCR clone 130746 (TRBV20-1, TRBJ2-5)
CSARFETQYF

SEQ ID NO: 261493 - protein, 13 aa, Homo sapiens
  CDR3 for alpha chain variable domain of TCR clone 130747 (TRAV2, TRAJ29)
CAAGNSGNTPLVF

SEQ ID NO: 261494 - protein, 16 aa, Homo sapiens
  CDR3 for beta chain variable domain of TCR clone 130747 (TRBV7-9, TRBJ1-2)
CASSPGGGAINYGYSF

SEQ ID NO: 261495 - protein, 13 aa, Homo sapiens
  CDR3 for alpha chain variable domain of TCR clone 130748 (TRAV3, TRAJ20)
CAVRSLNDYKLSF

SEQ ID NO: 261496 - protein, 13 aa, Homo sapiens
  CDR3 for beta chain variable domain of TCR clone 130748 (TRBV6-1, TRBJ2-1)
CAGMEPTNNEQFF

SEQ ID NO: 261497 - protein, 16 aa, Homo sapiens
  CDR3 for alpha chain variable domain of TCR clone 130749 (TRAV12-3, TRAJ53)
CAMSPGSGCSNYKLTF

SEQ ID NO: 261498 - protein, 14 aa, Homo sapiens
  CDR3 for beta chain variable domain of TCR clone 130749 (TRBV7-2, TRBJ1-1)
CASSFLTGTTEAFF

SEQ ID NO: 261499 - protein, 14 aa, Homo sapiens
  CDR3 for alpha chain variable domain of TCR clone 130750 (TRAV3, TRAJ34)
CAVRAPGNTDKLIF

SEQ ID NO: 261500 - protein, 17 aa, Homo sapiens
  CDR3 for beta chain variable domain of TCR clone 130750 (TRBV20-1, TRBJ2-7)
GSAAPGLARGISYEQYF

SEQ ID NO: 261501 - protein, 14 aa, Homo sapiens
  CDR3 for alpha chain variable domain of TCR clone 130751 (TRAV12-3, TRAJ57)
CAMSAWGGSEKLVF

SEQ ID NO: 261502 - protein, 14 aa, Homo sapiens
  CDR3 for beta chain variable domain of TCR clone 130751 (TRBV18, TRBJ2-5)
CASSPGVSQGTQYF

SEQ ID NO: 261503 - protein, 12 aa, Homo sapiens
  CDR3 for alpha chain variable domain of TCR clone 130752 (TRAV21, TRAJ11)
CAATSGYSTLTF

SEQ ID NO: 261504 - protein, 14 aa, Homo sapiens
  CDR3 for beta chain variable domain of TCR clone 130752 (TRBV20-1, TRBJ2-7)
CSAPELSGVGEQYF

SEQ ID NO: 261505 - protein, 16 aa, Homo sapiens
  CDR3 for alpha chain variable domain of TCR clone 130753 (TRAV30, TRAJ24)
CGTEIVDADSWGKFQF

SEQ ID NO: 261506 - protein, 16 aa, Homo sapiens
  CDR3 for beta chain variable domain of TCR clone 130753 (TRBV5-1, TRBJ2-7)
CASSYASTSSGGEQYF

SEQ ID NO: 261507 - protein, 20 aa, Homo sapiens
  CDR3 for alpha chain variable domain of TCR clone 130754 (TRAV21, TRAJ30)
CAVRRRMTRSSLEKGHDFIF

SEQ ID NO: 261508 - protein, 17 aa, Homo sapiens
  CDR3 for beta chain variable domain of TCR clone 130754 (TRBV11-2, TRBJ2-1)
CASSLYPPGVEYNEQFF

SEQ ID NO: 261509 - protein, 14 aa, Homo sapiens
  CDR3 for alpha chain variable domain of TCR clone 130755 (TRAV1-2, TRAJ15)
CAVRDRQAGTALIF

SEQ ID NO: 261510 - protein, 17 aa, Homo sapiens
  CDR3 for beta chain variable domain of TCR clone 130755 (TRBV5-5, TRBJ1-2)
CASSLGSLDGQSEGYSF

SEQ ID NO: 261511 - protein, 15 aa, Homo sapiens
  CDR3 for alpha chain variable domain of TCR clone 130756 (TRAV13-1, TRAJ44)
CAASRNTGTASKLTS

SEQ ID NO: 261512 - protein, 14 aa, Homo sapiens
  CDR3 for beta chain variable domain of TCR clone 130756 (TRBV11-2, TRBJ1-2)
CASSLYRGNYGYTF

SEQ ID NO: 261513 - protein, 16 aa, Homo sapiens
  CDR3 for alpha chain variable domain of TCR clone 130757 (TRAV3, TRAJ37)
CAVRPHGSGNTGKLIF

SEQ ID NO: 261514 - protein, 11 aa, Homo sapiens
  CDR3 for beta chain variable domain of TCR clone 130757 (TRBV10-3, TRBJ2-7)
CAVSEGLEQYF

SEQ ID NO: 261515 - protein, 13 aa, Homo sapiens
  CDR3 for alpha chain variable domain of TCR clone 130758 (TRAV27, TRAJ41)
CAGEGNSGYALNF

SEQ ID NO: 261516 - protein, 13 aa, Homo sapiens
  CDR3 for beta chain variable domain of TCR clone 130758 (TRBV19, TRBJ1-2)
CAGSVPGQDGYTF

SEQ ID NO: 261517 - protein, 14 aa, Homo sapiens
  CDR3 for alpha chain variable domain of TCR clone 130759 (TRAV1-2, TRAJ16)
CAVNRFSDGQKLLF

SEQ ID NO: 261518 - protein, 16 aa, Homo sapiens
  CDR3 for beta chain variable domain of TCR clone 130759 (TRBV11-2, TRBJ2-7)
CASSLAPTGVNYEQYF

SEQ ID NO: 261519 - protein, 16 aa, Homo sapiens
  CDR3 for alpha chain variable domain of TCR clone 130760 (TRAV20, TRAJ22)
CAVQASSSGSARQLTF

SEQ ID NO: 261520 - protein, 13 aa, Homo sapiens
  CDR3 for beta chain variable domain of TCR clone 130760 (TRBV27, TRBJ2-7)
CASSFVSSYEQYF

SEQ ID NO: 261521 - protein, 14 aa, Homo sapiens
  CDR3 for alpha chain variable domain of TCR clone 130761 (TRAV17, TRAJ45)
CATASGGGADGITF

SEQ ID NO: 261522 - protein, 15 aa, Homo sapiens
  CDR3 for beta chain variable domain of TCR clone 130761 (TRBV11-2, TRBJ2-1)
CASSRNRGLMYEQFF

SEQ ID NO: 261523 - protein, 14 aa, Homo sapiens
  CDR3 for alpha chain variable domain of TCR clone 130762 (TRAV1-2, TRAJ8)
CAVREDTGFQKLVF

SEQ ID NO: 261524 - protein, 16 aa, Homo sapiens
  CDR3 for beta chain variable domain of TCR clone 130762 (TRBV5-1, TRBJ2-2)
CASSLWDTTNTGKLFF

SEQ ID NO: 261525 - protein, 14 aa, Homo sapiens
  CDR3 for alpha chain variable domain of TCR clone 130763 (TRAV12-3, TRAJ10)
SHLPLTGGGNKLTF

SEQ ID NO: 261526 - protein, 15 aa, Homo sapiens
  CDR3 for beta chain variable domain of TCR clone 130763 (TRBV6-1, TRBJ2-6)
CASSSRPSGANVLTF

SEQ ID NO: 261527 - protein, 11 aa, Homo sapiens
  CDR3 for alpha chain variable domain of TCR clone 130764 (TRAV23/DV6, TRAJ48)
CAPRWGEKLTF

SEQ ID NO: 261528 - protein, 14 aa, Homo sapiens
  CDR3 for beta chain variable domain of TCR clone 130764 (TRBV7-2, TRBJ2-7)
CASSPKTSFYEQYF

SEQ ID NO: 261529 - protein, 14 aa, Homo sapiens
  CDR3 for alpha chain variable domain of TCR clone 130765 (TRAV2, TRAJ22)
CAVGRGGSARQLTF

SEQ ID NO: 261530 - protein, 17 aa, Homo sapiens
  CDR3 for beta chain variable domain of TCR clone 130765 (TRBV11-2, TRBJ2-4)
CASSSVGPGGHRNIQYF

SEQ ID NO: 261531 - protein, 23 aa, Homo sapiens
  CDR3 for alpha chain variable domain of TCR clone 130766 (TRAV8-3, TRAJ38)
CAVGASNAGNNHIQNPDPAVYQL

SEQ ID NO: 261532 - protein, 15 aa, Homo sapiens
  CDR3 for beta chain variable domain of TCR clone 130766 (TRBV11-3, TRBJ1-3)
CASSLFGPSGDTIYF

SEQ ID NO: 261533 - protein, 16 aa, Homo sapiens
  CDR3 for alpha chain variable domain of TCR clone 130767 (TRAV12-2, TRAJ32)
CAVNLGQGGATNKLIF

SEQ ID NO: 261534 - protein, 15 aa, Homo sapiens
  CDR3 for beta chain variable domain of TCR clone 130767 (TRBV20-1, TRBJ2-7)
CSAIGPLAGGREQYF

SEQ ID NO: 261535 - protein, 14 aa, Homo sapiens
  CDR3 for alpha chain variable domain of TCR clone 130768 (TRAV8-2, TRAJ4)
CVVSPSGGYNKLIF

SEQ ID NO: 261536 - protein, 15 aa, Homo sapiens
  CDR3 for beta chain variable domain of TCR clone 130768 (TRBV2, TRBJ2-1)
FASSELAGSYNEQFF

SEQ ID NO: 261537 - protein, 17 aa, Homo sapiens
  CDR3 for alpha chain variable domain of TCR clone 130769 (TRAV3, TRAJ12)
CAVRDGGRMDSSYKLIL

SEQ ID NO: 261538 - protein, 13 aa, Homo sapiens
  CDR3 for beta chain variable domain of TCR clone 130769 (TRBV15, TRBJ1-6)
CATSGGLNSPLHF

SEQ ID NO: 261539 - protein, 13 aa, Homo sapiens
  CDR3 for alpha chain variable domain of TCR clone 130770 (TRAV2, TRAJ29)
CAVRNSGNTPLVF

SEQ ID NO: 261540 - protein, 14 aa, Homo sapiens
  CDR3 for beta chain variable domain of TCR clone 130770 (TRBV7-9, TRBJ2-7)
CASSLQQGGYERYF

SEQ ID NO: 261541 - protein, 14 aa, Homo sapiens
  CDR3 for alpha chain variable domain of TCR clone 130771 (TRAV1-2, TRAJ16)
CAVNRFSDGQKLLF

SEQ ID NO: 261542 - protein, 14 aa, Homo sapiens
  CDR3 for beta chain variable domain of TCR clone 130771 (TRBV28, TRBJ2-2)
CASRIRSGTGELFF

SEQ ID NO: 261543 - protein, 14 aa, Homo sapiens
  CDR3 for alpha chain variable domain of TCR clone 130772 (TRAV29/DV5, TRAJ36)
CAARRKTGANNLFF

SEQ ID NO: 261544 - protein, 15 aa, Homo sapiens
  CDR3 for beta chain variable domain of TCR clone 130772 (TRBV7-9, TRBJ2-7)
CASSPGGGLTYEQYF

SEQ ID NO: 261545 - protein, 16 aa, Homo sapiens
  CDR3 for alpha chain variable domain of TCR clone 130773 (TRAV20, TRAJ22)
CAVKASSSGSARQLTF

SEQ ID NO: 261546 - protein, 13 aa, Homo sapiens
  CDR3 for beta chain variable domain of TCR clone 130773 (TRBV7-2, TRBJ2-5)
CASSQTSVETQYF

SEQ ID NO: 261547 - protein, 23 aa, Homo sapiens
  CDR3 for alpha chain variable domain of TCR clone 130774 (TRAV8-3, TRAJ38)
CAVGASNAGNNHIQNPDPAVYQL

SEQ ID NO: 261548 - protein, 15 aa, Homo sapiens
  CDR3 for beta chain variable domain of TCR clone 130774 (TRBV11-3, TRBJ1-3)
CASSLFGPSVNTIYF

SEQ ID NO: 261549 - protein, 13 aa, Homo sapiens
  CDR3 for alpha chain variable domain of TCR clone 130775 (TRAV27, TRAJ6)
CAGGTRGSYITTF

SEQ ID NO: 261550 - protein, 14 aa, Homo sapiens
  CDR3 for beta chain variable domain of TCR clone 130775 (TRBV6-3, TRBJ1-1)
CASSYQRRDTEAFF

SEQ ID NO: 261551 - protein, 14 aa, Homo sapiens
  CDR3 for alpha chain variable domain of TCR clone 130776 (TRAV26-1, TRAJ38)
CIADNAGNNRKLIW

SEQ ID NO: 261552 - protein, 13 aa, Homo sapiens
  CDR3 for beta chain variable domain of TCR clone 130776 (TRBV20-1, TRBJ1-6)
CSTFREGNSPLHF

SEQ ID NO: 261553 - protein, 18 aa, Homo sapiens
  CDR3 for alpha chain variable domain of TCR clone 130777 (TRAV26-1, TRAJ22)
CIVRVALISSGSARQLTF

SEQ ID NO: 261554 - protein, 11 aa, Homo sapiens
  CDR3 for beta chain variable domain of TCR clone 130777 (TRBV12-4, TRBJ2-3)
CASTATDTQYF

SEQ ID NO: 261555 - protein, 13 aa, Homo sapiens
  CDR3 for alpha chain variable domain of TCR clone 130778 (TRAV12-2, TRAJ53)
CAGVGGSNYKLTF

SEQ ID NO: 261556 - protein, 16 aa, Homo sapiens
  CDR3 for beta chain variable domain of TCR clone 130778 (TRBV4-3, TRBJ2-1)
CASSPALDRGVNEQFF

SEQ ID NO: 261557 - protein, 14 aa, Homo sapiens
  CDR3 for alpha chain variable domain of TCR clone 130779 (TRAV12-2, TRAJ40)
CAVKIPSGTYKYIF

SEQ ID NO: 261558 - protein, 13 aa, Homo sapiens
  CDR3 for beta chain variable domain of TCR clone 130779 (TRBV15, TRBJ1-6)
CATSGGLNSPLHF

SEQ ID NO: 261559 - protein, 17 aa, Homo sapiens
  CDR3 for alpha chain variable domain of TCR clone 130780 (TRAV12-2, TRAJ4)
CAVNVRPVSGCYNKLIF

SEQ ID NO: 261560 - protein, 17 aa, Homo sapiens
  CDR3 for beta chain variable domain of TCR clone 130780 (TRBV6-3, TRBJ2-1)
CASSYSSGTRGLDEQFF

SEQ ID NO: 261561 - protein, 14 aa, Homo sapiens
  CDR3 for alpha chain variable domain of TCR clone 130781 (TRAV12-2, TRAJ32)
CAHPESGAPNKLIF

SEQ ID NO: 261562 - protein, 14 aa, Homo sapiens
  CDR3 for beta chain variable domain of TCR clone 130781 (TRBV4-2, TRBJ2-3)
CASRETRAPGMQYF

SEQ ID NO: 261563 - protein, 13 aa, Homo sapiens
  CDR3 for alpha chain variable domain of TCR clone 130782 (TRAV22, TRAJ29)
CAVGGSGNKPLVF

SEQ ID NO: 261564 - protein, 13 aa, Homo sapiens
  CDR3 for beta chain variable domain of TCR clone 130782 (TRBV4-2, TRBJ1-1)
CASSQAGNTEAFF

SEQ ID NO: 261565 - protein, 14 aa, Homo sapiens
  CDR3 for alpha chain variable domain of TCR clone 130783 (TRAV13-1, TRAJ40)
CAARSTSGTYKYIF

SEQ ID NO: 261566 - protein, 15 aa, Homo sapiens
  CDR3 for beta chain variable domain of TCR clone 130783 (TRBV18, TRBJ1-5)
CASSETGGNNQPRHF

SEQ ID NO: 261567 - protein, 14 aa, Homo sapiens
  CDR3 for alpha chain variable domain of TCR clone 130784 (TRAV12-2, TRAJ13)
CAVKKTGGYQNVTF

SEQ ID NO: 261568 - protein, 14 aa, Homo sapiens
  CDR3 for beta chain variable domain of TCR clone 130784 (TRBV12-5, TRBJ2-5)
CASGSRTHQETQYF

SEQ ID NO: 261569 - protein, 16 aa, Homo sapiens
  CDR3 for alpha chain variable domain of TCR clone 130785 (TRAV21, TRAJ52)
CAVTNAGGTSYGKLTS

SEQ ID NO: 261570 - protein, 17 aa, Homo sapiens
  CDR3 for beta chain variable domain of TCR clone 130785 (TRBV28, TRBJ2-5)
CASSRQGGLAGAETQYF

SEQ ID NO: 261571 - protein, 11 aa, Homo sapiens
  CDR3 for alpha chain variable domain of TCR clone 130786 (TRAV1-1, TRAJ23)
CAVRQGGKLIF

SEQ ID NO: 261572 - protein, 16 aa, Homo sapiens
  CDR3 for beta chain variable domain of TCR clone 130786 (TRBV12-5, TRBJ2-5)
CASGPRTSGNQETQYF

SEQ ID NO: 261573 - protein, 14 aa, Homo sapiens
  CDR3 for alpha chain variable domain of TCR clone 130787 (TRAV9-2, TRAJ39)
CALYIYNAGNMLTF

SEQ ID NO: 261574 - protein, 12 aa, Homo sapiens
  CDR3 for beta chain variable domain of TCR clone 130787 (TRBV7-2, TRBJ2-5)
RASSQYQETQYF

SEQ ID NO: 261575 - protein, 10 aa, Homo sapiens
  CDR3 for alpha chain variable domain of TCR clone 130788 (TRAV23/DV6, TRAJ57)
CAASSTLSQG

SEQ ID NO: 261576 - protein, 19 aa, Homo sapiens
  CDR3 for beta chain variable domain of TCR clone 130788 (TRBV19, TRBJ2-2)
CASTRPGLAGGRVTGELFF

SEQ ID NO: 261577 - protein, 13 aa, Homo sapiens
  CDR3 for alpha chain variable domain of TCR clone 130789 (TRAV21, TRAJ15)
CAVANQAGTALIF

SEQ ID NO: 261578 - protein, 14 aa, Homo sapiens
  CDR3 for beta chain variable domain of TCR clone 130789 (TRBV28, TRBJ2-2)
CASSLGAATGELFF

SEQ ID NO: 261579 - protein, 14 aa, Homo sapiens
  CDR3 for alpha chain variable domain of TCR clone 130790 (TRAV1-2, TRAJ16)
CAVNRFSDGQKLLF

SEQ ID NO: 261580 - protein, 14 aa, Homo sapiens
  CDR3 for beta chain variable domain of TCR clone 130790 (TRBV25-1, TRBJ1-1)
CASTHLGGNIEAFF

SEQ ID NO: 261581 - protein, 13 aa, Homo sapiens
  CDR3 for alpha chain variable domain of TCR clone 130791 (TRAV9-2, TRAJ49)
CALIQIGGNQYYF

SEQ ID NO: 261582 - protein, 15 aa, Homo sapiens
  CDR3 for beta chain variable domain of TCR clone 130791 (TRBV9, TRBJ1-6)
CASSVAGTGDSPLHF

SEQ ID NO: 261583 - protein, 14 aa, Homo sapiens
  CDR3 for alpha chain variable domain of TCR clone 130792 (TRAV1-2, TRAJ6)
CAVSLSGGSYIPTF

SEQ ID NO: 261584 - protein, 15 aa, Homo sapiens
  CDR3 for beta chain variable domain of TCR clone 130792 (TRBV28, TRBJ2-7)
CASSPGGRGFYEQHF

SEQ ID NO: 261585 - protein, 17 aa, Homo sapiens
  CDR3 for alpha chain variable domain of TCR clone 130793 (TRAV26-1, TRAJ53)
CIVRVDDSGGSNYKLTF

SEQ ID NO: 261586 - protein, 14 aa, Homo sapiens
  CDR3 for beta chain variable domain of TCR clone 130793 (TRBV19, TRBJ2-5)
CASSMTGQQETQYF

SEQ ID NO: 261587 - protein, 15 aa, Homo sapiens
  CDR3 for alpha chain variable domain of TCR clone 130794 (TRAV3, TRAJ5)
CAVRDRKTGRRALTF

SEQ ID NO: 261588 - protein, 13 aa, Homo sapiens
  CDR3 for beta chain variable domain of TCR clone 130794 (TRBV7-9, TRBJ1-1)
CASRWTVNTEAFF

SEQ ID NO: 261589 - protein, 16 aa, Homo sapiens
  CDR3 for alpha chain variable domain of TCR clone 130795 (TRAV17, TRAJ28)
CATASVSGAGSYQLTV

SEQ ID NO: 261590 - protein, 11 aa, Homo sapiens
  CDR3 for beta chain variable domain of TCR clone 130795 (TRBV7-9, TRBJ2-5)
CASSLGETQYF

SEQ ID NO: 261591 - protein, 13 aa, Homo sapiens
  CDR3 for alpha chain variable domain of TCR clone 130796 (TRAV13-2, TRAJ48)
CAEMDFGNEKLTF

SEQ ID NO: 261592 - protein, 16 aa, Homo sapiens
  CDR3 for beta chain variable domain of TCR clone 130796 (TRBV5-1, TRBJ2-5)
CASSLRRTSGQETQYF

SEQ ID NO: 261593 - protein, 14 aa, Homo sapiens
  CDR3 for alpha chain variable domain of TCR clone 130797 (TRAV1-2, TRAJ16)
CAVNRFSDGQKLLF

SEQ ID NO: 261594 - protein, 14 aa, Homo sapiens
  CDR3 for beta chain variable domain of TCR clone 130797 (TRBV7-9, TRBJ2-3)
CASSLEDGTDTPYF

SEQ ID NO: 261595 - protein, 16 aa, Homo sapiens
  CDR3 for alpha chain variable domain of TCR clone 130798 (TRAV17, TRAJ52)
CATSNAGGTSYGKLTF

SEQ ID NO: 261596 - protein, 15 aa, Homo sapiens
  CDR3 for beta chain variable domain of TCR clone 130798 (TRBV11-2, TRBJ2-1)
CASSRNRGLMYEQFF

SEQ ID NO: 261597 - protein, 15 aa, Homo sapiens
  CDR3 for alpha chain variable domain of TCR clone 130799 (TRAV12-2, TRAJ32)
CAVNHYGGATNKLIF

SEQ ID NO: 261598 - protein, 14 aa, Homo sapiens
  CDR3 for beta chain variable domain of TCR clone 130799 (TRBV27, TRBJ2-1)
CARSFGREANEQFF

SEQ ID NO: 261599 - protein, 13 aa, Homo sapiens
  CDR3 for alpha chain variable domain of TCR clone 130800 (TRAV8-3, TRAJ42)
CARYGGSQGNLIF

SEQ ID NO: 261600 - protein, 14 aa, Homo sapiens
  CDR3 for beta chain variable domain of TCR clone 130800 (TRBV20-1, TRBJ2-1)
CSALDRGTHNEQFF

SEQ ID NO: 261601 - protein, 19 aa, Homo sapiens
  CDR3 for alpha chain variable domain of TCR clone 130801 (TRAV26-1, TRAJ52)
CIVRAHRNAGGTSYGKLTF

SEQ ID NO: 261602 - protein, 13 aa, Homo sapiens
  CDR3 for beta chain variable domain of TCR clone 130801 (TRBV12-4, TRBJ2-7)
CASSPTETYEQYF

SEQ ID NO: 261603 - protein, 14 aa, Homo sapiens
  CDR3 for alpha chain variable domain of TCR clone 130802 (TRAV12-2, TRAJ3)
CAVSLYSSPSKIIF

SEQ ID NO: 261604 - protein, 14 aa, Homo sapiens
  CDR3 for beta chain variable domain of TCR clone 130802 (TRBV27, TRBJ2-1)
CAGSIAETYNEQFF

SEQ ID NO: 261605 - protein, 15 aa, Homo sapiens
  CDR3 for alpha chain variable domain of TCR clone 130803 (TRAV12-2, TRAJ57)
CAVSRGQGGAEKLVF

SEQ ID NO: 261606 - protein, 15 aa, Homo sapiens
  CDR3 for beta chain variable domain of TCR clone 130803 (TRBV5-1, TRBJ2-1)
CASSPPRAPYNEQFF

SEQ ID NO: 261607 - protein, 12 aa, Homo sapiens
  CDR3 for alpha chain variable domain of TCR clone 130804 (TRAV27, TRAJ9)
CAGESGGFKTIF

SEQ ID NO: 261608 - protein, 14 aa, Homo sapiens
  CDR3 for beta chain variable domain of TCR clone 130804 (TRBV19, TRBJ2-7)
CASTVQGRPYEQYF

SEQ ID NO: 261609 - protein, 18 aa, Homo sapiens
  CDR3 for alpha chain variable domain of TCR clone 130805 (TRAV12-1, TRAJ15)
CVVSPAGQPGRNCSDLCE

SEQ ID NO: 261610 - protein, 13 aa, Homo sapiens
  CDR3 for beta chain variable domain of TCR clone 130805 (TRBV7-2, TRBJ2-4)
CASSREHANIQYF

SEQ ID NO: 261611 - protein, 14 aa, Homo sapiens
  CDR3 for alpha chain variable domain of TCR clone 130806 (TRAV17, TRAJ57)
CATDPQGGSEKLVF

SEQ ID NO: 261612 - protein, 15 aa, Homo sapiens
  CDR3 for beta chain variable domain of TCR clone 130806 (TRBV7-9, TRBJ1-5)
CASSQGHQPNQPQHF

SEQ ID NO: 261613 - protein, 14 aa, Homo sapiens
  CDR3 for alpha chain variable domain of TCR clone 130807 (TRAV12-2, TRAJ48)
CAVNAFFGNEKLTF

SEQ ID NO: 261614 - protein, 13 aa, Homo sapiens
  CDR3 for beta chain variable domain of TCR clone 130807 (TRBV28, TRBJ2-7)
CPGAQQGLDEQYF

SEQ ID NO: 261615 - protein, 13 aa, Homo sapiens
  CDR3 for alpha chain variable domain of TCR clone 130808 (TRAV2, TRAJ29)
CAAQNSGNTPLVF

SEQ ID NO: 261616 - protein, 14 aa, Homo sapiens
  CDR3 for beta chain variable domain of TCR clone 130808 (TRBV7-9, TRBJ2-4)
CAISLAMGGNIQYF

SEQ ID NO: 261617 - protein, 16 aa, Homo sapiens
  CDR3 for alpha chain variable domain of TCR clone 130809 (TRAV17, TRAJ22)
CATGPISSGSARQLTF

SEQ ID NO: 261618 - protein, 13 aa, Homo sapiens
  CDR3 for beta chain variable domain of TCR clone 130809 (TRBV11-2, TRBJ2-1)
CASSLGLAGGRFS

SEQ ID NO: 261619 - protein, 16 aa, Homo sapiens
  CDR3 for alpha chain variable domain of TCR clone 130810 (TRAV12-1, TRAJ53)
CVVTSVAGGSNYKLTF

SEQ ID NO: 261620 - protein, 16 aa, Homo sapiens
  CDR3 for beta chain variable domain of TCR clone 130810 (TRBV19, TRBJ2-1)
CASSKAGPSSYNEQFF

SEQ ID NO: 261621 - protein, 13 aa, Homo sapiens
  CDR3 for alpha chain variable domain of TCR clone 130811 (TRAV13-1, TRAJ5)
CAARVTGRRALTF

SEQ ID NO: 261622 - protein, 15 aa, Homo sapiens
  CDR3 for beta chain variable domain of TCR clone 130811 (TRBV7-9, TRBJ2-7)
CAGSPGGGLTYEQYF

SEQ ID NO: 261623 - protein, 14 aa, Homo sapiens
  CDR3 for alpha chain variable domain of TCR clone 130812 (TRAV16, TRAJ17)
CALSGRAAGNKLTF

SEQ ID NO: 261624 - protein, 17 aa, Homo sapiens
  CDR3 for beta chain variable domain of TCR clone 130812 (TRBV18, TRBJ2-6)
CASSPRRGAVGANVLTF

SEQ ID NO: 261625 - protein, 13 aa, Homo sapiens
  CDR3 for alpha chain variable domain of TCR clone 130813 (TRAV27, TRAJ6)
CAGGTRGSYIPTF

SEQ ID NO: 261626 - protein, 14 aa, Homo sapiens
  CDR3 for beta chain variable domain of TCR clone 130813 (TRBV6-3, TRBJ1-1)
CASSYQRRDTEAFF

SEQ ID NO: 261627 - protein, 14 aa, Homo sapiens
  CDR3 for alpha chain variable domain of TCR clone 130814 (TRAV29/DV5, TRAJ45)
CAASFRGGADGLNF

SEQ ID NO: 261628 - protein, 11 aa, Homo sapiens
  CDR3 for beta chain variable domain of TCR clone 130814 (TRBV11-2, TRBJ2-2)
CASSLPGELFF

SEQ ID NO: 261629 - protein, 14 aa, Homo sapiens
  CDR3 for alpha chain variable domain of TCR clone 130815 (TRAV16, TRAJ17)
CALNGRAAGNKLTF

SEQ ID NO: 261630 - protein, 15 aa, Homo sapiens
  CDR3 for beta chain variable domain of TCR clone 130815 (TRBV3-1, TRBJ1-2)
CASSPTRLPEGGYTF

SEQ ID NO: 261631 - protein, 11 aa, Homo sapiens
  CDR3 for alpha chain variable domain of TCR clone 130816 (TRAV1-1, TRAJ23)
CAVRQGGKLIF

SEQ ID NO: 261632 - protein, 13 aa, Homo sapiens
  CDR3 for beta chain variable domain of TCR clone 130816 (TRBV12-4, TRBJ2-5)
CASSPGTEETQYF

SEQ ID NO: 261633 - protein, 16 aa, Homo sapiens
  CDR3 for alpha chain variable domain of TCR clone 130817 (TRAV3, TRAJ4)
CAVRPSPSGGYNKLIF

SEQ ID NO: 261634 - protein, 12 aa, Homo sapiens
  CDR3 for beta chain variable domain of TCR clone 130817 (TRBV7-9, TRBJ2-7)
CASSQGVDEQYF

SEQ ID NO: 261635 - protein, 12 aa, Homo sapiens
  CDR3 for alpha chain variable domain of TCR clone 130818 (TRAV22, TRAJ29)
CAPPSGNTSLVF

SEQ ID NO: 261636 - protein, 14 aa, Homo sapiens
  CDR3 for beta chain variable domain of TCR clone 130818 (TRBV11-2, TRBJ2-7)
CASSLGAGAYEQYF

SEQ ID NO: 261637 - protein, 13 aa, Homo sapiens
  CDR3 for alpha chain variable domain of TCR clone 130819 (TRAV12-2, TRAJ10)
CAVPTGGGNKPTF

SEQ ID NO: 261638 - protein, 14 aa, Homo sapiens
  CDR3 for beta chain variable domain of TCR clone 130819 (TRBV25-1, TRBJ1-1)
CASTHLGGNTEAFF

SEQ ID NO: 261639 - protein, 13 aa, Homo sapiens
  CDR3 for alpha chain variable domain of TCR clone 130820 (TRAV2, TRAJ20)
CAVEDPSEYKLSF

SEQ ID NO: 261640 - protein, 16 aa, Homo sapiens
  CDR3 for beta chain variable domain of TCR clone 130820 (TRBV25-1, TRBJ2-7)
CDSSELTGGGIYEQYF

SEQ ID NO: 261641 - protein, 15 aa, Homo sapiens
  CDR3 for alpha chain variable domain of TCR clone 130821 (TRAV12-3, TRAJ49)
CAMAVTPNTGNQFYF

SEQ ID NO: 261642 - protein, 18 aa, Homo sapiens
  CDR3 for beta chain variable domain of TCR clone 130821 (TRBV4-1, TRBJ1-5)
CASSQDPRGQGVNQPQHF

SEQ ID NO: 261643 - protein, 12 aa, Homo sapiens
  CDR3 for alpha chain variable domain of TCR clone 130822 (TRAV12-3, TRAJ17)
CAMTLTGDKLTF

SEQ ID NO: 261644 - protein, 17 aa, Homo sapiens
  CDR3 for beta chain variable domain of TCR clone 130822 (TRBV20-1, TRBJ2-7)
CSATRAGGVAGVEEQYF

SEQ ID NO: 261645 - protein, 21 aa, Homo sapiens
  CDR3 for alpha chain variable domain of TCR clone 130823 (TRAV12-1, TRAJ49)
SSVIQPPTSVWVFNTGNQFYF

SEQ ID NO: 261646 - protein, 14 aa, Homo sapiens
  CDR3 for beta chain variable domain of TCR clone 130823 (TRBV12-4, TRBJ1-2)
CASSNLRGNYGYTF

SEQ ID NO: 261647 - protein, 14 aa, Homo sapiens
  CDR3 for alpha chain variable domain of TCR clone 130824 (TRAV12-2, TRAJ17)
CAVNIKAAGNKLTF

SEQ ID NO: 261648 - protein, 13 aa, Homo sapiens
  CDR3 for beta chain variable domain of TCR clone 130824 (TRBV4-1, TRBJ2-2)
CASSQGNTGELFF

SEQ ID NO: 261649 - protein, 13 aa, Homo sapiens
  CDR3 for alpha chain variable domain of TCR clone 130825 (TRAV3, TRAJ20)
CAVRDEPGYKLSF

SEQ ID NO: 261650 - protein, 15 aa, Homo sapiens
  CDR3 for beta chain variable domain of TCR clone 130825 (TRBV19, TRBJ2-2)
CASSLNRGVTGELFF

SEQ ID NO: 261651 - protein, 15 aa, Homo sapiens
  CDR3 for alpha chain variable domain of TCR clone 130826 (TRAV13-1, TRAJ17)
CAASIERAAGNKLTF

SEQ ID NO: 261652 - protein, 12 aa, Homo sapiens
  CDR3 for beta chain variable domain of TCR clone 130826 (TRBV11-2, TRBJ2-1)
CASSPGNNEQFF

SEQ ID NO: 261653 - protein, 13 aa, Homo sapiens
  CDR3 for alpha chain variable domain of TCR clone 130827 (TRAV13-1, TRAJ21)
CEASIYNFNKFYF

SEQ ID NO: 261654 - protein, 16 aa, Homo sapiens
  CDR3 for beta chain variable domain of TCR clone 130827 (TRBV20-1, TRBJ1-4)
CSAPGQGLLTNEKLFF

SEQ ID NO: 261655 - protein, 12 aa, Homo sapiens
  CDR3 for alpha chain variable domain of TCR clone 130828 (TRAV12-3, TRAJ34)
CAMGYNTDRLIF

SEQ ID NO: 261656 - protein, 15 aa, Homo sapiens
  CDR3 for beta chain variable domain of TCR clone 130828 (TRBV28, TRBJ2-1)
CASSIIAGGRSEQFF

SEQ ID NO: 261657 - protein, 14 aa, Homo sapiens
  CDR3 for alpha chain variable domain of TCR clone 130829 (TRAV8-2, TRAJ37)
CVVSISGNTGKLIF

SEQ ID NO: 261658 - protein, 15 aa, Homo sapiens
  CDR3 for beta chain variable domain of TCR clone 130829 (TRBV9, TRBJ2-3)
CASSTGGGEGDTQYF

SEQ ID NO: 261659 - protein, 14 aa, Homo sapiens
  CDR3 for alpha chain variable domain of TCR clone 130830 (TRAV1-2, TRAJ16)
CAVNRFSDGQKLLF

SEQ ID NO: 261660 - protein, 13 aa, Homo sapiens
  CDR3 for beta chain variable domain of TCR clone 130830 (TRBV7-3, TRBJ1-1)
CASSQDWGAEDFF

SEQ ID NO: 261661 - protein, 14 aa, Homo sapiens
  CDR3 for alpha chain variable domain of TCR clone 130831 (TRAV23/DV6, TRAJ10)
CAAAISGGGNKLTF

SEQ ID NO: 261662 - protein, 16 aa, Homo sapiens
  CDR3 for beta chain variable domain of TCR clone 130831 (TRBV10-3, TRBJ2-1)
CAIRGGGRGDYNEQFF

SEQ ID NO: 261663 - protein, 14 aa, Homo sapiens
  CDR3 for alpha chain variable domain of TCR clone 130832 (TRAV1-2, TRAJ8)
CAVREDTGFPKLVF

SEQ ID NO: 261664 - protein, 16 aa, Homo sapiens
  CDR3 for beta chain variable domain of TCR clone 130832 (TRBV12-4, TRBJ1-5)
CASSRPVGGSNQPQHF

SEQ ID NO: 261665 - protein, 16 aa, Homo sapiens
  CDR3 for alpha chain variable domain of TCR clone 130833 (TRAV30, TRAJ24)
CGTEIVDADSWGKFQF

SEQ ID NO: 261666 - protein, 15 aa, Homo sapiens
  CDR3 for beta chain variable domain of TCR clone 130833 (TRBV25-1, TRBJ1-4)
CASSPGDSTNEKLFF

SEQ ID NO: 261667 - protein, 11 aa, Homo sapiens
  CDR3 for alpha chain variable domain of TCR clone 130834 (TRAV21, TRAJ34)
CAHYNTDKLIF

SEQ ID NO: 261668 - protein, 14 aa, Homo sapiens
  CDR3 for beta chain variable domain of TCR clone 130834 (TRBV7-9, TRBJ2-3)
CASSLEDGTDTQYF

SEQ ID NO: 261669 - protein, 15 aa, Homo sapiens
  CDR3 for alpha chain variable domain of TCR clone 130835 (TRAV26-1, TRAJ40)
CIVRVTTSGTYEYIF

SEQ ID NO: 261670 - protein, 12 aa, Homo sapiens
  CDR3 for beta chain variable domain of TCR clone 130835 (TRBV7-9, TRBJ1-4)
CASSTDREKLFF

SEQ ID NO: 261671 - protein, 12 aa, Homo sapiens
  CDR3 for alpha chain variable domain of TCR clone 130836 (TRAV12-3, TRAJ17)
CAMTLTGNKLTF

SEQ ID NO: 261672 - protein, 12 aa, Homo sapiens
  CDR3 for beta chain variable domain of TCR clone 130836 (TRBV28, TRBJ2-1)
CASSVQINEQFF

SEQ ID NO: 261673 - protein, 14 aa, Homo sapiens
  CDR3 for alpha chain variable domain of TCR clone 130837 (TRAV21, TRAJ58)
CAVRRGRSGSRLTF

SEQ ID NO: 261674 - protein, 13 aa, Homo sapiens
  CDR3 for beta chain variable domain of TCR clone 130837 (TRBV7-2, TRBJ1-6)
CASSLKFDSPLHV

SEQ ID NO: 261675 - protein, 17 aa, Homo sapiens
  CDR3 for alpha chain variable domain of TCR clone 130838 (TRAV8-6, TRAJ8)
CAVKEGIENTGFQKLVF

SEQ ID NO: 261676 - protein, 12 aa, Homo sapiens
  CDR3 for beta chain variable domain of TCR clone 130838 (TRBV19, TRBJ1-4)
CASKDWPGGLFC

SEQ ID NO: 261677 - protein, 14 aa, Homo sapiens
  CDR3 for alpha chain variable domain of TCR clone 130839 (TRAV35, TRAJ38)
CAGSNAGNKRKLIW

SEQ ID NO: 261678 - protein, 12 aa, Homo sapiens
  CDR3 for beta chain variable domain of TCR clone 130839 (TRBV19, TRBJ2-7)
CASTDRGYEQYF

SEQ ID NO: 261679 - protein, 14 aa, Homo sapiens
  CDR3 for alpha chain variable domain of TCR clone 130840 (TRAV13-1, TRAJ35)
CAASKGGFGNVLHC

SEQ ID NO: 261680 - protein, 14 aa, Homo sapiens
  CDR3 for beta chain variable domain of TCR clone 130840 (TRBV11-2, TRBJ2-3)
CASSRLARTDTQYF

SEQ ID NO: 261681 - protein, 16 aa, Homo sapiens
  CDR3 for alpha chain variable domain of TCR clone 130841 (TRAV16, TRAJ52)
CALSAAGGTSYGKLTF

SEQ ID NO: 261682 - protein, 17 aa, Homo sapiens
  CDR3 for beta chain variable domain of TCR clone 130841 (TRBV11-2, TRBJ2-1)
CASSLYPPVVEYNEQFF

SEQ ID NO: 261683 - protein, 13 aa, Homo sapiens
  CDR3 for alpha chain variable domain of TCR clone 130842 (TRAV21, TRAJ27)
CAARPGNAGKSTF

SEQ ID NO: 261684 - protein, 13 aa, Homo sapiens
  CDR3 for beta chain variable domain of TCR clone 130842 (TRBV11-2, TRBJ2-2)
CASGRDREEELFF

SEQ ID NO: 261685 - protein, 14 aa, Homo sapiens
  CDR3 for alpha chain variable domain of TCR clone 130843 (TRAV3, TRAJ37)
CAVKESGNTGKLLF

SEQ ID NO: 261686 - protein, 14 aa, Homo sapiens
  CDR3 for beta chain variable domain of TCR clone 130843 (TRBV2, TRBJ1-5)
CASSENRGGQPQHF

SEQ ID NO: 261687 - protein, 14 aa, Homo sapiens
  CDR3 for alpha chain variable domain of TCR clone 130844 (TRAV1-2, TRAJ16)
CAVNRFSDGQKLLF

SEQ ID NO: 261688 - protein, 15 aa, Homo sapiens
  CDR3 for beta chain variable domain of TCR clone 130844 (TRBV9, TRBJ1-6)
CASSVAGTGDTPLHF

SEQ ID NO: 261689 - protein, 15 aa, Homo sapiens
  CDR3 for alpha chain variable domain of TCR clone 130845 (TRAV25, TRAJ52)
CAGRPGGTSYGKLTF

SEQ ID NO: 261690 - protein, 17 aa, Homo sapiens
  CDR3 for beta chain variable domain of TCR clone 130845 (TRBV7-8, TRBJ2-6)
CASSAGTGGAGAIVLTF

SEQ ID NO: 261691 - protein, 15 aa, Homo sapiens
  CDR3 for alpha chain variable domain of TCR clone 130846 (TRAV1-2, TRAJ28)
CAVQYSGAGSYQLTF

SEQ ID NO: 261692 - protein, 13 aa, Homo sapiens
  CDR3 for beta chain variable domain of TCR clone 130846 (TRBV20-1, TRBJ2-7)
CSATPTSGYEQYF

SEQ ID NO: 261693 - protein, 13 aa, Homo sapiens
  CDR3 for alpha chain variable domain of TCR clone 130847 (TRAV8-3, TRAJ20)
CAVGRPNDYKLGF

SEQ ID NO: 261694 - protein, 14 aa, Homo sapiens
  CDR3 for beta chain variable domain of TCR clone 130847 (TRBV12-5, TRBJ2-5)
CASGSRTHQETQYF

SEQ ID NO: 261695 - protein, 15 aa, Homo sapiens
  CDR3 for alpha chain variable domain of TCR clone 130848 (TRAV21, TRAJ45)
CAVSYSEGGADGLTF

SEQ ID NO: 261696 - protein, 12 aa, Homo sapiens
  CDR3 for beta chain variable domain of TCR clone 130848 (TRBV11-2, TRBJ2-1)
CASSPGNNEQFF

SEQ ID NO: 261697 - protein, 12 aa, Homo sapiens
  CDR3 for alpha chain variable domain of TCR clone 130849 (TRAV21, TRAJ27)
CAANTNAGKSTF

SEQ ID NO: 261698 - protein, 14 aa, Homo sapiens
  CDR3 for beta chain variable domain of TCR clone 130849 (TRBV7-2, TRBJ1-2)
CASSQTGSTYGYTF

SEQ ID NO: 261699 - protein, 14 aa, Homo sapiens
  CDR3 for alpha chain variable domain of TCR clone 130850 (TRAV26-1, TRAJ22)
CIVRVYGSARQLTF

SEQ ID NO: 261700 - protein, 17 aa, Homo sapiens
  CDR3 for beta chain variable domain of TCR clone 130850 (TRBV7-3, TRBJ2-3)
CASSPGGLAGSGDTQYF

SEQ ID NO: 261701 - protein, 12 aa, Homo sapiens
  CDR3 for alpha chain variable domain of TCR clone 130851 (TRAV12-2, TRAJ8)
CAVATGFQKLVF

SEQ ID NO: 261702 - protein, 20 aa, Homo sapiens
  CDR3 for beta chain variable domain of TCR clone 130851 (TRBV3-1, TRBJ2-6)
CASSPRPGLEGGAGANVLTF

SEQ ID NO: 261703 - protein, 11 aa, Homo sapiens
  CDR3 for alpha chain variable domain of TCR clone 130852 (TRAV2, TRAJ21)
CAVFNFNKFYF

SEQ ID NO: 261704 - protein, 14 aa, Homo sapiens
  CDR3 for beta chain variable domain of TCR clone 130852 (TRBV15, TRBJ2-3)
CSTRSGTSTDTQYF

SEQ ID NO: 261705 - protein, 14 aa, Homo sapiens
  CDR3 for alpha chain variable domain of TCR clone 130853 (TRAV12-1, TRAJ4)
CVVNEPGGYNKLIF

SEQ ID NO: 261706 - protein, 13 aa, Homo sapiens
  CDR3 for beta chain variable domain of TCR clone 130853 (TRBV7-9, TRBJ1-2)
CASSLKQNYGYTF

SEQ ID NO: 261707 - protein, 12 aa, Homo sapiens
  CDR3 for alpha chain variable domain of TCR clone 130854 (TRAV13-1, TRAJ30)
CAASYRDDKIIF

SEQ ID NO: 261708 - protein, 15 aa, Homo sapiens
  CDR3 for beta chain variable domain of TCR clone 130854 (TRBV12-4, TRBJ2-5)
CASSPPTGLQETQYF

SEQ ID NO: 261709 - protein, 14 aa, Homo sapiens
  CDR3 for alpha chain variable domain of TCR clone 130855 (TRAV8-2, TRAJ37)
CVVSLTGNTGKLIF

SEQ ID NO: 261710 - protein, 18 aa, Homo sapiens
  CDR3 for beta chain variable domain of TCR clone 130855 (TRBV20-1, TRBJ2-3)
CSASGLAGGPGTTDTQYF

SEQ ID NO: 261711 - protein, 14 aa, Homo sapiens
  CDR3 for alpha chain variable domain of TCR clone 130856 (TRAV8-3, TRAJ27)
CAGGRNTNAGKSTF

SEQ ID NO: 261712 - protein, 15 aa, Homo sapiens
  CDR3 for beta chain variable domain of TCR clone 130856 (TRBV11-3, TRBJ2-5)
CASGLRGRVQETQYF

SEQ ID NO: 261713 - protein, 20 aa, Homo sapiens
  CDR3 for alpha chain variable domain of TCR clone 130857 (TRAV27, TRAJ10)
ASTSVPSRGILTGGGNKLPF

SEQ ID NO: 261714 - protein, 15 aa, Homo sapiens
  CDR3 for beta chain variable domain of TCR clone 130857 (TRBV9, TRBJ2-3)
CASSLEGGLTDTQYF

SEQ ID NO: 261715 - protein, 12 aa, Homo sapiens
  CDR3 for alpha chain variable domain of TCR clone 130858 (TRAV2, TRAJ32)
CAVGGATNELIF

SEQ ID NO: 261716 - protein, 16 aa, Homo sapiens
  CDR3 for beta chain variable domain of TCR clone 130858 (TRBV4-2, TRBJ1-5)
CASSQGQGASNQPQHF

SEQ ID NO: 261717 - protein, 14 aa, Homo sapiens
  CDR3 for alpha chain variable domain of TCR clone 130859 (TRAV8-3, TRAJ27)
CAGGRNTNAGKSTC

SEQ ID NO: 261718 - protein, 15 aa, Homo sapiens
  CDR3 for beta chain variable domain of TCR clone 130859 (TRBV11-3, TRBJ2-5)
CASSLRGRVQETQYF

SEQ ID NO: 261719 - protein, 14 aa, Homo sapiens
  CDR3 for alpha chain variable domain of TCR clone 130860 (TRAV13-1, TRAJ44)
CAAKATGTASKLTF

SEQ ID NO: 261720 - protein, 17 aa, Homo sapiens
  CDR3 for beta chain variable domain of TCR clone 130860 (TRBV7-3, TRBJ2-3)
CASNLMKRMRGADTQYF

SEQ ID NO: 261721 - protein, 11 aa, Homo sapiens
  CDR3 for alpha chain variable domain of TCR clone 130861 (TRAV20, TRAJ34)
CTRDNTDKLIF

SEQ ID NO: 261722 - protein, 15 aa, Homo sapiens
  CDR3 for beta chain variable domain of TCR clone 130861 (TRBV2, TRBJ2-1)
CASSVNSEGTDEQFF

SEQ ID NO: 261723 - protein, 18 aa, Homo sapiens
  CDR3 for alpha chain variable domain of TCR clone 130862 (TRAV26-2, TRAJ45)
CILRVDKYSGGGADGLTF

SEQ ID NO: 261724 - protein, 16 aa, Homo sapiens
  CDR3 for beta chain variable domain of TCR clone 130862 (TRBV2, TRBJ1-4)
CDSNLLQGATNEKLFF

SEQ ID NO: 261725 - protein, 13 aa, Homo sapiens
  CDR3 for alpha chain variable domain of TCR clone 130863 (TRAV8-6, TRAJ50)
CAVIKTSYDKVLF

SEQ ID NO: 261726 - protein, 15 aa, Homo sapiens
  CDR3 for beta chain variable domain of TCR clone 130863 (TRBV7-2, TRBJ2-2)
CASRRPGQNTGEPFF

SEQ ID NO: 261727 - protein, 13 aa, Homo sapiens
  CDR3 for alpha chain variable domain of TCR clone 130864 (TRAV17, TRAJ5)
CAPMDTGRRALTF

SEQ ID NO: 261728 - protein, 15 aa, Homo sapiens
  CDR3 for beta chain variable domain of TCR clone 130864 (TRBV6-6, TRBJ2-5)
CASSPGGGLEGTQYF

SEQ ID NO: 261729 - protein, 12 aa, Homo sapiens
  CDR3 for alpha chain variable domain of TCR clone 130865 (TRAV12-1, TRAJ40)
CVVSSGTYKYIF

SEQ ID NO: 261730 - protein, 15 aa, Homo sapiens
  CDR3 for beta chain variable domain of TCR clone 130865 (TRBV20-1, TRBJ2-7)
CSARDRVSGMDEQYF

SEQ ID NO: 261731 - protein, 14 aa, Homo sapiens
  CDR3 for alpha chain variable domain of TCR clone 130866 (TRAV20, TRAJ42)
CAVQAGGSQGNLIC

SEQ ID NO: 261732 - protein, 14 aa, Homo sapiens
  CDR3 for beta chain variable domain of TCR clone 130866 (TRBV28, TRBJ1-2)
CASRIQGANYGYTF

SEQ ID NO: 261733 - protein, 16 aa, Homo sapiens
  CDR3 for alpha chain variable domain of TCR clone 130867 (TRAV3, TRAJ3)
CAVRDRAKSSASKIIF

SEQ ID NO: 261734 - protein, 16 aa, Homo sapiens
  CDR3 for beta chain variable domain of TCR clone 130867 (TRBV20-1, TRBJ2-4)
CSATSLEELAKNIQYF

SEQ ID NO: 261735 - protein, 18 aa, Homo sapiens
  CDR3 for alpha chain variable domain of TCR clone 130868 (TRAV21, TRAJ52)
CAVRPSPAGGTSYGKLTF

SEQ ID NO: 261736 - protein, 13 aa, Homo sapiens
  CDR3 for beta chain variable domain of TCR clone 130868 (TRBV7-3, TRBJ1-1)
CASSQDWGAEAFF

SEQ ID NO: 261737 - protein, 15 aa, Homo sapiens
  CDR3 for alpha chain variable domain of TCR clone 130869 (TRAV26-1, TRAJ42)
FIVRVKVGSQGNLIF

SEQ ID NO: 261738 - protein, 14 aa, Homo sapiens
  CDR3 for beta chain variable domain of TCR clone 130869 (TRBV19, TRBJ2-2)
CATTGHANTGELFF

SEQ ID NO: 261739 - protein, 13 aa, Homo sapiens
  CDR3 for alpha chain variable domain of TCR clone 130870 (TRAV13-2, TRAJ22)
CLGWISSARQLTF

SEQ ID NO: 261740 - protein, 15 aa, Homo sapiens
  CDR3 for beta chain variable domain of TCR clone 130870 (TRBV7-2, TRBJ2-3)
CARSSTGLETDTQYF

SEQ ID NO: 261741 - protein, 10 aa, Homo sapiens
  CDR3 for alpha chain variable domain of TCR clone 130871 (TRAV16, TRAJ22)
SAMYLRQLTF

SEQ ID NO: 261742 - protein, 15 aa, Homo sapiens
  CDR3 for beta chain variable domain of TCR clone 130871 (TRBV7-9, TRBJ1-6)
CASSSPGRGNSPVHF

SEQ ID NO: 261743 - protein, 11 aa, Homo sapiens
  CDR3 for alpha chain variable domain of TCR clone 130872 (TRAV35, TRAJ30)
CAGERDDKLIF

SEQ ID NO: 261744 - protein, 14 aa, Homo sapiens
  CDR3 for beta chain variable domain of TCR clone 130872 (TRBV15, TRBJ2-5)
CATSGDRGQETQYF

SEQ ID NO: 261745 - protein, 14 aa, Homo sapiens
  CDR3 for alpha chain variable domain of TCR clone 130873 (TRAV13-1, TRAJ9)
CAASPLTGGFKTIF

SEQ ID NO: 261746 - protein, 13 aa, Homo sapiens
  CDR3 for beta chain variable domain of TCR clone 130873 (TRBV20-1, TRBJ1-1)
CSAGTVGNTEAFF

SEQ ID NO: 261747 - protein, 17 aa, Homo sapiens
  CDR3 for alpha chain variable domain of TCR clone 130874 (TRAV21, TRAJ52)
CAVGGNAGGTSYGKLTF

SEQ ID NO: 261748 - protein, 13 aa, Homo sapiens
  CDR3 for beta chain variable domain of TCR clone 130874 (TRBV5-1, TRBJ1-2)
CASSFQGNYGYTF

SEQ ID NO: 261749 - protein, 17 aa, Homo sapiens
  CDR3 for alpha chain variable domain of TCR clone 130875 (TRAV3, TRAJ42)
CAVRDRDYGGSQGNLIF

SEQ ID NO: 261750 - protein, 12 aa, Homo sapiens
  CDR3 for beta chain variable domain of TCR clone 130875 (TRBV19, TRBJ1-1)
CASSIGTEEAFF

SEQ ID NO: 261751 - protein, 12 aa, Homo sapiens
  CDR3 for alpha chain variable domain of TCR clone 130876 (TRAV8-6, TRAJ43)
CVVSHNNNDMRF

SEQ ID NO: 261752 - protein, 13 aa, Homo sapiens
  CDR3 for beta chain variable domain of TCR clone 130876 (TRBV7-3, TRBJ1-1)
CASSQDWGAEAFF

SEQ ID NO: 261753 - protein, 14 aa, Homo sapiens
  CDR3 for alpha chain variable domain of TCR clone 130877 (TRAV17, TRAJ6)
CATDASGGSYIPTF

SEQ ID NO: 261754 - protein, 19 aa, Homo sapiens
  CDR3 for beta chain variable domain of TCR clone 130877 (TRBV4-3, TRBJ2-7)
CASSQEFIGWQVTPYEHYF

SEQ ID NO: 261755 - protein, 15 aa, Homo sapiens
  CDR3 for alpha chain variable domain of TCR clone 130878 (TRAV12-3, TRAJ27)
CAMRAYNTNAGKSTF

SEQ ID NO: 261756 - protein, 13 aa, Homo sapiens
  CDR3 for beta chain variable domain of TCR clone 130878 (TRBV11-2, TRBJ2-5)
CASSRGASETQYF

SEQ ID NO: 261757 - protein, 14 aa, Homo sapiens
  CDR3 for alpha chain variable domain of TCR clone 130879 (TRAV12-2, TRAJ13)
CAVKETGGYQKVTF

SEQ ID NO: 261758 - protein, 13 aa, Homo sapiens
  CDR3 for beta chain variable domain of TCR clone 130879 (TRBV7-9, TRBJ1-2)
CASSLKQNYGYTF

SEQ ID NO: 261759 - protein, 10 aa, Homo sapiens
  CDR3 for alpha chain variable domain of TCR clone 130880 (TRAV12-2, TRAJ10)
CAAWMGVETH

SEQ ID NO: 261760 - protein, 17 aa, Homo sapiens
  CDR3 for beta chain variable domain of TCR clone 130880 (TRBV13, TRBJ2-3)
CASSLSRVAGGRNTQYF

SEQ ID NO: 261761 - protein, 14 aa, Homo sapiens
  CDR3 for alpha chain variable domain of TCR clone 130881 (TRAV6, TRAJ17)
CALDLKAAGNKLTF

SEQ ID NO: 261762 - protein, 17 aa, Homo sapiens
  CDR3 for beta chain variable domain of TCR clone 130881 (TRBV14, TRBJ2-5)
CASSQASGRPSTSGQAR

SEQ ID NO: 261763 - protein, 12 aa, Homo sapiens
  CDR3 for alpha chain variable domain of TCR clone 130882 (TRAV13-1, TRAJ21)
CAAKEGFNKFYF

SEQ ID NO: 261764 - protein, 13 aa, Homo sapiens
  CDR3 for beta chain variable domain of TCR clone 130882 (TRBV6-4, TRBJ1-5)
CASSADLNQPQHF

SEQ ID NO: 261765 - protein, 14 aa, Homo sapiens
  CDR3 for alpha chain variable domain of TCR clone 130883 (TRAV17, TRAJ57)
CATDPQGGSEKLVF

SEQ ID NO: 261766 - protein, 15 aa, Homo sapiens
  CDR3 for beta chain variable domain of TCR clone 130883 (TRBV19, TRBJ2-4)
CASRGPRRGENIQYF

SEQ ID NO: 261767 - protein, 15 aa, Homo sapiens
  CDR3 for alpha chain variable domain of TCR clone 130884 (TRAV12-1, TRAJ44)
CVADLPTGTASKLTF

SEQ ID NO: 261768 - protein, 17 aa, Homo sapiens
  CDR3 for beta chain variable domain of TCR clone 130884 (TRBV11-2, TRBJ2-1)
CASSLYPPGVEYNEQFF

SEQ ID NO: 261769 - protein, 13 aa, Homo sapiens
  CDR3 for alpha chain variable domain of TCR clone 130885 (TRAV23/DV6, TRAJ27)
CAASKPMQANQPL

SEQ ID NO: 261770 - protein, 14 aa, Homo sapiens
  CDR3 for beta chain variable domain of TCR clone 130885 (TRBV5-4, TRBJ1-1)
CASSLDSRRGEAFF

SEQ ID NO: 261771 - protein, 15 aa, Homo sapiens
  CDR3 for alpha chain variable domain of TCR clone 130886 (TRAV3, TRAJ22)
FAVRDRGGSARQLTF

SEQ ID NO: 261772 - protein, 15 aa, Homo sapiens
  CDR3 for beta chain variable domain of TCR clone 130886 (TRBV27, TRBJ2-1)
CASSNGGGSSNEQFF

SEQ ID NO: 261773 - protein, 15 aa, Homo sapiens
  CDR3 for alpha chain variable domain of TCR clone 130887 (TRAV3, TRAJ13)
CAVRDIAWGYQKVTF

SEQ ID NO: 261774 - protein, 13 aa, Homo sapiens
  CDR3 for beta chain variable domain of TCR clone 130887 (TRBV2, TRBJ2-2)
CASSKKNTGELFF

SEQ ID NO: 261775 - protein, 17 aa, Homo sapiens
  CDR3 for alpha chain variable domain of TCR clone 130888 (TRAV3, TRAJ42)
CAVRDRDYGGSQGNFIF

SEQ ID NO: 261776 - protein, 17 aa, Homo sapiens
  CDR3 for beta chain variable domain of TCR clone 130888 (TRBV7-9, TRBJ2-3)
CASSPTVAGDLTDTQYF

SEQ ID NO: 261777 - protein, 15 aa, Homo sapiens
  CDR3 for alpha chain variable domain of TCR clone 130889 (TRAV12-3, TRAJ49)
CAMAVTPNTGNQFYF

SEQ ID NO: 261778 - protein, 14 aa, Homo sapiens
  CDR3 for beta chain variable domain of TCR clone 130889 (TRBV7-8, TRBJ2-3)
CASSVEAGTDTQYF

SEQ ID NO: 261779 - protein, 13 aa, Homo sapiens
  CDR3 for alpha chain variable domain of TCR clone 130890 (TRAV27, TRAJ6)
CAGGTRGSYIPTF

SEQ ID NO: 261780 - protein, 15 aa, Homo sapiens
  CDR3 for beta chain variable domain of TCR clone 130890 (TRBV5-1, TRBJ2-1)
CASSPPRAPYNEQFF

SEQ ID NO: 261781 - protein, 19 aa, Homo sapiens
  CDR3 for alpha chain variable domain of TCR clone 130891 (TRAV26-1, TRAJ22)
CCVLLHRWVFSGSARQLTF

SEQ ID NO: 261782 - protein, 19 aa, Homo sapiens
  CDR3 for beta chain variable domain of TCR clone 130891 (TRBV19, TRBJ2-5)
CASSIGQVTDFSLGETQYF

SEQ ID NO: 261783 - protein, 14 aa, Homo sapiens
  CDR3 for alpha chain variable domain of TCR clone 130892 (TRAV12-3, TRAJ42)
CAMNYGGSQGNLIF

SEQ ID NO: 261784 - protein, 14 aa, Homo sapiens
  CDR3 for beta chain variable domain of TCR clone 130892 (TRBV5-7, TRBJ1-5)
CASYGKLWDQPQHF

SEQ ID NO: 261785 - protein, 12 aa, Homo sapiens
  CDR3 for alpha chain variable domain of TCR clone 130893 (TRAV21, TRAJ24)
CAVEPGWGKFQF

SEQ ID NO: 261786 - protein, 15 aa, Homo sapiens
  CDR3 for beta chain variable domain of TCR clone 130893 (TRBV2, TRBJ2-3)
CASSDFEKATDTQYF

SEQ ID NO: 261787 - protein, 14 aa, Homo sapiens
  CDR3 for alpha chain variable domain of TCR clone 130894 (TRAV12-2, TRAJ45)
CALPERGGPDGLTF

SEQ ID NO: 261788 - protein, 14 aa, Homo sapiens
  CDR3 for beta chain variable domain of TCR clone 130894 (TRBV18, TRBJ1-5)
CASSPGNSNQPQHF

SEQ ID NO: 261789 - protein, 11 aa, Homo sapiens
  CDR3 for alpha chain variable domain of TCR clone 130895 (TRAV17, TRAJ9)
CATTGGFKTIF

SEQ ID NO: 261790 - protein, 16 aa, Homo sapiens
  CDR3 for beta chain variable domain of TCR clone 130895 (TRBV19, TRBJ1-5)
CASSIDRGGPRQPQHF

SEQ ID NO: 261791 - protein, 12 aa, Homo sapiens
  CDR3 for alpha chain variable domain of TCR clone 130896 (TRAV12-3, TRAJ33)
CAFMDSNYQLIW

SEQ ID NO: 261792 - protein, 12 aa, Homo sapiens
  CDR3 for beta chain variable domain of TCR clone 130896 (TRBV11-2, TRBJ2-2)
CASSLGGGELFF

SEQ ID NO: 261793 - protein, 14 aa, Homo sapiens
  CDR3 for alpha chain variable domain of TCR clone 130897 (TRAV1-1, TRAJ27)
CAVIYNTNAGKSTF

SEQ ID NO: 261794 - protein, 13 aa, Homo sapiens
  CDR3 for beta chain variable domain of TCR clone 130897 (TRBV15, TRBJ1-6)
CATSGGLNSPLHF

SEQ ID NO: 261795 - protein, 16 aa, Homo sapiens
  CDR3 for alpha chain variable domain of TCR clone 130898 (TRAV3, TRAJ23)
CAVKIGIYNQGGKFIF

SEQ ID NO: 261796 - protein, 17 aa, Homo sapiens
  CDR3 for beta chain variable domain of TCR clone 130898 (TRBV10-3, TRBJ2-6)
CAISESTAPSGANVLTF

SEQ ID NO: 261797 - protein, 14 aa, Homo sapiens
  CDR3 for alpha chain variable domain of TCR clone 130899 (TRAV23/DV6, TRAJ24)
CAASLSDSWGKLQF

SEQ ID NO: 261798 - protein, 13 aa, Homo sapiens
  CDR3 for beta chain variable domain of TCR clone 130899 (TRBV19, TRBJ1-2)
CASSQGQVYGYTF

SEQ ID NO: 261799 - protein, 14 aa, Homo sapiens
  CDR3 for alpha chain variable domain of TCR clone 130900 (TRAV26-2, TRAJ32)
CCVGYGGATNKLIF

SEQ ID NO: 261800 - protein, 12 aa, Homo sapiens
  CDR3 for beta chain variable domain of TCR clone 130900 (TRBV7-9, TRBJ2-7)
CASSFGSYEQYF

SEQ ID NO: 261801 - protein, 17 aa, Homo sapiens
  CDR3 for alpha chain variable domain of TCR clone 130901 (TRAV3, TRAJ12)
CAVRDGGRMDSSYKLIF

SEQ ID NO: 261802 - protein, 15 aa, Homo sapiens
  CDR3 for beta chain variable domain of TCR clone 130901 (TRBV11-2, TRBJ1-3)
CASSLDGTVGNTIYF

SEQ ID NO: 261803 - protein, 11 aa, Homo sapiens
  CDR3 for alpha chain variable domain of TCR clone 130902 (TRAV16, TRAJ33)
CALHSNYQLIW

SEQ ID NO: 261804 - protein, 14 aa, Homo sapiens
  CDR3 for beta chain variable domain of TCR clone 130902 (TRBV5-1, TRBJ2-7)
CASSRGESLYEQYF

SEQ ID NO: 261805 - protein, 14 aa, Homo sapiens
  CDR3 for alpha chain variable domain of TCR clone 130903 (TRAV12-2, TRAJ13)
CAVKKTGGYQKVTF

SEQ ID NO: 261806 - protein, 15 aa, Homo sapiens
  CDR3 for beta chain variable domain of TCR clone 130903 (TRBV28, TRBJ1-5)
CASSRTGGYVQPQHF

SEQ ID NO: 261807 - protein, 14 aa, Homo sapiens
  CDR3 for alpha chain variable domain of TCR clone 130904 (TRAV1-2, TRAJ16)
CAVNRFSDGQKLLF

SEQ ID NO: 261808 - protein, 16 aa, Homo sapiens
  CDR3 for beta chain variable domain of TCR clone 130904 (TRBV19, TRBJ2-1)
CASSKAGPRSYNEQFF

SEQ ID NO: 261809 - protein, 17 aa, Homo sapiens
  CDR3 for alpha chain variable domain of TCR clone 130905 (TRAV26-1, TRAJ53)
CIVRVDDSGGSSYKLTF

SEQ ID NO: 261810 - protein, 15 aa, Homo sapiens
  CDR3 for beta chain variable domain of TCR clone 130905 (TRBV20-1, TRBJ2-7)
CSARVPAAYFYEQYF

SEQ ID NO: 261811 - protein, 14 aa, Homo sapiens
  CDR3 for alpha chain variable domain of TCR clone 130906 (TRAV20, TRAJ42)
CAVQAGGSQGNLIF

SEQ ID NO: 261812 - protein, 14 aa, Homo sapiens
  CDR3 for beta chain variable domain of TCR clone 130906 (TRBV11-2, TRBJ1-2)
CASSLGTANYGYTF

SEQ ID NO: 261813 - protein, 12 aa, Homo sapiens
  CDR3 for alpha chain variable domain of TCR clone 130907 (TRAV25, TRAJ20)
CAGRSNDYNLSF

SEQ ID NO: 261814 - protein, 15 aa, Homo sapiens
  CDR3 for beta chain variable domain of TCR clone 130907 (TRBV7-6, TRBJ2-7)
CASSGRRDTFGEQYF

SEQ ID NO: 261815 - protein, 16 aa, Homo sapiens
  CDR3 for alpha chain variable domain of TCR clone 130908 (TRAV8-3, TRAJ28)
CAVGATVGLGVTNSLS

SEQ ID NO: 261816 - protein, 14 aa, Homo sapiens
  CDR3 for beta chain variable domain of TCR clone 130908 (TRBV7-2, TRBJ2-1)
CASSLGVGYNEQFF

SEQ ID NO: 261817 - protein, 13 aa, Homo sapiens
  CDR3 for alpha chain variable domain of TCR clone 130909 (TRAV12-1, TRAJ16)
CVVNGPDGQRLLF

SEQ ID NO: 261818 - protein, 15 aa, Homo sapiens
  CDR3 for beta chain variable domain of TCR clone 130909 (TRBV6-3, TRBJ2-7)
CASSSPGTVFYEQYF

SEQ ID NO: 261819 - protein, 13 aa, Homo sapiens
  CDR3 for alpha chain variable domain of TCR clone 130910 (TRAV8-3, TRAJ36)
CAVGATRANNLFF

SEQ ID NO: 261820 - protein, 13 aa, Homo sapiens
  CDR3 for beta chain variable domain of TCR clone 130910 (TRBV12-4, TRBJ1-2)
CASSLRQGKGYTF

SEQ ID NO: 261821 - protein, 12 aa, Homo sapiens
  CDR3 for alpha chain variable domain of TCR clone 130911 (TRAV3, TRAJ20)
CAVRDGDYKLSF

SEQ ID NO: 261822 - protein, 18 aa, Homo sapiens
  CDR3 for beta chain variable domain of TCR clone 130911 (TRBV11-2, TRBJ2-3)
CASSLGGASRGAPNTQYF

SEQ ID NO: 261823 - protein, 13 aa, Homo sapiens
  CDR3 for alpha chain variable domain of TCR clone 130912 (TRAV2, TRAJ24)
CAVTTDSWGILQF

SEQ ID NO: 261824 - protein, 13 aa, Homo sapiens
  CDR3 for beta chain variable domain of TCR clone 130912 (TRBV7-3, TRBJ1-1)
CASSQDWGAEAFF

SEQ ID NO: 261825 - protein, 18 aa, Homo sapiens
  CDR3 for alpha chain variable domain of TCR clone 130913 (TRAV12-3, TRAJ52)
CAMSAGGAGGTSYGKLTF

SEQ ID NO: 261826 - protein, 17 aa, Homo sapiens
  CDR3 for beta chain variable domain of TCR clone 130913 (TRBV13, TRBJ2-3)
CASSLSRVAGGRNTQYF

SEQ ID NO: 261827 - protein, 14 aa, Homo sapiens
  CDR3 for alpha chain variable domain of TCR clone 130914 (TRAV26-1, TRAJ5)
CIVRVRFNRGALTF

SEQ ID NO: 261828 - protein, 17 aa, Homo sapiens
  CDR3 for beta chain variable domain of TCR clone 130914 (TRBV29-1, TRBJ2-3)
CSVEVLAGETSTDTQYF

SEQ ID NO: 261829 - protein, 13 aa, Homo sapiens
  CDR3 for alpha chain variable domain of TCR clone 130915 (TRAV13-1, TRAJ43)
CAASKNNKNDMRF

SEQ ID NO: 261830 - protein, 14 aa, Homo sapiens
  CDR3 for beta chain variable domain of TCR clone 130915 (TRBV14, TRBJ2-1)
CASSQVQGRGEQFF

SEQ ID NO: 261831 - protein, 12 aa, Homo sapiens
  CDR3 for alpha chain variable domain of TCR clone 130916 (TRAV20, TRAJ39)
CAVCNAGNMLTF

SEQ ID NO: 261832 - protein, 16 aa, Homo sapiens
  CDR3 for beta chain variable domain of TCR clone 130916 (TRBV15, TRBJ1-2)
CATSRGPRTGGGGYTF

SEQ ID NO: 261833 - protein, 15 aa, Homo sapiens
  CDR3 for alpha chain variable domain of TCR clone 130917 (TRAV8-4, TRAJ47)
CAVSDPEEYGNKLVF

SEQ ID NO: 261834 - protein, 19 aa, Homo sapiens
  CDR3 for beta chain variable domain of TCR clone 130917 (TRBV25-1, TRBJ2-2)
CAILVYRVDRGRKTGELFF

SEQ ID NO: 261835 - protein, 12 aa, Homo sapiens
  CDR3 for alpha chain variable domain of TCR clone 130918 (TRAV29/DV5, TRAJ49)
CAATVTGNQFYF

SEQ ID NO: 261836 - protein, 19 aa, Homo sapiens
  CDR3 for beta chain variable domain of TCR clone 130918 (TRBV25-1, TRBJ2-2)
CAILVYRVDRGRKTGELFF

SEQ ID NO: 261837 - protein, 15 aa, Homo sapiens
  CDR3 for alpha chain variable domain of TCR clone 130919 (TRAV17, TRAJ45)
CATAYSGGGTDGLTF

SEQ ID NO: 261838 - protein, 15 aa, Homo sapiens
  CDR3 for beta chain variable domain of TCR clone 130919 (TRBV28, TRBJ2-5)
CASSSGRVIQETQYF

SEQ ID NO: 261839 - protein, 12 aa, Homo sapiens
  CDR3 for alpha chain variable domain of TCR clone 130920 (TRAV13-2, TRAJ23)
CAERHRGGKLIF

SEQ ID NO: 261840 - protein, 15 aa, Homo sapiens
  CDR3 for beta chain variable domain of TCR clone 130920 (TRBV19, TRBJ1-5)
CASSIVWADNQPQHF

SEQ ID NO: 261841 - protein, 19 aa, Homo sapiens
  CDR3 for alpha chain variable domain of TCR clone 130921 (TRAV3, TRAJ6)
CAVRDRNPSRSGGSYITKF

SEQ ID NO: 261842 - protein, 15 aa, Homo sapiens
  CDR3 for beta chain variable domain of TCR clone 130921 (TRBV18, TRBJ2-7)
CASSPTFMDSYEQYF

SEQ ID NO: 261843 - protein, 13 aa, Homo sapiens
  CDR3 for alpha chain variable domain of TCR clone 130922 (TRAV13-1, TRAJ37)
CAARSGITGKLIF

SEQ ID NO: 261844 - protein, 14 aa, Homo sapiens
  CDR3 for beta chain variable domain of TCR clone 130922 (TRBV12-4, TRBJ2-3)
CASSLGQGTDTQYF

SEQ ID NO: 261845 - protein, 14 aa, Homo sapiens
  CDR3 for alpha chain variable domain of TCR clone 130923 (TRAV38-1, TRAJ45)
CAYYSGGGADGLTF

SEQ ID NO: 261846 - protein, 15 aa, Homo sapiens
  CDR3 for beta chain variable domain of TCR clone 130923 (TRBV7-3, TRBJ2-1)
CASSPTGGGEVEQFF

SEQ ID NO: 261847 - protein, 13 aa, Homo sapiens
  CDR3 for alpha chain variable domain of TCR clone 130924 (TRAV2, TRAJ20)
CAVEDPSEYKLSF

SEQ ID NO: 261848 - protein, 15 aa, Homo sapiens
  CDR3 for beta chain variable domain of TCR clone 130924 (TRBV23-1, TRBJ2-1)
CASSQWPQLTMSSSS

SEQ ID NO: 261849 - protein, 16 aa, Homo sapiens
  CDR3 for alpha chain variable domain of TCR clone 130925 (TRAV12-2, TRAJ32)
CAVNLGQGGATNKLIF

SEQ ID NO: 261850 - protein, 15 aa, Homo sapiens
  CDR3 for beta chain variable domain of TCR clone 130925 (TRBV20-1, TRBJ2-7)
CSARGPLAGGREKYF

SEQ ID NO: 261851 - protein, 16 aa, Homo sapiens
  CDR3 for alpha chain variable domain of TCR clone 130926 (TRAV16, TRAJ52)
CALSGVGGTSYGKLKF

SEQ ID NO: 261852 - protein, 14 aa, Homo sapiens
  CDR3 for beta chain variable domain of TCR clone 130926 (TRBV19, TRBJ1-2)
CASSLQGQAYGYTF

SEQ ID NO: 261853 - protein, 14 aa, Homo sapiens
  CDR3 for alpha chain variable domain of TCR clone 130927 (TRAV12-2, TRAJ13)
CAVKKTGGYQKVTF

SEQ ID NO: 261854 - protein, 14 aa, Homo sapiens
  CDR3 for beta chain variable domain of TCR clone 130927 (TRBV19, TRBJ2-1)
CASPTFVVSSEQFF

SEQ ID NO: 261855 - protein, 13 aa, Homo sapiens
  CDR3 for alpha chain variable domain of TCR clone 130928 (TRAV20, TRAJ37)
FAGCSSNTGKLIF

SEQ ID NO: 261856 - protein, 21 aa, Homo sapiens
  CDR3 for beta chain variable domain of TCR clone 130928 (TRBV4-2, TRBJ2-3)
PCSQKTRPCISVPAAPDTQYF

SEQ ID NO: 261857 - protein, 14 aa, Homo sapiens
  CDR3 for alpha chain variable domain of TCR clone 130929 (TRAV12-1, TRAJ17)
CVVNYKAAGNKLTF

SEQ ID NO: 261858 - protein, 15 aa, Homo sapiens
  CDR3 for beta chain variable domain of TCR clone 130929 (TRBV7-3, TRBJ2-1)
CASSLSSGSFDEQFF

SEQ ID NO: 261859 - protein, 21 aa, Homo sapiens
  CDR3 for alpha chain variable domain of TCR clone 130930 (TRAV8-3, TRAJ10)
CAVGHTHGGRKQTHLWDRHSA

SEQ ID NO: 261860 - protein, 10 aa, Homo sapiens
  CDR3 for beta chain variable domain of TCR clone 130930 (TRBV20-1, TRBJ2-5)
CSARFETQYF

SEQ ID NO: 261861 - protein, 16 aa, Homo sapiens
  CDR3 for alpha chain variable domain of TCR clone 130931 (TRAV30, TRAJ24)
CGTEIVDADSWGKFPF

SEQ ID NO: 261862 - protein, 15 aa, Homo sapiens
  CDR3 for beta chain variable domain of TCR clone 130931 (TRBV20-1, TRBJ2-6)
CSARDRGPGANVLTF

SEQ ID NO: 261863 - protein, 12 aa, Homo sapiens
  CDR3 for alpha chain variable domain of TCR clone 130932 (TRAV16, TRAJ10)
CSRTGGGNKLTF

SEQ ID NO: 261864 - protein, 13 aa, Homo sapiens
  CDR3 for beta chain variable domain of TCR clone 130932 (TRBV6-4, TRBJ1-1)
CASSLDREGIAFF

SEQ ID NO: 261865 - protein, 10 aa, Homo sapiens
  CDR3 for alpha chain variable domain of TCR clone 130933 (TRAV1-1, TRAJ4)
LSGGYNKLIF

SEQ ID NO: 261866 - protein, 16 aa, Homo sapiens
  CDR3 for beta chain variable domain of TCR clone 130933 (TRBV28, TRBJ1-4)
CASSPPYRGRSEKLFF

SEQ ID NO: 261867 - protein, 14 aa, Homo sapiens
  CDR3 for alpha chain variable domain of TCR clone 130934 (TRAV29/DV5, TRAJ36)
CAARRKTGANNLFF

SEQ ID NO: 261868 - protein, 13 aa, Homo sapiens
  CDR3 for beta chain variable domain of TCR clone 130934 (TRBV11-2, TRBJ2-5)
CASSSTGEETQYF

SEQ ID NO: 261869 - protein, 15 aa, Homo sapiens
  CDR3 for alpha chain variable domain of TCR clone 130935 (TRAV25, TRAJ52)
CAGRPGGTSYGKLTF

SEQ ID NO: 261870 - protein, 16 aa, Homo sapiens
  CDR3 for beta chain variable domain of TCR clone 130935 (TRBV12-4, TRBJ1-5)
CASSSGPRGSNQHQHF

SEQ ID NO: 261871 - protein, 14 aa, Homo sapiens
  CDR3 for alpha chain variable domain of TCR clone 130936 (TRAV9-2, TRAJ39)
CALYIYNAGNMLTL

SEQ ID NO: 261872 - protein, 17 aa, Homo sapiens
  CDR3 for beta chain variable domain of TCR clone 130936 (TRBV20-1, TRBJ2-4)
CSARDWASGGRENIQYF

SEQ ID NO: 261873 - protein, 13 aa, Homo sapiens
  CDR3 for alpha chain variable domain of TCR clone 130937 (TRAV12-1, TRAJ6)
CVVFPGGSYIPTF

SEQ ID NO: 261874 - protein, 16 aa, Homo sapiens
  CDR3 for beta chain variable domain of TCR clone 130937 (TRBV11-2, TRBJ1-2)
CASSLDTGGADYGYTF

SEQ ID NO: 261875 - protein, 13 aa, Homo sapiens
  CDR3 for alpha chain variable domain of TCR clone 130938 (TRAV12-1, TRAJ16)
CVVNGPDVQKLLF

SEQ ID NO: 261876 - protein, 13 aa, Homo sapiens
  CDR3 for beta chain variable domain of TCR clone 130938 (TRBV2, TRBJ1-1)
CARNPTGGFHAFF

SEQ ID NO: 261877 - protein, 18 aa, Homo sapiens
  CDR3 for alpha chain variable domain of TCR clone 130939 (TRAV21, TRAJ52)
CAVRPSPAGGTSCGKLTF

SEQ ID NO: 261878 - protein, 13 aa, Homo sapiens
  CDR3 for beta chain variable domain of TCR clone 130939 (TRBV7-3, TRBJ1-1)
CASSQDWGAEAFF

SEQ ID NO: 261879 - protein, 12 aa, Homo sapiens
  CDR3 for alpha chain variable domain of TCR clone 130940 (TRAV13-2, TRAJ8)
CAPWLGFQKLVF

SEQ ID NO: 261880 - protein, 12 aa, Homo sapiens
  CDR3 for beta chain variable domain of TCR clone 130940 (TRBV19, TRBJ2-7)
CASTDRDYEQYF

SEQ ID NO: 261881 - protein, 12 aa, Homo sapiens
  CDR3 for alpha chain variable domain of TCR clone 130941 (TRAV17, TRAJ12)
CATLRSSYKLIF

SEQ ID NO: 261882 - protein, 16 aa, Homo sapiens
  CDR3 for beta chain variable domain of TCR clone 130941 (TRBV28, TRBJ2-7)
CASSIFFETGGPEQYF

SEQ ID NO: 261883 - protein, 13 aa, Homo sapiens
  CDR3 for alpha chain variable domain of TCR clone 130942 (TRAV8-3, TRAJ43)
SAVVPYNNNDMRF

SEQ ID NO: 261884 - protein, 15 aa, Homo sapiens
  CDR3 for beta chain variable domain of TCR clone 130942 (TRBV5-1, TRBJ2-1)
CASSPPRAPYNEQFF

SEQ ID NO: 261885 - protein, 13 aa, Homo sapiens
  CDR3 for alpha chain variable domain of TCR clone 130943 (TRAV12-1, TRAJ40)
CVVPTSGTYKYIF

SEQ ID NO: 261886 - protein, 14 aa, Homo sapiens
  CDR3 for beta chain variable domain of TCR clone 130943 (TRBV5-1, TRBJ2-7)
CASSRGESLYEQYF

SEQ ID NO: 261887 - protein, 11 aa, Homo sapiens
  CDR3 for alpha chain variable domain of TCR clone 130944 (TRAV12-2, TRAJ39)
CAVNNMLTFGG

SEQ ID NO: 261888 - protein, 14 aa, Homo sapiens
  CDR3 for beta chain variable domain of TCR clone 130944 (TRBV18, TRBJ2-5)
CASSPGVSQETQYF

SEQ ID NO: 261889 - protein, 15 aa, Homo sapiens
  CDR3 for alpha chain variable domain of TCR clone 130945 (TRAV8-2, TRAJ24)
CVVSDRTDSWGKFQF

SEQ ID NO: 261890 - protein, 11 aa, Homo sapiens
  CDR3 for beta chain variable domain of TCR clone 130945 (TRBV20-1, TRBJ1-2)
CSVQGAGGYTF

SEQ ID NO: 261891 - protein, 13 aa, Homo sapiens
  CDR3 for alpha chain variable domain of TCR clone 130946 (TRAV17, TRAJ9)
CATDYTGGFKTIF

SEQ ID NO: 261892 - protein, 14 aa, Homo sapiens
  CDR3 for beta chain variable domain of TCR clone 130946 (TRBV12-4, TRBJ1-1)
CASSLGTGGTEAFF

SEQ ID NO: 261893 - protein, 12 aa, Homo sapiens
  CDR3 for alpha chain variable domain of TCR clone 130947 (TRAV12-2, TRAJ10)
WGVTGGGNKLTF

SEQ ID NO: 261894 - protein, 14 aa, Homo sapiens
  CDR3 for beta chain variable domain of TCR clone 130947 (TRBV7-6, TRBJ2-3)
CASSVAGGTDTQYF

SEQ ID NO: 261895 - protein, 13 aa, Homo sapiens
  CDR3 for alpha chain variable domain of TCR clone 130948 (TRAV27, TRAJ41)
CAGEGNSGYALNF

SEQ ID NO: 261896 - protein, 14 aa, Homo sapiens
  CDR3 for beta chain variable domain of TCR clone 130948 (TRBV7-2, TRBJ1-1)
CASSFLIGTTEAFF

SEQ ID NO: 261897 - protein, 13 aa, Homo sapiens
  CDR3 for alpha chain variable domain of TCR clone 130949 (TRAV21, TRAJ27)
CAARPGNAGKSTS

SEQ ID NO: 261898 - protein, 15 aa, Homo sapiens
  CDR3 for beta chain variable domain of TCR clone 130949 (TRBV7-2, TRBJ2-1)
CASSSGLAGGNEQFF

SEQ ID NO: 261899 - protein, 15 aa, Homo sapiens
  CDR3 for alpha chain variable domain of TCR clone 130950 (TRAV20, TRAJ53)
CAVQASGGSNYKLTF

SEQ ID NO: 261900 - protein, 14 aa, Homo sapiens
  CDR3 for beta chain variable domain of TCR clone 130950 (TRBV7-9, TRBJ2-1)
CASSPRDSLYEQFF

SEQ ID NO: 261901 - protein, 10 aa, Homo sapiens
  CDR3 for alpha chain variable domain of TCR clone 130951 (TRAV23/DV6, TRAJ57)
CAASSTLSQG

SEQ ID NO: 261902 - protein, 14 aa, Homo sapiens
  CDR3 for beta chain variable domain of TCR clone 130951 (TRBV25-1, TRBJ1-1)
CASIHLGGNTEAFF

SEQ ID NO: 261903 - protein, 14 aa, Homo sapiens
  CDR3 for alpha chain variable domain of TCR clone 130952 (TRAV12-3, TRAJ42)
CATNYGGSQGNLIF

SEQ ID NO: 261904 - protein, 15 aa, Homo sapiens
  CDR3 for beta chain variable domain of TCR clone 130952 (TRBV5-7, TRBJ1-5)
CASSYGKLWDQPQHF

SEQ ID NO: 261905 - protein, 14 aa, Homo sapiens
  CDR3 for alpha chain variable domain of TCR clone 130953 (TRAV34, TRAJ44)
CGADGTGTASKLTF

SEQ ID NO: 261906 - protein, 14 aa, Homo sapiens
  CDR3 for beta chain variable domain of TCR clone 130953 (TRBV25-1, TRBJ1-1)
CASTHLGGNTEAFF

SEQ ID NO: 261907 - protein, 14 aa, Homo sapiens
  CDR3 for alpha chain variable domain of TCR clone 130954 (TRAV12-2, TRAJ40)
CAVKIPSGTYKYIF

SEQ ID NO: 261908 - protein, 20 aa, Homo sapiens
  CDR3 for beta chain variable domain of TCR clone 130954 (TRBV28, TRBJ2-1)
CASTPIGRSSGLAGGNEQFF

SEQ ID NO: 261909 - protein, 14 aa, Homo sapiens
  CDR3 for alpha chain variable domain of TCR clone 130955 (TRAV12-2, TRAJ35)
CAVMPIGFGNVLHC

SEQ ID NO: 261910 - protein, 12 aa, Homo sapiens
  CDR3 for beta chain variable domain of TCR clone 130955 (TRBV7-9, TRBJ2-7)
CASSIKREEQYF

SEQ ID NO: 261911 - protein, 16 aa, Homo sapiens
  CDR3 for alpha chain variable domain of TCR clone 130956 (TRAV1-2, TRAJ10)
CAVRGVLTGGGNKLTF

SEQ ID NO: 261912 - protein, 13 aa, Homo sapiens
  CDR3 for beta chain variable domain of TCR clone 130956 (TRBV19, TRBJ1-1)
CASTRRGDTEAFF

SEQ ID NO: 261913 - protein, 16 aa, Homo sapiens
  CDR3 for alpha chain variable domain of TCR clone 130957 (TRAV8-3, TRAJ8)
CAVPSDGNTGFQKLVF

SEQ ID NO: 261914 - protein, 14 aa, Homo sapiens
  CDR3 for beta chain variable domain of TCR clone 130957 (TRBV28, TRBJ1-1)
CASSESGRGTEAFF

SEQ ID NO: 261915 - protein, 13 aa, Homo sapiens
  CDR3 for alpha chain variable domain of TCR clone 130958 (TRAV8-6, TRAJ16)
CAVSSPDGQTLLF

SEQ ID NO: 261916 - protein, 16 aa, Homo sapiens
  CDR3 for beta chain variable domain of TCR clone 130958 (TRBV5-7, TRBJ2-3)
CASSSLGGAITDTQYF

SEQ ID NO: 261917 - protein, 17 aa, Homo sapiens
  CDR3 for alpha chain variable domain of TCR clone 130959 (TRAV3, TRAJ6)
CAVRDGPRAGGSYIPTL

SEQ ID NO: 261918 - protein, 16 aa, Homo sapiens
  CDR3 for beta chain variable domain of TCR clone 130959 (TRBV7-8, TRBJ2-3)
CASSTEGQRETDTQYF

SEQ ID NO: 261919 - protein, 14 aa, Homo sapiens
  CDR3 for alpha chain variable domain of TCR clone 130960 (TRAV38-1, TRAJ29)
CAFITPSGNTPLVF

SEQ ID NO: 261920 - protein, 14 aa, Homo sapiens
  CDR3 for beta chain variable domain of TCR clone 130960 (TRBV18, TRBJ2-7)
CASSSRGGAYEQYF

SEQ ID NO: 261921 - protein, 13 aa, Homo sapiens
  CDR3 for alpha chain variable domain of TCR clone 130961 (TRAV20, TRAJ37)
CAGCSSNTGKLIF

SEQ ID NO: 261922 - protein, 12 aa, Homo sapiens
  CDR3 for beta chain variable domain of TCR clone 130961 (TRBV7-9, TRBJ2-7)
CASSIKREEQYF

SEQ ID NO: 261923 - protein, 14 aa, Homo sapiens
  CDR3 for alpha chain variable domain of TCR clone 130962 (TRAV12-3, TRAJ16)
CAVNRFSDGQKLLF

SEQ ID NO: 261924 - protein, 13 aa, Homo sapiens
  CDR3 for beta chain variable domain of TCR clone 130962 (TRBV12-4, TRBJ2-5)
CASSLGGSRTQYF

SEQ ID NO: 261925 - protein, 12 aa, Homo sapiens
  CDR3 for alpha chain variable domain of TCR clone 130963 (TRAV3, TRAJ20)
CAVRDGDYKLSF

SEQ ID NO: 261926 - protein, 14 aa, Homo sapiens
  CDR3 for beta chain variable domain of TCR clone 130963 (TRBV2, TRBJ2-7)
CASSLTSGGYEQYF

SEQ ID NO: 261927 - protein, 13 aa, Homo sapiens
  CDR3 for alpha chain variable domain of TCR clone 130964 (TRAV27, TRAJ54)
CAGAGQGAQKLVF

SEQ ID NO: 261928 - protein, 15 aa, Homo sapiens
  CDR3 for beta chain variable domain of TCR clone 130964 (TRBV18, TRBJ2-6)
CASSPSYAGANALTF

SEQ ID NO: 261929 - protein, 13 aa, Homo sapiens
  CDR3 for alpha chain variable domain of TCR clone 130965 (TRAV35, TRAJ32)
CAGVGGATNKLIF

SEQ ID NO: 261930 - protein, 11 aa, Homo sapiens
  CDR3 for beta chain variable domain of TCR clone 130965 (TRBV12-4, TRBJ2-3)
CASTATDTQYF

SEQ ID NO: 261931 - protein, 22 aa, Homo sapiens
  CDR3 for alpha chain variable domain of TCR clone 130966 (TRAV21, )
CAVRQDAGNNHIQNPDPAVYQL

SEQ ID NO: 261932 - protein, 17 aa, Homo sapiens
  CDR3 for beta chain variable domain of TCR clone 130966 (TRBV13, TRBJ2-3)
CASSLSRVAGGRNTQYF

SEQ ID NO: 261933 - protein, 14 aa, Homo sapiens
  CDR3 for alpha chain variable domain of TCR clone 130967 (TRAV8-3, TRAJ10)
CAVGNAGGGNKLTF

SEQ ID NO: 261934 - protein, 16 aa, Homo sapiens
  CDR3 for beta chain variable domain of TCR clone 130967 (TRBV12-5, TRBJ2-5)
CASGPRTSGNQETQYF

SEQ ID NO: 261935 - protein, 22 aa, Homo sapiens
  CDR3 for alpha chain variable domain of TCR clone 130968 (TRAV21, )
CAVRQDAGNNHIQNPHPAVYQL

SEQ ID NO: 261936 - protein, 16 aa, Homo sapiens
  CDR3 for beta chain variable domain of TCR clone 130968 (TRBV4-2, TRBJ1-1)
CASRPLDGGGDTEAFF

SEQ ID NO: 261937 - protein, 14 aa, Homo sapiens
  CDR3 for alpha chain variable domain of TCR clone 130969 (TRAV12-2, TRAJ24)
CAVTPADSWGKLQF

SEQ ID NO: 261938 - protein, 17 aa, Homo sapiens
  CDR3 for beta chain variable domain of TCR clone 130969 (TRBV11-2, TRBJ2-1)
CASSLYPPGVEYNEQFF

SEQ ID NO: 261939 - protein, 12 aa, Homo sapiens
  CDR3 for alpha chain variable domain of TCR clone 130970 (TRAV35, TRAJ31)
CAAASNNARLMF

SEQ ID NO: 261940 - protein, 15 aa, Homo sapiens
  CDR3 for beta chain variable domain of TCR clone 130970 (TRBV6-1, TRBJ2-3)
CASSERGGITDTQYF

SEQ ID NO: 261941 - protein, 15 aa, Homo sapiens
  CDR3 for alpha chain variable domain of TCR clone 130971 (TRAV3, TRAJ20)
CAVRDIKLSDYKLSF

SEQ ID NO: 261942 - protein, 14 aa, Homo sapiens
  CDR3 for beta chain variable domain of TCR clone 130971 (TRBV7-3, TRBJ2-3)
CASSPSARTDTQYF

SEQ ID NO: 261943 - protein, 15 aa, Homo sapiens
  CDR3 for alpha chain variable domain of TCR clone 130972 (TRAV36/DV7, TRAJ53)
CAVEGSGGSNYKLTF

SEQ ID NO: 261944 - protein, 16 aa, Homo sapiens
  CDR3 for beta chain variable domain of TCR clone 130972 (TRBV25-1, TRBJ2-2)
CASSLSGFWVTGELFF

SEQ ID NO: 261945 - protein, 14 aa, Homo sapiens
  CDR3 for alpha chain variable domain of TCR clone 130973 (TRAV12-2, TRAJ17)
CAVLFKAAGNKLTF

SEQ ID NO: 261946 - protein, 13 aa, Homo sapiens
  CDR3 for beta chain variable domain of TCR clone 130973 (TRBV20-1, TRBJ2-7)
CSARAGSPYEQYF

SEQ ID NO: 261947 - protein, 14 aa, Homo sapiens
  CDR3 for alpha chain variable domain of TCR clone 130974 (TRAV12-3, TRAJ41)
CAMSAGNSGYALNF

SEQ ID NO: 261948 - protein, 11 aa, Homo sapiens
  CDR3 for beta chain variable domain of TCR clone 130974 (TRBV7-2, TRBJ2-3)
CASSSSDKQYF

SEQ ID NO: 261949 - protein, 12 aa, Homo sapiens
  CDR3 for alpha chain variable domain of TCR clone 130975 (TRAV8-4, TRAJ9)
CAVNTGGFKTIF

SEQ ID NO: 261950 - protein, 15 aa, Homo sapiens
  CDR3 for beta chain variable domain of TCR clone 130975 (TRBV5-4, TRBJ2-1)
CASSSGIAELNEQFF

SEQ ID NO: 261951 - protein, 13 aa, Homo sapiens
  CDR3 for alpha chain variable domain of TCR clone 130976 (TRAV36/DV7, TRAJ54)
CAVDIQGAQKLVF

SEQ ID NO: 261952 - protein, 14 aa, Homo sapiens
  CDR3 for beta chain variable domain of TCR clone 130976 (TRBV19, TRBJ2-7)
CASNVRDTFTGMYF

SEQ ID NO: 261953 - protein, 14 aa, Homo sapiens
  CDR3 for alpha chain variable domain of TCR clone 130977 (TRAV38-1, TRAJ45)
CASHSGGGADGLTF

SEQ ID NO: 261954 - protein, 13 aa, Homo sapiens
  CDR3 for beta chain variable domain of TCR clone 130977 (TRBV10-3, TRBJ1-2)
CAISERDSYGYTS

SEQ ID NO: 261955 - protein, 13 aa, Homo sapiens
  CDR3 for alpha chain variable domain of TCR clone 130978 (TRAV4, TRAJ9)
CLVAEGGGFKTIF

SEQ ID NO: 261956 - protein, 17 aa, Homo sapiens
  CDR3 for beta chain variable domain of TCR clone 130978 (TRBV27, TRBJ2-1)
CASSPMKGQGSYNGQFF

SEQ ID NO: 261957 - protein, 15 aa, Homo sapiens
  CDR3 for alpha chain variable domain of TCR clone 130979 (TRAV17, TRAJ57)
CATGPSQGGSEKLVF

SEQ ID NO: 261958 - protein, 15 aa, Homo sapiens
  CDR3 for beta chain variable domain of TCR clone 130979 (TRBV6-3, TRBJ2-7)
CASSSPGTVVYEQYF

SEQ ID NO: 261959 - protein, 16 aa, Homo sapiens
  CDR3 for alpha chain variable domain of TCR clone 130980 (TRAV27, TRAJ13)
CAGAQSDSGGYQKVTF

SEQ ID NO: 261960 - protein, 15 aa, Homo sapiens
  CDR3 for beta chain variable domain of TCR clone 130980 (TRBV29-1, TRBJ2-1)
CSVGRHALFYNEQFF

SEQ ID NO: 261961 - protein, 15 aa, Homo sapiens
  CDR3 for alpha chain variable domain of TCR clone 130981 (TRAV3, TRAJ47)
CAVRDIGEYGNKLVF

SEQ ID NO: 261962 - protein, 17 aa, Homo sapiens
  CDR3 for beta chain variable domain of TCR clone 130981 (TRBV7-8, TRBJ2-6)
CASSAGTGGAGANVLTF

SEQ ID NO: 261963 - protein, 14 aa, Homo sapiens
  CDR3 for alpha chain variable domain of TCR clone 130982 (TRAV12-1, TRAJ12)
CVLNGRDSSYKLIF

SEQ ID NO: 261964 - protein, 13 aa, Homo sapiens
  CDR3 for beta chain variable domain of TCR clone 130982 (TRBV28, TRBJ2-2)
CASIRESTGELFF

SEQ ID NO: 261965 - protein, 14 aa, Homo sapiens
  CDR3 for alpha chain variable domain of TCR clone 130983 (TRAV13-1, TRAJ44)
CAAKATGTASKLTF

SEQ ID NO: 261966 - protein, 13 aa, Homo sapiens
  CDR3 for beta chain variable domain of TCR clone 130983 (TRBV9, TRBJ2-1)
CASSPSGGNEQFF

SEQ ID NO: 261967 - protein, 14 aa, Homo sapiens
  CDR3 for alpha chain variable domain of TCR clone 130984 (TRAV13-2, TRAJ43)
CAEIPTNNNNDMRF

SEQ ID NO: 261968 - protein, 15 aa, Homo sapiens
  CDR3 for beta chain variable domain of TCR clone 130984 (TRBV7-9, TRBJ2-2)
CASGPLDTFPGELFF

SEQ ID NO: 261969 - protein, 13 aa, Homo sapiens
  CDR3 for alpha chain variable domain of TCR clone 130985 (TRAV1-2, TRAJ13)
CAVNSGGYQNVTF

SEQ ID NO: 261970 - protein, 14 aa, Homo sapiens
  CDR3 for beta chain variable domain of TCR clone 130985 (TRBV4-1, TRBJ1-5)
CASSPKGDNQPQHF

SEQ ID NO: 261971 - protein, 14 aa, Homo sapiens
  CDR3 for alpha chain variable domain of TCR clone 130986 (TRAV2, TRAJ22)
CAVGRGGSARQLTF

SEQ ID NO: 261972 - protein, 12 aa, Homo sapiens
  CDR3 for beta chain variable domain of TCR clone 130986 (TRBV19, TRBJ2-1)
CASSMQDTERFF

SEQ ID NO: 261973 - protein, 17 aa, Homo sapiens
  CDR3 for alpha chain variable domain of TCR clone 130987 (TRAV12-2, TRAJ36)
CAVKDNLFFGTGTRLTG

SEQ ID NO: 261974 - protein, 15 aa, Homo sapiens
  CDR3 for beta chain variable domain of TCR clone 130987 (TRBV28, TRBJ2-2)
CASTVAGANTGELFF

SEQ ID NO: 261975 - protein, 12 aa, Homo sapiens
  CDR3 for alpha chain variable domain of TCR clone 130988 (TRAV27, TRAJ35)
CAGADFGNMLHC

SEQ ID NO: 261976 - protein, 15 aa, Homo sapiens
  CDR3 for beta chain variable domain of TCR clone 130988 (TRBV20-1, TRBJ2-7)
CSARDRVSGMDEQYF

SEQ ID NO: 261977 - protein, 17 aa, Homo sapiens
  CDR3 for alpha chain variable domain of TCR clone 130989 (TRAV13-1, TRAJ31)
CAPRDRLMFGDGTQLVV

SEQ ID NO: 261978 - protein, 14 aa, Homo sapiens
  CDR3 for beta chain variable domain of TCR clone 130989 (TRBV4-1, TRBJ2-2)
CASSQAVNTGELFF

SEQ ID NO: 261979 - protein, 11 aa, Homo sapiens
  CDR3 for alpha chain variable domain of TCR clone 130990 (TRAV1-1, TRAJ23)
CALRQGGKLIF

SEQ ID NO: 261980 - protein, 20 aa, Homo sapiens
  CDR3 for beta chain variable domain of TCR clone 130990 (TRBV11-2, TRBJ1-6)
CASSLVFATGGSVHPSTLGT

SEQ ID NO: 261981 - protein, 12 aa, Homo sapiens
  CDR3 for alpha chain variable domain of TCR clone 130991 (TRAV13-1, TRAJ20)
CAARKNDYKLSF

SEQ ID NO: 261982 - protein, 14 aa, Homo sapiens
  CDR3 for beta chain variable domain of TCR clone 130991 (TRBV5-1, TRBJ2-7)
CASSFASGVNEQYF

SEQ ID NO: 261983 - protein, 11 aa, Homo sapiens
  CDR3 for alpha chain variable domain of TCR clone 130992 (TRAV12-1, TRAJ33)
CVGDSNYQLIW

SEQ ID NO: 261984 - protein, 17 aa, Homo sapiens
  CDR3 for beta chain variable domain of TCR clone 130992 (TRBV28, TRBJ2-5)
CASSTPEGDALQETQYF

SEQ ID NO: 261985 - protein, 14 aa, Homo sapiens
  CDR3 for alpha chain variable domain of TCR clone 130993 (TRAV8-2, TRAJ6)
CVVISAGGSYIPTF

SEQ ID NO: 261986 - protein, 16 aa, Homo sapiens
  CDR3 for beta chain variable domain of TCR clone 130993 (TRBV7-3, TRBJ2-2)
CASSLKRGTLSGELFF

SEQ ID NO: 261987 - protein, 13 aa, Homo sapiens
  CDR3 for alpha chain variable domain of TCR clone 130994 (TRAV35, TRAJ36)
CAGPRIGANNLVF

SEQ ID NO: 261988 - protein, 15 aa, Homo sapiens
  CDR3 for beta chain variable domain of TCR clone 130994 (TRBV28, TRBJ2-5)
CASSPPWSYQETQYF

SEQ ID NO: 261989 - protein, 14 aa, Homo sapiens
  CDR3 for alpha chain variable domain of TCR clone 130995 (TRAV27, TRAJ23)
CAGLSYTQGGKLIF

SEQ ID NO: 261990 - protein, 15 aa, Homo sapiens
  CDR3 for beta chain variable domain of TCR clone 130995 (TRBV19, TRBJ2-2)
CASSLNRGVTGELFF

SEQ ID NO: 261991 - protein, 16 aa, Homo sapiens
  CDR3 for alpha chain variable domain of TCR clone 130996 (TRAV30, TRAJ24)
CGTEIVDADSWGNSSL

SEQ ID NO: 261992 - protein, 16 aa, Homo sapiens
  CDR3 for beta chain variable domain of TCR clone 130996 (TRBV20-1, TRBJ1-1)
CSARALTQGMNTEAFF

SEQ ID NO: 261993 - protein, 17 aa, Homo sapiens
  CDR3 for alpha chain variable domain of TCR clone 130997 (TRAV12-2, TRAJ52)
CAVNPYAGGTSYGKLTF

SEQ ID NO: 261994 - protein, 16 aa, Homo sapiens
  CDR3 for beta chain variable domain of TCR clone 130997 (TRBV5-5, TRBJ2-2)
CASSGRRGGATGELFF

SEQ ID NO: 261995 - protein, 15 aa, Homo sapiens
  CDR3 for alpha chain variable domain of TCR clone 130998 (TRAV17, TRAJ16)
CATALRFSDGQKLLS

SEQ ID NO: 261996 - protein, 15 aa, Homo sapiens
  CDR3 for beta chain variable domain of TCR clone 130998 (TRBV20-1, TRBJ1-1)
CSASRGVTGNTEAFF

SEQ ID NO: 261997 - protein, 14 aa, Homo sapiens
  CDR3 for alpha chain variable domain of TCR clone 130999 (TRAV17, TRAJ37)
CSTDGSSNTGKLIF

SEQ ID NO: 261998 - protein, 13 aa, Homo sapiens
  CDR3 for beta chain variable domain of TCR clone 130999 (TRBV11-2, TRBJ2-1)
CASSLDLVNEQFF

SEQ ID NO: 261999 - protein, 14 aa, Homo sapiens
  CDR3 for alpha chain variable domain of TCR clone 131000 (TRAV8-3, TRAJ34)
CAVGPPHNTDKLIF

SEQ ID NO: 262000 - protein, 16 aa, Homo sapiens
  CDR3 for beta chain variable domain of TCR clone 131000 (TRBV7-2, TRBJ1-2)
CASSRQGGGANYGYTF

SEQ ID NO: 262001 - protein, 14 aa, Homo sapiens
  CDR3 for alpha chain variable domain of TCR clone 131001 (TRAV12-2, TRAJ17)
CAVLFKAAGNKLTF

SEQ ID NO: 262002 - protein, 16 aa, Homo sapiens
  CDR3 for beta chain variable domain of TCR clone 131001 (TRBV4-1, TRBJ1-1)
CASSYRQGTGDTEAFF

SEQ ID NO: 262003 - protein, 15 aa, Homo sapiens
  CDR3 for alpha chain variable domain of TCR clone 131002 (TRAV3, TRAJ22)
CALRDRGGSARQLTF

SEQ ID NO: 262004 - protein, 14 aa, Homo sapiens
  CDR3 for beta chain variable domain of TCR clone 131002 (TRBV19, TRBJ2-1)
CASSRLASINEQFF

SEQ ID NO: 262005 - protein, 15 aa, Homo sapiens
  CDR3 for alpha chain variable domain of TCR clone 131003 (TRAV20, TRAJ53)
CAVQASGGSNYKLTF

SEQ ID NO: 262006 - protein, 15 aa, Homo sapiens
  CDR3 for beta chain variable domain of TCR clone 131003 (TRBV20-1, TRBJ2-7)
CSARDRVSGMDEQYF

SEQ ID NO: 262007 - protein, 14 aa, Homo sapiens
  CDR3 for alpha chain variable domain of TCR clone 131004 (TRAV8-3, TRAJ36)
CAVGPITGANNLFF

SEQ ID NO: 262008 - protein, 15 aa, Homo sapiens
  CDR3 for beta chain variable domain of TCR clone 131004 (TRBV4-1, TRBJ2-1)
CASSQDPGNYNEQFL

SEQ ID NO: 262009 - protein, 12 aa, Homo sapiens
  CDR3 for alpha chain variable domain of TCR clone 131005 (TRAV8-3, TRAJ4)
PAFSGGYNKLIF

SEQ ID NO: 262010 - protein, 13 aa, Homo sapiens
  CDR3 for beta chain variable domain of TCR clone 131005 (TRBV20-1, TRBJ1-3)
CCAGAYSGNTIYF

SEQ ID NO: 262011 - protein, 10 aa, Homo sapiens
  CDR3 for alpha chain variable domain of TCR clone 131006 (TRAV38-2/DV8, TRAJ40)
CASGTYKYIF

SEQ ID NO: 262012 - protein, 14 aa, Homo sapiens
  CDR3 for beta chain variable domain of TCR clone 131006 (TRBV18, TRBJ2-5)
CASSPGVSQETQYF

SEQ ID NO: 262013 - protein, 15 aa, Homo sapiens
  CDR3 for alpha chain variable domain of TCR clone 131007 (TRAV2, TRAJ24)
CAVVRLKNSWGKFQF

SEQ ID NO: 262014 - protein, 16 aa, Homo sapiens
  CDR3 for beta chain variable domain of TCR clone 131007 (TRBV7-7, TRBJ2-3)
CASSPGTSGSTDTQYF

SEQ ID NO: 262015 - protein, 11 aa, Homo sapiens
  CDR3 for alpha chain variable domain of TCR clone 131008 (TRAV4, TRAJ31)
CLVGDNARLMF

SEQ ID NO: 262016 - protein, 17 aa, Homo sapiens
  CDR3 for beta chain variable domain of TCR clone 131008 (TRBV11-2, TRBJ2-1)
CASSLYPPGVEYNEQFF

SEQ ID NO: 262017 - protein, 17 aa, Homo sapiens
  CDR3 for alpha chain variable domain of TCR clone 131009 (TRAV3, TRAJ6)
CAVRDGPRAGGSYIPTF

SEQ ID NO: 262018 - protein, 15 aa, Homo sapiens
  CDR3 for beta chain variable domain of TCR clone 131009 (TRBV5-1, TRBJ2-1)
CASSPPRTPYNEQFF

SEQ ID NO: 262019 - protein, 12 aa, Homo sapiens
  CDR3 for alpha chain variable domain of TCR clone 131010 (TRAV3, TRAJ20)
CAVRDGDYKLSF

SEQ ID NO: 262020 - protein, 17 aa, Homo sapiens
  CDR3 for beta chain variable domain of TCR clone 131010 (TRBV3-1, TRBJ2-2)
CASSQFRDKVDTGELFF

SEQ ID NO: 262021 - protein, 13 aa, Homo sapiens
  CDR3 for alpha chain variable domain of TCR clone 131011 (TRAV12-2, TRAJ42)
CAVKRGSRGNLIF

SEQ ID NO: 262022 - protein, 16 aa, Homo sapiens
  CDR3 for beta chain variable domain of TCR clone 131011 (TRBV9, TRBJ2-2)
CASSAMGKGNTGELFF

SEQ ID NO: 262023 - protein, 13 aa, Homo sapiens
  CDR3 for alpha chain variable domain of TCR clone 131012 (TRAV3, TRAJ31)
CAVRDIYQCQTHV

SEQ ID NO: 262024 - protein, 15 aa, Homo sapiens
  CDR3 for beta chain variable domain of TCR clone 131012 (TRBV7-9, TRBJ1-2)
CASSSFGDTNYGYTF

SEQ ID NO: 262025 - protein, 14 aa, Homo sapiens
  CDR3 for alpha chain variable domain of TCR clone 131013 (TRAV12-3, TRAJ22)
CAMSWFGSARQLTF

SEQ ID NO: 262026 - protein, 11 aa, Homo sapiens
  CDR3 for beta chain variable domain of TCR clone 131013 (TRBV12-4, TRBJ2-2)
CASSSAGELFF

SEQ ID NO: 262027 - protein, 11 aa, Homo sapiens
  CDR3 for alpha chain variable domain of TCR clone 131014 (TRAV36/DV7, TRAJ45)
SGGGGADGLTL

SEQ ID NO: 262028 - protein, 12 aa, Homo sapiens
  CDR3 for beta chain variable domain of TCR clone 131014 (TRBV11-2, TRBJ2-2)
CASSLGGGELFF

SEQ ID NO: 262029 - protein, 18 aa, Homo sapiens
  CDR3 for alpha chain variable domain of TCR clone 131015 (TRAV3, TRAJ17)
CAVRARRGGGSCRQQANF

SEQ ID NO: 262030 - protein, 14 aa, Homo sapiens
  CDR3 for beta chain variable domain of TCR clone 131015 (TRBV4-1, TRBJ2-2)
CASSQAVNTGELFF

SEQ ID NO: 262031 - protein, 14 aa, Homo sapiens
  CDR3 for alpha chain variable domain of TCR clone 131016 (TRAV9-2, TRAJ39)
CALYIYNAGNMLTF

SEQ ID NO: 262032 - protein, 15 aa, Homo sapiens
  CDR3 for beta chain variable domain of TCR clone 131016 (TRBV19, TRBJ2-1)
CASSSPGVPLDEQFF

SEQ ID NO: 262033 - protein, 13 aa, Homo sapiens
  CDR3 for alpha chain variable domain of TCR clone 131017 (TRAV13-1, TRAJ21)
CAASIYNFNKFYF

SEQ ID NO: 262034 - protein, 15 aa, Homo sapiens
  CDR3 for beta chain variable domain of TCR clone 131017 (TRBV20-1, TRBJ2-5)
CSAPPRTGFGETQYF

SEQ ID NO: 262035 - protein, 13 aa, Homo sapiens
  CDR3 for alpha chain variable domain of TCR clone 131018 (TRAV8-3, TRAJ44)
CAVVPGTASQLTF

SEQ ID NO: 262036 - protein, 14 aa, Homo sapiens
  CDR3 for beta chain variable domain of TCR clone 131018 (TRBV11-2, TRBJ2-3)
CASSRLARTDTQHF

SEQ ID NO: 262037 - protein, 16 aa, Homo sapiens
  CDR3 for alpha chain variable domain of TCR clone 131019 (TRAV3, TRAJ37)
CAVRPHGSGNTGKLIF

SEQ ID NO: 262038 - protein, 17 aa, Homo sapiens
  CDR3 for beta chain variable domain of TCR clone 131019 (TRBV4-1, TRBJ1-4)
CASSQEGPRGVEEKLFF

SEQ ID NO: 262039 - protein, 17 aa, Homo sapiens
  CDR3 for alpha chain variable domain of TCR clone 131020 (TRAV3, TRAJ6)
CAVRDGPRAGGSYIPTF

SEQ ID NO: 262040 - protein, 12 aa, Homo sapiens
  CDR3 for beta chain variable domain of TCR clone 131020 (TRBV20-1, TRBJ2-1)
CSARLGTDEQFF

SEQ ID NO: 262041 - protein, 11 aa, Homo sapiens
  CDR3 for alpha chain variable domain of TCR clone 131021 (TRAV1-1, TRAJ23)
CAVRQGGKLIF

SEQ ID NO: 262042 - protein, 19 aa, Homo sapiens
  CDR3 for beta chain variable domain of TCR clone 131021 (TRBV7-2, TRBJ2-3)
CASSFLSRNWGGGTDTQYF

SEQ ID NO: 262043 - protein, 15 aa, Homo sapiens
  CDR3 for alpha chain variable domain of TCR clone 131022 (TRAV29/DV5, TRAJ29)
CAASERSSGNTPLVF

SEQ ID NO: 262044 - protein, 12 aa, Homo sapiens
  CDR3 for beta chain variable domain of TCR clone 131022 (TRBV11-2, TRBJ2-2)
CASSLPTGELFF

SEQ ID NO: 262045 - protein, 13 aa, Homo sapiens
  CDR3 for alpha chain variable domain of TCR clone 131023 (TRAV8-3, TRAJ4)
WVFYSGGYNKLIF

SEQ ID NO: 262046 - protein, 15 aa, Homo sapiens
  CDR3 for beta chain variable domain of TCR clone 131023 (TRBV20-1, TRBJ2-7)
CSAIDRVSGMDEQYF

SEQ ID NO: 262047 - protein, 15 aa, Homo sapiens
  CDR3 for alpha chain variable domain of TCR clone 131024 (TRAV12-3, TRAJ42)
CAMSGHGGSQGNLIF

SEQ ID NO: 262048 - protein, 16 aa, Homo sapiens
  CDR3 for beta chain variable domain of TCR clone 131024 (TRBV7-9, TRBJ2-1)
CASSDVAGGSYNEQFF

SEQ ID NO: 262049 - protein, 15 aa, Homo sapiens
  CDR3 for alpha chain variable domain of TCR clone 131025 (TRAV26-1, TRAJ9)
CIVRESNNGGFKTIF

SEQ ID NO: 262050 - protein, 11 aa, Homo sapiens
  CDR3 for beta chain variable domain of TCR clone 131025 (TRBV7-6, TRBJ2-5)
CASSFQETQYF

SEQ ID NO: 262051 - protein, 14 aa, Homo sapiens
  CDR3 for alpha chain variable domain of TCR clone 131026 (TRAV4, TRAJ10)
CLVGDTGGGNKLNF

SEQ ID NO: 262052 - protein, 13 aa, Homo sapiens
  CDR3 for beta chain variable domain of TCR clone 131026 (TRBV10-2, TRBJ2-5)
CASSVGPQETQYF

SEQ ID NO: 262053 - protein, 15 aa, Homo sapiens
  CDR3 for alpha chain variable domain of TCR clone 131027 (TRAV8-3, TRAJ45)
CALSYSGGGADGITF

SEQ ID NO: 262054 - protein, 13 aa, Homo sapiens
  CDR3 for beta chain variable domain of TCR clone 131027 (TRBV10-3, TRBJ2-7)
CASKLAVNYEQYF

SEQ ID NO: 262055 - protein, 14 aa, Homo sapiens
  CDR3 for alpha chain variable domain of TCR clone 131028 (TRAV17, TRAJ22)
CATPPSGSARQLTF

SEQ ID NO: 262056 - protein, 13 aa, Homo sapiens
  CDR3 for beta chain variable domain of TCR clone 131028 (TRBV10-3, TRBJ2-7)
CASKLAVNYEQYF

SEQ ID NO: 262057 - protein, 15 aa, Homo sapiens
  CDR3 for alpha chain variable domain of TCR clone 131029 (TRAV20, TRAJ53)
CAVQASGGSNYKLTF

SEQ ID NO: 262058 - protein, 13 aa, Homo sapiens
  CDR3 for beta chain variable domain of TCR clone 131029 (TRBV19, TRBJ1-5)
CASSTQDGQPQHF

SEQ ID NO: 262059 - protein, 11 aa, Homo sapiens
  CDR3 for alpha chain variable domain of TCR clone 131030 (TRAV2, TRAJ13)
CASGGYQKVTF

SEQ ID NO: 262060 - protein, 15 aa, Homo sapiens
  CDR3 for beta chain variable domain of TCR clone 131030 (TRBV19, TRBJ2-7)
CASRPTPGLSIEQYF

SEQ ID NO: 262061 - protein, 11 aa, Homo sapiens
  CDR3 for alpha chain variable domain of TCR clone 131031 (TRAV13-1, TRAJ15)
CAATPGTALIF

SEQ ID NO: 262062 - protein, 15 aa, Homo sapiens
  CDR3 for beta chain variable domain of TCR clone 131031 (TRBV28, TRBJ2-5)
CASSPPRSYQETQYF

SEQ ID NO: 262063 - protein, 15 aa, Homo sapiens
  CDR3 for alpha chain variable domain of TCR clone 131032 (TRAV26-1, TRAJ56)
CIVRVDNGANSKLTF

SEQ ID NO: 262064 - protein, 15 aa, Homo sapiens
  CDR3 for beta chain variable domain of TCR clone 131032 (TRBV20-1, TRBJ2-7)
CSARYPTEVGHEQYF

SEQ ID NO: 262065 - protein, 16 aa, Homo sapiens
  CDR3 for alpha chain variable domain of TCR clone 131033 (TRAV8-3, TRAJ45)
CAVGILFRRRCCRTHL

SEQ ID NO: 262066 - protein, 11 aa, Homo sapiens
  CDR3 for beta chain variable domain of TCR clone 131033 (TRBV20-1, TRBJ2-5)
CSADRAETQYF

SEQ ID NO: 262067 - protein, 15 aa, Homo sapiens
  CDR3 for alpha chain variable domain of TCR clone 131034 (TRAV12-2, TRAJ53)
CAVNGGGGSNYKLTF

SEQ ID NO: 262068 - protein, 13 aa, Homo sapiens
  CDR3 for beta chain variable domain of TCR clone 131034 (TRBV3-1, TRBJ1-1)
CASSAGVITEAFF

SEQ ID NO: 262069 - protein, 13 aa, Homo sapiens
  CDR3 for alpha chain variable domain of TCR clone 131035 (TRAV27, TRAJ42)
CAGARGSQGNLIF

SEQ ID NO: 262070 - protein, 14 aa, Homo sapiens
  CDR3 for beta chain variable domain of TCR clone 131035 (TRBV20-1, TRBJ1-1)
RSAQTRIGGTEAFF

SEQ ID NO: 262071 - protein, 15 aa, Homo sapiens
  CDR3 for alpha chain variable domain of TCR clone 131036 (TRAV1-1, TRAJ24)
CALSGELTAGGNSSL

SEQ ID NO: 262072 - protein, 16 aa, Homo sapiens
  CDR3 for beta chain variable domain of TCR clone 131036 (TRBV2, TRBJ2-7)
CASSEPWTGPSYEQYF

SEQ ID NO: 262073 - protein, 16 aa, Homo sapiens
  CDR3 for alpha chain variable domain of TCR clone 131037 (TRAV8-2, TRAJ7)
CVVSEGPYYGNNRLAF

SEQ ID NO: 262074 - protein, 14 aa, Homo sapiens
  CDR3 for beta chain variable domain of TCR clone 131037 (TRBV7-3, TRBJ2-2)
CASSSGGYTGELFF

SEQ ID NO: 262075 - protein, 15 aa, Homo sapiens
  CDR3 for alpha chain variable domain of TCR clone 131038 (TRAV26-1, TRAJ3)
CIVRTGYSSASKIIF

SEQ ID NO: 262076 - protein, 14 aa, Homo sapiens
  CDR3 for beta chain variable domain of TCR clone 131038 (TRBV13, TRBJ2-5)
CASYRRLAEETQYF

SEQ ID NO: 262077 - protein, 14 aa, Homo sapiens
  CDR3 for alpha chain variable domain of TCR clone 131039 (TRAV17, TRAJ31)
CATVLRNNNARLMF

SEQ ID NO: 262078 - protein, 14 aa, Homo sapiens
  CDR3 for beta chain variable domain of TCR clone 131039 (TRBV12-4, TRBJ2-5)
CVSSLWQKQETQYF

SEQ ID NO: 262079 - protein, 13 aa, Homo sapiens
  CDR3 for alpha chain variable domain of TCR clone 131040 (TRAV2, TRAJ9)
CAVEGTGGFKTIF

SEQ ID NO: 262080 - protein, 15 aa, Homo sapiens
  CDR3 for beta chain variable domain of TCR clone 131040 (TRBV10-3, TRBJ2-1)
CAITFGGGTDNEQFF

SEQ ID NO: 262081 - protein, 14 aa, Homo sapiens
  CDR3 for alpha chain variable domain of TCR clone 131041 (TRAV12-1, TRAJ30)
CVVNIGGRDYKIIF

SEQ ID NO: 262082 - protein, 13 aa, Homo sapiens
  CDR3 for beta chain variable domain of TCR clone 131041 (TRBV12-5, TRBJ2-1)
CASGLGRGNEQFF

SEQ ID NO: 262083 - protein, 14 aa, Homo sapiens
  CDR3 for alpha chain variable domain of TCR clone 131042 (TRAV17, TRAJ40)
CATALTSGTYKYIF

SEQ ID NO: 262084 - protein, 13 aa, Homo sapiens
  CDR3 for beta chain variable domain of TCR clone 131042 (TRBV2, TRBJ1-5)
CATAGPGNQPQHF

SEQ ID NO: 262085 - protein, 13 aa, Homo sapiens
  CDR3 for alpha chain variable domain of TCR clone 131043 (TRAV8-3, TRAJ28)
CAVGAVGSYQLPF

SEQ ID NO: 262086 - protein, 14 aa, Homo sapiens
  CDR3 for beta chain variable domain of TCR clone 131043 (TRBV25-1, TRBJ1-1)
CASTHLGGNTEAFF

SEQ ID NO: 262087 - protein, 13 aa, Homo sapiens
  CDR3 for alpha chain variable domain of TCR clone 131044 (TRAV17, TRAJ9)
CATDYTGGFKTIF

SEQ ID NO: 262088 - protein, 15 aa, Homo sapiens
  CDR3 for beta chain variable domain of TCR clone 131044 (TRBV27, TRBJ2-1)
CASSGGGPSYNEQFF

SEQ ID NO: 262089 - protein, 14 aa, Homo sapiens
  CDR3 for alpha chain variable domain of TCR clone 131045 (TRAV8-3, TRAJ10)
CAVGNAGGGNKLTF

SEQ ID NO: 262090 - protein, 14 aa, Homo sapiens
  CDR3 for beta chain variable domain of TCR clone 131045 (TRBV13, TRBJ2-5)
CASILGPRGETQYF

SEQ ID NO: 262091 - protein, 14 aa, Homo sapiens
  CDR3 for alpha chain variable domain of TCR clone 131046 (TRAV27, TRAJ15)
CAGFDHQAGTALIF

SEQ ID NO: 262092 - protein, 11 aa, Homo sapiens
  CDR3 for beta chain variable domain of TCR clone 131046 (TRBV29-1, TRBJ1-1)
CSVEVGTRTFF

SEQ ID NO: 262093 - protein, 15 aa, Homo sapiens
  CDR3 for alpha chain variable domain of TCR clone 131047 (TRAV3, TRAJ29)
CAVRAPLSGNTPLVF

SEQ ID NO: 262094 - protein, 16 aa, Homo sapiens
  CDR3 for beta chain variable domain of TCR clone 131047 (TRBV13, TRBJ2-2)
CASSPRTGEHTGELFF

SEQ ID NO: 262095 - protein, 17 aa, Homo sapiens
  CDR3 for alpha chain variable domain of TCR clone 131048 (TRAV3, TRAJ38)
CAVRDCLNAGNNGKLIW

SEQ ID NO: 262096 - protein, 14 aa, Homo sapiens
  CDR3 for beta chain variable domain of TCR clone 131048 (TRBV5-5, TRBJ1-5)
CASSGQGVDQPQHF

SEQ ID NO: 262097 - protein, 16 aa, Homo sapiens
  CDR3 for alpha chain variable domain of TCR clone 131049 (TRAV38-2/DV8, TRAJ47)
CAYRSAIMEYGNKLVF

SEQ ID NO: 262098 - protein, 14 aa, Homo sapiens
  CDR3 for beta chain variable domain of TCR clone 131049 (TRBV19, TRBJ2-7)
CASSIFAVTYEQYF

SEQ ID NO: 262099 - protein, 12 aa, Homo sapiens
  CDR3 for alpha chain variable domain of TCR clone 131050 (TRAV13-1, TRAJ54)
CAASGGAQKLVF

SEQ ID NO: 262100 - protein, 13 aa, Homo sapiens
  CDR3 for beta chain variable domain of TCR clone 131050 (TRBV7-3, TRBJ2-1)
CASSPVAYNEQFF

SEQ ID NO: 262101 - protein, 15 aa, Homo sapiens
  CDR3 for alpha chain variable domain of TCR clone 131051 (TRAV1-2, TRAJ15)
CAVDVMGSSGTALIF

SEQ ID NO: 262102 - protein, 13 aa, Homo sapiens
  CDR3 for beta chain variable domain of TCR clone 131051 (TRBV20-1, TRBJ1-1)
CSAFDRENTEAFF

SEQ ID NO: 262103 - protein, 13 aa, Homo sapiens
  CDR3 for alpha chain variable domain of TCR clone 131052 (TRAV12-1, TRAJ40)
CVVPTSGTYKYIF

SEQ ID NO: 262104 - protein, 16 aa, Homo sapiens
  CDR3 for beta chain variable domain of TCR clone 131052 (TRBV27, TRBJ2-5)
CASSYGPGGQKETQYF

SEQ ID NO: 262105 - protein, 14 aa, Homo sapiens
  CDR3 for alpha chain variable domain of TCR clone 131053 (TRAV1-2, TRAJ16)
CAVTRFSDGQKLLF

SEQ ID NO: 262106 - protein, 14 aa, Homo sapiens
  CDR3 for beta chain variable domain of TCR clone 131053 (TRBV11-2, TRBJ2-3)
CASSRLARTDTQYF

SEQ ID NO: 262107 - protein, 12 aa, Homo sapiens
  CDR3 for alpha chain variable domain of TCR clone 131054 (TRAV12-3, TRAJ20)
CAMVRGDYKLSF

SEQ ID NO: 262108 - protein, 16 aa, Homo sapiens
  CDR3 for beta chain variable domain of TCR clone 131054 (TRBV7-9, TRBJ2-1)
CASSDVAGGSYNEQFF

SEQ ID NO: 262109 - protein, 15 aa, Homo sapiens
  CDR3 for alpha chain variable domain of TCR clone 131055 (TRAV8-3, TRAJ27)
CAVGPSKTNAGKSTC

SEQ ID NO: 262110 - protein, 14 aa, Homo sapiens
  CDR3 for beta chain variable domain of TCR clone 131055 (TRBV11-2, TRBJ2-3)
CASSRLARTDTQYF

SEQ ID NO: 262111 - protein, 13 aa, Homo sapiens
  CDR3 for alpha chain variable domain of TCR clone 131056 (TRAV12-1, TRAJ26)
CVVRRNYGQNFVF

SEQ ID NO: 262112 - protein, 14 aa, Homo sapiens
  CDR3 for beta chain variable domain of TCR clone 131056 (TRBV18, TRBJ2-7)
CASSPRGGAYEQYF

SEQ ID NO: 262113 - protein, 17 aa, Homo sapiens
  CDR3 for alpha chain variable domain of TCR clone 131057 (TRAV23/DV6, TRAJ28)
CAALLAYSGAGSYQLTF

SEQ ID NO: 262114 - protein, 16 aa, Homo sapiens
  CDR3 for beta chain variable domain of TCR clone 131057 (TRBV19, TRBJ2-7)
CASSLAPSSTSSTSGR

SEQ ID NO: 262115 - protein, 12 aa, Homo sapiens
  CDR3 for alpha chain variable domain of TCR clone 131058 (TRAV27, TRAJ35)
CAGADFGNVLHC

SEQ ID NO: 262116 - protein, 13 aa, Homo sapiens
  CDR3 for beta chain variable domain of TCR clone 131058 (TRBV7-3, TRBJ1-1)
CASSQEWGAEAFF

SEQ ID NO: 262117 - protein, 14 aa, Homo sapiens
  CDR3 for alpha chain variable domain of TCR clone 131059 (TRAV12-3, TRAJ10)
SHLPLTGGGNKLTF

SEQ ID NO: 262118 - protein, 15 aa, Homo sapiens
  CDR3 for beta chain variable domain of TCR clone 131059 (TRBV7-9, TRBJ1-6)
CASSSPGRGNPPLHF

SEQ ID NO: 262119 - protein, 13 aa, Homo sapiens
  CDR3 for alpha chain variable domain of TCR clone 131060 (TRAV29/DV5, TRAJ31)
CAASRNKNARLMF

SEQ ID NO: 262120 - protein, 12 aa, Homo sapiens
  CDR3 for beta chain variable domain of TCR clone 131060 (TRBV14, TRBJ2-7)
CASSLYKDEQYF

SEQ ID NO: 262121 - protein, 16 aa, Homo sapiens
  CDR3 for alpha chain variable domain of TCR clone 131061 (TRAV14/DV4, TRAJ54)
CAMREGRIQGAQKLVF

SEQ ID NO: 262122 - protein, 17 aa, Homo sapiens
  CDR3 for beta chain variable domain of TCR clone 131061 (TRBV7-3, TRBJ2-3)
CASSPRGQGYGTDTQYF

SEQ ID NO: 262123 - protein, 15 aa, Homo sapiens
  CDR3 for alpha chain variable domain of TCR clone 131062 (TRAV21, TRAJ53)
CATLNSGGSNYKLTF

SEQ ID NO: 262124 - protein, 16 aa, Homo sapiens
  CDR3 for beta chain variable domain of TCR clone 131062 (TRBV24-1, TRBJ2-3)
CATSGPGTGATDTQYF

SEQ ID NO: 262125 - protein, 11 aa, Homo sapiens
  CDR3 for alpha chain variable domain of TCR clone 131063 (TRAV1-1, TRAJ23)
CAVRQGGKLIF

SEQ ID NO: 262126 - protein, 13 aa, Homo sapiens
  CDR3 for beta chain variable domain of TCR clone 131063 (TRBV10-2, TRBJ2-7)
CASGASGGYEQYF

SEQ ID NO: 262127 - protein, 16 aa, Homo sapiens
  CDR3 for alpha chain variable domain of TCR clone 131064 (TRAV26-1, TRAJ23)
CIVRVERYNQGGKLIF

SEQ ID NO: 262128 - protein, 15 aa, Homo sapiens
  CDR3 for beta chain variable domain of TCR clone 131064 (TRBV18, TRBJ2-7)
CASSPRGGKGYEQYL

SEQ ID NO: 262129 - protein, 11 aa, Homo sapiens
  CDR3 for alpha chain variable domain of TCR clone 131065 (TRAV8-6, TRAJ33)
CAVDSNYQLIW

SEQ ID NO: 262130 - protein, 14 aa, Homo sapiens
  CDR3 for beta chain variable domain of TCR clone 131065 (TRBV11-2, TRBJ2-3)
CASSRLARTDTQYF

SEQ ID NO: 262131 - protein, 14 aa, Homo sapiens
  CDR3 for alpha chain variable domain of TCR clone 131066 (TRAV12-2, TRAJ13)
CAVKKTGGYQKVTF

SEQ ID NO: 262132 - protein, 14 aa, Homo sapiens
  CDR3 for beta chain variable domain of TCR clone 131066 (TRBV18, TRBJ2-3)
CASSGLADTDTQYF

SEQ ID NO: 262133 - protein, 18 aa, Homo sapiens
  CDR3 for alpha chain variable domain of TCR clone 131067 (TRAV26-2, TRAJ45)
CILRLWGYSGGGADGLTF

SEQ ID NO: 262134 - protein, 12 aa, Homo sapiens
  CDR3 for beta chain variable domain of TCR clone 131067 (TRBV7-9, TRBJ2-7)
CASSIKREEQYF

SEQ ID NO: 262135 - protein, 12 aa, Homo sapiens
  CDR3 for alpha chain variable domain of TCR clone 131068 (TRAV2, TRAJ32)
CAVGVATNKLIF

SEQ ID NO: 262136 - protein, 15 aa, Homo sapiens
  CDR3 for beta chain variable domain of TCR clone 131068 (TRBV7-2, TRBJ2-1)
CASSSRTSREDEQFF

SEQ ID NO: 262137 - protein, 14 aa, Homo sapiens
  CDR3 for alpha chain variable domain of TCR clone 131069 (TRAV17, TRAJ15)
CATGPNQEGTALIF

SEQ ID NO: 262138 - protein, 15 aa, Homo sapiens
  CDR3 for beta chain variable domain of TCR clone 131069 (TRBV11-2, TRBJ2-2)
CASSSDRVNAGELFF

SEQ ID NO: 262139 - protein, 17 aa, Homo sapiens
  CDR3 for alpha chain variable domain of TCR clone 131070 (TRAV13-2, TRAJ31)
CAENARLMFGDGTQLVG

SEQ ID NO: 262140 - protein, 14 aa, Homo sapiens
  CDR3 for beta chain variable domain of TCR clone 131070 (TRBV7-9, TRBJ2-1)
CASSLGVADNEQFF

SEQ ID NO: 262141 - protein, 14 aa, Homo sapiens
  CDR3 for alpha chain variable domain of TCR clone 131071 (TRAV12-2, TRAJ11)
CAVEGGSGYSTLTF

SEQ ID NO: 262142 - protein, 14 aa, Homo sapiens
  CDR3 for beta chain variable domain of TCR clone 131071 (TRBV11-2, TRBJ2-5)
CASSRTGGIETQYF

SEQ ID NO: 262143 - protein, 12 aa, Homo sapiens
  CDR3 for alpha chain variable domain of TCR clone 131072 (TRAV17, TRAJ12)
CATLRSSYKLIF

SEQ ID NO: 262144 - protein, 16 aa, Homo sapiens
  CDR3 for beta chain variable domain of TCR clone 131072 (TRBV12-5, TRBJ2-5)
CASGPRTSGNQETQYF

SEQ ID NO: 262145 - protein, 14 aa, Homo sapiens
  CDR3 for alpha chain variable domain of TCR clone 131073 (TRAV12-3, TRAJ29)
CAMILLSGNTPLVF

SEQ ID NO: 262146 - protein, 14 aa, Homo sapiens
  CDR3 for beta chain variable domain of TCR clone 131073 (TRBV19, TRBJ2-1)
CASPTFVLSGEQFF

SEQ ID NO: 262147 - protein, 15 aa, Homo sapiens
  CDR3 for alpha chain variable domain of TCR clone 131074 (TRAV3, TRAJ17)
CAVSPKEAAGNKLTF

SEQ ID NO: 262148 - protein, 12 aa, Homo sapiens
  CDR3 for beta chain variable domain of TCR clone 131074 (TRBV7-9, TRBJ1-6)
RASSLMTSPLHF

SEQ ID NO: 262149 - protein, 13 aa, Homo sapiens
  CDR3 for alpha chain variable domain of TCR clone 131075 (TRAV3, TRAJ30)
CAVRDRGDGKIIF

SEQ ID NO: 262150 - protein, 14 aa, Homo sapiens
  CDR3 for beta chain variable domain of TCR clone 131075 (TRBV5-1, TRBJ1-1)
CASSRTTGDTEAFF

SEQ ID NO: 262151 - protein, 16 aa, Homo sapiens
  CDR3 for alpha chain variable domain of TCR clone 131076 (TRAV2, TRAJ20)
TTVLWSFRSNDYRLSF

SEQ ID NO: 262152 - protein, 12 aa, Homo sapiens
  CDR3 for beta chain variable domain of TCR clone 131076 (TRBV7-6, TRBJ2-3)
CASSTGTDTQYF

SEQ ID NO: 262153 - protein, 10 aa, Homo sapiens
  CDR3 for alpha chain variable domain of TCR clone 131077 (TRAV38-2/DV8, TRAJ40)
CASGTYKYIF

SEQ ID NO: 262154 - protein, 13 aa, Homo sapiens
  CDR3 for beta chain variable domain of TCR clone 131077 (TRBV7-2, TRBJ1-6)
CASSLKFDSPLHF

SEQ ID NO: 262155 - protein, 14 aa, Homo sapiens
  CDR3 for alpha chain variable domain of TCR clone 131078 (TRAV21, TRAJ45)
CAVVSGGGADGLTF

SEQ ID NO: 262156 - protein, 14 aa, Homo sapiens
  CDR3 for beta chain variable domain of TCR clone 131078 (TRBV20-1, TRBJ2-3)
CSALGLEGADTQYS

SEQ ID NO: 262157 - protein, 15 aa, Homo sapiens
  CDR3 for alpha chain variable domain of TCR clone 131079 (TRAV3, TRAJ22)
CAVRDRGGSARQLSF

SEQ ID NO: 262158 - protein, 13 aa, Homo sapiens
  CDR3 for beta chain variable domain of TCR clone 131079 (TRBV7-9, TRBJ1-2)
CASSLKQNYGYTF

SEQ ID NO: 262159 - protein, 14 aa, Homo sapiens
  CDR3 for alpha chain variable domain of TCR clone 131080 (TRAV12-1, TRAJ3)
CVVNAIGVQQCFQD

SEQ ID NO: 262160 - protein, 13 aa, Homo sapiens
  CDR3 for beta chain variable domain of TCR clone 131080 (TRBV29-1, TRBJ2-1)
CSVEGGRVNEQFF

SEQ ID NO: 262161 - protein, 11 aa, Homo sapiens
  CDR3 for alpha chain variable domain of TCR clone 131081 (TRAV3, TRAJ21)
CTVGNFNKFYF

SEQ ID NO: 262162 - protein, 16 aa, Homo sapiens
  CDR3 for beta chain variable domain of TCR clone 131081 (TRBV7-7, TRBJ2-1)
CASSLASGTSYNEQFF

SEQ ID NO: 262163 - protein, 14 aa, Homo sapiens
  CDR3 for alpha chain variable domain of TCR clone 131082 (TRAV26-1, TRAJ34)
CIVRVAYNTDKLIF

SEQ ID NO: 262164 - protein, 17 aa, Homo sapiens
  CDR3 for beta chain variable domain of TCR clone 131082 (TRBV15, TRBJ1-4)
CATSRYGTGDPNEKLFF

SEQ ID NO: 262165 - protein, 13 aa, Homo sapiens
  CDR3 for alpha chain variable domain of TCR clone 131083 (TRAV3, TRAJ16)
CAVRDRNGQKLLF

SEQ ID NO: 262166 - protein, 12 aa, Homo sapiens
  CDR3 for beta chain variable domain of TCR clone 131083 (TRBV7-9, TRBJ2-7)
CASSIKREEQYF

SEQ ID NO: 262167 - protein, 11 aa, Homo sapiens
  CDR3 for alpha chain variable domain of TCR clone 131084 (TRAV3, TRAJ21)
CAVGNFNKFYF

SEQ ID NO: 262168 - protein, 16 aa, Homo sapiens
  CDR3 for beta chain variable domain of TCR clone 131084 (TRBV19, TRBJ2-1)
RASSRAGPSSYNEQFF

SEQ ID NO: 262169 - protein, 16 aa, Homo sapiens
  CDR3 for alpha chain variable domain of TCR clone 131085 (TRAV1-2, TRAJ10)
CAVRGVLTGGGNKLTF

SEQ ID NO: 262170 - protein, 12 aa, Homo sapiens
  CDR3 for beta chain variable domain of TCR clone 131085 (TRBV7-8, TRBJ2-7)
CASSLGEREQYF

SEQ ID NO: 262171 - protein, 14 aa, Homo sapiens
  CDR3 for alpha chain variable domain of TCR clone 131086 (TRAV20, TRAJ20)
CAVRKSGDDYKLSF

SEQ ID NO: 262172 - protein, 18 aa, Homo sapiens
  CDR3 for beta chain variable domain of TCR clone 131086 (TRBV11-2, TRBJ2-3)
CASSLGGASRGAPNTQYF

SEQ ID NO: 262173 - protein, 10 aa, Homo sapiens
  CDR3 for alpha chain variable domain of TCR clone 131087 (TRAV9-2, TRAJ49)
CALTGNQFYF

SEQ ID NO: 262174 - protein, 14 aa, Homo sapiens
  CDR3 for beta chain variable domain of TCR clone 131087 (TRBV7-2, TRBJ2-7)
CASRSQGAAYEQYF

SEQ ID NO: 262175 - protein, 15 aa, Homo sapiens
  CDR3 for alpha chain variable domain of TCR clone 131088 (TRAV27, TRAJ38)
CAARRNAGNNRKPIW

SEQ ID NO: 262176 - protein, 13 aa, Homo sapiens
  CDR3 for beta chain variable domain of TCR clone 131088 (TRBV12-5, TRBJ2-3)
CASGDRQSDTQYF

SEQ ID NO: 262177 - protein, 15 aa, Homo sapiens
  CDR3 for alpha chain variable domain of TCR clone 131089 (TRAV25, TRAJ38)
CAGPVNAGNNRKLIW

SEQ ID NO: 262178 - protein, 14 aa, Homo sapiens
  CDR3 for beta chain variable domain of TCR clone 131089 (TRBV12-5, TRBJ2-5)
CASGSRTHQETQYF

SEQ ID NO: 262179 - protein, 11 aa, Homo sapiens
  CDR3 for alpha chain variable domain of TCR clone 131090 (TRAV12-2, TRAJ43)
CASPIGNDMRF

SEQ ID NO: 262180 - protein, 12 aa, Homo sapiens
  CDR3 for beta chain variable domain of TCR clone 131090 (TRBV20-1, TRBJ2-7)
CSAGLKMGGQYF

SEQ ID NO: 262181 - protein, 14 aa, Homo sapiens
  CDR3 for alpha chain variable domain of TCR clone 131091 (TRAV1-2, TRAJ16)
CAVNRFSDGQKLLF

SEQ ID NO: 262182 - protein, 15 aa, Homo sapiens
  CDR3 for beta chain variable domain of TCR clone 131091 (TRBV7-8, TRBJ2-2)
CASSLEAGDTGELFF

SEQ ID NO: 262183 - protein, 15 aa, Homo sapiens
  CDR3 for alpha chain variable domain of TCR clone 131092 (TRAV8-3, TRAJ27)
CAVGPSKTNAGKSTF

SEQ ID NO: 262184 - protein, 15 aa, Homo sapiens
  CDR3 for beta chain variable domain of TCR clone 131092 (TRBV20-1, TRBJ2-7)
CSARVPAAYFYEQYF

SEQ ID NO: 262185 - protein, 18 aa, Homo sapiens
  CDR3 for alpha chain variable domain of TCR clone 131093 (TRAV26-1, TRAJ52)
CIARVAGAGGTSYGKLTF

SEQ ID NO: 262186 - protein, 12 aa, Homo sapiens
  CDR3 for beta chain variable domain of TCR clone 131093 (TRBV29-1, TRBJ2-3)
CSVTGGADTQYF

SEQ ID NO: 262187 - protein, 12 aa, Homo sapiens
  CDR3 for alpha chain variable domain of TCR clone 131094 (TRAV8-6, TRAJ8)
CAVTPGFQNLVF

SEQ ID NO: 262188 - protein, 16 aa, Homo sapiens
  CDR3 for beta chain variable domain of TCR clone 131094 (TRBV7-3, TRBJ2-2)
CASSLKRGTLSGELFF
